United States Patent Application Publication US 2015/0315605 A1 - sequence listing, part 5

SEQ ID NO: 6535 - DNA, 3758 bp, Zea Mays
cccaacaaaaaaaaaacaactgctatgaatccgtcccaggaaaaatagagcaacttgaccccattcatccgtcgaacacactgcacctgttagtattatagcaacagtatttcagtaccagtgctcaatctaggcaaaagcccgcaagcgcacagttaacaacacgctacacgcctacaccagcatcgcttgctgagtacacttgagcgacactgtgtgagctgtggttgaatagttgagaaaaaaaaactcaaaaagaaaaggctacgcctctagctcgagtggggagagagagagtgagagacgagacggggaggcaaaggcaccacgagccactctagagacgcctcctccgtttgttcgagctgcctgggcgggaaagagaaagcgagaccgagaccgcagggattgaaaaaagagggtgcaaaagcaaggctcggattcttgcggggcgagcgactcgtttctcgtctctgcgctgcgagcgaggctcctgctcctcgcggtctcgcttccctccaagttccaatccagcaccgggcgccaccgctaatcagtgctgatatatgaaccccgcatttggacatttggtggtggcaaggcaacgccaaccttccctgttgctgctttgaatgttctggtggttgtcggatggatcgccgcagttggctctggaagcgcaagtcattggataagagccctggggagagcgatagctctggctctgcttcatcacactctgagccttccttcgatgatcaggaacctaaacctgtgtctagtaattcttctccaaatcatagtcattcgcctgatgtttcttctagaataatttataatgagaatcaagaagctgaaagagcagaatcattgaatgagaagctggtgttagcaactagctcgaatgattcttctccacaacatgatcaatcgatgaagccagatatataccaatcacctctgctattcccaaatatcaggaatgatgatgttccagattctgtaaagaatttgaatgagaaggtgtccccaaagtttaaggtcgatgatgtccaggattctgtaaagagtttgaatgagaaactttctgctgcccttttgactatcaatgataaagatgacttggtaaagcagcacactagagttgcagaagaggctgttgcaggttgggaacaagctgaagctgaagttgcttctctgaagcaactacttgaaactgcatcaaagaagaatacctctctggaggatcaggtcagccacctagatgacgcccttaaagaatgtgtaaggcagcttcgccaagcacgtgaagaacaagagaataaaatccatgagacagttgctaagaagtctaaagaattggagtctgagaagtttgagctccagcaccatattgctgaactcagtaagcagttgcaagccacgaaactagaagctactacggtgcgtgtccagcgtgatctgcaggaaaagcttcagatagtggagaaagaaaacaaagacctcaaggtagaattactcgcactgtccaaggacctgaagatacttgcacgggaaagagacctgagcaaccaagcagcagaaacagcaagcaaacttcacctggaaagtgtgaaaaagataacaagagttgaggcagaatgccttaagttgcgtcatttaacgcggcgtacgtccttgaccaatgattcaaggctgataactaacagtgcttgcatggaatctcagactgacagtcagtctgacagtggggagcacatgctagttgatgagatgaaaaattctgattcatgggcaacagctctgatagctgaacttgatcagttcaagaatgccaacaacgacacaagaaatcttgtgaataattcggttgaaattgacctgatggatgatttcctcgagatggaaaagctggctgcactgcctgaagtagactgtgtaagctctagctttggagctgaaactgattctgaccaaggtgtgagtagagataaatcatcaaaagttaaaactgaaccattgcagtgtcaggtgacagatttgcacgcaaagatcgagaagattgaaggtgagaaaagggagcttgaaatggcccttgcagatgccagagttcagcttggcacatcatgtgatgctctaatggtggccaacaacaggttgattgatttgcagatgcagttggacttggcaaatgagtccaaacatgctgctttcggagaagctgagcgactgaatggtgagaggaaagatttggcattgcaactggagtccaggtcttcacaagttgatgagcttcagctgatggtggcatcgctggaaaagaatgtagacaggaaggtgttggaattgcagttagagttagtttctgtggaggctgcagatctgcgcaagacagtggcttccctggaagagaagattgatgcagagataactctctctatgcagcacaaaacaaatgcagacctggcagaggcgtccaaagaatcattagaggcgcagctgcagtctgcaaacacagagatagggaaactgaacgggattgtgcaaactttagagaatgaggtgaggaaagagacagattctcgtgaagaactactgaaacagatagaggctatgaaaattgagtcagagagatcactatctgtggtgtctaccaaagagtcattagaggtgcagctccaggtggcgaattcagaagttgcaaagttgcgtgggatggtgaatgctctggagtgtgatgcggcgaacgagaaggcatattcttcagatctccagatgcaacttgaggcagtggaaggtatcaggaaggtgttggaatctgagcttgagtcttcacaccaggaggtgatgaggctgaaggagaaagtttcgtccttggaagcaaggatcaaggaccagacctcgttgcttgtagaatatacagctaaatcagaggatgcagtgtcccggaaaaaggcaatggagggtcaactagaagcagcaaatctggaagttacaaaactgagaaacaaggtgagcctgatacaaggcaaggtggagcaggagaagcttctgtcagaagagtacgaagcaaaatgccgcaagctggaggcgcaggtgttgagggacagccgagaggcgaaactttggcgcctcacgaactcaaacggagacctgaaggtgaagcaggagaaagaactagtcagtgctgccgggaagcttgcggagtgccagaagactattgctaaccttggccgccagctgaaatcgctaacagatcttgatggcgtggtggccgatcctgaaaagctggaatcgagggacacgcacctggacttcagagatggcggagacgtggctgatggactgtatgaactgggtcttcctaagaggaacggtagctgcctctcaccccttcggtcggatccgtcgccgaggggtttgccgtcccttagtagctacctgagcaaaacaaaaaggtgaaaagtctgatgggatcattcaccattgtgcttgtgcataaattatttgacagtctatggatgatgccagttgtgacctggtggtagatcggtgtacatttacagaacttgatggttgctcacatgtgtactttctccttttgttttgctctcattttgcgagactgcagggtttgtgacaaatttactagatcttgtgagactgtagtgcgttattctcgcgttggaattcaactcgtctacaacaaaaatagaagaaaaaaaacaaattcaaccggtcggcaaagtagaagtagg

SEQ ID NO: 6536 - DNA, 674 bp, Zea Mays
tttacatgaagaacccaaggtatccagacttcaagcataagcagactggcgaagcactatgggttgacgggaggaacaaccccaactgggttatatctcagctggcggttttggactcgagaatgagttcgctgcaagacaatgagaggaaaccagtctcctatatgtatgctgacgagttcatgacattggacggcaaccgatagtcgttatggaggagggaagcttcgctcgtgccgattggctggctgttatggcgagcgagatcatgctgtcgacctgtcttagtagctagctcatgcttgctgtctcagttttgttgagcggctctggagggttgcgtgttatgagcgtcgtccgtagtatggtttgtgacataaggtagctatgatgagcctagaacaaacataaacaaagtgcgggggaaacccttgcttttagtgactccattagtagtgctatgtggtttgtgacatggtttttaactatgatgttacgccgaatggtaatatattgaagaacgtgccgtggccctacacaacttagttattatttagactagatggagcacttaccaatgttggacttgttaaatctgggttttctgaatgtaaatgatactagtaattgtggttaagattaatctatggtaggcctggaataccaggactagg

SEQ ID NO: 6537 - DNA, 1131 bp, Zea Mays
cttgcaacgattggttgtgttgtgtggctacaaatacgaatacacagcagccctctgctctctgcacctgcgcattttgtaaaggtacgaggagcaaggtgaggcaccaccagtaccaaccgggctccgagttcatcacgcacgcatggaaggctcggcggcacaggcgccggggaagaccgtcctgagggtggtggcgatctccggctcgctgcgcagggcgtcggccaacaccggcctcatccgcgccgccgcggagatctgcagggagtcgatcccggggctggaggtggagcacgtggacatctcggagctgccgctgctgaacaccgacctggagggcccgggccccggcgcgttcccggcggccgtcgaggcgttccgcggcaaggtgcgcgccgccgactgcttcctgttcgcgtcgcccgagtacaactactccatctcgggcccgctcaagaacgcgctggactgggggtcgcgcccgcccaactgctggggcgacagggccgccgccatcctcagcgcgtcgggcgggtcggggggcagccgctcgcagtaccacgtccgccaggtcggcgtcttcctcgacctccacttcgtcaacaagcccgaggtgttcaccagggcgcaccagccgcccagcaagttcgacgacgacggcaacctcgtcgacccggacaccaaggaccaggtcaccaaggtgctcctggcgctgcaggctctcgcgctcaggctgcacctggggaagctcgctgttgctgcacactcttcttgaacgtcgtcgtcgtcgggggtgcactaaactacactacacatcgtcgccgagctccaaatgccgtgccgtgtccgtgtgtgcgcgcttcaataaattctcggcgtccaacttttaatgagtgatgcacaatcgtgttcatttgtgagatgccctgatcgaatcgatccgtttgcgttttgccacgatcatcaaagaccaaaagagaaagaagaagaggaggaggaagcttccgtgctgacagtaccaacatcagcaagcaacctcctccaagaacaggggaaacagccacgccattgctgccgtaagcaagaggtcgacaggctggctttgctgcaacaataaaaactcaatgt

SEQ ID NO: 6538 - DNA, 1391 bp, Zea Mays
cgaagtggatgctcctggtggtgtctagtggagagcttctccatacatggcatgcacactatcgtgctgttaggtgcctcgggctgtatgactatttgcttgtctcagggtcagaggatgggactatcaaagtttgggatctcatcacggtgcttgatgagcaatcaaggctggaggtccagacaccatatttgtatagtttcagtcagcatgcactgcctgtaactgatattgcttgttttcttggagcaatcgctatatcttcttctgaggatcgaacctgcaaaatttggagtttatctgagggtaggatgctgagaagcatttcatttcctactagcattgattctatagcactagacccaagaagtcatattttctatgctggtggtagagatggaaaaatatatgttactgctatgggtgttgatctcagttttcatggtagggatgagtcatctattctgggtgcattggatgaccacagcaaggcagtaacaagcttagcatcaagcagagatggacttctacttgtctctggatctgaggatggtaatgttcgggtgtgggataccagatgtcagcaagttacccgaaaattcaaacactcccaaggtccagtaaccaatgttcttattgtaacgccacaacgagtaaatctgccaccgctacaaccattacgcaaagttcggtctgcaaatggggaggctgaacggcaggcagtacttcttcatcggcctgaaaatgatgtcccaattcctggaaataagaccttcatttttatggagcgctacttggatgagcttcaggttatttgattttgggccgaatgctcagaatggcactccaaaccaacagggaacagaatggagagatagatacttggagttgcaggatctctttgtacatgaggtcctccatcagatgccatcctcgaggaacccatgatgcacatgctttggatatcgatcatttgtggtgtcgaaacagtgatggttgccattcgggctacaaacgatgtagatgagttctttggagtaattcaactgatggtgctttcggctgcgaggaacttatcagattctgaactaaaaccactagaatcggtgccagcagtcacttggaactggttctcgtttgtgtactagtctagagaaacgctaaaaatcaggtttctcttgattctagttctaattttaaggatacagtgagcttgctacataaagttattttgatttcatagagaaaatgttttgttctcaggggaatctgaattttgaaagttttctactagaatctaagatttgatacgttcagggttaaccataccaattaaggactaaaaagtgctagttagcggtatcggattttcgctggaaaaccgctgtttt

SEQ ID NO: 6539 - DNA, 1399 bp, Zea Mays
ggtgcgaagtggatgctcctggtggtgtctagtggagagcttctccatacatggcatgcacactatcgtgctgttaggtgcctcgggctgtatgactatttgcttgtctcagggtcagaggatgggactatcaaagtttgggatctcatcacggtgcttgatgagcaatcaaggctggaggtccagacaccatatttgtatagtttcagtcagcatgcactgcctgtaactgatattgcttgttttcttggagcaatcgctatatcttcttctgaggatcgaacctgcaaaatttggagtttatctgagggtaggatgctgagaagcatttcatttcctactagcattgattctatagcactagacccaagaagtcatattttctatgctggtggtagagatggaaaaatatatgttactgctatgggtgttgatctcagttttcatggtagggatgagtcatctattctgggtgcattggatgaccacagcaaggcagtaacaagcttagcatcaagcagagatggacttctacttgtctctggatctgaggatggtaatgttcgggtgtgggataccagatgtcagcaagttacccgaaaattcaaacactcccaaggtccagtaaccaatgttcttattgtaacgccacaacgagtaaatctgccaccgctacaaccattacgcaaagttcggtctgcaaatggggaggctgaacggcaggcagtacttcttcatcggcctgaaaatgatgtcccaattcctggaaataagaccttcatttttatggagcgctacttggatgagcttcaggttatttgattttgggccgaatgctcagaatggcactccaaaccaacagggaacagaatggagagatagatacttggagttgcaggatctctttgtacatgaggtcctccatcagatgccatcctcgaggaacccatgatgcacatgctttggatatcgtaggatcatttgtggtgtcgaaacagtgatggttgccattcgggctacaaacgatgtagatgagttctttggagtaattcaactgatggtgctttcggctgcgaggaacttatcagattctgaactaaaaccactagaatcggtgccagcagtcacttggaactggttctcgtttgtgtactagtctagagaaacgctaaaaatcaggtttctcttgattctagttctaattttaaggatacagtgagcttgctacataaagttattttgatttcatagagaaaatgttttgttctcaggggaatctgaattttgaaagttttctactagaatctaagatttgatacgttcagggttaaccataccaattaaggactaaaaagtgctagttagcggtatcggattttcgctggaaaaccgctgtttt

SEQ ID NO: 6540 - DNA, 1418 bp, Zea Mays
gctcaaggtggtgcgaagtggatgctcctggtggtgtctagtggagagcttctccatacatggcatgcacactatcgtgctgttaggtgcctcgggctgtatgactatttgcttgtctcagggtcagaggatgggactatcaaagtttgggatctcatcacggtgcttgatgagcaatcaaggctggaggtccagacaccatatttgtatagtttcagtcagcatgcactgcctgtaactgatattgcttgttttcttggagcaatcgctatatcttcttctgaggatcgaacctgcaaaatttggagtttatctgagggtaggatgctgagaagcatttcatttcctactagcattgattctatagcactagacccaagaagtcatattttctatgctggtggtagagatggaaaaatatatgttactgctatgggtgttgatctcagttttcatggtagggatgagtcatctattctgggtgcattggatgaccacagcaaggcagtaacaagcttagcatcaagcagagatggacttctacttgtctctggatctgaggatggtaatgttcgggtgtgggataccagatgtcagcaagttacccgaaaattcaaacactcccaagtaaccaatgttcttattgtaacgccacaacgagtaaatctgccaccgctacaaccattacgcaaagttcggtctgcaaatggggaggctgaacggcaggcagtacttcttcatcggcctgaaaatgatgtcccaattcctggaaataagaccttcatttttatggagcgctacttggatgagcttcagaagcatggtggttcatccaggttatttgattttgggccgaatgctcagaatggcactccaaaccaacagggaacagaatggagagatagatacttggagttgcaggatctctttgtacatgaggtcctccatcagatgccatcctcgaggaacccatgatgcacatgctttggatatcgatcatttgtggtgtcgaaacagtgatggttgccattcgggctacaaacgatgtagatgagttctttggagtaattcaactgatggtgctttcggctgcgaggaacttatcagattctgaactaaaaccactagaatcggtgccagcagtcacttggaactggttctcgtttgtgtactagtctagagaaacgctaaaaatcaggtttctcttgattctagttctaattttaaggatacagtgagcttgctacataaagttattttgatttcatagagaaaatgttttgttctcaggggaatctgaattttgaaagttttctactagaatctaagatttgatacgttcagggttaaccataccaattaaggactaaaaagtgctagttagcggtatcggattttcgctggaaaaccgctgtttt

SEQ ID NO: 6541 - DNA, 1452 bp, Zea Mays
atcctgagtcacgttagcaatgggaagagaggcagggtaaaggcaaagttgacacaggaagaggtgtctagtggagagcttctccatacatggcatgcacactatcgtgctgttaggtgcctcgggctgtatgactatttgcttgtctcagggtcagaggatgggactatcaaagtttgggatctcatcacggtgcttgatgagcaatcaaggctggaggtccagacaccatatttgtatagtttcagtcagcatgcactgcctgtaactgatattgcttgttttcttggagcaatcgctatatcttcttctgaggatcgaacctgcaaaatttggagtttatctgagggtaggatgctgagaagcatttcatttcctactagcattgattctatagcactagacccaagaagtcatattttctatgctggtggtagagatggaaaaatatatgttactgctatgggtgttgatctcagttttcatggtagggatgagtcatctattctgggtgcattggatgaccacagcaaggcagtaacaagcttagcatcaagcagagatggacttctacttgtctctggatctgaggatggtaatgttcgggtgtgggataccagatgtcagcaagttacccgaaaattcaaacactcccaagtaaccaatgttcttattgtaacgccacaacgagtaaatctgccaccgctacaaccattacgcaaagttcggtctgcaaatggggaggctgaacggcaggcagtacttcttcatcggcctgaaaatgatgtcccaattcctggaaataagaccttcatttttatggagcgctacttggatgagcttcagaagcatggtggttcatccaggttatttgattttgggccgaatgctcagaatggcactccaaaccaacagggaacagaatggagagatagatacttggagttgcaggatctctttgtacatgaggtcctccatcagatgccatcctcgaggaacccatgatgcacatgctttggatatcgtaggatcatttgtggtgtcgaaacagtgatggttgccattcgggctacaaacgatgtagatgagttctttggagtaattcaactgatggtgctttcggctgcgaggaacttatcagattctgaactaaaaccactagaatcggtgccagcagtcacttggaactggttctcgtttgtgtactagtctagagaaacgctaaaaatcaggtttctcttgattctagttctaattttaaggatacagtgagcttgctacataaagttattttgatttcatagagaaaatgttttgttctcaggggaatctgaattttgaaagttttctactagaatctaagatttgatacgttcagggttaaccataccaattaaggactaaaaagtgctagttagcggtatcggattttcgctggaaaaccgctgtttt

SEQ ID NO: 6542 - DNA, 1296 bp, Zea Mays
ggcaaacaccacgcgccgcgggcccttcttgcgtcagcatcgcacccgcacttgtccggtctgtgggcctggctgtttgttaggactgcccggcccggtgccccggtagtagtactagtagtatagctagcctagtagggtaaggaaacagtggtcgtcctctaatccgaatcggaaggcagcggatcggctcggaccgggccgggccggggcgtgtggctgcgctgcgtcgcctcgcctcgcgtcggcgattcttccggcgaaccaacggcgccagccacacctgagcgagcggcgcagaaaggtggcgcgtggacgccacgctcgcctcagccttagggatcgagggccctttccgtccgcgtggctgctgctcctctcgtctctcctcccacccgtccaaggcatggagcactgctatgtgggacagccgatctcgagggccgaggcaatgcccgagaggaggtccaggttctggcagatggatgcgcctcctccgccccgggcggaggtcatctgcccccagcctcgccgcgccacccggattcccctcaccgctgtggaaaccctgaacaaagccagccccaagatgaacggtgcatttccgccgtacagatcggactccacttgcgatatacttgatcttatcctcagtaagaatgactcggatggagattcgagcagccaggagggagctcctatggcaaaatgccagcagtacgagttgaagtaggctcgccatcttgcggcgttagcagcagcccaaaagtaaggattgaaggtttcgcctgtggcaactccgagacccactatgcagttacctttgtctgagcattttgttggtatgttcctgattttgcccttggaccgaccgaccgctcgctccttgtgaatcaccgtggtggtgtgcaggatattaagtagtgcatttaagctagcctgattagagttgccttttgcccttctgactggcaatcgaaactgcacaattgcagtgagtagtgagatgtatataagtgaggtccccgcatatttaccttatgatgtatgtgtctagtaaatttagctggagatctggtgtttcatggataagagcctgtgaatagagttgagtttttgcattcagaagtaagatgcaacatggagttttcagttattattatgaatgcatctttgttttgtgtcacatgttgtgatttttttggcctacaagttacctattttccttgcagtttgttttggtgttacacatgcttatttgttgccatctgacagtcaatttcctagaatgcaaaa

SEQ ID NO: 6543 - DNA, 781 bp, Zea Mays
gtcggtccacgttgtggatcgattcatataatcatatagcgtcatcatttgtagtccccaatcatccgacgatgatcccctcgattcgcggcgccctcgcctccaccactccccaaccacccgacgccgacccccctcaattcacgcccccacctgctgcatcggctccctctggcgccccgcctcctggcccagatccgtgcaccccttgccctctccggactcgatgattcacagatctgcccagctgcccaggcacagactaccggcatccggatctcctgctccactgctcgccgccttggggctctccggcgttggctcagcgcgacgagccccccaatagcctagttccggatcccccaaccgcccacgccccacagttcaagcaccggccaccgatgtctgacgaacgagcgaactccccgcggatgcaggaggaggaggtgcaggagcgaccgccgaccgtccgcgtttcaccatccccttctccgatctcaaggaatcataaaagcatatggaggaactatgtataggctacaaagaagcataagaagcatttttatagcagaagccaagtgttctgatgattttgttttttcaattgtgttttctgttattagttcagcatgcacatatattgacatgatttatggcatggcatctgccatctttgttatatttatgacatcgttcttgattgatgtgtgcgacatgaatgatggatttttttaacatcctgaccatcattgtgtcgctcattatcgtattttgtatatca

SEQ ID NO: 6544 - DNA, 2341 bp, Zea Mays
agttccgcgagctcgggatctctgctccccatcccgcgcgtccatcttggtcaagaaaccctaaccagcacatccatcccacaggcctgccgacggcgcgtcgcccctaaaccctagaccccctgcggaaatctctagagcctgggccagctctgtgcgccagctcttgctccatctctccgcggcggcagcgcaacaaccgcacccatgaaagtcgccatcctcaccccccgcgagcctgccccatcctgcttagtgtcgtcccccgccaccgcgcagccgcaacccatctggataaggatgcatccgcttctcccatagccgccactacccctgcctgccctcggctacgaacacgaagatcccctggatggaggtggagctctcagaggcttatgatctagaactctatctcatactacggattccacagggtgaggagagatacgagcagggtcccaccggcgatgcgggtcccatcttcggcattgggagcaatccgcctactcggacacgaaggttctctgaggcggtgtagctatagatcatgcgggcaacggggaaggacgatagctacgcagcccacatcacgaaggcatataagtgggagttcgccgaaagggaaggtttgcagctggttgtgctgaatccagggactactctgggtccatttttcatgtcatcagtcaataccagcctgaataatctgttgcaacacctaagaggttgaaaattaaccaggccaacggcttgagtcggaccctgtcaacacagggtggtcgatgttagagacatggcacaatctcgatcgtgacgtatgagaacccatctacacagggttgtgcttggcgtccatggaatgtttgtttgacttcaccgatagaattgctgatatgtaccatgatttcccagttcatagaatcaactatcaaagaggacaaacaggttggttgatgagagcaaaggagccctccaagaagttgatcgatctgggcgtttgtttccttccgtttgatgtgaccatcagggagaccgtcgattgcttcagaagcaaagggctcatctagccatgtgaacatttccagatgtaccagggttactattgcttactagaatgaggcgagagctgcttagctcctttgacattccttctacttagtggcaattggtttggttacttaaacctatgctccatatgatccacgctgattgaattttggtttgttaatatgttttgggcaagcagtgctatgagatggagatgatggttaggcatgatctttctataggttaaaagaacagattatccaacagctgatggaacctgcattagagatattatgttgatgtcacagatttagttgatgctcatgtgaaagcgctcaacaaggcagacactagaaaagtcagtatttacaacgttggaacaggaagagatagagaggcccgcaaatagttaatctgggacaacatatctctgtactggccatagaggacaacaaaaaaaatcaaaagttgaagaatcaccaacggtgcctcctttgcaccctccagctcaagaacctgggcccgagccagttcaacaagtcatgcccacagctgaagtgctgaaccaacagatttactgggaatcaatgaatcagcccgaggcacatctgaaatagatcaaaacaaggtagtcgccttggtcgtggttccacatgataatccgccaaaagcacttgcttctaccagtcctggaagcgtggcgactagctggagcaaatcagattctgtgcgatgaaaagcaagtgaaagagtggtgccgtcagcggtgcggattgggggcttctagagaaagggtctagcgtcgtgccctgcttgacgaacagtgtgttgatatgtgccatcatcgcactgggaacgaacgtgatggctagcacggggagcatcttgagcatctgctttgtctccaccactcaccatgctctgagcctgtgttggtatgcagacttttccctttgtttcagaagaagatgcagttgcattgcacattgttggaacccacgatcaccacaaaattgagggaatatgtcattactcatttgcataactcattagtcattaccttgtcaaggtttatgctttccatcacgaacggttggagttgcaacataacgatactttggtataccaaataaagttactctgttcaccaaatgtagggttagtttttttgttgtgctaaagactgaacataatttgggtgtgttaatattttatttattgtctgcacatggtttgcgttcttatgatgatggctcatggatcctgtaaaatacgtgttaggattgggagatcc

SEQ ID NO: 6545 - DNA, 2434 bp, Zea Mays
agttccgcgagctcgggatctctgctccccatcccgcgcgtccatcttggtcaagaaaccctaaccagcacatccatcccacaggcctgccgacggcgcgtcgcccctaaaccctagaccccctgcggaaatctctagagcctgggccagctctgtgcgccagctcttgctccatctctccgcggcggcagcgcaacaaccgcacccatgaaagtcgccatcctcaccccccgcgagcctgccccatcctgcttagtgtcgtcccccgccaccgcgcagccgcaacccatctggataaggatgcatccgcttctcccatagccgccactacccctgcctgccctcggctacgaacacgaagatcccctggatggaggtggagctctcagaggcttatgatctagaactctatctcatactacggattccacagggtgaggagagatacgagcagggtcccaccggcgatgcgggtcccatcttcggcattgggagcaatccgcctactcggacacgaaggttctctgaggcggtgtagctatagatcatgcgggcaacggggaaggacgatagctacgcagcccacatcacgaaggcatataagtgggagttcgccgaaagggaaggtttgcagctggttgtgctgaatccagggactactctgggtccatttttcatgtcatcagtcaataccagcctgaataatctgttgcaacacctaagaggttgaaaattaaccaggccaacggcttgagtcggaccctgtcaacacagggtggtcgatgttagagacatggcacaatctcgatcgtgacgtatgagaacccatctacacagggttgtgcttggcgtccatggaatgtttgtttgacttcaccgatagaattgctgatatgtaccatgatttcccagttcatagaatcaactatcaaagaggacaaacaggttggttgatgagagcaaaggagccctccaagaagttgatcgatctgggcgtttgtttccttccgtttgatgtgaccatcagggagaccgtcgattgcttcagaagcaaagggctcatctagccatgtgaacatttccagatgtacgttttattctatagaactgctacagtaatacttggctcatattaaaccgcctaaacgcactggaaaaaactaaactatatgataatgatataggtaccagggttactattgcttactagaatgaggcgagagctgcttagctcctttgacattccttctacttagtggcaattggtttggttacttaaacctatgctccatatgatccacgctgattgaattttggtttgttaatatgttttgggcaagcagtgctatgagatggagatgatggttaggcatgatctttctataggttaaaagaacagattatccaacagctgatggaacctgcattagagatattatgttgatgtcacagatttagttgatgctcatgtgaaagcgctcaacaaggcagacactagaaaagtcagtatttacaacgttggaacaggaagagagaggcccgcaaatagttaatctgggacaacatatctctgtactggccatagaggacaacaaaaaaaatcaaaagttgaagaatcaccaacggtgcctcctttgcaccctccagctcaagaacctgggcccgagccagttcaacaagtcatgcccacagctgaagtgctgaaccaacagatttactgggaatcaatgaatcagcccgaggcacatctgaaatagatcaaaacaaggtagtcgccttggtcgtggttccacatgataatccgccaaaagcacttgcttctaccagtcctggaagcgtggcgactagctggagcaaatcagattctgtgcgatgaaaagcaagtgaaagagtggtgccgtcagcggtgcggattgggggcttctagagaaagggtctagcgtcgtgccctgcttgacgaacagtgtgttgatatgtgccatcatcgcactgggaacgaacgtgatggctagcacggggagcatcttgagcatctgctttgtctccaccactcaccatgctctgagcctgtgttggtatgcagacttttccctttgtttcagaagaagatgcagttgcattgcacattgttggaacccacgatcaccacaaaattgagggaatatgtcattactcatttgcataactcattagtcattaccttgtcaaggtttatgctttccatcacgaacggttggagttgcaacataacgatactttggtataccaaataaagttactctgttcaccaaatgtagggttagtttttttgttgtgctaaagactgaacataatttgggtgtgttaatattttatttattgtctgcacatggtttgcgttcttatgatgatggctcatggatcctgtaaaatacgtgttaggattgggagatcc

SEQ ID NO: 6546 - DNA, 613 bp, Zea Mays
gccctgacgaatcttcttcgtgatgtggtggttctaccgcaaaggaccctccggcttctctggcgcctccacggccgaggaggtcaccgccggcgtcgacggccaccttctggtcgccgtcatcacaggtgcgacgagcggcatcgggctggagacggcgcgcgttctggcgctgcgcggtgtgcgcgtcgtcatggccgtccgcaacgtctcagccgggctcatggccaaggatgccatcgtggccaagacccccgacgcaagaatcgacgttctggagctggacctcagctccatagcttccgtgaggagattcgcctccgagttcgactctctcaaactgcccctcaacattctcataagtaaaagcaagtagagaaaatctccgaaccctggccccctatcactaacggaccggcgtcaactgtccactctgcaacggcccaaccgaaaggtggcgcacaggacaatgcaatccgagagcagatgagacacaacaaggagacttttttaaccaaacctaaaaattcgctgccgagggaaatcgaacccaggacttagagatgctactcggaagtccttaatcgctaggctagaaactctttcgcttgat

SEQ ID NO: 6547 - DNA, 3125 bp, Zea Mays
cggcgctctcccgatcccgagtgcatgctacctcacctgcgtgtgcgccgcgtttcaactcgagaaagaagacacaccgtcgcggcgcacgcggcctctggtttctgatttcctggttaccctttccctccctgcatttgcctttcagatcaggcggcagcaccttcctctcctccccttcccttccgtctcatcttcgttcccttccggggtcatcccttccgtcctcctcctaccaagtcccaaggccgcgagacagacagacagacagacagaaagagagagcagagcagacaatggcgacgctcgaggacctgggcgtctccgccttcatcaacatcctgggcgccttcgtcttcctgctcctcttcgccgtcctccgcatccagcccgtcaacgaccgcgtctacttccccaagctctacctcgcgcacaagcgccaccagcacgaccacgccgcccgctccgccttccgccgcttcgtcaacctcaacctctgcacctacgtcaccttcctcagctgggtgcccggcgcgctccgcatgtccgagccggacctcgtcgcccacgccgggctcgactccgccgtctaccttagaatctacacgctcggcctcaagatatttctgcccattacgactctcgcccttctggttcttatcccagtcaacgtatctggcggcacattacttgatctaagaaaggaagttgttttcagtgatatcgataagctttccatatcaaatgttagccctggatccaacagattctttatccatctcttgatggcatatgtgttcacattctgggtgtgctttatgctgtacaaagaatacagcaatgtagcatttatgaggttgcatttcctggcttcccagaagcgctgtgccgatcatttcacagtgattgttagaaacattcctcgtgtctcaagtcattcaacttctgaaacagtggatgagttcttccgaagaaatcacccagaccactatcttggtcatcagcctgtttacaatgcaaatcggtatgctaaacttgtgaagcaaaaggagaggctccaaaactggttggattactacgaactgaagttcgaaaggcatcctgagagaagaccaacaagacggggaagtggatcaaatagactactaccgggctagaatcagcgagcttgagaggaggatgacatcagaacgacagaaaattctcaatgacccaaaagctgttatgccagtttcttttgtgacatttgactcgagatggggtgcggctgtgtgtgcacagacacaacagtcaaagaacccaacccaatggttgactgattgggctcctgaaccgcgggatgtttattggcaaaatcttgccatcccatttttctctctcagtatccgcaggtttctgatgtctgtcgctgtctttgctctagtgtttttctacatgatccccatcgcgtttgttcaatcgcttgccaatctcgagggtcttgaaaaagttgctccttttctgaagccagtaatagaagcacatgtggtaaaatctttccttcagggatttcttcctggtctggctctgaagatttttctctatattctccctactgtcctgctaatcatgtcaaaggttgaaggctatgtctctttatcctcgctggaaaggaggactgcttcgaaatattactacttcatgctggtgaacgtatttcttggaagcataatcgctggcacagcatttgaacagctatattcgtttctccaccagcctcctacacaaataccaaggaccattggggtagctataccaatgaaagccacatttttcatgacatacgtaatggtagatggctgggctggtattgctaacgagatccttcgagtgaaggctctggtgatataccatctgaagaacatgttcatcgtgaagacggagagggacagggatcgggcgatggatcccggcagcataggactcggagaaaacctcccgtcccttcagctgtatttcctcctcggcctcgtgtacgccgtcgttaccccgcttctcctgccgtttataatcgtcttcttcgcctttgctttcctcgtctacagacaccagatcatcaacgtgtacaatcaggagtacgagagtgctgctgcgttctggcctcaggtgcactcccggataatagctagcctactcatctctcatgtaactctgtttgggttgatgagcacaaaggaagctgcgtactccacccctctgctcatcttcctgcctctgctgacgatctggttccacaaatactgcaagagccggttcgaaccagctttcagaaagtatcctcttgaggaagcaatggcgaaggacaccatggagcacgcatcggagcctaacctgaacctggaatccttcctggctaacgcttacctgcaccccatcttccgccttttcgaggaagccgggaaagaggaggagacggtggaggtgaggatcgacaaagccgagaagcagcagcatcgccatgaggaggacgaggctcacgcgaggagctcgtcgcagtaccgggaggaggagactcacttcaggagcacgcacgagacgcattaccaccacgaggagagccacgtcagcaggagcacccagtatcatgagggcatccacgtgaggagcgacacggactcgccgtcgccgccacacttcgtctaccactacgacatccagcagtgatgatgtcgtctctaactttgttttcctgggtgtcttgtgaatgcttctcttggctaacctgtccagccccccccccccccccccccaagaggtttgctaaagtcgctgatgattgatgaattgttgcgtgtacatgcagggtagggtctagtgttgtagtgactgtaaaagttctggtgtgccatgggacctgaacattgattccatgcaggaaaaaaaagaagtggatgaatcaagttgagtattgcgtggtatacatgagaatgtcttcataattcatttgaaaacatggagattaaaaaaaataacaggctctgtatgcaagcactgcatagagcagcagatatgagcgtcggagacatgctcctggtcctggagactcatgtcatcatggttaaacatgcagcgacaatggtcaagct

SEQ ID NO: 6548 - DNA, 3549 bp, Zea Mays
cgtgagtcggggactcgggaaccggagcacacaccaaaacccccagtgccgccggcggacgccctccagtttccggtcttcactaactccccgttttccgtactgctgcggcgcctcggcagtcggcaccacagccggcaagatgccccccttccgaatgccttcccacttcctcgcgcttccgctcctactcttgctgctcctccaggcgccgtccccggaggcggccgagtctacgccggggacccggacgcgcaagatcggcagctcgggggcgtcctcggtgttctcgctctttaacctcaaggacaagagcaagttctggactgagtcgatcatccgtaaagagttcgatgacttggaaggttctgcgtcgcgggactctagcaaaaacggcctgctcaacttcacaagagctggtaatattgcaaactatttgagcctggcagaggttgattccatatatcttccgatccctgtgaacttcatctttattggatttgatggaaatggacggcatgagtttaagttggggcctgaagaactggagcgctggtttacaaaaatagatcacatatttgagcacacaagaatccctccagttggtgaagttcttaccccgttctataagactactgttaagaaacttcagcattatgatcttcctttagtcagccatgtgaaccacaatttctctgtgcatgccatacacatgggagaagatgtcttatctgtttttgagcatgctataaaagttctatcctgtaaagatgatctcgtggattccagagaaaatgaagagatttttttgcaagtggatagtgctcaaatggaacatatattttcaactcttgttgatcaccttcagatacaagaggcttacaatatctttgttctgaaccccaagcctattggcaagaggattaattatggttatcggaaaggcttctctgagtctgagatcaatttgctcagggagaacaagaccctgcaagctcggatactccagtctaaaagtgacaacaaactcttccttgatatcgagaagggagtcaatagaaggccgttatatgaaagtcatcctctatcatcattttcatggacccgaactgacagtatggatatgggggattggtcaaagaaatgcaaggaagcattaagcaagtttgagctgctgaaggaagggaagagtaaagaggacattgtttatgaaaaggctgttcagatattacacggtacaaaggatgaggtgcatgacattgttcaaagtgctcttaagtccagtgatttgaagggtctccatgcccaatgtcttacagatatatggataggcagagagaggtttgcttttgttgatctgagtgcagggccatttgcctgggggccttctgttggtggtgatggtgtccgtacagaacttagtctgccaaatgttgcaaagactgtcggggctgttgcagaagttacagaagaagaagctgaagaaaaattgcaagacacaataagggagaggttttcgtcctttggtgaggattaccatgctgttgatattctattagcagagattgatgtgtatgaactttttgctttcaagcattgtgtgggaagaaggatacagcttgccctttgtaaagaacttgatgagaggatgcatgacctgaaaaaggaactggagggttacaatactggagattttgatgaaactaacaagaagaaagctcttgatgcactgaagagaatggaaagctggaacttattcagagatacttcagtggaacatcatagttacacagtggctcatgattcatttcttgcacaacttggatctatgttatggggctctatgaggcatgtaattgctccttctgcctctcatagagtgtaccattactatgagaagttatcgtttcagttgtattttgtgacacgagaggctgtcattgtcagaggatccatcattgatgatggcattttcaatggcacgtcgtgcagctgcggtgccgcttctattagtcaatggcacctataagtcaactgttagcacataccttgattctgctattctccaacatcagctacagaagctaaatgagcacaattcactgaaaggaaggcattcaaatcacaggtcaacattagaggtcccaatattctggttcatacataatgaacccatattattggacaaacattatcaagccaaggctctctcaaatatggtcgtagtagttcagtcagatgatgattcctgggaaagccatttgcagtgcaatggaagacccatcttatgggatttgaggaaaccggttaaagctgctattgctgcaactgctgagtatgtatctggtctacttcctccacatctggtttatagccatgctcatgaaactgcaattgaggactggacctggtctgtgggttgtaatccctcagctgtgacttctgaaggttcacaactttcagagttccagcaagatgtgattgctcgtaactatattattacttcagtggaggaatccattcaagtaatcaattcagcaattcagcaattggtaatagagcggactactgaaaaaggcttcaaaattttcaaggctcacgaaagtaagatggttgagaagtacaatgccgttgttagcttgtggagaagagtatcggctatgtccaagggattgcgatatggtgatgcagtaaaacttatgtcaatgcttgaggatgcttcaaatgggttttctagtgctgtgaactccaccatttcaagtctgcaccctgtccaatgcacccgcgaaaggaaggtcgacgtgcagctagacttgacaacacttcctgcttttctagctgtatttttgttgctttggtttcttctacgtccaaggagaccgaagcctaagatcaactgaacaccgagccaatgagcagcataggccatagagtttttgtgaatacgcgcatggattacagatggcgctggagcatggcccgggaattccaaaggtccaaaacaccgggtggcagggaacaaggtttcagaagattgcaatcctgacacatccccaagttgtagcagagttggaatgtcatgaaaactttaattcattcagtcctgtcctcgttccgggtttagccaattcttcctcgttccgggtaaggccttgttcgtttgtgtcggattggtgggtcggaacaattcccggccggattgcttctctaatttatataaactttgattagccggaacgattccgggtgcaatccgacgcaaacgaacaagccctaactgagattaatttgtccttgctgtaatgtttagccagtcctgccccgatccggggaactgagagattgtctttatcgcaacattaacggctagcggttagtatcatcttccagtcacctggaatgttactagtacaatccaattgtctgtttcctgccgcttacatgtaaaagtccatactcaagttttacagaaagaaacatgttctgtcatttattacaaaataaagccaaatagtaaaatgttatgtgtacgtagggacagtatgatta

SEQ ID NO: 6549 - DNA, 1283 bp, Zea Mays
tcgctgttccgagttagccctccgtgtggccacacgttttgagcacgcgcccaaggtctcagtggggttcataatccatcatcaattggatattacccaggctttcaaggtagaaaagaagctttttgttccatcatggccttatcaactccagcgtctattttggttgacgagaaccaacagataaatagaggtaagagggccgatggaccaagggccaaagggctgaagccatccgagaatcctggcaatcaagggaggagagctcttaaggatttgtccaacttctctaaaggcactggtttgaaggacacttccaccctgaaagagaagtcccagcagaagcctcgtagtaatgtggccaacactattaaaggcaatgctttgaaggacaagcccatcctgaaagagaagtccacccaggaacagaggtcaaaagctcttaagaacccaatgaaaattttagttgatgaagagatcaaaatgtgccatgagtgggctaaggatggggtggagggatttcactcaacacaaaataattctcaaaagttggataaggatctgctagacaaacgtgtcaagaagaaagtggcggcagtaaactcagccttgtgtggttggccagatacagtatttgattctctaatgtatccatctatggaggttgctgagcttttttatgaacaaaacgtgctggaggtggaacctgagattctcccggacatcagttggcgtctctctagttcaatggtaaagcaaagattgatgaagaccgtcttaccgatgctgagcttgaccagtaccattctttggagaacaatccaattatttttgagctgagagacgagccagcgatcccgcagctgggagtgtattgaagaatctgtgccagcaggacagaaagctctgtttgcttgctgcttgctctggagtctggagttgtctagtctagaattctagtaggtcttgaacctggtgttttccccagctatgttctagtgggatgttggtgatgtaggatttcagtttgagtactggtaccagttccagctgaagcgacagccttatggctgctgatgggtgatggttgtggaacaacgggcgatataattctaatattttcagcaaactagtctgtggtctctatatttattctcgtgaatcctaaacagtgctaagttttttttggccctaatctatggtctctataaaatcgatattatttttactattttaatcacttttagcttttactatttagatcttctcctaagtcactaaac

SEQ ID NO: 6550 - DNA, 1024 bp, Zea Mays
cgtatcataatcgcaaaaagctctccacgctctgaagaagcaacggcgacgcctccgacgacgagcacagctgcccagcccagcaaactagcagcgccctcgtcagttccgtctcgttcccaacctctcccggattcgattcgattgacccgtccgctccaaatcgaatctaatcagcagttttggagttgcggaagggagaaagagagaggagaggggcatggatcaggtgctcaacaaggtggggagctactggttcagcaaaagggccagcaaggaaatcgactccatcggcgacgacatcagcacacgagccaaagtggtcatcaataaaggactccacaatggctaccaagaagctagatcctcacaacggtaatgaagatgatggacatgacacccctagaccaccaggaaggaaagccgagaaagataaattgcgagcacgaaagcgagaggacaatgacaatgatgcattgatggaagaactaaaaaaattagagagtcaagattggagatagaaaatgatcgtaatgcacgagaagacaagttattagagccggagagtagtaaacttgatcttgagcgtgaacaacgtgacgacaaggtgatgagaaccgacacaagtacaatggatgatgagtcgaaacaatattttaagttagtgaaagaggaaattttggcgcgatgttttgggagaaagcaagattgaggggtcatgttattagagttgcttttagtcatactgaacagacttgtattttttctgtctcttcaatatagtatttttcctgaaacgactacaagatctgtttcctatatagtatttttttcgctgccattgtttccaattcttatccattcactgatatcttcaacatagtgcacacatgcgtacaatatagagaaaatgttatgaacaaaaattgaaatgaacatgttctaaacacaacataaaaaaattattgttctcgtttatttgacctgtacgctcccatagatgatcaactaagtctgactggag

SEQ ID NO: 6551 - DNA, 1421 bp, Zea Mays
cgtatcataatcgcaaaaagctctccacgctctgaagaagcaacggcgacgcctccgacgacgagcacagctgcccagcccagcaaactagcagcgccctcgtcagttccgtctcgttcccaacctctcccggattcgattcgattgacccgtccgctccaaatcgaatctaatcagcagttttggagttgcggaagggagaaagagagaggagaggggcatggatcaggtgctcaacaaggtggggagctactggttcagcaaaagggccagcaaggaaatcgactccatcggcgacgacatcagccatactaccctcccaagataactactataggaatctgatgaaccaagatgatacagataatttaggctcggaggattacgtgcaagttgatcctcttgtagctaatatgaattcccagacaaaaccaaagggcctctcaaaaaatttcactgatgatgaggacattctactgttgtcagcgtatctcaatgttagcaaagatcctattgctggaagggaccaaaaagatggcagattttgggaaagaattgaaaagtattatcatgtcaatttaacatttgaatcgctcttcattgcatcatcgatggggtataatccaaaagaaagtaagtctttccaaagttactatgaagccatacaaaggaagaatgaaagtggaaagacaatgaatgacaagacacgagccaaagtggtcatcaataaaggactccacaatggctaccaagaagctagatcctcacaacggtaatgaagatgatggacatgacacccctagaccaccaggaaggaaagccgagaaagataaattgcgagcacgaaagcgagaggacaatgacaatgatgcattgatggaagaactaaaaaaattagagagtcaagattggagatagaaaatgatcgtaatgcacgagaagacaagttattagagccggagagtagtaaacttgatcttgagcgtgaacaacgtgacgacaaggtgatgagaaccgacacaagtacaatggatgatgagtcgaaacaatattttaagttagtgaaagaggaaattttggcgcgatgttttgggagaaagcaagattgaggggtcatgttattagagttgcttttagtcatactgaacagacttgtattttttctgtctcttcaatatagtatttttcctgaaacgactacaagatctgtttcctatatagtatttttttcgctgccattgtttccaattcttatccattcactgatatcttcaacatagtgcacacatgcgtacaatatagagaaaatgttatgaacaaaaattgaaatgaacatgttctaaacacaacataaaaaaattattgttctcgtttatttgacctgtacgctcccatagatgatcaactaagtctgactggag

SEQ ID NO: 6552 - DNA, 1988 bp, Zea Mays
cgaagataagctcatgtacagtcagatagatcttgagatcaaccacatttattcacaggtttcagcaaatgctttcagctagcaaccggccttatgcgagaacaactggataagcccatcacccatcgcccatcggcagcagaaggccactgcccggacggagcttccgaaagggaaccgggcagcggcaatggagggacagccgctccatctcctcatcgcccagttccaccacccttgcctacgcggtctcatccccaactaccctacccactacctgcccacctcccgcctccgactccgcgtacagcgtcgcaagccgaagcagctcgccgcagtgccttcgaggcgtccatcgggcagccaagccgacgcgcctggcctggtgccggtgcctaacacggtggcggcgctggtgctccagctgaccgtgtgctcgctcctttttctcttccccaaccgtgcccgagccctcgcgctcccgccccctccgggggccgctgcggtggttgaggcgacgcaggaggaggaggaggaggaccaggagtgggaggctgcgctgcagaagtggaagaccaagacctacgcgctctcggtgcccctccgggtcgtggcgctccgcggctccttccctccatcttggattaaggatttcgtcgaagctcaggggaagagactcaaattcagtcctgagctccgtgctaatcttgatgggatcttctctgagatgtcacaatgtatggacaagggtcaagttcagccgaagtctgcaatggcagctgatgttgtttcccttggggactcttggctcggctatgccatccgcaagggattgctagagcctatcaagaatgctgaagaacaggattggtttcatagcctgagtgacagatggaaggaaccagaacggagaagcagatcctaatggtacaatatggggagttccatacagatggggcaccatggtcattgcttacaagaaagacaagttcaaaagacataatttgaagccaatacaggattgggaggatttgtggaggcccgagcttgccgggaggatttcaatggtcgattctcctagagaggtgattggtgctgttctgaagcatctgggctcatcatataacacagttgatatggaaatggacgtcaatggtggtagagcagcagtcctaaacagctttacgcaactacagaagcaggtccaactattcgacagcatgaactatctgaagtcgtttagtgttggagatgtatgggtcgcagtgggttggagcagcgacgtgatccctgctgcaaagcgaatgtctaatgtcgcggtggttgttcccaagtcaggcagcagcctatgggctgatctatgggcaataccatgcgcgacgagatttcagactgaccaaatcgggagccgagccagaggcccgtctccactggttcaccagtggttcgacttctgcctgcagagcgcaaggagcctacccttccgccaagacgtcatccccggagcatctccgctccacctcgagagccctgtgccagaggtccctcaagacaagaacaagaggaagccgaagctggacacgaaccttgtcaggggagtgcctccgcccgagatcctggagaggtgcgagtttctggaacccctgtcaggtaaggcgctggaggactaccagtggctgatgtctcgggtgcagagacctcgtcttggtttgtttgggaacatgttgcagaagatgtcagctgtacttgacttcaaaagaagatcttagagccactgtactgtgattgaccaagttttttttttctttttacttcgtggtgcaactcttaacaacgtcctctatattcatcctctatatatgtcctttacagtttcctctaaaagatttcatcctctatatctcatttctctccaacaacgtcctctaaatcacgtcctctatactcaaataatcatattaaagacattttttaattttattttttgt

SEQ ID NO: 6553 - DNA, 1172 bp, Zea Mays
gggccaaaacccactcgcttccgttcaccatggggccgccggtccaaattcgcgtcacggcccaaaacagtgaaaggcttgccgagccagacagacggagtgcttccagttgcagccaagccaaccgaaaccgatggcgtcgggctcccgcggcggcggcgggagcgacttctccgtggtcgtggtgggctccgacgccggcgccggcgcagcgctcctcgttccctccgaccgccactcgtggcacgactgcctcgccgaggcggacgcctgcttctccgacctcgaggagcgccaggtcgtgcgcgtccagggcaccgatcgggcccgccgaaccatcgtccgtgtcgtcggcaagttcttcccgggtgcgcgaatcggccacctccagcaattgacggtgaacgtctgaaaaagtatgtgttctacaaactccgcaccgaattgcctgtgggtccattctgcatcttgtacatgcacagtactgtgcagtctgatgataacaaccctggagtgtcaatcttgaggacaatttatgaggagctttcacctgagtacaaggaaaggcttcaggttttctacttcttgcatcctgggcttcgctccaggctggccatcgccacacttggcaggctatttttaagtggagggttgtattggaaaatcaagtacattagtcgactggagtatctctggggcgatataagaaagggagaggttgaaattccagattttgttattgaacatgataaggttcttgagcaccggccactcactgattatggcatagaaccagatcccctacatcttgctgatgtacctgctgaggaagtggggtactcgcttggaagatacgaagataaatggactccagaagatcgatggtattcagggaattacatgtgattttttctgctgtcgctgaagcctaaaagattattattgtatagtaacacgataatatgagatctgtatgtcagattgctgtgaaaacattggcaaactgtgtttccaacttcatgattcaaattcttttgaggggaaaaggctatagggaaactcctacaacggaattttattaaaaccttttgtaatgaaaatacgattacaaggggaaaagaggacaagaaaagaagaagtttcttgtcatcgtgaatttagccaaatcaata

SEQ ID NO: 6554 - DNA, 978 bp, Zea Mays
aaattgagtgaccatggtgcacctatgagcaggcgcgctctcgctcttccgaccttgtcttgagaggaaaaaggtacaatttaggacttagtccagtatgattcctgaccttattgatcggcatagaaaaattctcaatttggcagcaatcaatttctaaagcgtgacaattgggtctgcaggtgctgaattcgtggtattcagaccctcagagattgctgccagtgttgctcttgcggcgatcggggaatgcagcagttctgtaattgagagagctgctactatctgcaactatttggacaaggagagggttttaagatgtcatgaaatgattcaagagaagattgctgtgggaagcattgtcctaaagtctgctggatcatcaatttcctctgtgccacgaagccccataggcgtcctggatgccgctgcctgtctgagtcaacaaagcgatgatgctactgttggatctcctgcagtatgctaccatagttcttccacgagcaagagaagaaggatcactagacgtctactctagttgtggattatggtttcgtcaagtagttgcctgaatggaacaacaaaacatgcacactactcagtgttccatataaagagagagagaaaaataacaagcagcgtcctgcgagccagtgttgcgattccagttcatgcaattggcatccgtaaggggaatgcaagcgcaagacactagagtccagggatgctggtgtaggtagagagggggaacaaggaatttacatacggcatagagatgagagctctctcgtaccattttgtaccttcaattcgcaatgaactttaggcaaggattgccttgggcaattgaacatttgtcgggtgagaagaatccaaagatggatcggcagaggaatagaacaatttgatatatttccataaactacagatatgttttattttttcttaatggtgagctgtcacttgttgatagtaata

SEQ ID NO: 6555 - DNA, 2692 bp, Zea Mays
cagagcggcacgacgcgaccgcgcctaccacgttcaaaccgacccaaacgggacgcccctttgccctcttttccctcggtctccacccggcccgccgctcaccgctgccagcttctgcagctcgcaccgctcccgagtccgagtccaacaaggcttgagcagccgacgccaccccggtcggtcgacctccctctccccaccgacaccgcgggcccgcacgcagagaccccgcatgtcaccgtctacactcggtgacggcgcgagcaggtttccagccgcgagccccgcgactgatctgagctcgtgcctggctagctagtagatgtctccgaccgttgcctttaagctcgcacgcgaaccgtcccacactctgcgcaagccactgccgctgccgctgccgccgccgccgccgccttcagtctccgtctccaccggtgccctcgtctcccagccgctgccgccgccgccgccgccccgtgagagccggcgcagcaatccggttgcttggggacgcagcgaggatgggcagcaccagcgcgttcgtcatcaggtggatcaacttcttcaccatggtcagtctcagcccggcccacctccatccttccttgctctcccttctcccttctccaatcggaggagccgtcctgctttcgttcggcctcgctcgaggctgattctcgattcctgctgtcccggcggctgattgctgtttgctgaagtacacttccccccaccattttactacaccctatctctgctctgcttactagtagtttcgtggcaaataacttgtcggtgttactttctcgcgccgctgttcctgggacagatactggcgctactggtggtgggcttcgggttctggatgagcacccacgacgacgagtgcaggcggaccttgaccgtccccgtcatcgccctcggtggagtgatcttcctcatgtgcgcgtcaccgtcccgtggcatcattatgacctcggcgaactgtcacgctccccgctttaacctctctgcctcactgacgatctgtgctgcagatcgctcgtcggattccttggtgcctggaagaacatctcctgcttgctctggacatatctgatcatgctgttcgtggtcttggtggcaatcatggtgttcacggtgctcgcgtttatcataacaaactccggaagtggccatactgttcctggggctaggtatgtggatgactggatgttagtattttcatagaaagatcatgaccctgcgagttccagctctacagtacggaaacttacggataggggatagtagcctaaaccgatctacccaccgctacatacaggttttgagctttttttccatgacctcacagtttaaaaatgtcatcgaagctctgatcctaggagagagtttaactctggtttcttgtcttaaagtgcccctgcctgcgcatcagaaatacactgaagcatttcaaatgttctatgtaggtataaagagtaccgtctccaggactacagctcctggtttgtcaaacagctcgatgacacggagaaatgggctcgcctgaaaagctgcctggtgaagacagatgactgcaatagcctgtcgagaagatacaagccgttgctttcgttgagatcttaattaccagcccccaacttcgcgtgcagaccgcgagagaatacaagctcgcggacctcactcccatggagtcgggttgctgccgcccgccagcagagtactgcgcctggatgcccatctcaaccttttcttttcattagtggtcagcgtagtctctcaggcacgggcatcatcacaagattgctctggttttttcaggtgcgggttcccagctctgaacgcgtcctatttcgatctgagctatcacccggcgagcgccaacgccgactgcaaactgtacaggaacgcgcgctctgtccggtgctacgactgcagctcttgcaaagctggtgtcgcgcagtacatgaagacggagtggcgagtggtggctatcttcaacgtgatattgttcgtcatcctgtcgttcgtgtacttcgttggctgctgcgcgcggcgaaacgctggaggaggcgacgcgaaaggccgtggcaggtgacgggatcacttcttcgaggtgaagtgaagcgcttggccatcctatgtggagttagttaagcttagtatcaacaccccccctgtaaaattgttccatcaaatattcaaagttcctttgatgaagtaccaggacctgtcgctgcctagtaatactctgttgcaaatgtgggctgtgtttcttggtggtaaaagggaatgtcatttcgctcagcaaatcgcgcatgcttttgcacggcagattatacttagacgtggcaggctgtggaataggaagtttgctagagatacgtgcagtgtgatgtgccaaatactgcaggtcttcactcttcagcaacgcccgtcagccaggtgttcagcaacagcagcgcggacgactgctgcgccgacacgtgcagtgatgtgcctaatactgcagggtttagtgcttgtaattggacgaccatcagtgtgatgtagtgaagtggtgacagcagtcggtggatgttaaatccagaccggagcagagctcacctggagactgaagggtccttttcgaatttcttcatctgtaaaacttgtgatcccctccgcaagaacagcaaacagaatcaat

SEQ ID NO: 6556 - DNA, 2996 bp, Zea Mays
aagagctctcgatctagggattcccttcccgggtctcgttgctctcctcgtccaaatccccaggccagcctagcggcgcagcctgcacgcccccgccccccggaccatggccgaagaccacctctcctccgcgccgtccgccccatcggcggcggcggccgcggccgcggcggcggtcgggtcctcggtgatcccaatcgtcaacaagctgcaggacatcttcgcgcagctggggagcagctccacgatcgacctgccgcaggtggccgtggtcgggagccagagcagcggcaagtccagcgtcctcgaggcgctcgtcggccgcgacttcctcccgcggggctccgacatctgcacgcgccgccccctcgtgctccagctcgtgcaccagccgcgccgccccgccgacgcagaggccgatgagtggggcgagttcctgcacctctcggggcgtcgcttctacgacttccgcgaaatccgacgcgagatccaggctgaaacagatcgtgaggcaggtggtaacaaaggtgtatcggataggcagatacggttgaagatcttttctccgaatgtccttaacattactttagtcgatttgcctggaatcactaaggtgccagttggtgaccagccaactgatattgaagccagaataaggactatgataatgtcatacatcaggcacaagacatgcatcatcttagctgtttcgccagcaaatgcagatttagcaaactctgatgctcttcaaatggctcgggttgctgatcctgatggttctcgaacaattggtgttatcacaaagttggacataatggacaggggcactgatgcccggaactttctgctgggaaatgtgatccccttaaagcttggctatgttggtgtcgtcaaccgcagccagcaggatatcaactctgacctcagtatcaaggatgctctggctcgtgaagaaaaattcttccgtactcagccagcatatcatggtattgctcagtactgtgggataccacaattagcaaagaagctaaaccagatcctggtccaacatataaaaacagttttgccggggcttaagtcacgcataagcagtcagttgactgctgttgctaaggagcttgctgtgtatggtgatcctgttgattcaaaggctggccaaggtgctaagcttttgaacatactagctaaatactgtgaagctttctcctcaatggtggaaggaaaaaatgaagatatatcgacaattgaactctctggtggagcaaggatccattacattttccagtctatctttgtcaaaagtttagagatgaagatatccgcatggctattcaaaatgcaactggtcctagaagtgctctgtttgtacctgaagttccatttgaagtccttgtacgtaggcagatcagcagattgcttgatccaagtcttcagtgtgcacaattcatatatgatgaacttgtaaagatgagccatcgctgccttgcaatggagttgcagcagtttcctatactccgcagaagcatggatgaagtcattgggaagtttttgcgggatggacttaagccagcagaaaatatgatagcacacattattgagatggaggaagattacataaacacgtcacacccaaattttattggtggcagcaaggctgttgagcaagcacagcagcaagttaggtctgccaaaatgtcagcagcggtggtaagaaaggacggagtggatgcacaggcttctgagaaaactcaaaaatcacgcgcgatcttgggtagaagtggtgtaaatggagtagttactgaccacatccagggggtacggcctgctgctgaggcagagagaccaggatcttctggtagtggaagcacatctttctggaatcaaatatttacttccaatgaggaccgaacacatcctcctgcaagagataacacaacaaacaaatcttatgctgtgcctgcacccaatctggaacattcattctccacgatacagttaagagagccaccagtcgtcctgaagccttcagaacaccagtctgagcaggaggcgcttgaaatagcgatcacaaagttgctattgaagtcatattacaatattgtcaggaaaaatgtggaggacttaataccaaaagcagttatgcatttcttggttaatcatacaaaaagggcgctgcataattaccttataacaaaactttatagagatgatcttttggaagacttgctcaaagaacctgatgagataaccataaagaggaagcagatacgtgaaaatctcaaggtccttcaacaagcttacaaaactttggacgagataccacttgacgcagaggcagtagagaggggtggatactccctggattctgatgcgattggtctgccaagggcccatgggctttcttcatccctccacggattcaacgatggaagctcaccatattcaaccccgaagcagtcaaggtcaaggaggtcaaaccattctggcgagcagcttcctttcaaccccaatatgagtggcaatggtttttgatgccaccctcctacgttacaagacggccaaccagattggttatggaaccaaccaaatgtgcagcaagcacaccttattcaagtttgttggcaccaatagatatatgttatttctagttaaattctttgtagcgctgcgccgatgaagcctaacatggtgcgagttttgttgtttcgccttttgtacagtatatatctttgcccagtcatttcgtcatgatatgatatcaagtgatgggtatagttttgttcggacccagggaaagcaatgggaaaaaaatctactaggtgtgtagcagtacccagcgtctgagtgactgttacggatttgccttgcaaaatagacatggctggtatggcggcggcaaaaacaaaatgtggcataaaattgatctcgttttcttaatgttttcatttgatttgatagccctttgttaataattatgcatttgtaaatcagcatta

SEQ ID NO: 6557 - DNA, 2997 bp, Zea Mays
aagagctctcgatctagggattcccttcccgggtctcgttgctctcctcgtccaaatccccaggccagcctagcggcgcagcctgcacgcccccgccccccggaccatggccgaagaccacctctcctccgcgccgtccgccccatcggcggcggcggccgcggccgcggcggcggtcgggtcctcggtgatcccaatcgtcaacaagctgcaggacatcttcgcgcagctggggagcagctccacgatcgacctgccgcaggtggccgtggtcgggagccagagcagcggcaagtccagcgtcctcgaggcgctcgtcggccgcgacttcctcccgcggggctccgacatctgcacgcgccgccccctcgtgctccagctcgtgcaccagccgcgccgccccgccgacgcagaggccgatgagtggggcgagttcctgcacctctcggggcgtcgcttctacgacttccgcgaaatccgacgcgagatccaggctgaaacagatcgtgaggcaggtggtaacaaaggtgtatcggataggcagatacggttgaagatcttttctccgaatgtccttaacattactttagtcgatttgcctggaatcactaaggtgccagttggtgaccagccaactgatattgaagccagaataaggactatgataatgtcatacatcaggcacaagacatgcatcatcttagctgtttcgccagcaaatgcagatttagcaaactctgatgctcttcaaatggctcgggttgctgatcctgatggttctcgaacaattggtgttatcacaaagttggacataatggacaggggcactgatgcccggaactttctgctgggaaatgtgatccccttaaagcttggctatgttggtgtcgtcaaccgcagccagcaggatatcaactctgacctcagtatcaaggatgctctggctcgtgaagaaaaattcttccgtactcagccagcatatcatggtattgctcagtactgtgggataccacaattagcaaagaagctaaaccaggtatggtccaacatataaaaacagttttgccggggcttaagtcacgcataagcagtcagttgactgctgttgctaaggagcttgctgtgtatggtgatcctgttgattcaaaggctggccaaggtgctaagcttttgaacatactagctaaatactgtgaagctttctcctcaatggtggaaggaaaaaatgaagatatatcgacaattgaactctctggtggagcaaggatccattacattttccagtctatctttgtcaaaagtttagaggaggttgatccttgtgaggatgttacagatgaagatatccgcatggctattcaaaatgcaactggtcctagaagtgctctgtttgtacctgaagcagatcagcagattgcttgatccaagtcttcagtgtgcacaattcatatatgatgaacttgtaaagatgagccatcgctgccttgcaatggagttgcagcagtttcctatactccgcagaagcatggatgaagtcattgggaagtttttgcgggatggacttaagccagcagaaaatatgatagcacacattattgagatggaggaagattacataaacacgtcacacccaaattttattggtggcagcaaggctgttgagcaagcacagcagcaagttaggtctgccaaaatgtcagcagcggtggtaagaaaggacggagtggatgcacaggcttctgagaaaactcaaaaatcacgcgcgatcttgggtagaagtggtgtaaatggagtagttactgaccacatccagggggtacggcctgctgctgaggcagagagaccaggatcttctggtagtggaagcacatctttctggaatcaaatatttacttccaatgaggaccgaacacatcctcctgcaagagataacacaacaaacaaatcttatgctgtgcctgcacccaatctggaacattcattctccacgatacagttaagagagccaccagtcgtcctgaagccttcagaacaccagtctgagcaggaggcgcttgaaatagcgatcacaaagttgctattgaagtcatattacaatattgtcaggaaaaatgtggaggacttaataccaaaagcagttatgcatttcttggttaatcatacaaaaagggcgctgcataattaccttataacaaaactttatagagatgatcttttggaagacttgctcaaagaacctgatgagataaccataaagaggaagcagatacgtgaaaatctcaaggtccttcaacaagcttacaaaactttggacgagataccacttgacgcagaggcagtagagaggggtggatactccctggattctgatgcgattggtctgccaagggcccatgggctttcttcatccctccacggattcaacgatggaagctcaccatattcaaccccgaagcagtcaaggtcaaggaggtcaaaccattctggcgagcagcttcctttcaaccccaatatgagtggcaatggtttttgatgccaccctcctacgttacaagacggccaaccagattggttatggaaccaaccaaatgtgcagcaagcacaccttattcaagtttgttggcaccaatagatatatgttatttctagttaaattctttgtagcgctgcgccgatgaagcctaacatggtgcgagttttgttgtttcgccttttgtacagtatatatctttgcccagtcatttcgtcatgatatgatatcaagtgatgggtatagttttgttcggacccagggaaagcaatgggaaaaaaatctactaggtgtgtagcagtacccagcgtctgagtgactgttacggatttgccttgcaaaatagacatggctggtatggcggcggcaaaaacaaaatgtggcataaaattgatctcgttttcttaatgttttcatttgatttgatagccctttgttaataattatgcatttgtaaatcagcatta

SEQ ID NO: 6558 - DNA, 2294 bp, Zea Mays
cccgctgctttaaatctcggcgttttcgtggcgcgtgcaggcggagaggaagaggacgccaatccaaatccttatccccacgtgtgttatccttccattttgtgggcgggggtgagctcctgcctcctgccgccctgcttcgcaatcctcctccacctcgacaacgacgccgtcgcacctcgctgctcgccgccacagcggtctcacctcatcagcttgtgtcggccacgggacgcgaccgaggcgagggcgggcagtctttgtccggtcggcgatgcagaccctccgtcccgcgcccgcctccttcctcgtgccgcccgctccccagctcctccgcacagcgccgccaccagccccgagagcaaacgctgctgctcttgccgcggcgtcgcacggctggttcccctcgccgcaccgtgcctgccggcgccgtcgacgcgtgacaaggtctgcgtcgtccggtgcagctagcgccaccgtggcctccgtggatgatgccaagaaggacgtgctcatagcgctctcccaaatcatcgatcctgatttcggcacggacatcgtgtcctgtgggtttatcaaggatttggaggtcagtgaggccttggaagaggtctcatttcgtctggagctgacgactcccgcttgcccaatcaaagacgagttcgaacagaaggcgaacgaggtcgtcgcagcacttccatgggtcaagaaggtagacgtcacaatgtctgcgcaacctgcacagccggtatatggaggggagcttccagaagggctacagaagatctccaacatcatagcagtttcaagctgcaagggaggggtagggaaatcaactgttgctgtaaatcttgcgtacacactagctgggatgggagctcgggttggaatctttgatgctgacgtctttggcccaagcttaccgactatggtttctcctgaaaaccggttgctagtgatgaacccagaaagcaaatatattcttccgaccgagtatttgggcgtcaaaatggtgtccttcgggtttgctggacaaggaagggcgatcatgcggggtccaatggtttcaggagtcatcaatcagctgctgaccactactgactggggtgaacttgactaccttgtcatcgatatgcctcctggaacaggcgacatacacttaacactctgtcaggtggctccattgactgcagcagtgattgttaccacccctcaaaagctggctttcattgatgttgccaagggagtaaggatgttctctaaactgaaggttccttgtgttgcggttgtagagaacatgtgctattttgatgctgatggaaaacgttattacccatttggacaaggttctggaactcaggttgtgcagcagtttggaatacctcacctctttgatttgccaatacggccaacttttctacagcggtgtcctacgatagatccattaaagcaatcagagtgaaagtgccagattcagacgaagagttcttgctgcatccagcaacagttagacggaatgaccgatccgctcaaagcgtggtgtgtatatatgcttttcagcattcagtatgtgggatatatgtggttctaacatcagttcttaaggatggcaagtcaaaagtgtcttcatgtcattaaattgtgaaagtttcatttctacttgatcatagttggtcgccatcataaatgtacaagatctaccggatgaatggacaggggagcagaaggttcagtacagtgacataccagatgacatcgagccagaagagattaggccgatgggaaactatgcagtttctataacttggcctgatggatttagtcagatagcaccttatgaccaattggaaatgctggagcggttggtggaggctccgagtccagcagcagcgtctgcagtggcctcgtcatgatacagcagaaagaatgttcagttagcaaggggcaagaaggccgacttttagctcccagaaaatttatagctctgctacaaattttgaaagaattttacagtactgtagaaccatgctcattgaattttaaaaaaaggcagcagctttcgttcctcttaaaccattgtgcagacccccgttctcactaaaccacaggctagccttgacaataccaaaccataaaagaaaacggttactgttataaagatagttttttttcccagttatatagaaaattgatataaaactagtgacaaacagaaggtgcatgggtggatctaatatgtttgttacatatgaatatagtgaatacaagtattattgataaccattgcacatgag

SEQ ID NO: 6559 - DNA, 1439 bp, Zea Mays
gtagtttagagaggcgcagcggcctgtagccgcctctgacccgcagcagcgcctccatggctccattgccttctctatcccgactcccgagtcccggcgccatccaggttcgtgtgggggcgggcattcatggcagggcaatctgacccgcacctctccatcttctcgccctccgaggtaaccaaccccttcccttccacactgcactggcagggactatcttcgtctgtgctgctgcaggtggagttcgtggcggaggatgagatcgtcgaaatcgtcctcaacatccgcatggacgcccttaacatgatctacgggggatttcgggcccttcttcccacagattcccaccaaggtgccgctctggctcgccgtggcgctcaagaagcgtagcaagtgcaccatccgcaccccggactggatgactgttggtattggaagcggaaggagagtcgcctcgggaattccagccattgccattccactatattgaaatttctaagtgctggtgatgacatctcagatgcatacctggtgaggtctctaattgaggacatcagagatgtcagattccacaaggttaagaatggattagagacgatatctggacgcacctatgccgtaaagctcaaaaatctctctgcaatggaagtgaacattgtccgcccttttcatggtgagaactttgcaggcattctataagcacgatagtccacagatgattcagcaagcagataatgtagggaccagagcaacactagttacagaccgtggcccccagaataagcttcccttgtagatattgtttcaacttgcttgtggattctcggaggtagttgtccccataaaaaatgtgccctaagaatcttaagatgttgcgcacaaaatagttccatatcagaaagctggtacatatatataattctattctgattggttggtgacccggtacaatttataacagcttaatacattgcactgtatggaccagaaagaagacttggtacctcgttttctatttccatgcattatttattttgtcagaatattctcattttgtcatcaagcagcaatacatgatttgtcaggaaaagccccatgtctccaacttttgcagagagatctaaggcgtaggtgacgaagtcgagccacatgacaaaaacccagtaggggaccaggtagagcttgagcatctgcagagggcccatgaggaaggcgaggccagctaggagtgcgaccatggcgagccagcacgccgtggaggtggctagctagggcaggagaggaggcgtacgtacgggatgccatgactcgtccttgtccacgtggccgtggttctggtggatggaggagtgcagaatgtgaccgaccacgctgttgagtctggggttgttggagaagctgccgtggccgcagtcgtgtcccagcacgaagagcgc

SEQ ID NO: 6560 - DNA, 819 bp, Zea Mays
gcagaagcggatgaggaagcagtgtaggagagccaccctcgcttcccacctccagtgtctcatccgttccgacgacaaacacctccctttccctgcgctcccgtcttccttccagagctgccttgtctgcacatgcagaagcgccaagagcgagcgcctcatctctttatattgctctcacaccctccgtttctcgctcccacccactgccactgtacttgtgttgtgttagtgctgtgctgcgagaagaaggagaagcagaggaagagcaggtgctgagaagcctgccggcgcgcgttacgacaagcatatatgggggagatcaccaatgtcatggagtaccaggccatcgccaagcagaagcttccgaagatggcctacgactactacgcgtccggcgccgaggacgagtggacgctgcaggagaacagggaggccttctccaggatcttgttccgtccgcgcatactgatcgacgtgtccaagatcgacatgaccaccaccgtgctggggttcaagatctccatgcccatcatggtcgcccccactgctatgcagaagatggctcacccagatgacactgtcgtcctgggcaacttcaagcgtcgaggaggttgcctcgaccgggccagggatccgcttcttccagctatacgtctacaaggacaggaaggtggtggagcagctggtgaggcgagctgaaagggctgggttcaaggccatcgcgctcaccgtcgacacgccgcgccttggccgcagggaagctgacatcaagaacagctagctccatggaagcaagctgatcgtattcgtacgtgg

SEQ ID NO: 6561 - DNA, 3568 bp, Zea Mays
cgccgtcctcttctttgcccgtcggccggcgccgccgcagaaaccagccacccgagtgagctcttccagtcgtacttgtattaatcggcccactgtccggctactggtattaggttcgtgttgactggagattcagaattcatttttgtttgttgtgacagctggtgatccatctcgtgctcaaggatcggtctcgaactctcaattgtccctagagggcttgggttccgtgttgagggcgttcaaattactaccaaaaaattgggagttcaagacaccctgatgccatcagcacctggggagaaggatccacaagttataccgaggcctgcgacggggcctcctctggtgcagactctcacgcctgtcaatgcaacaggaagtcctgccatagacccgaggctggcgcagccgtcttggcctggccatgtagtactcctgcgcccttgtgcagcttggcctcctcatttgccagtcccgttgctgcttccgcaccaaaatgtggatgctctggaggatgtggctgcagcagatgttaaccctgcgatcgatagctgtgacgagaagatgttgcccaaggtgaatatgttgttcgatggtgaaagcgatgcgtatgagttctacaatgcatatgcggaaaaggtgggcttctttgtccgaaggtcaacgctctggacgacgtcaaagaacataatcactaggagaacttttgtgtgctcgagagaggggtttcgggagaagaagaagggagcaaaggaagcaaagtgcccacgtcccgaaacacgaattggatgccctgcaagcttgaccattagacttactgctaatggcaagtaccgtttgacagagtttgtgccgaatcataaccatcagctggcaacagcctctacagttcatatgctgaaaacaaagaaaatcaggcgcaaagcacgggctgcgagagaaaacctggcagatgataccgtgagtacaccagaatttgagaatgaagacgaggcatatgaattttacagcatgtatgcggggaaaattgggttcagcgtgcgcagggctagcatgacggtgaataatgagaatgttataaccagaagaatgtttgtttgttcaaaagaaggattccgtgagaagaaaagaggagcaaaaagagtaaagaaacctcgaccagaaacacgaactggctgtccggcatgtatggtcatcaggcttggaactaacgagaaatatcaagtcacagaatttgttacctgccacaatcaccagcttggagctgcagcagcttctgatcttgtcatggcatctgggagtacagaaaatgatcaagatgatggatttgatcaggcagatagatcacccgatgattctgttcacaagcaaaatctgatttatggaagtaccactctgagttccctagaaggtagaagttgcaaaagatacaagtatacaaagactccacgctcaggtgatgttggcgctacactagaatacctgcaaaaggtgtgaatcatcataagcagacagttatctttggtgctgcaattatatatgatgaaagtaaagaagctttccaatggttattagatactttcaagatggcaatgaacggaacacatcccaagacattgttaactgatagatctgttgccttaagtgaagctgttgcagccacgttgcctgctacagcccatcgttattgtgtgtggcaaatttatcaaaatgctctgcagcagctgagtcaagctttccatggttcaaaaactctagaatgcaacttcaagagatgcctatttgattgtgaggatgaggatgagtttgtgacagcatggaaggaaatgttggaaaagtatgacctagaagataatcaatggctagcagatttgttctcaataaaggagaaatgggcactggcatatggccgcgatgcattttatgctgatatgaaaagcgtccagcaaaaggaaagtttgacaagtgagctgaagaaacatctatcattggaatgtgaccttttgaacttctttgagcagtttgaaagactgttatgtgatcgtcggtctgcagagatggaggctgatgtgaatgctaatcagagtacaaagaagccaccttctatgcgaatgttaaggcaagctgccaatgcatatacaccttctgcctttaaaatgtttgagagggaatttgaattgtacatggattgcatgctctacatctgtggtgagatgagcacaattttcgagtatagaataagtgttgaggacaagtcaagagatcacttcgttaaatttgattcactcaattccatgatgaattgtacttgtaagacgtttgaatttattggcatcccatgtcgccatatgctgaaggtacttgacatgaggaatatcaaggaccttcctgcccagtacatcatgaaaaggtggaggaaggatgccaaatcaggatcctcaaatggtggttgtgctttcttgtttgatggtgaccctgacttttctcacataaaacgttataattttttgtgtcgtatgttcagtgtagcagcggctagagctgcaacttctgatgaatcatttgcatatatggaaaaccagtcaaacatactgatggatcaaatagagcaagttattcaaaccaggccccctgacatagctgatcttattggtgctaattgtgatcgaacacaaaatccagttgacaatattgtcgctgaaggcattcaaagtcatactaattttcttagtggctccactgatggctctctaacatttccattcacattgggtgctggcacattggattaccgctgactggtacctactgttaggatggcatgcaaaatgacataatggatgttctactaatgtgttggtagcttcacattggctgcagagctgcaaataacaatggtacacctactgcactggtagttggcaggcctgatattgtctgccttaacttctcacccaaagaaaggaaggattttttccccttcgccagcactcattgtatgtacttgatgggaaatgatgtttcatgaggtagcacccgaaatatcacctggttttccagcctggtgattgtgcacagggtgctcccggtaatgagggactccgcctgctgtgttgccagtttacaaggtgatgatgctgaacttaaccaacgcgagcccatctgatttttaaccagtgctgtacgcctgtagcgtaatgctgttgcgatagccttgtcatgacagttgtgcaatgtacagattttttaacccattacgtaaatatattgacatgtgatcactggtttcaaattgccagctgtgcaatgtattatgctagggagtacatattaacagctacgtagtatttatttagaaaaaaattagaacggcttacaatttggaattgaggaagaatgtgagaatggaacatgaataagaatgaggacgtgaggcaatctataaacttgctatgcaggcagtagttttcaatactctgcagtttagaataaaattgtttgtaaaatttatgttccaaatccactaggcacccaattgtactctacagtataaatttgattctca

SEQ ID NO: 6562 - DNA, 3279 bp, Zea Mays
agaagaccctccccaagtcaccgaacaagatcgtcgtgggcagcactcgccactcgctctcgcaggcggtgaggcggcgctatcagagcggacttcgccctccccccacccccacccccacgtccccctacaggtagccctgcaaccatggccgcggcggccgggctcagccgccggtgcaccgtccgctgacaagtcgacctttctcctacgacagcaaccgtcttcgtccggtcctggctgtttaaaaggagaggaaaggcaggaggaggggaggagttagtgttaagccaatgggggctattggaggcaatgagtcggtgcagtgggataaagtggctggagctgatgctgttaatggcggcggaacaagtgtgggcaggatggacaggatacaggtgctggtcaggctgaggccactgagcgagaaggaggttgcgaggggagagcctgcagaatgggagtgcatcaatgacaccactgtcatgttccggagcacgttccctgatcgacccaccgctccgacggcatacacatttgcaagtgtttttgcatatggacaaacgagtagtggaaagacttataccatgaatggagtaacagaatatacagtagcagacatatatgattacattaataagcatgaagagagagcatttgttctgaaattctcagcaattgaaatatacaatgaagctgtaagggatcttctgagtgcagaaaacactcctcttagactctgggacgatgcagagaagggcacctatgtggagaaccttacagaggttgtgttaagggactggaaccacctcaaggggcttatttctgtatgtgaagctcaaagaaggacaggggagaccttcttgaatgaaaaaagctccagatctcatcagatactgagattgacaattgaaagttctgcacgggagttcctagggaaggacaagtcaactacacttgtcgctagtgctaactttgttgatctagcaggaagtgagcgtgcatctcaggcgttgtctgctggcacgaggctaaaagaaggctgccatattaacagaagtttgcttgcccttggcactgtcattaggaaactaagcatggggagtaatgcacacataccatacagagattcaaagctcacacgcatattacaaccatctttaggaggtaatgcaagaacggctattatctgtacactgagccctgccactagccatattgagcattcaagaaatactttattatttggaagttgtgcaaaggaagtagttacaaatgctcaggtaaatgtggtcatgtctgataaagcactagtaaagcatttgcaaaaggaagttgctaggttggagagtgagttgcggcaaccagcttcaaattccagtcttgaagcattagtaaaggaaaaggataaccaaattagaaagatggagaaagaaattaaagaactcaagtcacagcgtgatttggctcagtctagattgcagaatttgctggagactgttggggaccaagtgaagcactcgggctcagggaagcgttcagcccgcagtcctccatcaattggaatatccccaggcatcagcagggatgatagttctcagatctctcacgatgattcagatcttttcaaggacgtgcgatgcattgggaccagtggaacaggaggaaatgaacagttggacctgtcagctggtgaaagcagtagccttcaaggtttaaacatgaattctagtttgcatggaagcggttcaaatgcatcagtgaattctaggcgctcaaggctccttagtgaatctcctatcacattggagcagcatttggagaatatcaaaaggccttttgttagtcttggcagagatctaggatcgtcgacacataactcatcaggctccagaatacttggtagaagcaggagctgtagatcacttatgggttctaccatgtttgatggcatggagatggatgatggcacccctctgcatagaagtttggttggtttccctggaaggcctgaagggaatcatagaaggggatcaacaccgaaccatgacgcagaaagtgaaactctttcaagagcaggatccgtagtttcaaccaagacaaatgctgcatgcgatgcagagtttactggtataggtgaatttgttgctgaactgaaagagatggctcaggttcattaccagaaacagttaggcaatcagattacaaatggagaatttgtagacataaagaacattggtttggacccgattgctgatgcttcgcaatcaccttctcgctggccattagaattcgagaagaaacagcaagagatcatcgggctttggcacgcgtgctgtatttccttagtccacaggacctactttttcttgctattcaagggagaacaagctgattcaatctacatggaagtggagctccggaggctatcattcctcagagatacctactctcggggaaacacccctagcaatgcggtggtaggcagcttgaactcttcccccgctgcgagcgccaagaagctgcagcgtgaacgggagatgcttgcgaggcagatgcagaagcggctcacggcagaggaaagggagcgcctgtacaccaaatggggcatttcgctggactccaagaagaggaagctccaggtcgctcgccggctctggaccgaggccgaggacctagaacatgtcagggagagtgcctcccttgtcgccaagctgatcgggctccaggagccagggcaagtcctcagggagatgttcgggctcagctttgcgccgcagcagcagccgccccctcgccggcgatcctccaatggctggagatacgggatcccttcgttcggctgatcggatcggatgaacggtgcgagcgactgacctaagagatgtaactaccctcccccccactttttttttattatcttggtgtggtgtacggtaccttctgatttctgtagttttttagtaggatacctaccgggccatcatttgtttgtgcggctggcttcgtgcatgcttttctgcctagccgccgccgatcaggcctcaattgctgacgacatcgtcctatcctacgaccgtaattgtaattcctgactcttctgtgttatcgtgttgacgtgcgctgcaacagcgcaatagtaacgtgatgttccattccatcaggaaaaaaaatcactgggactggtccctatagctaatcatggtcatctaccgtgaactcatgatatttgtctgtctgcatattgaattactgcataaatttagaagtaaatagttg

SEQ ID NO: 6563 - DNA, 2449 bp, Zea Mays
ttacatagcccgccgccaccgaaccagttgcttgccgccggcctccaccagctgctagccgtcggccaggccctccgccatcaggaagctgttcgttgccggccccgctctccaccagcctgaagccccgttctccgccgcagccccgttcggctgctactgctgcagcagctttcatccatccaggcatccggcgacaagcagttgcatattctcataacagtggccttgcctatcagctcaacagggcaacaggcctgagcggctgccttggctggggactggggtgaccgtgacctacaggaggagcgttcgctggcgaagagccgaagacagagagctcgagcgagaaagaacaagggcaaatgagggactccagctccggtccagcagattacgagcggcgttaagggcttaaggcaagtgtgtgtgagtgtgtctcggtcccatatctgaaagagtgcaacgttgatgaacaaaagtgaaaacggccatattggtagtctcatttttgcaataagctcatcaaaaagatgcttcttcctcgaaagcttctcccatggcggcgccccgctcaggacgcccaggccctggcaggccgcctcctgcgctcctcttcatcctcctttgaccccgacgacgacgaccctccgttcacgcgggttcctaagctcccacctcgggcgccatcgacgccgccgccgaagcccaaggccctggcgggcaagatcaggcccgatgagcctgcgcactccgaccttccctttgacttccggtactcgtactcggagacagacccgacatggaggcccatcggtttccgcgagcccacccggttctcgcccttcggccccggccgcctcgaccgcccatgggacggcacagccgcggcacgcgtcggcgattatgctagtggcgacgagaggatccgggaggaggttctcggggaacctctgtcggaggaggaggtggcggcgctggtggagaggtaccggcacagtgattgctcacggcagatcaatttggggaaaggtggggtaacacacaatatgcttgatgacatccacaaccattggaaacgtgcagaggctgtgaggatcaaatgtctgggagtgccaacgctcgacatggacaacatttgcttccatctcgaggataaaacaggcggcaaagtcgtatcccgcagcataaacatcattatactgtaccgcggtcggaactatgacccccagaaaaggcctggcgtaccattgatgctgtggaaaccgttagctcctatctatcctaagctcgtgcaaaacgttgctgaagggttgactttcgaggaaacaaaagagttgaggaacagaggattgaattctccaccacttacaaaactgactaggaacggtgtctatgttaatgttgttgataaagtgagagaagcgtttaagactgtggaagttgtccggctagattgcactcatgttgggactactgactgcaagaaaattggtgtgaagttgagggatttggttccatgcattcctatattatttaaagatgaacagattatactatggagagggaaggttcgccaagagcgttctgtttcagcagagtgcagttccagcccacaatgatgcacgcatctgccggtgattcacaggagttattattgcgctgcgatattgatgatggttcgggcggattgctgtctgtggaccgtggtgggggcgaggggcgaggccgctcaccagtgattcagtgaagaagaaaacaaaccaacacatttgtgtaatcaactttgatgaaacttcaattgaggagcggcacaaacatggtgaatatggcacttagatgcattgtttcgatgaatccagggtatatgacacggacatgatccagtgtggtctgatgctaactgcaccgacaacagcgcacgcttaggcaggagcgcgtgcggcgggcgcccggtgtgtcagctacctgggaatagatcccttggtcagagtggagaggaacggtggccgtaatacgtggggcccaggtgtttcaaaagttcacgcagggagccgaagcgcgtgcgtgcccacgagcgactgtcccgctctgcaatttgaggtcttgactcttgagcaacagccagctagatagcggtagaatggaacagcatgtgacgaactcccacagaatcgagcatacactcccaagtcccaaggctgcaaaccttccacgcatcttccgttctctttctcttttttatttgacacggtttacttcaaaaataaactaacgggtgacaaatatccgagaacaaaggtagtattattttacgtcccagctatctttttagttgttacatgtaaactggcaaagcaatcacaatgcagctaaacataacatcacattctactttgttgtactagccctgcaatatatttgtacactgatgcagagaacattcttc

SEQ ID NO: 6564 - DNA, 2741 bp, Zea Mays
ttacatagcccgccgccaccgaaccagttgcttgccgccggcctccaccagctgctagccgtcggccaggccctccgccatcaggaagctgttcgttgccggccccgctctccaccagcctgaagccccgttctccgccgcagccccgttcggctgctactgctgcagcagctttcatccatccaggcatccggcgacaagcagttgcatattctcataacagtggccttgcctatcagctcaacagggcaacaggcctgagcggctgccttggctggggactggggtgaccgtgacctacaggaggagcgttcgctggcgaagagccgaagacagagagctcgagcgagaaagaacaagggcaaatgagggactccagctccggtccagcagattacgagcggcgttaagggcttaagcttctcccatggcggcgccccgctcaggacgcccaggccctggcaggccgcctcctgcgctcctcttcatcctcctttgaccccgacgacgacgaccctccgttcacgcgggttcctaagctcccacctcgggcgccatcgacgccgccgccgaagcccaaggccctggcgggcaagatcaggcccgatgagcctgcgcactccgaccttccctttgacttccggtactcgtactcggagacagacccgacatggaggcccatcggtttccgcgagcccacccggttctcgcccttcggccccggccgcctcgaccgcccatgggacggcacagccgcggcacgcgtcggcgattatgctagtggcgacgagaggatccgggaggaggttctcggggaacctctgtcggaggaggaggtggcggcgctggtggagaggtaccggcacagtgattgctcacggcagatcaatttggggaaaggtggggtaacacacaatatgcttgatgacatccacaaccattggaaacgtgcagaggctgtgaggatcaaatgtctgggagtgccaacgctcgacatggacaacatttgcttccatctcgaggcggcaaagtcgtatcccgcagcataaacatcattatactgtaccgcggtcggaactatgacccccagaaaaggcctggcgtaccattgatgctgtggaaaccgttagctcctatctatcctaagctcgtgcaaaacgttgctgaagggttgactttcgaggaaacaaaagagttgaggaacagaggattgaattctccaccacttacaaaactgactaggaacggtgtctatgttaatgttgttgataaagtgagagaagcgtttaagactgtggaagttgtccggctagattgcactcatgttgggactactgactgcaagaaaattggtgtgaagttgagggatttggttccatgcattcctatattatttaaagatgaacagattatactatggagagggaaggttcgccaagagcgttctgtttcagcagagtgcagttccagcccacaatgatgcacgcatctgccggtgattcacaggagttattattgcgctgcgatattgatgatggttcgggcggattgctgtctgtggaccgtggtgggggcgaggggcgaggccgctcaccagtgattcagtgaagaagaaaacaaaccaacacatttgtgtaatcaactttgatgaaacttcaattgaggagcggcacaaacatggtgaatatggcacttagatgcattgtttcgatgaatccagggtttgtgaatttagaccgtttgagaaagtttttgtagaataaagctcagcctgttcatttgtttaatctttatcggctgtttttacattgttttgtttctatcaattgtagctacaataattcgaacaactgactttaatataaagcgaacaactctactgttttttaatgaatatatatatgtggagctctaccaactaccaacagttgtctgtttttttatgatttttatatatcatataaatagatattaaattatgtataaatagatattaaaatatgtatttaaatataattattgtttatttttaaatactaaggtatgtgtagtttgatggttagccctaaattaatagagtaggagacgtgtgctcaaatgcttaatttgcagtattttattttttatataattattggttatttttaaacacaaggtatatgacacggacatgatccagtgtggtctgatgctaactgcaccgacaacagcgcacgcttaggcaggagcgcgtgcggcgggcgcccggtgtgtcagctacctgggaatagatcccttggtcagagtggagaggaacggtggccgtaatacgtggggcccaggtgtttcaaaagttcacgcagggagccgaagcgcgtgcgtgcccacgagcgactgtcccgctctgcaatttgaggtcttgactcttgagcaacagccagctagatagcggtagaatggaacagcatgtgacgaactcccacagaatcgagcatacactcccaagtcccaaggctgcaaaccttccacgcatcttccgttctctttctcttttttatttgacacggtttacttcaaaaataaactaacgggtgacaaatatccgagaacaaaggtagtattattttacgtcccagctatctttttagttgttacatgtaaactggcaaagcaatcacaatgcagctaaacataacatcacattctactttgttgtactagccctgcaatatatttgtacactgatgcagagaacattcttc

SEQ ID NO: 6565 - DNA, 2103 bp, Zea Mays
tattttagaaacaacattatcccctgtatttatcagtattaataatacagcatgtcgtgaaaggtagagaagatagagagaaaagaatatcagcagaaactgtaaaaagcagtccgatttcagtagctcagttgacgccctgcagtttcagtgttggttctgtacatagcatgggcggcaatactgcgatatcagcagtgccgtgccgcaatgaaatgctgaatcttatgaacaaagatgtcgcgcagaattcagaaattacccttgcctttcgtaataggtacaagcatcaatcaagtgtccgaaagcatcccattcgtctgaagcaggggagggatgctctgctcgctccagaacacctggtcgggatccacctcggccttcaccatggccagcctcctgaagttgcccctgaagtacatctccccccacgccctggccgcctcgtagctcgtctccccctccaagttctgccccaggtccaggtccctgaagttgacgtacgccgcccggggcctggcgctcgcgtacggcgtcatgaaccggtgcacgccacgcacccacgccaggtaccctcgccggtgcgcgtacggcgtgtccgactccggcgtctcgctcatcgccccgccctgcgggtccacgtcgacggacccgcccctgtcctccacgaccctggcgaggagcccgcccagcccggccgcggggatcggggacgtcaggtgggcgctcatctcggcgaccatcccgctgcagttcccgaggaacagtgacttgaaggtcaccgatggatgcctctcgccggcgtcgtcgacctccggctccatggccaccttcacgaacaggtcctcgggaagcgcgtgcgccacgcgctgccattttgtcaggaggcggacagccgcctgggtctgccgctggtccccgcggcgcacgaggcggcgcacggtgaaggcggaaacgacgggcggcacgggaaccagccgcaccgtccaggagaccacgacgccgaagctcccgccgccgccgccgcggatcgcccagaagaggccctcgcccatggcggcgcggtccaggagcctcccctcggcgtccaccacctcggcgtcgaccacgttgtccgcgccgaggccgtgcttgcgcatcatgggcccgaacccgccgccgctgaggtggccgccgacgcagaccgtggggcagatccccgcggggaacccgagcgccccgccgctctcgcgcgtcacggcgtagtagagctccccgagcgtggcgcccgggccggcccgcgccacgcggcgcccggcgtccacgcggacgtcgcggagcgcggcgacgtcgaccacggcgaagggccgggcgcccgccacggatcggtaggagaggccctcgtagtcgtggccgccgctgcgggcccggaccgtgaggccgtggcgcctgcagcaggtgacgcaggcccgcgcctcggcgacggtcgccggggtcagcagcagcgccgggcgcggcgtccgcggggacgcgaagcggaggttctggatcgtggcgttcagaagggaagggtacgaagcggccgacggggcgtggacgagcctggacgtgtcggtggtggccggcgagaggcgcgcgacgcagcggacgaagctcccgtggagggcgccgccgccgccttgctcctgcggggaacaagtctgggcgaggagcagcaggaagaggaaagggaggtgccaggatcttggtcgcacagccgccttcgtcttgctcatcatctcttgcacttacacggcataagataattcgcggcagcagcaggtgggaaagagagcggtcgccgttgcaccgtcgttttcaggtgccgccagctttcaacgttagctcaccgtcactggtggcgtttcctgtatgcgtagggaaggggtatcgaggtgagtggcattgttgagatgaagacgatggcagctgacgggcgctctgcagccatgtatgatatgtattggcatgttctaggccagaaaggggcaatcaaagatacttgatgtatgtgttgtatgtgttttatatatgtatgtgtctagatttattatcgatcatttaaatagacaaaaaaaatcaaca

SEQ ID NO: 6566 - DNA, 1442 bp, Zea Mays
tcctccagctgccttgcgaaccccaacacttgtgtcacaactcggttcctgctccagctccacacctccttatcgcaacgcgagcagcagttgcattggaggcgaggaggagccacgccggggctcaaggaatggccgctctccgccacctcgccgccggccccacctgccaccaccaccaccaccacggcgtcgcggcagccaccgcctccctccggctccatcgcctccccctccccttccgcccccttcgctcccgctccggctccttcaccagggtttatgcgatctccagcaatgacatcagggtcggcaccaacgtcgaggtcgacggcgcgccatggaaagttctagagttcctccacgtcaagcctggaaaaggcgctgctttcgtcaggacaaaactgcgtaactatgtaactggcaacacggtcgagaaaaccttccgtgctggaagtacggtaaatcattcacacctcaaaccccacgtcttctgaacatgacaagaattcagcacttgttatattcctttccccgctctgtgcctgttctagtactacaaatgtttttttccttccttggaacaaattactgtacatgatgtagctttcttctgttacataattcaattcacaaatttcttgcttttttttcttaatttctgcggttgaactctggtatgacgtagtaccattggcctatggtggactgcccttgcttcaccaatacatgttttatgttcgctctatatccctcagtgttttactgttatgcaacgactaatagtcacttcattgaaactttcagctacaggaaccatccctttcaaaggagaccaagcaatttacatacaaggatggctcccagttcgtgttcatggatctgacaacatttgaagaaagtcggttaaatgaagcagatgtcggtgacaaacaaaaatggctgaaagaggggatggactgcaatttgttgtactggaatgggaagatcattgatttcgacctcccaatcactgtgaggctgactgtaactgatactgacccaggggcaagtgatagtgcgcaaggaggaacaaagcctgcaaccctggaaactggagctgttgtcactgtgccctcttttgtgaacgtaggcgatgatattctggtggattcaagaactgggcagtatatgaatcgagcataacgaattgaagaggatttcggatttgaggagagtactgcttttttgtttgaccattttagtcccattcacttgtacaaacgccctgggtctttggccccaggaaatttacatttctgctgcatgtgaatcctcactctgattataaccatgtacatctttggtttccagatataaggaaaattgtgttcagatttttaaagctgaaatctcaaactctgattataaacatgttactactgaccacaaaacatgagcaa

SEQ ID NO: 6567 - DNA, 2223 bp, Zea Mays
cgacctattttgacaaattcctccaccgctcatcctctcccgcgcgcttgcccctttccgcttggccttccgcccctcctcttctccgcacggagcgccgccacagatccagcaaaggcaacgctgagatccctacgacttcgaacggcctgtgacctgtggatctgtgccagcctgttggtcgagctacctgctccagaccgagcagcccgtgttaaagctagctaaggaaacagggcctaagtgagctcagaggaaaaaaaggaacgcaatggaggaagggaacgtgcgggtggacctcgacaagctccccatcaagcgccttgaggccattgaggagactggcaacgagcactacccacctgacactagcaacgaggagcagcgactcgcggccatccgccggattgacttctcctgggtcatagagaaggatgcaaagaaggccaagaaggcggctgaggctgacactgcccagcaggcatggccctggcagggccttatggagagcctgcagcaggcacatcaggagctctctgtcgtcatagacctcatcggcacggttgaggctaacgacgctgtggcagtcgcctcgacaacgaagcccaagtcgcagccaaatgaaatactggttgacatggcagtctctgctgccaccaagctccagcgccttaggcatttgtcatggtacttcaaacaatctgctaagactatggagcaacaattccaaaaggagactaggttctacggctccttaataagattgcagcagaactggaaagtgaagcggcagcgggctgttgggagtccaggaagtgaaggcttcatgtttgatctagttgatagttctcagctagacacaacaacagtgcttcgattatcaccattatctttaattccgattgatcaagactcttcaggcactttgtctgtacaaattccacagaagtctttgcgttccttgagccttaaatttcatggagacatagtcaataatgcagaaagcagtgctatcaaaaagaaagaaggcacattaaccaacactactgctgaagccgaaaaggatgttttggcagatgatgatgtcaataagtctattagatatgcacattccatccttcgtgacatccacaagtccatatttgaggagcaggttccatgaaattcttaggaaactcagggagaaatctcgtcatgtggttcgctaccagagttctgctcaggctgcacctgacgattgtggcctgctaagccatttttgcatgacagtggctcacaggatattttctaacaaagtacatttggagctggaaagcgtggttagtagggttccttatctccatctgcgttcccttcctacatggcattctcgaacttcttcctggtctctctgcttgaaagttcctcagcctatcctggccaccggtcgagtcacaaagccttcagactatcacgagctgaagtacaaatccaggtcgcagtttagtacaaaggtgatcttgaaagatggccaaattagtttaatgggtgagggctccccaagcattgttgggtccttgactgggaagccatctgattcacgtctgataaatagttacaattgtgacttggaagacctcccaatgatgcttctgcagcaggtcgccagtcaagtaatccactggctccatgatgaagcgatgattcttgggatgaacgtgaccagagatttcctgtgcctgtactttgaccttggccaaggcgaaacacttggtctattggcacatgtcgacccggatgacacctatggctgcatctcatggtacctcactgttgaacacccaatggaggaggggaagatgtcagctggcagtccagagtcagagaagcgaaggtttttggggtacctttccctggaagtgctttactctaccctgatggacctgataaaattgtgcagcacaagtgatcaaattcgtgcctcttgatcgacataagtggatgaaatgatgtatgtccgtgcagtgtttaagagtatgtaaattgaggcattatgtgcaccttttgtttgctaataggatgtttggcttgaaaaatggagtccatcctctcactcttcagtatgtttgtttggttcatgaatgaaataagctgatacatcaccatcttatttcactaagttaataattagtattagcatgtggaataaagttgtctcgctactctattaaaaaaaagttccag

SEQ ID NO: 6568 - DNA, 2666 bp, Zea Mays
attttgtagagcgtaagtacgagcgacctattttgacaaattcctccaccgctcatcctctcccgcgcgcttgcccctttccgcttggccttccgcccctcctcttctccgcacggagcgccgccacaggtgattgctagggtttcggggccgccgcctgcagcagccctaccgccagcgctcctacgcctgtgtccctgttcctctccgtcccgttctgccggcgtaccacggctgacggccgacgccctgcagatccagcaaaggcaacgctgagatccctacgacttcgaacggcctgtgacctgtggatctgtgccagcctgttggtcgagctacctgctccagaccgagcagcccgtgttaaagctagctaaggaaacagggcctaagtgagctcagaggaaaaaaaggaacgcaatggaggaagggaacgtgcgggtggacctcgacaagctccccatcaagcgccttgaggccattgaggagactggcaacgagcactacccacctgacactagcaacgaggagcagcgactcgcggccatccgccggattgacttctcctgggtcatagagaaggatgcaaagaaggccaagaaggcggctgaggctgacactgcccagcaggcatggccctggcagggccttatggagagcctgcagcaggcacatcaggagctctctgtcgtcatagacctcatcggcacggttggttgaggctaacgacgctgtggcagtcgcctcgacaacgaagcccaagtcgcagccaaatgaaatactggttgacatggcagtctctgctgccaccaagctccagcgccttaggcatttgtcatggtacttcaaacaatctgctaagactatggagcaacaattccaaaaggagactaggttctacggctccttaataagattgcagcagaactggaaagtgaagcggcagcgggctgttgggagtccaggaagtgaaggcttcatgtttgatctagttgatagttctcagctagacacaacaacagtgcttcgattatcaccattatctttaattccgattgatcaagactcttcaggcactttgtctgtacaaattccacagaagtctttgcgttccttgagccttaaatttcatggagacatagtcaataatgcagaaagcagtgctatcaaaaagaaagaaggcacattaaccaacactactgctgaagccgaaaaggatgttttggcagatgatgatgtcaataagtctattagatatgcacattccatccttcgtgacatccacaagtccatatttgaggagcaggtatttgatatggtgatccgggagacgtttaaccagtctcaaggcatcaatgttactgggatgtgcgaagattttctccaattagctattggccaggagtgttcgttgtgcctttcgcttgagctctctggacagaacaataacgcaggaacagtaggacagcaagatcatatggatacaaattatcctggaaatcttgcagtagccactgtaaatgggaaggagtcctcaaataaggatgtgagagggtttcctaaccccaaaagcttagaaatctacctgctccatatgttccatgaaattcttaggaaactcagggagaaatctcgtcatgtggttcgctaccagagttctgctcaggctgcacctgacgattgtggcctgctaagccatttttgcatgacagtggctcacaggatattttctaacaaagtacatttggagctggaaagcgtggttagtagggttccttatctccatctgcgttcccttcctacatggcattctcgaacttcttcctggtctctctgcttgaaagttcctcagcctatcctggccaccggtcgagtcacaaagccttcagactatcacgagctgaagtacaaatccaggtcgcagtttagtacaaaggtgatcttgaaagatggccaaattagtttaatgggtgagggctccccaagcattgttgggtccttgactgggaagccatctgattcacgtctgataaatagttacaattgtgacttggaagacctcccaatgatgcttctgcagcaggtcgccagtcaagtaatccactggctccatgatgaagcgatgattcttgggatgaacgtgaccagagatttcctgtgcctgtactttgaccttggccaaggcgaaacacttggtctattggcacatgtcgacccggatgacacctatggctgcatctcatggtacctcactgttgaacacccaatggaggaggggaagatgtcagctggcagtccagagtcagagaagcgaaggtttttggggtacctttccctggaagtgctttactctaccctgatggacctgataaaattgtgcagcacaagtgatcaaattcgtgcctcttgatcgacataagtggatgaaatgatgtatgtccgtgcagtgtttaagagtatgtaaattgaggcattatgtgcaccttttgtttgctaataggatgtttggcttgaaaaatggagtccatcctctcactcttcagtatgtttgtttggttcatgaatgaaataagctgatacatcaccatcttatttcactaagttaataattagtattagcatgtggaataaagttgtctcgctactctattaaaaaaaagttccag

SEQ ID NO: 6569 - DNA, 2450 bp, Zea Mays
gtggacccgagtggctgagtccacctctgatgctctgacctccgcctcctcctttctctcgtcgtcgtctccacgacacctcaaccccaatcagaacccggacccagatctctaaaaaatccccaatcccaatctgccgtacgccgttgcgatcatacctccaaatccgcccccaagtctgttcgatgcgaatagcacctgcgatttagcgaaccgtgcgctcgctaggtttagggtttcgagggtttgcgttagggtttgggcgcacgatggggcggtcgcgaggggtgctgagttccggcgacgacgacaccgggcacaggtcgaagcggaggagagtctcgtcgggcggggatgcgacggactccatttcagcctccatcgggggagctggagagggagggggcaagaaggcgctctatcactgcaactactgcaacaaggacatctccgggaagatacggatcaagtgctccaagtgccctgacttcgacctttgcgtggagtgtttctctgtcggcgctgaagtcaccccgcaccgcagcaaccatccttacaaagtcatggacaacttgtctttcccacttatttgcccggattggaatgcagatgaagaaattctcctccttgagggaattgaaatgtatggtctgggaaactggcttgaagttgcagagcatgttggtaccaagtctaagttacagtgtattgatcattacacatcagcatacatgaactcaccttgttatcccctcccggatatgtctcatgttaatggcaagaataggaaggaacttctagctatggctaaagtacagggtgagagtaaaaaagggactttgctgttacctggagaactcactcctaaggttgaatctcaattttctccctccagggtcaaggtggaagatgcacttggagaaggtccagcaggtcgatcaccttcacacatggctgttggtgcaaataaaaaagcttcaaatgtgggacatattaaggatggcgctactgtatcaaaagtcgaagagatatgctttctcaagaacgtctttttctgtaatttgagttctattaagaaatgaaatggtgatagtctcacgttacgacatgatgttcatgtagatagaagtgttggtgtgaagaagcccagatattctgcagatgaaggcccttcgttgactgaactgagtggatacaatgcaaagagacatgagtttgacccagaatacgataatgatgccgaacaagctcttgctgagatggaatttaaagaaactgattcggaaactgatcgtgaactgaaactccgtgtgctgcgtatttacctctccaggcttgatgaaagaaaaagaagaaaggagttcatattggaaagaaatttgttgttccctaatcccttggagaaggatcttacgagtgaagacagggaactttaccatcgctataaagtcttcatgcgttttctttctaaggaggaacatgaagccctcgttaggagtgttattgaggagcgaaaaattcggaggagaattcaagaactccaggaatgccgttctgctggatgccgcacactggctgaagcaaagatacacatagagcaaaagaggaaaaaagaatacgagctgaatgcgcaaaaagctaaggatagcagtcaacttaatgcaaataataaatcagtacaaaagatgaatcgacctatgaaaattgagtccgatgggaatttggatccaaagaaaggtggtgctggcttggattctcctaagacaacaggacctacaagtgttaagcagtgggatgactgggatatagttggtcttcctggggcagagctattaagtgctagcgaaaagcttctatgctgtcagaacagattgctacccagccattacctgagaatgcaggaggtgctgatgcaggagatattcaagggtagcgtcctaaagaaggaagacgcccacgtcttatttaaggtcgatcctaccaaagtagatagtgtttatgatatggtatctaaaaaactgggcaaccatgaggaggccccaaccgtctagcttacgcttttgagcttgcctgctgtgacatgccgaaggaaacaaatcttggtctggcccttcgcagcgtgtctgaatcagggctgaaggtggtggaaccatactaaatcgaatcggccatagttagctgaaattcatatcagctgtcagtagcacagtaaggcattcccgccaagctgtaaaattattgccccgacgagaatgtgtagcatgaatttgaatttcttttctgctattgctgtgtactgttgcagggtagtgccttattgtagtatatgtataggtgcctgagttttatgtatcatcgtgtatgtaccatttgggcgctctatttatgccattgtaccaaccccaaacatcgattattataattcatctcgcagccaaattcttgtctct

SEQ ID NO: 6570 - DNA, 1796 bp, Zea Mays
tcgcggttctaccgctccgctcatgcccgcggccgaaccctcccccgcatcccacagccgccgacgctcaccttccatcctccccgcagcccgcagccgccaacgctcaccttccatccccgcggatcccacgctccctcgggcgctccttccgcgcccgcccacagatctcccatcgacgtcgatgctctgcgattaagcccagctaaactcgcgcggtttggctttggcgcagcgctggagctctcgagacgctcgcttggcgccgaagcggacgaggagcagttgtcggcgtccgctgccgtgtcctcagctccgccatctccttctccagctcgacgatcctctgcttcctgctcgtgaactccagcgcggcagcgtcgagctcggcgcacagccacccgttctcggcttccacccgctctgcggtgtccctgcacctctggagctcggtcttcttggccgcgagctcggcctccaggactgcgccaaagccaaactgctactgctacaactccgccgtgctctccatggaagcttctgcgcctagatcaacagcgttcggccgctggtgcccggcgctaagctccacgccgtcatcgagcgtggcacagtgattccgtcctcgacctccccttcctctgcaacatgtccaggaccgggaactagtagtgggaggatcaccgtccaccgtcgagcgtctgcaaggcaaatcagatcaaccaccacatcggagtgaaaagtctgcgccactctgcctcacacagccaaaaaatgtatcaggtgattaagaaccatcccagctcattgaagctttatgagcagaaactgctaggaacgagtgaagtcatgaaagaagatgtccagaggatccatgacaaggtgaaccgaatcttgaacgaagagtttgctaagagcaaagactacgttcccaacaagagggattggctctcagcttactggactggctttaagtcaccagagcaaatatcacgtgttcgcaacactggagtgaagcctaaaatactgaaacgtgtaggtcaggcaattactacactgcctgaaaacttcaaaccacatagagcagtgaagaagatttttgagctgcgtgcagctatgatagagagtgctcaaggaattgattgggctgttgccgaagccctggcctttgcaacacttatagtggaaggcaatcatgttaggctaagtggacaggatgtggaaagaggaactttcagccatcagcatgcagttctgcatgatcaggaaactggagcaaagtactgcccacttgaccatgttgcaatgaattaaaatgaggagctatttattgttagcaacagagactagttggagcttcattgttgatttttgcaaataagcaagacatgcaaggagctctaaaaccaactggaatcacgaaggtttaagaagcgctccgcggacttccacggccgcgccgccgatctcgtccacggcctccggggcacggcgatgcccaggagacaggccctcaaggaagagcagtgcagagaagagaaaggtatctcgactattccaaagcacaagtatgcatccaaagcctgttccccaaaaggatcgaaaggaacttcaacctgaaccagcgagagtatcgatacaaagactgtttgaaatcttctagaaatgacatcgaatggaacttcaagctgaacaagcgaaagcatctatacaaagactgtctgaaatcttctagaaacgacatcgaaaggaacttcaagctgaacaagcgaaagcatctatacaaagactgtctg

SEQ ID NO: 6571 - DNA, 2120 bp, Zea Mays
tcgcggttctaccgctccgctcatgcccgcggccgaaccctcccccgcatcccacagccgccgacgctcaccttccatcctccccgcagcccgcagccgccaacgctcaccttccatccccgcggatcccacgctccctcgggcgctccttccgcgcccgcccacagatctcccatcgacgtcgatgctctgcgattaagcccagctaaactcgcgcggtttggctttggcgcagcgctggagctctcgagacgctcgcttggcgccgaagcggacgaggagcagttgtcggcgtccgctgccgtgtcctcagctccgccatctccttctccagctcgacgatcctctgcttcctgctcgtgaactccagcgcggcagcgtcgagctcggcgcacagccacccgttctcggcttccacccgctctgcggtgtccctgcacctctggagctcggtcttcttggccgcgagctcggcctccaggactgcgccaaagccaaactgctactgctacaactccgccgtgctctccatggaagcttctgcgcctagatcaacagcgttcggccgctggtgcccggcgctaagctccacgccgtcatcgagcgtggcacagtgattccgtcctcgacctccccttcctctgcaacatgtccaggaccgggaactagtagtgggaggatcaccgtccaccgtcgagcgtctgcaaggcaaatcagatcaaccaccacatcggagtgaaaagtctgcgccactctgcctcacacagccaaaaaatgtatcaggtgattaagaaccatcccagctcattgaagctttatgagcagaaactgctaggaacgagtgaagtcatgaaagaagatgtccagaggatccatgacaaggtgaaccgaatcttgaacgaagagtttgctaagagcaaagactacgttcccaacaagagggattggctctcagcttactggactggctttaagtcaccagagcaaatatcacgtgttcgcaacactggagtgaagcctaaaatactgaaacgtgtaggtcaggcaattactacactgcctgaaaacttcaaaccacatagagcagtgaagaagatttttgagctgcgtgcagctatgatagagagtgctcaaggaattgattgggctgttgccgaagccctggcctttgcaacacttatagtggaaggcaatcatgttaggctaagtggacaggatgtggaaagaggaactttcagccatcagcatgcagttctgcatgatcaggaaactggagcaaagataaagagactagttggagcttcattgttgatttttgcaaataagcaagacatgcaaggagctctaaaaccaactggaatcacgaaggtaagcgaacttcagtcatttattatatgcattagagacatgttttcctatctatgacatcatttttaacttgtactatgtttttccggtcctcatggttgccaagattttacttagttcgatgtgggagcaaaaggatatgccaaattgaatgtagtttcatcaattatgctcaattatggatgttcagaggcatccaatttcagtgtgtactgcaatacttgggtccacctgtacttggtttaagaagcgctccgcggacttccacggccgcgccgccgatctcgtccacggcctccggggcacggcgatgcccaggagacaggccctcaaggaagagcagtgcagagaagagaaaggtatctcgactattccaaagcacaagtatgcatccaaagcctgttccccaaaaggatcgaaaggaacttcaacctgaaccagcgagagtatcgatacaaagactgtttgaaatcttctagaaatgacatcgaatggaacttcaagctgaacaagcgaaagcatctatacaaagactgtctgaaatcttctaggtaacaacagccatgacttcgaacatattgtattctaccttttcagattttcttgtttttaatggtatcacaattattgtgctattgtgaataaaccacttgtaatgctgttttgctcagttttttcgtgttgtacataaatcattttatatttatactgcgtcacaataatttactgatgtgcaaatatgatattgcttt

SEQ ID NO: 6572 - DNA, 1677 bp, Zea Mays
tgtgccggaccgacgagataagtcatcagatgacgtgagaagcagtcaggcgttggtgcttgcttatatagctgcgctgcctgcgcattcacgccacagcgtcctcccctccccgtcctccctcttcttcacaccactcacagctcacaggtcctccccctcctcctcccgggctgccattgctgccgcccggccagctgattcaagtgcagatgccgaccatcatcgtctcggtggacctggaatgcagccgctgccgtgccaagatcgagaaggtgctcaacaggatccaagggtgagttctgcatcgacgacatcgacttggacgagaagagcaacaaggtgaaggtgacggggcccttcgacccggacaagctcgccgacaagctgtgctgcaaggcgtgcaagatcatcaagcagatcgagatcgtggagccgccgccgccgccgccggagaagcccaagaaggaggaacccgccccgccgccgccgaagaagaaggaggagccggccccgccgccgccggcgaaggtcgagccgccaccgaaggagaagcccccgccaccagcaccgaaggaggagccaaagcccgccccggcgccggcgccgccgcccaaggtggtggaggtcccctacccgtggccgtacccgtgcccgtacccgtacccggcgtggccgtccgactgctgctgccaccacgggcacggcggctgccactgctgctcctgcggcaaggcccccgaggccccggcgccgcccccgatgccgcagtacgtgccccagccgtacccctgcggcggcggcggcggctaccggatcgtctgcgatgaggacccctcctacgcctgcgccatcatgtgattcattgtcccgttacgcgcccacaacccaccacaccagtgtcagtcatctcgtcatgccgtgccgtgccgtgcctcccgtataatcgccgtacagattcatcatacacacacacacactcatattatatatatatacacagcatcatgtataccgtacgtacgtccgtacctgtaccgtctccttagcttgcgtgttatgttgtgcttcaattaagtacggagtatcatatagtagtacatatatgttaggcaaagtgagagaataaaataagcgatgatgatgttggttttccgtgtataaagaagaagaaaaaaaaaaagacaaggcgagagtgagagagttggcgtgttggtggcagcagaaatgtcaattttgcgcagcagcctccctttctttatgttgcgccaagaggtggtgaaaaaacggggggggggtcctttttatcgacgctttcgacgacctccactttcgttatctcgcttccatttccatctgtggggacgagcgatgtgacgtggccatttctgtttagatcatgtaaagataggaggaagacgatgttgaaggggtgcatgactgggcgggcgttgctaggctaggctaagggcctgtttgtttacccccatggattatataatctggattatttttggaggattatataatctggattatataatctggattatataatctcggtagtcctgtttgtttacccagattatttgagttgttaatatgattcttttgtatgagaaagacaagaatgccctctatatttgtactaggttgaaactcatatatgaaaaaaaa

SEQ ID NO: 6573 - DNA, 1264 bp, Zea Mays
gattagctccatggcggcttcgaaaaaatcaaaataaaaaactagcgccatggcggggagggataagaggcgacgagcggcgccgctcgaaggcgacgagcagcagttgcggcggaggctggaggaagcggcgctcctcctccgcaggatcaaagggcttgtgcgctggatcgtcgaagaggttgccgccggccgctccccgtctatagtgctccaccggtaccggaactattgctcctccgccgactctgcgtccccgtccccatgtgcctgcagctacgacatccccgtcggcacggacgtcctctctctgctccacaaggactaccacacctcccgcctcaatgtgctcctgagggtgctgttcgtggtgcagcagctcctgcagcagaacaagcactgctccaagagggacatctactacatgtacccctccatcttcgtagaagtagcagttgttgaccgtgccatcaacgatatctgcatactcttcaagtgcagccggcacaatctcaacgtggttcctgtagtgaaaggtttggtgatgggctggataagatttatggagggcgaaaagaaagtgtattgtataacaagcgtcaatgctgctttctccattcctgttgacattgaggcaatcaaagatgttgttagtgttgcccactacatacttgtggttgagaaggagacagtgttccagcgtttggccaatgacaagttctgtgaaagaaatcgctgcattgttattacaggaagaggctatccagatattccaacaagaagcaattggcacatgatgcaaacttgttgcgtgtccctgatatacggtggcttggagttttcacatctgattttgaagaatattgccttccagactgctgcctacttcgtttgtcacctgaagataggaggaaagctgaaggcattcttgctaggtgctatttacacagggaagccccagaatggaggtcagagttggaagcaatgctgcaaaagggtgtcaagtttgagattgaggcactatccgcaaattccatttcctttttatcgcatgagtacattccccagaaaatcaaacaaggcatgcatttataagattggacattcttgtatccgtccaggatgtgtcatagagtacaatctttttttgtctgattatagttatatccggagacatatcatgtgcaaacactaaggatctgtttcagaacataacataatatttccttaatcctaagataatatcgtggtatttgagcataac

SEQ ID NO: 6574 - DNA, 1580 bp, Zea Mays
ggctccttatttaaggtgtattcacaaacaggtcatatcttgggagttgagaagactgcttcacaacaagaaataaagaaggcatatcacaaattggctctgcgcctccatccagataagaatcctggggatgaggaagccaaagagaagtttcagcagctgcagaaggttatatccattcttggagatgcagagaaaagagctttatatgatgagactggcattactgatgatgatgcactggtgggagaagctgcaaatgatcttcaggagtacttcagaacaatgtacaagaaggtcactgaggctgacattgaagaatttgaagctaaatacagagggtcagattctgagaaaacggacttgaaggaactctacacaaaatataagggcaacatgaacaggcttttctgcacaatgatttgctcagaaccaaagcttgattcccaccgcttcaaggatataatcgatggggcgattgctgaaggtgagctgaagtcaactaaggcgtatgagaaatggtctaaaaagatttcggagatggagccaccaacaaatccattagagaggagagcgaagagtaggaagaaaagtgaggagaacgatctgatcctggccatctcacagcgcagggctgagcggaaaaaccagttcaactccatcctctcgaacatcatgtccaagtgtgattccaaggcaagcagttctgagcccacagaagaggagtttgagctggcgcgacagaggctggagagcaaaatggccaagaggcgcaaatgatgcctgctgccagccttctttccctatgcgtctatgccgaacatcgtcttaagctttgggtgtgatctgattttaccagcacgcaagtgatggttgtgagagctagcttgagcgtgtcaggatctgtatcatatctcgtgtcctctgggacagtaggtcgtgtggttatcgccttgccgagagggaagctttctctgaacttcaataccatggatacgtgggtaatggctatgcagttgtagtttagtgtgtgtgtggttatatatataatgtaatcgtgccagcagctatccgattatgttctttgaagaaagctgtagtgccctccaggcctcgaggatgcaagtgttgaagggcggacaacaggcgggctgtggcttataatccagtcctcacgaggtgtaattgccattaatgtcgaggtttacaacagcatcaagtcctgcaagtaccgatgcaaataccatcaccatgtttatcatttacaagtgtaagagctttccatttgaataacgctctagagtcagagactcgccgctgttggctttttgactagagcaaaaacggtgctcaaggcaatggccatcgttgctgctgaaatcgcagaaagtgaagctggcatatgattagagatgtcaatgggaaattttccaccctttatagtatcctatcatgtttgatctatctcaatatctatcatggttgtaaaactcattccatacctcgtctgggttttggatttctgttgtagacttgttctcaaatattatgagttaaaaacaaggcaacataaacgttaa

SEQ ID NO: 6575 - DNA, 1067 bp, Zea Mays
atgcctatccaggcgcagaacacgccatttgtaaaccaatcctagccgtgcgtcttcaatccaacggaaagttcctccttgtcaatagcaaatcggaggcccaagcgctcccaatctctccgggtcctctctccgcattctccgtcatggctgagccgacgccgtcgcagtcgccagcgcagacgccgcccccgccgccgacgcagcagactcccgcggcgggtgggctcgaggacatgctggcgtgtgtggcggcgctggaggccgcgctgctgccgtgcctccccgcgcgcgagctccaggccgtcgaccgctccctccagtcctcccaccagttgatgttgagaggcacgcaagggatttcatggaggctgccaagaagctccagtcttatttcatcagcctgcagcgtgaggaaccgccatctgcagaagagatgcttcgaaaggagattacgacaatggaggaagagttgaagagcaagtctgagctcattgccaagcacaagaagttgattgaagggtggcaaaaggaactgaaggagcagctgagcaagcacatcacggagcttgaaagggtgtgaggagtgcgattctgcggtttaccttgtagtgatcatgaacctctaggtgaccaaatgttatgttatgccctataaaactgtgtacatgtgcttagaatctgacgccatggttagcaatcgccttttgttggtttcttaaggttggaagccacgaacaaagcccactttatctatgtttgattgtgtacctttacttgccccatggtctctgttgttgtgcaaaatgagtctctgccatcataaaacgacatagaatgctaacggcttcctgtctttatgggtaaactttgggtgaatttatgggtaaactttgggtgaactgttggagtcagcctagcgggttatgtgcctactctggatggccgccatgttcgcaagttcctttctatctttactccatttgtgcctggatcagctcgaacagaaccttctcctgacaaaaagccgagccaagtggcacagttgctacgttgaatacacgagc

SEQ ID NO: 6576 - DNA, 1775 bp, Zea Mays
gcgggtgggtcgtccaaagtagaatccaacggcgcgccgcagctcctccgcccctccgctcccgccgcctatattccttacttgcgttcgttcgtcaagcccttgcacaagcgcgggcggccctccgaccggctgaaaccccggcggcctcctgaagattacggtaccgggatcggtctgagccgccgaggcccgcgcaggcgcttccttatatatcgtttcttggcgtggctaaggtggtggtgaccatccggtgaatatgaacattgtgtgtgaagtatgtggagatattggttacagacaacttctgctatgttgcggagactgtaagcgttatgctgtgcaccaaagcagctgcaagcagtgaaagattcacggagtgtcaaaaggctagctcctgtcgcgaggggataactgtgaagatggctatggcgccctcatcatatgagaactcaggagaagacattttctctgaaaatgtatttttggaatatgttttggcatataaatgttatctatctaaagcacaaaagaagagagtaatggagcttattcaggaaattcaacctgaattcacagtttttatatcaataatgcggaggggcaatgtgcgacctccgggtccttttctgggaattaacaaggaatatgcaaatgcacatttcccagataaaagcacaaatgtcactcttgagatgcctgacaagagcaagaagtggcatcccaaattctacagaagagatgtaagcagaacctgcatgcttacgggacagtggctagactttgtctgcgacaatcatgtgcaggagggagatatatgcctccttttaccgacaaaagatgagataagatgcacgtttatggtctatgttcttcatgaaacaactcattcttctagaggggaacatgtttcttcagaaagtgatatgcgagaaattcctcatgaatctctctcgagaggagactctgatgatcaatttgagcctccatactttgtaccatgcaagagtcctctatctgaatcccaaaagagaatggttgaggagcgagtgcgagctatccgatctgaaattcccatttgtgtggcagtaatgaagaacaacaatgttggtgtcgctcaacgttggatgctagaattaggttcacgatatggttcggtatatctcccaactaaagggcaaaccatattgctccagtgcggggggacgacatggaaggcaaaattgatgtttcataatggtagaaggtggtttctgaatggaggttggcccaattttgctcgcggcaatggcctgcgtgtgggtgacatctgtctattcgaactgaagaagaaagacagtaagcttaccatggcagtccacatcattcgcagggagaagttttagtttgcactataccaaagtgtggctcctgttctttcggctggtaccctgggcttattgtacttgttctattttgacagtcgtgtggctgatctctcgaaggattagagaccaatctgtaacatctgttggtagctatcgtgccgccttgcttttgcttatgttgtacttaacacccttcttaaagtttcatctgaattaaaagtgatgactattgtttgtcatcgaacatctagtctgtgttctcaatatagtctctcatgcctgttacgtctatctccctctcaagaaagagatccggttgtccaggaaccagttaatattaattgtttattctctctttgtgcatgtacaatgtatgaaaataatggaaaatactattactaattctta

SEQ ID NO: 6577 - DNA, 2094 bp, Zea Mays
cttgaagatgcagccaccgcctccgtgtcgtcttcctcgtcagcacgcagcagtcaggtcaccaccaacagcaacagcagtagtgccgtcgcgttgtctcccactcccaagtcccaactcccacctcccccgcccgccgttcaaatctccctagcctcccgaagtaggcaagtagccctccctgttccatcgaacccagcagagcagccagccgaacaacgaagcatgccgtcgaagccgaacgccgcgtcgcgcctcgtcttcctcgctttcctcctcgtcatcagcgccgccgcggccaacgatgacgccgcggcgcggcggacgatggagcagttcgccggcttccccgcctccgacgacggcgagggcccttccagcgacttccacgtcgactccgagggcctccagcgtcagatcgatgaactggcctcgttctccgactcgcccgcgccgtccgtgacccgcgttctgtacaccgacaaggatgtgcaggctcgaaggtatataaaagggataatgaatcaacttggccttgttgttcgagaagatgctgttggtaacatatttggccgctgggagggttccgagcctggactaggagcagttgcaactggatctcatgttgatgccattccattctcaggcaaatttgatggtgttgttggagttctgggtgctcttgaggcaattagtttgctgaaaaggtctgctttcctgccaaaaagatctttggaggttattatgtttacatcagaggagcctacacgatttggaattagctgcttgggaagccgcttaatggcagggattgaagaacttgctcaatccctccgaaaagtagttgacaatcagaatgtgtcatttttggatgctgcagaatctgctggctataagttgaatctagaggacctgcatagcgtatttttaaagacagacaaatactctgcttttatagaactgcacattgagcagggtcccatcttagaaaaggagggtatccctattggcattgttactgcaattgctgctcctgcaagtcttaaggtggactttgaagggaatggcggtcatgctggagcagtgctgatgcctgcaagaaatgatgctggactggcagcagctgaattagcattagcagtcgagaaacatgtcctggaatcaggatcaattgatacggttggcaccgttgacaaatggacacctaggcgtctaagcgtcctagcgcctggctagcgaattgcctcgccatggcgtcgtaataaccatgccaatgatgtgaagacctttgcatattttccactacactcgggcgtcacgtcactaaggtattctgcagttacatccaggagcaatcaatagcatcccaagcaaatcacacctagaaattgatgtaagagatattgatgagaagagaaggaatgatgtcattgagaagattcgccagtctgcagcacatatttcaaagaaccgtggagtagagctttcagaatttaagatcatcaaccaggacccacctgctctatctgacaaatcagtcgttgacgcaatggaatttgctgcaaaacagttaaacctggcatacaaaaagatgattagcagagcctaccacgattcactcttcatggccagagtatcaccaatgggtatgatcttcattccctgttacaaaggttacagccacaagccggaggagtatgcatcacccgaggacatggcgaatggggtgaaggtcctagccttgacaatggctacgctgtcgctggagtgacttgttagcgtttggaggaatcaagtcagcccgtgccaaaaaggcaaaaacaaacacctgtgttatttctaataataagctgcatagcattggcgtcatcttccctgcaccaggcctgtatacaaaccatcattcatcagggtttaggaataaagttgtcatctgtatctgtatgatctggacaatgattttctagcttgatcatattgatatatagtagtgattttctaaatctttatccatataaacaaactaatatagaaacgatgttatatcaattgtacattacctctatcgggtacacagggacaggataccctaaa

SEQ ID NO: 6578 - DNA, 1268 bp, Zea Mays
caagaggaagctcatgtgtgttatccatgagagggaaaaatggcagaagacaatgataggaaacctcttcatattgtgcacatctgtagtgaaatgtacccagtagcatcatgtggaccattatcagcatatgttgccagtttatcttgtgagattcaaaaaaaggctaacttggtggaggtgatactacccaagtacaccagcataaacttggatggaattcatggtctaaggagatctgaggcagaatatgaatcttatttcggtggcctttggcataaaaataaaatatggactggtacgtcaagtggtgttggtcttgtaataatagaaccatctcagctctcctattttagtcgtgatatgttacgtggctaccctgatgactttgagcgattttcctatttttcccgtgcatccctggattatattgttaaatctggaaagcggccagacattatacacatacataactgggaaactgctatagtggcaccgcttttctgggaaatatttgctcaccagggacttgggaacactcggatattactgacatgccaagacttgaattcagaatgcctagaggagccaaataaactggagatgtgtgggcttgatccccgtaagcttcatcgtcctgatcgtctgcaggatacaaacaagacacatcttgttaatattcttaagggaggcattgtttattcaaataaagtcgttttgatgtcctcaacacattcaaaagatgctcttattcagggttcacgacatgagctgcaatcaacattagccgcacatagggagaagatattggttgcatcttatggattggatggtgaactttgggatccattcaaagacatttatcttcctcgaaggtattctgccaatgatattgaggggaagtccatttgcagacaagcacttaggcgtagacttcggttcaatggtgattcatccattatagtaggatgtatctgtgatgataattcagatgtccatagtcttaaagaagcagttcatgttgctctgcacaggaatactcaggtcatcatcatggaaacgttagggtctgttgtgaactcaattttgcaagcattaaagggagagataaagggagacaaaatagcatttgttgaggcatatgatgaagctctggcacatttaatatatgcaggctctgatatcattctttgctcttccttccaagatccatcactgcaaatagcgaagtgtaatatggggcttcagttgttagaggacagggtata

SEQ ID NO: 6579 - DNA, 2104 bp, Zea Mays
cgcacgccgaacggcgcctcctcgcaccgatcagcgcagcggctcagcgcccgccagccgccatcaggcagcagcctcgcctctggccattgaagcacacggaattgtctctttcacctgggcaatccgcggagaggtacggcgcgcatagctaaccaaggaggcgtacgagcagcgtgcgtagcaggcaaccatggagacgccgcgcctcgtggtcggtgcggcgtcgcgggccccgccaccagctcctcgatcacagcgacggcgtatcctgcgtccgtgcggcggggcacattgctccccctccgcccgcgctgctccaccggtgcttctaacccggtgctcctcctactcctcttccagggaggggaacggcgattctcatggtaaggcccgccgcgagagctccggttccgtccggttggacgtcgaagcagatagcgatcaggtaccaagtttggctgacgagcaacgtgagggtgatattacagagctcttcaacctggctcaacggaatatcctgtacattaacaagcagcggcttattgccatggaggagatgaagaaactgcatgatgaaaataatttgcttctcgaggaaatacaaggactagaaacagaaatgcaaggtattcccctagaagcagcacagtcgtcaagtttcagtgagttactcctgcggatagatacaatggtcatttctggaatgatcagcatgacggaagcatctgatttaagagagaaacttgtcactaatagaagcataatacaaagcaccttttgtgatattcatcataagccaaatactgaattgctgtctgaactgcaactctttttgcgtaaaccaatagagaaacctcttcatattgtgcacatctgtagtgaaatgtacccagtagcatcatgtggaccattatcagcatatgttgccagtttatcttgtgagattcaaaaaaaggctaacttggtggaggtgatactacccaagtacaccagcataaacttggatggaattcatggtctaaggagatctgaggcagaatatgaatcttatttcggtggcctttggcataaaaataaaatatggactggtacgtcaagtggtgttggtcttgtaataatagaaccatctcagctctcctattttagtcgtgatatgttacgtggctaccctgatgactttgagcgattttcctatttttcccgtgcatccctggattatattgttaaatctggaaagcggccagacattatacacatacataactgggaaactgctatagtggcaccgcttttctgggaaatatttgctcaccagggacttgggaacactcggatattactgacatgccaagacttgaattcagaatgcctagaggagccaaataaactggagatgtgtgggcttgatccccgtaagcttcatcgtcctgatcgtctgcaggatacaaacaagacacatcttgttaatattcttaagggaggcattgtttattcaaataaagtcgttttgatgtcctcaacacattcaaaagatgctcttattcagggttcacgacatgagctgcaatcaacattagccgcacatagggagaagatattggttgcatcttatggattggatggtgaactttgggatccattcaaagacatttatcttcctcgaaggtattctgccaatgatattgaggggaagtccatttgcagacaagcacttaggcgtagacttcggttcaatggtgattcatccattatagtaggatgtatctgtgatgataattcagatgtccatagtcttaaagaagcagttcatgttgctctgcacaggaatactcaggtcatcatcatggaaacgttagggtctgttgtgaactcaattttgcaagcattaaagggagagataaagggagacaaaatagcatttgttgaggcatatgatgaagctctggcacatttaatatatgcaggctctgatatcattctttgctcttccttccaagatccatcactgcaaatagcgatgaaggcaatgaagtatggatctgtgccagtacagttaaacttttccagcgatgaatcaagcttatgctttccatttatatgt

SEQ ID NO: 6580 - DNA, 2675 bp, Zea Mays
cgcacgccgaacggcgcctcctcgcaccgatcagcgcagcggctcagcgcccgccagccgccatcaggcagcagcctcgcctctggccattgaagcacacggaattgtctctttcacctgggcaatccgcggagaggtacggcgcgcatagctaaccaaggaggcgtacgagcagcgtgcgtagcaggcaaccatggagacgccgcgcctcgtggtcggtgcggcgtcgcgggccccgccaccagctcctcgatcacagcgacggcgtatcctgcgtccgtgcggcggggcacattgctccccctccgcccgcgctgctccaccggtgcttctaacccggtgctcctcctactcctcttccagggaggggaacggcgattctcatggtaaggcccgccgcgagagctccggttccgtccggttggacgtcgaagcagatagcgatcaggtaccaagtttggctgacgagcaacgtgagggtgatattacagagctcttcaacctggctcaacggaatatcctgtacattaacaagcagcggcttattgccatggaggagatgaagaaactgcatgatgaaaataatttgcttctcgaggaaatacaaggactagaaacagaaatgcaaggtattcccctagaagcagcacagtcgtcaagtttcagtgagttactcctgcggatagatacaatggtcatttctggaatgatcagcatgacggaagcatctgatttaagagagaaacttgtcactaatagaagcataatacaaagcaccttttgtgatattcatcataagccaaatactgaattgctgtctgaactgcaactctttttgcgtaaaccaatagagaaacctcttcatattgtgcacatctgtagtgaaatgtacccagtagcatcatgtggaccattatcagcatatgttgccagtttatcttgtgagattcaaaaaaaggctaacttggtggaggtgatactacccaagtacaccagcataaacttggatggaattcatggtctaaggagatctgaggcagaatatgaatcttatttcggtggcctttggcataaaaataaaatatggactgggtaaagatacactcctagtgtgcaaagagattacgtcaagtggtgttggtcttgtaataatagaaccatctcagctctcctattttagtcgtgatatgttacgtggctaccctgatgactttgagcgattttcctatttttcccgtgcatccctggattatattgttaaatctggaaagcggccagacattatacacatacataactgggaaactgctatagtggcaccgcttttctgggaaatatttgctcaccagggacttgggaacactcggatattactgacatgccaagacttgaattcagaatgcctagaggagccaaataaactggagatgtgtgggcttgatccccgtaagcttcatcgtcctgatcgtctgcaggatacaaacaagacacatcttgttaatattcttaagggaggcattgtttattcaaataaagtcgttttgatgtcctcaacacattcaaaagatgctcttattcagggttcacgacatgagctgcaatcaacattagccgcacatagggagaagatattggttgcatcttatggattggatggtgaactttgggatccattcaaagacatttatcttcctcgaaggtattctgccaatgatattgaggggaagtccatttgcagacaagcacttaggcgtagacttcggttcaatggtgattcatccattatagtaggatgtatctgtgatgataattcagatgtccatagtcttaaagaagcagttcatgttgctctgcacaggaatactcaggtcatcatcatggaaacgttagggtctgttgtgaactcaattttgcaagcattaaagggagagataaagggagacaaaatagcatttgttgaggcatatgatgaagctctggcacatttaatatatgcaggctctgatatcattctttgctcttccttccaagatccatcactgcaaatagcgatgaaggcaatgaagtatggatctgtgccagtacagttaaacttttccagcgatgaatcaagggagtcaaaggggcatgagtgccgcaatacagtaatgtctcagtacatcatctcaacctatggagatttgtctctttctcaagcacttgatgactttaaaaatgacccttcgcattgggatcgacagatcaaggatgggatggctaggggttcttcatgggacgcaaagtgctatagccttcattgggaggcttattcatccataacgaagctgtgaactgggcatctgctagagaagcacatgacctacatgaggcaccatctccccaaattaagggtaccattttttggcatataattagactatcatttaatttcttagatgaacatttaatcaagcaaaaggtcagtgaataaaaaatggtatgtagagctgcactggatttcacaatatttccaatttactattttgagtgtgcgtttttaggaacaagcatgaacagtgtcagtgcacttggcacatacacatcattctggacaaacaaacagtacccctccgttttaggggcctttttaaagcgtttttcaaggaataagaactcggataatagatttgcctcgc

SEQ ID NO: 6581 - DNA, 1745 bp, Zea Mays
cggcaacccctccagctcctatccccaaactcgattgcagctcgtgcaccacacacggacacgaatcctcctccgggtcctccctctggaaaaccaggactacctcggatcagatgcagtgcctaccctgcggaccgtccaccaacgcgcccgctgcgcatgccgcggccaggagcgtcagccgtcggagggttgtcgtcgaagggcgtcacctcggcaacccacgacagcgaggaagcgcctccaaggtcaatgagggcaacaggtgaccgtggtgcaatgtcaagcaaaaccttatggctcgtgtcaaagaggaagcttattgctttgtcagccttttgtcttagcttacattcttcaagcatttgctttgggtgatacgtctgtcaaaatcgaggatgtgactcctaagatttttccatctgggccattatttccaactgagaaacggattgcagagctatttgaaataaatacttactcagttgtgaacatttttgatgcaacactacggccgcagcttaatgttactggtgttgtggagttgttggcagtgctctttcaaaaaatccgaagcctggtgatgttgttgcacgcgtcaacattcttgctgctgaaggaaaaattttgaaggcaaattggttggtgcagatcgtgctaaagatcttgctgttcttaaggttgatgctcctactgatcttttgaagccaattaatgtgggacaatcctcggccctaagagttgtggtttaaatcgagatattttaagtcaggctggggtgacaattggaggcggaattcaaacagatgcagctattaaccctggtaacagtggtggtcctttgcttgactcaaaggggcatatgattggtattaatgcagcaattttcacacagacagggacatccgctggtgttggcttcgctatcccatcatcaaccgtacttaaaatcgctcctcagttaatccagtttggaaaagttcgccgtgctggcttgaacgtggacttcgctccagatccaattgcgtatcagcttaacgttcgcaacggagctcttatactcaaggtacctgggggcagcgccgcagccaaagcagggcttgctccgaccagcaggggttttgccggtaacatcgttctcggtgacatcgttgtcgctgtggatggcaagcctgttaaaggcaaatctgacctgctgagggttctagatgactacggtgtcggagaccaggtgagcttgacgatccggcgaggctccgagaccctggaggcgacgctgcctttagaagaggcagacatgtgagcagtttgtggaaaatagaacccacgtataccgagctgtccacgactgtcgtcccattggaaacaattccatttcactaggaaatattgaagtgtccttttcgctctggacattcccttccatgcacgtgtatgagcatgatcatgagcttcacttctcgtgcttgtagttgccttaagatcagacagcctgatgttggagaacaagctgacctgttagttggattctgttgtcatctcattcccgtcagttcatctgcggtgttggctcaagttctatttttctcggctgacaaagatcgtgcgattgctgtgcacgcggtaaaagccaattaggtagtgtttggttgaggagccaagtagaatggagccgtttcatcactgattctaggaacggagccgctctgttctgtgtttggtaatctggaacggagcgattccgt

SEQ ID NO: 6582 - DNA, 1823 bp, Zea Mays
cggcaacccctccagctcctatccccaaactcgattgcagctcgtgcaccacacacggacacgaatcctcctccgggtcctccctctggaaaaccaggactacctcggatcagatgcagtgcctaccctgcggaccgtccaccaacgcgcccgctgcgcatgccgcggccaggagcgtcagccgtcggagggttgtcgtcgaagggcgtcacctcggcaacccacgacagcgaggaagcgcctccaaggtcaatgagggcaacaggtgaccgtggtgcaatgtcaagcaaaaccttatggctcgtgtcaaagaggaagcttattgctttgtcagccttttgtcttagcttacattcttcaaggtactttccagcatttgctttgggtgatacgtctgtcaaaatcgaggatgtgactcctaagatttttccatctgggccattatttccaactgagaaacggattgcagagctatttgaaataaatacttactcagttgtgaacatttttgatgcaacactacggccgcagcttaatgttactggtgttgtggagatccctgaaggaaatggttctggtgtagtgtgggacgattttggacatattattacaaattatcatgttgttggcagtgctctttcaaaaaatccgaagcctggtgatgttgttgcacgcgtcaacattcttgctgctgaagggatacagaaaaattttgaaggcaaattggttggtgcagatcgtgctaaagatcttgctgttcttaaggttgatgctcctactgatcttttgaagccaattaatgtgggacaatcctcggccctaagagttgtggtttaaatcgagatattttaagtcaggctggggtgacaattggaggcggaattcaaacagatgcagctattaaccctgtggtggtcctttgcttgactcaaaggggcatatgattggtattaatgcagcaattttcacacagacagggacatccgctggtgttggcttcgctatcccatcatcaaccgtacttaaaatcgctcctcagttaatccagtttggaaaagttcgccgtgctggcttgaacgtggacttcgctccagatccaattgcgtatcagcttaacgttcgcaacggagctcttatactcaaggtacctgggggcagcgccgcagccaaagcagggcttgctccgaccagcaggggttttgccggtaacatcgttctcggtgacatcgttgtcgctgtggatggcaagcctgttaaaggcaaatctgacctgctgagggttctagatgactacggtgtcggagaccaggtgagcttgacgatccggcgaggctccgagaccctggaggcgacgctgcctttagaagaggcagacatgtgagcagtttgtggaaaatagaacccacgtataccgagctgtccacgactgtcgtcccattggaaacaattccatttcactaggaaatattgaagtgtccttttcgctctggacattcccttccatgcacgtgtatgagcatgatcatgagcttcacttctcgtgcttgtagttgccttaagatcagacagcctgatgttggagaacaagctgacctgttagttggattctgttgtcatctcattcccgtcagttcatctgcggtgttggctcaagttctatttttctcggctgacaaagatcgtgcgattgctgtgcacgcggtaaaagccaattaggtagtgtttggttgaggagccaagtagaatggagccgtttcatcactgattctaggaacggagccgctctgttctgtgtttggtaatctggaacggagcgattccgt

SEQ ID NO: 6583 - DNA, 1479 bp, Zea Mays
gagtcagtggagaacaaaacgaaacccaaatatctggacgcaaacactgggccgcgttgcttctccgtcccactgaaccatcgccgccggctagccgcaggagaagttcccgccgcgccgacgccgaaaccgccgtcgcgtgttttgaagctctcgaaaaaagggcgcgcagcatgagagcggccgtgaactcgccacctccgcactgctactcgcgccgccgcgccagcgccacgctgctggatgcgcgccatgtgttcgaccacgtgccgcagcagcgcctaccgaacctggccgcgggactccgcgcgcggcctgtcgccgcggccgcctggaggcccgcgcggcgctcggccgcatctgcggctgcccgcacctgtggcaccgtttcaggacattcctgcaaatcccaacatcctcttcttcagcttatcgcgcactagtagcttcgtctgcattcttgccatcaagacggagctttgaaggctacattcctcgtagctgctccagctcatcgctccagatctacagccggtcaccgctgttaaatctatcgccgtcttcagctctcatggtatcctcccagctcacgggctcctccgacgtagcccaacgttcagaggaatggtttgctcttcgcaaggacaagctcaccacaagcaccttcagtactgctttgggtttctgggctggcaacagaagaccagagctgtggaacgagaaagtcttcggagcgacagagatcaagctagcagatgccgctagatctgccatggactgggggacgcatcacgaaagcgtagccatagagcagtacacgagcatcacaggaagaccggtgggcaccctcggcttcgcggtgcacaccgaggccagcttcggatggctcggagcctcgcctgatggggtcctcgggtgcgagccacacgacgggatcctggaagtgaagtgcccgttcaacaagggcaagcctgagctcgctctgccctggcgcgccatgccgtactactacatgccgcaggtgcaggggctgatggaaatcctgggcagggactgggtggacctctactgctggacacccaacgggagcagcctgttccgggtgccgcgggactgcgcgtactgggagctcatccacgaggcgctgcgcgacttctggtggggcaacgtggtgcccgcgcgggagctggcgctcctggggaaggacgacgaggcgaggtccttcgagcctcagcccaagcaccggctcacgaacctcgtgctgtataggagccggaagctggcctccgaagcgaagctactttgtatggatgttggcggccatgtagaattcttccaatgaggagtcctgccgccgtttattgtacactgtattatgactattctttaattaacttatgaattcgttaccttcccagcgccatgttcttttttgttctgttctgttctgtttaacaaagagtgtaagtataatcttcc

SEQ ID NO: 6584 - DNA, 2212 bp, Zea Mays
tttgggcttccaatccttcccctctcggcagctatccgtcgccagtgcgtgtttttgtttcccgctctcgcgatctctactctcgtctctcgtgcaagctctaaggcaaggatggggcgtaggacatgtggcacggccttcatccttctctacgtgctgtctacgtcgacattgcccgcgtcgtcatcgaacaccggcgacggcctcatccgcatcccgctgaagaagagatcgataatggacaccatctacggcgacctcctgccgaagccgagcgcgccggaggagaaggagaagcaagccgtcgacgacccggtgcgggacgccatagcccgagcacgcgagcggcagcacgaaatgctggtccaggccgctgccacggaacgcaggcgcaggtactactggagctacagcggggccgggggcaagggaaacggcagccgtctgcatgacggaggccagggcgaggggtcggggagcatcgccatcgttgcgctcaagaacttcctcaacgcccagtactttgggcagatcggggtcggctgcccgccgcagaacttcaccgtcgtcttcgacaccgggagcgccaacctctgggtcccttctgccaagtgctttttctcgctcgcgtgtttattccatcccaagtatgactcccgccagtccagcacttacaaaccgaatggaacaccggcttctattcactacgggacgggagggattgctggtttttacagccaagaccaggtcacggttggcaatctggtagttcaaaaccaggagttcatcgaagccactcacgagcctggcttcacctttctactggcaaaattcgacggcatcctcgggcttgcatttcaggaaatttcagttgaaggttcacttccagtatggtacaatatggtgaaccaaaacctagtggcgcagcctgttttctccttctggttaaaccggaacccattcgacggggaagggggcgaaattgtgtttggaggttctgacgaacagcattacaaaggaagccatacgtacaccagggtcactcggaaaggctactggcagtttgaaatgggtgactttctcattggcggaaggagcactggaatctgtgtggatggttgtgcggccattgcagactctgggacttcgctgattgctggtcctctagttgccattgcccagatcaatgaacagattggagcggccggggtggtcaaccaagagtgcaaacaggtcgttgctggttacgggctacaaattgcagggctgctggaagctcagacaccaccatcagaagtgtgctcgaaggtcgggctctgcacgttcgatgggacacgcggagtaagtgctgctggcatcgagagtgtaccgggatccgtagacggcatggcggaagctctatgcaacgcgtgcgagatagtagtgttctggacgcaaagcgagctgagcccgaacaggagcaacgagggcacgctggagtacgtggacaggctctgcgaaagcatgcccgatccggtggggtcgcgcgtggactgcggacgcgtgggttccctgcagaccgttgcgttcagcatcggtggaagggcgttcgagctccggcctgaccagtacgtcctcaaggtcggcgaggggttcgccgcgcactgcatcagcgggttcacggctctggacgtgccccctccggtaggccctctgtggatactgggtgacgtcttcatgggagcctaccataccatctttgactacggcaagatgaggatcgggttcgcagattccgcgtgagacacgggcgttcttccactaatgaccgcgaccactatagctgcagtatgttcctcagagaagccctgcgtggtgtagtgctggattttcactactacgccctgcagagcttttctcgagcttctgtagagcacatacactacgcgcaggacaaatgtgtatcgctgcatcgagaaagaaataaaggaaacaatgcaaaaaaaagaaagatcatgtattagttttctttatctttaatttatgcacccagaatcccagatatatcagcagagccaaagagtggcggacactgcgactattttcattgacgagtatcgaatgccctttgcgctgctgacgaggaagcaccagatcgtcatcataggaacctaacattatgtgtgggaattgaaacagagaaccagtctgcagcataaatgcgtaatcaaag

SEQ ID NO: 6585 - DNA, 1850 bp, Zea Mays
gaccaaaaaaccggcatggaaccaaactcgcttccctacaaacaaggacagcggcacgacgaagaaccaccagcttgaattttcccccataaatatccttctccgccacttgcaaattttcctattccatttcttcttcgtcctcgcaccagtccctcctccttggaagcgagggaggagagtggagggagagggaggagcgaggcaacggtgagctcgggaggcggcgtggggcttgcacgccggccctacccccagctcactcaccacgctcttctctcaccaactctctctctctcttatctccttccaagattcccccatttttttgttgttgtcccccccattcttgctaggatcattccttgatctttcgctcgctccagtacgcccgttttccagctccggagatcccatctcggccacctcctgcggtctccaagctccaagaggccagattccagcacaaatttgaggtcaatttgcccgctgagctcgaatcaatccgctcggcaacaagtgtcctttgttcccccgatccccgggcttcgattcgatcgaatccgacctaattttattgtgtgtgtgtgtgtgtttaaccttctctcgctgcacttttcctttctcctccctgtcgcaaacgcaaagtgggttccatcgcgtcacccgcacggctcctctgatcgggcggagaaagaaagcgcataaaaggcgagctcttgatgcggtcttggtcgtagcaacagcagctccactgctcccggcatcgcctgctgttgtttatccatatacggacggagcagcgggcgctccggcagaggcagtggcagcgcgctccccccgccagcgcgtgctgatgcttgcccccctgctcgccgccttcgctgtcgtcttcctgctcctcctgtccaggccatgcgcccgtgacatgagactgttcctcgcctccctgtgccagcagctcgtgctgtccctgctcgggttcctggcaggcctccgcctgctcagcggcgtcgcggccgcctccgcggccacagagaccatgccgctcatgccctccttcaagaggaagcgggccgcggccacggtggagaatgcggaggaggcggccgccacggccggcggcggcgagacgtcggtgctcgacctgccggagctggccatcgattgcattctggagaagctgcggccggcggagctgcggagcatggccgccgtctgccgctccatgcgcgagcgctgccgcggcgaccacctctgggagcggcacatgacaaacaggtggggccgtgtcctgggccgcgccgccagggacgaatggaggacgcacctggcttccgccagcgagtcccgcgccgcgggtggcggcggcaagcgccggaagtggctcgccgcgctgtcctgcgtttgcccggtggtgtcctggatgcggcccagggccgacggtggcaagtcgtccgcccccgttttggacgattccatcatgtcgtggtacctgtccgtggagagcggcaagttctggttcccggctcaggtctacaaccgcgagcacgggcatgttgggttcatgatgtcatgctatgatgcagcgctcagttacgatttccataccgacacattccgtgcaaggtacccaccacacggtcgacgaaccgtggtgttggaggatggcgtgcaatgggacagggtgagggcaccgcctgttgacacccttgcgcatgacctgcacacctctgactgcctgcatgagctccggcccggcgaccacatcgagattcagtggagaaggaacaaagaattcccatacgtggatagtgtgttctcattcatgcacttccatgcatgtttgg

SEQ ID NO: 6586 - DNA, 3116 bp, Zea Mays
cagtctagcttatttgctcagattatataatctaaccccttggattatgataatccataagcaagtgaggaggtgcttatttcagattatttttttctcacttcctcactaccctttcaagtttcctagaaattacccaccattgccattataatctaccgaatcgtttttgcgcctatcggatcggagaagcccgccgcccaacagaaacacgccagataatctgggtaaacaaacaggactactcagattatataatccaaattatataatccagattatataatcatccaaaaataatccagattatataatctattggggtaaacaaacaggcctttagttgtctctcgtatttggaatcgtttcaatgctcagggttatacatgacttaagtggtctaagctcctcaagttgagtccgacttcacatgagagcgaatttcagtctgttgaagcgcggggcagggttcagcagttttctcgttcgccgagcaccagatccacgctcctccatgccagatctgtggctatcagggatctggtacccccagcccttcctgggccccgctgtcctcgatgtggcccacggtggtggtgctgtgctgctgcttccgtgtgcgcgttcgcgggctccttgacgtgggctgctctcgtgtctggtgggcactgggcggcggctgcactgtcactagcgcttcggcaggcacgcggccatgcggctcctccctttgggggctggttctttgtggtgcagtggctcccaatcaggttcccgcgtctgccgcgcagctgtgggacacctccacattggctggtggctgcggccgctgttcctggcccacagtcgctgctttggtttgcggatctgaggctggtgttcggctcctgaatggctatgggtggcttgggcgggcctgtctagctgctgctggcgacgatggcatccttgacattatgttcctcccctcgggggcagatgtgcagatgccttaccgcctagatcacatccttgtggcagatggtttgccgccgtggttgtttggggctcgccttcggcaaatactttgccaccaatgcttgtggatgctcgtgtcatctccggtttgctgagagaaccgaaatggggtcacttgaaggagttgcataaagctatcaagctttgtgaaccagcattggttgcaggagacccaattgtaacttcacttggcaatgctcagcaggcatctgtttttagatcaagcaccgatgcctgtgtggccttccttgagaacaaggataaagtatcttatgctagggtatcattcaatggaatgcattatgatctacctccctggtccataagtattctcccagactgcaaaacaacagtctacaacaccgccagcgttggaagtcagatttcacaaatgaaaatggaatgggctggaggattcacatggcaatcatacaatgaggatataaactccttgggtgacgaatcatttgcaacagttggattactggaacagataaatgtgacaagggataacacagactacttatggtatacaacatacgttgatattgctcaggatgagcagtttctcagcaatgggaagaatcctatgctaactgttatgtcagctggtcatgctttgcatattttcgttaatggacaactaacagggactgtgtatggaagcgtagaagatccaaaattgacatatagtggaaatgtgaaactttggtcaggcagtaacactatttcatgcttaagtatagcagttggtctcccgaatgtgggagaacattttgagacttggaatgctggaattctaggtcctgtgacactggatggcctaaatgagggaagaagagatctcacatggcagaaatggacctataaggttggtctgaaaggtgaggctttgagtcttcattcacttagtggcagctcttcagtagagtggggagaacctgttcagaagcagcctctgtcatggtacaaggctttcttcaatgcacctgatggtgatgagccattagctttggatatgagtagcatgggtaaaggtcaaatctggataaatggacaaggtattggaaggtactggcctggctacaaagcttctggaacctgtgggatctgtgattaccgtggagagtatgatgaaaagaagtgccaaaccaactgtggtgactcttctcagagatggtaccatgttcctcgttcatggcttaatccgacggggaaccttttggtgatatttgaggagtggggcggtgatcctaccggaatttcgatggtgaaaagaatagcagggagtatctgcgctgatgtctccgaatggcagccatcgatggcaaactggcgaacaaaaggctatgagaaagccaaggtccacctccagtgtgatcatggacggaaaatgactcacataaaatttgccagctttggcacaccacagggctcctgcgggagctactctgaaggcggttgccatgcacacaagtcatacgacatattttggaagagctgcattggtcaagagcgctgtggggtaagcgtggttccagatgcatttggtggagatccatgccctgggactatgaaaagagccgttgttgaggctatatgcggctgagtcatatgatccatataacgtactggtttctacaataatgttaccctatatcaagctggcaagaggtgaaagtggcggcaactgcgacacacggattgccagggtttacaggaattagttgtatgttagatttaagcatcgtatgtgtatgtaacttaggtcacatgagacttgcatggaagaagtggttaggaccctagctgtgagaaactaagtcttgtagctctctacacagtagaattggtctggcaggtgagggtgcagatgagactctgctttattacctgagtccatgtgcgcggtggctcttgggttggagattgccaaaaggccagcaattggctttgcattatctggtcattcatttttttggtcattggagggtgcaatgtaaatgttcagggtcaatcatttatgaatttttctagctagtaatgaaacagtaaagaaaatgttggttcagattataaaacaccagttatcttccatt

SEQ ID NO: 6587 - DNA, 3093 bp, Zea Mays
cagctagctcgcaataactccttcctccccacctccacattctcccatccgccctgctttcccctccaaccatgccgtcttcttcctccccgagatctcgccatgcctgctctcccgcctcctgctagctagcctagcctagccagctgcgtgcgtgcgtgcgtgatcgtttcctgcatgcgatatcaccaacgcttcgctggaagaaggcgtcgtcacagacagggatcgaaggctgacctcctagacagccatcagctgcagcaagcgttccagcagcagctcttcgatcagatcccgaccaccaccacagtggacgatagcagcgacaacctcatccatggccgctctgacacgctggtagatgagttcgagagcaagtcctgcagcgagaatcccgacggaacctctggtgacgatggcctggaggaagaccccaatcagcggccgaacaagaagaagcgataccaccgccacacccagcaccagatccaagagatggaggcgttcttcaaggagtgcccgcacccggacgacaagcagcggaaggagctgagccgggagctcggcctcgagccgctgcaggtcaagttttggttccagaacaagcgcacacagatgaagaaccagcacgagcggcacgagaacgcgcagctgcgcgcggagaacgacaagctgcgagccgagaacatgcggtacaaggaggcgctgggcacggcctcgtgccccagctgcggcggcccggctgccctcggcgagatgtccttcgacgagcaccacctccgcctcgagaacgctcgcctccgtgacgagatcgaccggatctcgggcatcgccgccaagcacgtgggaaagcccatggtgtccttccccgtgctctccagcccgctcgccgccgccgccgccgccgcccggtccccactcgacctcgccggcgcctacggcgtccagtcagctgctgcgggcctcggcgccgaccacgtgctgttcggcgccggtgccggcgatctgctgaggagcgtgtcggccgggcagctcgacgcggacaagcccatgatcgtggagctggccgtcgcggccatggacgagctcctccggatggcgcggcctgacgcgctgctgtggggtggcggcgcgtcggcaggggcgcagcagcagcagctggacgaggaggagtacgtccggacgttccccgctgggctcgggccgaggcagtacgggctccgtccggaggcgtctcgggacagcgccgtcgtgatcatgacctgcgacagcctcatcgagatactcatggacgcgaaccgattcgcggcagtgttctcgagcatcgtgtcgagggcttccacgcacgaggtgctgtcaactggtgtggcagggagctacaatggtgcattacaagtgatgtcgatggagtttcaggtgccgtcgccgctggtgccgacgcgcgagagctacttcgtgaggtactgcaagaacaacccggacgggacatgggccgtcgtcgacgtctcgctcgacagcctccgccctagcccggtcatcaaatgccggcgcaggccgtcaggttgcctcatccaagagatgcccaatggctactcaaaggtgacctgggtggagcatgttgaggtcgacgacagatcagtgcacaacctctacaggcctttggtcaattcaggcctcgcgtttggcgcgaagaggtgggttggcacactggaccggcagtgcgagcggctcgccagcgccatggccagcaacatccccaacggcgacctcggtgtgatcacaagcatagaggggaggaagagcatgctgaagctggcggagaggatggtggcgagcttctgcggcggcgtgacggcgtctgcggcgcaccagtggacgacgctgtcgggaagcggcgcggaggacgtccgtgttatgaccaggaagagcgtggacgacccgggcaggccgccgggcatcgtcctcaatgctgccacctccttctggctgcccgtcccacccaagagggtcttcgatttcctccgcgatgagacctctcgcagcgagtgggacatcctctcgaacggtggtgctgtccaagaaatggctcacattgccaacggccgggaccatggcaactgtgtctccctccttcgtgtcaatagtgcaaactcgaaccagagcaacatgctgatcctccaggagagctgcaccgacgcctcgggctcgtacgtggtgtacgcgccggtggacgtggtggcgatgaacgtggtgctcaacggcggcgacccggactacgtggccctgctgccgtcgggcttcgccatcctccccgacggaccaccgccggccggtgcggctccgtcccacggagagggcttggacactggcggcggcgggtccctcctgacggtggcgttccagatcttggtggactccgtccccaccgccaagctctccctcggctccgtagccaccgtgaacagcctcatcgcctgcaccgtcgagcgcatcaaggccgccgtctgtgcggaagccggcaacccgcagtagccatccatgcgatatagaggagggagaagggggacatgcagcaaggttttgtggaaatgttagtggggagtcaagaacgcacctcagactctccttgccgtgtggtgctcatactgaaaggaaaaagaaggcgtcaccactatgcaaggggggatggttcgggtattgacttcgccgtccaatcaaactactacagaaaggacgtacgggtgctgtggagaagatggatcgatgctgtttctagggtttacttcctcattgttcgtggtgctgccgtagttcaggctaaggtgcctgtgcctgctcgcagtcgtagctagagaacacagagatttgttgcctctgatctttcctttttggatttgcaaagatttgtagatcagtcatttcgtaaaccgatgcgccttggctaaaacgcgcccgttcgttgttgttcgatcgtagctgccttttgctattcataaaacgatgcaatttcaaccactgagtttcttctagcttcttgttttcagagaattttgaaaacggaaacagcaggggtgaaaaatccgatggagg

SEQ ID NO: 6588 - DNA, 1965 bp, Zea Mays
ctattcccttacgtccccagcagcagtagccccagcccccagtgccgcagttgcgctcagctatctctgctgagccgattagataaatccggcggaggaagagggaagaattatcgtgcgatatttcccccctcccactccctctctctctctctcgatttgcccgagaaatttttttggttgtttcccgcatcactctccactaggccgccgtctcccccgctggtgctcgtcgcttcctgcccaattcggcgccattcgcccggcgcactccctattaattccctgcctcggtagtcactggccgattgccacgtgaaatttcctgttccgttgcctttcgggtgcgcctgaagtacccacacgctactagggttcaatcgtcgtcagcaggcttacctctcaatcactgcggggcggcggctcgagagtttgtggacagttggcgaagagatagttaggttttttttttgtctcccgtgtccgatggaggaatcggacttgggaggtaatctgggtaagcaaacggaagaggataaggctgcgggagaatcaggggatgagggtaagatcgagaggagccaatctatcaatctgaatagagtgccagcagttgctgtagaggcgatgagcacccagggaaactgtgagacgcacggtgcagcagtgccaggaactaaggatgcaggcacaggaaaggcagggcaatccagtggcgatcgacaggaggagaagttacccaagtgtgagcaggtcgactatggaagtgaagttgaaggctgcgcagatgatgagaaccctggcaagagggctgctttagttactttggttggaaatgaatactgcggcgacgaggatgagagagttcaagtgctcaccattgtcaagaaggacgagcatgcagatgacattgtcgaccgtattaatcctggcacagttgcagggtacagtgaagtgaagggtgctgtaggtgcttctgccgccacttctgcggtgcgacctgctggctcccgatcgtcaagtttccatggtgtgactaggcatagatggagtgggaaatatgaagctcatttgtgggacagttcttgcagagtagagggacgtagaaggaaagggaaacaagtttatctaggaagttatgataccgaggaaaaagcggccagggcttatgatgttgctgctattaaatactggggcgaaaataccagactgaactttccgatttcacaatacggcaaggagttggaggacataagggatttgtctcgagaggaatgtgtgacatacttgagaaggaggagcagctgcttttcaagaggagcttctatttatagaggagtgacaagaaggcagaaagacgggagatggcaagcacgcataggactggttgctggaactagagacatttacctgggaacattcaaggaagaagctgcagaggcttatgatattgctgccattgagatacgtggcaaaaacgctgtgaccaattttgaccgaagcaactatgtcgataagggtatgcactgtatagaaggcgaaggcttgaggctgcttgcatccaagccagaagaatgacttccaagttcaatgcagtgattgtcgatcgagcagatttggccagacgtatatgcagcttagttggtacatatacagataggagaaccggttgcagtttgtcaatattcctgctttacatgacttgggattacagttaaatcgacccgctagcaaaaaaaagtgtgcaaatgttagtagatttggccagacatatatgaagattttggggttgtatcataaggcctcgtaggatagatctttctgcaaatgttagcgaagccagtgtttatgttctgtttgctagattagcgttatcagtttgcacgttccccttttttttctgaataattgtccttgtatgatcttgagggaatgcgtttacctggtcgtttgccattcttttta

SEQ ID NO: 6589 - DNA, 2364 bp, Zea Mays
agggtttcactcttcatatataaaccagtccacaactccccccctaaaacttagccgcgtggacgcacaccagcacctgccctcctcgccgtcgccgcctccctccgcgcgaccgatctaccctccgccgccaccatgtcgctgatcgccggggaggacttccagcatatcctgcgtttgctgaacaccaacgtggatgggaagcagaagatcatgttcgccatgacctcaatcaagggtgtcgggcgccgcttctccaacatcgtctgcaagaaggccgacatcgacatgaacaagagggccggcgagctgacgcctgatgagctggagcgcctgatgacggtcgtggccaaccctaggcagttcaaggtgccggactggttcctcaacaggaagaaggattacaaggacggcaggttctcgcaggtcgtctccaacgcccttgatatgaagctcagggacgaccttgagaggctcaagaagatcaggtttttttcgcgttcctgtattgccagatgctatggataacatcactacattatttgttgagaaattatgcatttagatgatattcgtgcacttgtcattttatatgtagcctctactaactaaagcaacatgtcatacctgtctattgcacctatattagcagtttagcaccgtgttatactagtctgaatctgaattgatgattttgtttgtgttggtgacagctagtcgtattagtttatgaagtctcggaatagacacctagtggcatttaattatgatagcaaatactgtttggcatctttcttgaatgtcagtttgggactttgggtacctctagctggtcatgtttgggcttttggttacctgcaccgatgtgatatgttgcatccatttacatacacaagcaactatgcacgctggtggtgaggtgtattgaactgtccttgattattgaggcctagtgtacgttgtgcagttgtttgtccagcctatggtgggttgtctacatctccatgaaatgagatggagagctgatggataaaggataatgttggttggacatatggtcataattacataagtttgattaggctcacagagtcacagtgatttgaactaccgtgacttgattgacatatcttcgggtatgtgattcccaaagtagccattgtgtagctgacttgcaactgcagataatcttctcagtcctgattcccgagtgtttggtttctctctgtcccattcgaaaatagttatagaatagttatctcaagacatgtgaaaaatcagtgtcagcatacttgttctataattgtccaactggtccattgtgcactgtctacactctacattcttgcatcgagaatacatgatcttattatcgtagtagcccagaccttcagatttttaatttgttctgcaggaaccaccgtggtctgcgtcactactggggcctccgcgtccgtggccagcacaccaagactactggtaggcgtggaaagaccgttggtgtctccaagaagcgatgagctctatatcaccctgagaaatcttggccgcactaccgtgttggtttgtgtccaaacagtcctgatgaagggtttctgtttaggcagtttcctgaaatggtgttttgctctaggacaatctcgcggttattgaaccttaatatatcgtgtccctgggttgtgtttttttgacactttataagtaatttcatttggatgagacttaattctggtttgactcgttacattgttaactcgactccgagaggagtgccttcccagtgcagttcattcacattgcctgttgtggaggataaggttcattttcatcgtttcacgtttgcggtattttgcgttaaattacacctgtgttgtacaagtttggttcagtgaagctgctgatttatttgctttgctcggtgttgtgaaacctcctcgcattaacctatagtattgcaacgccataacctatagtattgattgatttacactatgggcaaagctgtatgaaacatcctcgcgtctgactacaggaaaggcagtatggaacatgcagttgtgcttgcggattttgatcatgaaaacttggacctctctgcacgccagtagctcaagcatgcaggaatgcaattcatcgacaagttttcgattttcacccgtgtctttaaccgaaaccagcgttagacgcgagcatgcctctgatttccactcctcgctgtccatgggctgctttgaaatttgtatgctgtaaattataaatcttctccatgtgagaagctgaaatatgtatgcagtaaattcaaaatcaatcaaacagttgtgtagtcggtgcggatgttggagtccggccgattgcccgttggtg

SEQ ID NO: 6590 - DNA, 1187 bp, Zea Mays
ttccaccccaatcacaaaccctagagcccgaggacaccagatctgttctcttcttcgcttgtcccaaccatgcggattcgtaggagaacatctcacgtccttggctccggctactctacacctgctactccgcctcctatgcttgtaactccaccaccgatttcggaaccgtgtttggagccgcttacatctcacattcacgacgacttcttgagccctactacaacccgagagagtctctgcaagctcagtcgctcaccatgggacctcttggatgacttgtccctctcggatcctcaggaggtggatgacctccttgatggttactatgtaaacatggactcccatgcatggagcctctcctcggccaccatgcccgtcacctccgtgaagaatgagaagacgacgaccatggccgcagctagcagtgagagagcacaactacagatactgaataagaatacaacattgaaaaaggctacagtgggggagaaaagggtcagagagatccagaaccaaaagactgcaaatgtgaagaaaaaagaggcggaggaagataaggccatggcggcagcaccaacatcagcagcctccaagccctccagcagctccaacacacagaagacgaagcttcccaacaactacgatgcaaacgagggcttctactactaccacgggtttcgcccgtctcgtggcaagaggcgctgcaggaaccatccaaagaatgatgaagaggtgaaggtggaaccatccaaatctgcttctcttccgagtcatgccaaagttgagattgaagatgctagcacgagcaatggggctacagctggcggtgatgacgtgtgcaacgacaacaactctggccgcggcaacgtcaacaacatggatcagaggaaccaaaatccattgaagctcccgagaaagccagtgaaggtgcggttgctcatgtcgctgtgagcaaccaaaagcagccaggtgcttgcgcgttgcacatcgatggcagaagatgaagtttggtctgtctgttttactttgaattgagactctcgtagctcatgcatcatccccctatcgttgttggtttaaattggcttataagccgtttgcctcttgcatcttgacttgttgtttctggtaataatgctactgacagcaggtattttgagttcatttgtgttgacgtgttcaac

SEQ ID NO: 6591 - DNA, 1381 bp, Zea Mays
gtgaggtaatcccgcagtgcaggtgagcgaccggcgcctagcgttctgtggccgccgcccttctgccgtccgaccggaccaggtcgccgacgtcgcccctatcccgcacgcgtcatcgcagcgcctccgagtctccgccaagatctgcctcggccacggcgcggcgccgctggagctgcagccgtccagccgactgccttccgccgaccaccgaccaccgaccactggccgagccgccgcaatctgtgctgttctatacaggctagctgcgctttgaagcatgggtcgttttgaacaagttactccagaaggccctgaaactaatcagcatgatgagcagcgctccatacgtttacatgcattttctgatctatcacacgtccctgcagccacttttatttatctcttaaaggactgctatggatatggtacgaacaaagcaacctcaaagtttaagatcctcatgcagctggtaaaagtggcattgcataatggtccacagccaggcccgttcacatatgttgtccagtgtatgtatattgtacctctgctggggaaaacttattctgaagggttcagccatatgttgacatcctctttaaagcacttgaaatctgtggaatcagcacagaaagatttcttggaggcaaagcaccttgccgcacaacttgttcttgatatccttgattctattgtaccccatgagaaccgcatattggtcaagcttcttgagacatttgaaattgagttgagagacatggcccgtgctttgtatgattcagagttggacgatggtgatctaatgaaagcacgtgaacatctcagacagcaagttaagcgctgtatggaatcagaatccaatgcacttgctgtgactctaataacacatttttccatccaatgctgtgatgagtccttcatcataaaattgattaaaaacaatcaattagagattgcagagcagtgtgctattttcatgggcaaggaaatgatatcgctagtcgttcaaaagtatctagatatgaaaatgctgaagagtgcaaacaaattggtcaaagaacatgaactcacagaagagtttccagatgttagctatttgtataaagagagttcagtaaagaagttggctgagaaaggatgctgggatattgcagaaactagggccaagaaggacacaaaactcctggaatacctggtatatttagcaatggaagctggttatatggagaaggttgacgagctttgcaagcgatactctattgaaggttatgttgattctttggcgataaagtttatgactttctggtggaagtggaacttcaaaagctgcgatgtctaatgaaaaaagtgttatgaagatgtgtattacaagcctctcaat

SEQ ID NO: 6592 - DNA, 851 bp, Zea Mays
acggcgacggtgtggaaccgtgcaaaccgaggggtaatcgatcgtgggaaagttgaagcgtcgagagcacttttcccttcagtgagtttgccgcgcgcgctgttcctcactccccgcccctcatccacgagaccacgacgaacttgtgctatcgccgccgccctacgcaggttccgaggccttgactggtctcttgtttggccgcgagcatcaccagtaaaatagtcaatgtatgcaaagttggaaccatatatatttctgtagagtaaatgatatagtactagatgaatagtatggataaggatgggatattgtctgatgaaaacttggcaaagatggaatctgctcaaccaaacggacagcgggtagatataataatcattgactctcaaagtgatgaaaataaaattggtgtggaaactagcataagagagagttccttgaaggagcataaggagcctccacgcacaacagtggacaacaatgtgaatgaagaaacatccactactgatgatgattcagaggccaattcatacgagttctttgttcgagaatcagataatgaacaagcttcagcatctgaggaaggcactgaggtacctctgactgaggaagaagttgaagaattggttgttgaattccttgaagtcgagagcaaagtaacctatataatcttttatattttatgcacatttttttttctcatttgactgatcgtgtttgtggcaacttttaggcagctcaagcacaaagagtcacttgaaaaaagagtcactggacaaaattgaaactgaagtaagattggagttatctgaaaggctttcaaggggatgagtgtgcactgatatatt

SEQ ID NO: 6593 - DNA, 2481 bp, Zea Mays
aaaaccccaaaaagaaatatccaaggccgcgccgtgcgcgcaatccccctcgctcgcaccatggcgctgcagctccagctgccgcggccgctcgccgccgcacggccctctatcctcctcccttccccagcccatggtgcctccgcttccgcgaccccccttcacgcccgcgcaggcggcgttgcgttttcgctccagaccaacgtgcgcctcctcaagcccaaccgccgcgtccgccgctctcgggacccctactacgatctcgacgaggacgacgaggaggaggcggagttcgacgaggacgatgaagacgacgaggagggctacgagagcgatgatgacttgtcgggtttggaatatcctggtgtactttattcaaacagccctcgtgcttcaagcaagaaaccagtggtaaaagaaaactgggaaggaagacaaaccaaaacccatgacaaatacggtagtccaggaagaagtaagtccatgcatcctaggagtaaagtgggacgatcatcaacagatcttaagaacatggacagagaagttgagttgaaaaatgcaagtatctctcgaagtctgttccagaaactacaagaagaatatgacttcgatgacaaatggttaccactgattgattacttgtgcacctttggactaaaagagtctcattttacttacatctatgagagacacatggcctgctttcaaatcagtcaggcttcagcagaagaaaggttggatttcctgctaaatgctggggttaaaagcaaagatatgaaaaggatactggtgaggcagccacagattctggaatacacccttggcaatctgaaatctcatgttgattttctcgtgagcattggagttccaaatagacgaatagggcaaattatttctgctgctccttcgatgttctcttacagtgtggagcagtctctgaagccaacagtaaggtatctgattgaggaagtaggtattgaggagagtgatgtggggaaagtagtgcagctaagcccacagattctggtgcagaaaattgatagtgcatggaaatctcgatcgcttttcctgtcaaaagaactggatgctcccaaacatagcattgttaagatggtcacaaaacaccctcagctgcttcactacagcattgaagatggaatcttacctcgactaaatttcctgagaagcattggtatgagaaactctgacattctcaaagtattgacaagtcttactcaggtgttatctttgtcattggaggacaatctcaagccaaagtatctttacttggtcaatgacctcaagaatgaggtccaatccttaacgaaatatcctatgtacctgagtttgtctcttgatcaaagaatccgtccccgccatcgttttctggtttccttgaagaaagctccaaagggcccatttcctctgagctcctttgtgcccacagatgagcgtttttgccagaggtgggctgggactagcttggaggcataccatacattcagacagaggttgctgctaacaagtttcgcagagaagtctggaaggaaaacactagtctcaagacggtagatgcctaggtggtgggagtttgtttctcttgagcccacgctcctaacattctcaggaaatgggcttggttgctgacttggtacttgatgttcacagggtttatactgcatcattaactatagcatatacttatcgtccatatcacctccctaatggtgaaaagtcttcaccgaattccctcaatcagctgcaaatggatgacaatctaagagaaatgcattattgccagtcgccagaatggttggatggacacttggttacctagctctaggagtacctcgccttgacggctaaaactgttgtgcagtcaagctttcggtggaatcgccatgcaaccaaactaccaagtcataaaaagtttccaaaaaaaatatagaggtactttattatttattctatcaatatactagattttaagttctaattcatcatatgttaagagattaaaaaagagaaaatttatcattttttaatcctttatattggatataatttttctcttttttatttcccttgacgaggataagttagaatttaaattttgatatattggtagagcagataataaaatatctatatctatggtttttttagatttttcatgacttttggtagtttaattgcacaggaagcttgattgcacaacgaattttcccagcagttttttcccgtcttgattgctagttttactattaagtacagcttctgaacaaaatgctacgctagaaacatgtagcctaactgtaagagtgccatcacaggcagccttgtgtactgctgtaattctgcaatgccttttgacattgggggtttcctttttttgtgaaggcttgctatcatgaatcatacacggcttgtacgtcctaccatttcatggtggttgggttagaactctctgtgatggactgc

SEQ ID NO: 6594 - DNA, 1270 bp, Zea Mays
aagccccacacgctgcagcaagaagaaccagaattgcatcacagatgtttcatgtgttcacttgatgcaaactgaaactgattatgatcgcactgcatccattattgatggcaagtccattgcagaggacatgaggttacatattgctgaagaggtctgtcaaatgaaatgttcagttggacacgtgcctggtctagctgttgttttggttggtgatagaagagattctgaatcatatgtgcgatacaaaacaaaaggctgtgaggaagttggtattaaatctttgttggcgaagttgcctggaaactgttcagaagatgaagtgatggattcagtgtcaagatttaatgaggatccatctgttcatggcatcctagtgcagttgcctctaccagagtttatggatgaggaaaagattctgagcatcatcagtctgaataaggatgttgatggtttccatcccttaaatgttggcaatcttgcactaagaagccgaaatcctttgtttgtgccctgtgctgcaaaggcttgcattgaattattgctccaatctgggattgaactgatgggcaagcatgtatctgtcattgggagaagcaaagttgttggattgccaacttccttacttttacagcggcatcatgccactgtcagtgttatccatgccttcacaacaaatccagaggctattacccgcgaatctgatattgtgatatcagctgctggagtggccaatcttgtaaggggaagctggttaaagcaaggtgcagtggtgattgatgttgggacaaatccaatcgaggatccaaccagtgactacggttatcgcctaactggggatgtctgcttcgaagaagcagtgaatgtggcctctgctataactccagttcctggcggagttggaccagtaacgattgccatgcttcttggcaacacacttgattcagcaaaacgcgtttatggcctaagtgactgaaactgacccccctctgaactgtaattttgtcgtgcttgtcctttgtaaactagttctcttctcttttcaacctcccgtcgctctctattttagctgtaggaggagggctgggatgtaccatattcttgctcaataagtattgtattagctgtgtccattaggtaagtttttttgtgtgtgaccatattagcctgttacctatataaccaacacacaatagcaggaacatgtcttcagacacgatttatttgcatttttttataagagaaataggcctgactgacaacattattg

SEQ ID NO: 6595 - DNA, 1444 bp, Zea Mays
gtggcccaaaaggcccaaacattcactgatatcccatgttttgacacgagcggtgggacgtgctgacggagatgggtggcgccgccgccgccgttcttgccgtcgcagccgcacgccggaaatctggtcccttcgtatccttgttctccagggcggcgcgcaggctccacgatgctgtagagactgcagcggcggaggaggacatggcggggacgcggagtccgcggcggcggcggcggagcagcagcagcctccttcttggaccggaattccccgacacctgggacccttcatcgcgtgacacgacgccgcagtctcctccgcggtgtgcccaagctgattatgatcgcactgcatccattattgatggcaagtccattgcagaggacatgaggttacatattgctgaagaggtctgtcaaatgaaatgttcagttggacacgtgcctggtctagctgttgttttggttggtgatagaagagattctgaatcatatgtgcgatacaaaacaaaaggctgtgaggaagttggtattaaatctttgttggcgaagttgcctggaaactgttcagaagatgaagtgatggattcagtgtcaagatttaatgaggatccatctgttcatggcatcctagtgcagttgcctctaccagagtttatggatgaggaaaagattctgagcatcatcagtctgaataaggatgttgatggtttccatcccttaaatgttggcaatcttgcactaagaagccgaaatcctttgtttgtgccctgtgctgcaaaggcttgcattgaattattgctccaatctgggattgaactgatgggcaagcatgtatctgtcattgggagaagcaaagttgttggattgccaacttccttacttttacagctgctggagtggccaatcttgtaaggggaagctggttaaagcaaggtgcagtggtgattgatgttgggacaaatccaatcgaggatccaaccagtgactacggttatcgcctaactggggatgtctgcttcgaagaagcagtgaatgtggcctctgctataactccagttcctggcggagttggaccagtaacgattgccatgcttcttggcaacacacttgattcagcaaaacgcgtttatggcctaagtgactgaaactgacccccctctgaactgtaattttgtcgtgcttgtcctttgtaaactagttctcttctcttttcaacctcccgtcgctctctattttagctgtaggaggagggctgggatgtaccatattcttgctcaataagtattgtattagctgtgtccattaggtaagtttttttgtgtgtgaccatattagcctgttacctatataaccaacacacaatagcaggaacatgtcttcagacacgatttatttgcatttttttataagagaaataggcctgactgacaacattattg

SEQ ID NO: 6596 - DNA, 2349 bp, Zea Mays
agatggagttatggagaggaataaatggaggtggcgaggggaggagagacggacgaaacggacggacgccacgccctgcccgccggggctgcttgccactcctctctcttcctcatccatcctcgccccggccccgcccccagaaccaaaccagcctccctccccagcagctcacgagagagcgcaagcaagtattactgcgcaccgcctcgcccgcgggcgtcagcgtgaagctgccgcacagctaccccgcgaggcatggggatggacgccggcggcgggaagctgccgtacagctaccccgcccaccaggacggcaagctggtgaagagcttcagccgcgtggagccccgcaagttcggcctcgccctcgtcgcgggcttcctgctcgtcacctgcgcctacttctccaccgccaagttcgacgccatccacgtcgccatgatcagccccgtctccggcaatgcggctgggatcggcccgctagtgggcgccgccaacgccgacacctccgactccaagcagcgattagatttgggcaagcaagacccggacgacgcgctgtccaggtccgaggaggaggaggggagcagggccgacgaggtgctggagaaggacgacggcaaggcatcctcgtcgtcggggacagattccggcagcaatgcgccgctggaggacacgaggagagacgagacctttgtgggggacagcggtggtgcatcttccgcggcgggcgccaggagtgaggcggttcctgccaggcacgagcacgacgatgacgcccccgctgccgccctgcttcctcccgtgacgtcagagggagccgcgaacagcacgcaaggatcaggagttcttgaggacgaggagctgcaggtgcaggacgctgtcgccaatccttccaagaggagcaacgattcagccgccacgcgcagcagcagcagtggccgctcgccctctgtggttcactctgatcctgccatcctccctgctccctcgcagcagattgctcctgctgctcctcaagaggcagataaggctcttgctgttcagcatattccagcgatacctgaggttaagcaatcagattcggagacgccggcgcgggagtggaagccgctgtgcgacatcacctcgaaccgccgcatcgactggtgcgagctcgacggcgacgtccgcgtgctgggcgccaacgcgagcgtcacgctggtggcgccgcccggcggggcggacggccgcaccttccgcgcggagtcgtggcgcatcaagccgtacccgcgcaaggcggacccgaacgcgatgcgcgtcgtccgcgtgctgacggtgcggtcggtgcccggcgaggcgcccgcgtgcacggaccggcacggcgtcccggcgctggtgttctcggaccgcgggtacacggggaactacttccacgcgttcacggacgtgatcctgccgctgttcctgacggcgcggcagtacgccggcgaggtgcggctgctgatcgcgcgcgcgcggacgcggcggttcgtgaacgcggaggagatcgtgcgcggcgcggagaagctcgggttcgaggtggtggtgtcggaggggacgcacgaggtggcgcccttcgcggagctggccaacagctgcgacgccatcatgggcgtgcacggcgccgggctgaccaacatggtgttcgtgccgacgggcggggtggtcatccaggtggtgccgctgggcgggctggagttcgtggcgggctacttccggggtccgtccagggacatggggctgcgctacctcgagtaccggatcacgccggaggagagcaccctgatcaaccagtacccgcgcgaccaccccatcttcacggaccccaacgggatcaagagcaagggctgggagtccctcaaggatgcctacctcgacaagcaggacgtgtcgttggacatgaagaggttccggcccacgctcaagaaggccatcgcgcacatcaggaaggccagggccaaggccaacgccggcggcggcggcaacaactaggcatcgccgtacatgtgctcattcatcctcctcttactctacttttgtttttcctcccctccttttcggattatggcagtacttgtatgtagcaagcagaaatcgatcaaatgtataatatggcagggaaagaagttagagcaaatcatatattctcttttccccccacttttcggtgagggtcaatggtggatggagagtatgatcaggactgagattctcctataaacattttagatttagtttctctcgaggaaaaaaaaaattcagatagcgaatagtacctacttagtacataatagtaattttttatacaaatttaataaaatatag

SEQ ID NO: 6597 - DNA, 1943 bp, Zea Mays
cgccagtgtcaggcgatcccggccgtcagccagctcattcgatggataggcgtgaggtcaagaatctgggaccatgggcaaaggggctgctgaaaggcatgccgcaggcagcggcgggaccggcagccatggcgcctgttgcgaagtatccgctggttctggcagaggaccggacgcggcggccggatgttctcaggcatctcaaagtgtatgaaggagggtggaacgtcaccaataagcactactgggcggtgtttctggatttcttctcggtgctttgtggttcatatttttcgggatagctgtggctggacgatgctattttggaacaagaatgtccaaaagaaaggtttcttatgcagatgtagtaggtcctgtgttgcttggggtcttcacacttgctataatagctgggtgcattctccttctgtatgggcagagtaaattccatgaagaagctacgcggaccgtcgattttgttgtgaaccaatctgatttcactattcagacactaaggaatgttacagaatacttgtcatttgcacagacgatcactgtggcagcactctatcttccatcagaagttcaaggtcaaattgacagtttgaaaggggatttgaacaaagcagctgacacaatatctgtgaagacagcagaaaattacaaaatgataagaaaagttctccatatcatgcctagagaagtatggaccgagatatacagtttacatatttgttaccttatgctggaaagctgtggcggctctctttatccttctagggattttcctgatactaaacagcgctgcgcaggatacctgcgaagcaatggaccagtgggcccagcaccctcaggcagagacagctctgagcagcatccttccgtgtgtggatgagagcacgaccaaccgaacgctgtaccagagcaaagaggtggtggtgaggcttgtggggatagtgaacagagctatctccgctctttcaaatcgaaggccgcatcacaagcacccaggacagttcatgccttacctgtgctcgccctacgactcaaacctcaacgaccgaccgtgcaagtatagggaggccacgtttgaaaacgcgacgacagcatggttgaactacacgtgcatggctcaagacacggacttgtgctcaggcaacaagaccttaacctacgacatctacggccaactcgtgctggctgcaaacgtgagctacgcgctgtaccactacgcccccttcctgctgaacctccaggactgcaagttcgtccgggccaccttcagcgccatcgcctcgcggtactgccctcctctggggcacgacctcgtgctggtctccgcgggtctggcgctcattgcctcggcctttgttctctgcctcgtctggatgctcttcgcggaccgcccccgaagggaggaggtgtccgatctggcgtcggggtcgaggatcgcgccggtagacagctctccgtcgtagaagcaagcaagcaagcaagcggcgcaacgggatgtctatgactatgagtgaggctgcttggtcgcatggtgaccagagtttagtacagttcccttccatggctatgtaaaatagtttcggtatagcgagttccgggagacgtcgttgaagtgcggagaggagggggagaaaccggaagcacttcgggtgggggacaaaaggccccattttgcagtggagagagttaggtggaaacgagtgctctgcttccttctatcgtatgtcagatcgatgcacccatggtgtatgttgctgcaaggacaaacggaataatcgatcagggttcccatgaccaatcacgcggcgaaagacagccgtgttcgatagttctgcatcctcaactaacttgaggacgacgtgctcgttgtcgttggcgtgtggaatgctgtcgactgtcgttatttccctgtttggagagaagtgaac

SEQ ID NO: 6598 - DNA, 2917 bp, Zea Mays
gtgacgcgtggaccccgcacgcaaaccctagatcggaagccgcacccgggcacatgaccgccttatccccgagtcagaccagcggcggccggaaccgggagccccgttgctggccacgcccccaccgctcgcgcgcgtcgagcagcttctcgtcgtagttgagcctacgcttggcgcctaccgccggttccgctgccgggtgtcctcccttcgtgccgctgacaccagagggtaggatccccgcgctttcgaccagcagatcccgccgcgacccaggaaggagacacttatggggaagggacaaatattagctgttcttcaaataggtggagaattcaacaccgatgaagatggacacatgtcatattctggtggagaggcacatgctatgcatgttcaaagtgactggacttttagtgcatttaagcaagagatatcgtcaacacttaacaatctgaagcttgaccagtttgcattcaagtatttccttccaaagaatgataaaactttgatctctatttccaatgacaaggacctacgacgcatggttgaattccatgcggagtcagattcgacatacatttatgtcatgaagaaagctgacaacagatcaaagaacattgttgctgtcttggacactcccacagatgcctttgcgattgtcccaacaactcaggatgggtctaagagacaaaaggtttgtgcaagttggaagaatgtgataactggagttggccaagtgtttgaaggacctaaggatttccgtgatgccttacataagttgcccatggcgaatacatgcttctaagtcccctgcaaagaaagaatttatggtcaagaaaatatctgaaagccacacctgtgaatctgaaacagtcaaaagcaatcggttggcttctcaacgatgggttgctagtgtcataaaagaaaagttgcgtgatagtccaaactacaggccaagagatattgcaaatgatcttcaacgagagtatggactatgcctgaactattcacaggcttggcgtggaagatcaattgctcagaaggaactttatagtacacacgaagaggcctgcagtcagttgccttggttttgtgaaaggattgtagagacaaaccctggaagtgtggcaactgtagtggccttggaagattcaaagtttcgtttttttgttgcattccatgcatcgctccatggttttgagcatgggtgcaggccgctcctttttcttgaagcgataactgcaaagccgaataagcactggaagctactggctgctgcttcagttgatggtgaaggtgatgtgtttccagttgcttttggtgttgtggatgacgagtcgcgtgaaaattggcattggtttcttgagcaactaaaatcttcacttggcacatctcgaaccatcacattcatatcgaatggagaacatggactttgggatgtattatcttcagttttccaagagtgtcatcatggctactgtgtggagtctcttattgaagaatttaagatgcaactggatgatgcatggactgaggaactaaaagattcgatggttgagcatcttaagaaggccataaattcatgcacagctgatgagttcaatcagtatattgagctcatcaaaagtggttctgacaagcttgctgattggctcttggagatcaaacctgagcgatggtcagatgcttttttcaagggatcacgtcatgggcagtattcttgtaatatttttggcactgtgtctgagtggattcccacgagatatgagctttcagttgtgcaattggttgacacgataagatgcaagctgatggagatgatgtacacacgcagagagtcttccaatgcatggactgaggtattaacaccggcagccaatcagaaacttcaggaagaggtgaacaaagcccacaccctcaatgtccttccagcagaaaacggtgaaaatggcaatgtgtttaaggtctgtgatgactcagttaatgttgtcaaccttgacacatgggaatgcacctgccaaaggtggcatatttctgggctgccatgcatgcatgtgattgctgtattggagcgcactgggcaatatgcatatgactactgtgtgaagtacttcacaacagaatgctaccgcttgacctattccttgtcaataaatcccatacctgatgttattgtgccgcctacattaatcgacttagctcagagcccagcaacatacccatgcccactgcgaacccgccgtcgggttggccggccaaaagagaagcctgctgatcctcgcattgcaatcaagagggcagtgcgctgcagcaggtgcaagggttatggacacaacaaggcaacctgcaaagttcctatcagcagtttcagcacgtagtatttactcatcaaatcagttgtgcagtgtgcattagtgtggagagttgttcgtgttattctctgcaatgttagtgttgatgtttcttttgatagtctgtgatacatgctagggatgatcttagcttggctgccaagagaggagtctgctgatcctcgcattgcaattaagagagcagtgcgctgcagaaggtgcaagggttatgggcttatggccaccacaaggcaatctgcaatgttccgatcagcacatagtatttaatcattggatcagttccgcaatgtatattaaggtggagagttgttcgtgttaattctccaaaatgctagttctgatgtttcttcggatagtctgttatacatgcaagggttgatcttagctctaaattgatctgtattttcaccattgcttagactaactgtattcagcttgtgagtaaaacgccgtagcttatactcatgttgctatccactttactcactttcttttccgttgtgtctgctgtgtggcttcctcgccatctcggcaactgcaag

SEQ ID NO: 6599 - DNA, 1530 bp, Zea Mays
ctttgctcgtcttgacgcttcgcttgtctaatctctggaactgcagcttccctcgctgacttgccgttggcaagccccgctccaagcatctccgcgcctgcttctgccgaatcgcagagcccctctcccgcttcccccctctcccctcttctctcatcattgattcgattttcctcgcccctggagcttcaaattcaagtgaaggagccagttaaggcttgccaaaactagcggcggcatcggcaatgctctagttggcctttccttccctcccagctcgagcagcgcagcgcggccctctttatctctctcggcagtggaggcagcgtcacccttcgcctaaatcaccaccaccagctctggagcgccgcgtcgccgctcctctaccatttcctggtatattggaccggaacggactaacggagtggagttctgctattgatcattgtgagttcatccccactccaatccatctgtccatggtccgtatgagctcatcttcctcggcgtctggggtcaatctgacagagcaaatcgagaatgtttttgaccaactgatcagcaaaattgaacaagcggatccagattttgacccgcggccctttttgaaacaattgaatgtgttaggccgctatgaaccaatcaagcggaatgtatatttcactaagagatacattgaagattatggcatttcttgtcactgtaagccttctcctggttcatcagttgtgtgtggcagagactgctattgtagcatgcttttctcttgctgttcatcacaatgtgaatgtgatattgcgtgcaccaataaatcattccagcacagacctcttacgaaaaccaaattgattaagacagagaaatgtggtcatggattggttgctgaggatgaaataaagaaaggagaatttgttattgagtatgttggagaagaacatgtgagaataggctatggacaatgaaaaggctggatgacactgacttctacctttgtgaggtcagcagtaatatggtcattgatgcaacaaacaagggaaacctgtcccgatttataaaccatagttgtgaaccaaacacagcgatgcagaaatggactgttgatggagagaccagggttggaatttttgcacttcgtgacataaagataggggaggagctgacatatgactataaatttgtccagtttggagcagctcaggtttgtcattgtggatcttcaaagtgcagaaaaatgctaggcacaacaaagtattcaggaagctcacagaatcatcgtaccaagaagaaaaagaggaaaacaagttgtgagaattgcatacagcagtttcttcgtctgtggcatccacgacaaaaaatgtatgttggatgttggatagttgacttcgatcaaggaactaaaatgcatactctccagttcattgatcaccatactgaaaagtttgatttgaaagaagaagaatggcacttcttggaggttctaaggtgtcaaaggaaaatgaataaatggatgatgctcaatgaacaaggttt

SEQ ID NO: 6600 - DNA, 784 bp, Zea Mays
ccgcgcctcccgacccggcgtcgcgtcactccccacacgcatctcgtcccttctctgccgcatagaccccgcccagcagagctcgctccggcgccctgcgagcaacgactgcggccccgccaactcctcgggcctcgccgctgccgccgtgtcaacctggcccgctccctccagccggtgggtgaggagcggctgtagccctgcaggaacccccggcaaggacatggacaagccaccgccccaattcgccttctatcacctcatccctgccctcaccttctcatgcctctccatgtgagtccccaaatcaatgagtgtcgttcccagcctgtcccttacacgtctatccctcgacaacatgttcctttgtggcatcctggatgacatgaacaggttcccaccaatcataggaaccacaacactcggttggtggccttctaggagctgttttgtgctttcttcaggatcttcgctactccaagagctgatttgcggatcagacaccacctcccctctctcagtcttagagtttgtgttggaggcttgtcctcgtctggagagctctcgccatcctctagcggcagctgtagctcttttggccctctctgatgcttctccgcggtcagtacacattattagaaacaatcagatttttcacaggacaagagttcatagacatacagtaagtagattgcgtgttttagatgttagtatattacatatgagtaactaaggtgcttcggacaaaatatgttctttctcgtagcattactgttgctttgat

SEQ ID NO: 6601 - DNA, 2491 bp, Zea Mays
gcgtaactgcaggcaacctcatgtgtatattgtagcaaagggaattttcacttcccaccactacgccacggcagtacggcacacgccatagcccttcccgcaagcagccgagctcctccccaaatccttccccgatgctgcggcgcaacagcgagtgcgaaatcgagtccgagctctgacgcgctcgcatggagctctggttctaggtgtgggctgcgctcctcgtatggatccagatgttctcgtggaaccgtaagcagtcctcctcctccggctcgccctcgccctcctcctcctccggccgccgccgcggcggggcggacgcctccatggactccagcagccgcggcggcggcgggagcgggagtgggagcgggagccgcggacggagcccgcggttggatcgccgcaacgcggtgaagcgcgtcgactacgaggcgggcgcgggggcgtccgtgtcggtggccgcgtcgtggtcgtcctcgtcctccgcggatcagcagcgttcgccgggcccggggctccagccttcgcgctccctagacgttgcccccggagcggacctccggatcagcgggagcgtagagggggaggtcgacgaactctgccgcagcctggggctctcggggcccgaggatttcgccatccccgtcgcggcctgggaggcgcgcaagtcgcggtctaactccgacctcctcccgcgctcccaccccgacccgtccacacccgccgacgaaccctcgccaattgcgcgtgtggtctcggcgcctgatgttcagccgactcgcttcgtccctgcccccattcctgctactgttgcggcgcccgaggagtcacccaaggctgcccctgccgttgctgttgcggctcccgtcgggggtttgcccctgccttcgccaaggaggggaggcggggaggtagggatacggggtgcacggccgcctttactctccccgcctccgccaattggtgcactcgctcctccgccggtgaggaggtccttcgttgacgatgacatgactaggtccgcttgggacattgtgcagtcgtttgctcccagggaacagggaagtgaaccgggagagcgtttggacactcgttgcaattcggacacagaggaagagagtgaggctgaggatggggtggcagctgtggagggcgagctgaaagagttgaggataggagagaccttcgaggggctcactggaacttcttcattgtcaacgacaaatgatgatgatgcgtccagtacaaccacggaggccatgttcatcatctcaccgaatggcaagttcaagcgtaagattaagtcatggatgcgtggtgctcttctgggaagcggctcatttgggatggtgtacgaggggatcatgagggtgcttttttcgctgtgaaggaagtatctttgcttgaccaaggaagcaacgcacaacaatctattgttgcacttgagcaggaaattgcactcctcggtcagtttgaacatgaaaatatagtccagtattatggaactgacaaggaagaatccaaactctatatttttattgagcttgtcacacaaggatctctttcatccctctatcaaaagtataaactacgagaatcacaagtctctgcatacacaaggcagattcttaacggattggtttacctgcatgagagaaatgtggtccacagagatatcaagtgtgccaatatattggtgcatgcaaatggatctgtaaagcttgcagattttggattggcaaaggagatgtcaaaaatcaatatgctaaggtcatgcaaaggaagtgtttactggatggcacctgaggttattaatcctaaaaagatgtatgggccttcagctgatatatggagccttggctgcaccgtgttggaaatgctaacccggcaaataccatttcctaatattgagtggacaaatgctttcttcatgattggaagaggggaacagcctactattccctgctacctgtcgaaggaggcacaagatttcattggccaatgtgtaagagttgatcctgagagccggccttctgcatcacaacttttggagcacccattcgttaacagaccactgcgggcttcatttgaatcttcatctcccccagccatctgattgtactattgatatagttgatcatcatgatttacgctactggttccagaatagaattatgtgggcgtgttagtttagtatctctgtagtacatagggttggtaggcagcattgctatgtttttgtattctttgggtgttcttcatcaggcatagggttttcttcctggttactacgtagatttgtgtacacttgtaggtaaaagggttgcaaacttgcaattgcctctggtgtagggttaggcagttagctgatgtttgtgaatattagacatcaccattctttacttaatggtttgttgaagcatccgcagcattgaatcgcgtggtccttctgtttttcgtcgcataggaaactggttcttctgat

SEQ ID NO: 6602 - DNA, 1209 bp, Zea Mays
gaccgcctccacccgagctaggtcacgaacggcatcagtgcaacaggcaatcccagcggcgtcggcaagaaatcagatctggaagacaaggaagacggaggaaggagatccgaaaaatgcgaggcagagacggggaagacgaggaaggagtttaattgatctacaagcttcagaacatgttcaagaatacatttcagtctgggttcctgtccattctttatagcctcgggaccaagccattgcagatatgggataaggaagttgtgaatgggcacattaaacgaccccaagatgaagatatccaatctaatgtacttgaaattgttggaacaaatgtacagtcaacttacatcacatgcccagctgatccttctgctactcttgggattaagcttccatttctggctattattgtgaaaaatcttaagaaatacttcacgtttgagatccaagttctggatgacaagaatgtccgacgtcgatttcgagcatcaaattttcaatctgtcacaagggtgaagccatatatctgcacgatgccgttgaaactcgacgatggctggaacaacatccagttgaaccttgctgatctgacaaaaagggcgtacggcacaaattacgtcgagacgctgcgggtgcaagttcatgcgaactgccggctccgcagaatctacttctctgaccgcctctactcggaggaggagctgccgcctgagttcaagctctaccttccaatccagaaatcataggatcccgagggcgtggagagactctggtgaccgggagacttatatcgtaccattgtgaggataacctagctgcacatctgcgccttcctgagatacagaaaaaaaatgtaccagaatgtttctgttagttttctgattgttgtgcgatgaatgattaggctgttctgttttcatagcaagggcgagtagccttagttggggctgttacccagtgacccctttgtgtgaacgagtagtcaatgttattagtccggaccctttggctactggtccttctggtccaaagcaaaacgtaccgttactgctcactgcctggtcatttaacgtgcttcttccatggttgtaccgtctctatgatagtatcatgtggccgctgatctattggatacatgttacgcgtgactcgcattaaaagcttcacttctctttagcgtcagccgtgccgagtgctgcagtccag

SEQ ID NO: 6603 - DNA, 2130 bp, Zea Mays
gccacggcgccatccaagtccgcctggccccacatgcagcgagcggctcacgccgtgtccccattcccagctccgcctaccataaaacccatccgctgtttgcgtcttcatttctctctctcctctcatctccacctctcctccggctagggtgttcacgcctgccgcggcgaagcttctgccctccccggcgtcgcgctctggtcgtcgtcggccgggaagatggctggcggcttcagggtacttcatctggtcaggccctttctggctttcttgccagaggtgcagagcgcggataggaagataccattcagagaaaaagttatctacactgttatttctctcttcatttttctggtgtgcagccagctcccactctatggcattcattcgacgactggagctgatcctttctactggatgcgtgttatccttgcatcaaaccgtggcactgtgatggagttgggtattactccaattgtgacctctggtatggtaatgcaacttcttgtcggatcgaagatcattgaagttgacaacagtgtgagagaggatcgtgctctgctgaatggtgcacaaaagttgcttggtatcttgatcgctattggggaagctgtggcatatgtcctgtctggaatgtatggtagtgtaagccaacttggaacagggaatgctattctcattatacttcagcttttctttgctggcatcattgtcatctgtttggatgaacttctccagaaaggttatggtttgggatctggtatttctctgttcattgctaccaatatctgtgagaatatcatctggaaggcatttagccccacaaccatcaacagtggtcgtggcgctgaattcgaaggggctgtcattgcactgttccatctgttgattacgagaaccgataaagtccgtgctcttcgtgaggctttctaccgccagaaccttccaaatgtgaccaatttgcttgccactgtcttggtattcctcatagttatctatttccaaggcttccgtgttgtgcttccagtgagatcaaagaatgctcgtggccagcaaggctcatatccaattaagctgttctacacttcaaacatgcccatcatccttcactctgcgctgattaccaacctctattttatatcccaggaagtacagtggaaacttccttgttaaccttcttgggaagtggaaggagtctgaatactctggccattctattcctgttggtggtcttgcttactatgtaactgccccatcaaggtgaaaagctagttccttcattggggactggggaggccttctcgccatgatcatttttgttgtttttgttattcaataattaggtattcttttgactaacaatagcacattggaaaccacgcagtttggctgatgtccttgcaaatccattccatgcactgttttatgtggtcttcatgctgtcagcctgtgctctgttctcaaagacatggattgaagtttccggttcatcagcaaaggatgttgctaagcagctcaaggaacaacaaatggtgatgccaggccatcgtgagtcgaacttgcagaaggaacttaaccgatacatccccactgctgctgcatttggtggtgtatgcattggcgcattgaccgtcctggctgatttcatgggtgcgattggttcaggaactggtatattgctcgctgtgacaatcatataccaatacttcgaaacctttgagaaggaaagggcgactgagcttggtttctttggtttttgattagtagctgtggaaccttaacttggctatagctgaattttcttgtaagtccctgtagtgcttagccagttgtaacttaaagagttctgtttaggttgccttcttgcggccacaatcatgtagcagaatgtgcgtgtgtttcaggttagcgtgggggtatgtgcatctgtccaaagagagtctgcaatttggcaaccggatattttgttatcaatttcagttacttcgaactgagcatgttctcattcccactttctgtttcggtctgttactaatttctcagaacattagatgctcacaggcgctttattctaatgtctctatttcatgacgagatatgaacatctctgaatctgattgcttcttt

SEQ ID NO: 6604 - DNA, 2710 bp, Zea Mays
ctgcagccgcctgcccaatgagcagcggccacgcattctcccttccctggactattcttggtgggtggagagagccgcagaaggcagctggaagaggagaggaccgcgcgaggctccgtgccggcgagttcgggtgcttttcctgcggtccgagatgcgatcgttgggacccgggagatagcgcagctcgggttcgggttcgggggcggctaccgcgacggcggccgccacctgagcaggatgtttaactggaacgacgagcagcaccaggatctcatcatgagtttcttggttggtattggcgatcaccactgtgatccttggagtgtttgggagcttgactggcttcgtcttccttctgctcactctgccagtcttgtaggctctgcttctcctgcattgacttctacttcttttgctcagtggcattatcaattgagaaatgtatgtggttcccggctatccactcttgcctgttgtggtcttttgggagataccttggtgatgtttctttggatcaataacatgatggtaagggatgcaatatgggctgaattcaatgagtgtgatgaccattttgggctttgcccaaagggggcaaaaaaaaacccaatatttatttccggggtccccaaaaacaatgaggaagaggtggctagtattgctgccatcactgaacagtctgcaggtgttcaaaatggacatcaagggaaggaaaaagcagactgcaagtcacacaagtgcacatatttcacccacacaaattgacatggaatcctggcccggacttccttccctgaatcctacacttgatagaaactatagtgatgacaacatagcatccacatatctggatttttgtgctgcaaccagtttacaagaagtgaccagaaattctacagagcaactagatggtaaatcagaagtgtttggtaatgatcaagaagaaaagagtaacagtttccttgattgcgactggggcaatattggaggttttgatgattttgaccgtctatttagccatagtgactccatatttggtaatgagatagttgccaacgacagtgattttctttctgcatcttcgaatttgatggatactgctgtgctatcaatcccagttccggtcgaagcacataagaggccagtgtggtcacgtagaaaaccagaggaaagaggtaaaagtaaaatatccagcagtacaagtggcttctcccacagcaaagtagagagttcatcgacgaatttgcaaactcctatggaacctgtacagactcctcaatatgcactgttccaggatagcaagaagataggagaagttcagcatgctaatcagtttatgtttcctggatatgggtatcctcctgcatatccatttcctaccattccgttagtgtcaaacattcaagctgaaggctatcagacaaaaccagctggcacaagctaccgaacttcggaagattacctaaaacagtcaagttccacagaaatgtcacaagatataccatcaagaccactaacaatgacaccacaagaaaagatagaaaagcttaggcgccggcaacaaatgcaagcactgatagctattcagcaacaacagcaacagtttggtcaacagggtcctggcagtgacacaatggtgtctcaagcatacacccctggtaacaaaaatccggattccttagggagttcaattgtcatagatgaaaacacaaataaggttatttcgcctgagatgattccaactgaccatgaccgggttcacaagagttctgcaatttcagatgatccctttatagaggaaaaaatatattatcagctacaagatgctcttggcaagttggataccaaaactcgactatgcattcgagatagtttgcttcgtttggtccatagtgcaacagagagaaagattgatggtgataggagcactaacaagactaataaagatgaagatgaagcttcggaagacgcatctactaggaaaacaaggtctccaaacaaggaagcagaaacaaccactaatccaattgatcgtatagtggcccatttgctgttccacagacattgctccaaggttgcaaaagcaacaaaagaaataatatcgtcaatccccttgactctagaacctgagccgaaggtacccttgggaactcctagggttccatcaaaagatcaacgagatgagcaagaaattgtgttgcaaccatcacaataatgtgagatgtgctagaagataaggataaaaagttatgcaaatccagtgatgatggcagtcttatgatcgcctgtggccctggagatcgcttgtgtaatatgtagccatttcaacattgtaggatccttttattttcatcctgtaagaacatctcagattgtataggaacctacgattttgtgccgagccgtaaaaagagcaaaccttggctctggacataaggcgtgtttaggagcaagaggattaaagcaaaccttggctcttggctctggacataaggcgtgtttgggagcaagaggattaaagttgattgaaggggctaaaatccttttctattcaatttaaaatagtaagagagattttagtcctttcaatctttttatgatgcgtttggttgcaatgataagacgagacgagatgagataatccttcaaataatgttgtttggtttagggtcaaaggttgagataggattatctcagtgttgttcca

SEQ ID NO: 6605 - DNA, 1723 bp, Zea Mays
gtcggagaccaacgccacgccgacatcgacagcactgatccgacaagtcgccgtttctgccctaagcacggacgctgttggtcacactcgcggagccccatccttccctcccggtctctccttgcgagctagtaccctacttgctgcacagtgccacaccgctcgcgctggagtatgggttcgagcccgatgtggtggtcaggaccaccaccgtcgccgtggagccgcggtttagggaaatggtgggcgctggtagggccattcgtggtgaaggccgtcgggttcctgctgctcgcgggcctcttgttccgggtgctctggtcctttccgtcctctccggcgccggcgttgcagatcacaaaagtcttttcaatggggaatggataccaaacccctctggtccagcctatacaaatgcaagctgtcgatttatcgacgatcaccagaactgcatgatgaatggtagacctgataaggaatatctacattggaagtggaaaccttatggatgtgatcttccaccatttgatgcagtaagatttctagattctgtgagaaacaaaggttggggactaattggtgactccatccttcgtaaccaagttcagtcattgctttgccttctgtctaaggctgaagaacctgttgaggtttaccatgataacgaattcaaaaacaggagatggcacttccaatcctacaacttcacagtgtccatcgtctgggctcctttcctcatcaaatctggtatttttgagaatgaggatggcgtgtctacctctgaaatacagctccaccttgatatactcgatgctaactggacaagtcagtatgagagctttgactatattattatttctggcggacaatggtttctgaggacagcggtctactgggagaacggtgcagtggttggtggtcataattctcagaacaagaacgtcgctgaacttggttttgagcacctgtatcagaaaactctacaaaacgttttcaacttcatcgtctcagcgaaacacaagccagtaattttcttcaggacctggtcacctgatcacttcgaggatggagagtggttcagcggtgggtcttgtcgcaggaaattgccctacaacaagggagagtacagagagggtaacatcgagcgtgtcatgagacagatcgagcttgagtccttcaacaaggctgtagccgcgcttaggggttcagcggacatggatagactgagactgatggatacctacagcctctcgtccttgagaccggacggccacgttgggccttacagaacaccctatccctttgcaaggggcagcagtaaatccacgcccgttcaaaatgattgcttgcactggtgtgtaccaggccccattgatgcatggaatgatcttgttatgaagatggccctggatccatgaaaaccttatggatttgtatggtgtgctcttatggagtaagtagcagctaagtgggcacaaaaaagtgtgtccgttttggtttagctgtaaaataggagtgctagcaaatagagaaacctcagggttggctttgttgcaaagatatgtgtatgttgttttaaagctttataagtttcaactgggcagatactgccagttgttcctggtttaacaggttggccctcgatgctgactgttcaagcgtaccatgaattttgagatggtagcaagaagtaaccttcaatccaccgttcagccaggcatga

SEQ ID NO: 6606 - DNA, 2221 bp, Zea Mays
caggcaccctcgtcactgactccacaaacaaaattgcagagtcggagaccaacgccacgccgacatcgacagcactgatccgacaagtcgccgtttctgccctaagcacggacgctgttggtcacactcgcggagccccatccttccctcccggtctctccttgcgagctagtaccctacttgctgcacagtgccacaccgctcgcgctggagtatgggttcgagcccgatgtggtggtcaggaccaccaccgtcgccgtggagccgcggtttagggaaatggtgggcgctggtagggccattcgtggtgaaggccgtcgggttcctgctgctcgcgggcctcttgttccgggtgctctggtcctttccgtcctctccggcgccggcgttgcagatcacaaaagtcttttcaatggggaatggataccaaacccctctggtccagcctatacaaatgcaagctgtcgatttatcgacgatcaccagaactgcatgatgaatggtagacctgataaggaatatctacattggaagtggaaaccttatggatgtgatcttccaccatttgatgcagtaagatttctagattctgtgagaaacaaaggttggggactaattggtgactccatccttcgtaaccaagttcagtcattgctttgccttctgtctaaggtaaatgctaccgactttactttctcgttctcccgcgatgcactatacagtgtccctattctatatttgaatatgatgggatctttcacaaaactgtactgaaaatttcaccccttttcatccttccaaatcttcacttttaaataatatataggatgttttagtttgataacaagtgctttgatactagacattatgcaggtattcaaatgtaaaggtcctgttaccatactttttacaagaacagctgaaactcttgttcagtgttcattaaacttcatgtgtaccactgtcacatgcttccttctggttgctgccaaaactggaagtgtttgcttcctgctgttggcttttgctatttaatccgttttctttttttaaataatggtgggatggaaattccctgatgctctaaccttattatctcttccactgtcacatgcttgctgcttgtttaggctgaagaacctgttgaggtttaccatgataacgaattcaaaaacaggagatggcacttccaatcctacaacttcacagtgtccatcgtctgggctcctttcctcatcaaatctggtatttttgagaatgaggatggcgtgtctacctctgaaatacagctccaccttgatatactcgatgctaactggacaagtcagtatgagagctttgactatattattatttctggcggacaatggtttctgaggacagcggtctactgggagaacggtgcagtggttggtggtcataattctcagaacaagaacgtcgctgaacttggttttgagcacctgtatcagaaaactctacaaaacgttttcaacttcatcgtctcagcgaaacacaagccagtaattttcttcaggacctggtcacctgatcacttcgaggatggagagtggttcagcggtgggtcttgtcgcaggaaattgccctacaacaagggagagtacagagagggtaacatcgagcgtgtcatgagacagatcgagcttgagtccttcaacaaggctgtagccgcgcttaggggttcagcggacatggatagactgagactgatggatacctacagcctctcgtccttgagaccggacggccacgttgggccttacagaacaccctatccctttgcaaggggcagcagtaaatccacgcccgttcaaaatgattgcttgcactggtgtgtaccaggccccattgatgcatggaatgatcttgttatgaagatggccctggatccatgaaaaccttatggatttgtatggtgtgctcttatggagtaagtagcagctaagtgggcacaaaaaagtgtgtccgttttggtttagctgtaaaataggagtgctagcaaatagagaaacctcagggttggctttgttgcaaagatatgtgtatgttgttttaaagctttataagtttcaactgggcagatactgccagttgttcctggtttaacaggttggccctcgatgctgactgttcaagcgtaccatgaattttgagatggtagcaagaagtaaccttcaatccaccgttcagccaggcatga

SEQ ID NO: 6607 - DNA, 1507 bp, Zea Mays
gtatagggtttagcagacaagggaggggactgagaactgggaagccgacgctccgctcggcaaagcctgaggcggcgacgacgcttgatcgcagcccgactcacaccgatcgttttttctttctatgcccgtggctaacttctagtgaggagttcgagggatggctttcgctagtagaattggaaatgcgctcaggagaactttagcgcccacttgctccccactgcttcagccagtaagatgcatgtcctcttccaagctctttgttggaggactttcttttgccaccgacgaaaccactctgaaggatgcattttctgagtttgggaatgtacttgaagctcggatcatcattgatcgggaatcagggaggtcaaggggttttggttttataacttttacatccactgaagaagcctcagctgcaatgacttccatggatggcaaggaacttcaaggacgaaatataagggtgaaccatgccaatgaacgcgctggtgggatacgcgggggtggtggattcggagctggtggtggttatggtggtggaggtggatatcctactggtgggtatggcggtggtggatatagttctggtggtggtggaggatatagttctggtggtggaggaggatatagttctgggggttatgctgccaatggttacggtgttggatctggcagtggctatggtggcacctacagcaatgcatcaggtggtggatattcaggcagtgatggttacggcaatggagctgccagtggtggttatgctaacaacttgagcagcggatacaacagcaatggaaggtacaataccattggcagttctgatggaaacactggtgggtacaattcgtctcccaacccgtatggtgtaggcaactacaatactggaggttcgagttccagtggtggaaccttaggagagtttggtggtggaggttttggtggcaacaactttgctggaaatgttaccggggggttttctggcggtggggcaagctatggagctaacaagccgcaatacaatggcgacgacgacctgctgggcgaaggtttcttcgacaaggaagtggcagagtaaatgagggagcggcgtactcgcacctctcgcacggtgctgcggatcatttttttcccccaaactgcatcagatcggtcgtgctaaatggagcaaatagaactttgcctgagctcattaggatatagaacataatcctttgttcttttttattctgtttcagacaaggcacgtatgttattttatccactcagctagcgtagctttactacaactatattgtgagaagaaaaagttgttatatcaactatattgtgagaagaaagagtggttatatcttctcaacaagaaatgatgatagttcaggtgctaattttcttagcctttgtattcttacgtactagatagaaatgtccaaagtccaatgtcgttcccaataataaaaataaaaataaaactctagcatatgctggaatagctcat

SEQ ID NO: 6608 - DNA, 1705 bp, Zea Mays
caactgcatttctccgcgacgactcgagctcgacacacgaaacagacatggccgccgtcgccgctctttcctgccccgcgcctccgcgtgtgttccgctgcgccaagacgctgcctgctccctccgccgccacatccagccgcggaagggtcggctacggctcctcctacgcccgccggtggcagtgccgccgctggacccaccggccggacgctacgacgacgcggatcaggcgggcaacgccgcgccgcacggcggtggtgagggtgaactgcgcctactctccccgcgctgaaacaatcactgcatgctcttggaatgaatatgtgatttgcagtgatgtacctgtgcttattgagttttgggcctcctggtgtggaccttgcagaatggtcacacggattgtcgatgagatagcacaagaatatgttgggagaataaaatgctataagcttgacaccgatgattacccacagaatgatcaggaaaggtactctgtatcaggattgggcacgggtggagctggtgtggtatgtcatagtcattgctcctactaaaaatattaggtgcacaatttaaggttgaactgttaacgtaacacagctatcatcaatacatggcagggttgtgcctactctagttcgaatgctattgatcttgttagtgccattattgaccaaatatgatgttgtcatggcagacttgatggttgctgcacatactttcatgcatgacatgcaccaggtaagtttgtaatggttatggtagaatgaatgtgtactggatgatcagcttggtgtcaccaatctccatgcatcttgttcagcactcaattccctcagcagaagcccatgaggtcacaactcatggtatccatttcagccccaagtcggcatggtgaaatactgaaatggaattggtctttggtgcacgtgttgcagctgtgtaatttcttgttatgtccaccatttaagagcctgatatacagccttagcataagaaaattgcttggttcttgagtacatggacaccatctgccacagtgactagtcgagcacttcatggctgctgttgcttggacttcatctggcctcttatgccatgataagaaaatcattgggtcactttccgcaattgacatgaaggtagtgttggtcataaatatcaactggtataccatctagtctgggacatatatgaacatgtacattgggagcctaagaggtctcgaaaaacatttgaaatcaatttatggtggtaatggctgatgttgaatccagtaacagctgaaacaatgtgccatgatgaaccacgaaaacatgtgattgatgaccgtggtatatcgtattccatgggtccgtgcacagtgcactgtcaatgtcatcatcagtcaggtgtactggtatcagtgtttaaggcttcagaaaacttcatgagcctttgggtacctggtgaggcattacctgttggtatcatactatcatctcagacttgatgctgtcagcagaacaatacccaatctatgcttgacggtctttagtgttagtatgatcaacaacatggtgaagaacctaactgtgggtgacaaacgaatttgatgtgatatggataatcatttgcacgtgttgttcagctgacaatgacttcgtaccttcggtataagtttagaatgagtaggattttgcattttttttgatttatcagg

SEQ ID NO: 6609 - DNA, 1959 bp, Zea Mays
actatctcgtgtgcggctatctcgtcaattttctaccaactgcatttctccgcgacgactcgagctcgacacacgaaacagacatggccgccgtcgccgctctttcctgccccgcgcctccgcgtgtgttccgctgcgccaagacgctgcctgctccctccgccgccacatccagccgcggaagggtcggctacggctcctcctacgcccgccggtggcagtgccgccgctggacccaccggccggacgctacgacgacgcggatcaggcgggcaacgccgcgccgcacggcggtggtgagggtgaactgcgcctactctccccgcgctgaaacaatcactgcatgctcttggaatgaatatgtgatttgcagtgatgtacctgtgcttattgagttttgggcctcctggtgtggaccttgcagaatggtcacacggattgtcgatgagatagcacaagaatatgttgggagaataaaatgctataagcttgacaccgatgattacccacaggttgctacagcttacagcatcgagaggattccaactgttttactctttaaggatggagagaaaatacatagtattaccgggacactgccaaaggctgtttatgtgaaagccattgagaaatctatttcagaacaatgacatatttggttaatattctttggtccatagatattaaactgtacactccattttataccagatagtgcagagagctcaagaatgatcaggaaaggtactctgtatcaggattgggcacgggtggagctggtgtggtatgtcatagtcattgctcctactaaaaatattaggtgcacaatttaaggttgaactgttaacgtaacacagctatcatcaatacatggcagggttgtgcctactctagttcgaatgctattgatcttgttagtgccattattgaccaaatatgatgttgtcatggcagacttgatggttgctgcacatactttcatgcatgacatgcaccaggtaagtttgtaatggttatggtagaatgaatgtgtactggatgatcagcttggtgtcaccaatctccatgcatcttgttcagcactcaattccctcagcagaagcccatgaggtcacaactcatggtatccatttcagccccaagtcggcatggtgaaatactgaaatggaattggtctttggtgcacgtgttgcagctgtgtaatttcttgttatgtccaccatttaagagcctgatatacagccttagcataagaaaattgcttggttcttgagtacatggacaccatctgccacagtgactagtcgagcacttcatggctgctgttgcttggacttcatctggcctcttatgccatgataagaaaatcattgggtcactttccgcaattgacatgaaggtagtgttggtcataaatatcaactggtataccatctagtctgggacatatatgaacatgtacattgggagcctaagaggtctcgaaaaacatttgaaatcaatttatggtggtaatggctgatgttgaatccagtaacagctgaaacaatgtgccatgatgaaccacgaaaacatgtgattgatgaccgtggtatatcgtattccatgggtccgtgcacagtgcactgtcaatgtcatcatcagtcaggtgtactggtatcagtgtttaaggcttcagaaaacttcatgagcctttgggtacctggtgaggcattacctgttggtatcatactatcatctcagacttgatgctgtcagcagaacaatacccaatctatgcttgacggtctttagtgttagtatgatcaacaacatggtgaagaacctaactgtgggtgacaaacgaatttgatgtgatatggataatcatttgcacgtgttgttcagctgacaatgacttcgtaccttcggtataagtttagaatgagtaggattttgcattttttttgatttatcagg

SEQ ID NO: 6610 - DNA, 1822 bp, Zea Mays
tgggagtccttaaaaccccctcggctttccattgttgttgggcagctagcgcccttgccgagtcacttggttggatcgccgctgctcaccccgtcctagacgcgaggcgacgacgcctccctatccctctcctccgcaatggccaggccccgcaagaacggcggtaccgacgaggatgatgctaacgccgccacgggagccaccgggaagccgaagaagctgatgaagcgggcgcggaggaagagcgagagcccctccccgcgcagctccgcgtaccgcggcgtcacacggcaccggtggacggggcggttcgaggcgcacctgtgggacaaggacgcccgcaacggctcccggagcaagaaaggcaagcaaggtagcccatcaccgatccaccagctcgtccatggattccggttgttacgtttgcgatcgcgactgacctgacctctcccccgtgtgctttgcgtatgcgtggttcctcttccgctgctggcgccgtcctgcgatcgaccgggttggcgggcggtccgggctcacgtacggacgggggcgcgtgcctgcagtttatctcggcgcgtacgacgacgaggacgcggcggcgcgcgcgcacgacctggcggcgctcaagtactggggccccgccggcaccgtcctcaacttcccgctgagcggctacgacgaggagcggagggagatggaggggcagccccgggaggagtacgtcgcgtcgctgcggcggcggagcagcggcttcgcgcgaggggtgtccaagtacaggggcgttgccaggcatcatcacaacgggagatgggaggcgaggatcgggcgcgtgttaggcaacaagtacctctatctcggcacttacgcaacacaagaggaggcggcagtggcgtatgacatggcggctatagaacaccgcggcttcaacgcggtcaccaacttcgacatcagccattacatcaaccactggcatcgacattgccatggcccctgcgacggcagcctcggcgcgatggacgtcgcaccgaacgtctcgctcgaactagacctactcgagtgcccggccaccgtcggcctcggcctcgaggagaccacgggcgacgatgaattccacaaccgcgaggactacctggggcaccttttcggcgtgcagcagcttcccgacgagatggggccgccggctcatcagatggcaccagcatcgtcggcgctcgatctggtgttgcagtcgcctaggttcaaggagctgatgcaacaggtttccgcggcgggagcctccgagaccaacggcggcagcatgcgtagctcgccatcaacgtccctgtgttcgttctcgccttcgcctctggagctgccatcgccgccgctacagcaacctactgaattcatcgatggcgcgccgccgcggtgcagcttcccggatgacgtgcagtcgttcttcgatttcaagaacgataacgacatgagcttcgtctacgcggaggttgacacattcctcttcggcgacctaggcgcatacgctccgccaatgttcgacttcgacctgtacgagtgatcaggatccgactgccagcgttccaagacgccagtgttgttaaaatggcttcataatttttgtttatgatgatgatgagatgactgctatcaaggtttacttgaaagaggtaggattagttatttattctcgcccttttttcaaatagctagaagaggaaaatatgcttctctttttttcttttttccctaaaaggctcaaaggtgtatacaagtcgtcacgaagaactaattgacattgatgacatctctactattataatgcaat

SEQ ID NO: 6611 - DNA, 1152 bp, Zea Mays
tgaacgcagaacctgtatattttcgttctgatctgatgtgattatcaaaacagttagtacatttagttctttttgcataagcatcaaccagtgtgtgtgtgtgtgtatatatatatttcatcacgaacgttttctggtaacaaggaaaatgcagataaacatggaataatctgaatttttcctttcttgttttatgttagccattaccttgttgtactgaatcttgcttgtgtccagggtagtctgtgacaggcctgggaacctctgcttcaagcacaggacttcaacacggtctgcaatctcaagtgcatcatgttctgagctcaaactgaggaagttgaggaggtgctctggagagaactgatcgcctgaagacatataccggtagatggtgtctcctacacccaccctcccactctgtggggtaacataacatctatcagaagcgagcaaatggaggatcttgactcttgacagaataaaactgttcagagagacagactttgcatgggaggatcagattacgtgactgacatacctttggaagtgtctccaagtatgataatggaacttgcatttcagagagaatactgctgttgatttccatggccatcttgtggatctggcttgcctggtctcttttctgctgcagttcacggtgcatgcaatcagacagcccagagtctgggacacatggctcagtttttcgagtgcaggaaggttcatcaggatatctgatcttggtgaggttgccatcacctgttgaaatcagaaaatcgagtctcaatcaggatgccatgaggatgaagcacatcaaactttgagatcgagtgatggtattatgacatttacatcatgtgtgcttccatcaggcatggcctggacagtaggtcccaaacactgttgctgcagttaacaaaagaagagaatcctgcattatatcaaatgcagacacctttgccgctccccgacatgtcctccccaagcagcaacttcgtgtacttctccttcatcagctccatctctgaaagagaagagaagccatcaagaaccagaaaacgccacaaggaacatgaactaaacagcctgctcaccgacggtgagaggcatgacggcgctactggttttgccggcattgtgcggctcgtgcta

SEQ ID NO: 6612 - DNA, 910 bp, Zea Mays
acatccaccccatccgtcattgacagatcccgcaatactcacagggccctcttctctcatctctcactccctcgctccgtctaccagtaccaccacgtccctcctcgtcgacgatctcgtagcggcggcgcacatggcgagcgacggcgcggcggctacgccagcgaaggttaccccaaagaaggccaatctcctcgacccgcactccatcaagcaccttctcgacgagaccatctccgaggtcgtgaagagtaagggctacaccgaggacacgcggctgggcaactggaagctggggatcggagccgccgtgattgctgtcgccctcctcgctcagttttaccccaagaagttcccgcagaaccgcgatttcctccttggctgcatcgccctgtatgtggtgctgaatgtggtgctgctgatccttagctacaccaaggagaaggatgccatcctattcacgcaccctcctatggtttacaaaggaaggagttcttgtggagggcctgttctggaaggatgtcgagaagctgattgatgactacaacagtgagcgcaagagtaaatgaattggtagctcgtgtctctggccatctggggagacatcgctgtctagagaaatccgtcaaagtttagcttaatctgaacaggcatttttgctatactgtaccggttgaccagtgaatgaatgatgttctagacattaactttggttccaagctttctgtcgtgtccatggataactatccgtccgaatcctagaaacgtggtccgtgcttgtaacctgtttgttctggtgcttccatacgccggagcagattttgaagagaaatgaaacaaatcgttaaatcacattatttcgttactgcggccacttatgcagggtttaagcgtacttccgaatagctta

SEQ ID NO: 6613 - DNA, 673 bp, Zea Mays
ctccgtcccatccctcgcctgccttcgcacgggtgcgccgcccgttcgacggccacgccgcgccgcgccgctcagctgccccggcaccggcccttcctcgccgagctcgggatcgccgagcccggtgacctctcagccaagcgctccagacggttgcagtctccgcagtccgagcccacctgttccccattggctcagtgcgcccccccccatgggtcggttcaggtgtctcaggcatgcgtcgaggttccttgcgcttcagtcaggcgaggtggtcctgcagaggcgcgcatggattcagccgaacacatcttgcagttctactggcatctatattagcaataagttctatgatcgattcatgttgataccatttgtatggagccggagttttcatgctacagatcaccgttgttcgaaacacaaggactactacaaaattcttggtgttcccaaggatgcatcgcaggatgacatcaagaaggcatttcattctcttgcaaaaaagtatcatccagacacaaatagaggcaatactgctgcaaaaaggatgtttcaggaaataagagatgcatatgaggcaaacactacgggacccttcaaagagggagcaatatgacatgctattttctagagggtcaagggtggagtttgatgggtcctatcagacaga

SEQ ID NO: 6614 - DNA, 2869 bp, Zea Mays
tgttagagacgttcttttaataaaatgctgtctcttatatttttttattattctcttataatagtccttttaagatacaagacatttacgtacatgccctgataacgtgaagcgagcaagcctgggctgcagccgatgggctgtatcacgcagctgcagcccaaacagctgaccgattgccgcggacccgggaggccgggacgagagagacgagcgggagcagccagcacgacgcctgtccgtctcccactctccctccattcccctctctctccttctgcctgtgcccgcgtggccgcgtctgtacctgtacggccaccaccatttccatctccgatccccgcgaccccccacccagccccaggcgcccgggctagatccggcccacgcgtctactcgccccctccggctccccttctccctaatcgccgtcgccgggggtgcaggcacagcggctgcttccgctcccgctcccgaggggggaggcggcaggcaatggcgcggcgggtgcggccgtcgcacctggtgctggcgctggcggcagcctacctcctcctcatctccctcaagttccgccgcgtgctggacctggccgccaccgacctcgcggacgaccctgccgccgccgccgccgccgccttctcttctccgtcctccgccgaccacctgcccccgcccgggtccgcttccgccacctcctcctcctcctcgcccccgttcccggtccgccccttctggcaccgctacgaccgtgtgtccctccccgacctcgcgtcccgcaaccgctccgcgctcgaccgcatggccgacgacgcctgggcgctcggcctcaccgcctgggaggacgccgccgccttcgcaggggacccctgggcgctgctcgccgccgccacctcccgcgcctccgacgccgccaagtgcccctccgcggtctcccagcgcgcgcggggccgggtcgtcttcctcccctgcggcctcgccgcgggctcgtccatcaccgtcgtcggcacgccgcgcgcctcgcacagggagtacgtgccgcagctcgcgcggatgcgccagggggacggcaccgtcatggtgtcccagttcatggtcgagctccagggcctgcgcgccgtcgacggcgaggacccgcccaggatactccacctcaaccccaggctcaggggggattggagccagcaccctatcctcgagcacaacacctgctacaggatgcagtggggcgccgcgcagcgctgtgacggcacaccacccgacgacaatgacgacaaagtcgatggattccccaaatgtgagaagtggatacgcaatgacattgttgacaccaaggagtccaagacgacatcatggttgaagagattcatcgggcgtgcgaagaagcctgcaatgacatggccattcccctttgtagaggagaggctatttgttctgactatacaagctggagttgaaggtttccacatttatgttggtggtcgacatgtgacatcttttccttatcggccggggttcactcttgaagatgcaacagggttatttgtcaagggtgatgtagatatacattcagtttatgccactgcacttccttcgtcgcatcctagtttttctcttcaacaagtccttgagatgtcagaaaagtggaggtctcggccactaccaaaaggccccgtttcccttttcattggaatactgtctgcatcaaatcatttcgctgagcgcatggctgtgaggaaaacatggatgcaggctccagaaataaagtcttctgaagccgtggctcgattctttgttgcactgaattcaaggaaagaggtcaatgtaatgttgaagaaagaagcagaatactttggagacattgtcattttgccatttatagaccgctatgagctggttgttcttaagacaattgctatctgtccagaacttgactgctgcaaacatcatgaaatgtgacgatgatacatttgtgagagtagatgtagttctgagacgcatcaagttgaacaatggtgacaaaccattatatatggggaaccttaacctcctgcacagaccattgaggactggaaaatgggcagttacagacgaggagtggcctgaggatatctacccgccatatgcaaacggaccaggctatgtgatttctggtgacatagcaaaattcatcgtgtcacagcatgccaatcagagtttaagactgtttaagatggaagatgtaagcatgggcctatgggtcgagaagttcaattcaacaaatcctgtccaatattcccacagctggaagttctgccagtacggttgcctggagaactactacacggcccactatcagtcacccaggcagatgctgtgcttgtgggataagttggttcgtggtcaggcatcctgctgtaactacagatagcagagtgaagctaaggattgctggacgctgtcctctcttcatcataccccagccaggtttaggtcggttggctggtattttctttttcgacacaatcgtagtgtagtaggtgttgttgctcctccgtcgctggctcaaatatgagctaaatgcatgggtgtgcggtaggagattgaagatttaggaagccccaaccagttggttattgttttttacacgatctgtattggtccaattgtggcgttggcgtccttgttcttgtaattgatccaattttgatgtagtaggccagattagagggaatattccagatcagatgtacgtctccgttcttttcttatagtaataactagacacaatttgccctgatctttgcaggatcctgctgctgaagatcttcagcattcctttgttttagtcactttgtgttgactttagttttagtaatcttgtggcagg

SEQ ID NO: 6615 - DNA, 2894 bp, Zea Mays
tgttagagacgttcttttaataaaatgctgtctcttatatttttttattattctcttataatagtccttttaagatacaagacatttacgtacatgccctgataacgtgaagcgagcaagcctgggctgcagccgatgggctgtatcacgcagctgcagcccaaacagctgaccgattgccgcggacccgggaggccgggacgagagagacgagcgggagcagccagcacgacgcctgtccgtctcccactctccctccattcccctctctctccttctgcctgtgcccgcgtggccgcgtctgtacctgtacggccaccaccatttccatctccgatccccgcgaccccccacccagccccaggcgcccgggctagatccggcccacgcgtctactcgccccctccggctccccttctccctaatcgccgtcgccgggggtgcaggcacagcggctgcttccgctcccgctcccgaggggggaggcggcaggcaatggcgcggcgggtgcggccgtcgcacctggtgctggcgctggcggcagcctacctcctcctcatctccctcaagttccgccgcgtgctggacctggccgccaccgacctcgcggacgaccctgccgccgccgccgccgccgccttctcttctccgtcctccgccgaccacctgcccccgcccgggtccgcttccgccacctcctcctcctcctcgcccccgttcccggtccgccccttctggcaccgctacgaccgtgtgtccctccccgacctcgcgtcccgcaaccgctccgcgctcgaccgcatggccgacgacgcctgggcgctcggcctcaccgcctgggaggacgccgccgccttcgcaggggacccctgggcgctgctcgccgccgccacctcccgcgcctccgacgccgccaagtgcccctccgcggtctcccagcgcgcgcggggccgggtcgtcttcctcccctgcggcctcgccgcgggctcgtccatcaccgtcgtcggcacgccgcgcgcctcgcacagggagtacgtgccgcagctcgcgcggatgcgccagggggacggcaccgtcatggtgtcccagttcatggtcgagctccagggcctgcgcgccgtcgacggcgaggacccgcccaggatactccacctcaaccccaggctcaggggggattggagccagcaccctatcctcgagcacaacacctgctacaggatgcagtggggcgccgcgcagcgctgtgacggcacaccacccgacgacaatgacgacaaagtcgatggattccccaaatgtgagaagtggatacgcaatgacattgttgacaccaaggagtccaagacgacatcatggttgaagagattcatcgggcgtgcgaagaagcctgcaatgacatggccattcccctttgtagaggagaggctatttgttctgactatacaagctggagttgaaggtttccacatttatgttggtggtcgacatgtgacatcttttccttatcggccggtgatcgttttcaggggttcactcttgaagatgcaacagggttatttgtcaagggtgatgtagatatacattcagtttatgccactgcacttccttcgtcgcatcctagtttttctcttcaacaagtccttgagatgtcagaaaagtggaggtctcggccactaccaaaaggccccgtttcccttttcattggaatactgtctgcatcaaatcatttcgctgagcgcatggctgtgaggaaaacatggatgcaggctccagaaataaagtcttctgaagccgtggctcgattctttgttgcactgaattcaaggaaagaggtcaatgtaatgttgaagaaagaagcagaatactttggagacattgtcattttgccatttatagaccgctatgagctggttgttcttaagacaattgctatctgtgagtatggggtccagaacttgactgctgcaaacatcatgaaatgtgacgatgatacatttgtgagagtagatgtagttctgagacgcatcaagttgaacaatggtgacaaaccattatatatggggaaccttaacctcctgcacagaccattgaggactggaaaatgggcagttacagacgaggagtggcctgaggatatctacccgccatatgcaaacggaccaggctatgtgatttctggtgacatagcaaaattcatcgtgtcacagcatgccaatcagagtttaagactgtttaagatggaagatgtaagcatgggcctatgggtcgagaagttcaattcaacaaatcctgtccaatattcccacagctggaagttctgccagtacggttgcctggagaactactacacggcccactatcagtcacccaggcagatgctgtgcttgtgggataagttggttcgtggtcaggcatcctgctgtaactacagatagcagagtgaagctaaggattgctggacgctgtcctctcttcatcataccccagccaggtttaggtcggttggctggtattttctttttcgacacaatcgtagtgtagtaggtgttgttgctcctccgtcgctggctcaaatatgagctaaatgcatgggtgtgcggtaggagattgaagatttaggaagccccaaccagttggttattgttttttacacgatctgtattggtccaattgtggcgttggcgtccttgttcttgtaattgatccaattttgatgtagtaggccagattagagggaatattccagatcagatgtacgtctccgttcttttcttatagtaataactagacacaatttgccctgatctttgcaggatcctgctgctgaagatcttcagcattcctttgttttagtcactttgtgttgactttagttttagtaatcttgtggcagg

SEQ ID NO: 6616 - DNA, 2420 bp, Zea Mays
gaattttagccattaaatgtatatggatacctgcaatgttttctgcaaatagccaattgtgctcccactttttgaggttccgtggaggcagagtttttcacagagtatggggatgcaagtcgatacaagattcaggaagtcattggtaaaggaagctacggggtggtctgctccgctgtagatgtccacactggagagaaagtagcgatcaagaagatacatgacatctttgagcacatatctgatgctgcccggattctccgtgagatcaagcttctgagactcctaagacatccagatattgttgagatcaaacatattatgttgcctccatcaagacgggaattcaaagatatttatgttgtttttgaacttatggagtctgatcttcaccaagttatcaaggctaatgatgacctgacaaaggaacattatcagttctttctctaccaactgatccgtgctctgaaatacatccacacagctaacgtttatcaccgggacctgaagccaaagaatatattagcaaattctaactgcaaactgaaaatttgtgattttggactagcacgagttgcattcaatgataccccaacaacgatcttctggacagattatgttgcaacaagatggtacagagctccagagctctgtggatccttcttttcaaagtatacaccggccattgacatttggagcattggatgcatctttgctgaggtgttaacagggaaacctttgtttcctggtaaaaatgttgtccatcagttagacttaatgactgaccttctaggcacgccatcgatggatacgatttctcgggtccggaatgagaaagcaaggaggtatctaagtagcatgagaaagaaagagacaatttcgttctcacaaaagtttccgaatgcagatcctttagccttggatcttttgcaaaggcttttagcatttgatccgaaagaccgtccaactgcagaacaggcattggctcatccatactttaaagggctagccaaggttgagagagagccatcttgtcaaccaatcacaaagatggagtttgagtttgaaaggagaagagtgacaaaagaagacattagggagctgatattccgtgagatattggaatatcatccacaactgctcaaagactatatcaatggcacggagaggacaacctttctgtacccaagtgctgtcgaccaatttaggaagcaatttgctcatcttgaagaaaatagtggaaacggacctgtgattccaatggaaagaaaacatacttctcttcctaggtctactattgttcactcatctccaattcctgtcaaggaacaaccccgtatcggcccatgtagggaaaggccttcatctgatgagtcctacaggaatcctcgggagacagaacaatattccggcaatctccccagaacgtcacaggctccacaaagagtgccaacagcgagaccaggaagggttgttggtccagtaatgccttaccaaaatggagacaccaaagacccctacgacacacgaaggttggcaatgagctcaggatatcctccccaacaaatcccacaaacgtttggttattatcagacacatggtaaaccagcttgctgcgagccatcacaggctgaaaggtacacgctgcatcagcaggctgcctatgcctgcgcaaaccgtacagccgcgtctgatgttgctctggacatgagagcacccccttttcagcatctatcggcagggcagagaagtgactcttgtgataggctgacagcagagacaaacttgtacacgagatcaaccaacggcatcgctgccactgcagcaggagtggcagcaactactcacagaaaggtcggcgttgttccgtttggcatgtcaaacatgtattagtgactggatcatggccgaatcatggtgaatcctctgtgcggttgatgggtctatgctgccttcaggtggctaaacaccgacaacttgaagcggccaatcaaacctttggctggatgctgcaagtttagagtgcagtagacagtgttttttctgtgtggtcaggaaaagaggaacaccgccggcggcatgaagcctgccaaaaagtttgtatctgcctgtgcctgagaagtgtgcccttggttgcacactgagaaggggtatagtcggcagtccggcggcatgtaatctgggcaatttaggcgccaatttcttttctagagcgaggaggcagaagggaaaggaaggaacattaacgttttaaatgttgtatagagacgtttctcatgcatcaatgtgctacatcagaattacttcagaaagatatgagatacagcaaaaaaaactgtatggcatatgcatgtttttagatctatcgtgaactagctccaaaaacatgctgcccattaatcttgaactatattacgtgc

SEQ ID NO: 6617 - DNA, 2015 bp, Zea Mays
accagacccacacgtttctttaccctaaccttttcgctgctccagcgaagaacacagccaccgccgtttcttcgtcttcctcgcagcgccggcgcgccatctcggtacgaaggcgacggcggcggcgacggcggcgttcaggatcgggatctcagcgacgacgtcagaggcttcccatcccgacccccgccagtcgcctcgcgccctcgactccggactccggtcctccgcacaccggccggtgaccctgcgtttgaacctgctatagaaatttataaaatggccgcggttgatgcgacaaccaaggagatggatgcactgcatgttggacaaaatgatgaaacaaaagagactctgattaaagaagacaaagctgcaaacagcaatcattctgttgttgcagctcagtccttgctaccagaggacgacgatgatgatgaagcacaagctgatggtccatctcaagatggagcagcagctgtaaagaagaaaaagaagaaaaacaaatccaaaaagaagaagggcccccttcaacagacagatcctccatcaatacctgttgatgagcttttcccctcaggagaatttccagagggcgaaatccaacaatacaaggatgacaatctgtggagaacaactagtgaggaaaagagggacctggaacgactgcaaaagccaatatacaactctgttcgccaagcagcagaagttcatagacaggtgcggaaatatatgaggagcatcataaaacctggaatgttaatggttgatctatgtgagacattggaaaacatggtccggaaacttatcaaggagaatggactgcaagctggcattgcttttccgactggatgctccttgaattgggttgcagctcactggactccaaatgcgggcgacaaaactgtgctacaatatgatgatgtgatgaagcttgattttggaacacatatagatggtctgtcaatgattttgtttccttttatcgtctttggttacattgttgattgtgcatttactgttgcattcaatcctatgtttgatccattgcttcaagcaacgagagatgccacaaatactggaatcaaggaagctgggatagatgcacggcttggtgatgtcggtgctgcaatccaagaagttatggaatcctatgaggttgaaatcaatgggaaagttttccaagttaaaagtgttcggaacctcaatggacacagcatcgggccatatcaaatccatgctgggaaatcagttccaatagtgaaaggtggagaacaaacaaaaatggaggaaggggagttttatgccattgaaacttttggatctacgggaaagggatttgtcagggaggacttggaatgcagtcattacatgaagaactttgatgtcggacatgtgcctttaaggttagcaaaggccaagcaactgcttgggaccatcaaccacaacttcggaacgctcgccttttgccggcggtacttggaccgccttggtgagaccaagtacctcatggctctgaagaatctttgtgacaatggcatcgttcagccgtaccctcccctgtgcgatgtgagagggagctacgtctcacagtttgagcacacaatcttactccggccaacttgcaaagaggtcatttccagaggcgatgactactgattgcggctggaggaggctccttgtaccaggttgtgtgtgtggagcgccatccgtttatggatcacactcggataaatggtttggtcctccagagttcaggatgttgtatgagttttataataactcgctaaagattgtggatgtacaagtagcagtaatacgttttctgggaacatggacattgttaggctatttccagcggggatttcgtccgagtttcaatctcgattaaatgtgttgccacataagaaaatatgataatatggcaataatttaataagagagtgagttttattggatgtgtttctctcacaactatatgatgggcaacatgtctttcactacccacgaggcta

SEQ ID NO: 6618 - DNA, 4097 bp, Zea Mays
aaatcgcagttcccgtccatctgtcaccacctcgctctctacattgcggaaccctattctctcatcgcgctctcgcctcaccggcgccgccaatccgccggcgagctagggctttctgatcactggcctctccagtttcccgccaccatgggggtcgacagcgacgacgaggatctcgtcgtctatgggacgcccatcgagcgagaggaggacacctccgcccgcaagcgccgggccgtcgccgaggctggccaactccgcgccctccctgcctggaagcaggaggtgagggatgaagaaggaagaagaagatttcatggtgcatttactggtggattctctgctggcttttacaacactgttggctcaaaagaggggtggacaccacagacatttacatcatcacgaaagaatagagctgagctgacaaagcaaagcatatacaattttcttgatgaagaggatataaaggatatgggtggtaatgctttggagacatctcagcagtacgatacctttggttttacagctgcagagcacgctcgaaaacaggcatccaaggaacaaaaggagaggtgtgacattgttaatgaaaatgggttggcgccaaggacgctctattagggactcacatgctgattccttatatgaatcacgcaggaatgctagaaaagcttttcttgctctctctggtgccaaggatggtgaagatcaagatcaaagtgctgaaaagcctagcttagataaagctgttgtggggtcagtcggggaaatacctgtatctggaaatacccctgtctatgtgcttcatccaaagcaggattttcatggattaggttacgatccattcaagcatgctcctgagtttagagacaggaaaacattgcagaagtcaagagagaggggccgcaaacgaaatgatgtttctatgaggggaaatcttctgatttctaactcaggacattatgctcctggttttgggattggagctctcgaagaacttgatgttgaagatgaagatatttatgcatcaggttttgcttatgaacaaactgaagttgatattgagccttcaaaaactgccaatgacagtaattataaacttgatgacagaaaaagaggtttctatctgagctttaagattgcctcaaattctgaatacaaacttgaacggttccttcctcctgagatccctgatgattttgatgctcaacacaaatttccaactccagttcaatctgctgagatgttttctgactctgctcctcttgaggttcctccaccagaagacactagcttgacactattgattgacggctgtgcagctatggttgcacgttgtgggaaacatattgaagatttctacaaggagaaaagtaagacaaacccgcagttccttttcctaagtggaggagctggctgtaactattacatgagaaagttatgggagcatcagcaaaaacatattggtcagcgatggcatgattctgcaaaatcaaagacttcttctgataagttgacagcagagaatcgtgggaaaattcttggtgaaaggccccttgacagaactactaaagtacatagcccatctctttctgcaaaggaagctgttcaactgcaatctaatcttactgagacatttgtcaagccaatatcccttgatggcctaccagagtatgagaagccttttagcaatgatcctgcgaaacaagttagatttgagcaatttcttagagataaatacaagggaggtcttcgtgctgcaaatgttacacctacaagtactatgtcagaaggtgatcgtgctcgggaaaggcttgattttgaggctgctgcagaggcaattgaaaagggcaagggaaaaaaagttattgatcctttgtcagtgttctctttgcctggaatgaatgagcaacgctttgtagcggcaacccaaccagagagctctgtagtgatacaagatgagaagcccatctatccacaaaggcagcagtttgaatggcggccttctccaatactgtgcaaacgttttgatattgttgaccctttcatggggaagccaatgcatgttcaaagaccaaggagcaagatggagaaccttatctttatgacagaatccaacaaaggaacaaatgatgaagtggagagctcgagtagaagtttgcagcatgcttctatggaagcgctatctgatgttgaatcacgaggagccgctactgatcctgactttgagcccagcagcttgcaaagacctgttgatctttacaaggctatcttttctgatgactcagatgatgatgcagatgaaattcttagcaatcaactagtggatccagtgaagacaagtgaaggtgccaacatggctctcaatcgtcttgtagctgaggatttcctagaatcattgggtaaagaactgggattagaagtcccgccagaaaggcctcatgtttcatctgaacctgaaaaattttcagcttctcgggctagtctctcatcccaggatgaaaggataacaactgctctcaccaaagtaaaggagaatcagtgctctattgacattgtgcaagttggcaatatcaatgaagatactccattagccagtgctgaaacccttggtatgaaatacgagaatcaggagaatagaaccgagaaaatcaggtctcgccctatgaatcgacaaagccagaaccatagtccaaggtctgattcatctagcgaacggcacaggagttggaaaaggagacatcgtcacatctggaatggaactccagaatctgagtccggtgaacgccataggagcaaaagaaaggagtctcattcaagacacagaaaacgcaggagtagaagtccaggtagtgatactcccagtgatacccaacatgagacaaaacggaaggagaaaaggcatcgccgaacttacacatctgatactgattctagtgatcatgaacacagcgaaagatataaatctagtagtaggcgatcatctgacaaagacagaagtagaaagcgtcgtatacaccacaagcacagaagaaaagatcatgtagattaaacatgaatgggaactgctggaatacgactgtacaaacgatggaaggtgcagtgcagggccattgggtttagcaaaccatggaagtttgatgagaacactgggaggtatggaaaatttgctcacaggaagtattctgctcatattggcttcattgcgttcatcacttttgcccgaagttttctttgttggattggtggaataccactgtagcattgctataccacaaagcagtttcatggaaaggaatcgcaatcatctggtcgcttgtagaagtcttaggaaaaagatcttgttgaagtagccgtgtttgcaaaaatgttgatcttgatagcaaatggtttgactacaaatctatggtgtgtgtaaaaccgcaagttgtatgatagctatttttttagtttacttagttatatgataatgtagttttgttttgttttacagaaggtaattaggtttttgagaatggtcaaagcatagcgtaatggttaaggcttctgagtagaacctttaggtcccggttcgttcctattgggggcaaatttctggtttggttaaaaaatcctcattgtgtcccgtctgctccggcgctcacgctcatgggttatgtcttgcgcgtcagcttccagttgggccgttgtagagtatgtgttgatagtgatagtttgggtcaggttcgaggaatttttttgtcgagactatgtttcagtcttttcttaatataatatctataaaaccaggagtgtgtctttctctctttctctgagtttcttttatagtgcagttgaacggtttgggcctggctgttcccaacaggctttacctttcctcattggcagcaagatgttgccatcaagagatgatagggtagagttgatggtaatgcttggtaaggcgatgagttcctttgccgaggctacattattcttgtgcttttccacgttcttgtttagttaagttagttcctctataccaaaataaaggtactactgttattgtattgagcaaaacaatcccaagtctgacagtttgtagggaagaacag

SEQ ID NO: 6619 - DNA, 1505 bp, Zea Mays
tccctgtgtctcgtcttcctagttcaggtctcaccgcaagcacctcgatacggcggagtcgtggggaaccgtggaggtgaggtcgtgaggagaggaaaatttccaccgccgtgcagccatgtcggtgcaggagtacctggagaagcacctgctctcgcgcaagatcgaggaggccgtgaacgcggcggtccgcgccaaggcccccgacccggtgctcttcatcgcgggccacatgcggcgggcggcgcccgccgtgatcacgagggttcgggcgcgccagatccttgacgggcacggcgcgccggctgtcgaggttgagttgcacaccaacaaggccatacaccgagcatccgcggccggctcgggcgcgctcgagggcgccgccgccgacgcggccggggccgccgagaggcggaagatactcgccaaggtggtcgccgactcggtgcggatgatcaatgacaaggtatcggaggcgctcgttgggatggatccgcaggagcagtcgcagatcgaccaggctatcatggacttgaacaaggcgcgccacaaggctgagcttggagttggagcaaatgctatgctggcagtgtcaattgcagcttgcaaagctggtgctgctgaaaaagaggttccactctacaagcatatagcgaatcttgttggcaaaagcgctacaactcttcctgtacctgcaattacagtcattaatggtggaaagcatgctggaaatggtcttcccattcaagtatacctccaaacctttagaatcttggaagttgacctttagaatcttggaagttgaaggcattattctcatattttgtccactcgagtcatctttttcctaaacagaaatatattaagatagataatttttcatgttctggagtaattataaacctttcttatttgtaggaaattatgatccttcctattggtgctaagaactttgaagaagcaatgcagatgggttctgagacctatcatcatctcaaggatgttattttggagaaatatggctcagacagctgcaacattggagatcatggtgggtttgctccaaatatttccagcatatctgaaggcctggatcttgtcattgcggcaatagagagggctggatataatggaagaataaaattggcaattgatgttgctgccactgatttttgtacaggaaagaaatatgacctggagttcaaatcaacaaagaaatcagggcagaactttaaaactgctgatgatatgattgagatctatagccagctttgttcagagtacccacttgtctccattgaacagcccttcgataaagatgactgggagcactcaaaaaaattgaccactctagagctgtgccaggttgcaggggatgacttgttgatgtctgatcctgaacgcattaagcgggcagttaatgagtacacttgcaacgctcttgttctcaaggtgcagtggtaagagttgtcccaccgagtcagcaggtcacagatttcgtctct

SEQ ID NO: 6620 - DNA, 1660 bp, Zea Mays
catgaacctagggccctgtccgaacgcgcctcccacggcggcgcgtgcgactccccaacatgggaaataaatagatgtcccaattacccatcgagccgtcgtcgtggagcggcaggatttgaaaaatctcgcgagagggccttgtccttgtccacttcctccgcttcgccgtccctcaaagcagcggaaggggagaggccagggtgcagcagcaggaccccaacggcaacctccgccacgcaccacggagcaaccaagcagcaggtgccgtgcgcgcggttcctacttccctcctctccttctctctctctcgctagtcgctaacttctcgattcgatcgttgcggttgccgggcgggcgcgtcgtctgttctctctctctttctctctctctcgattacttctcgttcgtgcagtgcagatgaactcttaatgttcgttttttttcccttgaagttctgctttgttctgtgacataagtgaggcaaggcaaggtaagtgacgagacaaagatggtgcaggaggagctgccgcaggcatggtggttcgacagccacaacctcgcgaggccgtcgccatggctgaacagcacgctctcagagctggatgacaagaccaagcaaatgctgaagctgatcgaccaagacgcggactcgttcgcccagcgcgccgaaatgtactacaagaagcggccggtgctggtggacatgctcggcgacctgtaccgcacgcaccgctcgctggcggagcagtacgacctgctgaagcacggcagcggcacacggcacacggtgttcggcctgtcttcctgcacacagagccggtcgtcgacgaacggcaggaccactcctcgctcctcctgctcggcctctacgtacgactcggagtccgaagtggacgaccccgggcaggaagaatacgaggcagagcagctggcgcgtgcggggatggccaagacggagtcgccgccgccgccgccggagcagcagcagcaagaacagcgtgagcaggcggagcagcagatgcgcgcggagatcgagaggctcaaggcgcagaacgcggcgctgcagaaggcggccgaggagagcgcggcggcgctcagggcggagctggccgggaaggacgaggagaagcgggaggtgatcaggcagctggcgtcgtccatggacgtgatgaggcaggagaacctcacgctgcgcgagcacatcagcaggggatcgtcgaagcgttcctctgcgccccgcgcgggagctgcgttcgatctcaggaaggtggccaggggcctcttctccgcgaggctgttcaccgcgcactgcaggcctacgggccccatcgtcgcgctctgagcaggatgccaggatcgtgaagagagacagcgtagatatgcatttgttgtaggcgagtgatgtgcatattataggatggcatcgatcgatattccctccgctgtctgtttctcaggttcaactaaactagagggagcactcgttttttactatgatggcgtagtagtagtagttaactgtagttaaatatttactagtcatatggatgcatgtttgtatgatggcgttaattattgttaagtattattttgtcagttcctcatctgctatgactatgatttttggacctgggtagaagataagtcgtggacttct

SEQ ID NO: 6621 - DNA, 2143 bp, Zea Mays
ctcgtggtgaagaaaggcgagagctggagagcaacgagacaagcacggcggtgtgcgtgcgcacaggcactagagtgagacagctctagaagagagcaagccgccgccgccgccgcatcatcgtcagaagcggccactcctacctctgatcctgatacaaaatccaggccagagggcaggagcctccaaaagagatccactcccccggatggcttcttgcctctgcttccgcagacgccgccgcccaatcattgcctcctctgtccccttcttcctcctcctcgtctccttcctcgcctcggcctcggcctcttccacgacgacgacgaagctgctaggcagcggcaataatgccacgcggcgggtgacgttcagctcggaggagctccgcgggttgcggagcatcacggcccggcttgcgcggctcagggacgcgtccgtcaagacgatccagagccccgacggcgacgtcatcgactgcgtgccggcgcacctgcagccggcgttcgagcaccccaagctgaggagccagaagccagaggaggagcccgaagagaggccgaggagcagcgctggccgcttctccgacgctgacctggacgaggacgacgacccgttgccgcaggtgtggcggcgctccggcgagcactgcccggaggggacggtaccggtgcggcgaaccacggaggacgacgtgctcagggccaccgcctcttccgccacccggttcgggatgaaggcccgcggtgcggggctcgggttcgcgcggcgcgactccaccggcggcggccacgaggtcagtgccaatcggcgatcactcagtcaccgccgcggtgacgacggtcgccggtcaacagtcaacactccaataatttacctttggctgtgcaagcgcagtgcaagaaatttgctcatcaatggcacaccgcacacgatgaaaagtggaaatgacaccaataattgcgtgattattgttgtgtgcttgcgacttgcgagtccgatccatccggcacaggtgacagtcacggtacagggggctgcactcgcaatggccagcacatgcacatgttgtcgactcgactgcatcgttaaacaatgggagaacgtcagtacgtcactgagcagctagacggcctctgtttgcagcacgcggtggggtacgtgaccggcgggcagttctacggcgccaaggcgagcctgaacgtgtggccggcgcaggtggcgtcgccggcggagttcagcctctcgcagatctgggtcatctccggcgccttcggcaacgacctcaacaccatcgaggccggctggcaggtcagccctcagctgtacggcgacaacagccccaggacgacgcgtaccaggagacgggctgctacaacctccactgctcgggcttcgtgcagaccagcagccgcgtggccatcggcgccgccatctcgcccgtctcctcctacgccggccgccagttcgacgtcacgcttctcatctggaaggacccgcgccggggccactggtggctgcagctcggctccggcgcgctcgtcggctactggccctccgcgctcttcacgcacctcggctcgcgcgccgacatggtgcagttcgggggcgaggtcgtcaacgcgcgccccgccggcgcgccgcacacgcccacgcagatgggctccggccgcttccccgccgagggatacgcgcgcgccgcatacttccgaaacgtgcagctcgtcgactgggacaacaacctcgtaccggccgccgggctccgcctgctcgccgaccggccggggtgctatgacatcgccggcggcagcggcggcgcgtggggcacctacttctattacggtgggcccggcaggaatgcacggtgcccgtaactttactagtatattagctaggaacggaatcgaatgcatgggatgggtgttgtacttgtacgtgtgtttcgtacgtgcgcactcaagcacacattagcagaggctgattgctatatattactccaaatgagtctgctttcactttttttaatctctccatgtgaatatgatgccgttgtgatcatctaacaatttgctcatttaatttagcattcttttttcctgtttctttactgcaattatattggacggttggggctatgagtttg

SEQ ID NO: 6622 - DNA, 2166 bp, Zea Mays
ctcgtggtgaagaaaggcgagagctggagagcaacgagacaagcacggcggtgtgcgtgcgcacaggcactagagtgagacagctctagaagagagcaagccgccgccgccgccgcatcatcgtcagaagcggccactcctacctctgatcctgatacaaaatccaggccagagggcaggagcctccaaaagagatccactcccccggatggcttcttgcctctgcttccgcagacgccgccgcccaatcattgcctcctctgtccccttcttcctcctcctcgtctccttcctcgcctcggcctcggcctcttccacgacgacgacgaagctgctaggcagcggcaataatgccacgcggcgggtgacgttcagctcggaggagctccgcgggttgcggagcatcacggcccggcttgcgcggctcagggacgcgtccgtcaagacgatccagagccccgacggcgacgtcatcgactgcgtgccggcgcacctgcagccggcgttcgagcaccccaagctgaggagccagaagccagaggtaggaggagcccgaagagaggccgaggagcagcgctggccgcttctccgacgctgacctggacgaggacgacgacccgttgccgcaggtgtggcggcgctccggcgagcactgcccggaggggacggtaccggtgcggcgaaccacggaggacgacgtgctcagggccaccgcctcttccgccacccggttcgggatgaaggcccgcggtgcggggctcgggttcgcgcggcgcgactccaccggcggcggccacgaggtcagtgccaatcggcgatcactcagtcaccgccgcggtgacgacggtcgccggtcaacagtcaacactccaataatttacctttggctgtgcaagcgcagtgcaagaaatttgctcatcaatggcacaccgcacacgatgaaaagtggaaatgacaccaataattgcgtgattattgttgtgtgcttgcgacttgcgagtccgatccatccggcacaggtgacagtcacggtacagggggctgcactcgcaatggccagcacatgcacatgttgtcgactcgactgcatcgttaaacaatgggagaacgtcagtacgtcactgagcagctagacggcctctgtttgcagcacgcggtggggtacgtgaccggcgggcagttctacggcgccaaggcgagcctgaacgtgtggccggcgcaggtggcgtcgccggcggagttcagcctctcgcagatctgggtcatctccggcgccttcggcaacgacctcaacaccatcgaggccggctggcaggtcagccctcagctgtacggcgacaacagccccaggttcttcacctactggacagacgacgcgtaccaggagacgggctgctacaacctccactgctcgggcttcgtgcagaccagcagccgcgtggccatcggcgccgccatctcgcccgtctcctcctacgccggccgccagttcgacgtcacgcttctcatctggaaggacccgcgccggggccactggtggctgcagctcggctccggcgcgctcgtcggctactggccctccgcgctcttcacgcacctcggctcgcgcgccgacatggtgcagttcgggggcgaggtcgtcaacgcgcgccccgccggcgcgccgcacacgcccacgcagatgggctccggccgcttccccgccgagggatacgcgcgcgccgcatacttccgaaacgtgcagctcgtcgactgggacaacaacctcgtaccggccgccgggctccgcctgctcgccgaccggccggggtgctatgacatcgccggcggcagcggcggcgcgtggggcacctacttctattacggtgggcccggcaggaatgcacggtgcccgtaactttactagtatattagctaggaacggaatcgaatgcatgggatgggtgttgtacttgtacgtgtgtttcgtacgtgcgcactcaagcacacattagcagaggctgattgctatatattactccaaatgagtctgctttcactttttttaatctctccatgtgaatatgatgccgttgtgatcatctaacaatttgctcatttaatttagcattcttttttcctgtttctttactgcaattatattggacggttggggctatgagtttg

SEQ ID NO: 6623 - DNA, 1887 bp, Zea Mays
cataacatgattcatctgacttatgtttctgtaggttgttcatctgacttatgatgacctatgatttatctgacttattgctttgcttgaaagaaattttaaaaatcatccgaaattcgcctcatgaaactgactcggctgaagtaccatgcacaggaagctttctcgtaccatcactgcaatcgtcgaccccacatggcagcgaaacggaaacggacgcgacacgctgcaacgttcgggagtaccagcgacgaacccaatcccaatccctatcttccgagatttgtctgcgcccctgcggcgcgcatggcgccacgactgaccgtggccttgggcggcgctcgggcatgagtacatggcgctcggtggcctcgcgtcgcgttactcacccaccggcaccgcgccacggccgcgttcgtctcaacaggagccgatggccactctcgcgccacggccacatatcctcctcggcttgacaaggccgcagcccatagcgcttcgtgcctgcgccgccttctcccgctcccgccacgcgccagtcccaccgcgggccgcgcagccgcggcgcgtcttcctcggccttggcgctgccttcatcgaccaggccacccgcatggcctccggcggcacctcgtcccgctctttcgttgccggagcgcggccgaggcaaggcgtttccccagtcgagcagattctcaagaatgtcgagtggccagatgagttccctttcaagcctgaggacttcagccgcttcgacgaattgattttagcgtactagacaaaatttgggcagacggggttcacattttgattacttggcagatcatcagatactctgttctactcggttccacgttttgtcactcacattgatgaccaagcaatccaagctctcacagagtactattctgaagttcttcctccaagtaatactcctggggtggccattctggacatgtgcagcagctgggtcagccattatcctcccggttacagacaagagaagatcgtggggatgggtatgaatgaagatgaactgaaaaagaactcggtactgactcagtatgtcgtgcaagacctcaatgtgaacccaaagcttcctttcgaagataacacttttgatgttatcaccaatgtggttagtgtagattaccttacaaagccaatagatgtttttaaggagatgcgacgaatactcaagccaagcggccttgccataatgagctatatctatatggacctcaactggtgatgctgatcatgcatggatagttggtgcttacttccattatgttggaggttttgaacctccccaggcacttgatatatctcctaatccaggacgaactgacccaatgtatgttgtatgctcgagaaagaaaatagggtaactaaacaatatatttggcaagtgctatcaagaaacaaatagaaggaaaaatacaagaagcaagttgtttggccctgatcgcaggacctattggtgagctgatgtttccgtgagtaatgtaacgacagaaaaaagaagcaactactacataaactatttatagaagcggcagattcacttcataggttgtagcaactgtctttactaaaagtgtgtttggtttgaggaatgaagtgatccatcttcttctcactcctcacttttttatttggtttgtgtaatagaatgagttgatccatcaccactccattcctcgtaagataataattagtatatacatgaggggtgggttgattccaccaaaattgatagaatgaacttatgatgcatcacctcataaagcatagagtgactgcacaaaccaaacacaccataagggtatgtagaaatgatttattaaaataatggtatttattaaataatactacatccgtatt

SEQ ID NO: 6624 - DNA, 3233 bp, Zea Mays
gcgtcgtgtgtctgggggctccaaccgaggttagcgtgggccctcccgatcaagggcccgattaaaggaacgatagttgggttaagcccaatccagtctctattgaccggctgtagaggacacacccaacactccaatctcaggggatggtggtgggggtggaggtcaccacggcgagatggatcaatggattagggggaacggagatctgaggagaaaaccaaaacactgccgagtaggaatacctgcgagaggaaatgcacaggggtcagcaagatctcgatgacggaggatgaagaagaagaacagaggatccacgtaagcaccggagtctgggtcgaagcacaccgacggcgacagtgcacggctatgccatcggcaacaactggcgaaagaaagaaatgaagaacaacccgagtcaacaacgggagaaggtgctaatggatttgaagtcaagctactaacgagaaatctcacgcgaaacggaggcagaggcacgaaggggaaccaaaagttgttaatggcgatcagcaaaagctgttgccatatctttaaagagctcggttcggttataataccacgaatgcaattatgtgcttcgtgttgctatttctacgatgccgcatccataccggatgccaaattgccaacaggaaatattgtaattgtaacgtcaaactttccatgctcgttcgactacaacgtgctgcggttgacataagggtcccacgtgttgaagccccaccgatcagccgcaccagcttccccgcacagccgtcgtcgttatccccagtccacaccggccgcgccgcagcggcccatcccacccgtcagcgtcggcgtaggcccccgccggctccttcctctcgccgtcgcgagaccgagcagccagtagcagcaggagtgggtgctccgtgccccgccatccaacaccaaaagtggaacccctcacacccacgcgaggtggtcgacactcgacggagagccgcaaaggaggaggagctggcggtggcgggatccagcaggccgcccatgtcgagcggcgcggacggatcggatccgatcacgggccttggcccgtcgacgatcccagagccgccggaccgtgagccgcctcatctacagtctccgtcgccggcggcgcagcaggaggtggcggcgtcgcaagccgagacgccggtgccagcggtgaccatcgtgatctcgcggccaggggaggaggttcagacgcctgatgcaatgggtggctccccggcgtgctccacgcaggccggtgacggcaaggctacagccacctcggtttcgttgaccgcttcggcggctgccaaggaggccgagttggcaaggtccgacagcttcgacgactacgagcaatgcaggtattcagtcggtgtgggattccctgcgcgcaagctcagggtattttagtgaattgcgagttggaaaggggacgagggtgtgttctgcttgggagtgttccaattttgtatgggtaccttgttaggtttagtagttgcgcgttttatccatctatgaatcacctgctatggctttgggtgctccctatcttgggggcgttgcttcctcatgcggtgtagtgattgtaggtgtatcaacaaatttccatttatgatgtactgattcatttcttgaagtcaccctagaacatggatcatgtcaactggactgtttactttagctgcccttttctgtctgtaactacaccaatagatttttgcctgcagttgggtggatgttgttcatcacatataacatgcgagcaataagtttgtgaacacgttcattgtcagtttatctgcatcttcattagtattgactttgccggtgcttgtgacatgtgcttatttagaggccatatattagtgcaattaggctgtcacagagtgcaaatgggactacatagcattcctgttagctatgatattttagggtctcgagggtatttaggcgttgatgagaatgtaggttatgcttccaatgcagttgggttgaccttgatccttgaatgtagaagcaaaagatattcgcaataagtttgctgatggtaagatcatttgtgtgtagaattattaaagattgggacttcatagattcaataattcaatgaataaatatgatatttgattcttggttatgaaaggctaactggcagctatgagctgcaggtgaaaaacaatacgaggaagaatgctggaaactgataatcaacttctggctgagtatttcttgtaccacaaatgtgctgtgagcatgaactgcatgcaccgttgctttgccatagtttgtcaacagaagacagaagaacctctggtcgaccttggatgtagatgtcgtggtgatcttgcaaaagcacatcgcacatgcattgatgtttggtttcgtactagaggttcaaacaagtgtgagatatgccagcaggttgctgccaatatcccccctccagagacgcaagcaagtacaagttattgggtttggagggttgattcgacttatggaaggggacgaggaggacgtgaaaggggatggtttagcccactttgggttgcatttgcaatcctgattggtggtctcttattggatgtgctgatatctgtttctcttggtgtttccgcacttcctgtcaatataataattggcgttcttatagttctcggattgggcaccgcccttcgtcttgctctcgagtgctgccaggaatggggctcaaggaggaacgtaggcaatatgccgaggctggagaacataccgccgactgggtaccaccctgcagtagtataatcattatgggacttgtaaatagcggtaggaacatctaaccttgtgctggctcttggattgtattagctttagctcacacgttgctcgttaatgtcgagctcaaattcaaagcttgttgattacgatcgggtccatactccactagtccaatgcaatgtaaatgcagagttactgatactcggtcttcatggactagtgctgatgccgaattgccagcatcttaattggttgtctggctaatcgttcagcatgacagcgcttggtttcttcttccttgtacggtttgctctcacaaatcacttgttgtgtttcatcttatctgtggcttgttggtataggcatttgtgaaggccatttgagcgaatgctgttttcatacgtttatgcacagagttgtgtggatatagcatttttatgtgaactaataacctgctg

SEQ ID NO: 6625 - DNA, 2018 bp, Zea Mays
ctcccagcttttgccattttggcgaccagctccaacaaccggagagggggagagagagagagctcgagtcacaaagctaaaaaaagcaccgagaaatctagtggtgcagcgagcgaatccgtccggccgtccccttcctccgccacccatccccaaaattttcaccgcacgtcgcctccccgcgacgacgacgcccgaagcttccagggccctcccctcccccccgcggccgcccctccctagatcgccgcctccggcagcggcgaggctgcatcgcgagggcggcggaggagccgggcgacggggtcgacgaaggcggggaagacgaggctagggttcggggtcgctgctgctgggctgcgtctgagggaggaggatgcatatgatgcggcggctcaagagcatcgcctccggccgctcgtcggtctccgatccgggtggtgactctggctccaaaagaccaaagtttgagcaggatggagcaggagatattgttatggagccacacttaaccgaggataaacctgtgcggatagaccaagaatcatcgtcaacatctaatagggatgctgaggcaagcacatctactagcatgaaacctgttaaaactgaagaagcaggagcagatcttcttcccaaagagatgaatattatgacaattagcgacgataaagctgatggccataatgataaggaaggtgagggtgttacacttgatgggactggaacagagacagggcagataattgtgacaacaataggaggtcacaatgggaagccaaagcagaaggtctcatacatggcagaattggttgttggtactggttcgtttggtattgttttccaggcgaaatgcttggaaactgacgagacggtggcgataaaaaaggtgttacaagataagcgctacaagaatagagagctccagactatgcagttacatgaccacccgaatgtagttcagctgaagcatcacttcttttcaacaactcaaaagggagaagtttacctcaaccttgtacttgaatttgtatccgagacagtttatcgtgttgccaaatactacaaccggatgaaccagcgtgtacccataatatatgttaagttgtatgcatatcagatgtgccgtgcgcttgcttacatccatcgagttgtcggtgtgtgtcatcgtgatattaaacctcaaaatctactggtcaatcctcatacacatcaacttaagatttgtgattttgggagcgctaaaaaattggtccctggtgagcctaacatatcgtacatttgctcgcggtattatagggctcctgaactaatatttggagctacggagtataccactgcgatcgatatctggtctgttggctgtgtagtggctgagcttctgattggtcaggtcgacgcctgtgcccatccgttcttcgatgagctgcgggaccccaaggcttgcctgccgaacggacggccaatgccaccgttgttcgacttcacagcagccgaactcgaagggctccccgccgagcttgtccaccggatcgttcctgaacacatgaggaaggaagtgaattaggtggacggacgtactggggcaaaaaaaaaaaaaaaactccctgtttctctgttggttctgagagatgtgtgagggcacggatatggaggagcggtggtgtattgtaattgtaaagagggctgaaagaaaggtccctctggttgggcgtgtcaccaaagagtggccctagaggcaaaccttacgtttgctcgttgcccttggtgtgtacccagatgtgtatcgatgacataggctggctgctgtatcatcatcagggttgacgctgaacaagagaaattcaagcagggtgctgctagctcgcttcctcccgtagctggaaaccccagaatgccagtttccatcactgcacgtcgtcgcgctgtccactggtgtcccgtaagcatatagagctctgccggctccgctattggcttgcgtgtgtctatcgataatgacttctacggacgctacc

SEQ ID NO: 6626 - DNA, 2533 bp, Zea Mays
agccaaggagccggatgcaaaggtctcccagcttttgccattttggcgaccagctccaacaaccggagagggggagagagagagagctcgagtcacaaagctaaaaaaagcaccgagaaatctagtggtgcagcgagcgaatccgtccggccgtccccttcctccgccacccatccccaaaattttcaccgcacgtcgcctccccgcgacgacgacgcccgaagcttccagggccctcccctcccccccgcggccgcccctccctagatcgccgcctccggcagcggcgaggctgcatcgcgagggcggcggaggagccgggcgacggggtcgacgaaggcggggaagacgaggctagggttcggggtcgctgctgctgggctgcgtctgagggaggaggatgcatatgatgcggcggctcaagagcatcgcctccggccgctcgtcggtctccgatccgggtggtgactctggctccaaaagaccaaagtttgagcaggatggagcaggagatattgttatggagccacacttaaccgaggataaacctgtgcggatagaccaagaatcatcgtcaacatctaatagggatgctgaggcaagcacatctactagcatgaaacctgttaaaactgaagaagcaggagcagatcttcttcccaaagagatgaatattatgacaattagcgacgataaagctgatggccataatgataaggaaggtgagggtgttacacttgatgggactggaacagagacagggcagataattgtgacaacaataggaggtcacaatgggaagccaaagcagaaggtctcatacatggcagaattggttgttggtactggttcgtttggtattgttttccaggcgaaatgcttggaaactgacgagacggtggcgataaaaaaggtgttacaagataagcgctacaagaatagagagctccagactatgcagttacatgaccacccgaatgtagttcagctgaagcatcacttcttttcaacaactcaaaagggagaagtttacctcaaccttgtacttgaatttgtatccgagacagtttatcgtgttgccaaatactacaaccggatgaaccagcgtgtacccataatatatgttaagttgtatgcatatcagatgtgccgtgcgcttgcttacatccatcgagttgtcggtgtgtgtcatcgtgatattaaacctcaaaatctactggtaagttcccagatccacttttcctcgaagcagtttgtgtggttgttagtgttgcaagtattctgttattcccattttggaccattttgctaccatcttgcttgtaagttgtaacacctgtcaacgcagaaatactgtgtaagtgcacatctgcaggtttgtcatgcaaaatgtctcttaaatctttggagtattttttttgttcagttttacgctaactgctgaaaatgttccttattgcaacttgattaaccttccaggtcaatcctcatacacatcaacttaagatttgtgattttgggagcgctaaaaaattggtccctggtgagcctaacatatcgtacatttgctcgcggtattatagggctcctgaactaatatttggagctacggagtataccactgcgatcgatatctggtctgttggctgtgtagtggctgagcttctgattggtcagcctttgtttcctggtgaaagtggtgttgaccaactggtggaaataataaagattttgggtactccaacaagagaggagatcaggtgcatgaatccaaattattccgaattcaagttccctcagataaaagcccatccatggcacaagctttttggtaagcgcatgccacccgaggctgtcgatctcgtgtcaaggctgctccagtactcaccgaacctgcgctgcactgctgtcgacgcctgtgcccatccgttcttcgatgagctgcgggaccccaaggcttgcctgccgaacggacggccaatgccaccgttgttcgacttcacagcagccgaactcgaagggctccccgccgagcttgtccaccggatcgttcctgaacacatgaggaaggaagtgaattaggtggacggacgtactggggcaaaaaaaaaaaaaaaactccctgtttctctgttggttctgagagatgtgtgagggcacggatatggaggagcggtggtgtattgtaattgtaaagagggctgaaagaaaggtccctctggttgggcgtgtcaccaaagagtggccctagaggcaaaccttacgtttgctcgttgcccttggtgtgtacccagatgtgtatcgatgacataggctggctgctgtatcatcatcagggttgacgctgaacaagagaaattcaagcagggtgctgctagctcgcttcctcccgtagctggaaaccccagaatgccagtttccatcactgcacgtcgtcgcgctgtccactggtgtcccgtaagcatatagagctctgccggctccgctattggcttgcgtgtgtctatcgataatgacttctacggacgctacc

SEQ ID NO: 6627 - DNA, 2060 bp, Zea Mays
acacaatgctgcaccgacagaaccaaagaaaaaaacaagaagtgttcttgttgagagtttggtgccaacaaggcattattgaccgacatgttagatgcaacggatcggcgtgagcacactgtactggtccccagagaaatagtgcatacttctgtcctgtgttcacttaattattgtgcatggtgtaaataaatctcctgcaagtttcctggctgcattggccttctaattacgtaactgaatcggcatgagcatttatttagtccatcaggaacagcacggcccggcgaaacctcgggtacctgtcgtgcgggacaggcaacccgatcgacgactgctggcgctgcgactcggactggcacagcaaccggcagcggctggccgactgcggcatcgggttcggccgcaacgccatcggcggccgcgacggcaaggtgtacgtggtgacggacccgagcgacgacgatcccgtgaacccgcgcgagggcaccctccggcacgccgtcatccaggaggagccgctgtggatcatcttcaagcgggacatggtgatcacgctgagggaggagctcatcatgaacagcttcaagaccatcgacgggcgcggcgccaacgtgcacatcgccaacggcgcctgcgtcaccatccagtacgtgaccaacgtcatcatccacgggctccacatccacgactgcaggcccacggggaacgccatggtgcgcagctccccgagccactacggctggcgcaccatggccgacggggacggcgtgtccatcttcggttccagccacgtctgggtggaccactgctcgctctccaactgcgccgacggcctcatcgacgccatcatgggatccacggccatcactctgtccaacaactacttcacccaccacaacgaggtgatgctcctgggccacagtgactcctatgtgaaggacaaggcgatgcaggtcacgatagccttcaaccatttcggcgaaggcctcattcagagaatgccaaggtgccggcacggctacttccacgttgtgaacaacgactacacccactgggagatgtacgccattgggggcagcgcggagccaaccatcaacagccagggcaaccgctaccttgctccgacgaacccgttcgccaaggaggtgaccaagagggtggagactgcccagaccgtgtggaagagctggaactggaggtcagagggcgacctgctgctgaacggcgcctacttcaccccgtccggcgcgggcgcctcggccagctactcgcgcgcgtccagcctcggcgccaagtcgtcgtccatggtcggcaccatcacctcggacgccggcgcactgtcgtgccgcaagggcgcggcctgctagcgcggatcgcgctccctctccagcaacaggaaaagaaacaggacaacaggaaactaagccacctcaacaccaccaccaccatggttacagtttcttcttcccttctttttaggggtcgcttttgacaagggttatattatatatatatatgatggtcctccttgatattttcaccatttgctcaacctcccccctgctcccgacatggaaagctacctggagcagcaggcgtgaagcgttgctgattggtcgctcggtctctctattagtcgtctgatctgagtgttgcgtgttgttccctctgcctacaagcaagtggtgtatgttgagggcagggggtgcgtgcgtgcgtgttgtgtgtgatacttactcacttggttgttgtgttgagaaaaaaagggtcagattgttagtagtggtagtactacatgttacgcctggacagactgggatggaatggatgtacaagacatggaggaatacccatgttcttaactcttcttcttcttcagtgaaaaaagctaaaacgttacagtttagctgaatattttgatctcgaagaacagcatgtgctgcttcggaaaggacactagcaccagcacattgatatgcccagttccatatcaagttttttcactatcctcggaagtagtacttgtgtacatgaggagggatcggggatggatctgg

SEQ ID NO: 6628 - DNA, 484 bp, Zea Mays
gtggaaaccctttttttctgggaaaacaatgaaccatataccaccaacggaacacgggaacggcggaagcaaacaactagaaattccccagcccggttccttttcgtgcggtttgatctcgtcggaggcccggccgcagttccgccatcagccatcgaattcgatggcggccaacttcgggaacaagatccgcaacgccaagctggttcttcttggagatgtaggcgctggcaaatctagcttggttcttcggtttgtcaagggacagtttgttgaattccaggaatcaacaatcggagcagctttcttttcccagaccttagcggtaaatgatgagactgttaagtttgaaatctgggatactgctgggcaggagaggtatcatagcttggcccccatgtattataggggtgcagccgccgccattgttgtctatgacatcacaaatccgtgatgaggcgaacgaggcggaagatgatggaga

SEQ ID NO: 6629 - DNA, 1257 bp, Zea Mays
gcaactgtttgttaactgcaaatccgagagagtcgacgggctactgttgatgtcttcttgaaggcagctggatacctagactgtgcagttcggcatgtactcccgaagatgccactggagctaaggagacaacttccagtagacctggctgaaggaaatctcaaagctctaagcctccaagccctgggtcagggggttgacatgcagcttggtttggctattgatagtccaaaggccactttagcagtaaaacggcgcttagcctgtgagatggtcaaatattggcaacaagttcaagagagcattccagagcttcctatctctgatggatggggtaaaaagcaccggctctttataaagtggaaatatgttgaagctaaggctgcagcatactatttccacggtttgattcttgacgagggaaataccgaaaaatcccatggaatggcaatagctgcactccaagcttcagaggaatttctaaaagaaagcaaaagggtttcagaagccttccatgcaactcctccaacatcgaggagtcccaatccattcggaacagcaaaatatctgtttgacaagatcccaagagatgcttccagcaaggttcgaatcaaccaggacctgtatactcaagaaaaggtcattggagcgccacccccattaccagattttgcattggcgctaacacctgaagaatatgatcttcctccactagatccactttggaacaaagaagacacaagccattaagtgtatatgcagcagaatggttgcttctggcaaaaatattggctctggagagaaaggaaggaccaagatctgccatgtcaagagctgatgtgtaatgaatgaagtgtacaaagtattttcaaacaaaaatacatgttcacaaatttacgcaaggcctgaagacaatctgaagagctttgtacaggcgattcttcttctgacaagggaaatgctatgtcaaagggttccttgatcattgtgcatcttgatgcttgcattttgtcaaaaacagattttcagcaatttatgtagaactgtaaactagcctctgatcgaaagtggcagccttcaaatttttttttgccataaaacatttacatcggcaccttaaaacatgccgtgggacaatcagtttcatctgagcacttaggtgaacaggattttcaaataatcagtggatactgtggcaaagtcagcttccagccattcagtgcatgcatatacagtcataaaattttagttttgaac

SEQ ID NO: 6630 - DNA, 459 bp, Zea Mays
cccctggccactggcccctgcgtttcctatcgtttcggttcggcgcaggcgccgctaccgcctcctctcgaccgctcgccttcccgttcgccatgtcgttgctcgccgcggccattcccagcacttcctcccacttctccgcacccttcctcccctcattccacatgccccgcaagaacctcaccgccccactccaccggatccgccgtccgcggccgttcaccgtcgtctcctccgtcccagaccccgcggcggggccggtggaatacacgccctggctcatcgccggcctcggcaacccaggcaacaagtactacggcacgcggcacaatgtggggtttgagatggtggatcgcatcgcggcggaggaggggattacgatgaacacaatccagtccaagtcgcttctgggaattgttgtctgtaatttgtggtctgccacaacattatgtaaaggtt

SEQ ID NO: 6631 - DNA, 928 bp, Zea Mays
cccctggccactggcccctgcgtttcctatcgtttcggttcggcgcaggcgccgctaccgcctcctctcgaccgctcgccttcccgttcgccatgtcgttgctcgccgcggccattcccagcacttcctcccacttctccgcacccttcctcccctcattccacatgccccgcaagaacctcaccgccccactccaccggatccgccgtccgcggccgttcaccgtcgtctcctccgtcccagaccccgcggcggggccggtggaatacacgccctggctcatcgccggcctcggcaacccaggcaacaagtactacggcacgcggcacaatgtggggtttgagatggtggatcgcatcgcggcggaggaggggattacgatgaacacaatccagtccaagtcgcttctgggaattggttcaattggcgaggtgccagtcttggtggtaaaaccgcaatcatacatgaactacagtggagaggcaattggacctcttgcagcctattatcaagtaccattacggcacatcctcttgatttatgatgatacaagtctgcccaatggtgtactgcggcttcaaaagaaaggtggtcatggtcgccacaacgggctacagaatgtgattgagcatttggatggtcgcagagaatttcctcgtttatctataggcattggtagcccacctggaaaaatggaccctcgggctttccttctgcagaagttcagttcagaggaacgagtccaggtttaatattaccttgcgggtatggattagtaaaccctctacccgcgggtttcatacccattgccattccaaggagatttttgaatcccagcttgaaaatcgctcgcaccaggagttgaagctagagacctgttcacaacaataccaaatcaaactgttgttaatatgtgtgtgtgtgtgga

SEQ ID NO: 6632 - DNA, 1408 bp, Zea Mays
cgtagttcaggtattacttcgattttcacgaaatcatagggggtgcgaagtggatttcttcttaatttagtttgtaaattgtgatttacgtgtatctcagcgatcaagaattgctttggtgctaacagttggagtctctttgatcagaatggaacctcaccttactttggctgcattgttggtcgagttgcaaatagaatcaaggatggaaagttcactctaaatggggtgcagtacaatctgagtatcaacaacccacctaacactcttcatggtgggtttaaagggtttgacaaaactatatgggaagttgccgagtataacaaaggggacaagccctcaatcaccttcaagtattacagtaaagatggagaggaaggttacccaggtgatgtttctgtcactgcgagatactcgcttctcccaagcgcgacactgaagcttgagatggaagctataccactgaacaaggccacacccatcagcctagcacagcacacctactggaacctggcaggccacagctcaggagacgtgctctcgcactcggtccagatctggggctctcagataaccccggtagaccagacctcaatacctacaggcgagctcatgccagtgactggcacccccttcgattttctgaccgggaccaggatcggaagcaggatcgaccgggtccccggcggttacgatcacaactacatgctcgactccggcgaagtgaggtcaggcctgcggcatgtggcgcacgtcgtggacccgtccagctcgagggccctggacatctgggccgacgcgcctggcgtgcagttctacaccggaaattctcttggtggcgtcgtgggcaaaggaggcgcggtctatgggaagcacgctggcctctgcctcgagacgcagggtttccccaacgctgttaaccagccgaattttccctcggtcgtgtttggccccggtgagaggtacagccatacgatgctgttcgagctctctaccgagtgagtcatgtagcccgtctgcctgcccgtgtagatagatagatatacaccgtttttattttccttgttgttttgtgcttgcgagtagtcaagaaactgtggcgcgcgcggcggttgttcaattgattcttggtttagggctgaatgttgtagcaggaatgcagcaagactagtaggaaaggaacggatttggggggaggtactaggttactaggtctgcatctcgttctgatgtgaacctgtcacttgtgtgtgtgttgagtttagttcattcaggatttagcagttcttgcatgaggtaggctaacatcgcatttcctgtcgagagaaaaactcgatcgaaacctgagtttagtatggtttcaggatgcagcaatcgacttatcgacattcacgttcacagtgcgcgg

SEQ ID NO: 6633 - DNA, 729 bp, Zea Mays
cagggggtgagggagcgaacagagtggttgtcccctcattcgagatgtaaagtcggccctctcctccttacctcaatgtattgctcgtaagttttataactcagaagaatcatgctaaatagcccaatgatgatacatgtaaactattttcttgtcgtgaaccttgaagccaggatggaaagacctcttcgaattataaatctcaacctaatttgagcttgagtctgatgacatgttttgcaccgcaggattatctcctaaaatctgcatttttattttctaacaatatgttaagtcttgagcacttaaattcatttaatctgaattagttaggtctacacaagatgtgaagtttatacaattccaactaacggtcaacgtcgtagctctgataatcaatgtagttgctgctgtcagttctggaaacgtgctgttgaatgttgttcaggtttgagttcagctctgagatctattggtagttgcattatttatcatcatttaacttgtaaaagctgcaatttcttcagttttgtgcatgtccagacaatatttctaaaaaatgtgtttggtggaattctaatttttgctcccttggctgacagttgctgtgggttaacctaattatggatactttgggtgcccttgcattagcaacagaaccacctacaaaccatcttatggagagacccccagtagggagaaggattttagaagctcgatgattttgtt

SEQ ID NO: 6634 - DNA, 2318 bp, Zea Mays
aattgaaaacagggccttggtcgagttaaaaaaaacgcgagtgaaacacactgacaccgcacacacgccaaccggcctaccgccttcttctcttgtctcgtcctcctcgcgactatggccgccgccgccgaggtagaccccagccccaacccgccgccaactacagcctccggcctctccaagaccaagacgcgggaggccgaccgccgccgacgccgccgcagcaaggccaagaagaacaagtccgtcactgaggctgatgcccaggacgctgacgggggagcttccagctccgacgccaaggagaacgccgatcccaaccccgagccacaggttgaggtggagatagagtacgtgccggagaaggccgagcttgacgaccctctcctggatgatttcaaggccatcttcgagaagttcaccttcaaggacgctgctgcagcggcggccgagaaagacgagggtgccgctgatgccacaaagaaggggtcactggatgatgatgacgacgacgaagatgatgagcaggaggcaaacaagaagaaggacggaggcctatccaataagaagaagaagctggaacgcaggatgaagattgcagacctcaaacagatatgcaacagacctgacgtcgtggaggtctgggatgcaactgctgcagatccaaaattgcttgtatatctcaaggcgtaccgaaatacagtacctgtccctaggcactggtctcagaagcgcaagttcttgcaggggaagagaggtattgagaaacagcctttccagcttcctgacttcattgctgcaactggaatagaaaagataagacaggcttatattgagaaagaggatagcaagaagttgaaacagaaacagcgtgagcgtatgcagcccaagatgggcaaaatggatatagattatcaggttttgcatgacgcgttcttcaaatatcagacaaaacccaagctgtctagtcatggtgatctgtattatgaaggcaaagaatttgaggttaaactgagggaaatgaagccaggcatgctgtctcgtgagcttaaagatgctcttggtatgcctgatggcgcccctcccccatggcttataaacatgcagcgctatggtccacctccatcttatccccaactgaagatcccaggtctaaatgccccaatcccccctggtgccagttttggttatagaccaggggagtggggaaagccaccagttgatgagcatggacgtccactctatggagacgtttttggtgttctgcagcaggacgaacctaactacgatgatgaacctgttgatcgcagcaaacactggggagatttggaggaagaggaggaggaagaagaggaagaggaggaagaggaagaaccaatggaagacgaggaaatggaagacggaattcagtctgtcgataccatctcaagtactccaactggtgttgaaacacctgatgttatcgaccttcggaagctgcagaggaaggagactgacaagcaggcagaacggccgctgtaccaggttcttgaacaaaaggaagaaaggatcgcccctgggactctatatgggtcaagccatacgtatgtgttgggaacacaagataaatcatcagctccgaaaagggtggatctgcttaagaatcaaaagtcagacaaggtggacgtcaccatccaacccgaggaactggaagccatggatgatgttctggcagccaagtatgaagaagctcgagaggaagagaagcttcggaaccaaaaggaggacttcagtgacatggtggcagagaatgctcacaagaggaagaggaagcaagagaaggaaggcaagtcgaagaagaaggaattcaagttttaagggcaggcgggcgatgtaggtcatgaggcaccgttgtagctgttccaaatatgactggctgtatggtttagttgctgcgatcagacagttccgttccgtgttccaagttccaaccgagaggtcgggctcattcgcttggttaacacaaatgtcgctttggattttcactggaatatgcttaattactctgtaagaaatcgttgcgctgttgaaatatcacgtgctggaaaggcggtctttgctatggggggggggggggggtgctttgacctgccgaaggggttatgcggcgcgatgatctatttcggtggagccaacaagacaattgattatggctagtgtgggaacattttcccgtgtttttcttagaaaaaatgaactaatttcttttgagcaaatgaaaaccccttaaaaaaaatagggttttcaaaatagctctggtcagaagagaaaaaaataca

SEQ ID NO: 6635 - DNA, 1211 bp, Zea Mays
aaccgcagaggccaacagcacaacgagcgcaccactccccaagaaatggagctgacccaactcctcctcctcaccggcaccgcctcccgagctcctgctccgcgcgcgtagccgcgccgcagttcccagtaataacacgcccgcaagctccgcagtccgctccctgcgcgagggtgttgtttgagccatgaagatggcgacgatgactgcttacaagtatcaagctcaggcgttgatgagggactacttgctagctgatctactcgttccgtacacctctgtgctctttggcattgtcctctgcaaggcttatgatttcactcgaatactgagctccttttatttcaaggggtatactttattgacaaaaatacagcgcatcgaatggaacaataggggggcctattacattccgtaattcgataatatccacttctgcattgggggtttctgttggctacttcatcactgatcttgaaatgatcttctggctgtatccttcccttggtggaatggaatatgtcctccaccatactctttctctggttgcaatagcttacacaatgttgtctggggaagggcagttttacacatacatggttctcatttcagagacaaccacccctgaaatcaacttgcgatggtttcttgacactgctggactgaagaaatcaagtgcttacttggttaatggaattctgatgtttgttgcatggctggtggcaaggatatttttgttcatgtatgtattttaccacatttatttgcattacagtcagataatgcagatgcatgcctttgggtactacctgacgtttgttgtgccatcggtgctctttgtaatgaacacaatgtggttcatgaagatcttaaaaggcgtgatgaaaacactggcaaaatggtcatgatggatgatgccaagaggatcccagaactatcaacaggatttggtctttctggcatcattgatctgtaaagttatggatatcagggtaactagagaaagttaatatgtaaagtattagcaaacaagctagattaggtgaaattgccctattttcagcagtgctggaagttcataaccagtttggtttgtaccggagatccagcacgctgttctgcttacccccaatgccatgtgtatatctggagcattttgcttaccccaatgccatgtgtatatttggagcattttaatggatggtttgttc

SEQ ID NO: 6636 - DNA, 1008 bp, Zea Mays
ccgggtgttacaggctcgtaggtccgatcgccggagtcacatgctctgggctggcttctgctgctagctgcctcgctagccgcctagcccaaccgcaatgcgcgccatcgcctccccacttgcgcctcctcgcccagagccacccattgccgtccgatcaagatccaacgccctcaaacgcgccactttaccaccagtccccctcaccgccgcccgtctccgcctccgccgacaaccggagccagggccctcgccacccacccgattgagccaccccatgcctcctcccactgcgacgatgtcccccgcagctggcggttcctttcctgagctcacctgtcccgcggactttgccaccgtcgccgcccccggcggccgcttctccgtcgtcggcttcggatccctcctttccgagcggagcgcgaggagcacgttcccggagctggagggcttccgtgtcgcggtgctgcgggggttccgccgagtcttcgcccacgctgcccccatcttcttcgagcgcggcatcgccatcgaggccaccaaggaattctcaagcttgagcgtagagccatgcgacagtgaactgatagtagtcacggttttcgaaatcaaggaggaagaggtcccggcgtttattgagagggaacatgagtttagatttcttgcggttgtccctgaaggattggatggggtaccttttacaaatcgagcagttgtctgtgcacgctacagcaatgaagaatatttccaagagagatgccgaggaagcaaggaaatatataacaagtactatggacggtacaatattgacaaaatatggagagatgatatcttaccatgtcgcttatacctcagacattggagagctgcgtgtcatttcattaacgcctcgtttggatcattggaattgaattccattctaataatagtaatttaggcatatatcaattaagctaattcggtttatgcaaaatatatttgtatattattattagcaagatgtcggag

SEQ ID NO: 6637 - DNA, 1842 bp, Zea Mays
caaggagctacctagcaacgcgcagtaagcagcgtgggcaaagctacgagcgcccggctagcttcgccatgaacatgggtggggtgtccccgtcgacagtccggtgcaagcactgcagcacgcagctcaccgtgtgccccggcgagcgcgccatccagtgcacgcaatgctgcggcgtgacgcgtatccggcggcggcgggtccagcggccggcggcggcgccgcccaccacgggcttcccgcgcgcccgcggcaagaagcgggccctcctgatcggcatcacgtacgcggcggggctgcggccagctgaggggggccctcaacgacgtcaagtgcatgaggcaactcctctgccagcgcttcgccttccccagcgactgcatcatcatgctcactgctggacgagctctcgcggtgcagatgaccagaaggacccgttcaggctgcccaccaaggacaacatccggttggggatgcagtggctggtggaggggagcagcgagggcgactccctcgtgttccacttctccggcctgggcgcgcaggtcgccgacgacgacggcgacgagctggacgggtacgacgaggccatctgcccgatggactcgttccagaagggacccatcctggacgacgagatcaacgagactatggtccgcccgctggtccacggcgtcaagctgcacgccgtcgtcgacgcctgccacagcgccaccgtcctcgacctcccgttctgctgcaacatgtccagaagcgggagctggcagtggaaggacgagagccccccgtccggcgcctacaggggcacgagcggcggcaaggcgatgctcatcagcggctacagtgacggcaaagccaagtccagcgtggccagtgcgcagaaaccggaggcctgcgcgaccatgggggccatgacgcacagcttcatcacggcggtggaacgcgagccgcagggtgtcacctacggccgcctgctcacctccatgaaggccatcatgaccaactccggcggctgcgccgtgcagggtcctattggcgccggcgcggccgcccgcaaggtcgccaacttcagcggcgtggaggaacccaacctgtcctcctcggagaagttcgacatctaccgcaaggcctttgtgctgtaaacctcctctgcatcggccattgcaaactaccgtctggactctttaaattgccgtgtcgggataataaaccagacgggcctatgtgtcaacaatgtgtcgtctttgtgtcatcagtcaccggaggagaatatttgtgtttatgcacacgccaacaatggctccttgctactaaaccttatggcccattgtaataaggctattgtatctcttctacatgtctctaaaataaactaagtgttatggtggtaattaatatcactttcagcatacaagaatggacatagctttatacgatcagaatgatattaaaaccaataatgagatttatatgagcctactaaaccttatgtaccctagaagcttcgatcttcctagacaaaaggagttgagcacaccataggacgaaattagatttagccatttgaattatgatgacttggtgtatgggggatcaacactatggtggtagaagcagtggcatctgacatgtgaggaggaagaaggatgtgcggtgggaaattagaaaaaaaaaatcttggctttgatgccatgcaagacaatatcctcttgaggctgtactcatgtacatatagatatacgagagcattatttacatgagcactacctagattaggggatgtagccctaaacctttacatggcagataacaacactatcaagattaggcattgtcctttgc

SEQ ID NO: 6638 - DNA, 1673 bp, Zea Mays
cctgtccttattccgtccggacaccgacgaatgaactcgcggtgccgcggcgggaacgggtgcaaggtcggcgacgacaacggcagcctgatgctgatgtgggaggacggcttctgccggccgcgggtggcggagtgcctggaggacatggacggcgaggacccggtgcgcaaggccttcatcaagatgtccatccagctctacaactacggagaagggctgatgggaaaggtggcctctgataaatgtcacaaatgggtcttcaaggaaccttctgaatgcgagcccaacatctccaactactggcagagctctttcgacgcacttcctccggaatggaccgaccagttcgcatcaggcatccagaccatagctgtgatccaagccgggcatggcctcctgcagctgggctcctgcaagattatacccgaggacctgcacttcgtgctgcggatgcgacacatgttcgagtcactcggctaccagtcgggcttcttcctctcccagctcttctcgtcctcgcggggcgcctcgccgacgccgacgccgccattcccgctcaagcagccgccagcagctccggccgcgcgcgccccgccgcagctcttcagctggccgggccaccaccagccgcagcagctcccgtcgcccgcgggagcgtcgccgctcttcccgcccggcccgggcgcgttccacccgtcctccgcgcgcccaatgccgccgttcccaggcggcaaggacgagggccacatgttccacctcccgccagcggcgcaccacggcaccaacaagcagccgccgcagcacatggacgagcaccaccaccaccagcagcagccgatggtgggggccggcggcgacgcgcccgacggcgacctccgctggcccaacgggctgtccttcttcaccgcgctcaccgggcgcgcggacgacgcgaagctgcttttcggcggccccggcgctggcgctggcgctgcggacgacgacgacaaggcggcgccggacgcgcacggcggggccgagaacgtggaggagtacctcagcctggagagccactccaacaaggccaggaaggtggagagccccgcggcccagagcaccaacaagttcaagaggagcttcacgttgcccgcgcggatgagctcgtcctcgtccacgtcagcgttcccgtccgtgtcggcctccacggcgccgccgcagcagcagcaagcagggatggagtatcgagggccgcacgagggcggcgtctactcggacctcatggagacgttcttggagtagctatagctagctagatcccgtagcatgcatgatcgatcggttcagggtcacacactacgacaagcgtacgctgctttttgtttctcaccgccctccgtcccaagctttgtttcaggtttggagttttaatcgcataatatgtttaattagatttgtgtgtgtatttttttaattttcatcgtgtttcccccctattccagtagttgtcgtagctgctagctagatcgtaatgcacaaaaaaaatggtggagtacatgcatgcatgcatgcaagaagagcatgagttgcttccattatcatgactggctggcaactctgtggtgcaaccgccatggcgccatgatgaggaggtacaatgatatgcaacacccaataatatgggctttttgtcg

SEQ ID NO: 6639 - DNA, 2482 bp, Zea Mays
ccagaccagtctgaccctcccatagcttgccgagccccgtttagagaaacaagcgcacggacctgttagatacggcctgattttttaaccgtgatcttcactgagcccgtacactagtcctcatccggaaaaaagtatcaactcccaaactctcttcctttgccggcctcgtcgcgcgcccggctcgcctatatataaccgtctcgcctcccacctcattcatcaaacggactcacagctcgcagcacctgcaggacattgagaaccagccagctaaccaaccaaccaaccggcggagccaaagccaagaaggaaggcaacgtgcccatccagtcaggatgtgcaactccaacgtcaagtccgcgggggtggcccagatcgacggccgcccggtgctgcagccggcgggcaaccgcgtggcggcgccggagccggacgcctcccgcccgctcaagaagtccctccagaagtcgctctccatgccggtctactacgacagcaacgccaccgcgggcgcccgtcctgcgccggccgagaacaccacccgtgccgcggctaattcgtctccgctgcctcccgcgaaggcggcgacgaaggcagcgggcgctttccccgcggagaagagcggcaggtccaaggcggccaggaggccaggcgccgtgccgccgccggtggtggcgttcgcggcgctggaggcgttggagccggcggggagcatcgccgcggcgcagcgggagcacgccgcgcaggcgcaggcgcagcgcaagctgcggatcgcgcactacggccgcaccgcgtccttctcccgggtggaggggcgagtagtcggcgccgcggccgcggccgccgagcgggccgtccccgcctcccccaccgggcacgacgagaagcgctgcagcttcatcacgccctactcagaccccctgtatgtcgcgtatcacgacgaggagtggggagtgcccgtgcacgacgacgagttgctattcgagatgctcacactgtctggcgtgcaagtcggggccgactggacttccatcctcaagaaaagacacgtctacagggaggcgttctccggcttcaacgtggatgcggtcgccaagtacaccgagaagcagatggcgtcgctgagcgccgactacgggctggatttgggcaccgtcagaggaaccgtcaacaacgcctgccggattatcgaggtaccgtgacccgtgcggagggacttgggctcgctggacaggtacgtgtgggcgttcgtgaacaacaggccgctgtcgccgagctacaagtacagccggaagatcccggcgaagacgtccaagtcggagtgcatcagcaaggacatggtccggcgcaggttccgcttcgtcggccccaccgtcgtccactccttcatgcaggcggtcggcctcaccaacgaccacctcgtctcgtgcccgcgccaccgcgcctgctccgccgccgccgttaactgattctgctgaccaccgtccaccgatcgagagccagacgtaaggaagaagagagacctttatatataaggacacgtacaatacaaccgagaaaaaagagaaaggtagtagcctctagtagcactagaagtagtacgtagtatacggaagggagagtgctggtttgcaattgtgtgtacgtacgagtacgatgatcgagtgtgcttgtgtagattgattacgcccccacccctaattagtcaatgaatgagcttgcttgctgcgacttccgcctgcacactgcagtgtgcagtcattgttcgcgtgaggcggttagctgcaggcgtgcgctctcctcctctcaacaagctaggctgcgcagatagtgatgtgatggatggggagatgatgatgatgatgattatagagagaagcccggccgtgtgggctacctgcatgtggccaagctctgattaaaagcgcgataacagcactctcacggcaggcaggcaggccatgtggtgtggtgtcgcaggcaaacgcatgtgcgacgaagacagagagggagagacggaaacgcagggagaagagcgggaaggaaagggggactagctaggaaaggcccgctttgccggccgcgcatgtgaccctgcagctcgcgtaccttttccaatcctcaaagtgggaggacggatcggaccccatgcactccacgctagtggtgtgtttggtttgtagagtcactccatgaggtgatgcatcataagttcattacaacaattttggtggaatcaactcactcctcatgtatatactaattattagcttataaggaataaggtggtgatggatcaacccattctattccacaaaccaaataaaaaagtgaggagtgggaagaagatagatcgcttcattcctcaaaccaaacacactgtagatttttcatggtttcttgcaagttcagttcctacgaaagcgggggcacggttccggagcaggagcattggatttttgctacccgcgcacgcatt

SEQ ID NO: 6640 - DNA, 5023 bp, Zea Mays
gcacaagcttcctccttcccacatgggcaccgtctcctccttccccaattgcaagctccattcgcgctcctcgtcctccgctgcctccagcctagtcccatctctgctcgattggagaggtttgggccatgcttcctcctcgcgcgccacgttctcgacggaatttctcgtctacacaggagccaaggaacgctagaattagacgcttcccggggtcccttttagttcccctctaacgaatcataggtttgcagtttggtgtggacgtatcctgtgatttgtggatggttttggtgtagagtttagagagatcaagaacttccaacttggggtttcctgtagccttttttagctgttctggggcttttatgggagtgcccgtcgcgcagaagtccgattcttgggtgactgtgcttgcgatgacggacagcggcggcctcggcgttcggcctattaacggaggccgagggagtgccgtggagcagcgtgggctcggactcggagacaacgggcctccagtgtccccaccagagcgtgtttctacgccgcctgcgccgagactagctgcttggtggcgcatgtcgtcgcctggtcctctccggtgctcaaccccgaggagcgttggatgtgaagatggtgatgattcggataggtacttttccccacagagtgagttttctcaagacacttctgatacagattcgatgagcacaagtattagtaggatgtataccttcaggttagggacttcgagcccattagatagtcctatcaaacaattgggagtaggagacacaagtcctccctcaaggaagggttgccattctcctagatatccttggaattcttgccggggatcagatgatgttgattctagctttatgagttcacctcggcatgatgatgaagagaggaaatatgatgtgcaaccaattgattttgagagtagacacatctggtatcctccaccacctcaggatgaaaatggtacttttcaatatgatgaggatgatgacaatgatgtttgtgatgggaaggtctttggacatattaaccatgattattgtgacggcgaagatgatgatgatgtgttagggatcaaaggaaaacatagtatatctcacaaagagttcttgaggagtgctttacatgggcatttcagggctctcgtctcacaattgctcgaaggacatggcattgatcctgtggatggctggccagacatagtatcctcattagcttggcaagcagctacctttgtcaggccagacacgagcaaaggtggtagcatggatcccacagactatgtcaaagtcaaatgcgtagcatcaggaaatccaaatgataggaaaaggagtatcttaagaatgctgttgcaaagatagaggctcaacgcccacaagtcttgctagttgagaaaagtgtgccattgcatgcacaacagcttcttgcaaaagatatctctttagtattgaacgtcaagagatcacttctggaaagaatttctcgctgcacaggtgctcaaattgcatcttctgttgaaaatatcacttctacaggagttggacaatgccaaacattctggattgagagagttacagaatgttcatcaccgaaggtctcaaacaaaaacacagtcaagacactgatgttttttgatggttgtccaagacgcttggggtgcacggttcttctaagaggaaaatcatatgaagagttaaagaaagtcaaacttgctgtacagtatgctttatttgcagcataccacctgtcacttgaaacctcatatcttgctgacgagggtgcaacacttccaaaagtcccttcagaccttcaacttgagaagccgaattcttcctcaagatactatcagcagaatttgattgaatttcaaaccattgaaggggaaacttatggagctggatgcatcacaccttgccttaatggctctgcaaatcaatctcattcaagagatgacataattcatgaggaacatgcacactgtcattcaagatctgacttaagttgggaagaatatactggtggaaccattgatgtatacccttattccacagaagcttcaatgtatagtagctgtatgccacctgtatgcatgactgttcagacacctaaaagttcacttgccagtgcgagaaaaagtacaccaggaaatttgtttttttccaataatgttcacatagatgaagcaggtggtggaatgtcaaaggttgataatgacgtccttgacttggataatggttggaatcatatctcagatgaagattctgtagcaatacatgatcacaacggtaatcacaatgaatattttccaacatctgacagtccacagagcattttggtttccttgtcaattgcatgccctctgagaggaattgtatgtaagcagtctcagctatttcgtataaagttctatggtacttttgataagccgcttggaacgtattttcgtgaagatttatttgttcagacatcatgctgtgaatcctgcaaggagcctgcagaatctcatgtgcgatgttacactcatcaacaaggcagtctcacaatcagtgtcaaaactcttccatctgtgaagctacccggggagcttgatgggaaggtatggatgtggcacaggtgtctcaggtgcaaaccaaaagatggaattcctccagccacacaaaggatagtcatgtcagatgcagcacgtggattatcttttgggaagtttctggaacttagtttttcaaatcacacaacagccaatcgaattgcctgctgtggacactccctccaaagggactgccttcgtttctatgggcttgggagcatggttgctgtcttccgttattcaccagtagacattctttctgtcaacttgccatcctcagtactggactttgcttgtccaaaagctcaagattggatcatcaaagaagctgttgatgtatgcgctaggaaggaacatctgtatagggaaatcgttgctaaacttgactgcatcgaaaagatagttaaagaccagaacattggtatgaagtcaggcttgcataaacatgttgctgatcttaaggagttggttaaagttgagtggaagaagtatgacgttgtatcagcgttttctatcgtagataacttgcagacatttgaaccgtatatagatgttctagagctcaatctcctgaggagagagcttgtacatgatattcacgtatgggatcgcagactgtacatgatgcactccctcacgaaagagaactgtcgtactatgccaaatgacgcacaattttctgagaagtttactgaaagctcattagaacaatcaaaggatgtgacatctggtaaacatttgaatgctgagagttctctagaacagaatcaaccaagtacgttggaagtggctgcagtttcagtgaaatcatcccctatgacggaacaaaccaacactagcatttcacatttggcattggaaaccaccattatgggtgatgcatccatgcattctgtctcaactgttatcagctttgccccaggctcgtatgaaatgcagagtgaaggagtgctggctgaactagaagctggaaagactttgcagaaatcacaatcttctgcctccaatctttctgatagaattgacttagcatggactggttctggtcagcttgttaacgattcatcaagtagcatggaggcagtttcattcatacctgctagtctgaaggataatcctgcataccagaaggttatagcacccattagaatcaaatcgtttgattctgctataagttccagaaatgttgatgattcaaatgctagtataagaagatcttattctcaaaggcccccaaaggctattgagagaactgtttgatgcaatcaggagaaagtgctgtccagatgaactagactatatccgctccttaagtcgctgcaagcgatggagtgctcaaggtggcaagagtaatgtctactttgccaaaacactagatgacagatttgtgataaagcaagtgacccggacagaattagattcatttgaggattatgctgctgattatttcaaatatttgatagactctgtatcatctggaagcccaacttgcctcactaaagtccttggtctttatcagatcattgccaagaatttgagagatgggaaagagctgaagatggatgtaatggtcatggaaaacctatttttcaagagaaaggtatcaagaatatatgacctaaagggttctttgcgttcccgctacaaccctgatacttcagggaacaacaaggttctcttggatcttaatctgttagagacacttcacacaaagcccatttttcttggaagcaaagcaaaaagaaggctagaacgagctgtctggaatgatacttcttttctggcatcggtggatgtgatggactactctctcctagtcggcattgatgaagaaaggaaagagcttgtgatggggattatcgactatcttcggcaatacacttgggacaaacaactagagacttgggtgaaggcgacaggatttcttggtggctccaaggatgttctgccgaccattatatctcctgaccagtacaagaagaggttcaggaaggccatgtccaagtacttcttggctcttcctgaccaatggtcaccgtaacgccaacaatgcatccaggccattccaagcgcggcgacagggaagaccactccggttttctttttctttttctctcccttctgtttcttttaggacgatctatccatctgtgcctattgtatgctgtttttgttcacaacaggcaggatgaactctgtggaagattgtggcgattgttgtccagccaagcagaggttaggcgtcaatacgtgtacataccctacactgtaacatgaaattgcaaaggaaatgaaaatacgcgaactcgcgagttccttaccagtgatatgatttgagaagcttgcccattgttgctttgtgaggtctaaaacaattattcactccgcttctttctacgttttatattttat

SEQ ID NO: 6641 - DNA, 5526 bp, Zea Mays
ctagcacaagcttcctccttcccacatgggcaccgtctcctccttccccaattgcaagctccattcgcgctcctcgtcctccgctgcctccagcctagtcccatctctgctcgattggagaggtttgggccatgcttcctcctcgcgcgccacgttctcgacggaatttctcgtctacacaggagccaaggaacgctagaattagacgcttcccggggtcccttttagttcccctctaacgaatcataggtttgcagtttggtgtggacgtatcctgtgatttgtggatggttttggtgtagagtttagagagatcaagaacttccaacttggggtttcctgtagccttttttagctgttctggggcttttatgggagtgcccgtcgcgcagaagtccgattcttgggtgactgtgcttgcgatgacggacagcggcggcctcggcgttcggcctattaacggaggccgagggagtgccgtggagcagcgtgggctcggactcggagacaacgggcctccagtgtccccaccagagcgtgtttctacgccgcctgcgccgagactagctgcttggtggcgcatgtcgtcgcctggtcctctccggtgctcaaccccgaggagcgttggatgtgaagatggtgatgattcggataggtacttttccccacagagtgagttttctcaagacacttctgatacagattcgatgagcacaagtattagtaggatgtataccttcaggttagggacttcgagcccattagatagtcctatcaaacaattgggagtaggagacacaagtcctccctcaaggaagggttgccattctcctagatatccttggaattcttgccggggatcagatgatgttgattctagctttatgagttcacctcggcatgatgatgaagagaggaaatatgatgtgcaaccaattgattttgagagtagacacatctggtatcctccaccacctcaggatgaaaatggtacttttcaatatgatgaggatgatgacaatgatgtttgtgatgggaaggtctttggacatattaaccatgattattgtgacggcgaagatgatgatgatgtgttagggatcaaaggaaaacatagtatatctcacaaagagttcttgaggagtgctttacatgggcatttcagggctctcgtctcacaattgctcgaaggacatggcattgatcctgtggatggctggccagacatagtatcctcattagcttggcaagcagctacctttgtcaggccagacacgagcaaaggtggtagcatggatcccacagactatgtcaaagtcaaatgcgtagcatcaggaaatccaaatgatagtgctttcattaaaggtgttgtttgttctaagaatgtaaaacacaaacgcatggtgtcaaaacatgagaaccctaggctgcttcttttgggaggagcactagaataccagaaagtcacgaacaaactagcttcaataaacagcattcttgaacaggaaaaggagtatcttaagaatgctgttgcaaagatagaggctcaacgcccacaagtcttgctagttgagaaaagtgtgccattgcatgcacaacagcttcttgcaaaagatatctctttagtattgaacgtcaagagatcacttctggaaagaatttctcgctgcacaggtgctcaaattgcatcttctgttgaaaatatcacttctacaggagttggacaatgccaaacattctggattgagagagttacagaatgttcatcaccgaaggtctcaaacaaaaacacagtcaagacactgatgttttttgatggttgtccaagacgcttggggtgcacggttcttctaagaggaaaatcatatgaagagttaaagaaagtcaaacttgctgtacagtatgctttatttgcagcataccacctgtcacttgaaacctcatatcttgctgacgagggtgcaacacttccaaaagtcccttcagaccttcaacttgagaagccgaattcttcctcaagatactatcagcagaatttgattgaatttcaaaccattgaaggggaaacttatggagctggatgcatcacaccttgccttaatggctctgcaaatcaatctcattcaagagatgacataattcatgaggaacatgcacactgtcattcaagatctgacttaagttgggaagaatatactggtggaaccattgatgtatacccttattccacagaagcttcaatgtatagtagctgtatgccacctgtatgcatgactgttcagacacctaaaagttcacttgccagtgcgagaaaaagtacaccaggaaatttgtttttttccaataatgttcacatagatgaagcaggtggtggaatgtcaaaggttgataatgacgtccttgacttggataatggttggaatcatatctcagatgaagattctgtagcaatacatgatcacaacggtaatcacaatgaatattttccaacatctgacagtccacagagcattttggtttccttgtcaattgcatgccctctgagaggaattgtatgtaagcagtctcagctatttcgtataaagttctatggtacttttgataagccgcttggaacgtattttcgtgaagatttatttgttcagacatcatgctgtgaatcctgcaaggagcctgcagaatctcatgtgcgatgttacactcatcaacaaggcagtctcacaatcagtgtcaaaactcttccatctgtgaagctacccggggagcttgatgggaaggtatggatgtggcacaggtgtctcaggtgcaaaccaaaagatggaattcctccagccacacaaaggatagtcatgtcagatgcagcacgtggattatcttttgggaagtttctggaacttagtttttcaaatcacacaacagccaatcgaattgcctgctgtggacactccctccaaagggactgccttcgtttctatgggcttgggagcatggttgctgtcttccgttattcaccagtagacattctttctgtcaacttgccatcctcagtactggactttgcttgtccaaaagctcaagattggatcatcaaagaagctgttgatgtatgcgctaggaaggaacatctgtatagggaaatcgttgctaaacttgactgcatcgaaaagatagttaaagaccagaacattggtatgaagtcaggcttgcataaacatgttgctgatcttaaggagttggttaaagttgagtggaagaagttgtatcagcgttttctatcgtagataacttgcagacatttgaaccgtatatagatgttctagagctcaatctcctgaggagagagcttgtacatgatattcacgtatgggatcgcagactgtacatgatgcactccctcacgaaagagaactgtcgtactatgccaaatgacgcacaattttctgagaagtttactgaaagctcattagaacaatcaaaggatgtgacatctggtaaacatttgaatgctgagagttctctagaacagaatcaaccaagtacgttggaagtggctgcagtttcagtgaaatcatcccctatgacggaacaaaccaacactagcatttcacatttggcattggaaaccaccattatgggtgatgcatccatgcattctgtctcaactgttatcagctttgccccaggctcgtatgaaatgcagagtgaaggagtgctggctgaactagaagctggaaagactttgcagaaatcacaatcttctgcctccaatctttctgatagaattgacttagcatggactggttctggtcagcttgttaacgattcatcaagtagcatggaggcagtttcattcatacctgctagtctgaaggataatcctgcataccagaaggttatagcacccattagaatcaaatcgtttgattctgctataagttccagaaatgttgatgattcaaatgctagtataagaagatcttattctcaaaggcccccaaaggctattgagagaactggtaagggtctgtcaccaacattcttgaacaagctctcacttcctggtatgattcatggcgagagtcggttgctgctgtcacaaaatgattcaggtgttattgttccaatttatgatgatgaaccatctagcatgatagcccatgccatgactgttccagaatatcacagcttcttgttgccacttctgtatcagaataatgaatctaatttattgaattatggttctgatcagcctcaacctataactagaaatgattctaagtataaccatttcactatttcttttgaggatgaagactcaaattccgttgataaagcaaaattttctgtgacatgttattttgcaaagcagtttgatgcaatcaggagaaagtgctgtccagatgaactagactatatccgctccttaagtcgctgcaagcgatggagtgctcaaggtggcaagagtaatgtctactttgccaaaacactagatgacagatttgtgataaagcaagtgacccggacagaattagattcatttgaggattatgctgctgattatttcaaatatttgatagactctgtatcatctggaagcccaacttgcctcactaaagtccttggtctttatcagatcattgccaagaatttgagagatgggaaagagctgaagatggatgtaatggtcatggaaaacctatttttcaagagaaaggtatcaagaatatatgacctaaagggttctttgcgttcccgctacaaccctgatacttcagggaacaacaaggttctcttggatcttaatctgttagagacacttcacacaaagcccatttttcttggaagcaaagcaaaaagaaggctagaacgagctgtctggaatgatacttcttttctggcatcggtggatgtgatggactactctctcctagtcggcattgatgaagaaaggaaagagcttgtgatggggattatcgactatcttcggcaatacacttgggacaaacaactagagacttgggtgaaggcgacaggatttcttggtggctccaaggatgttctgccgaccattatatctcctgaccagtacaagaagaggttcaggaaggccatgtccaagtacttcttggctcttcctgaccaatggtcaccgtaacgccaacaatgcatccaggccattccaagcgcggcgacagggaagaccactccggttttctttttctttttctctcccttctgtttcttttaggacgatctatccatctgtgcctattgtatgctgtttttgttcacaacaggcaggatgaactctgtggaagattgtggcgattgttgtccagccaagcagaggttaggcgtcaatacgtgtacataccctacactgtaacatgaaattgcaaaggaaatgaaaatacgcgaactcgcgagttccttaccagtgatatgatttgagaagcttgcccattgttgctttgtgaggtctaaaacaattattcactccgcttctttctacgttttatattttat

SEQ ID NO: 6642 - DNA, 2510 bp, Zea Mays
ggctacagtcctacgtacagccatctggaccagagttctcaactactgccgccggccacctcctccgcccgccgccagcgtctccggctccgatcacctcccccgcccgcttacggccatctccccgcccacctacggccaccgccgcccgcgaaggcgtctccggatccggccacctcctccgcccagcgtgtttaccggacacgtctgccacccgtcaggccctgcccgacgctagggttgggcgacggcgtccaccggctgacgcccggggagatctcgcccgctctgctccatccaggtgcgaagtaatggaggtgctctgcatcggaacagcggataccaagtttgaggagctgcttttcctcgcggcgcaactccgctccgccctcgccgcctctggctccgactcgaaggttcaagtgagcatagtggatgtctccacaactgaaaagacaacggcaaatgatttcaaagacatcatatttatccctagaaatacaattctttcatgtcatttgggtgttgaccaacataatcttccagataacagaggtgaagcaattgcactcatgtcaaaggctcttcagagcttccttaaaaaaagatatgacagtggtatgctggtgggtgctgttggtttaggaggcagtggaggaactgcactaattgctcctgctctgaggttgttgccacttggagtgcctaagcttattgtatctactgttgccagtggtcacactacaccttatgttgaaacatctgatttggtcttgtttccttcggttgttgacatctgtggaataaacagtgtcagtcgtgttatattatctaatgctgcagcagcttttgctggaatggtacatggaatcttgtcggcgtccaatgagtctgatgaaacgtcaacaaagccaactgttggtattactatgtttggtgttacaacaccatgtgtaaatgcggtcaaggatagactgaacaaagaaggttatgagacccttatattccatgccacaggtgtaggaggcaaagcaatggaagacctagttaggggtggttttatacagggcgtgttggatgtaacaacaacagaagttgcagaccatattgtagggggcatcatggcttgtgatgagaccaggtttgatgcaattatagagaataagatccctcttgttcttagtgttggagccttggatatggtaaactttggagctcgagatacaattcctcttgctttcgcagaccgaaatattcatgttcataatgagcaggtttcattgatgcgtacgactgtggaagagaacaagaaatttgctaggttcattgctgataaaataaacaaatcttcatccaaagttactgtttgccttccccagaagggcatatctgcaatagatgctccaggaatgccattctatgatccagaagctacatctacactgttgggtgaattaaacacccttatacagagaaccgatattcgagagaaatattgcggaggacgcggtcaatattacataaactgaaggaacagatcagtgacggtactccagttattggagctggtgctggcacaggcatatctgcaaagttcgaagaagctggtggggttgatcttatagtgctgtacaactctggacggtttcgaatggctggaaggggctcactagctgggctcttgccctttggtgatgcaaatgacattgtacttcagatggccaacgaagtgttgcctgtggttaaaggagttcctgttcttgctggggtatgtgctacagatccatttcgtcgaatggaatactttctcagacaactagaaaccattggattttgcggtgtgcaaaacttcccaaccgtaggtctgtttgatgggaattttagacagaatttggaggaaactggaatggggtacagcatggaagtggagatgatttcaatggctcatcgcatgggtttccttactactccatatgctttcaatccggatgaagctgctgccatggccaaggcaggagctcatatcgtagttgcacatatgggtctgacaactgcagggtctatcggggcaatgacagctgccactttagatgatagtgttttacgtgttcaggccattgcggatgcggcatttggggttaatcctgatatcattgttctctgtcacggaggccccatatctggacccctagaagccgagttcgtattgaagaatactaaaagggttcatggattttacggtgcatcaagcatggaaagattaccagtagagcaagctatcacgaacaccatgagagagtacaaaagaatttccttaaaatgagaaccatcgtttacatgcgtgatttaagcctgctgttctttcgttacacttcgcagattctgtcatctctgcctctttatttgtcatatacattttcttaccaatgtacctttcttgttggaatataatcataataaatgttttctttgacgaggctgcgtaatgtcttaattattaccgtccattc

SEQ ID NO: 6643 - DNA, 2659 bp, Zea Mays
gcgactggtgctgagtggtcgtgtccacctcaccgaatcaccgctcaaccgtcattcctacaggctacagtcctacgtacagccatctggaccagagttctcaactactgccgccggccacctcctccgcccgccgccagcgtctccggctccgatcacctcccccgcccgcttacggccatctccccgcccacctacggccaccgccgcccgcgaaggcgtctccggatccggccacctcctccgcccagcgtgtttaccggacacgtctgccacccgtcaggccctgcccgacgctagggttgggcgacggcgtccaccggctgacgcccggggagatctcgcccgctctgctccatccaggtgcgaagtaatggaggtgctctgcatcggaacagcggataccaagtttgaggagctgcttttcctcgcggcgcaactccgctccgccctcgccgcctctggctccgactcgaaggttcaagtgagcatagtggatgtctccacaactgaaaagacaacggcaaatgatttcaaagacatcatatttatccctagaaatacaattctttcatgtcatttgggtgttgaccaacataatcttccagataacagaggtgaagcaattgcactcatgtcaaaggctcttcagagcttccttaaaaaaagatatgacagtggtatgctggtgggtgctgttggtttaggaggcagtggaggaactgcactaattgctcctgctctgaggttgttgccacttggagtgcctaagcttattgtatctactgttgccagtggtcacactacaccttatgttgaaacatctgatttggtcttgtttccttcggttgttgacatctgtggaataaacagtgtcagtcgtgttatattatctaatgctgcagcagcttttgctggaatggtacatggaatcttgtcggcgtccaatgagtctgatgaaacgtcaacaaagccaactgttggtattactatgtttggtgttacaacaccatgtgtaaatgcggtcaaggatagactgaacaaagaaggttatgagacccttatattccatgccacaggtgtaggaggcaaagcaatggaagacctagttaggggtggttttatacagggcgtgttggatgtaacaacaacagaagttgcagaccatattgtagggggcatcatggcttgtgatgagaccaggtttgatgcaattatagagaataagatccctcttgttcttagtgttggagccttggatatggtttcattgatgcgtacgactgtggaagagaacaagaaatttgctaggttcattgctgataaaataaacaaatcttcatccaaagttactgtttgccttccccagaagggcatatctgcaatagatgctccaggaatgccattctatgatccagaagctacatctacactgttgggtgaattaaacacccttatacagagaaccgatattcgagaggtgaagctgtttccttaccacatcaatgaccctgaattcgcaaatgcattggtagatgcattcttgagtatggatgtacaggcctctagttcagcccaacctaagcaagatcttaatattggaaaatcctgttcaggacagaaaatttcagatagttctattatatggagaactcctgtggattttccagatgcaaaaccagaaatattgcggaggacgcggtcaatattacataaactgaaggaacagatcagtgacggtactccagttattggagctggtgctggcacaggcatatctgcaaagttcgaagaagctggtggggttgatcttatagtgctgtacaactctggacggtttcgaatggctggaaggggctcactagctgggctcttgccctttggtgatgcaaatgacattgtacttcagatggccaacgaagtgttgcctatccatttcgtcgaatggaatactttctcagacaactagaaaccattggattttgcggtgtgcaaaacttcccaaccgtaggtctgtttgatgggaattttagacagaatttggaggaaactggaatggggtacagcatggaagtggagatgatttcaatggctcatcgcatgggtttccttactactccatatgctttcaatccggatgaagctgctgccatggccaaggcaggagctcatatcgtagttgcacatatgggtctgacaactgcagggtctatcggggcaatgacagctgccactttagatgatagtgttttacgtgttcaggccattgcggatgcggcatttggggttaatcctgatatcattgttctctgtcacggaggccccatatctggacccctagaagccgagttcgtattgaagaatactaaaagggttcatggattttacggtgcatcaagcatggaaagattaccagtagagcaagctatcacgaacaccatgagagagtacaaaagaatttccttaaaatgagaaccatcgtttacatgcgtgatttaagcctgctgttctttcgttacacttcgcagattctgtcatctctgcctctttatttgtcatatacattttcttaccaatgtacctttcttgttggaatataatcataataaatgttttctttgacgaggctgcgtaatgtcttaattattaccgtccattc

SEQ ID NO: 6644 - DNA, 2832 bp, Zea Mays
ccgaatcaccgctcaaccgtcattcctacaggctacagtcctacgtacagccatctggaccagagttctcaactactgccgccggccacctcctccgcccgccgccagcgtctccggctccgatcacctcccccgcccgcttacggccatctccccgcccacctacggccaccgccgcccgcgaaggcgtctccggatccggccacctcctccgcccagcgtgtttaccggacacgtctgccacccgtcaggccctgcccgacgctagggttgggcgacggcgtccaccggctgacgcccggggagatctcgcccgctctgctccatccaggtgcgaagtaatggaggtgctctgcatcggaacagcggataccaagtttgaggagctgcttttcctcgcggcgcaactccgctccgccctcgccgcctctggctccgactcgaaggaatggaacttggtcgaatagtaaggttgcaacttgcagtgcaggaactcaaatttacgtgctcttccacatatgattctaattggcaaggttcaagtgagcatagtggatgtctccacaactgaaaagacaacggcaaatgatttcaaagacatcatatttatccctagaaatacaattctttcatgtcatttgggtgttgaccaacataatcttccagataacagaggtgaagcaattgcactcatgtcaaaggctcttcagagcttccttaaaaaaagatatgacagtggtatgctggtgggtgctgttggtttaggaggcagtggaggaactgcactaattgctcctgctctgaggttgttgccacttggagtgcctaagcttattgtatctactgttgccagtggtcacactacaccttatgttgaaacatctgatttggtcttgtttccttcggttgttgacatctgtggaataaacagtgtcagtcgtgttatattatctaatgctgcagcagcttttgctggaatggtacatggaatcttgtcggcgtccaatgagtctgatgaaacgtcaacaaagccaactgttggtattactatgtttggtgttacaacaccatgtgtaaatgcggtcaaggatagactgaacaaagaaggttatgagacccttatattccatgccacaggtgtaggaggcaaagcaatggaagacctagttaggggtggttttatacagggcgtgttggatgtaacaacaacagaagttgcagaccatattgtagggggcatcatggcttgtgatgagaccaggtttgatgcaattatagagaataagatccctcttgttcttagtgttggagccttggatatggtaaactttggagctcgagatacaattcctcttgctttcgcagaccgaaatattcatgttcataatgagcaggtttcattgatgcgtacgactgtggaagagaacaagaaatttgctaggttcattgctgataaaataaacaaatcttcatccaaagttactgtttgccttccccagaagggcatatctgcaatagatgctccaggaatgccattctatgatccagaagctacatctacactgttgggtgaattaaacacccttatacagagaaccgatattcgagaggtgaagctgtttccttaccacatcaatgaccctgaattcgcaaatgcattggtagatgcattcttgagtatggatgtacaggcctctagttcagcccaacctaagcaagatcttaatattggaaaatcctgttcaggacagaaaatttcagatagttctattatatggagaactcctgtggattttccagatgcaaaaccagaaatattgcggaggacgcggtcaatattacataaactgaaggaacagatcagtgacggtactccagttattggagctggtgctggcacaggcatatctgcaaagttcgaagaagctggtggggttgatcttatagtgctgtacaactctggacggtttcgaatggctggaaggggctcactagctgggctcttgccctttggtgatgcaaatgacattgtacttcagatggccaacgaagtgttgcctgtggttaaaggagttcctgttcttgctggggtatgtgctacagatccatttcgtcgaatggaatactttctcagacaactagaaaccattggattttgcggtgtgcaaaacttcccaaccgtaggtctgtttgatgggaattttagacagaatttggaggaaactggaatggggtacagcatggaagtggagatgatttcaatggctcatcgcatgggtttccttactactccatatgctttcaatccggatgaagctgctgccatggccaaggcaggagctcatatcgtagttgcacatatgggtctgacaactgcagggtctatcggggcaatgacagctgccactttagatgatagtgttttacgtgttcaggccattgcggatgcggcatttggggttaatcctgatatcattgttctctgtcacggaggccccatatctggacccctagaagccgagttcgtattgaagaatactaaaagggttcatggattttacggtgcatcaagcatggaaagattaccagtagagcaagctatcacgaacaccatgagagagtacaaaagaatttccttaaaatgagaaccatcgtttacatgcgtgatttaagcctgctgttctttcgttacacttcgcagattctgtcatctctgcctctttatttgtcatatacattttcttaccaatgtacctttcttgttggaatataatcataataaatgttttctttgacgaggctgcgtaatgtcttaattattaccgtccattc

SEQ ID NO: 6645 - DNA, 5837 bp, Zea Mays
tcgattcattcaccaccacctctccacactttgaaatcaactcaatcaaagcagcccctcctccagtcctccccaacaatcgaattccggtgcgaattggagccctcagccctcccgcgcatctagggttttgcccatggaccccgacgccggcggggctggggccgggggccgggcgggcttcgagcgggcgtgccggctgcccaacaccgtccactccgaggtcctgccgtcgctgccgctccccaccctcccgcgcgagctcggcttcgacgcgctccgcgacgacgagcccctcgccgcgcccgaccgccccgacatgatcatgcaggccgccaacatcgcccgcatcctcgccgacaccgacgtctcccacctgggcttcaccgcggcggacaacgtcgaagtggatcccagccggtgctcctggctctggagggaggtgctcaagcacaaccccgacgccttcaaggtcaaggcgcccgggccgtcttctcaaggtccatttggaggcccaggataccacaatcaagaacgtgagaagcactttgaacatcttacacctaatatgagcaaaacacgaaatggatctgcattttctcaggatgaaattaactcacacagagagcattttcgtaatgaactgaccccagattcagttgcttcaaagaagccaaaagtaaggaagaaagaaattaacaattctgtttcaacttctccccacagcattcctaataatcaagaagttattgctaccttctgtgaggcggtggaggatttctgtggaaaagctgaaattcctgacgatggtgatggtggtgactggttgtcaatcccacttgacgatgttaaggttcttgtgaatgaaattacatctgttcgatccaaaaggatattgcatgaggttcctatggatacagttacaaggttattagacgtgattgaccgtcagattcgatgttctcaaggtttgtcgatagatgtgaaggaaaattctgacgcctttgatgctgaacctctggttttctctgctttggagtccagtcatgctgcgttggcaattatgacccaccatgatatgccaaagcaactgtatcgggaagaacttattgagcgtattatcgatttctcaaggcatcagatcacagattgtatggcagcaagtaacccaacctttcgagctctctacaaaccagctggaaatgttgcaaatgatggagatgatgatgaaggtgatttggaaaatggacaagttagcaaaaggagacgtactgctactaatttgagcatgagaaaatcttcaaacagagtttctgcttctgtttattctgctgtgcagaaactatgcttgatattgggttttcttaaggaactgctcacaacagtgcgcttgtcagatagttgtattctgcaattagcgaaaacatgctttactacattcttggtggataatatgcagctattacaattgaaagcgattggggttatttgcacggtgttttcatcatacacacagcacaggagttacttggttgatgaaacacttcaccttcttcgtaagttgcagttttccaagaatgccgttagaacctaccatctagcagatgaagaccaaaagcaaatccagatgataacagcactgttagttcacttggttcagtttagtgctattgttcctgatagcttaaagggaacagttgattggaccactatcgttgatgcctctagtgatgctgattattatccaattcaatgccatgaagcggcaacagaggcttgttgtcgtttttggactgatgtccttcaacgttttactgctgctaaatctcaagatatgtcggaaaccaaagggataatagacaatcttgttcaggatttcctaacgatactaaacttgccggagtatccagctgctgcttctattcttgaggttctctgcgtgttgctgcttcagaatgctggattgaaatctaaggacattaatgctcggtgctttgctattgatcttcttggtggtattgcatcaagattaaagcgtgattctgtcgtctgtagtgaagaaaagctttggatattgcaagatttcactgataaaggcagtgacggctcaatttttttgaaaaacaagtgttgcgtttgtcttggtggaagaggcataaatatagcctgtaatgaatgtggaagatgtttccattcagattgtatgggggctggtagtcaggataacttacagcgtgatagtgtctgccccttgtgtttttgcaaacaacagctcaatgtgctacagtcgtactgccagtcacaaattaaagaaaatggcaaaaaaactgctgcctctgccagtaagaaatctgctaaaccaactgaggtgtcagcagtggaaattgttcaacaaatactactgagttatctccaagaagctggttcacaagatgatgggaacctgtttactcgatggttctatctgtgcatctggaacaaagatgaccaacattctcaggagaagatcatttactatcttgctagattaaaatccaaggagattctgcgagattctggcaatggtctggcaatttccagagattcagcaaagaaaatttgcttggcacttggctagtttgagagaaaattctcctgtaataagagcaaaagcattacgtgcggtcagctgtatagttgaagctgatcctgaggtcttgggtgacaaacgtgtccaatatgctgttgaagggagattttgtgattcagctatttctgttcgtgaagctgcccttgaacttgttgggaggcatattgcttcacatcctgatgtgggcctgaagtatatagaaaaagttgctgagcggataaaggacactggagtcagcgttcgcaagcgtgcaatcaaaattataagggatctttgtgcttcaaatccgaacacggacacaactcatgcctttgtggagataatttctcgtgttaatgatgaggagtccagtgtacaggatcttgtatgtaaaacattttatgaactatggtttgaagaaccaactgggagtcataagcacttggttgctgatggaagttcagttccaatggagatagctaaaaagactgagcaaattgttgacatgttgaggaagatgcccaatcaccaacccctgattaccatcataaaacgtaacttgactcttgatttcctccctcagtcaaccaaggctgcagggattaactcatccatggtggcatcaattcggaagcgttgtgaattgatatgcaaacgcttattagaaagaatattgcaggttgaggagggagctgctaatgagatggaaatccacacactaccttatattgttgccttgcaagcattctgtattgttgatcccacactctgcattccagtaactgatccttctaagtttgttgtgacactgcaaccataccttaatattcaggttgacaataaatcatctgcccagttgcttgaaagtattatttttgtgattgatgctgttcttccactcataaggaagccaccacaaaatgttgttgaagaacttgagaaggatctgaaacatatgatagttcgccattcgtatttgacagttgtacatgcctgtatcaagtgcctttgtgctctgagcaagtcagcaggtagaggtccaggattagtggaaaaccttgttaatattttctacaagcatctgtgtggagctaattcagatagtcagctgttgggtcgatcactgttttgtcttggactcctccttcggtatggttatcaattgatgctaacatctgaaaatcagcttgattttcccaagatcatcaacttgctccagagaaaatatcttctcaaggatgatttcagcttgaaggttcgagctttgcagactttgggatacatacttattgcgaagcctgaatttatgctacaaaaggatatgttgaatctcatagagacagcactctcttctgaggttgattatagattcaagattcaaggacttcaaaacctctacgagtatcttagagatgctgaaagccaacttactgctgagagtactgcgaaacctcctgggcagtgtgaaataaatggcagaagtgaagtgcctgttgctgctggtgctggagacaccaacatatgtggtggtattatccaattgtattggagttctattcttgaaaggtgcttggatacaaatgatcaagttcgccagagtgcacttaagattgttgaagttgtacttcgtcagggtttagtccaccctattacctgtgtacctcaccttatagcacttgaaatggacccgctggaggggaattcgaagttggctcatcatctcttgatgaatatgaatgaaaagtacccttcattttttgaaagtcgcttgggtgatggactgcaattgtcatttaaattctttgaatccatagtcagcaaccataagatgtccgcaaacataaaatcaaatccaattgcatttgtcaaacctggcatatctagaatataccgtcttatccgttcaaatcgaaattctagaaacaaatttgtccactcgatagttcggaaattcgagtctgatagccggagtcgcagcacagttagctttcttgtatactgtgctgaagttctcgcctctctgcctttcacatgctctgatgaaccactttacttgatctatgatataaatcgagctattcaccttagagctggaggagtcgagggcaatttgaaaaggtggacttctatgtctcagtctcaagagatggcgggtatgccaaccttgccaggagagagtcatgttgtcatgcaagaagagcctggcggatattatgataacatgggagatgccactgaaagggtgaatgacaatccttgcagtacttcagatgtggacattgccaaagttcagggagattgccatgatgcaatagccctccagctacttctgaaattgaagagacatttgaaagttgtttatggtttagatgatgcccgctgtcaggcattttccctgaaggagcccccgaaatctggagaaacattctccaggcagaatgtttcttttaatattggcaacactaacctcagtctgccgagctgcctgcaggacgcagcctctgtttaccaggatttcaagacagtgcttcgcgaagattccatggactttgctgtgttcgtcccttcagtccagactaggaagcgcccaaccccaagaaatacaacgagcccaaccccaagaagtatgacgagagtcaggagaacggctgccccgagtgttacaaaagcccgtggtggtgcacgtggcgacgattccgacgataccgatgacgacgactggaccgggggtccaagagtgctagacttcagtgggggcggccgcgtgacaaggcagagggtccaagtatgatgtttcttttttgcgtgcgtgcgtgtgtacattatagggaagggaaacctatagcaggcttagcagctgacacgagagagttaggggttgaattttaggtttcaggtcgtttattttagggtacatagaagcagaaaggaaaggaagatagccttttacttagatgtcattaatttggagcactccttttcttgctctgcccctgtcctgtttgtaatttccgtggggcttcggcaaaaaactgacaaaataggttgtgctccggtttctgatctctgattcaatgggaaatggaattattccttttgctttgcctgtgtaagcagttagcgcctactccgtctgttccaatatacaatttgttttagcattttatttttgtgtctatatttattcgtttggctttaatccgtatcggtttctatagatgtttttgtc

SEQ ID NO: 6646 - DNA, 4034 bp, Zea Mays
atgtggcagcgtgatgcgccgcaagaagcttccacgaagcttcatggccgctaccgcctcgagaacaagtccccattcccgaccgcaaaagcgggccgagccgaggaagaagagaacaaaacgaaacccgaagctttttcccccattcttcgctggatatacaggaggattttcagagtcagggaggtgagggagagagggcgaggcaactgtgtgtgtgtgtgtgtgtgtgagcaggcccgccgagaagaaccttcgcgacgccgaggggtcggtcgcgcgcgggcgctcgtcggtcggtcggtcggtcggtgtcgtctctcctgcgaaggtgcccctggctgctgctgccggggtggtctgatcgggcatggcgcaggggagttcgccgccgccgccggagatccgctcgccggacgagcgggccgcggcggaggaccccgccgaggcggaggcgggggaggtggtcttcgacgacgcgttcgacataccccataagaacgctccgcacgaccggttgcgccggtggaggcaagctgctcttgttcttaatgcttcacgacgttttagatatactcttgaccttaaaaaggaggaagagaaagagattataaggaggaagatccggtcccatgcgcaagttatacgggcagcatttcttttcaaagaagctgggcaaaaagatatcagagttttccaattgaactggaaaagcttaacacattaaacagggaccatgacagtgttcttcttcaagaaattggaggagttaagggattgtcagatttgttgaagagtaatttagagaagggagttagtccaaatgaggatgaattattacaaaggaagaatgtatatggatcaaatacatatccacgcaagaagagaaaaaacatactgcgttttgtatttgaagcttgccaagatttaactcttgtcattctgatgatagctgctgccatatcactaacattgggtatgactacagagggtgttgatgaaggatggtatgatggcggaagtatctttttagccgtttttcttgtgatacttgttactgcaacaagtgattataggcaatctctacagtttcgacatctgaatgaggagaaacagaacatacaagtggaggttgttagaggtggtaaaagatttggagcttcaatctttgaccttgttgttggtgatgtagttcctctcaaaattggtgatcaagttcctgctgatggtgtcctgatatctggccattctcttgcaatagatgaatcaagtatgactggagagtcaaaagttgtccacaaggatcaaaaggcaccattcttgatgtctggttgcaaggttgcagatggctatggttctatgttggtaacaggggtgggtacaaatactgaatggggtcagttgatggctaacctttcagaagataatggtgaagaaacaccattacaggttcgcttgaatggtgttgcaacttttattggtttggtgggcttgtctgttgctggtgcagtacttgttgtgctttggataaggtattttactggacataccgaaaatcctgatgggacacctcaatttgttgctggaactactggtgtgaagcaaggatttatgggggcaattagaattttgactatcgctgtgaccattgtagttgttgctgtgcctgagggactcccattggcagtaacactgacgcttgcatattccatgaaaaagatgatgcgagacaaagctctggtgaggcggctctcgtcatgtgaaacaatgggatcagctactacaatatgcagtgataagacaggaacccttacattgaataagatgacagtcgtggaagcatattttgctggaacaaagttggatccatgtgatgatgttagccagatgtcagacagtgcagcgtcacttattattgaaggaattgcgcagaacacaacaggaactgtatttctgccagaggatgggggagcagctgaacttactggttcgcctactgaaaaggccattctttcttggggccttaagatagggatggatttcgacgatgtgaggacaaaatcttcagttattcatgtttttccatttaactcggagaagaaacgtggcgctgttgcagtacagttagatgatggtgttcacatccactggaaaggtgcagctgaaatagtgttatcatcttgcaaaagctggctttccgtcgatggctctgttcagtcaatgagtgctgagaagcacgatgaattcaagagatcaatcgaagacatgggagcgaattcattacgctgtgttgcttttgcatactgttcctttgacattgaaaagatcccaatggaagacataacaagctgggagttgcctgaggatgacctgactctgcttggcatcataggaataaaggacccctgtcgcccaggtgtaagggatgctgtacgcctgtgcactactgctggtgttaaggtgcgcatggttacaggagataatattgaaacagctaaagctatagctctggagtgtggaatactagatgcaaatagtgttatttcagagccagttgtaatcgagggaaaagtgttccgtgagatgtctgaaagtgcaagaggagaggccgccgacaagataattgtgatggggagatcctcgccaaatgataaacttttgcttgtccaagctttaaaacgaaaaggccatgttgtagctgttactggtgatggcacaaatgatgcccctgcattgcacgaggccgatataggtctttcaatgggcatttccgggacagaagttgctaaagaaagctctgacattataatcttggatgatgacttcacgtcagttgtcaaggttgttcgttggggacgatctgtctacgctaatatccagaaattcattcagttccagctcaccgtcaatgttgctgcacttgtcattaatgtggttgctgctgtgtcctctggtgatgtgcccctaaatgctgttgagcttctgtgggtgaacctcataatggacacacttggagctcttgcattagcaaccgagcctccaacagacaaccttatgaagagaaatcctgttggtcgaagggaacctcttgttacaaatatcatgtggagaaacttgtttgttcaggccctttaccaagtagcaattcttctgattttcgattttgatggagtaaggattctgcgtctgcagaatgaaagccgatctgatgctgagaagataacaaatactttcatcttcaacacatttgtattttgccagatcttcaatgagttcaatgcacgaaaacccgaggaaaagaatgtcttcaaaggggtcacgaagaatcacctgttcatgggaataatcggtataacgacagtatttcagatactgataattcagttcctggggaagttcttcaaaatagtgaggcttggttggagactatggttggtttcagttgctatcggccttgtgagttggcccctggcttatgtgggtaaatttattcctgtgcccgtaagacctcttccggactatttcaaaccccgctgttgttggaaaccgccgcgccgagacgaggaggaaggtgggcagagctaaagcgcaacgagtgggcagtgtaaataggcacgtgataaaaaaatggagataaattgcactggttgattccatggtagcagcatcctggggatgtacgcataagatggcaggtagtcggcctcgtcgttttcttctaggagaagcagtcggaagaaaagaagtactatacagaagccaaacttgtctacccctatccagctggtgtgtctgctatgcggcagcgaaacttgagtcattagattgtagcctgaatgaaagcagcgctagcttgcgatgtagcagtacctttttttccctggcgatatcatctgactgtaaatttgtaaatgctttcggactacgagttgttcttatttttcatccacctcttctctacggaacgtttttttctatataagaaaataaagtcaacagagcagttctaaaacgactgttttttttttcctgaa

SEQ ID NO: 6647 - DNA, 2109 bp, Zea Mays
tttttcttccagccatccgtccgtccgccgacaacacgagacgtcgcgacactcacccgtccggccgtccgccgaccgccgtccaggccatcctgctgttcgccgaccgccgtccaggttgtcctgctgttcgccgaccgccgtcgaggccgtcctgctatcgccaacactgctgtccaggcgtccaggcgtcgttctccagccgtcgaagccgtcccgtcggtccagccgtccaggcgtcgaagacacggccgtcgaagtcgtcggtccagccgtccaggcgtcgttctccagcctccaggctccatctgccgtctgccgagccgagtgccgaagacacggccagtaccgcagccgcagtacgacccggaggaggaggagcacgccattcagactcaatgcctgcggagtcagagactgggaacaacaacctaggtttggaaagcatattgccactgcctccacagccgcagcgaccaccactacctccttctgtgagaggcagcagcagcagctctgtttcagcaggaaacaagagaaaaacaagtggaagctctatgggtgcaccaattgttcagtcgtcatcttcagcacaagcagctgaaaataaagatgcaaataaattggttgtcgcagacacaagtaatactggtactagagctgtagcttctgttgatatagcgggccttgatgatgatgaggaggacataccagaggatatgactggaacaggaaagagacaaaagaggcgcacatctattgtatggaagtattttaccaaagaaactgtggaagtggaggtgaatggcaagaagtttgagcagctttgggcctactgtaactttccaaaatgtaagcagagatatagagctgagtctaatcatggaacaaatgcattccgcaaccatctgaggtcacatcatagtattgtcaaaggacagctagaactaaaggcagaaaaggataatggaaaagatgtcaccactattcagccttttaggtatgatccggatgctagtcttagaaaattctatttagcagtaatcatgcatgagtacccattcaacattgttgagcatgattattttgttgatttcatcaagtcgttgaggcctaattttgccttcaagtctagagtgactgctaggaaagatatacttgacatatactttgaagaaaaagaaaaattgtatgcccaattgaaaaatgtaacatgtcgctttagtgcaacaatggatatttggacatcatgccagaacaaatcatacatgtgtgtgacattgcactggatagatgattcttggcatattcagaagagaattgtggggttttttcatgtagaaggaaggcatactggtattaagttggcacagtgctttactgaagtgatggtaaaatggtttgctgagaagaaattgttttcattgaccttggataatgcatcaaataatttagtggcagtcaaagacattattcaagatcttagagtgaatgcttcttcttgtttgatttgtgatggaatattctttcatattagatgtgcatgccacatactcaacttggttgctagagatgggcttgctgttatttcaaaagcactggaaaagataaaagatttggtactaactgtgaagggctctcccttgcaatgggaggaacttatgaagcgtgctactgagtgtggattggatacatcaaagggaattcaactagatgtttccacaaggtggaattcaacttacatgatgctaagggatgcattgcactatgtgtgtttgatgtccgagatagtgattcccaattcatgaatgaagatggcgagctgtgaagaaatcttgcaaatgtgtgtttgatgtcatggactcatgaagacattgaagaacttatattgtgtccatatgtgtgtgtccgtgtgtgactgagactattattttgttaactattattgtgtctggactgaatttatgtaagtttacttgttggatttggatttgtgctatgtgctcatgtactattgtggacttattttcttgttgttcaatggctatgtcggtggacttattttcctgttgttcaattgctatgtggttaacttgtcatgtaatcatg

SEQ ID NO: 6648 - DNA, 3136 bp, Zea Mays
tcacttgacaagactcaagagcgaaaaacaagcaagcaaagaagataaaccatccccgaaggccgtttttaatagagagcagcaaggagagcgagcgcaccaacggggatctgagcatccgaccggccgcttgctagggtttcgtccgtccgcctccctgccacagcaccactccgcatctccagccctagcctcgctcagcccgggatcccgcgggggccatggcggctgaagcgccaccgtcggcgtcggcgtcggcgtcctcctcctcggctccgcggccgcctaccgcggccgcctccgcccccggcggcggcggcggcggggcgcccgcgtccgcggagtcgtacctcgggagcctcatcagcctgacatcgaagagcgagatcaggtacgagggcgtcctctacgacatcaacaccgaggagtccagcatcggcctgcgcaatgtgcggtcctttggaaccgaaggtcggaagaaagacggagtgcagattcctgctagcgacaaagtttacgagtatatcctcttccggggaactgatatcaaggatttgcaagttaagtcatcaccaccacagccgccaccaccacaagcagcttccctgcacaatgatcctgccataatacagtcacattattctcaacctgcatcaacgtcatcaagtttgccttcagctgggggtgcagttttaccagactttagctcccaggcagttcaatatgggcttcagaggccaacctttcagagtaaccttcctctctaccaaccagggaatactccgtggggctcttcagtggcacctccagcaggaaatgctccatggggctcttcagtggcgcctccagcaggaaatgcttcaacactttcagttccctcaatgtactggcaagggtactatgcaccttcaagtgggctgccgcatcatttgcagccacctcctttgcttcatccaacaccaggattgtcggttccccagaatctccaatatccaggactaaatccttctttgcaatctgggccgcaaaagctgtcagaactccaaccctcattgatgccacctattactagtcaaggtccttcatcaggtatcctgcctgctacaacagctcctgcttctgctacattattagctccagaaagctcaaagcctctgttgccgaacatgggatcgttgtttgctccacgtgcaacatctcttggtgcaacttttcctttaccaagccagccaactgccgtcgctgaaactagtgcaacagtgtcacagaacttaacttcatttggtagcagcaaggttcctgctcttccaggctcaacactggcataccaaaccgtatctcagtctgtttcttctactattgccccatctagctcagcccaagcggagatgcctgtgcctttgctggcaccatcaggtcaactattgcagaacacatcatccatcctttcatcatcgcattccatgcaggcaccattacagctggctagcaaagaagtcaagccaattgagcctaaggctaaggttgcagaaccgttactacctgaccctttgctaccagatccaccatcacgggctatgcctgaaattaaggagcctatattaccattgccgaaacagacgcctcagaagtacaatggatctggttcacgcaaccaccacaactttaggggccgtggaaggggtagagggagtgcgttttcacagtctgtaacagcattcactgaagaatttgatttcacggccatgaatgagaagtttaacaaagatgaagtatggggccatcttggtaagaaatcccagtcaagggacaaggatggtgaggtgggagatgatgtgtttgatgaagaactggaggctgaggaaactgacaacccagagctagctgttaaggacgacttctttgattccctctctagtggaacgtttggacgtggagggccaaatggaaggggaagaccttctgaacggcgcagagtagacacagagacgtttggcgaatttccgaggcacaggcagccctaccgtggtggcggccgaggctaccgtggcggtgggcgttcccgtggttcatattacggtggcagaggctatggaaacacggggaggggtggccctgggaattcttatcctcactggggcaatgggagagattgattatagcagcagcagccatacttgcgggtgttgtagtcttttgccacatgcatgaagcgcatccattactattaaacaaataaatggaaccttaccaccatgtcactcgtcggtgtgccttgtccagacaaggcctgtagcgtttggtcattgatgtggtgcacccctgccctgtaggagagttaccagtagatgagcagatgagatgatgcttgataggtataagcttgtggcccttgatgtgcataccttgcacttgagatttagttgtataggccggtctcaatgcaggcatgcaacgtcggctctagctcagtaaccttttcctttcacaaagtttagccgtgttgtctgttttgtattggtgatagtgtaactttgaaaaatttactgcttattgtacgttgtttgggttgaggatgagtgggatggaatggctctattctagtcttttaggatgggattcgagtctggtgtttggttggaggggaggacttgtcccagtttctgtatttgaatggagggacgatgagaaggaatttatgttgtttgtgactggttaggatatctgttaagcttgttcggttaggggtggattgatgagagattagagatgattaaatcacaaatttgtataggagtgggttaaattgcctccaatccttctcaataggtggggtctgcatgttaagggtttgttcggttattcctatcccgtgtggattggatgggattggaaaaaattatgaaagattttgacttatttgggattgaaacccatccaatcccacccaatccacatggattgagaacaaaacgaacaagccctaatatggtgccgctcttaacctggtccgcggttgccacgcctttggcccattcgttggggccatggcgtcgtatatatcttatctattttttttcgaccatattaatagaaatgttttttggccccttttttatttttgccgaagcaaaat

SEQ ID NO: 6649 - DNA, 5037 bp, Zea Mays
ccatccctgccatatattcccacagatttccaacacgaacacacacttccagctgcatcccacccgaaacgaggagccggagccacaggcacaaggcagcgccgccggccgctgccaattctcttcccgctgtcatgtacagctcctactccgccgcggcctttgcgctgagggccgcgaagccatccttgcacgcccattcctcctactcctatttctaccacccccctccccacctctgccattgcgacgacgccgacgagcaccgccaccataataaggtcgtcccgcggagcccgtacctcgccccacgcttcttgttcgacggctgcctgctccgccactcggcctacctgcttctttccgcgcagctccggctcctgccgccgccgccgcgcccgtatgcatcccgatgctgccgccggcgagcacccataggctgttgccgcgacggcggtggtgggagacagctggctggacaactctgttgtcatgttgaggcgcacaagtgccggtgctgtgggagtggcgctgggaggccggatcttggggcgatccgccggcgattgaaagcgcctgagtgccgctgcggcagttccggggatgggaccttgcttggagctggatgcgtacggcgggatgtgccgagattggtggggagggcgatgcggcaggaggtgtgggagtatgagggcggccagtggctgtacggaaggtcttcgacggaatgccttgattcggaggaggaagaagaggattgcggttatggtcaattggaggtaggtgggatgcatttcagtaggagatgggaagatggtaatgttgatgatggggatggtcattgtatggattgctgtcggaggaagggcatagaaaactattacagtggtgaggatgtgtacagtagccggcgtagagagaggagagatctgaatgagggccgtcatagtttcagagattctgaccggcgccagcgaagtgagtactatgatgatgaggatgatcttgacttggggcagcgaaagcagggatgggaagggagagatacgaggaattttgtacccaatgatgcagttgacacaaggagtgttgaaactagaaggtactgtgatgatggcagggaatataactgcataagagacaggaggaattttaactctgatgatgtggccaatgtcaggagggctggtcggtatgcagaggatataggaggatttgatcgtagaagagagagtagggattttgagatcgatgataaggttattgtgaggagagaaggcaggcgccatagaaatgaccacagatatgtttcacggcacccaagaagaagtgaagatacagatggagaggatgtttcactcttgagatcacgtcattggaatgacaaagagattggttacaatgagcaagatcttgctgacagaaggtactactctatggtgagatctcaaaagtctgcgggagcatcttcattgcatgaggatgattcaaagagggcttcaaattttaggagcacatttgatgctagacatacagggcagaaggagaattcagcctcaagtgtgaggtggcatgacaatgtaggtggacgaactgagcagatatctgaggagagggaccggcgacgttcagctggttggtcaaatgatgagagagagagatatgattacgatgatgcgcagtttgtgagagtaagaaattctaggataggaagacaagatgacaagtttataactgaggatgaaactagggttacatccagttcaaagaacacatccattttaaaacacggtagcaatgctgatcagcaggctgcagtacataaggatggttcaacgaagagctcacagaagataacggagatatcagaagtccacgataattccactgaacaagattcaagagcacagcgctatcatcaggaagatagagaaaactacactaagaatacgccatcttctgttcaaaattctgtgaagatggctagtgacagtagaagacaagttgatcagcataatgaggtgaatcagaacttggtctcagtcactgattcaaggaaaaactcagggaacctcaatgtaacaattgatagcagtcacaatgtcagcagggtctcacactcaatgagaaatcataatgaaataaaccagatggatattgatgacagttctacttccttacagaatataactcatgttataagagataagaagagcattgtaaaccaacaagtgatacatgaaacggatatagacgcgcagaatattacacatgtcgatatttcaaagatccatgctagtgatacttccacgtctaggagttcacaaagtcatttggaaactagatcagacatgaactcatcttccagtatgggtttcatcaatagaacaagaagccaggaaaaagaagggtatggaaatatgatctctgctaatgatagtggcatggttaggggttcacaaagtcatcttgagactggattgtatgatccatttcactcaaagccatcggctaatattactgacaacaaaagggaaagtcatgaacaagctgaacttaatattgccaatgctagtaatgctgctgcagccaacacttcaggcagtcatctccaaaccaaaacagattaccaatttcaatcgccttcagctgtagcaattgacagtatgaatgaacaaattgattttgctaagatccatgctattgatgctacagttagcagttcacaaggtcctgtgattagaaatgacaatcaagttcataaggcatcaactgtacattggtcaagtgagagacaaggcatgaatggtcggcaaattacacaagtttccaatacagaacgagatgatgaagcaagaagtatttttcctgaatcctctcaggatacacatcataacatggatttgatctggcagcaggcagacaccagtgggatctctgatgacaaaaatattactggtttgctcgtggagagcaccaaaaagggatttatgactaatgtggatatgggaaaacaagaagcaacaatgggtagctatgaccaagaagtaaggagtgaaattactgcaggaagtagtttaccaagtgattcaagtgccagacagtctgtcaaggaaagcatgctagaatcagctgctcgattagagaaatcatctacctttcttgttggacggtttgttgatgagctccaacagggagtctcagatccagatgctactttaacaaagaaaaatgggaaatccataatggaaggtataacaagctcttcatcaaggtctagaacaaaaggaccagcagatgaaatgtgggatgtccagagtactacttctgaagagaccttcaagacggccgacaaggaggaaggttcctcagctgatggagctactaattctgcctctcagacaccaaaaaatgaatctgttgttgctaggaaagttcacaagtcactctgggcttatgttgctgatataatccgtcttggatttattcaacatggtgactcccatgattctagtcacaaatcagttaagaaaagttcatctaataattctcagagcacagagggttggctttctagtcaggaacgtgataatgatggcacaaagaagaaaaatggaagtaccaacactctgggtggtggtgaacaagaatctggagtggcttcaatgtcaaatgaggaatatttgcacactgatacccatggtttgcagatatcagaaactgttgttgaacctcaagtaggtagatctgagggagacttgttgcctacaagttctacagatgatctacatatatcaggggggagaacaaagcaatctgatgcaggtgaattacgcaaaggaaatagcatagatgatagcactccaacttatctagatatcacgataggacatttacctgaacgcaaaactgcatccaggatcacaacagagggttctggtgagtttattactgggaaaggaatgttagctggcacatcttctgtgaccatcagtgcaatggaagctggtcgcagtgaagatggagctgattcgatatatgatccttcaggtgctataactccttatcatgattctcaaacgcaaacagtaatgccacatgagaatacctcaactggtatccttggaccaccagcgttacctgtgggagtttctacaaggtttgaagaaaagaatatcatgcaagaggccccagaaattattaaaacaggagggaaggatacagaattgaaaaggagaaattttcaaagaaataaacaagtattgaaggatacatttgatgaatgggaggaagcataccagcgggatgctgagcagagaaaagctgatgagttattcatgagagaagctttacttgaggcccagagagctgcagatatttgggaggtacccgttggtgcagtgttagtacagaatggcgaaattattgctcgtggttgtaatcttgtcgaagatcatagggattcaactgcgcatgctgaaattgtttgtataagagaagcttctaacaaactcaagacatggcgcctagcggctgttccctggggatggacaaacaagcactcttgattcaacaaaccagagccaggccgcagggcctgtccaccctttccatccgaagatagccatcaggcgtggtgtgctgtcggccgagtgctcagagataatgcagcagttcttccagctgaggaggaagaagaaaccacagtcaccaccgcaggcccaccgccatgggcaccatcatcctgtcaagttcttcagcaagatgcaccacatgttcggcacgatattctgtttataacttcgcctctctgttttattttagcttcctaaatttcgtattatggaagtgtgaaaaatgcatttctttctgtgcatctagtgtttttatacaggtaccagtttgtattgtgagatgtcatcgataattgcttagttccaatgtcgaaacttagcggcaccaacaaccattgctgaagcaccattcacaatgacatgccgcaaaacatagaaaaattgcattatccaatgctgtagg

SEQ ID NO: 6650 - DNA, 1486 bp, Zea Mays
ctcgcacagagacactactagcttgctttctcctatctccactgccgcctagccctacagtcaaccgccgccaagcccggaaccggctgccgccacctgctagcactcgccacacgcgcggcgctggcgtgccctcgccgccgacagtgtcccgcccccgccgtcggccgacccctcgcggcctcgccctcgacgatcggccctcgccggctcgacgcgtgacgccggcgccgccacccaccgtccgacggcctagccggagtcggacgcccccgggctcgcgcctcgccttccaacagtccaagcgccgcattcgcgcgtggccaaccccaaagtctgaagttcgatccacatccaccgatccgcagaggcgcagactacaggttctcgttcttcagtgcgtgatatcaatccactgaggcgctgggtgcagttaatttcccaaactatatttgggggtgttcagcaaaaaccgcgtcaactgcacccgtgcgggtgagggatcactagaggctggactcgtgctagagatggtgaaggcaaaagcaagggtccgctatgagcctggaccggcttttgaggaggtcaaagaagaagccatgcttgatatatcaccaacagactcgacagagttttggttaattcagtggcctaaagaccagatagatgttttggattttcatggcaaagagctttctctcaagctgcatagtgatggaaacttgggcaacttggaaaattcctcagggaaatcttatgagattgcgagctttgcagctcagaaaccagatgcaaccgtcttcctgccttcagggtcagaaacaaaggctgtggggaagatttcacggcgagtatccttagttcgttatcctaaacctgaggaatttacaaaaccaagttttgggagtcttactcctagcataaagaaatctgcaggttctaagaagaccatgtctcggttcaccggtgtatcaaagaatcccagtagccaaggttcggcgctttcactgggccaaaggagcgcagagccaacacccaaacacaaggggaagagaaaggatgaaagcagcctggggcactcaaatgtgtcgggcaaggccacagaaggatctgaggctcgaggcgcggggagcaacacggcttcagagatgccacagtcgccaccggaaaaatcaaagaagaggaggaagaaggataagatcgttgagtagtagtgtcaccttggcaggtgatcaagtttcccttgaattatcaatcagtggctcgagcagctgtgctggaagttcacgttcaggtttctttatgaatttccggttctcattttatccatgcagaattttttgctggagtgcccggtgttgtttgacctgggagcaacctgttgcgtggtgctgaaataccgctatgtatcgttctgtttttggtatgtgaaaggttatctttgttgcgctgttcctgttggtgtgctaagctgagctgatatagg

SEQ ID NO: 6651 - DNA, 3089 bp, Zea Mays
aagcccctctgcctctctctctctcacctcctgtcccctctcctctccgtgtccggtggagcttctccacctccggccaagatctggaaccagcgagggtgcccggcggttctcatcccggaccccgactctttcctcatctctgcaacctctggatcctccatctgcccccctgcaggatctggaagctgcacccgtcggggggagaagcaagcagcacatccagcccgctcgagctcgctcatctgacctcaccactgagcttccgcaggatcttcacatccccattccattgacaacgtgaaagagaacatgtgacggggctgccaagctacatgacaacgacgccgattgccgaatgccgagacaccgcgcacgctcttgcagataaagatgatcggttgatcgacgtggtatttgtaccactttgctgtccgtgaaagcccgctatataggtggtgacatcaagtgatcaagattttatggtgcgcaagaggttgggttatagttcccgtggccatcgaattccaactatgccacgtgttccaaactcagctcgggggaaacgttctaccagaagaaagaaagatgagaatgatgatatgtgtgcaatggatttgctcgcaactgtggcaggaaagttactagcagatcaggacaattcatctagcgttcctaataccagtgcagcgaaagctaaaaaaaggaaatcagttaaggaagaacactttgatgaaattccgcctctaaaaaatgtggctatggagaaagatgtgggttctggtagcgttagtgccttccctaggcaagctaaaaactgcctggcagaaaactcatcgacaagaaatggagctgatacagtattagagtcactaacagtgaaatcaaatatgctagcaaaaattcctgagtgtggatcttatggaatacaccatgcaggctcctcaagttcagcagagcctgaacaagtgcatcaagctgaacctaaagtgagcagaagacaagcagatggacatcctgtggcttatggtatatttaactccgtggatgtggatggcaaacctccggctttggttagttctgacagtagctcgtgtgttcctctgagcagccatgacaaggaacatcaaacctcttccttgtatcggggtgtagtgcagtatactgcagatagagaagatgatgaaaattcttctgggtgcacgcatccaagcaccatagaaagtaagggttgcaaaccacaatatctaggtaaccataggataaggaaattgcttgcctcgaaggtaaggaaggcagcacgtaataagatttgtggagggattccatcaaaaaagatctgtggagggttgtcaaaaaaaggtagcaagctaaacttatgtgggaaaaagatgtccaccacacaccaaaaggtgcaaagaatgattttcaaaaagaaaaagctaacgcaccgtacatcttttgctaaggagatgctaactgaagctagtgggacatcatttgctatggaaggtcaaaataaatcatgtgaagctgagaattaccatgttaagctaagaatcaagtcattcaacatcccagaattgttcattaaggtcccagaaaatgcaaccattggatcactgaagagagctgttatggatgttgtcaatagtataatggaaggtggcctacgcgttggtgttcttcttcaaggaaaagatatccaagacgacaacaagacactttgtcaggctgggatatgccacgataaaaagctaaataacatagacttcacgctggagtgcgagcgtgagcgcgagcctccctctggagtcattatacaagaacagatggatttcctcaccacagatatggtggagccattagctaggatgaagtgtgaggaaccttttcctgaagccgacgtcggagatgacagccagcagcctagagcgccttatcgaagccgctctctctctgacctgtactctgtccattgtcctgttcagatggcttcacaggacacgacggcgagctcccaggccatcgtccctgtttcgcctgcgccttcagacgtgggcgctctagccattgtgcccctttgtaagtccaaggggtctgaagtcgggcagaggcgcatgaggaggcccttcactgtcggcgaggttgaggcgctggtgggagcggtcgagcagcttgggactggaaggtggagagctgttaaaacgcttgcattcgacagtatagatcaccggacctacgtcgacctcaagctgatccacccaaggccgaggaagctattagatggttttatccatcagcatctgcaggcaatgctcgtgctcaatacaacctaggcctttgcttgcagaacgggaagggtgtcaagcggaatcagaaggaagctctacggtgaagggcttgcacaggatccagtgcgtgctaagaggtggcttcaactagctgctgattgtggtcacaagaaagctctttatgagtgtggtattaagctttgtgcggcaggagacaaggtcaagtgtctcatgtatctagagctggcgacacggcgtggagaagctgctgctgctcacatgagggatgtaatacttgaatcgctctcggttgtgaatgcgcagcgtgccatgtcggatgctgataaatggaagcctaggacactccatcctagacctagaaggtgaggaaatgacgacgccaaagtgcagaagaaccatatcatcaagatgtccacaccctagtcatctgtggccagaattgaagcacagaaggtcgaagcaaacatgtatgcttcctcggcacccacagccacaggaatgtcagtagccatcctgtggctctctgtataaagccatccattggcagatgtaataccaggagaacttgtagtacagaaagttctgtagcaaatactacttcctcccttccaaattgctaccttaattctcgaatatttgtcaccactagttcatttttgaactaaaatgtgacaaatagaaataacggagcgagtataaaatactttggcttttctagatatgtattttttatacacttaaatacaaagtaaaaggaatgtatctataaatgca

SEQ ID NO: 6652 - DNA, 1477 bp, Zea Mays
ttgataatataatttgtattggattttgtgtagtgtgcaacttttcaaaatctatggagaaccaaaaccacctatgcaagaagacataacttacatgtctacattggggccatttccgaaatgggcctcgacagagaatagaatagcctaatcaattcagttggttatttcttatctagaagcaaaagagaaattgctaatgctatttttacccgttttgtctttatcctttccgcgtccgacgagtgcgcggcggccggtgatgactggtcgcgacaggtgtgccgcgggccccgcggtgccgtgccgtgtggatcagtcccgatccttctcccgccttcggccttccccgcgcgcgcgcgcacgcaccagcaccaccgcgatataaagcccgccaccaatccgctcgtggtcgtcgtcatcatcccgattcccgacacgcttgtgttgtcgcgattggcaagctcggcggctcgtggcagcgggaacttacgaggcgaaggagagcgagggcgaccgcgcggatcgcatcgcagctctgggcggaggtggggccttgcgcggagatgctagcggtgttcgatcgggcggtggcgccgagcccggaggggctgcggcagccgggcgccgcggggggcggctgcgcggcgggcctcgcggaccggttcagagaggcgcggcccgacgcggtcaccgtcaaccttggcgggtccggcgccctggcgtactcctcgagcaaccagaaccccctcctccccaggttgtttggcgcggtggacggcgtattctgcatgttccagggaacaattgcgaacgttgctgtgctgaagcagcagtatgggttgagcaaaggcgctaatgaggtcagcatcatcatcgaggcttacaggaccttgagggacaggggcccttatcctgcagatcaggttgtgagggacataagtgggaaatttgcatttgtcctgtatgattgctccactaagtcggtcttcatggctgctatgcagctgttcagttattcccgaagacatatatctgatcacaggctactgctacgacgtacaatggtaccactggtattgaccggcaactgataggtagctcagctcgtgttcgtaacctcataacaggacaccgatggaaatgttccgttctactggggcgtggacaccgacgggcgtcttgtggtctctgacgacgccgaactcgtgaagagtgcctgtgggaaatcctgtgccccgttccccaaaggcttcttcttcacgacgtccggagggctgaggagctacgagcaccccatgcacgaggtgaagccggtgccgagggtggacagcaagggcgaggtgtgcggcacgacgtacacggtcgacgcaagcgccaggaaggagaccaccatcccaagggtcggcagcgccgccgactggtcttcgcaatgcgctgccagtcgagcatccttgaggaaggatagggataaggc

SEQ ID NO: 6653 - DNA, 1972 bp, Zea Mays
cggtccaaccaatggccgggttcgcgcgcgccaccgcccccgcgtccccgtcaccggcggcggcgctgctcaccggcgagcgcctcgtggtcttcctcttcgcggcccgcgtggcactcgcggccccggtgcacctcgccgcggcgctcgcggtcctcgtggcggccgccctcgccgtcgagctcgccgtggacggctccggctccgccccgcttcgccgcttcaggaccaggccaggtgcttcgtcaggcatacttcttggcgccactactctgcccagcgtcatgctttctcggttaattcaactgtcaaggctcctaccagctgatcctaatggacctaaaggcttgatggtaacgaccaatatggcgtatatgctctgtcatggagtggctgctgtgatcttaatcaagcatatcctagagaagtttccctcatgcgcatcttttggggaggcgcttttggtgtcaggtggtcttgttctctactttggtgatatgttggcacatacactttcaaagatggagttctccatgtcatcaaaagcattcattcacacacctcaaactagaagcgatatgaccgcaattattcaggggattttacttgtcctttttctacttccgttactatacaagagttctcttaaagtttggtattgctggacaaaggagagaaagcaacaaacacaaacacctgaggaacataagcgaataagaattgattctgccatattctatatctcgttggcggtggtgttaatatttttactgccatcatggacacaccttgtccaaggcctcaaagtgcatccttttgtttggattgttaactatatgttcactgattcacatgagcgacttgttttatgtgcatactggatatgtgtaatatatgtatcagttagaaggttctacagtatatcaaagcaaagcaagacagagaggattcttttgcgcaagtattatcatcttgtcgctgttctcattttctctcctgcagttatatttcagcctgctttcttggacttggcatttggtgcagcatttgcagttttcttgatattggagatgttacgaatttgggaaatataccctcttggacgtgttgtgcatcagtttatgaacgcctttactgatcatcgtgattctgagattcttattgtcagccatttttcactcttactgggctgtgcacttccgaaatggatgtcatctggattaaatgaccgaccacttgccccttttgccggaattctcagcttggggataggtgataccatggcatcaatgatagggtacaagtatggcgtgttaagatggagcaagacaggaaagaaaacaatcgagggcacggcagcgggcataacatcggtgctagcagcctgctcgatcctggtgtcactcttggcttccagtgggtacattctttcgcagaattggctatcgctcctgatagctgtcacattgagcgggttattggaggcatacactgcacagctggacaatgccttcatccccctcgtgttctatagtcttctgtgtctataagggtagcatcctgtacatctaactgaccttgatatcctctttttgtttacacgctattagtatatacgtagtgcaatatgttatttcgacattactcacttggtctcctcggcgcatcaactgcctggtgattcagttcaacagatcacattctgtgtaaccctgcctttcggaagttgagaggacgtgctcatggttgagacagtcggtacaggcatatgaccagaagtagaaaaataaaatgttctccagtcgttcagtagagggtgtttttggcggagctgggcagttggatgctgtacataaagttttttttatatgaacctgttgactgttgttgggacgaacagtattgaaacatgctgtgatgctgatcaatttgatcactctatttgctctttctatccatttttaaatacctc

SEQ ID NO: 6654 - DNA, 994 bp, Zea Mays
gccggccaacggctgcatgccgcacctgctcgccaatagctgcagccggccagtaggtgatgccgcccgcggtggctaatcgggtgccagcagcttcatgttaaatcaaccagccgccgctcccttcttccatttcctggccgccaagcttccaacgtacgcagcctgctcgtcttccacctccggccatcttcctccctctaccgagcttccctccccacagcagcagaccaccggcgctccctgttcttcttccccgtgggcgcccccccttcatccaggcagcagacgacacacgcacgccaggaacgcccgagctctccatctctaatccagcgcgcagggcatttctcagggtccgagctcgagcaggtccggcagccctccccaaccaagcttctcccatggcgctgctacctccaggatggagctcgacaccccaaagattatcgcagcagcgagctccttcgccggcgcctgtccacaacagcagtcccgacgcgacactgtgacccttggtgaggcaccttgctgtcctagccgctggatcgagctttgtcccagcccgcagcttgctatcgtcgagtattgggcttgccgtcgatgtcgtgcttgtcatgcgcagcaagaaccacagcgccacgacttgttccagctcgacgagagcagccacatcgtcgtcgacccgtgcccttgtcgtcatgcctcgcgcattccatgctcgacgaaagccccaagctgtggacagcatgcggacatgcgcgacacgagtcggccaggttgttcgctttagaaaaattgtgatttcgtttttatttatgattcagtcgatggcgtgaatatgtgcgtgaaaatataattgtatgaatggacgtgggtagagaaagaagacgaagtacaaagaaactcgtatgtttttatattttgataaaaaaatatgcaatgcgttgtttgatgcgaaaaactaagttacaaaatgcggattatgttttgg

SEQ ID NO: 6655 - DNA, 1279 bp, Zea Mays
caacggctgcatgccgcacctgctcgccaatagctgcagccggccagtaggtgatgccgcccgcggtggctaatcgggtgccagcagcttcatgttaaatcaaccagccgccgctcccttcttccatttcctggccgccaagcttccaacgtacgcagcctgctcgtcttccacctccggccatcttcctccctctaccgagcttccctccccacagcagcagaccaccggcgctccctgttcttcttccccgtgggcgcccccccttcatccaggcagcagacgacacacgcacgccaggaacgcccgagctctccatctctaatccagcgcgcagggcatttctcagggtccgagctcgagcagccctccccaaccaagcttctcccatggcgctgctacctccaggatggagctcgacaccccaaagaaattccccctgggcgctggaggcgccaagctcgcgccggtgagcacctcccatggcgtggccatctccctgctgttgccagggccgacgagtccaagtcttgtctctagccttccttgccgactatggctgcccagcagctcgtcacctccctctctagtgcatgccccggctgtcatttccccacgccgagcgtgccctctcgccatcctttgccttgctgctcgcagctgagtttcctactcgtcgcagctcgcgcaccacctgttcgacgttatgcacagtagctgcatgtctcagattatcgcagcagcgagctccttcgccggcgcctgtccacaacagcagtcccgacgcgacactgtgacccttggtgaggcaccttgctgtcctagccgctggatcgagctttgtcccagcccgcagcttgctatcgtcgagtattgggcttgccgtcgatgtcgtgcttgtcatgcgcagcaagaaccacagcgccacgacttgttccagctcgacgagagcagccacatcgtcgtcgacccgtgcccttgtcgtcatgcctcgcgcattccatgctcgacgaaagccccaagctgtggacagcatgcggacatgcgcgacacgagtcggccaggttgttcgctttagaaaaattgtgatttcgtttttatttatgattcagtcgatggcgtgaatatgtgcgtgaaaatataattgtatgaatggacgtgggtagagaaagaagacgaagtacaaagaaactcgtatgtttttatattttgataaaaaaatatgcaatgcgttgtttgatgcgaaaaactaagttacaaaatgcggattatgttttgg

SEQ ID NO: 6656 - DNA, 2500 bp, Zea Mays
tgcatagcctatcgagcgacggcctacgctcaaaaaacacaaatcgctttccgcgccgccgccgcgccgccgaccggcgctcctcacctctcccgccgcacccatcgtccccccgttcccggctaaaccctgcttgagccctagacaccgcccgcctccgggaggtagagagcatgcacgccaggttcctcagcgcgccgtcccctgcctccgccgccccctccccgtacgttcgcttggccttcacgggcgccctcccgcgccgcgcgtgttggaagccgcgaggccccgcgtccgcgtccgcgccgccgcctcggcctctccactcgctgtgcgcccgggcctccatgcagcccgcctctcccgcgcacgacgggcatggtggtccgccggtgcacggcgtctccaacaccgtcatcggggtcctggggggcggtcagctcgggaagatgctctgccatgcagcgagtcagatggggattagaattgtcatcctcgaccctcttcccggctgccccgcgagctcggtttgcgatgagcacgtcatcgggagcttcaacgatggggacacggtccgggagttcgccaagaggtgtggggtcctaacagtggagattgagcatgttgatgccgccacactggagaagctggaaaaacagggcgttgactgcgagcctaaagcctccacaatcacgattattcaggacaagtacaggcagaaaaagcatttctcaagatacgagatcccattgcctgacttcatggaatatagaggaggctggggaaaagtttggctatcccctaatggtcaaaagcaagagattagcatatgatggtcgaggaaatgctgtagccaagaacaaagaggagctatcttctgttgttgcttcactgggtgggtttgagcggggcttgtatgttgagagatggactcctttcgtaaaggagctttctgtaattgtggcaaggagcagagacaactctactgtctgctatcctgttgtggaaacagttcacaaggaaaatatatgccatgttgttgaagctcctgctgatgtatctaacaaaataaagaagttagctactagcgtggctgaaaaagctatcaaatcattagaaggagctggtgtctttgctgtagagttgtttttaacagaagatgatcagattttattgaatgaggtagcccctaggcctcacaatagtgggcatcacacaatagagtcatgctacacctcacaatatgagcagcatatacgcgctattcttggccttcctcttggtgatccctcaatgaaagcacctgcagcaataatgtacaacatcctgggcgaggatgagggtgaagcagggttctttctggctcatcagcttatcagtagggcactaaccattccaggcacatcggtccattgagatgcggaagcaaaggaagatgggtcatattacaattgtggggccttctaagataagtgtaaaatcacgcttggacaacttgctgcaaagaaactcgtctgatcccaaggaagttagccctcgtgttgctattataatggggtcccaatctgatcttcctgtgatgaaagatgctgagagggttttgaaagagttcgacataccttgtgagttaactattgtttctgcacatcgtacaccagagcggatgtatgattatgcgaagtctgctaaagacaggggtttcgaggtcataattgcaggtgcaggcggagcagctcatttaccagggatggtggcttcattgactcctcttcctgtaatcggagttcccattaagacttcaacactatcaggatttgattccctcctatctattgtgcaagtattcctgttgcgactgttgctatcgggattgcagaaaatgcaggtttgctggcagctaggattctggctgcaagagatcctgagctccaggacagggtaactaagtaccaggatgatctgagggacatggttttggagacggcagaaaggctggaggaccaaggcccggaggaatttctgaagggaatggattgaccccttttgaagccctggctctggggcctgggaggaatacgagtgtattatgggtcggcgataactcactgtccactcgattatggtttaagatggggagtcatcaagaagatactttaataggctcggctgcattcgattttccttacaattcttttttgataattgtgctatcttaacccatctcaacatgcccttttcccttctaatatagggtatgaattttgggtttagagggggaaaaaagaatgggagtaaacgttgtacgtacgaaaaataaaacggttcgagtaacgtaaaaaacatgcctggatttttcagccgcacaagttgctttgagtcaagtaattgtacatattccctccgttctaaataaggccttgtttggttattaccattgttcatggattggatttggttattatcattgcacatggattgaatgagattataaaaaattaag

SEQ ID NO: 6657 - DNA, 1246 bp, Zea Mays
gggaggtgggaggactagaccaattcgacgaggaggctcatgcacggtggctcttacaatgcatatacaagctcagagacaacaaacttctttttcgatgtcaatgtggacaattttgaagaagccttagatagatttgctcagttcttcattaagccactgatgtcacaggatgctgttcttagagagataaaagctgttgattctgaacacaagaaaaatttgttgtccgatggctggagaatgtatcagcttcaaaagcatctggcttcaaaggatcacccttaccacaaattcagtacaggaagttgggaaacactagaaactaaaccaaaagcgaggggcgtggacatcagacttgaacttctgaagttttacaagaattattcagcaaaccttatgcaccttgttgtttatggaaaggagagcctcgattacattcagggcttggttgagcgtatgtttagtgacataaaaaacactgatcagagatgcttcaaatgtccaagtcatcctctttcagaggaacatttgcagcttcttgtcaaagcactaccaatagaagaaggggactatctaagaattatatggccaattactcctagcatccagttttacaaagaaggtccttgccattatctaagtcacctcattgggcatgaaggcgaggggtccgtcttccatattataaaggaactaggatgggccatgaacttaatggctggagagagcactgacagtaatgaatattcctttttctcagtaagcatcaggctcaccgatgctggtcatgaacacatggaggatattgttgggttgatctttaaatatcttcatctattaaaagtagacggagtccacgagtggatatttaatgagcttgaagcgataaatgaaatggagttccattatcaagacaaagttgatccaataagctatgtgatgcgtactgtctcaactatgcggttgtttccaccagaagaatggctggttggagcagcattgccatcaaagtatgcaccacaaagaataaatatgatactcgatcaactatcacctgaaagatgttatgcaccttgagtccagccaatgtaacccactagtgttaggtatatgtaatacaaagatcactattaatgacttagggtttttactctccaacattggagttttttcttttgcaccttccctagccgtcgcctgcccactagggatgccaccaccatggtcgacggccctcctctcc

SEQ ID NO: 6658 - DNA, 4624 bp, Zea Mays
agtcccttcccttggctgcctctgtgtcttgtccattccagggctccagccagcaaagagctggattcttcgtatcccctaccaaaccccaccaccacgagcggccgccgcgcggcgagaccaggacgcatggcgactgcctcctccttcaccgccatctttttcagcagtgccttcgtcgcatgcttcgcggagccaaagtgcagatccagctgcaaaggaaggcaccattaccaccaccacctgtggctgcaacagccacaactgctgctggtggagggacactagccacaatcatgtgcatcgccagagaggaaggggttgtcgcgctctagaagggcgtcatccctggcctccactgtcagtttctctatgatggcctccacatcagcttgtgaaggctttcttcgtcagatgtgctgttgtgggtgatgtcagtttactaagcaagattcttgctgcgcttgccacaggtgtgatagctattgttgtggcaaatccaactgatctcgttaaagttaggttgcaagctgatggaaaggctaacacagtcaagaggagttattctggagcccttaatgtatatgctacaataatcagacatgttactttaaccatcatgggcagtaagtgtacaagattatttcttttttcgttgtccttaaaatatttcatgtttccaggaaggtattggagctttgtggactggccttggcccaaatgtcgcacacaatgtcataattaacgctgccgagttggacagctatgattagttcaaacatgtacctgttgactctaatgtctttgtggtgggcattatatttcattatcattattcattcatttgttctgttcatgtagatgtttctaaaacttcctaggtatactgataacgtgttacccatcttttagctggacttggtgctgattttttttactatttgcattggctctccgatggatgcaaataagctttgactaaatatcttactagcagttcacaaggttcagcaaaaaaaaaactaaaacaacacaattgttttgtattctttacttcaatagtcatcgagtgattcatcctccatattttgcacaaaaactaagggaacacctagcctacctaccgtggacaaataccatttgaagaattgttagataatttcacacatgtatttacatttttttcctaatgagtacgtgcaggtttatactatatattaatctaccatatctctatacacttagacatgactaattttcgactgaaattagctgcaatctcagaaaattcgttgaacattggttgttttaattttggggaaatcatgtatcttagagaacccttatttacattgcacatttgaagccatcatttaaaaaatcaaacaaattataaattaggatggatggaatatttgtttacattttccctagagggggtgaacattctgaagcattaacgaactacagcctaggaagaaatttaggtattggtacatttggaaaagtgaagattgcagagcataaccttacatgacatagggttgctataaagatcatcaactgctaccaaatgagaaatatggaaatggaagataaaaatatggtttcgggtgaaggaagttgttaatattaacaaattgttatcaacatttgggtttgtacttgccactcaaacttttatctctactaatatgaagaaggtaaggggtaggttgcctaccatggttctgcctaccccttgttctgcctcctgcgcctccacgctaggcaaccaagaatgttcttaaatgagcaactttttcatgcaatcaagaatcagaagtctgtgttggtttacatcttttctgaaagtgatttactattttatacttgagtaactttgtcctatgatatgagatatccaaattcatctaataattagttaatttgagatgagttggtcctacaagggtccataactgtattgtatgcacttgcacccacatatatctaataagtgagtctgagcagtgacatagtccattggtaccatgggttgtatggatataggtcactgcattgctgatagtgaggagcagaaagttcatgttattgctggtgtgctgacccttaccactccaattttagtccacccctattgaccacatagttgaaatgagtattataggtgtgattacatgagtcatatctgcagcatggctcatttttgaatgtttgctggtgggaggatcgtctcttctatgtctacaagaatattttgccagtgatgacggtgtttagaggatgggatccttgcaattgtcaaacaagatgagagaccccttgaattgcttgctaaagaatatgctatcaactcttttgacatagatcctcaaaacccctctgatgttgttttcacgttagaatgggaatcaatcggtgtcctaccttgtggctagaagaaagaaaatttttactaccgagggatctcaattagaattttaggctcattcatacattcactacaatgccttcgaactcatgaacatttatctctggctctattgtggtgggttacatgaatagagtttttgcatgttcttcgtttcatatggtggcatacttgttactatgtgacattgtttgatgaaacccttgcgacattgtattatttattttgttctatatagtcttaacattttatcaaataagaatttatgtgacatcacaacacattgtactatcatatatagaagtcgacattgtattgatggttgcaatgtagtggtcccgttgcaacgcacggtggttggaagactcgatcatacgacgccagcaaagaggccaattctggtcgttgcgcaggcagcgtggcacgtcattcggcgatcgtggaaaggccttctgccatgagcccatgacgcgcatacgctcgcggcggaagcgaacggctggtgccgcaacccggacggccggaccggacggacggcatctgctccctgcccgtgggcggctggccccgatataaaactgacaagagatagactaatcaagtctctcaacccgagtctaatcttggtccccaatccaatcccgcacccaccattgcgagagatcatcagaggaccgcgtccaatcgaagcggagaggaggagaagggtgtgctgatggcgacggcggtggcggccacggccgcggcggcgggtggcagcaatgtcgagttcatccgcgcgcgcagcgacaagcgggagtaccgccgtgtggtgctcgcaaacgcgctcgagatcctactaatcagcgaccccgacactgacaaggcggcggcgtgcatggaggtcgaggtgggctcgttcagcgacccggagggactcgagggcctcgcgcacttcctcgagcacatgctattttatgccagcgagaaatatcctggagaacacgagtatacgaaatatatcacagagcacggtggctcttacaatgcatatacaagctcagagacaacaaacttctttttcgatgtcaatgtggacaattttgaagaagccttagatagatttgctcagttcttcattaagccactgatgtcacaggatgctgttcttagagagataaaagctgttgattctgaacacaagaaaaatttgttgtccgatggctggagaatgtatcagcttcaaaagcatctggcttcaaaggatcacccttaccacaaattcagtacaggaagttgggaaacactagaaactaaaccaaaagcgaggggcgtggacatcagacttgaacttctgaagttttacaagaattattcagcaaaccttatgcaccttgttgtttatggaaaggagagcctcgattacattcagggcttggttgagcgtatgtttagtgacataaaaaacactgatcagagatgcttcaaatgtccaagtcatcctctttcagaggaacatttgcagcttcttgtcaaagcactaccaatagaagaaggggactatctaagaattatatggccaattactcctagcatccagttttacaaagaaggtccttgccattatctaagtcacctcattgggcatgaaggcgaggggtccgtcttccatattataaaggaactaggatgggccatgaacttaatggctggagagagcactgacagtaatgaatattcctttttctcagtaagcatcaggctcaccgatgctggtcatgcttgaagcgataaatgaaatggagttccattatcaagacaaagttgatccaataagctatgtgatgcgtactgtctcaactatgcgggtaatatattgtcttgtggtattctcttttattgacaacactaatcaacaaacattctactgattgtttccaccagaagaatggctggttggagcagcattgccatcaaagtatgcaccacaaagaataaatatgatactcgatcaactatcacctgaaagatgttatgcaccttgagtccagccaatgtaacccactagtgttaggtatatgtaatacaaagatcactattaatgacttagggtttttactctccaacattggagttttttcttttgcaccttccctagccgtcgcctgcccactagggatgccaccaccatggtcgacggccctcctctcc

SEQ ID NO: 6659 - DNA, 4647 bp, Zea Mays
agtcccttcccttggctgcctctgtgtcttgtccattccagggctccagccagcaaagagctggattcttcgtatcccctaccaaaccccaccaccacgagcggccgccgcgcggcgagaccaggacgcatggcgactgcctcctccttcaccgccatctttttcagcagtgccttcgtcgcatgcttcgcggagccaaagtgcagatccagctgcaaaggaaggcaccattaccaccaccacctgtggctgcaacagccacaactgctgctggtggagggacactagccacaatcatgtgcatcgccagagaggaaggggttgtcgcgctctagaagggcgtcatccctggcctccactgtcagtttctctatgatggcctccacatcagcttgtgaaggctttcttcgtcagatgtgctgttgtgggtgatgtcagtttactaagcaagattcttgctgcgcttgccacaggtgtgatagctattgttgtggcaaatccaactgatctcgttaaagttaggttgcaagctgatggaaaggctaacacagtcaagaggagttattctggagcccttaatgtatatgctacaataatcagacatgttactttaaccatcatgggcagtaagtgtacaagattatttcttttttcgttgtccttaaaatatttcatgtttccaggaaggtattggagctttgtggactggccttggcccaaatgtcgcacacaatgtcataattaacgctgccgagttggacagctatgattagttcaaacatgtacctgttgactctaatgtctttgtggtgggcattatatttcattatcattattcattcatttgttctgttcatgtagatgtttctaaaacttcctaggtatactgataacgtgttacccatcttttagctggacttggtgctgattttttttactatttgcattggctctccgatggatgcaaataagctttgactaaatatcttactagcagttcacaaggttcagcaaaaaaaaaactaaaacaacacaattgttttgtattctttacttcaatagtcatcgagtgattcatcctccatattttgcacaaaaactaagggaacacctagcctacctaccgtggacaaataccatttgaagaattgttagataatttcacacatgtatttacatttttttcctaatgagtacgtgcaggtttatactatatattaatctaccatatctctatacacttagacatgactaattttcgactgaaattagctgcaatctcagaaaattcgttgaacattggttgttttaattttggggaaatcatgtatcttagagaacccttatttacattgcacatttgaagccatcatttaaaaaatcaaacaaattataaattaggatggatggaatatttgtttacattttccctagagggggtgaacattctgaagcattaacgaactacagcctaggaagaaatttaggtattggtacatttggaaaagtgaagattgcagagcataaccttacatgacatagggttgctataaagatcatcaactgctaccaaatgagaaatatggaaatggaagataaaaatatggtttcgggtgaaggaagttgttaatattaacaaattgttatcaacatttgggtttgtacttgccactcaaacttttatctctactaatatgaagaaggtaaggggtaggttgcctaccatggttctgcctaccccttgttctgcctcctgcgcctccacgctaggcaaccaagaatgttcttaaatgagcaactttttcatgcaatcaagaatcagaagtctgtgttggtttacatcttttctgaaagtgatttactattttatacttgagtaactttgtcctatgatatgagatatccaaattcatctaataattagttaatttgagatgagttggtcctacaagggtccataactgtattgtatgcacttgcacccacatatatctaataagtgagtctgagcagtgacatagtccattggtaccatgggttgtatggatataggtcactgcattgctgatagtgaggagcagaaagttcatgttattgctggtgtgctgacccttaccactccaattttagtccacccctattgaccacatagttgaaatgagtattataggtgtgattacatgagtcatatctgcagcatggctcatttttgaatgtttgctggtgggaggatcgtctcttctatgtctacaagaatattttgccagtgatgacggtgtttagaggatgggatccttgcaattgtcaaacaagatgagagaccccttgaattgcttgctaaagaatatgctatcaactcttttgacatagatcctcaaaacccctctgatgttgttttcacgttagaatgggaatcaatcggtgtcctaccttgtggctagaagaaagaaaatttttactaccgagggatctcaattagaattttaggctcattcatacattcactacaatgccttcgaactcatgaacatttatctctggctctattgtggtgggttacatgaatagagtttttgcatgttcttcgtttcatatggtggcatacttgttactatgtgacattgtttgatgaaacccttgcgacattgtattatttattttgttctatatagtcttaacattttatcaaataagaatttatgtgacatcacaacacattgtactatcatatatagaagtcgacattgtattgatggttgcaatgtagtggtcccgttgcaacgcacggtggttggaagactcgatcatacgacgccagcaaagaggccaattctggtcgttgcgcaggcagcgtggcacgtcattcggcgatcgtggaaaggccttctgccatgagcccatgacgcgcatacgctcgcggcggaagcgaacggctggtgccgcaacccggacggccggaccggacggacggcatctgctccctgcccgtgggcggctggccccgatataaaactgacaagagatagactaatcaagtctctcaacccgagtctaatcttggtccccaatccaatcccgcacccaccattgcgagagatcatcagaggaccgcgtccaatcgaagcggagaggaggagaagggtgtgctgatggcgacggcggtggcggccacggccgcggcggcgggtggcagcaatgtcgagttcatccgcgcgcgcagcgacaagcgggagtaccgccgtgtggtgctcgcaaacgcgctcgagatcctactaatcagcgaccccgacactgacaaggcggcggcgtgcatggaggtcgaggtgggctcgttcagcgacccggagggactcgagggcctcgcgcacttcctcgagcacatgctattttatgccagcgagaaatatcctggagaacacgagtatacgaaatatatcacagagcacggtggctcttacaatgcatatacaagctcagagacaacaaacttctttttcgatgtcaatgtggacaattttgaagaagccttagatagatttgctcagttcttcattaagccactgatgtcacaggatgctgttcttagagagataaaagctgttgattctgaacacaagaaaaatttgttgtccgatggctggagaatgtatcagcttcaaaagcatctggcttcaaaggatcacccttaccacaaattcagtacaggaagttgggaaacactagaaactaaaccaaaagcgaggggcgtggacatcagacttgaacttctgaagttttacaagaattattcagcaaaccttatgcaccttgttgtttatggaaaggagagcctcgattacattcagggcttggttgagcgtatgtttagtgacataaaaaacactgatcagagatgcttcaaatgtccaagtcatcctctttcagaggaacatttgcagcttcttgtcaaagcactaccaatagaagaaggggactatctaagaattatatggccaattactcctagcatccagttttacaaagaaggtccttgccattatctaagtcacctcattgggcatgaaggcgaggggtccgtcttccatattataaaggaactaggatgggccatgaacttaatggctggagagagcactgacagtaatgaatattcctttttctcagtaagcatcaggctcaccgatgctggtcatgaacacatggaggatattgttgggttgatctttaaatatcttcatctattaaaagtagacggagtccacgagtggatatttaatgagcttgaagcgataaatgaaatggagttccattatcaagacaaagttgatccaataagctatgtgatgcgtactgtctcaactatgcggttgtttccaccagaagaatggctggttggagcagcattgccatcaaagtatgcaccacaaagaataaatatgatactcgatcaactatcacctgaaagatgttatgcaccttgagtccagccaatgtaacccactagtgttaggtatatgtaatacaaagatcactattaatgacttagggtttttactctccaacattggagttttttcttttgcaccttccctagccgtcgcctgcccactagggatgccaccaccatggtcgacggccctcctctcc

SEQ ID NO: 6660 - DNA, 2332 bp, Zea Mays
cccacttggaatctggaatttgactgaggggatgtagaccgttcgatttccaatcgcacggtccgcgttcgtttgacgtccttctggcggttatgctgctgcgaccaagtcgagggctttcgtgccttcagcccttcagtcttcaccagtcgcgcgccgccatgtcggagaccgaatcggcggcagcggcgccggtggctgcggctgaatcgaagcctcggcgactgcgggggcacaagaagggcgccgtcacctgctgcgtcgcctcctccgcccgccccggcgtcgtcgcgtcctccggcgaggatggatgtctttgctggtttgatctgcgcaccaaagatgcacttttgaccatggaggcagcaaataaaccaatttcttcaatttgctttaaaccaggaaatgaagattttgtgtatatctctgctggaaatgaaatattgtcctttgatgttcgtatgtggttttcttgtagggaactcaatcaaagccattagagacatataactacaatagagatgaaatcaatcagattgctgtcagctctaaaggttttctcgctgctgcagatgatagtggggatgttaagattgtcaataccattcagaaatgcctgtataaaagattaagggaagcccacacaagtatttgcagcagcgtgcaattcattccttggagaccttggacagcaattactgggggccttgactcaaagctcgctgcatgggatttctccaaaggacgaacactgttttctattgattatgtagcagtttctgaagagggtattttgggagggctctacaaggtttgtgctgttgcaaggggggatggtgctgttgatgtggttgatcttgagtatgaactggcccctgcgaaatcgaagggacctcctcgggcagctattttgacaacgagatcaaaaggcgctgaacttggagatgggagctgcaatcaaagtcgagcgaaaagaatccatcttgactacaccatgggcggccatactgcagctgtgtcttgtgtagcattttcagcatttggtgagaaggggaagttcctcatttcaggtggcaatgatgcatcagtgaagctgtgggattggtcgaaaggattttactctgaaacaaacagcaaagttgatttggttttggatattgatgtaaagaaaaagtctgagactctcagtggctgcaaactcttgttgtacccattggaacaggaggaagaagaggggagttcaaagcttgcctctttaccagcaatagctaagaaagttttatcttacgaggagggtatttatgcaaaactttccaggaagtggatagaagaaggcctcagaaccgtatccattggaagacaggaaccagggggttttgctgctgttctttggaggagaagagaaatgggaggcttgctcttgccgcatcaccgaacctttccaaattctttgcaagcttccatcccgggacctctctctcttcacaaaggcgaccgcaaaaaccttcattactttgcacctgatgtgcacctcttctgttccctgcggcaaggctttccacgctcatcttggtcggccgtcatcagatcagaagccagcggcaacgcggtggcgtcgccaggcacggtcatcaagcgtagcaaggaggagctcatcaccttcttcagagacatacagacatccattgccgagtgctcgcgtaaagcttccaagaggacgaggaagcagccgcctgatctgttccaagaggtccgcaggagggaggaacagtcacacggtggaggagatagcggcaccgacgacgtttcagagggaccgaggaaagtgaagagtcttgaggacatgaacgtggctggattgagagagttggcgagggccagaaggatgaggggttactccaagcttaagaagggcgagctcattgatcggttgagaggggctactacgtaataaactaccatgatgcagagcagcttcgcagttaatagggacacatgttcttttcgaacgtatgatgagattaccgatcaaaaaattgtatgatgatgagattaccgactttccaaacgatctagtcagttcattgataagaactagaacaatgtgtgtagttattatactatagaaccggtggagctgtattgttgtactacgccgaaacttttgtgtaggcatggcaatctcctgttgttacgtaagttactttgttatgtacggaattagtttctctaaatctaccatggattgtgtatttctacaacatctgtttggaatttgatgtacattctaactaggtggcaattggcaaataaagaagtttaaaatggccta

SEQ ID NO: 6661 - DNA, 1333 bp, Zea Mays
cgttgcttcgctttcttccaataatccctcgatgttcccgaaaatagaaagctcagtcatgtcggaggatatggtcactgacggctatgtggagatagtgaacattgacatttcgtcggttgtgattgagatgatgagaaagaaatacttcgatgttcctcagctgcaatgtatcctttgactgtttttatcatttcccccaatctattgtccattgatacccttatgaactgcagacttgcgcatggatgttagagatatgagtatgtttccggacgaatcgttcgattgtgcaatcgataaagggactctggactcattgatgtgtggtgtggatgctcccctcagtgcagctcagatgattttggaagtggacaggcttcttaaaccaggaggaacctttattttgataacatatggtgatccatcggtacgaatgcctcatttgaatcaatcagcatgtgactggaaagttgtactttatattctaccaagacctgtgttcactggaaagataacgaggcgtgtactggatcctgttccactgaccgagaggggtagactccctgatggatttgtcccagaggatcctgactcccattatgtctatgtctgcaagaagatgcagggattaacaggcacaggttccccaactgtaaaccacatagagaggcaaggggaagaataaacaaataggctgatttcacctcccacaagattagtggattgttatgatttatatacaagatcagatacgtttccaccattgttgtggccatccaaatgtagaagcgtgccattgcatatctaactgatcttgtaaaagttgcaagaatccgggagtcaatgctttgcgcaagagctgtcctttttctttctttcttttctgtatcatcttgggaagcacaacggaattgtttggtacattcgaggaagagatttatttttattacgccccgtttggatcactggaattgaattccattctaataatagtaatttaggcatatatcaattaagctaattcacttttatacaaaatatatttgcatactattattagcaagatgtcttagatatttatgtgctacatttttattatagaggagtagaacgaagagtgtcatgtaagttacagattagaaacaaattctaatcatgcataaaatcatttcctatcctccaccctatgaatttgagataaccttatatctgaactttggaaagtggtggaatgccaaattccaaactaaataagttactttattgagtgaattccaattcctttaaaatgaagggatccaaacgccccgttattgttcgaagaaagaaa

SEQ ID NO: 6662 - DNA, 2076 bp, Zea Mays
cagccagccaatgagccatcatcccccagaagcgcgcgcacaggaactgggctggaggatccgtttccgcaaccgcaacccagtccccttatcctgaaaactactcctcctctctcgtctctaaacccccgggcagcggacaaacaagcacacagcacgagcgaagagacgcagccatggcgatggctccaccgcctgcctgctcgctcttcccccgggtcgccgctgctgcgcccagttccgtcacctccaactccgttttgacctcgcgtggccccggtatccttccttccccgcgtctcgctttcgcccgccgccacctctccgcggcatggtcatcgaaggcagcagcctccgcttctgtcgaaatccaggatgactacacggatgagatggacgcggtgaacattgcgcaggatgtcacccagctcattggaaaaacaccaatggtgtatctcaatagagttgctgacggatgtgtggctaatatcgctgcaaagctcgagtacatgggaccttgccgaagtgtcaaagataggattggattaagcatgattaatgatgctgaagagaagggattaatttctccagacaagaccattttggtagaaccaacaactggaaatactggtgtagccattgcttctgtggctgcagcaagaggatacaagttgatagcaacaatgccttcatcgttagatgtcgagagacgcattcttctgcgtgcattcggagcagagattgtgttaactgatcctaccaaaggactaaaaggagcttttgataaagctgaggaaatagtcctgagaacaccaaatgcgtatatgtttcagcagttcaacaatgaggcaaatagtgagatccactttcaaaccacaggcccagaaatatgggaagacacgttgggttctgttgatatacttgttgcaagcataggaacaggcggtaccattagtggcactgggcgttacttgaaaaggatgaacaaagatattaaggttattggggtagaacctgctgaaactagtgtgatttctggtgatagccctggttacattccaagtatattagatgtgcagttgattgatgaggttgtgaaggttagcacagcagaagccgttgattctgcaagggaacttgctctaaaagagggcctgctggttggtatttcctctggtgctgcagcgattgctgctatcaatgttggcaaaagacctgaaaatgctggaaagttgattgcggtcattttccccagctttggagagagatacatctccaccattctgttccgtccgatatatgactctgttcgaagaatgaggaagagatagcgagccttgtactacttcaagcgcgttgccagtccccttctctagacctgacaggcttccatgacatgattgataaacgtgaagcagtgaagaccctgtttgattgcaacttcagggtccgaagttttgaagctgcacagagtttctatcaggtgagctgcaggcctgcagcttggttctagcaagactggaggagtgcctcatgtttagaccagctcatacaatcctggtgcaacatgcagaattgcgtgccgcagttagcttgggcctttcgtttagtagtctaggaccgggtacaaaccgcttgttacctggtacgcacttgagctgattttagcgaccaactatctgcaaattctttttgccttccgaattttgattgtttcatcttttatctggcgtctgctttactaactagttttttgcggaactacaattttcttttctctttttcttgtctgcaaaagatcgaaggtcgagcttgcaattgcaagatcaaaggtcaagctgaaaggagcctgtcgaacaaaatgcagcgtcttcactcaggtcgaagcgggaagctctaaaccgtcagagcgtctccaaaactggctgacactgacagacaaaaaaaaaactgatttaggtattggagcgaacacatccttccaatagcagcctaaatcaccaccttattttagctattacctaaaccatcaaatctcctcaaatttatgctctcaaaaaattagccaaatttatt

SEQ ID NO: 6663 - DNA, 3008 bp, Zea Mays
cgcgccaggggtgagaagtatggtggccgaggagaggctggcgtgggcggtggagcgctcccctcggtcgccacgtgtgtcacgcagccgcatctcggttccctcctctctctctctcttcttctccctctccacctcctgcttgcactgttcgtctcctcagtaactgcacccacctccacacctacacccgagaggcggcggcggcagacacagacaccgtctctctcctccctttgtcgtcgtgtctctctgcatggaagcctccgccggctcgtcgccaccgcactcccaagagaacccgccggagcacggtggcgacatgggaggggcccccgcggaggagatcggaggggaggcggcggatgatttcatgttcgctgaagacacgttcccctccctcccggacttcccttgcctttcgtcgccgtccagctccaccttctcgtccaactcctcgtcaaactcctccagcgcctacaccaacacggcaggaagagccggcggcgagccctccgagcctgcttcggccggagaagggtttgatgcgctcgatgacatcgaccagctcctcgacttcgcgtcgctttccatgccgtgggactccgagccgttcccgggggttagcatgatgctagagaacgccatgtcggcgccgccgcagccggtgggcgacggcatgagtgaagagaaagccgtgccggaagggaccacagggggagaggaggcctgcatggatgcgtcggagggggaggagctgccgcggttcttcatggagtggctcacgagcaaccgcgaaaacatctcggccgaggatctccgcgggatccgcctccgccgctccaccatcgaggccgccgccgcccggctcggcggcgggcgccagggcaccatgcagctgctcaagctcatcctcacctgggtgcagaaccaccacctccagaggaagcgcccgcgcgacgtgatggaggaggaggcgggcctgcacgtccagctccccagcccggtcgccaacccaccaggatacgagttccccgccggcggacaggacatggccgcgggcggcggcacatcttggatgccccaccagcaggcattcacgccgcctgctgcgtacggcggcgacgcggtgtacccgagcgcggcaggccaacagtactctttccaccagggccccagcacgagcagcgtggtcgtgaacagccaaccgttctccccgccgcctgtgggcgacatgcacggcgcgaacatggcctggccgcagcagtacgtgccgttcccaccgcctggggcttccacgggctcttaccctatgccgcagccgttctcccccggattcggcgggcagtacgccggcgccggcgctggccacctctcagtggccccccagcgcatggcaggcgtggaggcctcggcgaccaaggaggcccgcaagaagcgcatggcgagacagcggcgcctgtcctgcctgcagcagcagcgcagccagcagctgagcctgggccagatccaggcctccgtccacctgcaggagccgtcccctcggtccacgcactccggcccggtcacgccgtcagcaggcggctggggattctggtcgccgagcagccagcagcaggtccagaacccgctctccaagtccaattcatcaagggcgccgcctccctcgctggaagcggcggcggtggcgccacagacaaagcccgcgcctgctggtgctcggcaggacgacattcaccaccgcctcgcagcggcttcagataagcggcagggcgccaaggcggacaagaacctgcggttcctgctgcagaaggtgctgaagcagagcgacgtcgggagcctcggccgcatcgtgctccccaaaaaggaagcggaggttcacctgccggagctgaagacgagggatggcatctccatccccatggaggacatcggaacgtcgcgcgtgtggaacatgcggtacaggttttggcccaacaacaagagcagaatgtatctgctggagaacacaggggaatttgttcgttccaacgagcttcaggagggggatttcatagtgatctactccgatgtcaagtcgggcaaatatgtatgttcttctattgccgactatttccttgctacataatgctcgtttttctggtccatatgcctgcatcattagtcaactcaaacgtgttgtcgtccttgaaactgcaatccaaatctacgcaaccgttttgcatgccactgtttgtatgtggatgcctggatggcaatcaaggacatagtggcatcttttgatctcgctgttcatggaattggtttacttcagcagcaactcatcaagaaccctgaaaccccccttgtgtcctatatatatccacagctgatacggggcgtgaaggtaaggcccccgccggcgcaagagcaaggcagtggttccagcgggggaggcaagcacaggcccctctgtccagcaggtccagggagagccgcagccgccggtgctcctgaagacgccgtcgtcgacggggtcagcggcgcctgcaaggggaggtctccggaaggcgtgcggcgggttcggcagcagggagccggcgccatgagccagatggcggtgagcatctgaaagagcagcagactccgccatatattgatcgatcgaccaatcgatcgttagttctccaagttactattagctagctatagctcgaaacagctgaactgatgatgacgatggtaacctccgtcgtgtgtgctaagcatgtagcgtgctaggagatgatatattaaatataatcgagtagtagagccacccgctgtgtgacgctaaatttgtgtgcatggtttggtttgtgagttgggcccgtgcgtggctgtgtcatgtcgtggttaattagctatactagtcctgtctgtacatgcatggacatacctgatctctcggccattggtgtcggcgacgtgccattcggctaacaagacgacagctgcagcctgcagcaaaagctagaacattctacaca

SEQ ID NO: 6664 - DNA, 2608 bp, Zea Mays
cgctccggatgtctccagtttcggcgtaccgccgcgtgcgcttcccaaaacactcccgtctccccgtgcccgatacaaagcgcgagggggcgaaagcacgccacaactgcaccgcactctctgcctccctccgtccgtccgtcctcccgtcctcttccttgtgccttgtcctgcttctccactcgccactgccgcattctgcccaagtttgccgtactgccgcattccaccagccacccaccaggccaccacccagcactccagccgccagaacagagtctacggcgccgccgtcgcacgacaggagagggagagggagagagacgcgggctttgacttgccgccggtgcgtccgtgcgtgcctggtgggaggagtgggagacgccggtacagtacaggagccatggcgccgagctgctacgacgcggcagcgtccatgctcctctgcgccgaggagcacagcagcatcctgtggtacgacgaggaggaggaggagctggaggcggtcgggagaaggagaggccggtcgccgggctacggggacgacttcggcgcggacttgttcccgccgcagtcggaggaatgcgtggccggtctggtggagcgggaacgggaccacatgccggggccgtgctacggcgacaggctgcgcggcggcggcggctgtctctgcgtccgccgggaggccgtcgactggatttggaaggcttacacgcaccacaggttccgccctctcactgcctacttggcagtgaactacctcgatcgcttcctctcgctgtctgaggtgccggactgcaaggactggatgacgcagctcctcgcggtggcgtgcgtttctctggccgccaagatggaggaaaccgccgtcccgcagtgcctggaccttcaggaggtcggagacgcgcggtacgtgttcgaggcgaagacggtccagaggatggagctcctggttctaacaaccctcaactggaggatgcatgccgtgacgccgttctcctacgtggattacttcctgaacaagctcaacaacggcggcagcacggcgccgaggagctgctggctcttgcagtccgcggagcttatcttgcgtgcggccagaggaaccggctgcgtcgggttcaggccgtccgagatcgccgccgcggttgcagccgccgtggccggagacgtggacgacgcggacggcgtcgagaacgcctgctgcgctcacgtagataaggtacgtagtgcattgaaggcagcaaagcgccgccatgcatgcggaatgcgatgcgaactcggttccgtcgtctagtttgtttaagctagtaaaacaaatgcgatcgaggccacacggggtcggttcgagatccagacccattcatggctggaaatctcgtactagccgtgcttggcgtaaacgcgccggccccggtaacagatgcgtacgtgaagcgcatttatgcccgcgcgtttgggtgtgtgagctccattgggtggcgggttatttaatgcgcgctgttgcctgcctctgtggtctgtgctgtgtctgcaggagcgggtgttgcggtgccaggaagcgatcgggtccatggcgtcctcggcggccattgacgacgctaccgtgccaccgaaatctgcgagacgcaggagctcccccgtgcccgtgccgcagagccctgtgggggtgctggacgcggctccctgcctcagctacaggagcgaagaggcagcgactgcgactgcgactgcgacttctgctgcctcacatggggcccctggctcttcaagctcgtcctcgacctccccggtgaccagcaaaaggaggaaactcgccagccgatgtgatggatcgtgcagtgaccggtcaaagcgcgcgcccgcccaatggaccaaagagtgaattgactagggcgtctgcttgctttctgatcaaagagtgcattgagaggcggcaaaatggaggaataaaggggattttggcatgacgagggcaaaggagttgatgaataaagacgcgacgaggtggacaacacctaaattgccgatcttttctttgcaaggggagtaggggacctgcttgggcctgggggagggtagtagacagcccagcacaaaaacctggttggtgtgccacgaccacaatgggcgcgccagccatggctttgtaggaaacacaagggcgctagaggagatccgatgggatgactcagaataaagatagtggagggaccagaccgtatgcagtatgtgcaacaactaggcactggcatgcttatgctcaagtaatctgataacttgaatgttgtgtatccgacaaactgcttctgtgaagagagaaatgcaggtagacgatgaatgtatgtgacaaaaagaatgtccgacccagatgagaaaataaaatatgaatccatgacaaggggatgtgggtttagttctatccatcatttgtttttaattttaacttaatattgtcctgcctgcctataatgttagtctgcttgtctagttgtctgctctggaggccatggcattgctttctcagcttctctatagctctaccactagtttagtagtagtagtagtaggaattaaaaggaggccttgtcaggcggaccgttgggaa

SEQ ID NO: 6665 - DNA, 1213 bp, Zea Mays
cttgtacacttgaactttgagagagagtccccgaaatatatccaatattgaagactctttgcttggtgcgcttaagcttattatgctaataggtttggtgatcatttcatttggtccaagttattcatatacccttctaaaattactctatggggaaagacacagtgatggagaggctccagttattcttcgttactattgtttatatatcatcagtttagcaatgaatggcacatctgaagcctttcttcatgctgttgcaaatgaaaaccagcttaagcagtcaaatgatatgttgcttctgttctcggtgatttacatcattctaaatgttgttcttattaaatcttctggagctgttgggttaattgctgctaatgccattaatatgttgcttcgaatatcatattctgcagtatttataaaagactatttcaagggctcattctctttccggcgctgtgtgcctgcgggctggggcattttactcatttctggtctgaccactgttttctctgagagggttttcttgaacaaaacgaggttcaagcagactgttcccattcacatagcgattggcatcatgtgcttgagcatcgcgttacttgagatataccgtggcgaaaagcagttcttgatgcaaataatcagaactttgaagcataatgacaaaagccagtgatttgaagacacagcgcatttcatagcgtattctctctggaacgcctgatgaaagagagctggtagtatagtgggtgggtaatttggtgtgtatgcaggagatcgggagttaacagaagaggggggattaatcggtcagatagataaatcggttgcgtatgggaattgctggatttcttgttgacccaatatttatattacaggtttattgagctagtgattcaataatttataattaaatgaagaagtttaggttccttttgttaagaacagcttggccgaatagagccagatgcccagatggatccccaagtgaccaagcacaacgacctggaaccatctgacgccggtcgccggcacattgtgccaatcagctgctataaagttacctagcgcgcagctgcggccgatgtggcgtcgctggatcatgtggacgaagccccaatttttcgtagattggagctgtttgaatccataaccgtccctttcccttctttttcacttatttggttactaggtgagtacacgtgcg

SEQ ID NO: 6666 - DNA, 2899 bp, Zea Mays
gtttcgtcgacaagccagcagcccagcacgcaaagggcactgtgccgttacggcgcggcggagccggaaactcccgagtcgcgtgacagtaaacgaaggcacgaacgcgactcttccatccaactgtcgaagcaaccgaatcggggacaaccgagggcgagggcggccggcatggggatcgtggaggcgtggatgcgggagaagcccatccgcacattcctagcccgcctcgcccagcgccgggcggcggctgccgccgccttcctcgcttccccctctgccaccacggtcatcgatggcgagggcggcagcgacgggagcatcccgcagctttcctccgttgccaactccgtcgtgtcccgctgctcaaggattcttgctctttcaattgagaacttacagcgaagctttgagactgattttccacacagttgtaatgaggctaatacatatgcaagagaccttttagagtattgctgccataaagctcttcatgaagttacaacacgtccagattatttggccgataagaatcttcgccgcttgatgtttgatatgatgcttgcatgggaaactccaggtgctcaggatgtgtcagtagataatggttctattgtgcgtgattcccttgagattgaagatgaggatgaggggtcaattttttatgcaaattccacaagattggctgctcaagttgatgacaagaagacagtcgggttaagtgcttttgcacgaatagcaccttcatgcccaataatagctgacctggttactgtacgcaatctgtttgacgcacttacaagttcatctggaggccgattgcattttcttgtttatgacaagtatctcaagagtttagacagggaattgaggtctgtgaaaggtatcatgcaatcatcacttgcctcaagttttcatcttgatgctggagaatgcatattagctattgatggagacaagcccattcaaccggtactgcaacatattggaatatcagcatggccaggaagattggtcctcacaacacatgctctttattttcagagtattagagtgggatatggtgataagattgttaaatacgacctatcaacagattcaaatcaagtgattaagcgtgatttgactggaccactgggtgtccgcctctttgataaagctgtgatgtacaaatcaagcactttgacagaaccaatttatttcgatttctttgaattaggaggcccttcacgaagagactattggttagcaatcacccgtgaagtattgcagtcgatagaatgtcggagaaccattctataccattttctttgtatgctctctctagaatgggttttcttctgctgaagacaaacgataaatctgaaaaggaaatgagcttttgtgctgtttgctttggtgtaacaaaatctttggaggctgccctagaagagtcaatttgttactctgagagaatagagtcagcacgtgctacagttgatcaagtaaaggtagaaggcgttgatgcaaatcttgccctcatgcaggagttactcttccctttaattcaagcaggcaagattgtttactctctcagccaatgggaagatcctttgaaatcacttctattcttagcttttatgttgtatgctattcaaaggggtctcatcagttacatcgcaccctttgttttcttaacttttgctattatcatgctttggcataagtatattggagacggaaaattgttggaagtgcttgaagtgaaacctcctccaagtaaaaatgccgttgagcagattttgacattgcaggaggctatatccaagttagaaaattttctacagtctgcaaatattactcttctgaagttcagatctgtcttgtttgcctgtgttcctaaggccactgaagtagttgcagctgtacttattgtcgcagctgcatttcttgtcttcctaccttccaggcctctgatacagatgttagtcctggaaatgtacacaagggagatgcccctaaggaaacagaacactgaaaaattccgcaggcgaattagagagtggtgggctcgcattccagctgcacctgtgcagatgatcagacctaatgaaagcaagaaaaagagatgatcatgggcttttagggttgatttggtgacaaggggatcccgagaggattggaggggattaaggggaaagtaaattaatttccccctcaatcccctccgatcctcccatgatcccgggtcaccaaatcaacccttaggcttttggcagacctagtgccggaggcacccacaccgagaagggacaaactgaggaattctttccttcacaaatgcggagacactgctttgaacccgtgacctagcacctgccactgcactaggccagaatttaagatctcaaagagagaaaaaatagcccacatattctgttccctagtttgaacctaatcagctaacttaggcttcttcggttcgctctcaatccatgtggattaagtgtgattaggtgtgattaaattccaagcaagtcaaacttcttatttttttccagtcatatccaattcatatgtaatgggaataaccgaacaaggccttatgtagattttgacctactaagaaaaactagccccggtaaccagtgtatagcatcatgtcgctatgagtgtaaaatgatgactgcagaagaattattcatttttcttgcaagccatttcttagaagtttctagagctctgatgtgttctagaagaatttatcagatgtttgaactgatggttggaatgtaaggtggtttcatatggattctttgaacttatttgctctagtaaaattgatgtatccccacagcacattggagaagcagctgaaagtgtgtcgtgtagtccagtttagcactttatcttcaaaatt

SEQ ID NO: 6667 - DNA, 3117 bp, Zea Mays
gtttcgtcgacaagccagcagcccagcacgcaaagggcactgtgccgttacggcgcggcggagccggaaactcccgagtcgcgtgacagtaaacgaaggcacgaacgcgactcttccatccaactgtcgaagcaaccgaatcggggacaaccgagggcgagggcggccggcatggggatcgtggaggcgtggatgcgggagaagcccatccgcacattcctagcccgcctcgcccagcgccgggcggcggctgccgccgccttcctcgcttccccctctgccaccacggtcatcgatggcgagggcggcagcgacgggagcatcccgcagctttcctccgttgccaactccgtcgtgtcccgctgctcaaggattcttgctctttcaattgagaacttacagcgaagctttgagactgattttccacacagttgtaatgaggctaatacatatgcaagagaccttttagagtattgctgccataaagctcttcatgaagttacaacacgtccagattatttggccgataagaatcttcgccgcttgatgtttgatatgatgcttgcatgggaaactccaggtgctcaggatgtgtcagtagataatggttctattgtgcgtgattcccttgagattgaagatgaggatgaggggtcaattttttatgcaaattccacaagattggctgctcaagttgatgacaagaagacagtcgggttaagtgcttttgcacgaatagcaccttcatgcccaataatagctgacctggttactgtacgcaatctgtttgacgcacttacaagttcatctggaggccgattgcattttcttgtttatgacaagtatctcaagagtttagacagggaattgaggtctgtgaaaggtatcatgcaatcatcacttgcctcaagttttcatcttgatgctggagaatgcatattagctattgatggagacaagcccattcaaccggtactgcaacatattggaatatcagcatggccagagtattagagtgggatatggtgataagattgttaaatacgacctatcaacagattcaaatcaagtgattaagcgtgatttgactggaccactgggtgtccgcctctttgataaagctgtgatgtacaaatcaagcactttgacagaaccaatttatttcgatttctttgaattaggaggcccttcacgaagagactattggttagcaatcacccgtgaagtattgcaggtgaacagatttattaggaagttcaatcttggagatgttcagaaagcagaagcactctcaaaagctatcctaggcattttgagatactctgctgtcaaagaagcttttcatattgctccttctcactttaagacaacacttacttttagcttagcagaaaagcttccgaaaggagatatggtcttagaagcactgtataacaattatttccaactcttggactcttcattgagacatttggcaattgattctgcagtcgatagaatgtcggagaaccattctataccattttctttgtatgctctctctagaatgggttttcttctgctgaagacaaacgataaatctgaaaaggaaatgagcttttgtgctgtttgctttggtgtaacaaaatctttggaggctgccctagaagagtcaatttgttactctgagagaatagagtcagcacgtgctacagttgatcaagtaaaggtagaaggcgttgatgcaaatcttgccctcatgcaggagttactcttccctttaattcaagcaggcaagattgtttactctctcagccaatgggaagatcctttgaaatcacttctattcttagcttttatgttgtatgctattcaaaggggtctcatcagttacatcgcaccctttgttttcttaacttttgctattatcatgctttggcataagtatattggagacggaaaattgttggaagtgcttgaagtgaaacctcctccaagtaaaaatgccgttgagcagattttgacattgcaggaggctatatccaagttagaaaattttctacagtctgcaaatattactcttctgaagttcagatctgtcttgtttgcctgtgttcctaaggccactgaagtagttgcagctgtacttattgtcgcagctgcatttcttgtcttcctaccttccaggcctctgatacagatgttagtcctggaaatgtacacaagggagatgcccctaaggaaacagaacactgaaaaattccgcaggcgaattagagagtggtgggctcgcattccagctgcacctgtgcagatgatcagacctaatgaaagcaagaaaaagagatgatcatgggcttttagggttgatttggtgacaaggggatcccgagaggattggaggggattaaggggaaagtaaattaatttccccctcaatcccctccgatcctcccatgatcccgggtcaccaaatcaacccttaggcttttggcagacctagtgccggaggcacccacaccgagaagggacaaactgaggaattctttccttcacaaatgcggagacactgctttgaacccgtgacctagcacctgccactgcactaggccagaatttaagatctcaaagagagaaaaaatagcccacatattctgttccctagtttgaacctaatcagctaacttaggcttcttcggttcgctctcaatccatgtggattaagtgtgattaggtgtgattaaattccaagcaagtcaaacttcttatttttttccagtcatatccaattcatatgtaatgggaataaccgaacaaggccttatgtagattttgacctactaagaaaaactagccccggtaaccagtgtatagcatcatgtcgctatgagtgtaaaatgatgactgcagaagaattattcatttttcttgcaagccatttcttagaagtttctagagctctgatgtgttctagaagaatttatcagatgtttgaactgatggttggaatgtaaggtggtttcatatggattctttgaacttatttgctctagtaaaattgatgtatccccacagcacattggagaagcagctgaaagtgtgtcgtgtagtccagtttagcactttatcttcaaaatt

SEQ ID NO: 6668 - DNA, 3124 bp, Zea Mays
gtttcgtcgacaagccagcagcccagcacgcaaagggcactgtgccgttacggcgcggcggagccggaaactcccgagtcgcgtgacagtaaacgaaggcacgaacgcgactcttccatccaactgtcgaagcaaccgaatcggggacaaccgagggcgagggcggccggcatggggatcgtggaggcgtggatgcgggagaagcccatccgcacattcctagcccgcctcgcccagcgccgggcggcggctgccgccgccttcctcgcttccccctctgccaccacggtcatcgatggcgagggcggcagcgacgggagcatcccgcagctttcctccgttgccaactccgtcgtgtcccgctgctcaagcgaagctttgagactgattttccacacagttgtaatgaggctaatacatatgcaagagaccttttagagtattgctgccataaagctcttcatgaagttacaacacgtccagattatttggccgataagaatcttcgccgcttgatgtttgatatgatgcttgcatgggaaactccaggtgctcaggatgtgtcagtagataatggttctattgtgcgtgattcccttgagattgaagatgaggatgaggggtcaattttttatgcaaattccacaagattggctgctcaagttgatgacaagaagacagtcgggttaagtgcttttgcacgaatagcaccttcatgcccaataatagctgacctggttactgtacgcaatctgtttgacgcacttacaagttcatctggaggccgattgcattttcttgtttatgacaagtatctcaagagtttagacagggaattgaggtctgtgaaaggtatcatgcaatcatcacttgcctcaagttttcatcttgatgctggagaatgcatattagctattgatggagacaagcccattcaaccggtactgcaacatattggaatatcagcatggccaggaagattggtcctcacaacacatgctctttattttcagagtattagagtgggatatggtgataagattgttaaatacgacctatcaacagattcaaatcaagtgattaagcgtgatttgactggaccactgggtgtccgcctctttgataaagctgtgatgtacaaatcaagcactttgacagaaccaatttatttcgatttctttgaattaggaggcccttcacgaagagactattggttagcaatcacccgtgaagtattgcaggtgaacagatttattaggaagttcaatcttggagatgttcagaaagcagaagcactctcaaaagctatcctaggcattttgagatactctgctgtcaaagaagcttttcatattgctccttctcactttaagacaacacttacttttagcttagcagaaaagcttccgaaaggagatatggtcttagaagcactgtataacaattatttccaactcttggactcttcattgagacatttggcaattgattctgcagtcgatagaatgtcggagaaccattctataccattttctttgtatgctctctctagaatgggttttcttctgctgaagacaaacgataaatctgaaaaggaaatgagcttttgtgctgtttgctttggtgtaacaaaatctttggaggctgccctagaagagtcaatttgttactctgagagaatagagtcagcacgtgctacagttgatcaagtaaaggtagaaggcgttgatgcaaatcttgccctcatgcaggagttactcttccctttaattcaagcaggcaagattgtttactctctcagccaatgggaagatcctttgaaatcacttctattcttagcttttatgttgtatgctattcaaaggggtctcatcagttacatcgcaccctttgttttcttaacttttgctattatcatgctttggcataagtatattggagacggaaaattgttggaagtgcttgaagtgaaacctcctccaagtaaaaatgccgttgagcagattttgacattgcaggaggctatatccaagttagaaaattttctacagtctgcaaatattactcttctgaagttcagatctgtcttgtttgcctgtgttcctaaggccactgaagtagttgcagctgtacttattgtcgcagctgcatttcttgtcttcctaccttccaggcctctgatacagatgttagtcctggaaatgtacacaagggagatgcccctaaggaaacagaacactgaaaaattccgcaggcgaattagagagtggtgggctcgcattccagctgcacctgtgcagatgatcagacctaatgaaagcaagaaaaagagatgatcatgggcttttagggttgatttggtgacaaggggatcccgagaggattggaggggattaaggggaaagtaaattaatttccccctcaatcccctccgatcctcccatgatcccgggtcaccaaatcaacccttaggcttttggcagacctagtgccggaggcacccacaccgagaagggacaaactgaggaattctttccttcacaaatgcggagacactgctttgaacccgtgacctagcacctgccactgcactaggccagaatttaagatctcaaagagagaaaaaatagcccacatattctgttccctagtttgaacctaatcagctaacttaggcttcttcggttcgctctcaatccatgtggattaagtgtgattaggtgtgattaaattccaagcaagtcaaacttcttatttttttccagtcatatccaattcatatgtaatgggaataaccgaacaaggccttatgtagattttgacctactaagaaaaactagccccggtaaccagtgtatagcatcatgtcgctatgagtgtaaaatgatgactgcagaagaattattcatttttcttgcaagccatttcttagaagtttctagagctctgatgtgttctagaagaatttatcagatgtttgaactgatggttggaatgtaaggtggtttcatatggattctttgaacttatttgctctagtaaaattgatgtatccccacagcacattggagaagcagctgaaagtgtgtcgtgtagtccagtttagcactttatcttcaaaatt

SEQ ID NO: 6669 - DNA, 2245 bp, Zea Mays
acacctggaaagtggtgttccctcgtctgaagccgaggaaaaaatctcgcattcgcaaagcagacaaaacagcgtccccctccctctactaaaaaaaaaatggaggcatgagctccgcctcctcctcgtctctcgccgatctccccaaaccctagccccgacctgaccgccggcgggcccgccggccggagaaggagtcgctcccacccacccaacttctgcggcggaaggggagcgggcggcggacgagatgccgtcgcacggggatctggaccggcagatcgcgcagctgcgcgactgcaagtacctgcccgaggcggaggtcaaggcgctctgcgagcaggccaaggccatccttatggaggagtggaacgtgcagcccgtgcgctgtcctgtcaccgtctgtggcgacatccacggccagttctatgacctcatcgagctcttccgcatcggcggcgacgctcccgacaccaactacctcttcatgggcgactacgtcgatcgtggctactattcagtcgaaacagtttctctgttagtggctttgaaagtccgttacagagatagaattacaatacttagaggaaatcatgagagcagacaaatcactcaagtatatggcttctatgatgaatgcttaagaaaatatggaaatgcaaatgtctggaagtattttacagacttgtttgattttttgcctctcacagctcttatagaaaatcaggtcttctgtcttcatggtggcctctctccgtcattggacacgttggataatattcgttctcttgatcgcgtacaggaggtcttcatcagagcaatgagtgggaattgcagaatcctgccaaattagttctcagatccaagacatgttcaatcctattcagaagcttgataacattgagataattgcaagacagccatacaaaaatgacagcgttgtcagcgtagaaagatacccagtgcttctagtgtttttctctcattcctcttttcttttggggtgggggatggggagcttgaggctgacatttcaccattagtgaagtgaccaaccagtagtcatttgcaatgaggtttgcttgttaattaataattataataatctgccagcacatgcatatttgtttgtgaaacatttgcatctgatagtaaactattataagaaggtacattgaattttttgttactacggttacaaggtttatgagagacctatttctttctgaggtcatcatactttgctatgtggattgttatgcatgtaactgtaaatacttgggctgatagtgctccttgccttgaattttgaggtgatgcttatgaacgctaggaaatggtgcccaatgtgctgggtcttgaattgatagcttgctaattcttgtgctgtattaattgaatgcattatacttctaatctttttaatcctcaactcgtatgcctaaaaaatgtgtgcaggttcctcatgaaggacccatgtgtgatcttttgtggtctgacccagatgaccgatgtggatggggaatttcaccaagaggagcaggttacacatttgggcaagacattgcgcagcagttcaaccatacaaatggtctttctctcatttcaagggcccatcaacttgtaatggaaggatttaattggtgccaggataagaatgtagtcacagtcttcagtgcgcctaactattgttaccgctgtggtaacatggctgctattcttgaaatcggggaaaacatggaccagaacttccttcaattcgacccggcacctcggcaaattgagccagacacaactcggaaaaccccagactactttttgtaattgtggtggtgacattaacttactggtgttgatgctcctcttttccgcagcatcagggtctgtagatcatctgtccttagatatgggttccatgagcccgacctgtacgtctcccaattcttttgtttggagattttgttgccgcttaacgatctttatacaatatgttaaaaagttaaatgccattggatttttcttctttctgttgtacgtcgactttgtattatttgtagacggtgaatggaagtcgcagcaggaaagccagcccctgctatggttttgttttgatgtgcatcatatcatccgcgtggctgagtaaattatgtccagacgggtaggttttggtttgggtttgcagcatcccgatctgatgtgccctagtgctgtttaatgttggttggagccttctaccttgtggtcg

SEQ ID NO: 6670 - DNA, 524 bp, Zea Mays
ggaaatttcgctatgggatgttaaacaaacatgatactgtattggagagatctcaaggttgctgtcatctatgcggtcctgttttgttttctcatggtgtcctgctatgccgccctttacttgaaatggttcagactttcagccatgtttgtaaccttcgggatcctccttccagtgagtctcaaaatctctaggcatagaaggctgaagaggaaaagagaaaggagactgttgttgccactgtccatgtgaatacattttttttgatacaccctgtaacattctagtggagttggccagctacagaagatagggaaatcctcggcagacgaactcaactttacggccccagcctacgctttggaaaatgttgtatgcatcacctgttgtgcttctgtcctccacatgtgtacacacacacatacgtgccgaacactttgcgttgttttgccccccgcccctgtgtttgcatcaaacttcgtccgttgaaagttgatgcatgttgctggagtttctgacggcaa

SEQ ID NO: 6671 - DNA, 2110 bp, Zea Mays
acggaatggacgggaaccccgaaccccaaattgatccgatccactcaccttttttccccttctaatttcactttcacctcctccgccaccagttcggggaaaaggaatttttggagaaaaatcccattggcccagcccagaatactcagccgcgcgccgcgaccttcgctcccgtctccggtctccgcctgccccccgtccccaacctatcgggagcgctcccgattcgcgggagcgagagaaatagagtgccccccgctctccgctctccgccgcggatcagcgccgtcgccgatcggaggccctcgcttccgccggcgggcggcgcgagccgggagatggacggcggcgcgggtgccggtcggaggagcgtcccctcctcctccggattcaggaggagggtcccgcccgccgagaacgggcacggccatgacgccccgccgccctccaggcggtcctccgcctccctctcccgcggccactccacggcggcggagaaaggaaaagcgatcgccgctgctgttgagggcgttgaaaagcattggggaacagctgtatctggtcctaacaattttattgagactcttcgagaacggatgtttaggccatcactgtctaccattatctctgagaattcaaaagtggtcactgttgtaccatcagacacggtgttgacagcatcaaagaagatgctggaactaaaaatgagttcagcagttgtagcaatcgaaagcaaacctgggggaattctgacatctagagatatcctgatgcgtgttatcgcccaaaatcttcctcctgagtccactacagtcgagaaggtcatgactcagtgtcctgaatgtgcctcggtagacaccccaattcttgatgctcttcacacaatgcatgatggaaaatttttacatttgcctgttctggacagggatggaaatgttgtgactgttgttgatgttcttcacataacgcatgctgcaattgctacggttggaaacagcggggcagctggatctgagtcaacgtctgccatgatgcagaggttctgggattcagcaatgtccattggacctcttgatgatgatgatgactccaccagaagcgaaggatcgacaaaggtggcatctgaggcagcagatataggaagatcagccttgtttccagcttctgctttatcaaacacttttgggttcaagattcaggacaagcaagggagaatgcacagatttaactgtgaaacgagcagcttgacagacctgataactagcattcttcagagggtcggcgatgacattgacagaaaacacctgccacaaattttgtatgaagatgaggaccatgataaggtcatattgtcgtcggacagtgaccttatagctgccgtagaccacgcaagacaaatcggttggaagagcctaaggctgcacttggactacgcccgccggaagagaggggacggttcctcagacttcgagtacgctggcaaggatgcatgggcttctgcatacagtgctgtcgcggcaggggcggctctggttgctgggctcggcgtgatggcttacttgaaacggtcagggtaatagcttgaggcaagcacggcagggactagggagcacggttttgatcgtctttgtgatacaagtgccacttcatcggaattggcagaatggctgtgtaagtaattcttgtgagagaggaaaaaaatgaagattttaataatactactgtcaaggcagtgaatggtcccttcatacaagtacacggaactgatcgagttttttttggtgggttgagacttgagagtcaccatggctgtcagcttcgtcacgattgtatttattatcataaaaacacatgattcattgtacaagaagagtcttgatagaccttcttcatgcagcgtctggctgattagaatttatccaaggcgatttttgtccatagttactagctcttgctgcaacctgcaatgtactaagctccttgttccagcagacaccagattttttgtatgatactgtgactaaaattttgctctccacagaccatgcgtgtatgaagacatgattttttttgtcatagtttttttatatgatgatccttagtgcaacat

SEQ ID NO: 6672 - DNA, 2702 bp, Zea Mays
aaagcccgtcagccggtgtgtagacccaatacggcccggccgatttgtcgctgacgtcacctcatcttcaccaccggagtccggagtaatgcgcaggccacagggtcgggttcgctttttcttggcttcttctctcgtccatccacagggggaaggagcaggagggagggagccatggttgtcagcacattcactggccccgggattgggatcgggttcggtgtcggctgcgggttcggcgtcgggtgggggttcggaggaatgcctcttaacacgttcggcttgggtgggggctgcggagttggtcttggactaggatggggctttggaaatgcttttggttgtcagtatcgatcttcaagagtccagttccagggcattgaatttcagaagaaggctggaggagatgaatcacaaaaagttgtttcacccgagcttgctgaaaagtctcatccttatggctagtattcctgctaccacaaaatccacagagactgagttctgtgtgctgagttgcagtttaattacatacatgacaagcttaaaaacaaaacaaaataactgctgctataaagttacagtttagggaaggtcttttaagttgaaccaccagaaggttaagaaaaagtacaaaacaaaggcggacgttgtttctgatctgttggtgggtgctgtgactgcataccgggaatcagaacaactggtaacttcgtcatagcatgaagcatccatggacctggcatgatggtgaatgacttgcacaactgtatctcttttcttcctgaaaacacacaactgtgtctttcagtgtttttttccagtgcaaagcctctcatacatcaagcaaatggatggtcaaaggaagcagaatcgttctttgatgtagtagagcttgctggctctgcctccccagtcctgaaccagtatgactgctggaatgaagctgcgcttgtggggacatcctccatgacccattcaaagcccttggggtagtagatccctgtcattggatgtgggacccacaatgatgtttctggggacttcacttcagtaggctccagtcgcttcacaaggttcaacatggattactagttaccggagcagagctgccgatttcgcaagcgcatggcggcccatcgaatgcaggctggggcgtttgctaagatgccactggtggttatccttggtagcaaccagctgatagcagttccttcttgtttggtacctccctcatcctcaacccaggtatttatacactagctgtagccttgcagatgcaatgccacaacaccaaccaccttccgcaataaaagagacaccgtacatccattggattatagagaactagacacgcttaacatacagcaaagctaaagaggaggaggggtttgttaaaggattatagacaattttgttcactgtcgctagcttccaatggagcaactgaaatgacggttttgagcctctgattgaacgcctctggacaaaacaccaccagaactgatgctcctagaatctgaagtcagttttgccaaggagtgcagtcttggactgtactgttttgctattttgtgtaaccatgcgacagcaccaccgaggctgtagctagcattgttagcaaagtggaaccttgacattatgaacaaaagatgagagccggacacaattagaagaaaactctacagttacagaaattccacgatgaagggttgatagctgcaaattattttgttataataaagtcctcaatggcttgtaaaattagcaagctgatgtagaggctaaaaacacttatggagtatgataaaagcttagagtcctcagagcacaggtcagagacagcgttttgggtgacagtcgacattggctcttaaagactcgctagcgcggttatttttcttgttctctcatcactgggtaagatctgtactcagctgtcgaagtcaattagccattgagcacgcccattaacaggtgaactcagagtggaaatccatctggatgtgattatcatgcatatttcaagatatgtatcctcaaggtgaagactttttttttaccttactggatggatgtctccatagtttctgtgcatggtacttgttatctgatccatcttccccaaacattctacctcatctgatcagcgccatcgacgctctgtttcttgtgcacaataatggagagcatgggatctgattctccgcttccataacgcacagctacggcgcaaaactaaagacaaagcatttcaggccttccgtatttgacagactgacagtacagtcacgagaagcacgacgctgcctgcacaggagttgtactgggacatgtctgggagtggaataaagctgctgattttgttctcatcggcttcgatccgtctgttggctccattgcttttggtagaagggtaggaagtcttccagggctggatggtatgctgctatacaaggaatcttgatcacttcacaggttattggcacttgttttcgcgtcccctattccaaaagaaattatgctggcatgttttgcttgttactccctgtgactggtccgaacagtttccaagacaattatgtactgattttgtctgggcattggaagtctggaacagaatgtggcttcctaaacaaggtaatcgattgcactataaaaagttgaataaattgtaaagggttgggatacatttttttgagatt

SEQ ID NO: 6673 - DNA, 3302 bp, Zea Mays
ggcagacaggcagagagctctgcctccccaggatacttcgcccctcgttccaccgcgagcccttccgcgttccgcctctgttccgccgctcgggacccgggagacgagaagtagtagccccatccccaactggtcctaacccacggtacccaatccttgactcggttctctccatgagcttactgccccatctccatttcttcaatcattactcgcctttccgttcaagggcgttgcttgcctggataaccacggcatcgttctacccgccgggcccgagctaagtcatacgtgcaaacaaagagcagcaaaagaagaacaagtggggcgacagggacagggaggaggggaaggcagaggaaatggaagcctctttcttgaggaaagatggcggtgatcaagccagtgcggcgacaatgtccggcgagcacaggaacaagggccttgactgggatttgaacgactggaggtgggacgccaacctgttcctggccacgccggcggccatcgtgccgtccgagtgcagcagcaggaagctgagtcgagctcagggggagatcgacttcggcgtcgtcgttgacaagaggcggaggctctcgccagaggaggacggcagcgccggttgcagcaattctggggtagcagatggagacaacaatcatgtggtgcctgctcagagagggcggagcagcgaggaggagacacccaggaaaggtgccagttcgagcaccactccgtcctgccaggttgacggctgccatgccgatctcagcggtgccagggactaccataagaggcacaaggtgtgtgaagcacataccaggacgactgtggtctgcatcaagaatgtagagcatcggttctgtcagcagtgtagcaggtttcagcttcttcaagaatttgatgaagggaagaagagctgccgctcgcgtctagcacaacataatggaaggagaaggaaagttcaaccacaaactgttgtgaatgggaattccatgagtgaaaatcaatctctaagtaacacctcaatccttctgttaaaacaactttccaggctagagtctggtagctcctctgagccaatcaatcatcctaattctttggttaaccttttgaagaaccttgctgctattgctagcacacagtcatatcaagatattctaaagaatgcaaattcaaattcaatattgtcaaatgctggtaataatgctgcaaatggatctactgtgcatgagcaaactatacggtcaattccaatcagaggagaatcattagcagaagagcctccagtgaaaaggcgggtacatgattttgatttgaatgatgcttgctttgaagaagttgagagccgaacagataaaattgtgttcaagctgtttggaaaagagccaaaagattttcctgtagatctacgggaacagatccaacactggttatcgcattatccaactgatatggaaagctatattaggcctggttgtgttattctaactatttacctccgcctccctaattggatgtgggatgagcttgatgatgatccagcttcgtggatagaaaagcttattagcatatccaatgatggactttggagaaaaggatggttgtatgctagggtagtcttatgtttgcatctccctggcaactggtaattggcgacaagcatcagagactgtgtgtaactcctattgcagttgcttgttcttcgtctgtaaaattctctgtgaaaggtttcaatatagttcagccaactacaaaattactttgtgtgtttggtgacaaatatttaattcaagaagagacacaaatgctacttgaagattcaactgtgcagcaaggccctcaatgcctgaccttctcatgttccttttcttgtacaagtggaagaggattcatagaggttgaagattatgatcaaagcagcctttgtgttccctttgttgtcgctgacaaagatgtatgttctgaaattcggatgttggagcatggattgaatttaatttcatttgatgaaacctcggaaagaatagatgatctgatggcttatcgcaatcggtcgttacattttttgcatgaaatcggatggctccttcaaaggagccatgtgcgagctacatctgagcagccacagtattgtccagaccgtttccctgttgaaagatttagatggctgctatcctttgcagttgatcaggaatggtgtgctgttttaaggaagcttctgaacaccatgttccagggtgatattgacctagatgttccgtcaccaattgaattcgccttaggagaaaatgtgttgcttactgctgttaaaaaacgctcaaagcctttagttgagtttctattaagatacacagcaacagattacgccccagtgggcagtggagccggcgctccagttcagttcttgttcactcctgcgatgactggactgtcaaatattacacctctccatattgcagcaacaatcagtgatgctactggtgttttggatgctttaactgatgatcctcggcagttgggaatcaaagcgtggaagaacgctcgtgacgccactggcttcactcctgaggaatatgctcgaaagagaggccacatatcctatatccaattggtacaggacaaaattgacagaagggtgagcagagctcatgtctcggttaccatccccagcacaattgatactgccggaaagcatgctagccgattgaagcctgccgaccaaatcacatttggtgtggagaaaaaacagcgagggatgaaccaaacattgagctgcagacaatgtgtccagcaggtccagcagcttgcattccactcccggacaaataggttcttgtctaataggccggcgatgctttccttggtcgccattgctgccgtttgtgtctgcgtaggattgatcatgaagagcctgccacaagttggtggtatgaggcctttcctctgggacaagatacgttggggccccaattgatagactgcacaagacccaacccaattgtatcagtgtatgatgaagatgtttgcgccgagcgaagctagattcttgtaatgtacatgtttcttagactaaatgcctaaattgaaatttctgttccatagtaaaacctgtgaaatgctctaatttgcctagcttgtagctccattgcatttgcatcctgactgaggtaaagcttttacttgtttttattgagaggaaaaaaaactcagtcttagcttgaaaaaatactcgaagtctcaccctttatcactggcgggccgttactatctactctgcaacgatcacaaggtatagtgag

SEQ ID NO: 6674 - DNA, 1895 bp, Zea Mays
gaacagctgcgactctccacggcaccgaagaggtcacctcccctcatggcctcattacagcgcctcctcccacccacccaagagctcaccttccccgtcctctcgcaccttatcttactcgtttaaatacctgggtttcttctcggggggagagagctagagaaagcgtagagctagtcagagagagagagagagagagagagagagagagagagagagagaggcggggggcgggaggatggctttgctgcagagccagagcctgccaggcattggctgctgcagcagcagcatcgtcttggcacgagcgagggtgcagcagtgtctggcagcggcgtcgcactcacaggcgcccctcctgcaggccaatggcggcagggcgggcctcccctcctcctcctcgatccttaaggctggcaatgcgatcagcttcagccggcggagaaggagagacctgcgcgtcgtcgcggaggcggccacggcggggacggccaaggtcacgccggcctcgtctggcggcgtcagcctcagcgacgtgctctggccttctgccggtgagtctgaagaaacgctggtgcttctgccggtgagctggtttttttaggggccatggctggtgcttctgattccttttcctcttttggtcatttccgaggtatcctagtatatttcatctcttcgatccgatctgctcactgcttgcttttattcacgggctggctcgcccttgtctgaacctctccggtctctgctgtcgccattgccagacgatgacaactattccttgcatatatgtattccagaaaacaaagtagttgttgcacttgcatgcatgctggcaaaccagcgctgagtttttttggttttaacaaaaagtttatttatttacaaagagaaaggccacccctttgatctgttatcatgtgtaatgttgataccatgcaggagcattcctggccatggcggtactggggaaaatggaccagatggtggcgttcaagggagtatccttgacgattgcgccccttggagcagtctgctgcgtgcttttcagcgctccagactcgcctgcggccaagaaatacaatatgttcgtcgcgcagattgcttgcgcggcctttggcgtattagccctctcgttgtttgggcctggctggttagcgagaggcgccgctctttcagcctgcatagcattcatgaccatcacgggtacctcgcatcctccagctgcgagcttgcccctcttgtttatcgatggccccaagtttcacagtttgcagctttggtacgcgcttttccctggagctgcaggctgcatcgtcctttgcttgattcaagaggtggtggtttacctgaagaagaacttcaagttttgactcaagcagcttgacgctatggatttttgtggaagtggtccgattaattattcaatcatgtaacataaattacattgcctgcatttgcgataaagttgtgaaaatgaaggtttactgtctcctgtcttggttaaagaagaaagaagactttccttgataccttgtgctcatcaaaatgcagttgatacaaatgtgtacataccattctcccatcgaataaagtctgacaatttattcctttttccttctggtagcatcaatcctgtaatgtaattgtgcaaagtgaaataaccaggaatactttgtgataacctctggtttatctgaagggagataagatcatttgttctagaacagagttgtagttgcatggacagaacccatagtaacagattgctgacccagactcagtacaactccgactaacaactgaaaaaaggttgagttcagaagcgtttagtaatggattgtaagtgcaagggcatgacacacgcaaagagtttgaaaaacttacagata

SEQ ID NO: 6675 - DNA, 1869 bp, Zea Mays
cttcacaacggacgagaggcgtcagacaaaaaatagaatctggttgctcatctcatctcacgactcataaaaaaatagcgtcttttatcatatccgttgctcgcaaaacgcccccacacgccgccggcgaatcggcgactccccttgcgacgggaggaagcagccacgccgccgtctcggcgactccctgacgactgcctctccggtctcgaacgcgatctggcccatggtggctctggcgccgttggttcgtgagatctagggttgtcgagcgccgcggagtgggagcggatggggcgccggaagatgtccgcagcggcgccgccgtcccggagctggtccaacgttggcgggagcgtaatccccgaactacttgcaaaacacaaaatggacttggaaaatttgacgctgacaaaacatccaatcagaacattacattttttcctgttagccatgttacaatacttgaaaagattagcaacatatatcctgagaaagagtggtttgttctttctcttaattgttttggtggtagcttccggaatcttactctctatttcagatggcctgcataagaagcatgtgcaggagttccttaattatgctaaattcgtgttgtggtggatttcattaggtgtggcttcatcaattggactagatacagctggaagcagttctttggggcattgggactgcacttggcgagcttcccccttattttatatcacgagcagctcgcttatcaggaagcaagtcaaaagctgttaaggagcttgatgccgctacttccaaagaagatgggacagtagcatccactcttgatcgctccaagcgttggcttctttctcactctcaacatctcaacttcttctctatcttgatacttgcttcggttccgaacccactctttgatctcgctggaattatgtgtggccaatttggtgtacctttctgggagttcttttttgcaactttgattgggaaggccatcatcaagactcatattcagacgctgtttatcgtgtccttatgcaacaaccagctcctgtatcttatggaaaaggagctaatctggatattcggtcacattcctgggttttctgctaccctaccatctgtgattgccaaactccatgctgccaaggacaagtatctatcaccaccgacaccagtctcggcgtcctcacagatggaggagaaaagttggaatctctcttttacattggtttggaactctatagtgtggcttgtgcttctgaacttctccgttaagataatcacgtcgacggcacaggattatctcaaaaagcagcaggatatggagatggaacgcgtttctgattctccgcccccggaacaaaactaactagcggcgcaagtttatttcagctgctagctgcacagattctcctctgcatttttagcaactggttaagcgtctgcagacgattccaagttccaacgattatcaattagtattagtagctattcatctacacagtcaacgaaaacatgggcctggcaactggccgggtgatggctgtgacctcctatcatatcattgagcctgtagtgggcagttcctggaggagaattctactgttcttttttgtttttccggacatctacacggatagacagtagggattgtttgtgtgaagcacggttggcttatgccgagatttagcactggtagatgtttctatttgttttggaaatgctatagaaacatgtgagcattcaacaatgatacgctctgttaagtttgttgtgtattttggtttgcaactggtgcccgaaagagcaaacagtggctccatcaatttcctttggcaagtaaaaccccctatagaagacattgcttgtcct

SEQ ID NO: 6676 - DNA, 1803 bp, Zea Mays
cccggcggccgacggtgctttggagggaacgcgactgggccgcccgatccggtgccctagcccccccgcgcccactataaaatccgccccctttctgggcactcgctcatttcatttaccacaccaccttcctctcctcgctctccctattctggacggccgactcgcttctgtgagctcccctcccacctgcagctaccggccttagatccagccatgagggagattctccacatccagggcggccagtgcggtaaccagatcggttccaagttctgggaggtcgtctgcgacgagcatggtatcgatcccaccggacgctatgtcggcacctccgacctccagctcgagcgcgtcaatgtctactacaacgaggcctcatgcggccgcttcgtgccgcgcgctgtgctcatggacctcgagcctggcaccatggacagcgtccgcaccggaccgtacggccagatcttccgccccgacaactttgtcttcggacagtctggcgcggggaacaactgggccaagggccactacacagagggcgcagagctcattgactccgtgcttgacgttgtcagaaaggaggctgagaactgcgactgcctccaaggcttccaagtctgccattcccttggaggaggcactggatctggaatgggcacgcttctcatttcaaagatcagagaggagtaccctgatcggatgatgctgacattttctgtctttccctcgcccaaggtgtcagacactgttgttgagccatacaatgcaaccctgtctgtccatcagttggttgagaacgctgatgaatgcatggttcttgacaacgaagcactttatgacatttgcttccgaactctgaagctgacgacccctagctttggagacttgaaccacttgatcagtgcaacgatgagtggtgtcacttgctgcctccgcttcccaggacagcttaactctgacctgcgcaagcttgcagtcaacctgatcccgttccctcggctccacttcttcatggttggctttgcgccactcacctcgcgtggctcgcagcagtaccgtgcgctcactgtccctgagctaacccagcagatgtgggatgccaagaacatgatgtgtgctgctgacccacgccatggtcgttatctcacagcctctgccatgttccgtggcaagatgagcactaaggaggttgatgagcaaatgattaatgtccagaacaagaactcgtcctattttgtggagtggatccccaacaacgtcaagtccagtgtttgtgatatccctccgcgtggcctctccatggcctccaccttcattggcaactccacgtccatccaggagatgaggaaggctttcttgcattggtacactggtgagggcatggatgagatggagttcaccgaagctgagagcaacatgaacgatctggtgtccgagtaccagcagtaccaggatgccactgctgatgaggaggcggaatacgaggacgaggaggccatccaagacgagtaagggtggtttgggccctgccacatttgtacccttgtttcctttcattccggggcttgcctatggtttgcttgttgtattcgctcaagttatgcggtatgtagtagtactttcgtgcgtagcatgctgtatgctaccacaaagactttgttcacctgcactgcttgatatgccagccatggcatatgtgacgagtatttcattattttatctgcttgcttgctcctgtgatggttccttcctatgacattgaatgcgaatttgcccattgctcacgttggatctgcatgg

SEQ ID NO: 6677 - DNA, 1507 bp, Zea Mays
cctttacccccacagcttgcgtggtctgtggtctcatctcactcacactcactctctctctcggcgacgtctacgccgagtgcccaggcattcttcaggcgcaggtcgctgccgccctacgccaggtgccccggtcttctttcgtcccttcgccggcgacgaccaccgccagtatagcggatggcttcgtcggtgcgggcgccatcggggtcggtgatcgccgtggcatcgtcctcttcctcagcagccttggccggggtgtgcggcacgggctcgccgtgcgccgcgtgcaagttcctgcgtcgcaagtgccagccggactgcgtgttcgcgccctacttcccaccggacaacccgcagaagttcgtgcgcgtgcaccgcgtcttcggcgcgagcaacgtgaccaagctgatgaacgaaatccacccgttgcagcgcgaggacgccatgaactcgctcgcctacgaggccgacatgcgaattcgcgaccccgtctacggctgcgtgggcgtcatctccatcctccagcacaacctacggcagctccagcaggacctcgcccgcgccaagtacgagctctccaagtaccaggcggcagcggcggcagcatccgcgtcgacggcgccgaccgggccgcaggcgatggcagagttcatcggcagcgcgatgccgaacggcgccgcgcacaacttcatcaaccttggacactcggcggcgctcggctccctcggaggctccaccgccatgttcgggcagcaggagcagttcggcagcaacgcgcagatgctgtccaggagctacgacggcggcgagcccatcgcgaggatagggatgaacaacggcggctacgagttcggttactcgagcgcgacgacgatgggcgggtctgcaggcgctgtctctggcggcctcgggacgctcggcatcagcagcccgccgttcttgaagtctggaaccgccggcggcgacgagaagcccagcggcggtcagtaggcggttccatccgtgtgaccgatccttctatccatccatccatccatcagtcttgtcaggttactgacgcgatgaagaaacggggaggaaaaaaatatccatgaaacgcgtgcaaggacttatcctagacgtccgccgttgtcaggagggggctaatttccagacgattttacatggaaaaagtgcgtcgcttgcgtgcgtgcgtgcttgcttttgttgctagattcattgcttgtttgttaattaccacgctatctaccctccccatccacatcatccacgagatcgtcagatattccatgccagcgtccacagagtggcctatgttcttgttattagttgctgtactgcgaagggagggggacaaaatgcatgcttgtccggcccggacctttttttttaccccactcggaagactagcgcccatttgtactccatgtattattgctaggttggctgtaatatatgaagttgaccttttgagaagaggtgcagttgcttatgaagacccccc

SEQ ID NO: 6678 - DNA, 1737 bp, Zea Mays
cccacagcttgcgtggtctgtggtctcatctcactcacactcactctctctctcggcgacgtctacgccgagtgcccaggcattcttcaggcgcaggtcgctgccgccctacgccaggtgccccggtcttctttcgtcccttcgccggcgacgaccaccgccagtatagcggatggcttcgtcggtgcgggcgccatcggggtcggtgatcgccgtggcatcgtcctcttcctcagcagccttggccggggtgtgcggcacgggctcgccgtgcgccgcgtgcaagttcctgcgtcgcaagtgccagccggactgcgtgttcgcgccctacttcccaccggacaacccgcagaagttcgtgcgcgtgcaccgcgtcttcggcgcgagcaacgtgaccaagctgatgaacgaaatccacccgttgcagcgcgaggacgccatgaactcgctcgcctacgaggccgacatgcgaattcgcgaccccgtctacggctgcgtgggcgtcatctccatcctccagcacaacctacggcagctccagcaggacctcgcccgcgccaagtacgagctctccaagtaccaggcggcagcggcggcagcatccgcgtcgacggcgccgaccgggccgcaggcgatggcagagttcatcggcagcgcgatgccgaacggcgccgcgcacaacttcatcaaccttggacactcggcggcgctcggctccctcggaggctccaccgccatgttcgggcagcaggagcagttcggcagcaacgcgcagatgctgtccaggagctacgacggcggcgagcccatcgcgaggatagggatgaacaacggcggctacgagttcggttactcgagcgcgacgacgatgggcgggtctgcaggcgctgtctctggcggcctcgggacgctcggcatcagcagcccgccgttcttgaagtctggaaccgccggcggcgacgagaagcccagcggcggtcagtaggcggttccatccgtgtgaccgatccttctatccatccatccatccatcagtcttgtcaggtttggtttggttttgcatttgcatgctgcctgcacagtgttctagtctgttgtgttttgccttgtgcttccgattaattcgcgagtctggtggactactgttagtcagtttattttctaggtagaggcactaatgaagcatgactaaaataagggtttcattccatttccagggctaaataaataccttttgttgcatgatgctagttggagcgtccttgttcggaacaaaacattgtagtagaactgtttggatccataatatatattatcaatgatgactaggtgcatgcatgcatgcatatatatgtgtgtacttgaacactagagcttttctgagcttctttctgatcgacggaacgcgcagcatctgttttgtcaaactgttttgcttttagatcgggtggtacatgcacacgggcgtgttgaacagatctcttttcggtttttgcgtcgatcgtgtgtgtgcctgtgtggtcactggtgaacctaagcttccgtttcttttcttttcttttctttgacaagtgcgctcctggcctgctaaatctgttgaaacagaagagacgccattggctagcaaatcctggagctgttcttgtttgtatatatactatctcttggcagcacggtcctctaacaattaaccaagtgtattttttgtaaattaaaaaaaaatgtctatacgagggc

SEQ ID NO: 6679 - DNA, 1596 bp, Zea Mays
aaaaaaaaaaaaacctctccctccaaaactcctctcttccccttccgaattacagtttccctcgcatcctcctcctacatctatctcccacctcgcacaatcacagattcctgattcctcaatcctcagtaccccgctgcctgtcctccacgcacctcaccgcaaacatggcgaacgccgccgacgacctggacctcctgctatcactaggcgaggccgtcccggagacacctcccgcctccccccgcaccgccgatgtccccgtgtgcgacggcgctttcacaccaccaaggacggcgccccccggcggcaccgacatgtccgttttccgcgacgccgtcaaggattacctcgaggcggcccccgaaaccacctccccgcttgctaatcgccccaagcgacccaaggccaccgaaatcctcgtcgacaaatactccggcctccgcatcaagcaccttacgctctcgcctcttgagattagcaaccgcttcgctgacatccgatttgtgcgcatcaccgcgttaaagaactctgtggggagcgacaggttctccggctgttgggcaaccgcgggcgtgttactggacaagggcgtgcagcgggtgagtgcgaaggggagcagctacagcatctggaagatgggcgctctggacgagaccgacgtatctctgttcctgtttggggacgcgcacgttcactactccggagctgctgtgggttcagtgttcgctgtgttcaatggcaatgtccgcatggacaatgggggcaaagggttctctatgagtgttgcttctgttggacagatgttgaagatgggggtcgcatcagattttggtctctgcaaaggcaagaggaaagacggggtggcttgcaccatggctataaataagagtaaaggatcatactgcaaatttcattcgtcgaaaacatcacaaaagtatactactggcagagtagagcttaagggcggaacgacccaatccaagaaattctttgcaaccggtgaaagtaatgtcaattgatgggctaaaaagggctttaagcaatgcagatagagtgactaataagaaccagtcccagggtataagatttctttcccatgttacagctaatatggacaatatggtaccaaaagccccaaccaccggctctaggaatcaacagagatcgaaggccggcttaaacaaaagtttgtcatcatctggcgccaaagccttgcccaaggagggattgcgaaaaccacaacaggatgttaaaaggcaaaagatgaacaatcctacagagaatattgttgagcttgatgcggtcagctcagacgatgacgagataaatatagtactgcgacgctgatgcttcatcaataatagcgtgacatgtaattgtactccaaatcggctaaacaattgtacgctcttgttttcatatatcccaagtcatccgaggcagaaaaattaaatcagatatatttgttgacttatggatcaggttggtccgtagtgttctattttctcttgacatgcagtttaacaattagatataaacatatatttttaatatttttatagaagagagaagtcagcccttgatcaaaagtta

SEQ ID NO: 6680 - DNA, 490 bp, Zea Mays
aaaaaacttcactaccccctctgcaggctctcctgcttttctttgtactacatcaacgagaagggggacaaggtctacaccaccaagaaggagtcacctcttggggtgccaacgcagtctgctcacccagctcggttctcaccagatgacaagtactctcgccagcgatacctgttgaagaagagatttggacttctgccaacgcagaatccaggaccgaagtactgaagcttcaagtcaactgtccaacctgcgatgttctttttgtgtcaatgcttgttggttggaatgtactatcttcgttctcgaatatttgtggtccacttgttcaattttgaactaaaccgcgacaaataaaaaagaccactcatttgtccatttggcgtttacttagtgtaaataagttcggctgcacggtcaagctgcgcccggctgcaactgcagcaagtattttactgcttccaagtactgtagcttggtctgggaatgc

SEQ ID NO: 6681 - DNA, 631 bp, Zea Mays
gcagagcaacgctcaagttcgcgaatcgcgagttgtggcgacggtagaggaaaaataagccgtggcctctcttccgtaagccctagcccctagccgccagtgtcgtgcattcgtgctgaggctcaactgctgatccgtcttccaagctctggtatcatccctgagcactgatttaagatgtatctccagtactacatcaacgagaagggggacaaggtctacaccaccaaggagtcacctcttggggtgccaacgcagtctgctcacccagctcggttctcaccagatgacaagtactctcgccagcgatacctgttgaagaagagatttggacttctgccaacgcagaatccaggaccgaagtactgaagcttcaagtcaactgtccaacctgcgatgttctttttgtgtcaatgcttgttggttggaatgtactatcttcgttctcgaatatttgtggtccacttgttcaattttgaactaaaccgcgacaaataaaaaagaccactcatttgtccatttggcgtttacttagtgtaaataagttcggctgcacggtcaagctgcgcccggctgcaactgcagcaagtattttactgcttccaagtactgtagcttggtctgggaatgc

SEQ ID NO: 6682 - DNA, 1283 bp, Zea Mays
ctgcttagttctaacaactggcttttgtatgccaaatgaaggatgaaaatggtaataagatggtcaaccaatatgtccacttgggaaagatcggttctggaagctacggaaaagtggttctgtacagaaacattaaagatgggaagctgtatgcagtaaaggttctgaataagccatacatgatgaaagtacatgttgtacatacaaaaactgccatgacagatgttcttcgagaggtatccataatgaaaatgttgaaccaccccaacattgtaaatctcgttgaagtgattgatgacccaaacatggataaattttacatggttcttgagtatgttgaaggaaaaatggtttgtgataatggtttagaagaagctactgcaagattttttttgcgagacataatatctggtcttttgtatcttcactcccataatgttattcatggtgatatcaagccagacaatctcttggttaccagtaccggcaacgtgaagatcggggatttcagtgttagccaggtttttgaggatgatgatgatatgctttggagatctcctggcactcctgttttcactgccccggagtgctgtcaaggttcagcctaccatggtagagcatctgatacatgggcagttggtgtaactttatattgtatggtctctgggcactatccatttctgggggatacattgcaggaaacttatgataagattgccaatgatcctgtggaattacctggcgacgtgaatccccaacttgccgatttgctcctaaggcttctctgcaaagatccaggagatcgcatcacactgcgtgctgcggctgagcatccttgggtcgctggggatgaggggccagtccctgaattcatctgtagatgtgggtttggccgcaggaagaggaatgatgtccgggaagaagttcaataacaaagcatcctcggatggtctaataggtctagcgtagataattgatgatcggcaaagcgaagccctgacgatgagttcgttgttccgtgttccctgtttctaatacgcgctcgactgaacatatttctttttgctacagaatatatactgcgtaaccctatgccagtaaggcaacgtttgtcacagtttcacgttgtcaaacgcagcttaacgggtgatgtttttttttatgatccgagaggaatggataagtgaattttttttttgaaaaaaggtgtatctttacggatggtctacgggtgaagcttccatttcatataaggagccattggtgaagctgttttactgaac

SEQ ID NO: 6683 - DNA, 5151 bp, Zea Mays
gctgaacaacggagagaaaaagtgaggcggaagacgagggacatacttcaagcgcccgcggcccgcagcctgctcgcccaggtcttcgccggcgacgagcacccaccaggtccgctcagtccatctctccagaaatccccagatgttccacagcaagtcgctccctaggcccaaggacacatcggtggtggtggtcgtccttgagacgacagaagtgtacattgtgatcagcttgtcgacgaggagagacacccaggtcgtatacgtcgatccgaccaccggcgccctgcgctacctggggaagcatggggaggacgtctttgattcggaggcggcggcgctgaaccacatcaccaacggatcaagggttctatccaagagcactacatatgccaaggcagtgctgggatacgcggtgttaggaagccatgctctgctcttggtcgcgacacagttgagcgcgtcggtccccaatctgccgggaggcgggtgcatatacacattggcagagagccagtggataaagatccagctgcagaatcctcagccccaggggactggagaacagaagaacatacgtgagctggccaatctagacattgatggcaagttcttcttttgcgagacaagggatgttaccaggcccttcccgagtcctattacactacgggaaccagatgaggaatttgtttggaacgagtggctgtcaaagccctttaaggacattggtttgccaggacactgtgtcattcttctgcaggggttcgctgagtgccggaactttggaggtgctgggcagcaaggtgggttagtcgcccttattgcacgccgaagtcggttgcatcctggaactcgctatttggcccgtggactgaacgcatgttcaggcacaggcaatgaggtagagtgcgagcaactcgtttgggttccacggaagggcggacagcgcatcccttttagctcgtatatctggcgccgtggaactattccaatatggtggggcgcagaaataaaaaacgcggtgtcagtggaggctgaaatttacgttgccaacgatccttacaacggaagcttacagtactaccaacggttgggtaaaagatatgggaataaatcatctgaagcgaacgtgtccaggcaaaaaagttctggaagggttcccattatttgtgttaacttgctaagatacggcgaaggaaaaacagagtcagttcttgttgatcatttcaaagaatctatacggtacatgaactctactggaaagctgggaagcacgtggattcagttaataaattatgactggcatgccactgtgaagttaaaagggcagcagcagacagttgagggcctatggaggcatcttaaaccacctacaatggtcattggcttcagtgaagggaattactatgatgcaagacagcagcttaatgaatgtaaaggatcagttatctgcaatgacgatgtaaatggtgggttttgcatggaatctattcaaaatggggtgatacgattcaactgtgcagactctcttgatcgaaccaatgctgctagttactttggtgcacttcaagtttttgttgaacagtgtagtcgattgagcatctcgcttgacatagatgcaatgtttgggttgtcaagtagatattctgaatatgatggtagaaacactcgttctttgccccctggatgggaggagcgctttgactctgtaacagggaaatcattttatattgatcataatacacgtactaccacatgggaacatccatgccaggaggctccacagaagccctggaagagatttgatatgacatttgatcagttcaaaggctcaacaatgcttgctccagtgaaccagcttgctgaactttttcttttggcaggcgatatccatgctacgttgtacactggctcaaaagctatgcacagtgatattctgaacatattcaaggaggaaacaggaaagtttagtaaattctcagctgttgagaatgtgaaaattacggtgctaagaaggtaccaaaattttatgaatgatagttcccgtcaaaagcagttagagatgtttcttggtttgaggctatataggcatctcccgtccatccctatgttccctctcaaagtgctatcaaggccatctggatgcatgttaaaaccagttcctagtatcatcccaatggctgatggtggttccagtcttctgagcttcaaaaggaaggatcttatttgggtgtgtcagcaaggtgcagactatgttgaactttttatataccttggggaaccttgtcacgtttgtcaactgcttcttactgtctcccacggtgctgaagattcttcatatccagcaaccgtagatgttagagttggctcaagcatcgactccctcaaactcgtggttgagggtgcttgcattccacaatgctctaatgggacaaatttactgattccagtcactgggagaactgatccagaggacttggctgttacagggaaaagtgcgaggcccaatgttcaagagagctcctatcttcctttgttatatgactttgaagagctagaaggagaattaaactttttgaatcgggttgttgcattatcttttcatccatctgctgtatcaagaacacccattactcttggcgagattgaagtacttggagtttcccttccatgggcagacatgttaaccaatagtgaacgtgctcctgaatttatggagtttatcaataaaaaatcatcaagtgctcactgtaatctaggttccaagtcttttggaaattcttccatgcctgggaatgattctcatggtattgatgagtcttatactaaaagttcatcattagttcaaccgtgtggttcggaaaatttgttggattttctcacaggtgattttgacatgtcggagtcccatataactcaaaatacttttggtgctggagaacaaacaaacttcttagatgatggatttgatgttaatcctttcgcccctgcattggaagtgcctgttcctgttgctaaagtaaacaaggaggttgaagaatgtggcagcacccagctttatattaaattttttgaatccctttctggctataataagggaaagggtcttgactttgagcaaacgatgaagcttgaaataaaacgtctccgtcttggtctttcagccgctgaaagggaccaggcgttgttatcaattggtgtaattcctgccacattagatccaaaccgtttaattgattattcttacctattgaagttatccagcttagctgataatctagcactgctgggccatacagtccttgaggatcgcgctaatgcttcaatagggcttgaaaagggcagtgaacatgctatagacttttggaacatcagtgaaaatgatgaattctgctatggtggggcatgtgaagtccgtgctctgtcttcattacaagctttagcatctagagaaaatcaatcggtattcatggaatgtttccagtgtgaaaagacagtttgcaaagcttgctgtgctgggaaaggggccttccttttgcttaacacctacagggagttgaagatatatggtgggagtcaaagtggtggctactcagcactcacagatagttttgtgtgcaaatcgtgctgcagtgaaattatcaaacgtgcattgtatgtggattatgtccgggttcttcatagtttgcgcagaaaagatcgttcagagaaagcagcactgagtgctgtgaatcaggtctgccaactggagtacaagaaagcatctgatttatctcaaagtattcaatttggtcagagacaattgaagcagatccttgatggtgaagaatcccttgcagaatttccatatgcaaactttttacaaatggttgaaactgccaatgactctgaaccactgctttcattactggcgccttttggtactggagagtatacgtcttactggaaagctccacaaggtatcacttcagtggaattctcaattgttcttggtggtttatcagatattgcaggagtttccataattgtcagttcttgcggttactcagcatctgactgcccaattgtagagatatgggcgagtaataaaatacaccgagaagatcgtacatttataggaaagtgggatgtacaggatataatatcttcatctccacagcttcgtggacctgaaaaatctagtagattgagtgaagaaccaagacacattaaatttcacttcccaaatcctatccgttgtcgtataatttcaataaaaatgacactttcccatagaggttctcattcaaccaagtttagtgaggagtttgatcttctatcattgaatgatagctcatcttatgaatcgaagccaaccaatttacataattcatttatccatgcaaaaagaattgtagtttttggcagtttgttgagaaaggagatggagcctgacacatcaggggggataatgagaatgaaaagttatttagacagatcaccggccttggggagatttaggatcccagttgaagctgagaggctgagagataatgatcttgttcttgagcaatatctcttagctaattcacctggaatagctggattccggcttgattctttcagtgttataagacctcgtgtgacccattcaccttcttcatcagagttggacatgagggagttttcattgacacgaatggaagatagatttataaacccagcaattctgtatatacaggtcacagttgttaaggagtccggcaagttggttgtagaggaataccgtttaccagaagtaaaagcaaacacgccactatattttgatttcccagatctacaacaggatgcgcgctgtgttatctttagattgcttggtgacgtcactgcctttgtcgacgacatttctgagcttgagaacttaaacttgcggaatcttcctttggcgtcgggactgtctttgtcaaataagatcaagttgtactactatgctgatacatatgagatgggaaagatcggcagtctctcagctgtataatgtcgtcgtacatgccaacctgggatggtaacccgtccctagaagattgttgtaacctactgtttctacgtgttgttgtggaagtaaccaagaccggaggagaaatttaatttcagttgttaacatcaaccggg

SEQ ID NO: 6684 - DNA, 2376 bp, Zea Mays
cgcgaactccaaatcgaaagcccgagcccacctgcagcctcagggtcaggggctcagggcaccagttcccatttcctcggcctccgcgccggccatggacgtcgatgacccctcaccgcgcgccggcggaggcagcggcgtggacccgccccgcatccggcggctggaggaatcggtggtgaaccgcatcgcggcgggggaggtgatccagcgcccgtcgtcggcggtcaaggagctcgtcgagaacagcctcgacgccggcgcgtccacagtctccgtcaccgtcaaggatggaggactcaagctcatacaggtttccgacgacggctacggcattcggtttgaggatttgccaatactgtgtgaaaggcatactacctcaaagttatctgcatatgaggatttacagaccataaaatctatgggctttagaggggaggccctggccagtatgacttatgttggccatgttactgtgacaacaataacagagggccaacttcatggctaccgtgtttgttataaagatggagtaatggagaacgagccaaaaccctgtgctgcagttaaaggaactcaaatcatggttgaaaatttattttacaatatggtagctcgtagaaaaacattgcagaactccaatgatgactacccaaagattgtagatttcattagtcgttttgcagtccatcacatcaatgtgaacttctcctgcagaaagataggcttgtagagtgtactgctttaaaaagggcaattgaatttgtgtactctgcaacgttgccacaagcatccaaacccttcatatacatgtccatcaatcttccatcagaacatgtggatgtcaatatacacccaaccaaaaaagaggttagcctcttgaatcaagagcgtgttattgaaactataaaaaataccattgaggaaaaactgaggaattgtaataccacaaggatattccaaactcaggcagtaaactcagcacttactcaagtttacacgcagaaggacaagggtactgaggtcaaaatggcccctggagtgaaatctcaaaaggctcctgtgagccaaatggtcagaactgatccacgcaatccatctggaagcttgcacgcttactggcatgggcaatcttcaaaacttgaaaataaatatgaccttgtttctgtaagaaatgttgtaagatcaaggaggaatccaaaggatgctggtgatttatctagccgtcatgagcttcttatggaaatagattctcactgccatcctggtcttttagaggttattaagaattgcacatatgttggcctggctgatgaagtttccgctttgatacaatacaatactcacttataccttgtcaatgttgtaaatgttagtaaagaactcatgtaccagcaagctctgtgccgttttggaaacttcaatgcgatccagcttagtgaaccagctcctcttcaggagctgctgctgatggcactgaaagatgatgaatcaatcggtgatgaaaatgacgaggagaaactggagattgcagaggcaaactcgaaaatactgaaagaaaacgctgagatgattaatgagtacttctctattcatgttgatcacgatgggaacttgaccaggcttccagttgtacttgatcagtacacccctgatatggaccgtctcccagaatttgttttgactatggggaatgatgttacctgggatgatgagaaagagtgcttcagaacggcagcagctgctattgggaacttctacgcactccatcctcccatccttccaaatccatcggggagtggtgttcaggtgtacaagaaaaataaagcttgcatggcgagtggtgaacatgttgatagtacagatgaagatgacattgatcacgaactacttgcggaagcagaaacagcatggtcccaacgtgagtggaccattcaacatgtcttgtttccatccatgcgacttttcctcaagcccccaaagtcaatggcaacagatggaacctttgttcagattgcctctctggagaaactttacaggatttttgagagatgttagcccacacttctaactacttacaagaagccaagaaagacaccctataacatgttttgcactgtacatattcgtgtagtgtcgcaaatgttttttttaatagttcattgacttatgagatggaagtataccatgagcatgctattgttttctccctctaagggcttgttcggttacaccaatccagagggagattgaaggggtttaaatccccgtctagtcatttttgactaagaggggatttaatcccctccaatccccatctggattggtgtaaccgaacatgccctaattgagttgtctaatgatatctaaaggaaa

SEQ ID NO: 6685 - DNA, 1959 bp, Zea Mays
ttaaattcgttgatcacggatcacggtccacatattcttgggtgggcctctcctctcgtttgcctgcgccgccgcgatcgccaatcggcatggctcttcccaaaccccgcccgccaacgccgacggcgtcagcggccacgggcacctcctcgtcgcgaatagactcgccatcgctaaaggccgcgctcgcaatggctctcatccactacaaccgcctccctggcaaagccaacgccaccgcgggcacatcacccccgtctctcctccactggaagcgcaaggccaaggaccggaagcgcgaaatcctccgcctccgcgaggagctcaaggtcctccaagatggggtgcgcggggaggagatggagcccccggttgcgtcgtgccggtgccacttcttcgacgggtgccgggaccttcgaccgcagcagggtggcggtggtggggagcactgggttgacgaggtgctgaggaggaggtttctcagactggtgcggtggaaggagaagcgacggcgagtggatcgatctcttccaagttctagtttgatcgatttcaacagtgaggatgagatgcagcagctcagcatgtcgactgatttcctggtggagctatcagacggcatttttgccaaaagtgaagctggccactcatttgctacattttctcaccaagcagtagatttcattttggctacactgaagaacattctttcatcggaaagggaaaaagacttagttggggagataatcgatagtttagtgactcgtttgatgaaaaggatgtgcactgttcctgaaaagcttgtcacatcagattcaggattcagttacttgagttcctcatatctgattacatgaaagtttggctatgctgtgagcatattaacaaaagactttttgaagaatgtaccagatctattctcaaggcacgcaatgatttgcaaatcctggaaaacatgaatgggctctatgtggtgtacattgagcgtgtggtcggaaggttggcaagggatgtggctcctgctgcacatcaggggaagctggacctagaagttttctccaaactgctgtgctgagagtgccttgcatatgacattccaagcctgacccggcctgttatatgcttaggttgattcaaaaccacgacaccattggtccacttagactatgcatagttacatttctgtttgaaagacaaactttagaatttggtagtggatctacttgtatggcctgttgtttcatgtcaccattgatagttgattagtttcattttgctgacttaacccctatacactgtgagttgctgtagacatgctttgttactctgcaaatttaggttgcatccgtgaataatagtaacttctgcgcgccctgcgcgcacaaaaaacgttacacaatatgtagtgtaaatgacatatttatacttagttatatatgctaatgcggtgaatttggcttggacttattttactatacctttttgattgacaataacataccaatgactgtcgaaattaacctcctcatttgacaataaaaaagacagttttttcataattgtaatgcaaatgggagggctagatcgaggcagttttagctacccttctgcttagtgcgagcgacattgacataattggcttccttaatctgcccgctgcatcttgtattgcatcatcacttctctcccttgaaagcatgcgaaggcttctcaattgctcctctgaactctaattattgcgggacacaaagacgcactgtctttacaatatcttgtccttgatcagtgtcttggatggacaatcgtgctcgttgcagtcgcccaaaagtttatattcaccgcttcttgtagctcttggggatagttgcaacttgcatggatgattctcgacatcacgtttgagaaaatatactccagataccggcaaagagatcgtactgtagcacgcatcaaactaat

SEQ ID NO: 6686 - DNA, 1461 bp, Zea Mays
gatttgtcggtgctcgcgcccccctcccttcccctggcatttgaggccaggattttttggtgctctcattgttagctgactggtgagggtctggatctagcaatggcggaaaacacccacggtagtggtcgccacgtgcttggggacttgacaaatgttatttgcaagcgagcagccacatcagatctggagaagagtacaggtgggataaagatcagacggattgaaaagactgggactaggaaagagtacgatgcaaatgcaaaagctagcagtattgggaaaggaattgtatttggccatttgtttgatgatgttgccagagagaaatttcaaagccattctatctttcagaatagtagggttcaacacatagctgccgaagcagctggactcttatccaaggaagccaatgactcgaagaaccactatgcatcaatcggtccattagatctcagtgataaggagcaggattcttcacttgaatctgaagacgactatgatgatgaagataatgatgagacgaatggtgaattgctgcaccattttttcagctcagagctagctaataaaatgtcaacaaatgatggtgagtgcttgactcaggaggagatagttgggtcatctggaaatcagaaacctctgtcttcattggatgctacgacaggtggtgacttgccaatttctagtgctcagcatgcttctgtgagaactggtggtttggaagaagctgttgccccaaaatcttgtgcttgttctttctgtctcaaggctgcttttatgtggatggatctccattatcaggatgcaagaagccggctttctgtattgaagaaaagcatcaagtttgccaggtcattggaggaaaaatgtagaggaaatgaatatgcggccaatgtagctggatatgaatcaaagcgagctgtgggagtggagtttgaactatctcaacaacagagatcactctttctttatacagaaaatgcccttgtccgtgagtcaacgcagcttcattctgcttttgtgaaactgaaagaattgagagagaactgcaagacagatcttgagacgctcagcaattcttcaatgagaaaatgagtgctgcatgttgcgttgctgaactgttagtttcctgagacttagtatgatcagctggcttgtcttgaagcaagatgtgctgagattgaaccacaacttaggaattatggtgcttaccatcaatttgggacttcaatttggctgtagtgattattcctatcataaagcgttggtctagtatgcttgtagctgatgtaaaaataaccatggtaaggtaggaactgtatgtttgtctcgttgaggcatcgtcatcttcacttgtaccttgcagtgagcttccttcatatgaacattctttccacgttctccaaacaaaagggaaaaccatatcgtttcgtgcttgttggcgaatttcatagtgcg

SEQ ID NO: 6687 - DNA, 1886 bp, Zea Mays
gcgctcccggtctcggactctaggctcgctccagtttccgcctggctccaccaacaaaaaccaacgctccccctgcccccctctttcctccccagacccgcgctcccctccgtggcgtgcaacgcgttcctcggctcctgcaggcggcgacctcggaaaggcgggggcgtctcgtcgcgaggtcttgtctgtggattgaccaggcatttgaggccaggattttttggtgctctcattgttagctgactggtgagggtctggatctagcaatggcggaaaacacccacggtagtggtcgccacgtgcttggggacttgacaaatgttatttgcaagcgagcagccacatcagatctggagaagagtacaggtgggataaagatcagacggattgaaaagactgggactaggaaagagtacgatgcaaatgcaaaagctagcagtattgggaaaggaattgtatttggccatttgtttgatgatgttgccagagagaaatttcaaagccattctatctttcagaatagtagggttcaacacatagctgccgaagcagctggactcttatccaaggaagccaatgactcgaagaaccactatgcatcaatcggtccattagatctcagtgataaggagcaggattcttcacttgaatctgaagacgactatgatgatgaagataatgatgagacgaatggtgaattgctgcaccattttttcagctcagagctagctaataaaatgtcaacaaatgatggtgagtgcttgactcaggaggagatagttgggtcatctggaaatcagaaacctctgtcttcattggatgctacgacaggtggtgacttgccaatttctagtgctcagcatgcttctgtgagaactggtggtttggaagaagctgttgccccaaaatcttgtgcttgttctttctgtctcaaggctgcttttatgtggatggatctccattatcaggatgcaagaagccggctttctgtattgaagaaaagcatcaagtttgccaggtcattggaggaaaaatgtagaggaaatgaatatgcggccaatgtagctggatatgaatcaaagcgagctgtgggagtggagtttgaactatctcaacaacagagatcactctttctttatacagaaaatgcccttgtccttgccatcaatatgcacctgtgattatagcataaaacaatgtgcgtggcagtctgttgagcacacatctgctttcacatgttgatatggtttgattgctagaaggatcatggctctaagagaatgatctgtaataattggaattcatgtattctctgcttgtggtgttaaatcatttatctgggggctaatacaacaacaatgacaacaaagcctttcagtcccaaacaagttgggttaggctagagttgacacccaatagaaaacacaagttggcattctgcttttgtgaaactgaaagaattgagagagaactgcaagacagatcttgagacgctcagcaattcttcaatgagaaaatgagtgctgcatgttgcgttgctgaactgttagtttcctgagacttagtatgatcagctggcttgtcttgaagcaagatgtgctgagattgaaccacaacttaggaattatggtgcttaccatcaatttgggacttcaatttggctgtagtgattattcctatcataaagcgttggtctagtatgcttgtagctgatgtaaaaataaccatggtaaggtaggaactgtatgtttgtctcgttgaggcatcgtcatcttcacttgtaccttgcagtgagcttccttcatatgaacattctttccacgttctccaaacaaaagggaaaaccatatcgtttcgtgcttgttggcgaatttcatagtgcg

SEQ ID NO: 6688 - DNA, 2082 bp, Zea Mays
cgacccaactctgtcctcacttctctcgggagccgggactcgggagattacttcgccgccgtcgcctcgcctccgcaaccgcgacacgacacacaccagcgccgccaccgcggaaggagcaaggttgaagaagaagcggcacccgccacagatacgccgcgcggcggcgccatggccgagctgcggcacgccacggcggcgacccgcgccaccagttccccatccaagcgcgacgccgaggccgcgtccgcgtcctcgcccttggtcgcgtccccccgcgtcgacggcggcaaggacggcctccgcccccagccaaggtggtcactcccgcccccccttccgctccctcctcgcgctcgaggaccccaggtcccccacggcttccgcctcctaccggattctcgtcgccgcaatcgcctgcttcgcgctcactgcgctcttcttcgcgcctttcgtctggacacgcctcaacgcgccgtacctgtgccgcaaggaggggattcggctccactgccccagggtgaggcagcgggactctctgtgggagaatcctcatgctgcagcaacttggtggaagccgtgtgctgagcgtcagagtcatgaagtctcagacctcgtgtcagagaatgaaacttctgggtttatatttattcatgccgagggtggattaaaccagcaacgtatagctatatgtaatgctgttgcaattgctaagataatgaatgccacacttattctgccagtgctaaagcaggaccaaatatggaaagatcaaacgaaattcgaagacatctttgatgtagaccattttataaattatttgaaggaggatgtgcgcattgttcgagatattcctgactggtttacagaaaaggatgagcttttcactagtataaagcgcactgtgaaaaatgtcccaaagtatgcatcagcacaattttatattgataatgtctttccaaggatcaaagagaaaaagataatgtcaatcaagccgtttgttgataggttaggatatgataatgttccaatggagattaaccgactgaggtgccgagttaattatcatgctttgaagtttctacctgacattgaagagatggctgacaagctagcaacaaggatgaggaatcgaacaggaagtttaaatccatacatggctcttcatttgcgatttgagaaaggaatggtgggcctttcattttgtgattttgctggaactagggaggagaaagctatgatggctacttacagacagcagcaatggccaaggcggtacaagaatggatctcacttatggtcactagcactagaaaagagaaaagaaggccgctgtccgcttgagccgggggaaataggaattattttgcgtgagatggggtatactaaggaaactcagatatatgttgcatcagggcaggtgtatggtggaaacaacagaatggcacccttgagaaatatgttccccaatctggttagcaaagaagatcttgctagcaaggaggagatggagcctttcaagaagcatgtaactagtcttgctgcactggacttcttggtgtgcctgaagtcggatgtgttcgtcatgacccacggtggcaatttcgccaagctgatcatcggctaccgccgctacatgggccgccacaggctcaagtcaatcaagccagacaagggtctcatgtccaagttcttcggggacccttacatgccttgggcgactttcgtggagaacgtgatgatcacccatgagacacgaaccgggctccccgaatccaccttcccacactatgacctatgggagaaccctctcaccccttgcatgtgtagagcttaaattatagactacgagtgatggtgcatagttattctttgttcatttgctgatatgcaaactgcaaattttgtgtagttttttaccactttttgatgtacgatttttttttaccaaagcaaagttcagttcatgcacaatcctcggcacggatacattgccatccactcattcggagcagcagaagcgccgcctgatcctgtcgtcgttaaggctatctccaaccctttgccctctcaaatccccac

SEQ ID NO: 6689 - DNA, 1128 bp, Zea Mays
tttcttttttctcaacaatatgtagtgtaatagatatttttcttaataatacttatatccaaaagtttgttttgtatgagacgctgagtggtggcccctaccttccaacaaatatttgacggtgagtcggtgacaagtaatagcgggccggaagagataaggctcctcttggcaacaaaacagccggttggcgtgccgcgtgcacgcctggacgacgatgcagctccagcatggccctcggcctggagtggccggtgctgctcgtccccgcagtagtctcccccgccgacctagcctcccgcgccgccgccgcagcagcagcagcacgaccaggacgacgaggacggcgctggtggtgctagtagccgcggcgacaagagacggggccagaaagacgacggcgtcggccagcagggccacggcggcggacgtggtgaggcagttctacgacggggtgaaccggcgggacctggcggcggtggagccgctcatcgcggagggctgcgtgtacgaggacctggtgttcccgcgccccttcgttgggcgggagcgtgtggtcggcttcttcggcgagttcatggggaccatcagccccgacctgcagttcgtcatcgacgacatctccgccgaggactccgccgccgtcggggtcacctggcacctgggtatggtcgagactgcgtggagccggccgccaagcccggggatttggcactggtaatcatcaggggagtgacatggatcctcgaacgatttccgagccttgcaagcaggctctgatgaccccaggtccccaaccgaggcaatagctacaggatacgctacgcatggctttgctctcgaaagtccagtgagatcgagctagcagacgtgtataatgttctacaattaatacattattctaagaaactggccaaacgtatgtctcgtcgtgacgaaaagaaaaataaaaatataggcccaattacttttattaaataggagtgtatagttctgcacctaagtaagagcttgttactatacaaaaactgactattagtaagatgagatgtatagtttacagtcggtctaccggctaaaccattaaccttgctctaattttatatatatgcaaacataaatgtatag

SEQ ID NO: 6690 - DNA, 1673 bp, Zea Mays
gacaagacaacccatgcatggccggtccgatggagcgagagggacgagacgcagccgagaagcccctcttggtaagggtgggcggcagcggtggtagccagggcggcagcgcctcctcttcttcggttgccgtggtggtcggctgcaccgccatcgccgtcgccggctccttcgagttcggaatgtcgatcggctactcgtcaccgactcagctgggcatcatgcgcgatctccgcctctcgttagctgaggcaatggcgatatcggatgttctctgcgctcttgggtatctcctgataggattttcccagagctattggtggcttgacatcggaagggtgctgatcggatgcggaatcgggattctgtcatatgtggttccggtctacatatcagagataacgccaaaggaccttagaggaggctttgcaactgtaaaccagttcatgatttgctgcggagggtcgcttgcatttgttcttgggacatttatcgcctggcgcaccttggcgatcgttggagtggtgccgtgtttagtgcagctggttggccttcttttgattcccgagtcccccagatggctggctaggtttggacacccaggtgcctttacaggagcactgcagacgctaaggggacatggaaccgatatctctgaagaggcctcagaaataaaagttttcacagaaaagcttcagcgccttccgaagtcgaagatgttagacctgtttcagaaggagtacatccgtgctgtcatagctggagttgggctcatggccctccagcagcttgggggtgtcaatggcgttctcttctacgccagtgaagtgttcgtctcggccggtttctcgtcgggaaacacgggaacagtggccatggcggtagtgcaggttccgatggtcggactaggggtgcttctgatggacaaggctggaaggaggccactgttgatgatctctgcagctgggacatgcgtgggttgcctgctagttggtctgtcattcttgtccaaggtttgatttttttttctctcctcctgatattgatcgcctcaccgtaagaaggtaggtaggttaggtcgactgcaagtcgatcgccattcttgggcttgggcttgctcaaccagtgcccatcgatctcttcttggaacaggagcagcactgggaaagggacctgaacgtgttggctttggccggacttctggttttcatcggatccttttcactgggtatgggcgggataccatgggttataatgtcagagattttccctataaacatgaaagggtcggcagggagccttgtgaccttagtaagttggctcgggtcgtggattgtctcgtacgccttcaacttcctgctgatttggagttcttacggcaccttcttcatcttcgcggccatttgcggactcacggtcgtgtttgtgcatcggctagtgccggaaaccaaaggaagaaccctggaggagatccaagcctctatgaactcgtccttgacacccttccacaagtattagtttgcttgcatagttgattagtgtcacagatacggttcattgtatacaaagagagacatacaaatacatgtcatttctccataatactactatctcattattatacagtgttttaaatagcgggaaaatgaatttatcctcaatcttctaaaaag

SEQ ID NO: 6691 - DNA, 2442 bp, Zea Mays
cgggcgattggtttccttctcggactcttcgtcgtcttctccgatctccccttcctccctcgctctctcccgcccccgtggtccaaaccctaacaaacagcaatcaagcggaacccctgcaatcgtaatcggttcgctgcctaatcccctccctttctcatctcatgaccatgccggcctcgtccccctccgttggcagcgcctgtgacccaccgccgccgccgcctccgccgccgccgcgggctatgaagcgcgagctcgccttcgcgctccagtccctgtccgagatctctgcctcccacggccgcacgcgctccggccgccccatctcttcccttccagacccatcggcatcagcatctctcaagaggcgcaagagatctgacccgcccgcccctgcccccgcccccgcccctgcccccgcagccgatctcgtctccccgcccacgccgcctatcgacgccgagccgcctaaccagcccctccgtgacatcatccaaccgctacatggatctaatcctcccaccgcctctgaccaccgattcgattccaatgccgatcaagaggtcttggcaatggaagtgattgcaaagccgaatctgcccgcagaagaggatattgcagcagatgactcggcaatggaagtgactgcaaagtcgaatgtggctgcagcggatggtgtatcaaagccgaatgtttccgcagaggatactgcatcaaagtcaaatgtggccgctactgtagcagtagcaccaactctgttggaaactgccattgcagctggaaatgaccagtgtgatacctcaaactcaaatggagaaaatctacagcagcaagccgtggaaaatgtattagtctccaccactatgttagctgaggacactgtcacacctgcagctgctgccgggctcaagcctgcaaggcgcttcactcgatcgttgctcaagaataataaaccagataaagaagagtctgcatcttgtgaaagtcaggcaacaccagatggtagcaaggatgcctcagttggttttactttgctcctggagaagcctcagagaaggttcacaaggtcgttgctcaagacaaaggttgagagcagtttggttggatctgatgatgtgctggacagtgcatctgattcccctccatcagtgaagaagatggagatgaagatgtcaaagaaagttgcatgtctcacgaagcaccctggaaacattagagagctgctcaacacaggcatgcttgaggggatgccagttatgtacatcattcctcatagcaagaaggctgtcctaaaaggagtgattactggttgcaatatacgttgcttttgcctgtcctgtaatggcgccaaggccatttcagcttattactttgaacaacatgctggaagcaccaaaaaacaccctgctgattacatttacttagggaatggcaatagtttgcgtgacgtgctacgtgcatctgacagatctcccttggaggctctggaagaaacgattcgttcctccattgatccagtagttaaaaggagccgcattaattgtctgaattgcaatgagcttgttcttccgtcatcacatgaaaatgtactgtgtcaagtttgcctcgagtcaaagcaacctcaagatcctcttactgcatcgtatacatgtaatggcagttcgagtctgagtcgaagttccaaggaggctttgctaaggaacatatcatcaggcaagaagggtgggagtgccggcaaagtaacaaacaaggataacagactacacaaattggtctttaatgttctgcttgatggcacagaagtagcttactatgttgatgggcagagaaaggttgatgggtatatcaaggatcatagaatctactgttagcccatcagcatttgaagctcatgcaggtgagggatcaaggcgcaaaccgtatgataacatattcacatcaaacggagtatcattgcatgagctggcgatgaaaatatcaaaggatatggaactgtcagaacgcgagacagatgatctgtgcagagaatgtggtcaggggggagacattttcccgtgcaaaatctgtccaaggtcatttcatccagcttgcgttggactgtctaaagtccccgcagaatggtattgtgatagttgtcgcaatcttgtgcaaaaagaaaaggctttagcaaagaacaaaaatgctaaagctgctgggaggcaagctggagttgattccattgaacagataatgaagagagctatacgaattgtccccatctctgatgatcttggaggctgtgctctgtgcaaacagaaagatttcaacaatgctgtgtttgatgagcgcactgtgatactctgtgaccaatgtgagaaagagtatcatgtaggatgcttgcagagtcaatggcaagtagaactaaagatggagtatgatgccttttaccttggtgaatgg

SEQ ID NO: 6692 - DNA, 3570 bp, Zea Mays
cgggcgattggtttccttctcggactcttcgtcgtcttctccgatctccccttcctccctcgctctctcccgcccccgtggtccaaaccctaacaaacagcaatcaagcggaacccctgcaatcgtaatcggttcgctgcctaatcccctccctttctcatctcatgaccatgccggcctcgtccccctccgttggcagcgcctgtgacccaccgccgccgccgcctccgccgccgccgcgggctatgaagcgcgagctcgccttcgcgctccagtccctgtccgagatctctgcctcccacggccgcacgcgctccggccgccccatctcttcccttccagacccatcggcatcagcatctctcaagaggcgcaagagatctgacccgcccgcccctgcccccgcccccgcccctgcccccgcagccgatctcgtctccccgcccacgccgcctatcgacgccgagccgcctaaccagcccctccgtgacatcatccaaccgctacatggatctaatcctcccaccgcctctgaccaccgattcgattccaatgccgatcaagaggtcttggcaatggaagtgattgcaaagccgaatctgcccgcagaagaggatattgcagcagatgactcggcaatggaagtgactgcaaagtcgaatgtggctgcagcggatggtgtatcaaagccgaatgtttccgcagaggatactgcatcaaagtcaaatgtggccgctactgtagcagtagcaccaactctgttggaaactgccattgcagctggaaatgaccagtgtgatacctcaaactcaaatggagaaaatctacagcagcaagccgtggaaaatgtattagtctccaccactatgttagctgaggacactgtcacacctgcagctgctgccgggctcaagcctgcaaggcgcttcactcgatcgttgctcaagaataataaaccagataaagaagagtctgcatcttgtgaaagtcaggcaacaccagatggtagcaaggatgcctcagttggttttactttgctcctggagaagcctcagagaaggttcacaaggtcgttgctcaagacaaaggttgagagcagtttggttggatctgatgatgtgctggacagtgcatctgattcccctccatcagtgaagaagatggagatgaagatgtcaaagaaagttgcatgtctcacgaagcaccctggaaacattagagagctgctcaacacaggcatgcttgaggggatgccagttatgtacatcattcctcatagcaagaaggctgtcctaaaaggagtgattactggttgcaatatacgttgcttttgcctgtcctgtaatggcgccaagatctcccttggaggctctggaagaaacgattcgttcctccattgatccagtagttaaaaggagccgcattaattgtctgaattgcaatgagcttgttcttccgtcatcacatgaaaatgtactgtgtcaagtttgcctcgagtcaaagcaacctcaagatcctcttactgcatcgtatacatgtaatggcagttcgagtctgagtcgaagttccaaggaggctttgctaaggaacatatcatcaggcaagaagggtgggagtgccggcaaagtaacaaacaaggataacagactacacaaattggtctttaatgttctgcttgatggcacagaagtagcttactatgttgatgggcagagaaaggttgatgggtatatcaaggatcatagaatctactgtaatcactgcaacagagtggttagcccatcagcatttgaagctcatgcaggtgagggatcaaggcgcaaaccgtatgataacatattcacatcaaacggagtatcattgcatgagctggcgatgaaaatatcaaaggatatggaactgtcagaacgcgagacagatgatctgtgcagagaatgtggtcaggggggagacattttcccgtgcaaaatctgtccaaggtcatttcatccagcttgcgttggactgtctaaagtccccgcagaatggtattgtgatagttgtcgcaatcttgtgcaaaaagaaaaggctttagcaaagaacaaaaatgctaaagctgctgggaggcaagctggagttgattccattgaacagataatgaagagagctatacgaattgtccccatctctgatgatcttggaggctgtgctctgtgcaaacagaaagatttcaacaatgctgtgtttgatgagcgcactgtgatactctgtgaccaatgtgagaaagagtatcatgtaggatgcttgcagagtcaatggcaagtagaactaaaggaattgcccgaggaggagtggttctgttgcagtagttgctctgagacacgatcatcattggacaagataatctccgatggagctcaactgttggcggacccagatcttgaaatcataaagaagaaacatgagacacgaggtttatgcatggacaccagtaaagatctcaaatggcaattactttctggtaaaagggctactgaagacggaagcatattgctctctgctgcagtgccaatttttcatcaatcttttgatccaatccgtgaagctctcactggtagagatctgattcctgagatggttaacgggaggggacctaaggagggaatgcccgggcaagattacagtggaatgtactgcgcactgttaactgtgggctctaccgtggtgtcagcagcacttttgcgtgtgatgggaggtgatgtggccgagctgccactagttgctacaagccaggatgttcaagggctgggctacttccaagccttgttctcgtgcatagagagggtgctagtctcactgaagatcaagcactttgtgcttccagctgcacatgaagctgaagggatctggatgaacaaatttggcttctctagaatctctcccgaagagctggaagcttatcttaatggggcgcacttgactatattccatggaacgtcatacatgtacaaggctgttccagtgtcataattgatgggatagaagagatatgggtgatttcgtctgtcttttggggggtgggggtccgctcgctattgtgatgtacagagagagttgataaggaagcaaagcatggcaaagacaatgtacaggagctggaagccaaggcgaagcatcggatgaatctaaatgaatgaattccccttggtttgtttactcttgaatcgaaggaagcctgtctttttttggtgtgatatactagactagatgcaatgcaattgaaggagtcgcaccgagtcctggtactagagccagattttttgcaatttaaattttgactctgaaactgctaccagagctgctgtgcattcttctctttctgcatacaatttaaaagttgcaaatgacaccgtcatgtgtgacgtatcattcattagaggcggaggcacgtgcgcagactcgcaaagcactagcagacacttttttttttgacttgacttggttttcgggaggaggaagagtcctgcgtagttgcgttgcaccagcctgcatttgcagagcaaaaacagcataaataaaatggagggtgga

SEQ ID NO: 6693 - DNA, 1910 bp, Zea Mays
ggagatccggtctgctacttatggatgccgacgagcaacagaactagtacaggtcgcaacaaccccaacgagcaaaccccccatttgccaccaaccccgacgagcggcgatgaccggcacggtgtctaagctggcggcgccccgtccggcggcaccgccgctccggccggcgtccctccgcaccgccgccctcgccttcgccccctccgcgcgccgggtccgcgtctccgtcgccgggcgagccaggagccccatcattgcgatggcttcggccaaggaaggaaatggtgcaccgaccaagaggactgcgcttcatgatctctacgagctccagggcctgtccccgtggtacgacaacctatgccgccctgtcacagacttgctgcccattatcgccagcggcgtccgtggagtcaccagcaacccaacggccatttcatcgtccagcgcatatgatgatcagttcaagcagctcatttcggctggaaaggacgcggagagcgcttactgggaactcgttataaaggatatccaagatgcgtgcaaactttttgagcccatctacgatgagactgatggggctgatgggtatgtctccgtagaggtgtctcctaggttggcaaatgacactcaaggaactgttgaagcggcaaagtggttacacaaagtggtcaaccgccccaatgtctacataaagatcccagctactgcagaatgtgttccttccatccaggaagttatcgctaatggcattagcgtcaacgtcacgcttattttctcaattgcaagatatgaggctgtgattgatgcttacctcgatgggctagaggcttctggcttgagtgacttatcccgagttactagcgttgcatccttctttgtcagccgagtggacacccttattgacaaaatgcttgacaagattggaacacctgaggcccttgccttgagaggaaaggctgcagtagcacaggccaaactagcaaatcggctctaccagaagaaattctctggcccaaggtgggaggcgttggccaagaaaggtgccaagaaacaaaggttgttgtgggcatccaccggtgtcaagaacccagcttatcctgacactctttatgtggacagtctcatcggacctgacacggtcaacacgatgcccgaccaagctttgcaagcattcatagaccacggcaccgtttcaaggacagttgatgcgaacgtgtctgaggcggaaggtgtatacagtgccttggagaagcttggcatcgactgggaagaggttggaaagcagcttgagctggaaggcgtggactccttcaagaagagctttgacagcctactcgtgagcctgcaggagaagggcaacagcctcaagatggcgagtgtgtaaagctgagaagattgggtacctgcgagtgaacgattttactaaataaaatgctagcttgctggctctcctcttagtttttacgctgtacctttgctctcaattttctgagtcggctttgtatcccaggcttgccagaacgtcattgtgtagccactgttcatggcttgtaattgctacggggtatccgataacgtcattgtggatgaggcctgtttgccctgactcttgaactcaatgtcgccatggtttgctatgcatttacgtgtgctctgcaataatctgtcattggtggcttgcaataggatgttcatagcacttctgcggcacttaggttttgagattcatcatgacataggctacaaccaccaccagacaatcactattgatcaggttgatctgtgtttccatccatgagctaccatttgcaaatataataaagattgagcaagcacattctagcatgaattgtattaagaaactgatctcgataaagagatctatctggacatcgcataaggaataa

SEQ ID NO: 6694 - DNA, 2209 bp, Zea Mays
cccatagaggtatggcattgtagccgacggacgaccgacgcgcaccccccgccatgctctccagccgaagatgcttcgcggcggcggccaaccgggtccggccgctcgccagggccttctgcgacgcgccggcctcgcgcgcggatgcgggggcctccgggacgcccagcccgcaggatcacgccgagaaggttgctgccctgaaggatccgcccgatgtgctagacgttgctatcgttggtggaggcatggtgggcttggctgtcgcttgtgcattgtcaaatatgccgttaacgaaacaccttagagtcgctattatcgatagcaatccagcgctgaagtcaaggagttacctggataaaaacagtatacccgattctagggtcagcaccgttacccctgcaaccatttctttcttcaaggatattggcgcctgggagcatgttcaacagcaaagacatgctttctttggtaaaatgcaggtgtgggattacactggacttggatacacgaggtataatgctagagatgtgggcaaagaacaccttggatgtgtggtggagaacaaggtgctttgcaactcactgctcttacgtttacaggaagaattggatgatattgaaaatgtgatatatcctaccagattggtgtctcttactttcccgttgaagaccagacaagcaggaatgaaaccaacatcaagagaaccattatctgttggtcatactacagaagagttccatcgcagtcatttagttaaacttgatctcagtgatggacggagtttatattccaaattggtgataggagctgatggttcgaagtccaatgttagacagattgcaggcataaaaacaactagttggaattatccgcagagtgcaattatctgtacagtagagcatgttgtggaaaatgattgtgcgtggcagaggtttctcccttctggtccaattgcgctacttccgataggcaataacttcagcaacattgtatggacaatgagtccagaggagtcactgcgccataagtcaatgagcccagaagagtttgtgaattctgtgaaccacgcattggattttggttatggtccgcatccacactctaccgctcttgaccattacatggaacagttcttttctggcattgggagcagtgcagcatctacaaaggaatgcttcgaagtgccaccgaaagcaacccgtgtagtttctgagagaatggcgtttccattgtcgttgatgcattcccatgattatgtttccaaaaggttagcattagttggagatgctgctcatactgtccaccccttagccggccaaggtgtaaacttgggctttggtgatgctgctgctttagcaaaagttattgctgagggagtttcagtgggctcggatgttggggatctgactttgctacagcggtatgagaaggagaggaaggctgccaatgtggcgatggcagcagtgctagatggttttcagaagatgtactctgttgatttggggccccttaatgtagtgagagctgctgcgttccacggtgcccagtacatatcaccactaaaaaagaacatcatctcttatgcaacgggtgacacgaaatggtcactatttcagtgaacagcactgctttgaaactcttgtcctcacctcgttctttgtttcggcatgtactggaaacaaagaacgcaatcagtaatttcgttcgaaagacatcctcatttgggctgtttggttactgggacacgtcaagcgcccgtctcgcgctagcctggatccctgggaacgtagctcttctgcgtttctgctcgtacaggccagcgaccaaaaaaagctctatactgcatgcgcgggtgcaagcagtcgtcatgcactacagtcatccaaacacgagctcagcatggtcaacgtgacgccgtgggcctagacgccaccagccaatcaaccaatcatgcgaattgtgttgctttcgatcttagtgttaatttgagcgcccgaggcccgacctagtttgtgaggggtttgtcgacggatgagcttgctctggctggtgcatggatggaagaagcgggatcagctgacgccgtcgaacttgctgctcatcagagacaaggtcgcgctcggcagcacccggctcacctgaggttgctctgcatgcgttaagcaaggatcagatcgacagagcacctcatatgcatgcatggcat

SEQ ID NO: 6695 - DNA, 3026 bp, Zea Mays
ccgacccattgctatcctacctgccagcgaacctgtctcgtctccttgttgcccacgtggcctcgccgtcgccgcgagctccaccttcctcagctctgccccgagcgcgatgtggcgagcgacgaggcggtctccgccgttcctgcgatggctatcgtcggacgcagcctcctctaaggcgccgcggcagcgcgtagcggcgctgtgggggaacggtgactacgggcggctggggctgggctcgctggagtcgcggtggagccccacggtttgccccttcttcctcgcccgcgccgccgacccgcccgcctccctcgcctgcggcggcgcacataccctctttctcacccagaatgggcgagtgttcgctacagggctgaacgactttgggcagctggggataggaacctctgttacacatatgctggagcctgttgaaatttctggatttcacgaaagagttgtagaagtttcagctggcaaccatcattcttgtgcagtcaccggtaatagaaaataattagattctcttaagtgcccggttttattcactataatatggtgaattcgttaaatgataagagcagccggaagggaaggtgccatcttcatcttctatgttactgtatatttttaatggagcagcagatacttcatgcttctcgggtgtagaagttagtgattgtgattccttgcttcttgtttgtgtgggcctaaatacacaacacaagtatgggttgaggaaacattttttttgcctttctggttggttgaatattgatctagtgttgaatgttcatttcaagcaaatttccctttatcgcatgggaaactacatgtgtatggtgttgtaatatgttaattataatattttttattatggccccaattactctactagatattgacaatgggtttgataaaccaaaatacatattgggtaggttgcacgttcaaacaaaaagggccatatggaattatggatttgtgcactctccctaggcctatgtgcgatcacaacttaattgaaatatgttattgctcatttgctaattgagatgtcatatgctctgtaaaatgtattaattttgtaaggttattgtcactgaatgctgcactgcagcatacagcacattacaccataataatgttttactggtatctggataagtataacagaaaagaagtgtgataaccatctcttctatttatttataaaattgatttgtgctgcacatatgtgcattataacaattgtattatcaattgttagagtggacgcactaaccaatcaaacacaaaagcttaagctgttaggaaaaagtaggcaatctacttatacacttcaatactctcactcacgtgcaaccagagagaaaggtgcaaacatgtaaataaaggggcagagacacaaataaagcctctaccaggatttgaactcaagacctctggctttgatactatgttagagtgagatgcactaaccagttcaacccaaagctcaccatatcaaagtggacacactaatcagtcaaacccaatagcttaagctgttagaagaaggtaggcaatccacttatatatttcaacaccaatctccactaaatttttgtatttttactttcttgaacagcggatggtaagctctttgtttggggcagaaactcaggtggccagcttggccttggtaaaggggcaggtaaagtagtttctaccccaacaaaggttgattgtttgactgacctcagagtaaaaacggttgctctgggatcagagcattcaattgctgttacagaggaaggtgaagtcttgagttggggagctgctggttctggtaggctcggacatggccgtcaatctagttgctcaattatgtggtattgtaatgtgagttttgggtaaaatgctgaatggcatagatatagaagttcgaaaatttgaaggcttctgcttatcttacgtgaatatactccaagattgatcaaaaactttgatggtatcaagattaaaaagatagctgcaggaatgttgcactcagcttgcattgatgaaaaaggtactttgttcatatttgggcagaagactgagaagggatttggaagaccgaacgaagaattcagaccaaatattgttgaagagataccattttcagaagaagttgcttgtggaggttaccatacttgtgttgtaacagatagcggtgatctgtattcttggggttcaaatgaaaatggctgccttggtctgggaggtacggatatggtccgctctccggaaattttgaaaagttctctatttaaacttcctgtatctaaggtatcttgtggttggaagcacacagctgtagtttcaggtgatgacatctacacatggggttggggaggcgccaatgggacttttttcgaagagggccattcttccggtggacagctgggacatggaaacgacgtagactattttgagcctatgatggttccctttggcacgaatgcaagagccgtccatgtatcgtgtggcttcaatcatactggtgcaatttacgagtgctccgaggactttgactgacgtgccacctgcagacagcagatccgcatgtcttggagacttaggttagttatcaaattatactcgctagaagtgcatataaacagcataaataagctctgatgttggacctgcatttatgtgaagagaaatatagaacaagtgataacacccctgagagggggatgtaaattaaacagaataagggatgaactggatgcattttgtgatgcatcagagttacttgccagtgtatagcatttcttcatttattggctggttctgtattattttgccaggtactaagaaatccattgcctgatgtctcagcaggctgtttgtgtacattatgattgcttgactgcttggtgtcgatgcttgctgtgttttttgtgtgtaaataatacatgaatcagttaatcgtgcttgtacaattaaatatgtacatatatcagtgcatcacttattatatgtacatgatt

SEQ ID NO: 6696 - DNA, 1392 bp, Zea Mays
tacgaatttcgctctggaaaatcctcaatctacaatggaatgaagcttttaccaactggtagaaagagttctcttgctattttcacttactcttcacttgttggaatgacaacatattttcttcactatttgtcgggtatgctgcgctctgttcttgtggaaattgggattgctgaagacatgcataatcctcttggaatattcgttctcgtatctgtcatcttagctggagcctggtttggttattggggtgtccgtaaatttgtcctggcagaagatggatctgttgacgagggtgtggcttattttgttgagtgggctatcttgattgtttcagccgttatgatcctccagagttctctggactatctctttgcatttacaactctagtattatgtggaatcatcaaagtgattgcaagaattgagggaaagtcaaaagttttacgctatatattcgggtatgatcaactctcttccctaattgggactttctgatggtacctctcgtaattcatcccgttatggagattttgatgaagactattctagcatgaatgaagatcgccaagatggatttggcaatcttcatggtggataccagagacatgcaccgagaagaaactcacctcttgcaggctcagcaaagacattatcgcaaggtgttgctatggatagcttctattctacatttcacactaccccagagaggatggaattcacaaaagaggaatatgaagcattcaccagaaaggagacgaagaaagctatgaagcaactgttgtcatcaccggatttcaacaggtgggcattggctaatgcagacaggatatctgtggctccaccaggaggaagctacagcagtaacaacagccagcagcggcatcgtttcttgggactgttttgagctgtgcctgcgtgtgtgtggtgtgctttcttagcagcaataggagtgctcattgctcagtgatgattccatgtgagttgattagcaaggtttaggataacatctgagtgttccactttgaggtggcagcaaatatgtagaatattgtagtttaggcgcatcttaggtccaaagtccaaatggcatctgtatcttgtaacattaagtggtactgtacagtgcccgaggtgagtgtatctcaacttgttgagctgaatttcacgttcgatcatcattatgacagtttgaatttattcaaatcatcattatgataggatgaaaagtattcaagtgttctatgcctgcatagaaagtaagttgtgttgaattgtcgtgtgcggtaagcagtggtttgggtttgtagttgattttgtaagggactctattctcatcaccgcctgtaaactaatgatctgctctggtttgttcaatatgcatgagtgatg

SEQ ID NO: 6697 - DNA, 971 bp, Zea Mays
gttatttctaactattaagtgttaattatctaatgtatttaatgaagtaacacagttagacttgcctaaagaggccagtgaagcttcactggctgcatagagaagtacttttttattatcatgtaaatgcatggttctttggaaccatttggcctatctgattaattattactataaccgggaatgggggcccgaggctataacccggactcctcgccctcgtacctcgttgctggcgaagagcgtcatcaatggcgagtggaggttcactacacagccgccggatcttggagcatcattcgcggtcttggcgcgtctacgcaactgtatcctaagggcgtcgaagaggagagacggtacgccggtggcgacaaggtacgatagatttgaactggagtgtggaggtatcgtcggccagtgccatcagcgatgggtggaggtttccgtcgagtcgaggaaggagcgcttcgtgtaaagtgccgtcaaggaagatgacgatggtggtagggatcgacgatagcgagcacaacttctacacgctgaagtgggcgcactgcagcacttcttcccgccgaccaagctgcaacactactgccttgttgtcgtcaccgccaagccctctgtcgcctccattgttcgccctgccaacctagggagggcacattgtggcggctacgagagaccgattttcctgtgtggtggtgacaacgacaccgtggagccaagtcaatgtcggcaagctgatttttcagattggaacctatggttctttttaaagatcgaatatgttctagcatctttaaaagatttgtcagaatgtaaacatttgttttgaggtcatttaagcctcaaacaaaatttcttggacttatttcgttggagggaacgagacatctcgagatctaaatgtgtatagaacatatattttttatgggtatcaaatataattgtgtgtaaagcacgtacatagt

SEQ ID NO: 6698 - DNA, 2152 bp, Zea Mays
gttatttctaactattaagtgttaattatctaatgtatttaatgaagtaacacagttagacttgcctaaagaggccagtgaagcttcactggctgcatagagaagtacttttttattatcatgtaaatgcatggttctttggaaccatttggcctatctgattaattattactataaccgggaatgggggcccgaggctataacccggactcctcgccctcgtacctcgttgctggcgaagagcgtcatcaatggcgagtggaggttcactacacagccgccggatcttggagcatcattcgcggtcttggcgcgtctacgcaactgtatcctaagggcgtcgaagaggagagacggtacgccggtggcgacaaggtacgatagatttgaactggagtgtggaggtatcgtcggccagtgccatcagcgatgggtggaggtttccgtcgagtcgaggaaggagcgcttcgtgtaaagggatcgacgatagcgagcacaacttctacacgctgaagtgggcgcactgcagcacttcttcccgccgaccaagctgcaacactactgccttgttgtcgtcaccgccaagccctctgtcgcctccattgttcgccctgccaacctaggcaccgcgaatgtgttgtcgtatgtggggagcagacagtcaacttgcatctaggtctaaataaaatagtagtgattaaatctttgaatctgtagatcaaaccatctcaagtaattttagttttgttatgaaaatttttagctcagatgaaataattgcattttgattattaagatttaacatacatctggttctatgaggaaggaaatcataagtggagattgaagttgatcaacttgacactcgaataaaagaatcaacaaatattgcaagtgctgaaagttgtgactgctcaagtccaattgctttatcacacaagttctggtggagatacttattctagaatcttcaaaagcatcaacgttagtgttcaaggttagtataacaagtattgcaagtgttcaaggttagtataacataatcattttaaaacgaagcaacaggtcagtgcctttgaaattaaacaaccaaaatcactgtaaattaaagtccctttgagagctcctcaaaaacaatctgaccatattttatgcttttctccaccttattttttgactttttcctccagggactgattctggactttcaacttaatgcttctctacctgttgtcatactgaagctactgctcctggaagagcatcaccaacatatccctgatggccctctctgcttcatgctccaagcacttggatgttcaccttgaaatataattattaatagggactgtccaaatacttcagctaagcaaaatagcgacctccataaaaaagcaacctgtaactatctctgaaaattttgaaaaaaactgatggtaactgataagctgctgctagcaactaccgtcgcctatttgttttgtttcagaaagttaaggtgcatgaacctctgatatagcatttgacacactgtactttacacatcacccaggaggaactcttgtgtgggtgtgggtgtgggcagggctagaaggaagaaccatgcatgctactacattcatataatctttttcagaggtttaagatatcaacactaatctgactttgattgtctgaaagaatttatcatgctgctgcttactgttttcggtagggggtcaatgcttactttagctgtgcaataattcctcaatattaaaccgagtttgatcaagtaccttgaagctacaagtagcagtgatttgacaggtttactactgcctgaaacatgattggagggcacattgtggcggctacgagagaccgattttcctgtgtggtggtgacaacgacaccgtggagccaagtcaatgtcggcaagctgatttttcagattggaacctatggttctttttaaagatcgaatatgttctagcatctttaaaagatttgtcagaatgtaaacatttgttttgaggtcatttaagcctcaaacaaaatttcttggacttatttcgttggagggaacgagacatctcgagatctaaatgtgtatagaacatatattttttatgggtatcaaatataattgtgtgtaaagcacgtacatagt

SEQ ID NO: 6699 - DNA, 2700 bp, Zea Mays
gttatttctaactattaagtgttaattatctaatgtatttaatgaagtaacacagttagacttgcctaaagaggccagtgaagcttcactggctgcatagagaagtacttttttattatcatgtaaatgcatggttctttggaaccatttggcctatctgattaattattactataaccgggaatgggggcccgaggctataacccggactcctcgccctcgtacctcgttgctggcgaagagcgtcatcaatggcgagtggaggttcactacacagccgccggatcttggagcatcattcgcggtcttggcgcgtctacgcaactgtatcctaagggcgtcgaagaggagagacggtacgccggtggcgacaaggtacgatagatttgaactggagtgtggaggtatcgtcggccagtgccatcagcgatgggtggaggtttccgtcgagtcgaggaaggagcgcttcgtgtaaaggtagcactgcttgctcacgttaatcatccctatgcctacatctatgttttggttttgctgacctgcatgaatacaaccacttgttttggtccttggtatgttttctatgttttggtttttctaatctgcattggaaggcatgttgttggtaagcattgtcgatgctctggtagaatatatcttgagttacaaatgcgagcttcagttttcacgcaacttcatgaaagcttagctttatagcgcagttcagtgttaattatttaattttgtaggcaataaaaatgcatttcttatcctttatggtagacatttctgtcctttgctactatctaactgaatagctgaaatacaatgttttcattggtcgattaatattctatccacttgaatcacaatcactcccataaagaaaatttcttttccgtaattgaagttaatgaacaatacaaccagggaattgttttgcatccattgcatgtcatttttaggtaccaaagtaaacaagctctggacagattcagtttcagtttcagtgatcctgtttgcaacatccaagcatcctgtaatcacctgtatagcagttacacctgttcatgtacatgcttttaacaataaatcaacaacttacatgatagctttattgtagatgttgtttgtttattgttattatcttatcggaagtgccgtcaaggaagatgacgatggtggtagggatcgacgatagcgagcacaacttctacacgctgaagtgggcgcactgcagcacttcttcccgccgaccaagctgcaacactactgccttgttgtcgtcaccgccaagccctctgtcgcctccattgttcgccctgccaacctaggaaatcataagtggagattgaagttgatcaacttgacactcgaataaaagaatcaacaaatattgcaagtgctgaaagttgtgactgctcaagtccaattgctttatcacacaagttctggtggagatacttattctagaatcttcaaaagcatcaacgttagtgttcaagggactgattctggactttcaacttaatgcttctctacctgttgtcatactgaagctactgctcctggaagagcatcaccaacatatccctgatggccctctctgcttcatgctccaagcacttggatgttcaccttgaaatataattattaatagggactgtccaaatacttcagctaagcaaaatagcgacctccataaaaaagcaacctgtaactatctctgaaaattttgaaaaaaactgatggtaactgataagctgctgctagcaactaccgtcgcctatttgttttgtttcagaaagttaaggtgcatgaacctctgatatagcatttgacacactgtactttacacatcacccaggaggaactcttgtgtgggtgtgggtgtgggcagggctagaaggaagaaccatgcatgctactacattcatataatctttttcagaggtttaagatatcaacactaatctgactttgattgtctgaaagaatttatcatgctgctgcttactgttttcggtagggggtcaatgcttactttagctgtgcaataattcctcaatattaaaccgagtttgatcaagtaccttgaagctacaagtagcagtgatttgacaggtttactactgcctgaaacatgattgtaagtgttcttagtatatagctcttctccatttcctctccaactgtcacatgtgctcatacgcttttgccttagtttattacatgtccagaacaccaacataaagaaaacctgccctcgattagcattattcagtagagagagttgtggagaaataaagttaatttgtttgttggcgcaactaattagaccacgttttcattaacaataatactaacatgtttttgttgtagggagggcacattgtggcggctacgagagaccgattttcctgtgtggtggtgacaacgacaccgtggagccaagtcaatgtcggcaagctgatttttcagattggaacctatggttctttttaaagatcgaatatgttctagcatctttaaaagatttgtcagaatgtaaacatttgttttgaggtcatttaagcctcaaacaaaatttcttggacttatttcgttggagggaacgagacatctcgagatctaaatgtgtatagaacatatattttttatgggtatcaaatataattgtgtgtaaagcacgtacatagt

SEQ ID NO: 6700 - DNA, 2347 bp, Zea Mays
ttttttttcgataccatctaatccagaaataagagaacaaggtgtaataaaaagaaatttggatggtgtcatcaatgagagaggaaatactatgtttgcttgactagtctcgcagcgcagggttagacgtgtgcggagcaggtagcacacaagggagagggagacagagggaggagggagagaggaatcttcctgtttccttgcctgggactgggactccgtctccgtctccgtctccatccccatcccctgccgttgcgcccatctcatccccgcgtcttttcctctcgactctcctctctctctctctctctctctctctctctctctgcgctgctctcggtttaggtcgaggagttgctagctagctagggggtttggatccctgctggtgctggctgctccgctgctgcgtgctagtcctactccagccccccagccccagcgaagcaggcaagcatagatagaggctggggtgggcagggaggtgcgcggacggagatccatcagatcagaatcagatcacatcatcggccctcggatgcgatgcagcaccggcgcaagcccgcttccgccgcggcgccgccggccgccaagcagccggccgcgcgcaggcccacggcgcggctgtcgctcgcgggcctcgtcgtctccatcttcctcgtcgccaccttcctgtacaacgaggacgtggtgaaggcggcctccggctcctccagctcagcaacaacagccgacgccgctgaggtaggcgtctccgggcgggcgaggtcacccgacctaagggtgctgcaggaggcggcgcaccagggggtggaagctgaggagcgggaggttggagatcgtacggaagcggagcagaagcagaagcccctgaccctccccatccccatccccgtggtggcgctggcggaggaggaactcgtggagaatactaagggaaggcagaagcagcagcagcaggaggaggagcaaacccagaagccaccgccaccgccgccgcctcctccccaggttgccgggtgcgacctgtaccggggtcggtggacgttcgacgcggccggcgagcaggcgccgctgtaccgcgagtcggagtgcgagttcctgacggagcaggtgacgtgcatgcgcaacggccgccgcgacgactcgtaccagaagtggcggtggcagcccgatggatgcgacctgcccaggtacgatgctcggttgctgcttgagcggctgcgcaacaagcggctcatgttcgtgggtgactcgctgaaccgcaaccagtgggagtccatggtgtgcctggtgcagtctgtggtgccctggggccacaagacgctgcacaagttcgtcaacaacggatcgctcaacgtgttcacggcgcatgattacaacgccaccgtggagttctactgggcgcccttcctggtggagtccaactcggatgacccgcaggcgcacagcgtcatgaaccgtgtcatcgcctggcgcgccatcgccaagcacgccaagaactggaagggcgtggactacctcgtcttcaactcatacatctggtggctcaacacattcgagatgaaagtcattcgccgtcatcagcatcagcttgaaaaggaggaggagggggtgaggtggagcaagtacgcccttgtggaccggccggtggcgtaccgggaggtgctcaagacgtgggccaggccgtgggcgtggggtaacgacggcggcatcaagtgcgccatggagacgcagcccatcagcaacaaccggacggggcgactggacatcggcacggattggcgcctgcacggcgtggcgcgcggggtgctggcgcgctacctccgccgcgtgccggtgcacttcgtcgacatcacggggctgtcggagctgcgcaaggacgcgcacacctccgtgcacacgctgcggcaggggaagctgctcacaccggagcagcaggccgaccccaagacctacgccgactgcatccactggtgcctcccgggactccccgacacctggaaccacttcctctacgcgcacatcctctcgctctcctcgtccgcccaggatcactaaccatttttgcccagcctcacaatgtcaagcgcttcctttcaactcctctccctagaccacccacccaccctggatacctattactactgctgctgctgtagatcttcgtttcattttgacaaatgcatgcaggtcttctcttgtaatttctataaaaaacatccctgatttaattttgactagcagtaccaattactttttcatttttagtgttgagagagagagagataaccatgatgattaccaatcaagaaactgtggtccggcaagcaacaaacagatg

SEQ ID NO: 6701 - DNA, 1403 bp, Zea Mays
cgctcggctccgccccgcccgcctctccccattctcacttcttttcccccagttgcgttgcgtgcccctcgtttccacactttgttgcgctcctttagcgccggcggcccgtagcctcaatcatcatttccattccatccggtttcttccgacgacggtgtgtacagagagcaggatcggacaagtctctgctggtagaagcatggcgcagcgccggctgttgggcacggcgccggcgcccgcgggcgatgcggcgtcgcacggctcgggctccagccccgacgcgatgcggatcatggtgggcgtgctggtaacggtcatcgtctgcacgctgctctactgcgtctactgctggcggtggcggaagcgcaatggtgaaactgcgctctgctgccatccggagatccctgctggacagcctatggcggcggtcgagctcggacctgccgctcatggacctcgcctccatcctcgctgccaccgacaacttctccaaggccaacaagctcggcgagggcggcttcggccccgtctacagaggcgtgctgagcggcggctccgagatcgccgtgaagcgtctgtcagcgcggtcgcggcagggcgcggcggagttccggaacgaggtggagctcatcgccaagctgcagcaccgcaacctagtgcggctgctgggctggtgcgccgagcgcgaggagaagctgctggtgtacgagtacctccccaaccgcagcctcgacgccttcctcttcgatccgagcaagagtgcgcagcttgggtggagcacccggcacaacgtgatcctgggcatcgcccgcggcctgctgtacctccacgaggactcgctgctgaaggtggtccaccgggacctcaaggccagcaacgtgctgctcgaccacaagatgaccccgacgtccgcccgaccatgtccaacgtcctgctcatgctcatcagcgaccacaccaagttacccgagccagccatgccgcccttgttcgcgcggctcaggaacatctccttgctggcgccgccactcaccaccaaaaccgagtccaccacgtctccgctgtcgatcaacgacgtctccatcaccatgatcgaaccgcgatgagctcatgcgttttgtacttctgacaactgagggagaggcttcgagtgtaaatttataagactgcaatcgttcagaatgactactcatatgtactagtaagtttttttttgatggtgtgcacaagtgtgggatttagctactagactagaacatgcggcgcccgtaatcgggtcataacagatttcttttttatgtttatgcattctcctatgtgatccaatggactaaaatgtgtcaccactggtagcaaagagcatataactattttaattagtttgtatccaaatgcataaga

SEQ ID NO: 6702 - DNA, 1920 bp, Zea Mays
cgctcggctccgccccgcccgcctctccccattctcacttcttttcccccagttgcgttgcgtgcccctcgtttccacactttgttgcgctcctttagcgccggcggcccgtagcctcaatcatcatttccattccatccggtttcttccgacgacggtgtgtacagagagcaggatcggacaagtctctgctggtagaagcatggcgcagcgccggctgttgggcacggcgccggcgcccgcgggcgatgcggcgtcgcacggctcgggctccagccccgacgcgatgcggatcatggtgggcgtgctggtaacggtcatcgtctgcacgctgctctactgcgtctactgctggcggtggcggaagcgcaatggtgaaactgcgctctgctggtggctttcctttcctttccattccatccgctgctgctgcgtgtgtttctaacattggatgatccctgccctcttgttcagccatccggagatccctgctggacagcctatggcggcggtcgagctcggacctgccgctcatggacctcgcctccatcctcgctgccaccgacaacttctccaaggccaacaagctcggcgagggcggcttcggccccgtctacagggcgtgctgagcggcggctccgagatcgccgtgaagcgtctgtcagcgcggtcgcggcagggcgcggcggagttccggaacgaggtggagctcatcgccaagctgcagcaccgcaacctagtgcggctgctgggctggtgcgccgagcgcgaggagaagctgctggtgtacgagtacctccccaaccgcagcctcgacgccttcctcttcgatccgagcaagagtgcgcagcttgggtggagcacccggcacaacgtgatcctgggcatcgcccgcggcctgctgtacctccacgaggactcgctgctgaaggtggtccaccgggacctcaaggccagcaacgtgctgctcgaccacaagatgagcccaaagatctccgacttcggcatggccaagatcttcgaggacgactccgacgcgattaacacgggccgcgtcgtcgggacctacgggtacatggcgcccgagttcgcgttggacggcgtcttctcggtgaagtcggacgtgttcagtttcggggtcctcctgctggagatcttgagcgggcaacggaacggcgccttgtacctcgaggaacaccagcagtccctcatccaagacgtaccattctgaaccttcattcagtgatctgaactgaacggagttagccaatctatatacatgttttttttgttgacaggcatggaagctgtggagtgaagaccgcgcggccgagttcatggaccagtcgctggggcggtcctactccaaggacgaggcgtggcggtgctaccacgtcggcctgctctgcgtgcaggaggaccccgacgtccgcccgaccatgtccaacgtcctgctcatgctcatcagcgaccacaccaagttacccgagccagccatgccgcccttgttcgcgcggctcaggaacatctccttgctggcgccgccactcaccaccaaaaccgagtccaccacgtctccgctgtcgatcaacgacgtctccatcaccatgatcgaaccgcgatgagctcatgcgttttgtacttctgacaactgagggagaggcttcgagtgtaaatttataagactgcaatcgttcagaatgactactcatatgtactagtaagtttttttttgatggtgtgcacaagtgtgggatttagctactagactagaacatgcggcgcccgtaatcgggtcataacagatttcttttttatgtttatgcattctcctatgtgatccaatggactaaaatgtgtcaccactggtagcaaagagcatataactattttaattagtttgtatccaaatgcataaga

SEQ ID NO: 6703 - DNA, 1843 bp, Zea Mays
tttttttcaccaaaccagcgaggcagctaccgttttgtcgccatagcactcccgccgaccccctcgccgccgccgggaatggagaccagcaccaagaagcttagcagccttcgtatcacctccctggacgacgatgacgacgagaccgagatcccgcaccagccccctcaagcaggcctctccaccgctgaagcggattatgaggacgacgacgatgaggaggaagaagccgaagtgactcttggtgtccttagcaaaccgaagcacccaggcctcctcctccgccacttgttccccagcaaggccggtggcatcccggcgtggctagacccggtgaacttgccgtcgggaaagtccagctactgtggtttctgtggcgagcctctgcagttcgtcctccaggtgttttctttgtgtgcaatgaagttgccacactcgactgcttattgtttggatatcgacttggtcacagttaggcttggttgtgtttagatttatgcaccaattgaagataatgtagcagccttccaccgaacgctgttcatgttcatgtgcccatccatggcatgcttgcttcgagatcaacatgaacaatggaagcacaagtacgggaatccatgtagaagcgtgaagattttccggtgccaattgccacggaataatgccttctactcagctcaacctccaaagcatgatggctctgacaaaccactctgtccaggagctcctgtatgccactggtgtggtacctggaaaggtgataaaatatgtagtagctgcaagaaaagcaaggtactgttctgagaaacatcaggcactgcattggcgaactggtcataaaaatgattgcctccagataataagttctgctgcttcaaattcagttctgccagctgtaggaatagttcctgctagcatttcttggccagaatttgagataaaaatagactacgaaggtacttttgattctgatagtggtgatgaaaacaactcgaagtcattggtgatgcaaagacatgggaaacttgatgctatgatgcagtcgtggatggaccatttcgaggctgatgctgacaacaaatgctgggcgtcttttcaagaacgggtctcaagagcaccaaatcaagtgttgaggtattgtcgagaaccaaatgctaaacctctatgggccttatctttcgggtgcccgtcagatgctgatatcccatcatgtagctactgtagaggtccattatgctatgaatttcaggtaatgccacaattgctttatttctttggtgttggaaatcaaccagactcgcttgattgggcaacaattgttgtctacacatgtcaagggtcatgtgaccaaactgttagctacaaagaggaatttgcttgggttcagttgtaccctacaacaaccacgaggcgggaattgacaggaatcataggcaagtgcatacctcctttgggtactggaattttgagataggatgtggcttcaatgtttccaggtctattggtcgtgcagggagttttaagcatcttccgaccgtggcccaatgcttggtgctcgttacagtgcctttgatccatttaggcactatccttgggcccacgaatacgtgatggcaaatagttgcatacttccatttttgtggtgggccaccattttcggtttaattgtcatcatcacatcattaaaaagctttgttgttttttgttatctaaaaggatcattggtctcagaaggtgctcgcattcatgtaaacatttccttcatcggctaaagttttgatgttggttttgattttaaatggaacattattatgttaatattccagtggtgttttcaccccca

SEQ ID NO: 6704 - DNA, 748 bp, Zea Mays
gcattgtgctatgcgatgcttcacttttcatcagattcaagtgaagctctggctttttgtggcatatgtcgtttcttttgtctgtttagctggatccgtgggtttattggtgcaagatgcactgacgaacaagggcccttctgtctggactggtgttgctggcgttctgcaatgtgttcttgtgttgataagcggcctggtgtattggacatgccactcagaagattaagggcgtaatgtcatgagcagacttgcaaggttggtcacagttgtgtgaaggaaattatttctggcaacatatgattttgtgtgatggaaatgacggacactgttcactgctgaatgggatgactagatgtttcatctgtgcatatctgacttttggaaaatgatgtttcttaacaccggtgcatgtgttagccccagcttcttgtgagttgccaatctgtgatgcggtcgtgatcatgcaaatcttttggctaaagctgaaaccggctgcagcaacaagctagtgctactatttacaccatgcctcctagtcaattacagttgacttcatttaagtcgagacgctgtctcggcctgtttcatcgttactccaccgtcccacatatatgaccgtaaccactttttgttttagttccataatataagaagtgttcttcctagacatgcatacatggatacatgagtggttacgccatcgaagctagtgttgaaaacaccattgcttcaagttgagaacgcc

SEQ ID NO: 6705 - DNA, 770 bp, Zea Mays
tagaattcccgtggctccagatacaacatctctgtctgtcaaatataacttctgtattcagagtgaagctctggctttttgtggcatatgtcgtttcttttgtctgtttagctggatccgtgggtttattggtgcaagatgcactgacgaacaagggcccttctgtctggactggtgttgctggcgttctgcaatgtgttcttgtgttgataagcggcctggtgtattggacatgccactcagaagattaagggcgtaatgtcatgagcagacttgcaaggttggtcacagttgtgtgaaggaaattatttctggcaacatatgattttgtgtgatggaaatgacggacactgttcactgctgaatgggatgactagatgtttcatctgtgcatatctgacttttggaaaatgatgtttcttaacaccggtgcatgtgttagccccagcttcttgtgagttgccaatctgtgatgcggtcgtgatcatgcaaatcttttggctaaagctgaaaccggctgcagcaacaagctagtgctactatttacaccatgcctcctagtcaattacagttgacttcatttaagtcgagacgctgtctcggcctgtttcatcgttactccaccgtcccacatatatgaccgtaaccactttttgttttagttccataatataagaagtgttcttcctagacatgcatacatggatacatgagtggttacgccatcgaagctagtgttgaaaacaccattgcttcaagttgagaacgcc

SEQ ID NO: 6706 - DNA, 3138 bp, Zea Mays
ctaatgccaccgctttccttatcttgggcgttggacggacggggcgagcgagcgactcgagcgtaccgccgccgccatggtggcgctcgcctcactctcatctctctgtccctgcggcatcgcccgccgccgcgctgcgtcagccacttcatccaccgccttttccatctcgtgctgcgccgtcgcgaccccgtccttctcagggaaaggaccccaggaatctagaacaccccgaagaaggctgaggaaaactgagggtgctaccaagagcctggaagattcggtcaagcgaaagatggagcagttctatgaaggggccgatggtccacctctgcgagtgctccctattggcggtcttggggaaatcggcatgaattgcatgcttgtggggaattatgatcgatatatcttgattgatgctggggttatgttcccagattatgatgagtttggtgtgcaaaagattataccagacaccacgttcatcaagaaatggagccacaaaattgaagctgttatcatcacgcatggccatgaagatcacatcggtcattccagcactcgattcaacaacaccgatttttgcatcatctttcaccatggagctaataaagaagcgtttgaaggagtttgggatcttcctctcatccaggcttaaggttttaagaattaaaaagagatttcaggctggaccttttgaagttgaacccatccgtgtaactcattcaattcctgactgttgtggcttagtgcttcgctgtggtgatgggataattttccatactggtgactggaaaattgatgaatcaccagtggatggaaaaaaatttgaccgacaagcattggaggagctctccaaagaaggtgttactcttatgatgagtgactcaacaaatgttctttcccctggaagatcaatcagcgaatctgttgttgctggttcattgctgcgacatatttcggaagcaaaaggaagagtaattacgacacaatttgcttcaaacatacatcgaattgggagcatcaaagctgctgcagatttaactggtcgaaaaatggtgtttgttggaatgtcactcaggacataccttgaagctgctttcaaggatggaaaggcaccactggatccatcaaccttggtcaaggtagaggacatggatgcatatgcgcctaaagatcttctggtggtcactacaggttcacaaggagagccacgtgcagctctgaatcttgcttcttatgggggaagtcatgctcttaaactatcgaaagaggatgtccttctttattcagctaaggtcattcctggaaatgagacacgggtaatgaagatgatgaatcgtctcactgatcttggccccaaaattatcatgggtaaagattctggcctccatacctctggacatgcctaccgagaggagctggaggaagttcttcggattgttaaaccacaacatttcttgcctgttcatggagaactcctatttctcaaagaacatgaattacttggaagatcaactggcataaggcacacaactgtaataaaaaatggagagatgcttggtgtgtcacatctaagaaacagaagagttttgtccaatgggtttgtttcattagggaaggaggatcttcagctcatgtatagtgatggtgataaggcttttggtacatccactgatctctgcgttgatgagagactaagaattgcatctgatggcattatttttgtaagtatggagatcttccgacctcagaaggaacatgggttagcgcagtcaggtttgaaaggaaaatttaagattaccacaagatgtctatggcttgataatggaagattattggacgcgctctacaaagcagctcatgctgcattgtcaagctgtcctgtgaattgtccacatagtcacatggagaggatggtagctgaaatcttgaggaaaatggtacggaagtatagtggaaagaggcctgacgtcattgctgttgctacagagaacaccacagcaggtttctcagaacacctcgacactaaagcatctggaaattttggaccgtcctcagctactagccacctgagcaggagtccagctacgagtcttgaaggcagttataaaacacacccagacaacccagaggtggatgctgaagaaatccttcccgagactgtgagaacaacacccgacgatgcaaccacaagctccaatggcgaagcattattctcttcagatttacatcagcctaaaacattggagcacttttgggagtcattcaaatcccctacagctgtcaaaattgcacggatcgtcaatgggggggacaaacaaaatttcggcaagattggcataatgggtcaggactcattaatccagtcagctcctgctccagttaaatcctcaaaacggaacaagtggaaacctgaggaaattaagagcttaatacagatgcgtggcgaaatgaatgagaaatttcagagcgtgaaaggaagaatggtactgtggaaggagatttctgataccatgttgaaccaaggagtaagtcgtactccggcacagtgcaaatctctatggacatcgctagttcagaaatatgaggaaagcaaggatacggaaagcatgaagacttggccgtatttctcggccatggataagattctatcgcagcaaggggagatggcaaccaaaggatagaaaaaggcttgtagcttagtggtagaaatttagaatattgattggtatgttgcagcagagcccagtcagtctagtaatataaagatgaaatgtctgtctacagtgcctggtgatctattgggatcggattcttttgttttgtgtaagacatgcagtagcacaagatcgagatgcatcgactggcttgaaattaagcttcagggcccgtggactcagagcggggtagccaggagcgctctattcttagcaacaggcagacatgtgtggttttatctgccagataacgtttgtaactcctataatgtaataggctacacggtaggcgaacggcgaacccctaaaagacaactgatgtatcatatgttttgaggagttatgtaatcgcctgcacggcatatacgtgtacttttcttcaaagcgactgtgtacatcaatggtggatacatggtcg

SEQ ID NO: 6707 - DNA, 3143 bp, Zea Mays
tgccaccgctttccttatcttgggcgttggacggacggggcgagcgagcgactcgagcgtaccgccgccgccatggtggcgctcgcctcactctcatctctctgtccctgcggcatcgcccgccgccgcgctgcgtcagccacttcatccaccgccttttccatctcgtgctgcgccgtcgcgaccccgtccttctcagggaaaggaccccaggaatctagaacaccccgaagaaggctgaggaaaactgagggtgctaccaagagcctggaagattcggtcaagcgaaagatggagcagttctatgaaggggccgatggtccacctctgcgagtgctccctattggcggtcttggggaaatcggcatgaattgcatgcttgtggggaattatgatcgatatatcttgattgatgctggggttatgttcccagattatgatgagtttggtgtgcaaaagattataccagacaccacgttcatcaagaaatggagccacaaaattgaagctgttatcatcacgcatggccatgaagatcacatcggtgcgttgccttgggtcattccagcactcgattcaacaacaccgatttttgcatcatctttcaccatggagctaataaagaagcgtttgaaggagtttgggatcttcctctcatccaggcttaaggttttaagaattaaaaagagatttcaggctggaccttttgaagttgaacccatccgtgtaactcattcaattcctgactgttgtggcttagtgcttcgctgtggtgatgggataattttccatactggtgactggaaaattgatgaatcaccagtggatggaaaaaaatttgaccgacaagcattggaggagctctccaaagaaggtgttactcttatgatgagtgactcaacaaatgttctttcccctggaagatcaatcagcgaatctgttgttgctggttcattgctgcgacatatttcggaagcaaaaggaagagtaattacgacacaatttgcttcaaacatacatcgaattgggagcatcaaagctgctgcagatttaactggtcgaaaaatggtgtttgttggaatgtcactcaggacataccttgaagctgctttcaaggatggaaaggcaccactggatccatcaaccttggtcaaggtagaggacatggatgcatatgcgcctaaagatcttctggtggtcactacaggttcacaaggagagccacgtgcagctctgaatcttgcttcttatgggggaagtcatgctcttaaactatcgaaagaggatgtccttctttattcagctaaggtcattcctggaaatgagacacgggtaatgaagatgatgaatcgtctcactgatcttggccccaaaattatcatgggtaaagattctggcctccatacctctggacatgcctaccgagaggagctggaggaagttcttcggattgttaaaccacaacatttcttgcctgttcatggagaactcctatttctcaaagaacatgaattacttggaagatcaactggcataaggcacacaactgtaataaaaaatggagagatgcttggtgtgtcacatctaagaaacagaagagttttgtccaatgggtttgtttcattagggaaggaggatcttcagctcatgtatagtgatggtgataaggcttttggtacatccactgatctctgcgttgatgagagactaagaattgcatctgatggcattattttttatggagatcttccgacctcagaaggaacatgggttagcgcagtcaggtttgaaaggaaaatttaagattaccacaagatgtctatggcttgataatggaagattattggacgcgctctacaaagcagctcatgctgcattgtcaagctgtcctgtgaattgtccacatagtcacatggagaggatggtagctgaaatcttgaggaaaatggtacggaagtatagtggaaagaggcctgacgtcattgctgttgctacagagaacaccacagcaggtttctcagaacacctcgacactaaagcatctggaaattttggaccgtcctcagctactagccacctgagcaggagtccagctacgagtcttgaaggcagttataaaacacacccagacaacccagaggtggatgctgaagaaatccttcccgagactgtgagaacaacacccgacgatgcaaccacaagctccaatggcgaagcattattctcttcagatttacatcagcctaaaacattggagcacttttgggagtcattcaaatcccctacagctgtcaaaattgcacggatcgtcaatgggggggacaaacaaaatttcggcaagattggcataatgggtcaggactcattaatccagtcagctcctgctccagttaaatcctcaaaacggaacaagtggaaacctgaggaaattaagagcttaatacagatgcgtggcgaaatgaatgagaaatttcagagcgtgaaaggaagaatggtactgtggaaggagatttctgataccatgttgaaccaaggagtaagtcgtactccggcacagtgcaaatctctatggacatcgctagttcagaaatatgaggaaagcaaggatacggaaagcatgaagacttggccgtatttctcggccatggataagattctatcgcagcaaggggagatggcaaccaaaggatagaaaaaggcttgtagcttagtggtagaaatttagaatattgattggtatgttgcagcagagcccagtcagtctagtaatataaagatgaaatgtctgtctacagtgcctggtgatctattgggatcggattcttttgttttgtgtaagacatgcagtagcacaagatcgagatgcatcgactggcttgaaattaagcttcagggcccgtggactcagagcggggtagccaggagcgctctattcttagcaacaggcagacatgtgtggttttatctgccagataacgtttgtaactcctataatgtaataggctacacggtaggcgaacggcgaacccctaaaagacaactgatgtatcatatgttttgaggagttatgtaatcgcctgcacggcatatacgtgtacttttcttcaaagcgactgtgtacatcaatggtggatacatggtcg

SEQ ID NO: 6708 - DNA, 1622 bp, Zea Mays
ggaatttcgaaccggtaaaatagcagatcgccctcccactccagtcctcccggttttctagggtttaaagagcttgccgagcccgccgtgcgccggccggcacatctccactactttccgccatcgccggagccgaccccttcgtctccgcacgcggcaatggcattctccttcgcctcgccggctgcgtcgaaccctttccagacgccggcgacgccgaatccctttcaaacaccggctccggccacctcgcaggcgccatccctatcgccttcgccgttccagttcagcttccagcagcagccgcagccacagcagcaggtggcgccggcggcgcaacctccgcagccgcagccgcagccgcagccgcagaagctgatgctgtacacgacagatatgaaatctgcgggatacagcaccaagtgggaggagctgcacgccgagtcgcagaaggccttactccagatcgaggacaagatacgggactacaaagacgagtgtgagaggttggaccagtgcagtcgcctttatgactcctcaatctcaaatgccaattttgagcttgatgcgagtcgcattgctcaggtggaaaatcttcatcaacatgtcgaatcaatgaaaactgaatatctcaatgaacaacgccgcaccggcaacgggagcgatccatttctggaggcaaacagacgagaagcagctaaacaagaagcagctgccagaagggtccatccaacactgcatctgcctacccctgcgcagcccacggcacagatcgctgcaccagctacaagccaaccgcagcaaccttcctttccgtccgctgcgacttcctcaagcgccttctcaacctttagcactccggcttccgctccatcctcgtctagtctgtttgcaactccaacaactccagctccatcgggcaacctttttggtgcgccaggatcggctcagttgaccacaccatttgggacaccttccactcctacgttagcatcgacgccagctcctggatttgggactagcgctacatctaatttgggtgggacatctctattttctacaccgtttggaggtggagctacagcttcaggttccagctttggtggtgcatccaaaggaaggtcgaagccccggggacgacgctagatgtaaatggaccaacgtgaaacgaggatgctcctggttcacttgactgctcccctttccctctatcctatgcaaaatttgtgactacttgtcgccagcaattctagtggagttttaagtgacctattgcatgactactacctttaagcctttgtatcagatataccatcgcattagttgtcataaacttttaatctttgtgccccttcacagtctcttgcctgggtgtcagggtgtgctgtcacaacatagggctgaacaaatctagagttagaacatgccagctggaattccagtttcttctttgaacatgagcgttagcagctcgttccttggtagacaatctcgttctttaatgcacgtatttgatcgtcattcctttgtttagaggttacttcatgctgtcacccacgacatggaagccgagagcggcgacggagacagacacgacggacggggggtgtatcttgattcca

SEQ ID NO: 6709 - DNA, 1497 bp, Zea Mays
cagcacatttatgaaacggaccattgaatgtgctcaagtcttctttcctccagaatcccccatctgagcaagggcgccgccgccgtcggctagcgccgcagcattgacgtggacgccgaccctctccggcagccgcttgcagcgcgtcccttccccgctcccgcggcatggactgcgcaaagaggagggcggtggcggacctccacgacgagctgatggtggagatcttctcgcgcgtgcccgtcaaagacctccgccgttgcacgtgcgtgtgcaaatcttggtgcaacatcatcaccgaccccctcaacggcaagaagctgccccagaccctggaaggcttcttccaaggcgtcgtcggagggcctcacaactacggccaattcaccagcctgtcggggagcggagaacgcgtgcctccggtcgacccttccttctccttcatcacggcaatgctgcctggcgtggagcacatggtcctcttggattcttgcaacgggctcctgctctttgggtgcacccgggaggacaagttcgggtacatcgtgacaaaccctgcgactgaggaattgatgactgtgcccaccagctcctgctcttgtcctcctccaccttcggttggtggggaaagatatgcgcacacctttctgatgtttaaccctgctgtctcctcgcacttccacttggtccagatctgggaggataatgcggtgaaggaggtggaaacggtacactcttactcgtctgaaaccaaggcatggagtgacaggtcaagcaagtgggggcgaggtgaagagggcggtgaatggaagctgtggggtgaatccgtgattggattgacgcgtggctgggctttggtcgatggtctgctgcattttcttgtcttcgatcttcagaaacaagagaatgtgataattgcagtggatggggaagggaaaacttgtaggatcatcggctggcatggtaaggatgtgagaacaattgcttttattggtcaatcccaaaaccatctacactgcatcggtgtgaatttgcaattacatcaaggctcccaagtgcgcttcacgcaaatgtcgatctgggttcttgaggactatgatacagaagcatggatcctaaagcacaatgtgagctcttcgcagttctttgaattactgagtcacccaatcaaagacttccatattgtggccattcatccagatcacaattcgttcatccttgttcagcactggaaccagaaactggtatcatataacatggatactcaggaactgcatggtctctgcactcttggaaagggctatgtgattattaccccatatgttccctgtttcttggagtcatcggttcttgccaccaaacactgaggttgttgtttctggggacttctctgcatgttcaacaagagcctgatcatccaagtgtggggcaaggatgcatctgccttatgatctgagggccaagtggaggaacatgaagtagtgggatgtagtcatt

SEQ ID NO: 6710 - DNA, 2194 bp, Zea Mays
agccggaagtgagccttcttgggcatacacagaaggcgtaacgagttgaatgaatcttgctgtaccgctctgtgctgcgagactggaagagactccacggagacaccacatggccgccgccggcgacggcggtgagtcccactaccgggaggcgctccgcgaggccttcggtgactcgtcgagcagcgattccgacacacccgccggtgtcagccccggagcaggccgcgggcactggaggtgggaggcggtggctggggtcagggggctgtggctctgcgccgccttcctctccgccgacgagcaggcgcgcctcctcaacgccatccagcgaggtgagtcctcggttgccgggacctcctgtagcattcttgttccccttcttgcgaggagaaaaaggggatttcttttagcttcgtgttttgttcggtttggttccaatcataaattttgaaaggacgttatttgttactggtcgatccatctctccttgtgatagttagaatcatcggatctgattaggcagctgcgatgcagttagtaatgttaggaatcggtgaatcgatcgatccccttttcctctgaccatgtactagttctgattataaagttatctagctatatgtaaccatgttaaattgtaatttgcaataagccttttggtctctaactgatactatacttatctctggattagttaaatattacgtctcccagtagagcagtagcaaactaccctaagcacctatgcagaagtaactcagctctagtttgttgttcctcgagaacagaaataacaatggctcgacgctagtcataaatctgatggcttttctttttgtgcagaaggatggtttattaatgcagacaaccaagtaagtttcttcctctcatcttttccttgcctggccaatgttcatcagcgttaggattttagatacgtctgtcctgattagttccatgaacactgccccgatttgtatatggtttcctaaagtaattcaaactgtacagagaatttgttacatccttgtacgtctagtctgtcgtttttatttaataatgtttaaattccacttgctcctcccttcattataggcgatgagattcggcgacctcccttcgtgggcagtcgaactttctgcacttatccgcgaagctatctgcgtcggcgacgccagtgccggtcttggtgcggaggcgacgaacgaggacgaggatgcgtgccctctgccatcagacttgttgtggcgggagccattttttgatcagatgatcgcgaacagatacagaccagggcatctgtgctcacgtcgatctgatgcgctttgacgatgggatcgcgatcgtctcgctcgagtcagcctgtgtgatgcgcttcagtcgagcagaagcagcctctgacaccccgaagcaagggggcagtgccagtgaatctactgcagaggtccccgttctgctgaacccgggctcccttgcgctcatgtctggcgatgcaaggtatctgtggatgcatgagatcaaccggaaaccaggcaggcagctgtgggatggcagggagctcgagcagcgcaggaggacctctgttacgttgagaaaactcctgccttatacggactagatcactggtcatgacagtgaacaaactgttctgcagttacaggacagtaacctttttgtggtggaaaattgtaatatgctgttgctaaagacagccatcattggataatcaaaaggcgcagcctaagaggagtattgttgagtgcctcgagctctatattattggcaggaagctgtagcatttaccatgcatcagatccggggaaaggagagaagatcaggggacggcggcctttgtgagtgcaggaggtgtccggcgaccaacacaaaagcactgcgtccgaagagcgccatcggaaacgcctccgtcgtccagcctccaagctcgccgcagagtatcgtaggtactagtcgtagcactgacgaaatcgtgttttgtgcttaactgctattgctgtctggtgacttgaagtgagaatacttgcagttgtgtccagtgggtcatgtttgaagatttattaattacggtattgtttcaggacttgatctccttgttaattttgtagaagttgtctcctattgattatagatgtccttaacaagtgataattttctattaattacggtattcctt

SEQ ID NO: 6711 - DNA, 837 bp, Zea Mays
cacatctgcatatcccacattaactgcagttcagatcagggatactgaaattagtgattaagctccaccatgaagatagcctggggtaagaaatctaaggttaagaagcagtcagtggttgtatcaactataccaggcctaccatttggagcggggagtgacaacgatgaggttgaaacggaggaaaaatcagatgcaaacacaaactgtcctggaacaaagccagttgaaactgctgagttgctccagagtcagggagacaagctagccgaggaagggaagtaccatgaagcacttgctaaatgggaggctgctctgatcttgatgcctgataatgcgatacttcatgagcagaaagctcaggttttacttgaagtgggagatgcatggcgtgcactgacagcagcaaccacctgactacaccgacgcaaaagctgaccgtgaaactgctgctcgcctagtcaagaaacgaggacagctgcatacgtcaggtttaagtgctaacaaaagacgcttcacagttggggagtacccaaaggagggaggtgcagagggtgaagaaaaagggaaagaaacagccgagcaactccaaaagatcacccaagaaaattagctaaattaactgattttgttactgtgtaaaatagatattacaaaaaaatattacattagtgttggtcacctgctttaattcgtaaagggaaccataacaaggcaatacaattaaagataatcggccttcgttttcctaatctatctaatagataaattaagggaggaggattatggtaatccaagaccttcgaataataaaataggaatgtctgatgagaatca

SEQ ID NO: 6712 - DNA, 2154 bp, Zea Mays
ggcagggcaaaccgtattgttggcttcgcctagggtctcccttctactgtcgccgcaacctgaccaacctcccttctactgcccgcctagggtctcccttctactgccgccgcaacggcgcaacctcccttctactgccgccgcaacctcccttcttcgagtcccatccgacctagccctgcaacccgccggacgacgagcagtgaggcccgcggccgagatggaccggtacctgacggtggagcggccacggaacgagtcaaccatcgaagagaacgggatccgcatcaccgcgcagggcctcatctgcaactatgtctcctacgctacctccctcctccaggtgcctgggcttgtcctcaccatcgccgtcgtatcgtattgtacttaggatgcgctgttctgttcgagtcccgtccctgtcgattcgaagagatccccagcaacgtgagggaggtgttcctgaccggccccacctccaagttcggcagggccatcgcgctctacctctgcaggaagaagatcagagtcctgatgttcacggtgtcgtcggagaggttcctgaagatccagagggaggcaccgccggagtaccagcagtacctcgtgcaggtgaccaagtaccaggccgcacagaactgcaaggctgccaggtcatggtgatttcacgtccgttaggctcgagaggtggactcaaacatccaagttttgcaagttttgatgttggatgttaaatttctatgctcacccctcgtttggttattgatttgatcatagttttgcatgaactattggcgttggctatctaaaaggacagaaaggcagacatgagcaacagatcccgctccatgggctgaaactgggattcgtgatggcaggcgcccctcttagtcgtgtgtagggcgagctgctgccatggtggctttttcttgcgggtgtgagctccgctcgccgccggtcttggacgccgtggctaggctcctaccacccctccctccacccgggactccacgctgccaccgccacacgacagtacgcatacactcttcttcctcccctcgctctggatggctggcgtccgctccctcagcgcctccgcccatgcccggctcccgcacttgccggctccccgatggagatgaatgaagaaaggaagatctgcaagaataaagtcgaggcggaggcttggtttactggtcttagtgccttgatatgtcgaagacagcatggatcccaggtccaacatatagatggaatccggattgctggacttcctattgattttccaagatcggagatgcaatttcatactgtgcaaaagcaatttcgctatgcaagtcacgcatacagaacctgaaaagttccaaggatgctttgttggatggtatagatggtggtgatgcatctgctgctgaagctgaaggaggctcagaaaaatctaccattgaaaaagagctagagcagcttactagcatattgcctgatcttgagaagaagcttgaggacctgtctgaagcaaacccaagcgctgacatggatgagatggtgaaggcaattgtgtccagggtaactgaagtgatgccaaaagctgcatcttttacttcttcccaaatagcaacctcaagcaatggattcgactcctcggttatgtctacgacagcgacaactggaagctctggaagcactgtgaactgaccttggggttgtaggcagaggcgtcaaacgagctagcatcaagccgatctctgccaaacctgttgctaagaaacctgcacttgattcaccatctctccaaggtgacaacagcatcaactctgaggttgtccctgcgacgcagactgatgaatccagctaaagctctacatttgaaacgaacgctttctgacgggggcacggcgataacacgccttctattctagtatgcttagatagattcaatgttagcgcaaacgactgatgataagtttttcagttagtattttaatttggatttagagtacacttatgtatgatttatttgacaatgcttatttatgagacattgaattgtacttatctatattacattaaatatgatgttattaaatatgtgtgtatgtatatttatcttttaaattattataatgtgacatctcaaaaatgattataaattga

SEQ ID NO: 6713 - DNA, 5268 bp, Zea Mays
ggtcactcaatttccaagtaaatccagttctccctcgtctccgtcgctggctcgtcccggccccgcctgtgcgccgcggcccaggaatcatgccgagcaagtggcaggtctggggccagcccgacggcagcatcgtctggctccccgtctccgacgcgcccccaaacccgcctcggccgggtccgcttcgtcccgctcctcgtcatccgccgctgcccgacgaagcgccaatcgaagaaaccctatgcccggacaccgccggcggatgccgtatctcttctatggccgacctactccttcaagcgcgggagcagctgattgaaggcgatgcgatggatggattggctcagagtgtcaatacggctggactgttctccaccgggtctgggaggccactggctgtcagccagagagccgtaaggagggccagtgcgttggttggcgaggaagtggacgaggctactgataacaataacaagaagagaagtggtgtgcataaagataacttcttcccaatgttccaaagtggatctggtaaggcagtcttgctcaacaaggactcaattcagaaggcaagagctgttctagaagaaaatgttgagaatgcagctggtgccaaacagccaatgttccataccagtacgggtagatctgtcctagtcagcaagagctcaatcgataaggcgagagctgttttagggggtcggatgattgcacatgaaggagatgtaggaggtgtggatggtatggaacagtttcctgtgtctcaagctggttcaggtagagctgtatcaatcagaaatgtggaaggtccaggtagaccggccaatcagtctctgatatttcaaactagttccggaagaccagttttgatcagcaaaagatacgtcgagagatctagggctctgctgatggatgaagatgttaaaaatattcgacaatgggatactggctgccagctcccaattttccaaacaggacttggaaggcctgttgctgtgaaacatagttcaattaaaaaggcaagcacaattttgggggatggagatgttaaaagaagtggtaatggacataccggtgtttgtaccacacctttccaatttgaaacaccaaaatccgttttgatgagtagcagtttgattattaatggcatgacagttacaccagaagaaaatacttcagtgcgagcagaaaaatgtttcaacgatgatggccaattgccgttatttcagactgggtcagggaggtcagtcacagcaagtaagggttcctttaaaagggcaagttctgttctggagccaagaaatattgcaaaggaattggaagatgaatctcatctcaatgatggttatgccacctcaatatttaaaactggacttggaaagtctatcttaccaactgagaactcaagagaaagggcacaatttgtattagaggctaaagaggctgtaaaacaagtaattagtgacattggagctggctttggtgaaaatccaatgttccattctggaaaacaacagttttcacctgaaaatgatacttcaagacctagggccagtacccccatggagcaaggcaaatttgcaacaaaaggatatgaagactgtggaagtccattgccaatgtttcaaactggatctggaaaatctgtattggtctgtgaaagctcgatgcaaaaggcaagagccgttcttgaggaagaagagcactacaagttggttaagatggacaaaaaaattgcagcctcagcttcaccgctcaagacaagccatgcaagaacagtaaacatatcttcaactggtgtttctagagctgctaccttattgggcttggaggagaataccctttcaacacaattttttggacatgtgagtgataagttaggtacggagataactgttaagcggggaaatccagaacacatgcttgatgttgcatctgcacatgcaatttctagtggcactcataagggttttatttatccaacagaaaaccccacacatatggataaacatcagcagtttggattttctaaaagttctacctcttacgttggtgagcattctatcaggttcagcactgcaggtggccgatcaatggctatctctgtcgatgcactacaacgtgcgaaaagccttttgggtgattcagatttagtggtttctccaaatggttcaattggtcgctctttggcatcagctatagagaatctaccaaaaccaactatttctccgaaaggagatgtatctaacctatcatatggaactagagcaataggatatgctgtacctgacacccctgtgactaaaacaagtgctaatcagtttcatatgggaagggaatatcgtccagtcaatgaaattccaaaggtccccaagcctccctccagatgtttatctgaaggcgacaatgcgagtaactctaaagacaagacccagtggcaccatatgccagctggttctggaaatacggactgcttagcaaatggaaagagaattattggggggagaaactccgtatctccattcaaacggccccgttcttccagatgggtcagtaaccactataaatggattgtgtggaagcttgcttcacttgagaggtgctacccaactagagttgctggtaaattcttgacggttgacaatgttcttgaggagcttaagtaccggtattcacttgatgcatcattggatgtggcacttctggaacaactagagaaaagaaagcttttcgtagggcagaagcttcggatatggggagcttctttatgtggttggtctgggcctgtgtcatttcatgaggtgtctggtgttgtcaaattagttgtccacataaatggcacctatcgtgcaagatggaatgatgccttaggattctgcaaacatgttggactcccactggcattcaggtgcataaaagtttctggtggtagagttcctaggacactggttggaatcacaaggatatatcctattctctaccgggaaaggttgcctgatggtcgttttgttgtgagatctgaaaggatggaaagaaaggcgctggaactataccaccagagagtatctaagatcacagaagatattctgtttgaacaacaagaaaactgtgacagtactgatgataacgaggaaggggctacaatttgtaaaatgctagagcatgccgctgagcctgagtttatacttgcgggcatgactccagagcagttgaagtgtttctcatcttatatagaaaagcaaaaggtaagtagcctggcatctgttggttcatatttacatggaaagttacacatgctttgtcgttatgctgcagattgttaagcaaaatgaagtatctgagaaggttgagaaggcccttgttgttgctggccttagttcaagggatgttacaccatttttgaaagtgagagtgattggccttgtcaataaacattcagcttccacatccagtaacaaggaagggctaataacaatttggaatccgactgagatgcagaaagataatcttgtggagggacaagcttattctgttatgggattggtaccttcgaactattgcaccgaaatcatgtacttgcatgctagaggatcatctacaacatggaagcccttagcatcagctcagactacagattttaaagcaattgaactcttgaaatttggtgaggtgccgatttcaagtgaatttgatattgcaggtcttattttatatgttggcaatacttatttatgtaacaacaagaaaaagcagtggctttttttaacagatggatctaaatttgtctctgggcaagggtgtgaagagcaagattgtcttctagctgttagcttttcgtccgcaaccactgatgaagactctacattatttagttacactctctctggaaatacagttggttttagtaatctggtcaaacgacagaaagacgagacgaggcaagtatgggtagctgaggcaacagagagctcaagctacactctttccaacgagattcctagaaaatctcacctaaaagaagctgcagttttggctgagagatgggcttctagatcttatcataaaattcaagagctaaaagaaagggttttatgtatagttggcaacgctggtgtctgaattataataaacggtaccacctgctgtttttggaaatggtgcaagattttgcttgggggttgtcttagctacaccattatttctcactgatgttggttggttctggttggagcctttttaacgcaatatgaatggcccttgcaaaaaacttcaagagcagcaagatccttgcacaaacttcaaaaatcaacttgaagatgtacacatttgaagacacgaggcttcagggctgttttctaagtctgtgtataaagcctttttcagagggtcgattaactttgagccgtggaaaaggttatggagatcttgggcgccgcctaaatgcaaaacttttctctggctagccattaggaacaaatgttgaactgcagacagataggagaagagggctttctcacctagaggcctgccccctctgcgatcaagagcaggaaacagctcaacacatcctaacgagttgtgtttttgcaaggcttttttggcacaacattatggctcccttcggtatgggtacctcaccccgagtcagaatgaacttatcctttgcagatttgtggcgaaaagtgagcaacaatgtgcataaagagaagagaacaggaataaacaatgctattatcttggaggcctggtgcatttggcggcaaagaaatcgtacggtttttgaaggagatttgccagctgttagcaaggtgcagcaaagttttctagaagagctaacatgtttggtcttgactggggctcatcaccttagcattttagggataattgatactcttagagcggtcggattgggctctcttgatcatatgtaatttttgtttcagtttcgatgtggtgtgggtgatgatcttgctcagcaagatcctcatcttgtaggattttcttttctctctaatataaaatatgggacgcgttcgagaaaaaaaaacttcaagagctaaaagaaaggcttctatgtatagttggcgaccctggtgtctgaattataataaatggtgctgcccgccattttttttggagatgatgcaagattttgcatgggggttcttgccataactacatgtctacatcaatatttctcagtggtacaattagaagatcaacaacccacattggcacattgtatgcacaactttcagaacttcg

SEQ ID NO: 6714 - DNA, 1457 bp, Zea Mays
aacttcagccattcgattcttgatttgtggtccctggtgcagcgaggccacaagggggaaacgaccggaggcctggttctagagactacacaacatatcgcgatggctctatctgacctgaggtctatgtctggcttgctggcccgcacctctctcgatcccacatcggactcatctccttcgattcagcagaggacagcgctctgcctctccactacttgacagccacggatccttccatccctcgcctagcgaacagacccggctggccatcctcaacgcacccctcccattttccattcggatgtatgcgtgggtgaccagcacatcgaggagttccacaagcacacatgaggtaaccacagcttccagactgcaagtacgagctctgccatcgcattcatgttacctctgaaagcactcagacaatcctctagatttattgtcaataacagctgcgtatttggcattggcttcatcaaagttgccactatcaaagttaacacgacgctagaaacactgtttgtcaggaagatgaacatcttcaacgaggccaaagtttacacttggaaaatcgaggatttctctgctctgaagaacccgtcccactcaccggagtttgagatcgctggatacacatggtgataaataatcttttcagcttgcagtacttgacatgtactccacatgactgaacgttgatatcataatctgaacttccttgcaatgctaagagtggttctgaaccacatcggttttgaaaattttacttgaaacacaattatagcagtcctgcacgtcgtcaacctgattgtgtgaccctgaccaatttgcaggattatctctttgaatccatcctacgatggtaacagcctgtccttattcctgaaaatgaagaagacaaacgacgtccccaaaggctctgggagcctggtcgagttcgctttatccatcaaagaccaggaaaacggcaaggacaggaaatatccaggcaggtgccagttctcgagcaaacaccatcgctggggatggaagaagttcatctcgctggaggacttcaaggactcgtcaaagggttatctcatcaagggcaagtgctgcatcgaggctgaggtcgcaatcagtggctcttcgaagacggagtactctatgtaatttgatttgtgagagctcatgattagtgtttattctcgctagaaccaactatatagcgtgttccatatgtattagcatgccatcgagactctagcttgctctatagatatctcgacgtatccgctcttcaagcttcgttctgtcgagttgaatgtggtctaataagtgaatatatgcaaactgggatcttattattttaggctattctggcaatctatcttgattgcgacgaatgatttcacagcagttcttttttttctctatctaatttttgctgtcgagtcttattagttatgctcttc

SEQ ID NO: 6715 - DNA, 3150 bp, Zea Mays
tggacactgccattagggtctggccagtcccgctgccgccccctccgcctctctcggccgtagtcgcaacgctgtgtcacgccgcacatggcgaagcgcccgcgccacgccggaaacggcgccggccgctcccagctggcgtcattcgagcggaagcttcacgacctcatactcaacggcggcctagcaggccccggcgcctccgccgaggacatcgccaacaccctccgcatccaccaccctaagttccgccgcctgaagcacggccccttctttgcctccgtccgccgcgctctcacctccatccccatcccctcctcctccgatgacgacggctcctccgcctcccgctgccgccacgacgcccacaccacctcctccgcctccgtctccgacgccgccgcccacccgtcgccaccggcccccgccttcgacgttaccaagtccacgctcttctcccattacgccgctcagacgcgcaagcggaaccaaaaccagcagctggagatcgaggtcacagcggagaagccgcgccgcctcatcacggccgaaggcggtggcggtggcgacgcgaagcccgaggccgtcccggctgctgaagggttttgcagagaggacaagggacccaggttcgccgacctcggcgggatggaggcggtgatcgaggagctcatgatggaggtggtcgtgcccctgtgccatccgaagctgccgcaccgccttggagtcagacctgtcgcggggctgctgctgcacggaccacccggctgcggaaagaccacccttgcccatgccatcgctattgagactggcgtgctgttctacaagatatctgcaccggaagttgtatctggggtgtctggagcttctgaggaaaacatcagaggcctgtttcagaaggcctatcggactgctccctcgattgtattcattgatgagatagatgcaattgcatccaagagggagaatctgcaacgagagatggagcgacgaatagttactcaattaatgacatgcatggatcaataccaccagaatattggatcggacactggcaatttggatgctgaatcatctgaatagaaacctggttatgttattgtaattggagccacaaataggcctgatgctgtggaccaagctctgcgaaggccaggaaggtttgatcgagagatatctcttggtgttccagatgagaatgcacgaaaacaaatactgaagatgcttactcagcatcttcgacttgaaggcgaatttgacttgttcaagatagctagagcgacacaaggttttgttggtgctgacttgaaggcattagtggataaagcagggaatcttgcaatgaagagaataattgataaaagaagaattcactatcgccgtgagcatgacgggaatagcaagcatgactggtggaggcaaccttgggatgaaagtgaggtggagggcctacatattactatggatgactttgaggaagcaacaaaaatggttcaaccatctttgagaagagaagggttttcttctgttcctgatgtcacttgggatgatgttggcggtcttgattcattaagaaaagagtttgaccgctgcattattcgttgtatcaagaaccctgaagactatgaggtatttggagtgaatatgcaagctggcttcctgctgttcggtcctcctggttgcgggaaaacactaatagcaaaagcagtggcacatgaggcaggagccaattttattcatataaaggggcctgagctattgaacaagtatgttggggagagtgaatcagaagttaggaaaatattcactcgtgcacgtactaactctccatgcatcctattttttgatgaggttgatgctttgacaacaaaaagagggaaagagggaggatgggttgttgaacgtctcttaaatcagttacttatcgaacttgatggtgctgatcaacgacaaggtgtctatgtgataggagctacgaacagctcctttctggtgtaggattgatgtgatagatgatgctgttctacggcctggtagatttggaaagaaacattatgtacctttacctggtgcacacgagcgggtttcaatattaaaagcacatgctcgcagcaagcccatctcgaccgatgttcatttggatgcacttgcacgtcgtgccgagtgcaacaatctcactggtgctgacctagcatcactggtaatatttgtgatatatcatcgaaccattcttttggaagttgtccaaacacaagcactagtgcttcttcagtttgcagaatgtagcattgttttctctctctcgtattgttaccttttgctttgcattgagatgggtgctggtgaattcaacctgacttagttgacaagctagctgcatcgtaataattaatagcagcgcttctttcatcgggtcaacgaagcacttgcagaacgttttaccaaaaaagagagagagagaagggagtgatgtgcttctttcaccaggtcaatgaagcagccatggcagcattggaagagcgattagagttcattgagaacgggacatcctcaatgggttcatcttgtttgattaagctctcacactttgagcgtgctctatcgaagatcaagccatcagtatctgaacagcaaattaaatattacgaggcgttgtcaaagagatactcgtcaaactgaggtatcaccacgtctccatgactcccatccatggttcgtcagtggttgcagctttgtatttttggtggtggtgaatggtgatgaaattctacagttgtagaaatcattttaggttttgctgcctacaggcaaatttttgtatggccttaagatacattatacaaggatgagtagtaccacaaatatgtcgcagttaatgctatcgaaggcctccagtcgtggagcgcattcccccagtgtgctggtgtctgtccgattaaacttgctccctggtttggttgaatggtgatcaaacttactggtttggttgagtgatataaagtttgcagcaggtttaaacattaaaatgcagatgatagacgatatatgagtcactggatttagaaatttatatgaaggtcatagatggattgctaattttagatttcaagtaaaatcgtatcatacatattgttaagttgtagagggagc

SEQ ID NO: 6716 - DNA, 4029 bp, Zea Mays
gccgcgtcgtcggcttctccgctcttcacctgctccctctcgacgaactacgaagccatccccgcctccgcaaaccgccccgagcctccgacgtattccctggccagtaggccacttcccttctggccttcctactctctccacgctccacagctgtgagcctgtgaccctccgcttcgacgcggacgccgcaggccgttgacgatacaacgcaccccgccgaaaggggctgggactccttttccgtttccttcgcacatctcctcgctttccgccgagagaacttttttcagtcaatcataataataataataaaaaattcgccgttcggccccgaatttcccctctgtttctgcttcatctgacgcatctgatccattcccccttctcgacgcggatcgaatcacgagcgtgtggcggcggctgtggtggttagggacttagggttggagctcctggaggatggcgagccacggcgccggggtggctgctggatctgacgccccgcacgctgaggttgtcagtatgggtcaaacaaatctatctccatatcctctttcttccagtcatcattcatggtcctctgcaactgggtcagcaacggtttcatggaacaatacagtggacaaacttagccaagatacagtttactatgatccacaaagggatgtatcagattcaggagggaatcaaaatgtagaaagtagcgtgcctcatgttgcccagtcgagtagggggatggcagatgtagcccattctcacatgtcttactctagttcagatcaacatgtctataaccctgtagaatatgccaactattattatagctacccacaagcaacaaatgattcttctgtccagcaaggagcaaaccaacatccagaccgtgccaggatatggaagcagcagctactattatcagaacaacacatggaatggtggaagcacagggaatacttttgctcaatcataccagaactactcatcatctgatacaaatgcacaacaaagttctacttcagtgcctgccaattctttaccatatcagcagcagtataaccagtggccatactattacaatcaatctgtgccaagtgcttctagcaatccagttgctgggaacagtactacagataacttaactggttccaggtgttccaggacagcaaagtcaatatggcaaccaggcagaaggccattataaccagggacctggtgtgcaatggtctcaaaatcattatgcctaccagacacagccataccctcagaagactaattccaatcatccacaactaagcaaccatgaagatcaacaggagactgtatattctaacagtccaagcacaaatctttcgtcgaaccatgtttctgaaaattttaaaccaaacttgcaggattctgtgacaatggacacttccagcgaaggcaaaatacaggttcctataaatcctcaaattgccccaggtttctctatggtgataccaaagaatgagaagaaacattctggacttgatttatcaaagaaacctgcctatgttagtgtctccatgcctacgaatgatgctaaagcaactcaagttggtcttgatgctagattacccttttcactccgtaactatgctacgaggaacctcaatcgttgcaagaatgatgcccagagggaggcctgccgaagcataatgaatgagatcacaaaaaaagcttttgctgagggaacccttcttactaagaactgggacactgaaccactatttcctttgcctgaaagtactgtgggcatgactggaacaagtgtaaacaatttaagtcccttctcatcagtttccaccccaaggaaacgtgtgaaaagtagatgggagcctgttgtggatgaaaatgttaccaataaggtggaacaaatagcaaaaggattgatcggcagtaatgtccacagtacttcggaccctaaaaatagaatgggtagcagttgggatcataggaagtttctccagtcttctcaagcaccttcaaataaagtcaatcagaggtctgccaagaagcaaaaaatgggtagtaatttgagtcaaatacagaatggaaatgcttcaagtgacagtgagaaggaacatgatctaaccaaatattatgccagtgcaactgcactagcaaattcgcctgaggaaaagaaacgtagggagcatagatccaagcgttttgaaaagagtaaagattcatcatttaaatcaagaaatgtttctgcaaataaagatgctatgactaatttgcgtgcaagaagggcaattttgtcttttcgtactagaacctatgaaggcggcactttggctgttgaggatatggattgggatgcactgacagtcaaaggaacatgtcaggaaattgagaaaagatatctacgacttacagaagcacctgatcctgccaaaataaggccagaagatgtcctggagaaggcccttgcaatggttgaaacatcacaaaagaattatctttacaagtgtgatcaactaaaatctatccgccaagatcttacagttcagagaatccagaatgaactgactataaaggtttatgaaacacatgcccgattagctatgcaagctggtgatttacatgaatttaaccagtgccagtcacaactgaagaggctatatgcacaaggaatcaagggttgctattttgaattttctgcttacaatttgctgtgtgtcatgctacactctaataataaacgagacttgctgtcatcaatggcaagcttatcaaaagaagccaaacaagatgcagctgttaagcatgcccttgcagttcatgcttctgttttatctggcaattatgttctatttttcaaactgtacaagaaggcgcccaatttgaactcatgcctcatggatctatatgtggagcggatgcgcttcgaagctatgaaatgcatgtctaggtcatatcgcccaactgtacctgtgggatatgttgcacagattttggggttcatgagaactgatacaggctgtgcaaccaatggggatgatggattagaagaatgcgaaaaatggttgaaagcgcatgggatagttctttcagaaggtaacagtggggaattacaaatagacatgaaggcttcgtcttctacactttacatgccagagccagagaatgcggttgcacatggtgatgcatcacttgctgttgatgactttttggcacggactgacgggcatcttaaaaggtgcagcagcgatgagccaacggtggatactccgtagtgtagtatattggtgctgctgtggcagtcgtgccgagatgtggacgcactgcacttctcccgtagaaactgcaaagggggcatgaaatggagctgcccaacgaagctcgcggagctaagagagtcggaacaactgaacaaggatgtggtcatcgggttttgccacttgcgcaaattgatccagtcatccagagttgcaccgcgatgagcttcgttgagaagacagagaagaaagcagcattacccgacatgagcagaagtttttatgtcgtggtggtttgctcacaagggcctgttccgataggagtagattgaaggtattagaagatattaaatttcttagtcttgtttggaagtaaggggattggaggaactgaagatttgaaggggccaaaatcctagaaggggattttagccttggctgatttgatgacccctccaatctctctcaatctccttatcatcaaatcagccctgcctcgattctcttctcccaaacaagccagcccttactagtaaaaattgaatagaaaaaaagatttaatcctcctcaatctccttcaaccaaacaaggtctaacttgcattaagcgtagaaagtattgtgaaaaacagctacagctttgaagcatacatcatacattatcttttccggtgctctttttttctggctgccccttcctctgtgaagattgtgaattactttttcttgcacgtaaatttattttcctatcccatagaataatgaaaattatatactaatgttcc

SEQ ID NO: 6717 - DNA, 1647 bp, Zea Mays
aaaaaagacattgggcctcgcttgtcggcccagtccccagcaaaaccctggaggcccgcgcggcactccgaaaccgtcatctcattttccttttcacgcccactcactcacccgccgcccccgccgccgccatcccctccttgccgtctccgggcacggcctcgtcaatcctttgctcctcctccgccgcagccgctgccatggactccacgccggcgcccgaggcggctcccggagcctcctcttccgccaccgccgctgccgaggatctggcggggggcgtggcggcgatgaccctggatgagcggttcgctctgctgcgggggatcggggaggagtgcatccaggaggacgagctcaggcgcctgctcgagaacaagcccgtgcccatctgctacgacggcttcgagccctccggacgcatgcacatcgcccagggcattgtgaagaccatcaacgtcaacaagatggtcagggccgggtgcaaggtgaaaatctggattgccgactggttcgcgcagctcaacaacaagatgggaggcgacctcaagaaaatccagacagtcgggcgctacatgatcgagatttggaaggcggccgggatgaacctcgacggggtggagttcctgtggtcctccgaggagatcaaccggcgcgcccacgagtactggccaatcgtgatggacattgcccggaaaaacaacgtcaaacggataacgagatgctgccaaattatgggcagaagtgaccaggacgacttgactgctgcccagattttctacccttgcatgcaatgtgctgatatatttttcttgaaggctgacatatgccaattggggatggaccaaaggaaggtcaatgtgctagctagggagtactgtgattacatcaaaaggaagaacaaaccaattattctttcacatcatatgctccctggttttaaagaaggccaggagaaaatgtcaaagagtgacccatcctcggctatctttatggaagatgacgaggcccaagttaatgtgaagataaagcaagcattttgccctcccaaaattgttgaggggaatccttgtttggagtacattaaatacatcgttttcccttggtttggaaggtttgaggtggcccggaaggaaagcaatggcggtaacaagacatttacaagcatggatgaactaatttctgattatgagactggtgctttgcatcctgctgatgtcaaacctgcactggcaaaagcaataaatgaaattttgcagcctgttcgtgaccacttcaacaacaataacgaagccaaagttctactaaacactgtcaagagtaaccagttgaggagcggaaggtgttcatctttagggtgaatgtcgctgattgaaattcttctatgcttattctgttactaatgccaccactcattttagatcaagcattgagccattggttatcagtgtacaatctctctatacaggcattttggtggcagtggccttgtctgtcattggctacaacgttctagataaaaaaacatttaaattttgtggaagttgaattatcttctcatgtgtgtatgactgtatgtgagactggttgaaagtgcaagcgacaaggcatatatggccgagaagtttaaatgtttttatactgtgg

SEQ ID NO: 6718 - DNA, 937 bp, Zea Mays
atcggctgcttctctagttattctcaagtgatattttggtgtagagcttgactaggttcagtgtttctttggacagtgcatgtgagccagcaaagtatatgtgcatgggagccacgttgagttgctcctgcagtgctgctgtgctggtatgccccagaattcatgttcaccaagttgtggtcgagttccatatccctgcctacataatcagtgatgcttgcccatatatatataaccctttggttgggtccagtgaagttctcccacctcgccatggctcggatgtccttaggagttgttggcccatatgaagcttgttttgtaatcatctcagagctcccaaaataaagagtgaagactcaagatgaagtggttgctaaagaggactctactctagtgcctggtcatcaagtggatggagccatctaactggggtttaatagagggatttagacctccgtctctgcaacaaaggcaagccccggtgcatttaccccttcattgtatttttaaaaagacttttatacacttaagtctaatcaaatgtgcattaagtttataggaattgcttggaaactatttgatgcattgactaccttgatatccatgcctttatagatactttgatgaagtatcaaaatatgatttaaaaaaatgcttagccctgcttagatcttgtggatagaggttgtcttttgcaataatgcctagctcaagggttatcctaaggaaggatgacttctacctgcaagaatattttcattgggagcatggtgggatcttactgcaaagttccctataatgctcttttcatccttaggaacacaaaacaatcctaagggtggaagtacttagcttgagacttgggctaggaacaggtgatgctccacctaggttaattaaggattggatgcgtatgtaggcctgtatgatcaag

SEQ ID NO: 6719 - DNA, 1170 bp, Zea Mays
cattgccacaccctgactccgccatcaaaaacatctccaaaacctcattccgcaatgagacccgcagccgcagcagccaccgctaccaccgccgcgctccgtctccgcgccgcctccctctcgccttctctcgctgcctccctctcgccttctctcgccgccctcctttctcatcgtagatcctccctcattcttcctccgctgcgccgcatctgctcccttgcgcctccccactcctccgccgcccccaattcgcagcccccgccgcagttgctctctcccatcatggacgcgcagttcgtgctcttccgcgcgcagctcgacgagtcttccaccctccgcgaccgcatccgtgccgtcgtcgccgagattgagtccgcctcccgcgtcgccaccgccgcgctcctcctagtccaccagcccgtccccctggcagatgtgcttgtgaaagccaaggcgcaggtagaggtgatcaaggggttgtacgcgcgcctggcggaagtcctcaaggaatgccctgggcagtactacagtgtgctctggggagtttggccttgatgttgaggactacctgacaggactgtgcttcatgtccaatgaatttcctagatttgtagtaaatcgcgtcactgctggcgactatgactgtcctaaaagggttttgggcttcttgaccgatcttcatgcttcgtttaggatgctgaatctgcgcaatgacttcttgcgtaagaaatttgatgggatgaagtatgatttgaggagggtggaagaggtctactatgatgtgaagatccgtggacttgtacctgcgtagttgaaacaagagacttagaatccttggtaatgttagattgttaacataccgtggtttggctttttgtcatccataacgtgttcatctagctaaaatgtgaaaaatattctgttggagcgtatgtgttatggactgaacttgggggcactcgaatgaccttgctcatttcttttactgtggcaccacatgttcatgcatttgaccccgggatgtagatcgagttagatttcgtgaactctggagagaataatttttattggctcactttgcctttcacaaatcttcatacttatctaatggtgatatacatgtttggattttcaatgggatctgtggtttgtaggcaaggcaatgat

SEQ ID NO: 6720 - DNA, 920 bp, Zea Mays
ggttgctgcagcagctccaaggcattctagactggaggtctcaagttcgattcctcttaaatgcatcttttttttgcaattactaggggcaacaacgtccaaatcccagacccacgcgcgctatgacttctttttgtgcacgctcggtcacgcgcaggatgacttcttttactgcaccggagggagtgggtggcctcgccggacggcggacgatccccgcggtgccagtgccactgccaccacctcggcccgccggacagcgggcgcggaagaagatgacaaggctccatcagtccattacgctgagcgaggcgatctccgtggagaacaaggggaagccacgcccactacagcctgagcaggaagctccgagcggcttcgtgctccctgacctcaacctcccggcagacgtctgatgatggctgagtttgtcggcgtggctacagtacgtcttcagatcgaactagcacgctaacctgatgattaactgtacatagaagaagctgggccgggttctggaagatcacgcttgccaggatactgaagacgaacggagattatctttttttttgtttcatatgttgttgacatttagggtttagagctgtcgtcgtcgtagtcctccggcctgaatgacgtcgtttttctgttcagggtggaggatcggttttaacgtttattacctcacgtacgttttctggtaaggttgtagatgctgccgcagtcttcactaacagctatagaagatgagagaactcgagccattggaggcccgatcggagccgtcacaggatcgacactagtggcgcggaagtgattagggatcaggtccaactacctcaatgatgatcgtcgtatcttcgactcagaccacttctttcttactcttttttgttggaggaggggaatttagcttctcg

SEQ ID NO: 6721 - DNA, 2780 bp, Zea Mays
gcctgcccactgctcagtccactgcccagcacggatctcatctcaccagctgcccgcgcatccaattcctctcgctggacggctgcagcacatcatcaggtgagaccgtgagagggaatgggatcaacaacaatgtcccctccatcttttcccgtcgtcctcctgctcctcctcctcgccaccatagccgcagccgccggaagcaacatggatgaggaggtggtggacgacctccagtatcttattgacaactccgacgacatccccaccaacgatcccgacgggtggcctgagggagactacgacgacgacgaccttctcttccaagatcaggaccaggacctcacaggccaccagccggagatcgacgagacccacgtcgtggtcctcgccgccgcaaacttttcctccttcctcgcctccagccaccatgttatggttgagttctacgcaccttggtgtggccactgccaggagctcgccccggattacgccgccgccgccgcgcatctcgccgctcaccaccaccaggcccacctcgcccttgccaaggtcgacgccaccgaggaaaccgacctcgcccagaagtacgacgtccagggcttccccaccatcctcttcttcatcgatggcgtccccagaggctataacggagccaggaccaaggaagccatcgtcgactggatcaacaagaagctcggcccagccgtgcaaaatgtcaccagcgtcgacgaggcccagagcatactcaccggagatgacaaagccgtccttgccttcctcgacacactatccggtgctcacagtgatgagcttgctgctgcttcgaggctggaagatagcatcaacttttatcagacttcgactcctgatgttgctaagcttttccatatcgatgcagcagcgaagcgtccatccgtagtgctgctgaagaaagaggaggagaagttgaccttctatgatggggagtttaaagcatcagccattgctggttttgtgtctgctaacaagcttcctttggtgaccacactaactcaagaaacttccccttctatttttggcaatccaatcaagaagcagattttactatttgctgttgcaagcgagtccaccaaatttctgcccatctttaaggaagcagcaaaaccatttaagggaaagttattatttgtctttgtggaacgagacagtgaggaagttggtgaaccagttgccgactactttggtattactggacaagagaccacagttcttgcttacactggtaatgaagatgctaggaaattttttcttgatggtgaggtgtcacttgaagctataaaggacttcgctgaaggtttcttggaagacaagcttacaccattctacaaatcggaaccagtgcctgaatctaatgatggggatgtgaaaattgttgttgggaagaatctggatctaatagtttttgatgaaacaaaagatgtacttcttgagatatatgcaccatggtgtggtcattgtcaatcgctggaacctacttacaacaatctagccaagcatctacgtagtgttgactcccttgtggtagccaaaatggatggtactaccaatgagcatccacgtgcaaagtctgacggatacccgacgattctcttctatccagctgggaagaaaagctttgagccagtaagtgattataactaaatgtttttacttgtggatgtgtggtgtctataaggcattaagatccaaagaggaggagctgaaatggccacgaaacacatatatagccagtaaaggagtttattaattgtcgagcttagctgataaaagccaatttgtggccaggtattagttgagcaggcaacgtttgggaaggtgtctgctgattcaatgtgttgttggtttgtttttgcttatacctttttcagatcacttttgagggggagcggacagtggtagatctgtacaagttcatcaagaaacatgctagcatccctttcaagttgaagcgccaggagtcgagaaccgagagcactcgggcggagggtgtgaagagctctggtacgaactcaaaggacgaactgtaaagagctcagggttggatgtgtgttggagtggatcagggtgaaagtttccatctcaatacaagtagatcgatcttggtggatgcgagtgcagtgttggcctgagggaggagcagcagagatgagtgcttactgcttagagagaggaatgaaatcagcaactaatcaaataaaatcaaattccattattccttttatgcgtctgttttgctgtctttactttctttcatcagtatacaatacatggagactggatgtatagctggagtgactctacgcagggctaccatgcagatgcggcacaccgcctcctcggccgcgatgtcctcttgctcttggtcttcctggtcgaccatcctaccagaggtgatgatgaagaacagaccagcgaaggtgacacgttcactacgaagaagcaacaggagggagtagctgtccagacacggccacgtcgacagaagcggaacaacgtgagagtggagtgtatatatgggcctaaatgggtcgtttaactgggccgtggagcttatatgcttccctatctctggaaggagggtatcgagaaaccagtaaacaaacactacggcagctatagccgcccccttccctatcttcttccgcacgccgatctcccctgctctcctatccctatcttccatggagcgctaacaatctggtatcagaggtcagacaagttggatcccatcagcaact

SEQ ID NO: 6722 - DNA, 3257 bp, Zea Mays
ctagtcaccatctgtggggaacatctcgtgtcgtcttttgtttccatcgctacagtcaccttggtatcactcctccaggtagctgcctgcctatgtatcatccatttaataacaaagttgtcaaccggtgatactgggagcttgtctttctcattcatgaagaaaattcagatcatatcaacaaaattgttgcagcaccatgcatttttagctctcctgtcacagtattccctgcatggatacagcggtgaacaagaacttaataatttggttctcaatgatctttattaccttatacgtggagaactcgaaggacgtcagattagctctggcccttttcaggagttgctcagttttcttcttgggtttagaatttttgaacacaatcccttggagcaactacaaaacacatacctgatggcaaatgacaaatttttatttgatgtggagcacatacatgacgagcttggagttgatctctggactgattcagacaagaggtctaaagaagtagctaaaaaaatgctggatattatgagtaaagcaaatttaatgaagtattatgctgatgcaaaactttctgcattgatgtccttcttgaaatttttatctgtctacaaaggagcgatttctaacaaaaacttggacttacctgatggaggcatatcagtagcggccacacaatcagcaattaaatgtgcatgtaaatcatttgagtcaactgttgattcactgctgcctcaagctcatacagatgaggttttgtttcccctcttgtccgggcaagtggaattattgcttactttggcccgaatattgtttcatcaagcaaagaacaagaaatcaagccatctctgtccagatattgtacttctaatgaaaacttcaggtgccagcacttgtttgtttgttgatctcatgccatctgctcatgctcttaagcaaccagtgaagacacttcttgttctgcttttgtcgtcatatgagttcatgtacagcaaggttgacataaaagacctaccaaatgatattaacatttttggcgaattagcccttttaagtgtgagcttgctacctatactgtgcaaattggcagagaatagggaatgctctgatcttgctgttgcatcaatggacctaatattgaagggatctgtaccttctaatttatggatgcctattctgcaaaagcattttcatctccagactatactgcataaatgccagaatggtgatttattatctactcaagttatacttaatttcctcttgaccttggggcgaacaaaggatggtgctaaagttcttcagtctgccaatatttttgcattcttaaagttacttttgagtcagttgtctctggatgactcctgtttgagaaattccttgagcgcccaagtgaaggatgtgaacctatggggcttgggtctcggtattgttgcgtccctgaaccattgtttggatgatgacatttctcataacaatgtcgtgagcaacactatcagcttcctttcaggacatgtgcctttggtgtcatcatatctgtctacacagagtgctactactcatcagagcaagaaacgggcattgtcgcagaagtcacagacatcgctttcagcccttagtcttactgagaatattctcatacttctatgcatcttggcaaaataccattttccacgggacactggaaagaaggaagtagattcagaactaagagagattattatccacctgctagcatttataagcaaaggaagtgtaaagactggcaatgcctctaaatggaactcatcgtttttctgccctgctgttatcaaagaggaagtagcgcttaatgagaaaccaccactcatttgtagcaagtatgggtggttcagatttgcagcaagttgtactttgtcaactgcaggtgtttcagtttctcccagtgcagctttatcagtggtgagacgggacaagacttcaggagattctgattctataaggcagactcgttttactgagatattagctgttcagatatacaggattgcttttcttatcatgaagtttctctgtagtcaagcaaaagaagcagtaaaaagggcagaagaactggagtttcttgacctcgcccattttcctgagcttcccatgccagatattcttcatggtttacaggatcaagtggtttgtattgtcactgaaatattcgaggcaaatgggtcaagcactctaaatcccgagacagagaaggtatgccagctcctattggtgacacttgaaacgtcactttacatggaactatgtgtatcccaatcatgtggcatcaggccagtacttggtcggcttgaagatttctgcaaaggaattaaggctatgcttcaagctatagagaagcactccagttttgaaccttttgtcaggtcgctaactgaaattacttctcttttgtatcccgggcttttgcataataaccttctcatgtgactcttgtaaattgtcactgttaaagagatgtgttgttggctaactttgaattgagccacatatggacttgcatactcagttgacgtcacccgaggaagcttcgttttcgcacgttactgtcaccaaagtaaagtgggttccagcggctacgaagcaaattcgcagagccagggcaccaaatcaaactgaaggcgacgacgcccgaggaagcttcgttttcgcatcacctttgttcggtttcacagccgaggctcccaaagtggccagagaatcttggtggacttgcctttccgggactccacactgccgaccacgcttattcacccgtgtaaattatgctgggattctcctttgctggctcgtctggccgatgtgcgtcccatcatcacagagaactagaaacaaatgatacatatgtagatgctatgcgttcttgatcaatcagacacgcatttttttttctgtagaggaatacatgttcggcgcgttgcatctttacactaccatttgtttgccttctccatcctgtttaagccctgtttcaaaacgctaccatgcaaattaaccctaagggataatttgggagccgtaaaaccggaggggattggagggtctagatttcccttagggttgatttggtgacaaagggatcacgggaggattggaagggattgagggggaaataaactaatttccctctcaatcccctccaatcctcccgagatcccgggtcaccaaatcagcccttagggtccgtttgtttccttttattttgaggaattgga

SEQ ID NO: 6723 - DNA, 6648 bp, Zea Mays
ctcctttcccagaaaaaccctcgttcagctgctacactcaccgcggtctctctctgtccatttcccgcctcctcgccgcaactagggtttcttaagccctcaccgcccatggcgagcggcagggcggctacatccagttccatcctcgtcaacgccgccggcaccagcaagaccctgtccgcatcgctatggtgggactccttcgtcgtcctctccgacgacctcgaccgagccactgctggcccctctgtcccggatgccctcgctaagcggatcaaaagccaccacgcgtggctccgagggtcggtctctatgttcgggaagccgaacgacgcgtccaggagcgcactggaagttggcgaggttgccgtcggggagcgtcgcctcactgtcaagccagagctcaaggaggccgcgcttcgtgcaagcaaatgcctgaacctggatgaagtgcaatcatacattctggtcaagagatcttcagaagtctctccaacaatccgtgatgctgatgctgaggagtttcttcatctggtatctgtacgatattaccttgagcgtcagtgcttactgaagtgcatcagaagaatctttgtgcatgcaagtgacgtgtctgattcaactgatcccattcgagatgaggcttcattattgattagtgaagagatagacagaaaactgatatctatcattgaagattctttttcaactgcatcttctgtaaaagcggaagcggaatttacaatttctagtctggaagaaactttgattgaagttaacttgattcttgacatattgtttcttactttttatgataacttctcaagatgtaatggtagacagtggataactttgtgttcaatttttaaggacattctatgtggttcttatggtgtcgggaaatttgttgcatctgttgaggcaaagaattcatttcattatgctaaagctcagctacttctcatccttattgaaactttggactttgagaatctcctccggatgattcatgatgaagttcctctgagtggagggtgttctgcattttctgtcggtgatattctggagatggatgttgaaatatcaaaattgcctgaattttcattggtagaatcaggaccacttatactggcttgggcagttttcctttgcctagttctgtctcttccagaaagtaacaccaacttggaaattgatcatacatcctatgcccgacgggcctttgagtttgcgccattcaattatttactaggagttctttgttcaagcatcttcagggagtcagatggtcctgtttctggttatcggggtatattgcggacattcatttcagcattcatcgcttcatatgaggtatcttatcagaaagaacacagttcctttgacatgatttcgagtattttatgtgaagtttatgatggagaggaatctctctgtatgcaattttgggataaagatagctttgttgatggtcctatcagatctgttcttcatatgctggaggaggagtatccttttcagatatctgaactgatacgtttcttatcagcagtttgccatgggacctggcctgctaattgtgtatataattatcttgagaggatgaatggagttacaacaatctataccatcccttgtgttgctgatggtgttggttatggccatcaaattgaaagtcatcatccagtcagcattcctagtattgaaggcattacaattccacaaggaacccatggctacattttgaaagttcttcaagaggataccacattagttcgctgggagttcccgcattctggggtatcctttttgctcataactctggcgcaagagctccattcatgcaattacaagaaggcatgtgatatcataggtctactttatcggatggtgtcgtcaaataaggacctgtgcttcgctttgatgcatgttgacaagtcactggctgttcaaacatcaaataacttaggacaaattgaaaagcatgattgatattgctaaggtattttgcaattccattttcaaatatgtgcgagatgttaataatgctgacatattgtccaaaacctttggtctactagcagaaatgatgaaatgcgctccatatcacgtgtttgatgcggcgttcgagtgcaacatcttcacttcacaattaagtagtccatcaagtgattggttactttctggtgccctagctagaatgctttttgctgcctatgaaggaaatggagattgttcttcgcttacatcttcagtgcttgactttaccactcaggttcttcggaaaggagcagatgctgatgatataatatcacctttaattgttttctcaattaaatacatcatgattaatcatgtgaactggaaacacaaggaatgtagtcgttggaagacaaccctacgggtgtttgaattggtgaaaagctgtcttcaagtaaaaccattctcatcaaagcttggtggcatcatttgggaaattctactatatgattcatctgtccacggtgtactctggagcatattatctgtactaacacgattactgcatgactcatataggagcaattatcatggtcttaaggatattgaagatatccagcttgtcctttgcaatggacttgatattatatatcacatcctgtccaatttaccagagggtatgcaagtagctgccgctagagcattctcagcattgtgtttcattgcatataaggcccaacctcagttgatggaaaatgccagctttacaagtgatgtttctgagatacggagattggaatcaaatatatcctgcattctagatgaggatgataaaaataatgattgtttggttgtggctgtattcaaccttttgacatctgctgctcgttatcagcctgcttttcttatttccttgatagagcagagtacgaagtcaactgatcataatgcttccaccaatgatcgtgacaatagagttttggttacttcaaaaagtaatgctagacttgttgaccaaatcttggactatattgataggtccattgagctcatgaatagatctcccttggtgttactcagtattctggacttgttgaaggcactatgggaaagtggtatacgatttttgtttattttagagaagctaagaagctctgtaacattctgggataacttatcacggtgtattcgtgctacacttgatatctcccctattgacaatattgatgccattgacgagaaattttcgttaaggtaccattgtcagggtaaaatatttgagatcatgtcacacgagttatttttgcaaggaaaattgcttacagagacttctaatactgtccaagatgatccaaaggggcaaaaagagcataaaagtgggccttgtcgtatcagtgtagtcttgaaatggttcgataatgctattttggccgatctggtcagtaatttgtcaagtaatgcatacaaaaaggaacttcatcatgcaaaggtagctgcctgcctatgtatcatccatttaataacaaagttgtcaaccggtgatactgggagcttgtctttctcattcatgaagaaaattcagatcatatcaacaaaattgttgcagcaccatgcatttttagctctcctgtcacagtattccctgcatggatacagcggtgaacaagaacttaataatttggttctcaatgatctttattaccttatacgtggagaactcgaaggacgtcagattagctctggcccttttcaggagttgctcagttttcttcttgggtttagaatttttgaacacaatcccttggagcaactacaaaacacatacctgatggcaaatgacaaatttttatttgatgtggagcacatacatgacgagcttggagttgatctctggactgattcagacaagaggtctaaagaagtagctaaaaaaatgctggatattatgagtaaagcaaatttaatgaagtattatgctgatgcaaaactttctgcattgatgtccttcttgaaatttttatctgtctacaaaggagcgatttctaacaaaaacttggacttacctgatggaggcatatcagtagcggccacacaatcagcaattaaatgtgcatgtaaatcatttgagtcaactgttgattcactgctgcctcaagctcatacagatgaggttttgtttcccctcttgtccgggcaagtggaattattgcttactttggcccgaatattgtttcatcaagcaaagaacaagaaatcaagccatctctgtccagatattgtacttctaatgaaaacttcaggtgccagcacttgtttgtttgttgatctcatgccatctgctcatgctcttaagcaaccagtgaagacacttcttgttctgcttttgtcgtcatatgagttcatgtacagcaaggttgacataaaagacctaccaaatgatattaacatttttggcgaattagcccttttaagtgtgagcttgctacctatactgtgcaaattggcagagaatagggaatgctctgatcttgctgttgcatcaatggacctaatattgaagggatctgtaccttctaatttatggatgcctattctgcaaaagcattttcatctccagactatactgcataaatgccagaatggtgatttattatctactcaagttatacttaatttcctcttgaccttggggcgaacaaaggatggtgctaaagttcttcagtctgccaatatttttgcattcttaaagttacttttgagtcagttgtctctggatgactcctgtttgagaaattccttgagcgcccaagtgaaggatgtgaacctatggggcttgggtctcggtattgttgcgtccctgaaccattgtttggatgatgacatttctcataacaatgtcgtgagcaacactatcagcttcctttcaggacatgtgcctttggtgtcatcatatctgtctacacagagtgctactactcatcagagcaagaaacgggcattgtcgcagaagtcacagacatcgctttcagcccttagtcttactgagaatattctcatacttctatgcatcttggcaaaataccattttccacgggacactggaaagaaggaagtagattcagaactaagagagattattatccacctgctagcatttataagcaaaggaagtgtaaagactggcaatgcctctaaatggaactcatcgtttttctgccctgctgttatcaaagaggaagtagcgcttaatgagaaaccaccactcatttgtagcaagtatgggtggttcagatttgcagcaagttgtactttgtcaactgcaggtgtttcagtttctcccagtgcagctttatcagtggtgagacgggacaagacttcaggagattctgattctataaggcagactcgttttactgagatattagctgttcagatatacaggattgcttttcttatcatgaagtttctctgtagtcaagcaaaagaagcagtaaaaagggcagaagaactggagtttcttgacctcgcccattttcctgagcttcccatgccagatattcttcatggtttacaggatcaagtggtttgtattgtcactgaaatattcgaggcaaatgggtcaagcactctaaatcccgagacagagaaggtatgccagctcctattggtgacacttgaaacgtcactttacatggaactatgtgtatcccaatcatgtggcatcaggccagtacttggtcggcttgaagatttctgcaaaggaattaaggctatgcttcaagctatagagaagcactccagttttgaaccttttgtcaggtcgctaactgaaattacttctcttttgtatcccgggcttttgcataataaccttctcatgtgactcttgtaaattgtcactgttaaagagatgtgttgttggctaactttgaattgagccacatatggacttgcatactcagttgacgtcacccgaggaagcttcgttttcgcacgttactgtcaccaaagtaaagtgggttccagcggctacgaagcaaattcgcagagccagggcaccaaatcaaactgaaggcgacgacgcccgaggaagcttcgttttcgcatcacctttgttcggtttcacagccgaggctcccaaagtggccagagaatcttggtggacttgcctttccgggactccacactgccgaccacgcttattcacccgtgtaaattatgctgggattctcctttgctggctcgtctggccgatgtgcgtcccatcatcacagagaactagaaacaaatgatacatatgtagatgctatgcgttcttgatcaatcagacacgcatttttttttctgtagaggaatacatgttcggcgcgttgcatctttacactaccatttgtttgccttctccatcctgtttaagccctgtttcaaaacgctaccatgcaaattaaccctaagggataatttgggagccgtaaaaccggaggggattggagggtctagatttcccttagggttgatttggtgacaaagggatcacgggaggattggaagggattgagggggaaataaactaatttccctctcaatcccctccaatcctcccgagatcccgggtcaccaaatcagcccttagggtccgtttgtttccttttattttgaggaattgga

SEQ ID NO: 6724 - DNA, 1374 bp, Zea Mays
tatatcatcccctcggacccctccccttctcataacggcagggcatgcatgcatgcgtgcacagagacacccacatctctcgttcaccatgcctgcttcaccctacagctacacactactggtcgggcttttcctcgtctccctgctgctgcacagccccaggccgtgctcttgtgcgaattaccacactctcgcggcgggccaggcgctcgctgtcggcgacaccctcgtctccaggaacggcaagttcgcgctcggcttcttcccgtccggcaccaccaccacacccgccgccactggaggagaacaagcaacacccaagattgcgatgggacgattattagatcattcacgtatagtcacctacgccacgcgacaagaaacttctctgacaggctaggaggcggcggatttggttctgtgtacaagggaacgattctagggagggacgacgatggttccgcggtcactactatagcggtgaaaagactactagatggtgctcgtcagggagagaagcaattcagggctgaggtgagttcgataggcctgatccagcatatcaacctggtgaaactggtcggtttctgctgcgagagcgataaaaggttgctagtgtacgagcacatggtcaatggttctctcgacgtccatctgttcaatagtaatggcggcggtggtggtggaaaggatggtgtcgtcgtcctagactggagcacgaggtaccagatcgccgtcggggtcgcgagagggctggcgtacctgcacgagggctgccgcgagcgcatcatccactgcgacatcaagccggagaacatactcctcgacgcgtcgctcgtcccaaagatcgcggatttcgggatggcggcgatcgtgcccagggatttcagccgcgtcctcactacgttcagaggaaccataggctaccttgccccggagtggatcggtggagaagccatcaccgaaaaagtggacgcctacagcttcggaatggtgctgctggagatcgtgtcagggaggaggaactcgcctaaggtatacaccaccaacagctgccacgtttcttatttcccgttgcaggccatcacgacgatgctccacgacggagatgtgaatagcttggtagatccacagctgcacggcgagttcaacttggaagaggctttaaggctatgcaaagttgcattttggtgtattcaggataacgaacttgaccggccgacaatgggtgaagtggttcaggctctcgagggcctacatgatgttggagttttatactttatgtttatctcttcatgtttgtagcaatggtacgcaatgcaataattgtaccaacgcatcatgctatacgaatattttttttggtgaatggtg

SEQ ID NO: 6725 - DNA, 1194 bp, Zea Mays
accttcctgcaggctgcagtagattgacgaatagagcgcgtgcgcaggagtataaaagctagctccggtccccgggggccgcggcctcgggctgccgctggttccgaacgcgtggtgcgacccgggattccctcgcgcttctctgtgtccccttcctccggcctgaggggaggaccccgcagatcccatcgaaattcacggccggcctaacccaagccggtcctccccgactcccggcgacgaccaatttctccttgtgagaagaaatgcatcatgagtcaagagtatgcttcagaacatggcttgcctatgctagaacatgtcctccttccaaagacaaagggcttcatttgttgtttgcaagagctgaggagttccttagatgcagtttatgatgtcacaatagcatacaagcatcgactcccagattttctggacaatgtgtatggcgttgatccttctgaagtccacatccacgtcagaatggttcagctccatcacatccccacaacagaagacaagataacagaatggatggtagagaggtttaggcagaaggaccagctcctggcagatttcttcatgaaggggcactttcctgatgaaggaactgaaggagatctgtcgacgccgaagtgcctggcaaacttcttaacagtagtatgcttgacggccatctgtttgtacctaactcttttctcatttgtgtggttcaaggtctatgttgtagcaagctgcgcttacctctcatttgttacctattactccatactaccaccccaactgataggttcaccagagggtgatgtcaaggccaaaaaggttgtgtagatgttgatgtaacttgccatgaaaactgtacatccgcaaacgatttttactgctggagtttctgccttgtgacatttaaggttccctttctgcagtaggaggtatgaatgtatgatagtgcgtatgtaggaattttctgtgattcatcagtgtgtgagggccctatctgaaggcagtaaactgattttagatatatgttcttaacatttttataaacaaaactagaccacatttgttacaaatattgaagatttatttatttattttatttgatctttgttctgatgcaaacaatcaaacattagctatatccaacttgaatatattaatacaaacaaccaaacaaaaacaaccaaacaaacg

SEQ ID NO: 6726 - DNA, 2661 bp, Zea Mays
cgcgtgcgcaggagtataaaagctagctccggtccccgggggccgcggcctcgggctgccgctggttccgaacgcgtggtgcgacccgggattccctcgcgcttctctgtgtccccttcctccggcctgaggggaggaccccgcagatcccatcgaaattcacggccggcctaacccaagccggtcctccccgactcccggcgacgaccaatttctccttgttctcgcccctccaacccttcatgatgcttagataatatacagtgctgggttttagcactgttttgagtttttaaattgagctaaggcttcagtgttagtcttgaaagatgaacggttcaagtggttcccaagggcatcatgtcagtggagagaagaagcaagtgtgtcatgttagccggcccattcttaacaatggaccaaagcaccgtccattgacccccatgaggcgatgccgtggtgtagcatgtgtagtgattatactgtcaacagcattcctgttggtagtttacttggctcctattactacttttgctgtgcggctgttcagtgtgcattacagccgaaaggcgacttcctttctatttggaatgtggttatctttatggccgttcttgtttgagaagataaacaaaaccaaggttgtcttctccggtgaaaatgtgcctccaaaacgacgtgtattgttatttgctaaccacaggaccgaggttgactggatgtacttgtgggatcttgcactgaggaaaggccatttaggatatatcaagtacatacttaagagcagcttgatgaagttgcctatttttagctgggcatttcacatttttgagtttatcccggtagaacggaaatgggagattgatgaagcaattattcagaacaagctatcaaaatttaagaacccgagagatcctatctggttggcggtttttcctgaaggcacggattatactgagaagaaatgcatcatgagtcaagagtatgcttcagaacatggcttgcctatgctagaacatgtcctccttccaaagacaaagggcttcatttgttgtttgcaagagctgaggagttccttagatgcaggtgaacaccctttcccctactcgttctatgcacgcatgatacgttttttgtcatgatgtttgtggcactattgctcaaggatttctttttgtcttctcggcagaatcttcatgatcaaataactgtcaatctaccatatatatccattacattaatggcaattgtgaaaaatatatattaaatctctgtcaaactattatattctctggagtatgttataaacattcttagaacccatgtagaatggaaattattcacactctgaaaattgttatacttttttccttgagtatgttataatcactcttaaaatctatgaaatttcttaaaagttcacgttcagaaagttacatgggttatcaattcttgctatataatgaaaaatgttcttcactgttctaggcatctagtaacaataatttcagggaatgtaactataatttgagttaatgaaaaggatcatattatgctttcagagggaactaaacgagttagtactggtgttgtacaaatgtagtctctgtgtggtccaatagaccaatatatacttgcattcccaaaatatctcaccattgttactgatcaaaacaactacatcgaggaaactaagaggttacagccacatatacttgaaatccatgtaacatgaaacataattgcaactgtacctattaagttttcaatcccctagctacctgtagtttttgaagcgtttcttttctgtttctgcaatatttgactcctgagccctggcatgccgtccttgcagtttatgatgtcacaatagcatacaagcatcgactcccagattttctggacaatgtgtatggcgttgatccttctgaagtccacatccacgtcagaatggttcagctccatcacatccccacaacagaagacaagataacagaatggatggtagagaggtttaggcagaaggaccagctcctggcagatttcttcatgaaggggcactttcctgatgaaggaactgaaggagatctgtcgacgccgaagtgcctggcaaacttcttaacagtagtatgcttgacggccatctgtttgtacctaactcttttctcatttgtgtggttcaaggtctatgttgtagcaagctgcgcttacctctcatttgttacctattactccatactaccaccccaactgataggttcaccagagggtgatgtcaaggccaaaaaggttgtgtagatgttgatgtaacttgccatgaaaactgtacatccgcaaacgatttttactgctggagtttctgccttgtgacatttaaggttccctttctgcagtaggaggtatgaatgtatgatagtgcgtatgtaggaattttctgtgattcatcagtgtgtgagggccctatctgaaggcagtaaactgattttagatatatgttcttaacatttttataaacaaaactagaccacatttgttacaaatattgaagatttatttatttattttatttgatctttgttctgatgcaaacaatcaaacattagctatatccaacttgaatatattaatacaaacaaccaaacaaaaacaaccaaacaaacg

SEQ ID NO: 6727 - DNA, 1011 bp, Zea Mays
gttttaagatcggtgacaactagagagaaggcgaagcgaacttgagccagagagagaatctcgcaccgcagcaggaggggaccgagagagaagcgaactcgagaaagggattcaaggaggctgttgccgatggccatggcggcgcggctgctgcgagcaaccgaggtggcatctcgatttctatctgcttcccatggtttcgtccagcgagctgcatacacagctggtgggatagtcgatgttggccaaccaacaccccagtctcatccagagttattagctgatggagagatcacaccaggcatcacaaacgaggaatacatctctagaagaaaaaaacttttagaggtgctaccagagaagagcttggccattattgcttctgctgatcagcagatgatgactgatgtagtgccatatccattcagacagaatggtgattacctgtatattacaggttgtacacaacccggtggagtagcagttttgagtgaagaaacagggttctgcatgttcatgccagatacaaataaggaggatttagtttggcaaggtgaaactgctggagttgaggctgctgtggatttctttaaagcagataaagcatttccacttagtcagatgcaaaagatccttcctgaactgattgagcaatcaaaaggggtgtatcacaatgtgaatacaacatcttcttataagaacttggatgcctttcgtagggcatcactcaacaataaagtaaaagatcttacaaattacactgatgaattacggtgggtcaagtcgaaatcagaaattaagttgatgagggaatcagcatctattgtttctcaggtgaacttttggagttgatgtggggaaaaccattggtagagtaacagagactcaacactgaaggtacttcagctaattagataggtgggtgaacatgtagtcctttttggtttggtaaaaccaaaggtacactgtctaatgattatccataccacactgtcctgaacatatttcctg

SEQ ID NO: 6728 - DNA, 1969 bp, Zea Mays
gttttaagatcggtgacaactagagagaaggcgaagcgaacttgagccagagagagaatctcgcaccgcagcaggaggggaccgagagagaagcgaactcgagaaagggattcaaggaggctgttgccgatggccatggcggcgcggctgctgcgagcaaccgaggtggcatctcgatttctatctgcttcccatggtttcgtccagcgagctgcatacacagctggtgggatagtcgatgttggccaaccaacaccccagtctcatccagagttattagctgatggagagatcacaccaggcatcacaaacgaggaatacatctctagaagaaaaaaacttttagaggtgctaccagagaagagcttggccattattgcttctgctgatcagcagatgatgactgatgtagtgccatatccattcagacagaatggtgattacctgtatattacaggttgtacacaacccggtggagtagcagttttgagtgaagaaacagggttctgcatgttcatgccagatacaaataaggaggatttagtttggcaaggtgaaactgctggagttgaggctgctgtggatttctttaaagcagataaagcatttccacttagtcagatgcaaaagatccttcctgaactgattgagcaatcaaaaggggtgtatcacaatgtgaatacaacatcttcttataagaacttggatgcctttcgtagggcatcactcaacaataaagtaaaagatcttacaaattacactgatgaattacgagaggaaagccagttggcagctaagattgaatacgagtgcaaaatgagaggtgcccaaagaatggcgttccatcccgtagttggtggaggagcaaatggcagcattatacattattcaagaaacgatagaaaaatcaggacaggtgatcttctgctcatggatgttggctgcgagtatcatggctaccttagcgatctgactcgaacatggccaccctgtggcaggttttcacctgctcaggaagagctgtacagcctaatactggagacaaataaggagtgcataaagctctgtaaacccggcacaagcattaacgagatacacaatcattcggtaaagctgttgataaagggattccaagaactgaggatcctggagaaggggaaatccatccaatacaactacttgaacccaaccgcaataggccactcgttaggcatggatattcatgactccatgacactccccaaggacaagcccttggagcctggcgtcgtaataacgatcgagcccggggtgtacatcccggcggccccggtcctgaacgagcgcgcgccgagcaggtaccgcggtatggggatccggatcgaggacgaggtcctcatcaccgacgacggccacgaggtgctgacggcgtcggtgcccaaggaggtctcgcacctgaccaccctgatgaacatgggcaggggcggctcggctgcggacgcccatggccatgagctgcgagccgcctgcagctagctgaggcggctgcgtgcgtgaggtcatgcccgtggcggcggccggacctagtagacctggcacgacgtcgtggagcagaatctacgtgctctgcgaatacccgttgcatccattgattggactgttgtaatcacgggaacagatagcgaattgggcaggtgtttttttaaggtaatgggaggtgttatattctggacccttaccatggcgcgtcattgtatttgcatgcgcagttgtgttgtggccgcattcagcttctttatattgttttgtcgccgttcagaacggttagccgaatcttaccgtgagccatggcatggtgaccacacggattacagccagccgtgtggcgctagcagatgcatgcaacagtcggctggggcggccatgaatgcgggaggctgtagacctgtagtgatgtcctgtttgtttcagtttatacattatataatct

SEQ ID NO: 6729 - DNA, 1540 bp, Zea Mays
atcgtctccagctgctgtcttgctcttccccgccagcaccagcacgcagcacgcagcaccagccaccacaccacccgtcacgtcactactgctccttcctttgtcctctcctgcctcacgtctcacgccagcagaagcgccaaacaccagcagcggacgaccacgccaactctaggtctacgaggaaggggggggggagggaggagcagcgcagcggcagccgatggtgtcgacgagctcgacgccgcaccctctggatccgtccgtcccggccgtcgtggggggcggcaaggaggaggaggaggaggcggtggagtcttgtgccgccgccgccgccacgcccttgccgccggttgggatcgacgacgaggaggagggcccccggagagtgcgcaagccctacaccatcaccaagtcgcgcgagagctggaccgaccccgagcacgacaagttcctcgaggcactgcagctctttgaccgtgactggaaaaagattgaagcatatgttggctccaagacagtaatacaggtgaggaggtctacatttttgaagtaccaactaccagcataggattaggagtcacgcacagaagtactttttgaaggttcaaaagaatggaacaggtgagcatttgcccccacctaggccaaagcgaaaggctgcccatccatatccacacaagtcctcaaaaaaggcccttcaagttgtcttaccacaacaagtttcacacataatggagcaaggctgtggtacacctatggatgtagctactgttgctacagactctagtgtaaataatgcttttcctgttcaacatttcagtccgaggcatacacaagccatgccagactttgctcgtgtatacaacttcctgggaagcatatttgatccagagacaaatgggcatttgcagaagttgaaggaaatggatcccattgatgctgaaacggtactgttgctgatgaaaaatctgtcaatcaacctaactagtccaaactttgaggagcataggaggttgctctcttcggatgcctcaagcatggatcaaaagtcgggctcttcccgggttcatctcccgttcatgataacgagcaagtgagagaagcagctggctggcctgaaggcaagaaggtcgtttggagtcgtcacactcaggagcaaggcgatgcgtatgtacatatatcttaataagcagctttaggatagcttggtttgctcgaccgacatgttgcaagtttatgcgcctttttctttattctccgcccctccagttttgcccgttgtagtatggaacttataacatgcgtgttttatgccgcatcttacaaaatatttttgtcccatcacaaggatgaacgggtgggggcatgtgtgtgttttttttgccgtgtgtgtatgtatacagcatgcggctgtatgtgtagatcaggctatatatataacagactgtgtgctgttctattattgccctcgtttcaaatacttattttttttgccgttattaataatattattacatggagtatggtattagtatat

SEQ ID NO: 6730 - DNA, 720 bp, Zea Mays
ctcttcttcccatcgagacccaaccataccagcggcgccgcaggctgacaaggaggcggagtagagtggctggactacctcgacacctccactgcaaccatgggtatctcacgtgattcgatgcacaagcgtcaggccaccagtggaaagcagaaggcgtggcgcaagaagcgaaagtatgagcttggccgccagcctgctaacaccaaactgtctagcaataagacagtgaggagggtctatgtccgtggaggctacgtgaagtggagggctctccaattggatacatgtaactactcgtggggaagtgaggctcttacccgcaagactggcatcctggatgtggtctataatgcatcaaacaatgagcttgtgaggactcagactcttgtgaagagtgccattgtacaagttgatgctgctccattcaagcagtggtacctcactcactatggagtggacatcggtaggaagaagaaggtgattatcgctaagaaggatgcgactgagggacaagagggtgaggctatagttgaggaaacaaagaagagtaaccattggcatttccttttattggccagctacatccttgaggataaagagctcgagttctacatgaagaagctccagagggtccagttcttgaaagggtgggaatgtgtccaagaagacaaaggcatcgacccgccaaatcttcgctaccaattcaaacagcaatag

SEQ ID NO: 6731 - DNA, 2568 bp, Zea Mays
cagcctacacgcccccgcctcctgccctcctctgtccacatcctcgcctctccccactagttcgctcgcgtgatggtggtgcgggagcagcggaacaagggttcgtcgtcggccaccctgtgacaccccgcccccgcccccgcggcggaacctgcaaacccggaggccggagctccgacttcgtcggccatcgaccgcgtctgatcggcgctgggacctgccgtccggacgaaatcggtcagcatggcggggcccaatgagaaggcggcggcgggaggcgggggtggcgagaggcgcaagtacccgatccacatggaggactacgagctgtacgaggagatcgggcagggcgtcagcgccatcgtgtaccgcgcactctgcaagccactcgacgagatcgtcgccgtcaaggtggtcgacttcgagcgcaccaacagcgacctgaacaacatcgttcgtgaagctcagacaatgattttgatagaccatcctaacgttgtcaaggcgcattgttcatttgcaaaagaccaaacgttatgggtggttatgccgtatatggctggggggtcctgtcttcacataatgaaatcagtgcatcctactggattcgaggaacccatcatcgcgactatacttcgtgaagtcctgaaaggtttagagtatcttcaccatcatggctctatacatcgagatgtgaaggcaggaaatattctagtcgattctcggggtggaattaaacttggggactttggagtctctgcttgcctttttgattctggtgatagacagagggccaggaatacttttgtgggaacaccttgctggatggcgcccgaggttatggagcaactacatggatatgatttcagagcagacatatggtcctttggaattactgcacttgaacttgctcatggtcatgctcctttctctaagtaccctcccatgaaggtcttgctcatgacacttcagaatgctcctccaggtcttgactatgaaagagataagaaattcacgaggaacttcaagcaaatggttgctatgtgtttggtaaaagacccttcaaagaggccttcggcaaaaaagttgttgaagcaaccatttttcaagcaagctcgttccactgattttattgcacgaaagcttttagaaggattgcctggccttggtgttagatatcaagctttgaaggtacagtggttttaagttctactttatgactaactattcatcgtgaaattagcacagaaaggttcgccatgatgcaggaaaaggatcaacatttaatggctcaaaagaaaatgtctgatggaaagaaagaagaaatctcgcaggatgaatacaaaaggggtatcagcagctggacctttgacatggatgacctgagatctcaagcttcattgaatgtgaagacagtaccttatgcaaagattcagatatatctttctatgacttggacagtttacaggatcaagcaccagaagggtcacacttgttgagagatttctcaacgaagtatgatgctgacattgaaaatgatatgacaaccaaagataagtcagccgtttcatctcctgatcagcctgctagcttagtgagctctaaacagcaaactagcatccacaaccttgacaagtgtaatggagggcatttgcatgtatcagatgaaacatcttctgaagctgctcctaagacacataaatcagcagaggaccatgatgatagatccaaacctccacttataagaggtcgatttagagttatacctgggcatgttgactcaaaggctcaaccacctggcctacagaagtgtcacagcatgcagacaatttctcgccttccatcattaagtataccctcttccgcagaagttgcatcaaccattattggtggctccttctacatgcagctatatagtattctacagacaaatatgcttcagagggaccaaatacttaacgcgatgaagcaggtgagtggttgtgctatggcttcaccaggcgtaccttctatggcttcaccgtgtatcccttccacaagtcgctcgacatctccatcaggtgtaccatcagttgacagatccatgctggaagctgcacaagaaagggagaaagagctgctgaatgaggtcttggagctgcaatggcggttattgtgcacacaagatgaggttcaaaagcttaaagcaaaggcagcgcagatctgatgctgaagctgttaagggagcattaagggcgcgtcatgataagatgatctgttcattcggttttcaaatggctatttagcataggagagagatacaaaattaaggattggtgtatatttaaaaaggtgctagtgatgctcgagtgtccaatcctgtctaagcaggacattaatttcgtacaatctgtgtgtttgtgtttatgggtggcatggcgctgtgtttttgttggagcgcaattcccaggttgggacttgggaaagatagcttaacatgcctatgggttttaatctttccttttgttgttgcatgactttttggttattctcattctacgtagattggatgaggttgaaagaaactag

SEQ ID NO: 6732 - DNA, 2708 bp, Zea Mays
ctttctcctcctccgcaacgcacggcctgtcactacagcctacacgcccccgcctcctgccctcctctgtccacatcctcgcctctccccactagttcgctcgcgtgatggtggtgcgggagcagcggaacaagggttcgtcgtcggccaccctgtgacaccccgcccccgcccccgcggcggaacctgcaaacccggaggccggagctccgacttcgtcggccatcgaccgcgtctgatcggcgctgggacctgccgtccggacgaaatcggtcagcatggcggggcccaatgagaaggcggcggcgggaggcgggggtggcgagaggcgcaagtacccgatccacatggaggactacgagctgtacgaggagatcgggcagggcgtcagcgccatcgtgtaccgcgcactctgcaagccactcgacgagatcgtcgccgtcaaggtggtcgacttcgagcgcaccaacagcgacctgaacaacatcgttcgtgaagctcagacaatgattttgatagaccatcctaacgttgtcaaggcgcattgttcatttgcaaaagaccaaacgttatgggtggttatgccgtatatggctggggggtcctgtcttcacataatgaaatcagtgcatcctactggattcgaggaacccatcatcgcgactatacttcgtgaagtcctgaaaggtttagagtatcttcaccatcatggctctatacatcgagatgtgaaggcaggaaatattctagtcgattctcggggtggaattaaacttggggactttggagtctctgcttgcctttttgattctggtgatagacagagggccaggaatacttttgtgggaacaccttgctggatggcgcccgaggttatggagcaactacatggatatgatttcagagcagacatatggtcctttggaattactgcacttgaacttgctcatggtcatgctcctttctctaagtaccctcccatgaaggtcttgctcatgacacttcagaatgctcctccaggtcttgactatgaaagagataagaaattcacgaggaacttcaagcaaatggttgctatgtgtttggtaaaagacccttcaaagaggccttcggcaaaaaagttgttgaagcaaccatttttcaagcaagctcgttccactgattttattgcacgaaagcttttagaaggattgcctggccttggtgttagatatcaagctttgaaggtacagtggttttaagttctactttatgactaactattcatcgtgaaattagcacagaaaggttcgccatgatgcaggaaaaggatcaacatttaatggctcaaaagaaaatgtctgatggaaagaaagaagaaatctcgcaggatgaatacaaaaggggtatcagcagctggacctttgacatggatgacctgagatctcaagcttcattgggcacagaatgtgaagacagtaccttatgcaaagattcagatatatctttctatgacttggacagtttacaggatcaagcaccagaagggtcacacttgttgagagatttctcaacgaagtatgatgctgacattgaaaatgatatgacaaccaaagataagtcagccgtttcatctcctgatcagcctgctagcttagtgaggaatgcttctatgcgtgggatgcccataaacggttctttcaggaaagacaactctacagaaagcttcgatttggaatgtcaagagaaacatctggacattgttccgactagctcatcccctgaaaggaagttttcttttagttcttgctcatcaaatgggctccttttgtccaaagagagctctaaacagcaaactagcatccacaaccttgacaagtgtaatggagggcatttgcatgtatcagatgaaacatcttctgaagctgctcctaagacacataaatcagcagaggaccatgatgatagatccaaacctccacttataagaggtcgatttagagttatacctgggcatgttgactcaaagaagttgcatcaaccattattggtggctccttctacatgcagctatatagtattctacagacaaatatgcttcagagggaccaaatacttaacgcgatgaagcaggtgagtggttgtgctatggcttcaccaggcgtaccttctatggcttcaccgtgtatcccttccacaagtcgctcgacatctccatcaggtgtaccatcagttgacagatccatgctggaagctgcacaagaaagggagaaagagctgctgaatgaggtcttggagctgcaatggcggttattgtgcacacaagatgaggttcaaaagcttaaagcaaaggcagcgcagatctgatgctgaagctgttaagggagcattaagggcgcgtcatgataagatgatctgttcattcggttttcaaatggctatttagcataggagagagatacaaaattaaggattggtgtatatttaaaaaggtgctagtgatgctcgagtgtccaatcctgtctaagcaggacattaatttcgtacaatctgtgtgtttgtgtttatgggtggcatggcgctgtgtttttgttggagcgcaattcccaggttgggacttgggaaagatagcttaacatgcctatgggttttaatctttccttttgttgttgcatgactttttggttattctcattctacgtagattggatgaggttgaaagaaactag

SEQ ID NO: 6733 - DNA, 2740 bp, Zea Mays
agcctacacgcccccgcctcctgccctcctctgtccacatcctcgcctctccccactagttcgctcgcgtgatggtggtgcgggagcagcggaacaagggttcgtcgtcggccaccctgtgacaccccgcccccgcccccgcggcggaacctgcaaacccggaggccggagctccgacttcgtcggccatcgaccgcgtctgatcggcgctgggacctgccgtccggacgaaatcggtcagcatggcggggcccaatgagaaggcggcggcgggaggcgggggtggcgagaggcgcaagtacccgatccacatggaggactacgagctgtacgaggagatcgggcagggcgtcagcgccatcgtgtaccgcgcactctgcaagccactcgacgagatcgtcgccgtcaaggtggtcgacttcgagcgcaccaacagcgacctgaacaacatcgttcgtgaagctcagacaatgattttgatagaccatcctaacgttgtcaaggcgcattgttcatttgcaaaagaccaaacgttatgggtggttatgccgtatatggctggggggtcctgtcttcacataatgaaatcagtgcatcctactggattcgaggaacccatcatcgcgactatacttcgtgaagtcctgaaaggtttagagtatcttcaccatcatggctctatacatcgagatgtgaaggaaatattctagtcgattctcggggtggaattaaacttggggactttggagtctctgcttgcctttttgattctggtgatagacagagggccaggaatacttttgtgggaacaccttgctggatggcgcccgaggttatggagcaactacatggatatgatttcagagcagacatatggtcctttggaattactgcacttgaacttgctcatggtcatgctcctttctctaagtaccctcccatgaaggtcttgctcatgacacttcagaatgctcctccaggtcttgactatgaaagagataagaaattcacgaggaacttcaagcaaatggttgctatgtgtttggtaaaagacccttcaaagaggccttcggcaaaaaagttgttgaagcaaccatttttcaagcaagctcgttccactgattttattgcacgaaagcttttagaaggattgcctggccttggtgttagatatcaagctttgaaggaaaaggatcaacatttaatggctcaaaagaaaatgtctgatggaaagaaagaagaaatctcgcaggatgaatacaaaaggggtatcagcagctggacctttgacatggatgacctgagatctcaagcttcattggtactcatataaatttccatcaacgatgttcacaccatgcaattccatgtaattgacctttttccagggcacagaatgtgaagacagtaccttatgcaaagattcagatatatctttctatgacttggacagtttacaggatcaagcaccagaagggtcacacttgttgagagatttctcaacgaagtatgatgctgacattgaaaatgatatgacaaccaaagataagtcagccgtttcatctcctgatcagcctgctagcttagtgaggaatgcttctatgcgtgggatgcccataaacggttctttcaggaaagacaactctacagaaagcttcgatttggaatgtcaagagaaacatctggacattgttccgactagctcatcccctgaaaggaagttttcttttagttcttgctcatcaaatgggctccttttgtccaaagagagctctaaacagcaaactagcatccacaaccttgacaagtgtaatggagggcatttgcatgtatcagatgaaacatcttctgaagctgctcctaagacacataaatcagcagaggaccatgatgatagatccaaacctccacttataagaggtcgatttagagttatacctgggcatgttgactcaaaggctcaaccacctggcctacagaagtgtcacagcatgcagacaatttctcgccttccatcattaagtataccctcttccgcagaagttgcatcaaccattattggtggctccttctacatgcagctatatagtattctacagacaaatatgcttcagagggaccaaatacttaacgcgatgaagcaggtgagtggttgtgctatggcttcaccaggcgtaccttctatggcttcaccgtgtatcccttccacaagtcgctcgacatctccatcaggtgtaccatcagttgacagatccatgctggaagctgcacaagaaagggagaaagagctgctgaatgaggtcttggagctgcaatggcggttattgtgcacacaagatgaggttcaaaagcttaaagcaaaggcagcgcagatctgatgctgaagctgttaagggagcattaagggcgcgtcatgataagatgatctgttcattcggttttcaaatggctatttagcataggagagagatacaaaattaaggattggtgtatatttaaaaaggtgctagtgatgctcgagtgtccaatcctgtctaagcaggacattaatttcgtacaatctgtgtgtttgtgtttatgggtggcatggcgctgtgtttttgttggagcgcaattcccaggttgggacttgggaaagatagcttaacatgcctatgggttttaatctttccttttgttgttgcatgactttttggttattctcattctacgtagattggatgaggttgaaagaaactag

SEQ ID NO: 6734 - DNA, 1307 bp, Zea Mays
actagcatgtaaatatagaaatatataggaatataatcttaaataggtttattgatttaatagagaagtaaaaaaaaagaaaaaaagaaaacagttaagattaaggttatatgggccaccagtttcccggtccatgctaaactcaccctgcagccgccacctcatgaactcaccctgcagcaccctcaggcctcaccgcctcagctgccaccctcaccctgcatccgagagagagagaggagagggacagccaccgtcaccgccaggagacaagcgccgccgccgctaggaatcaggagacaagcgagcgcgatggggatggtgagactatggacgaattcgaagaacggttgtttgggggcaaggacacagacaaaggatcactctacgagaagctcgatagggctgagaacactgcgacaggagcagttcaggatggatggatggttatgattcttttaatgatggcttaaatgatacaattgctaatgcggcacgcaacatccaaatggaggaggacgaggacgtcgacggtgactgggaagatgactttgagttcaggcctgatgttcggtttaggcgaggttcaacgtattctgttcgggaccttgaccttagaaaacctgcagccgcaaagaaccctcctagacgacagtttgaaacaactacagcggaggtactgaagaaggctgattttaggaatgttagattcctctccaactttcttacggaagctggaattatcatcaagagaagccagacccgtataagtgcaaaagctcagcgtaagattgcaagagagatcaaaactgcgcgtgcgtttgggttaatgccttttacaacaatgggtagaagaccattcttctttggcagaagtgcggaggagcattattcggatgatggatattttggctttgtgaagcagaaggatggtgagcctgttgagaatgaggacgctgagccaaatgtggaggctgtgtaaacattctggagcatcctttttttgcaagcgctccgttcggtttcttctggtgccttcatgacaagtcacacaatgctcgttttgcgtcttcagatcatagcgtagctcagcttgaataaaactgtaacatcacgcctgttttgtgaaaactcgtgccttgctcaattgtgccactttagcagacatccccagctcacctcatcctggctggagatcatatcatatgcagatatgaaatggaacgttggatcagagttttagtggacgctcaattttttttgagtgtattgggacagaagcctgaagcaggtagccaggtaccaca

SEQ ID NO: 6735 - DNA, 849 bp, Zea Mays
caatcagggtatgattgccacaggttgttgcacttcccttagtgcgccaccctccttggctatatattgtaatcccttcaccatctaatacattaattctattcagccacttgtcttacaccctcatattttcttcttaataatataatgatgtatgatgtctagttctcttgcgcgtttgagaaaaaaaagttcaccgcacttagccaacttgtccttgactttatcatttgttgaaactacttttcaaaattgtacgcttattattttgcaggcgaaggtgcatggttgttgaaactctggctgaaaagcattttgatttagctttcagaatgcttcatgagtttgatctcccagaaaggaaaaaagggggccagttgacagagttcttgaagaatataagggggactatagatgatgatgaatgggatcaggttattggtgctgctataaatgtttatgccaacaagcataaagaaagaccagatcgccttatcgacatgctaatcagcaatcacaggaaagtacttgcttgtgttgtctgtggacgtctaaaaagtgcattccaaatagccgcacgaagtggaagtgtcgctgatgttcaatatgttgcccatcaggtcagttatcttcacaaatttacagatgtttgctgcttattaataatcgaatgaattttatgttgcatctttctactaccatcaatgacttgtagccccctgcccctcttcaaaactatagttcagctttgtactactccctatcctaaaattactgtcattttagctttgaaagtatgtcccacaaagagtgtcgtttcgctagctacggaagtcctgtgcctattgg

SEQ ID NO: 6736 - DNA, 2278 bp, Zea Mays
acagagtcacagtcactgttcacacaacagctgctagtagccgtagcccgtaggcgagccagaggcggcccaattcgagagcggttccggcggcgtgggcggcgccgtgcctgagatcggagccccgtggcgcggtgctggcaactggcggcgcgatgtgggcggtccacgggagggagtccacggccgctgcgcttcgcctgctgctgatcgcgatcgcctgcggcctcgtcttcgcgctcctccacctccccctcccggatgaccgtgcgcgaaccgccgaccccggtgggcagcgcggcgctgctgggggcggcggggcccgcctgtcggtgcagcaggggagggttcgagaggccagaaggctgagtgtcgtcaccgaagagatgggcaaactgacgaaacggcggcggaagaagatgaaaggatatctaaatctcccccagacaccaaagagaagatctggatgatgcaagatcagctaattttggccaaggcgtacttgcatttcgcttctccccaaggtagtgtacatttagttcgagagctgaaattgaagataaaagagatcgaaagggcaataagccactcaagtggaggtacccatgtacctgggagtgtgttgcaaaaaataaaggcgatggagctgaccctttcaaaggctcagaggacctacccgcattgctctcagatgacgtcaaagctacgtgcaatgatgcataatagtgaagaattggtcagagcacaccaaagtgaatcttcattccttgagcaggttgctgtgaggacattacccaaaggccatcactgcctagcaatgcagcttaccgcagaatacttttcgttagatcccactaaacgtgaattccctaaaagagacaacattcagttgggtggttattatcattatgcgatgttctctgacaatgtgcttgcaagtgctgtggttgtcaactctacaattgctgcatcaaaggatcctggaaggatattattacatattgtaactgacgcgttgaattatcctgcaatgatgatgtggtttctgacaaacccaccaactccatcagtaatccaaatccagagcctagatgatttgaaatggttgcctggtgatttcagttccagattcaagctgaagggggttcgggatccgagatacacttctgcactcaaccacttgcgtttttatttgccagaagtgtttccatctttgagcaaggttctactcttggaccatgatgtggtagtacagaatgacttgtctggattatgggacctagatatgaagggtaaggtaaccggtgctgtcgacacatgcacctcaagtgaaggtttccgccaattggatagccttattgatttttccaatccaagcgtcttcaacgaacttgacccaaaggcttgtgcatttgcatttgggatgaacatatttgacctgaacgaatggcgcaaacagggtttgagtacaacctatcatagatggtttcaactgggcaaaagtgagaagttgtggaaggcaggaagcctgccactgggtcaggtcgtcttctacaaccggacgctgcctctggaccaccggtggcatgttctagggctcggtcatgactccagcatcggaagagatgaactcgagagtgcctctgtcatccactacagtgggaaactcaaaccctggttggagatttctatcccaaagtacagaggctactggaacaggtaccttaactacgataacccgcacttgcagcagtgcaacattcacggatagaggcgatggcgggtgaggtgattcgcaaggtagaactgggatatacgcaacttcgctgtagtaacttattaggagagcaagttgttgtttttttgtttctgttgctagatgccctatttgcaattttgtttgctagtagtcacaatcggtacaaaagcaaaaaaggaagaacaaaatcgagtacacgagctacagtttcactagtgatacactgaaggtttgacagaagtcaagccactagctaacattatcaataactagtgttgcctcggacctggggaagagtgcgaattccacggagctcagttagcgtgcgttggacaagatagatgtaaagttttcgcgataatatcgttctctcttacaaagaaaggggttttactactgccatttaaaattatgccgcagtgctggcgttgccatcgctttgttttattttcctttttttaatgatatatttgcaatgtaaactatatggctctccgttgtggacatctcagcagggtg

SEQ ID NO: 6737 - DNA, 2501 bp, Zea Mays
cagtcactgttcacacaacagctgctagtagccgtagcccgtaggcgagccagaggcggcccaattcgagagcggttccggcggcgtgggcggcgccgtgcctgagatcggagccccgtggcgcggtgctggcaactggcggcgcgatgtgggcggtccacgggagggagtccacggccgctgcgcttcgcctgctgctgatcgcgatcgcctgcggcctcgtcttcgcgctcctccacctccccctcccggatgaccgtgcgcgaaccgccgaccccggtgggcagcgcggcgctgctgggggcggcggggcccgcctgtcggtgcagcaggggagggttcgagaggccagaaggctgagtgtcgtcaccgaagagatgggcaaactgacgaaacggcggcggaagaagatgaaaggatatctaaatctcccccagacaccaaagagaagatctggatgatgcaagatcagctaattttggccaaggcgtacttgcatttcgcttctccccaaggtagtgtacatttagttcgagagctgaaattgaagataaaagagatcgaaagggcaataagccactcaagtggaggtacccatgtacctgggagtgtgttgcaaaaaataaaggcgatggagctgaccctttcaaaggctcagaggacctacccgcattgctctcagatgacgtcaaagctacgtgcaatgatgcataatagtgaagaattggtcagagcacaccaaagtgaatcttcattccttgagcaggttgctgtgaggacattacccaaaggccatcactgcctagcaatgcagcttaccgcagaatacttttcgttagatcccactaaacgtgaattccctaaaagagacaacattcagttgggtggttattatcattatgcgatgttctctgacaatgtgcttgcaagtgctgtggttgtcaactctacaattgctgcatcaaaggtatgagcttagattcgtgatgcaatatttttttagtgaattcgtgaagcaataatacctggcttgctttttctgtgagcttcgtacttgctgaatgcagtacaattaaaataatggaacttcaatgtgggaactgctgcgaaaatttagatgcaatgagcatggaagggaggactgcaccatgacttcttcagtagaatcttcttttcattcagcctgtcttatttggcaggatcctggaaggatattattacatattgtaactgacgcgttgaattatcctgcaatgatgatgtggtttctgacaaacccaccaactccatcagtaatccaaatccagagcctagatgatttgaaatggttgcctggtgatttcagttccagattcaagctgaagggggttcgggatccgagatacacttctgcactcaaccacttgcgtttttatttgccagaagtgtttccatctttgagcaaggttctactcttggaccatgatgtggtagtacagaatgacttgtctggattatgggacctagatatgaagggtaaggtaaccggtgctgtcgacacatgcacctcaagtgaaggtttccgccaattggatagccttattgatttttccaatccaagcgtcttcaacgaacttgacccaaaggcttgtgcatttgcatttgggatgaacatatttgacctgaacgaatggcgcaaacagggtttgagtacaacctatcatagatggtttcaactgggcaaaagtgagaagttgtggaaggcaggaagcctgccactgggtcaggtcgtcttctacaaccggacgctgcctctggaccaccggtggcatgttctagggctcggtcatgactccagcatcggaagagatgaactcgagagtgcctctgtcatccactacagtgggaaactcaaaccctggttggagatttctatcccaaagtacagaggctactggaacaggtaccttaactacgataacccgcacttgcagcagtgcaacattcacggatagaggcgatggcgggtgaggtgattcgcaaggtagaactgggatatacgcaacttcgctgtagtaacttattaggagagcaagttgttgtttttttgtttctgttgctagatgccctatttgcaattttgtttgctagtagtcacaatcggtacaaaagcaaaaaaggaagaacaaaatcgagtacacgagctacagtttcactagtgatacactgaaggtttgacagaagtcaagccactagctaacattatcaataactagtgttgcctcggacctggggaagagtgcgaattccacggagctcagttagcgtgcgttggacaagatagatgtaaagttttcgcgataatatcgttctctcttacaaagaaaggggttttactactgccatttaaaattatgccgcagtgctggcgttgccatcgctttgttttattttcctttttttaatgatatatttgcaatgtaaactatatggctctccgttgtggacatctcagcagggtg

SEQ ID NO: 6738 - DNA, 2875 bp, Zea Mays
ctgagcagtgagaaggccaggagggagagccaacgcctggcaaatgcagtgcaatggccgccacccaccgtcccattcctagctagcttggagccttggcagagcagcagccagcagcctgcccagcacaaacccagcagggaaggaaaggagaagagagaaggagaggtcgaggcgagcaatggaggtcgtcgcgtcctccgaccaatatcgctcgtcctcctcttccgccagcagccccgcgcgccgttactacctgcccaagcccggcgcgctccgccgccccatctccttcgaggactcccccgactgggacgacatccaccccgacgacaccatccacctcgccaccgccgcctctgcctccatttccattgcgagcagcgcctacccctcgccttcgccctccctgccccaagggtcctcctccgcctctgctgcatgccgcgaccggaaggtggccggagttaccctcgtctggaaggacctcactgtctcctcactcgccgcagccacaaaccgcttctccgaccgcctcgtcaagagctccaacggctacgcgctgccggccactctcaccgtcatcatgggccccgcgcgctccggcaaatccaccctgctccgagcaattgcagggttatgttgaccgagacgatgtgctcattgaatccctcacagtacgagagatgctatacttctccgcgctcctgcagcttcctggtttcctatcttcgaaaaaggcaattgtggaggatgctattgcagccatgtcattaggtgaccatgctgacaaactcattggcgggaattgttttatgacgaggcttcctaccggagaaagaaggcgggtcagcattgcgagagagcttgtgatgagaccacatgttttgttcattgatgaaccactgtacaatcttgacaggtatctttcatttccagtccgatgcatatttgccttttttatgactagtatttgaaaagtgacatacagatcatatccctatcctataggttccaaacacgagtcatgaacgaacacaattaacacatgacaccaccacatttgatgtagaacaaactcttgcaaaaatcgttacatgcttattcaaaagagcagtactgtctattctattctgtagatgccatccctgtacatgggagtgtgactgcacatttgagtgcagatgcgtttattttgtttgtcctgtttcagtgtgtctgcgctgctcttaatggtaacattgaagaaactcgcaagcacaggatgcaccatcatattcacaatgtatcagagcagcacagaggtttttggactcttcgatcgtatttgcttgctttcaaatgggaacacactcttctttggagaaacattggcttgcctacagcacttctcgaatgctgggtttccatgtccaatcatgcaaagtccatctgaccacttcttgcgggcaatcaataccgacttcgacagaattatagccatgtgcaagaatttccagttattagcaggatgatcaaggggatttttcgtcagtgagcatggatacagcagtggcgattcggacactagaagcaacatacaaacaatcagctgactctgttgcagttgaatcaatgattgcaaagttgacagagaaggaaggtccttgcttaaaaggtaaaggcagggccagtgatgcagcaagaatcgtggttctgacctggagatcgttgctaattatgtcaagagattggaagtacttctggatcaggcttgtcttgtatatgcttattgctgtgtcaattggcacgatatttaccgatattggccattcactatcatctgtaatggtgaggatttctgcgatatttgcatttgtatcgtttgtcatccttctaagtgcttctggagtacccgctcagatcgatgaggtcaagatttattcccacgaagaagctaatcggcattcagggacaatggtgttcctgttagggaacttgctatcaagcattcctttcctattcctggtctccatcctgtcgtcgctggttttctacttcctgatagggctgaggaacgagttcagctccctgatgtactttgtgaccaccatctttgtatgcctgctggcaaatgaagcgcttatgatggttatctcgtacatctggctcgagacatacaagtgcaccttaactctcgttttcctacacgttatcatgatgcttgtggctgggtatctccgaatacgagaaaacttgccttatcctgtgtggacctacccgctgtccttcatctcgttccacacatacgctgtgcagggcttggtggagaacgagtacgtgggcacatcgtttgctgttggacagatcaggaccatacctggtgtccaagccgttcgaggctcgtacgacatttcgtcttccccaaacgcgaagtgggtgaacctcctggttctgctactgatggcgctcggatatcggattcttctctacttgctgcttcgtctagacgtgaggaagaacgcgaggaggcttggaaactggaggtcatggtggtcaagtgtgcattctgctgccactggtgcaaagtgatttttgagcttctatctaatcgagtgagtgagtgtcgtaggtgtttagtgagttctttggtttggtttggtttggtttgtatgccctgtccatatgagaaatgtatgtatacacgtattggttggcaacaaacacaaaacaatatcattgtttcctaatgacatacatctatttatctatctatctttagaccgctggtgcatgtggtcgatctgtccatatgagaaatgtatgtatacacgtattggttggcaacaaacacaaaacaatatcattgtttcctaatgacatacatctatttatc

SEQ ID NO: 6739 - DNA, 2523 bp, Zea Mays
agagcgcacggcccagttgggcccaatactcgacacgactcattgaccggcccattacggctgaagggagtcgctcgccgccgcgttcgaggcgttccctcgtcgcgctcgcgccgtcgaccttcaccgctcgctgtcaggtctgcccgccacgacctcgccggccacactcgcagctcgccctcgctcctacgcctcgccggcgaggccttctgccttttcgcgccctctatctgctgcgatctttggagcatcgttctcttctctcacttgagatccagacccctaaaccctagagctcgccgcttccgctcgctcgctccgcgctggcggcgacaatggaggacgaggagatggagaagaaggtgcagcagtacttgcagcgcaagggtttccgcctcactgagcttgcgctccaggaggagcgcaaccgcctctccacctccgccatctccgacgttgcgcttgcacggtctgacaatgatccagcgagatactacgatggatatagcagattaagaacatgggcatacagttctcttgatcaatataagcacgaattacttcgcgtcctttatccagttttcatccatagcttcatggatctagtggcagaaggacatatgcaggaagctcggtcatttttccatacatttcgggaagatcatgaggtgatgcattcaagggatcttcagaagctggaaggcgtcctgtctccttcacacttggaggaaatggaattggcccggtcttttaggaaaaataaatttaaaattaaattatgtgagtattcgtatgaattgcttctccagtatctccagaaaacacaagcccttgtggtgcttggagtaatcaatgagcacataacttttgaagtatctcctggtcagccctcattaatctctgatgacgctgatgttgttgctctgattgggacaagtaaggacttggcaaaacagataaatcagaaggaagtacattgggggttgcttgaagattctgttgaagagcgaatggagaaggcactagcagaatctgataaaatagaagctgaaagcaaggatgctgatgcagaagataacaagaaaagaaatgcagaaggtggaaagcaaggtgcttctcttaagaaagccaaaaaggacaagcttgttggtgcgactggaaaaagcgtcagaactgaaacaagcatggtttctgtggcacctcgagtgaaaccggagctaactcttccagcaacgcctgttgaagttgaacaatcaattcttgaggacctacgaaaccgtgcacaactgaatagtgtggcattgccatctgttagcttctacacattccttaatacacataatggattaaactgttcctcaatatcacatgatggatcactggttgttggtgggttttctgattcgtcagtgaaggtctgggatatgtcaaagatgggccagccagcaaaaatatcaagatcacagggtgagaatgggccttcccagggtgagcgcatatcaacattagatgaggggaaacgaacctatacactatttcaaggccattctggaccagtttattctgcggcctttagcccgtttggggatttcctcttgtcatcatcttcagactcgacaattagactatggagcaccaagctgaatgctaatcttgtctgttacaaaggacacaactacccggtttgggatgtccaattcagtccagttggccattactttgctagtgcttcgcacgacaggactgctagaatttggtcaatggataaaatccagcctttgcgaataatggctgggcatctttctgatgttgattgtgtccagtggcatgtaaactgtaactacattgccactggctctagcgacaaaactgtaaggctatgggatgttcagacgggtgaatgcatacggatgtttattggtcataggagtatggttttatcactggcaatgtcacctgatggacgatacatggcctccggagatgaagatggaacaatcatgatatgggatctctcgactggccgttgtgtttcaccactactaggacacagctcttgtgtgtggacacttgctttcaggagcattgcttgcatcgggatcggctgactgtactgtaaagctctgggatgtcgcttctagcacaaaaaccctgaagacagaggataccaaaggcagctcagctaaccgactgagactgcttaaagctctccctacaaaatcaactcctgtttatagcctgcggaaaactagaactggtcctgttttgacattgagtagtgaagctggcatttcagagactgcctattgtacagctaatattttcattagcaattccaacgaactcagcatgtactgccgaattgagcaccgcagattcgttgtagcgggttgtgatattgtaacaatattattaggttgtgaccttatgaacgcaactaaatgtacaagtgctgacaggcgatagcgtgaatgcaatggtctatcaggtctggagtttggtttagtgaccaggtaattc

SEQ ID NO: 6740 - DNA, 1743 bp, Zea Mays
aacaaagaacagtggcatcgaaggacagttttcttcacttattgaatctacagttgctaaactcagagatcctcatgtatattatttagttgaggggccaattacatctagtcaatcacatcgttctattatcttgcgtggcgatgatttaagctttgattcacatacacatggaaactcaagaacagacagttgtaccacaagtattgtaacttgttcagaattcttcacagaaaagaggtatgacctctcattgacaagagagactgcagatgcaattgcaataactgtcaaccaatcagcgcctagcttgaagcctggcggtacccctgtggtagagtattttcctgcctcagcacctgccagcctcatagtaatcaccttgaagcttgacatactatgctactcatcaatagactttccagtggcggctgctgtatctgaacttgttattccaggattagcagatcagatgattgtaatgaagagaattattgcttcagagataactcaacaagcacagcttcaaccattccattttattccttctggttggcatgttccagtaacagctatatacaatacaagatatggtgagactgaggagaggcaaagtgagctgcgaaaagaactgcatttaaggctaggacttcccttagatcggcctttgttgcgaatttctaatgcattgactttcggtggcatgggaaggaggaagaaaagcatgccaagaagtggaagtagaatttgttttcatccattgtggtatgttatcacattcaggttcttcgctgcttcgagacatccacagagaacttccatctagtggtgtatccggaggtgttatgtctttgattgatggttcatatgagtattatcattatcttcacgatggtattgatgacaatggatggggatgcgcatatcggtctctacaaacaattgtctcttggtacagattgcaacaatattcatcaatagatgttccttctcacagggagattcagcaagttcttgttgaaattggtgacaaggatccatcatttattggatcttgtgagtggatcggagccattgagttaagctttgtcctcgacaaactgctgggcgtgagttgtaaggttatcaatgtgaggtctggcgatgagcttcctgaaaagtgcagagaacttgccaggcattttgaaacccagggaactcctgtgatgattggtggtggagtcttggcttacacccttttgggagttgattataacggagccagtggagactgtgcatttcttatccttgatccgcactacactggtactgacgatctcaaaaagattgtaaatggcggatggtgcggatggaagaagtctgtcgacagcaaaggccgaagcttcttcttgaaagacaagttctacaaccttctactaccccaaaggccaaacatggtgtgaaacctatattgttcaatatgttaatagtgcagacgtgcaggttcacgaggcacagatatttatgcttgtgatagaggtttatggttgcgatagcagaagttatgatttgtaaaaaaaatttagtgagacattatattgtttttttaataaatttgtagtgagtaaattaaattaaattaacgaatgagagttttacaggcataacactaaaagcagacgttttgcttgagacgtcatgcttaacatgtggagtctgtgtatttggtaaactaagggtctgtctgtatccattggcactgaa

SEQ ID NO: 6741 - DNA, 2897 bp, Zea Mays
tcgttctcgtctcccagccccgtcgccgctgacgtggcgcccaccgcgcggaaaaaaatattgcagatattttcctcaccgctccttcccccctctctgctcgtccttgcctcccaccgcaccgccggctcttgctctgctcggttcctcctggcagcaaccgaatgtctcccgacgccgacgccgccgccgggggaggaggaggtggagaggcgagcgccggcgccggcgccggcgcgtcgtcgcctcccgcgtccgcgtccgcggcggcgaacggccgggcgctggtgcggtgggaccagatcctgccgcgccgctccctgcgggtgcttctcgtcgagcacgacgactccacgcgccagatcgtcaccgcgctcctccgcaagtgcggctaccgcgatgaattgccagacaaatggatcagaaaataatgcagccagcaatcatgtaagtaccaatgttgctaatgggtcaaagacaggagaaaacaatgatgaggaaagtgatgcccaagtaagtatctaaccttgcttacagcgtacctgttcaactggcattaatgcatgtgttaagtttcacatttgcatccctgcttagcttgacaacaccagtttaatagaaagtaatgaagtttggcagtatagcactatagcatttatagacatgtccttttctatgatggttctttttcttgactttaacatagtgagtgtaactggcactgtttaatggaatcagttagagttcatcatttcatcctttatgcggttctgatataacattcatattggatttctttgccatgttacgttatggagactgttttgtcttgactagagctttggtaacaaaagggagactgaaattaagagtgctgagacgttaccagatattcgtagagatgaaatggctggctcatccaaaaaaattgaactacaaaataagtctaatgatggagtaaacacaaaagtggatgcgtcaaaagatagcgatggtgctccaagtgaaagtgagaagaatgtgcgttccaaatgccttaatggtattacttctgcaaaggtggctgagcaaataatggataatgccttgaggatcacggatgcaagttcacgtcgtccaaccaatcttggcaaagatttggctatgactgaaccagcagctgatagaaaatgccaatctttagtgatggaaaataatgctgtcaaagaaaagaaccctggtgaaaagtcgaagagtgctgtaataggtcatgctgattcttacccctcccaatttctcgagaccaacttgggaaaacaacagtatcgtaatggttacaagaatcaagaattcagggaaaaagatatctttaatcactcgaattcttctgccttctcgagatatggcaatagaaggatagaatcatcaggtgagatacagtttcttccttctcgttgcattgttgggcaagagcagcatgttcatggcaaggacccagttttccaacccaatggggtcttgctgcctcccaatgaccataatacaggtgagagtacaaggcaagctcgaattactctggacagtagcatggagggtgctgacatcatttgctccagtagtgctagggaagatgctggtgcaagtagttcttcccatagaaaggacagtatgagccatccctcatatgggtttgtacctgttccaattcctgtcggtgccatgatgccctatcattgtggtgcaattctgcagccagtatactacccacagggtccacttatgcactgtaattcatctgcaatcaacaaggcaacaattcatcaaacctctggccaatctaactaccgtgaagattgtggtagtggtagaccatctcaggttgatgaacacaaacagtcagaggaaaagcaccagttgcatcattcaagacaaattcatcgggaatcaggacaaccagttgacatggttagagctcacatggatcatgctaaccagagtgcaagctgcagccgggatatctgtaaaggaagcggatgcacgggtagcggtgaagccgataccaatgcgaacacgacggttgccctagagagtggcaacgagagtggcatccaaaatagtgacaggtctcaccgagaagctgctttgatgaagttccgcatgaaaaggaaagacagatgcttcgataaaaaggtcaggtatcatagcaggaagaagcttgcggagcagaggccaagagttaaggggcagtttgtaagccagaagctgaaagcagctatggcaacggaagccgaaactgactcgtgacgggcgctagtccagaactgtaattttggttcttcccttcgcgccaggtgtgggcgattggactggtaagtctgaaggctggcaaaagtttttttttcttccttccatggttagcctttctgtacaaaggtgaactccacgtcgggtgtttgttggcatccaagccttattttttgcgaggtacatcaagttgacaaaatgttcggagggatagggtgaaaacggtgcaagcgccatatttcgtccatacgcttaggtgtttgtggagtgtgaaagcagagcctgtacagcatattcaccacccattctgttgccattacaattgtagtaacttgtaattactactatgacaaaagtagacactgttgtagaacttacagccagcaggtcttttccatatgggacagtagcattttatttattaattggttgatcatatgaggacagtcccgaatgcaggacagttaagatttgtttgatccaatccaatcatccagcattttgcttgccttaaactggacaaggaatcagcagggtgcacaccttgtccttgtcagctattggtacacagcagcatatatcctttgcctgtgtttgctgtactactactctgg

SEQ ID NO: 6742 - DNA, 1180 bp, Zea Mays
cttagacctctttctcaatgagttgcttttactggaagtacagagactggtaagaggataatgatttcagctgcccaaatggttaagcctgtttcattagagcttggtgggaaaagtcctcttattgtctttgatgacattggtgacattgacaaagctgttgaatggaccatgtttgggatcttcgcgaatgctggtcaagtctgcagtgctacttctcgtttactgctgcatgagaaaattgcaaagaaattcttggatagattggttgcatgggcaaagaatataaaagtctcagatccactggaggaaggctgcagactgggttcagttatcagtgaaggacagtacgagaagataaagaaattcatctcgactgcaagaagtgaaggtgccacaattctgtatggaggtggccgaccacagatgttagtacgtcaatgcaaatttggcaagaggaagtctttggaccagttatctgtgttaaggagtttaggacagagagtgaagctgtggaacttgcaaatgatactcactatggtttagctggtgccgtgatctccaatgatcaggagaggtgcgagcgcatttcaaaggctcttcactctggtattatttggataaattgctcgcaaccatgcttcgtccaagctccttggggagggaacaagcggagcggttttggtcgggagctcggagaatggggtcttgataactacctgacagttaagcaagtcaccaagtattgctcggatgaaccgtggggatggtaccagcctccatctaagctgtgaaggggcattcactccagggaatgtaatgcatcattaactgacagcatcagtcctgttaatggacaggagctcgtgtacagtacagtgctcgtaaaaaaagctctttgatggtaaagttgcttgctgctatcactactccagaccagaattcaggactggagagtacgatgtcatgagttgtactacttgttagtctgcactcttatcattcgaagtttggcagtggtgtgtagttgcacttggaagattgcaataataataaagataattggataattgatccattttaatcatatttcttaaaaaaagctgaataagctctggagtttcttcttctttttgattaaaaaaaacaattttggaagcctttctaaaacgaaactttg

SEQ ID NO: 6743 - DNA, 2221 bp, Zea Mays
tgtttgatcgatcgattgcaatttgcaaagcacggcgagcggaggccagatcaaaaagtagcacggcgcagcgagccagcgatataccacatgacacatgtccacacccctctgcgttcggtcaccaaacagtcagcgcagggcagggcagcctgaaagaaagcggcggcggcagcaggtcactggctcactgctctgtcctctcgtctccagagttcagaccaccgcatcgccatggcgccgccgcagacgatcccccggcgcggcctcttcattggcggggcctggagggagccgtgcctcgggcgccgcctgcccgtcgtcaacccggccaccgaggccaccatcggcgacatcccggcgggcacggcggaggacgtggagatcgcggtcgccgcggcgcgggacgcgttctcccgcgacggcgggaggcactggtcgcgcgcccctggggccgtgcgcgccaacttcctccgggcgatcgccgccaagattaaagacaggaaatctgagctggctttgctggagacacttgattctggaaagcctctggatgaagcaagtggagacatggacgatgtcgctgcatgctttgagtactatgctgatctggcagaagctttagatgggaagcaacagtcaccgatctctctgcctatggaaaactttaagtcgtatgtacttaaagaacccattggggttgttggactgatcactccttggaattatcctctgttgatggcaacttggaaggtcgcacctgccttggctgctgggtgtacaactatattaaaaccttcagagttggcttctgtgagctgcttagagcttggtgcaatatgtatggaaataggcctaccaccaggtgtcttgaacataattactggtctgggccctgaagctggtgctccattatcctcacattcccatgtggataaggttgcttttactggaagtacagagactggtaagaggataatgatttcagctgcccaaatggttaagcctgtttcattagagcttggtgggaaaagtcctcttattgtctttgatgacattggtgacattgacaaagctgttgaatggaccatgtttgggatcttcgcgaatgctggtcaagtctgcagtgctacttctcgtttactgctgcatgagaaaattgcaaagaaattcttggatagattggttgcatgggcaaagaatataaaagtctcagatccactggaggaaggctgcagactgggttcagttatcagtgaaggacaggaatcaggccaatagcgatgacatccaaagcaagaaagtgtgagcaaatgattctttgcacatcactctttcaaaaaaaatacgagaagataaagaaattcatctcgactgcaagaagtgaaggtgccacaattctgtatggaggtggccgaccacagcatctcagaagagggttctttcttgaacctacaattataacagatgttagtacgtcaatgcaaatttggcaagaggaagtctttggaccagttatctgtgttaaggagtttaggacagagagtgaagctgtggaacttgcaaatgatactcactatggtttagctggtgccgtgatctccaatgatcaggagaggtgcgagcgcatttcaaaggctcttcactctggtattatttggataaattgctcgcaaccatgcttcgtccaagctccttggggagggaacaagcggagcggttttggtcgggagctcggagaatggggtcttgataactacctgacagttaagcaagtcaccaagtattgctcggatgaaccgtggggatggtaccagcctccatctaagctgtgaaggggcattcactccagggaatgtaatgcatcattaactgacagcatcagtcctgttaatggacaggagctcgtgtacagtacagtgctcgtaaaaaaagctctttgatggtaaagttgcttgctgctatcactactccagaccagaattcaggactggagagtacgatgtcatgagttgtactacttgttagtctgcactcttatcattcgaagtttggcagtggtgtgtagttgcacttggaagattgcaataataataaagataattggataattgatccattttaatcatatttcttaaaaaaagctgaataagctctggagtttcttcttctttttgattaaaaaaaacaattttggaagcctttctaaaacgaaactttg

SEQ ID NO: 6744 - DNA, 1696 bp, Zea Mays
caaccagcggctccggaatccggatctccccacacggccacacggacacggccacacgcttcggcaggcacggccggtccatgtagcgcgcgcccggacacggagcaggggtcacgcgcaacggcagcccggcttgtcgggagcgcgaggggcgacatgggggcggaggccggcgagcccagctccatcctcaggaatgtctaaacgaaaagactttagctggataaccgcgaagaaacttcttccagtgtcaattttctacaatgcaaatgtgggatttgctctagcaagcttgaaaggggttaacatcccaatgtatattgcaatcaaaaggatcactccccttgctgtgttggtggctgggtgcatgcggggaaaggggaagccaccgacacaggtcattctttcagttatctgcaccgccactggtgtcctcattgcagcacttggagatttttcctttgacctatatggatactgcatggctctaacatcagtcttcttccaggttgtgttatttccttgtgctttgttcttacaaatttattctataacttttgagaggtttttaggcaaggttctttatctttgtaattgacaactgaatgtgtatgcactatgcagactatgtatttgattctggtggagaaatcaggcgctgaggatggtctttcctcagtggacttgatgttttacaacagcatattgtcacttccatttctgtttttcctcattatagcaacaggagaattcccccattctcttacagtattatctgcaaaggtcagtgatacaaatgcagtataatcaaaaatttaccagcacatttaagctagcaatctctgcgtgttcccttgtatcacccctttaactcaagaatgacaattaaaggtagttctccagagtttctgaagcaaatggtttcacacttcgctgctattcattaacacaatagtactcttaaagttcgtgtcattgtctgttgtatgtctctatcctaacttgcattgtctggtgacacttgaactgcaggcagcctctctgacgttcggtgtcattctcgttatctcactggtgatgggaatcgttctcaatttcactatgttttggtgcacaattgtgaactctgctctgactacaacaatagtaggagttctcaagggtgtcggatcaacgaccctcggtttcgttctgttgggaggtgtcgaagtacatgctctgaatgttactggactggtgatcaacacatttggcggcgtatggtactcttatgcgaagtataagcagaaaaggaaaacaccacggaagatccaacatgatgtagagtcgcatgcccacaagtagcgtcagattaactgtagttatacttcgttctttgatcagataataactggatgcatgtttaaatccattttttctgaactctattccatcaccagcagttaggttggtgcaattaagggaagcaacaagcttttcctatttcacatcttatagtttttacgatcagtgatatagggtgtaaagtcagttatttttcgcagctccagtgtgcgatgcatcacttttgctccaaagagagaaatccatgggtctggatgaggtgattgccggttctttaaggaatttttaaacatatgctcctagttcagctgttcagttttacccagtagtaatggatggatgagacgtttta

SEQ ID NO: 6745 - DNA, 1652 bp, Zea Mays
aagccgaagctgcccttgcccactcttcttctcctctcccccctctttctactaaaaaaatactcctccccacactaaactagtgccaaattgcttccgcattccctccctgcattcccctcctccgagtatccgacccatcggcggtcctctccctcgtggcgacggccgctccaccgccgctgccgagtgggtcttggccggcgacgaccgcccaccggatacagcagcaggaaaaacacacaacaataatggggcacgaccatatgtctcgtataaagatgcatatggcagaaggttcttttggtgacaggaaccggtgccagcaacctgggtgcaatgaggttgtcgatggaagggtagtgtactgcaaaactcacagcggagagttgtcatgccaacagttcagtcacctccagagcggactggagagctcagcagtaccatgcactgagcaagagttacatgtcaagcacgaaggggatgatcgaggtaaactaaaggatagttctgggtacactttgggtcagactgcacaatttgtcttccctggggcaggcatgttttgcaagaacgatagctgcagcaagcaagcacatgagaactcaatctactgtaagttgcatagcggtgttagcaagggctgcatggtccgaggctgtacaagaggtgcacatggaggcacacctctgtgcattgggcatggaggcgggaaacggtgtgtgatccctggatgcccaaatgccgcgtgtggtcaaggcctcagtgaccgctgtgtgaggcatggtggtggcaggagatgtagattcgaagggtgtgcgaagggcgcacaggggaacaccgattactgcataaggcacggtgggggaaggcggtgcaagtttgaaggttgcacgaagagtgcgcagggacggacagatttctgcattaagcatggtggtggcagccggtgcaagttccaaggatgcggcacgagcgcaaaatggggaacagatttctgctctatccacaggaaggctttgttgggaggcgacaatgccgccgtccctgaagctttgcctgccgcttcagaaaaacgacgtcgtgccaagaagcccaagaaggcggcgaaactgtctgaggcctcccaagagaatgccacagcagcagcagctattgctggtaacagcactcaacatatgggcggtcttctcatagctatccctgttgctaaccgtgacatgttaaccaaagccgtggcagcgacggggcaagctgcaatagcctccgcacagatagtggcgccgctgtccatgaaatcgccgacgccatctggagcagcggcggctaccttgactgggagggaggcgggagcaagcagggagatgctgggtctgtagaaagatggtggcagtgcataattcgggaggcttggcgacaccccttgcccagatagttctctgattattgccttctttttagactgagaaaaacctcgaaactttaggagggttgtgcattttgacagactcgggccgtcgactgactctagtgatgttctgtgcctttctcgtttgtaaattgcaatgttctcgtgtattttctcttgtgaccatttggacagtaagcaataatattggtgttctaatctcagaccattatttgtgaaatat

SEQ ID NO: 6746 - DNA, 913 bp, Zea Mays
atcccatccacctgcgacacatttccccccttttcccgcaacttccgtgacgacttcaccactacatccatgccaccggcgacttcatggcctccccattcagcctctccttcccaagacaaagatggttccagggaggaagggatttaatgcacaagggaacccagcagcatttccttgatgcatcagttgcttacaagcgtgtagtcctgaacgacatcgaataccttgctaggtttgggtactccaaggagcaggtgtatctcttactatcatgttgtccctgtgaggcaggatctctggaatagtagactctccttatgcagtgtcaactcttgacatccctacaacaatatttgatcaggatgatatggagcaatggtggcagcactagttgaagatgatcagcttgtgaagtcttttacacaagttgttttccacgttttgtcgagctcaagtaaattccttcacaatgttggccttcagtatgtctccaagacaagcttagtttcatcaaaagtgcaagaactctaatctcaactagagactaagacaagaaaaacgatagactttggcgaaaatggaaaccttgaaggcgtcacaagaatttgcagccactgtagctaatcaaccaattgaggtcaaggcgtcacaagaatttgcagccactgtagctaatcaaccaattgaggtcgaagattttaagaagttgctaatagaaaataatactcggtcgaagatttaaagatagactcttaatgtttgatgaaattatatgcacaatttggattgcattcaagtgtacgttgatttttattaattggtgatgaaataaaaatgtcatagtttgtttgacatgtcagctactatattatctgccacttcatctcacttgcgacaaaactaatggtca

SEQ ID NO: 6747 - DNA, 1062 bp, Zea Mays
catccacctgcgacacatttccccccttttcccgcaacttccgtgacgacttcaccactacatccatgccaccggcgacttcatggcctccccattcagcctctccttcccaagacaaagatggttccagggaggaagggatttaatgcacaagggaacccagcaggtattttcctgcacaagttctatggttttgttcttagctaacactacaagtgtggatgaatctgggaagcagcatttccttgatgcatcagttgcttacaagcgtgtagtcctgaacgacatcgaataccttgctaggtttgggtactccaaggagcaggtaggtagtagggtaactaatgattatcctctaagtaccatatatgttgaatattgccttaacgttgggggatttatataggtgtatctcttactatcatgttgtccctgtgaggcaggatctctggaatagtagactctccttatgcagtgtcaactcttgacatccctacaacaatatttgatcaggatgatatggagcaatggtggcagcactagttgaagatgatcagcttgtgaagtcttttacacaagttgttttccacgttttgtcgagctcaagtaaattccttcacaatgttggccttcagtatgtctccaagacaagcttagtttcatcaaaagtgcaagaactctaatctcaactagagactaagacaagaaaaacgatagactttggcgaaaatggaaaccttgaaggcgtcacaagaatttgcagccactgtagctaatcaaccaattgaggtcaaggcgtcacaagaatttgcagccactgtagctaatcaaccaattgaggtcgaagattttaagaagttgctaatagaaaataatactcggtcgaagatttaaagatagactcttaatgtttgatgaaattatatgcacaatttggattgcattcaagtgtacgttgatttttattaattggtgatgaaataaaaatgtcatagtttgtttgacatgtcagctactatattatctgccacttcatctcacttgcgacaaaactaatggtca

SEQ ID NO: 6748 - DNA, 1305 bp, Zea Mays
catccacctgcgacacatttccccccttttcccgcaacttccgtgacgacttcaccactacatccatgccaccggcgacttcatggcctccccattcagcctctccttcccaagacaaagatggttccagggaggaagggatttaatgcacaagggaacccagcaggactgattactcttcacctcctcaaggaaagcagaagttcaggtgcaattcaaggatgttcctgatgacattttagaagtagaactactgatgttcttgctgttgccaacacagtggcagaattgcttcagaatcattgttgactccccctaagcatatatatttgaaagatgttagaagtggtgacctaactaagtatttcctttctcattttttggcgtctaattatgtgttcatttcattactgaagcaattcaaaatatggatgttacttaatcaattcagaaagttgctgatgcttatgattgcaaagttctggaaacacttgcaagcattatgtttctgctggaatttgctctaggtattttcctgcacaagttctatggttttgttcttagctaacactacaagtgtggatgaatctgggaagcagcatttccttgatgcatcagttgcttacaagcgtgtagtcctgaacgacatcgaataccttgctaggtttgggtactccaaggagcaggatctctggaatagtagactctccttatgcagtgtcaactcttgacatccctacaacaatatttgatcaggatgatatggagcaatggtggcagcactagttgaagatgatcagcttgtgaagtcttttacacaagttgttttccacgttttgtcgagctcaagtaaattccttcacaatgttggccttcagtatgtctccaagacaagcttagtttcatcaaaagtgcaagaactctaatctcaactagagactaagacaagaaaaacgatagactttggcgaaaatggaaaccttgaaggcgtcacaagaatttgcagccactgtagctaatcaaccaattgaggtcaaggcgtcacaagaatttgcagccactgtagctaatcaaccaattgaggtcgaagattttaagaagttgctaatagaaaataatactcggtcgaagatttaaagatagactcttaatgtttgatgaaattatatgcacaatttggattgcattcaagtgtacgttgatttttattaattggtgatgaaataaaaatgtcatagtttgtttgacatgtcagctactatattatctgccacttcatctcacttgcgacaaaactaatggtca

SEQ ID NO: 6749 - DNA, 763 bp, Zea Mays
tgagagtccggcccattctagcgctgccagcctgtcactgaaactacctgtgtccggacgcccgatctagcaactagcaagcgccgcatccctcgcctcttcccgacttcccccctcgattcgatccgagctcacttctagggttcttggccccgctccaccgtcgcccatggcagacgatgccaaccgagcggccttcatggagctgcagtcccggatgatagataccaccgcgaagatcaagcagttacaaacccaaatgcgttctaaagaaggggaaaagaagcgtgcctaccttactttggaggaacttcgccagttgccagatgataccaacacctacaagactgtcggaaaagtgtttattctggagccgaagtcagttctgttcaatgagcaggagcaaaagcttaatgacagtgagagtgcgatagcttcaatgcagactaccttgagaaacagcagggcgaagtggagaacaatattagggagctgcttcaacaggacccaggacttgcgcgtcagatcctctcaatgaccgttcaatgagagttgtttttctctccatttaattttttagataatttgtaatgtcgcagtttgatcagtcatgctgtggtcttgccttatctgtgagacatgtgcggtctgtaatttctgaggtgtttggctggtggaatgatgtggtccatcattatctcactctagtgctttgtttggtttgtggaatagattgagttaattcatcatcatcccattcctc

SEQ ID NO: 6750 - DNA, 3048 bp, Zea Mays
atgccgtcccttcccttctggtcgctgttccgttcaccatgctccgccccctctatttgtgaggacacagctaagcgaaggacccagaaaagcaaaagtttcaaagaggttgagaaatttgatgtttttgtgctggagaaaagttctggttgcaaattccggtcgttgcaacttttgctcttcgctatcatgtctgctgcgtttctaacactcctatacacaccatctgtgtatgaacatcagttgcagtcaagctctcggcttgtcaatgggtggatatgggataagaggagttctgatccccgatatatatcttctgccagcattcaatgggaggatgtatataaaagcatgcaaaatctgaatgttggtgaacaaaagctcagtgttggactcctgaattttaacaggactgagttcagtgcttggacacatatgctcccagaaagtgatttttcagtcataaggctagagcatgccaatgaaagcatcacctggcaaactctgtatcctgaatggatagatgaggaggaagaaacagagataccatcttgtccttcgcttccagatcctagtttttcaagagcgacacactttgatgttgttgctgttaagcttccctgtactcgtgtggcgggttggtcaagagatgttgcaaggctgcatctgcagttgtcagcagcaaaattagcagcagccacagcaagaggcaatagaggaatccatgtgctgtttgtgactgattgcttcccaattccaaacctcttctcttgcaaggacctagtgaaacgtgaaggcaatgcttggatgtacaaacctgacgtgaaggctctaaaggagaagctcaggctgcctgttggttcctgtgagcttgctgttccactcaacgcaaaagcacgactctacacggtagacagacgcagagaagcatatgctacaatactgcattcagcaagtgaatatgtttgcggtgcgataacagcagctcaaagcattcgtcaagcaggatcaacaagggaccttgttattcttgttgatgacaccataagcgaccaccaccgcaaggggctggaatctgctgggtggaaggttagaataatacagaggatccggaatcccaaagccgagcgtgatgcctacaacgaatggaactacagcaaattccggctgtggcagcttacagattatgacaaggtcattttcattgatgctgatctgctcatcctgaggaacattgatttcttgtttgcaatgccggaaatcaccgcaactgggaacaatgcaacactcttcaactctggagtgatggtcattgagccttcaaactgcacgttccagttactgatggagcacatcaacgagataacatcttacaacggtggtgaccaagggtacctgaatgagatattcacatggtggcaccggattccaaagcacatgaatttcttgaagcatttctgggagggtgacgaggacgaagtgaaggccaagaagactcggctgttcggcgccaacccaccgatcctctacgttctccactacttggggcggaagccatggctgtgcttccgggactacgattgcaactggaacgttgagatcttgcgggagtttgcgactgatgttgcgcacgcccgctggtggaaggtgcacaacaagatgccgaagaagcttcagagctattgcctcctgaggtcaaggctgaaggctgggttggagtgggagcggcggcaggccgagaaggcgaacttcaccgacgggcattggaaacggaacataaccgatccgaggctgaagacttgcttcgagaagttctgcttctgggagagcatgctatggcactggggcgagaacaagaacaactcgacgcagagcagcgcggtgccggcaacacctgccgcgacgagcctgtcgagctcgtgaggcctgttgtgtagatacagctttgttgagagtagtataccagatacgaaacttctgaagctcctccatacatacatagcaacagctctgtaaaggtagctatgtaggcctttctccccccccccccccccccccccccccccgaatgactatactctttgttcgccgtcacggctgcagcgacccctcctgctgcttcctgatggttgacaattcttttggtttttgccaataattcatcagtataggctgtttttcactctgggcggcttgagtccggtctgggcctgttgttgcttcaaatcctaccggggctactgcttttgctgcggtacgcctggttttgatgtatggtggttgaacagtttcagtgataaatctggagtgatgcaatatgggattgctgaccagcaaacactgcatcatctaaggcatgaatatttatttgatcggttattgtctgagtgctgctgttcgggatgaacgaaaccaccctgactttttgagttgtttgcatgcagcactcgtgtttgtttctggtcgtgtgccaccaagccatggacgcaatgcaagcgttcaaatgccgtgcctccctgcgtcgtactggcacagagcaagcatcatcattgcgtccatcgagagctttggttccgtgcactgctgctgttgcgccaaagaacgagacgcatcattgcccggatccatgatctcgtggtgctgtcgagttccttggaggtgcggtcttttgcagctcatcagcctgctcgcttttccagcagcggcacacctaaaaagcacagggataggctgtatctgcgtgcgacctcgctccggcggtgccgtcgcttcgcctgagacagagacactgtacgtacacctggttgggtccttcccttgtcgctcacgattggagtagttggatgtttgcgttgcaagtgactgagattaggttttctccacgtttgccactacaaaatccgcgagatgcgcgtccagatctgacgcgcagtctagtagtgctacagtaatataatgtatagaaaaaactattgcgcgattaagttttttcgtgcgatcatcgtgtagttaaatgactgaaaattttaaaaatttcttaaatacgag

SEQ ID NO: 6751 - DNA, 2116 bp, Zea Mays
ccgcgcacgccactaggacgagtcaaaaccgttgcgcgtgggaatcctccatcggctgcaccagcggagcccacagaccacagtcaccgagcgccaagaagaacgctctgcccggcccgccgtggcgagtccatccaacggccccgagaagctgaactgaccggccaccgcccagggtcagctcggtcattccgccgccgctgtcgtggtcgtggttccgcgccaactcaactccacggccgcggcgctagcatccactcaccatcgtcactcgccgccgctggcaccaccctccacgccccgtccgcactttttaaaactacgacccagctgccgaatcaaccgcctcccccggcgagcgcctccttcctctctcccatgggcccccgcgcccgagccgggaccgcttcgcccaccggccggtgcgcgcgccatagatagattccacaagcttcgcgaccagatccgatgctggaggccaccgccgccgcctcctccccccgcgccgcggccgcggcagtcgccgccggggcggccgccgccgcggtcgtttcctccccgcggcggggtggaggctccgcgcacaaccaccggcggtgggccccggccccgttcagggcttgcctgctcgcgctctggttgctgggcttcgcgctcgtcttcctgtggcagagcacctccgtgggccgcgtgcggctctacacgcgcccgccgatgccgaagcgcgccgtggcgtcgttggggcactgggcggcctccccgcccgtctacgatctgagggagttcggggcggtcggggacgggcggacggttaacacggccgcgttcgagtctgccatcgcggcgatcgccgagaggggcgggggcaggctcaccgtgccagccgggcggtggctcaccgcgccgttcaacctcaccagccacatgactctcttcctcgctgctggcgctgagatcctagggattcaggatgaaagatattggcccttgatgtctccattaccatcatacggctatggaagagagcacaagggacctcgatatgggagccttatacacggccaagacctgaagcatgtgactataacagattcttgtgaaaatgtggtgataaaaaactgctacatttctgttggtgatgatgggatagccataaagagtggttgggaccaatatggaattgcttatggccgtccatcagctaatattactatccagaatgtcgtaatccgctctatggtcagtgctggagtatcgattggaagcgagatgtctggtggtgtctcggatgttttggtagagaatgttcatgtctgggattcacggcgaggcgtgaggataaagactgcacctggaagaggggcctatgtaaccaatgtcatttaccagaacataacctttgaaaacgtacgtgtcggtatagtgataaagacagactacaacgagcacccagacgaaggcttcgacccaaaggccgtccccaccatcgggaatatctcttacacctcaatccatgggcatcgtgtgcgagtaccggtcaggatacagggaagcgcgcagatccctgtgaagaatgttaccttccatgacatgtcaatcggtatagtagacaagaagcaccatgttttccagtgctccttcgtccaggggcaggtcattggctacgttttccctgtgccttgcaagaacctggacctgtacgacgagcggcgtgggctggttaaacaatcaacgttacagaatatctctgatatcgactacagtttctgacaatggcatttgataccactgtactattgctgtaggtgtattcagtattcacagccgtcacagtcctttccacacatttagaagcaaaattttgggtagcttttacactcttcacctcacagtcaggcatgtatctaaggaagatcgacttgaccatactgtctcgtagagggacgccaggaatgttgccttttcacttttttgatcactgtatgattacacttacttggttacacagtcgacagtacacttttgatagtgcttactgttcatggcagactacatttaccttgccctttttaaaacagatgtggatgtatatgtatttggtagtttgaacctggaa

SEQ ID NO: 6752 - DNA, 2385 bp, Zea Mays
ccgcgcacgccactaggacgagtcaaaaccgttgcgcgtgggaatcctccatcggctgcaccagcggagcccacagaccacagtcaccgagcgccaagaagaacgctctgcccggcccgccgtggcgagtccatccaacggccccgagaagctgaactgaccggccaccgcccagggtcagctcggtcattccgccgccgctgtcgtggtcgtggttccgcgccaactcaactccacggccgcggcgctagcatccactcaccatcgtcactcgccgccgctggcaccaccctccacgccccgtccgcactttttaaaactacgacccagctgccgaatcaaccgcctcccccggcgagcgcctccttcctctctcccatgggcccccgcgcccgagccgggaccgcttcgcccaccggccggtgcgcgcgccatagatagattccacaagcttcgcgaccagatccgatgctggaggccaccgccgccgcctcctccccccgcgccgcggccgcggcagtcgccgccggggcggccgccgccgcggtcgtttcctccccgcggcggggtggaggctccgcgcacaaccaccggcggtgggccccggccccgttcagggcttgcctgctcgcgctctggttgctgggcttcgcgctcgtcttcctgtggcagagcacctccgtgggccgcgtgcggctctacacgcgcccgccgatgccgaagcgcgccgtggcgtcgttggggcactgggcggcctccccgcccgtctacgatctgagggagttcggggcggtcggggacgggcggacggttaacacggccgcgttcgagtctgccatcgcggcgatcgccgagaggggcgggggcaggctcaccgtgccagccgggcggtggctcaccgcgccgttcaacctcaccagccacatgactctcttcctcgctgctggcgctgagatcctagggattcaggatgaaagatattggcccttgatgtctccattaccatcatacggctatggaagagagcacaagggacctcgatatgggagccttatacacggccaagacctgaagcatgtgactataacagtgggctcctctgcaaaataggtcataatggtactataaatggacaaggtcaaagttggtgggtaaaatttcggagaaagctccttaatcacacaaggggtcctctggtgcagctcatgcggtcaagtaacattatcatttctaatatcactcttcgtgattctcccttctggactcttcacacgtacgactgcaagaatgttactatctcagaaaccaccatcttggctccaattgctggagctccaaatactgatgggatagatccagattcttgtgaaaatgtggtgataaaaaactgctacatttctgttggtgatgatgggatagccataaagagtggttgggaccaatatggaattgcttatggccgtccatcagctaatattactatccagaatgtcgtaatccgctctatggtcagtgctggagtatcgattggaagcgagatgtctggtggtgtctcggatgttttggtagagaatgttcatgtctgggattcacggcgaggcgtgaggataaagactgcacctggaagaggggcctatgtaaccaatgtcatttaccagaacataacctttgaaaacgtacgtgtcggtatagtgataaagacagactacaacgagcacccagacgaaggcttcgacccaaaggccgtccccaccatcgggaatatctcttacacctcaatccatgggcatcgtgtgcgagtaccggtcaggatacagggaagcgcgcagatccctgtgaagaatgttaccttccatgacatgtcaatcggtatagtagacaagaagcaccatgttttccagtgctccttcgtccaggggcaggtcattggctacgttttccctgtgccttgcaagaacctggacctgtacgacgagcggcgtgggctggttaaacaatcaacgttacagaatatctctgatatcgactacagtttctgacaatggcatttgataccactgtactattgctgtaggtgtattcagtattcacagccgtcacagtcctttccacacatttagaagcaaaattttgggtagcttttacactcttcacctcacagtcaggcatgtatctaaggaagatcgacttgaccatactgtctcgtagagggacgccaggaatgttgccttttcacttttttgatcactgtatgattacacttacttggttacacagtcgacagtacacttttgatagtgcttactgttcatggcagactacatttaccttgccctttttaaaacagatgtggatgtatatgtatttggtagtttgaacctggaa

SEQ ID NO: 6753 - DNA, 1426 bp, Zea Mays
gagatcgcgaccgcgagtcagggtattttgggcaccaccagagcgccaagaagggaaggttggcttctccttcctaccctttccgcgctgcaaccgccaaattctccgactgcctcgcactctcgcagcacgtggggggtgattctctctttcttctcttcctcagccgccaggaaggtggattcttttcgagctcttgcccagctgattataggtaggtacgtggctggatagaccctactgctggatagagcgtctcagggacgggttgactctttctggccgcatcagcggccggctattcttcttgtccggctatccgttccaggacttcggattaagaggcgacgagatgatgcgacgctgcgtctcggcgttggcccgccgccgccgtccagatcgcacggttgatactatgaaggcacgattccaatgtttggttaacatttcctcttcaataagggacactgacagccaaaggtgctcaagtacgtgtgctacttcctgtgctaccgatccagatgttttatcgagagaaacatcgtcatcagaaatgcttgttgattcatttgggaggttccacaattacttgaggatctccttgaccgagcgctgtaatctgaggtgccagtactgtatgcctgctgaaggagttgaactaacaccaaagtcagagcttctgtcacatgatgagataattcgaatcgctgacctttttgttacttctggtgtgaataagatccgattaattggtggagaacctaccgtacgaaaagatattgaagatatttgtttgcatctttctagtttgaagggactgaaaactcttgcaatgaccacaaatggaattgttctttcaaagaaactcccaaagttgaaagaatgtggactcaatgctttaaatataagtttagatacactagtacctgcaaagtttgagttcatgacaaggcgtaaagggcactcaaaggtcttggaatcaatagatgctgctgtagaacttgggtatagccctgttaaggtcaactgtgtcatcatgcgtggtataaatgatgatgagatctgcaattttgttgaattgacgagacacaagcccatcaacgttagatttattgagtttatgccatttgatggtaatgtttggaatgtgaagaagctagttccttatgcagagatgttggacaaagtggtaagcggcaaagttataaaggagtagagagacttcaagatcaccccacagacactgcaaagaatttcaggattgatggacatgttggcactatttcatttattacatcaatgacagagcatttttgtgctggctgcaatagattacggttattggctgatggaaacctcaaggtgtgcttatttggcccctcagagcttatttcaattccattggctattctggacatgatcgaag

SEQ ID NO: 6754 - DNA, 1823 bp, Zea Mays
aaataaagttaaatacattcccttgccttcctcagcggctcctcgtcctcggctcctcccgctcccctccgcactgtgtcgagccgagcgtgccgctggccgaccttggcaccttgcccgcgcccgcccgagccccgacgctgcctgaagcagcaagtgacagctcccctgggcgagccggtttactaccagcacggtgagcttcggtcgggcggagcagacgacaggcagcacaccaaggtagatcgacgggctctacacggacccgatctgcctctatgctgcaacctggattttcttcttccaatcaccaccacagcgcaacgcctgaacggccgtcgctgccggctacgccaggtgctcaggtcttattcggccccttcgccggcgacgagcgccaccaggatgcgtccgagactaagttgatgaagcagcctacttgggtcttctttgagaaagaatcggtaactgacttaagagaacaaattctccaactcattcagcatgattgtaaggatcaagaggaaaaatcacgggcagagctactggagaagctcaacagatgtaaaagagatacacttatcgaactgtgtcgctcgtttgatttaattggctcaagagctaataggaaggaggaacttgtattgtttctgatggaattcattaaggatcactgttctggtagtgatgtcataaactcggataagaaatacaagaaaagaaagcgtgtcagagaagaggaaaatttgtctgctggtaaaccttcaaaggtaatcgggagtctaaaggagacacaaagcctcgaaaacaagtaatcaaaccaagtaaagatgagctgagggaagctgtctttcttatcttggatactgcggactttgccactatgacctttggcgatgttgtaaaagaagtcgacaaatactttggcaaggatctgtttgagagaaagccactaataaggtcgcttatagaagaggagctctttaggctagcagacgaggcagagaagaaggaactggaagagtcggaagcagcagaggcgaaggctagagccgagcaagctgccaaggagatggcacaagttcaaacagttgaattggttatcaacgagcaaaatgtacttgaagatggtcgagatagcaacaccaaagacagtctaaagaacgcaaatgacagtgctaacaagaaatgtatcgatggtggggcttctgtggagtatggtttcaatgaaaacagctgttacgctgctgaaggttcagaagagcacaaagttgatgatgataataaaaacataactaaggatggcaatggtggaaaggtcgcagttgcacccactgcaaacactgattgtaccttacaactacagggttcaagcaacgtcgaagctgagacgactatgaagagcaatgttggaaccctagaagcgtcaaaagatggagaagtgagagatgccagaaatggagaaaacaatggcactgaagatggtgggaatgaaggaatcaggagtgggaatgttggtagcaatgcagaagctgaagagtctcacggtcatggaaataatgaacgcgcagaacataccgaagatgacaaggctcaggaatgtagccacaatgagaacagtgcaagtgtaggaatccttggcgatggagacggtgaagctagagaaggcgatataaatgcggaagcggaacaaagtcaagcagacggtggcggcaatagtaaagcggaagatgctgagcacaatgaaaacaccaaaactgacgccaattcaagcaagaatggtactactgctgctgtggagtttgaatatgaggatgtggatg

SEQ ID NO: 6755 - DNA, 3522 bp, Zea Mays
ccgatgcggatgcggatgccgatgccgatgccgaagcgcacctgtctcttctccttgccgaccctccacccccagccgaagtgaggccaccaatcacacagccgctccccccgctcgtcctcctcccctgcccctgcctccgcccccgcccccgcccccgccccgccacgccagcatttggattggattgccggcggccgagtggaggcggagatccatccggactccgatccaggcacgcatgacatcacatcagttcagctagatgcctgaaggagaagttcagtagcacaccactacctcacaaaacagctcttctgctcgtgcaaaagtatccagggtccagatgggttcagacaagcagattggtagcccacgccaactcttggaaacactaaagatgggcagagttaggactatcctgacacatacatacccgtaccctcacgagcactccaggcatattatgactgcagtgattattgcctgtctcttctttatatcgtctgacaacatgcacacgctcatacataaactggataacaatatcaagtggtggtccatgtatgtttgcctcattggcttcttctatttcttctcatctccttttcttggaaggaccattcagcccagctactcaaattttaaccgctgtgcttttcatcattgcctttcatatcatatttattggtctctggtacattgggttggttgcacgcttggcaggaacgaggccaggcgtatggacaattctccagaactgtacagtaatcagcattgcatgttgtgtgttctacagtcattgtgggaatcttgctgtgcacaagagcaaatcttttgttgaaagatgagatatgttcgtcttggtttgctcctgttggatctgcaagtgactatcctattctggcaaaatgggttatctacggggagtttgcagcggatcctgtgctggcccatcggatgaaatctctcctttgtactcattatgggctacatttgttggcctctatatcgctaactttgttgtggagagatcaactgggtgggctcttacccacccgtcaacagatttggaggatgagaaactgaagaggcatatgaaaccagattttctggacatggtaccttggtattcagggacatcagctgatttattcaagacagcatttgatcttatggtctctgtgactctttttgttgggcgatttgacatgcgcatgatgcaggctgcaatgaaaggaccaacaggcaacactccaaatgatgacctattgtatgaccacttcaatgaaagggaagacctttggtttgactttgttgcagacaccggtgatggagggaattcatcatatacagttgcccgactgttagcccaaccatctattaggactgttatcggtggctctatgcatactcttccacgtgggaacttacttattatcggcggagatcttgcgtacccaaacccttcatcatttacatacgagaggcgcttctttaggccttttgagtatgctctgcaacctccaccttggtacagagatgaacatatagctttggataagcctgagcttcctcctggtgtatcaaagatgactgaatatgatggaccacagtgtttcataattcctggaaatcatgactggtttgatgggcttcatacttttatgagatatatatgtcataaaagctggttaggtggatggtttctgcctcagaagaagagttattttgcattgcatcttcccaagggttggtggatatttggtcttgatttatctctccatggcgatgttgatgtataccaattcaagttctttgctgatgtttgtcagaataagctgtgcaggttggagagaatgattctgtgattgtagtaacacatgagccaaactggcttcttgattggtactggaatgagactacaggcaagaatgtatcacacttaattcaggaatacctgaaaggaagatgtaaacttcgcatggcaggggatttacaccattttatgaggcactctgccactcgatcagaaaagaataattttgtgcaacacttgcttgttaatggatgtggtggtgcctttttgcacccaacacatgttttcagaaactttgagaggttctctggaaccacctatgaatgcaaggcagcttatccatcctatgatgagtctactgggattgcattgggtaacatattgaagttccgcaaaaagaattggcagtttgacatcattggcggttttatatacttcattttggtgttttcaatgttcccacagtgtaatcttgttcgtatcttaaatgaagaaacttggtctgggcgtctgaaaagcttctcaggcacaatatggagtgctttgctttatatttttgagcactcttatgtctcttcagtaggaagtcttactttattgacggcgtcatattcattcgtaccatccaaactatcaaggaggagaagagctattataggcggcctccatgttttggcccatttaactgcagcactacttttaatgttgctgctggagttgggcattgaaatttgtattcgtaaccatttattggcaacttcaggttatcacactctgtatgaatggtatcgatccatggaaagtgagcattttccagatcctactggtcttcgtgctcgtttggagcaatggactctgggactgtatccagcatgtataaaatatcttatggcagcctttgacgtccctgaggtcatggctgtgacaagaataaatatatgcaagaacggaatgatgtctctttcgcggagtgttctgatcatgtactacacttctgtgtttatctatttctggattttctcgactccagttgtttctctcatatttggtagttacctatacatctgcatcaattggttccacatacactttgatgaagccttctcgtcgctgcgcatcgcaaactacaaatccttcacaaggttccatgttaagaaggatggtgatctagaaatatttactcttgcagttgacaaggtcccaaaggactggaagttggatccgaggtgggaatcagagggacgagggcctcatcagctcagccatgaccggaagcatccaagcaagtggaggtcagcctcatcaactgaccctgtgagatctgtacgggttgttgatcatttcaccatcgaaagaacaagaaccccagatatggagccctcttcctgattgtgcagcccttactattataaggagttgctactgctgctagaaaaattaacaataactagcttcaacacacagtattgtttttgtttccacatccagccaataggtggaccgaggtgatctgcccttgtcggcgtccccgctttactgacctcacctgcagcattgtaatctgtatagaaagaaaattcacctgctgcctattgcttgtattcaatcaaaggaactctaaaaaaaagagtgttacagaagaatgttttgagaaagcaaagggatgaatcgattcatcatcatttactaaagattgattctat

SEQ ID NO: 6756 - DNA, 3629 bp, Zea Mays
ccgatgcggatgcggatgccgatgccgatgccgaagcgcacctgtctcttctccttgccgaccctccacccccagccgaagtgaggccaccaatcacacagccgctccccccgctcgtcctcctcccctgcccctgcctccgcccccgcccccgcccccgccccgccacgccagcatttggattggattgccggcggccgagtggaggcggagatccatccggactccggtgagtccgttcccgctgccgtgcttgatccaggcacgcatgacatcacatcagttcagctagatgcctgaaggagaagttcagtagcacaccactacctcacaaaacagctcttctgctcgtgcaaaagtatccagggtccagatgggttcagacaagcagattggtagcccacgccaactcttggaaacactaaagatgggcagagttaggactatcctgacacatacatacccgtaccctcacgagcactccaggcatattatgactgcagtgattattgcctgtctcttctttatatcgtctgacaacatgcacacgctcatacataaactggataacaatatcaagtggtggtccatgtatgtttgcctcattggcttcttctatttcttctcatctccttttcttggaaggaccattcagcccagctactcaaattttaaccgctggtatgttgcttggatttgctttgcatccctgtaccatcttcctagcttccagtcaatgggggttgatatgcgcatgaacctctcgcttttcttgacaatatatttctcctcagtgcttttcatcattgcctttcatatcatatttattggtctctggtacattgggttggttgcacgcttggcaggaacgaggccaggcgtatggacaattctccagaactgtacagtaatcagcattgcatgttgtgtgttctacagtcattgtgggaatcttgctgtgcacaagagcaaatcttttggtagtagttctgatcccaatttgcttgcttttcttaaaaatgaaaacgggagtacctggatatcaaattttctccgtatgaatcagttgaaagatgagatatgttcgtcttggtttgctcctgttggatctgcaagtgactatcctattctggcaaaatgggttatctacggggagttagtttgcagcggatcctgtgctggcccatcggatgaaatctctcctttgtactcattatgggctacatttgttggcctctatatcgctaactttgttgtggagagatcaactgggtgggctcttacccacccgtcaacagatttggaggatgagaaactgaagaggcatatgaaaccagattttctggacatggtaccttggtattcagggacatcagctgatttattcaagacagcatttgatcttatggtctctgtgactctttttgttgggcgatttgacatgcgcatgatgcaggctgcaatgaaaggaccaacaggcaacactccaaatgatgacctattgtatgaccacttcaatgaaagggaagacctttggtttgactttgttgcagacaccggtgatggagggaattcatcatatacagttgcccgactgttagcccaaccatctattaggactgttatcggtggctctatgcatactcttccacgtgggaacttacttattatcggcggagatcttgcgtacccaaacccttcatcatttacatacgagaggcgcttctttaggccttttgagtatgctctgcaacctccaccttggtacagagatgaacatatagctttggataagcctgagcttcctcctggtgtatcaaagatgactgaatatgatggaccacagtgtttcataattcctggaaatcatgactggtttgatgggcttcatacttttatgagatatatatgtcataaaagctggttaggtggatggtttctgcctcagaagaagagttattttgcattgcatcttcccaagggttggtggatatttggtcttgatttatctctccatggcgatgttgatgtataccaattcaagttctttgctgatgtttgtcagaataaggttggagagaatgattctgtgattgtagtaacacatgagccaaactggcttcttgattggtactggaatgagactacaggcaagaatgtatcacacttaattcaggaatacctgaaaggaagatgtaaacttcgcatggcaggggatttacaccattttatgaggcactctgccactcgatcagaaaagaataattttgtgcaacacttgcttgttaatggatgtggtggtgcctttttgcacccaacacatgttttcagaaactttgagaggttctctggaaccacctatgaatgcaaggcagcttatccatcctatgatgagtctactgggattgcattgggtaacatattgaagttccgcaaaaagaattggcagtttgacatcattggcggttttatatacttcattttggtgttttcaatgttcccacagtaggaagtcttactttattgacggcgtcatattcattcgtaccatccaaactatcaaggaggagaagagctattataggcggcctccatgttttggcccatttaactgcagcactacttttaatgttgctgctggagttgggcattgaaatttgtattcgtaaccatttattggcaacttcaggttatcacactctgtatgaatggtatcgatccatggaaagtgagcattttccagatcctactggtcttcgtgctcgtttggagcaatggactctgggactgtatccagcatgtataaaatatcttatggcagcctttgacgtccctgaggtcatggctgtgacaagaataaatatatgcaagaacggaatgatgtctctttcgcggagtgttctgatcatgtactacacttctgtgtttatctatttctggattttctcgactccagttgtttctctcatatttggtagttacctatacatctgcatcaattggttccacatacactttgatgaagccttctcgtcgctgcgcatcgcaaactacaaatccttcacaaggttccatgttaagaaggatggtgatctagaaatatttactcttgcagttgacaaggtcccaaaggactggaagttggatccgaggtgggaatcagagggacgagggcctcatcagctcagccatgaccggaagcatccaagcaagtggaggtcagcctcatcaactgaccctgtgagatctgtacgggttgttgatcatttcaccatcgaaagaacaagaaccccagatatggagccctcttcctgattgtgcagcccttactattataaggagttgctactgctgctagaaaaattaacaataactagcttcaacacacagtattgtttttgtttccacatccagccaataggtggaccgaggtgatctgcccttgtcggcgtccccgctttactgacctcacctgcagcattgtaatctgtatagaaagaaaattcacctgctgcctattgcttgtattcaatcaaaggaactctaaaaaaaagagtgttacagaagaatgttttgagaaagcaaagggatgaatcgattcatcatcatttactaaagattgattctat

SEQ ID NO: 6757 - DNA, 1254 bp, Zea Mays
cccaagacaagcaccgaagatggcttgacgcccgaatccagaccctcgtctgttatggcggcggcggaggcggcgccaccgccgatactcgagctggacccgtcgcacgatcgagccgtcagcgttgtcgaggacatcgtgcgtctagagcggaggatctttccgaagcacgaatcgctggcgcggtccctgcacgacgagctaaagcggcggaactccgggctgatctacaagacgtccagcgccgacgagggggaggtcatcgggtatgccatgtacacctgcaacacatccctctgcgccaccatcaccaagctcgccgtgaaggagaactgcaggcggcagggccacggcgaggcgctgctggcgggcgcagtggagcggtgccggcggcggaaggtccagcggctctccctccacgtcgaccccacgaggacggctgccgtggcgctgtaccgcaaggccgggttccaggtcgacaccaccgtcgagggctactacgcgcctcacagggacgcctaccggatgttcttggatctgtagtagaaccgtcgaggacgagaaaaccagcccatgtgttccggcagctgctgccggcttgtagctggtctggtctggtgatacaatacctcgtgagtaggatacagccaacagccgagcagggtggatgattcgaagctgtaagaacgatctgctagaaagttttcataccaccaagagaaaatcgaaagcccaatctgattcagcatcgattcaagtaccccttaggcaatgctgattcacagcaggagggagcaaaccaatcccgcaagtgtgcctggcccatcggaaggccgatgcgctggagtctcggagaacacccagcgggcagtgcctatgcaaggccggcggcggcgacggcgggtcagctcacaggaagattgctcgggacggacggagagggaggctttgcgtcaaggaagaagtcgttggtggtactcattacccagtggtcatgttcaaactcttatccaccttttttttttgaaaggggtcttatccacctcatttaggctttgttcggttagctctcaatccatgtggattgagcgagattggatggatttgaatctcaaataagtcaaacttcttctcaattttttccaatctcatccaatccatgtgttttagaaataaccgaacaagcccttacagggtagaatagaatacgggagtggattatccatgggtgaatcttcagctcaattcacgtag

SEQ ID NO: 6758 - DNA, 1382 bp, Zea Mays
cggccacgctcgccgcgggcacacgcggcgcgctgtgctcacccctgtctgcctgcgcgcccggcacgcccgcgcccactcacgcccggccctgccccgcgccctcatcgtctcctcccggcctcccctcaaagcccaccaccgctgcccccacgccacccaccccaccccacccccgcccctaccgcgcggtgcccgagacccagaggccagaccccggctacctttcttcacctccttcccatcgcaatcgcaagcccccggctccggcgctcggcggtcggccaggttcgggagatcacttcgtcgcggcgaggagggagggggtcgccgttagcgcgcggcacttggatgagaagggcagcggtggaggaggatgcggaaggcgtacagggactccatcaaggtgctcgaagctgacatccagcacgccaacacccttggacggactgcagcctcgcaggggctcttggtctgctgagaatcctcatatacaaggtttatgtggatggcacaacaaccatgtcgactcatgagaggaaatccagcatcaaagaattctatgctgtgatatttccttctttgctgcaactgcaaagggggatcactgatgtcgaggacaagaagcagaaggccgtatgcatggagaagtacagaaagaaagatgaggatggacgggacaccttatctgatattgatgttgagagggaagaggagtgtgggatttgcatggagatgaacagcaaagttgtgttgcccaactgcacccatgctatgtgtatcagatgttaccaggactggagttcaagatcgcagtcctgcccattctgccgtgacaacctgaagaagacctgtcctagtgacctgtggatctatgttgaggaccaagatgtggtcgacatggagacggtgtcgagcgagaacctcagacggctgttcatgtacataagcaagctgcctctgattgtcccagacgtcatcttcagcgtgtatgattcccacatcaaatgacttccgacgcgaccttcccgacgaccttcagccagtgcccagctccagttaatcttatgcccccatgtcctccattttcatgctttgctcaagcttttggaagtgcctgaactgatttggaaccgaaagccttccggtggtgctttagaaacttgtttagtgcctgcatgcatctttaatcatatgcagccactctgtacatatctgacttggctcagttaataggggactgtgcttgccccaaatggaggcagggccgtttgtgtctttctcatgtttccattagcgaagcaacgcaaagttctgggcattggaaggtttctgctgcaatgttagaatgctctctatacttaattagtctggatctacta

SEQ ID NO: 6759 - DNA, 2061 bp, Zea Mays
cagggacatgctgtggaataccgtgatgtgtgccatctgatttgttgtaatagatctttcagcgggcccttgtacatatgggaaaatagaaactgaagaaggcagtgtcagctataggtcaatgccacggctgtcacaaataatcttcccaagaggacttgctgccccaagtgctagttcaacgcaagatattttcattgggcagctcggaggtgcaattgcaactaccattgagcatgtgatagctcctgatataagatttgaaactgttgacatggcagtgaggttgcttgtacctattattgtgctacagaaccacaataggtacaacattcttcaagaaggccataactatagtatagatgttcaagctatagaaagggaggttaaaaagatggtccaccctggtcaggaggtaataataatttctggttcgcatgcgctgcaccagcatgaaaagttagctgttgcagtttccaaagcaacacgtagccattctcttcatgaaacaaagagtgatggccggtttcatgtccgtaccaaaacttacttggatggagcaatacttaaagaggaaatggagcggtctgctgatgtgctgtctgctggtctattagaagttgcaaatccttctctctcaagtagattcttcctaaagcagcattggactgatggagaagatgatgtaaaagactctattaagcacaggcccttgtgggaatcttacatgcccaaaaataataaaggaaggagaggaactggaaagaagaaacatggaagtctgtacagaacttatgggaccagagtgatcccagtttttgtattatcactggccggtgtcgatgctgaacttctcatggaagaggagagtcttgtttggacaagtaaagatgttgttattgtgcttgagcataacaatgaaaagattcctctaagctatgtgtcagaaacgactaggcagtttgctcttccatctatcgcacagcgccacatcttggctggtctggcatcagcagttggcggtctgagtgcaccatatgaaagagcatcacgtattcatgaaagacatgtagtgaactggctgtgggctgcaggctgtcatccgtttggaccattctcgaactcctcacagatcagtcaaattcttcaggatgtagcactgagaactacaatttatgctcaagtcgatgctgctcttcgcaaaataagagacacatcagagtttgtccaatcttttgcatcagagcatcttaagacgccattaggagaacttgtgaaaggtaataaaaacaagtccaccactgagttatgggtagagaaattctataagaaggtaaccaatctaccggagccttttccccatgatcttgttgagaagttagaagaatacctggataaacttgaagggcaactcgtggacttgtcttccttattgtatgaccaccggctggtcgatgcatatcaaaacagtaccgatatcctgcaaagcactatttttacacaacagtatgtggaacgtgttctagctaacgagagagacaagatgaaatgctgtagcattgaatatagtcatccaaagcagtcatcccaggcttttgtctatggagggatccttctggctggatttcttgtgtattcactggttattttcttctcttcacctgttcgctaattttatgtccagatgcagaaagtcttggatgctttatggtaggctaggtttgtctggggctgtcaatcttcatgagggaatggcctgaactgtcttggatacagaagggctttggcacagttttagtgctctatttctcgacacacaagcaatcagacggctgatatatatgtaactgattcttgtctgcgataaactatagtcgatttcacagaagagctggtgcatgctatgaaaatatgaaatactttcatcccattttgcaacttgttactgcagaactgcacataacaccactgacagaaacccccgtttgttaataagccccccagcttcatgaggaccagccagcagacatgtggccttggactggtgcaaggacgtagtcg

SEQ ID NO: 6760 - DNA, 2372 bp, Zea Mays
cgagagcaggagacagaggggctccccccccacccccgagcccaaacgcagctagctccccattccacccaagctcccgcagccagatgctctcccccgctcgagccccaccgccgccgcccgtccccgccgccgggtagaccgcccgatccgacggcgcccgccgcacccatgggccgcggcggcgcgcgcgcggcccccgccgccgcggtgccgccctggcacgcgctcccggacgaggtctgggagcacgccttctccttcctccccgcggactcggaccggggcgccgccgcgtgcgcctgccacgcctggctccgcttcgagcgccgctcgcgccgccgccttgccgtcgccaactgctacgccgcgtccccgcgcgacgccgtcgagcgcttccccgccgtccgcgccgtcgaggtcaagggcaagccccacttcgccgacttcggcctcgttccgcccgcctggggcgccgacgccgcgccctgggtcgccgccgccgccgccggctggccgctgctcgaggagattagctttaagcgcatggtcgtcaccgacgactgcctcgagatgatcgcggcctccttcaggaacttccaggtgctgcgcctcgtctcctgcgagggcttcagtacagccggcctcgctgccattgccgctgcttgcagaaatctaagagaacttgaccttcaggagaatgagattgaggattgctctattcattggctcagtctatttccagtatctttcacttctttggtaactctaaatttttcatgcctagagggggatgtcaatatcactgtacttgaacaattagtaaccagatgcagcaacctcaagactctcaagctcaacaatgctatacctcttgacaagcttgctaacctccttcgcaaggctcctcagattgtagaactcggaacaggaagattctctgcagattaccatccggatctcttttcgaagcttgaagcagcatttgctggctgtaaaagcttaagaaggctctctggggcttgggatgccgttccagaatacctgccagcattttattgtgtatgcgaaggcctcacatcactaaatctgagctatgctactgtacgaggccctgaactgattaaattcattagcagatgcaaaaatttgcaactcttatgggtgatggacttgattgaagaccatggtcttgctgttgtggcatcgtcttgtaacaaactgcaggagttgcgggttttcccttctgctcctttcgaagcagctgagcagacggatgaccaacgaggcccttattaccatcgcgaagaaccggcccaacttcacttgcttccgcctatgcatcattgagcctcacacaccagattacattacacaccagcctcttgatgcaggttttagtgccattgtggaatcatgcaagggcctcaggcggctttctgtttcaggccttctcacggacagtgtatttaaatccatcggggcacatgctgaccgtcttgagatgctctcgattgccttcgccgggaacagtgatttgggcctccattacatcctatcgggctgcaagagcttgaagaagctagagattagggactgcccatttggtgacaagcccttgctggcaaacgctgccaagctggagacaatgcgatccctttggatgtcgacgtgctcaatgaccttgggcgcatgccggcagcttgcgcgcaagatgccccgtcttagtgtggaggtcatgaatgatcctcgacggggattccccttggactctctaacagatgagagccctgttgagacgttgtatgtctaccggacaatttcaggtccaaggtccgacacaccagcttgtgtccagattctctaaggggcagctgtggtctacaaaggtactatggaagcatccattttcaatcacatcatgtaccttcaacaccttactagcataacctggatcgtctccttgaagtagcaaggctggtgacctcggtaatcctgtcataatctctgcttagctgtacaactgtttctgggagtttagggtgagagactcagggtccctttcaggtgttaataactgtagggaggacactcgatgagttacaggaactactagatagcgtcttgaggaaacttgggtttgttttcttagcgtgcctagttcttttcatgtataaaaaaatatgggatcattccaatgctgccacaatgtactgtactattggaacaattgtacttggagcctctacttttttgagttttgaccccctccccccccccccccccccccccccccactgattatgggttgctgttgctcccgcctgtgatttgtgaatgctatataaaagcttgtacgtggctctgccttc

SEQ ID NO: 6761 - DNA, 1389 bp, Zea Mays
tctccaccgctccttttttttctctctctctctctcctagtagtatatatatacacacacataaatacatgtttctctcaggctcacaaagtcactcagttgagagaaatacaaacatctgagtctagctcctgacagtcacagacctcaaaactgttctgcacatccttcagctcctttcttttgcagttgcagacttgcaggtgcatgttgtccagagataagcaggtgatggctgcgccgatggccgcggcggacggcgggctgaggcggctgttcgagaagccgctgccggagaacccgacgctgctggaggcgctctcggcgtggaaccgcaacgtgcaccaccccagcagcaagcccatcgacacggcgtccttcacggagatcttcggcgagctccacttccaggagaagcagcagcccgaccgaggcgccctcctgccgccgtcgccgtcgcccccgccgacgccgctccctccttcccgcacgctgtcgtggctcgacatcgcggccgaggccgagaagagcaaggacgactcgtcgctggacgcgctgctgaggcccaagccagcgaccaccgtggccacggtgaagaggagcgcgagcttctgcaccaagaagggctcctccgcgtcgctgctgctctgcaccgaggggctcggctccgagagcaccgtggacgctgacgacatgttcaaggacggcgacgccgaggccgaggccgaggccgccgccgccgcgctcaagggcacggacacggcggacggcagcgacgccgaggaggcggtgaaggaggagaggcagccaaagacgttcccgccgccgataccgtccatcgggcgcggcggcaagccgtacgtgtgcttccggtcgttccgggaggacggccggttcgtgctgctggaggtggtgatccccgggaaggagctcctgcaggccacgcgcgagggcggccggctcaggctgcagttcgccaacgctgccgcagcagccgcaggtggtgtgggtgtcgtcgacgaggcggtgcacggaggtgacgacgatggcgacccccgtggcaagaacgcatgcatagacgacgacgaccacgatgacgagcgctaggtgatcgtcggggttcgttgatgtacttggcatactttatcacgatcgataattgtcctactactactgctacggatgatgatgatgcaatggtgaatcatgctgatgagaagcatcggctaactaattaattaatgtttctaaagtgtttttcagaaagtgatctgaaaagcgttgtgctcgtcctattcagtcataaattcagattccacctttcttgatgctcgatatattttttctataaaaacgattcttgatcctacagtgatctgtatggcacag

SEQ ID NO: 6762 - DNA, 1867 bp, Zea Mays
tcgccggtccttgatctccatggctctagcgtttagccgcagcagcggccagcacgtgcacgccggcgaggatagcgcggtcccggcggttaccaccacacaggtcactgacactagctctcaatgaaattgcggacccgcaacacagtgggaggttacctcccagctcgggcccactccagtccagcggtccagccccgtgggtacaccatacacggtcccctcgcctccctccgagaaggaagaagctcaggcgaagcgaggcagagggatgtcgtgacgacgaaaccgaagccgagaacggaagcgagccttacatatacccggccccgtcccagtgccctcggcttccgccccagataccaaaccctaaccttagtcggccgttccgcaggcccgccggcggcgacgccttgtgtgccgcgtccgtgattctcttgcacagggaagcgtttggaaggggactccctgcctagtgcactggccgcagcgacgcgcggccgaggcgcggatcggggaggggaggacggctgtggcgagatggcgggtgacgtcgcgacctcgccagccccggcgccgctgtccgtgtcctcatcgtcgcagaaccaccaccaccacggccccacgaccgcccgcggtctcctctgccacgccggcgccggtgcctccgctggtgtggtggcggcgacgttcgtgtgcccactcgatgtcatcaagaccaggttccaggtccacggctggcccaagcttgccacagattgctcaacaagaaggtttccggggaatgtatcgcggcctatccccaactattctggcactcttgcctaactgggcggtttactttactgtgtatgagcagcttaaaagttttctttcttccaacgatggaagccatcaactttctttaggggcaaatgttgttgctgcatcatgtgctggagctgcaacaactattgtaacaaatccactttgggttgtgaagacaagatttcagacccaaggaattagagccgggccaatcccgtataaaggtacacttgctgccttgagaagaatagcacatgaagaaggcatccgagggctatacagtggcctggtccctgccttggctggtatcagtcacgttgctattcagttccctgtgtacgagaagataaaagcttatctggctgagcgagataatactactgtagaagcattgagttttggtgatgtcgctgttgcttcgtctctggctaaagtagctgcgtcaacattgacatatcctcatgaggttgttcgatcaaggctgcaagaccagcgagcaaactctgatgccagatacaaaggtgtaatagactgcgtcagaaaggtttatcataaagagggtgtggctggcttctaccgtggatgtgccacaaatctgttgcggacgacccctgctgcagtgataactttcactagcttcgagatgatccataggtcccttcttgatctattccctgctgaacctgaacctcacatccaacctctaaagcattgaccatacaacatctgtaccctatccatgcggcagattaggaccccagtaaccatccagcaacagcaatgttgtttactgtgccagatggctcttgtaaaagagaattgtttttttcccagataatagctgccattcaaaagttgaaacaatagtgtaggcagagcattagcatctgtgtacgtaatagatttgttagcatgcatttggggtggaggtatatgagcgatgttgggtattttttttatgatgatgacgaaaagaaaaatgttacgacatatgaaggaatgattactatattctttttcacacctggtgtgctgtgatcgtgattcgtgaatccgtgat

SEQ ID NO: 6763 - DNA, 1683 bp, Zea Mays
gcctaaaccccgaaattataaagaaaaccgcctcggccgcaacttgactatctttgtgaggaccttcaaccatctcaggcggaatggcggcttctggtgagggcgcgtcgctgccgtctccggcgggcggggaggatgcgcaccgccgccgcgtcagctatttctacgagccgtcgatcggagactactactacgggcaaggtcacccgatgaagccccaccgcatccgaatggcgcactcgctggtggtccactacggcctccaccgcctcctcgagctctcccgcccctacccggcctctgaggccgacatccgccgcttccactccgacgactacgtcgctttcctcgcgtccgccaccggaaacccgggtgtcctcgacccgcgcgccattaagcgctttaacgtcggtgaggactgccccgtgttcgacggtctcttccccttctgccaggcctccgctgggggaagcatcggcgccgccgtcaagcttaaccgcggggacgccgacatcaccgtcaactgggcgggcggcctccaccacgccaagaagagcgaggcctccgggttctgctacgtcaacgacatcgtcctcgccatcctcgagctcctcaagttccacaggcgtgtgctatatgtagacattgatgtccaccatggagatggcgtggaggaggccttcttcactacaaaccgagtcatgactgtttcctttcacaagtcgtacaatgttcctatgatggttttaggtggtggaggttacaccatcagaaatgttgcacgctgctggtgctacgagaccgcagttgctgttggagttgaacctgataacaagctgccttacaatgattactatgagtactttggccctgattatactcttcatatccaaccaaaaagtgttgaaaacctgaataccacaaaggacttggagaacataaagaacatgatattggagaacctgtcaaagatagaacatgttcccagcactcaattccatgacagaccgtcagaccctgaagctccagaggagaaagaggaggacatggacaagaggccacctcagcgcagcagattatggagcggaggagcttacgactctgatacagaggatcctgacagcctgaaaagcgagggtaaagacgtaactgctaacttccagatgaaggatgaaccaaaagatgatctgtagaagtttcagaagtgcccccaaagttactgagttgtgaatgggatcgtcgacatgcatgttgaagagtggggacgcatctgaacctgtccgtgctgatatctgccgctgtgcatctgtaacagactgaacgttttgctggttccagctttcctgcgtgttggtaactagactagatatatggccctttggtgggtcccaaactgttgagctggagaaatgaagtgattattctcgcatgattttgtagcatgcatgtaatcattacccattagttcattaggctatcaacagtagtttactcatccccatattcaaacttcactatgtgcgcaaacagtgatttgattgaccatatgattaaactttgaagatggtctttgggtagtgtttggtttcaaagtgtaatgggatggagccgctccgctcttaatttgttgttgtttggattagttgcatataggatagagtgactcgagtttatgcgaagtcg

SEQ ID NO: 6764 - DNA, 1778 bp, Zea Mays
ctcgaccagttcctactccccaggccaacaaaatcacctcccgcacctccgcgattcttctcgaagactcgaaccgcctggaatcagaatcgccgttgtcgggaatcgctccgatgcccgcggcgatcgggaggcggccgcccgaacgccgggtctagacctcgcgtgcgatggcgaggtcgaggcctagggtttggctcgtggcgggctgcgccgccgtcatcctgtgggcctccgtcgcgcagctcgtcgccgtcggccgctttctcctccttttcggcctcgtgggcgacgccgatccctcgccgccaccttccgcgcttccgcccccgagaatatacatgagcaatggttatctgaagatatcttgtaatgggggtctgaatcagatgcgctcagagatttgtgacatggtggcagttgctcgtcttctaaatctcactatggttgtccccgaacttgacaagagatcattctgggctgatcaaagtaattttggagatatatttgacgtgaggcatttcatcaactctttgagagataaggtgcacatcattgaacagcttccagagaagcttggtccaagagattcaaacattattatacttgaaatgccacctgtgagctggtcagatgaaaaatattacttgcatcagatcctaccgctgttcaacaaatacagcatcatccattttaacaaaacagatgctcgcatagccaataatggtatcagtacagagcttcaattgcttagatgccgtgttaattttcatgcactgaaattcacacctcaaattgagggattagggaataaactggtacataaactgcgagccaagggatcatttgtagccttgcatttacgctatgagatggatatgctggcgttttctggttgcaaccatggcctttcacctgaagaagccgaggagctcaaaaaaatgagatatgcttatccatggtggagagataaagaaattgattctcaagccaagaggtcgcaaggactgtgcccacttactcctgaggaggcatcacttgttttgaaagctctaggatttcaaaaggatgctcttatgtacatcgcagctggtgaaatttatgggggagataggagactagaaccactacggtctgcttttccaaaccttgtacgaaaggagatgctgctagactctgaagttctgcatcaattccaaaatcactcttcccagatggctgcacttgacttcattgtatccacagctagcgatgttttcattcccactttcgatggtaacatggcaaagcttgttgaaggtcaccgaaggttcctgggttttcggagaagtgtggtgctagaccgccggaaattagttgaacttctagatctgtacaccaacaagacaatctcttgggacaaatttgcatcttctgttcgggaagctcataaggaccgtgtagctcaaccatcctgcaggcgaaaacttgaaaacagaccaaaagaagaggattacttctatgctaacccccatgaatgcctagccaattcaaccttgtgcagctaaactgagtttctggtttctgttaggtgaccagatgtgagcgtgaaatcattaccaggcaggaattggcacacggttgttttgatgtcgtgttgtcgagggaccgaagccagatttacacagcccatcacgatcttttgacttcgaattccttattatcctgttgtatagtttgcttggtgcatcagccttctcgatgaatgctttactgtgtaaacccttccgtgagatcat

SEQ ID NO: 6765 - DNA, 1860 bp, Zea Mays
ctcgaccagttcctactccccaggccaacaaaatcacctcccgcacctccgcgattcttctcgaagactcgaaccgcctggaatcagaatcgccgttgtcgggaatcgctccgatgcccgcggcgatcgggaggcggccgcccgaacgccgggtctagacctcgcgtgcgatggcgaggtcgaggcctagggtttggctcgtggcgggctgcgccgccgtcatcctgtgggcctccgtcgcgcagctcgtcgccgtcggccgctttctcctccttttcggcctcgtgggcgacgccgatccctcgccgccaccttccgcgcttccgcccccgagaatatacatgagcaatggttatctgaagatatcttgtaatgggggtctgaatcagatgcgctcagagatttgtgacatggtggcagttgctcgtcttctaaatctcactatggttgtccccgaacttgacaagagatcattctgggctgatcaaagtaattttggagatatatttgacgtgaggcatttcatcaactctttgagagataaggtgcacatcattgaacagcttccagagaagcttggtccaagagattcaaacattattatacttgaaatgccacctgtgagctggtcagatgaaaaatattacttgcatcagatcctaccgctgttcaacaaatacagcatcatccattttaacaaaacagatgctcgcatagccaataatggtatcagtacagagcttcaattgcttagatgccgtgttaattttcatgcactgaaattcacacctcaaattgagggattagggaataaactggtacataaactgcgagccaagggatcatttgtagccttgcatttacgctatgagatggatatgctggcgttttctggttgcaaccatggcctttcacctgaagaagccgaggagctcaaaaaaatgaggtctggcagcgtctgcttcaagcatcttatctggtccaggtcgttcagaattgatcacagaccccataatcctctctaaaagatatgcttatccatggtggagagataaagaaattgattctcaagccaagaggtcgcaaggactgtgcccacttactcctgaggaggcatcacttgttttgaaagctctaggatttcaaaaggatgctcttatgtacatcgcagctggtgaaatttatgggggagataggagactagaaccactacggtctgcttttccaaaccttgtacgaaaggagatgctgctagactctgaagttctgcatcaattccaaaatcactcttcccagatggctgcacttgacttcattgtatccacagctagcgatgttttcattcccactttcgatggtaacatggcaaagcttgttgaaggtcaccgaaggttcctgggttttcggagaagtgtggtgctagaccgccggaaattagttgaacttctagatctgtacaccaacaagacaatctcttgggacaaatttgcatcttctgttcgggaagctcataaggaccgtgtagctcaaccatcctgcaggcgaaaacttgaaaacagaccaaaagaagaggattacttctatgctaacccccatgaatgcctagccaattcaaccttgtgcagctaaactgagtttctggtttctgttaggtgaccagatgtgagcgtgaaatcattaccaggcaggaattggcacacggttgttttgatgtcgtgttgtcgagggaccgaagccagatttacacagcccatcacgatcttttgacttcgaattccttattatcctgttgtatagtttgcttggtgcatcagccttctcgatgaatgctttactgtgtaaacccttccgtgagatcat

SEQ ID NO: 6766 - DNA, 2044 bp, Zea Mays
cccaggccaacaaaatcacctcccgcacctccgcgattcttctcgaagactcgaaccgcctggaatcagaatcgccgttgtcgggaatcgctccgatgcccgcggcgatcgggaggcggccgcccgaacgccgggtctagacctcgcgtgcgatggcgaggtcgaggcctagggtttggctcgtggcgggctgcgccgccgtcatcctgtgggcctccgtcgcgcagctcgtcgccgtcggccgctttctcctccttttcggcctcgtgggcgacgccgatccctcgccgccaccttccgcgcttccgcccccgagaatatacatgagcaatggttatctgaagatatcttgtaatgggggtctgaatcagatgcgctcagagatttgtgacatggtggcagttgctcgtcttctaaatctcactatggttgtccccgaacttgacaagagatcattctgggctgatcaaagtaattttggagatatatttgacgtgaggcatttcatcaactctttgagagataaggtgcacatcattgaacagcttccagagaagcttggtccaagagattcaaacattattatacttgaaatgccacctgtgagctggtcagatgaaaaatattacttgcatcagatcctaccgctgttcaacaaatacagcatcatccattttaacaaaacagatgctcgcatagccaataatgggaataaactggtacataaactgcgagccaagggatcatttgtagccttgcatttacgctatgagatggatatgctggcgttttctggttgcaaccatggcctttcacctgaagaagccgaggagctcaaaaaaatgaggtctggcagcgtctgcttcaagcatcttatctggtccaggtcgttcagaattgatcacagaccccataatcctctctaaaagatatgcttatccatggtggagagataaagaaattgattctcaagccaagaggtcgcaaggactgtgcccacttactcctgaggaggcatcacttgttttgaaagctctaggatttcaaaaggatgctcttatgtacatcgcagctggtgaaatttatgggggagataggagactagaaccactacggtctgcttttccaaaccttgtacgaaaggagatgctgctagactctgaagttctgcatcaattccaaaatcactcttcccagatggctgcacttgacttcattgtatccacagctagcgatgttttcattcccactttcgatggtaacatggcaaagcttgttgaaggtcaccgaaggttcctgggttttcggagaagtgtggtgctagaccgccggaaattagttgaacttctagatctgtacaccaacaagacaatctcttgggacaaatttgcatcttctgttcgggaagctcataaggaccgtgtagctcaaccatcctgcaggcgaaaacttgaaaacagaccaaaagaagaggattacttctatgctaacccccatgaatgcctagccaattcaaccttgtgcagctaaactgagtttctggtttctgttaggtgaccagatgtgagcgtgaaatcattaccaggcaggaattggcacacggttgttttgatgtcgtgttgtcgagggaccgaagccagatttacacagcccatcacgatcttttgacttcgaattccttattatcctgttgtataggtcagtttttagcttctgtattgattcgttcgctttccaacatgccaaaaggggcctgtttggagcatgtaaattttggtttgttgtctaccatttttcttcatcggtgtctaactcgtgctgctaggccgaagggttagctgtttcatcttttggttttgtttctctaattttacaaattcttagtggaattatcacctttttaaaactgtgctgtttcaatacaggagtgctgaacctgtctcatttgtctctcttttcttttttggaaaaggttgtccagtttgcttggtgcatcagccttctcgatgaatgctttactgtgtaaacccttccgtgagatcat

SEQ ID NO: 6767 - DNA, 984 bp, Zea Mays
catctgatgaatcagcttgattcgtttagtgataagcttgtaaagagaattcttaaagctcatgaaccttataaccataatgacaatactaaatgttctgttgtttctgagagggtatcatatgaatttgttcctgaaaggaaagcttgctcctcattaaacaaatcagtggtacagaatgcaagtggttgtgatagcaataggaacaaatgtttggcatctgggaaagctgtgtccaagaaaaaagatcagagtaccaataatagcttggataaagaaaatatgtcatcttgtggttctggtggcacaaaggtgtcatctccaggctccttgggtttagctagggaggttgattctggaaattgtctctccctcttggataaccggaattgtcctatgactaggacctcaaaggcaaatcacaacaattgtaggcaaactgcggacatcttggattttaatctcagagaatgtagttccttcaagaaaggtcatagcaagggtttatctgaagcccagaagcatgaaaagtcgcttcctggctcttcaattgcatgtgatattgaagatgccggtgattgcaatgataaccttgtgaaagcacctttcatcaaacaacgtaacaggttcgacagattagagcaaggaaggtgccagtgtaaacagctactcacatatgatcttggtatttatgtaatttccgtccgatgtaaataaatacttagttctgaaatcatttatacatgcatatccacttgagagtactgttataatggtaggaatcttggtcccggttcaccatgtaacattataatttaaatagggatgggcatgagcctcttaggctatttctagtagatcctctaccttgtatcctatttcaaatttttctgcaaacactgtcagtgtcatctacaattttgtgctccctattttccatggtctacttgagacagttttatgagtttgtgaaggcttatctaa

SEQ ID NO: 6768 - DNA, 1070 bp, Zea Mays
catctgatgaatcagcttgattcgtttagtgataagcttgtaaagagaattcttaaagctcatgaaccttataaccataatgacaatactaaatgttctgttgtttctgagagggtatcatatgaatttgttcctgaaaggaaagcttgctcctcattaaacaaatcagtggtacagaatgcaagtggttgtgatagcaataggaacaaatgtttggcatctgggaaagctgtgtccaagaaaaaagatcagagtaccaataatagcttggataaagaaaatatgtcatcttgtggttctggtggcacaaaggtgtcatctccaggctccttgggtttagctagggaggttgattctggaaattgtctctccctcttggataaccggaattgtcctatgactaggacctcaaaggcaaatcacaacaattgtaggcaaactgcggacatcttggattttaatctcagagaatgttccttcaagaaaggtcatagcaagggtttatctgaagcccagaagcatgaaaagtcgcttcctggctcttcaattgcatgtgatattgaagatgccggtgattgcaatgataaccttgtgaaagcacctttcatcaaacaacgtaacagccaactttaagaaaaagggtaagagaacactggagttggtgaatttgcagaatagctcagatttaactgatgttgtcacaaaagataacgttcgacagattagagcaaggaaggtgccagtgtaaacagctactcacatatgatcttggtatttatgtaatttccgtccgatgtaaataaatacttagttctgaaatcatttatacatgcatatccacttgagagtactgttataatggtaggaatcttggtcccggttcaccatgtaacattataatttaaatagggatgggcatgagcctcttaggctatttctagtagatcctctaccttgtatcctatttcaaatttttctgcaaacactgtcagtgtcatctacaattttgtgctccctattttccatggtctacttgagacagttttatgagtttgtgaaggcttatctaa

SEQ ID NO: 6769 - DNA, 1963 bp, Zea Mays
tacgctttaccataatctaatttatataatataggatagaaataagtaccgtaagttgataaaacgaattttaattgggaaatttggatccataccattaaaagatcactattttggatccataccattactatctcacctacatgtgggtccacatgagtcaatgacatgtggggtctatggtatatatctaaagtttagattttttaatggtatagatccaattgttccattttaatttgggacactatagatgcatttttggcactattggagatgtcttaggtcctgggcatcctagctcgtgcgtctctcacccggtacctgctcctcggcgcctccccaaccaagcctccgcaccttcctcccgacgcgcccctcatggcgaggaggcgctgctgatgcctcccggcgtcggattggacgcggcggccacgacacctagccgcttgcggtggtgctcgccgagctctaggcgcctaatccgccgacgctgctcctcggatcctccccgagagattcaggcctcgtctcgtctcgtcctgcctaggtggcaggtgcaaagataggcaacaagtgttcaacaacacgactgtggatcaattgacctgcatttcagcttttcagttgaggattaaagtggagctttaagaagcttgaaaattgacattatctcaataatacattgaagtgcaagatgccaaaaataaagaatctctctaatgcatgcaaagtatcattttctccggaaggtcccatatctgaagaggtgcttgagagagtccgtgcactgttagatgagataagacctctagatgttggcctagataatgaagcacaaattgcacgcaattggagtagtactacgcgtccatcaaatgggagacgaggacgtaatggggctaaccagttcactgctccaatcaaatatttgcacattcatgaatgtgaaagtttctctatgggtatattttgtatgccaccttcttcagttattccacttcataatcatcctggaatgacagtacttagcaagcttctttatggaagactgcatgctgagtcttatgactgggttgatgtacctgatcatcctattgatcaattgcaaccaaggccagccaagcttgttaaagattgtgaaatgacggctccagagacaactattctataccctaatgcaggtggtaacatccacacattcagagccatcacaccttgtgctctcttcgacgtcctttctccgccatactccgctgaggatgggcggcactgttcatacttccgcaagtctcaaatgaatcaaccatctgttgttttgcctgctgagatagatagcacacaagtagtttggttggaggagttggaggaccatcagcccccagaaggctttgttgttgcgagaggtatgtataaaggccctgtaattaggagataatttgctttggggcacagaatccaccaaactgcaaatcagctgaaagacgatattgcaagcatcctcaggtcatgtgcagcctacggtttactttgtacatgtcaaagtgacctgtgataattcaacagcagttttacaggacaagaatggatgtttttttgtttggttgcttttttaattgtgtcccactgctgtagtatctctgacctagttatggagctcttatcagaccaagaccgtggagcacctacttttgagcatagtctagcatattgtcatgatgtattgatgtactagggacatcaatggacaaccttttccatttggtgatttcagaaagagtttggttggggctaccattttgtctgtgtaatagcaccattactatttttgggcaagactgtaaattacgggggaggaactgtaataatatcgttagatttatcatgaaatatattttcacgatatacctatcatttttaataaaatcttaaacatcaatgttttttcataaactaagtcaaa

SEQ ID NO: 6770 - DNA, 2051 bp, Zea Mays
tacgctttaccataatctaatttatataatataggatagaaataagtaccgtaagttgataaaacgaattttaattgggaaatttggatccataccattaaaagatcactattttggatccataccattactatctcacctacatgtgggtccacatgagtcaatgacatgtggggtctatggtatatatctaaagtttagattttttaatggtatagatccaattgttccattttaatttgggacactatagatgcatttttggcactattggagatgtcttaggtcctgggcatcctagctcgtgcgtctctcacccggtacctgctcctcggcgcctccccaaccaagcctccgcaccttcctcccgacgcgcccctcatggcgaggaggcgctgctgatgcctcccggcgtcggattggacgcggcggccacgacacctagccgcttgcggtggtgctcgccgagctctaggcgcctaatccgccgacgctgctcctcggatcctccccgagagattcaggcctcgtctcgtctcgtcctgcctaggagacggagtggcgcgccagcggccacgccggcgaagagaggacgacagcgtgcaagaagagaaggcctgtgtcaggggcagctataggtggcaggtgcaaagataggcaacaagtgttcaacaacacgactgtggatcaattgacctgcatttcagcttttcagttgaggattaaagtggagctttaagaagcttgaaaattgacattatctcaataatacattgaagtgcaagatgccaaaaataaagaatctctctaatgcatgcaaagtatcattttctccggaaggtcccatatctgaagaggtgcttgagagagtccgtgcactgttagatgagataagacctctagatgttggcctagataatgaagcacaaattgcacgcaattggagtagtactacgcgtccatcaaatgggagacgaggacgtaatggggctaaccagttcactgctccaatcaaatatttgcacattcatgaatgtgaaagtttctctatgggtatattttgtatgccaccttcttcagttattccacttcataatcatcctggaatgacagtacttagcaagcttctttatggaagactgcatgctgagtcttatgactgggttgatgtacctgatcatcctattgatcaattgcaaccaaggccagccaagcttgttaaagattgtgaaatgacggctccagagacaactattctataccctaatgcaggtggtaacatccacacattcagagccatcacaccttgtgctctcttcgacgtcctttctccgccatactccgctgaggatgggcggcactgttcatacttccgcaagtctcaaatgaatcaaccatctgttgttttgcctgctgagatagatagcacacaagtagtttggttggaggagttggaggaccatcagcccccagaaggctttgttgttgcgagaggtatgtataaaggccctgtaattaggagataatttgctttggggcacagaatccaccaaactgcaaatcagctgaaagacgatattgcaagcatcctcaggtcatgtgcagcctacggtttactttgtacatgtcaaagtgacctgtgataattcaacagcagttttacaggacaagaatggatgtttttttgtttggttgcttttttaattgtgtcccactgctgtagtatctctgacctagttatggagctcttatcagaccaagaccgtggagcacctacttttgagcatagtctagcatattgtcatgatgtattgatgtactagggacatcaatggacaaccttttccatttggtgatttcagaaagagtttggttggggctaccattttgtctgtgtaatagcaccattactatttttgggcaagactgtaaattacgggggaggaactgtaataatatcgttagatttatcatgaaatatattttcacgatatacctatcatttttaataaaatcttaaacatcaatgttttttcataaactaagtcaaa

SEQ ID NO: 6771 - DNA, 878 bp, Zea Mays
gtcaggtcagctgagacgcaggtgacaaatgtgatttcaagccggagctcggtttccttccagagccacaggatgacttctgtatccatccgttcaagaccaagttctcttcgtttcaagatttgctgttcgaaggagacagtcgacaaggtctgtagtatagtgaaggagcagctggctcttcccgatgggactgctatcactggcgaatcaaaattcgccgaacttggtgctgattcactggatacggttgaaattgtgatgggcctcgaggaggcgttcaacataaccgtcgacgaaacaagcgcacaggacatcgcgacggtgcaggacgctgcagacctcatcgagaaactcatgctggaagcgcctccaaaggttgtctagatcgatccatcagtcttgcgattggcgacttggcgttttatgttaaattgttcatgttacccaatttgttctttattgatggttcaagataagatttttgtatggatgttgctgaggtataaattagatgctccaaaggctgcatggagcagatgaagacgatgtattccacttcccatttgcatgttgtacttccatagagagatcaatgaactgttatgaagagtcactgcaactgtggcttttgatctttgtgaagtcacatacagtaattgttgttagatttgcaaatacaaggctgtctgtcaggtgctaacgcattgtggtgtttcaccacaagcgttgatgaattcccttcgttgtgattgattggctgattgctcgataacaacttgacttttggtaaatcagatcggataggatcacgttggatttatgggattcaattaaattatagaaaaatcacaaaaacccatgtatgacaagggaga

SEQ ID NO: 6772 - DNA, 1850 bp, Zea Mays
cggccgccctactcgagcgggctttcttcttcgagtcaataggaaccaaaatcccccaaccgccccagcgcacggcccggccgtctcaggcgtccgcggagatgacgcagcaggacgtggagatggcggcgcgccacgggaccggcgccgacggagcgggattctaccctcagccgcggaacggcgccggcggcgagacgctcgacgacgacggcaagaagaagcgcacgggaacggtatggacggcaagcgcgcacatcatcacagccgtcatcggctccggcgtgctctccctcgcctggtcgactgcacagctgggctgggtcgtggggccgctcaccctgatgatctttgccttgatcacgtactacacctctagccttcttgctgactgctaccgcagcggcgatcagctcaccggcaagaggaactacacctacatggacgctgttgccgcgtacctgggtcgatggcaagtcctgtcctgtggtgttttccagtatgttaacttggttggaactgccgttggattcagtctcatcgtcgattgagaaaccccttttggctgaatggcgatgagcagggccgtgcacaaggcaaactgcttccacaacaagggccacgcggccgactgcagcacctacgacaccatgtacatggtcgtatttgggatcgttcagatcttcttctctcagctccctaacttcagcgacctttcgtggctgtccatcgtcgccgccatcatgtcgttctcttactccagcatcgccgtcggcctctcgttggcgcggaccatttcaggccgtagtggtacgaccactctgaccggcactgagatcggagtcgacgttgattcagcccagaaggtctggctcgcgcttcaagctcttggcaacatcgcgttcgcttactcctactccatgattctcatcgaaatccaagacacggtgaagtctcctccagccgagaacaagacgatgaagaaggcgacgctgatgggcgtgacgaccaccacggcgttctacatgcttgctggctgcctcgggtactcggcattcgggaacgcggcgccagggaacatcctgaccgggttcggcttctacgagccctactggctgatcgacttcgccaacgtctgcatcgtggtgcacctggtgggcgcgtaccaggtcttctcccagcccatcttcgcggccttggagacggcggccgccaagcgctggccgaacgccaggttcgtcacgcgcgagcaccccctcgtggccggcaggttccacgtcaacctgctcaggctgacgtggaggacggcgttcgtggtggtgagcacggtgctcgccatcgtgttgcccttcttcaacgatatcctgggcttcctcggcgccatcggcttctggccgctcaccgtgtactacccagtggagatgtacatccggcagcggcgtatacagaagtacaccagcaggtgggtggcgctgcagctgctcagcttcctgtgcttcctggtctcgctcgcctcggcggtcgcgtccatcgagggagtcaccgagtcgctcaaacactacgttccctttaagaccaagtcgtgatgactgactgagcttcaattctccggtccctgtacaatgcaatggcctaccaccttgcagtggtcgctaagggttatatagtccacatgaaaaactgatgtacatagaaaatcctgaccttcaaaaacagatttggtgtgtgattgttttgcaccgttatatctgattttgaagactaggattttatatgtgtacgtgtataccaaactttcatgtgtaccaaataccatgggctaatgaaaaactgatacaattgagtcccgt

SEQ ID NO: 6773 - DNA, 1853 bp, Zea Mays
cgttgccacactactcccgcgtctataaaaatctgccgcggcccctctggccctccgcgcgccggccgccctactcgagcgggctttcttcttcgagtcaataggaaccaaaatcccccaaccgccccagcgcacggcccggccgtctcaggcgtccgcggagatgacgcagcaggacgtggagatggcggcgcgccacgggaccggcgccgacggagcgggattctaccctcagccgcggaacggcgccggcggcgagacgctcgacgacgacggcaagaagaagcgcacgggaacggtatggacggcaagcgcgcacatcatcacagccgtcatcggctccggcgtgctctccctcgcctggtcgactgcacagctgggctgggtcgtggggccgctcaccctgatgatctttgccttgatcacgtactacacctctagccttcttgctgactgctaccgcagcggcgatcagctcaccggcaagaggaactacacctacatggacgctgttgccgcgtacctggtatgttaacttggttggaactgccgttgggtatacaattacagcgtccatcagtgcagcggccgtgcacaaggcaaactgcttccacaacaagggccacgcggccgactgcagcacctacgacaccatgtacatggtcgtatttgggatcgttcagatcttcttctctcagctccctaacttcagcgacctttcgtggctgtccatcgtcgccgccatcatgtcgttctcttactccagcatcgccgtcggcctctcgttggcgcggaccatttcaggccgtagtggtacgaccactctgaccggcactgagatcggagtcgacgttgattcagcccagaaggtctggctcgcgcttcaagctcttggcaacatcgcgttcgcttactcctactccatgattctcatcgaaatccaagacacggtgaagtctcctccagccgagaacaagacgatgaagaaggcgacgctgatgggcgtgacgaccaccacggcgttctacatgcttgctggctgcctcgggtactcggcattcgggaacgcggcgccagggaacatcctgaccgggttcggcttctacgagccctactggctgatcgacttcgccaacgtctgcatcgtggtgcacctggtgggcgcgtaccaggtcttctcccagcccatcttcgcggccttggagacggcggccgccaagcgctggccgaacgccaggttcgtcacgcgcgagcaccccctcgtggccggcaggttccacgtcaacctgctcaggctgacgtggaggacggcgttcgtggtggtgagcacggtgctcgccatcgtgttgcccttcttcaacgatatcctgggcttcctcggcgccatcggcttctggccgctcaccgtgtactacccagtggagatgtacatccggcagcggcgtatacagaagtacaccagcaggtgggtggcgctgcagctgctcagcttcctgtgcttcctggtctcgctcgcctcggcggtcgcgtccatcgagggagtcaccgagtcgctcaaacactacgttccctttaagaccaagtcgtgatgactgactgagcttcaattctccggtccctgtacaatgcaatggcctaccaccttgcagtggtcgctaagggttatatagtccacatgaaaaactgatgtacatagaaaatcctgaccttcaaaaacagatttggtgtgtgattgttttgcaccgttatatctgattttgaagactaggattttatatgtgtacgtgtataccaaactttcatgtgtaccaaataccatgggctaatgaaaaactgatacaattgagtcccgt

SEQ ID NO: 6774 - DNA, 432 bp, Zea Mays
ctgacagcctggctagtggcgaccgtctgcctgccctgcacgcccacttgccgccgccccggcttcgttcctgctaccactaccgccatcccgaccggctcgcgcgccaccgccatctcctcctgcgctcgccttgctgccgcggccgcccccacctcaaggacccagaggggctgccctcgatctgactgaccccacgggacaggatggacaaggggaaatcggtggtagccgagctgtcggcatcgtccagctcgctcccgtcgccctcctcctatcctttctcaaagaaggctaaacctcggaaattggtcagcttgtgcctgggcacccttggtcagcatcttgaagatatcatcactgatatttcagaatttgctgccttatttccaccccacataacgttacggcaagacctgcgctgctatttgc

SEQ ID NO: 6775 - DNA, 2563 bp, Zea Mays
tccacgagcacaagcatgctagccgccaggacccctgtctcgctctcgctccaccaccgcatcgtcgccggcggccaccgggggcgatgcgtcgggggcagccaaaggaggcgcggtggcgcgccgtgccgccagttcacccaggcgctccagagcctctggaggcacagtcccccgatccctcctcctgcgcctcccgctgccggcgctgccaccagcggcgaggccgaaccctcgcggcagccgccggtactcgagaacgctgccttcgaggagtactataaggttcagcaaattgtccgcgaggaggagtgggatgccttcatgagtgttctacggaaaccattaccagcgacttttagaatcaatgcctgtcttgcatggcacctgaatttctcccggaaggaattgaggaaaaatcaggcactcgaaagttttcatgagtttctgaagcatgagagtgaggttccaccactgtttctgaatgtacaacctgatcaccatattcttgatatgtgtgctgctccaggctctaaaacttttcagttacttgagatgattcaccaatcaaaagaactaggtctacttccaggagcattggaccaacttggcccagtaaacggctcagtctggcctgtaggccgtggcgccggcatggattgttcaggttcatataaagatccctgcaaactacaaaagctagaattcgaccgcatactttgtgatgttccgtgtagtggtgatgggactattcgcaagggtcatgacatgtggagaaagtggaactcaggcatgggtaaccaacttcatcttctgcaagtaaatattgcaatgcgtggtattgcgttacttaaagtgggtggaaggatggtctattcgacttgttcattgaatcctgttgaaaatgaagctgtcatagctgagctccttcgaagaagtggaaactctgttgaactccttgatgtttctagcgagctacctgaattggttcggcgtcctgggcttagcacttggaaggtacaagatcgagaatcttggtttcagagtcacgatgaagttccacacaataggaagaatgtagtatttccaagcatgtttcctgcaagtaatagcaccgaggaaagccataccgtgtgtggtgatgttgaagtgaacataaataatatgaacagcttctcaagaaatatcaacattgaagaaacaagcaaacttaatcaagatatggatggagtttctgttagtcccactaaaattttggaatgcacttctaacattgtgagttcaaagtttccactgcatcggtgcatgaggattgttcctcatgaccagaacagcggggcatttttcatcgcagttcttcacaaattatcgcccttgaatggcagtcagataaaggatactaaaattcagcacagacttgggacagacagaactatacagttccagaaagagcccaagccagaaacacgaccctatgaaactactttgacacgccgtcagcacaatgtttctgaagttgatgatactgaagtgcttggtaggggacagaaattaggcacagacagccaaacttcaaaggataagaactcaagcgaggtcgaaatagttagcattctagcagagtcaggagatagaatggagttgcaaaagcaaagcaggtgggaaggggttgatcctgtcttagttttgaacgatgaagcggtgataaagagtatacaatccttctttggcatcaaggaatcattcccactcgaaggtcatctggtgactagaagtcctgataatgcaaggagaatatattacgtatcaaaatcagttaaagagattttggagctgaattcaaaagttggtgggcagctgaagatagcttcacttggtgttaaaatgtttgaaaggcatagatcaaaggatccctgtccatgtgcatataggttgtcttatgatggattatcgctggtgcttccatccatcagcaagaggatactatatgcatccgcactcgagttccaccgccttgtacagtaccgaagcataagctttgctcattttaccgacaccagattcggggagcaggctgcgtccttgacgcctggttgctgtgttgtagtgttactcgaagggaataggcgtgtagattccatttgtaaggatccctccacaattgccgttgtttgctggagagggaaggggaccattaacgttatggtttctccctcggataggaaggatctccttgaaaggatggcgtatcgatttggatgatggatgccctaacgacgactatggagcttgccttggcatcttgacaaggacctaccttcctatttggttggctgctaattaaaacttggtataccacattaattaattctaggcatgtgtgttttgtttcacattataaagtgggatttgtcaaactttgttacgaatagcaggttcttagtaatttacacacgtcggttggttgggcctggacgaaggaaggatttgtacagatcagatgagagagttttgagtttgcaactatgaactatgtactactatctatctctttcgaccaaga

SEQ ID NO: 6776 - DNA, 3466 bp, Zea Mays
ggccatcacagtccacgagcacaagcatgctagccgccaggacccctgtctcgctctcgctccaccaccgcatcgtcgccggcggccaccgggggcgatgcgtcgggggcagccaaaggaggcgcggtggcgcgccgtgccgccagttcacccaggcgctccagagcctctggaggcacagtcccccgatccctcctcctgcgcctcccgctgccggcgctgccaccagcggcgaggccgaaccctcgcggcagccgccggtactcgagaacgctgccttcgaggagtactataaggtgagtttagtcttcctatttggagttatagtgtcgcgtacaaaatggcatggtttcagggtcctgttcttctggatgtgtgtcagtgttcagcaaattgtccgcgaggaggagtgggatgccttcatgagtgttctacggaaaccattaccagcgacttttagaatcaatgcctgtcttgcatggcacctgaatttctcccggaaggaattgaggaaaaatcaggcactcgaaagttttcatgagtttctgaagcatgagagtgaggttggtaacataactagacaagaggctgttagcatggttccaccactgtttctgaatgtacaacctgatcaccatattcttgatatgtgtgctgctccaggctctaaaacttttcagttacttgagatgattcaccaatcaaaagaactaggtctacttccaggagcattggtacgtttctccctaagttgcatctggcactaaaactattgctcgtgtaactcttgatgatttttggagtcatgttagttgttagtattcaattttgttacatgtagctagtagaactagtcgttttataatttccaaagacttatgagaaattaatactttagttatattgatatggcctaggaccaacttggcccagtaaacggctcagtctggcctgtaggccgtggcgccggcatggtaaggactaaggaggacctagagcctaggtggctaggaggtctatctcctgtagtcctgtactacccctgtccctaagtcagtccctatatatagaggccccatgtacccttgcaacttaaggagaagtagatcaaagggacaaagggttagcccatcttttcttcccctgacttgggcgttgtcctactggtcactcttcctgtcctctcatttctccccaaatccccctccctaatctggggcaatctaagtactaacatatatattctcccttgttcttgtgagactggttaggtgatagccaacgatctcaatatgcgaagatgtgacctccttatccataatacaaagagaatgtgcaccgccaacctaatagtaacaaaccatggagcagaaaacttcccctattgttctcttgcaaaggattgttcaggttcatataaagatccctgcaaactacaaaagctagaattcgaccgcatactttgtgatgttccgtgtagtggtgatgggactattcgcaagggtcatgacatgtggagaaagtggaactcaggcatgggtaaccaacttcatcttctgcaagtaaatattgcaatgcgtggtattgcgttacttaaagtgggtggaaggatggtctattcgacttgttcattgaatcctgttgaaaatgaagctgtcatagctgagctccttcgaagaagtggaaactctgttgaactccttgatgtttctagcgagctacctgaattggttcggcgtcctgggcttagcacttggaaggtacaagatcgagaatcttggtttcagagtcacgatgaagttccacacaataggaagaatgtagtatttccaagcatgtttcctgcaagtaatagcaccgaggaaagccataccgtgtgtggtgatgttgaagtgaacataaataatatgaacagcttctcaagaaatatcaacattgaagaaacaagcaaacttaatcaagatatggatggagtttctgttagtcccactaaaattttggaatgcacttctaacattgtgagttcaaagtttccactgcatcggtgcatgaggattgttcctcatgaccagaacagcggggcatttttcatcgcagttcttcacaaattatcgcccttgaatggcagtcagataaaggatactaaaattcagcacagacttgggacagacagaactatacagttccagaaagagcccaagccagaaacacgaccctatgaaactactttgacacgccgtcagcacaatgtttctgaagttgatgatactgaagtgcttggtaggggacagaaattaggcacagacagccaaacttcaaaggataagaactcaagcgaggtcgaaatagttagcattctagcagagtcaggagatagaatggagttgcaaaagcaaagcaggtgggaaggggttgatcctgtcttagttttgaacgatgaagcggtgataaagagtatacaatccttctttggcatcaaggaatcattcccactcgaaggtcatctggtgactagaagtcctgataatgcaaggagaatatattacgtatcaaaatcagttaaagagattttggagctgaattcaaaagttggtgggcagctgaagatagcttcacttggtgttaaaatgtttgaaaggcatagatcaaaggatccctgtccatgtgcatataggttgtcttatgatggattatcgctggtgcttccatccatcagcaagaggatactatatgcatccgcactcgagttccaccgccttgtacagtaccgaagcataagctttgctcattttaccgacaccagattcggggagcaggctgcgtccttgacgcctggttgctgtgttgtagtgttactcgaagggaataggcgtgtagattccatttgtaaggatccctccacaattgccgttgtttgctggagagggaaggggaccattaacgttatggtttctccctcggataggaaggatctccttgaaaggatggcgtatcgatttggatgatggatgggataaaggtgggagcatatcctgtacgcaaagaagtcatgtgctcccaggcacaaaatgcatccagccgatccgttctgtatctaacggtgttatgacatttttgcaaataagtcttcccacgcttcccacattagtgttgttcattaaaaaaaccccgccctaacgacgactatggagcttgccttggcatcttgacaaggacctaccttcctatttggttggctgctaattaaaacttggtataccacattaattaattctaggcatgtgtgttttgtttcacattataaagtgggatttgtcaaactttgttacgaatagcaggttcttagtaatttacacacgtcggttggttgggcctggacgaaggaaggatttgtacagatcagatgagagagttttgagtttgcaactatgaactatgtactactatctatctctttcgaccaaga

SEQ ID NO: 6777 - DNA, 841 bp, Zea Mays
gaccacctgaatatttggaaagtcgaagtcccaacttcactgatggcatgcactccttaaatgctgtttttctacttattgacacacttctcaacaacatgccctttccctggtaccgaatgtctttctttgttttctggagctgcgcctatgtaacattccagtgggtccttcatgcttgtggaggcgtatcctggtggccgtacccatttctggacctttcatcatctggagctcctctatggtacctcggcatggccatcgctcatgtcccctgcttcttcctgtattggttgatcgtcaaggcgaagcacacttatttccaacggatgttcccacatgcttatgttagggcaacatagacccatttatctaatcacaggttaggataaactcataaacatgtataaataaatatctgtatcatactacttctgcacctgccgggcttaagtgtacacctgtatagtctcgtgaatttacagcccctttgagatgggtatgagacctgagaacacgccaggaccggcatgttgatcaatgaatcgcagaggttcactgtcacctgggaacacggtcttgtgctctgtgcctctgtgtgttcctttccttcgcttgaacttgaagtgcacattggaagcacgcccatggtttccctttcccccaaggatgatgtattgcattttatggtgataaaaggacgcttttgaactacagtgctcgagtatttcttcactcccgatgtggtgtccaattcatcatgaatactcgttcagtcacaactcacaacatattctcacttgaaggcttgaagaaactgtcagcgtattttgtatttggc

SEQ ID NO: 6778 - DNA, 1569 bp, Zea Mays
gcaacgggcgcagcgcacagcaggcgcaaacgcaacacagagcagcgacccaacctacgaacccagagttcccgccaggcccagagcccagagcccagagccccacccgcccccgcgcccgcgggctccaggccgagccgaagctaggcgcgatgtcgctgtcaccggcggacggcgcagcgtactggctgcggtggcaggtcctcgtctgcggcgcgctcatcgcgctgcccacggtggccgcggcggcgctgctgccgcggctgcggagctcagcgccgcccctgcgcgcggccgacctctgggttccttgctgggcgcgcctccacccgggctggctccttgcctaccgcgccgtcgcgctcgccgccgctgtagcgcttctcgcgcgcctcgtcgtcgcgcgcggcatcaccgtcttctacttctacacccagtggacgtttctattagtcaccatatattttgcgtttgccacagctatatcagcccatggatgtttggtttactcaaggaaaagtttgaggaaagccgacgaatcccgtggacttcttaatgctgatgtcgaaaatcgtgatgtttccaattctgtttctggagagaggaaaacagatgagacaaatatgatgatgagctattatgaacaaatagtgaatgagagaagagctgggttctggggccggtgcatggaaatcatataccagactagcgcaggtgcaacaatgttgactgatgtcacatattggggccttcttgtgccatttttctaccgtgacaagtttgggttagctttgttggcttaattacttaagactcagtggattttcagccctttccctggtaccgaatgtctttctttgttttctggagctgcgcctatgtaacattccagtgggtccttcatgcttgtggaggcgtatcctggtggccgtacccatttctggacctttcatcatctggagctcctctatggtacctcggcatggccatcgctcatgtcccctgcttcttcctgtattggttgatcgtcaaggcgaagcacacttatttccaacggatgttcccacatgcttatgttagggcaacatagacccatttatctaatcacaggttaggataaactcataaacatgtataaataaatatctgtatcatactacttctgcacctgccgggcttaagtgtacacctgtatagtctcgtgaatttacagcccctttgagatgggtatgagacctgagaacacgccaggaccggcatgttgatcaatgaatcgcagaggttcactgtcacctgggaacacggtcttgtgctctgtgcctctgtgtgttcctttccttcgcttgaacttgaagtgcacattggaagcacgcccatggtttccctttcccccaaggatgatgtattgcattttatggtgataaaaggacgcttttgaactacagtgctcgagtatttcttcactcccgatgtggtgtccaattcatcatgaatactcgttcagtcacaactcacaacatattctcacttgaaggcttgaagaaactgtcagcgtattttgtatttggc

SEQ ID NO: 6779 - DNA, 1782 bp, Zea Mays
atgaggaacaaaatcaacctgggttcaaatcagaaagtttttccagatgcagctgctatggcaaatgactctaaacaagatgacgcatttgatcttccatcagatgactcagacgacaatgactttgaccccaatatgcctgaagagcatgtggttggtaaggatgaagaatcgtctgaagaggatgaggatggaggatcagactctgatgactcagactttttgacatgttctgatgattcggaacctttgatagacaagaaggttgatgacctcagattaccttctgaagattcagaggatgatgactatgatccagcaggtcctgattcagataaagatgtcgaaaagaagtcaagttctgatgaatctgacttcacatctgactcagatgatttttgtaaggagatttcaaaatctggacatgatgaagtttcatcacctctattacccgatgccaagggtgtggttttaccagattcaaggagacggcaagctgaacggttggactacaaaaagttgtatgatgaggcatatggtgaagcatcatctgattctagtgatgatgaagaatggtctgggaagaacacgccaataataaaaagcaatgaagagggtgaagccaattctcctgcgggaaaaggctccagagttgtgcaccataatgatgaactgactacacaaagcactaaaaaaagcttgcattctattcatggttcagtagatgagaaacctggagaccttacttctaatggcagcaacagcacagccaggaaaggacattttggcccagtaattaatcagaagctacatgaacattttaagacacaaccataccctagtcgttctgttaaagaaagtctggcagaagaactagggttaacatttcgtcaggttaacaaatggtttgaaactaggcgtcattccgcaagggtagcttcttccaggaaaggcatcagtctagataagcatagcccccaaaatactaatagtcaagtgacagctagtatggaacctaaagaacctgaggggactgtggtggaagaatctaatgtatgcctaaatgggggtactaccatctctaaagaagcagtgtcttcaaaagttggatcaagaacccctggaagtgatgtgggagggtcaaaagttgattctgctgaggatcagaatccggggcctgatcttgcagagaaggcaaggcaaaaggcaatacagcaggagttgaggaagaaaaaaatgggacgatgaagtttgtagacaaagatatgagccagaatttggactgctcctgaaatttccaggtcgggtcgtgatttcgctgccggtgctatggaccttgaaactttggctttgtatggctctatgtcggcagccaaaaaacatagatataccattacaactttacaagtcagctagctctcattagttcgtgccagtcaactagcaagcgcatcattcagtttttttttgtggggccattgctttccgttcttaggcaactgagagcttcctctgatttctggggcgctctataggaattagttatccttcagatttgtttgcagcgactcctggcattgcaaaagcgtacggctccgtaacgacagcagtgtactgcagaagatgtgtgttgttttcatcgatgttgaattttctggtaagatggaatgttgtaccaaaccccttgcgtgatgcgaacagaggactttgtaatttcagtgtgcggccatgggtctgtacctgcttttcatgcaaacgcattttcggtaacgtcagtgtccc

SEQ ID NO: 6780 - DNA, 1173 bp, Zea Mays
agtagtagcgggcgacgcggccgcgaggcaggcaggtagaccacgccgcacgccagccagcggccagcgcccgccccgccgcgcttcggcattttcccattttctctctctgccgccgctccctcccgcggcggactcgataccccgcctctcctctcgcgaactagggggcagcgggcaggtgccggcaggcggctcgatcccttcctcctccctcgtcgcggggactgctgctgctgctgccgtgaccgcgagcatggccaccggcgccgttacgccgccgccgctggctggcgcgcggcgattcccccgtggacgaagcttcctccaccggcgcctcgctacctcgcctatgaaagatgaatctgtgatttccacagatggtggaaatgaggagacagacactgacagcctccatgttgctagaggattgtctcatcctgggctttcgtcaagtttatccaataaggcatcagtggtcccaacccctttgcttccttctggacaatctgatctccggttcaatcgtcttcgaccctcaattgatgaaagtgattgcaaatacaaaagattatttggctgctatgttgctcgtgaggctgtgatcgatgaggaatactggatcgctgcatggttgagagcagaagatcagtatgaaaatgagtcaggcaatcgctatgttgaaagctttaaaagaaagtttgcatcaaaggaattccatgcattaaagaagagatgcaacacacaacatagagagaagtatatctgtcttgtcgcggtaaagaacgatgacatcaggcgaactgtcctgaatagtgttgttggtaccttagatgtatgtgtaaggcatcctctatatggggagaaatttcctgaggagcctggaaaaccgtctcttcactgtcgaatttatcagcctgatcagccaaaatttgggtatgtaacaaatgtatgtgttgctaaatatgcaaggcgtcaagggattgctagcaacatgctgttattggccatagatgctgcaaaacttaacggtgctgaaaatatttacattcatgtgcataaagataacttaccagcatggaggctctatgatcagattggattcaagggaaggggctggcgtcctcacgttgcatctggcggatgactgtagacgccttagtactgtagccg

SEQ ID NO: 6781 - DNA, 1358 bp, Zea Mays
aacggatagaccaaaaaaaggaggaagaatactagtagtagcgggcgacgcggccgcgaggcaggcaggtagaccacgccgcacgccagccagcggccagcgcccgccccgccgcgcttcggcattttcccattttctctctctgccgccgctccctcccgcggcggactcgataccccgcctctcctctcgcgaactagggggcagcgggcaggtgccggcaggcggctcgatcccttcctcctccctcgtcgcggggactgctgctgctgctgccgtgaccgcgagcatggccaccggcgccgttacgccgccgccgctggctggcgcgcggcgattcccccgtggacgaagcttcctccaccggcgcctcgctacctcgcctatgaaagatgaatctgtgatttccacagatggtggaaatgaggagacagacactgacagcctccatgttgctagaggattgtctcatcctgggctttcgtcaagtttatccaataaggcatcagtggtcccaacccctttgcttccttctggacaatctgatctccggttcaatcgtcttcgaccctcaattgatgaaagtgattgcaaatacaaaagattatttggctgctatgttgctcgtgaggctgtgatcgatgaggaatactggatcgctgcatggttgagagcagaagatcagtatgaaaatgagtcaggcaatcgctatgttgaaagctttaaaagaaagtttgcatcaaaggaattccatgcattaaagaagagatgcaacacacaacatagagagaagtatatctgtcttgtcgcggtaaagaacgatgacatcaggcgaactgtcctgaatagtgttgttggtaccttagatgtatgtgtaaggcatcctctatatggggagaaatttcctgaggagcctggaaaaccgtctcttcactgtcgaatttatcagcctgatcagccaaaatttgggtgctgaaaatatttacattcatgtgcataaagataacttaccagcatggaggctctatgatcagattggattcaagatcgttgatcaggatgacgattgtcgttcatcagacctgtgcttactctccttcagttcataaggcttgctgactagataggaatagaagggacatggcccctagttccatctccctgtccagggaaatgccatcagtcctcgcgatttggaaaggcgggatggtatgtgccaagtaataccttcaccaccttgtatatgatgaaagtgtttccaaatgtttgcggctttcgagattgtcactagatcggtggcagttcagatccaccagaatgtttgaggtatttgtatacatcaaaagcttctgtcgtgt

SEQ ID NO: 6782 - DNA, 2034 bp, Zea Mays
ttgtgcgcagatggatgggtttaccttgccaccatttgagtcaacctgcatctttagggacaacgatattataagggttaaacaaaaatcctgtacgaagcacatagagcacaatgatgtgcactgtattcaagatcatgagataatagagaagagatcacttccagttgatggcaaaatccttgcaatccaggataaggaggatgtctgtaaacaccaagaagaagaggcacatgacgatcaccagcttgaagaaaatgccactgctagccatagcacagaaaataatggtacaagtttgaagaggaagcggaatgatggggttgcagatatacctgagagctcaaagggacaaaggctgaaggtgacaaattctggaaagcatatagattacagcaagaaggaacaaaatggatctaaaaagttgaagctgtcagttattgatattgaagctaagaaagcaactccacaacatgaaactaccactaccttagtggagcagcaaaaatcagagggaatgtgcatggagattcaccaatagctgctgattgtccatcatcaagcaatcaagatggcttgcctgtcccatcaagcaatcaaaatggatcacatgttcatttttcaagcctcaaagcagatgaggacgaatctgaaacgtcggatgagattgtcccagttgtggttcggcctggtcacattcgctttgagccagcaggcagagaacccgacaaatcgccagcaaaagaattacagggcacattccaatggagtggaacattgagcaaaaagaagggccagaagtggggaataaatagctcaaacaagaaaaatgccgatgtcggctatcatgcaggaatagctggaagcaacacagaagttaataatcttgtcatggacattaaggttactgaaaatggcttctgtgctgtcagtaatagaaggatcgatgaaggcagtaatgttgagatgtccagtgtgaaggctgttgctaatgaagaaaagtctagaggtgtaccttttgatttcgagagcttgtaccccctaacgcaacttccaaaggagggagatctgattgcataccgattggttgagctgtcttccatgttgtgtccggagctgtcttcgttccgtgttggaaaagttgtgttatatgatcccatatcattgcgtatcattctcttacccgttcaagagtatccaatcaccaccgaggaaaacgaagacaaggacgagccagatatgcttgtggacttgtcaccgtacaaggaagatggctccttggagatcgagtactcttcacttcttgatgtaaggctactgaagggtattgaaccagtccccggggctttcagtactcccttggcagaaacatgcaatgaagttggatcggcactggccaaaggaaggccagttaccttacacaaaaatgaaggcaatattgagagccagaaatcacccttggttgcaaacaacactaatggaaagtcagaaaagacggtttgggaaaaaaatgacgaacccggtgatgaggtcgatgttcagcaaaatggctggggaacatggaaacaaaatagtacgtcagcttggtcttatagagcccttaggagcagcgcccttggcccgacgatggcacttctacgagggaagaacaaccagaggggtaaaccaccctatcgaaagaagggcaagtaattgcctatgtgtttagtgtttaagttcaacgatacctatgtaatcctgtgttggtccaatcttttagcagttgatcttatttatgtaaaatttggcgaggaagagtgactgccgttgctgccctggtcattttgaagtctggccaagcgaattgttatcgtttgcaaaggatcgttatgatttgctccgacacttgtcaaatgctggttttagagttttgcatgtgcactaaaaatgttcataattccatatctgccacaaaaggttgtagcaccaaacgctccacctaaggccttgttcagttatttccattacatatgaattgggtgggattggaaaaaa

SEQ ID NO: 6783 - DNA, 2050 bp, Zea Mays
ttgtgcgcagatggatgggtttaccttgccaccatttgagtcaacctgcatctttagggacaacgatattataagggttaaacaaaaatcctgtacgaagcacatagagcacaatgatgtgcactgtattcaagatcatgagataatagagaagagatcacttccagttgatggcaaaatccttgcaatccaggataaggaggatgtctgtaaacaccaagaagaagaggcacatgacgatcaccagcttgaagaaaatgccactgctagccatagcacagaaaataatggtacaagtttgaagaggaagcggaatgatggggttgcagatatacctgagagctcaaagggacaaaggctgaaggtgacaaattctggaaagcatatagattacagcaagaaggaacaaaatggatctaaaaagttgaagctgtcagttattgatattgaagctaagaaagcaactccacaacatgaaactaccactaccttagtggagcagcaaaaatcagaggggaactatcaaactgagttgaaatgtgaggcaaaggtgacaaactatgatgctcaaagtgacacaaaaaagaatgtgcatggagattcaccaatagctgctgattgtccatcatcaagcaatcaagatggcttgcctgtcccatcaagcaatcaaaatggatcacatgttcatttttcaagcctcaaagcagatgaggacgaatctgaaacgtcggatgagattgtcccagttgtggttcggcctggtcacattcgctttgagccagcaggcagagaacccgacaaatcgccagcaaaagaattacagggcacattccaatggagtggaacattgagcaaaaagaagggccagaagtggggaataaatagctcaaacaagaaaaatgccgatgtcggctatcatgcaggaatagctggaagcaacacagaagttaataatcttgtcatggacattaaggttactgaaaatggcttctgtgctgtcagtaatagaaggatcgatgaaggcagtaatgttgagatgtccagtgtgaaggctgttgctaatgaagaaaagtctagaggtgtaccttttgatttcgagagcttgtaccccctaacgcaacttccaaaggttggaaaagttgtgttatatgatcccatatcattgcgtatcattctcttacccgttcaagagtatccaatcaccaccgaggaaaacgaagacaaggacgagccagatatgcttgtggacttgtcaccgtacaaggaagatggctccttggagatcgagtactcttcacttcttgatgtaaggctactgaagggtattgaaccagtccccggggctttcagtactcccttggcagaaacatgcaatgaagttggatcggcactggccaaaggaaggccagttaccttacacaaaaatgaaggcaatattgagagccagaaatcacccttggttgcaaacaacactaatggtaaagaacacaaactaggaaagtcagaaaagacggtttgggaaaaaaatgacgaacccggtgatgaggtcgatgttcagcaaaatggctggggaacatggaaacaaaatagtacgtcagcttggtcttatagagcccttaggagcagcgcccttggcccgacgatggcacttctacgagggaagaacaaccagaggggtaaaccaccctatcgaaagaagggcaagtaattgcctatgtgtttagtgtttaagttcaacgatacctatgtaatcctgtgttggtccaatcttttagcagttgatcttatttatgtaaaatttggcgaggaagagtgactgccgttgctgccctggtcattttgaagtctggccaagcgaattgttatcgtttgcaaaggatcgttatgatttgctccgacacttgtcaaatgctggttttagagttttgcatgtgcactaaaaatgttcataattccatatctgccacaaaaggttgtagcaccaaacgctccacctaaggccttgttcagttatttccattacatatgaattgggtgggattggaaaaaa

SEQ ID NO: 6784 - DNA, 2183 bp, Zea Mays
ttgtgcgcagatggatgggtttaccttgccaccatttgagtcaacctgcatctttagggacaacgatattataagggttaaacaaaaatcctgtacgaagcacatagagcacaatgatgtgcactgtattcaagatcatgagataatagagaagagatcacttccagttgatggcaaaatccttgcaatccaggataaggaggatgtctgtaaacaccaagaagaagaggcacatgacgatcaccagcttgaagaaaatgccactgctagccatagcacagaaaataatggtacaagtttgaagaggaagcggaatgatggggttgcagatatacctgagagctcaaagggacaaaggctgaaggtgacaaattctggaaagcatatagattacagcaagaaggaacaaaatggatctaaaaagttgaagctgtcagttattgatattgaagctaagaaagcaactccacaacatgaaactaccactaccttagtggagcagcaaaaatcagaggggaactatcaaactgagttgaaatgtgaggcaaaggtgacaaactatgatgctcaaagtgacacaaaaaagttggagagtcgaagtgctcgccgcaagaaaattaaaaggctaatgaaacaaagaggaaaattacaaatagaaaagaatgtgcatggagattcaccaatagctgctgattgtccatcatcaagcaatcaagatggcttgcctgtcccatcaagcaatcaaaatggatcacatgttcatttttcaagcctcaaagcagatgaggacgaatctgaaacgtcggatgagattgtcccagttgtggttcggcctggtcacattcgctttgagccagcaggcagagaacccgacaaatcgccagcaaaagaattacagggcacattccaatggagtggaacattgagcaaaaagaagggccagaagtggggaataaatagctcaaacaagaaaaatgccgatgtcggctatcatgcaggaatagctggaagcaacacagaagttaataatcttgtcatggacattaaggttactgaaaatggcttctgtgctgtcagtaatagaaggatcgatgaaggcagtaatgttgagatgtccagtgtgaaggctgttgctaatgaagaaaagtctagaggtgtaccttttgatttcgagagcttgtaccccctaacgcaacttccaaaggagggagatctgattgcataccgattggttgagctgtcttccatgttgtgtccggagctgtcttcgttccgtgttggaaaagttgtgttatatgatcccatatcattgcgtatcattctcttacccgttcaagagtatccaatcaccaccgaggaaaacgaagacaaggacgagccagatatgcttgtggacttgtcaccgtacaaggaagatggctccttggagatcgagtactcttcacttcttgatgtaaggctactgaagggtattgaaccagtccccggggctttcagtactcccttggcagaaacatgcaatgaagttggatcggcactggccaaaggaaggccagttaccttacacaaaaatgaaggcaatattgagagccagaaatcacccttggttgcaaacaacactaatggtaaagaacacaaactagacggtttgggaaaaaaatgacgaacccggtgatgaggtcgatgttcagcaaaatggctggggaacatggaaacaaaatagtacgtcagcttggtcttatagagcccttaggagcagcgcccttggcccgacgatggcacttctacgagggaagaacaaccagaggggtaaaccaccctatcgaaagaagggcaagtaattgcctatgtgtttagtgtttaagttcaacgatacctatgtaatcctgtgttggtccaatcttttagcagttgatcttatttatgtaaaatttggcgaggaagagtgactgccgttgctgccctggtcattttgaagtctggccaagcgaattgttatcgtttgcaaaggatcgttatgatttgctccgacacttgtcaaatgctggttttagagttttgcatgtgcactaaaaatgttcataattccatatctgccacaaaaggttgtagcaccaaacgctccacctaaggccttgttcagttatttccattacatatgaattgggtgggattggaaaaaa

SEQ ID NO: 6785 - DNA, 2031 bp, Zea Mays
ggaacccacttcacacctgggtggctgggtctggctggttccttccttcccgcttccctcgtcaaccaaatcaactcgtgaggtctcctccccatcgccacacccacgcgccgcgcaccgcccgcccgctcgccccgcctccgatccctaatcaatcggcctgaccctagcccgccgccggccgcccacgcccgcccgcctcggctcgtctcaaatcgggcgccccaggggagcgaggcctcgatcgcggcggaccccgatgctccgcattccggcccctccggcgacgtcggcggcagcggaggcatgatccggtggggactcggcggacctgccagccatggacgccaccgcacgcccggccatcgtcatcgacaacggcacagggtatagcaaacttggattttctgggaactcggagccgtctttcactctccccactgtagtagctgcgaatgaatcttttctagaccagacagagctgttgagtagtgcaaactggatagcacagtataatgcaggcatcatggctgatcttgacttttttattggagatgaggctttatcgcggcttaggtctagtgggctgtacactttaagaaggccaatccgtcatggtcaggttcatgactgggatacaatggagagattttggcagcaatgtattttcaattatctacgttgcaatcccgaagagcattatttccttcttacagatagtcctgtcagtacacctgaaagtcgtgaatgtacaggagaaataatgttcgaaaccttcaatgtccctggactatatatttccgttcaatctgttctcagcctttctgctggatatgcctatctgaaaagtatttctgatgacgattcagatactgtgtctgatatgacaggggtagtagttgatattggggatggagctccacaaattgtgccagttgtaaatggctatgtaatcgggagtagcataaagtcttttcctttctccggaagtgatgtaacccagtttgtttcacagcttttacaggaaagaggtgagcttttgccacctgaggattctttagatatatctcgtaaagtgaaagaaatgtattgttatacttgttcagacattgtcaaggagttcaagaagcatgacaggaagcctgataagtacatcaaacattggtcagctgttaaaccaaagactggggtcccatatacaattgacattggatatgaacgctttcttgggccagagatcttcttcaatcctgagatttactctgccgatttctccactcctttgcccgagttgattgacaactgtgttcagtctgcaccaattgacacaaggagagctctgtacaagaatatagtattatctggtggatctaccatgtttaaagacttccacaagagactccaaactgatataaagaagatagtggatgaccgtgttgctgcgactaatgcccgtcatcgtgtggaagtgagcctattgaagtcaacgtggttgcccatccaatacagagttacgcggtttggttcggggggtcactagctgcatctaaccctgacttctttgagttttgccacacaaaggaggactacgaggaacatggagccagcatctgcagaacaagccccgttttcaaaggaatgtactgaatttttcctcacgacccatcctctagctggtgagctcatttaggtttcttcgacagaatatagtcaattttgattcttttttggtgcgttccaaccattgtcgggccaccctgattaggtatgtagctctgtttgtactagttgtttgttttgtgttctgcgtcgaatgttgtgtatagccaacagtttggttcctgttcgaggtgcttcattgtagccagaacctcggacagtttagaggaaaaatatttggttattcttttacattagcttgttcagacagatttacgggactcttattaataagagaagtcaaatttaggactttgtcgtggatgaccacattatttcaattgaataatatggtatccctactttcaacga

SEQ ID NO: 6786 - DNA, 1866 bp, Zea Mays
ggccagtcttatttaagagtggccaggaccgtgtcctcagcctcgtacaatacaatacaacccaggatctctgtgttccttctatactctgatgcctgtgtgtccctcgccctctttcttttgcctcaatatcagaagctagctttcttcttcatcgcgttacgatctcggtgaggatcgaacgttcttcgtcttgccttaaggaaaaacccctctgacctctcgatcgtcgcgggtaagctctaatctaagcaagcagtatagcaatggtctatataatctatattaacgtgtacaaagcttcagggcatatcatgcaaaatatatatctagatatatacccgctagctcggcagctaaataatcgaattcgtatcagcaatttaatagcgcatgcacacgcccacacacgttgtttcttctccatgcatgcaccgggctcccagcgcgggcgcgtcgtttgcttgtcgctaaattaataacggccggcaacgtgcggcgttctaatctgtgcttctatcgagcagcattgccaaccgggatggcgatggcgtctcgggatggaggaggtgcggcgggccgggcggcgctgcgggtgggccggacgcgggagtaccggacgggcatggagacggagctgctgtccatcgacgccgggtcgtcgggcggcccggcggtgagcctcttcgtgctgtgcggcgacggcttcgaggccgcgcgcctgttccggtcggggaccctgtcgctgcacatggcccgcgtggagggcctcgtcccgatgtccatggccacggtcgccgtcggcgaccaccggtggatgctggcgcgcgacgccctcgtggcgcgcgtcgacgagcgcaccttcgtcttcgagctccccggcttcttctacgccgtcgccatgccgcccgacgccgagagggagtgcgcctcgatggcggagatcctctcgcggttctgctcgtaccacgatcttgccgccgacgccgccgccgatggtggaggcgaacttgctggtgagctggacacaaacccgtgggccggtgctcacgccaggataagtcgcctcaagaggcagcacacctcgccggctgccgccgacgcgccgtccgaccccgccaggcagatggagcgcgccgtccgcacgtcagcggtagtcaagctacttacccgatccctgctatctggcgtgctccagccgggccggcacctgaccgtcaccaccggcaccgcctccgccatcgccggcaccagctcgtggccctccacggcagcgctgccaagcagatcggtcgtggcagacctgctcgacgccatcgagacgaaccgggccgtgccgcgctgcggtggatccggtggcgacggcggactcggactcgggtggtggaacctcaacgtggagggtgtaatgctgttgctcagggtcgtccaggcggtccggggaaggaacaatctagcggcgccggcgccagggggaaagaggccacgggacgagggaccagctggccgcgacaccatgagaggtggcgttgtgggaggcagcagcgcggcacggcggtggtgtggcgctggcgggcggccggggaagattgggaatgcaccgttggcgcctgtggctgtggggtccagaccatcatcaaatagatgcttgattgacgatcggtaggggtttagggtaattagggaacggtttgatttgttgatatgctcagactgctatcgtacgcgatgcatgattgatgatcggtatgcttcgagaagtcaaattctttattagttctcgtcgagaccatcaccaatcaaatagacgcatgcttggcgatcgcagagttctttgtcgtctcaataatactcgataaacttagc

SEQ ID NO: 6787 - DNA, 2787 bp, Zea Mays
acgacagccaatcatgccgagctgcaaacctaggaagcgctgggccaaccaccatcgagcctgaccacagcatgcgaccatcgcatctgatgtgtatgccgccaggtgtgtaacctctgtgtgttgtgtcaccctctgaattagtacaaacaaattccttacaaatcaaacagaaaacatcaaaattgcatcgctttctaaccaattcaatccttttcaaaatctataatggaatcttagcgatcgaaccactgttaattcatatgatctaaatgaatcgttaatattattggaccggcctcggacttctatattgattcccttgtccttgcccatcccacaccgctttctacgattcgacatggagaaggtccactacacagtgtctgaaagcacggcgtataaacagtgagcttgtattgtggttgttgcttgctgccactctcgcgtcgtccttgtttgtactatacagctgctctcaacctttcgttccgtggcccctctcgtttattcgcccctgccacgaccaggaccgcgtcgcgcgctcgcgcccttcacgccctgcgctgtgcttgcctcgtcgcggccacgtccacctacctatacctctctgtccgacgacctcatcccctttcccaagatccgagccgcggcgtctccaagtacctcgctcgcaggagcaggttgcaaggagccagccactcctgcgagtttctggcgatggtggccgttgcggcgggaaggcgggccggcggcgttggtggccgccggcgctcgggctgcggcccggggcaggcacagcagaagctactagcgatcgccgtcgccgcgcgcttcgctgaggccgtggcgccgccgtctgcggaggcctcccgtgccggctccggcggctgttgcgtagagctcctcgagtgcctcctcggggctctgagcgtcaacgcggccccgccgcccgcgcagcacaggcgggccgtgcactcgatccgccgccgccgcccccgtggcggggggtccgccgacgaccgccacgccgacgctccctcgggccgcatcgcgggaaacggcgcatccgcatccgcagccgcgtcgctctacaccatgcagggcaggaagggtgtcaatcaggacgccatggtggtctgggagaattttggttcaaaggatgataccattttttgtggagtttttgatggccatggaccaaacggccatttggttgccaagagggtcagagatcttctccctgtaaagttgagtgcaaatttagggaagggtgaattcaaagagatttctactagcgatgtcaagagtgggactactaaaggagttgcaaccgaacacagggttgaagatactgatgcttcccctggaaatgaagagaatggcgagtacccagaatttttcacagcactgagggcttcattcttgcaggcgttttatgtgatggacagggatctgaaggcacatagaaatattgattgtgaattcagtggtacaacagcagtcacagtaatcaagcagggacaaaatcttataattggcaacttgggagattctagagctgtcttgggcacaagaggtgaacataatcagctagttgctcttcagctgacagtggacctcaaacctagtatcccgaatactaccgaaaataaagaaaaatgaatcatttacaggtgaagcagaacgaattaggcaacaaagtggcagagtattttctcttccagatgaaccagacgttgttcgtgtgtggcttccaactttcaacttgccagggttggccatggcaagatcatttggagacttctgtctgaagaaatatggaataatttctatgcctgatgttttctaccatcgcatcacggataaggatgaatttgttgtgctggcgactgacggggtgtgggatgtgctttccaatgctgaagctgttagcatcatcagcaatgctccttcacaggcctcagcagctcgatttctggttgaatcggctcacagggcatggaggacacggtaccccacatcaaaaactgatgattgtgctgttgtttgcctctttctgaaaacagaagcagcaagtacatcctccagtgctgtaaccaaagatttggtgaagaacagagaaatgagcagcggtaagcattcattggctgttaaaacaagcacccaaggttcctgaaaatcttgttactgcaaaagatgagtggtcttttgttgatggttcctctgggtgtgtcgcgctgccaactttaccagagcccacttcagttgtgaaggatagctcaaaagattgagcttgcctgccaattgagatggcataatttttgctggaaatttgttcgccttcgtttgcaagcttgtgtgcatcagatttgttgtgacgtgaagaccagtgccagtttcattggcgagttgaggaagttattgcatagtggaatggataagtgtgcagattttgttctttttgtacagtattcaatcagtttagtgggatcagttggtagtaatgataactataataatactgtgcctattattgatggatgggggtgatcagatccatgcataggatgaagtttctcccttcttttgtaatataaataattgtgtcggttccagcagctctaataaattttcttttaggtgttgctttgttttatgtcataggttttctagttttgctttgtccaattaagtttagtattatatttccattgatgctatgacaaaccattccagttagatattggatgactaagtaagttttcctctgtatgttctgtatta

SEQ ID NO: 6788 - DNA, 2344 bp, Zea Mays
cacgcgtccaatacaatgtcacctttggccgcatcgcactgagagtcagagacccaaacctccacgtcacgggacgaatctgggccgtccatcacttgtacccgcgccaaactttgtctattcctcttcagagttcagacttcgggcctgtttccttcagttcttcttccctcaatccattgcaagcaacaggaggagaaaaaacaaggagcgagacctcgcagctgacgcgcacaaggcaaaacccaatcggagccgtggaccgggccggagatagggctcgaggccatggcaagcggaggcgagggcgcagggagcggcgagtcccctcccgctgcctcagtggaggcggcagcgggggaggcgacgctgcacatccggtgcgcgaacggctctaagttcacggtgcagacggacctgggcgccacggtgggcgggttcaaggaggtcgtagccgggagctgcgacgtgccggcgccgcagcagcgtctgatctacaagggccgcatcctcaaggacgagcaaaccctagaaagctacggcgttgagacagatcacacaattcacttggtgcgtggtgttgccccaccagctgcatccagtgcacctgctgctgccagctcccttgcttcatctactcttagtagcgtcccggcaggtggcctgggagatctatttccaggtgttggtgctccaggaagtggcaggtcatcaggtatatttgggccaggatttccagagttagagcaagttgagcagcatttaagccagaatcccaacttgatgagggagataatgaatatgccagcgatgcaaaatctcatgaataaccctgatttaatacgcaatatgattatgagcaacccacaaatgcgcgagatcatggatcggaatcctgatcttgcccatgtgctcaatgacccaagtgtcctccgccaaaccctcgaagctgctaggaaccctgaaatcatgagagagatgatgcggaacacagacagagctatgagcaacattgagtcctctcctgaaggttttaatatgctccgtcgcatgtatgaaactgtccaggagccatttctaaatgcaacaacaatgagcggggaagggaacacagcctcaaacccatttgcagctcttctcggcaaccaggggtctaaccaacctggtcaaggtcaacctgcaacatatactccaactataggttcggagtcgacaactggaaccccagctccaaatactaatccacttccaaatccctggagcaccaatgctgggagtgcacaaggagcaacacggtccagtggcaacacaagaactggtgcttctggtcatgttggaggtactggtgccactggtggattgggagggcttggttcaccagatttgagtagtttgcttggtggtcttgctggcagtccaagaactggtgcttctggtggtttaggaggtttgggttcaccagatttggggaatatgcttggtggttctcctgatgtttctcttttcagtcagatgttgcaaaaccctgcaatgatgcagatgatgcagagcattatgtctgacccacagaccatgaaccagttgcttagcttcaacccaaatgcacgcaacctgatggaatcaaaccctcagatgagggaaatatttcaaaatccagaatttcttcgccagctgacatcgcctgagactttgcagtctttattaggacagcttggtcaacatcaacctaaccagggtagaaacaattcaggcagtgccacaggtacgcctggaaaccctagccttgacaccttgatgagcatgctcagtgggcttggttcgggaggtggcataggtgttccaaatacttccaatgtgccaccggaggagctctatgccacacagcttactcagctccaagaaatgggtttcattgacactgcggagaacattcaagcactgctcgctaccgctgggaatgtacatgctgcggtggagcgtcttctcgggaaccttgggcagtagctaaaacgagcgagccacacaccgccagtaaatcttaaaatgtcgcgcatctgcaggagtgttcggcttaacgttcttcaagcccttgaatttgaagggggtggcgtccataatcccgaaaacaaaataatcaaaaagtcaggcagccattaacttttctcatacatggtggtcatgtctttgttttacagtgttgtatttgcaatttggattggtgtacatacatatcggtcggatattacctcatagaatgtatgtagttttgtgttttgaactgttgattcttgattcccaatcaatcaaatcaaactatctaatccaactgttggctttctcattc

SEQ ID NO: 6789 - DNA, 816 bp, Zea Mays
cgtgcgcgaagataacaacacacacggcactacggcagccagccagccagccagcttctgctggaacaagaacagtacaggtacagcctcctccctccacagcagcgacaccaatggcatcgtggtcgtggacctctgttcactgcagcagctaccccctaccggggccgtcggcacgcttcacgccttctctggtctccgcaacaacaccggcgctcaggcggacgagggcgagggggcagctgcagcgatgcctctgttcccagtacgccggcgaacgccagccgccgccgccgccaccgccacagccggagccggactcgccgcagcagctggagcgcctcttctccaacctcaaccagaccaccatgaagcacgagccagggagcgtcaccagcgccgtcttccttgtggctggcacaacggttggagcaggcatccttgcaatccctgcagtcacacaagaagctgggttcttggcctcggcagtcatatgcatcctctgctggtcatacatggtcgtcacggggctgttggttgctgaagtaaacgtcaataccatgtgtgagctaggatctggtggcgtctcactggtctcgatggctatgcgcactcttgggacatttggagtgagaacatcttgcttatcctatttatttatacattatgcacttcttgtcgcatacgtggcacgctcttcaaatatcataacaaactcattgggcattccaatatgggagagtgctaccctgttttctctagctttcggaggggtatgttactttggaagccttttgattagactcgaaggttcct

SEQ ID NO: 6790 - DNA, 932 bp, Zea Mays
cggcactacggcagccagccagccagccagcttctgctggaacaagaacagtacaggtacagcctcctccctccacagcagcgacaccaatggcatcgtggtcgtggacctctgttcactgcagcagctaccccctaccggggccgtcggcacgcttcacgccttctctggtctccgcaacaacaccggcgctcaggcggacgagggcgagggggcagctgcagcgatgcctctgttcccagtacgccggcgaacgccagccgccgccgccgccaccgccacagccggagccggactcgccgcagcagctggagcgcctcttctccaacctcaaccagaccaccatgaagcacgagccagggagcgtcaccagcgccgtcttccttgtggctggcacaacggttggagcaggcatccttgcaatccctgcagtcacacaagaagctgggttcttggcctcggcagtcatatgcatcctctgctggtcatacatggtaatagaatgtcactgactgggtaaattatcaaacccggcgtgttaaaaggacggtttgatgattgacccaagtgcctgtttcgttgagtcgtttacagtgagacagcttatgattgttggcgtcgcatttccaggtcgtcacggggctgttggttgctgaagtaaacgtcaataccatgtgtgagctaggatctggtggcgtctcactggtctcgatggctatgcgcactcttgggacatttggagtgagaacatcttgcttatcctatttatttatacattatgcacttcttgtcgcatacgtggcacgctcttcaaatatcataacaaactcattgggcattccaatatgggagagtgctaccctgttttctctagctttcggaggggtatgttactttggaaggggtagatcagatggaggcggcgaacacct

SEQ ID NO: 6791 - DNA, 1989 bp, Zea Mays
gccagccagccagccagcttctgctggaacaagaacagtacaggtacagcctcctccctccacagcagcgacaccaatggcatcgtggtcgtggacctctgttcactgcagcagctaccccctaccggggccgtcggcacgcttcacgccttctctggtctccgcaacaacaccggcgctcaggcggacgagggcgagggggcagctgcagcgatgcctctgttcccagtacgccggcgaacgccagccgccgccgccgccaccgccacagccggagccggactcgccgcagcagctggagcgcctcttctccaacctcaaccagaccaccatgaagcacgagccagggagcgtcaccagcgccgtcttccttgtggctggcacaacggttggagcaggcatccttgcaatccctgcagtcacacaagaagctgggttcttggcctcggcagtcatatgcatcctctgctggtcatacatggtaatagaatgtcactgactgggtaaattatcaaacccggcgtgttaaaaggtcgtcacggggctgttggttgctgaagtaaacgtcaataccatgtgtgagctaggatctggtggcgtctcactggtctcgatggctatgcgcactcttgggacatttggagtgagaacatcttgcttatcctatttatttatacattatgcacttcttgtcgcatacgtggcacgctcttcaaatatcataacaaactcattgggcattccaatatgggagagtgctaccctgttttctctagctttcggaggggtatgttactttggaagccagcgattgattggtgcagtaaatggagttctggtagtcggcatcctagcatccttcacttctcttgttgtagtggcaagtggaaacctacagtggagttctcttcttgaagcgaattttgctgctgctccacaaagtataccaataattgctctttcatttgtataccaggtaatcctgtataccatccaggcatccatattacttgaataaaattgtcttcttgacactagactgaatattttccctaacagaatgtggttcctgttctctgtacaaatttggagggagacctgtcaaaaaacagctattgtggcgggtactgccatacccctggctctgttcctagtatgggatggagtaatcttggggacacttccagaccttgcagggagcagcactgtttctgaccccttggaactacttagatcgagtaatgggatagtggggcctattgttgaggcgttctcatttctcgctatagccacatcatacattggatttgttctaggaatctcggacttccttgcagacttgcttaaactaccaagtggccagaacaaaccgctgccatacgtattgactctgtttcctccacttgttctgtcactgcttgacccggagatatttttcaaggcattggactttgcaggaacttatggagttctagtgctgtttggagtttttcctgccgctatgtcttggtcagagagatattcggatgagttggaagctccagtaccccctatagtccccggagggaaatttactctctcggctgtcatgggaggtgcattgcttgtgattgttccagagttaatcaaggatgtaatgcaactacaaggactacactgacaatcggtgcaagtgaaaggacatataacagttacagtaaaacggtccttgagatttttgttgcagtaacaagtacatgtagcaaaagcaaaggcaaaactcgaaagcaatcaagtgcagagattgcagtttcatcgagcatcgacgttggagttgaattgttttttatgagattagcacggggttcagaacttcggttaaatttctgcaaccgaaagaaaaatctaaaattccgtattacactaatatatgtgctttgttgtgaatatataactttgtaattatattttctattgtttatgtcacataaaattcttcttttcattaga

SEQ ID NO: 6792 - DNA, 1844 bp, Zea Mays
gttgaaaccatatgcggcattttgctttttgcgggactttttcgagacatctgatcacagtcaatggggtcgtttttctcagttttccaaggataaggtactttacaccatgacattatacgttttcattactatgttcagtaccatctatatatacaattatctgaggcagcaacatatgcaagaaagaaaaatgttatcctgaaaggtgatttacctattggtgttgataggaatagtgtcgatacatgggtatacccaaccttgtttcgcatgaataccgctactggagcgcctcctgattattttgacaagaatggacaaaattggggttttcctacatataactgggaggagatgtcaaaggataattatgggtggtggcgagctcgtctgacacagatggcaaagtacttcacagcatacaggatagaccacatcttgggtttctttaggatatgggagcttccagatcatgctgcaacaggtttagttgggaaatttagaccttccatccctcttagtcaggaggagcttctaagtgaaggtctatgggattttaatcggatgagccaaccatacattcgtcaggaaatactggaggagaagtttggatccttttggacagtcattgcagccaattttctaaatgagtaccagaagcagtgttatgagtttaaagaagattgcaacacagagaaaaagattattgtaaagattaaaacaagtgctgaaaagtcactgtgggtagagaaagaggacaatatccgccgtggccttttcgatttactacagaatattgtccttatcagagatccagaggactccacaaaattctatccccgttcaacctggaagacacatcaagttttagggaccttgatgaacacagcaaaaatatcctcagaagattgtattataactattattttgttcgccaagaaaatctctggcgccaaaatgccctgaagactttgcctgtcctgctgaactcgtcagatatgttagcatgtggagaggaccttggccttatccctgcttgtgttcaccctgttatgcaagaactggggttgattggattgcgtatccaaagaatgcctagtgaaccaaacttggaatttggtattccttctcagtatagctatatgacggtttgtgctccctcatgtcatgactgctctacattacgtgcttggtgggaagaagatgaaggaagaagaagtcgtttctacaagactgtagttggcagtgatgaggagcccccatctcgttgcaccccggaagtagtgcacttcattgttcagcagcattttgacgctccatcaatgtgggcaatctttccacttcaggacctccttgcactgaaagacaagtacaccacaagaccagcgccagaggaaacaatcaatgaccccactaacccaaagcactattggagattccgtgtccacgtgacattggagtccctgctgaacgacaaggacatccaggcaaccatcaaggacctggtcacaagcagtgggaggtccttccccggaaagaaggcggaaggtgccgacgagagcggggagaagctgtccaaggtgcagctgaatggtaaagcttaggaaaggattgcgagagctgctggaagtgaccacggttacaagtaaataaatagaataaggcgacagattgcatcaccgtgttgatccaggtgatgctgtttctggtaggaaattcttacccatgtgatgttctttcaactctggaaataagaagcaccctctaccaagtcagaaagtgaaataatccatccagtgtcggttttcattaatagaattttcgttgaccgcccagttatt

SEQ ID NO: 6793 - DNA, 3579 bp, Zea Mays
ccgacgcgcgcgtcgtcctcacctcacgtgtgtcaccgccaccgccgctcacagccacacacaaccggacgacgacccgagcggattgctttgctattcttcgccgtctcaaaattaggagccggatccacgaagggaggagaaaagggctccttttttatgctgtcactgcggtcgcgggtgacgctttcccaggctctcccaccgtcgtagacgtcgccttcgccctccacacgcacacccatccgctcccctcgcgtcgccttctatcttcgagggagagccggagagccttcgccgctctctcactcgctctgttttgtacctcgctctgatctctccccccgcccgtcgctgattccctgcccgtttgtcgccattgccgccggtcgtgccgtgtcaagtttgtacctgaagctatggctgggattcattcttcagtcgtacatcaacacattcagcttcctgatctcgctcttctcccctgttcgatttgaaggacatggcgacctcgggaaagaaacacctgaattcagtgaccttgctgttcaaactaccgtattacacgcaatggggccagagcttgctgattgccgggtcggaaccagcactcgggtcgtggaatgtcaagcaaggagtatctctcagtccagtccatcaggacagtgagctaatctggtgtgggagcgtgtctgttgttgccggctttacctctgagtacaagtactatgtggtggatgacaagaagaatgtgttgagatgggaggctggggagaaaaggaaactagtcctgccggagggcgtgaaggaaggagacgtaattgaaatccgtgactggtggcaggatgcttctgaagctctattcttcagaagtgcattcaagaatgtcattttcaatgctactgaaggtgttaaaaaggaatcacagtcagtgtccctcaacaaaagtttggatcctgaagatatcgttgtccagttcgtgattagctgtcctcggctcgtatctggatctactgtcatcgtcactggaagtaaccctcaattaggaagatggcaaactcaagatggtctcaagctgagctatgttggagattccttgtggaaagcaagctgtgctttacggaagtctgagttccctataaaatacaaatattgtcaaatcagtcaagcaggaaactctacattggagcttggcccaaacagggaggttaatgttgatttatcatcacccaagcaatccagatatattgtgttatctgatggtgctcttagggatgcaccatggaggggtgcaggtgttgctgtacccatgttttcaatcagatcagatgaggaccttggcgttggagaatttctagatcttaaacttcttgttgactgggcagtcaattcgggcttccatcttgttcagctccttccaatcaacgatacttcagttcatgggatgtggtgggattcttatccgtacagctccctgtctgtgtttgctttgcatcccttgtacctgagggtacaagcactttcagatgcaattcctgtggatgttaaggaagaaattcagcaggcgaagaagcaattggataaaaaggatgtcgactacgaggcagcattgtccacaaaattgtcgattgctagaaaaatattcaatttagaaaaggaaaaagtgctaaactccagttctttcaagcagttcttatctgaaaacgaggaatggttgaaaccatatgcggcattttgctttttgcgggactttttcgagacatctgatcacagtcaatggggtcgtttttctcagttttccaaggataagcttgacaaacttatttgtgaaggtactttacaccatgacattatacgttttcattactatgttcagtaccatctatatatacaattatctgaggcagcaacatatgcaagaaagaaaaatgttatcctgaaaggtgatttacctattggtgttgataggaatagtgtcgatacatgggtatacccaaccttgtttcgcatgaataccgctactggagcgcctcctgattattttgacaagaatggacaaaattggggttttcctacatataactgggaggagatgtcaaaggataattatgggtggtggcgagctcgtctgacacagatggcaaagtacttcacagcatacaggatagaccacatcttgggtttctttaggatatgggagcttccagatcatgctgcaacaggtttagttgggaaatttagaccttccatccctcttagtcaggaggagcttctaagtgaaggtctatgggattttaatcggatgagccaaccatacattcgtcaggaaatactggaggagaagtttggatccttttggacagtcattgcagccaattttctaaatgagtaccagaagcagtgttatgagtttaaagaagattgcaacacagagaaaaagattattgtaaagattaaaacaagtgctgaaaagtcactgtgggtagagaaagaggacaatatccgccgtggccttttcgatttactacagaatattgtccttatcagagatccagaggactccacaaaattctatccccgttcaacctggaagacacatcaagttttagggaccttgatgaacacagcaaaaatatcctcagaagattgtattataactattattttgttcgccaagaaaatctctggcgccaaaatgccctgaagactttgcctgtcctgctgaactcgtcagatatgttagcatgtggagaggaccttggccttatccctgcttgtgttcaccctgttatgcaagaactggggttgattggattgcgtatccaaagaatgcctagtgaaccaaacttggaatttggtattccttctcagtatagctatatgacggtttgtgctccctcatgtcatgactgctctacattacgtgcttggtgggaagaagatgaaggaagaagaagtcgtttctacaagactgtagttggcagtgatgaggagcccccatctcgttgcaccccggaagtagtgcacttcattgttcagcagcattttgacgctccatcaatgtgggcaatctttccacttcaggacctccttgcactgaaagacaagtacaccacaagaccagcgccagaggaaacaatcaatgaccccactaacccaaagcactattggagattccgtgtccacgtgacattggagtccctgctgaacgacaaggacatccaggcaaccatcaaggacctggtcacaagcagtgggaggtccttccccggaaagaaggcggaaggtgccgacgagagcggggagaagctgtccaaggtgcagctgaatggtaaagcttaggaaaggattgcgagagctgctggaagtgaccacggttacaagtaaataaatagaataaggcgacagattgcatcaccgtgttgatccaggtgatgctgtttctggtaggaaattcttacccatgtgatgttctttcaactctggaaataagaagcaccctctaccaagtcagaaagtgaaataatccatccagtgtcggttttcattaatagaattttcgttgaccgcccagttatt

SEQ ID NO: 6794 - DNA, 1548 bp, Zea Mays
tcataaacaaccgaacagctgctgtgagatttccttataatagagcggggagggaatctcgtcgctcgctgcgtccacgtcggtctcttttttctaggccgtgcgatcgcattctgacggcagcgaatgcttggtggtggacgaacgactcggcttctactcgataattccagaatccagtctatgagtcaacttatcctctatgcagcaaaaaaataagcggtcgtcaggcgccgggcgagggaagcagggaaacaaggagcgagcgagcctgcgccgctaagacgggcgccgaccggcgagcgatgcagtccccttcaccttttcttcattcttccgcatcgtaagaggattaggaatttaggatcggggccgacagagcccgacgaccagcatggaccactcgcccgatgatctgtcgttgatggcgctcggcgaggacggggatcacggcgccgccctgcccctcattgcggactaggcaaagcatgacgacgatggcatcatccgaaaatgagcatgttgatggcgtcagcgcacatggtcacggaggtgaaggcgaccacgtcagccatggcagatgaggagcatccggagagaagagaggaggcctcagaagtgagctgtgtattctccatcgttgcgctgatagtgtttctgataattatagtgttgttcgcctgttcggttgcttgccttgattcatagcggttccagctagggttgagcttgcgagttgtgggttacatttaaggttctattccactacatgttcatgtatctatattttttcttctcctacgacttgcccccttttgatccgacaagaagaagaaaattaaggaggtcgtcatccaaaaaccttctgatggaatggacaactttgcagagaagacagaaaaaacactggcagtcacagaatccggtgtacttaacttcactagaatgaggaagataaacaggcacaacagatacactcattgggagctagactagacaagtttaagaatcagaaaatgaatcgaggctttacatttagtcattgtgcaagtttaaaaatcaaccagtgaattaaggctttacatttgttcatcctacaaaaatttcaggtggattttaattcaacttgagtacttttgcaatatctggctctccctgcttttcagatgatcaagttgtacaggaactaggggaaggcattatgctttgaagtgtcccaacatacccttgggagggaactggccgagattataactatgaacagggtgttcaacattattcgcgacaacaaccaggtcttgctgggataggtgtaggaccattatgaggccaccacatgttcttaggaagggaacaaggaagataattttttgttacttttataaatttgtgtaaaatacaacctgagcatgtgatgatgtttttacttgctgaaatgggaacaagtgggtcacttcatgggcatctaaggttggtgatcaaagcaagatttgcccccaaaaactttgaagcaatcctaaggagacacatcattaagttatccaattt

SEQ ID NO: 6795 - DNA, 1966 bp, Zea Mays
ccccatccccccatatcccttcgacccttccgccgagctcggcctcgggcggcgtcccggtctcaccgcgaccgggcggtgagaggtagaacggccaccagacatcaaccgtgaaggggtggcgtcaaggcagcgctgaagcggcggcgacgtcgaggctcgagctcccgtgccgcgctccgagctaacctagatgaacatactcgaaaggatacgtggaggtggcgacagggcggctgccacggagcgccccccgcggccggagtgctgggtggagatttcggagtccgtctcacggctctgcagcttcgacgccgccggcagcggtagccgcagcatctctgtaaaagttattcaggattctagacctatacatgacaaacttgttgattctttcttgaacaaaatttttccatcaggttatccatacagtgtgaatgaaggttacttaacttataccaaattccgtgtgctacagcatttctcgagtgctatgctacatgtgctatcaacacaggtttgcgacctaccccggcgcaagcaactgctgtaagttggattctaaaagatggaatgcagcacgcaggaaagctcatttgtagcagcatgggtgcaagaatggattctgaaccaaagagttggaggatacttgctgatgttctctacgatctcggtactgcattggaagttgtttcgccgctgtgcccacaacttttccttgaagtagcaggcttgggaaattttgcgaagggaatggccgttgttgcagcaagagcaacgaggcttccaatttactcttctttcgccaaagaaggcaatcttagtgatttatttgctaaaggggaagccatatcaacacttttcaatgtcatgggaattggagctggaattggattggcatctactgtttgttcaacaactcaagggaagttaattgcaggcccgttactttccgcagtgcatatatggggtcatccaagagatgagagcaactcctgtaaacacactcaacccacaaagaacagcaatgatcgtggctgattttatcaaggtttggtatctctgatctattaacgcaacctttttatccagtccagctacgacagtaacatttgtctattatttactataccaataaacacgacatttttaagttgatctctacaatatatttgaggtaataatcttacttctattttatactgcttacgtctttctgtggtacatcaagtataattagttgatatatatatatataataataataataataataataataataataataataataataataataataataataataataaacagttttatggtgttgaggcctctgtttataatcttatcccgggcccctcaaaagtcagaaacggccttgatgttgttgttcatgatccgtgtgctctatgtgttgtgcccatttcctagactcctctatttgaaaatgtcgctatactaatttatttttctatttcacgtacaatatgcttatgctatagtgtcggatagggcgctactattttctagtgtcctaaaaaggccaaaaggaacaaagatttaagacattcgcactaagtaacgccaaatgtttggttgcaccatgtagcgcctaaaacaaaggctgcagcacgacaggctaaaacctgtggtaaaatgccgtagtctccatagcccggagtgaaagtgctacggtacaaggttgtctatcgttgcattcatgctacacaagcattaaaatatatttttaattagggatgatagttggaagtatatagtagttggatatatggaaaagatatagagtaacatgggtacagaagaagctggtatagagaaaaatctttttgactgaactaaaatatttttaagtatatatatagagtacactagtacacagaggctctatagtggcggttctagagctgtttgcactggtgtttttcagtgccgc

SEQ ID NO: 6796 - DNA, 2057 bp, Zea Mays
ccccatccccccatatcccttcgacccttccgccgagctcggcctcgggcggcgtcccggtctcaccgcgaccgggcggtgagaggtagaacggccaccagacatcaaccgtgaaggggtggcgtcaaggcagcgctgaagcggcggcgacgtcgaggctcgagctcccgtgccgcgctccgagctaacctagatgaacatactcgaaaggatacgtggaggtggcgacagggcggctgccacggagcgccccccgcggccggagtgctgggtggagatttcggagtccgtctcacggctctgcagcttcgacgccgccggcagcggtagccgcagcatctctgtaaaagttattcaggattctagacctatacatgacaaacttgttgattctttcttgaacaaaatttttccatcaggttatccatacagtgtgaatgaaggttacttaacttataccaaattccgtgtgctacagcatttctcgagtgctatgctacatgtgctatcaacacagtccttgctgtttgctgcaggtttgcgacctaccccggcgcaagcaactgctgtaagttggattctaaaagatggaatgcagcacgcaggaaagctcatttgtagcagcatgggtgcaagaatggattctgaaccaaagagttggaggatacttgctgatgttctctacgatctcggtactgcattggaagttgtttcgccgctgtgcccacaacttttccttgaagtagcaggcttgggaaattttgcgaagggaatggccgttgttgcagcaagagcaacgaggcttccaatttactcttctttcgccaaagaaggcaatcttagtgatttatttgctaaaggggaagccatatcaacacttttcaatgtcatgggaattggagctggaattggattggcatctactgtttgttcaacaactcaagggaagttaattgcaggcccgttactttccgcagtgcatatatggggtcatccaagagatgagagcaactcctgtaaacacactcaacccacaaagaacagcaatgatcgtggctgattttatcaagctgaaaggagcttctcaaagcttaagttattgaagaattatttaagatctacaatgtctcaagaaaggttaaacgagctagcaactttatgtattgagaagaaattattagatgatgtcaatattgaagccatctgatgattttgcatctagaaatgttagacgacatttttaagttgatctctacaatatatttgaggtaataatcttacttctattttatactgcttacgtctttctgtggtacatcaagtataattagttgatatatatatatataataataataataataataataataataataataataataataataataataataataataataaacagttttatggtgttgaggcctctgtttataatcttatcccgggcccctcaaaagtcagaaacggccttgatgttgttgttcatgatccgtgtgctctatgtgttgtgcccatttcctagactcctctatttgaaaatgtcgctatactaatttatttttctatttcacgtacaatatgcttatgctatagtgtcggatagggcgctactattttctagtgtcctaaaaaggccaaaaggaacaaagatttaagacattcgcactaagtaacgccaaatgtttggttgcaccatgtagcgcctaaaacaaaggctgcagcacgacaggctaaaacctgtggtaaaatgccgtagtctccatagcccggagtgaaagtgctacggtacaaggttgtctatcgttgcattcatgctacacaagcattaaaatatatttttaattagggatgatagttggaagtatatagtagttggatatatggaaaagatatagagtaacatgggtacagaagaagctggtatagagaaaaatctttttgactgaactaaaatatttttaagtatatatatagagtacactagtacacagaggctctatagtggcggttctagagctgtttgcactggtgtttttcagtgccgc

SEQ ID NO: 6797 - DNA, 1957 bp, Zea Mays
caagcaaaccgagtcgagtccacagtccacaccaccaccgcgaggtccactaaaaaaacaagagcattaccggcaccaatcaatcaggctggcagtggagtgacagcggcggcaacaccacgcccacgcggcgccggagccgatcccccgatggatctcccgccgctctcccaccaggccctcttcgccgccgtccgatccgccgacgcgcccgccgtccgcgcggtcctggccgacgccgaggcgtcggccacctccttggccgcgctcgccgccgctcagacggacgccggggaaaccgcgctgtacgttgccgcggaggccggcagcgaggaggtcgtgcgcctcctcctccctctctacgacttcgaggcagccaccgtccgctcacgccttgacctcgacgccttccatgtcgccgccaagcagggccacaccgggctttgctcagtctgtgactcttccaacactagtcccctctactcggctgctgtcaaggatcacttggatgtggtaaatgctatactggacactgatgatagctgcataaagattgtgcggaagaatgggaaaacatccctacatactgctgcaagaattggataccatcgtattgtcaaagcactcatagagagagatccaggaatcgttccgatcaatgataggaagggacaaactgcacttcacatggctgtgaagggcaaaaatacagatgtagtggaagagttattgatggctgatgtttccattctcaatgtgagggacaagaaaggaaatactgctttgcacatagctacacggaaatggaggccccagatggtacagcttcttcttagctatgaatcacttgaagttaatgctatcaacagtcaaaatgaaacagctatggatttggctgacaaagttccttatggtgagtctaaaacggaaataatagagtggctgacagaagctggtgcaaagaatgccagaaatgttgggaaaattgatgaggcatcagaactgaggagaactgtgagcgatatcaagcacaatgttcaggcacagcttagcgagaatgctaaaaccaacaaacgagtgactgggattcgcaaagagttgcagaaactgcatagagaagctatccaaaacaccatcaattcagtcaccttggtagcgaccctgattgcctccattgccttcgtcgccatattcaatctgccaggtcaatacttccaggatgtgaatagtgggggagacattggtgaggctgaaatagccaagcttaccggtttccgtgtcttctgccttctgaacgctactgctctcttcatctccctcgcggtggtcgtggtgcagatcaccttggttgcctgggaaactggtgcccagaagcaagttatcaagatcgtgaataagctcatgtggacggcatgccttagcacgggtgtggcttttatctcgctggcctatgttgtagttggcccgcagcatgcctggatggccttcacggcatcagccatcggagggccgatcatgattggaactttcctgttcctagcctatcttctgttgcgcccacggttcaagttcggcgaagacagacagcgccgcatcaagagggcaagcggcagcaaatccttctcctggtcaatccatgatgggttttcagatctggaagccttctctgatcatgagaagaggatctatgccctgtaggagggtgtaacagtaactactcccacaagaggcaactgggagagtacaaatggttcatgtatatatttggtttagccgttttagcctagccgctgttagacctttctccccatgtacaatatctaataatgaagagctgcagctattgtaaagtgcaagtattgagcatgcttgaaagttgaaccggttgccctttgtgaattggctacacgttgtgtcgtattattattcccttttaaaacaaaaaagtggaataata

SEQ ID NO: 6798 - DNA, 2204 bp, Zea Mays
caagcaaaccgagtcgagtccacagtccacaccaccaccgcgaggtccactaaaaaaacaagagcattaccggcaccaatcaatcaggctggcagtggagtgacagcggcggcaacaccacgcccacgcggcgccggagccgatcccccgatggatctcccgccgctctcccaccaggccctcttcgccgccgtccgatccgccgacgcgcccgccgtccgcgcggtcctggccgacgccgaggcgtcggccacctccttggccgcgctcgccgccgctcagacggacgccggggaaaccgcgctgtacgttgccgcggaggccggcagcgaggaggtcgtgcgcctcctcctccctctctacgacttcgaggcagccaccgtccgctcacgccttgacctcgacgccttccatgtcgccgccaagcagggccacaccggggttgtgaaagagttcttggggcggtggccagggctttgctcagtctgtgactcttccaacactagtcccctctactcggctgctgtcaaggatcacttggatgtggtaaatgctatactggacactgatgatagctgcataaagattgtgcggaagaatgggaaaacatccctacatactgctgcaagaattggataccatcgtattgtcaaagcactcatagagagagatccaggaatcgttccgatcaatgataggaagggacaaactgcacttcacatggctgtgaagggcaaaaatacagatgtagtggaagagttattgatggctgatgtttccattctcaatgtgagggacaagaaaggaaatactgctttgcacatagctacacggaaatggaggccccagaatatctcaatgtgaaaaacatgtcgtatgtaagccatggtggtttcttagtggagcagagcatctattggaagagcaaccatatatctaagaacacacgaccatcttataaagcactataaagacattagttgctgctgctattaactgtctgccactagtcttactaagtcattgcaacggcgcaggaatgtatctggatgctaatatctcgatggtacagcttcttcttagctatgaatcacttgaagttaatgctatcaacagtcaaaatgaaacagctatggatttggctgacaaagttccttatggtgagtctaaaacggaaataatagagtggctgacagaagctggtgcaaagaatgccagaaatgttgggaaaattgatgaggcatcagaactgaggagaactgtgagcgatatcaagcacaatgttcaggcacagcttagcgagaatgctaaaaccaacaaacgagtgactgggattcgcaaagagttgcagaaactgcatagagaagctatccaaaacaccatcaattcagtcaccttggtagcgaccctgattgcctccattgccttcgtcgccatattcaatctgccaggtcaatacttccaggatgtgaatagtgggggagacattggtgaggctgaaatagccaagcttaccggtttccgtgtcttctgccttctgaacgctactgctctcttcatctccctcgcggtggtcgtggtgcagatcaccttggttgcctgggaaactggtgcccagaagcaagttatcaagatcgtgaataagctcatgtggacggcatgccttagcacgggtgtggcttttatctcgctggcctatgttgtagttggcccgcagcatgcctggatggccttcacggcatcagccatcggagggccgatcatgattggaactttcctgttcctagcctatcttctgttgcgcccacggttcaagttcggcgaagacagacagcgccgcatcaagagggcaagcggcagcaaatccttctcctggtcaatccatgatgggttttcagatctggaagccttctctgatcatgagaagaggatctatgccctgtaggagggtgtaacagtaactactcccacaagaggcaactgggagagtacaaatggttcatgtatatatttggtttagccgttttagcctagccgctgttagacctttctccccatgtacaatatctaataatgaagagctgcagctattgtaaagtgcaagtattgagcatgcttgaaagttgaaccggttgccctttgtgaattggctacacgttgtgtcgtattattattcccttttaaaacaaaaaagtggaataata

SEQ ID NO: 6799 - DNA, 1527 bp, Zea Mays
aggtttttgaaagtcatatctatcaaatcagtcgaacaaatcgacgatgtggcatgtaatcttgcccaagttattgctacggaaaagaccttgatagaggagtgtggtaatcttctataccatgcgcagaacctgcagatgagggagagcagtttgtggagtcaagcgatgcaactgaaacaaaatgaagcgaagtaacagaaggcagaggggcaaacacgctgccatggtcgtttgttcaactgagggagctaactgagctccaccgttgtctgcccaagtggacagaggctgcctgatgccctgatcgatgatacatcaccgaaggcagaagtgggtcctgtgaatcaagagttgcggattcttttcccagtacatatgtatatgttcggtaatttgccgtgtaagcatttttgctgtttagctattgaaaaaaacagacacgagcatcgttcttacgaatgcaaatttgttgattctttgcagtacgtgtgttgcccaaataccactgccttcatagttcatatataagatatcagtttcgagacaaaagtcagctatagagaagtttggtctgagtttgagaccaagcttgagcttatggcagttgaaccaagaatcatcggtctcagccatcacgacactattaactgtcatcatcttctggatgtatttgaagagcacattgactcgcagtggctcattcggctcgctctccagcgcctgcccttcaggtacaaagttcctcttgtagttctcatacgtagtggtgttctttttaaccttcttagcaatttcagtccagtactccttcatcatcaaacatctgaatgacaacccatttcccactcccacacgctcaggctggacaatgatggccttggccttcttgaggaggaatgagtaaccgacggagctgtagtccttgaaaatggagcctgcaaagatataggcatctgcagactcaacaatctcagtacagaaggcggtgctgacgacgcccctgtaggtgccgatgaagtggaggtgcgtctctgccacaagacccttagcagatggcatcactgcataggacctgacacaaacttgtaccggatgcatatgaattttccctgctgccgagctggcagctgagctcactgccacaatggcgggcggtggtgagggtgtccaggtcgggcgcgctccccgccagaccgatccgctccagttgcaggcccttgataatggagtgcacagctgggacatcgttgacagcgtgggtcctgatgcacttggaggtggcgcgctcgaggtcgatgacgagcagggactgggggatctcctccgacgcctcggtgaagatccagctccgtgagctgtccatcaggctgtgtgcgtcaggtccgccgctcgtctaggcgattccgatgacgccccgcaaggacggcgtctgcacggagcgatggacgcgtgtgtgcagccacgacatggaggtggtcggctggtgggtgtcacaggcggagatcctggcgcaccgcgcgatgg

SEQ ID NO: 6800 - DNA, 1724 bp, Zea Mays
tgttctgttcgcttctgctcccaccgcgtgcttgcgtggcgctgccccagcctgctagctagcctgcaacggaaggggccggataagatggcagatggtggggcggcgtcgcgcggccctcccgacggctcgccgccggccgcgctgctgctgctgcagcagcccctcctccacgcctacgaggcccgcaaggacccggcggcgtgcggccgggaggcgcacgggcacggcttcggcccggaccccgacggcgccggcttcggcggaagtccgatcttcgtgcggacctgcttcaatggcctttacggcctctccggcgtcgggctgctgtccatcccgtacgcgctgtcggagggcgggtggctgagcctggcgctgctgctcctcgtcgcggccgtctgctgctacacgggcctgctcctgcagcggtgcatggacgcgtccccagccgtgcgcgggtacccggacatcggcgccctggcgttcgggcgcggcggccgcctcgccgcgtccgcgttcctctacgccgagctctacctcgtcgccatcggcttcctcatcctggagggggacaacctggacaagctgttcccgggcaccagcctcagcctcggcctccgcggcgccgccctcgtggtctccgggaagcagctcttcgtcgtcctcgtcgccctcgtcatcctgcccaccacgtggctccggagcctcggcgtgctcgcctacgtgtccgccagcggcgtgctcgcgtcggccgtcgtcgtcgtctgcgtgctgtggaccgcgctggccgacggcgtcggcttccgggccagggggaggatgctcaacgtcagcggcctccccactgctctcggcctctacaccttctgctactgcggccatgccatcttcccaacgctctgcatctccatgaaagaaaagaaaaggttctccagggtgcttgtgatatgcttcgccgcatgcactctcaactacgcatccatggcgatcctcggctacctcatgtacggcgacgacgtcaagtcccaggtgacgctgaacctgcccgagggcaaggtcgtctcgaagctagcgatctacaccacgctgatcaaccccttctccaagtacgccctgatggtgacgccgctctcaacggcagtggaggagaagctgctcgccgccggccgcggcggcaagagtagtaggtccgtcagcgtgctggtcaggactctgctggtcgtcaccacggtcgtcgtcgcgctcgcggtgcccttcttcggccacctgatggcgctcgtcggctcgctgctcagcgtcatggcctcgatgctgctcccctgcatcttctacctcaagatctttggcgcggcgcgctgcggcagggcggaagtcgcgcttgtcgccaccattattgttctgggttccgtggttcttgcgactgggacgtacgcctctgtgaagaagattgttcaggattactgaagacgagatgtctggaaatgtcggtggcagtgtcacagtcattgttggcgttcttttgccgcgatcgacagtcccatatctcaacatcagcagattaggtgaaccaattagaaggtgttctttaaaaaatcagttagaagatgtttgtagacaaagtaaggagagacggaaggaacagtgatgtactgaaaacataatagggtgatacgcttctatattggcgtgagctactattttatcttttatcttgaggcatgtgg

SEQ ID NO: 6801 - DNA, 1171 bp, Zea Mays
ccaacgatttgctcggttcgtcgacgacaacctccatcttcacattccgtcctctctccctctccctctccctcttcctcctcactccccacccccctactccctctctcgtcatccgccacacgccgccaccgtctccgggcaggcaggaagcaaagcggtaagatgatgatgacgcgggccccgatgggaccgatggagggcgcggcggtggacgaggtggtgcgccgtctcgtggagggcggccgcggcggccgccaggtgcagctgtcagaggcggagatccggcagctctgcgtagacggaaagcgggtgctcctttcccagcccaacctcctccgaattcacgcccccgtcaagatctgcggtgatatccatggccagtttgttgatcttctgaggttgttcgatttgggtggttatcctccagcttcaacttatgtattccttggagactatgtcgatagaggcaaacagagcttggagactatatgcctgctgctggcatacaaaatcaggtatcccgaaaaaattttcctgttgagggggaaccatgaggatgcgaagatcaacagagtctatggtttctatgacgaatgtaagaggaggttcaatgttcggctgtggaagatattctcagattgcttcaactgcctgcctattgcagcgctcattgatgacaagatactgtgcatgcatggtggtctctcaccagaatggactagtttggatcagataaaggatattgagaggcctgctgagattcctgattatggtctcttgtgtgatctgctttggtctgatcctagtcctgatggagaagggtggggggagagtgacagaggtgtttcgtgtacgtttggtgcagataagctcgtagagtttttggagaagaacgatctcgaccttatatgccgagctcatcaggtagttgaagatggttatgagttttttgcacaacgaagattagtgacaatcttttcagctccaaattactgtggagagttcgataacgccggtgctctgttgagcatagatgagagcctaatgtgttcatttcagattctgaagccaactgatatgggtccaccacatgcaagaaaacaaattccaaataaggtgtatgatttgaaggcaagcaaactgattacatgactctgtcttccacttc

SEQ ID NO: 6802 - DNA, 1495 bp, Zea Mays
aacgatttgctcggttcgtcgacgacaacctccatcttcacattccgtcctctctccctctccctctccctcttcctcctcactccccacccccctactccctctctcgtcatccgccacacgccgccaccgtctccgggcaggcaggaagcaaagcggtaagatgatgatgacgcgggccccgatgggaccgatggagggcgcggcggtggacgaggtggtgcgccgtctcgtggagggcggccgcggcggccgccaggtgcagctgtcagaggcggagatccggcagctctgcgtagacggaaagcgggtgctcctttcccagcccaacctcctccgaattcacgcccccgtcaagatctgcggtgatatccatggccagtttgttgatcttctgaggttgttcgatttgggtggttatcctccagcttcaacttatgtattccttggagactatgtcgatagaggcaaacagagcttggagactatatgcctgctgctggcatacaaaatcaggtatcccgaaaaaattttcctgttgagggggaaccatgaggatgcgaagatcaacagagtctatggtttctatgacgaatgtaagaggaggttcaatgttcggctgtggaagatattctcagattgcttcaactgcctgcctattgcagcgctcattgatgacaagatactgtgcatgcatggtggtctctcaccagaatggactagtttggatcagataaaggatattgagaggcctgctgagattcctgattatggtctcttgtgtgatctgctttggtctgatcctagtcctgatggagaagggtggggggagagtgacagaggtgtttcgtgtacgtttggtgcagataagctcgtagagtttttggagaagaacgatctcgaccttatatgccgagctcatcaggtagttgaagatggttatgagttttttgcacaacgaagattagtgacaatcttttcagctccaaattactgtggagagttcgataacgccggtgctctgttgagcatagatgagagcctaatgtgttcatttcagattctgaagccaactgatatgggtccaccacatgcaagaaaacaaattccaaataagccagcaagagggtgaagccttcgaccagcatccaatactttcagcatcatgatcgtcagtcagctcaaagggggtgatctgttgtttggatagttggatccaccaggacatggcattagactcagcgtcttggttggcggcttggctgtaaaggatattctgtacagcattaggttggattcagcgcaccatctgttctattgttcttcctgccggcacagtacctcattggcagcttgacatccagtagatgaaataggtctgcacaaattctgtccatcagcagtaccattcttttctttttttgacttccagttcttttgtggatctgaaagatgtgtgaagctgttatctaaagtcttaaaagatgctggaaat

SEQ ID NO: 6803 - DNA, 1134 bp, Zea Mays
cggcccgccaccagtagctcgctcggctccagatcccgcgccacaccacatagcatggcagaagatacagcgtagcaaggtccggacgttcaccagagggcagtggggatggggatggggccggcccgcgtgcgctctccgtgcgggaggcctcggcggcggtgccgctcccgcacccatcggcggcggctgcgctcgaccttaggcggcggggcggccaggctggcgctgtgacctgaaacggtggcgggatggggaggaggaaggagcacctagagagagtccgagtggaggcgtactgctgggacgtgttcaagccagtggagatggtggagatcgacagcatggagaagcttgacgacgcgttcaggatggcaagttggtgtcagaaatgcatctacctaatgcccagaatggagaagatagcaggacaatatcctgggtggtcgcagcgatctgtgattgtttatgcccaaagcgtagggttacccgtcttgttagcgctaccttagtgccgcttttttgaaccctagacatctcagaagaggtaccagctgtactttcacgggctttaacaaattatttagaaagccatatcggggtgatctctctggtctggtgacctgatctgagttttttttgccttcattcaggggaagcactcggagatgaagctgaagcagagcaaacgtgagacgcaccgtgggcattctctatccaaggggaaggttgctggaacatgatctggattcaaaatggttggctattgttgatatatcttgttctccccacaattttatgttctacatgagtggagagatcatatagctcatgagaaagatgagggtactggttagtggttgtatactgccaaataaagcttgaatcgagataggtgttgttgtttttttctttatatcctgttataatggtgcaaaattggatctacaactttgctagctcccccccccccccccccaaaaaaataaagcagatacctacagatgttggacattgtaaaagaattgtaaaatcaaaatatccatatgttgagaacaatgttgtcgtaatcgcttaccttacactgttcgtactgcaattgattattcttatgcctttaaagaagtagctgaa

SEQ ID NO: 6804 - DNA, 1762 bp, Zea Mays
gaggatggcgggatccgaaatctgtgaccctccgcgtcatctgaaccctagggccacggcccgccaccagtagctcgctcggctccagatcccgcgccacaccacatagcatggcagaagatacagcgtagcaaggtccggacgttcaccagagggcagtggggatggggatggggccggcccgcgtgcgctctccgtgcgggaggcctcggcggcggtgccgctcccgcacccatcggcggcggctgcgctcgaccttaggcggcggggcggccaggctggcgctgtgacctgaaacggtggcgggatggggaggaggaaggagcacctagagagagtccgagtggaggcgtactgctgggacgtgttcaagccagtggagatggtggagatcgacagcatggagaagcttgacgacgcgttcaggatggcaagttggtgtcagaaatgcatctacctaatgcccagaatggagaagatagcaggacaatatcctgggttactcagaccttactcctgcccctctctcctgtttattctattatctggctccatttgtgcagcacaaaacttagcactttgtttcattttggaatattcttgcttttagtttctgatttaattgtagcttcttgctaagtgattgacattatctggttcttattcatttcaagttgttctttcaaaaaaattggaataaaagtcattttggaatcgtgtggttctattgctgctagcttagtaaggtaaaatagcctgacctcgtcaacaattagttctttttaggagaaaaagatgcaacaaatgaggattgatgcttcccgcaagagtacatgatgtacaatatatatctttagatggtttcattgttgtagctgatactaagaatgtagcttttttctttattcaaggtggtcgcagcgatctgtgattgtttatgcccaaagcgtagggttacccgtcttgttagcgctaccttagtgccgcttttttgaaccctagacatctcagaagaggggaagcactcggagatgaagctgaagcagagcaaacgtgagacgcaccgtgggcattctctatccaaggggaaggttgctggaacatgatctggattcaaaatggttggctattgttgatgtaagaatatactttatgtaccctcaagatcattctgcattcaatatatctagaacctaatgaggctcattctgcattcaatatatctagaacctaatgaggcatttccttggcttttagataccaaaccttgctactgtttgttcatatatatatatatatatatatatatatatatatatatatatatatatatatatatatatatatatatatatatatattcatgttaagacatcttattgtatccaatttcttatctcagatatcttgttctccccacaattttatgttctacatgagtggagagatcatatagctcatgagaaagatgagggtactggttagtggttgtatactgccaaataaagcttgaatcgagataggtgttgttgtttttttctttatatcctgttataatggtgcaaaattggatctacaactttgctagctcccccccccccccccccaaaaaaataaagcagatacctacagatgttggacattgtaaaagaattgtaaaatcaaaatatccatatgttgagaacaatgttgtcgtaatcgcttaccttacactgttcgtactgcaattgattattcttatgcctttaaagaagtagctgaa

SEQ ID NO: 6805 - DNA, 3536 bp, Zea Mays
ccacagccagcgagcgccccctccggctccggccctcctcttcctcttcccccaattcccattcccaattcgccctcctcaaatccggcgccgcattcccgacattccgcagatctgggatccgccgccgacggatcccctgccgcccgcaacgacccgggacgcgcgtgatcccgccgcctagccgccaagttggcgcctcagcggaggtcgcagcgcctcgccggcggcggcgcgggctctgccgccgccgccgccgcgcagccgcccggagcctctagcgcgcacgctgcgacgggtgactcgggcgacgccgtcatggcgcgctggctgcagtccgcggggcttcagcacctcgcaacgtcctccgccgccggcgctggcggcgcggactaccgtggtgggatgcctgggtttgggggcgctggcgccggaagcatgctgtcgagcctgctcatgcagggctatgggccagaatcaattgaagaaaagcagaggctttatacgcttctgagaggtctaaattttagcggagagtctgtacccacatcaatctctgagccttacacaccaacagctcagagctttggtggtgggaaccctgtagaggggttttattcgcctgaacttagaggggatcttggtgctggacttctagaccttcatgctatggatgatactgggcttctgtctgaggatgtagcatcggaaccatttgagccatcaccttttatgccgaaggatattgatgatgatgatgaggatgtgatagcagggagtcagcaagcctcagtagataattatggtgtggtgaccagtgaaaaagagaccactgctagagaaaataatgtagcaaagattaaagtagtggtaaggaaaagacctttgaacagaaaggagctatctcgaaaggaagaagacatcataactgtggaggattcatcatttttgacagtttatgagcctaagctgaaggtggatctgacagcctatgtggagaagcatgaattttgttttgatgctgttttggacgaacatgtttccaatgatgaggtttaccgtgaaacagttgagcccataattccaattatatttcagagaacgaaagcaacatgttttgcttatggccaaacaggtagtggcaagacgtacacaatgcaacctttgcctctgagagctgcacaagacatggttcgtctattgcaccaacctgtctatcggaatcagaattttaagttgtggcttagctattttgaaatatatggtgggaaactatttgatcttctatctgacagaaggcaactactgatgagggaagatggcaagaaacaagtttgcattgttggtctacaggaatttgaggtgtctgatgtacagatcgtaaaggaatatattgaaagaggaaatgcagctagaagcacagggtcaacaggggccaatgaggaatcatcaaggtcacatgctattctacaactggctgtgaagaagcatatcattgtaaaagataccaggagacagagagatcgtgatgctaatgaagctaaaaatacaaaggctgtggggaaaatatcatttattgaccttgctggaagtgagcgtggtgctgatactaccgataatgatagacaaacaaggattgagggagcagagataaataaaagtctgttagctctcaaggaatgcattcgagcacttgataatgatcagatacacattcctttcagaggaagcaagcttactgaggtccttcgtgactcatttgttggtaactctaggacagtgatgatttcttgcatttctccaaacgcaggttcatgtgaacacacactaaatacattgagatacgctgatagggtcaaaagtctttccaagggcggaaatacaagaaaagagcagtccacaggaccaactaccacttctagccgggattctttgtcagctttatcatattcattgcctgctgaagctgaagaaattcctaatcaagttcaagagaagagaccagtcgatacttataggaagggcactgaaaattttatctccaacccttctgtggagtctgaccgaaattcctttagtacgattccaaattattccaatagagggagagaagaaaatggtgcagcatctggtaatgacagggagagctatgatttgaagtccagccaacctgcttacactagtaagccacagttggttcagaattcagcaaacacacaggaggaggagaaagtcacaaaagtctcacctcctcggagaaaggcttatagagaagacaaatctgataggcagagcaactatatgaaaaaggataatggtcctgagacaagtcgggttgggtataagatgcagcaggcaaagcagctgcaacagcaacaaagaccagcatctgcttcagcctcatcaaggcaatctgaaaaggaaagttcttgtgatgatgtagaaattgatgcaattcttgagaggaggccctcattgcagttcacaggaaggagatcgagaatactatggagattgtgcgggaagagatgaaccttttggcagaggttgatcaaccaggcagcctgattgacaactacgtgacacaactgagctttctgctgtcacgcaaggctgcaggtttggtaagcctccaatcacacttggcacggtttcagcaccgcctcaaagagcaagagatccttagccgcaagaaaccttccagatagtatgctcaacaatggctctggattttgcctggaaatcttattgcttggagctcaatcgcagtctattagttggttttctcctgtgcgctccagtaaatgttagacccaagcaaagcagtgatagagaggacacatgggagttgcttgagggtgtggtgatcttgatgttgaggatggtgtggtcctggttgatgtctccactttgtgtttgtcagggttgacaaccagtttggtagtagtcctttttacagtggggctgcttgggtgtttttttttggcagatgtcatgtatggcttgcccactttgcctttttttttcttttccccattttgtacgagaaactggaatgtctggaatgttgtttgcagacaccggtgggtcgatattcaccgagggggtctgtggaaaccgatacattgttgtatactagtcggttgaccgtgcgttacaacggcttacaacaatatccacgtaaactattcataaaaaatttttaagattttttattgattgtctccgcgctctctgtataatatattttttgatttggctaactgatgttattgtttactccatgcaaatatatcttggtacaacacggccaataaagtgagcgattagaagagagttcacaatgattgactgaatgaacagagattataaaatgacataattccatcataaggagaccaaataagagagtttgtgagatcaagtttctaaaaaagtcccatgaagtcaaacttataaaaaagatagattaaaatatggagtgattgctaaagtcaggcatcaataaaaactggatgcgctccatataaattatg

SEQ ID NO: 6806 - DNA, 884 bp, Zea Mays
gtttggcgggcgccgcgcgtatgtttctcgttgcgacttggaggagaaggagattcgccgtctcaccccttccctgcctgctccctcgtctaagaaaagcgggcagagcagagacggcggcggcaggccatcgcggactcccgctcaccctcgtctgccaccgcctcccaggtcaggggccgacggcgacgggtggggaggggcggcagaggtagtccgaggggaggctgtggagcggagggcggagagaggccacgccgtccggagtctccagttccgtcgccacagcttcctgccgcgcctgggccgaggtaaacgagagggatcgaggaagaagtatcccccggagccccttcccccgaacccgaaggctccggaatggcgcactgggttagcgacagtgatggcagtgacaactttgaatgggatagtgatggcaatggggaggagccagcgaacttcaatgctgctggtgccggttcatcagctctgagatcaacgaacactgatgctccaggtccatcaacacgggttgctaatggcaatgggaaggctgggccatctgcctccttggttcaaaagtatatggacatgggtttcacggaagagattgttcggaaggccatgaaggacaatggggataatggagcagattcattagttgagcttcttcttacttaccaggaactaggcaatgacctcaaagtggataacggcttcgcttctggttgtgccccccaaactgttgatgatagtgatgatgacgacattctagaaaactgggatgatgaggatgctgatggtgggagaagcaccagggttgctaactctattgatgattctgaagacgaggtaattgcaatgctagtttatgtagcttgtca

SEQ ID NO: 6807 - DNA, 828 bp, Zea Mays
gtatgaagaaggattaaagctgaggccgaatggttcgctaggtttactctcccctcctcttccacggccgcgcctgcgacacccatccgccgccacgccatggccaagtacaacgtggtgcagaagaacaagcgccagtgcaatcaggaccgcaagcgcgccgcgcatggggagcccgggaccggcaagctcaagcagcggaccgcgcccgtctccatgtccggcaagcggaagaagaagctcgagcgccgcctcaaccggaagcagaaagaggctgcgatgattaaggcgctggagaacaacatgggggatgtcgacatggtctcagttgaagagtcttcagaagctgcaaagggcaagtcccaagtgaagttcagtgtgaagaaaaactcaagaatacagataaagagattaaagggcaaaggaagaaagccaaaaatgcaaaaccacctgccaaggagaaagttgatgccatggtagaatgacagttgatgccatggtagcatgacggacaagactacatacatccatccctttgtatgttttctcagagtttgcagcatggaccgacctcaccgaacactggcgcgtgtctcttgcatcttctgcctgaatgttaaatagaagctacttaggcctggtgttaatgtacttcaaacatgaatctacctttaatagtggactatgcgaatttgttcatgttcttattgcgtttatggagatgcttcattgtgaatgtcggcttctatagtaagcaactagcataatcttatcaccccccccccccccccccccccccctccctccctccccagcatcggatggcaa

SEQ ID NO: 6808 - DNA, 2760 bp, Zea Mays
acgaactggcgtgccagtgccagtgccgagcgcccgagcccttactcctcttcttccgaccccccgctggcttggaaaaaaggggaagaaaactcgcgcagtcggtcaccgaagggaggagcgcggtcgaggtgccgcccacacggagctgcgaggtgtttgtaggatctcctaggtcttgtctgctcccggtgccggcacgatgagggcaagctcctctagaggcagggcgctcgtggcgaagagctctagtactggctcggagaccatggagctcgagccatcttcagaaggaagcccacttttagtacccaggcagaagtactgtgaatcaacacaccagacaaggaggaggaaaactcgaactgtgatggtggggaatgtgccacttggcagtgatcatcccataaggattcaaaccatgacgacttcagataccaaggatgttgcaaaaacagtagaggaggtgatgaggatagcagataaaggagctgatcttgttagaataacagtccagggtaggaaggaagctgatgcctgctttgagatcaagaacactctggttcagaagaattacaacattccactagtggccgatattcattttgctcctacggtagccctaagggtggcagaatgttttgacaaaattcgtgtgaacccaggaaattttgctgatcgtcgtgctcaatttgaaaagctggaatatactgacgacgactaccaaaaagagctagagcatattgagaaggtgttttctccattagttgagaaatgcaagcagtatggaagagcaatgcgaataggaacaaatcatggtagtctttctgaccgcataatgagctactatggtgattctccacggggaatggttgagtctgctttggaatttgctagaatatgtcggaagttggacttccacaactttgtattttcgatgaaagctagtaaccctgttatcatggtccaagcatatcgcctgcttgtggcagaaatgtataacctaggatgggattatcccttgcacttgggtgttacagaagctggagagggtgaagatggaaggatgaaatctgctattggcattgggacactgctaatggatggtttgggtgatacaatccgtgtctccctcacagaaccaccagaagaagagattgatccttgccaaaggttggcaaatcttgggacgcaggccgcaaaccttcaaattggggtggccccatttgaagaaaagcacaggcgttattttgatttccagcgtaggagtggtcaattgcctttgcagaaggagggtgaggaagttgactacagaaatgtcctgcatcgtgatggttctgtactgatgtcagtttccctggatcagttgaaggctcctgatctcctttataggtctcttgcagcaaagcttgtggttggcatgcctttcaaggatctggctactgtagattccattcttttgagggagctcccccctgtagaagatgctgaagctaggcttgcactcaaaagattagttgacatcagcatgggcgtactggcccccttatcggagcagttgacaaagccactcccacatgcaattgtacttgtcaacctcgacgaattgtcaagtggtgcacacaaacttttgccagaaggcactagactagctgtcactcttcgtggtgatgaatcatacgagcagctagatattcttaaggatgttgatgatataacaatgttgttacataatgttccatatggtgaggagaagacaggcagggtgcatgctgctaggaggttatttgagtacttacaggccaatggcttgaacttccctgtaattcatcacataaatttccctgaaaccattgacagagatggtcttgtcattggtgctggggccaacgttggtgctctcttagtcgatggtcttggtgatggtgtattccttgaagctgctgaccaggaatttgagtttctgagggacacatctttcaacttgctccaaggttgcaggatgcgcaacacaaaaactgaatatgtgtcttgtccttcctgcggccgaacactctttgaccttcaggaaatcagcgctgagattagagaaaagacctctcatctgccaggtgtctcgatcgctatcatgggctgtattgtcaatggaccaggagagatggctgatgccgattttgggtacgttggaggcgctcccggaaagatcgacctttacgtcggcaagaccgttgtgcagcgcgccatcgccatggaaggtgccactgacgccttgatccagctgatcaaggaccatggccgatgggtggatcctcctgccgaggagtagggctgtaggctgtagccaagtctgtagtttatatattctgtaaagcgaaacacgcaatgcagtaactgagcatacgatgtacatccctacacattttgtacatttattgagatctgagaaataaactagaaaccgtcggtgacggcatgtctgcagcaccccaaatgaagcacatacgatttacatattagtagtagcccatgtgagcaagacataatcctatacaatcttgaagtctgcattatatattttttccaacagaggtagcttagaaagtttttcgagcaatgcaattttgttcgttactttccgtttactttttcttttttttagcgttgagggttatataaatagatttataatacaaagagaaaaacggtcgtgattacacaacaccaaaatttttattgtggtcttgagagtttgtgatgatc

SEQ ID NO: 6809 - DNA, 2803 bp, Zea Mays
ttttagtttttttttaaaaaaatagatctcgtggaggtggacccgtttagatagaagaagctgaaatagacataaaattgttgacctaaagcttttctaaacatacccttaggtgccgttcggttttcacggaacgaaagactagaacaatttctagctggatttcttctctaaggtatataaattttgattatctaaaacgattctaagtccattattgaataaacgaacaagtccttgactggctctagataagagagcaacttgttaacatgaggcgtgagcgtgagacgccaccgcactgtcgccgccgtgcaggctccaaaagatttttgtacgtattttccttttcagactccggcaaacagaaactcatgttttccctagttctgtgggcatcctgaagttgacgtcccgacccagggcaacccttgctgcgttgccgcgttcgcgtccttcctcagcagccctgtgtctgtgtgctgggccggcggcggcgagtgtgtgcgatgcggtgaccctcacgcagcccacgcctgacgcctccaggggacaggacgggcctctgcctctctctccttcaccttcactttaaaatacaccagcccgcggctcctcagcgctctctctcgctctcgctctcgtcaggcacgcacgcacgagtgaacacagacgcgatctcctgctctctgcctccctcgttctcctctgcccgtgcgcgctccagggcacacacgtacggagcgtgcgagcaccgtcatgtggtggaggtgctggagaacctggcgttcctggcgaccgcgagcaacctggtgacgtacctgatggggtccatgggctactcgccgtcgcagtcggccacggcggtgaccagcttcatgggcacggcgttcctgctggcgctgctcggcggcttcctctccgacgccttcctcaccacctacaccgtctacatcgccagcgccttcgtcgagctcacggggttggtgatcctgacggtgcaggcgcgcacgccgtcgctgatgccgccgcggtgcgcctcgccgggcgcgggcggggctgcgtgcgagcccgtgtcgggggcgaagaaggcggtgctgttggcggggctgtacctgacggccctgggcgtgggcgggatcaagggctccctgccctcccacggcgcggagcagttcgacgagcgcgcgccgcgggggcgcaaggcccgctccaccttcttcaactacttcgtcttctgcctctcctgcggcgccctcgtcgccgtcaccttcgcggtatgggtcgaggacaacaggggatgggagtgggggttcggcatctcctccgtcgccatcctgctctccgtcccgctcttcgccgcgggctccagcctgtaccggaacaagctgcccacggggagcccgctcacaaccatcgccaaggtcctcgccgccgccgcgctcgcgcggcgccgcggcggcggcggcggcggcgcgcagagctccagcaacggcgccgtcatcgaccgcgcgcccagccccgcggggagcgccgacgacatggatgagtactgcaagtccggggacatggaggagatctcgatctccgacgcggcgtcgccggccgccgagccgtcccgcgagctcgcgttactgaaccgcgcggtgcagtgccagccgccgcggcacggccgccgcctggcgtgcacggtgcaggaggtggaggacgtcaaggtcgtgctcatggtgctgcccatcttcttgtccaccatcatgctcaactgctgcctggcgcagctgtccaccttctcggtcgagcaggcggccaccatggacacgcgcgtggggaggctcaccgtgccgccggcgtcgctccccgtgttcccggtcacgttcatcatcgtcctcgcgcccgtctacgaccacatcatcgtcccgttcgcgcgccgcgtgacggggaccgagacgggcatcacgcacctccagcgcatcggcaccgggctggtgatgtccgtcgtcgcgatggccgtggccgccgccgtcgaggtgaagcgcaaggacgtggcgtccagaagcgggatgctggaggactccgggaagccgctgcccatcaccttcttctggatcgcgttccagtacctgttcctggggtccgcggacctgttcacgctggcggggctgctcgagtttttcttcagcgaggcgccgccgcggatgaggtcgctggcgacgtcgctgtcgtgggcgtcgctggcgctggggtattacctcagctcggtgctggtgtccgtcgtgaacagcgcgacaggccgcggcgggcaccggccgtggctgcagggcgccagcctgaaccactaccgcctcgagaggttctactgggtcatgtgcgtgctcagcagcatcaactacctcttcttcctgttcttggccgtcaggtacaagtatagaaacgcgggggtcatcaaagtgatgaggacatcactatgagtacgactacaccagcagcacctccacatcaagcgccacttccttcattagctgggccaatcactcgggcccgtgccagagatcttaacttcgtcatgctactgaagaatgagggcccagaagaatagacgaccagcccaactgcggcccatagtggacgacctagggttggccgcccctaggggctgcgccccctctatttatccaggagctgcgcctcctttattttcgagttttgttttacgttagccttagctactctcgaacacgcgcaaatctgcgctgtcttcgtgtattcagaactccaccctcgagtaatagattagattgctcgc

SEQ ID NO: 6810 - DNA, 2936 bp, Zea Mays
ataggctggtggagtagtcgtcgccacatcccgcttcccccgtacgccgtacccccgcagctcgctctcgccttctcctccggttcctgctgcaacctgcactccgtagtccgccctttctgcccgccgccggccacttcaagactactccccgccgcgttacctcctcctcgtcctcctggggttacccagctctgttcccctttcagggaacgccttgagaggcggggcgggtccttggtccggaggcgcggcgacggcgagtgatttttgttcgccagagggagagttttttttttcaccgggtttggtgggaagtaaggaggcggccgcgagtggcgagacgttcacgggttagatctggcggtacggcgtcgcggatctgagcgaggtaggctgtcgtttccccccctccggcgcctgttgcatttcccccctccggcgcgtgtctcgatatccttgcagttccctgtagttggcaagagctgaaggctacctaatctccatctgcaggtttcggtggagcgatcaggaggtggtcactatcttcgcctcatttcgagtagtttgggcgcctgtagtttgcctgtttccttttcggtgtctgatcaagaagatgatgtgctcagagggcttctagttgttgctgatatcttgtcttgtgttgtatcacccggaagctggaaaggagcgcatcactcctgctctccccttttactccttggttacttggtatttcttggatatccaggctggaaggggttagatccagttcctgcggccctagtaataaggtgcacttggggaaggtgccatgacctacttccccggtgaggtggtggagcacattttcagcttcttgccgtcgcacagcgaccggaacacggtctcccttgtgtgcaagttgtggtacgatgtcgagaggctgagccgacgaggtgtgttcgtggggaactgctacgctgtgctccctgagcgtgtggtgctgcgattccccaatgtaaaggcgctgacggtgaaggggaagcctcactttgcggacttcaaccttgtgccgcctgattggggtggctacgcggggccatggattgaagcaacagccaggagctgcctgagtcttgaggagctgcgcatgaagcggatggttatctctgatgagaaccttgaactgctagctcggacattcccaaaattcaaagtcctcgtccttatcagctgcgaggggtttagcacggatggtctagctgccattgccaatcactgcaattgacacactctcgaagatactagagcgaaccccaaatttggaagacttggggacaggtaatttgacagatgagttccaagctgagtcctttgtcagacttactagtgctctggagaaatgcaaaaggctgaggaatttgtctggattttgggatgcttctcctatctttgttccgtttatctatccactctgtcatcaactaactggcctaaacttgagctatactcccacactggattattctgatctgactaaaatgatcagccgctgtgtgaaactccagcgtctttgggtactggactgcatttcagacaagggtttgcaggtggtggcctctagttgcaaggatctacaagaactcagggtgtttccatcagaatttaatgttgctggtgcttttacggtgacagaggagggacttgttgcaatatcatcaggctgcccaaaactgagctctttgctgtatttttgtcaccagatgaccaatgaagcactaactactgtagccaagaattgcccaagtttcatcagatttagactctgtatccttgagccaaagaagccggatgccatgacaggccagccgttagatgaaggctttggtgcaattgtccgtgactgcaaaggtctaagacgactgtcaatgtcaggccttctcacagacagggttttcatgtatatcagaatgtatgcgaaataccttgagatgctttctatagcttttgctggagatggtgataaggggatgatggatgtgatgaacggatgcaagaatctgaggaagcttgagattagagacagtccatttggtgattttgcactcttgggaaatgttgccaaatatgacacaatgcgatccctttggatgtcatcatgcaatgtcacattaaaggggtgccaagtccttgcatcgaagatgccgatgctcaatgtggagatcatgaacgaactagatggaagtagtgaaatggagaaccatggtaacctctctaaagtggataagttatatgtttaccgtacaactgctggagtgagggatgatgcaccaaattttgttcaaatattatagagctagctgcaattaccttggtatcttcccttcctacgagaatcgggaaaagccacactggtttgtgcccttatcctggagcaacatggccgggattcatcatcatctctgtaccaactgctcccctcttccagtgtctggtcatatggccacccaggccctttatcgccttgtgcattctcactcgagaggaggacagaatcagatgactttttttttcttcttttcacgccatgtaatctgtagtgtacctgtcttcatttgcttttcactttggcacggtggattgtgctgtcgcggtactgttctagtgttttgattcgtaaacctgagaactgtcgggacattccggtgacgatgatttctttcttgctcctgtgaatgcagtgtgtgtgcaaattttaggtttatactacatctctccacgtaaatttgctagatgtagccgactacccacgtagcggttcattaatgatcttggtttaattaatggctgagtattttttttctaatttatgtactttctctattttgtttacatattttattatattaggtttattctgagataaacatttgtgtttttttgcctatcgatga

SEQ ID NO: 6811 - DNA, 2051 bp, Zea Mays
cagctttggaggaacgcagaaacgtcgaaaccagcacccggaaacccagacaaagcacgagccacgcacgccccgctgtctccctcccgccgtcccgccgccaccgctactgccggagtctctcgccaccgtcgttgctctcccgccttcaccgtgccaactcccctccttgcctcccccgcgcttcagtcgctccactccccatcgctttcgcctggtcaggtatagtcgccacctttcttttctttcccttaccattttctttcatgcgctcaagagccaacacggctcgatccagaattccagatccaggtgtcctttgacccagaccgcgcctgcctttccctccgctcggattcttcgccgtcttcgttcctactgggcgccgccggggtggagcggagatcggatccgccaggagctgattccttctctcgtagcttgtgcaagctgttggcttgggagttatctttctaatctggcctaaagaaatcctgaggcggtagcgtcacatggatgcaagtacggaggttactgatgctattgctgcagtgggcattgacaatgggccaacggggaagttgccgccccgtgatagtgtaggggggcacgcagaagaacacgacgtgctggctgatggaacacattcgggtgagagcgaggtgatcaacccgtctgaagaagtggaaatggaagccacctcgcaatcccaggacataaagccccgagttcctgagggggttcaaggccattcaccgaaggttgttactaaatctccgcgacagagccctcggggcggggataagagtgaagccaggaaaatctctcccagtccttatcctaaggtgcccatcgcacgggtttctgatctagatatagttgatagctcttcgagcaatggtgatactggtgccagtaagaaaaagactgaaaagagcagtttccgcccaattgccaaggagagcctgtcacttgaggactcaaaagagaagaataaaactcagaaggcatcaaaccaacgctctgccaaaaacgatattgacgaagaatcaaatgaaagtgtgaaacctcaaagggtgggcagcactccttcatatggatttagttttaagtgtgatgagagagctgaaaaaagaagagagttctactcaaagctcgaggagaagattcatgcacaggaactggagaaaagcaacttgcaggcaaaatcaaaggaaactgaagaagctgaactcaaaatgctgagaaagagtttaaagttcaaggcaacaccaatgcccagcttttataaggaaccacctcctcccaaggttgagttgaagaagatcccaacaacaagagctcgatcaccaaagcttggtcgctccaagaacacaccctcaggagggacagaaggaaattcaaaccccccagctcgttcagctcgactgagtctcgatcaaagggtcccccaaaatggtgccaagaaagcacctgctgcaaatgcggcgaagaagccccaacggaaatctctccctaaattgccttcggagcaaacagccaaagttgttgacattgcagcgtctgttccatctggagaagagctggggaagaagccatcgttgacgggtcttgttcgagagccaatccgcgcgcaacttacgcctgatgaacctggactcagcgtgtaggaaaggaacctatcaagccgactcatgaaagaagagagttgtgcctcagcttcctttatcacactttgctatttctgcattaactgctggctggtattatgtactaaaattagtctcatcaccaggatggagttgggagtttggagaatggcaagtgacccccgtgtattgtttatgctagtttctgttgacatacgaagtgtttgtagttggcaaattttttcagattatcatgtctcctatctccagggctcggagccaattttcttgccgtcgtagagaagccttgtgattcggtgcattagttcttgcagtttgatttcggctattgttcattgcttgtactgatacacaggtgacaaggaacattctgcacgtaaa

SEQ ID NO: 6812 - DNA, 958 bp, Zea Mays
ctttttcatagctaaacgaaatgcacctcagtggtctgtaggcaggcaggcaggcatcgacgtgcccacctcgttccgctctgacgtctgagatcgcgagatcgggaacccctgcccgtctgctccggaatctcgcccgcacgaaacttccccgacccatcgaccacaccagccccatcccctccgtcgctcccaagtcccaactgccgccacctctccgcgagccgacgccgacgcctacggtcaccaggacagagggacggctgctaccgcgggagtatgggggtggactactacaaggtgctgcaggtggggcgcggcgcctctgacgacgagctcaagaaggcttaccggaagctggccatgaagtggcacccggacaagaaccccagcaacaagaaagaagcggaggccaagttcaaacagatctcagaggcatatgaggtgctaagtgattcccaaaagcgggcaatctatgatcaggccggcgaagaggggcttaaggctcaggtcccacctactggagcaggtggtcccagtgggtcttccttctatggagggaatgcatcgacattccagttcaaccctcgcagtgcagatgatatttttgctgagttttttgggttctcaagcccattctcaaccatgggtggcatgggcggaggtgctgagagaggcatgaggggctccaggtttgggatgttcggcgatgacatatttgggtcccaccctcagtttcctggtgaggcatcaatgcatgttccacagcggtctcagaaggttcctccaattgagaatcggttgccatgcaaccttgctgatttgtacaaaggtaccaccaagaaaatgaagatttcacgagaggttttagatgccagcggatacaagagcttcatctcttgtttgcttgcaagaaatatgatggctaatgcttctcaacttgattatggacactttt

SEQ ID NO: 6813 - DNA, 1686 bp, Zea Mays
cgcgattgggccgcggatgaggcgcgtgtgagccacaccgcgccaggctgcccctccctccgccgcacaacctcaccgatcccactttaagccacaccatcgccccaccgtctcctctccggcgacctcgctggcagcgtgcgcacgagcgtctgcgtccggcctccacacgggccgcctcgccgtgcgcgccgccgccctcccggcagacggccgcagtgacggcgctgcctcctataaggaacttggtctgtactccttgaaaaagaggattgaagatgcagttgtgcgggttgaaacgaccgcttccgatgctctggagttggaggaagcacagagaattaagcaggaagaagtactgcagaaacgtaacttgtgggataatccagctaagtcacatgagactctgtctgctctggctgatgctatcagggtggtcgaccatcttaaagatcttcgcttcaaggctgaagaggcgaagttgattagtcaattatcagagatggatgccataaatggtgagctatttaagcaagcatacaaatcttcagtagacgctagtgagtatctagatcgctaccagatgtacaagcttcttaagggtccgtatgacaaggagggagcgtgcattattgttactgcagtatctaacggtgttacttctgagctgtgggcagagaaggtctttggcatgtatacaagttgggcacggaagcaaggttacaaggttggattgattgagaagatattttcaactagtggccatatccaatctgcaacaatggagattgaatcagagtacatgtttggcaccctttctggagaaaaaggaatgcatcaaatgatatactcctcccttgaaaattctgacattgatcaggcattatcagctagagtcgacataattcccctgttcttggatagaccagttgttcttcacttggatgacgatgatatagagacctctccctcaccttctgtacataagaagggagatagaagaaatggtgttgccgttagggttcaacacgtaccaagtggagtcactgctgaaagttcaggtgagagaagctactttgcgaacaagctaaaagccacaagtaggttgaaagcaaagctccttctaatagctagagaattgaaagtatcggatataaaaacaatcaacagacaagctgtagaggataaatgcaactgtggagcacgaagatacacatttggacgtcagaaattggtacatgatctcaatacaggcatccaattgtcagacttgaactcagtcttggaaggcgatatcgaaccattcatcagaggccgtattacatccagacaattgtgatgcacccagctctcacaaagtcattgatctgttcgctcgttatgattctgtacatttatttcttttcttttacagaacaaatcacatcataagataatatctgtaaatatatcacatttcaagtcaaaagggcatgccaaaaggtatacaaaacatcaatattaatgagcattgtcaagcttgaatctcttttattgtgtagagttagtggaacttgttggctatcaacaccgcatcctcaatagctagtccttcgccttacaccacctcattgtcatagaaaccagactacaaatctgaccttgaagagtcaattcatgcaaatacaccattggacaagatgtaac

SEQ ID NO: 6814 - DNA, 1646 bp, Zea Mays
cccgcccgccctgcgtgtgcgtgctgcgtgctgctactatatataaattgcaagcaagctaggcaggcaggctagcccagcgctcggccctcggctccttaaggcttcatcttctcaagttccggccgtccatcgccgccgccggcctcggccggctcagttcctgcctgccagccaaaaattccacaccacccacccagagactgaggcgcgcggtggtgaagacgtgatcgaaagtcgaaaccaaaacgatatatagatggggcgcgggcgcggcaaggtggaggtgcgtcgcatcgagaacagcgtgagccggcaggtgaccttctcgaagcggcggcgcgggctggcgaagaaggcgcgggagctggccgtgctctgcgacgccgacgtcgcgctgctcgtcttctccgacaagggcaggctccacgacttcgccgcgcacggcagcatggagcgaatccttggccgatacgagaggtacttgctatgtgaagatagggacgatgtaacccaagactaccctgaagaatcgcaggggaacatgagctatgaccacatcaagttgaggtccaaactcgaagctataaagaagagccaaaggaatctcatgggggagcagctcgagtccctgacgttcagagaggtacagcagcttgagcaccggatagacagcgctctgaggaacgtcagatccaggaaggaccacatcttgctcaactcgatccaggagctccggaacaaggcaagcatgccaaataaagaatttaccttaacatcgtcaaaaacataacatttttttattcggttgcaaagtggctagtagaatgttgatccattttctagatttctgattagttcttcagattctttattatcgcttcattgttttggttgttctcattgtttttatttgtaagaggtggcgcagtaacaggaagttctgtacttttggatcccaccttgcaggaaacttttctgatggaacaaaatggcattctagagaaggagaaggctgcagtgggggcatcatcatccctgcacaccaccaccagcaccgcagcagcttcttccacggcagcggcggcggcggcccttccaaacctgaacatctgtcccgacgactccgacgagccaggaatggcggcggcggcggggatcaggttgccgtggtggatgctccagccatctgccgtcagccaacggcaggaacagcactgaactgcttgtcttctcagatgatccacgctgcttgttccagctcgattctagtttctattagaactcgattcagctaaggcgggaatttgtgatctttctattgatctgccgttcttattggttgctagatcgattttatccttgtccttcttagtatctgaacctctgctgtgtcgtttgtcgtagttcttggtcgcaaaagctccggtttgcgtctctagtttggtttggttcctgtaaaatctgctgttgtccttcaatgagctgtgcaggccagttagatgattacttccactaacactatgacagacaattaggcccgagaaggcccaggctgcctttggcatatggatcaaatttgggctccgatggcccaacttttgataaattcgagctagtccatctgggctcatttttcagaaaat

SEQ ID NO: 6815 - DNA, 1534 bp, Zea Mays
gaacacggtttaacaaacaccctacccaaaggggcggaaaccaagccgccctgaccgccagacccaagccaacaagcaagagcattactactgcttccgaccgaaacctttcttggaacgcaagaaggatccccaccccgaccgacctaccctaatcggcgatggcgacggtggcgatggacatctcgaagcccactccagtggcgtccggcgacgaggccgcggcggcggccaaggggaggagcggcggagggggcgaggggctgcggcagtactacctgcagcacatccacgacctgcagctccagatccggcagaagacccacaacctcaaccgtctcgaggcccagcgcaatgacctcaactcccgagggaagagttgcagttgcttcaagagcctggctcatatgttggtgaggtggtgaaggtcatggggaaatcaaaggttctggtgaaggtacaccccgaaggcaaatatgttgttgatatagataagagcattgatatcacaaagatcacaccttcaacaagagtcgctcttcgtaatgatagctatatgctccatctgatcctaccaagcaaagttgatccattggtcaatctcatgaaagttgagaaggttcctgattctacatatgatatgattggaggccttgaccagcaaattaaagagatcaaagaggtcattgagcttccaatcaaacatccggaactatttgagagccttggaattgcccaaccaaagggtgtcctcctttatggacctccaggcacaggaaagacattgctggcacgtgcggttgctcatcacactgactgcaccttcatcagggtgtctggttctgaattggttcagaagtatattggtgaaggttcccggatggttcgggaactctttgttatggccagggaacatgcgccatccattatatttatggatgaaattgactctatcggatctgctagaatggagtctggaactggcaacggtgatagtgaagtgcagcgtaccatgcttgaacttctaaaccagcttgatggttttgaagcttcaaacaaaattaaggttttgatggcaacaaacagaatagacattttggatcaagcccttttgaggcctggccgcatagacaggaagattgagtttccaaatcctaacgaggactcacgtttcgatattctgaagatccattcaaggaaaatgaacttgatgcgtggtatcgatctgaaaaagatcgcagaaaagatgaatggggcctcaggagctgagctcaaggccgtctgtacagaggctggaatgtttgctctccgtgagagaagggtgcacgttacacaggaggacttcgagatggcagtggccaaggtgatgaagaaagacacggagaagaacatgtccctgcgcaagctctggaagtgaggctcatgccttgatgtacccaccgccacctttcacggcctctccctgaacggtagggcctcaaagtgccttattttttgttatcactacaacccacacatatccaatgcatacgct

SEQ ID NO: 6816 - DNA, 1674 bp, Zea Mays
cggtgagcagctagcagctgcagcacacgcgcgcacgtcactttagcttgcaggtgctgaggccatcggggtgtgctacggcatgagcgccaacaacctgccggcggcgagcacggtggtgagcatgtacaaggcgaacggcatctcggcgatgcggctgtacgcgccggaccagggcgcgctgcaggcggtgggcggcacgggcatcagcgtggccgtgggcgcccccaacgacgtgctgtccaacatcgcggctagccccgcggcggccgcgtcgtgggtgcgcaacaacatccaggcgtacccgtccgtgtcgttccgctacgtgtgcgtgggcaacgaggtggccggcggcgcggcgcaggacctggcgccggccatggagaacgtgcacgcggcgctggcggcggccgggctgggccacatcaaggtgacgacgtcggtgtcgcaggccatcctgggcgtgtacagcccgccgtccgccgcggagttcaccggcgaggcgcgcgggtacatgggccccgtgctgcagttcctggcccgcaccgggtcgccgctcatggccaacatctacccgtacctggcctgggcatacaaccccagcgccatggacatgagctacgcgctcttcacctcctccggcaccgtcgtgcaggacggcgcctacgggtaccagaacctcttcgacaccaccgtcgacgccttctacgtcgccatgggcaagaacggcggctccggcgtgccgctcgtggtgtcggagagcgggtggccgtccggcggcggcgtccaggccacgccggccaacgcgagggtgtacaaccagtacctcatcaaccacgtcgggcgcgggacgccgcgccaccccggcgccatcgagacctacctcttctccatgttcaacgagaaccagaaggagagcggcgtggagcagaactgggggctcttctaccccaacatgcagcacgtctaccccatcagcttctgaagaaccgttaaccgtaccgatccaagctagctgctagctggccctggtggtggctccgaccgacgacggacgacgacgatcgacctgcagccgtatgtgtcgatccggccgtatacagatgatagtacgtagcatgtatgtatatatatggtatatgtgggcttgctttgcgaccgctgggagtgagtatccgatccaattggtacggtagctactcccagatgcgtacgccgtgagtgatgctgagtacgtattttatatgtatatgttatacacatcgaaagggatctttcggagacgacgcgcgcgcgcggttaccgtatatattgataaatacggtaacgtcgtcgtcaattggtcgatgatctcccttcgtagctatagtagtatacagagagagaggttggtgatggataagatacacatgcatgtacattatcacgcaccgtataaattaatatacggtttttaattaacttgagataattgtacgcgtacttcaatcaattctatcatccatttccctggttccaaaaaaatagaatacaactttcgtttttaagaaatcatcaaatgcttctaagttagattaagggtttacaaaaaatattaatatttatgatctaaacatatattagatgaaaagatgtactttttctataataaatcgatttggagatgtagatatg

SEQ ID NO: 6817 - DNA, 1688 bp, Zea Mays
cacgtcaacccgtcgccactcacataaaacgtcttgacctctctgctcgccgccggcgaggagacagtagcccgccgctgcacgcacgcgccgcgaggaggtctggagcggctagctcgtctagagctaagtcagcgaatctcccggaccgtcccttctcagttctcatggccgtccgccgcaggcccgcggctgctgctgccggggacctgcctccgcaggcgccaccggcagatgcagcgccgacgccggcgccagacgaactggtcctccggccgccaaacctccgcgtggccgctgtggcggcggtgctcttcctcgcgcccttctcttatctctcgttcgtgcgctaccgcttgggcgccgatctgcagcgatccatcttaaaatgcggcgccatgagcctcattgggttctgcgtcgcgctcaagctcatccctgtcgcggccagctaccacctccgccgccggatgttcggctacgacatcaacaagaaaggcttgcccacgggccaaattaaagtgcctgaagcactaggtcttgttgtggggattatctacttggtcattgctattatatttcagcagtttcactatgccccagactccatttggcttgttgaatataatgcagcgttggcatcagtctgttttatgattcttcttggatttgtcgatgatgttcttgatgttccatggagagtgaaactggcattgccaacgtttgcagcactcccattgctaatggcatatgctggtggcacttccatcatcattccaaagcccttaactccttatgttggactaacggttttggagctaggtttattttacaagctattcatgctcttgttagcagtcttttgtacaaactcgataaatatacatgctggtctaaatggacttgaagttgggcagactattgttatatctgctgcggtatccctcgattgtttttgttggtgatacctacacctattttgctggaatggctttggctgtgataggaattttgggacatttcagcgagacattattgctcttctttttacctcaagttcttaatttcctatgttcagtcccacagctctttcactttgttccttgcccaagacataggttgccgaggtttgatcctgaaacgggtctgttgactggtaccaaagatggtaatctggtgaacatattccttaggttatttgggaagtgctcggagaaggccctttgcataaggctccttatttttcaggctctatgttgcgtattctgcttctggctaagatacatgctcaccggatggtacaaatgatcacctgcgaaaggctctccatcttgtcgcccagctcttgggaaaacccggttgcgtctgatggctattgtttcctcgacgtactttatcaggaacatgggatctgcagaggagcaattggaaggctgaaagagcagaaggttgagcgggaggagtaatctgattaattgaattttgtttgtgattaggccttattgggcctggggtttgggccgtctggccttgtaaggagggtgtacttaaaccctgaatcttctggtaattggcaggaagaaaatagaagaaaaaccaccaaacagaatttctgtttacctgcgcttgtcctcccaatcggaggcagctaccgtgagtgctcacgtcggagttggcgttactccggc

SEQ ID NO: 6818 - DNA, 612 bp, Zea Mays
ataagccaaacactccggcagctgtggtggagacgcctccgcctcccaaacacccgaatcaaactaacagccaccgatggcgtcgccatcgcggttgctcccgcccacgcctccttcggccgcccagccccgcggcccgcgggatcgcctcgccttgccgcgcctccggtgcctcgccgccgccgcagcctccgcctcgcccactgatggcgctgtgctgctggagcgtggcggttccgcggcggtggccgtgcgggagttcgtcacgcttgacgagctccgcgctgccgtgcgcctccgcgtccgcaccttccacgagtacgcagacgactccgtcggaaccgaggatcacagaaaggctcttgcagatagggagtttgaagcattacaggataggatttctgggaagatgataaattttcgaagagtttcttgcataaacgggactgttccactgtccccatcattaatgtcagctgaggaactttgttctatgtgcaagtttgtggaggatggaaaagagagattagtagttggtagtttagaccttaatcagtgtctttggctaccagatgaattgactggaaagaggcctgggggactttgtgcgtg

SEQ ID NO: 6819 - DNA, 1831 bp, Zea Mays
ctagtatgtgccagcaagtgtaggggatgacacctgggcccgtgtgtgtttgatatggagagagagaggccgtagcaggggtactttggggcatacgaaaatacggatacccgcaatgatatctagagcgtacaaagtggcgtctgcacgtagaattacaatagcaccgtttcgaatatgataaatattataaatccgtacaagttgcaatggtacggtttcacttcattcttatttaaatgtgtcccaaccgagagtgtggtgaaaaaaatagaataaaacctgagtttgtgccgcactaccgcgagcaaaaaaaaatgtcaaaattcttctctttaaaaaatggtctaattcatcacctcaaattcaatctggaacaatgatttggattggatcaatttctatgcaaaaacacagttatcgccctgagcccctgacgctggctgaaccgacaaacaacagcaataattcatagttgaagacaggcacagggcgagaccgccgtcatggacactgagaccgaggggaaggcggcggcggtcgaggagatgagggagtggtgcgtcgctctccccaaggtggagctccacgcccacctcaacggctccgtccgcaactccaccctcctagaacttgcaaaacatctaggcgacaaaggagtcattgtttttgaagatgttaaggatgtgatcatgaagagtgatagatctcttccagagtgtttcaagctttttgatctgtttcatatacttacaactgatcatgatacagtaacaaggattgctaaggaggttgaaaagatcttgctgcagacaatgttgcatatttggaaataagaacacacctaagaacaatgaggcaaaggggatgaccaagaggtcttacatggatgctgttattaaaggtctgaaagcagttgaagatgttgatgtcgaattatttggttctaatttcagaacaaatgaaacactaagttctaagcttttggatggtgtcacaaagaaaaagaagatatatgttaggctccttcttagtattgatcgccgcgagacaacttcggctgcattggataccgttaatctagccgtggaaatgatggaccaaggtgtcataggcattgacctttctggcaatccagtcgtgggggaatgggaaacatacctgcctgccctacaacatgctaaaaatatgggaatccccgttacaatccactgtggagaggtggcgaaccggaaggaaatccaagcagtgctggacttttgccctcagaggctgggtcatgtatgctgtctgaatgatgtagaatggaagaagctcaagtctctgatgattccggaggtgctccttccctagagcttcaccactttgctgacctctacaatgcgaagcaccctttgtccctgtgcacggatgattccggcctgttttcgacaagcctctcaaatgagtattacctcgttgcaacaactttcggcctcagcaagttcgagctgttccagctggcccaggatgcagtgcagtttgtttttgctgatgatgtggtgaagaagtctctgaaggaggtgttcaagcatgctgaaaagaggctgctcatgtgggatgaacttgctgcaccaagctagtgtacgtacccgttatgagatcagtatgtatcaacccaattgtatgatttatatatggttgtgtaacttttcgtttatgcacctattatatgtgtaccgtttttcaacgtcttagtagaaggtcccgctcgcgcaaccattggacacacaacccagttgttgatatctacgcattaagctaagcacaccaccatcatgtgttggttacc

SEQ ID NO: 6820 - DNA, 2148 bp, Zea Mays
ccccgctataactataagtgccacgccgggcgcgcgagcggcggcgacccgcgcagcagctccgaaccttctcccagtcccaggcagccagcgcaggaagctcaccgggaagccggtgcaatcacacaccacacatccccgctacaaatcccagcccccggtcgacatccctcccactcctcccccatgcgcaccggcaccggcaccggcagctcaccgatccccggagccgctactataagtacaaagcttccccggcggcggtccacccggccatggcggcagtcggagcgcgcccagtgctgtaccaccaccacccccacccggcgccggcgggcggcgcccccgcccccatgtcctcttcctacttctcccgcggcggaggcagctccagccccgcgtccagcctctccgccgcgcacttggacatatccgagttcctcttcgacgacgcctccgtcgtcgtgccgccggacgccagtggtggcggtgcgatcagcgcaggcggcgctgggagcgcggcggcgccggagcggccgcgcacggaccggatcgcgttccggacgaggtcggaggtcgaggtcctggacgacggctacaagtggaggaagtacggcaagaagtccgtcaagaacagccccaacccaaggaactactaccggtgctcgacggaagggtgcaacgtgaagaagcgggtggagcgggacagggacgaccccggctacgtggtcaccacgtacgaggggacgcacaaccacgccagccccagcacggtgtactacgccagccaggacgccgcctccggccgcttcttcgtcgccggcacgcagccgccggggccggggctgtaataagatgtacagactctgtcccaatggatgttggacccgattcttagttacatcttgtatgcagtgcaggtgtggctgaacgctccccaggcaggaggcatcagtcgcagcccttggctacgccggccgtgccaccaggccctagccatgtttgcagactccgcatgggtaggcactgaagcaaactagtagacctttttggctcttgtacacaaactgaactatatgaaactttggtactacttttttttccctgtcaaatataccccctccggccttccattcatcaggtatgtttgtatgagattgcaagcccagtgtgtgtgtgtgtgtgtgtgggagttacaatatacacgctgacacaccaacaccaaactacacactggaccctggagtacaaaactgtcatctgatacagcgatgggtagagaggccttgaatcatgaaggttacagcgcgttaattttagtgatcgtctcagccgcttggctctttacaagctcgactatcatacagcattaggggcatactaagtgccagggggggctcacggtagagatgccgattggagagatttttagccaacagaaacaagagcggggttgagcgccataaccctccacggaaaacgcatctaccatatatacatgtacaattcttgacgcccaacggacccaaaaaaaaaactgtgggccggtcaagtctcgtgcggacgaccagctagcacctagcagcagttctttggccatgccatggtcagctcagctctactgtgatggacccagaacgcccgatgctacgagttgctcctgagcttttctttcgaggtttcaggtcaaccacgatgacggtgacgttgtcctcggtacccttcttcagcgcgaccctcacgagataatccgctgcggcttgggcagcggggtcggtggtggatccatcaccctcgtcgcacaacgaccacgatgcgccagcggcaccgttgttcttgtgccacacttggatttgccggcgcgcagctttgcatgcctcttcgttcgtcaccacatcccacagcccatcgcttgcgaggatgagacagtcgtcatctttcgccctgggaacgaccgtgacctctggttttggaatcacgaacggcttcagataccggtccccaatcgatcttgacatagcaagtataccggagacccggtagccattccattggatgacctttccccccagggcctcaatcctcgctcgttcatccttcctgtcaggctgaaacaaccaaatcggatgaacaccataagcatcatag

SEQ ID NO: 6821 - DNA, 3624 bp, Zea Mays
cgcgctagctgttacagcatataaattaattaaactagtatatgtagacacacacagcacacaggaaagcacaccatcttctgtctacataaacaagctacctgcagcgcgatgtgctccactgcagtgctgctagttcgcacaggcgttgtgcttgtgtgtttggccgccttggcgcgagcgccgagcaaggtccatgctgccgccggcaccggggatgggctccttgctatccctaccaacgcctccctgtcgcactgcccctcttggtgcggggatgtccaaatctcctacccgttcgggatagggccgggctgcttccgtcaaggcttcgagctcacctgcgatcacacagctccttctcccaggctcttcttcgtgtcggggaacagctcgatccaggtgacttctgtacatatcggcatcagtagggttcgggtttcagctgttgggttcaacgtcaccatgagcgcaggcgtggacacctacacccagtcctggaaggcccctccagataacagagagatcatggagagggcaaacacgccttatagtgcctgtacagggttaggctgctgcatgattccaatacgtggcggccaaggcatcactctcaaactaggtcgcctcaatagtaccattccacacttcggtgaagcgctctcccgtgtcaagattatcgtttcacaatactatgaattcgttgctgatgatgtttacacaagttgggtgaatacaagcaacgttgatgacatgctattttacattgcaatcatggaccaaccgagctgcgcgagtgcccagtcccaagagaacaagaatacctacgcatgcagtagtgaaagcatctgcgacgacgatctaccaccagtagtatctcaaggaggctacaattgcttctgccctggtcgtcaaatagagggcgtcaacccctatattgaagatggctgcatagcatattataacccagaggcaccgagtattaggaactgtatgagattatgtggaaacataagcgttccatttccttttgggattgaagaaggctgctacgcaaatgataacctacgactcaactgcacaagcaacggcactcttattcttgatcgagggtacgcacaatatcatgtgaccaatttgtcacttgatgatgggcttttgatggttacaaacatgctgaatgccacaagcttcaacaatatggagagggtagtcatcactaactatgacggttactatcacaacaacttccaaccaacttacatggcggttgtggatggtaattatgatttctctcaggaggatacaacaataaaatgggttatagcaaacataacttgtcagaaagcaatgcaaaataatgctacatatgcgtgcgtaagtgacaacagtatatgcaaagatgtcatgcaagggaatatacgtgacgggtaccgctgcaagtgttctgatggcttccaaggaaacccataccttcaaaataattgtacagatattgatgagtgccttattccaaataaatgcaatggaatatgccacaattttgatggaggcttcaattgtacaagttgccctcacgggaaagagtatgatccaaaaaatcataaatgtgtcatgtcagctaagcagcgtattctaatttttgggattgtaattgggcttgtttgtggtcttggatccataagttttgcacttggtgcaattgtactcaccggtaagtggaaaaaaggtatccaaaggagaattcgaagagagtacttcaagaaaaatcaaggtctactcttggagcaactaatatcaaatgaaaatgccacaaacaaaacaaagatattcactttggatgaactagaggaagcaaccaacaagtttgatgctactcgtgttctaggtcatggtgggcatggcactgtttacaaagggattttgtgtgatcagcgtgtcgtggctataaaaaaatctaaaatagtggagcaaatagagatagatcagttcatcaatgaggttgctattttatctcaaatcattcaccgcaatgtggtgaaactttttggttgttgcctagaagatgaggtacccttgctagtctatgagttcatatcgaatggcactttgtatgacattcttcatgaaaatattgcaacaaaatgcttgttgtcatgggatgatcgaattaggattgcaacggaagcatcaggagcacttgcttatttacactcagctgctgcaataccaattttccatagagatgtgaagtcttctaatatactcttggacgacaacttcactgtaaaggtttcagattttggtgcttcaagatctctatcccttgatgaaacacatgtggtgacaattgtccaaggaacattcggttatttagatccagagtattatcatactggttctctaactgagaagagtgatgtgtatagttttggagtgatacttgtggaacttttgacaagaaagaaaccaatttttatcaatgaatcgggtgccaaacaaaacttatctcattacttcattgaaggactacaggaagggactctcatggaaataatagattctcaagttgtggaagaggcagaccaagaagagattaatgaaatctcctcacttatagaagcgtgcttaagatccaaaggaggacatagaccaagcatgaaagaagtagatatgagattgcaatgtctaagaacaaagaggctacggaataaaacacatcttttgattgaaaagggtggagaaatggaacctttgttatgcgcagaagctcagcacccacatgaacgtatcaatccaatttataatgaggaacgtttaacaattccaatgatgtctgggtgttacagtttggagcaagaacttgcggcagcatctagtatgattcgctaacttggtatttgcttggatgttggacacatctatagtaaccatctatttttagagaggaactatatggtatattttgttcctttcgcataagactatggtatatatggtgtgtatatgtatataatatatatgacattgctatgtttacatataatgtaatttccgtatttcaaactgtaatgcgttttagttttgttttgattacaaatttggtactctaattgtaatagtttctaaaaccaatcataatatatagttataatacacttgagatttggaatttgtattagtattgaaataaacttgagatttggacaatgtaatagcattgaaaagtagaatttttatatttttatcacttaaaaaatcaaaagaaattctatattaggtaaatatgaatattacaagcatgggattacactaattcatgctcttttttaagaactcgatgctgattctttgttttggtgacatgtattcattcgctatggtccaagcacacatctggagttcattctgtccttcaaggaaagttttggcgtaaacacaatggcaaaagagaaacttcattattaacgacctacattattaacattagtatcatcgtagaacctcaggaacaagtttatgtcgccaccgaggtgtaaaacctgttattttattttaatggctcgttgaagagatgccctttaatcttatttttttctttctaaatttaacttttaaaatggc

SEQ ID NO: 6822 - DNA, 1301 bp, Zea Mays
cgaaaaactacgcgcccaagcagcgccacgcggcctccccgccgcgcaccacgagccactcgctcgctcccccgtcctagtagtggctagtgcgcgcgcaacacacacggacgcgcgcgctccgtactcgggagtcgggcctcgactcggcacgcgtccgcggctccgcgcccaggccagggtgtgttgtgtcttccagtctccacgctcctgagaccacatctctctctccatggcgacggccatctcgttcccgcgcgcgccgctggtcactccccgcgcgtgcaccccccgccggcttgtccacgtgtcggcggcgcgcgcctctcccccgcgcggaggagggcgcgtcggtcgccgctccccgacggtccccgctgtagcgggagcctcctcctcctcctccggcttggctccggacacaagcgtgccggcgtgggacgctctcggcggcgtctccgtcctcgccgcgggaacaggcaacgctgtggcgctgacggacctgtgggactccgccgagggggtggccgtggttgcgctgctgaggcatttcgggtgcttctgctgctgggagctggcctctgttctcaaggacgccatggcggagttcgactcggcgggggctaagctgatcgccatcggcgtcggaaccccggagaaggctcgcatcctcgccgaccggggttggattttttgtgttcaaaagcaaaggactgttgaatgcaaggaaagacgagggcgcacaggcgaccgtgcccctttggacgatgtgctcaatatttgctgcgaagttcctgcagcctaacctgatggctcggtcttaagctatctccaacaacttattcattcttatacgtatattcaaactttaatctatgaacagtgcaatatataatgtaaaaaaatgcaaaacagtgttattgtataaaatttggtgcactgcagacggtcttaggtcggattccttcccatcgttacgcatatggtcttcatccattcttttttttttgcagccttgttaaaaaagggaagttggaatatacttgtagcatgcatatcgtcttcatccattatctttttttttttggcatcaacagatccctttctttgttcacaagctggacatgggtctatatattctaccggtttcctggacgccaattgtcggtgtccttgattcccaaacttacaagattgtccgctgcaagtgtcttctccaccaatatgcacatgtgagatactgctgtgccaagcttcatatgtgttgatatatttgtcttactttgatacctagatggtta

SEQ ID NO: 6823 - DNA, 1449 bp, Zea Mays
gcgctcacttctccgattaaccttgccgcgtcccgacgccacgtcaacaaatacgcgggcgcgattcaaatcccgactgacgcctgcctgcctggcatggttgtcttgatggcgcccgctgtagaagccgtgaaggagacaggcaccttccagaaggttcctgccttgaacgaaaggatactgtcatccatgtccaggaggtctgttgctgcacacccttggcatgatctggagataggtcctggtgctccaaccatattcaactgcgtcattgagataccaaggggcagcaaggttaaatatgaacttgacaagaaaactggactgatcaaggtggaccgtgtgctgtattcatcagttgtttaccctcacaactatggattcattcctcgcacgctttgtgaagacagtgatcctttggatgtactggttataatgcaggagcctgttatcccaggctgtttcctacgtgcgaaggccatcggccttatgccgatgattgatcagggagaggcagatgacaagatcattgcagtgtgcgctgatgatcccgagtacaggcattacaatgatatcaaggagctcccacctcaccgcttggctgaaatcaggcgcttcttcgaggactacaagaagaatgagaacaaggaggttgctgtgaatgactttctaccagcgagcgccgcttatgaagccatacagcactctatggacctgtatgctacatacatcgttgagggcctgaggaggtaggattctgatggctaggaaaggtggggaggatgttgacgaaaaactgggagaccatttaccgcatggaacgagtaccgttattattttatttgtgtcgtgtatactgctagtagtgaaccctcaatcaaagaccgaaatcccctggggagtcggagtcggtagtaggtgaagctagtaacaaggttggcgaaatattattttctggcctgactgcctatatatgttgtacgtgattggtatcgtaatattcattcgcttttgtgatacataattcgttattggatcttcaattgtgttctgctctcggaacacggtggcgatgtgcctcgtagaaaaatgcaaaggcctcagcgttcttgtttgttactttgctgttatggaaaactgacaggacctgaagtcctgaacgttgtctggtggaatttgtccagcattcccctttcagctggttgcgtatttgaatcctgcacgtaaaaacaaccgcgcacttgtttaactacaattgatctagatttctttaagggctagtttgagagaaaaaaaagaggggctagaatctccttatttaagaagtaaacagaaaaatattaaatttaacagcagctcatggttgtttggatgcccgtcttagagcagcttcaatagttttctaaacaactctctaagtattaaatttaagaagtaaaaagaaaaata

SEQ ID NO: 6824 - DNA, 1649 bp, Zea Mays
cttgcattatccatagactgagcacacgacgcgcgctgcgcgctacttcacatcccactactcctccaggttgtcttgatggcgcccgctgtagaagccgtgaaggagacaggcaccttccagaaggttcctgccttgaacgaaaggatactgtcatccatgtccaggaggtctgttgctgcacacccttggcatgatctggagataggtcctggtgctccaaccatattcaactgcgtaaggccaccctgtcatgcttgactggtcctcttgtgatatgttcatgttaatagcatgatgtcttttgttctattggaaaataaaaagtctccctggactctaaaatcaatgcctgtgaacacatgaactgtttgtgtcacccatgttcctctgctccttggcactttctgatgcatgctcaaatgcttaagaaagactcatagaagcgactcctattcctatgccaggtcattgagataccaaggggcagcaaggttaaatatgaacttgacaagaaaactggactgatcaaggtggaccgtgtgctgtattcatcagttgtttaccctcacaactatggattcattcctcgcacgctttgtgaagacagtgatcctttggatgtactggttataatgcaggagcctgttatcccaggctgtttcctacgtgcgaaggccatcggccttatgccgatgattgatcagggagaggcagatgacaagatcattgcagtgtgcgctgatgatcccgagtacaggcattacaatgatatcaaggagctcccacctcaccgcttggctgaaatcaggcgcttcttcgaggactacaagaagaatgagaacaaggaggttgctgtgaatgactttctaccagcgagcgccgcttatgaagccatacagcactctatggacctgtatgctacatacatcgttgagggcctgaggaggtaggattctgatggctaggaaaggtggggaggatgttgacgaaaaactgggagaccatttaccgcatggaacgagtaccgttattattttatttgtgtcgtgtatactgctagtagtgaaccctcaatcaaagaccgaaatcccctggggagtcggagtcggtagtaggtgaagctagtaacaaggttggcgaaatattattttctggcctgactgcctatatatgttgtacgtgattggtatcgtaatattcattcgcttttgtgatacataattcgttattggatcttcaattgtgttctgctctcggaacacggtggcgatgtgcctcgtagaaaaatgcaaaggcctcagcgttcttgtttgttactttgctgttatggaaaactgacaggacctgaagtcctgaacgttgtctggtggaatttgtccagcattcccctttcagctggttgcgtatttgaatcctgcacgtaaaaacaaccgcgcacttgtttaactacaattgatctagatttctttaagggctagtttgagagaaaaaaaagaggggctagaatctccttatttaagaagtaaacagaaaaatattaaatttaacagcagctcatggttgtttggatgcccgtcttagagcagcttcaatagttttctaaacaactctctaagtattaaatttaagaagtaaaaagaaaaata

SEQ ID NO: 6825 - DNA, 3406 bp, Zea Mays
agcaaagctgaataacagatcactcccgtctcccatccccttcctctcctagcaatcctctgccggagtccaagctccaatcagatccggacccacccctccccctccgaagaagccctaggcatgccccgcagccgatgaggtcgctccgccgggtcctcatcccgctcgtcctcctcgcaggactcgtcttccgcgtggacgacggcggcggcgcgttcctcccgcccccgccccccgcgctccccgctcccccgccccgcctcgcacttaacggagaagcggctccggaggatgatggggcggcggtttcccgctccacggagatcgtcgcggcggaggcgcgctccaccgagttcgtcgccccagcgaggcccaagaagcagagcttccgggagctccttgtccggccgcagcctgcgcgccacgagccggctagtttggttaccgacgaggcgaaagccgaatccaggggctttcttggtcttatctccataataaaagcattttgggccatattcttgttttgtgttgatctggagcacggaaggaggagcctttgctgattaggtttcttataatgtggccactggttgggcatgatacttcctgtgctaccgagggctactcactcatgcttagcacattcttgggggttggggcatctggaagtggcataccagttatgcaccttatggtttgttggtatttctgatcgaatgacttttggttctctttgtcaacagctctgtgcttcagttttgggataatggcacaattcagcttgtggacaaactgtcgcaatctcctctgtgggagatcaccacagggcctccactatcagaccagattaataccgctgagtctggtctgaattacctcatttatcctttcaatgagaacaagaacatgaatggtactgaactttgggaggtttataatgggaacaccgtgaggctcccatggaaattggaggaattcgttgccagaagcccatacattcgggattctgttgttactattggatcaaaagtttcaaccgtttttgttgttgattctgatagtggtgagattatttacaggcacagtattccagctgtgttaaatgaattggaaggaccagggattgaaggaacaccatccaagctaaatgcccgtactaattatgacagcgataatatcatggtgcttgtgagaaatgactattctcttagtgcatcagatcttggcaagcatttatttaactggacaagaacttctttctctgtgaaatacaaccaccctgacattccatgcatcagaagtgagggtttgccacttgctttacctgattcacgttcagctaatgtaattgtcttgaaagaaggtaccccttttatttccatccatggttctgatgccctggaaccagttcaaaccccaaggaagctaccaaacactgctgggaagtcagatatcgtattggatgattctcaaaatcaaacgtatgatggtgctcgatctcatgtcatctctgctgattctgaagctaccgaaacccccactaggaacacttatgtatggttattttcttttttccccatatttttggtcattggttatctgttgagcttgacctctgcaagcaagtcttgcaggcaatttgtgattcagcttattaagccattcacgcgcgacaagaaatcggtggacattagaggcaggtcagagggatctcctaaaagaagaaaaacacggaagaaggatggacttgtcaatagccctgagaccttgacagcatctgacaaggagtgcagtgaaactggtgggtcaactgaggcaccaatggaaaattctgcactaaaagatgcccttggtggtcgtcacattggtaaactatatgtctccaataaagaaattggtagagggagcaatggcacagttgtttttgaaggatcgtatgatggtcgtcaagttgctgttaaacgtctgctgcgttcccacaatgacatagctgaaaaggagactcagaatcttattatatctgatcatgatccaaatattgttagactatatggttgtgactatgacagcgattttgtttatatctcccttgagaggtgtcactgcagtttggctgatctaattcaaaaacactcatatctgtcttctggagagtctgtttctaacaatgaggccagtttcagcatcaagtcaaagatttcaaatgttaagggaatggatgtggaattgtggacacatgatgggcttccttcagcacaactcctgaagctgatgagagatgtggttgctggccttgtgcatctgcatgacttgggaattattcatcgtgatttgaagcctcaaaatgtcttaataagcgcaggaggacctattagagcaaagctttctgatatgggtatcagtaagcacctgcaagatgacatgacttctgttagccatcatggtacaggatttggaagctctggctggcgggcacctgaacagcttcgtcatggtcgtcaaactcgtgcaatggatctttttagtttgggctgccttattttctattgtatcactaaaggcaagcatccgtttggtgagtactatgaaagggatgtgaacattgcaaacaatcgctttgatctctttatggtggactacataccagaagcagtccatcttatatctcatttgttacaaccaaacccagaggcaagtatatgtcatgcaccatccactcttttggagccctgaattgcgtctttcgtttctaagggataccagtgacagaattgagaaaaccagtgaaactgacctcataaacacactggaaagcataggatctttggcgtttggtggaaaatggggagagaaattggatgctgctttggttacagacatgggtcgttatagaaaatataactttgggtctattcgtgatcttctgaggtatatcagaaataaatcgggtcattacagagaactttcagatgatctcaagggcatacttgggtcactaccagaggggtttgatcgctattttgctagccgatttccaaagttgctaattgaggtgtacaaggtcttgtgggtgcactgcaaggacgaggaagctttcagtaaatatttcaaaggaagttagttatagctggagaggattgtcctttcctactgtacatactaaccctgatgtagaacaagtacatgtgtaccatatgactcgtattataggataaaaaagagctcaatctgtacattatgcaccggtatggtaggaccgtgtcatttgcacagcctaatgctctgatggcttggacattgtgcatcgtggaatcttcgtaatcgttgtgtgtttgatgaagtcttaacctagctagaggcctagagctctatcgcttgtcagcgaggttattttttgggggtt

SEQ ID NO: 6826 - DNA, 874 bp, Zea Mays
ttcccctaaaaatctccagccgtctgtcttgctgctcgttcctgcagctcagacgtcgcctcccttctaccccttgctcctcagccaggcttgttagccgagcccctccaactagcgtgctagacctttgacgccgtttccccgtcgtccaagctccaccatgcccacacgtccgtcctgctcctccatgcacacgcccatgcatccttatctccctggaaacttcactcgtgtacggctccctggtgataatattcagcgatgcttcgccagggcaccgttcccctgcgcgctcgctggacgccgtcgcacatgctccctgctcggcctccccggcgtgctgctccctcgccttggtgcccctgcgagctccttctctctggcccggtttccagctcgggcctcgctagatgccgatgccgcttttctgacctcgtctcgatactcaatcgctgcagcacgccatgccgtgtgtgctgcactgtcatcattcgctatcctcatttttgctaatttttctcgtcgtttctcgtctacaaccttgtcagctcctgcgtgtcgtgcgcgtcttgtgttcgggtcgagccccaggattttgaggaaaaggaagctccagtgcattggccggtgaaatgaataaaatggattttgaagaaaaggaagctccaatgcatcagccggtgaaatgaataaaatggtggtaattatggtccttgtgaaatctgagatcaacttagtcgcgaacagggtctcgctgccgcagaacgttgtcgcagaccgcttcaccgtcgaccctttgaactgcgtcatccccggttaatctcgcgcgcgtaccgacagcttcgaaggagataagtttacctagtgagagttg

SEQ ID NO: 6827 - DNA, 1011 bp, Zea Mays
catgcccctacccagccattcccctaaaaatctccagccgtctgtcttgctgctcgttcctgcagctcagacgtcgcctcccttctaccccttgctcctcagccaggcttgttagccgagcccctccaactagcgtgctagacctttgacgccgtttccccgtcgtccaagctccaccatgcccacacgtccgtcctgctcctccatgcacacgcccatgcatccttatctccctggaaacttcactcgtgtacggctccctggtgataatattcagcgatgcttcgccagggcaccgttcccctgcgcgctcgctggacgccgtcgcacatgctccctgctcggcctccccggcgtgctgctccctcgccttggtgcccctgcgagctccttctctctggcccggtttccagctcgggcctcgctagatgccgatgccgcttttctgacctcgtctcgatactcaatcgctgcagcacgccatgccgtgtgtgctgcactgtcatcattcgctatcctcatttttgctaatttttctcgtcgtttctcgtctacaaccttgtcagctcctgcgtgtcgtgcgcgtcttgtgttcgggtcgagccccaggattttgaggaaaaggaagctccagtgcattggccggtgaaatgaataaaatggattttgaagaaaaggaagctccaatgcatcagccggtgaaatgaataaaatggtggtaattatggtccttgtgaaatctgagatcaacttagtcgcgcagtgacacaccaagataacacgtgttatgtgctctccatcaacaagtgaagctcaccgaagaaggatcattaactctaccggtgtctactgctcagaacagggtctcgctgccgcagaacgttgtcgcagaccgcttcaccgtcgaccctttgaactgcgtcatccccggttaatctcgcgcgcgtaccgacagcttcgaagtgtccccgctgccgaattaaacacgtgtctacgttcaccgtggatcag

SEQ ID NO: 6828 - DNA, 2250 bp, Zea Mays
ttttacatttttttaatctctttccttcctccgcactccgccgcgccggccagtcgtcttgtccccctcgccgcctccgtgctcgtcttgctccttctcggctccccaccccgccacctcgtcccaccccgccccttgggttgagttgagctactcaaccgtcagtcaattcctgcacctggcgttgggcgggttttcatgggggcagcataaaagcctcttcggttcttcccctagctctgcctcgcggcaagtccccctccgctacgttcgccatggctcgcaacagggaagtggtgattttgctgttggatgttgggccttcgatgcatggagtgctgctagagctagtttataacaggagcgatgaagttggtattgtcctctttggtactaaaggtgtgggtttataagaaaacagctgaggaaaaattccccactttgaagaagtattcggacaaagctcctccaaatgataaatttgcttctcatgaagtcaaagttgattatgagtacaagagtgttgttgagccagacaaagttgttccaccagaccaaaggattaaggggtatctctatggtcctcaagttattcctgtatcaaatgctgaatgggaggcagtcaagttcaagccagagaaaggtgtgaagcttctaggatttacagatagatccagcgtaccacggcaccaatttatgaaagatgtatgcctgtttatacctgagccaggtaacatgaaagcaagtcttgcagtttctgcgatagcaagagcaatgcatcaaatgaacaaggttgctatagtgcgatgtgtgtggaggcaaggtcaagggaatgttgctattggtgtattgacgccaaacatttcatcagtgaacaatatccaagattcattttacttcaatgtgctcccatttgctgaggacatcagagagtttcagtttcggtccttcagcagcctgccatcatcatctcagcccactgaagaacaacaagaagctgcagataacctagtgaagatgttagacctagcaccacctggaagagaggtcctcaagcctgagtttacgccaaatcccatcttggagagattttacagttaccttgatctcaagtcaaagcagccagatgcaaatgtcccaccgcttgaaagatctctaaggaggataaccgaacctgatcctgatgtggttggccaacaaacacaattaatccagaatttaagcaaagcttttgtgctgaaggataaccccaagaaaaagaaagcacgaacacaggacatgttggcatatactggtgcaggtgatcaagctaaatctgtagaggacagagttctggaaaatacacatccttcaacagagaatgttgtggcaatcagagattcaaatccagttcaagattttgaggccatgctggctaagagatctagctcaacatggactcagaaggctattggagatatgcagaattacatagcagctttgttacagaactccagtgatgggggcaactatcaaaaagcacttgaatgttttgcttctctgcggaaggcctgtattattgaacaggaaccacaggaattcaaccagttcctaacgaagatttacgagagattgaaggaaggtgatgctgccaagttctttcaacttctctcctcaaaaaacatttcacttatcaacaaagaggaagcgcctgacagtgatgtgactgaagagatggcaagaagtttctacctgaaacgagaaaaggcgtctcagtaggagctggaagaagccggtaactcgaagcgccttgggtttggagggtatctgcatgttttgaaactgggtatctgggtggaactggaactaatactcaaactctctgggttgagtcactgttttgctgcacaatctgctgcctactacgtttcgactagattcagctttgggtactactgtatgttgtttgactggagtagcatgtccatagatcacatacttctgcagtgttcattggagtgaatgcatgcatgcggtgaaatgcagcatggataggtctaggaagaaacattaccatcatttcctaatgttggagcgctgcctagaaaaggatctttttctgtaagtggtctggtgcgtcaaaccctccaaagtccaaaataatcctttctacataacaagtccgatgtgtcattggactgtacgatgagccaggttcggtacaccatggtacaacagactaattctaaacttgggcttcttttctttgtc

SEQ ID NO: 6829 - DNA, 2591 bp, Zea Mays
cagtcgtcttgtccccctcgccgcctccgtgctcgtcttgctccttctcggctccccaccccgccacctcgtcccaccccgccccttgggttgagttgagctactcaaccgtcagtcaattcctgcacctggcgttgggcgggttttcatgggggcagcataaaagcctcttcggttcttcccctagctctgcctcgcggcaagtccccctccgctacgttcgccatggctcgcaacagggaagtggtgattttgctgttggatgttgggccttcgatgcatggagtgctgctagaggtgaagaacgtatgcttgactcttgtgcataagaagctagtttataacaggagcgatgaagttggtattgtcctctttggtactaaaggaaatttggtattaccaaagggaagcggcggctctgtctaatcactggtgcacaagaactgttaagagatccgcctgaggggaccaaagaagatcaggtggacaccattgcaaacatgttgaaaaaacacaatatcaagatggagtgcattattttcagagaaccgggagtgcatcataatgatgtaatggaagaaaatgaccgactattgcatcagttcagaaatagatcagtagcaaaggtagttcaggttgacaacccaacatcactgttgggtgctctcaagacaagaaatgtgctcccagttaccgttttcaggggagatctggaagtgaactccaattttaaaataaaggtgtgggtttataagaaaacagctgaggaaaaattccccactttgaagaagtattcggacaaagctcctccaaatgataaatttgcttctcatgaagtcaaagttgattatgagtacaagagtgttgttgagccagacaaagttgttccaccagaccaaaggattaaggggtatctctatggtcctcaagttattcctgtatcaaatgctgaatgggaggcagtcaagttcaagccagagaaaggtgtgaagcttctaggatttacagatagatccagcgtaccacggcaccaatttatgaaagatgtatgcctgtttatacctgagccaggtaacatgaaagcaagtcttgcagtttctgcgatagcaagagcaatgcatcaaatgaacaaggttgctatagtgcgatgtgtgtggaggcaaggtcaagggaatgttgctattggtgtattgacgccaaacatttcatcagtgaacaatatccaagattcattttacttcaatgtgctcccatttgctgaggacatcagagagtttcagtttcggtccttcagcagcctgccatcatcatctcagcccactgaagaacaacaagaagctgcagataacctagtgaagatgttagacctagcaccacctggaagagaggtcctcaagcctgagtttacgccaaatcccatcttggagagattttacagttaccttgatctcaagtcaaagcagccagatgcaaatgtcccaccgcttgaaagatctctaaggaggataaccgaacctgatcctgatgtggttggccaacaaacacaattaatccagaatttaagcaaagcttttgtgctgaaggataaccccaagaaaaagaaagcacgaacacaggacatgttggcatatactggtgcaggtgatcaagctaaatctgtagaggacagagttctggaaaatacacatccttcaacagagaatgttgtggcaatcagagattcaaatccagttcaagattttgaggccatgctggctaagagatctagctcaacatggactcagaaggctattggagatatgcagaattacatagcagctttgttacagaactccagtgatgggggcaactatcaaaaagcacttgaatgttttgcttctctgcggaaggcctgtattattgaacaggaaccacaggaattcaaccagttcctaacgaagatttacgagagattgaaggaaggtgatgctgccaagttctttcaacttctctcctcaaaaaacatttcacttatcaacaaagaggaagcgcctgacagtgatgtgactgaagagatggcaagaagtttctacctgaaacgagaaaaggcgtctcagtaggagctggaagaagccggtaactcgaagcgccttgggtttggagggtatctgcatgttttgaaactgggtatctgggtggaactggaactaatactcaaactctctgggttgagtcactgttttgctgcacaatctgctgcctactacgtttcgactagattcagctttgggtactactgtatgttgtttgactggagtagcatgtccatagatcacatacttctgcagtgttcattggagtgaatgcatgcatgcggtgaaatgcagcatggataggtctaggaagaaacattaccatcatttcctaatgttggagcgctgcctagaaaaggatctttttctgtaagtggtctggtgcgtcaaaccctccaaagtccaaaataatcctttctacataacaagtccgatgtgtcattggactgtacgatgagccaggttcggtacaccatggtacaacagactaattctaaacttgggcttcttttctttgtc

SEQ ID NO: 6830 - DNA, 2759 bp, Zea Mays
cagtcgtcttgtccccctcgccgcctccgtgctcgtcttgctccttctcggctccccaccccgccacctcgtcccaccccgccccttgggttgagttgagctactcaaccgtcagtcaattcctgcacctggcgttgggcgggttttcatgggggcagcataaaagcctcttcggttcttcccctagctctgcctcgcggcaagtccccctccgctacgttcgccatggctcgcaacaggtggtgattttgctgttggatgttgggccttcgatgcatggagtgctgctagaggtgaagaacgtatgcttgactcttgtgcataagaagctagtttataacaggagcgatgaagttggtattgtcctctttggtactaaaggaacatgcaatgagcttgcaaaggacattgggggctataagcatgtgacggtcatacatgatattaaagttgtagatgaaggaacggcacaggctctgcaaaaccttccattaggatctgcccctggtgattttctggattctattgttgttggcttggatatggtgattaggaaatttggtattaccaaagggaagcggcggctctgtctaatcactggtgcacaagaactgttaagagatccgcctgaggggaccaaagaagatcaggtggacaccattgcaaacatgttgaaaaaacacaatatcaagatggagtgcattattttcagagaaccgggagtgcatcataatgatgtaatggaagaaaatgaccgactattgcatcagttcagaaatagatcagtagcaaaggtagttcaggttgacaacccaacatcactgttgggtgctctcaagacaagaaatgtgctcccagttaccgttttcaggggagatctggaagtgaactccaattttaaaataaaggtgtgggtttataagaaaacagctgaggaaaaattccccactttgaagaagtattcggacaaagctcctccaaatgataaatttgcttctcatgaagtcaaagttgattatgagtacaagagtgttgttgagccagacaaagttgttccaccagaccaaaggattaaggggtatctctatggtcctcaagttattcctgtatcaaatgctgaatgggaggcagtcaagttcaagccagagaaaggtgtgaagcttctaggatttacagatagatccagcgtaccacggcaccaatttatgaaagatgtatgcctgtttatacctgagccaggtaacatgaaagcaagtcttgcagtttctgcgatagcaagagcaatgcatcaaatgaacaaggttgctatagtgcgatgtgtgtggaggcaaggtcaagggaatgttgctattggtgtattgacgccaaacatttcatcagtgaacaatatccaagattcattttacttcaatgtgctcccatttgctgaggacatcagagagtttcagtttcggtccttcagcagcctgccatcatcatctcagcccactgaagaacaacaagaagctgcagataacctagtgaagatgttagacctagcaccacctggaagagaggtcctcaagcctgagtttacgccaaatcccatcttggagagattttacagttaccttgatctcaagtcaaagcagccagatgcaaatgtcccaccgcttgaaagatctctaaggaggataaccgaacctgatcctgatgtggttggccaacaaacacaattaatccagaatttaagcaaagcttttgtgctgaaggataaccccaagaaaaagaaagcacgaacacaggacatgttggcatatactggtgcaggtgatcaagctaaatctgtagaggacagagttctggaaaatacacatccttcaacagagaatgttgtggcaatcagagattcaaatccagttcaagattttgaggccatgctggctaagagatctagctcaacatggactcagaaggctattggagatatgcagaattacatagcagctttgttacagaactccagtgatgggggcaactatcaaaaagcacttgaatgttttgcttctctgcggaaggcctgtattattgaacaggaaccacaggaattcaaccagttcctaacgaagatttacgagagattgaaggaaggtgatgctgccaagttctttcaacttctctcctcaaaaaacatttcacttatcaacaaagaggaagcgcctgacagtgatgtgactgaagagatggcaagaagtttctacctgaaacgagaaaaggcgtctcagtaggagctggaagaagccggtaactcgaagcgccttgggtttggagggtatctgcatgttttgaaactgggtatctgggtggaactggaactaatactcaaactctctgggttgagtcactgttttgctgcacaatctgctgcctactacgtttcgactagattcagctttgggtactactgtatgttgtttgactggagtagcatgtccatagatcacatacttctgcagtgttcattggagtgaatgcatgcatgcggtgaaatgcagcatggataggtctaggaagaaacattaccatcatttcctaatgttggagcgctgcctagaaaaggatctttttctgtaagtggtctggtgcgtcaaaccctccaaagtccaaaataatcctttctacataacaagtccgatgtgtcattggactgtacgatgagccaggttcggtacaccatggtacaacagactaattctaaacttgggcttcttttctttgtc

SEQ ID NO: 6831 - DNA, 2157 bp, Zea Mays
ctccgctccacaaccttcttaattttctgaagcttgggcgggatctcggctcgcctccgtccatctctatggcgccacggggccaccacctggcggaggtggccctcctcgcctctgcttcggcggacctcgcagccgcaggcgccggcgagagggaggggtggttggacgaccccgccatcctcccctcgctcgggccccgcgcgcgatctctcgccgtggccagcgcggcgcactccgtgctcgtgatcgtcgcggtggcgggaggtggaggcggcggggtcacggtggagcctgcgctggggcccgacgagggccgaatctccgccgttgagtgggtcccgttcgccggggaggacgatgcagagggggaggagggggtgtccgtggtgatcggcacggacgctgggtggctactgttctactcgctcgcaggcgatctattgcacaagcagagtatatatcctgcaaagatactgaaactcaactttcgtgagaggaaggagaacgcttgggaagattcaggctcagatgaactttctgtagtgtttcctggtgttatcgcgcgctttgatggtgctgaccttcagaacgttcttaaaaaagcatttcaagatgtaaaatcacgcctgtggaaagataagtttgaagagcaagatgctgaggatgaggaaacttttggacgaataccctttcagatttggaatgtaaacaagttcagttcatgcgctgatgctgcaattgttggtctgatgccacctcccttgttagaacttcagctgcttttatattgctgggcagtcaagtcagcgccactactgtgccatcacagttggagaggatgctgtagtttcagcatatagaagatagaaccaggtcaattgttggagcaattttgtcaagaggtgtagctgcaacattttcgacaatatcatctttgtccaaaatactatggcggagtgagccgtcaccacctaaaaagtcacggccaaagccccaatcctttgcaaaaacatcacccctcacctgcttgaaagactccccaaggaaaggagaacggcttacactctctccgagtggtacgctggctgctataactgattcacttgggcggatactactgctggacacccatgcgcttgtggctgtacggttatggaagggctatcgtgatgcttcatgtctatttgtggaaatgcttctgaacaaagacaaggcttcgtcagggtcgatgcacatagagtatacgaagagtgactattgtttgtgtttagcaatccatgccccgcgaaaaggcataatagaggtttggaagatgcgcaccgggtcacgcctcctaaccatcccatgccccaaaggaagcaggatcttacaaccctcagcgaggctctctacgtcgtcgttctcaccttcgtattccccgctggaggtttacctgttcaatggagactctgggcaattgtcagttttgaataggcacatcggatgaatcatttgttcctttgttgtgttattaaattgttactgccaagtgttgtagagaattacttgtttcagtgtttacagttttgttaatcaagaaaaaaaagtgcgtgggtcaggattgaacaaacagagatgaaattgggcggatggataaaccagaagcagacatgaatgcgggaggggagtggcaaaaaaaaaaaaggagagtaatcttggcaatagatacaggtttccttttacctctcttatttccagcccgtggaaactaccaaaatataccctaccccttatggcctcatctctttattaccatgaatgggaacacaactgaagacctaccagagtctggagactttctcacgttcgtctctccctcgcttggccttgagcatcgccgggggaagatgtaggcgaccggaacaggggaatccctcctgggtaaggttgctgtcagcagtccctgatccttctctttagaatgtgttttgtacagctgtgagttttgaaacaaagctgatgtgatctgtctgctatgaaaaagttgttgagtgttgtaaaagagctaaaaattatttggttcaaacggctgagtgaattgtctataaataaattgtatatcgtttatatacaattttgttcaactatctcttaattaatgtatcgaataaaaac

SEQ ID NO: 6832 - DNA, 2174 bp, Zea Mays
gccttcctcgtcgaatcgcgcgcatctccgctccacaaccttcttaattttctgaagcttgggcgggatctcggctcgcctccgtccatctctatggcgccacggggccaccacctggcggaggtggccctcctcgcctctgcttcggcggacctcgcagccgcaggcgccggcgagagggaggggtggttggacgaccccgccatcctcccctcgctcgggccccgcgcgcgatctctcgccgtggccagcgcggcgcactccgtgctcgtgatcgtcgcggtggcgggaggtggaggcggcggggtcacggtggagcctgcgctggggcccgacgagggccgaatctccgccgttgagtgggtcccgttcgccggggaggacgatgcagagggggaggagggggtgtccgtggtgatcggcacggacgctgggtggctactgttctactcgctcgcaggcgatctattgcacaagcagagtatatatcctgcaaagatactgaaactcaactttcgtgagaggaaggagaacgcttgggaagattcaggctcagatgaactttctgtagtgtttcctggtgttatcgcgcgctttgatggtgctgaccttcagcatttcaagatgtaaaatcacgcctgtggaaagataagtttgaagagcaagatgctgaggatgaggaaacttttggacgaataccctttcagatttggaatgtaaacaagttcagttcatgcgctgatgctgcaattgttggtctgatgccacctcccttgttagaacttcagctgcttttatattgctgggcagtcaagtcagcgccactactgtgccatcacagttggagaggatgctgtagtttcagcatataggttatcagaagatagaaccaggtcaattgttggagcaattttgtcaagaggtgtagctgcaacattttcgacaatatcatctttgtccaaaatactatggcggagtgagccgtcaccacctaaaaagtcacggccaaagccccaatcctttgcaaaaacatcacccctcacctgcttgaaagactccccaaggaaaggagaacggcttacactctctccgagtggtacgctggctgctataactgattcacttgggcggatactactgctggacacccatgcgcttgtggctgtacggttatggaagggctatcgtgatgcttcatgtctatttgtggaaatgcttctgaacaaagacaaggcttcgtcagggtcgatgcacatagagtatacgaagagtgactattgtttgtgtttagcaatccatgccccgcgaaaaggcataatagaggtttggaagatgcgcaccgggtcacgcctcctaaccatcccatgccccaaaggaagcaggatcttacaaccctcagcgaggctctctacgtcgtcgttctcaccttcgtattccccgctggaggtttacctgttcaatggagactctgggcaattgtcagttttgaataggcacatcggatgaatcatttgttcctttgttgtgttattaaattgttactgccaagtgttgtagagaattacttgtttcagtgtttacagttttgttaatcaagaaaaaaaagtgcgtgggtcaggattgaacaaacagagatgaaattgggcggatggataaaccagaagcagacatgaatgcgggaggggagtggcaaaaaaaaaaaaggagagtaatcttggcaatagatacaggtttccttttacctctcttatttccagcccgtggaaactaccaaaatataccctaccccttatggcctcatctctttattaccatgaatgggaacacaactgaagacctaccagagtctggagactttctcacgttcgtctctccctcgcttggccttgagcatcgccgggggaagatgtaggcgaccggaacaggggaatccctcctgggtaaggttgctgtcagcagtccctgatccttctctttagaatgtgttttgtacagctgtgagttttgaaacaaagctgatgtgatctgtctgctatgaaaaagttgttgagtgttgtaaaagagctaaaaattatttggttcaaacggctgagtgaattgtctataaataaattgtatatcgtttatatacaattttgttcaactatctcttaattaatgtatcgaataaaaac

SEQ ID NO: 6833 - DNA, 1405 bp, Zea Mays
tttgttttcatgacatgtgattttgtattaaatgggtgcacatcaaatacaaattggccactaggtacatttacagcaagcagctgaagtgaaaagaatagttgagtgggtcatgggaaaccttgatggaacgttaggtgttgatgctagtaatcctacgttacaacatggtggtacagttattcctgatacccaagaaaatgactcttcaagaggctctaatactcttacacggagtacttccaagatcccatttgtccaaggaaaaacaaatgatttttccattataaattcgttaaagaatgttcgggctgatgtcttgagagagaacactgaagcagttttcgcggcttgtgatgctgcccatggacggtgggctaagctgctaggtgttcgttctgctttacatcccaggttaaggcttcaagaattcttgatcatctacaacataacagaagaatttatagctgctacagaaaagattggaggcaggttgggttacaacattcgtggaatcctacatcaacaatcgaagcaattcgttgattatcagcataatgttcggatgacaaaaatcaaggcagttctagatcaagagacgtgggttgctgtggatgttcctgaagagtttcaagcaatcgttctttcactttcatccacttattcttctgttaatggcatggagatgcctagcactgatgataactcaaagtttagtgatcatcggtctacaagtcaagaaccgacatattcagctaaaaatattgctgataatggcaaagtaacatccgggactggtgaaaacaaggttgaattcacttcacagactgaaaataatgttgccgggaatctaaagtccaccttgcaaacgattgtacatggaggtgttggctatcatatggtaaactgtggtttaatactgttgaagatgttatccgaatacgttgacatcagtaaatgtttaccatcactatctttggaggtggtccaacgtgttgtggaaatattaaagcttttcaacactaggacttgccaacttgttctcggtgcaggagccatgcaggtgtctggacttaaatcaattacgtccaaacatttagctttggcgagtcaaatcattagttttatgcattctttaattccagatatcaggcgagtacttttcctgaaaatacctgaagcgcgcaaacatctgttaatgtctgagctggatagagtagctcaggaagttacctatttgcatcgcattctttcccaaacattgcttgaggttgaggtgcaaacaatattcaggcaagtggttcaaatattccattcacatattacagaagcattttcaaaattggaagtcaatactccctctggcaaagaataggtatgctgcttatttgtgcatcttttagca

SEQ ID NO: 6834 - DNA, 1349 bp, Zea Mays
gaaacacatcattactttaagatgggccggctcaggttagtgggcatcaacccatttgcctgcactagtagacagatttctcagaagccgcggccgtcacgcgtcagacccacgcagcgcaccttctcttctccgccgcgtcgccgccgaacatcagcatcggatcgatggagggctgggacaaggggaccaagagcacggtgggcgagatcccgctgctgtcgacgcgcgcgggtccgcgggacggcgaggcgtggcggcagaggctcaaggaggagtaccgcgcgctcatcgcctacacgtcggtgaacaaggccaaggacaacgactggttccgcatcgccgccgccaacccggagggaacccgctgggaggggacctgctggtacgtccacaacctccgccgctatgagttccctctccagttcgacatgcccgtcgcctacccccaggtcgcccccgagatcgagctccccaccctcgacggcaagactcacaagatgtaccgcggtgggaagatctgcctcaccgtgcacttcaagccgctgtgggccaagaactgcccgaggttcggcctggcgcacgcgctgtgcctcggcctcgcgccgtggctcgcggcggaagtcccgattctggtcgactcgggcatggtgaagcacaaggatgacgaggcggctccggctgaggcatctgcctctgctgctcctccttcgtagttgccacttgcaacaactgagtgtccggcgatgcctaggcgtcgcctaggcgtccaggtgcccgaaagatccaaggcgtccccgtcgcctaggtaagaagcagcaagagggcatagggcagaggggaaaggaaaggggcggcactgtttcagggtggcagcgccgaatcgggagcggcggaggccaaatccagggcggcagagaacaaatccagggaggcggaggctgaatcggcggcggcagcgtccaaatcgtcggcggcggcggcgaatctgaggcggcgacggcgaatctaaggcggcggcggcgaatctgaggcggcgacggcgaatctaaggcggcggcggctcaatcgggggcagcggcagctgaatggtgggggagagaggcaacctagggttgccagaggaaggattatatgggctggctggtgggctgggtctcctaccccttccttctccttttttcttttttttttctttttcttcctcctccatggggctgttttgctgattctcaggttgataaggcgtcgccttgctcgccttaggcgtcgcctaggcgtctaggcggtggtccggcgccttatctcgccttaccgccttaagaaccatggtttgatatttatataaa

SEQ ID NO: 6835 - DNA, 2521 bp, Zea Mays
gcggccccaatcccattcgctcgtccccctccgcgcttctttcctgggaactgcaactacaaccgcaatgttggtggaggtagagtcgtagagactagagagtcacacacgctcgctgctgcctctccttcctctcctcggcaagtgagagaggtgtgaaccgacgaggaagagcacccatccccactgcgcatcctcgattcgattccgtccccttgcctcttgcctcttgggcgtctccgcggctagatggcgtctccccctcccttcgacctctgcggcgatctcgacgacgacgacatcgatgaacccgtcaccgccgtccccaaggatcgccatctccctgccgccgcccctacgccgaacggcctcaacgaccacctcctccgcttcacccgcagcctccagcgccccacccaaaaccctaaccctagccccaatccgccaccgcctccgcccccagccgccgccgaagaacaagtcgagaaggtcaagctcgccggccgccgccgcctatgcaagcttgccaccaccaccaccgccactcagcgagtggatgaagaggaggcggagtgggacaaccaggacgacggtgaaagcatactcgacatcctagacgacctcaccacacgatttgactctctatccgtccagaagcccagcaccgccgcgaggtccaggacacaacagctcacccctttgccgtgcgccatcaccgtggacgacgacctagatgaccatagcccagatgatgtggatgctcacgccggtgcctcctcaccccttcaaatttctagctctgatgaagctagggctcccaccagacgctccgaggtcaagatcgaaactgatttagtctcctcagcctgtacccattatgcctgtgatgacgtccgtggcaaggggaagaacaaagggaccaccaaggatgttgggaggctaaatagggtatcaaaggcctcatcctttgttgattcttattccgattctgattatgacgactgcgaggaggaccaaggaacaagaacagattatgctgttaagcagctaagaagcaagggattcacaaggagaccacccaacaccccaacattcaggaaccatggtgtcagcgacgatgagctgggtcaggagaaggagaaccttggagctgtggagaacaatgctgaggatgttggatgggagaagacagaggacttcaagatggatccaactggaactgctgcaacatccaagccatacaagctcccaggaaagatattcaagatgcttttcgcccaccagcgcgagggcctccgatggctctgggttctgcactgcaggggaacaggaggaatcctaggggatgacatgggtcttggcaagacgatgcaggttgctgcatttttggctggactgtttcattctcgtctagtcaagagggtgctcattgttgctccaaagacacttctggcccattggacaaaggagctttcaattgttggccttaaagaaaagatcagagactactctggccccagcacaaatattcgcaattatgaactccaatatgccttcaaggagggtggtatcctcataaccacctatgacattgtcaggaacaactacaagctcataagaggcaactcctacaacaacagcaatgatgatgatgatgaggaaggaactttgtggaattacgtaattcttgatgagggacatctaataaaaaataataagacacaaagggcccaaagtttgtacgaaataccttgtgcccatcgcattgtgatcagtggaacacctattcaaaataacttgaaggaaatgtggactctgttcaatttctgttgcccagatgtcttgggtgataaacagcagttcaaaataaggtatgaaacggctatccttcgaggaaatgacaaaaatgctaccgctcgagagaagcacgtaggctcaaatgtagcaaaggaactaagagagcgaatcaagccatactttttgcggcgcctgaaaagtgaagttgtctttgatactggtgcatcagaagaaaaaacattagccaagaagaatgagctaattgtctggctgaagttaacaccatgccagaggaaactatatgaagcttttctaaatagtgagctggttcatttagcattgcagccaaaggcatcaccgttggctgcaatcacaatattgaagaaaatatgtgatcatccactgctattaactaagaaaggtgctgagggtgtgttggaaggaatgggtgaaatgttgaatgatcaagacattggaatggtggaaaaaatggccatgaaccttgcagatatggctcatgatgataatgcactggaagttggtcaggatgtctcatgcaagctatcattcatcatgtccttgttgcggaaccttgttggagaggggcatcatgttttaatattttcacagactcgtaaaatgctaaaccttattcagattgcaagctgaagtgtaacatcacatcctgttctttcagaaaaagtttgggtgccctttaatcttt

SEQ ID NO: 6836 - DNA, 1066 bp, Zea Mays
gctttactagcccagcccaccaaactgcaggcaagacggacacaaacacgaagcccaagtagaaacagactgcacccctttttcccaaacgcccctgaacaagacaaggcccagaaaaaattcagcaaacaagcaaagcacgatggcccgctacgaccgcgcgatcaccgtcttctcccccgacggccacctcttccaggtcgagtacgccctggaggccgtccgcaagggcaacgccgccgtcggcgtccgcggcacggacaccgtcgtcctcggtgtggagaagaagtcaacccccaagctccaggactccaggtccgtgcgcaagatcgcgtgcctggacacccacatcgctctggcatgcgcggggctgaaggcggacgcacgcgtgctcatcaaccgcgcgcgggtcgagtgccagagccaccgactcaccgtcgaggaccccgtcaccgtcgagtacatcacccgctacatcgctgggctgcagcagaagtatacacagagtggtggagtccgccctttcggcctctccacactcattgtcggcttcgacccctacaccgacaagccagcgctgtaccagaccgatccttctggtaccttctctgcttggaaggcgaacgccacgggaaggaactccaactctatgcgtgagtttctggagaagaactacaaggagacctccggcaaggagaccatcaagcttgctattcgtgcacttctagaggttgttgaaagtggtgggaagaacatcgaggttgcagtgatgacaaagaaggatggtctccgggaacttgaggaggctgagattgatgaatatgttgctgagatagaggcagagaaggctgcagctgaggctgcaaagaagggtggtcctagggacacctagtccctgtattgtgtcgttctgatgcaggaagcaacgaacctgggctccgttcctcatcatgcagtccaccacctgcctgcgtctctcattacggaatctgggactggaggaggctgttgggccgtagctatccatccgctgggcactccgtcccacccttcattacaacacgag

SEQ ID NO: 6837 - DNA, 2540 bp, Zea Mays
agtaccctactgcttccatcaaggagaactgcaactggaagcgggtgcgagcgactgcgatccggacgaggggagggacctgtccgtaatttcggaaaggagcctgggggagaatgccgatagacatgccgcggggtctccccttcgccgtcgacacgtgggggtcctcctcccgaagccggcgccaccgcttccttacccacgcacaccgggaccacctcgtcggcgccggtgcggacatcgatgggggagggatcgtctacgccactcgcctcaccttgcacctcgcacttcgccactttccccagttggggagttgggagttcgtggagatggaggtgggaaggacgttggtggtggatgatcccgtcggcgccttctctgtcaccacgtacgacgcaaatcactgccctggggcagtcatgttcttgtttgagggtcaatttggtaccatacttcacacaggggactgtcggcttacaccagattgcgtacagaatttgccaatgaagtacataacaaagaaaggaaacgagaacatttgccgacttgactttgtattcctagattgcaccttctccaaatgcttcctcaagctaccgagcaaggactcagcaatccgacagatatactagttgaggtgtcaaggactttcggaacaaaaatttacgttgaccggaaattggattgttttaaagcactctcactgacagcccctgaaatcatcactgacgattcatcttctcgctttcagatggttgggttccaccaattacatgatagagcaagcaaagagcttgcagaggcaagggcaaatctccaacctgaacccttatttattcgtccatcaacacaatggtatgcaacctgtgctcgaagcccgaaacccagcctaacagaagctgagcaggatgagcttggcatctggcatgtttgtttctccattcactcctctcgtgatgagttggagcaagcactacaacttctccaacctcactgggttatttcaacaactcccccatgctttgccattgagctgagctatgtaaagaaacattgtttcaagacccgcttaacagctgatgatccactctggaaaatattcagagatcctctgggaaagtcagtgtcctccccttgttcagtgcttgcgacacagacagatgaaaataactcaaattttgttgttgatgatgaccattcttcttcctctagcgatggatgcacatacttaaatgtaataagcactcttgaactgaaatttgtgccacctcaaccacctgaagaaccggacattacattgtttggaagagcaaggtttgcctctcaagcaattgactttatgaaagaagattacattgccttagaagaagccagggcatgtgcaccaacagattcggttcatggcagtagtgaagaagtcgaaacatattctggaatggatttcggtgtgaaacaaccaccagcctcccagcaggatctcatggaagttggagatgatgtttctttcaaaaaagttggagatgatgtggattcctgtaagcatgaagtaacctcaacacaattagaagggtttcgagtcaagtcattacctactgttcaaagcaatatgttagtggtgtctgatcaacttgaaaggtcagaagttgtaggagagtcaaaattattgaaatccacggaagacttaaaccttaccattgtcagaagtgcagaaagaactgattgtcaaaaggaacctttgtgctatattggatcatcgaaatgtttgaatgcaagtttgaagaggttttacaggtcaaggaatatccctgttcctagacctcttccatcgcttgtcaaacttatggagtccactaaacgggtcaaaatacaaccaaatactaattatactttgttgaactcacgacacagcttaccctaatgaatgattgagcttatacttggcatattatgatagccaaaattttcagatttatgagtatatgaatggattatttctgaagaggacacctgtatattggttattgtgataaccaaaatactcggattctattgggtatacaggtatacttggactggttccgaagaagatacctgtttagtattgatccagatccacacttatacaggagctttgtacgattctcaaactgttgtacagaaaattgatgtaattacatgatgactctattggataatccgaagtgtattattcttctgcaatactagctaggcatcgtatgatgtcaaatatattctcagcaagttcgctttacgacttgatttactgaatatcatgatattctggcgtggatctatattgcttctgattcataattgtttgctgcaggagagtacataatatcttctagttcactaatgcataattttatacacaaagcagtgtcgccatggcatgacccttcaatccgaaaatacagattcatcacgcgacaagtcccgatgctactaggaattaaatcgtccagggcttaacagggcataaacttaaaaaaaatcgaaaaggagctaaaataaaa

SEQ ID NO: 6838 - DNA, 2631 bp, Zea Mays
agtaccctactgcttccatcaaggagaactgcaactggaagcgggtgcgagcgactgcgatccggacgaggggagggacctgtccgtaatttcggaaaggagcctgggggagaatgccgatagacatgccgcggggtctccccttcgccgtcgacacgtgggggtcctcctcccgaagccggcgccaccgcttccttacccacgcacaccgggaccacctcgtcggcgccggtgcggacatcgatgggggagggatcgtctacgccactcgcctcaccttgcacctcgcacttcgccactttccccagttggggagttgggagttcgtggagatggaggtgggaaggacgttggtggtggatgatcccgtcggcgccttctctgtcaccacgtacgacgcaaatcactgccctggggcagtcatgttcttgtttgagggtcaatttggtaccatacttcacacaggggactgtcggcttacaccagattgcgtacagaatttgccaatgaagtacataacaaagaaaggaaacgagaacatttgccgacttgactttgtattcctagattgcaccttctccaaatgcttcctcaagctaccgagcaaggactcagcaatccgacaggttgtcctccgtgctgtggttatatcttgcatatggaaacatctgcatgcaccatttgtcttccttgcttgtgatctgcttgggcatgaagatatactagttgaggtgtcaaggactttcggaacaaaaatttacgttgaccggaaattggattgttttaaagcactctcactgacagcccctgaaatcatcactgacgattcatcttctcgctttcagatggttgggttccaccaattacatgatagagcaagcaaagagcttgcagaggcaagggcaaatctccaacctgaacccttatttattcgtccatcaacacaatggtatgcaacctgtgctcgaagcccgaaacccagcctaacagaagctgagcaggatgagcttggcatctggcatgtttgtttctccattcactcctctcgtgatgagttggagcaagcactacaacttctccaacctcactgggttatttcaacaactcccccatgctttgccattgagctgagctatgtaaagaaacattgtttcaagacccgcttaacagctgatgatccactctggaaaatattcagagatcctctgggaaagtcagtgtcctccccttgttcagtgcttgcgacacagacagatgaaaataactcaaattttgttgttgatgatgaccattcttcttcctctagcgatggatgcacatacttaaatgtaataagcactcttgaactgaaatttgtgccacctcaaccacctgaagaaccggacattacattgtttggaagagcaaggtttgcctctcaagcaattgactttatgaaagaagattacattgccttagaagaagccagggcatgtgcaccaacagattcggttcatggcagtagtgaagaagtcgaaacatattctggaatggatttcggtgtgaaacaaccaccagcctcccagcaggatctcatggaagttggagatgatgtttctttcaaaaaagttggagatgatgtggattcctgtaagcatgaagtaacctcaacacaattagaagggtttcgagtcaagtcattacctactgttcaaagcaatatgttagtggtgtctgatcaacttgaaaggtcagaagttgtaggagagtcaaaattattgaaatccacggaagacttaaaccttaccattgtcagaagtgcagaaagaactgattgtcaaaaggaacctttgtgctatattggatcatcgaaatgtttgaatgcaagtttgaagaggttttacaggtcaaggaatatccctgttcctagacctcttccatcgcttgtcaaacttatggagtccactaaacgggtcaaaatacaaccaaatactaattatactttgttgaactcacgacacagcttaccctaatgaatgattgagcttatacttggcatattatgatagccaaaattttcagatttatgagtatatgaatggattatttctgaagaggacacctgtatattggttattgtgataaccaaaatactcggattctattgggtatacaggtatacttggactggttccgaagaagatacctgtttagtattgatccagatccacacttatacaggagctttgtacgattctcaaactgttgtacagaaaattgatgtaattacatgatgactctattggataatccgaagtgtattattcttctgcaatactagctaggcatcgtatgatgtcaaatatattctcagcaagttcgctttacgacttgatttactgaatatcatgatattctggcgtggatctatattgcttctgattcataattgtttgctgcaggagagtacataatatcttctagttcactaatgcataattttatacacaaagcagtgtcgccatggcatgacccttcaatccgaaaatacagattcatcacgcgacaagtcccgatgctactaggaattaaatcgtccagggcttaacagggcataaacttaaaaaaaatcgaaaaggagctaaaataaaa

SEQ ID NO: 6839 - DNA, 1808 bp, Zea Mays
aaagaaatgttcggcacctagtataggttaagttgccttttcgattctcagaaaaagactggctctgcactcggataattttaaaatggatagtgcacagcagcccactggggaattgaacaattcgttcgatactcttatggtttctggaggtgaccagagtcgacagcctcaggatgctggcaatgaaacgagcttcacgaattggaaagacctccccatggagctgctcctgcgtatcatttcactagttggagatgacaggatagtcattgtggcctccggtgtatgcacaggatggcgtgacaccttggggtggggggttgcaaatctttcactatcatggtgccaggaccgcatgaatgacttggtgatatcactggctcacaaattcacgaagctgcaagttctatctctacgccagatcaggcctcagctagaagacagcggcgtggaggccgtggcaaaccactgccacgacctgcgcgagctggatctcagcagaagcttcaggctgagcgaccggtccttgtacgccctggcgcacgggtgccctcagcttaccaggctcaacatcagcgggtgctccagtttcagcgacgtggcgctcgtgttcctctccagccagtgcgggaacctgagatgcctgaacctgtgcgggtgtgtgagggcggcctctgacagagcgctacaggtactttcgtttgctgcagccttggtcgcttgagctcgcgttgatccctgctgttttggtggtgtgtcctgtcctgtgtaggccatcgcctgttactgtggccagctgcagtcgttgaacctgggctggtgtgatggcatcactgacaagggggtgaccagcctggcttcgggatgccctgaactcagggccgtcgacctgtgcggctgtgttcttataacagatgagagcgtggttgcgctggcgaacggctgccttcacctgcgctccctgggtctctactactgccagaacatcacggaccgcgccatgtactccctggccgccaacagccgcgtgaggagtcggggccggggctgggacgcgacagcgaagagcggcggcggtggcaaggaccgggagcgggacggactggcgagcctgaacatcagccagtgcacggcgctgaccccgcccgcggtgcaggcggtgtgcgactcgttcccggcgctgcacacgtgcccggagcggcactcgctcaacatcagcgggtgcctcagcctaacctccgtgcactgcgcctgtgcgctgcaccctcaccgggccgggcgagtcatcctctccaaccacgcctactgaacgcaatgcgtgaataggcggcgatgctcagatgtgtggataggccgttcaaccgtgagcgacggtgtccgctgtttatgtgaggtgcttgttttgtgtttaggcgtcaaggcgtgtacttggggtctctactctctagggaaccgtgtagaagcaaccgagttgagttcatcgtctgtaaaaacatggactgtatctgactatctgttgtcatgtcttttgagatctttagcctggactctggagcagcgcggcgacggcgatagccactcctttggtgggggctctcagactatctccaaaccctatcatactcttatttctatcctgttcgtttagtttaatccatatcggtttctactatagaggaacaaacagtcaaacgaacgagaacaaacagtctgtaaaagcagtctaaacagtcagctttagaaacgaacagtgttacagtttatttatagtgtaaaacagcctgcatgcatttgctggagttggc

SEQ ID NO: 6840 - DNA, 3120 bp, Zea Mays
cgtcgccgtttcggtctccggaaaggaaagcaaaagagaaggagggggcgagagaagaaactgatttttggcgaggccaagccgggggtgggattaccgggagcacgctgactgggatcacggcggatggcggcggcggataggcagttggtagttgccgtcgaggggaccgcggcgctggggccctactggtccaccattgtggcggagtacgtcgagaagatcgtgaggagcttttgtgcaagtgaactgccaggccagaagcttgtgggtactccgcctgaacttgcattagttgtttttcatacccatggaccttacagtgcttttgatgtgcagcgaagtggatggacaaaagatgtcgatgctttcctatcatggttatctggaatattgttcagtggtggaggattcagtgaagcttctacttgtgaaggtcttgctgaagcattgaagatacttcaaggcaatcctaatacaacccaaggtcatcaaaaccatgaagcacaaaagcattgcatacttgtcgctgcaagtaatccttatcctctgccaacacctgtatactgtcttcctactcaaagtactgatcacaaagagaacattgagacatcaaaagaaccttcaattgctgatgctgagaccgttgcaaagtcatttgctcagtgctctgtctcattgtcagtgatatctccaaaacagcttccaacattaaaggcaatatacaatgcgggcaagcgaaatcttcgggctgctgatccatcagtcgaccatgcgaaaaatccacacttccttgttttgctctctgagaatttcatggaggcacggactgctcttagtcgccctttacatggaaacttggctccaaatcaaaccataacgaagatggacacggcacctgcagtgactatgccaggaccaacatcaaatggcaactcctcagtgaatgcaatggcaggccgtcaaccaattgttggaggtatttctaccacatctgttaaagtggagccaacaaccatgccaccgatagtttctgcacctgctttctcgcatgtaacgcctatttcaaatgtggcttcacaaggaatatcagcactgcaaacctcatcaccttctcttatttcacaagaagcaaatatgggaaatgataatgtacaagaacacaagcctataataaacccagttcaacaaccgattcggcctggtggtcatggcagcctcctcaacaatctgtcacaggttcggttgatgaactcaacttctttaggaggaggagctacctcgatgggactgcctaacatgggagcaacaccaatacaagtccacatgtcaaacatgatatcaagcggcatgacatcaacaccctctgtcatctcctctatgtctggacctggacaacctattagtactcaacagatggtacagagcacagctcttggttcgtttggctcaaacactcctactgttacaggcaattcaactattgctgtatcatcctctttgactaacaaccaaagcagcatgggcatgggtcaatctgtgcaatctgtggcacagggaggcttggtgtctggttcacaattaggacaaggtggaattgttgcaaaccaaaatgtgatgagcacccttggacctacagctatctcttcaacgcctgcgatgatgccgacacctgggatggtcccacagacaggagtcaattccttaggtgtgaataacaattctgctatgaatatgcctattacgcagcagcatgccaatgcccaacagccgccaccaaaggaactttatctggccaaaggcaaggacagcctgtaataatttgtaaactcgaaggttataggagtggaacagcgtctgaaacacttgcagcggactggccagaaacaatgcagattgttcgcctcatagcccaggagcatatgaacaacaaacaatatgttggcaaggcagactttctagtttttcggactttaaatcaccatgggtttcttgtacaactacaagagaagaagctgtgtgctgtgatacagttaccatcgcaaactctgttgctgtcgatggctgacaaagcaggtcgtttgattggcatgctcttccctggggacatggtggtgttcaaaccgcaggcctcaactcagcagacaccaatgcagcaacagcagctacagcaatttcaacagcagcagcagcagctgcaacaacacatgcatatgcagccgcaaggcctcccacttcagcaatcacagatgcaactccagcaacagcagccgcagatgcaaccgatgcagcagcagcaaccttcgcagatgcagcagcagatgcaatcgatgcagcagcagatgcagccaatgcagcagcaaatgcagcatcaacagcaacagatgcagcatcaacagcaacagatgcagcaaatgcagcagcagcagcagcaacaacaacaacaacaacaacagatacagcctcagcagcaacagatgcagcaaatgcagcagcagcagcagcaacagatgcagcctcaacagcaacagatgcagcaaatgcagcagcagcagcaacagatgcagcctcaacagcaacagatgcagcaaatgcagcagcagcagcaacagatgcagcctcaacagcagcagcaaccccagatggtgggtacaggaatggggcagcagttcatgcaggggcacaatcgggcagtgcagatgatgcaagggaagattacgccacaggggccgggcagcatgcctgggggaggcttcctaccttaagcaccttttatcagcaggcatcagatgaattgagggtttacactgacccaagtgttgagatgtcaacttcatttgacagggttagggaatagtcactcggggagtgttgctaaaacttaatctgaaaacttaagcatccctgtcaccgataggtaaatgccagatgtccatgcataggtgcatactttatgatatggtggtgtactcgtaatcttgagtgactttatggcattgttgtactagccgtaaactattaggtataacagaattattatttaaactacagtaaaataagtgacctgtgttgtttagggtttaaatggtacgttaaataggtagttgaatcatttaagca

SEQ ID NO: 6841 - DNA, 819 bp, Zea Mays
gcacccgcacccgcacccgcgcgccgtccctgtctctatctgtctgtgtcctgctgcagtgcctccggctcgcgtggcagcttggggccaggtgcgtgttgtgcacttttcttccgtcgtgcccgcgcgcgcgctgcctcgctcctctccccccctgctggccttgccctcaccacctgctggggagcagcacagtagtagtacatacagatacaggtcacgacacgtgcggcgcggtcatccatggcgtcgtccgcctccacgacgtcgggcggcgacgagcgcccgcgcgcgcctcacgccgacgcgtgcgctgggacggcgccgccgcaggcgcacgtggagtgggccgcctcgatgcaggcctactacgccgccggtgggcagccttacgcctggcacgccgcgcagagtgtgccctacccgactcccgagccggtggcggtggcggaagcgaagatcaagaggaagagctctggcgccctctctggcggttgcacttccggaagtgccggtgggagcgagggctcatcagataaaagagatgctacccatcataaggtattaccttctgtaaggaggagaaagtccagcggcgccaatgtacaaggtgagccatcgcaggctgcgacagctcaacatgctgcagctgagtcacgagtcacagcaaaaaagaggcccgcaacagaactctcggtttcgacacctgagatagctggaacctccaatgtcattgtcaggccgaacttgaacattgggatggacctttggactgattctccagttaaagcagagacctctggacagggtgaaataaat

SEQ ID NO: 6842 - DNA, 1598 bp, Zea Mays
caggtatgcgtaaatggctttctgtgaccacctcggagtggcatggcacaaattcctggtgctcgcactggaatattctgtagcaaccttgagcaaatacatatatgttcgtgataatgcacacacgatctgccgaaaacacaagtgcaattttttccctgaaggctttccaatttttgacactttttgctacatttatggtacagccactagttttctctatcaagtatacttatattatgtattaaggtcacagcagcttcgcttatattatgaactcacattcacctttgccttccagctaagatggcgaaactgaaggagttgttgcaaaagagtgaaaaccacatttgtgctgactgtggtgcatctgatcccaaatgggcatcagctaatattggggtattcatttgcgtaaaatgttctggcgtccatagaagtctcggtacacatatttcaaaggttctgtcagtgacactggacaagtggtctgacagtgaagttgactccatgatagaagttggtgggaattctcaggcaaacgcaatatatgaggcttttataccagagggctaccagaagccacattcagattctacccaggaagagcgagaaaaattcatcaggtctaaatatgagctgcaggaatttctgaagccaagcttgcgcattgtttctcatcagcctagtgactctggaaaacatgccggaaatgcttctcattctgatggttccaagagtcaagtcggcatgatcgagttcattggaatattgaatgtcaaggtgattggaggcaccaacctagccatcagggatatgtcaagcagtgacccttatgtcgtcctgacacttgggcaacagaaagcacaaacttcagtaatcaatggcaacctgaatcctgtctggaatgaagaactgaagctctctgttccccagcaatatggacctctgaagctgcaagtgttcgatcatgacatggtgtccaaggacgacctcatgggtgaggccgagatcgacctgcagacaatgatcaacgctgccgcagcatttggcgacccggagctgctgggcgacattcagatcggccggtggctcaagtccgaggataacgctctcgtcagggacagcgccgtggtggtctctggtggcaaggtgaagcaagggatggcactgaagctgcagcacaccgagtccggcgagctggagttggagatggagtggatgccgcttaacgtgtagaaatctgctcaagttgccacctttataatgggtgtgggatacaaagaatttgttttgcttttgttgccaagagaaattgttatattttggtaattggcaagggctctcttcaaaataaagatctgaatcgctaaaaggtgtgttgtggatactaaaatttgagagatgattcacaagaaactcctttttttctaatctaaattcaaggttcaccatgcagtttataacaatcaatgtcctctcgatttgttgatatcaatgtccattacatgcaaaacgacgcaaaatagaattgtgggtttgttttgctatcttgcgggtaaaattttttgccacagtaaatggtgtgcattatctgt

SEQ ID NO: 6843 - DNA, 1674 bp, Zea Mays
ggaccacctgttctagttctagtgatcagaggggagggaaggggaggtgaacggagggagcggaggaagatctcgggctctcagagctgcatcctgaacccatcgcgtaggaaggggcaaaggagtcggagctgatccggcagtcgctctctctcgacttgcgattcgcgattcttctctgagtaattgggctgccacctgcgcttggtcccaattcacagtaaaatctacgcattgcgtggccacgttggctaggaatttggaagcaagtactctccgctttcagtaatcccaacggattgagtacgatttgacgcatttgcggccgagctttcttgcacccaagatgagtgggcatggtgacactgcgacctcagctaagatggcgaaactgaaggagttgttgcaaaagagtgaaaaccacatttgtgctgactgtggtgcatctgatcccaaatgggcatcagctaatattggggtattcatttgcgtaaaatgttctggcgtccatagaagtctcggtacacatatttcaaaggttctgtcagtgacactggacaagtggtctgacagtgaagttgactccatgatagaagttggtgggaattctcaggcaaacgcaatatatgaggcttttataccagagggctaccagaagccacattcagattctacccaggaagagcgagaaaaattcatcaggtctaaatatgagctgcaggaatttctgaagccaagcttgcgcattgtttctcatcagcctagtgactctggaaaacatgccggaaatgcttctcattctgatggttccaagagtcaagtcggcatgatcgagttcattggaatattgaatgtcaaggtgattggaggcaccaacctagccatcagggatatgtcaagcagtgacccttatgtcgtcctgacacttgggcaacagaaagcacaaacttcagtaatcaatggcaacctgaatcctgtctggaatgaagaactgaagctctctgttccccagcaatatggacctctgaagctgcaagtgttcgatcatgacatggtgtccaaggacgacctcatgggtgaggccgagatcgacctgcagacaatgatcaacgctgccgcagcatttggcgacccggagctgctgggcgacattcagatcggccggtggctcaagtccgaggataacgctctcgtcagggacagcgccgtggtggtctctggtggcaaggtgaagcaagggatggcactgaagctgcagcacaccgagtccggcgagctggagttggagatggagtggatgccgcttaacgtgtagaaatctgctcaagttgccacctttataatgggtgtgggatacaaagaatttgttttgcttttgttgccaagagaaattgttatattttggtaattggcaagggctctcttcaaaataaagatctgaatcgctaaaaggtgtgttgtggatactaaaatttgagagatgattcacaagaaactcctttttttctaatctaaattcaaggttcaccatgcagtttataacaatcaatgtcctctcgatttgttgatatcaatgtccattacatgcaaaacgacgcaaaatagaattgtgggtttgttttgctatcttgcgggtaaaattttttgccacagtaaatggtgtgcattatctgt

SEQ ID NO: 6844 - DNA, 1541 bp, Zea Mays
ttcaaacctcgtgggcagagcagcacaacacagcattctttggcggagcacgagggggcccacgcctgaatgccaggcctggccgcgacgtgtcgcgcctcgccctccccgactccactccactccactccactcgcccgcgcccgccgcccgcgtgctcctccctcgcgccccgccccgccccgcccctatctatatccattcccgctcgtccccctcaacaaccctcctcaccgcgcactcgtgttcgtgtcatcccgcccgcaggccgcagtccatggccaccgccagcctcgcgctctcgctgcgcctcgcgccgtcctcgcgcccgctgagcctccgccgccggggggccgccggcgtcacctgccgcgccaccaccgccacgttccaccagctcgacgccgggaggtacagcgtggtcggggcgcagccttctatggaggtcgtggccaaggctaaccatgtgacggtcatggaccatgagatgaagtcgaggagggagcacttcgtgcctgatcccatgaggatccccaggacaatcatggagcagtggaacccgcagattgctgacagcctccctgatgcattttgtggaggatgggttggattcttctcatatgatacagtgcgttatgttgaaacaaagaagcttcctttcagtaaggcaccacatgacgataggaaccttcctgacattcatttaggcctctatagtgacgtcattgtgtttgatcatgttgaaaagaaaacacatgttattcattgggtgaggacagactgctatcgttctgttgatgaagcatatgaagatggaagaaatcggcttgaagctttgttatcaagattacattgcctcaatgtcccaacactttcttctggttctataaaactcaatgttgaaaactttggcccagtaatgcaaaaatcaacgatgtcaagcgaagaatataaaaatatcgttgtccaagctaaagaacacatcttggccggtgacattttccaagttgttttaagccagcgttttgagagacggacattcgccgacccctttgaaatctatcgtgcattgcgcatcgtaaatcctagtccatatatggcctatctacaggcacgaggttgtattctcgtggcatcgagtcctgaaaattcttacccgggtacaaaagaggacaataatcaatcgtccgcttgctggaaccataagaagaggcaaaacaaaagcagaagacaaaactttagaacaattgcttttgagtgatgaaaagcagtgtgctgaacatattatgctagtagatcttggccgaaatgatgttgggaaggtgtccaaaccaggttcagtaaaggtagagaaattgatgaatatcgaacgatattctcatgtcatgcacatcagctcaacagtaactggagagctacgcgatgatcttacgtgttgggatgcgctacgagccgcattgccagttggaaccgttagtggcgctccaaaggtgagagcaatggagttgattgatcagctagaagtgagtaatgcgtgggcc

SEQ ID NO: 6845 - DNA, 1284 bp, Zea Mays
agctgagctatattaatttacaacaattggaattagtgcttggagcaatgcacgggacgaaacaggttttaccccagaagactatgctcggcagagaggcaatggcgcttacctgaatctggtccaaaagaagattgataagcatcttggcgaaggccacgttgtcctcggtgttccgagcagtatatgccctgtaataaccgatggcgttaagcctggcgatgttagcctcgagatatgcagggcaatgtctgcatcagtgccaggttgcctcctctgcagccgtcaggcacggatgcatccaagttctacggcaaggaccttcctttataggccagcaatgttaactgtgatgggagtcgctgtggtttgtgtctgcgtgggcatactcctccacacctttcccagggtttatgccgcgcccacattcagatgggagctgctggagcgtggacccatgtaaattttaggatgaaataaacctagcagttttgtaacttgagagctctagcgcaaaggaacataattaccgtgtgaagaagttcctttgcatttgcagcaagatccggttgctgttgtaagcttatatatcgtcaatatcaactatatttacagcctaacatgcttcgattccattcatcatttttattgtagaatttgtttcttccttgcggagattttgtgagccgtcagaataaaacatgtccttgtttatgtaatcgttgagacataacatatcttggaatgacactgaaaaactcaagattttattagttgaaagtatcttatacaatccaagctcctgcaaatttgcagggctgaaatgcgtgcacttgcttttcagcctataatcaagatgtacattttgcgataagcagacggttttctggtgaaatgctggatggaacatagcttacaagatcagcaaccagacccttctgcccaagccatagtagcctccccgtatcaatgatatctttacacatggatcccagagtggccctctcccctgctggtatacttcggattactctctcaattccgacggcctcctgatcaagcttctctggtcctctagtccatcacaaaatggcataaaacaaatatcaagctttcagtggcatgacacaataaaattggaagtccagaaagtgagttgtgagagttctttgaaccacaaacatcgaaaaataaataacctagagatgacaagcatgatgcacagatgacactagagagcagagattcgaacagagtatttaaccacaacagaaatgattgata

SEQ ID NO: 6846 - DNA, 2007 bp, Zea Mays
attgatctcgatcgaggcggaaaacaaatccgtctcttcccaccaccaaggcaccaaccgccgccatcgtgtgatggccgccacgcccgacgagcggaagcaggagaggccgatgaggcccgcgacgtcgccggcgagcgtggtggcggacttcgccatgggaggcgcggccgccgtggtggcaaagacgggggccgcgccggtcgagcgcgtcaagctgctgctccagaaccaggccgagatgctgcgccgcggcaccctcacgcgcccctacaggggcatcgccgacgccttcacccgcatcctccgcgaggagggccccgccgcgctttggcgtggcaaccaggccaacgtcatccgctacttccccacccaggcttttaactttgcattcaggggctatttcaaaagcttttttggctatgacagggagaaagacggaaagtggaagtggttagctggaaatgtagcatctggcagtgctgccggagctacaacatcattgctgctataccatctagattatgcaagaacaaggctagctactgatgcaattgaatcacggggaaccaagcgccagttcagggggttgctggatgtttacaagaagacacttacaaccgatggcatgtctggactataccgaggtttcagtgtgtctattacgggaatctccttataccggggtttatattttggtatctatgatagcatgaagcctctagttctagtaggcccattggaggggaatttcttcgccagttttgtgttgggctggacaataactacgttctctggggcttgtgcctatccattcgacacggtccgtcgtagaatgatgttaacttcaggagaaccatttaaatacaagaacggtttccatgcagtaaaactgatagtttcaaccgaagggttcttcacattattcagaggtgttggtgcaaatattctctcagggctggcaggggctggagttctttctgggtatgatcaactccaacggttggcaagccggcatgatcaaaattttgagcacaatatgaaaggggcattgaaatgatgtgcatatgatatgaatagattcagatccttggttgaagtccagatcattcaaatgggatgctcaagcaagaactcctgagcctgaagaacttcgcaaaaaatattgggggaagaaaaaggaaaagttttcctggagatgaatttcacaaggagatggaatcattgcaacaaaagataactcttgtaaacagagagtgctgaatatatattttaatgtgtagatctaatccttcaagtatgagcacatgtacatgttggtgtttcttcgattgttagaggcaatagtatcctatcaatgtgaaatgtaaatccaaatccttcagtaggtcatgaccaagctatttttctaaaaagggatggacatcttgactcttgaggaaggttcttcagttacagatttggatttttgctaacatcatatgagcatgtcatgtgcagatgcaaatgacatttttgcaggagtgtcagaccttttttgaagtgacaggattcaagtggatatcgtatccattaatctgtgcatcactcaaaagaagagcaaaggagcctctaatccccatctgtctctgattctgatcatctccagggagccgagtaattgccactgcgctgggactgaacaactgaaaggagggaggctgatgagccgtgtgagctcactgggaggtgcagtcgccatggtgaccaagatggggaccatgccagtggaatgtgccaagctgctgctcctgaagaccagaactatgatgagatgaggctaggggccctcacatactcatacaatggcatcaacgacacattcactcacatcttccacgagtagggtgccgcttcaaccaggtcaatgacatccactacttcccacccaaaacaatccctgtcacttatgagaaaattcactatttgccatttgaaagagtggactgtgcaactttgccattccac

SEQ ID NO: 6847 - DNA, 3214 bp, Zea Mays
ggcgtgttcggctggctacaagccgacactgttgcagctgtttggactgctgcagctgcaatccatagagagaaaaatactgtagaagccgcagccgcagccggattgcagccgcagcaagccgcagcgaacaagctgtttatccatgggcgtcgaacaacagagacacaagcctgccaaaccaaaccagccttccgccggattggaaactaccagatgctaccagcgctactaatccagcgtctcccaccgtaggaatctctcaattagcgacccgtgtcctgttgcacaattatatagccaccatttgagaagataggggggaggtggagcagagcgcaaggagaggggacaaggagggacgggaaggggaataagctgaggggaaggcaaggcaagcaggaatcggctgggttgcgcgccgacttcctggccgagtttttctagccatcggatcgaggcagtcccatcggcgaagacccggttccgttcggcggccatgcggttggtttctctgcttggtctgtcaggtttctggttgcttgctcggggtccaagctgtgcttcatctccagttgccgcggtagcagcgcaaagatgatgatgtcctttctccggaggcgtccggagcgtcgttccacgcttcctatattgattgagttcggtagatgattcttggacatcggtttggtgttcggtggggctcaaatacggattctgaaggacttcaaaggtgcttgaatcagtacatcttaggtgctatcccagactaggctgcgatgggtttaccccaaccttcaacagtcgaggatgatgcgccaacagcactgcgcacctctatttcttgccctccacattctggaggagttagtgcctgtgatttggatgggcttcctgcgggaagctctagcagaagggtgctttcgtacccattgatatgtgattttgatagaaaggccacattagatgctcctaatgaatcaaatgggtattctaaagacggatgtgaatttggcgaacccgcagacctccatggactaaacattgattcaagaaatacaaattcttggtcttctcctaaattagtgccttctgtccatatgccggcaaggagggttgtgggctttgattctggttgtattggaggttctgatggggcagaaacggatatggtcgattcatctttggtcgacagaaattctcatttgccatttgatcagcatgaacttcaagcaaggaaaagactgttctctccattgaaaaatgtgctcgttaaacagttcaatggtgatatgctcaaccttccttctggtgattctagatttaggcattctgattcagccgataaactatacagtactggtttccaagataataaaaaagccaacacgggatgcatcaatttttttgaaacgcgggatactccagcctctaggtgctccagccggagcccagaatgggatgttactaggagcaattctaattcattcactgatggtcctttacttgggagcaaggattatatatcctattatgatcatctagcagctagtgcaaaattagcgcactctccgctttctctgtctcctctcagccctaaatatatgaacaaaattaaagtgacaggatctcaaagatatataatgaaagatcttgaggatgacttcctagatttaaaggaaactggaggttctggcggagctaggatgccggaggtatcaaaaggatctaacttgttacatgatgaacttgatgttatgacacctaaatggggttcattgagaagatatcaaaattggggccctgaatcttcccctacatctcccagaattggttatggtcggagtttgtctttgcatgtaaggaggtcacttgttggctcctttgaggagtctcttttatctggtcgatactcgtatggaaaagacagtcagacaattgatggtttcttagctgttctaaatgtcactggtggtagtttcttccccacaactcagaaacttccattctcagtaacaagcatcgatgaggatagctccttactatactattcttctattgatcttgctgggaggttgccttcgaataacaccaaaagcccaaagctccaaagaagctacagtaataatgattcgcggtcagcaaagagtcgtttacgcatccctgttaagggtcgcatacagctggtggtaagcaacccagagaagactccacttcatactttcttctgcaactatgacttgagtgacatgcctcctggaaccaagactttcgtgcggcaaaaggtcactctctccccctctgccttgccttctaatccagtggaagaaggaagcaagacttgtgatgttaattctggtcacaaatcttctcagtcagtttcatgtggaaatgaacctagcgaacggggagctcgttctgaatgctgcaacggtggacagaactgcaactcaaatgatgaatcagaaaaaggagatctgaaaacaagatgtcgatcattggatagtgattctaatgaatcaaataagtctagttctccaggaaataagaaagaccagtctgattctgatggttgctgctgtcaaatggataagtttggcatgggagaaaagaaatcatgctgctcaccttctaagatcaatgatagttcaggtggagctgtgcttcgttatgctttgcacctgcgatttctgtgcccctccaagaaaaaatcctcgaaatcaatgcttcgttgcaaatctgatctatcaacggcaccatatagcagcaatacgctacctgaggaagaacggaggttctatctctacaatgatcttagagttgtatttcctcaaaggcactcagatgcagatgaaggcgagctgcgagtggagcatgatttccccgccgatcccaagtactttgacataagcaactgatggttgcgctgctgcaccggacaataataatctgtaaatatgttatcatgactaacttggtcaccagccgtttcatcttttcaccaacaaatgtacaggtactgggatcgccattgggtcctcgatcctcgttggggttaggcacggagaaaattccttctctgtggtagggaacaaggacaagggtgcatggattttcttcaaaggtcttgtttagatactctagtatgcatcacaatccacaggtcttgtttagatactctagtatgcatcacaatccacatatgttgaggtgc

SEQ ID NO: 6848 - DNA, 2334 bp, Zea Mays
aaaatagaaatcctttcaaaaaaaaaaaaaaaactggtttcccaaccagcgaaagggtggaggcggaagccacaaaccaaaccctcctgcgtcttccctcctgcttcgtgcttcttccactcccccttctcttctgcggcgccaagctcgagctcatcgccacggagctcgatcttgggttttggtctatccgcgacgaaggtgaattagttggagactgcgtgatgtctggtgcgaaagcgggtgtagacgtggaaacaagggacggcggtgccggtggctccttcagtgaggagaggctcgttgataagctcaacaagctcaacaacacagcggcgagcattcagacactttcacaatggtgcatttttcaccgcaagagggccagaagggttgtagacacatgggaaaagcagttcagtagtgcaacaaaggataagaaaatatcattcctgtttctatcaaatgatatcttgcaaaacagcaagcgcaaaggaggtgattatgtgcatgagttctggagggttctacccagatcattgaaacatgtctacgaaaatgggggagaagatggaaagaaactggtggctagactaataggaatttgggatgaacgcaaagttttcggaacccgtattgaaagtctgaaatacagcatttttggtgacaaccctcctatattcgataacaatgggaataaaaataattcaaaccctggctctaaccccttaaattccaaagttgcaaggaaggattccagtacagtactaaaaaaactgactgttggtggtatgcctgaaaagattgtgactgcataccaatctgtgcttgatcaacattttgatgaagacacagttttgaacaaatgtaagagtactgttagtgttctggaaaagataaagaaagatatagaagatgctagtaccaaaggaaacaatcctgaagcagtgcattgcacaacttgaaagcgtatatgtggtgaggatattgctgataaatcaattaaaagaagctctcgtcgaacaggagtcaaagtcagaagttcttcgcagccagttgcaagtcgctcgttcagaggctgaacatgccattcaacttaggcaacgatttgatggtgccgttgtctcaaatggcacaggatctaattctagcctgctaatgattaccccaacagaacagacagctgctatgatacagggttctggagtaaggctgacgtctcctcagttgcaatcactgaatccagcaacctcgcttgcccctacagtcagtgcagtgggagatgagccgaagagaacggcagcagcaatggcagacaagctgacatctttgtcggcacctgtgcaggttctgagctccattttctcatcttttgttgccgagcatggcgcctcgctatcttccaagaacagtggaccggcttctggagaactctccggggaaccgccgggcttccagattgaaaagaggcctaggcttgagaaaaccgtgcaggccagtgacatgggtgctcctccctttcctgtgcaagtaccgcagctgcaacaacagactggagcagcgcccacacagctaccaacacagatcaaccaagcaccgggtccatttgcaccgccactgccgtctcttttgccaccgtttctgcaacagttcggccaaagtactggaggaatgatgggagtgggacctttcgggatgatgtccggctctatgccacctccgcctccattgcccaacattatgccggcaggttttccaggaccaagcggtccacctccacctccgcttccaccggcccagaaccaaccccaacagcagcagcagtctcctcaggcaccacagcaatcacccacatcagcaggattcttccagtcatcagcaggcatggggttcttcccaccagtgcaggtgcaacagtctccgtctgcccaacgacaatgactcaacggtggcatggcattcatcgggctataatggcagcactttgtgctaacttctgtacattaaccaataatcacctagcgtcgagcttatacgtggctgatcctgcaagagaggcgcaggaccgttgtcacggttagaaaaaaaaactgtagaataggcttttgtgatgactctcgttttggtcagagttgtttaactcttccttgttctgtgtagtagttagatgttgtgtctctgtcccccgtttgctttgatctcctgaggcaaaagaaagtggcactggaattgttgcccactgaatcactgatcgtgctgtcattgacatgatgtaaactgcaaatacttgttctattgttgtttaaatttaattatttattatgattatttttt

SEQ ID NO: 6849 - DNA, 1753 bp, Zea Mays
cattaattaacctctctccttcctcgccccttcccctccacgactccactaccaccaccttcaccttgtctcccacaaccgccgcgcgcaagccctagcccgatctcgccggcgacagacaccagatctcgccgcccgttgcgcgccgatacgcgccccgccggattcaccgctcctcgcgctgcagcacgcccgggcctgggttactgcgtgacatgtagtattgtataattggaggttgtcaccatcaccacaaagcatatgttgtgatttgtcgatggcgaggagatgaaacaggtgtaggggcggagcagcaaggacatgacagccatgccgcatccgcgccaccgaggcgctgctaagaagcccatgtggatcatagtgctattgtctttggtttgtgttgcacttatgggggcctatgtctacccaccacggcgctactccgcatgctacttctttgcttcgagtgtctgtactccgttcaaggattggctacctgctgttgctcgtgagcgaactgatgaagagatagtttcatcggtggttattagggatcttctttcaatgcctatggctatgtcaaagaacccaaagattgcctttatgttcttgacaccgggttcattgccttttgagaagttgtgggagaaatttttacagggtcatgatggccgatattctatctatatccatgcatctcgtgaaaaacctgtacattctagctctctttttgttgggcgtgaaattcacagtgaaaaggtagtatgggggaggatttcaatggttgatgcagagaagaggctgttaggaaatgcattggaagatgttgataatcaatttttcgtcttgctttctgacagctgtgttccactacatacatttgattacatatataattatctgatgggaaccaatgtcagtttcattgattgcttcttcgatcctggcccacatggaactggaaggtatacgatggaaatgcttcctgaaatagaacagagggacttcaggaagggtgcccagtggtttgctataacacgaaggcatgctttattgattctggcagacaacctttactacaataagttcaagctgtactgcaagccagcagaaggacgcaactgtattgctgatgagcattatttgccaaccctcttcaattctgtcaatgagaatgttcacattacaagtgatgataaaaaagttgtgacacagaccccatgtatgtggaatggaacaaaaagaccctgctatctttttgctagaaagttttacccagaatctttgaacaacctgctgaagctattctccagttacacatcggcttgagttctacatgattcttttggcattttgcctaggagattcctctaggatttatctttttgtgcttcatgtaaattgtggaattgatacttagaggcttaacagagttacagatccagggccttgatgtaattctgagtcccttggtagggctgaggtgatgtttgtttattattgacgctgccctccctgtcattcgtggtgctctctgtatgactatgtttcttttagcccttcacttttttctcttctcttttattcttagattcctagctcccatattctgagtaacaggggttttgtcagttcttactgttattataagattatttttttgtagacacgaagatattatgaaatcagttacactaatagtttaacctggtcttgtgagttacagtgacagttttactcttgtgatgag

SEQ ID NO: 6850 - DNA, 1872 bp, Zea Mays
cattaattaacctctctccttcctcgccccttcccctccacgactccactaccaccaccttcaccttgtctcccacaaccgccgcgcgcaagccctagcccgatctcgccggcgacagacaccagatctcgccgcccgttgcgcgccgatacgcgccccgccggattcaccgctcctcgcgctgcagcacgcccgggcctgggttactgcgtgacatgtagtattgtataattggaggttgtcaccatcaccacaaagcatatgttgtgatttgtcgatggcgaggagatgaaacaggtgtaggggcggagcagcaaggacatgacagccatgccgcatccgcgccaccgaggcgctgctaagaagcccatgtggatcatagtgctattgtctttggtttgtgttgcacttatgggggcctatgtctacccaccacggcgctactccgcatgctacttctttgcttcgagtgtctgtactccgttcaaggattggctacctgctgttgctcgtgagcgaactgatgaagagatagtttcatcggtggttattagggatcttctttcaatgcctatggctatgtcaaagaacccaaagattgcctttatgttcttgacaccgggttcattgccttttgagaagttgtgggagaaatttttacagggtcatgatggccgatattctatctatatccatgcatctcgtgaaaaacctgtacattctagctctctttttgttgggcgtgaaattcacagtgaaaaggtagtatgggggaggatttcaatggttgatgcagagaagaggctgttaggaaatgcattggaagatgttgataatcaatttttcgtcttgctttctgacagctgtgttccactacatacatttgattacatatataattatctgatgggaaccaatgtcagtttcattgattgcttcttcgatcctggcccacatggaactggaaggtatacgatggaaatgcttcctgaaatagaacagagggacttcaggaagggtgcccagtggtttgctataacacgaaggcatgctttattgattctggcagacaacctttactacaataagttcaagctgtactgcaagccagcagaaggacgcaactgtattgctgatgagcattatttgccaaccctcttcaatatggttgaccctggtggaatagctaactggtcagtgactcatgttgattggtccgagggaaaatggcatccaaggtcatatagagctgcagatgttacatatcaactcttaaagaacataacgtctgtcaatgagaatgttcacattacaagtgatgataaattgtgacacagaccccatgtatgtggaatggaacaaaaagaccctgctatctttttgctagaaagttttacccagaatctttgaacaacctgctgaagctattctccagttacacatcggcttgagttctacatgattcttttggcattttgcctaggagattcctctaggatttatctttttgtgcttcatgtaaattgtggaattgatacttagaggcttaacagagttacagatccagggccttgatgtaattctgagtcccttggtagggctgaggtgatgtttgtttattattgacgctgccctccctgtcattcgtggtgctctctgtatgactatgtttcttttagcccttcacttttttctcttctcttttattcttagattcctagctcccatattctgagtaacaggggttttgtcagttcttactgttattataagattatttttttgtagacacgaagatattatgaaatcagttacactaatagtttaacctggtcttgtgagttacagtgacagttttactcttgtgatgag

SEQ ID NO: 6851 - DNA, 818 bp, Zea Mays
taaaactcgcgctccaggcaagtgggctgctgctgctgctgagagggggaggcgggggcacccggacggtctacactaatgccttaatagttagtagagatttacagagtatgatgtacttgagggaaagcattggatcagcattaaatggccctcgattgtatttgcttggataacctttctattcacatctgattcttatctgctcattgcaacggtcttggactcttggggattattttatagttttatgaatattaaagtcatagataaaagtagcgtcaaatgtagagttacggagaaatgttgtgtttgtgattcagctatgtttttaaatactaaacatgtttttacatgctttgtttatggtgcaggccatggcggcacttgcttcatccaaggaggctgactggaacgcgatgaggctgagggagaaagaattggctgctgtgaagatcaaccctgcggatgtcgaaattatcgctagtgagcttgagatcgcggagagaacgctccgtgagcacaagggtgatgccgtggctgcggttcgattcctgctgcgctagttccgagatttcgtcgccagcatcatatgttccccttcagttccacacaagaggtgatgatgtgaagtgaagcactagtacttttgtgtgcctgttttggaagtttgctattagaactatgttgcagaaaatttaagaatgagaataccatgcaaaaggtgtaatatgatttgtattagttatttgctattagaactaattaatcattatataaaattaaatactagacgaaatactaaaatttgatactat

SEQ ID NO: 6852 - DNA, 898 bp, Zea Mays
aaatccattcatcccgctgtgtctgtgtattgtagtatcagccaaaaaaaaaagaagaataccccgaacacgaccagaaggcctactaaaccctgccgccgccgccgccgcgccatggccgacgagctcgacgagctgatcggcttcctctccgaccgcaacccccaggtgcggggcgcggcggcggacatcgtgcgcgggctgacgggtggggaggacggcctccgggcgctcacggcgcgcgccgatagcgcccttccggcgttgctccgcctgctggcctccgcgggcggaagtggctcgggagaggccgcggcggactcgctcgtcaacctcagccaggacgcggccctcgcagcgcgccttgtcgcgctcggggccgtcgatgccgccatggacgtcgtggccaagcgaggcggggagcagccagctctcgcgcgcagactcgtcatgctgctcgttaacctaacccacgttgagtccggcgtcgccgcgctcctccaggttggggatgagaaggtgcaaggcttgtatgttgcaaagcttgtgcgatcattctgtaggtcatccagtgattctgaagaggaagacatttttgagtacgttgcctccacacttgtcaatatatctaaggttgaagctggaaggagaatattgttggagcctaagagaggtcttctgaagcagattattcgacaatttgattcaacaaatcaacttagaaagaaaggggttgctggtacaattcgtaactgttgctttgaggctgatactcagcttctgagtttgctttctttagcagaatatctttggccagctctacttttgcctgtagccggaaagaaggcacggtgtcaatatgcaaggatcgggtcgctacttccatagtggcactggc

SEQ ID NO: 6853 - DNA, 1589 bp, Zea Mays
aacaaatccattcatcccgctgtgtctgtgtattgtagtatcagccaaaaaaaaaagaagaataccccgaacacgaccagaaggcctactaaaccctgccgccgccgccgccgcgccatggccgacgagctcgacgagctgatcggcttcctctccgaccgcaacccccaggtgcggggcgcggcggcggacatcgtgcgcgggctgacgggtggggaggacggcctccgggcgctcacggcgcgcgccgatagcgcccttccggcgttgctccgcctgctggcctccgcgggcggaagtggctcgggagaggccgcggcggactcgctcgtcaacctcagccaggacgcggccctcgcagcgcgccttgtcgcgctcggggccgtcgatgccgccatggacgtcgtggccaagcgaggcggggagcagccagctctcgcgcgcagactcgtcatgctgctcgttaacctaacccacgttgagtccggcgtcgccgcgctcctccaggttggggatgagaaggtgcaaggcttgtatgttgcaaagcttgtgcgatcattctgtaggtcatccagtgattctgaagaggaagacatttttgagtacgttgcctccacacttgtcaatatatctaaggttgaagctggaaggagaatattgttggagcctaagagaggtcttctgaagcagattattcgacaatttgattcaacaaatcaacttagaaagaaaggggttgctggtacaattcgtaactgttgctttgaggctgatactcagcttctgagtttgctttctttagcagaatatctttggccagctctacttttgcctgtagccggaaagaagttgcccgactagctagtcgagacacctgagcgaccaggcgactaatcgcgattaatcgacgattaggtcgactaatcgggtcctagtcgacctgggcgtccctactggttctcctgcatatttacagatatatagtgaagaagacagatcaaaaatgccacttgagctatcgagtgcactctctcatgaacgggaagttgttgaggattctgaaattcggcagcaggcattagaggctatttatatgatcgtattgcaggatggtggccgaaggtccttttggtcagttaatggcccacgaattctgcaggttggttatgaagatgaaaaggacccgaaagtgatggaagcatatgaacttattggttccctgcttgttgggaagggtgaagatgtacaagataacaagaaggaacaaggagagaagcctcaatgagccccgccgctgataaaaacggtgctgtatttttgtttgtctagaaaacatccctcgccgtgtgcaatagcaatagtatgatatcccaacttgtcaactgttgcaactgcaagagctctgcagtgttgcttttgtaattgacgaatgtatctggaaaatttgcaggtattggccgtcttttccttggttttgagctctctgacaattcttcgttttttttggaatgcatctcttgacgagtctttcacaccgtcgcttcagaacatggatatgcattaaacgggctaccctgtagctttcgctg

SEQ ID NO: 6854 - DNA, 1422 bp, Zea Mays
agagcgctcccctaccctttttcccctcctcgcagtcgcagcagcagcgcacaccagaaaagcttttctgcctcctctccaccttgcttcccgcaactaccacgcacgccgaatacttggcaagaagaaaccctttctcgtcccgttgaactggcgccgtcgactccaccggggcacgctgtcgcgggttgctctccggtcctcgttctccttgctgctgaatccgctagtggagatcgacctgatttctcctgtcctgtcaattggattttagcccggctttcaaggtagagaaagaagctgtctggtccatcatggccttcccaactccagcttctgtttttgttgacgagaaccaacagataaatagaggtaagagggctgctggatcaaggaccaaagggctgaagccgtcggagaatcctgggaatctagagaggagagctcttcaggatttgtccaactttgccaaaggcacaggcactgctttgaaggacaggcccatcacgaaagagaaatctacccagaaacagaggtcacagaacccagtgaaaatattatctgatgaagatatcaaactgtgtcatgagtgggctaaggatggggtggaagggtttcactcaacacaaaatgattctcagaaggttgataaggatctgctagccaaacgtgtcaagaagaaagtggcgtcagtaaactcagccttgcgtggttggtcagatacggtatttgattctctgatgtttccagctagggaggttttatatgaaccaaaagtgctggagctggaacctgagattctccgggacatcagttgggatctccctagttcagtagatggtaaagcaaagctggatgaagactgtcttgcctatgatcagcttgaccagtacccatctttggagaacaatccagttacatttgagctgagagacgagccagcgatcccgcagctgggagtgcattgaagaatcccgcagctctgcttgctgctttgctctagaatgctaggtcttgaacccctgatgtttttctccagctatgttctggtggatgtgggtggtataggatttcacagtttgatcactagtacctgatccagcggaagcgacagcgcttcctgtttgttatgcttgctgatgggcgatggttgtggaactgctgatggtataattctaatgttttcagcaaaacaaacctatatggtctctatatttattctcctgagtcatatgacttggcagtgctttagatagcgacaatggtcctaaatatagcgagattcttgccacgtgctagcaagagacaaaggaggggtcaggttgattgtccagaggtcacatcaggagactacggtccggttggtttcagttttttttttcagactggtcgctaaaaggttttgcgtactataaaaaaaat

SEQ ID NO: 6855 - DNA, 2190 bp, Zea Mays
cttgggcaacgtattttgttttctttccgccctaatttacacggctgtttttttatatttaagctcacgaccacctccaaaagcactatagcgatccttttaaaacccttattattcggactttcacacccaaaataaaagaaaaaaagacatccaaggaaggaaagggtggaggtggaagccgcaaaccaaaccctctctgcctcgtcctccctcctcctgcttcgtgcttccccttccccttctcgtctgcggcgccaagctcgagctcatcgccaccgaggtcgtttcgatctgggttttagcctatccgcgaggaaggtaaattagttggagacttcgtgatggctgctgcgaagtcgggcgtagacgtggaaacgagggacggcggcggcggcggctccttcagcgaggagagcactttcacattggtgcatttttcaccgcaagagggccagaaggattgtggacacatgggaaaagcatttcagtactgcaacaaatgataagaaaatatcattcctgtttctatcaaatgatatcttgcaaaacagtaagcgcaagggaggagattatgtgcatgagttctggagggttctacccagattattgaaacatttctacgaaaatgggggagaagaagcaaagaaactagtggcaagactaaaactggctgttggtggtatgcctgaaaagattgtgactgcataccaatctgtgtttgatcagcattttgatgaagacacagctttaaacaagtgtaagagtactgttagtgttctggaaaatctaaagaaggatatagaccttgctagtaccgaaggtgatccgcctgcctcaacaatgatttctgacctacaagaacaggaaacaatcctgaaacactgcattgcacaacttggaagtgtagatgcagcgaggatatcactgataaaccaattaaaagaagctctcaccgaacaggagtcaaagtcagaggttcttcgcagccagttgcaagttgctcgagcagaggctgaacatgccattcaacttaggcaacggtttggtggtgccgttgtcgcaaatggcacaggatctagttctagtccgctgctgatgtctcctcagttacagtcgctgaatccagcaccctcactcgcccctccaatcggtgcagccggagatgagcccaagagaacggcagcagcaatggccgacaagctggcatctctgtcagcgccggtgcaggtcgaaaagaggcccaggcttgagagaaccgtgctggccagcgacatgggcgcgcctccattctccatgcaagcaccacggctgcagcagccggttggatcgatgcccacacaagcagcgacacagatgaaccaagcgccaggcctattcgcaccaccgcctccaccaccgttgccgcctcttctgccaccgctcctgcaacagttcggtcaaagcgctggaggaatgatggggatgggaccgttcgggatgatggctggctccatgccgcctcctccgccgatgtccagcatcatgccagcaggttttccagcgccaagcggtccacctccacctccgcttccaccggctcagacccaaccccagcagcagcagcagtctcctcctcagccgccagcgccgcagcagtcagcagggttcttccagacatcagcaggcatggggtacttcccagcagtgcaggtgcagcaatctccgtccgcccaacgacaatgactctatggtggcatgacatccatcggggcgggcttataaaaggcagcacctcgtgctaaattttgtacattagacataattacctggtgtcgagcttatacgtgactggccctgctgcaagagaagcagcaggaccaatggtcacgattagaaaaaaaaagattgtagaataggcatgggggcttttgtttggtccgagttgttttaactcttcctgtttgtgtcgtgtgtgcagtagttagactttgcattgatcccctgaggcgcaagaaagtggtgctggaattgttgcttaatagagctgccctctgatatagcagtgcccttttaggggctggggcgctgggctgaagcagtgttagaacttaactggtcatagtgtcatagatatgatgtgaactgcaaatacttgtcctttttgtgacttaaatttattttctattttctatttagttttgaatagag

SEQ ID NO: 6856 - DNA, 1933 bp, Zea Mays
gtgtgtctgttccctgaaaactaaacatgttactactttaatgtatgtgctaccttgtagaactaaaattgtggcgacatcggtagcttcttggcatccatatttatgttttatcctttgaaacagaatatatattcctcatgttcttcaacagtagcactgtactggaagtatggaacttctattggagttgcctatcaatgattcacattgtttgtttccatgcagaatctaagataaatattattgagacataatggtgacagcttgtcaattatcctgcctttggaattattttctactacttgcttcctatatgtttagagtgatctgtttgaatgatcacttgggtttacgacgcgtgtccaccagacatttaaattcctgagtttagttgacgtagtgattttaatccattcttcacggactagtactgtctgtttattgtatgacttacagttagtgcaggcatgaatgtttgcatgactcaaatcttattttgattcagctgtattttgtcttttatgacagtgagaatatctgctattctgttttaatataattttgtttgctccatacaatcgttggagtcaaacaatttctagctgccttaccttttagtgtcatacccaatcgcagatttctgctttgcattaatttatctaatttgtcctgcagatatgccgagcgcttgcttatatacataactgcattggcatctgccaccgtgatatcaaaccgcagaatgttcttgttaacccacatacacaccaactcaaaatttgcgatttcggaagtgctaaagtattggtcagaggagagccaaacatctcctacatatgctcaaggtattatcgagcaccagagctcatatttggtgcaacggaatatactactgctattgatttgtggtcaacaggctgtgtcatggcagagctgcttctaggacaggctctgtttcctggagaaagtggagtcgaccaactagttgagatcatcaaggttttgggtactccaacaagggaagagatcaagtgcatgaacccaaactatacggagttcaagttcccacaaattaaagctcatccgtggcacaaggtttttcaaagaaggcttccacctgaagcagtggaccttgttagcaggtttctacaatactcaccaaatctacggtgcactgctttggaggcctgtatgcaccctttcttcgatgagctgagagacccaaacactcgtctacccaatggtcggcctctgccgcctctcttcaacttcagatctcaagagctaaaaggcgttcccccagaagtcatcgatcgccttgtcccagagcactcaagaaggcagagtttgttcatggcgctaaggacctagtttttgccgttctttttgcccccttttttcccaccgtttgccaccttgagggaagcttgtaaagctatagcttctcctttcccctcgtccttactttcctcccctctctttcttccgagctttgtgtggatgagagatccttgagatacactgctagagctgtgagttccaggatgtgaggttcgagtgtgtgtgatgtgcagttgtcgcctttgaggtcggagatttcagttgcagtgttgtgagaggcttgtgaagcttttttgtctacttttcagtgcttctctggcttgaagttttccttcaattcttgtgaactggcttcaagatttggcttcgtgaaccctgtgtgcgtgtaaaagtactggttggatgctgctgcaccaattctggaaaaaaaaagcttacaactaaacacctacttatgttttgtttagccaaattcagtgccttcctgttatgcattgcggttcaagatcagatgaatttatatagggtctgattatttagccaaattcagtgccttcctgttatccatttcaatatggaagagttcaac

SEQ ID NO: 6857 - DNA, 3363 bp, Zea Mays
gccctcactcgctccagtctctccctctcatggcctcagcctcagcctcactcgctcgctcgcaccaccagctttgctccagagtcctgactcctcctagccttctcctccctctctcccctaccaccacacaacgggataaaccccagcacgaggccggagctgctgctggaaccgtcaggccgtgaagagcctgcggttcgatctgctgcaagagctcctcgtcgatctcttctctgcgaggtttcggtctgaggtactggctgtggattctttgatccgagacccatcccctatctctctctctctctcctatgggcgcggctttcgcccgattatcgggaggtattgtatttgggacggattgacccgcttatctgagaggatcttcactccagtttcgagtttgatctgccactatttggagaaagccacggctgttcttctgcttgatctctgggtggttggtgtagcagtgcttctagcgtgttctctgaattggttgaatcaccagcacaagatttgttgcgtttccccccctccgctctatttctgcgattttgcacgaaaatgatcctgtcatggacatttttggttgtcatttaatttgcctggcattcgaattggcaacatgatcttccacaaaagcgaagaaactgcgcgcccagtatttgcccatcttgaccttggtgatctcgattgagccttaccagttaccacattgctggagtggaggtatggcgtattctggacaaaggcatgctggtgttgggagctcctcgaggccagctaatggattcaagggggcagccaactcggtggagttcctgggtagggagatgctgggaatgcgactgagggatgccaagcccgacacagatgatgaaagggagatgtggtcaagttcagatgtgactgatagttctagtaatgaagctggtcatgtaatagcgactactgttcacgggcgcaacggcctgcctaaacagtctgtcacatacatcgctgaacatgtggttggaactggttcttttggggttgtgtatcaggcaaaatgccgagaaacaggggaaattgttgccataaaaaaggtccttcaagataagcgttataagaacagagagctgcaaatcatgcatatgcttgaccatcctaacatcatcggtcttaagcattacttcttttcaacaactgaaagggatgagctttatctcaaccttgttcttgagtttgttccagagacagtaaacaggattgcaaggcagtacaatcgaatgaatcagcggatgcccctcatttatgtcaaactgtacacgtatcagatatgccgagcgcttgcttatatacataactgcattggcatctgccaccgtgatatcaaaccgcagaatgttcttgtgagatatgattttttttcttttctataatgatttttgttgctttacatgtatcattcgcatttgttggatgttttgttgctgggatggtatgataacgccatagaatagcaattggtttttacaagtgggactgaatttttagatcatgtgtagcccgatgtcataattattggtagtttcacccaacatctacggcactagcagtttgaaattggaaatgtcaatccacgtgtgcattatttagtttcatatataggtgctatcccatgtgcatcattttattcctaggctgcacatatcatattttataccctgtgtatgctgtttttcttgtcaatggtatcttactatcttctcttgtggaacatttcgtcatcatctgttcttttataacaaggctggacaaaaaaccatgctcccagttccacagatgtcaattggttctgtacatcccactagtgcgtaaatgctaaactaattcaaaatttatttgagcaaactgtgagcctcggaaaggagcatggaagatcaatgcaactagctagcttgttaacccaccatgactccataaccgcatagattagagattgtttgaagaagcaggagaaactgaaactcaattgtagagtatgtacgaaacgaggtttccataattgccttctttttgtctcctttgaatgctgaggtagctactgtttagctacttgaccttttctttacctcgggaatagcagattacatatttatgatgagtgatgctttttgctaatacttctactgtaggttaacccacatacacaccaactcaaaatttgcgatttcggaagtgctaaagtattggtcagaggagagccaaacatctcctacatatgctcaaggtattatcgagcaccagagctcatatttggtgcaacggaatatactactgctattgatttgtggtcaacaggctgtgtcatggcagagctgcttctaggacaggctctgtttcctggagaaagtggagtcgaccaactagttgagatcatcaaggttttgggtactccaacaagggaagagatcaagtgcatgaacccaaactatacggagttcaagttcccacaaattaaagctcatccgtggcacaaggtttttcaaagaaggcttccacctgaagcagtggaccttgttagcaggtttctacaatactcaccaaatctacggtgcactgctttggaggcctgtatgcaccctttcttcgatgagctgagagacccaaacactcgtctacccaatggtcggcctctgccgcctctcttcaacttcagatctcaagagctaaaaggcgttcccccagaagtcatcgatcgccttgtcccagagcactcaagaaggcagagtttgttcatggcgctaaggacctagtttttgccgttctttttgcccccttttttcccaccgtttgccaccttgagggaagcttgtaaagctatagcttctcctttcccctcgtccttactttcctcccctctctttcttccgagctttgtgtggatgagagatccttgagatacactgctagagctgtgagttccaggatgtgaggttcgagtgtgtgtgatgtgcagttgtcgcctttgaggtcggagatttcagttgcagtgttgtgagaggcttgtgaagcttttttgtctacttttcagtgcttctctggcttgaagttttccttcaattcttgtgaactggcttcaagatttggcttcgtgaaccctgtgtgcgtgtaaaagtactggttggatgctgctgcaccaattctggaaaaaaaaagcttacaactaaacacctacttatgttttgtttagccaaattcagtgccttcctgttatgcattgcggttcaagatcagatgaatttatatagggtctgattatttagccaaattcagtgccttcctgttatccatttcaatatggaagagttcaac

SEQ ID NO: 6858 - DNA, 2245 bp, Zea Mays
atgggtctctctggctccggtgccgtcgcgtcgattgtgttcctcggcctctgcgccaccgtgtcgtgctggcctgcaccgccgccaccggagatgctgcacgagagcttcgcagggaagtcggagttcaggacggtgaaccggaggaggctgtcctcgtgctccaacccgagcccgtacctgtcgatcaacgtgagcagcggcggggcgccgctccccgacgaggcgttcctcacggtcaccgtggccggcgtcctcagacccgacgccgacgactgggtcgcgatgatcacgccatgcagctccagtgtctccgggtgccctttgagtggtgttaactacgtccagaccggcgatctagcgcatctcccgcttctgtgccactaccccgtcaaggcacagtacatgaagcgcgaccctggctacctgggctgcaagaccgcggcatgccagaagcgcgacgcgtcgggcgcctgcagtgtccgcacctgcgccgccaccgtcaccttccacgtcatcaacttccgcaccgatgtcgagttcgtgctcttctccggcggcttccggacgccgtgcgtcctcaagcggtccggcgcgctccggttcgccaaccccgccagcccgctctacggccacctctccagcaccgactccacggccacatcgatgaggcttacctgggtgagcggcgacgggaggccgcagcaggttcagtacggaggaggcaagtccgctacttctcaagtggcaacgttcacgcggaatgatatgtgcagtagccccttgttaccaagccctgccaaggatttcgggtggcatgaccctggctacatccacacggccgtcatgaccgggctccagccttctcaatcctacacctaccgttacggaagtgattccgtgggttggagtgacacaaacacattcagaatgccaccagctgcaggctccgacgagacatcatttgtgatctacggtgatatggggaaggctccgctggacccatcagtggaacactacattcagcctggatcgatttctgtggtcaaggcagtggctaaagaaatccaaacaggaaaggtcaattcagtcttccacataggagacataagctatgccacaggctttctggttgaatgggatttcttcctaaacctcatagcaccactcgcttctcgagttccctacatgaccgctattggtaaccatgaaagggattatgcagagtctggttctgtatatgtgaccccagattcaggtggcgaatgtggagttgcatatgagtcatatttccgcatgccagctgttagtaaggataagccatggtattcaattgagcaagggagcgttcactttgtcgtgatgtcaactgagcataagtggtcagagatgtcggagcagtacaaatggatgaatcaagatttgtcatcagtcaatagatcgaggacaccatgggtaattttcattgggtgagttttcttacgcatagaccgatgtactcatcccatgtcggaataccagttaatgtagatctagcatttgtagcctccgttgagccactcttgctcaagcaccaggtggatttggttttctttggccatgtacacaactatgagaggacttgtgcaatatacaagaatatatgcaaaggcaagccaaagaaggatgaaagtggaattgatacttatgacaacagcaaatatactgcacccgttcatgccactgttggagctggaggatttagcttggacaagttccctaggattgtgttgaacaagtggagcttatcaagagtttcagaattcgggtatgccagggtgcatgccacaagaggtgatatgctggttcagtttgtaagctcaagtacgatggaggttttggaccaatttagatttgtgaagccagatccggcaaggaggctaaggaacaagccagtttaaccgtagctgcaatgcatgcaaaagatggagctggagctacttccttatattattgttatgctatatataaaagatggcgttgaattacacatcagcgtgtttcagcgtgttgtctaggttctatacttatatgtgtagtgtatggttctttatgacatttccacatgatagttctttctccctctgaagtatattgatccacaagtgtcattttgtagttgtagctaacagcctaacaacggctcctgaacttaagttataatttacagttttgtcagttctgaaactacaggaattaaaaccag

SEQ ID NO: 6859 - DNA, 1063 bp, Zea Mays
caatgcaacaactgtgctgctgggcacccactccccagtcaaggcatatccattccatggatctcgcgcccctgctccttctctcgtagctgctgctgcttccggtggtggcggttgtctccggcgagaccgccgcgcacccgggctacgcgcacgctgaggaggcatgcggcggtgtgctagaggcagaggcggagaaagcaacggtgctggtgcctgcgccggagcggcgcaaggagttcgacggcgggcggatcgtggacatcatccactactaccgcgaggacatgccggagtgggagtcatcggagggctccggcgagttcctgcagctggcgtggtccatgcgcaatggctccgacatcgctaacttctcggagctccggctcactgcgcactccggcacccacgtcgacgtgctaggacacgtcttcgagcactactacgacgcctgcttcaatgtcgacaccctcgaactcgccgtcctcaacggaccagcgttgttggttgacgttcccagagataagaacatcacaggatggtgcacaatggttggttgataatacagacatcaaactagttggagttgactacttgtcggtgggcgcatttgatgaatgcattccagctcatctagtatttcttgaaaaaagggaggtcatacttgtcgaagccttgaatctggagcatgttagccctagaatatacatcttgcattgttgccactaagattgcggggtgctgaaggttctcctgcaagatgcatcctcatcaagtgacatgggatggtgtgaggacccaataatatggagctgggctagtgctgatccaatcgacactaatatgagctgaagatactacataaaacatgaacaatatggagttttatatactggaccccagtccaggttttaaatccacccctgcaaggggtgagtttatgtttgtgtttgggagtgtatatttctatattgcagtttgaaaaaaatactatgtatataataaaataagaatatatcaatccattcacatgacaattgaaaaatgtggctcccatcactct

SEQ ID NO: 6860 - DNA, 3783 bp, Zea Mays
acttctctatctttgactaagtttatagaaaaacgcatcaacaattcaacattaaatgaatgtcattaaattctccatgtgttttgatagtgcatttatttaacttgtatgtattaatatatttttttctaaaaacttggtcaaagttagagaagtttgacttaggacaaagctaaagtgatgtatcattcagaagtcggaactgagggactagcaactaaaaagcccatgattcatttactaaaacatgcatgataaaactgtggctgcaagctgaatggttaattggtctttcatataacgcgacaattgtttttatgaactttatctggaattggagctgttccttttgtggattttcagtaggactacacagatgaagcattatttgttgatgttatttttaatgtgtattttcacatcgactgaacagacacagtggatttactacttttactcttatttaaagtgtcccaccattcattctaacacttcgataacttgctgtgctatattgttctttgattatatttcaagctgcaaagttatcttattgttgtcttccttgtataaattattctaacaaatgtgatatgagtttctttaaattggtggatttcctctgatgctagaacagtaccatccataacaatcttgaatctaatattcagcttgtcgatactttttattttaccctgttcttgtgttctgtttggaaaagagatttacttttccttttactactgactgtttttcctttcatgccacaaggtttcttccttcagtaaatttctttgcaagaatgtcctaataggatgcaaggctcatgatttgtgtggtctccactattttgaggcaactgagtatcttgtattagtgtcacttggtctgcactttctcaacaatgaaaggctagattagaagctggatgatcttgcaggctgaaaattgaattgtttctgcctggtggtattcattcaaactttctaatagagggaaaagctctataatggtaaaatgtgatgtttgatggcctaggatttggttcaacaactttcttgtccaccacttcagtcactacctacctcctttgtcctgacaccaattggtccgctatagacttgttgagcatataaattaaaaccagtcatctgtttccttagctaaggacctgtttggatccaccagctaaactttatgactaaattaagctgtagtggatccaaacagcctagctaaaatatcagccaaatgcttcttagctaataagaaccccattatctcattatatgttccaacccagctaaaagtgctcaatgaccaaattaccctcctgtcttttccacatctgagccctcgggctccgttccaccacgcttgggcattttcaccagcctccgcccacaagcgggccacaccagctggtagcactgttccccggcggacccagcggcatggcgcctccccagacaaggccgtggcatccggcagcggagggccgctcacgctccacactggtggtggggtcgcacatatcctggcagcggagggttcttgcctcgtgctcctcagcacaatggagatggatggtcaatatacacctattagctagaggatccaaacagccctagctaaactttagctggtcatattagttggctaaagttttttttctcgaaatgcgcaggagaactgcacctcattatattaagaagaaaaggtaaccagggtctaaagaaggcccgatacaaaaaaaaaaccttacgagggccagaagcacgcatacagaaaggaatccatctaggaaaacataacccacacactacacactagggaagtccctaggactcagctaagggggctgccagataagaaatgtcttttgccccgctatttcccaccgatgcatctcctcttttgcccagataaaggttagagttatatttaaattccaaccataaaaaacccatctattctggtgatttcaaatcgctcaagcacccaaaatgatgagggagtttagaccctttttgataagcccacttactactcctgctgccttttcccaccagcctaggaaggaggaagcagccatctatggtgcgagggagttgcaacccaaactgtctcagcaaaagataccagaattctcttgcaaagacacaagtcaggtggtccatagtttcagcctcttggtcacacagaagacatttctccgggtgatccaaacctcgttttgcaagcctattcgctgtccagcatcttttctgagtaactagccaaatgaaaaaccggcatttgggcggggcccatgatttccacaccatcttataatatgcaaaggaacttgagccaaggaaaaggcctttgtaagaagatttagccgaatatttgccatttgaggctaagctgaaaaggtgtttatcatctatgtcaagctgcagttcaaaatctgaaagcaaatcccagaggtgctggctaaagtttagctggggtggatccaaacagagcctaagtgtatgatattgatgaatgatcaagaagaagaatatgatggcccccctcaaaaggaaattccttctttaattgtctggacccttggaggaaagaatgtatatgttgaaggatcatgggataactggaaatcaagaaaagccatgcaaaaatctgggaaagatcactctcttttgctggtactcccgtcaggagtttaccgatacagatttgttgtagatggagaaaggagatgccttcctgaccttccctgtgaaactgatgcaatgggcaatgcggttaaccttcttgatgttaatgattttgtcccagaaagtgttgagagcgtggtagaatttgagccaccgctttctccagactctagctacagtttccaggcacctgaggacaaggacttcgccaaggagccacctgctcttccagctcaactccatctcggcgtccttaactcacagaactcggaagaaagctgcgcgcggccgcagcacatagtcctcaatcacctcttcatagagaagggctggggcgcccaccccctggtggctctcggcctaacccacaggttcgagtccaaatatgtaaccctcgtcctgtacaaacccatcgaacgatagcaatagcccgcgcatgaagagcggaagttcaatgcttgacaactcactgcgggagcagcgatgaacagcgccgaggttgtacatgcttgtgaaagtggttgaggttcaggagtattttttttccgtgccctgcttgcagaacctctggtagtctggttgttagctgtacatgctgcgctatcatgatgttggccttctggtttgtttacagagagacaaggcgtccttacaatttttacatgtccgcttgtcgtcgtcgttcctctcccatcccatggcagattggcaggaatgaaatgtgttgaaatccacatgaatgttaggtgccggagatagatcaagggattcctagatttttatttgttttttgactggtcaagaagatgttgttgttatgtactaaactcaagaaatttttacaaatgagatactagtgttctcaggcccggagccatttttttttacaatgcccttatgcaacgcattcatggagtgagatttgccaaattctgcagaactctgcactattttttcttgaaagcgtctagacatttaggtagtagagtttctgtgattaatgacatcataaaattattatgattattgtgttttacaaaaaaaaaatataaactagatcatggcaatagaaaataaa

SEQ ID NO: 6861 - DNA, 1144 bp, Zea Mays
atgtatcctgacgatgctggcgccgaggtaaatgggtttatgaaattatttctaggtacgaaattgctttcagctttcctctacaaattgcaatcaatttttgagatattgagtttgataatatatgtgttcttcattttcttgtaaccgttgcacactaacattttatcgaattatttgtgtgccgtcacaatgtacgagcgctctactaagcaaatatgtcaaacaagcaaaaagatgtctgatcttccttccagatgattaatatggttcccttgccccaaagaaactccatgttcagttcaagaccaaagtacaaaaagaaatcttcaacctacaatactactactccatttcattccttacaaggtttgtctttctttgatacaaattgcagaatgcactgaatagccttgaaatctttaaaaaagttgtactcacaccagcgcactaatgtcagttaggccatcaatgaagttatagaagtcactgatgtcataagttaggccattgggttgatatccctaatttttctttcataaagcccacaaatccctaccatttctgtttactgtaaaaagtaacttgtgtactttagaagggaaataaatcaagaagcatttctaactagaagttctatttaaatttttctgaagcggaaaaactcagggagaagctgaggcaggagtgcctgcggaaggggacggaactggcgcatggggtggctgacgccctcttcgctgtaccacccaccgaggacctcgacggccctatcgtacacctcccattgcccgttgtccgactcccgcgcgagaagcatcttggtgctgggacctcactgccacgattagtagctgcaaaggttggggcagatgtaacactaacagacattgcgcagaatgcagaagtgagttccaattcgtctttggaatccttattgtttgatccttgtcagagcttttccagtatggtttggacctcactgccaggattagtagcttttaccaagtcttttggatcatgtggtggatatattgtcgcatcaaaggagataattcaacaccttaagcatagttgtccggcccatctatatgctacttccatgtcgccaccagcagtccaacaagaaaatatcaaaattgct

SEQ ID NO: 6862 - DNA, 1071 bp, Zea Mays
ggtgttagcaccagagggggaggaagaaggaaagcaagcaagtggtgggaggagtcatggactgctgcatctgcagccccacggcgtccgtgtacaggcttccgaggaactccatctgtgctccatgccacgagggcgccaaggcagtcatcgcttttctgaacaaggatggtgagcggcaggaggaagacgccggtggccaccaccaccatggctctgccctcaagtccagagggtccacgacgcagcctcatagcgcagccaaggggatgagggacgcgtgggagcaggtgaaggagatgagaggcagggaggaggaggcccaccggagagccgccttcctcgcgatggcgccgtggaaggagcgactccacaccgacatcgtcgtcaaaccgggcactgggtctccaatactggcccacaaagccatcctgctggcccacgacgagctatccctcctgctcgccttcctctacaccggcaacctcctggaggacggcccggccgtgccgccggtcccggaggccggaggagcggcagctgcacgcgctgctcgtggcggccgacaagaagtacgacgtcccgttcctgcgccgggcctgcgaggcgcagctggacgcggccctggacgcctccaacgcgctgcggacgctggaggtcgcggacctgagctccagcgcggcgctcagggagcgcgccatgggcgcggtggtggagcacgcccagcaggcggtgttctcgcccgagtactacgacctggccaccaggaacgcgggcctgtgcgtcgagatcacccgggcgctgctggccaagatgtccatgacgacaaataaagcctcatgcatagatgtagctagagcttcaatgcaaagctgcatgctgcgacgatagtgtttgatttcatcaacgatcctatagatttattctatatgttaaacgcaattctcggcagctgtcattaattaacaccattaattaatgacacctcgtgattaattcacggcgggccgggccgtcaacgattcctgcgcttctttaatttcgattcagagcttcaatttccacacaatt

SEQ ID NO: 6863 - DNA, 1868 bp, Zea Mays
actcccagctcaaccatttccagcctcaattagccgaggcccggcccattccttgcccacgtcatctttctgtctctccctctcatcgccgcgtcacgcacagccgccgccgtcgtgcgcgtgtgccggaacggccgcgtggatcctccgccccgtcccagcggcgacttgtccgtgcgaagatgctggggttctcgaccggacagctgctggtcgtcctcggggcctgctccgtcatgatgaagcccagtgatatggtgaagattgcgaggacggccgggcggatgactggaagagcggttgggcggctcatagtggctcgccggcagctggacgagattctgggccagtctgcagccacccaggttcataaggagcttaaagacgctatgacacaattagactcgatccgttatgaagtccagaacttatcaagattatctcctgggcagtttatgttgaagcaacataacgctggtaatgataatcttacttggcaataaagtcacatttttctatggttagtacctctcactacattatttaagttaattggctccaaagttcatcattgatttacacatgagcaggcatggctgaagcagggaaatctgactcctctgatggtcctacaaccaacgtatggtggtatatcattttatttcagttttagtccaagtacttgaagggcctggtgcaatgcaggtcgcgggttcgaagcagtctcctcatttgcggagaaggcttgtcttggttgattcgttccccaaaccccactcatatgggagcctccgtctgtccgccactggcaagaagaatttcgtcaggaaattcgcagtataattcgcgatgaatttgaaaaatactgtagaacacagcccattcaaaactctgtgagcacaactgaacacagaaaacttcatgtggctgatgaaccaacggcactgaaatccaaggacatgaagatggctaattcaggattgacaaatctgcacaaccaagcaatgacgtatgcaaggctatctgaagccccaggacttaagatggattcttccttgagtgggaactacaaagatcaatctaaggagatggatgggctgctaactgtactgccaatatcagctgaaagtgctggattacttccaagccgcccagataaaccaacaggctcagatctagtccttgaggctgtgcttgaagcggaagttgcggagaacgctaaactgtttgtgtcgcagcctcatgatcagctacctaaggaatgaagacgaagatgatgtgcttgaagacgttgcaaacaggaccaaactgttcagctgacagccgcatggtcagttgcctacggagcgatgatggtagtttttgatccttaacaggatttggcatactaggcctgtttggtagagctctagaagttgatataccgatctggcgtccagcaccagcggtgtagcttgtagtcttgtaccctcaggcctcaactagccagctaggattcggatgccatggtagaaactggcgacatagcttgtagcctcaactagccaggtaggtttggctgccatagttgaggtaaagctgtggccggtgggcacgtagcttgtggcctcaaaaggagcaagaaagaaaaatagagtaaattagttgtggttatcaatgtgcatggtgattttaaagcttttaaggatgtcatctgtattctgtgtcctcgcaacactgatattctttgcaactctgagtagagagatacacggaatgttcagcttttcagatccattgatggtagtgttgtttttaatgttcccaagacttctgaggaagctgcaagagcaggaattgtgcatggcctccgagaacctgatggtcat

SEQ ID NO: 6864 - DNA, 1582 bp, Zea Mays
gaaaatcggcccgattatagcgttctccttgacgccagaacaagaggcgtcaacgtcaatttggttgtgctggttcagttttgtcagagctctttttcattcttgcaagcaaatttccgcagctgaatatctgatatgggtgaaaccatgggaaggagaacagtcagtggccttcttgtcaccaaaggaggctcaattcttgtcttcagggaggaaagcccacgccacaaggccaccgcatgttgtacccgcctctggtgcagcagtaagcttttcccgaacaaagacacgaatacacgcagggcatccagggaaacatcggctcttcagagatcacaagtgtctaggaaatccaactggatgtcccatcaaggaagtatttcttatgatcgaagcaccagtaggaatacagcaagtacttttggtgagactcacaacaaaccaagagaaaaagaaaatctcgggtgtgatctaccggctcggttgaaagaaaggatcaatacatccaggaaaagctcattgggtggactgggaagtcctaacaaatcatcaacaaacacatcaagcagtagccgatcggtttcaagatcagtatgtcggccagcatcgagaatgagaaaggatggaggaaggggcgcagaatctatgaggatgcatagagccagagatagtggtggtagctcttggggagatgtgttgacaagaaattctgaccaagattcttcacacaggtctctatctcgaaacgtgttgaggcataggagcagatctcagcaagggccaatatcatcattggaggataatttagatgattccagtgaatactggcattttgatacagatgacagtgaagaggttgaggatgactatgcctttaatgatcagcataggggaatgagaatggacattgataacatgtcttatgaggacctacttgcgcttggggagagaataggtactgtaagcactggtctttcagatgatgcgctttctgagtgtctgaagagaaacctctatgtgcccacaacttcaagcagcaatgaagatggtgacatcaaatgcatcatatgtctggaggagtactcttctggtgtggaggtggccaagatggcatgcgagcattactaccataccacttgtatccaacagtggcttcagcaaaagaactggtgcccgatttgtaaatgtgacgcttctgccattagctcatagtgttcttgacagtaacagaagtatcagttcattgtaatcaaataggattacacaagtttttttggttctagaacaaattattcacttcaatcctatactgctcttcaattcacactacacttgtcataggaagcaggaaaataagtcctagaagaaaggattttctcagttttgatgttgaagttgaagagtagatgatagtgttgccattctttacatacaaaagcgtcaaaaattcagcattaatagtgcagtttttgtttgccatcgttttcactatctgtgctagttagcgtgatttgtacatttgtggatgtggtgtacgtcatggatcacctcgatcagaccagaagagtttcttgtatgttag

SEQ ID NO: 6865 - DNA, 1406 bp, Zea Mays
cccccccccccaaccccccaaaaaaaaatccggtcgatcctagctcgcgatgttctccggcaccggaccctccggcggggcagcccactctacgtccaccggtggtgggggtggctcgccttccgacaggggcggccccgcgccctcggcctcggcgtcggtctccacgccagccagcgagagcaccgtcgcccgccgcctaaacggacttgacccccacggcgacgacgctccatcgtcgcagccagccacgagcaagaagaaaaagagaggggcacgagcagttggtcctgacaaaaatggccgtggattgcgtcaatttagcatgagagtatgtgagaaagtcgaaagcaaagggagaacaacctacaatgaggtggcagacgaactggttgctgagttttcagatcccaatattaatattgactctccagatcctgataattcgtctgcgcaacaatatgatgagaaaaatatccgaagaagagtttatgatgcgctgaatgtcctaatggctatggaaattatatctaaagataaaaaggaaatacagtggagaggtctgcccaagacaagtatgaatgatattgaagaactgaagacagaggtcaatggactgaaaggtcggattgacaagaaaaatgcatatctgcaggatttacaagatcaactatatgggtcaggagatgcaccttccggtggagtggccttgccatttatactagttcagacacgtcctcatgcaactgtagaagtggagatatcagaagatatgcagcacgtgcattttgatttcaatagcactccatttgagttgcaggatgattcatttgtactgaaagcaatggcattatctggcgaagaagctgattgtacccaagctcctggtgcgaatggaggcgagtgctcaagtacacggaacaattattggcaccaccaccaacaaccgcagcctccagggccaagagtagttagggtaccaaactcgcctcctattccagggatactaaaagggcgtgtcaagcatgaacactaggcttcaatatgcttagtggtgtcaaatgagctatttactttattgtccccagctagttttacctgtagaaaatgcatgtaaattatgcctgtaggggcagccgcagtctaatttgacttcgctgatggatagttcgatttgtgtcatgatatgccatacgcctagctcacgttaactcctagtattcagttgtttggtcgaggaaaagagtctgtggttaagtgtaattgtgtagtttatcttcaaacagtcggcatatcgtatctatgggacgatttgaggaacagtgttgtcagtacactccaattgatatacaataaaatgcaaatgtttgtttacagttcggttggtttctgatggcaatggcaca

SEQ ID NO: 6866 - DNA, 2937 bp, Zea Mays
ccgctctagcaggtagcagcagtcgcttccgtcccccttcctcttgtattcgcttcgccgcccaacccagcctccaccgctgccttcccgaccgttctcgccgccgctgtctcctcgcccaccaccccgcacggccggcgaccagcgcccacgcggccgctcgatccaaggccagaacgagcccaccacgatccgcatcacgccgatatttttcaggttgttggtacggatctagggttttcctgctgcggattcgttcgattcgctcatggccgctgggcgccatgggggttacagggactacgaggagagggagcgggagctcgacgcggaggcctccaggaggagcaaggagcagcaccaccatctcggcggccgccaccgcgacgtggaccgccgccgcgatggcgggcgcagcaggggtggtagagactttgccaacggccacggtcgccgacgttcgcccccgcccaggagccgcctcgcgggaaggcttggtgaccgtgagcctggcgaggtgctgagcggtagcgcatctgatgactccggtgggaggtcggatagagggagggaaaatggcgtgcgcagttctagcagggagggcgacatggtggcaggcactgggatctcgtcaccgatcaagaagaggaaattctcaccgataatttgggacagggatagcccaaagccaccgcattctggtgcagccagggacaagaaatcggtagaatctgttccttctgagctccctccgccgccgccgctgccacaagaccacatcccactgagcttgtctgtggagaagtcacctatggatgtagaaactactgttggtacagagagtgctgagcagttgccggaacatgaggtcaataaggtgatagagcaggaagaggactatccaagtccaacaatgaggaacatatcgacttcaagatgggcgggtgcaaatgatgatgaggaaggtggggcagctccaatgaagaagagaagtgtttcacctgcagactcctctgtaccaggtcagtggaaacgagcaagcccagaacctggtgaagtctctggaggaagggcaatgtctaggtcatctgattcagggaaaataggtaatgatgagaaagaagattccgaggtcgataaagatgactatatggatgttgacagggagcatgctagtgacagtggtacagaaaactgtatgtcggatactgactcagacaatgaaatgtgcaggcctgaaacccctgaaccagagaggccaccacacaggtgtatcaatatgcttcaaggttgcagaagtgttgatgagtttgagaggctcaacaaaattaatgagggaacatatggtgttgtatacagagcaagggataagaagacaagtgagattgttgcattgaagaaggtaaagatggagagggagcgagaaggtttcccattaacctctcttagggaaataaatatcctcttgtctttccaccatccttcaatcgtggatgttaaggaagtagtagttggaagtagtttagatagcatttttatggttatggagtacatggaacatgatcttaaaggtgtcatggagaccatgaaacaaccatatacacaaagcgaggtcaaatgtttgatgcttcagctgctagagggtgtaaaatatctacatgacaattgggtactccatagggatctgaagacctcaaatcttttgctgaataaccgtgggccccagaactgttgttaggaacaaaggagtattctactgctattgatatgtggtccgtgggctgtataatggctgagctccttgccaaagaaccattatttaatggaaaaacagagtttgaacagctagataagatttttagaacacttggcacacctagcgagaagatttggcctggctatgctaaattaccaggcgtgaaagtaaattttgtcaaacaaccgtataataggctaagggataagttcccagctgcatctttttctgggcgaccaatcctgtctgaagctggttttgatctattgaatagactgctaacttatgatcctgataagcgcatatcagcagacgatgctctgaaacacaaatggttctctgaagttcctctgcctaaatcaaaagacttcatgccaacatttcctgctcttaatgaacttgacaggcgtaccaaacgttatctgaagagtcctgatcctctggaagagcaacgtctgaaagaactgcaagggaacataggcaaccgtgggctttttggctgaactaagagtacttgattggattcctgtccgtactaactgttatgcttcaccctgaatccacgaggtcagatgtcttctgaggattaacactccatccagattgatcataaaagcaaatataaaccgtcttcatcgtaaggtgtgacatgttggctttgaatgggtacaccagtttcacctttggaacttctgtatgtaaaatattccagattgagacgaaagaagcgcaggggaaggaagccttttgcttttatcaggaaatcaatgacattaatacaacttagaaggtgaattaattgtgagatatgtccacaacaaattcggaacttgaactaatctaagctgtggctgcttcaagataggaaagtgacaatttgtggagggccttcaaaagtgttttactagtgaaccatggtgaaaaacatgaagcgattggtttccgcaataaacaaagtgaaagttagcatgtagagtattgcaatacgtgcggtgccatttgaagttctggtgaggtttgcttgcgatagagctctttgggggcacttagaagtcagaccctcgtgcttattatgttgctgtccctgcatgaaattattgcacatgcacaagcaaccttcatgcagacccatttttcgttttttccaacttacaccggcagcatctcctggagtttagact

SEQ ID NO: 6867 - DNA, 3017 bp, Zea Mays
ctagcaggtagcagcagtcgcttccgtcccccttcctcttgtattcgcttcgccgcccaacccagcctccaccgctgccttcccgaccgttctcgccgccgctgtctcctcgcccaccaccccgcacggccggcgaccagcgcccacgcggccgctcgatccaaggccagaacgagcccaccacgatccgcatcacgccgatatttttcaggttgttggtacggatctagggttttcctgctgcggattcgttcgattcgctcatggccgctgggcgccatgggggttacagggactacgaggagagggagcgggagctcgacgcggaggcctccaggaggagcaaggagcagcaccaccatctcggcggccgccaccgcgacgtggaccgccgccgcgatggcgggcgcagcaggggtggtagagactttgccaacggccacggtcgccgacgttcgcccccgcccaggagccgcctcgcgggaaggcttggtgaccgtgagcctggcgaggtgctgagcggtagcgcatctgatgactccggtgggaggtcggatagagggagggaaaatggcgtgcgcagttctagcagggagggcgacatggtggcaggcactgggatctcgtcaccgatcaagaagaggaaattctcaccgataatttgggacagggatagcccaaagccaccgcattctggtgcagccagggacaagaaatcggtagaatctgttccttctgagctccctccgccgccgccgctgccacaagaccacatcccactgagcttgtctgtggagaagtcacctatggatgtagaaactactgttggtacagagagtgctgagcagttgccggaacatgaggtcaataaggtgatagagcaggaagaggactatccaagtccaacaatgaggaacatatcgacttcaagatgggcgggtgcaaatgatgatgaggaaggtggggcagctccaatgaagaagagaagtgtttcacctgcagactcctctgtaccaggtcagtggaaacgagcaagcccagaacctggtgaagtctctggaggaagggcaatgtctaggtcatctgattcagggaaaataggtaatgatgagaaagaagattccgaggtcgataaagatgactatatggatgttgacagggagcatgctagtgacagtggtacagaaaactgtatgtcggatactgactcagacaatgaaatgtgcaggcctgaaacccctgaaccagagaggccaccacacaggtgtatcaatatgcttcaaggttgcagaagtgttgatgagtttgagaggctcaacaaaattaatgagggaacatatggtgttgtatacagagcaagggataagaagacaagtgagattgttgcattgaagaaggtaaagatggagagggagcgagaaggtttcccattaacctctcttagggaaataaatatcctcttgtctttccaccatccttcaatcgtggatgttaaggaagtagtagttggaagtagtttagatagcatttttatggttatggagtacatggaacatgatcttaaaggtgtcatggagaccatgaaacaaccatatacacaaagcgaggtcaaatgtttgatgcttcagctgctagagggtgtaaaatatctacatgacaattgggtactccatagggatctgaagacctcaaatcttttgctgaataaccgtgggccccagaactgttgttaggaacaaaggagtattctactgctattgatatgtggtccgtgggctgtataatggctgagctccttgccaaagaaccattatttaatggaaaaacagagtttgaacagctagataagatttttagaacacttggcacacctagcgagaagatttggcctggctatgctaaattaccaggcgtgaaagtaaattttgtcaaacaaccgtataataggctaagggataagttcccagctgcatctttttctgggcgaccaatcctgtctgaagctggttttgatctattgaatagactgctaacttatgatcctgataagcgcatatcagcagacgatgctctgaaacacaaatggttctctgaagttcctctgcctaaatcaaaagacttcatgccaacatttcctgctcttaatgaacttgacaggcgtaccaaacgttatctgaagagtcctgatcctctggaagagcaacgtctgaaagaactgcaagggaacataggcaaccgtgggctttttggctgaactaagagtacttgattggattcctgtccgtactaactgttatgcttcaccctgaatccacgaggtcagatgtcttctgaggtgaggtgccatggacatgaagtatcacatcttctcggtgtctagcagcgactgatagtgttctttagcaggcttggtgccggtttgagtggataaggtttctccttgtggcccatcatagaaattttgttgcaggattaacactccatccagattgatcataaaagcaaatataaaccgtcttcatcgtaaggtgtgacatgttggctttgaatgggtacaccagtttcacctttggaacttctgtatgtaaaatattccagattgagacgaaagaagcgcaggggaaggaagccttttgcttttatcaggaaatcaatgacattaatacaacttagaagctaagctgtggctgcttcaagataggaaagtgacaatttgtggagggccttcaaaagtgttttactagtgaaccatggtgaaaaacatgaagcgattggtttccgcaataaacaaagtgaaagttagcatgtagagtattgcaatacgtgcggtgccatttgaagttctggtgaggtttgcttgcgatagagctctttgggggcacttagaagtcagaccctcgtgcttattatgttgctgtccctgcatgaaattattgcacatgcacaagcaaccttcatgcagacccatttttcgttttttccaacttacaccggcagcatctcctggagtttagact

SEQ ID NO: 6868 - DNA, 3243 bp, Zea Mays
ctagcaggtagcagcagtcgcttccgtcccccttcctcttgtattcgcttcgccgcccaacccagcctccaccgctgccttcccgaccgttctcgccgccgctgtctcctcgcccaccaccccgcacggccggcgaccagcgcccacgcggccgctcgatccaaggccagaacgagcccaccacgatccgcatcacgccgatatttttcaggttgttggtacggatctagggttttcctgctgcggattcgttcgattcgctcatggccgctgggcgccatgggggttacagggactacgaggagagggagcgggagctcgacgcggaggcctccaggaggagcaaggagcagcaccaccatctcggcggccgccaccgcgacgtggaccgccgccgcgatggcgggcgcagcaggggtggtagagactttgccaacggccacggtcgccgacgttcgcccccgcccaggagccgcctcgcgggaaggcttggtgaccgtgagcctggcgaggtgctgagcggtagcgcatctgatgactccggtgggaggtcggatagagggagggaaaatggcgtgcgcagttctagcagggagggcgacatggtggcaggcactgggatctcgtcaccgatcaagaagaggaaattctcaccgataatttgggacagggatagcccaaagccaccgcattctggtgcagccagggacaagaaatcggtagaatctgttccttctgagctccctccgccgccgccgctgccacaagaccacatcccactgagcttgtctgtggagaagtcacctatggatgtagaaactactgttggtacagagagtgctgagcagttgccggaacatgaggtcaataaggtgatagagcaggaagaggactatccaagtccaacaatgaggaacatatcgacttcaagatgggcgggtgcaaatgatgatgaggaaggtggggcagctccaatgaagaagagaagtgtttcacctgcagactcctctgtaccaggtcagtggaaacgagcaagcccagaacctggtgaagtctctggaggaagggcaatgtctaggtcatctgattcagggaaaataggtaatgatgagaaagaagattccgaggtcgataaagatgactatatggatgttgacagggagcatgctagtgacagtggtacagaaaactgtatgtcggatactgactcagacaatgaaatgtgcaggcctgaaacccctgaaccagagaggccaccacacaggtgtatcaatatgcttcaaggttgcagaagtgttgatgagtttgagaggctcaacaaaattaatgagggaacatatggtgttgtatacagagcaagggataagaagacaagtgagattgttgcattgaagaaggtaaagatggagagggagcgagaaggtttcccattaacctctcttagggaaataaatatcctcttgtctttccaccatccttcaatcgtggatgttaaggaagtagtagttggaagtagtttagatagcatttttatggttatggagtacatggaacatgatcttaaaggtgtcatggagaccatgaaacaaccatatacacaaagcgaggtcaaatgtttgatgcttcagctgctagagggtgtaaaatatctacatgacaattgggtactccatagggatctgaagacctcaaatcttttgctgaataaccgtggtgagttaaaaatatgtgattttggactgtctcgtcaatatgggagcccattaaaaccttatactcaactggttgtgactttgtggtacagggccccagaactgttgttaggaacaaaggagtattctactgctattgatatgtggtccgtgggctgtataatggctgagctccttgccaaagaaccattatttaatggaaaaacagagtttgaacagctagataagatttttagaacacttggcacacctagcgagaagatttggcctggctatgctaaattaccaggcgtgaaagtaaattttgtcaaacaaccgtataataggctaagggataagttcccagctgcatctttttctgggcgaccaatcctgtctgaagctggttttgatctattgaatagactgctaacttatgatcctgataagcgcatatcagcagacgatgctctgaaacacaaatggttctctgaagttcctctgcctaaatcaaaagacttcatgccaacatttcctgctcttaatgaacttgacaggcgtaccaaacgttatctgaagagtcctgatcctctggaagagcaacgtctgaaagaactgcaagggaacataggcaaccgtgggctttttggctgaactaagagtacttgattggattcctgtccgtactaactgttatgcttcaccctgaatccacgaggtcagatgtcttctgaggtgaggtgccatggacatgaagtatcacatcttctcggtgtctagcagcgactgatagtgttctttagcaggcttggtgccggtttgagtggataaggtttctccttgtggcccatcatagaaattttgttgcaggattaacactccatccagattgatcataaaagcaaatataaaccgtcttcatcgtaaggtgtgacatgttggctttgaatgggtacaccagtttcacctttggaacttctgtatgtaaaatattccagattggtacgttgtaaacaatccccagtgtgtcggatttaaatttaaataaaacatcatcattattagttttcttcatgctccttgtgccttttcttttgatctttgcattttgtttgcaagagacgaaagaagcgcaggggaaggaagccttttgcttttatcaggaaatcaatgacattaatacaacttagaaggaaagtgacaatttgtggagggccttcaaaagtgttttactagtgaaccatggtggttgttgcttatcttcagctgacagttataacattgctcacagaaaaacatgaagcgattggtttccgcaataaacaaagtgaaagttagcatgtagagtattgcaatacgtgcggtgccatttgaagttctggtgaggtttgcttgcgatagagctctttgggggcacttagaagtcagaccctcgtgcttattatgttgctgtccctgcatgaaattattgcacatgcacaagcaaccttcatgcagacccatttttcgttttttccaacttacaccggcagcatctcctggagtttagact

SEQ ID NO: 6869 - DNA, 1928 bp, Zea Mays
atggttccgacgaccacgggcgctgacggagatggtgaacgacgagtaactgcctctgcagtgggcggaggcgacggtggtgccgccaaatcgacgtccatgggagcggatgtagacgaccccgcgtcaaccaccggcaccggtggtgacggggatgcagtggggagtccgcactccaccaccggcagcggaaccaccgctgtccatccatggagaacgcagaagtgcatgttttgcacttgcacacggcgttcagggatgacgtgcactggtggaagtgcagcgtctagccccacagcaaacgcctccaacatggcatcatcaacaatgtgcagaacttcgcgcatatggcgtatgcgcatggaaacgatcacatttacaaaatgttttgtaacaagaaccagctttacttacatgagcccatccgacgtggcagggaaccaccacgatccgagacgaagacgatgcctcccagtccaagaaagaacggagcaggccgcaggcgatacatacgacgcgatgacggcacggtcccaccaggctgatccctcacggttctttcctattcctattccgctgtaccccagtccccacacacaaagcaccgactcactcggagtcggccactctcaccggccgcggcgcccgcaaccgacctcccctccaggcgaccgcatggcggagcgggagcggaagcggaagcgagcggcggaggagtgggagaggcggaagaggggcaggaagagggagaaggagaggcaggtggggtggacgagcgaccccgttgaggcgcttggggaagatgtgatggggcgggtgatggagttcctggacgcgcgcagcgtggcacgatgcaccgcagtctcctgcgcttggcgcggggtagcggcagacaaccgcctctgggcacctatgtgtactgaattgatggcgggaaaggctcatatcccacgtttaacatcgatccgcactggatccaagttgtctacatattcaatggtcattatggatgggaaacggagtcggatcacaaaagaggatctctgcgatcatgcgtgggaatatcgtttcaccatactgactctgctagttttgagttcaacttgttttagtcggtaacaatctgatggatgcatgggatcatgacaactgtcagcatctctctagcttcttcagaggttgtagcttctgagcgcactgaggcagcacctgattactggaggaaccttgatccatcatggaagcacactggtccacctatgcgacgctacttccaccccgatggctaccacagtgcagaccctcatgacgccgtgtggggtggccatgagtgcacctacacggtcataacgagctttgtcgacgatggccagatcagggagcactacgtgaggatcaaccggtggccgccaatgaaggtgtcaaggaaggacgactggagctgggagctatcgaaccacatgtaccgctataacagcatacctgattcccacaggaaaggatgcactggtcctctgttcccagtttggtgaatgcaagtctacggtagtaatcagcggctacggttcatgctgccgcagtcttatctgctagtagaaatcaagcttgccatacgttcgtaactgaggacaactgaaaaatggaatgtggcatcaggaggttgtatttggtacggctgccgagggtcaaggctaggtgtgtatgcaatatacataaacaaggtatatatatgtattatatgttttgtacttttgtggcattgtgatgatgatgatacccttcgtgatggtttggtagtagacttgtgccgtcgcctgaacacttacatgcctgtggagcgtgttgtaaaaataatgtaagtatgcagcaaatgcggtatgttttggtgtttgtggtgtttatgtatatggttacggagaaggtttttg

SEQ ID NO: 6870 - DNA, 1553 bp, Zea Mays
acgcaatctatcgctcgcacctcattggtttgctacacgtgttcctcgtcagacactcaggctcacagacgcgaaggaacaccgcccaacccgaaaccgtttccaaaatgcaaaactcgactccacgcgtcgcccttcttctccggagagatcgtttaaatagccccgtaccaaatccaattcgtctctcctcaccggagaacagaaacgatacggttaatagatagcgaagaagggcagcaccaccagtagcagcagccatgcccgctcgcgctcgatggcgactcctcgcgctgccgctcgcgctcttactcgttgccgggtcggcgcatggcctcgtgaagccggaggcagccgcggcgcccaagccccccgtccccaaggccatatcggacctgagggacgcgatcgtgaaggggctgggattccaggccgaggggctcaaggtgtccgggttcgacgtgcgagacgcgctcgtggggcacgcggtggcgtacgagttcgacatcgaggtcggcaggaaggtcctaccggtgcgcctgctggaggacgtcagccggtgggacttcgtcgacctccccatcttccgttcccaggccgacgctgacgatacggcgctcgccgagatccggcggaccgggacggggagcatcgttgagcctaccctgccgcccttccagctcgccgggcccatggagctctggatccagaacggcgacgacgtcaggcttgccttgccggtaagaagtccgttttgcaaaaatgttggaaattgatcaaaaatgggagggaaacacccgagctgaaagaattcgaatgcccgggttcaaattctgaaaggcatgtgaattgagtcccaaatccagtaaggcgtgtggattggcacccagataattaaacgttatccttgtatacaaaggttcaggtgtgcgaattgtaatgttcttgctctggttgcctagttgattttgaattgcgagtctgtgtcttcggtatgtaatctgagttacctaaaagtctagtctagtctagagattgaaatggtgtggttgccaaggtcaggggtgctcgcccaaatgcatcaaagtgcaaattgggatgatatcaggaggtagtgatagaatggaaacattaagatcaggaagttaagttaaatgtttactcaaactcttgaacatcagaggcaaaatcaacaggcacagctgaaattattagatttggagttggggccggtggcataacaaaagctactttttcttggtctcaaactctgactggcccagaatgaggggaatacttctgtatgatgatgcagatggcatctttaactttggacttccttccctgaaaatttgaagtgcattagtgcatgttaagtaaagctgtttgaacagtcgcttttaagcagcaaatggtaactgatgtgtttgagcaaagtgtgacaagaatgaattcaatgaactgaaaaatgtttcagtgtccatatgctcatatttgtagacatactattatgatcctttttttgcaatggagatcggcctgatcagttgcat

SEQ ID NO: 6871 - DNA, 986 bp, Zea Mays
aagcctccgcctcgtctcgacgccttacacccagtgccaaccgccgtgccctcaccctctctatctgcgccgtctctcactctctaccgccgccgccgccgccctacgccacgcaaaaagcgccacaagattcgcccctgctgaaaacgcactcgatggcgtccgcgacgggggtttcctcctcggagatggcggtggaccacgcgacggggccgggcgccgtggacaagccgcggttcgatgctctgacgccgaatgagatgagcggcgggaggccccagttccggaaagtgcccgtcccgcagcaccggttcgcgccgctcaagcgatgctggatggaaatctacacacccgtatacgagcatatgaagatcgatatacgcatgaatctcaaggcaaggagggtggagctaaagacaaggcaagacacaccggacgacgtgaagaccctgcgaggggagcatctgtcgcgtgctattggccgcctatcagggaaaggaggcaagaccaagtacgccattgagaactctaccaggacccgcatcgttatcgctgatacaaagatccatatacttggatcctttgttaacatcaaggtcgcgcgggattcgctttgcagtctcatcttgggttcacctgctggcaaagtgtattctaagctaagggctgtatcagctaggttggcggaaaggtattaaattagattggttttgcttgtaccatgtaacggttgcagttttgctgacagtatgttttactagcggatttgtgtgctcggggatgctgggagatttaaattggtgtgtacatgtgctcttgtgccaccacaatctatgtggtggggttgattttgatgaaaattagttattttcttatcctaacccactataaatcgataatatatgtattgaggtgggtatgagtgtagccaaacaaggcttgagatgtgtttctacttgtttcatagagtgcatgttcctttgcga

SEQ ID NO: 6872 - DNA, 2279 bp, Zea Mays
ggcaacgcaacggtcccggactggtcctgcaatacaaaaggattcttcagttagcagtagctttcagctgatcgattcacttctcctccccgtctgttgagtcattacccgcaggcgtttcgtcaccgctttcagaattcagacagaggtcggtcgccaggaacccataaaaaaagtttccaagcatgcatggttttgttgcctgtgagtagatgatgttggagtacgtaacgtagtaacaatgagcagtgatgtgaattgcgatgatatacgtgacgccgagagagcacatgaacaggcggcagcgggcacagtcctccagtcctcgggtgaggcgatcgtcgccggcgccatgggagggggagtccaccaccaccacccgtgcgtggctgctgatggagatggggccggggccgggcccgggccggccagcgtggaggccgcgttgaggcctcttgtcggcgtcgacgcctgggactactgcgtctactggaggctgtctcctgatcagaggttcttggagatggctgggttctgctgcagcagtcagttcgaggcacagcttccagcgctgggcgacctgcctccatcaatccagctcgactcctcgtctgcagggatgcacgccgaggcaatggtgtccaaccagccgatctggcagagcagccgcgtgccagagctccaaacaggttactccagtgtacggcatggtgcaggagcccgggtccagcggcggcccgaggacgcggctgctggtgcccgtcgccggcggcctcgtcgagctcttcgcggcgagatacatggcggaggaggagcagatggcggagctggtgatggcgcagtgcggggtgccgagcggcggtgaggggggcgcgtggccgccgggattcgcgtgggacggcggcgcctcggacgcgtcgcgtgggatgtacggcgatgcggtgccgccgtcgctcagcctgttcgacgccgccggcagcgtcgcggcggacccgttccaggcggtgcagcaggcgccgggcgccggtggtggtggggtggacgacgtcgccgggtggcagtatgctgctgcggctgggagcgagctggaggcggtgcagctgcagcaggagcagcagccgcgcgatgcggactcggggtccgaggtcagcgacatgcagggggacccagaggacgacggcgacggcgacgcgcaggggcgtggcggcggcaagggcggcgggaagcggcagcagtgcaagaacctcgaggcggagcggaagcggcggaagaagctcaacgagcggctctacaagctcaggtcgctcgtcccgaacatctccaagatggaccgcgcggcgatcctcggggacgccatcgactacatcgtgggcctgcagaaccaggtgaaggcgctgcaggacgagctggaggacccggcggacggcgccggcgcccccgacgtcctcctggaccacccgccgccggcgagcctggtggggctggagaacgacgagtcgccgcccacgagccaccagcacccgctcgccgggaccaagagggcccgtgcggcggcggaggaggaggaggaggagaaggggaatgacatggagccgcaggtggaggtgcggcaggtggaggccaacgagttcttcctgcagatgctgtgcgagcgccggcccgggcgcttcgtccagatcatggactccatcgccgacctgggactggaggtcaccaacgtcaacgtcacctcccacgagagcctcgtcctcaacgtcttccgcgccgccaggcgggacaatgaggtggcagtgcaggcggacagactgagggactcgctgctggaggtgatgcgggagccgtacggcgtatggtcgtcgtcggcgccgcccgtggggatgagcggcagcggcatcgccgacgtgaagcatgacagcgtggacatgaagctcgatggcatcatcgacgggcaggcggcaccgagcgtcgcagtgggggtttcagaggatcactacggcggctacaaccatctcctccaatacctcgcttgatcattatttaattgcgttcgttcatgttgaaagttcgatcaaactatcaaaggatggatcaactaataaaaacgggatccatatataagtaactgtgaattgcgatcattaattgtatgcatacaagcatatggtcgtggattaaagtttgttaattgggttttctcactgcttttctggatctttcttgtgttggttcaaacgagggcggaataataaagctatttcctctatgtttttatacaaggt

SEQ ID NO: 6873 - DNA, 1174 bp, Zea Mays
gctgtttcatctggatgcaaactatatgctttggaatacaacttggggagaagatgttattgctatcctgccctgggaggaatggtgggagtttgaagtgacaaaggatgactcaaatcctcagattgcactgcttcctttgcatccagatctgcgggcaaaatttaatgagacagcagcttggatttatgcaaaaagcatggaggggaaaccttatgggtatcacaatatgatatttagctggattgataccatcagtgataattatccaccaccattagatgctcatgtggttgcttctgttatgactgtatggagcaagcttcaaccagagtatgctgctaatatgtggaaagaagcccttaacaaacggcttggaactaagggtcttgacctttctgaaatcatagtggaatcagagaaacgtgggataacatttgacaagttactatctgttcctgagaacgatagctgggtctatgaagatggtcagtcagcatcttgtgtggctttcgtccttatgatgtacaaggaggctggactctttgaccctattaccagctctattgaagttactgaattcacaataaaagatgcttatatcctcaacttttttgaggacaactcgacccgacttccggagtggtgcaacaaggatgacgatgtgaagcttcccttttgccagatcaagggcaagtaccggatggagctgcctggatacaacaccatgaaaccctatgcccacatgaacgagagatgtccatccctgcctccagattacaacaggactaagggctgctagtgctaaccagatatgcgtgtgcattttattcacgctcccttgtagccattgcttcagctgtaaatattatacatttatactagtataatagtactatgggggtatgtactgcttgcccttgagaagcgtgtattgattgtaggcaacttatgtgagacttcctcgaataaggaagaacatgaatcacacaaatgtacagtaaccatgcttgatctttttatcagtgtttacttatgtaacagtaaaaaatgtataatgtatgtgcgcctttggactgagctgattacatgatccccatgcccatatgcatgtgcctcccattgcggattacagagtgtaaaaagatttgactatgtggaagtaagcaatcgg

SEQ ID NO: 6874 - DNA, 1883 bp, Zea Mays
ctgctacatgcccccgcccgaaaccccctctcggtccccgcttgcgatgcccccggtgtgacgcccgcgctcgcctcctcatggatcgcacgcccaccccgcgtacatctctgggcggcgatgcccgccccatccttgctccattctcgcggtcgtcggtcgaccctacctcgccatcccccatcccattcgcttgcaccagcggcccgagctccaggtcgagtgccgagctgtagaagggcaagatctacttcctcatgccggtcatggcaagttgcccaccccgacgcctgcgcccaataagccgcccgtcgatcgccggtcaatccgcttcggtgcgaggaggcgacaacgtcctcttgctccgatccacctctcccccaacccgctaggacgccgctgccgagagcgagcagaggcttccctcctccgacgggggaggaagatgctcaccaagttcgaaaccaagtgcaaccgggtcaaggacctcgccttccactcgcgtcgtccatggatcctgtctagcctctacagcagcgtcacccagatgtgggtctaccgcatgggcaccatcctcaaccgcttcgcagtggcgtccagttccacgccacataatcgctctttgtatccggagtagtatcgctccccttcctgactggacgtactcctagcccactagcattggccttgagcacgcacgaaggctcattcatcagtaactatccggtgatttgccgtataaactgtcacatgatgtttctacctcacaagtggttgtactcaagcaattgagataatttgctctgtgttagctcgtcatggtgcaaacatcctacttccaagacttggatttatgttctatgaagcgcgtgctgttttcaatggcatggaggccatgtacttcaaacagcgacgtcaaggaagatgatgatggtcgtagggatcgacgatagcgagcaaaacttctacacactgaagtgggcacactgcagcacttcttcccgccaagcaagctgcaacagtactgccttgtcgtcgtcaccgtcaagccctctgccgcctccagtgtccgccctgccagcccaggtatgcgaatctccaatccatgtgaggattcagggctagactagatgtagcttccgacctatatgattagttgtatgtggagagcaaacaatcaacttacacctaggtctaaataaaatagtggtggttaaatctttgaatctgtagatcaaaccatctcaagtaattttagttttgttatgaaaatttttagctccaatgaaataattgcattttaattattaagatttaacatacatttggttctatgaggaaggaaatcataagtcgagattaaagttgatcaactcgacactcgaacaactgaatgagcaagtattacaagtgctgaaagttgtgagtgctcaagtccaacttctttatcgcataagttttggtgaagatacttattctggaacctttaaaagcatcaacgttagtgttcaagaactcaaagagtaaatgaagatggaagaccaagatgatatttatggagactattctgatacattgtcaagcactgagttcgacaatatgaacatctcaacatactgatccatggaagaacatgtatcattgtttaatgatgaggaaagacagggatttctcttaagtacaatgcttgctagcgtgtgcgacatgccagatcacccaaaagattgacaaatgatgtgtatatggttgattcatttaattttgttatgcattttggtcactataagaatgcattctttatgtgtgctaatatgacatcctaggacctgacgcttcaattttcaaattggttattgatgtatctttttacatgaagaggtaat

SEQ ID NO: 6875 - DNA, 2834 bp, Zea Mays
acacatcctaaatccaaaccaaccccacacccccaccaaactaccgaagcggaagggggggaaaatccacgcgacgacgacgcggcgaaacgaagggaagggaagcaggagcgagacaaatccccacccggctccaaaccctagccacctcccccgtcctgtccccagatctcgctgccgtctgacccgcctcgcttcgatgtgacccggccctagggtttgagacgtgttgcggtaggggtgttctcaaggattcacgacacgagagagattcggggaggcgtcgacggtgcgagcacacatgaaggacccggcgcaccgcacgaaggtggtgctccggcggctgccgccggcgatcgcgcagcaggccgttgtggaccaggtcgacttgcgcttcgctgggcggtacgactgggcgtgcttccgccccgggaatgccagccaaaagaaccatagacattctcgactttaccttaatttcaagcgccccgaggatgttgttgagttcgctgaggtcttcaatgggcacgtatttgtgaatgaaaagggtgctcagtttaaagctttcgtggaatatgcaccatcacaacaggttcccaagtcaactatcaagaaggatggccgtgaaggaactattatgaaagatccggagtacttggagtttcttgagtttatttcaaagcctactgagcatctgcctagtgctgaaattcagctcgaaaggaaagaagctgaaaggctgctggaaaggaggcacctgttgtgacacctcttatgatgtatgtccgccagcaaagggcagctaagagtatggttcatagacctggaagtagacttagcagaaaacttgcaagtgtcgtaagcagttccagtcctaaaaggtcttctgagaagcgcagatcctccacgtatgttgtacgagacaacactaaggagaaaccaacctatatcatggtgccaaagagagaggagcatacacaaagggaaaaagatgttgctggaaattcaggcgatgccacaagtgggggaacatctggatctggtcaggttgctgagtttaaaagggataaaattgtcatattgaaaggaagaggaaggattgattctaatacacctaatggagcaactcagcactcatcaacccctatcaagaatgtgccaccatcgcgttctagacaagaccagcgacttgaagccagtggaaaaattattaagactatactatcaaacaaggaagcccgcagttcaaatccttctgaacatgagcaggaaggtcacatgtttaatactgagaaggataagcggccaccacgggctttcaaccctcgtaccattgtgaaagatcaggtagttgaaaatgctgagaggagccattttgatgagaaggctaatcatctccatggctccgttcccattggtgagaaggttgaaaggcatgctagaaacagagatagacccgatcgtggtgtatgggcagctcgccgctatgacaaatctacatctgcaggtagttcacatccttcgtcgtcagagttccctcaaatgcagtcacattctggagataatattttgcaactagcagatggtatgtaatttgctgaaatagttgcagcattggtgatgcctgcagtctcaaaacttgaactcaacacaggtcatggagacagaaagacagacacaaggggtcaaggtggtagccgtggtgttcctgttgaaaatggacataggcacgccaaccgtcgtggccttccacgtggaccaaaggaaactgaaatatctgcaagtgtgcctgatgcgaagaattcaaagaggggctctgctagctatggtgctcatgagagacaagtatgggttcagaagtcaagttcaggctcgtgagtttgttcattgatgatactcccatcgaaacaggtattgccagtcgtggtgaagtcttggattctgcagtgcattcttctttgttagctgttgatcctgtgaagtatgttaacaaaatgtccaacggtcaaatgctgctatgaagtgcaacctcagatttgtcaatcgaggtcttgctgctatagctgaaaagagagcttgctgatttgattcacagaaatagtgaagtaacataacccggcatgtaggtagctctcgaccacttttgggcaagatttgattcggtcccaaggttgatatttctggagcaatgggtggagattagtttggcaccagtacctcactacctcgtgacagtggtcacatatttccaagacccctggaggctacacgcaccctcgtcagagatggatgtaaatatctctagagaaagaagaggtctggttctgattgctgtttacaggttagaggtgcagcgtatttacaaagagatataagagttatcacttatcatcagactgcttggtttgctaaataaaggtgaatttagttactagattatgagaccccgtgttttgactgccgcaatcgtggttcgcggcagcagaaaggttacctagagtctaaaagtggcatctcattttggtattatggttctgaccaaatgggatatgatgtgacttgtgcggttgttttggacgcctggtgtgttttgctaccatgttccaccagacgacccgggggttctgtagtgtcagggatggatgatgtgtttggtgtacagcatcactggtgcttactgttttaaatcttaaaagtgatgttgccttgccttaatggttgatggtgtctgttctcttgtccattccgtcatgaaagttaaaaaaacatgcttgaaaacggaactctccagtattttggagtggttggacacctctaagctgattctcttgttt

SEQ ID NO: 6876 - DNA, 1670 bp, Zea Mays
agtatacaacagccagcccaataatgacatatgggacacgtcactatcgaagagcttgtagttgtaggagcagatcgcggtaagcttaccacctaggcaccggcggacccgccagtccgcccctgcatccagtgatccagtcaatcgcggacgcccgcttggccgcttccatgggttccatgaggcggagttccgtgcggcttctcatagggttcctgctaattcggctcaattggtgctcggcggtgggcgacaagggcgcggagaaagtaggcgtggctttcccggtggtggtgagcacctggccgttccgtgaggcggtcagagcggcgtggaaggtggtttcgaccggtgaaggatggggttcggccgtcgatgctgtcgtcgctggctgctccgcctgcgaggacctccgctgcgatggtacagattacgtgtgcttctggtatgctgctgttctctgccacgcaccgatcggaggttgtacgtgtggaggatcggtgggcgcggtttgaaggctgaacggcggcgaggagccagcgatcgtgagagaaggaaaacaagttggtccaggtggaagtccagatgagaatggggaaaccactttagatgctcttgtcatgaatggggcaacaatggaaattggagctgtggcggccatgagatatgtgaaggatggaatcaaggcagcaaagttagtcatggagcacagcgagcatactctgctcgttggagagaaagcaacagcatttgcaatttcaatgggtcttccaggaccaactaacctcagttcaccagagtcaattgagaaatgggaaaagtggaaacagaaccactgccaaccaaacttctggaaaaatgttgatcctgtcgtggggagtcaaggtggtctctgccaggggtattttgaaagtgataatttactggagccaataaagtccaatttgaaggttgttaatcgccacaaccatgacacaatttctatggctgtgattgacaagatgggccacatagcagttgggacatcaaccaatggtgctacatttaaaattccaggaagggtgggcgatggaccaataccaggatcttcttcatatggtgatgatgaagttggggcttgtggagcaactggtgatggtgatattatgatgcgcttccttccatgctaccaagtggtagagagcatgcgacaagggatggatcctcgagatgctgccacagatgctatatcgagaattgcccgcaaatacccagatttcatcggtgccgtatttgcagtcaacaaggaaggggtgcatgccggggcatgccacggatggacattccaatactccgtacggaattccagcatgcaagatgtggaggtcattacagtatatccttagcaatcgcaattcaacgaaaacaaaagtttgctttatcagcatgtttaaaaatgtcacggctgcccccctgttgatgttttaaaaatgttctgtgcggattatttcaatgttttcttaaagtcgattgttttgaaactagtagtactgtatgtaccaatctgaccttagttgttttttccctggaaagtgttgaatgtcttggaaagtcgaaaccttggatcttctctgttggagttggagttgattgtacagaagttagacttggatatagtcaacttcgtcgaa

SEQ ID NO: 6877 - DNA, 1508 bp, Zea Mays
ctcggcgatgctctccctgttcgccggagctcgtgcggtcgctccggaccacgcgcattgtggaatgcaataagagacatggttgtccgtggtgctccagcaatagccatagcagcggcactagcattagccgttgaagtttctgatttagattttattggtacgcctgaagaagcagcttcttttgtttcaaagaaattggaataccttgtatccagccgaccaactgcagtgaacctatctgatgctgcaacaaagctccaaactttggtatcaaaggcagctgaaactgcaaaagattccaagtctatctttcaggtctacattgaggccgcagagacgatgcttgttgatgatgtggcagataataaagctattggctcacatggagctgtatttcttcaaaggcagcttgcaaattcaaaaaagatatctgttctaacccattgtaatactggcagtcttgcaactgctggttatggaactgcccttggggttatacgcgctcttcattcggggggagttttagagaaggccttttgcaccgaaactcgtccatttaaccagggatccagacttacagctttcgagttagttcatgaaaaaatacctgcaacactgatagcagattctgctgctgctgcgttgatgaaacaagggcatgttcaggctgtcattgttggtgctgatcgaatagcagcaaatggtgacacagccaacaagattggcacatacaacctcgccatctccgcgaagcatcatagtgtccagttctatgtgtcagcgccggtaacttccattgatctctccctcccatctggggatgagatagtcatagaagaaagatcaccaaaggagttgctgaactctgaaggtggtctgggaaagcaagttgctgcatccggtatatcagtctggaacccagctttcgatgttactccagcaaatctgatcactgcaatcataacagaaaagggtgtgatcacaaaaactgatgctgatggatctttcgacatcaaaggattccttctgcccgcaaaataatactctagcgtggcttccattctgaatgacaaatgtctggatcgacactgttgtattctgttttctctattatacacaataataaagtcatgtcctcataggattttggtgtaagttttatggataggagatcgacgctagggtgtgtacccatagcggcgcgtatgagccgtgttttcacacgagtgggcaagtgaaaaagagatgtgggagatgacctctgaggctagggatgttttgtttctagagactaattttttagtctctttattttattttattttagttcctaaattgctaaatatggaaactaaaatagagttttagttttcgtgtttgataatttaggggctaaaaaaaataaaataaaatggaaggattaaaattagtctctagaaattaaaccccccctaagcaagatgattgtcttgcttgctttcaaaataatacattatctctatatt

SEQ ID NO: 6878 - DNA, 4313 bp, Zea Mays
cacgtttaaaaaccaccaccaccgccttaattcatactccgtattaaattgttttatctctcccgagccagcccgttgctggctgcttgcttctcgcagagacagggagtgagtgaggcagaggaggcgtacctgcggaggcgggcagccgaggcccgcgcaattcgcgtccagcagggtgggtcgggctcgcggcgcctctattggcattcccgcggttgtgcgggcgggttggcggccagcgagatcggctgttgtttctggcggtttttgtgaggtgtttagtgttttgctgggtgtgactgtgagcgtggattggcgactgctggaggggtttggggatcgatttgaggtcgtcggagcggagatcccgaggggacctgcggtttcgttgtggcccgtgagttggattccggacgcagtgccgtccggcgggccgccgagacgatggcgtcggtggaggtgaggtcggtgcggaaatccacggccctgcgggcgcgcggcgggcccagcaagctgcagtcggcgcggtcgatgccgctcgactacaggtactcggacggtccctcggcggcgaacggcgccggtggcgggccggctgggaacggcgtcgggcgccgggcggttgcggtggaggcagggaaggaggagaaggaaggtgaagtggtgcggttggagggggacgacgcggactctccgtacagctccaatgtggtgacagcggaggaggaggcggggaatacaggtggaggaggagacgaggtggattcggcggccgcggcgacgccaaggcggttgtcgccaagggcagcagcgagccccacgcaagtcgacgcccggtggggtgacaccagctcgtacggcgctaagaagaagcatagagtgttttgtcagcttcgaaatggtgattgggcattatgcacagtacttgcaacctccggtgacgagtctgttctaaaggtttctgaagggaaagtactgagattgaaaacagagagccttcaacctgcaaatcctgaaattcttgatggagtggatgaccttatgcagctaagttatctaagtgaaccatcagtgctgtacaatctgcagtacagatactcccaggacatgatttatactaaagcaggtccagttttggtggctgtcaatcctttcaagaaagtttctctgtatggtaacgagtacattgatgcatatagaaataaatcaatggatagtccacatgtttatgcaatagcagatgcagcactttgtgaaatgaaaagagatgaagtcaaccaatctataattataagtggtgagagtggcgcaggaaaaacagaaactgcgaaaattgctatgcagtatctggcttctcttggaggtggaagtggcattgaatacgaaattcttcagaccaatccaatactcgaggcttttggcaatgcaaagacattgagaaatgataactcaagtcgttttggaaagcttatcgaaattcatttcagtaccactggaagaatatgtggtgccatgattcaaacatttttgcttgagaagtccagagttgtgcaatgtgcagttggtgaacgatcgtaccatatattttatcagctgtgtgctggtgcacctgcatctctaagagagaagttgaatttgaaaaaggtagatgagtacaaatatcttaaacagagctgttgctattcaattgcgggcgtggatgatgcccaaatgtttcgaactgtgacggaagctatggacatcgttcatatcagcaaagaggaccaagagaatgtttttgcaatggtctctgctgttctatggctgggggatgtctcgttcacagtaattgacaatgaaaatcatgttgaaatcattgcggatgaagcttcaaaaatggttgcagaacttcttggctgcagtattgaagatctcaatttagctttgacaaagcgccacatgaaagtaaataatgaaaacattgtccagaaacttacccttgctcaggcaactgacacaagagatgctctggccaaatcattgtatgccagtttgtttgaatggcttgtagaacaaattaataagtctctctcagttggcaagcgtcgaactgggagatctatcagtattcttgatatctatggctttgaatcatttgatttttgaacagttctgcatcaattatgctaatgaaaggttgcaacaacatttcaatcgtcatttatttaagcttgagcaagaggaatatgtggaggatggcatcgactgggcaaaggtcgactttgaggataatcaagattgtttgagtctatttgagaaaaaaccactggggttattgtctctgctggatgaggaatctactttccccaatgccacagatcttacttttgcaaacaagcttaagcaacatcttaactcgaattcttgcttcagaggagaaagagacaagggatttgctgtccgtcactatgcaggagaggtggcttatgatacttcgggttttctggagaagaatagagatttattgcacatggactcgattcagctccttgccaaatgcaaaacttttctgccaaaaatgtttgcatctaagatgttagttcaaccagatgattctatgtctgttccatatagatctagtgctgctgattctcaaaaactaagtgttgccatgaagttcaagggtcaactgttccaacttatgcaaagactggaaagtacaacaccacactttattcgttgcattaaaccaaataatttacaacttcctgcaatttatgaacaaggacttgtgcttcaacaacttaaatgctgtggggttctcgaggttgtccggatttcaagatctgggtatccaacaagaatgactcaccagaagtttgctcggcggtatggctttcttcttcttgaggatgttgcatctcaagatccactcagtgtttcagttgcaattcttcatcagttcaacattttacctgagatgtatcaagttggctacacaaagttgttcttccgaactggacagattggcaaacttgaagatactcggaatcgtactctacacggtattctaagggttcaaagctgtttcagggggcatcaagcccgtcatcatgcgagagaacgaataagaggagttttggctcttcaaacattcattcgtggtgagaaagcacggcaaatttattcctctttgttgaggaaacatagagcagcagttattttgcagagtaacttgagatgttggcttgcaagaaggtatttcataaatgtccggaaggcctcagtgataatacagtctggtattcgtggcagtcttgttcgaagatgtaatggcaatattgatctaataaacgtgctaagagagtttgaatcaaaacaggaggcagagggtgaccaaattttgatcaaggcatcagtcctggccgagttacagaggcggatactaaaagccgaggccacagtacgtgaaaaggaggaagagaatgagacgcttcatcagcggcttcagcaatatgaaaaccgctggttagagtacgagcagaaaatgaaagctatggaggaaatgtggcagaagcaaatgcgttcgttgcagtcgagcctttccgtagcaaagaagagtcttgctctgcatgagacacctaggatgtcggactcatcagtggatcagagctgggaaagcaacgggaaccatgtcagcagcgggtctcagctggtgccacgcactggtgggcgcgaaatgagcgctggcctgagcgtcatcggccgcctagcagaagaattcgaacagcggagccaggtttttgctgatgacgccaagttcctggttgaggtcaagtccgggcaggcggatgccagcctaaacccagacatggagctccggaggctgaagcacaacttcgactcgtggaagaaagatttcagtggccgaataagggagacaaagatgatcctgaacaagctcgggaacggcaacgagtcatcgcccaactccgtgaagcggaaatggtggggcaggctgaacacctccaagttttcgtgagtttgttatgtatactgattggtaattcgtagatgtaccggtattttacacgccggtgtggttctagcttcctagagtttctattctacggggtgtcgtgacttgtgaaagtcgagtgtgttgggctggagttgtgttccgtggagggcgagttgtatagttcttccacaatggcttcctttgaggggggtcaaggactactgaattgtgatgtaattacttgctgaagtagttgtcgaagcgggaagattgtgacatcgctcactattccactatcctcgtgctttac

SEQ ID NO: 6879 - DNA, 4343 bp, Zea Mays
gtattaaattgttttatctctcccgagccagcccgttgctggctgcttgcttctcgcagagacagggagtgagtgaggcagaggaggcgtacctgcggaggcgggcagccgaggcccgcgcaattcgcgtccagcagggtgggtcgggctcgcggcgcctctattggcattcccgcggttgtgcgggcgggttggcggccagcgagatcggctgttgtttctggcggtttttgtgaggtgtttagtgttttgctgggtgtgactgtgagcgtggattggcgactgctggaggggtttggggatcgatttgaggtcgtcggagcggagatcccgaggggacctgcggtttcgttgtggcccgtgagttggattccggacgcagtgccgtccggcgggccgccgagacgatggcgtcggtggaggtgaggtcggtgcggaaatccacggccctgcgggcgcgcggcgggcccagcaagctgcagtcggcgcggtcgatgccgctcgactacaggtactcggacggtccctcggcggcgaacggcgccggtggcgggccggctgggaacggcgtcgggcgccgggcggttgcggtggaggcagggaaggaggagaaggaaggtgaagtggtgcggttggagggggacgacgcggactctccgtacagctccaatgtggtgacagcggaggaggaggcggggaatacaggtggaggaggagacgaggtggattcggcggccgcggcgacgccaaggcggttgtcgccaagggcagcagcgagccccacgcaagtcgacgcccggtggggtgacaccagctcgtacggcgctaagaagaagcatagagtgttttgtcagcttcgaaatggtgattgggcattatgcacagtacttgcaacctccggtgacgagtctgttctaaaggtttctgaagggaaagtactgagattgaaaacagagagccttcaacctgcaaatcctgaaattcttgatggagtggatgaccttatgcagctaagttatctaagtgaaccatcagtgctgtacaatctgcagtacagatactcccaggacatgatttatactaaagcaggtccagttttggtggctgtcaatcctttcaagaaagtttctctgtatggtaacgagtacattgatgcatatagaaataaatcaatggatagtccacatgtttatgcaatagcagatgcagcactttgtgaaatgaaaagagatgaagtcaaccaatctataattataagtggtgagagtggcgcaggaaaaacagaaactgcgaaaattgctatgcagtatctggcttctcttggaggtggaagtggcattgaatacgaaattcttcagaccaatccaatactcgaggcttttggcaatgcaaagacattgagaaatgataactcaagtcgttttggaaagcttatcgaaattcatttcagtaccactggaagaatatgtggtgccatgattcaaacatttttgcttgagaagtccagagttgtgcaatgtgcagttggtgaacgatcgtaccatatattttatcagctgtgtgctggtgcacctgcatctctaagagagaagttgaatttgaaaaaggtagatgagtacaaatatcttaaacagagctgttgctattcaattgcgggcgtggatgatgcccaaatgtttcgaactgtgacggaagctatggacatcgttcatatcagcaaagaggaccaagagaatgtttttgcaatggtctctgctgttctatggctgggggatgtctcgttcacagtaattgacaatgaaaatcatgttgaaatcattgcggatgaaggatgtgctttgctgtgacagagtgcacgtgtataaaacttgtttcaaggagtccgcctgatgatgttttggaaaactgaacacaaactagcaattgtattgaagatctcaatttagctttgacaaagcgccacatgaaagtaaataatgaaaacattgtccagaaacttacccttgctcaggcaactgacacaagagatgctctggccaaatcattgtatgccagtttgtttgaatggcttgtagaacaaattaataagtctctctcagttggcaagcgtcgaactgggagatctatcagtattcttgatatctatggctttgaatcatttgataagaacagttttgaacagttctgcatcaattatgctaatgaaaggttgcaacaacatttcaatcgtcatttatttaagcttgagcaagaggaatatgtggaggatggcatcgactgggcaaaggtcgactttgaggataatcaagattgtttgagtctatttgagaaaaaaccactggggttattgtctctgctggatgaggaatctactttccccaatgccacagatcttacttttgcaaacaagcttaagcaacatcttaactcgaattcttgcttcagaggagaaagagacaagggatttgctgtccgtcactatgcaggagaggtggcttatgatacttcgggttttctggagaagaatagagatttattgcacatggactcgattcagctccttgccaaatgcaaaacttttctgccaaaaatgtttgcatctaagatgttagttcaaccagatgattctatgtctgttccatatagatctagtgctgctgattctcaaaaactaagtgttgccatgaagttcaagggtcaactgttccaacttatgcaaagactggaaagtacaacaccacactttattcgttgcattaaaccaaataatttacaacttcctgcaatttatgaacaaggacttgtgcttcaacaacttaaatgctgtggggttctcgaggttgtccggatttcaagatctgggtatccaacaagaatgactcaccagaagtttgctcggcggtatggctttcttcttcttgaggatgttgcatctcaagatccactcagtgtttcagttgcaattcttcatcagttcaacattttacctgagatgtatcaagttggctacacaaagttgttcttccgaactggacagattggcaaacttgaagatactcggaatcgtactctacacggtattctaagggttcaaagctgtttcagggggcatcaagcccgtcatcatgcgagagaacgaataagaggagttttggctcttcaaacattcattcgtggtgagaaagcacggcaaatttattcctctttgttgaggaaacatagagcagcagttattttgcagagtaacttgagatgttggcttgcaagaaggtatttcataaatgtccggaaggcctcagtgataatacagtctggtattcgtggcagtcttgttcgaagatgtaatggcaatattgatctaataaacgtgctaagagagtttgaatcaaaacaggaggcagagggtgaccaaattttgatcaaggcatcagtcctggccgagttacagaggcggatactaaaagccgaggccacagtacgtgaaaaggaggaagagaatgagacgcttcatcagcggcttcagcaatatgaaaaccgctggttagagtacgagcagaaaatgaaagctatggaggaaatgtggcagaagcaaatgcgttcgttgcagtcgagcctttccgtagcaaagaagagtcttgctctgcatgagacacctaggatgtcggactcatcagtggatcagagctgggaaagcaacgggaaccatgtcagcagcgggtctcagctggtgccacgcactggtgggcgcgaaatgagcgctggcctgagcgtcatcggccgcctagcagaagaattcgaacagcggagccaggtttttgctgatgacgccaagttcctggttgaggtcaagtccgggcaggcggatgccagcctaaacccagacatggagctccggaggctgaagcacaacttcgactcgtggaagaaagatttcagtggccgaataagggagacaaagatgatcctgaacaagctcgggaacggcaacgagtcatcgcccaactccgtgaagcggaaatggtggggcaggctgaacacctccaagttttcgtgagtttgttatgtatactgattggtaattcgtagatgtaccggtattttacacgccggtgtggttctagcttcctagagtttctattctacggggtgtcgtgacttgtgaaagtcgagtgtgttgggctggagttgtgttccgtggagggcgagttgtatagttcttccacaatggcttcctttgaggggggtcaaggactactgaattgtgatgtaattacttgctgaagtagttgtcgaagcgggaagattgtgacatcgctcactattccactatcctcgtgctttac

SEQ ID NO: 6880 - DNA, 3002 bp, Zea Mays
atctcacgcggccatccgacgaccagcttctttcactttggaaccctcgtgtgaggccaccatccccttctctctcccttctttcatctcccctccccatttggatcctccgccaccggttccccattgctgcctccaccgcccccgctcctcgccggttccccattgctgcctccactgccctcgctccgaggagggccacgacggccagatcctggactcattgtcgcgtacctggatccaggggaaatggcggaacacggcgaacgcgagcgtgacggcggggttcatgtgcgcgcccgagatgtggccgacggcgtagatcatgacggtgacgatgagcccgccggcgaccgactgccccagctgcgagatgcggtccttgtcgctaccgtagatccctgccgccccgcacatgacgaacaccagcaggaacgtggacaccacctccgagaccacctgtcgatcgataaccatgggaggagcaccaccaccacaaagcactctcatgcatcagtcgatctccggccgccggtacttgattctgaataacaaataatttccactactgggactgaaacttagtatccatctactgcttgattaggacatggcttagaaaatgtcatctttcacttgagtagtctttggtcattcaagcaccacttggcattcagttacgtcatggcagttttggtgtggcccaaatacctttaccccttgcttctgtgagttcaaaggatacctctgatacttgtattgaagatggtgaactctgtgatactttgtcaatgaagaaaaggacagacgaagtggcaggagcaaatgggttggaaggggtctcgatagagtgtgctaatttgttgaataatggcattgatgttttcatgaagcagttaattggatcttgcattgaattagttagagcaaggtctcgacatggcaaactaaggcatgagacattgaagcagcagctgtgccgaaagctaataaatggtgtatcagtgcataaccatgttcctgggcagagttctgttatacctccagagacaaattccatctccatgcaggacttaaaggcagtaatagagttaaacccttgtttgcttgggattaatgcatcactgctacacgaaaagatcaattcatatgactagtaggatggagctagttgtattcatctcgtcacaagatcctatgatcttgatggtctgtcttgtttcatggctgttgtaatcaagccataagtttactgatgggtggcggtgaaggcaagcacattctgtgcagtaccctgattgttttgcatgtcatctccagtgcaatcttccagaatgaacaaaaaactgtgtatctgctgggtgcagtactaaaataattcatttcatccacctaaggagtaaggactacgatgggcgaaagtgctccagagataactatgttgctggactccagacaaattgaggaaccatatcaaagatttatctccaaatgaaagcctgtatgagcagaagcccgaagaaacagctcttgtcctgccatcatcggtgattgcaagtactacagctaggagcaaaccccatacttcccgatttgaatatgtagaaaatgcacctgctcctaagactgggagcagcttagaaggcaatctcatgagtggacatgttgcacccctaaagtcatcgaacttctttgttgaatttgggatggacagtggatatcacaaaaaatatacatccagttcatccaaagtgcaggtaactgttttattcagacatatatgattaatcatcatccatcaatatgtgaactccattgagcaagtatattgtaaagtcagaactaaaaagaggaacatttggttccaccatttcaccttattttgtgctaaggggaagtatttagagattgaattgatggcaattacttcagtctttaaacctgttattagtgttgataatgttgattctattctgtcgcacattgttgtgaacagcttggaaataccttgcgaggtttccttaagctgttcctagtttggcatcaagtttgtctgtgttctctgctcctcctcccctcctgttaagactgcagcttagtattccgtttgaaattagtcatctcatttcaccaagactcgctcttaaaagaagacttgccattatatgtcctactcagttagggaggaaaagaaggggaatgctggggccaactgccaagctagttatgcacttgtatctaatatattgatttgaatatgatgacctctatattgtcagtttctgaatttttgcaacacagatgagcctctcccatgtgcttatgaaagtttttaccttttcttcaatatgaagtctgaatgtgtggtgtggcctgtctgatctatctagcagagatggcagcggcggcggggccgtacaaagagatgctggaagtggtgaacgcgtgcgcggcccggatccggtggcgcctccgtccagcttccaagcgccgcctcctcaacagttgtgctgtggttgttgatgaacaaacctagttgttgccagaatatcctgtttctctgcactgggttgcggcttgtggtactggtcgactatggtggcacaatgcctcaactacaagaaaatctttgtggcctgctatatcttgcccgacagttcaaactttgcaaggtgaggtctgttcagtttggccagaaaggcatcccctacctgaacacctacgacggccgcaccatccgctaccccgaccctctcatcaaggccaacgacaccatcaagatcgatctggagaccaacaagatcatggacttcatcaagttgtatttgccctttcatggacttcatcaagttatatacttagttaggctcaatgttagcacaaacagttgatgagcaagtttaaatttagagtacacttatgtatgagttatttgacaatgcttatttatgagatattgaatgttatttatctatattatattaattatagtgttattaaat

SEQ ID NO: 6881 - DNA, 3010 bp, Zea Mays
atctcacgcggccatccgacgaccagcttctttcactttggaaccctcgtgtgaggccaccatccccttctctctcccttctttcatctcccctccccatttggatcctccgccaccggttccccattgctgcctccaccgcccccgctcctcgccggttccccattgctgcctccactgccctcgctccgaggagggccacgacggccagatcctggactcattgtcgcgtacctggatccaggggaaatggcggaacacggcgaacgcgagcgtgacggcggggttcatgtgcgcgcccgagatgtggccgacggcgtagatcatgacggtgacgatgagcccgccggcgaccgactgccccagctgcgagatgcggtccttgtcgctaccgtagatccctgccgccccgcacatgacgaacaccagcaggaacgtggacaccacctccgagaccacctgtcgatcgataaccatgggaggagcaccaccaccacaaagcactctcatgcatcagtcgatctccggccgccggtacttgattctgaataacaaataatttccactactgggactgaaacttagtatccatctactgcttgattaggacatggcttagaaaatgtcatctttcacttgagtagtctttggtcattcaagcaccacttggcattcagttacgtcatggcagttttggtgtggcccaaatacctttaccccttgcttctgtgagttcaaaggatacctctgatacttgtattgaagatggtgaactctgtgatactttgtcaatgaagaaaaggacagacgaagtggcaggagcaaatgggttggaaggggtctcgatagagtgtgctaatttgttgaataatggcattgatgttttcatgaagcagttaattggatcttgcattgaattagttagagcaaggtctcgacatggcaaactaaggcatgagacattgaagcagcagctgtgccgaaagctaataaatggtgtatcagtgcataaccatgttcctgggcagagttctgttatacctccagagacaaattccatctccatgcaggacttaaaggcagtaatagagttaaacccttgtttgcttgggattaatgcatcactgctacacgaaaagatcaattcatatgactagtaggatggagctagttgtattcatctcgtcacaagatcctatgatcttgatggtctgtcttgtttcatggctgttgtaatcaagccataagtttactgatgggtggcggtgaaggcaagcacattctgtgcagtaccctgattgttttgcatgtcatctccagtgcaatcttccagaatgaacaaaaaactgtgtatctgctgggtgcagtactaaaataattcatttcatccacctaaggagtaaggactacgatgggcgaaagtgctccagagataactatgttgctggactccagacaaattgaggaaccatatcaaagatttatctccaaatgaaagcctgtatgagcagaagcccgaagaaacagctcttgtcctgccatcatcggtgattgcaagtactacagctaggagcaaaccccatacttcccgatttgaatatgtagaaaatgcacctgctcctaagactgggagcagcttagaaggcaatctcatgagtggacatgttgcacccctaaagtcatcgaacttctttgttgaatttgggatggacagtggatatcacaaaaaatatacatccagttcatccaaagtgcaggtaactgttttattcagacatatatgattaatcatcatccatcaatatgtgaactccattgagcaagtatattgtaaagtcagaactaaaaagaggaacatttggttccaccatttcaccttattttgtgctaaggggaagtatttagagattgaattgatggcaattacttcagtctttaaacctgttattagtgttgataatgttgattctattctgtcgcacattgttgtgaacagcttggaaataccttgcgaggtttccttaagctgttcctagtttggcatcaagtttgtctgtgttctctgctcctcctcccctcctgttaagactgcagcttagtattccgtttgaaattagtcatctcatttcaccaagactcgctcttaaaagaagacttgccattatatgtcctactcagttagggaggaaaagaaggggaatgctggggccaactgccaagctagttatgcacttgtatctaatatattgatttgaatatgatgacctctatattgtcagtttctgaatttttgcaacacagatgagcctctcccatgtgcttatgaaagtttttaccttttcttcaatatgaagtctgaatgtgtggtgtggcctgtctgatctatctagcaggtttagtgagatggcagcggcggcggggccgtacaaagagatgctggaagtggtgaacgcgtgcgcggcccggatccggtggcgcctccgtccagcttccaagcgccgcctcctcaacagttgtgctgtggttgttgatgaacaaacctagttgttgccagaatatcctgtttctctgcactgggttgcggcttgtggtactggtcgactatggtggcacaatgcctcaactacaagaaaatctttgtggcctgctatatcttgcccgacagttcaaactttgcaaggtgaggtctgttcagtttggccagaaaggcatcccctacctgaacacctacgacggccgcaccatccgctaccccgaccctctcatcaaggccaacgacaccatcaagatcgatctggagaccaacaagatcatggacttcatcaagttgtatttgccctttcatggacttcatcaagttatatacttagttaggctcaatgttagcacaaacagttgatgagcaagtttaaatttagagtacacttatgtatgagttatttgacaatgcttatttatgagatattgaatgttatttatctatattatattaattatagtgttattaaat

SEQ ID NO: 6882 - DNA, 941 bp, Zea Mays
atcggcccatcagtagttaaccaccaaccacgtagtaggccttacgggcctaatgtcgttggctggtcctttgccacgccatgaaaccaaagagcggcgtcgttgcgatccaagacggcaggcgagctccaggttcagttgttcggaggaagcccagcgccggcgatggcgagtgtaaaccccgcggtggcggaggcagaggcggaggcggtggggcggcgggacgagctgtcggagtcgctggctgagctcttcaccaacgtctccctcatggtccgcggcgagctccagatgaatgatcgcgtatcacaggaatacagcaactacggtgacatcgccgctggtctgcgagtatttgtagagcagctgaatgagaaaaaccgaggcttcgaggattacgtgtcgcagattgatgcgatagatcaacaggtgactgagtttgaggcagtggtgtccatgctcgacaagcatgttgccctcttggaaaagaaagtaaaatcggcctatcacatttctactacccaatgatttccatccatatgccacaatgcagattcttttgccaacacttgagcttatccgggaaacatattattatatattctggctgaggaaacaacgctgtagctgtagctgtaggtgttcccaccgttgaaatgatgcaatcagattccaagttgtgctgtagtaactttcagacaaacaggcagcagttgggttttgtccctcacagtcacagtgtattattagtgttaggaaattgatgcatgggtgccgggatttgcggggcacaatcattgcctactgctccacaagaaacatgtcactgttgtgtgtgttgtaatttctggatcaatgggcgaactgcatcttgcagtgtacgcgcttgccaccaagattcctgcagattttcagccaaaggaaatctggctgcaggggag

SEQ ID NO: 6883 - DNA, 1458 bp, Zea Mays
atggtgcccagcagtagccctcagcccactcttgtttgcaactgcaagtaggctgagggagccgccacttggccacttgcattatttgcaccggctagttacctggtccggaaccttgtgcccagctgcgttagtgtcctggcggccaggccaaaccaaccaagctgcaggtctagctagcttcccattttccccctcttcgacgatggaaacgggagcttgctcataggcagcaatatttcttctggaaaaactacaggaataacagactgaagcacatcataccgcgccctcctcctgaacctgcaccttcacaggcacctgctacattgcccctacaagcgtccgtgccgacacctgtagctccacctgttcctgcaccaacatcgtctatgccacctgtggtagcaggtggtgcatctgcaatgtctcctatgcagtttgtaggaactccaggcactaatatgccgaagaatgacatgagaaatgctatggacaatagaaaaaggaagtatgcaccacctcccttgcaatcatccaacagtcattttatgaagttatttgtccatgcattgttttctttccttgctattttgtctgtgctatgaaatcattggtgaactattattttcgaaggacatgatccaattcagtttgatttatggccactcttccaatatagatcatgaagattctcctttccttacaggaaagatgattgagactctcaacatgttttttctgagggatgctatatcctcttccccattcactttggttgctcttcttcattgaagacggtggagaaatacttcttttacttctctgatctttggcccattatcccagtaaaattcatctgaagttctgtcaacaatgcatattgagtcaagtgttattcgttccattgtgcaaataaagactggataaagactagtcaattgaaatgtgaacgtcttgtagctgtgactgaatctgcatatttcttcagagcttataaatgtgatatgaatgtttcataaaactacagtttggctgatgatatgtatacatcttcatcgcaggatgggctaattgaagttcttgcgcaacttttcaacggacactgccggattcgagcacagttgctgcctcaggagccttattatttccttttgttttagtgctggttatttggccttgtagttgagggttcgtgagtttttagaatggaagcttctgacttagagtgaagttagaacaaatactccatgtcgcatgaacttgcacacgtgactttaggtgtcagcattctcctgaatgatcataccatttaccttaatgtttcagcatattgcttggcagcaggaaatatgtactgttcataaactatacatatgcccgttggccccaatacaaagttgacattttggcaatattctgttcatacaaaacaactgtacatgttttagtattttt

SEQ ID NO: 6884 - DNA, 6160 bp, Zea Mays
tttgtaccattttatttttctattagttagacggcttcttctggtgtctcacgccattcttccattagggcatgggttcgaaccccacctcatacaccattttgtaatattttacgttgatttaactaaatggcccgacaagctaacgggttggcatagcatggtcagcatgtcgacatgtcgtgcgtgggccggagatactacccgtgggcgtcgggcctagtggggttgtaccgggtcgtctgtttggccatctatatacgtagatatggtttgtaacgtggaggttggttgcatcgaaggaacggtcgtacaatggtttatttgaaaatagatgtgagatattatttataaaaagatgacgcagaacgaccattaaaactattgctttaatacaatagagacaacgactatagaggttagagatggcaatggagacccgatccccgattccccgcggggaattcccctattaggggacgagtatgggactaatttagtccccgcaggatctaaacgggggaagtttaatcccatcgggttcgcggggacggggacggggaaccatcatctatccccgttccccgtttacccgccctacaaaactattttattcaagttagtcaatttacttgttaaaattatagtaaaaactcagtgcatagcatgttataaaataaaaaactaaactctaaaatagatgtctcttgtaattttcaatattgtttgttaaatttacattaatttgatacaatcaatttaaatttatctttaaatattgtacttctagcggggatagattctccgcgggattaccggagataaattctccgacaggaatgaggatgagagaaaaagctcccccgtgagcgtttacggggatggggacaaagaatttttctccccgtggggatgggatgaagagccattacccaacaggaaaatccccattatcatccctaatagaggtatagatagagaagatatattcaatttgatccacgtaaacccgaaaagacatgaagaaaaaaaataagtaggccaaaagtcagcgtgagcaatccgccgcacaaccccccacgacggcggctgccccaccgcgccccggccaccgtgattcgctgggccccgccgcctaggtacgccgtccccagaagccagaacgcgaaaagcgagcacgggcggtggcccacggcgtcgacgcccaggatccggtgaaccttccggtccatgcgagaaaagagaaagggtatcatggcaccacgctcacacgactacgcgagccgaggtggcggcggcgtcgtcaccggtcttcgacggcgatgtggcgcattggggtgccaggaattttcctcgcctagtcttttttttccctttctgagccaaacggaagcgccattaaaccatctctctcccggcactcccacgctcgctgcctttctttggctggcagccgctggctccccacctgtccctctccctcacacccttttccccccgtggcttctctcgctgccgcccctccgcaataaaccgctgccagcccgagcggctccatcgccccgctcgcgcttttcggagtgccaaaggccgtgattccagcgctgctttttttggaattcccgaccttcttcctctcctcgtcgtctcattgccattggagctagcgtctcttgcacagagacaggaacgatcccacaacgttgcctcgttgtttcctcggaattcttgcttctcctgccccttgttcctcgggattaatcttgcttcttctgcctctgctctgtgaaattcgaggtttttgatcaatcccggtgctctggtgtcgttgtttttcaggcccagggaggccgcgatggcgaacctgacgaacggctttgcgagcctccattgcgcaggggcgatgcatgtggacaaagggcacatgcaagcatcgggactgccttttctctctttcagaagatgcgcccagcttgatatctccagactaggtagcgtgcctcgtttcatgggcgcaacatctgctactgtctcccaacatcatgtgaggcagaggatcagcgccatcagagcctctactctttcctgcctgcaagacgatgccacaaaattctttgattttgtggttattggcagcggtgttgctggcctaaggggcttatttgtgcgatgaagagattgtcagggtagtttgcacagaaggtccagagcgtgtcaaggaactaattgccatgggtgcctcattcgaccatggtgaagatggtaggctgcaccttgcaagggaaggtggtcattctcacaacagaattgtccattctgccgatatgactggaagagagattgaaagagcactgcttcaagcagttcacaatgatgataacatatctttgtttggtcatcactttgctattgatctattgacatgtcagaaaaatggtgaaatctattgctatggagtggattcaatagacattgaaacccagaaggtagtccgcttcatctcgaaagtgacattgcttgcatcaggaggagctggccatatatatcccacaaccaccaatccaccggtagctactggggacggaatcgcaatgtgtcatcgtgctcaggctgtaatatccaatatggagtttgtgcagttccatccaactgcactttcagatgagggcctgccaataaagccaaagacaagaagagagaatgcatttctcataacggaagcggtgagaggagacggaggaattctttacaaccagtccatggagagattcatgccgatgtacgatgaccgctcggagctggcgccgagagacgtggttgcgaggagcatagacgaccagctgaagaaacgaggcgaaaagtatgtcctcctggacatcagccacagaccaagagacaaggttcttgcccacttccccaacatcgccgccgagtgcctgcggtacggcctggacatcacccggcagcccatcccggtggtcccggcggcgcactacatgtgcggcggcgtccgggcagggctgcagggggagaccaacgtgaagggcctctacgtggccggcgaggtcgcgtgcacggggctgcacggtgccaaccggctagcaagcaactcgctgctggaagcgctggtgttcgccaggagggcggtgcagccgtccatcgacctcatggtggatgccgacggagatgccagaccgtcgctggtggcgaggtgggcacggccgacgctgccgcggtcggtgctgggcgacagcgtgctgtcggacatcgtggggcggacgaggcaggccaggatggagctgcaatcagtgatgtgggagtatgtcggcatcgtgcgctcgacggggcggctgaagcaggccgagtggaggatcggtgacctggagtcggagtgggaggagttcctgttccggcgggggtggaagccgaccacggtgggcgtcgaggtctgcgagatgcgcaacctcttctgctgcgccaagctcgtcgtcaggagcgcgctggccaggcgcgagagccgcggcctgcacttcaccgaggacttcccgtacctggaggagagcaggaggaagcctacggtcatcttcccggccgccgtgcaggagctcacgtggagctccaagccgttgcagaggcagctgcaagcagatgacaatgcatgcagttcatccggctgggccttggggattcgttaattcattcattaatttttaagaactctcagtcgacagcatacacaaaatccagacagttaggctgtagtagcctgcgtatctttgcaattcttgccagttccagctgttgcaacttgtaaacggtgttgttggagctgcattatggtttatgaaccttgatccgtagtatatgtatgtggtgattggctgattgcacaccaactgatgaccattgtgatgtcatgcagaaaaaattgcgagaacttctgaatttcatttaccacacaagtgagttgccatttgacatgtagatacatcatcgctagaagttcagagttcccatcacatttatacacacatgaaacctgcaccaaaaactttgttcagaaatgaagttgtcaggatcagctacatgtctcggcggaacagattgtatgcggagatgagggagcaaatggcgaaaacaacaaatgccacgaaagatatggcaatggagccgttcgccatgctcgggaaggaatcgctcccccagttctcaatcaaatcacttgctcgagcagttgctgatgacgatgacgatatcagaaggtatgctaccacctgaaacggcaaaagaagttaccatcatgagagcaagctcgtccctggaaattgggagtacacatctatattcacaatagttggggatcaggggcggactcaccacccaggcaccgcaggcggtggcctgggctggctcgccagctgcaatggagggcaaggcgcgagcacagtgcacggaagcaagcagcacgtggcacgagcacaggcgtggggatcacaccgtattctcgcctaggctgtcatcagttcctgggtccgccactgttggggatagacgggggagaaacgagctactccaatgcacagtttggttatctagtcgattctattccctaagagacagaccaggtgaccaattgtgattagtcatcgaccagggcgactaaacaacactagtagtcccctatatgtcaggacaaatatatatcatatactatgtatacaagtgcagaaccaaatctacacaagtgcagcagccaagacacaagccagcacccaccagcagcagtagacatacacatcagtaaatggcagaaaagcagaacaaacaggaattgctacaccgctactgcagcagtcaagattcaggaataagatctcaagaaaatggaggaatggaggaagtaccatgatcgtgagctcatcctcgcagaccagcagcagttaggatgggaagggttgcaaattggtccaaaaaaattaatcccaaaaacttaaaccgaagtggctccagccatagtagatgcacccaatgtctcagctgctcagcaattgcaatatgtttcttgctgctcaccccctagccgcctgactaatcatgattagtcatcacatgtctagaaaagtaatcagtctaatcaggttgtagctcctagtcgagtccagagtagcgattaggactactaaccgtgattaattgaatgacttaataacactgcaagtttcaaccctgaaactattgtgtttgtgggatacttgttgaagttagccatctaaactatctatttaacctttcacaaagtcaattctggcactagctatcacgtgcttagaaacagggaggaatggagatatgtcacctcaaatgtaagtgacaaggaggcagtatcaagtttgtgtaactgacaaaataaggagtataattgacactagtacagtgacatcacagtaaaggtgctgcacaccaatattatggtcttgtaactctatgcacttgagcacatattcgttgtgaagacatattaactaagcaagctcatgctcatcaattgctcactcactcaatttacatttgagcatggatgcaatgaacgtgaaaatgagatatgtcgaacatgccaatgatcttgctgatcctcatgtataaagtatcaagagtaagctaggttttatttccaggctgatgttgaatattctctactcaacttcagataagtagcaattaacatccacaaatattcatcacaaatttggatgacgcaaagtttagcacaggataggacgatcagaatgcaggcatttggtgcgtatcatatgaagaggcgatgaactaaccatgccgacttcaatccaggcagcaaatggagggagcataaattaaccaaggagtgtatcagcaatcacaagtaagtcatctccttcaccaccagattaaaaagcctatactgtgcttcagtaagacgacttctaccaattcctcttcctcggtgtaacatcatagcaaggagggcaaccatttgcacagccgtaaacaagcctacgaagagcgagcggtaaagacgacacgaggcagcaggcacacacctgatccatggtgaagtcgaagagatcacgcttgggatggggaatcaaatgcttgttcctcctcatgagctcggcgagcg

SEQ ID NO: 6885 - DNA, 1800 bp, Zea Mays
aaactgccgaccagcgatcacctctggtgggtctccagtgagtcactgctcaccagtcaccgccatggccgggaagcagttcccctccccggcgcactcgcgctccgcctcagcctcctcccgccgactcctcgccgccgtcgccgcctccctcatactcctcacagcttcctacttcctcctcctctccccatcctcgcaccgatccgccccagccatcctcgcgaaccctagcgccaccacatccttcctcgcctccctcgaccgcttcctctccgatccgcatccctctgcctccgccgccgctcccgtagaacttgacgccgcgatccgggtccaggaggatgcccgtctctacggggaccccacatggcccgcgccggccgcggggctgctcagggtctacgtttacgagatgccgagcaagttcacgtacgatcttctgaggttgttcagggattcctaccgggacaccgacaacctcacgtccaatgggagccccgtgcaccgcctcatcgagcagcattctattgactactggctatgggcggatctcatcgcacttgattcacagagacttttgaagagtgttattagggttcagcagcaagaagaagccgacattttctatgaagctttgaaatgggtcacagatcagcctgcttggcaacgttcagaaggcagggatcatgtcattcctgttcatcatccatggtcatttaagtcagtccggagatctgtcaagaaagcaatatggcttctacctgatatggactccaccgggaactggtataaacctggacaagtatatctagaaaaggatgtcatccttccatatgttccaaacgttgatctttgtgatcacaagtgtgtattagaaactcaatccaaaaggagtatattgctgttctttcgaggaagactgaagagaaatgctggaggaaagatccgcagtaaacttgtagaggaacttaaaagtgcaaaagacatagttatagaagaaggttctactggagctcagggaaaagcagcagctcaggatggcatgcgcaagtctttcttttgcttgagtccggctggggataccccatcttctgctcgcctgtttgatgcaatcgttagtggttgtatcccagttataattagtgatgaactggagcttccatttgaaggaatacttgactatagggagatagcattgtttgtttcagcaagtgatgctgtgcaaccgggctggctcttgaaatacctaagaggaatcaatgccaaaagaataagagaaattcagtctaatcttgtgaagtattcaagacattttctgtattcaagtcctgcccaacctctcggaccagaagaccttacatggagaatgattgctggtaagctggtaaatatcaagttgcagattcggcgttctcaacgtttggtcaaagagtcaaggagcatatgtacatgtgaatgtagagttgggaacaccacgagaatgctttgaccaatattttcatttgtgcctttaaacttttgtagcatagccgttttttgttaccaatgaggcgagctttgagtttggcaaaatttgccgatgtatttgtaaatgcaactgagctggaaagagttgtgatactgtactaatcccgatgcttgtgtttgctttactgcccgttaggaacaaaaggaatgtaaaacagagaaatgtaaaaaaaaatcaagagcttgaagtagatatttatttcctccatttcatgaatgaaagtaaaggtctgtttggtttgtggctaaatatgccacactttgcctaag

SEQ ID NO: 6886 - DNA, 3019 bp, Zea Mays
aaatgccaaaccacaacaagtcgcttccgtccctccccacgccgccgagggccgccgaccaggagatcacgcgctcatctctcatggagtccgtctagcttccgctcgtctgcgcccactccaagcagccgcagcggaactcaactactgcaggttgagatgaacggtccatcgaatttcatgcctactcctgaacaggatgttctggacgtcaagcccttgaggacattggctccaatgttccctgctcctctgggtgtcaatacatttaaccactcaaccacgccaccattgatatttgtcactccttctggacaatttcaagggggttttggtgattggaataattctgctgccaaatcatttttcgctttcagcagcaaggatgctcgtggaggcaaggctgatacatttagtgatcagaatactggtactggcaaggctgccacttttggtgatcaggatgcttttggcagccagaatgtttttgctagtgatcacagtactggtactggcaaggctgccacttttggtgatcaggatgcttttggcagccagaatgtcgccactggtgtgcaggatgctgcgaaaggccagactgcaacagattggacagatgtgagtgccaatcctaatggcccaattgatgccattgccatttcagcttacaggtcaacacagcctaatgttatatcactggatgatgatgatgacgacgacgatgatgagccttatgctgctaacaagacatcagcatctggacgcaagatcaagaggccatcccacctcagcggatacaatgtgagtgatgctttggtaagtgacagctccaacagcatgaaggttaagcgccccaaatcctctcacgggaaagctgctgctgacaacgagcatgccttgcttccaccttctgaggatcccagggaaattgtggaggcagttctcatgacctttgaggcgttgcggcgtaggcatctccaattggatgaggcacaagagactagcaagcgtgcagatctgaaggctagtgctatcttgatgtccagtaatatcagggctaaccctgggaagaggataggggttgttcctggagttgaaataggggacattttctacttcaggatggagctatgtattattgggctgcatgctcctagcatggccggaattgactatatgactgccaagtttggtgacgaggatgattctgttgcaatatgtattgttgctgcaggtggttatgacaataatgatgatgatacagatgtactggtttacagtggttcaggaggtaatagcaagaacagtgaggagaagcatgaccagaagcttgagaggggcaacctggctcttgagaggagcttgtccagaaaaaatgtaatccgtgtggttcggggctataaggatccaggttgcttgactgggaaggtttatatttatgatggcctctataggattcacgagtcatggaaggagaaaacgaagagtggaatattttgttttaagtacaagctgctgcgagagccaggacaacctgatggggttgcaatctggaagatgtcccagaaatgggtacaaaatccactgactagaggcagtgttttaaatcctgatctatcatctggtgcagaaaatcttccagtgtgtcttgttaatgacattgacagtgatgaagtgccacaccatttcacatataccactcaggtcgaacacttgaaaccactcagttctgtgaagcctttacagggttgcagatgccttagtgtttgtctgcctggtgatgccaactgctgctgtgcacagcgtaatggaggcagcttaccttacagctcatcaggactgcttgtatgccgcaagactatggtttatgaatgtggtgaatcctgtcggtgttctttcaattgtcgtaacagagtgacccagaaaggagttaggatccactttgaggtctttaagacgggaaatcgaggctggggtcttcgttcgtgggacgctatacgggctggttcatttatatgcgaatgtcgtgtcctggtgagaggacattaaaatggaattttggacctgaattgataggggagcaaagcacaaatgtttctgctgatacctttgagactctacccattaagataagtgctaaaagaataggaaacatatcacgtttcatgaaccatagttgtgctcctaacgtattttggcagccagttcagtttgaccatgaagatgatcatcgcccacatatcatgttctttgctttgaagcatattcctcccatgacagagttgacttatgactatggtgacgttggagctgatcctagtggtgtacggtctcctagagcaaagaactgcctttgtgaatcctcaaattgtcggggattctttatctgaccgtggaaaatgcatattctatctatcaacattcaaccctaccagctagatcctttttggtggcacctgaagaaaaagtaggactgttcgaacagcttgcatcactctgtcgttgtggaaccattatattaattaatgtcaatcttttagatgaccattcagcaactaatgcacaaacgtttcttttgtgggggaagaatgttggtcttggaagttcaattttgtgtagtttgtagacttgtagagcatttagtgctgctaaacttgtgcaccttaagtcttttggctgtaaaagagcctcgaggctccagctgaattggttaggcagtctaagtagcatttctttgatcctgaatttgactccacgtgagtcaatttcaagctggagttaaaaaaaacattcttatgttctatactaaagtacagttctaaggctcaaccatgatcatagtcgttctcacatgtgctatattgctgttgtgtatgggtgtggtacgtgaaacttgatatattggtaaagtttttttatactaattaaaaacttgagaaaatacagactacccaagtgtagagctgttggatcctcgcattttatccatatctctctcgtcgcttcattttctacaaca

SEQ ID NO: 6887 - DNA, 2796 bp, Zea Mays
cccgaacgcccacccctactcgcacgtgcttcccctccttccccatcgactcgttccgacaacgcccgcgtctagtctcgtctcgtctcaccattcgtcactcgcgcgcgccgtcgtccttctccgccgtcgtccccgccgccgacgatgcctcgtaaggcctcgtcgacctcaggtccatgcgtccgggcccttctcgaaacctcttaaactctctagcgccagatctaaccgccttgctaaccctaactcccagattcgcgcctcaaatggcgcaagcggaagctcaaccccgacgcgtccccgtcgaagccctccatttctaccgcggcggccgaccactcctccgactccgactccgccgccttaaacgacgacgaggacccctccgccctcggcgcgacgggggacggggcaaccgacaacgacgcggacgccgcggcgtccgaggaccccgcggtcgagctccgcgaggcggaggttctgccctcggccgatgccatctctagcttccctgccgccaagcgccgcgtggtcaaccggccgcatgcgtccatcctcgcgctgctcgaggccgaacgatctgcttgttccggcgatgtccctaccgtggcactgccggcgctagagaacatctcgcacgggcagctgcaggtgctgtctggggtgcttccggaccacccatcccttgcgacagaccccgacaagccgtccttgtatgtgtgcacgccgcctcccctcatggagggtcacggggtgcccaagcagttccagggtcgcttccatgtggtgcccaagcactcagattggttctccccagggacagttcataggctggaaaggcaggtagtgccacacttctttacagggaagtctccagggcatactccggagaagtatgtcatgttaaggaataaagttattgctaaatacttagagaacccaagcaagaggcttgcttttgctgagtgccaggggcttgttgggagcacatctgaattgtatgatctgagtaggattgttaggttcttggacacttggggcatcatcaattaccttgcggctgggtctgtgcaccgtggtctgaggatggcaacttcgcttctaagagaggaacctacaggggaactgcaattgcttacagcaccattgaaatcaatcgatggtctaattttgtttgaccggccaaaatgtagcctcccagtggaggacatttctaggatggcagcgacttcatcgaactcggaggctgtggattttgatgctgcattttcagacttggatggaaagattagggagcgtttgtctgagagctcttgcagttattgcttacagcctttgccaagtttacattaccggtcgcaaaaggaggcagatatttttctatgttctgattgcttccatgatgcgagatatatcactggacattcttgcttagatttccaaagagttgatggggataatgatgaatcagaaaatgatagtgataaatggactgatgaagaaacattgttgctgttggaaggcattgagaagtacaatgacaactgggatgacattgcaggtcatgttggaacaaaatcaaaggcacaatgtatctaccattttattcggttgccagtggaagattgtttgctagagaatgttgagatacccaatgcacccattccatttcgaccacaaagcaatggttatcaatgtttagattccaatggcagcacatcaggagctccagttcaaaatatccaacaaggcaatgagcttccgttcataaattcttctaatccggtcatgtcactggttgcatttttggcctcttcaattggacccagagttgcagcatcatgcgcacatgcagcattatcttttttgactagagacgaggattccaggaaatgttaaatatgctgccatgcttggtctgtcagcagcagcaatgaagtctaagctctttgccgatcaagaagaacgcgaagtgcaaagactaactgctactgtaataaatcatcagttgaagagattggagttgaagctgaagcagtttgcggaagttgagaccttgctcttgaaggaatgtgagcaagtagaaagggttagacacaggatttcagctgaacgcgtcaggatgaggtcagccctattaggtcccaccggaagcggtctaccagggggcagttgtagcactatgccatcaaatccagcaggcatgagccccagaccagtcggtgtgccaggctacatgccacagaccagcatgccagccacatatgccaacaacctgcaggggcatgggaatcctcagatgccgttcttacatcagcggcctcagatgctttcgttcggccctcgcctaccactctcagccatccagactcaaccatcaccacaatcatcaaacatgttcaactctggcatgcccaattcgattgctcctaaccaccatcagttgctgagatcatcctccggaaacaattctagtgcaggataggggaattgtccataagattttttttttctcagcttaggtttgtcaggtgtagcattatgtcatttataaacacatcactgtaattcatttatgtgatgtatgtgtttgtcatataagttttttattaggtcctataaattgtccccatattgctgcgcccttgtgtacctttgttaccaggtcacctcttcccagtgcagggagattcaaatgaacagaatatgttttcatatgtatcccttgagaactcttattgaatatatatgtatgtagttaattcaataagtttgaggttatgaaggtatttt

SEQ ID NO: 6888 - DNA, 3118 bp, Zea Mays
cccgaacgcccacccctactcgcacgtgcttcccctccttccccatcgactcgttccgacaacgcccgcgtctagtctcgtctcgtctcaccattcgtcactcgcgcgcgccgtcgtccttctccgccgtcgtccccgccgccgacgatgcctcgtaaggcctcgtcgacctcaggtccatgcgtccgggcccttctcgaaacctcttaaactctctagcgccagatctaaccgccttgctaaccctaactcccagattcgcgcctcaaatggcgcaagcggaagctcaaccccgacgcgtccccgtcgaagccctccatttctaccgcggcggccgaccactcctccgactccgactccgccgccttaaacgacgacgaggacccctccgccctcggcgcgacgggggacggggcaaccgacaacgacgcggacgccgcggcgtccgaggaccccgcggtcgagctccgcgaggcggaggttctgccctcggccgatgccatctctagcttccctgccgccaagcgccgcgtggtcaaccggccgcatgcgtccatcctcgcgctgctcgaggccgaacgatctgcttgttccggcgatgtccctaccgtggcactgccggcgctagagaacatctcgcacgggcagctgcaggtgctgtctggggtgcttccggaccacccatcccttgcgacagaccccgacaagccgtccttgtatgtgtgcacgccgcctcccctcatggagggtcacggggtgcccaagcagttccagggtcgcttccatgtggtgcccaagcactcagattggttctccccagggacagttcataggctggaaaggcaggtagtgccacacttctttacagggaagtctccagggcatactccggagaagtatgtcatgttaaggaataaagttattgctaaatacttagagaacccaagcaagaggcttgcttttgctgagtgccaggggcttgttgggagcacatctgaattgtatgatctgagtaggattgttaggttcttggacacttggggcatcatcaattaccttgcggctgggtctgtgcaccgtggtctgaggatggcaacttcgcttctaagagaggaacctacaggggaactgcaattgcttacagcaccattgaaatcaatcgatggtctaattttgtttgaccggccaaaatgtagcctcccagtggaggacatttctaggatggcagcgacttcatcgaactcggaggctgtggattttgatgctgcattttcagacttggatggaaagattagggagcgtttgtctgagagctcttgcagttattgcttacagcctttgccaagtttacattaccggtcgcaaaaggaggcagatatttttctatgttctgattgcttccatgatgcgagatatatcactggacattcttgcttagatttccaaagagttgatggggataatgatgaatcagaaaatgatagtgataaatggactgatgaagaaacattgttgctgttggaaggcattgagaagtacaatgacaactgggatgacattgcaggtcatgttggaacaaaatcaaaggcacaatgtatctaccattttattcggttgccagtggaagattgtttgctagagaatgttgagatacccaatgcacccattccatttcgaccacaaagcaatggttatcaatgtttagattccaatggcagcacatcaggagctccagttcaaaatatccaacaaggcaatgagcttccgttcataaattcttctaatccggtcatgtcactggttgcatttttggcctcttcaattggacccagagttgcagcatcatgcgcacatgcagcattatcttttttgactagagacgaggattccaggttagccatctttgttttattccgtgttactaaatgcttttgttcagatacatgagtaaacactaacgccttagtacttcaaagatcaaacattcagcattccctcatccgtgaggcagagatttttccgtcatgtctactatccagacctttcatttgtttctagttcctttttgcattatcgtgctagagtttaagtatgacttatcttttgatacacattgaagggtgagttcagaaggctcacatgctggtggtctgggcaatggtgcaaattcaaattttcagaaccataatggtgcttcaccatccatttctccaggaaatgttaaatatgctgccatgcttggtctgtcagcagcagcaatgaagtctaagctctttgccgatcaagaagaacgcgaagtgcaaagactaactgctactgtaataaatcatcagttgaagagattggagttgaagctgaagcagtttgcggaagttgagaccttgctcttgaaggaatgtgagcaagtagaaagggttagacacaggatttcagctgaacgcgtcaggatgaggtcagccctattaggtcccaccggaagcggtctaccagggggcagttgtagcactatgccatcaaatccagcaggcatgagccccagaccagtcggtgtgccaggctacatgccacagaccagcatgccagccacatatgccaacaacctgcaggggcatgggaatcctcagatgccgttcttacatcagcggcctcagatgctttcgttcggccctcgcctaccactctcagccatccagactcaaccatcaccacaatcatcaaacatgttcaactctggcatgcccaattcgattgctcctaaccaccatcagttgctgagatcatcctccggaaacaattctagtgcaggataggggaattgtccataagattttttttttctcagcttaggtttgtcaggtgtagcattatgtcatttataaacacatcactgtaattcatttatgtgatgtatgtgtttgtcatataagttttttattaggtcctataaattgtccccatattgctgcgcccttgtgtacctttgttaccaggtcacctcttcccagtgcagggagattcaaatgaacagaatatgttttcatatgtatcccttgagaactcttattgaatatatatgtatgtagttaattcaataagtttgaggttatgaaggtatttt

SEQ ID NO: 6889 - DNA, 764 bp, Zea Mays
tacactgatctgccgatatatggttcatgccagtgaacttcgagaacctgttcagcaagtacgcgcgcacttccccggacaggctcacctacagggagctctggtcgatgacggaggggttccgcgacgccttcgacctctacggctggattgcggcgaagctggagtggacgatcctgtacgtgctggcgcgggacgacgaggggtacctgtcgcgggaggccatgcggcgcgtgtacgacggcagcctcttcgagtacgtggagaggcagcgcgcgcagcacgccaagatgtcctagctagagggaagaggatgcgacgtgggcacgtggcctcgatcgcgcgtgaatgaaatggaagccaagtgaacctgtctcggctggtatgtagatagtgagaagggtgtcggccggaaaacaagcagccgtgtgtactactccctcagctcccatcaataacgcagagttcgccggaccggcacctccccatctttgctacttcaacctggtttttcgcgcggtttatgtggctgtctgaagcgagacatgaatttgcgtattgtttaattttacaaaactactgaaatgaacaaaattggcctattagctcagttggttagagcgtcgtgctaataacgcgaaggtcgcaggttcgagacctgcatgggccatataatttagttttttttagaaaaatagctcttcagttcgtttttgtctatattttaaaaatcaactgtagctcatatttttgtgagatttaaa

SEQ ID NO: 6890 - DNA, 524 bp, Zea Mays
acacggtcacacacaccacaacccagccacccaccacctcccccaattgcctcttctcttctcccagcagctgccgcgacgcagtcctactcctgcggtgcctccagtttcgcagcaccgttgccacacatcgccaactaacgccatcgatcacccggcggccgcccagagtcctgccctgccatatccgaacctgctcctgcagctagccagcaacacagacagaataggtcggtcggtcgatcgatcgatggccagcgttatcgacggcaatggaggcagccggctggtggtgacggagctgggccacctcaaggagctggcgatgcagctggaggggcacctcggcggctcctcgccggacctctgcaagcacctcgcctcgcagatctcctccatcaccgaccgctccatcagcctgctcatcaccgccacctcatcaagcccccacggcggcgcctctgacgcgccgcccttcatcagggctactaccaagaaaagtttaaactattgatttactttgc

SEQ ID NO: 6891 - DNA, 1873 bp, Zea Mays
ccgggtttgttattttcactcaaaccccagcatctcctcccagccggcagcacctaacccgtcacgagcgcaccgccgcacgttccggattccccaccgccgccgggatcccgaccggatccctaattccaaggggtaaacgatgaggccgcacgcggtggggacgggcggcggtggcgtggggaggcggaaggcgggggccgccgctgctgccgcaagccgggagtggatggtggtgccggcgtcgggtccggctcgggtggaggaagccgggaagcacgcggtgatggcgcgtacagggcttcccgcgcgcgatctcagggtactcgacccgttactctcgtacccgtccacgatcctgggccgcgagcgcgccatcgtcgtcaacctggagcgcgtcaaagccctgatcacagccacagaggtgctgcttccaaacaccaaggatcccgcctttgcgcgcttcgtccgcgacctccagacccgtgtcctcgcatcttcgtctgaccaggcagctgagttcactgacatggaaggtgaatcatctaatgttgcttcaccatttcccctaccaagtgcatccaaaggacatgaaatggagatgactaagaagactactgctgttgtgcctgagatgactagtagcagcagtatgcccaatttagctattgcaaaagatggaaacaccaacgttttgcctttcgaatttcgagctcttgaagtgtgccttgagtcagcctgcagatctttggaagatgaaacttctactctggagcaagaggcatatccagcattagatgagctgacatcaaagatcagcacattaaaccttgaacgagttaggcaaatcaagagtcgtctggttgcgatatctggtcgagtacagaaggtgagggatgagctagagcatttactggatgatgaaatggatatggctgaaatgtacttgacagagaagcttactcaacaagaaattagtgaggcttcatctagagctgaggttgatgatccatctcaaacagaagaggatagggatgaagattatagaagtgagccagatggaagcaatgatagctttattggttataagcctaatattgaagaactagagatgcttctagaagcttattttgtgcaaattgatggcacacttaacaagctatcacatggagtacgttgatgacacagaagattatatcaatataatgttggacgacaagcagaatcagctgttgcagatgggagttatgctctcaactgctactgttgtcatcactgctggagtggctgtagttggcctttttggtatgaatattggcatatcactttacgcagacccaacaactgaggaggaaactcgagcagcaaacagaaaattttgggaaactacttttgggaccgttgctggctgcgtgattttgtacatcatagccatgggttggggaaagagaagtggattactgcaatgaggtggaaactcatgcaatgaggtggaaacatgagtgttctgcacccaatgaaaactggtttgacaaaaatctccaagatgagatgttgcattggcatgccgctcaaatacagtacgtcctattccactatgccgggaaagaaacatcttgtgtacgctagtagtaatgtgtgtgaaataaaactattgtacaatttgttgcccctcacctgtcatggcaactcagtaattctgtacctgtttaccacggtagctgcggtttttgctcttgcagttgtaatcatttctgtaactgttgtaactgtatccaccgaactgtaatatgtaaaggaagtatatgagaaagctgcactcttgtctgcatggagatcttgtcattaagctgcaatatttggttccctaact

SEQ ID NO: 6892 - DNA, 1339 bp, Zea Mays
gtacagagcattgtaaacgcatcccctcccctgcccctgcccctgccctgccgccgcagcttcggcttctcccgctcagctgcagcggcagcaggcggccgtctgttccgctcccctccgcctccgtttcttctcccggggtacctcagccgactcttccggaaacaaacaaaacaccctcccaccctttgcgctgcccgttgcggcctgtctgtctccccgtgacgtctcccggcggctcctggcatcggcgctctgccccgcctctcctcctgcggcggcggagagaggagggcgacggacggcatcatgaagcgcctagtagtcgtcctggcattggtgctggccgccgcgctcggcccggccacggccccggccccggcgcgcgcccagctgcggcgggaccaccaggcgccgccgggcccgcgcccgcacagcgtcaccatcaccgagttcggcgccgtcggggacggcaggacgctcaacacggtccccttccagaacgccgtcttctacgtccgctccttcgccgacaagggcggcgcgcagctgtacgtgcccaggggccgctggctcaccggcagcttcaacctcaccagccacctcaccctctacctggaggaaggcgccgtcatcgtcggcgcaaaggactcatcacaatggctgatcgttgaacctttgccatcttatggccaagggctagaccttcctggtcctagacatcaaagcttgatcagcggatacaacttaactgatgttgtcataactgggaacaatggagttattgatggccagggcttggtatggtggcagtggttgcgctcccatgagctgaaccatagccgacccaaccttctggagttcctgtattctgaagatattgtcatctcaaacttgacattcttaaattcaccagcctggagcatacacccggtgtactgcagtaatgtaaaggtccacaatgtgacgattaagacctcattggacgctccactgactgatggcatagttccagatggccagatgttctatggagattgtgagcactgcttatacccggcttcgggaaatgactaagccatgggcatggcttctccattcttctctcatgctttttggtgggttgacaaccctaatgttggcactgtactttgaaaaccccacacgtgttatgggcgctacttgaataattgcttccgctaaaattaatcactacggtgatgctacttgttatgtcacatttgggatttcgtgctgactaagttgtaataactctatttactctgatctaccttaaattctgtggaatgttgtatcacgtgatgcagtgaatgttaat

SEQ ID NO: 6893 - DNA, 2301 bp, Zea Mays
ccctcccattctctcagtctctctccatccaccacccgacccgatagtgtcctagacgccgctaccgccgccaaccaaccactcttctcctacgccgccgccgccgccgatcccgtcgcgatgagccacgacaccggcgccggcgtggagtccctctcgctggacctgctggcccacgcgctggcggccgtgcgcgacccgcgggaccgcaagtcgtgccgcctcgccagccgcgccttcgcgcgcgccgaggccgcgtcccgccgcgccgcgcgggtgctgcgccgggacgcgctgccgcgggcgctgcgcgccttcccggcgctgtcctcgctcgacctctccgcgtgcgcggggctcgacgacgcctccctcgccgccgcgctgcccgaggagccgctgcccgtccgccgggtgcgcctcgcgcgggccagcggcgtcggctggcgcggcctcgacgcgctcgtggcggcgtgcccgagcctcgaggccgtcgacctctcgcactgcgtcgccgccggcgacagggagatggccgcgctcgccgccgccgccgggctcagggacctcgtcatggacaagtgcctcggcgtcaccgacgtcgggctcgccaaggtcgccgtcggatgcccgggcctccagagcctcagcctcaagtggtgccgcgagatctccgacatcggcgtcgacctgctcgccaagaagtgcccccaactgcgcagcctcgatatctcctacctcaaggtgaccaatgaatcccttagatcactctccacccttgagaagctagaggacatagcaatggtcagctgcttgtttgtagacgatgatggcctacagatgctaagtatgtgcagctcgctgcagagtattgatgtagccaggtgccaccatgtgtcttctttgggcttagcttcactcatggatggtcaaagatctctccggaaaataaatgtcgcacacagtttgcatgagatagaggcttgtgttctgagcaagttatcaacaataggagaaaccttgactgttttaagactcgacggcctcgaaatcttcgcctcgaatctccaggcaattggttctacctgcaagaatctggtcgagattgggcttagcaaatgcaatggcgttacggatgatggtatcgtttcgctagttgctcgttgccgcgacttaaggactatcgacgtgacgtgctgccatcttcttacaaatgctgcccttgctgcaatcgccgagaactgtagaaagattgaatgccttcggcttgaatcctgccctttcgtaagcgagaagggactagagtcgatcgcaactctctgttccgaccttaaggagattgacctcaccgattgtcgtattaatgacgcagctttgcagcagttggcaagttgctcggaactgctgatcttgaagcttggcctatgctctagcatttccgacgaaggccttgtttacatcagtgcaaactgcggaaagcttgtagagctcgacctataccgctgcagcgctgtaactgatgacgggctggcagccgtagcgagcgggtgcaagaagatgaggatgctgaacctatgctactgcacccaaatcacggacggcggtctgaagcacgtaggcggtctggaagagctggcgaacctagagctgaggtgcctggtgcgcgtcacgggcgtcgggatcacgtccatcgccgtgggttgcagtagcctggtagagctggacctcaaacgctgttactccgtggatgatgccggcctgtgggctctctcaagatactcccagaaccttagacaggacgtgaagatggtgcacctctcctgggtctccatcgaagggttcgagatggcgctgcgggccgcgtgtgggaggctgaagaagctgaagctgctgggcgggctgaggtccgtgctctccaccgagctgctcctgacgctgcaggcctgcggctgccgcgtccgctgggtcgacaagccgctggtctacaagggatgagcatgagcatgagcttgagcgggcctctggccaatcaaggagactgagacatgcatcattgagagagcagagggaagacgacgctggtcattagcggtgtgccctgcttcctttcttgcgacagtacgtagaagagtagctgcgatgcgagtctgtctgtctgtaacagtaacacctgtccttcagtgcaattactgtctaaactttcggagtttccgcaatatgatgactgcccatcttgtaagctcatttcttgagtggatagcagacacagcacggtctattccaataaactatagatagatc

SEQ ID NO: 6894 - DNA, 4127 bp, Zea Mays
ctgccctccgccccctaaaccctagccgtttcccatagccgctcgccccagcctcctctgcccagagacttttctttgcggccgaaatggatgactcggagaacaacgcaccctcgacgccggggtcccccgggttcagcaccgaccggctgccacccaacaccaccaccagccgcggcgccaccgacccgtcatcttactccgacgacgatggcgaagctgaggtcgatcctcacgtgctacccgatgacgacgaccccgccgctgtagcggctcccgacgaggacgaggagggggaggacctcttcaacgacaactacctcgatgattaccgaaggatggatgagcatgatcaatatgagtcagttggtttagatgattcactcgaggatgagaggaatcttgatgaaatcatggctgatcgaagggccgcggaagcggagcttgatgcaagggaagtgaggactggtgcaacagctgataggaagctgccacgaatgctccacgatcaggatacagatgatgatacgaatttcaggcgtcctaaaaggcacagggctagttttagacaaccaagtggaccaagaacaccaagaagtgatgatgatggtgatggtgccactcctagttcacctggaagatctcatcgtggaatgtcatctggtggtgatgtgcctatgactgatcagactgatgatgacccatatgaggatgaatttgatgaagaagatgagatgaacatgtaccgtgtccaaggtacattgagagagtgggtcacaagagatgaagtccgtcgctttattgcaaagaaatttaaagaatttcttctgacatatgttcatccgaagaacgatcaaggagagtttgagtatgttcggcttattaatgagatggttttagctaacaagtgtagcctggaaatagactacaagcagtttatttatatacatccaaacattgccatctggttggctgatgcgcctcaatcggtgcttgaagttatggaagaagttgccaaaaatgttgtttttgatcttcacaagaattataggaacatccaccaaaagatctatgttcgaatatcgaaccttcctgtctatgatcaaatacgcaatatcaggcaaatccatctgaacacaatgattcgaattggtggtgttgttacccgacgatctggtgtattccctcagctgcagcaggtgaagtatgactgtaacaaatgtggaactatcctgggccctttcttccaaaactcctacactgaggtgaaagttggatcatgccctgaatgtcaatccaaagggccattcacagtcaatgtcgagcagactatatataggaactaccagaaactcactcttcaggaaagcccaggaattgttcctgctggaaggcttcccagatacaaggaagtcatacttctgaatgatctgattgactgtgctcgtccaggagaggagattgaggtcactgggatatacacaaataattttgacctgtctttgaatacaaagaatggtttccctgtttttgccacagtggttgaggcaaactatgtggcaaaaaaacaggatttgttttctgcatacaaattaacggacgaggacaaagcagagattgagaagttgtcaaaggatccaaggattggagaaaggattatcaaatcaattgcaccatccatttacgggcatgaagatatcaagactgccattgcacttgctatgtttggtggacaagagaagaatgtgaagggaaaacatcgcctgagaggcgacatcaatgtcctcctcctgggtgatccaggcactgcaaaatcacagtttcttaagtatgtggagaaaacaggacacagagcagtatatacaactggaaaaggagcctctgctgttggtcttactgctgcagttcacaaagatccagtaacacgagaatggacacttgagggaggtgcactagttcttgctgataggggcatttgcctcattgatgagtttgacaagatgaatgatcaagatagggtaagtattcatgaagctatggagcaacagagtatcagtatatcaaaagcaggaatcgtcacatctcttcaagctagatgcagtgttattgctgcggcaaacccagtagggggaaggtatgattcatcaaagacattcactcagaatgtcgaattgacggatcccattatttcacgttttgacgtcctctgtgtggttaaggatattgtcgatccatttacagatgaaatgctcgcaaggtttgttgtagatagtcacgccagatcccagccgaagggggctaaccttgaagacagggtttcaactgatgtggatgatgatccactggctgctgcaaggcaagctgacccagatgtcctttcccaagacatgctgaagaaatacataacctatgctaagctgaatgtgtttcccaaaatacatgatgccgatctagacaagattagccatgtttatgctgaactccgccgtgaatcctctcatggccaaggggttcctattgcagtaaggcatatagagtcaatcatccggatgtcggaggcacatgcaaggatgcatctgaggagctacgtgtctcaggaagatgttgacatggccatccgtgtcttgcttgactcttttatttcgactcagaagttcggtgtgcagaaagcacttcaaaagaatttccggaagtacatgacattcaagaaggactacaacgagctgctcctgctgctcctgcgcacactggtcaaggacgccgtgcacttcgaagaaatcatggcaggatcagcctcacgtcttactcacgtcgaggtcaaattggaggacgcccaagaatacgagatctacgatctgaagccgttcttctccagcgcgtgcttcagggacaacggcttccttctggatgaagggcgtgggatcatcaggcatccactcatttgttataggcatacaattgacacttggctggtcgccttttggatttagtatctgttgtgtcttgtttgagagtttcgtactatatgcacttgctgccatttaggcgtgactgtatggtgtgtgaaatcattcgttagatagaatgatcggtgtggctgcaagcaacaaatagttagaaaaagaaacaaaaacgaactgcagccaaaagaccctgagggttattgaagatgatgaatgcatcagttgccatgccttagaagaagagtatgctaagcttttccatcaacccttgtctgacgaatatgtggctgccttagctgccctctttggctgttctgttcagttacaaccttttgtagatagaattgtagatcaactctccggatggaaatcatattcacgagagtgcaagaacattatgtgcttaatgggatgcttatgtatctttctatagttattaatattccctcttgggctatcaagactattgataaaaatcagaataagttttctttagggcttggtattcatcccaatactcatgggttgagggggattaagatgtaaattaaaccgatttatatctcatgccttgttcggttattctaattccatgtggattagaatgtatttcggttattctaattcatgtggattagaatgtattgagatgtattttaacttgctatgtatttaaaccgactcaataccattcaatccacatgtattaacggtgaaacgaacgagccctcaatccaccccaaccatatgtatcgaagtaaatataagagtatccaaacataaccttatatggtgaaatgaagtcgaaagggcactgcttcgttgcatgaggaagtgtttgtagacctctctagatggacagacttgcatctccggtctcaaagagcttagttggacattgtgtagtttacctatccaagtgtcaggcaaaaagcacgagctttcttcccggtggtgctgctctcggaagttgggaattgggcacacactttgttctagattgataaatggatttatgggtagaaaattgctaatcttgcacctagaatatttaaggcaattccgaagagaatttctaacaaaagaacgattcatgaagccttctcagatataagatggatttttgatattgctagatctccatctgtttggatcttagtggac

SEQ ID NO: 6895 - DNA, 2156 bp, Zea Mays
tttcttggacccgagtcgagtagtccggtacatcccaccgcctcgcaccgcggccatgttgacaccgcgcgtcctcaaggcttcgctgctccgctgcttgcgcgctaccgccgagctgcctccgttgcggcgaccccggatcctacctgtgcgggtttaccattccagaggctattctagtgggggaagctccaagtatgataggccaatgagacagttttccgaacagaatgagtcaacctctcagccattaatatattacattgctccatctgctctgcttgcttttgctgggatagccacatttgttcattacaatgatgagaggcgtgcagttcccttcgctaaagtaccaggacagaccaatgttcccaaaagatgtactaccaatagacctgcaataggagggccatttaagctgtatgatacagaaaacagtgaggtgactgaatcaaagcttcggggaaagtggaatctgatgtactttggctatacatcatgcccagatgtgggtccagctgaagttcagaagatagctgatgttgttaaactgttagagtcaaagtacgatatcaatattacaccactctttgtcacaattgatccacaacgtgattcacctgctcagcttaaggcataccttactgagtttgacccaagaatagtaggactaacaggtcccatcagtgcagtaagacagatagctcaggagtaccgtgttttctttaaaagagtagaggaagttggtcaggactatcttatagaaagctctcacaatatgtacttgctagatccatgcttggagacagtaaggtgctttggaagtgagtacgaggcatcagaccttgctgaggctataacaacagaggttcagaaagcatctgcctcatcaacaaattagtctagcggtatggcagcatcagcagttttccaatcttgccgtgaagcacctcctcgcctgttgcatagccctcacagaagggcgtgactcacagtgggctggccattcagctctgcctgcaaccaaccgattcaagttctcctattctcgctcttgttgtgtcagatctgagcttaactgtacagaatggtcttcttgcgacgaagtctcctggcagttccagatcacttacaattctgcgagatgagaatgatcttacaatttccagcaaacattaacctgctgcattggatgaggcatatgacctacagacttaccaggttgttagcacagattcatgaacctgctttgctctctcctctggatgctgaacaggtagtactcgatacgtgctttttgtctacccgccggcacgacagcagccacctgctgccattatgcctgcccgaggccgagggcctcgccatcctcatttcatattcgcggttgtgtttgttctagggcctagctaggtgttgacatcgtgtgagagcctccttttgccactggagtgagtagagttaagcctgttgtgcagtagtagtggaccagtgttagctgtagcaccttttgttttattttatagtcccgtgtgctcgtgcgtttggtgtaagctgacgcctgcaatttaggcttagccggcgtgatcttatgatgatttttgccttgttaaatgttgatggcctgcttactgtgacgctggtggccacctgttgtacgttggggttaaactatggtttgcattgccttggaacccgatgagtagattcttgagtcttgacgctgcaacctgcaggcctgcgacataaaacaatctattcttcgttgccaagctgtagggatggaaaatggaatagattcgaattatgtgatgtccgcaaaacttctaatttagatatccatattcatatctatttagaccatattctaaacctctagagctaattgttagttagataataagttgttagctagttttagtgctacctattggttctagaggtttggaacggatcttaatatgaatactaaatgaatatttttcatattcattttgagtgttttctgcgtctgattctaaatctgtatttgaacgatagtattcgtatccacaaagaaaacaaaatatcatgaacctatttaaaagttctcttcgtaaagagtggcaaaatatttaattttattattactaatgacgtgtctattaatatttttt

SEQ ID NO: 6896 - DNA, 2156 bp, Zea Mays
ggggccacgcgcccacgcctctccgcatgacgcaagagccgacgtcactcctcccgatctgggcgcggacgccaacgacgcgacggcccaagtcgcgacgccaccagctccccatcccctcggacgccatggaggaagctcgcgaccacaggctctcctccaccgccggccgccccttcctctctggcttctgcgccgcggcgctccgacgtaagcccctcggcgcccgcgcctccgccgccgccgccgccaccggcgagggccttgtgcggcagctcggcgtcctcgacctcgtgctgctcgggatcggtgcgtccatcggcgccggcatattcgtcgtcactggcaccgtcgcccgcgacgccggcccaggtgtcacgatcagttttgttcttgctggagctgcgtgcgtgctcaatgccctgtgctatgctgaactggcgtctcggttgcctgctgtggttgggggagcatacttgtacacgtacgcagcgttcaatgagatcaccgccttcttggtcttcactcagttgatggtggattaccatatcggcgcagcaagcattgctcgcagcttagcaagctactttatcgagttcttggagctaatcccgctcttgaagggccaaattccaagctgggtaggccatggggaggagttttttggtggtgttgtatcaattaacatactggcccccgttcttctcatcatcttaactgcgattctctgctatggtgtcaaagaatcatcagcagtgaacacgtttatgacaacattgaagataatcattgttatagtcattgtatttgctggtgtgtttgaggtggatgtatcaaactggtctccgtttatgccaaatggtttcaaatctgtagtgactggagccacagtagtcttttttgcatatgttggatttgatgcggttgctaattctgctgaggaagccaaaaggccacagagagacctacccattggtatactaggaagccttatagcatgtgtgttgttatacgttgctgtatgcttggtcattactggaatggttccatatacattactcggtgaagatgctcctttggctgaggcttttgctgctaagggcctgaaatttattactgtattgattagtattggagctgttgctggacttacaacaacacttcttgttggcttgtatgttcagtcacgtttgtactttggacttggaagggatgggcttttaccttcagtatttgctgaagtacacccaacaaggcatactcctgtacagtctcagatttgggtcggttgtgttgcagcagtcatggcaggcctctttaataccggttattcagttgtatcagcttgtgtgatcacactaagatggaatgacaaaggaactagtcgtcgctcccttggaagtatgtcaatttggcaagagggtgttctaagtcttgtcatagttgctctttgtggttttatagtgggactttgctatcgctttaactatgctatagcctttatggttgtagcttttctgatagctgttgctgccagtttcgctctccagtttcgtcaggtctatgtggatccacctggcttttcttgtcctggggtaccgttggttcccattatttctgttttcttcaacatggtcctgtttgctcagctacatgaagaagcgtggtatagatttgtcattcttagtctcatcgctgtgggagtttatgccggctatggtcagtacaatgctgttccttccagctcagaacactctactattggttaccatggcattccttctgaagccgcatgagctatgttcatccccggagttcttcgaacatactgtatggtaccaacatacaccatcgtcaccgaagtttgaacctgttgcttttttttttgatgttttgcacagtgcatactcttgtagttacgcttagtactcctatacctatatctagacagtgaatttcacagcctgtgttgtgcccaccacaccattcgtcaggaagcttgccaagtgcatagaccttgtaaaaatgcaaatgaaaataaagaactgcagctgcattgtttgtaggaactcattgtcatgcactatgtataattctgtgtatattgtgaagagttcatatcaaattgcactgcggccgtcttttgccgttgccct

SEQ ID NO: 6897 - DNA, 1385 bp, Zea Mays
gtctgtgagaacatagattgctgaaactgcatggtcgatgcactgataatcaaagaagttcccaggctgatcctgcagatgctgattctaaaccaaccagtggttcaaagggaagccatattcgcactgggactaaagttactgaagaagcaggacagcccattccacgtaggcgccaaaataaaggcaacagaaaagcgcacagctcacgtaaacagagattctttgctggtaattttgtgaataatcctgatcagtatggtggtgtgtcagaaagccctccaggcaattcagttggatatttctatggatctactccagaaaatcacagttataaaagttcaaagctgagttcatctcctcatggaattcctactgggagctcgcctgttgggtctgtgcccaaatcttctccacaatctcagcatcttacttttcatcttttagaaaaaaataaactccagccgcaaaggtacaataagttcaaacatcactgccttatggagcgtaagaaattaggcactggccagagtgagcaaatgaactcactgtatcgcttctggtcatactatctgagagataattttaatgaagatatatacaaggattttaagaaactcgcactggaggatgctgcagcgagctacagatatggtctcgagtgtctattcagattttatagttatggtttggagaaaaaattccaacccaatgtatatgaagatttcgagaagcttactttcgaattctaccgtaatggtgatctttatggactcgaaaaatactgggcatttcaccattaccgaaatccagatatcggtcctgtagataaacttccagagctggagaggcttctgagggaggagttccagaccctagaggacttcaaggcaaaggagaaagcccgagcgacgacggagaaaggaactggcatcagtagcagcagtgtggtggtggccgcaagtcatagcaaggctgagactaagcaggtctgagtcccgcatgaaaattttcggtggtcgccccagcaaaaagaggaagtagcgttttctttttctttgcgaagaagtaatgattcgggtagacatgtgcagattttgctatatcccctgccagtgccgtgtgttgtggctgcccagaaattttccctccttttctcattaccttcctggcaccaatgtcaatgtgggagttgtacatagatattttttttcctctcttgttaaatggacatatcatagagaatggagtttaaagcctttgtggtggctcggtgctgttttttagggtgtgggctatgttgatggcatagtcatctttgagaacttgatttttgaataccttctcgaatttaaaatgatgcaacgaatcatatagttaaagcc

SEQ ID NO: 6898 - DNA, 1842 bp, Zea Mays
ctagagggtagaggcacgggccgcgacggccgatcaggtgagtagccggccggcagcggaaaccgaaggcacggccacagcaccaccgcgcggcctcgagagtcgaaaccatcaggccatgttcggttggtcagggattggccgggattgtggcgcaatccacgtggatcatccccggctggaaactttcccgattcacattttaattgtcttcggttcatccaccaggcgaggggagggcgacgcgtgcggctagcgaggcgatggttgcgcgacacgctgacggcgacgcctgcgaccatcgatcatccattgttcatctccatccccttcggtggccaattttctctccgggagaaagctggcgcgggttggaggtgggaagaaagagaaagaagatgttgttgcgccttcgattggattgggttggccttggagcgcgtactgccgccgcatgtattcgctgttccggccctgattctatggtgcaccactgtgctgtgcgccgccccagccctcgaggatttagcaaactgctcagatctgttctcgctttgcttcatcagtgaacactgaacacggtgcgtgtgtggccgttcggttctgctttgacagatttctatattgattactcccaccttcgggctttcgatcagcttggtctagtaattctagacacaagttgcttgctccgtttggttcagagggtgtgtcagctcgttcttagcaagcttatcatggttctgattccatgtagtgtcagtaccaaacaaccaccaactgtggtaggaaaagagtagtcatatcaacatgagacatggttggtggtgcgtggtctggagtgataaaccgaagagatcaaatgagctatttcaatctgttagaataataagtggctagttgataaagagcatgaacataatgtcctcttatatttttctgtttaattagtttaatcaaaagcacactttacgcaaccttaaatcttatgactaccattcgctttaggtacttagatctatccctaaatatatgtagggatttttccctgttacagcggcattcacgtatgtatggagttttctatatatgattgttgggcctaataagtgaatttactgaagcaatattttcttttgttttttttcaatttaaggttttgattatctgcatagctgtattatacatttcactcctacatgttcagttttaatagtagtgtctgctattagttcttgcatctgttgtgttaaccaatcctgctgctagttcaattctagtgatctactaccattcactttcctcctgctgttattcgctttcctactgctactagttcagttcttgcatctgttgtgttgaccaatcatgtgtgttgcctctcaggtccttagcgatccgaagaaacatgcaatctgaatgtatattggacctacagacttgcttgcttctttaccattgcaatctgaatgtctaatatgcattttgggcttcttttgagtcatgttgttggtgtggaaccgtggaagtaggatgtggactgcaaggatggctagtttactctttactggcattgacagtttacttgtcgttcttcagtcatttggtggcatgtatcatcaagcttctgtcctttctatacattgttatgaacgttgctatgccttttatttcgaatgctgatgcaatctacgagtttctatccttgtatgtgtgcatagacattgttatgaatgctgctaatgtcttttattttgaatgcttatgcaatctattgagttgtatgtgtgtaaagacattgttatgtgtacggttttctatgtcatattcttttgcataaaa

SEQ ID NO: 6899 - DNA, 3194 bp, Zea Mays
ctaaaagctaatcccctacgctatctgtatatacaagacggaagcgcgaccccgaaaaaaaaatgtcctccatctccatcctgcacagatcctgcctccgcctaggtctttcatctggggatatgggctaccgccttcctccaaaagaaatacaggacattgttgatgcaccaccacttcctgtcttgtcattctctccaaacaaagataaaattctgtttctgaagcgtcgagcactgccaccactatcagacattgcaaagcctgaggagaagcttgctggtctaaggattgatggaaattctaatactaggagccgaatgtctttctacactggaataagtatccataagctgttagacgatgggactttgggcccagagaaagaggtgcatggatatccagtaggtgcaaggattaattttgtcacctggtcacaagacggccgtcatatatccttcagtattcgagtcgatgaggaagacagcaaaagtggaaagctgagagtgtggattgctgatgtggagtctggagaagcaaggccactttttaaatcgcctgaaatatacctaaatgctatttttgacagctttgtatgggttaatgattgtacactgctagtctgcactattcctgcgacacgtggagatccaccacataagccatcagttccatctggcccgaaaattcaatctaatgagtcaaagaatgtagtccaagcgagaactttccaagatcttctgaaagatgaatatgatgcaaaactatttgattactatgcaacctcacagcttgtgttggcctctttggatggaacagtgaagccaattggccctccagctatatatacatctgttgatccatcaccggatgataaatacataatgctttcttctatccaccgcccatattcctacattgtaccttgtgggaggtttccaaagaaagttgagttgtggactgtagatggaaagtttattagggaactttgtgatttgcccctggctgaggacattccaattacgatgagcagtgtacgcaagggtaagcgctcaattaattggaggccagacaaaccttcgatgctgtactgggtggagacacaagatggtggagatgcaaaagtagaagtctcccctcgtgacatagtttacatggaaaatgctgagcctataaatggtgaacacccagagattctgcataaacttgaccttcgctatgctggcacctcttggtgtgatgaatctcttgctttagtgtatgaatcttggtttaaaactcggaaaatcagaacatgggtgctctctcctgataaaaaagatgtcagcccacgcgttttattcgaccggtcttcagaagatgtatactctgaccctggctcaccaatgatgcgaagaactgtgatgggaacatatgtcatcgcaaagatcaagaaagaagacggaaatatttatgtcttgttgaatgggatgggtgccacaccagaaggaaatattccattcctcgatttgtttgatataaatactgggagtaaagagcgtatatgggagagcgacagggaaaagtactatgaaactgttgttgcactgatgtcagacaaaactgacggggaactgctccttgatcagttaaagatacttacgtcgaaagaatcaaaaacagaaaacacacaatattacttgcagacttggccagaaaagaatcaagttaagataacaaatttcccccacccatatcctcagcttgcttcattgtataaggaaatgataagataccagcgaaaggatggagttcaacttacagcaaacttatacctgcccccagggtatgattcatcaaaagatggacctttgccatgtctagtttggtcctaccctggtgaatttaaaagcaaagatgctgctggtcaagttcgtggttcccctaatgaatttccagggattggtgctacatctcctcttctttggttagctagagggtttgtgattctgtctggtccgacaatcccaattatcggtgaaggcgatgaagaggccaatgacagatatgtggaacaactagtaacgagtgcagaggctgcagttgaggaagttgtcaaaagaggggtggctcaccctgataaaattgctgtcggtggtcattcatatggtgcattcatgacagctaatctgctggctcacgctcctcatcttttctgctgtggaatcgctcgctctggagcttacaacaggactctaactccatttggttttcagaacgaggatagaacactctgggaggcaacaaacacatatgtcgagatgagccctttcatgtctgcaaacaaaatcaagaaaccaattttacttatccatggagagcaggacaacaattctgggacattgacaatgcagtcagaccgattcttcaatgccttgaaaggtcatggtgcactgtctcgtttggtaatacttccttttgagagccatgggtactctgccagggagagtatcatgcacgtcctctgggagaccgataggtggttgcagaactactgtgtaaatggtactagcaaggttgactcagtgtcagaggctgacagtaaaaacaaaacattgtcagctagtggtggcagtgcagcccgtgaaggtctaaaccctgaggaactctcatcattaccaagatcgcttctgtgatcaacttcagttggtgttcatgaaacattccctggacagcaagcctaaagggaaaaaatagtgtatcgttgcacttctaccttaaccgactaccagggatgccttgattggcctcatatttgtttcgattgctgcaggtgatcatgttactggcatgcaggagccccctacccccccccccccccccacccccaccccacaaatataagaaaggcctagtctctggtggccactgcactcagatatatttgggtcaatttgtattctattggtaatggccaatggaagtcattcttgcgattaatatcatgtacagaaatatagccttttgcagttttgatcccaactcttgcacttggcagcgaactgatacgttggttttctttgacagcaatctaaaataaaataataactaatgagattatcatatgctccaatgtctcgcatcgtcacattttacctgttaccattatttactgcagctgttgtactgacattcgttgcccatttgagaggcgc

SEQ ID NO: 6900 - DNA, 1945 bp, Zea Mays
tcgtcgcttctactactgctatgctatagcatatactccagtcgttgcccccgccgccgccgccgccgccgcctcgacgcatccgaggaggaggagaaggagaggccggccgggtagccattcgcgtgcgatcgcggcagaggagggcggcggtatatagacgatgggcctcgtcggcggtgtcgtcggcttctgcctcggcctccccatcggcctcgccgccgcgtacttcgtctacctccgctacttcgccgccgctcgccgcctccaggatcctgtcattaaacctctacgagatttagattctgaaaccctgcaggcaacaataccacatattccattatgggtgaagagcccagactacgagcggattgactggatgaacaagtttatttttgacatgtggccttttctggataaggcaatatgcaagcatataaatcgtgctacaaggccaatatttgatcaatatgttggacaatatggtatagaatcaattgaatttggagagttgacacttgggactcttccacctacatttcaaggcattaaagtttacgaaatgttagaaaaagagttggtaattgagcctgtgattcggtgggctagtacatcaaatgtaacagtgaacgtaaaggtgcaatctttcgaagtgacggttcagcttgaagatttgcatataatgctgacaccacgtgtgattttgaagtcacttgtgccaagctttccctgttttgctaacttgtgtgtttcactaatggaaaagtggcgctacaaagaagccagttggaatcttgcatgtaaaggtaattagagccctgaatcttctcaagatggactttctcggcaaatctgatccctatgtgaagatgcgcctgagtggtgagagactgccctcgaagaaaacatctgtcaagatgagcaacctgaatcctgagtggaatgaacacttcaggttcatagtcaaggatcctgatacccaagtccttgagcttcacatgtttgattgggaaaaggtttctagcagtatgcaacttatctacttctgatatgttcataatcctcattttgatgcaattcatgctttttttttcaccctgatttgcattggcaagagagacacgccaaccggataaccttagcgtgttttctgattgttcaaggttaagatgcatgataaattgggcatgcaagtaattcccctccgcttgcttacaccttacgagagcaaattattcacgctcgaccttgttcgaagcatgaacccaaacgatccgcagaacaagaagaacagagggaagctcatcgttgagttgacatttgatcccttaagagaagacaatatgtcttcagatgctgaaggtaatgctagcgtgagaagggatgcggacggtggtggtgggggggtgctgttggtttcggtagaaaatgcggaagacgtcgaagggaagcggcatactaatccatacgctgaggtccttttcaggggagagcggaagaaaacaaaggtgataaggaaaacaagagagccaagatggagcgaggagttccagttcatggtagacgagcctccggtggaagataagatccacatccaagtcaaaagcaaacgccgcgggcttcccttccgcaacaaggaatcgctggggcatgtgaatataaacctggtggatgtggtgaacaacggccggatcaacgagaagtaccacctcatcaactccaggaacgggatgatacacgtggagatcaaatggagcactgtgtgattattcagctcgtgtaatgtttaacatcaacgggctgccaagaggcgtgtgactggtttgtgagttgttgccgttattattataaaaaaaccgatcggtcggggcttctttggttgcttcctatggcaacatttggtaccttcacaagaatcagtagatgacaagtgtagatgccgatt

SEQ ID NO: 6901 - DNA, 2010 bp, Zea Mays
aaaaactccgcccgtccccacgccaccccgcctcgcgcttgccgttgccgcctccgacccgctgcttcattcgtcgcttctactactgctatgctatagcatatactccagtcgttgcccccgccgccgccgccgccgccgcctcgacgcatccgaggaggaggagaaggagaggccggccgggtagccattcgcgtgcgatcgcggcagaggagggcggcggtatatagacgatgggcctcgtcggcggtgtcgtcggcttctgcctcggcctccccatcggcctcgccgccgcgtacttcgtctacctccgctacttcgccgccgctcgccgcctccaggatcctgtcattaaacctctacgagatttagattctgaaaccctgcaggcaacaataccacatattccattatgggtgaagagcccagactacgagcggattgactggatgaacaagtttatttttgacatgtggccttttctggataaggcaatatgcaagcatataaatcgtgctacaaggccaatatttgatcaatatgttggacaatatggtatagaatcaattgaatttggagagttgacacttgggactcttccacctacatttcaaggcattaaagtttacgaaatgttagaaaaagagttggtaattgagcctgtgattcggtgggctagtacatcaaatgtaacagtgaacgtaaaggtgcaatctttcgaagtgacggttcagcttgaagatttgcatataatgctgacaccacgtgtgattttgaagtcacttgtgccaagctttccctgttttgctaacttgtgtgtttcactaatggaaaagattttggattgaaactcttgtgtggagatgtcatggcaataccaggcttgtatcaatatgttcaagatcaattatcaaagcaaatctcaaatttgtatcactggcctaaggttatacagattcctatcttagatggagcaagtggcgctacaaagaagccagttggaatcttgcatgtaaaggtaattagagccctgaatcttctcaagatggactttctcggcaaatctgatccctatgtgaagatgcgcctgagtggtgagagactgccctcgaagaaaacatctgtcaagatgagcaacctgaatcctgagtggaatgaacacttcaggttcatagtcaaggatcctgatacccaagtccttgagcttcacatgtttgattgggaaaaggttaagatgcatgataaattgggcatgcaagtaattcccctccgcttgcttacaccttacgagagcaaattattcacgctcgaccttgttcgaagcatgaacccaaacgatccgcagaacaagaagaacagagggaagctcatcgttgagttgacatttgatcccttaagagaagacaatatgtcttcagatgctgaaggtaatgctagcgtgagaagggatgcggacggtggtggtgggggggtgctgttggtttcggtagaaaatgcggaagacgtcgaagggaagcggcatactaatccatacgctgaggtccttttcaggggagagcggaagaaaacaaaggtgataaggaaaacaagagagccaagatggagcgaggagttccagttcatggtagacgagcctccggtggaagataagatccacatccaagtcaaaagcaaacgccgcgggcttcccttccgcaacaaggaatcgctggggcatgtgaatataaacctggtggatgtggtgaacaacggccggatcaacgagaagtaccacctcatcaactccaggaacgggatgatacacgtggagatcaaatggagcactgtgtgattattcagctcgtgtaatgtttaacatcaacgggctgccaagaggcgtgtgactggtttgtgagttgttgccgttattattataaaaaaaccgatcggtcggggcttctttggttgcttcctatggcaacatttggtaccttcacaagaatcagtagatgacaagtgtagatgccgatt

SEQ ID NO: 6902 - DNA, 1459 bp, Zea Mays
tgctactagtttgtatgtttgtcatgctctaagcactcatggtctgaacctctggagaactttgatcaccagctcttgtgggacagtatatcatgctttgtggtatggttcggatgtggctgttaaagttttctccaggcaagaatattcagaagatgtgatactgtcctttcgacaagaggtgtcccttatgaaaaaactgcgccatcctaacatactgctcttcatgggtgcggttacgtctccacaacgcctttgtattgtaacagagtttctccctcgtggaagcttgtttcgcttacttcaaaggagtgctaccaagttgggtgtgagacgacatgttcacatggctttagatattgcaaggggcatgaactatcttcaccattccagcccacctatcattcaccgagatttgaagtcatctaatctgttagtcgacaagaactggactgtgaaggtggcggactttggcctttcacgtctcaagcgcgaaactttcttgacaacaaaaacgggaaaaggaacaccgcaatggatggcgccagaggtgctgcgcaacgaaccttccgatgaaaagtctgatgtgtatagctatggggtgatcctatgggagctcgttactcagaagataccctgggaaaacctgaactcgatgcaggtcattggcgcagtaggttttatgaaccaaaggttggatatcccaagcgaagtagatcctcagtggagatcaattatcctgaactgttgggaaagcgacccgcagcaacggccgtcgttccaggagcttctggagaggctccgcgagctgcagaggcgttacgccatccagcagcggaacgcgaagaacagcgtcgaggagtgaagactgaagaatgcaatgcaactctcccaagcggcggcgggcttgctttgaagcattttgcgagccagcagcatgccagatctagagaagggcctgagcctcctgtactggggcctgggggctgctaaggctggaagaagtatgttctacagacgaggcgccttctgtcttcttctttttttttaaaaaaaaagaaagttcttccccatggcaattgtgactgtaattaatttctgggtcctgacagcaagggtcagtagggtagcgagtgagtagtgactgagctcgggcttgcttgctagcgcctctgggttctgattcttgacaacgcaaatgcgtactacgtggttaacagtaacatccaatccagcctccagtttctggcaagggcatgcatgatgatgtgtagattgtctgttctgataggtcagtggtgtgtacatgtgatccccaaccgaacgcattcgactgcgtcgcttcgatatctggttggtcaggttacactgctgaatacgggtgatagatccttcttccctagcaagtagcaatggctgccgaacaagaattcttatatttgagtgctcgaaattaaaa

SEQ ID NO: 6903 - DNA, 3450 bp, Zea Mays
attcaatctccatccggatgcgtcatgcgtgtgtgtgacttgtgagagagacagattccacagcaatttgctccccttccacgcacaggtcaagaaccgctccccagaaaagatcgtatttttcatcgattcaaccggtttctgtacgggaaatcgctgctggagatctcagagaaccggaagctcggagcttttgctccgtttgcgtcgaatctgccttgggagcggataaaggagcggcctttcgagctcgtcggagccgcccctgaggaggcgaaaggggacgcggcggcggcgccatcagctgtagggcgctcgtggaagtcggtgaagccggtggtttgaggacgaggtggcctcggtggtttcgaggaagccacccactgccgcggcggggatggactccagcggggaggaactcctgaagaagatccgggagctggaggttgggcaggcgcagctcaagcaggagatgtccaagctgatacccggcgccgtggagcggcggcgctcgcaatccgtctcgccgcggcgcggcgcgccggtgccaccgccgaccaaggcgaaggcggggccaccaggtaggctgctgtccgggggatttgagggcgggcagcgtgcgtgggcccgtgggtcggcgtctttcccgcactcatcgccgctgcatcgggagggccgggccacgggcgctggaaatggtagcaccagcgctaggctgcctgagaggcagtactccagggtgctgcagtcactggggcattccgtccacattcttgacctcgatgggaggatcatatactggaatcagtctgcggagaatctgtttggctatcctgcatcagaagcccttggtcaggacgccctcatgcttctggttgattctggtgatcacaatgtggtgaatgacattttccgacgtatttctatgggtgaaagttggactgggaagtttccagttaagagcaaacaaggagatagattttcagctgttgccaccaacacacctttctatgatgaagatggaagtttggtgggtatcatttgtgtttcaagtgattcccgccacttggagcagatattttgtaagcctccaacctctgcaaggcctcaatcagaatcatctaggacatcttgtgatgggagttgcagcaacactagtcgcagaatcaatttgttgaacagaagtccttttgatcctcagatacccctgcaaagcacttttgcatccaggataacgaatttggctaccaaggtcacaaataaagttcgttctcgggtcagcacagacgattatggcatagaacgggaaggtggcagtggtgagagtcattgttcggatcgtggtgcaaaggaagaaccaacatctagcggaacaaatacacctagagggaatgcaccacatggtcccttttctacagatgagaactcccctgggaaatcaacgaacccaagcagtgatgaattagaaggaaaagtaggtctgcacaagtttttgagttcaaaggcagaggcactactgaacaagaaagggatatcatggccttggaaagtgcgcgagaatgacggacctgatgaaagaaatcatgtgatattgttgcatggagaccaagagaatgttatgaatcatcagaaggtttcagattctagcatagctccagattcccaaggcgctgaacacaacctacctagcaaaaatgaggcatcaggttcctggtcctcttacaacaataacagcacaagcagtgcaagcagcacaggaagcactaatagcagtgctctctacaaagtagatcatgaagcggattgtctggattatgagatcttatgggaagaccttgtcattggagaacaaatagggcaaggctcttgtgggacagtatatcatgctttgtggtatggttcggatgtggctgttaaagttttctccaggcaagaatattcagaagatgtgatactgtcctttcgacaagaggtgtcccttatgaaaaaactgcgccatcctaacatactgctcttcatgggtgcggttacgtctccacaacgcctttgtattgtaacagagtttctccctcggctatgacaatgcctgaagtaccattatatattttgattctgagggagtattctccatgggtgatggatgacagcagatctatgatatccttttccttgggttgggttggttccatgttcaaaacactgtcaagcactcaaacacttctctctttttggttcatttccgtattttttcacttctgtcttttcaaatgcagtggaagcttgtttcgcttacttcaaaggagtgctaccaagttgggtgtgagacgacatgttcacatggctttagatattgcaaggggcatgaactatcttcaccattccagcccacctatcattcaccgagatttgaagtcatctaatctgttagtcgacaagaactggactgtgaaggtggcggactttggcctttcacgtctcaagcgcgaaactttcttgacaacaaaaacgggaaaaggaacaccgcaatggatggcgccagaggtgctgcgcaacgaaccttccgatgaaaagtctgatgtgtatagctatggggtgatcctatgggagctcgttactcagaagataccctgggaaaacctgaactcgatgcaggtcattggcgcagtaggttttatgaaccaaaggttggatatcccaagcgaagtagatcctcagtggagatcaattatcctgaactgttgggaaagcgacccgcagcaacggccgtcgttccaggagcttctggagaggctccgcgagctgcagaggcgttacgccatccagcagcggaacgcgaagaacagcgtcgaggagtgaagactgaagaatgcaatgcaactctcccaagcggcggcgggcttgctttgaagcattttgcgagccagcagcatgccagatctagagaagggcctgagcctcctgtactggggcctgggggctgctaaggctggaagaagtatgttctacagacgaggcgccttctgtcttcttctttttttttaaaaaaaaagaaagttcttccccatggcaattgtgactgtaattaatttctgggtcctgacagcaagggtcagtagggtagcgagtgagtagtgactgagctcgggcttgcttgctagcgcctctgggttctgattcttgacaacgcaaatgcgtactacgtggttaacagtaacatccaatccagcctccagtttctggcaagggcatgcatgatgatgtgtagattgtctgttctgataggtcagtggtgtgtacatgtgatccccaaccgaacgcattcgactgcgtcgcttcgatatctggttggtcaggttacactgctgaatacgggtgatagatccttcttccctagcaagtagcaatggctgccgaacaagaattcttatatttgagtgctcgaaattaaaa

SEQ ID NO: 6904 - DNA, 1011 bp, Zea Mays
tatcaacaacttctccctcgttcgtcgttgcctccccctccgtttatttattttatataaataaaacaaaaaacaaaaccgcagcagctcctccactggcacactccccctctggcctctaccctgcctgccgtttccatctccatccagttctccgcacccacccacgaccacgacccacccacccactcctttccccaacccacggccgtggacgccagggtcttctacctcaagatgaagggggactaccaccgctacctcgccgagttcaagaccggcgccgagcgcaaggacgccgcggactccacgctcgccgcctaccaggccgcgcaggacatcgccgtcaaggagctgccgcccacgcatcccatcaggctcggcctcgccctcaacttctccgtcttctactacgagatcctcagctcgccggaccgcgcctgctcgctggccaagcaggccttcgacgaagctatttcagagctggatagtcttggggaagagtcgtacaaggatagcacactcatcatgcagcttcttcgtgacaacctcaccttgtggacttctgacatgcaggaggatggtggcgatgaaatgcgggatgcaaacaagcctgacgaggagcagtagtagccaaacatctccatcgatcatgccatgccatgccatgcttgtacaaggaccattttcgtgtgtcctttccttcaatcgtcgacctttcgttttgttgttatactgctattgtggaaccctgttactgttactgttagtgtatcctattggcaataatcaaatgtggtatggttgactactatactaatgggtgatcattattcatcatttgattaagttagataattgaatgcttgtgtgctatcactaccatgtgatggaatagaattcaccaggcaaatatattttataggacattttaattcagccggctaaggttgagtaaacaagtgtttgaccgggtttaggacattttgatccaaaatctcatcaatccag

SEQ ID NO: 6905 - DNA, 3266 bp, Zea Mays
ttgcagctctggaatttggttgaggggtgtcggtgttttaaacccgccggttctaaccaactagtaaatttgtgctgcgtgctcttatcccggatggttgatgaaagaagacacacaaggtttatcctggttcgggcaagagaaggccctacatccagcggggggaggagacttatattatcttgcatctaagtgctcgtagtaggggatacaagcaagtcgagagagggagtgagtcctaagtctctgagtatgattgaggcgagtgccaatatcaggagtggagtgaggagtgaacggtgaagtgttgtccttgacctccttatagaaggccccgggctcttccttttatagctgcaaggaggaggcccaggggtacaggtgttgctatgctattgctgtggtaggaggaggtgtgtccgagccctgtagcggtatggccggcgggatggccctcgtccttgatgtcgtctttggtcaggagaaggacgcccgatccctgtagcctgtcctttgactaggtagagagccgaggccgggtttgggagcatgggcgtctgcccgagctcgtcctgtacaggggtgcgaatgagacgtttccgagggtgtcgagtcggagtggttgaaacagagctcggcatggtgaaaaagtgtgtggtaatctggtccggatgtcattctggatggtggaaagtggattggacactggtcttgttgtttctgtagccttcctgtcttcagcgggagagcaggtggcatttaatgcgcgtgcttccctgttggggcagttggccgaggtcaagctcgggcgaggcgaagatttcttccgaggccgaggccgtgattagacgttgcatgtagtcacgctctgggtggttgaaacagtggtcggagtgggggaatagtacccctgtattcgtgccctgaccatcgttgtgggtggtaaaagtagattagaccgtgggcgtgtcgtcctttgttgactttggcacctgctgcggggcaggtggccgtacagactacatttaatacgcacgttctgggatcggagtggttggccgaggcgggcatgccccggagcgctgcccgagatgccctcgagcgagtcggaaatgcgtcttccgcccgaggctggcctcgggtgagtcgcgaatgcgtccttcccccgcggcgaggttcggtcgaatcgtagaactacggctcgcccgaggatatcctcgggcgaatcgtagttgtactgtcggcctgtggggcttcgggcgaatcgtgattttggttccgtgtggccttggtaaggttggaagcgtgtttgcttgtgaccccttcttacccaggcgtctaggcactttagggttgtgatctgggtacccctaattacggtacccgacaagtgggtagagcttcaacctgacattgaagatcaacatatttggcgtctctctggccatggtatttactccagcaggtcagcgtatgaagcattttttactagatctatcactttcgccccttggcggcgtgtgtggaagacctgggcccccttaaggtgcaaactctttgtttggttggcaatcaaaaaccgggtctggacagctgacagattggcctaaagaggactgccccatccagctgcgtgccctctttgtgatcaggcagaggagaccatccaacatactctcatcccttgtgtttttgcccggcaagtctggacgttgatcctccacaaattgggcctcctcatcattgctcctcagccaggatgctcgagattttcgagttggtggtgccaaagtattaaaagtgttgagaagaacttcaggaagggacttaactccctaatcattttggttgcttgggagttatggaagcaccgtaattcttgcgtctttgacggtgctacaccctgtgtccaaagtgttgtgcttgctgtgactgaagagggtagtgcctggtgcttggctggagcatcagctcttcaggacctcctcctgcgtcgactccccatggcgtcctagtagttgttaggtgatagttctggtcgtttgtcgccctgtgtgtgtggcgcgctgagttggggtaatggtgtggtgtgttggccttattggccttgtacttaggggatgacaagtcttgtctctcctaatttctctttcttaatgaaatgcctgcgtttgttcaaaaaaaaaagattcagccaactattctgcactactgctgccttgatgttgcttcaggtaatcgaccatatatggactgttttagtgtttttcacagcactgcatataggctttagtgtattacgagtatgtttctttctaattctacctttcttactttgtgcaacactgcaaatcaagacctgagttacaaaactgatttttattgtacggttgtctaagtttgcactatcatcattcaagttatatcatggtatgcagagatagcacccgccttgatgttgattgtcattttttgtatgtcattgcttataaaaaaacagagataccctgctatgcttaaggaagatgaaagtgacatcaaaatatggagataatcaaactgccgactgaatttgatatcactaaaaaagacatggtactgctgagacaccaaacaaatacacaatgcaagcaccttggagtacatatgttccatgattaatgttagtccactaacagaagatattctctacagggattagtaaaacacttacaggcgcaacctcagctaggtttgggttgttgtctggaaggagattagtttcaaggactgagctgatcaacatgccggcaaggaacaactctttctttttgccttgcatgagctaggggaaattcagtactggctacacgggaagcgggataagttgcagtgacagcaaaaccagataggagaaagagtgcaggaactgaagaagattggtgggaagcacagctttctgatctttgaagaccgcaagtttgctgacattgggaacacaattggagcctcctgcaactacgaggggaaaaaaattctgatgactaaagtgcttcgattcttaaaccttcagtaggccagaaatatctttataatggacccgaggcctatacgaactggtaattgacaacatgggttccaaaaacattagattggaatcttaatctatctcaatatttacttcatttttaagagacatattgtcattttgtttttttccatagcgttagcatgggcatgtatactatcagtatatatgatttttttgccttacacctcggttcaat

SEQ ID NO: 6906 - DNA, 5554 bp, Zea Mays
ctatgacagctctgctagagaagaatgccaagtttgtgtggtcagataagtgtcaagcaaacttcgaggagtcaaagaagagattgactacagcacccgtgttgattttgcctgatctaagcaagaactctatctattgtgatgcatctcgactgggtatatccgctaggtcttcgttggcaccttccctgacgacgagcacccacatggtgtgacttgaaggtggtgagcgatgcaaacgtcttcttccccaattgagactgtcctggcacacctcggcatgcatggctgcttctccgagatcaccaccaacctggcgagcgtcgacaccgatggtggtgtttagatctcaccgttctgtggccacgccccacaggtgcaagctctgctctgacaacatgtgcaagcgttaggctgatcatttaattgtgcatatgtgggctctttaattgtttgtgactacatatgtgtattgtaggaaaaaaaatccatattttgtacattgttaaatgcctgtcatttctatattatattgtactacataattaatatctgcatttctatttacagccataatgtagaaagtgcattgactgaatattatattcttaacaaaaatctgaaatggaaattactgacagatacgtctcctgatgccagtgcaaatgctgcttttgatttttatgattagatagattatatgcatggtggtgtaagcttatttattaaattggatgtatgtccctggctgttttgttaaatctgtgataggcttaggctgatcatatacttctaaatttatcacctgttttgaatgcattccaagcaaaatagttgatgtccctggatcctgtacctattggtgtagttttgttttaattgatttggtgctttcagtctttgcttcgccaatgtttctgtaattgattgccctgggaagtgctgtagtaaaagcacgactccaattccaaattacagagaattccagacaagagggtctgccctggtctgatctataaatcgctatgttcttatcttcagtaatcatctattttcttaggtgcctcatattattgagaactcatggtcccagttcttttggcattaatagattgatgagttattttattggatgacgtcaaatttcctttgcctcactgtccaggttaaatggcctctgattattgacttgaaaactggcatgtgtgtgttttttcattttgtttctttataatctgcaccaactaacctgctttgaatagtttgtttgtgattctactgtttacgtgagtttgactggttagagaatttaaatgtatcaaaaaaatagttcaaccctgcattatacaaaattatgtggaaccataaaaggatttggtcgtgttgcatgatttgcatgatagcaaggctatattcactctaatcaggtttataattcctagaagcaaatatagagagttgctagatgttaaatgtcggttccttttttagttttttaagctcttatttctcctaaacataggtcaggcaacattatatgaagtagcattactgaattctcacacataatgcaaaggccttgtttgatgtgtctgttacatccatagttggcaatgggaagactgtgaagttctggactgatcgttggctctttggtcaaactgttgctgaatgctgcccatccttaattaaatcaattcctaaaaagggccttaaagcaacgaacagtagcagagggaatcacagactgcaagtgggtttctgatataagaggagcactgtccgtgcaagttctactggaatacttgcagctctggaatttggttgaggggtgtcggtgttttaaacccgccggttctaaccaactagtaaatttgtgctgcgtgctcttatcccggatggttgatgaaagaagacacacaaggtttatcctggttcgggcaagagaaggccctacatccagcggggggaggagacttatattatcttgcatctaagtgctcgtagtaggggatacaagcaagtcgagagagggagtgagtcctaagtctctgagtatgattgaggcgagtgccaatatcaggagtggagtgaggagtgaacggtgaagtgttgtccttgacctccttatagaaggccccgggctcttccttttatagctgcaaggaggaggcccaggggtacaggtgttgctatgctattgctgtggtaggaggaggtgtgtccgagccctgtagcggtatggccggcgggatggccctcgtccttgatgtcgtctttggtcaggagaaggacgcccgatccctgtagcctgtcctttgactaggtagagagccgaggccgggtttgggagcatgggcgtctgcccgagctcgtcctgtacaggggtgcgaatgagacgtttccgagggtgtcgagtcggagtggttgaaacagagctcggcatggtgaaaaagtgtgtggtaatctggtccggatgtcattctggatggtggaaagtggattggacactggtcttgttgtttctgtagccttcctgtcttcagcgggagagcaggtggcatttaatgcgcgtgcttccctgttggggcagttggccgaggtcaagctcgggcgaggcgaagatttcttccgaggccgaggccgtgattagacgttgcatgtagtcacgctctgggtggttgaaacagtggtcggagtgggggaatagtacccctgtattcgtgccctgaccatcgttgtgggtggtaaaagtagattagaccgtgggcgtgtcgtcctttgttgactttggcacctgctgcggggcaggtggccgtacagactacatttaatacgcacgttctgggatcggagtggttggccgaggcgggcatgccccggagcgctgcccgagatgccctcgagcgagtcggaaatgcgtcttccgcccgaggctggcctcgggtgagtcgcgaatgcgtccttcccccgcggcgaggttcggtcgaatcgtagaactacggctcgcccgaggatatcctcgggcgaatcgtagttgtactgtcggcctgtggggcttcgggcgaatcgtgattttggttccgtgtggccttggtaaggttggaagcgtgtttgcttgtgaccccttcttacccaggcgtctaggcactttagggttgtgatctgggtacccctaattacggtacccgacaagtgggtagagcttcaacctgacattgaagatcaacatatttggcgtctctctggccatggtatttactccagcaggtcagcgtatgaagcattttttactagatctatcactttcgccccttggcggcgtgtgtggaagacctgggcccccttaaggtgcaaactctttgtttggttggcaatcaaaaaccgggtctggacagctgacagattggcctaaagaggactgccccatccagctgcgtgccctctttgtgatcaggcagaggagaccatccaacatactctcatcccttgtgtttttgcccggcaagtctggacgttgatcctccacaaattgggcctcctcatcattgctcctcagccaggatgctcgagattttcgagttggtggtgccaaagtattaaaagtgttgagaagaacttcaggaagggacttaactccctaatcattttggttgcttgggagttatggaagcaccgtaattcttgcgtctttgacggtgctacaccctgtgtccaaagtgttgtgcttgctgtgactgaagagggtagtgcctggtgcttggctggagcatcagctcttcaggacctcctcctgcgtcgactccccatggcgtcctagtagttgttaggtgatagttctggtcgtttgtcgccctgtgtgtgtggcgcgctgagttggggtaatggtgtggtgtgttggccttattggccttgtacttaggggatgacaagtcttgtctctcctaatttctctttcttaatgaaatgcctgcgtttgttcaaaaaaaaaagattcagccaactattctgcactactgctgccttgatgttgcttcaggtaatcgaccatatatggactgttttagtgtttttcacagcactgcatataggctttagtgtattacgagtatgtttctttctaattctacctttcttactttgtgcaacactgcaaatcaagacctgagttacaaaactgatttttattgtacggttgtctaagtttgcactatcatcattcaagttatatcatggtatgcagagatagcacccgccttgatgttgattgtcattttttgtatgtcattgcttataaaaaaacagagataccctgctatgcttaaggaagatgaaagtgacatgtaagattactcagtgcacttcatttttgctcttagttgacctgtacatgtctgatgtttatgctgttttgtcttctctactttaagtgcctactagattcaaaaaaatactttaagtgcctactaggtgcaattttaaattagtattttgtagtcaacagatagagcacactgctctgattgtagtcaacaaagatggcattgaagaacccagccagacatactaggattaagtgaatttgccaatatgagatgacccaaatggtttaagtgaatatctctatctcgagttggaggttgctatcagacactacctgtttttaactcttagtttgagcttacatctcaaaccaaactattatcttgcaatctgcatgaagaattgcagtgcttgttgcttcacttcagtttttactctcattttgcacgaaactatgtgttatttattacagatttcactcatttcttttgtttactgtgtagcaaaatatggagataatcaaactgccgactgaatttgatatcactaaaaaagacatggtactgctgagacaccaaacaaatacacaatgcaagcaccttggagtacatatgttccatgattaatgttagtccactaacagaagatattctctacagggattagtaaaacacttacaggcgcaacctcagctaggtttgggttgttgtctggaaggagattagtttcaaggactgagctgatcaacatgccggcaaggaacaactctttctttttgccttgcatgagctaggggaaattcagtactggctacacgggaagcgggataagttgcagtgacagcaaaaccagataggagaaagagtgcaggaactgaagaagattggtgggaagcacagctttctgatctttgaagaccgcaagtttgctgacattgggaacacaattggagcctcctgcaactacgaggggaaaaaaattctgatgactaaagtgcttcgattcttaaaccttcagtaggccagaaatatctttataatggacccgaggcctatacgaactggtaattgacaacatgggttccaaaaacattagattggaatcttaatctatctcaatatttacttcatttttaagagacatattgtcattttgtttttttccatagcgttagcatgggcatgtatactatcagtatatatgatttttttgccttacacctcggttcaat

SEQ ID NO: 6907 - DNA, 2714 bp, Zea Mays
cttgaccggaccctgcggcccagcttttttcttcactctctgcaacccattccccccctgcattctctctctgttctcttgtgcgtgcctgcgctctgtagtgacgacgactgggcggcggccgctgccgccgacctacgtgcgcaggtctccatcttccggaccttcgctggagacgagcacccaccaccagaaattttctatacatttaagatgtacagggcctcaaatttcatacctgatcctaatcaggtgcttctagatgccaatccattaagcgccactacaaacggtgtttcttatacgggcaccagtggtaatggtgccattgatgccactcctatctctgcatacaagacaagatcaagcatatcacttgatgatgatgatgatgagccttactcgggcaaccaaggtttggcatctgaacggaaggctaggagaggccgtcctcctggttctggtcgtgatggatcaaatggtaagttaaagcgccctaagcctacatacaagaattttgttgctggcaaagagcttgtctttctgtcttctacatccgatcccagggagtttgtggaatcagttcacatgacttttgaggccctcaggcgaagacatctgcagatggatgaaacacaggatgctagcagacgtgcagacctgaaggctggtgccatcatgatggccagtaacatcagggcgaattcaggcaagagggtaggaactgtacctggagttgaaataggagatattttctattttaggatggagctgtgtgtcattgggttgcatgcacctagtatgggaggcattgattacatgactactaaatttggaaaagatgaggattctgtagccatatgtattgtctctgcaggaggttatgagaatgaggatgatgacacagatgtgctcgtgtacagtggtcaaggtggaaataataggaatactgaggagaggcatgatcagaagcttgagaggggtaacctagctcttgagaggagtttgcataggaagaatgagataagggttgtacgcggcttcaaggatccattttgcctaactgggaaaatttacatatatgatggtctctacaagattcacgagtcctggaaggagagaacaaagtacggtgtcaattgcttcaagtacaagctgctgcgggaacctggacagcgtgatggagctgcattatggaagatgactcagagatggatagataatcctgctaccagaggcagggtcctactagctgatctgtcatctaaggctgaaattttgcctgtttgtctcgtcaatgaggtagaccatgagaaaggacctgtacatttcacttatactaatcaggtcaaatacttgaggcctctcagttctatgaaaaagttgcagggctgtggatgccagagcgtttgcttgcctggcgacgccagttgtgcttgtggacaacataatggaggcgatttacccttcagttcatcaggattgttgtcatgccgcaaaccaatagtctacgaatgtggtgaatcttgcaactgttctacaaattgcaggaacagagtgacccaaaaagggtccaggctacatttcgaggtcttcaggaccacaaatcgaggctggggtcttcgctgctgggaacctattcgtgctggttcatttatatgtgaagtaagcacatatgtatcgcctgatgaatttgaaccactgcctgtcaagataagtgcaaaaaacatgggaaatgtctcccgtttcatgaaccacagttgctcacccaatgtcttttggcaaccagttcaatatgatcacggagatgatggacacccgcatataatgttctttgcactgaagcatattccacccatgacagaactgacttatgactatggtgttgctggagctgaatctagtggttcaggttctcgtagaacgaagaactgcgtgtgtggatcacaaaactgcaggggattattttgatgggttgagagacgtgctcttggtggttaatcatgcaaaccactttctgctagatcctttctatgaaaccaaatttagtctccggataatatgacagatgatgtcatttgccatgtgtactgtgaagacagtaagttgtcgagcgagctgtagaatttctgttgctctgaactgcatggtggtcgctttcccaccatttcctcggatgtttatgtgggcgtggattgctgcattgcttccgctaaacttgtccaccaattgcaccggcttttgtagacttgttatcagccccgcttgcgttggacgcctggttgttaggatatggtcttgtaaattatcctggttaaggatcatgttgctttcgactcgaattttcgtcctcccttgcccttatgttcagcaatgttcaggtgtatgctgagtgctcaggtagggaccaaaggatgcagttgatgcaatttggaaccaggttttcttgtgggcgccggccaagggaatttgctgcgagaggtacaggtgagatgcaatgtggctggcacaccataaggccatctctctctagcagccgtgtgtgtacatgtgaacattgttttgcagtgtagactttacggggtggataggtcgggtagagatgttactccttagaaccgcggtcccagcacttgggcgcgagcgtaactacgtacacgagtcccggacccgccgactagcctggtcggctcgtctcctggtcctctacaccc

SEQ ID NO: 6908 - DNA, 2870 bp, Zea Mays
gtcctgcttgctctctctagagctgactttaggacattggaggctttgacgccttcggtgtccttgcgtccgcgtcgtgtccgcgcgcctgctgcccgccaacccgcctctcccaaatcccatccaaattcctccgcgtctttcgaagatcatattttgggaggggcaccgcccccagatcggggaggaatccccattccgtctggtgggtcggtctcccctgtccgtttttggctcttttcccctctcacaagggcggctcttggatgggctgcctgccgtgcttcgggtcggctggtgagggggcggccaaggagggcggtgcgcgcaaggacgataaatcaaaaccacagggtggactagactctaagaaggatgcagtcattttgagggaggggaataatcaacatattgcagcacacactttcacttttcgtgaacttgcagctgccactaagaacttcagacaagattgcttattgggtgagggaggttttggtcgtgtttataaaggacgtttggagaatggacaggttgttgcagtgaagcaacttgatcgcaatggccttcaaggaaacagggagtttctggttgaggttctaatgcttagtctgttgcaccatgacaatctagtaaacttaattggatactgcgctgatggagaccaacgtcttcttgtatacgagtttatgccattgggatcacttgaggatcatttgcatgggatttcaagtcctcaaacattctactcggtgaagggtttcatccgaagctatcagacttcggccttgccaaacttggccctgttggtgacaagactcacgtttcaacacgtgtcatgggaacttatggctactgtgctccagagtatgcaatgacagggcagcttacagctaaatctgatgtatatagttttggtgttgtgttccttgaactgattactggccgcaaagcaattgacaacacaaaaccccatggagagcaaaacctagttgcatgggctcgtcctctattcaaggaccgcagaaaattccctaaaatggctgatccgtcacttcagggctgtttccccatgaggggactgtatcaagctctagctgttgctgcaatgtgtttgcaagagcaggctgctacccgcccctttataggtgacgtggtcactgctctttcatacctagcttctcacacatatgatccaaatgcgcctgctcaacataatcggagtaattcatctactccgagggttagccgaggtggtgggagcaatgaccaacgccgtctccgctcatcaaaccaccactctccagatttgagaagggaagtcaccacagcatcaagatacgacgatgaggttagcagggcaaactctggtactggttctggtcgccggtctggcttggatgatgcggatatgtcaggctcacaattgggtagccctgctcacactggaaggaagaggggatctcctaggacttctgaaagccagcatgctatagcagaggccaaaacatatggggaaaattcaagaggcagaaagtgaccaaactctcagagcagcattgaccgtatgagcagaatgctgaaccagatggttcatccattcatcattcatagaaaaaaaaaatgataagttccttgctagcgccagacaggaacattgcatcagtccatctaggtcccttggtctttgtgaatagagctttcctcttttccctttacgggctattgccactgcttcttaacttctccatacaaatatcattgccaccacaaccaccatcagaactcccattcctgtcatctattcctcatgaatgcgatcatcatgcttacgagccttcgtcgtcacggtgtataacaacattcggttcacaatgtggaggtaaggcaaacatctgctctggggagcacaggatctcatccagttgggcatcttctgttgctgttgcatgctgggtgtcagcagtcacaccattgtcgaggggtgtgatgttctttttcttgaatggtttgtacctggggttacagcagttcacctgtgtttgatacatctgccttgtgacatttttgtgttgagttgtcggaacacatctattatcatctctaccataaaattgttgtggcccttgcatcttatcctatgcatgctgttttgaaaactgcttttgtccccccccccttttttttggtgcactaaactttcatccattagattttttatcgcatcagaactggatgcccatcatgaccggtgatatatccattcacttccaatgatcttttcttgaggatactccctctgtcacagaaatagtgcacctatggattcacgctggttaaacccttttttaaattgactagatttgtagaaaacattagcaatatttgtatctctaaataaatttaatgatactaattacgtacacttcagaagccatgagtctggaaactgggaaaccagcgttcaaagctggagtctgaaagcatgcggttgatgacagcttgcgtcttccctcccctttcaagagcactatccacctctgcggaaaagatgtaccgccggagaagaacacttcagaagatgtgtgcaacttctcaatcaccattttgttacgagaataccgaagagccccaagtcaattctttcagcagcttactcattttcatactcatattcaaacttcactctataaacagtataatttatagtacaaaacaatgttttagatagggctggcaaaatgctcgtgactcgtcggctcggattgacttgtttgaaattttttacgagttgagttaacattctagctcagttcgttaacaagcttgctcggtttgttaacgagacagctcgcgagctatcatatttc

SEQ ID NO: 6909 - DNA, 1404 bp, Zea Mays
tgggcaatgggcagtcaaagccaacctgctcccgtaattaggcgaccttgcagaattcctttttttatctccaggaaagttcagagacaaacagaaagctgggcgaagaacgaaggcacctcgaaaccaagcctggccatgagaccatcaaaatctgtaaacagcacgtagtcacggtggggcgcgggcctatatattgtcttgtcaggccttgttcgtctcttcagaatcttcagacatccgagcgtcttgcgcgttcgatttgaaccacttggcgctgctgcctgaccggtcctcacccctcaacccgccgaacttcctcgtcaccgccggcggcgatcgatcgttgccaagtctcccaccatcgcctccacgggaaaaaatggcgcaggaggctgcaccggcgaggccggtgggccccaccaggctcgtctacttcgatgatatgggggcactccaccactcatccgccaccgttctctccgtccaccaggaggagggcggccgggtagcggtggtgctggacgccacggtcttccacccgcagggcggcggccaaccggcggacacgggcgtcatctccgccggcggagccaggttccttgttgaggatgtgcgggcgaaagacggagtggttttccactacggaagatttgagggcacggagcaaggatgtgggactgtatttaaggaggggggaaccgttagcttgcaggtcgacgcagaacgacgcagctttaattcaaggcttcattctgctggccatttgttggacatctgtgttcacaatgtaggcctctttcatctggagcctgggaaaggctatcattttcctgatgggtcttagcttctgtttttccttatgaggaggcagccatattatgcggaggttctttgcctagctacatttcaaaggatagcaatcctcgcattgttaagtttggggataaccctggtggtccttgcggtggcactcatgttgccgacatttcaatcatcaacagcctaaaggtgacaaacataagagtcaagaaaggcctcactaaagtctcatacagcatcagcccatgatccttttccagcagccgcagcagacaacacctggaatttattggagcgagaattattaattgaatcagaaggctgtactttagtttcgtggcatcacatgtatacgtagggtggcaaataaacaatttctatgtagtaaagtctgccagttcctcatgtacttcaatagatgatttgtttctgtactgagtcgtagcagagccgttaaggttctgatgtagatgatgacacatgtaaaactgccacggcaccatcatacaacaacatgaaggagatttaaatttgttagagcaactccaatagttatgtaaattttagctctctaaatcacag

SEQ ID NO: 6910 - DNA, 2974 bp, Zea Mays
cgccccctcccgcattgccgtttccgaccgccaactctcccaaggctgctctgctcgcccaccggaattcccgccgcggagggtgctgtggtataagcttgctttaggattggagggctctggttggttgcctagacgccggcgatggcgtcgccggccggcggcgagtctccggcgaagcccgtcctcctgcacggcgacctcgacctctggatcctcgaggcgcgcctgctgcccaacatggacatgttctccgagcacgtgcgccgctgcttcgccgcatgccgcccgccctcctcctgcgggaccaagcacccgccgcccgccgccgctggccgccgccaccaccaccaccaccggaacatcatcaccagcgatccctacgtcacgctgtccgtgtccggcgccgtcgtggcgcgcaccgccgtcatccccaactcccaggaccccgtctgggaggagcgcttcgccgtgccgctcgcgcaccgcgccgccgacctcgagttccaggtcaaggacaacgacaccttcggcgcgcagctcatcggcaccgtcgccgtccccgccgaccgcgttgtctcgggcgacgaggtcgaggactggttccccgtcataggcaccaacggcaagccgtacaagcccgacaccgcgctgcgcctccgcttcaagttccagcccatcgccgacaacccggcctaccgccacggcatcgccggcgaccccgaccacaggggcatccaggactcctacttcccgctccgccacggcggccaactcacgctgtaccaggacgcgcacgtcagggaaggggacctgccagagattgagctcgacaacggcaagacgttccagcacaacgcgtgctgggaggacatctgccacgccatcctagaggcgcaccacatgatatatatcgtcggctggtcggtgtacgacaaggtgcgcctcgtgcgcgaaccatctccgtcgcggccattgcccgagggtggagaccttacgcttggggacctgctcaagttcaagtcgcaggagggtgtcagagtgtgcctgcttgtgtgggatgataagacttcacatgacaagttcttcatcaagacgggtggggttatggcaactcatgatgaagaaactcggaagtttttcaaacattcctcagtcatctgtgttctctctcctcgatatgctagcaataagctcagcattttcaaacagcagttgatgacattgaatttgtagctggcaggttgttgggactttgtttacacaccatcaaaagtgtgtgctggttgatacacaagccaggggaaacaagcggaaaattacagctttcattgggggcctagatctttgtgatggccgctatgacacacctgaacacaggcttttcaaagatcttgacacagtattccaaaatgattaccataaccctacattttcggcaggtgcaaagggtcccaggcaaccatggcatgatttacattgcaggattgatggccctgctgcctatgatgtcttgacaaattttgagcaaaggtggcgaaaggcaacaaaatggcgtgaccggtttagaagagtatctcattggaaagacgatgctttaattaaactggagcgtatctcatggattttaagcccttcacccaatgttccaaataatcatcctagtttgtgggtttcaaaagaagaggatcatgaaaattggcacgttcaggtattcaggtcaattgactctggttccctaaaaggatttcctagtgattgcaaagcagcttcaaagctgaatcttgtgtgccgaaagaacctggtaattgataagagcatccacactgcatatgtccgagcaatcagatctgcacaacatttcatttatattgagaaccagtactttcttggttcttcatatgcttggccatcctatgtgaattcaggtgctgataatctggtaccaatagaattggccctcaaaattgcaagtaagattaaagcgggagaacgctttgcagtgtatgtagtgataccaatgtggccggaaggagtccctactgcagcatctgtgcaagaaatccttttctttcaggcccagacaatggagatgatgtataaaataattgcagatgagctcaaggcaacggacaataaggatatgcaccctgaagattacttgaacttcttttgtcttggaaatcgggaagaaccaccatctaatggtagtccagaatcagagaaatctacagataaaagtgcagcggccttagcttcgaaatatcgacggttcatgatctatgttcacgcaaaagggatgattgtggatgatgaatatgtcattctgggttcagcaaacatcaaccagagatccctggctggttctagagatactgagatcgcaatgggtgcataccagcctcattatgcatggtctacaaagaatggacatcctcacggccaggtatatgggtacagaacgtctctgtgggcagagcaccttggaacggttgatgatcgcttcaaggatccttcgagtttggagtgtgtaaggtttgtgaatcaaatagctgtagagaactggcaaaggtttacagcagaagaaatgagtacgttacaagggcacctcctcaagtacccagttaaggtggaggctgatggtaagatcagcccactgtcagaccaggagtgctttcctgatgttgggggcaagattctgggagctccaacttcacttcctgattcactgactatgtagtgttattacataaaaaaacttctttcagagttgaactttgtaattgtctaaaattggcgggtttatcgcagaacttgtactatatctgtaatcatcgatagttggcgcagggaaagttcaagatgttagtggtgctaagttttcccagcgtttgtaaatgaaccatatgataggatcctagacaatgcttccatttccattatgattatacaacagttttcaacatttttgctc

SEQ ID NO: 6911 - DNA, 3024 bp, Zea Mays
cgtgcctacaccggcaagtaaaagtctcactgatgatatactactagtataataaacgcaactaaaatcgcatagtactactactatttcgagctaaattgccaaatctcgagatccaatcgaagcgccccctcccgcattgccgtttccgaccgccaactctcccaaggctgctctgctcgcccaccggaattcccgccgcggagggtgctgtggtataagcttgctttaggattggagggctctggttggttgcctagacgccggcgatggcgtcgccggccggcggcgagtctccggcgaagcccgtcctcctgcacggcgacctcgacctctggatcctcgaggcgcgcctgctgcccaacatggacatgttctccgagcacgtgcgccgctgcttcgccgcatgccgcccgccctcctcctgcgggaccaagcacccgccgcccgccgccgctggccgccgccaccaccaccaccaccggaacatcatcaccagcgatccctacgtcacgctgtccgtgtccggcgccgtcgtggcgcgcaccgccgtcatccccaactcccaggaccccgtctgggaggagcgcttcgccgtgccgctcgcgcaccgcgccgccgacctcgagttccaggtcaaggacaacgacaccttcggcgcgcagctcatcggcaccgtcgccgtccccgccgaccgcgttgtctcgggcgacgaggtcgaggactggttccccgtcataggcaccaacggcaagccgtacaagcccgacaccgcgctgcgcctccgcttcaagttccagcccatcgccgacaacccggcctaccgccacggcatcgccggcgaccccgaccacaggggcatccaggactcctacttcccgctccgccacggcggccaactcacgctgtaccaggacgcgcacgtcagggaaggggacctgccagagattgagctcgacaacggcaagacgttccagcacaacgcgtgctgggaggacatctgccacgccatcctagaggcgcaccacatgatatatatcgtcggctggtcggtgtacgacaaggtgcgcctcgtgcgcgaaccatctccgtcgcggccattgcccgagggtggagaccttacgcttggggacctgctcaagttcaagtcgcaggagggtgtcagagtgtgcctgcttgtgtgggatgataagacttcacatgacaagttcttcatcaagacgggtggggttatggcaactcatgatgaagaaactcggaagtttttcaaacattcctcagtcatctgtgttctctctcctcgatatgctagcaataagctcagcattttcaaacagcaggttgttgggactttgtttacacaccatcaaaagtgtgtgctggttgatacacaagccaggggaaacaagcggaaaattacagctttcattgggggcctagatctttgtgatggccgctatgacacacctgaacacaggcttttcaaagatcttgacacagtattccaaaatgattaccataaccctacattttcggattgatggccctgctgcctatgatgtcttgacaaattttgagcaaaggtggcgaaaggcaacaaaatggcgtgaccggtttagaagagtatctcattggaaagacgatgctttaattaaactggagcgtatctcatggattttaagcccttcacccaatgttccaaataatcatcctagtttgtgggtttcaaaagaagaggatcatgaaaattggcacgttcaggtattcaggtcaattgactctggttccctaaaaggatttcctagtgattgcaaagcagcttcaaagctgaatcttgtgtgccgaaagaacctggtaattgataagagcatccacactgcatatgtccgagcaatcagatctgcacaacatttcatttatattgagaaccagtactttcttggttcttcatatgcttggccatcctatgtgaattcaggtgctgataatctggtaccaatagaattggccctcaaaattgcaagtaagattaaagcgggagaacgctttgcagtgtatgtagtgataccaatgtggccggaaggagtccctactgcagcatctgtgcaagaaatccttttctttcaggcccagacaatggagatgatgtataaaataattgcagatgagctcaaggcaacggacaataaggatatgcaccctgaagattacttgaacttcttttgtcttggaaatcgggaagaaccaccatctaatggtagtccagaatcagagaaatctacagataaaagtgcagcggccttagcttcgaaatatcgacggttcatgatctatgttcacgcaaaagggatgattgtggatgatgaatatgtcattctgggttcagcaaacatcaaccagagatccctggctggttctagagatactgagatcgcaatgggtgcataccagcctcattatgcatggtctacaaagaatggacatcctcacggccaggtatatgggtacagaacgtctctgtgggcagagcaccttggaacggttgatgatcgcttcaaggatccttcgagtttggagtgtgtaaggtttgtgaatcaaatagctgtagagaactggcaaaggtttacagcagaagaaatgagtacgttacaagggcacctcctcaagtacccagttaaggtggaggctgatggtaagatcagcccactgtcagaccaggagtgctttcctgatgttgggggcaagattctgggagctccaacttcacttcctgattcactgactatgtagtgttattacataaaaaaacttctttcagagttgaactttgtaattgtctaaaattggcgggtttatcgcagaacttgtactatatctgtaatcatcgatagttggcgcagggaaagttcaagatgttagtggtgctaagttttcccagcgtttgtaaatgaaccatatgataggatcctagacaatgcttccatttccattatgattatacaacagttttcaacatttttgctc

SEQ ID NO: 6912 - DNA, 2237 bp, Zea Mays
ttgaccatgcctagcgttgagcacaactgcacaagcaggagaaatcagaatcaagggtctcgtcttcgttcccttcgcctccccattccgtaccgcgtcagatcgcacccctcctccatggcggcgctcagcctccgccagaggcagcttgatctgattgtgcggatgctgcacctcaacaagccaccgccgccgcccggcacggctgcggagcaagaagaggaggtgtacaagatcctggtactggacagcttctgcctctcgctgctctcgccgctgctccgcgtcgccgacctccgcaagcacggggtcaccctctactttcccatcgacaagccccgccagcaggtcgccgacgcccccgccgtgtacttcctccgccccacgcaagccaatgccgaccgcgtcgctgcagatgccgccgcctcgctctacgcatccttccacctcaacttctcctccgccctcccgcagcctccggctctgcccaccgcgtcgcccgcctcgccgaccagtacctcgacttcgtctctctcgaggacaacctcttctccctcgcccacccgcgctcctacgtcgcgctcaacgaccccaaagcggccgacgccgacattgaggccctcgtcgacgcgatcgcgctcggcctcttctgcgcggcggccacgctcggcaccgtgcccgtcatcaggtgcccccgcggtggccccgccgagatggtcgccgccgcccttgacgcccgcctccggcatcacctcctcgccaagcctaacctcttcaccgaggcctcagcctcagcctccgttgcctccttccagcgccccgtgctctgcctcttcgacaggaatttggacctctctgtgggaatacagcacgattggagctaccgccccttggtccatgacgtcctcggcctcaagctcaacaagctcaagatgcccgcggacaagtctggcccggccaaggcctacgatctcgatgattccgatgccttctgggtagcaaacagctggtcgccgttccccagggtggctgaggagatcgagtcgcagctcgccaagtacaagcaggatgtggacgaggtgaaccagcgcaccggtggcaacaaggatggcatcgagttcgatggcacagacctcattggcaacacccagcacctgatgaatgccgttaactcgctcccggagctcacagaacgcaagaagatgatcgacaagcacacgaatatcgcgacagcgttgcttgggcacatcaaggagagatcgctggatggatactgtgactgcgggaacgacatgctcacgaagggcaccgtggacaggagcacgctactgggccttctccgagggaagggcaccaaggcggacaagcttcgtctggctgtgacctacctcctctgtttcgagacgccagagctagagcaggtcgaggcggcgctgcgtgagtcagaagtggacatgtcagcgtttcagtatgtgaagaggatcaaatcgctgaacacgcagtttagtgcctcgtcgtcaagcagtgcaacgaggagcaacattgttgattgggcagagaagctgtatgggcagtccattagcgcagtgacagcaggggtgaagaatctcttgtccagtgggaggcagcttgcattgacgaggacggtcgaagctctcatggaagggaagccgaatccggaggtggacaactatctgctgtttgacccacgtgcccctagatcaggaagcggtgggcagttcaaagggccattcagagaagcaattgtgttcatgattggtggtgggaattacattgagtacaggagcttgatggagctggcagaatgctcgcagccgccttcttccaagcatgtcatatacggagcaactgagattgtcaacggggtggagttcatcgagcaacttgcagaactggggcagaaagcggggctgggtctgggtggtggaaacaaccctccactacagtaattactaataaataagggggggttctttcacatcgtttgaacattgtcagatatgatatgatcatttgcttccttttgtatggtttatattcgttgagaatatgttagtgcaatctgatccgcagtcttttttatactggttactggaggcaataataattataaacagatagaagaacaagacattcaaaggtttctagagatggagctgctattgtcaagtaattttaatagatagaaatgaagtatgcatcaattcaagcgggcc

SEQ ID NO: 6913 - DNA, 3427 bp, Zea Mays
gaatccccgccgtgtgttgcgattgccggagtggggtttgccactttgagcggttgcacggccggttccggtaaaaaaatactaactgtcttactaggagcctagagtgtccgaatttttgccattgcttgtcctgacttgccaacctacaatgggatggggaaacactattaccagacgcctcaaggttttctctatggccctgtttatctacttcgactataaggctgttcagaagagagttcaatgggttagcactggtaaaaagagtgctatatggaagaaaacacatgagcgaaatgctcgccgtgtcctcaacctgatgatagagttagaaggtttatgggtgaaactgggccaatatttatccacaagagcagatgtacttcctgaaccctacataaatgtcctcaagcagttgcaggattcgcttcctccacgaccttttgaagaggttcgtgaaacgatagagaaagaacttggagaacctatgagtgatctatttgctgattttgtcctagaccctctcgcaaccgcatcaatagcacaagttcatcgtgcaactctggcagatggcagagaagtagttgtcaaaattcagcatgatggtgtgaaggagatcatattagaggatctgaagaatgcaaaatcattgattgaatggatagcgtgggcagagcctcagtatgattttaatccgatgattgatgaatggtgcaaggaggctccaaaggaacttgatttcaaccatgaagcagagaatactagggctgtctccaggaatcttagtcgcaaaagtgactgtgggagtggcagtgtttccagtactgttgatgtactcattccagaagttattcagtcaactggcaaggttctaattttggaatatatggatgggattcgtttaaatgataatgattcattggaagcatatggtgttgacaagcaaaaactggtcgaagagataacccgtgcatacgctcatcaaatatacattgatggcttctttaacggcgaccctcatcctggcaattttcttgtgagcaaggaacctccacataaaccgattctccttgattttgggctcactaagcgcatatctgaatctatgaggcaggcactagcaaaaatgtttttgtcatgtgcagagggagatcacgtggcactgctgtcagcattttcagagatggggcttaaactgcgggttgacatgcctcagcaggctatggatattgccacagtattctttcgtcagtcaaccacagcaagtgaagcaaaggagaacataaaaacacttaatgaccaaagagagagaaatgtcaaagctcttcaagaaaagatgaaattgaacaagaaggaggttcaacgctttaatcctgttgatgctttccccggggatgccataatatttatgagggtcttgaatctcctcagaggtctttcagcttcactaaatgttaggatagtttatctggacatcatgaggccatttgctgaatcaactttgttagggagtttgacacacggacaaatacctaacagtcagtggatttttgactcacctgctaactctgatgtggagtctaaactgagaaattatctgcttgagttgggaagcgacaaaattttaggaatacaagtctgcgcatataaagatggaaaggtcataatagatactgctgctggtatgctggggaagtatgatccccgacctgttcaacctgattctctttttcctgttttctcagtgactaagggtatcactgctgggatggtacattggcttgtggacaaagggaagctgaagtacgaggaaacagttgccaacatatggccgaattttggaactaacggaaaggagttaataaaggtccatcatcttctaaatcacacatccggtttgcacaatgcactgggtgatgtggtaaagaatgatcctttgttggtatgtgactgggaggagacactaaaccagattacgaagagtacacctgagaccgaacctggttcagcacaaatttaccattacctctccttcggttggctgtgtgggggagtcatagagcatgcatctgggaagaagtttcaagagattctagaagaggctattgttcgtcctcttcacattgagggggagttgtatgttggcattccaccaggtgtcgagtctcggctggcagcgctgacagttgacaccgaggagctccagaagctatcaggaatcagggcaggtgcagatgtgccagcagctctgctgaacaacatcgcgcagatggcgtccggtgtgcccgctattttcaacacgctaaacgtccgtcgggccatcatccctgccgccaacggccactgctctgcccgcgcgctcgctcgatactacgcggcgctagcggccggcggttctgttcccccgccgcactcttcgggcgccatgccgcccctcggcagccacgtgcacacccccaagttcccgaccgcgccgctcaagaagaagaagaagggcgccggaaagaagaagggcgccggcggcggctccatgggagacctcaaggtccaggatataagcggcggcagcagcgacaggaacgggtactgccagctgcgcaccagcgacgccgacagcgaggcggggagcggcagcggcggaggcggcaggatgttcggcagcgacaggatcctcgacgcgttcatgggcgtcggcgagtacgagggcatggcgcaccgggacggcaagttcgggctcgggttcaggaggtacgacgacgccagcagcggcagcggcaggctgaggtgctttgggcactccgggatgggcggctcgaccgggttctgcgacgtggagaacggcttcgccatcgcggtgacggtgaacaagctgtctctgggcagcgtcacgcgcggcgtcgtccggctcgtcctcgaggagctgggcctgcccgtgccggacgagtactcggccaccggggagaaggggcctgacatgatgctcaacctgacgacaacgacgacgactacgccgccgcaactgagatgacgacggcgaaactgagattatcaggttgggttcgtaataatctgtggaacaagatatatagcgagcagaaggaaggttggggtacagggatttggtggacagtatatatacgcgtgccattttgattttgacgtggcatgtaaaactcggcaaattctggtatattacgaagctgggtgctgggaattgtggccagcagtacaagaaatggacatgctagtttgttgacctgtgttttttttatggcggaactttttgttttgtcttctgggcttcactaggtctatgctcgtgcgttgccacggaaaacacatgaaatcgtaatatgtgtggtatcgtaaatcaaacaatatatcatgatatgacttctcgtcctaaattaggtatatataaaat

SEQ ID NO: 6914 - DNA, 454 bp, Zea Mays
gtcagcgccgacgacctcaatcgcatggctcgacgattgagaagttcagagatacacttgcgaagcacagacttctgacaccaacgacaccattggcaaggcagggatctgatgatatgtccttggtgtcatccgtgatataaaccacttcctttagtcatgtgttattcttcattgttattcatgtgtacaatttgttcctttccattgtcacagagttcaggttttcagatttttttgcctgtgaagtctacccacgctgcctcgctcttgttctttataatgagatgaaattgtatggtggctttcgagtgagatgaaatgtatggtggctttgggagtgactcattgtggtttactaagtatggtggctttgcgagtgaaccattgtggtttaccaagtccatttcaattcgaaaaaatggcatcgggaggcaaaacaactgcaaaaggg

SEQ ID NO: 6915 - DNA, 1109 bp, Zea Mays
gcttcatctagagggaccgtctcctctcctgcacccagactcctctctctctctctctctctctcccctctgtgtgcggtgtgccctggcctcctccgccgccattgcagcgagcaagatcaatccctctgctgccattcatgagtcaagctggggcattccctcctgggaagaagatcacggtggtgtttgtcataggcagtggcaagggcacccagtgctccaagattgtcagacactttggattcacccacctgagcgctggcgacctcctgcgccaacaatgccatgatcaagaacctgatgcacgaagggaagctcgtgccgtccgacatcatcgtcaggctcctgctcacggccatgctccagagcggaaacgacaggttcctcgtcgacggattccctcgaaacgaggagaaccgccgagcgtacgagagcgttattggcattgagcctgagttggtgctgttcatcgactgcccaagggaggagctggagcggcgcatcctgcaccgcgatcagggaagagacgacgacaacgtcgacactataaggaagcggtttcaggttttccacgactccactctacctgttgttctgtactacgacagaatggggaaggtccgacgggtagatggcgccaaatccgctgatgcagtctttgacgatgtgaaggctatatttactcagctactgaccactcaggcaagccaaggtggcaatgcgagcagcaggcggagcaatccgccgctttgttcagtgctctaggatgaagcaacatacctccagctccaaataaaaaaaagaggatttcagaaaacacacacttgctgtgcgtatgtggtgtgttcgtgctgtgctgtgctgtgctgtgcagatttaatggcttgttaaaaagaaacagagaataatggccctccccagctgcagctggtatggttgttcgctcagtggcagcactagaggctgcgagcctgctgcaaacacacagcttgtatttctaattgtaaaatgtagcgaaatggatgaatgtgatgtgtgcaactcattcagtttgctttgctgcatctcatctgatgatgcttgtgatggctttcttccgcaaagct

SEQ ID NO: 6916 - DNA, 1117 bp, Zea Mays
ctcctctcctgcacccagactcctctctctctctctctctctctcccctctgtgtgcggtgtgccctggcctcctccgccgccattgcagcgagcaagatcaatccctctgctgccattcatgagtcaagctggggcattccctcctgggaagaagatcacggtggtgtttgtcataggcggcccaggcagtggcaagggcacccagtgctccaagattgtcagacactttggattcacccacctgagcgctggcgacctcctgcgccaacaagttcagtcagatactgaacacggtgccatgatcaagaacctgatgcacgaagggaagctcgtgccgtccgacatcatcgtcaggctcctgctcacggccatgctccagagcggaaacgacaggttcctcgtcgacggattccctcgaaacgaggagaaccgccgagcgtacgagagcgttattggcattgagcctgagttggtgctgttcatcgactgcccaagggaggagctggagcggcgcatcctgcaccgcgatcagggaagagacgacgacaacgtcgacactataaggaagcggtttcaggttttccacgactccactctacctgttgttctgtactacgacagaatggggaaggtccgacggatggcgccaaatccgctgatgcagtctttgacgatgtgaaggctatatttactcagctactgaccactcaggcaagccaaggtggcaatgcgagcagcaggcggagcaatccgccgctttgttcagtgctctaggatgaagcaacatacctccagctccaaataaaaaaaagaggatttcagaaaacacacacttgctgtgcgtatgtggtgtgttcgtgctgtgctgtgctgtgctgtgcagatttaatggcttgttaaaaagaaacagagaataatggccctccccagctgcagctggtatggttgttcgctcagtggcagcactagaggctgcgagcctgctgcaaacacacagcttgtatttctaattgtaaaatgtagcgaaatggatgaatgtgatgtgtgcaactcattcagtttgctttgctgcatctcatctgatgatgcttgtgatggctttcttccgcaaagct

SEQ ID NO: 6917 - DNA, 1127 bp, Zea Mays
gtagcactggcttcatctagagggaccgtctcctctcctgcacccagactcctctctctctctctctctctctcccctctgtgtgcggtgtgccctggcctcctccgccgccattgcagcgagcaagatcaatccctctgctgccattcatgagtcaagctggggcattccctcctgggaagaagatcacggtggtgtttgtcataggcggcccaggcagtggcaagggcacccagtgctccaagattgtcagacactttggattcacccacctgagcgctggcgacctcctgcgccaacaatgccatgatcaagaacctgatgcacgaagggaagctcgtgccgtccgacatcatcgtcaggctcctgctcacggccatgctccagagcggaaacgacaggttcctcgtcgacggattccctcgaaacgaggagaaccgccgagcgtacgagagcgttattggcattgagcctgagttggtgctgttcatcgactgcccaagggaggagctggagcggcgcatcctgcaccgcgatcagggaagagacgacgacaacgtcgacactataaggaagcggtttcaggttttccacgactccactctacctgttgttctgtactacgacagaatggggaaggtccgacgggtagatggcgccaaatccgctgatgcagtctttgacgatgtgaaggctatatttactcagctactgaccactcaggcaagccaaggtggcaatgcgagcagcaggcggagcaatccgccgctttgttcagtgctctaggatgaagcaacatacctccagctccaaataaaaaaaagaggatttcagaaaacacacacttgctgtgcgtatgtggtgtgttcgtgctgtgctgtgctgtgctgtgcagatttaatggcttgttaaaaagaaacagagaataatggccctccccagctgcagctggtatggttgttcgctcagtggcagcactagaggctgcgagcctgctgcaaacacacagcttgtatttctaattgtaaaatgtagcgaaatggatgaatgtgatgtgtgcaactcattcagtttgctttgctgcatctcatctgatgatgcttgtgatggctttcttccgcaaagct

SEQ ID NO: 6918 - DNA, 1324 bp, Zea Mays
tatcaaccgcatcctctattccagttcttctccacctcgtcctcgtgccttctcgcccgcccccccaaaattcacccggccaccctctaccaccacgtcggcgcgggtagcaagcagttggtctcatcgtcctcgcacctgacaacgtcgcggttcgcgctctcgcctcgtgccgcgcgcccattcctcgccctcgtctcctgcgagttcccacgccccccggtgccgccaccccggagccagtcctcgccgcattgttcccctcctcctggtgatcccgcaccgcgctgtgtccgctccatcttcctccgccgccacgctcatcgccggttcatgtttcatcttaaggaatgaccagcagtcgacaaatggaactgcactacataaacactggatttccatacacaatcaccgagagtttcatggatttctttgagggtctcacttatgctcatgctgactttgctctcatggatggctttcaggatcagggtaatccgtactggacaatgatgcatacaaactcatacaaaactgatggtgggcgcagaacatgggataacactacacctgtaaacaatgtggattctgccaatgttgtcctgcagggtggtgaagctccccgcacaactgcaaatactactagtgaggattgcatccaacaggtacaccaaagtccgggtagtcctcaggttgtttggcaagacaacattgaccctgacaatatgacatatgaggaactcttggatttgggtgaggcagttggaacccagagccgtggtctctctcaagaatgcatttcattgcttcccatcactaagtataagtgtggattcttttcaaggaagaaaacacgccgtgaaaggtgtgtgatttgccaaatggagtacaggagaggaaatttgcagattacgcttccatgcaagcatgtataccatgccagctgcgtgacaagatggcttagcataaacaaggtatgccctgtttgctttgctgaagttcctggcgaggattctctgaggcaatgattcatcagttgtgatgccactatgaagttgctgctctgggtactgcgcccccaatggacgcatgatttctgctttgaaggcagcttgttgtccccactttagaattgtgtattagcgccatattaccaaataggttattacttatcagatgtatttaggtagtgtttggtttcagaatatggtaggatggagtcactttgctcctaatttattgttgtttgaattgatttcatgtaggacatagtaactctaaaaatggaaaaactatgcttaaatactgaagcatctgactcccc

SEQ ID NO: 6919 - DNA, 1246 bp, Zea Mays
cgtctctctgaccctctcccctcgtcccgaactggcgaacagtaagcgaaacataaacaaacaaccacggacccaatgaaatcgagggaaggttcacgacacgctgctccccaccactaaccgcactcgattgagcgccatgctgcagctccagccccctgggttcctgcccatcccgcgccggcgcgtcaccgcccgcgggcgtcgcgcccgccctgtcatcgccttcaactcccagtggaagatccccgacgtcgacacagatgcggtgcgggagcgagtgcggtcttggatgtctctggcgcggggcgcgatcgccgacgcggggcgcgcggcgcgggagggagggaggcacaaagaggagcccgagggtgggaagaagaagcagcggaaggaggtgaccgtggaggagcaggcgttcgttgcggtgccagaggtcaccgtggagccgcgggtgccccagggttggctctcgctggacgccgtcgtctccatcgagcagttcgccaggttgaatgggttgacggggagacaggtgcagaggatatttgaatcacttgctccagagcatctgcacaatgacgctcgaagcctggttgagtatagctgcttccgctacttggcaaaagataattctgacttccatccaaacttgaaggagcttgcctttcaaaagcttatctttgtgactatgcttgcttgggaagatccatataacgaagacagcagtccactttcttcgctagacaactattctgtattgggaaggcttgttggagaagatgcctttgcccgaattgctcctgctgttgcaggtgttgctgatgtttcaacagctcattatctctttagggctcttgttggtgcagaaaagggactttcatttgatctgtggacaacatatctagcggaacttttgaaggttcatcatggcaggcaaacacatcaaacgggagataattttttgtatgatgagaaagtcttatgcattggctctagtaaaaaaagacctgttctaaaatgggaggaaaataccgcatggccaggaaaccttaccttgacggacaaggcgctgtattttgaggccattggactgtcaggtaccaagaaaccaatgaggcttgaccttacaaatcagaattcaagggctgaaaagacgaaagttggaccatttggatccaaactatttgactctgctgtctcagtttcttctggttcaatattgttgttatgatatcatgttttt

SEQ ID NO: 6920 - DNA, 6164 bp, Zea Mays
gagacaaatacacgagccaaaaggagtgacactgagactgtgagaggtattccatgtaatgccataatttgtgatggcatttttcagcaactccgggagcaaggccgattcagaagggtacaacttgaatgaaaaggccgatgatgatggcatacacgagtcaatccgggatgggaatgatggcctgaactctaggcagtggaacttaaatgagaaagcagaggatgcttaccacagcgaagcagagcaatatgagtctggccagtcaggtttgtacgcatcaaggcagcatgttcagagaggaggcagatcgtctggtggtccatggggcacaaattttctgaaggattccaggtccaaacagacggccaaggaagttgcatcaaatagcggtagaggaatggatgctgctaactcgcatgatgacatggatggtagcagagaggatgatgaactgaatagagcaaatggtgaggtgcctgctgaggaaatgctctcagatgactattacgagcaggacggagaggatcagattgaatcgttgcatcgtggcgggatgaagcagtcaagctgttccacttctggtggagcagcaaagtctggctcacgacaaatgaagaagatgtcaaagtacaatgcttatgataacgatgagtataatgatgagaatgatgatgacagcgatgcagatgaagatgatcctgctgacatggattttgagccagacggcgaaacagacaaggctactgataaggataagtttatggatagtgagaattctgacggcgacgacgatgatgaccttgaactctcagatgatgaagatgattttgttgagaatcggaggcaacctaaacgacttaagattgtagcaactaaaacttccaagggaggacagttgcccatgccagttcaaccaaaacgaggggtgtctcacagtgatgaagaatatttttcaggaaaagactcagatgttcccagcgattcggatttcaaacacataccgaaaaaacctgacaggttgcatcagaaacctgtgggccgcagtgatgttgccccaatcagttctcataatgagcttagaacttctggaaggaggaggacggtgaaaaagatctcatatgctgaaagcgaagaaagtgatgatagtgaggagaagtcaaataagcgacaaaagctcatcaaggaggaaccggaagaggaggatggagaaacaattgaaaaagttctgtggcatcaacccaagggtgtagcagaagaggcaataaggaatcaccggtcagctcaacctactgttgccagcctaacatcggactttgaccaacaatgggatgaattagagttctatataaaatggaaaggccagtcttacctgcattgtcaatggaagatactatcagagctccaaagtgttagtggattcaagaaggtaataaactacacgaaaagagtttctgaggaacagaggtacaagagggcactatcacgtgaagaggttgaggttgaacggatatttgctgatagggtcagcaaagctgatggagatgatctggttcccgaatatttagtaaaatggcaaggacttccttatgcagaatctacctgggaaaaagatacagatattgattttgctcaagatgcgattgatgaatataaggctcgtgaagctgcctcagctatacttgggaaaacagtagatttccaacgaaagaaaagcaaagctagtttgaggaggcttgatggtcagccagaatggctaaaagctggcaagcttcgtgattatcagctggaaggactaaactttctcgtcaatgggtggagaaacgatactaatgttatacttgctgatgaaatgggtctgggaaaaactatccaatctgtatccatgcttggcttccttcataatgctcaagaaatcaatggcccatttcttgtagtcgtgccactgtcaacattgtcgaactgggcaaaggaatttcggaagtggctgcccaacatgaatgttgttgtttatgttggcaaccgtgccagcagagagatgtgccagcagcatgaatttttttcagacaaaaaaggtgggcgtcatgtaaaattccacacgttgataactacgtacgaggtgattctcaaagacaaagcggttctttccaagataaaatggaactatcttatggttgatgaagcccaccggttgaaaaattgtgaagcgtcactgtatacaacccttttggaattcagcactaagaacaagctgcttatcacgggaacacctttgcagaacagtgtggaagagctttgggcattacttcatttccttgatccagtcaaattcaacagcaaggatagttttgttgagagatacaaaaatttgagttccttcaacgaaactgagctcgcgaatctgcataaggaattgaggcctcatattctacggcgggttataaaagatgttgagaagtctttacctcctaaaatcgagaggattctacgtgttgagatgtcacccctccagaaacagtactacaagtggattttagagcggaattttcagaatctgaataaaggtgttcgtgggaatcagttatttcagttggcacatcttggaattgaatgcaatttggctgtctcagatcttgattggaacaatgttactattctttctcacctactattgctaggtcaagcagttcctcacctgctattgctagctcaagaagtttctcacctggccgtgcattacctatcaaactggagcatgggcaaggccacaaggcaagacttggctgttgtatcacttcttaacattgttgttgaattgaagaaatgctgcaaccatccattcttgtttgaaagtgccgatcatggttatggtggagatagcatcggtgatcggaataaagttgaacgtattgttatgagtagtgggaaacttgtcttgttggacaaactattggtgagactgcgggagactaaccatcgtgtgcttatattctcacagatggttaagatgttggacatccttgcagaatacctctctcttcggggatttcagtttcagaggcttgatggtagtacaagagcagatcttcgtcatcaagccatggaacactttaatgctcctggaagtgatgatttctgttttcttttatccacacgtgccggaggacttggtattaatctagcaactgcagatacagtgataatttttgattcagattggaatccacaaaatgatttgcaggccatgagtagggcacataggattggccaacaggagacagttaatatctaccgcttcgtcacatgcaaaagtgttgaggaggatattttggaacgcgcaaagaaaaagatggttcttgatcacttggtcattcagaagctaaacgctgagggcaggcttgagaagaaagaatccaaaaaaggtggccccatatttgacaagaacgaactttcagctatcttgaggttcggtgcagaggaattgttcaaggaagacaagactgatgaagagaccaagaggaaccttgaaagtttggacattgatgaaattcttgagagagctgagaaagtcgagacaaagggtggtgaaggggaggaaggaaatgagcttcttagcgctttcaaggtcgcaaacttttccagtgtcgaagatgatgcaacgttctggagtaggttaatacagccagatcctgcagatatagttcaggaaactttggcacctcgtgctgcacgaaataaaaagagctatattgaagatcctcagcttgacaaaaataataacaggaaaagacgggcagttgaaacacaagaaaagccaaggaggctttctggcagaactgtggaaacagttaattcattaccattggttgatggagcagtagctcaagtacgagagtggtcttttggtaatgttccaaagaaggacgcttctcgttttgtacgagcggtcaaaaaatttgggaatgcaacccagattggattaattgtggatgatgttggtggtgtacttgcgaaggtaccgcatgaagcgcagatagaactatttgatttgctggttgatggttgtcaggaagcagttaaggagaatacagacattaagggcacagttttggattttttcggtgtagctgtaaaggcctatgaattgctagctcgtgttgaagagcttcagttcttggcaaagcgaattgcacgttacaaagatccaatcaagcagtaccgcatccagctaccttataaaaagcctcagtggtcagcaagctgtggatggactgaaactgatgacgctagattgatggttggaattcattggtatggctacgggaattgggagaaaataaggttggatccaaagcttggcctgacaacaaaaattgcgccagcaacacttggagaaagggagacatttttaccacgtgctcccaacttggataaccgcgctagtgctctcctgcaaaaggagtatgctaagtttagcggtaagagcttaaaagtcaaaggaaacacccgccagacagtcaataacgacagtaatagtggagttcgatcaatgaggggccggcaaaaggatgtaccagaaaaagatgataataagccgaacaaagatgacattcagaagcgtagggtaatagtggaagctgaagcaagagaagaaggtgaaatttctgaatcggaggcagagaccaggtatcgtcaggacaaagaggagaagtggcttgaatggtgctctgaagttttagatgaggagcaggaaactttgaagcgcctggataggctgcagaatacaagtgtaaacctcccaaaggaaaaggttctttcaaggattcgcaagtatctcctgataattggggacaaaattggagaagttgtccggcaacacagtgaatcttataggcaatcccgcatggtcatgaggttatggaattatgttgccaccttttcaaacatgtctggggagcaactgcatgatctctatatgaaacttagtcaagaccaactggaaggtggagttggcccatctcatggtggcaatttcacatccattcctcccaataagggaggtaactcaaatcaacttcatccttcgagaaaccaaaggccaactaggtctctccagtacaattctgagtctttccataatgagagctctggaagttctgaagcctggaagcgtcgacggagagctgacacagataatcaatttgacacccagcctttgtgtcaacctccaattatgacaaatggaaataggttgcaggaatctagtagttctgcaggtattcttggttggggtccagttgaaattagacggtatggtaatgagaggccaaaacgtgctgttcatcctagtcatttccctactgggcatggacctttgctgtagctgaaggaagtagatgatgcgaacaaccttgttcattttggcataaccgttcccagtgaatttcagcttccatatagttataaatggtggatctccgtaggaattgaaattctttttccaaaacaaaaaggaataaagagcaacctcacctggatcacagttttgaattatatgccttaaaaggtaatgccaggactctagaggcgacttatggaattgttaacagctacactgaatatccttctgacaccatcacagcaacacaaatacatggtggcttgtgaactgccaagaggatcaatcgaggaagttttgcctgttcagttttgtgatctctcaacaatgatctatagttaaatctcaatacataaattatgctttacattgtaatatattgaaatatggttccgttatgctccctccctctcgatgtgttttgtgccgtttttctaccgtgttgatgtaaaagatgaaagaaatgcatgttctcattttgaggcaacaaaaagttgcagccgggagcataatagtgaaatgcgatggaattatcggatacttatcgattccatagtgttttccctgagacaatgtactgaatgaggtacggttataagaaatggtgataattagcttagtaggtgctcagccattctacaagtcatctggtagtccgaagttgcatgaggcctactttcccctggttgccccacttatgctcagtaagtatgcttctagggttgtatgatgatggcccaattgaatttttaatcctgtgtatgaa

SEQ ID NO: 6921 - DNA, 6350 bp, Zea Mays
tgagagccggagagggagaaagaggatagagagagaaggaaaaaacttatctgccgcctctctatcgcgcgcgccgccgccgcgctgccgcgccgggagcctgtctccggcgatcgccgccttccagccccgttactgaccctcctccgatccgaatcctaggcgaaaaatcgcggaaaataccgcaaaaaatcgcggaaaatcgcccggtcctttttgaataaatcgcacgggcgttgcaccccgctcccttgctcccctcccaccgccggcgacggcgatcgcgcagactaataggtgccccgcggcgagccagaaaacctgcctcgtgccggtccgagcattcgtctctgtcggggggactgagcgcccgtcgcccacccgcctcctgctcctctcgtcggccgcggcaggaggagtgacactgagactgtgagaggtattccatgtaatgccataatttgtgatggcatttttcagcaactccgggagcaaggccgattcagaagggtacaacttgaatgaaaaggccgatgatgatggcatacacgagtcaatccgggatgggaatgatggcctgaactctaggcagtggaacttaaatgagaaagcagaggatgcttaccacagcgaagcagagcaatatgagtctggccagtcaggtttgtacgcatcaaggcagcatgttcagagaggaggcagatcgtctggtggtccatggggcacaaattttctgaaggattccaggtccaaacagacggccaaggaagttgcatcaaatagcggtagaggaatggatgctgctaactcgcatgatgacatggatggtagcagagaggatgatgaactgaatagagcaaatggtgaggtgcctgctgaggaaatgctctcagatgactattacgagcaggacggagaggatcagattgaatcgttgcatcgtggcgggatgaagcagtcaagctgttccacttctggtggagcagcaaagtctggctcacgacaaatgaagaagatgtcaaagtacaatgcttatgataacgatgagtataatgatgagaatgatgatgacagcgatgcagatgaagatgatcctgctgacatggattttgagccagacggcgaaacagacaaggctactgataaggataagtttatggatagtgagaattctgacggcgacgacgatgatgaccttgaactctcagatgatgaagatgattttgttgagaatcggaggcaacctaaacgacttaagattgtagcaactaaaacttccaagggaggacagttgcccatgccagttcaaccaaaacgaggggtgtctcacagtgatgaagaatatttttcaggaaaagactcagatgttcccagcgattcggatttcaaacacataccgaaaaaacctgacaggttgcatcagaaacctgtgggccgcagtgatgttgccccaatcagttctcataatgagcttagaacttctggaaggaggaggacggtgaaaaagatctcatatgctgaaagcgaagaaagtgatgatagtgaggagaagtcaaataagcgacaaaagctcatcaaggaggaaccggaagaggaggatggagaaacaattgaaaaagttctgtggcatcaacccaagggtgtagcagaagaggcaataaggaatcaccggtcagctcaacctactgttgccagcctaacatcggactttgaccaacaatgggatgaattagagttctatataaaatggaaaggccagtcttacctgcattgtcaatggaagatactatcagagctccaaagtgttagtggattcaagaaggtaataaactacacgaaaagagtttctgaggaacagaggtacaagagggcactatcacgtgaagaggttgaggttgaacggatatttgctgatagggtcagcaaagctgatggagatgatctggttcccgaatatttagtaaaatggcaaggacttccttatgcagaatctacctgggaaaaagatacagatattgattttgctcaagatgcgattgatgaatataaggctcgtgaagctgcctcagctatacttgggaaaacagtagatttccaacgaaagaaaagcaaagctagtttgaggaggcttgatggtcagccagaatggctaaaagctggcaagcttcgtgattatcagctggaaggactaaactttctcgtcaatgggtggagaaacgatactaatgttatacttgctgatgaaatgggtctgggaaaaactatccaatctgtatccatgcttggcttccttcataatgctcaagaaatcaatggcccatttcttgtagtcgtgccactgtcaacattgtcgaactgggcaaaggaatttcggaagtggctgcccaacatgaatgttgttgtttatgttggcaaccgtgccagcagagagatgtgccagcagcatgaatttttttcagacaaaaaaggtgggcgtcatgtaaaattccacacgttgataactacgtacgaggtgattctcaaagacaaagcggttctttccaagataaaatggaactatcttatggttgatgaagcccaccggttgaaaaattgtgaagcgtcactgtatacaacccttttggaattcagcactaagaacaagctgcttatcacgggaacacctttgcagaacagtgtggaagagctttgggcattacttcatttccttgatccagtcaaattcaacagcaaggatagttttgttgagagatacaaaaatttgagttccttcaacgaaactgagctcgcgaatctgcataaggaattgaggcctcatattctacggcgggttataaaagatgttgagaagtctttacctcctaaaatcgagaggattctacgtgttgagatgtcacccctccagaaacagtactacaagtggattttagagcggaattttcagaatctgaataaaggtgttcgtgggaatcaggtatcacttcttaacattgttgttgaattgaagaaatgctgcaaccatccattcttgtttgaaagtgccgatcatggttatggtggagatagcatcggtgatcggaataaagttgaacgtattgttatgagtagtgggaaacttgtcttgttggacaaactattggtgagactgcgggagactaaccatcgtgtgcttatattctcacagatggttaagatgttggacatccttgcagaatacctctctcttcggggatttcagtttcagaggcttgatggtagtacaagagcagatcttcgtcatcaagccatggaacactttaatgctcctggaagtgatgatttctgttttcttttatccacacgtgccggaggacttggtattaatctagcaactgcagatacagtgataatttttgattcagattggaatccacaaaatgatttgcaggccatgagtagggcacataggattggccaacaggagacagttaatatctaccgcttcgtcacatgcaaaagtgttgaggaggatattttggaacgcgcaaagaaaaagatggttcttgatcacttggtcattcagaagctaaacgctgagggcaggcttgagaagaaagaatccaaaaaaggtggccccatatttgacaagaacgaactttcagctatcttgaggttcggtgcagaggaattgttcaaggaagacaagactgatgaagagaccaagaggaaccttgaaagtttggacattgatgaaattcttgagagagctgagaaagtcgagacaaagggtggtgaaggggaggaaggaaatgagcttcttagcgctttcaaggtcgcaaacttttccagtgtcgaagatgatgcaacgttctggagtaggttaatacagccagatcctgcagatatagttcaggaaactttggcacctcgtgctgcacgaaataaaaagagctatattgaagatcctcagcttgacaaaaataataacaggaaaagacgggcagttgaaacacaagaaaagccaaggaggctttctggcagaactgtggaaacagttaattcattaccattggttgatggagcagtagctcaagtacgagagtggtcttttggtaatgttccaaagaaggacgcttctcgttttgtacgagcggtcaaaaaatttgggaatgcaacccagattggattaattgtggatgatgttggtggtgtacttgcgaaggtaccgcatgaagcgcagatagaactatttgatttgctggttgatggttgtcaggaagcagttaaggagaatacagacattaagggcacagttttggattttttcggtgtagctgtaaaggcctatgaattgctagctcgtgttgaagagcttcagttcttggcaaagcgaattgcacgttacaaagatccaatcaagcagtaccgcatccagctaccttataaaaagcctcagtggtcagcaagctgtggatggactgaaactgatgacgctagattgatggttggaattcattggtatggctacgggaattgggagaaaataaggttggatccaaagcttggcctgacaacaaaaattgcgccagcaacacttggagaaagggagacatttttaccacgtgctcccaacttggataaccgcgctagtgctctcctgcaaaaggagtatgctaagtttagcggtaagagcttaaaagtcaaaggaaacacccgccagacagtcaataacgacagtaatagtggagttcgatcaatgaggggccggcaaaaggatgtaccagaaaaagatgataataagccgaacaaagatgacattcagaagcgtagggtaatagtggaagctgaagcaagagaagaaggtgaaatttctgaatcggaggcagagaccaggtatcgtcaggacaaagaggagaagtggcttgaatggtgctctgaagttttagatgaggagcaggaaactttgaagcgcctggataggctgcagaatacaagtgtaaacctcccaaaggaaaaggttctttcaaggattcgcaagtatctcctgataattggggacaaaattggagaagttgtccggcaacacagtgaatcttataggcaatcccgcatggtcatgaggttatggaattatgttgccaccttttcaaacatgtctggggagcaactgcatgatctctatatgaaacttagtcaagaccaactggaaggtggagttggcccatctcatggtggcaatttcacatccattcctcccaataagggaggtaactcaaatcaacttcatccttcgagaaaccaaaggccaactaggtctctccagtacaattctgagtctttccataatgagagctctggaagttctgaagcctggaagcgtcgacggagagctgacacagataatcaatttgacacccagcctttgtgtcaacctccaattatgacaaatggaaataggttgcaggaatctagtagttctgcaggtattcttggttggggtccagttgaaattagacggtatggtaatgagaggccaaaacgtgctgttcatcctagtcatttccctactgggcatggacctttgctgtagctgaaggaagtagatgatgcgaacaaccttgttcattttggcataaccgttcccagtgaatttcagcttccatatagttataaatggtggatctccgtaggaattgaaattctttttccaaaacaaaaaggaataaagagcaacctcacctggatcacagttttgaattatatgccttaaaaggtaatgccaggactctagaggcgacttatggaattgttaacagctacactgaatatccttctgacaccatcacagcaacacaaatacatggtggcttgtgaactgccaagaggatcaatcgaggaagttttgcctgttcagttttgtgatctctcaacaatgatctatagttaaatctcaatacataaattatgctttacattgtaatatattgaaatatggttccgttatgctccctccctctcgatgtgttttgtgccgtttttctaccgtgttgatgtaaaagatgaaagaaatgcatgttctcattttgaggcaacaaaaagttgcagccgggagcataatagtgaaatgcgatggaattatcggatacttatcgattccatagtgttttccctgagacaatgtactgaatgaggtacggttataagaaatggtgataattagcttagtaggtgctcagccattctacaagtcatctggtagtccgaagttgcatgaggcctactttcccctggttgccccacttatgctcagtaagtatgcttctagggttgtatgatgatggcccaattgaatttttaatcctgtgtatgaa

SEQ ID NO: 6922 - DNA, 2057 bp, Zea Mays
ctgggctagacagaccggctcatgttggcaaaatattctgggccgtatcatgttggcaaaaatatactgactccggtccgcaactccggatgtgtcggcgaccaggcaaagctccgtgtcctctcgtctcgtgtgactgacgaccaggtgggagggccataaggcctttagcgcggcggcggcaatggcgcccacggcctgcctccggacccccttcttccccgcccgtgcccgatccaccaacgccaccccgttctcgccacaccgccgcttttctctcaaatgcagcgcctccaacggtgacaactccaaccccaactccatctccatctctcccacctcgccgcctcggctaacggtgtcggacggcgtcgagtctgtggacgttaacgggttgcgtcgcccgccagcgcccgcctccgtccccgccgcccgcgatccccactggctgcctcgtccgctcacaagtgcggacgtcatggaggtggacgggaaggggctcaaggttgcttaccagggttgtgctggagcgtacagcgaagcagcagcaaagaaggcgtacccgaattgtgagactgtgccctgtgagcacttcgacactgcatttcaggctgttcaaaactgggtagctgatagggccgtactgccacttgagaattcattgggaggtagcatacataggaattatgatcttttgcttcggcatagtttgcacattgtaggagaagttcgccttgcggttcgccattgcttattagccaatcctggcgtgaagattgaaaacctgaaaagtgctatgagtcatccccaggctcttgcgcaatgtgagcacacattaacatcactaggaattgagcatagagaagctgttgacgacactgctggtgcagcaaagattgttgcagaacatatgctccaggacactggtgctattgctagttcgttggcggctaaactgtatggattggatgttcttgctgagaatattcaggatgacaaagataatgtcacccgttttatgatgctagctcgagaacccatcatacctcgcactgataaaccatttaagacaagcatagtcttttcactagaagaaggacctggacagctctttaaggcacttgctgtatttgcactgagggacatcaacctcacaaagattgaaagtcgtccacacaaggaaaggcctcttcgggtatctgatgactgttcctcactcttaaagaactttgattaccttttttatgttgaccttgaagcatcaatggctgatccaaagactcagaatgctcttggaaatctgaaggagtttgcaacatttttaagagttcttggaagctatcctacagatgtgaatgaaccttagattgaaagtactgcagattacatactggattagcaggaataggcaaaatgagtaaaaggatctactctagaccagtagggaccggtgcattcgaggctcacatttggttgtgatattgagaggaaagtctgatgttttgctggtgatttttctgatgatttaagtcttctccaatctcctatggataccaaagggttgaatattcggaaatacttcaatgtacaaggtttatatgtttcatgttggagaatctgtgtcatggtagcatgcaggttgctaaagcacagttacagtgaaataatgggacaatgtctaagaacaccgccctttttttgtgacaatataataagaactgaataactgatgtttccatgtctgggcgattgggccggcgttcctcaaaaatcatatttgctgtcattacgcgctccatgcacatacatctggcggtggtcacgttggccaagcatcgccaaactttccttctgtagaaggaagtcatttggcgcttcttatttttttctattgatggaacggattttggtgctccttgattgccttgatcagtgccaggtcaaattcggcagttcaagtttcgagcaggttagtcggtttggttcaggttcctgtgaggagcttttataagaatctgggtatcatagagattatatgcagagaagagataaaaatg

SEQ ID NO: 6923 - DNA, 1265 bp, Zea Mays
ggatatcgctcgccctgctcaccccggtgctcccccgatgacacaagcatcgttcccataaaatataaaaaaggcgcccactagcgcacgcacccgcataaacagacaccaggcacgccgcgcatcgcaagcgagcgacacaagagagcgcccatcatctgtgccctgtgcgccaccatctcgcccgccttcaatcccctccatcattcgttccaacagccccgctttctccaccatcagtgcgaaaaaatttatgcgcgctttgggaaagcgcgagctcgttttgctttgaagctgcctccgcctttttatccgtccgggccggggctgtgggctccgcctccgcctccgggccgccgccgtcggactcgtgggcgtggcgcaagtatgggcagaagcccatcaagggctccccctacccacggggttactaccgctgcagcagctccaaggggtgcccagcgaggaagcaggtggagcgcagccacgcggaccccaccgcgctgctcgtcacctacaccttcgagcacaatcacgaggcgccgcagcccaagaccagcggcggcagctgctgccaccagcaaggcaagccgtccgcgcggccgccggcgccgaagcctgagccgtccgtggtcctggtccagcgggatgagctcggcccggagcacgagctggtagaaacagaggtgccggagcaggagcaggagacggagccagaagaggagcacgagccggcggaagagggcgtcccatgtctggccggtccggaagcggcagcaaccttaacggtggcgccggcggccgaggaggacgaaagcttcgactttgggtggttcgaccagtacccgacgtggcaccggtcggcgctgtacgcccctctgctgccgccggaggagtgggagcgggagctgcagggggaggacgccctgtttgcggggctcggcgagctgcccgagtgcgccgtcgtcttcggccgccgccgcgagctcagcctggccgccaccgcgccgtgctcctgatggtccttcgactctttttacgtttgtttttatttttttttcttttccttttgggcccctctttaagttttacacggaacgatttggaggcactggtacatagctctgattggtgcacggggtttatctgttcaaggccggctgctggcttaagctttctctcctcccgtgttgattggtgcacgcgttcgccgtccaaggttgtcctgtttgcgatgtgattccaaccagaaaacagcgaaaggt

SEQ ID NO: 6924 - DNA, 2224 bp, Zea Mays
acgcacgcagacgcaggcgcgcgcacagcgtagggtcgcagcctcccacgcacaggcaggcacaggcaaccgcattttcccttctccacctccatcgcctcctcgatctctcctcccccccgtcccccgctcccccccacccggcgccgactaccaaccgcatgcgccatgcagccggggcccacctcgccgccgcacgaatccccctcgccgccgcacgaggtgacgccacaggaggagcccgcgaccctgcccctgcccggcgaggaggcccagccccagggccaggctgacgacggcgacgcggtcaaagcggcggcgggagcccgggaggaccggaacgacaggagcggcgccaccgcatccgcccgggggaggaagaggcggaggcgcggcggcacctcctccacctccccctcgcccttcccgtcccctgccgccgccgcggggacgacgcggggggtcgtcatggtcaagcgggacctgctcgcgcgctgcatgacgtgcccgctctgccgccgcctcctccgcgacgccaccaccatctccgagtgcctccacacgttttgcagaaagtgtatatatcagaagtttgatgatgaggaagtagaatgctgcccagtatgtaaaattgatcttggctgcacacctactgagaagcttagagccgatcacagcttacaagatgtaagatcaaaactttttccattcaaaagaaagaagattaatgcagaagaagtttcatctagtatttcacttcccactaaaattaaagaaagatctatctcttcattagtcgtcgatacgcctaaagtaaaaccaacaggcttgactggacggcgaacaagagcagttgccagaaaagctgctgctgtcgccactgccactgtcaccttgcatgaacttcgtccagttattgaagatcctgtgaaaaaggaaattgatagttgtgacagccatcctcatgattcaaatttgcctgctagttcaagcaaagcaccacaaataagaagacagatatcacctaacgtggaggcatctaaccgttcctccaacaaagataccgaaggtgatagtaacgatgagctggcagataagtctgagctctggcgtcctttaaattgtttagtagaagctgccaacaggacaaaatcctttaggtcaagttcacagagtccagttgttaagggagagcaacccaatggctctacgagtagtacatttgctagcaaagcaaaggcaagggagaatctggagaagtccaaaattcaggatgacaaaaaagatgttcccatgccaccagtgctgccaaaaagaagagctcaaggtactgcgcggaagaagagagatcgtcttcaagctccaactgatgtgaagcctgatgctgcagttgcacagaatgcaaagaagttcagctccatatggttttcattgattgcctcatttgaccagcaaggagatccacctttaccacagatcccttcccactatttgcgaataaaacggaaatatccctgcttcatctatcctaaaatacctcatgcaaaagctcagtcttccaagtgagtctgaggtggaaataaagtgttgcgagcagccagtgaacccttcacaacctctgcgcaatttagtagagctgtggctgaagggaagagcaacacagacaactcagaccatgaccggttcgtccgctaaagagtttgtaatggtgctaacatacggacggccaaaggctcctgcaatgtgaaggcaccatgcaaacattcaggccctcaaacctatttttcctgtgaggcagctatagccagacaattgttggcgaggtcatcaaagataactctccctgacgacacagcctcacaatatgcagtggctggctcacttcagagccagcccaagcccttgatgtcacattcatgtattctttttttatagcatatgttgtttgattcctttaggatgtccttttcttatttattatacatcgatagtggtatatagatagaaagttgtgattgatacttgtaggtatcattgatgttttgattgggccttaaattatatagggagagaaacttgtagtctttgcttgtaagagatgagcagagttgattgcagagtgtttctgctgtaccgtgacttattgtagcactagcaccgaattgtaaccctatattttgtctttgaactcgttagtgacttatttgttcagggggactcatgc

SEQ ID NO: 6925 - DNA, 1219 bp, Zea Mays
ccgaattacaaactccgctggcgctatataaaacccaacagccccatcttgtgacccagtcgcctcgcctctcctctccgtttgctttgcattcaccccttgccgcacacatcaggaaggcgggcaggcgacgacaatgacgatgatggcgccgcatccgcagccactgccgctgccacagccgccggcgccgttcggggacaccacgctcaccaaggtgttcgtgggcgggctggcgtgggagacccacaaggacgccctccgcgagcacttcgagcgctacggcgacatcctcgaggccgtcatcatctccgacaagctcaccggccgctccaagggctacggcttcgtgacgttcaaggaggcggacgcggccaagaaggcgtgcgaggacgccacccccgtcatcaacggccgccgcgccaactgcaacctcgccgccctcggcgccaagccgcgccccccgccacacatcctccgcccttcgccgccggccaccccggcgccgcacgcgcccgcgctcccctcgcaacaccagcccacgccagccatcgccgtggggtccaggggcgtgtcgccggtgccgtggtactaccacccctccacgacgccgccgccaccggccgcgcaccactacgcccacggcgcgcaccagcagtaccacggcgtgctcccgttctaccccgccgccgccgccacctacggtggagcaggtgacaggctgcagctgaaggcacgaggcgatcgatgatggcgacgacgagcggcggaacgaaaggagcaggccaaacaggctgagctgcacatgaagggtgtcgtccgtctgtcgggagggcccgaagcgacgcaaggcccgggcccccattaggccattgctacatcccccctctgacttcgtgcgtggctgcacggccaccgtgccgggcaagaacagtctgtaacaaatgattcgattcgtctctctctcgtttaccaaccgtatttttttccaatggtaaacccgttaccagtgtctgtagggggcagcggaccccaataataatcgtcataatatttcgccgttcatctctgtgctgctttgcgtgcatgtatgtgcgtcagcagaacactaatggttcgccggcccatcccgtcggttctgtgggctcgcagtcccacgcccgcactccgaccttcttctccacgggctgagaaagtcgagcgttgctctttcaattcc

SEQ ID NO: 6926 - DNA, 4966 bp, Zea Mays
gcgcgcgggcaggcgtgtggcgcggctgtgtcgtctgtgagtgcatgcgaggcctccggttccggctctctctctcggtgcagttcgtccgggagggggagagcgaggtggagtggtgctaagccaagccaactagatcgagtcgtcaagaaggttggagaggagagatcgagatggggaagcaggcggcggtggtgctggccgtgaacggcaagcggtacgaggccgccggcgtggacccgtcgacgacgctgctggagtacctgcgcacccagacgcccgtcaggggccccaagctcggctgcggcgaaggtggctgcggtgcatgtgtcgtccttgtctccaagtatgacccggccaccgacgaggtgaccgagttctcagcgagctcctgcctgacgcttctccacagcgtggaccgctgctcggtgaccaccagcgagggcattggcaacaccaaggatggctaccaccctgtgcagcagcgcctctccggcttccacgcctcccagtgcgggttctgcacgcccggcatgtgcatgtccatcttctccgcgcttgtcaaggctgacaaggcggccgaccgcccagccccgcctgccggcttctccaagctcacttcctccgaggctgagaaggccgtctccggcaacctgtgccggtgcaccgggtacaggcccatcgtcgacgcctgtaagagcttcgcggccgacgttgatctcgaggacctgggcctcaactgcttctggaagaaaggtgacgagcctgcagatgtcagcaagctgccaggctacgacagtggtgccgtctgcactttccccgagtttctcaaatctgagatcaagtcctcagtcgagcaggttaacggcgctccagttcctgtttctgacgacggctggtaccgtcccaagagcattgacgagcttcacaggctgtttcaatctgagtccttcgatgaaaattctgtcaagatagtagcttcaaacactgggtccggggtgtacaaggatcaagaccttcatgacaagtacattgacatcaaagaggtcccagagctttcagtcatcaacagaagcaacaagggggtcgagcttggatcagttgtgtccatctctaaagcgattgaggtgctgtcagatggaaatgtggttttcgaaaagattgcagatcacctgaacaaagtggcctctccgtttgttcggaacacagcaaccattggtggaaacatcattatggcgcaacggttgcaatttccctcggacattgtgactgtactactagctgcaggtacaactgtcactatccaggtggtttccaaaaggctttgcctcaccttggaggagttcttgcagcagcctccatgtgattctagaaccctgttgctgagtatatttatcccctattggagttcagatggcatcacctttgagaccttccgagcagcacctcgtccacttggcaatgctgtcgcatacgtcaattcagctttcttggcaaggacttcagtggatgcagcatcaagggaccatctcattgaggatacatgtttggtgttcggtgcatatgggactgatcatgctattagagctagcaaggttgaggattacctgaagggcaaaacagtgagctcgactgttatacttgaagctgttcggttgcttaaagcgactgtcaaaccatcagaaggcacaacacatcctgagtatagaatcagcttggccgtcagcttcttgtttaccttcctatcttcccttgtcaacaatgagtcaacaaaggttaatggtcccaacgggtcatgtagtaatggagccacaaacggtgcccttgagcactcaccagagaagcatcttaagtttgacagcaacgatttgccgatacggtcaagacaagaaatatttttaactgatgaatacaagccagttggaaaaccaattaagaaagcaggtgcagagatccaagcttcaggggaagctgtgtacgttgatgatatccccgctcccaaagattgcctctatggagcatttatctacagcacccaccctcatgcccatgtaaaggctatcaactttaaatcatctttggcctcgcagaaggtcatcacagttatcaccgcaaaggatattcccagtggtggacaaaatattggttccaccttcccgatgatgggagacgaagcactttttgcagatccagttactgaatttgctggtcagaatattggtgttgtgattgctgaaacacagaagtatgcctacatggctgcaaagcaagccattattgagtatagcacagaaaatctgcagccaccaattctgacgatagaagatgcgatccaacgaaacagctacttccaagtccccccatttttagctcctaagccagttggtgattacaacaaagggatggctgaagctgatcaaaagattctatcagcggaggtaaaacttgaatcccaatactatttctacatggagacacaagtggcgctagctattcctgatgaagataactgtataaccatctattcttcgacacaaattcccgaggtcacacaaaatgtggttgcaaagtgccttggcattccatttcacaatgtccgcctcatcagcagaagagtcggaggaggctttggtggaaaggcaatgaaagcaatacatgttgcatgtgcatgtgcggttgctgcattcaagctgcggcgtccagttcggatgtacctggatcgcaagacagacatgataatggcaggcggtcggcatcctatgaaggtgaagtactctgttgggttcaagtcagatggcaagatcacagccttgcacattgatcttgggatcaatgctggaatatcaccggatgtgagcccaatgttgccacctgctatcataggtgctctcaaaaagtacaactggggcaatcttgcatttgataccaaggtctgcaagacaaatgtctcatcaaaatcagcaatgaggggtcctggagatgttcagggctctttcatcgctgaagccatcattgagcatgttgcctcagcactttcagtcgacactaacaccataaggaggaagaaccttcatgactttgagagccttgtggtgttcttcgaagatgctgcaggtgaagcttctacctacagcttagttacgatgttcgataagctggcctcctctccagaataccagcgccgagctgcaatggtggagcacttcaacagaagcaacaagtggaagaagcgtggcatttcttgtgtgccaattacatatgaggtcaatcttcggccaactccaggcaaggtgtctatcatgaatgatggttccatcgttgttgaggtcggaggggttgagataggccaagggttgtggacaaaagtgaagcagatgacggcattcggattgggacagctgtgccctgacggcggcgaaagcctcctggacaaggtccgggtcatccaggccgatacattgagcatgatccagggagggttcaccggtgggagcaccacttctgaaactagctgcgaagctgttcgacagtcgtgtgttgcgctggttgagagactgaagcccatcaaggagaatctggaagctgaggcaggcacagtggaatggagttccttgattgctcaggtgaggataagcttgtgaattccaattttctcactgccatgccagtaaaacaaattgtttaaatccttgtccccttcctttgagacaataacaaacggcaagcaatagaaatagcaatagcaaatttagtgaggagatcacatgattctgaggaacacaatatttgccagtatttcaattggtcatgtcattctgttgctcatttgcaggcaagtatggcgagtgtgaacttatcggcacatgcatactggaccccagatccaactttcagaagctatttaaactacggagctggcattagtgaggtggaaattgatgtgctgacaggagcaacaacaattctaaggagtgaccttgtctacgattgcgggcaaagcttgaaccctgctgtcgacttgggccaggtggaaggcgcattcatccaaggagtaggcttctttacaaacgaggagtacacaacaaactctgaggggttggtcatccacgatggcacatggacgtacaagatccccacagtcgacaccatcccaaagcagttgaacgttgagctgatcaacagcgcccgtgaccagaagcgtgtcctctcttccaaagcatccggcgagcctccgcttcttctagctgcctcggtgcactgcgcaatgagggaggccatcagagccgccaggaaggaattctcggtctgcactggtccagcaaactctgccatcacgttcgagatggacgtgccggcgacgatgcccatcgtcaaggagctctgcggcctggatgttgtggagaggtacctggagagcatgtccactgccggaccaacaaccactgccaaagcatagatccagcaggtgcaccgcccatggtgagagagcttaataggtctgtgtaaaacactgaacagcatgacatgccaagcttacatgtgttagctctgatgtacagaagacgaggtagcaatgggagctgtggtcttgtgaatcaggatccatgaacattagaggaaaaaataaagtaaataagtgtcgggcagacaaatgtgtggatgaaatcatgtggttttgattggattttgaagaaatttttgcaatgaatctccgttcatactcctaggtgtgtacctgcctactgggtacatgggggataggattgtaccatccagctaggtttggccttgctgtctcgttgtgaccttcaccggtagctactccctgcgcacctatttgaactagcagagcagtgttgtgaccttcaccggtagctacttactccctgcgctgcgcacctatttgaactagcagagctaaaattactaaggaagacatatcaactagtaatgctatgggctaaat

SEQ ID NO: 6927 - DNA, 2332 bp, Zea Mays
ccttgtctgccccactcacacttccagatgggccccatccacctcgatgaaacaaaagtatgttctgtctgccaggtaggtcccgccggaacggatcccctgcttcttctaccgaaatcgttgcttccgacgcaccagggccgcgcgccgccggcgaccttgccgtggcccttctacaaaaccgacccgcgccggagctccgccgtcggatgtggcggagacggcgtcaatggcgtcctcctctgctgccgagtccagctcccgcctctctgatcgagcgaggaggtcggcgctgggactcagattcatggtgctcctgatgcacgtgctgttcgttggcgctgtcttcatcctcgatccgaccctcgactggcgaatccacggggagccgtggtatatagggttgtatggagtgcttgttctgctcacgctagtgcaatacttctatacagctggctcatgtccagggtatgttattgatgtaatgagagctggttccatgatgcatgcaaccttcgtcaacactgctgctctttcaaatcaaattcaagaaatggaaacataaattctccgacgagtcgtgctcaactacagaaacttagcacgatgactcctacatcttcatgggcacagatggttatggatctttatcctccagggtcaagcagcagggattggacttgcacttactgcaggattgttcagccacctcgcacccgacactgccatgactgtgataaatgtgtccttcaatttgatcatcactgtatatggcttggaacatgcattggcaaaaggaaccattgtcgttttttgtgagcttttaatgtgttttcacctatatgttccattcacttgcacgtcagttgtggtgtgatgtgttataaactcactgtttgcgtacacagccgtttaacccacgtacacagcggttatttgtgtaaatgctacagtggcttattgtgtccatttaatcagccatttataccgtttagcccaattaaatagccaaaaaggttgtgactgtttagtcatttaaatgtttaggctaacactgtataaactaccatacttgttgcggaaacactatagttatttctttgattcggacactgataaactttctttggagtatctatagatgttttccagagttgtagttttgtgactgaaagtacatattgatcagaccaatgttatcgagtatttacattgtgcaccattaaacagatagaacataaatgccactgagtatttcagaaccaacacccctcctcttgtaatataatgatttaccttatttattgacataacataactactgcttctactactttattgtgaattgtgattacacattgagacttccatgttgtctctcgccatgctgtacgattgcagtatgatactattgttttaatctcttggttcttatggttgtataaccgcctttactaggtggtacatatttgaagaaacaatcttgtgtatctggactgctgctctctgcatcgagtcattgtgtttagatgtggacaaggcctggtggaaggactttgttggtgttatcctgttggcagcgcttatccttatcctgatattcctactactattgtggttatttcattcgtacattgctctaacaaatcaaacaacctacgaaattgccagaaggaagcgaatattctacctaaggggagtccctgaaagagttcttccattcagcaaaggcatatgcagaaatctctacgatttctgctgttctagccagaagggatatattctggaagctgtgcccccaagtgaagagctggaagctagagctgcccgttacacgtgccgagatgtcatttgctgtcgttgctgctgataggttgtaccatagcattctgcccgtatagcccagttgcgctgttctctgttcaaggttaagttaatggaagcaaattttagtgacctgcgaccgttagatgcccccagagttcattatttgtgcatagtcatttgtacatttcactcagaaaaatgtgcgctctgagatccagttgttcacattctgtatggctttgaattcaaataggttttcaggacagagaactgatctgtacttcagttttttagtcgaaatgtgtgttggtaatttattttaagattttcttatatttattcctagccatatattttatatttatttatcttgagggcttgtgttgtaacacccactttgtaattgctaggaataataccagtagaggaacaatttctctttatgagagttggatctttatgcatcatcttatgtgaacatcatgcccaaaacaattaataaaaa

SEQ ID NO: 6928 - DNA, 2892 bp, Zea Mays
gaaacaaaagtatgttctgtctgccaggtaggtcccgccggaacggatcccctgcttcttctaccgaaatcgttgcttccgacgcaccagggccgcgcgccgccggcgaccttgccgtggcccttctacaaaaccgacccgcgccggagctccgccgtcggatgtggcggagacggcgtcaatggcgtcctcctctgctgccgagtccagctcccgcctctctgatcgagcgaggaggtcggcgctgggactcagattcatggtgctcctgatgcacgtgctgttcgttggcgctgtcttcatcctcgatccgaccctcgactggcgaatccacggggagccgtggtatatagggttgtatggagtgcttgttctgctcacgctagtgcaatacttctatacagctggctcatgtccagggtatgttattgatgtaatgagagctggttccatgatgcatgcaaccttcgtcaacactgctgctctttcaaagcagtcaaattcaagaaatggaaacataaattctccgacgagtcgtgctcaactacagaaacttagcacgatgactcctacatcttcatgggcacagatggttatggatctttatcctccagggtcaagcagcagggattggacttgcacttactgcaggattgttcaggtattcttgtatcctcacgcgctaaatgttctctaagttttacaagtaagtaggaattaatatagttttgttatacaaaaattgagttggttgcatgagttattaactttgagttatgcaccaccaatttgtttgactaaaatttaagaataatatacattcaatacatccttcaaaatttaccaagtctgttaaaaaaactatgtaaaagtctgaaatgaatttgtggtatgtttgattatatttgtcagtgtagttaaagttactagaagatttgctcttcacatccttgattggctagtggtttatttaccagtttgtgacattcaaagattcgtttctgatcatgaaggttatttgtgcattaagaatcttctaaaacttaatacattgattggttgatgagtaactgattcgcaatgcagcgggcacaggacctctctcttagaaaagtaaacttatgctatcttatttgctcagaattgttcctccaaaatctcatggtttcatgctaatttcatctattatgtctttagaaagtttcccataccttgttgcttctgatagtcagagttaaagttttgctaccaacatctttttgcagccacctcgcacccgacactgccatgactgtgataaatgtgtccttcaatttgatcatcactgtatatggcttggaacatgcattggcaaaaggaaccattgtcgttttttgtgagcttttaatgtgttttcacctatatgttccattcacttgcacgtcagttgtggtgtgatgtgttataaactcactgtttgcgtacacagccgtttaacccacgtacacagcggttatttgtgtaaatgctacagtggcttattgtgtccatttaatcagccatttataccgtttagcccaattaaatagccaaaaaggttgtgactgtttagtcatttaaatgtttaggctaacactgtataaactaccatacttgttgcggaaacactatagttatttctttgattcggacactgataaactttctttggagtatctatagatgttttccagagttgtagttttgtgactgaaagtacatattgatcagaccaatgttatcgagtatttacattgtgcaccattaaacagatagaacataaatgccactgagtatttcagaaccaacacccctcctcttgtaatataatgatttaccttatttattgacataacataactactgcttctactactttattgtgaattgtgattacacattgagacttccatgttgtctctcgccatgctgtacgattgcagtatgatactattgttttaatctcttggttcttatggttgtataaccgcctttactaggtggtacatatttgaagaaacaatcttgtgtatctggactgctgctctctgcatcgagtcattgtgtttagatgtggacaaggcctggtggaaggactttgttggtgttatcctgttggcagcgcttatccttatcctgatattcctactactattgtggttatttcattcgtacattgctctaacaaatcaaacaacctacgaaattgccagaaggaagcgaatattctacctaaggggagtccctgaaagagttcttccattcagcaaaggcatatgcagaaatctctacgatttctgctgttctagccagaagggatatattctggaagctgtgcccccaagtgaagagctggaagctagagctgcccgttacacgtgccgagatgtcatttgctgtcgttgctgctgataggttgtaccatagcattctgcccgtatagcccagttgcgctgttctctgttcaaggttaagttaatggaagcaaattttagtgacctgcgaccgttagatgcccccagagttcattatttgtgcatagtcatttgtacatttcactcagaaaaatgtgcgctctgagatccagttgttcacattctgtatggctttgaattcaaataggttttcaggacagagaactgatctgtacttcagttttttagtcgaaatgtgtgttggtaatttattttaagattttcttatatttattcctagccatatattttatatttatttatcttgagggcttgtgttgtaacacccactttgtaattgctaggaataataccagtagaggaacaatttctctttatgagagttggatctttatgcatcatcttatgtgaacatcatgcccaaaacaattaataaaaa

SEQ ID NO: 6929 - DNA, 454 bp, Zea Mays
aactcatcacccgtagtatcaattatcataacctccgactccgacgatctgaactgtgaagatgagcacttatccaccgccgacgggggaatggaccaccggcctctgtggctgcttcagcgactgcaagagctgttgcctgtcgttcttgtgcccgtgtatcccgttcggacaggtggcagaggtcttggacaagggcatgacatcctgtggtctggccggcctcctctactgtttgctgctgcatgccggggtggctgtggtcccgtgccactgcatctacacctgcacctaccgtcgcaagctccgggcggcgtacgacctgccgccggagccgtgcgccgattgctgcgtccacatgtggtgcgggccatgcgccatctcccagatgtaccgggagctcaagaacagaggcgccgacccggccatggaggtctttggaggctgtgaggca

SEQ ID NO: 6930 - DNA, 854 bp, Zea Mays
aaaaaaaacagaaaggatttagacaattagacggggaacagcgagaatggtaagcacgcgcggcttcatggacggacagataaggaagacgaggcgtcggttctgattccattccatggcttctcctcttgcatgcttattaaatgcaggttgcctgtcgttcttgtgcccgtgtatcccgttcggacaggtggcagaggtcttggacaagggcatgacatcctgtggtctggccggcctcctctactgtttgctgctgcatgccggggtggctgtggtcccgtgccactgcatctacacctgcacctaccgtcgcaagctccgggcggcgtacgacctgccgccggagccgtgcgccgattgctgcgtccacatgtggtgcgggccatgcgccatctcccagatgtaccgggagctcaagaacagaggcgccgacccggccatgggatgggaagtgctctcgaaaaagacgactatggctcctgtaccaatgcaagacatgacgcgctgacgacagcaactcgatctcctagcaaaccaggattacgtgttgcatatatgcacagtttgtgtgttatgtggctatgtcagcaagtaaatggatcggagtctatgagtggataaaattaagtggatgtgttcgcgtcttagtaataagtgaataaaatttcataagtgttactaaaataggtaaatagggtacatgtatgtttggatcccattatgaactatttgtaataatagctatatatacaaaagttgtggaattagcttgtagtaaaagaaaaataagtgatacctatacatttctgtaaatttcacaacatcgtagatgtgattgctatatatatcct

SEQ ID NO: 6931 - DNA, 4672 bp, Zea Mays
gtgttgtgttgtgttgtgttgcgtgctgtggagggggaggaggagatggggaagggggcaggagcagcggagccgtcgacggtggtgctggccgtcaacggcaagcgctacgaggcggccggcgtggctccgtccacgtcgctgctggagttcctccgcagccagacgcccgtcagaggccccaagctcggatgcggcgaaggtggctgcggtgcatgcgtggtcctcgtctccaagtacgacccggccacggacgaggtgaccgagttctctgccagctcctgcctgacgctgctccacagcgtggaccgctgctcagtgaccaccagcgagggaatcggcaacaccagggatggctaccaccccgtgcagcagcgcctctccggcttccacgcctcgcagtgcggcttctgcacacccggcatgtgcatgtccatcttctccgcccttgtcaaggccgacaacaagtccgatcgcccggaccctcctgctggcttctccaagatcactacctcggaggcagagaaggctgtctcgggcaacctttgtcgttgcaccggatacagacccattgttgacacctgcaaaagctttgcctctgatgttgacctcgaggacctaggcctcaactgtttctggaagaagggcgaagaacctgcagaagtcagcaggctgccggggtacaacagcggtgccgtctgcacctttccagagtttctcaaatccgaaatcaagtctactatgaagcaggtgaacgatgtccccattgcagcctcaggtgatggctggtaccatcctaagagcattgaagagcttcacaggttgtttgattccagctggtttgatgacagttctgtgaagattgttgcttcaaacactgggtctggagtgtacaaggatcaggacctctacgacaagtacattgacatcaaaggaatcccagagctttcagtcatcaataaaaacgacaaaggaattgagcttggatcagttgtgtccatctctaaagctattgaagtgctgtcagatggaaatttggtcttcagaaagattgctgatcacctcaacaaagtggcttcaccgtttgttcggaacactgcaaccataggaggaaacataatgatggcacaaaggttgccatttgaatcggatgttgcaaccgtgctcctagctgcgggttcgacagtcacagtccaggtggcttccaaaaggctgtgcttcactctggaggaattcttggaacaacctccatgtgattctaggaccctgctgctgagcatatttatcccagaatggggttcagactatgtcacctttgagactttccgagccgccccacgaccatttggaaatgctgtctcttatgtaaactctgctttcttggcaaggacatcaggcagccttctaattgaggatatatgcttggcatttggtgcctacggagtcgatcatgccatcagagctaagaaggttgaagatttcttgaagggaaaatcgctgagctcatttgtgatacttgaagcaattaaactactcaaagataccgtttcaccatcagaaggcactacacatcatgaatacagggtcagcttggctgtcagtttcttgttcagtttcttatcttcccttgccaacagttcgagtgcaccatcaaatattgatactcccaatgggtcatatactcatgaaactggtagcaatgtggactcacctgagaggcatattaaggttgacagcaatgatttgccaattcgttcaagacaagaaatggttttcagcgatgagtacaagcctgttggcaagccgatcaagaaagtcggggcagagatccaagcatcaggtatatactcttatactgatacataaactgatttagcttgaacttccaaacttgttccactgttagtgaacctcgtctattttctatactccacaaaacaatcatctcatggctccttttttttgtctttagtgcaatagtttcgtcagccagaaccatctcataagtttctgtcccagcatgctctattgattgtatttcctcccttaaaaaatgccaaaccatattcatttttcttatacaggggaggctgtgtacgttgatgatatccctgctcccaaggattgcctctatggagcatttatctacagcacacatcctcatgctcatgtgagaagtatcaacttcaaatcatccttggcttcacagaaggtcatcacagttataaccgcaaaggatattccaagcggtggagaaaatattggaagcagcttcctgatgcaaggagaagcactatttgcagatccaatcgctgaatttgctggtcaaaatattggtgtcgtgattgctgaaacacaaagatatgctaatatggctgcaaagcaagctgttgttgagtatagcacagaaaatctgcagccaccaattctgacaatagaagatgccatccaaagaaacagctacatccaaattcccccatttttagctccaaagccagttggtgactacaacaaagggatggctgaagcagaccacaagattctatcagcagaggtaaaacttgaatcccagtactacttctacatggaaactcaagcagcactagcgattcctgatgaagataactgcataacaatctattcctcgacacaaatgcctgagctcacacaaaatttgatagcaaggtgtcttggcattccatttcacaatgtccgtgtcatcagcagaagagtaggaggaggctttggtggaaaggcaatgaaagcaacgcatactgcatgtgcatgtgcccttgctgccttcaagctgcggcgtccagttaggatgtacctcgatcgcaagacggacatgataatggctggagggagacatccaatgaaggcgaagtactctgttgggttcaagtcagatggcaagatcacagccttgcacctagatcttggaatcaatgctggaatatcaccagatgtgagtccattgatgccacgtgctatcataggagctctcaaaaagtacaactggggcactcttgaatttgacaccaaggtctgcaagacaaatgtctcatcaaagtcagcaatgcgagctcctggagatgtgcagggctctttcatcgctgaagccatcatcgagcatgttgcctcagcactcgcactagacactaacaccgtcaggaggaagaaccttcatgattttgaaagccttgaagttttctatggagaaagtgcaggtgaagcttctacatacagcctggtttccatgtttgacaagctggccttgtctccagaataccagcacagggctgcaatgattgagcagttcaatagcagcaacaaatggaagaaacgcggcatttcttgtgtgccagccacttatgaggttaatcttcgaccaactccaggcaaggtgtcaatcatgaatgatggttccatcgctgtcgaggttggaggaattgagataggtcaaggattgtggactaaagtgaagcagatgacggcctttggactgggacagctgtgtcctgatggtggcgaatgccttctggacaaggttcgggttatccaggcagacacattaagcctgatccaaggaggtatgactgctgggagcaccacttctgaaactagctgtgaagcagttcggcaatcgtgtgttgcacttgttgagaggctgaagcctatcaaggagagtctcgaagctaagtccaacacagtggaatggagtgccttgattgctcaggcaagcatggcgagtgtgaacctatcagcacaggcgtactggactcctgatccatctttcaagagctacttgaactacggagctggcaccagtgaggtggaagttgatatcctaacaggagcaaccacaattctgcgaagcgacctggtgtatgactgcgggcagagcctaaaccctgctgtagacttgggccagatcgagggctgctttgtccaaggaatagggttcttcacgaacgaggactacaagacgaattccgacggcttggtcatccacgacggcacatggacgtacaagatccccacggtggataatatcccgaaggagttcaatgttgagatgtttaacagcgcccctgacaagaagcgtgtcctatcttccaaagcgtcgggcgagccgccgctggttctcgcagcctcggtgcactgcgcgatgagggaggccatcagggcggcgaggaaggagttctcggtcagcaccagccccgcgaaatccgccgtcacattccagatggacgtgccggcgacgatgcccgtcgtcaaggagctctgcggcctcgacgtcgtggagaggtacctcgagaacgtgtctgccgccagtgccggcccaaacacagcgaaagcatagatccagcaggcctcagggtgcagtcggcgcactgccagagatgatgtgtgctgccctgatgtacagacagtacagtacagaggagagagaattgggggaactcaggaactgcgaggagcgatgaacagtatatagagtgaaaaataaaagtgcttcgtactaataatcactagaaaaaattatgcacatctcccacgcactaccggcacgactgttgaatattttgtaaaataagatgtcataagctatttattttctgtatgattagatcagcaaataatttaattcaagtataaatcacagaaa

SEQ ID NO: 6932 - DNA, 3385 bp, Zea Mays
cggcgagaggccaccgcccgcgcggccgcgctcctcacactaccacccgccccctctacgcaaggcctagaagcgccgcctccacggctgcacctccgccagttgcgctcctcgcctcgccgctgcctccgtagccgtcgcgggcgccaccatgccgctccggttggatatcaagaggaagctcgcgcagaggtcggagagggtgaagtccgtggatctgcatccgacagagccatggattttgtcgagtctttactcaggaagcgtttgtgtatggaactaccagactcagacaatggtgaaatcatttgaagtcacggatttaccagttcgttcggctaaatttattgcacgtaagcaatgggttgttgctggtgccgacgatatgttcatccgtgtgtacaactataacacaatggacaaggtcaaggtttttgaagctcacactgattacattagatgtgtggctgttcatccaacccagccctttgtgatatcatcatccgatgacatgctgattaagctgtgggattgggataaaggctgggtgtgtactcaaatattcgaagggcattctcactatgtgatgcaagttacatttaacccaaaagataccaacacctttgctagtgcttccctggatcgcacaataaagatatggagtcttggttcccctgatccaaatttcacactagatggccattcgaaaggtgtgaactgtgttgattacttcactggtggtgaccgaccatacttaattactggctctgatgatcagactgcaaaggtttgggactaccaaacaaagagctgcgttcaaacacttgaaggacatgcacataatgtttctgctgtatgtttccacccagagctacctataataattactggttcagaggatgggacagttcgaatgtggcattctactacctacaggctcgagaacactcttaactatggccttgagcgagtttgggctttagggtatatgaaagggtcaagaagggttgtgattggatacgatgaagggacaataatgataaaaattggtcgtgaagttcctgttgctagcatggatagcagtggaaaaattatatgggcaaagcataatgaaatccaaactgttaatatcaagagtgttggtgcagacaatgagatcgcagatggtgatcggttaccgttggccgtgaaggagttgggaagctgtgacctttatccacaaagtttaaggcacaatccgaatgggagatttgtagttgtatgtggagatggagaatacataatatacacagccttagcatggagaaacagatcatttgggtctgcacttgaatttgtttggtcaactgatggagaatatgccatcagagaaagcacctcgaggataaagatatacagtaaaaatttccaggagaagaaaagtataaggccatccttttccgctgaacggatatttggtggagtgttacttgctatgtgtacaaatgacttcatttgcttctatgattgggcagaatgcagattgatacgtcgaatcgatgtcaatgtgaagaatctttactgggctgacagtggtgatttagtaacaattgcaagtgatacgtcattctacattttgaaatataatagggatgtagtttcatctcatttggatagagggggttcagctggtgaggaaggtgtggaagatgcctttgaactgcttcatgagatcaacgaacgtgtccggactgggctatgggttggcgattgtttcatctacaataattcttcatggcgtcttaattactgtgtaggaggacaggtcacaactttgtttcacttggatcggccaatgtatttattaggatatcttgcaaaccaaagccgtgtctatcttattgataagcaatttaatgttgtggggtatactttactccttagtttgatcgaatataaaacacttgtaatgcgtggggatttcgatcgcgcgaatgatgttttatcatctataccaaaggaacaatatgacagtgtggcgcgtttcttggaatcacggggaatgttggaggaagccctcgagatagcaactgacactaattacagatttgacctggctgtgcaacttggtcgacttgaaattgcgaaggcgattgctaccgaggtgcaaagtgagtccaagtggaagatattaggggagttagctatgtcaagtggaaagcttgagatggcagaggagtgtcttctacatgctatggacctcagtggtttgttgcttttgtattcttcccttggggatgctgaaggcattaacaaattggcatctgtagccaaagaacaaggaaagaacaatgttgctttcctttgtttcttcatgctaggaaagctggaagagtgtcttcaattgctaatagaaagcaatcgtattccggaagcagcattgatggcaagatcttatcttcccagcaaagtccctgagattgtagcattgtggaaaaaggatctccagaaggtaaactcaaaagcagcagagtcgctggctgatcctaatgagtacccaaacttatttgaagactggcagattgctctcaacgtagaagctgctgttgcctctaaaaggagtatctatccatcggccgaggagtacatgattcatgctgaaaggtcaaatgagagtttagtggaagcttttaaaaatatgcatgtacatgaagagatggtaccagatgataatgaagatactgttcacgaggttattgaggatggtggagtagagagtcaagaagatgctgttgaggtcgatgcagaggatgacggagtagaagaaagtcaagatgaagctgttgaggttgaggctgagggttcaagtgatggtgctgtccttgtgaatggaaacagtagcgaggaacagtgggtgctgactgagcaatagtggattaacggatcagcaacttcgcttcagcggtgtagtttgtaaaggttgctgactgctatagagtacatgatatccattttttccccaacggtattaatcaacacttccatctttgtgcccgataggaaattttgtgcttccctttctacatgtagatcaggccttaggcgtcgaagacattttatagcctaccatgaggtactcgtttcacggagatggtatatgatataggtgatcggagtgatattttacatggtgcatatagtagcttgtcgaactgagaatgttttacctgtgatgtacatcggacttgggagctttgtatcattgtgttacaccttttcaatggtggcgaataaatttacagcagatgttttcaatagccttttagtaaatgtgtgaacgatttgcgttgtgctatgttttgttgctgacttgctgtgatggctagtctacttctatacttgactc

SEQ ID NO: 6933 - DNA, 1444 bp, Zea Mays
aaaccgagggagaggggacaacggacaaccgcccttctccatccggtctccaagccaacgactcgagtcgttcaaaactggacacagcagtgaaccggagctgcttgcttgctgtctcgccaagaagcaagagtaggaggagcagctggtctctcgccaagtcgcgcctctccctcctctcttctcttttctccctcgcgtcgcgcgctccacatgctgagcctgaggtcagtatccggctccaactcctcgaggggcatcgccgccgtggtcggcgtcggccccaggctgggctcggcggtggcgcgcaagttcgcctccgagggctacaccatcgccatcctctcgcgcgacctcgtgagtaagtaagcaagtgacacgagaggtgcgtgcgcgtggttgcagagaagctgtcgcagctggcggaggagatcgcgcaggcggccaaggcgcaggtgttcgcgctgcgggtggactgcgccgacgcccggtccgtgcgcgaggccttcgagggcgtgctctccctcggccccgtcgaggtgctcgtctacaacgcctgcgagccgcctgcagccaacgaggacgcgcgccccgcgcccttcctcgccgtcacccccgacgccttccaccgcgccctcgccgtgtccgccggaggggccttccactgcgcgcaacaggtcgctgacgaggagcagcagggccggcggcgacacggcgggcgcgggcgcggacccggacgcggtggcgcagagctactggcacgtccacgcccaggacaagagcgcttggacgcaggagatggacatccggtcgccgtccttcatgtagcagcagcagctagccgccgctgctgtacgtacggtccctggaatctttagtggactgctaccggccgggcgcgttcccgatcaagcaggagagagggacaagtgggtcttgttgtgtatgtatacgtcgtgccctgtaaatcgtgtgtgcgcgcgcgcggctgcgggccgggaatcgtgtccccgtcccgcgccgcacgttggcgcggctctagctagcccccccttttctcatcatttggtgtgagatgcccgtcgctggtccgaccgcgggttctgtgcgtcgattgcggccgagagcgaccgcgcgtgcgtctccgtcgcatcctgtacccgtcgccgccgccgccggcgaccggcctccggaaagctctcatgtgtgatggatgtgtgcgcccgttgttacacatgagctagtccgtatatgtggaggattgtgcttagtggtcgctacccacttgaattgagcagcatccgtgagactctgactattgtatcctgggctacgtacgtgcatactgcatacatggttggttgacttcgcctctctttgtactggccgttatggctgcacagagtattccagccgcacttttaggtggaagagaagggctgca

SEQ ID NO: 6934 - DNA, 1318 bp, Zea Mays
catctatccaaccaaccgcgtcggggctccgtagtccgttgttgagtttccgctcctcgccctcggtcgccgagtccaacagggagggggaggaggagcggctgcgctcgcaatccattccataccattctccctagtctcccggactctccctccctccctaatcttctcgtccgtcgtctcccatggaacggctcatctccacgcccgccgcctccccgacccaaacccggatccggggacccctttccctcccctctcggctccccgcggccgcggcatggccgcggctgcgctgccggcccggcgcgatcgcgctggcgtcgccgctgcgccacgaggctctctccgccgcaccggaggaggcgcggagccagccgccgccaccggctgccgtcggcagcccgtgggagcttctcgggagtctgctcccaaaggcttgcactgctgcccttttcctattgatgacagttgttactagttccctgcactcgagccttcctgcctatgcatcgatgcaaccagttgccaaaactggtggaggaggaggtctcttcacgacagagatactaagcagtggctgggctggttttttagctgggtgcttacataccttgtctgggccagaccatctggttgccctggcgccactgtcaattgggagatccagacttgagagcggactggttggcgccctttggggctgtggccatgatgcagggcaagtcattttcggcctgctcttcttgctactcaaggaccggttgcacatcgaggtgttccgtgcatggggaacaagagttgtaggcctgacccttctgatcataggagccatgggtgtccgggaagcttcggaggtccaagagtcctcgctggtgctggagggcgtggacaccagcagcatgagcagcaacgagcctctgcagcccgcttcagctccccggaagaagaaagtcggtttcgcaacgttcgccacggggatcgtccatgggctccagccggacgccctgctgatggtcctgccagcgctggctctcccgtcgcgcttcgccggcgcggccttcctcggcatgttcctggtcggcaccgtgttctcgatggggagctacactgcctttgtgggctcctgtagcgaggccctgaaagagaaggttcctaggataacagagaaactgacctgggctgcctcgctcgtagctatagccatgggtgtagccctcctggttgggcagttctttgggttcagcctgtactgatgctagcagctacgatggaagtcaccactgacaacaataatcagacaatcccgacaggacag

SEQ ID NO: 6935 - DNA, 566 bp, Zea Mays
gtcacagtgttgcaaaaaattgggcggctacgtgactctagggtggaatttagatctactgtaagcagtgggaaaagtaggctatttcctgtagaggttctatttaataatgaaaatggaataggcattgaaaaaacaagagatgaagctcaagctcaagatgctgagaaaactctccaaaatttaaagaaatttggtagagaagagtcaaaatctcagccaggaaacacactcgatgatgaggatataaagctattaggtgatgatgaggatgctttagcagatgatgaatgaaggacatcgctgttggagaagtacctatgttgattgcagggttttgcaatggattgtcttatctctaaagattgtagtctaggtatctaaacgaggaactaacatgtactagattgtattgtcgtagatgtttgtttgtgagagaacatttgtgaagttacggggtgaccagttgatcacaatgccagctcttttgtgttgagttcatactgtattcttaactaaccacaactaatcatatgatgagtcataggagacttttttgacttcag

SEQ ID NO: 6936 - DNA, 1280 bp, Zea Mays
cgcgttgatgcctcccaccgaaatgcatgtcctaaaccctaacgtagctcctacactgcaccgccaacttcaccgcacgagccaaaacggcggccatgtccgtccgccccagtcctacccggcttatgcacgcggcgaagagtggtgccgtcgtcacccttcgcaggatacgtggatttgatccaccaccagctcgagtttttgcttggcattgccctggagttggatgcattcaagtatttgcaaatagttgcttcatatggaggatgcacaggtgcaaacaatcttgataagaatgaggagatttcgagtgggtgagcgcggcaacgacatgttgacaggagacggcgggaagcgctcgacaagctaattaacttgaaagagcttgggcaacgtccaggaagtgtcggggtcttctgtcgggtctgaccgcttttgaacactgagtcaccggttactgtcgagcaggagaggatcacggtcaagtcagtcgggattaagaaagagttcgatgctgatagggtctttgggcaggagtatgcacaaggtagcctcagtgataacttctttgcgatcattgtgccgactgagtacgattgtttaacggccagcactaggaagaaggaaattgttgatgtcatagttaaggctttcaagagcacatgagtatgaacctgaggtggcttgctggcgtacatggagtggtgacagattgcatgctggtagttgatgaaactggtgggatatttgagaaaggtggaatttagatctactgtaagcagtgggaaaagtaggctatttcctgtagaggttctatttaataatgaaaatggaataggcattgaaaaaacaagagatgaagctcaagctcaagatgctgagaaaactctccaaaatttaaagaaatttggtagagaagagtcaaaatctcagccaggaaacacactcgatgatgaggatataaagctattaggtgatgatgaggatgctttagcagatgatgaatgaaggacatcgctgttggagaagtacctatgttgattgcagggttttgcaatggattgtcttatctctaaagattgtagtctaggtatctaaacgaggaactaacatgtactagattgtattgtcgtagatgtttgtttgtgagagaacatttgtgaagttacggggtgaccagttgatcacaatgccagctcttttgtgttgagttcatactgtattcttaactaaccacaactaatcatatgatgagtcataggagacttttttgacttcag

SEQ ID NO: 6937 - DNA, 1320 bp, Zea Mays
gtttgttccttgtaggctaggtcgattattttggagcccgatttattctctgtaggctggttcttttttagcccagtttgcctggaagaacagagggcagcagatatggatctgttgcctggaagaacagagtcgagtggaaaagaaaacaatttgttctgccatagcggtctcgtgtatggacatgaatctgttgcctggaagaaccgagttgagtggaaaagaaaacaatttgttctatggatccccaatctgtagtcttatctgatggtgaaggaggatacgtggatttgatccaccaccagctcgagtttttgcttggcattgccctggagttggatgcattcaagtatttgcaaatagttgcttcatatggaggatgcacaggtgcaaacaatcttgataagaatggtaaactagactgaggagatttcgagtgggtgagcgcggcaacgacatgttgacaggagacggcgggaagcgctcgacaagctaattaacttgaaaggagaggatcacggtcaagtcagtcgggattaagaaagagttcgatgctgatagggtctttgggcaggagtatgcacaaggtagcctcagtgataacttctttgcgatcattgtgccgactgagtacgattgtttaacggccagcactaggaagaaggaaattgttgatgtcatagttaaggctttcaagagcacatgagtatgaacctgaggtggcttgctggcgtacatggagtggtgacagattgcatgctggtagttgatgaaactggtgggatatttgagaaaggtggaatttagatctactgtaagcagtgggaaaagtaggctatttcctgtagaggttctatttaataatgaaaatggaataggcattgaaaaaacaagagatgaagctcaagctcaagatgctgagaaaactctccaaaatttaaagaaatttggtagagaagagtcaaaatctcagccaggaaacacactcgatgatgaggatataaagctattaggtgatgatgaggatgctttagcagatgatgaatgaaggacatcgctgttggagaagtacctatgttgattgcagggttttgcaatggattgtcttatctctaaagattgtagtctaggtatctaaacgaggaactaacatgtactagattgtattgtcgtagatgtttgtttgtgagagaacatttgtgaagttacggggtgaccagttgatcacaatgccagctcttttgtgttgagttcatactgtattcttaactaaccacaactaatcatatgatgagtcataggagacttttttgacttcag

SEQ ID NO: 6938 - DNA, 2907 bp, Zea Mays
ctttcctcgattgctcccaaacccagaaactgaagactgttgcagccgcgactcctgaatcccgacagctccagcgcctccgctggtccccactgcttcggccatggcggtgcgagccacggtctcccgcttcccggccacgccggaggcgctggagtcgtgcgccgtccagtggggcgtcgccgtgacgcccttcgccgccgcggacgagcacggccaacccccgaccaccggcgccggcggggaccgcgtcccacgctgcgagcactgctgggcgtacttgagcagccactgcgatctggagcgctggggctggacctgcgcgctctgtggcacgctcaacggattcgacgacgaggccgagcgacggttccagcgtcccgacgtgtgccccgagctcaagtcctctttcgtagacctcgaaatcctagtggatgaggcagagggcggaggagacggtgtgcaggcgctgcctgtctatgtggccgcagtggatctcgcatgttctgaagagttcctggaactcgtcaagagtgcgcttcttgcggccctagaagctcttgttccgggctccctatttgggcttatgacattcagccacaagattgggttgtatgatgtccaaggcccgattccactcgtgaagaatgtttttattcctccggacttagaagaagatggtctgcctgttgcccttgaagatgccatgcccctactttgttttttggctccattaatgggcaggttgacacatgcaaggatcaaattgctgctgtcctggagacactgcgacctacatcttcatgggagagaggggttgcttctgggcaggaagaggatactgttttgcttggcagacgtggttttgggacagccatgtctgctttaattgagtacctaagttcagaatatggttctacttttgctttagctcgggtatttgcttttctgtctggtgctcctgattatggagctggtgtgctagataccaggagatatggggagcaatatgctagtaaaggggtagacgctgatcttgcgttgctccctgaacagatacctttctacagagacctagcagctgttgctgttcagtcaggagtatgcatagacatatttgctgtaactgatgaatacactgatttggcttcactgaagtttttaagtatcgaaagtggtggatctttatttctttatgcaagtacagatgattcaacagttccccaagacatataccgattgctaagtcgaccctatgcatttggttgtgttctaaggctgagaacatcttcagattttgagccgggcaattcttatgggcatttcttccctgaccctcaatatgaaaatgtgcaacacatcatctgctgtgattcatttgccacttatgcatatgactttgagtttgcccataacgacggtttctccaggcacacagatcctgctgttgtacagattgcttttcagtacagcgtgattgaacctgtcaaggaaacatcaggcaatggatcacaaccatctgcaagttacaagttctgtctgaagagacggttgagaataagaacattgcagtaccgtccaactaataatatcagcgaaatttatgacagtgtagatccagaggttgtcctgcatatccttgttcataaggttattttagaatccttggataaaggggttagagaaggcaggcatcaagtgcatgcttggctatccctccttgcagcccggtataatcaggccctgagttctgatgtgcgaccgctgtcaagcatagacattgacttctcacagtgcccacagcttcaaacgatacctcagcttgtttttgcattgttgagaagtcctcttcttcgcttgcatgaggaaggcgtgcacccagattacaggatatatctacaatgccttttcagtgcactggagccatcatctgtagctaaagccatatatccggttttaatctcgtattcctcgcctgacaagcaagcattcccacggcacactctgagccatgctgctctaatcatgagcgagagcccaatatttcttctcgacacatttaccaaccttattgtttactattcctcaactgctgatccttcagttccttttcctccaccccatgactgccttttgagaaaaacaataaatggactgaagcaggacagatgtataacccccaagcttacattcatccatggagggaaagatgattcaacattgtttgagagctatctcattgaagagcaagatgttgatggatcgggcttaacaactggttcaggttttgtagccttccgtgagagcgtgaggaacgttgcaggagagatcatacaggaagaaattggaagttagttccagctcgattacctttttggttctgctgcagagggtatcgactaggatgttttagccttaattaatgccgtagcagttaactgaaacgtagatagccaaaatggagagacaattcaatgaataataaaaggaggccacttgatgtatagttgcttctgtcaacaactgctttaggcttgactaggcagagcagcctttctggtacagcggcactgtctgtctctatgctaaaacagacgagttttactacacaataatacaccgtcggaacctggcagactgaaatttgagagaattcaatcccttaatgctcggtttggatattggagggcaaggaattgaattgagttcaatactaaatcaaccatggtattgaaatgagatgtagtttcaattgtatcgtttgaatgttactgaattagagtttggaatcgtgcgatctaattccacgtaataccgaggggtgatgctctgtattgaaaagttgggattctagttatagttcaattatagggaattgagtctctgattctaaatctcaattccgtg

SEQ ID NO: 6939 - DNA, 1551 bp, Zea Mays
cactgggctaagttgttttgaaattatgggccctaaggccaaaattgggctggtttcttgtacacttccacgttcgaggcgcgcggcgagccgggttctcaccaattcgtcttcttccacaaactccaaaaccctagcgccgccgccgccatgtcctcgtctccgtccccggcgaaccgccgtccccggggcccgcttgcgctggggctggagtcctcggcgaacaagatcggcatcggcgtggtctccctctcgggtgacatcctctccaacccgcgccacacctacgtgacaccgccgggtcatggattccttccccgggagaccgcgcagcaccacctcgcgcacctcctccctctcctccgcgccgcgctcgctgagtccggtgtggcccccgctgacctcgcatgcgtctgctacactaaaggccccggcatgggcggccctctccaggtcgccgccgcagccgcccgcgcgctctccctgttatggaggaagcctctcgtggcggtcaaccactgcgttgcgcacatcgagatgggccgcgcggtcactggggccgtggaccccgttgtactctacgtctccggcggaaacacgcaggttatcgcctacagcgaggggaggtacaggatcttcggggaaacgattgatattgccgtcgggaactgccttgaccgattcgccagggtcctagagctctccaatgaccctagccccgggtataacatcgagcagggtatggatgtgtcattcagtggcatattgagctttattgaagctgcggcgattgaaaagcttaaaaataatgagtgcacacctgcggacctatgctactcattgcaggaaactatctttgccatgcttgtcgaaattactgaacgtgccatggcacactgtgattcaaaggacgttcttattgttggtggcgtcggttgcaacgaacgtttacaggagatgatgaagattatgtgctcagaaagagggggtaggctgtttgcaactgatgaccgctattgtatagacaatggggcaatgattgcatatactggtttactggcgtatgcacatggcatgaccactccccttgaggagtcgacatttacacaaagattccgaactgatgaagttcatgcaatttggagagagaaggagatgccggtgctaaataatacccattcagatgcaattgctgaagtttctaaagatgaagcctccatggcaacaccaatcgttatagattactgagatcatggacactggatacacttcttgatgcaaatctgattcggcaaggatagatcttgttcgtaggtgtgttgtacgttgtctacggatcgggtgtcattcatgtaagacagacatgcgactggtaacgggccgttaatattttgtgacattctggtagaagatgcagatctgatttggaaagaaagtgggtcttgctaagtgtgttcggctgttgggtacgacttccgtatcatatatgttgtgacagtttgacagaagatttgaagagtgaagtttctgatttgaaaaaagtatttcggg

SEQ ID NO: 6940 - DNA, 1866 bp, Zea Mays
taagttgttttgaaattatgggccctaaggccaaaattgggctggtttcttgtacacttccacgttcgaggcgcgcggcgagccgggttctcaccaattcgtcttcttccacaaactccaaaaccctagcgccgccgccgccatgtcctcgtctccgtccccggcgaaccgccgtccccggggcccgcttgcgctggggctggagtcctcggcgaacaagatcggcatcggcgtggtctccctctcgggtgacatcctctccaacccgcgccacacctacgtgacaccgccgggtcatggattccttccccgggagaccgcgcagcaccacctcgcgcacctcctccctctcctccgcgccgcgctcgctgagtccggtgtggcccccgctgacctcgcatgcgtctgctacactaaaggccccggcatgggcggccctctccaggtcgccgccgcagccgcccgcgcgctctccctgttatggaggaagcctctcgtggcggtcaaccactgcgttgcgcacatcgagatgggccgcgcggtcactggggccgtggaccccgttgtactctacgtctccggcggaaacacgcaggttatcgcctacagcgaggggaggtacaggatcttcggggaaacgattgatattgccgtcgggaactgccttgaccgattcgccagggtcctagagctctccaatgaccctagccccgggtataacatcgagcagcttgcaaagaagggagaaaaattcattgatgtcccttatgttgtgaagggtatggatgtgtcattcagtggcatattgagctttattgaagctgcggcgattgaaaagcttaaaaataatgagtgcacacctgcggacctatgctactcattgcaggaaactatctttgccatgcttgtcgaaattactgaacgtgccatggcacactgtgattcaaaggacgttcttattgttggtggcgtcggttgcaacgaacgtttacaggagatgatgaagattatgtgctcagaaagagggggtaggctgtttgcaactgatgaccgctattgtatagacaatggggcaatgattgcatatactggtttactggcgtatgcacatggcatgaccactccccttgaggagtcgacatttacacaaagattccgaactgatgaagttcatgcaatttggagagagaaggagatgccggtgctaaataatacccattcagatgcaattgctgaagtttctaaagatgaagcctccatggcaacaccaatcgttatagattactgagagtacatgagcttcattatcaaacaaagatgaccgagaaggaaagactccacaatgacttcagatgttacaacttccagtattggaagggttcattattttttgtcctcgcttaccaaagaaaatggccaaatacttagacgaaggaaggacatcaaggacaccaaagatacctattgagattccaataagaaaccaaaacagggcaacacagttaaattgatgaagccttctcccatgtcctcctatgaagaggaaaagatataagggaagaaggtttcgtaagacatcaaagatatatgaagcgaagtatatgaagaaacaagttatgaggcacattcattaccccttactacttttctcacagtcacaaactatcatagtgatacattcaagttataagaacaatattcgaagatggatgtacccttgcaactttggatgttgaacgttctggatgtgtgtaaatgcgtgagcaatacaaaggtagtcctctctcccctcaacatgggcactgtttctctatttatagaaataaggtggcatacaacttcatatgaaattatgtttgtgccctt

SEQ ID NO: 6941 - DNA, 2049 bp, Zea Mays
taagttgttttgaaattatgggccctaaggccaaaattgggctggtttcttgtacacttccacgttcgaggcgcgcggcgagccgggttctcaccaattcgtcttcttccacaaactccaaaaccctagcgccgccgccgccatgtcctcgtctccgtccccggcgaaccgccgtccccggggcccgcttgcgctggggctggagtcctcggcgaacaagatcggcatcggcgtggtctccctctcgggtgacatcctctccaacccgcgccacacctacgtgacaccgccgggtcatggattccttccccgggagaccgcgcagcaccacctcgcgcacctcctccctctcctccgcgccgcgctcgctgagtccggtgtggcccccgctgacctcgcatgcgtctgctacactaaaggccccggcatgggcggccctctccaggtcgccgccgcagccgcccgcgcgctctccctgttatggaggaagcctctcgtggcggtcaaccactgcgttgcgcacatcgagatgggccgcgcggtcactggggccgtggaccccgttgtactctacgtctccggcggaaacacgcaggttatcgcctacagcgaggggaggtacaggatcttcggggaaacgattgatattgccgtcgggaactgccttgaccgattcgccagggtcctagagctctccaatgaccctagccccgggtataacatcgagcagcttgcaaagaagggagaaaaattcattgatgtcccttatgttgtgaagggtatggatgtgtcattcagtggcatattgagctttattgaagctgcggcgattgaaaagcttaaaaataatgagtgcacacctgcggacctatgctactcattgcaggaaactatctttgccatgcttgtcgaaattactgaacgtgccatggcacactgtgattcaaaggacgttcttattgttggtggcgtcggttgcaacgaacgtttacaggagatgatgaagattatgtgctcagaaagagggggtaggctgtttgcaactgatgaccgctattgtatagacaatggggcaatgattgcatatactggtttactggcgtatgcacatggcatgaccactccccttgaggagtcgacatttacacaaagattccgaactgatgaagttcatgcaatttggagagagaaggagatgccggtgctaaataatacccattcagatgcaattgctgaagtttctaaagatgaagcctccatggcaacaccaatcgttatagattactgagtaaagagtaaatgcttgtacggtaaagcctagaaccactcctaaggctatctccaactgatctcctatagtcctatctcatctcctatctcaaacttcactctacaaacagatagttccacatctaaatgtgatatctttgctctgtttgggagaagcctcctccaggcacatggcaggggctcagaatagttgtgctgttgtatgaactgcagcaggtaaaatgaacatgtcgtatgcctgacatacctgaagatagctgacatggatcaaacctcaccaatcgctgacatggatcaaacctcacctatcaccttaacattctagttagttacttcatcgagtgaacttattattgttgtaaactaatagacgcatttctgcaaagctagcttaactcttaagttactcttgtgatggtaatctgttaaggttctaaagcagcctcttttggatcgacattggattcttgggaacgtggggagttatttcgattcgcatccaatgcacatcagctaaggtggtggttttctgtaaaatatatacattggattattatgtgggtgttttgttttgcgagaaaaaactactacgcttgtgttggatgcgaattgaatgtctctaaatgtctgggtgcacaggttgatgcacaagatatgttgtcttataaaccccaccccaactaacgtgtatagattgcattatccagaagcgaatgtccttggaatgtggacaatggttttgttatggtcttattacct

SEQ ID NO: 6942 - DNA, 1350 bp, Zea Mays
ggggcaccggcgcaccgcacatcggtgcctaggtcactcgggcccactccacagaactacggaagaagaagaagcagtcggcagcaaactgaatggcgcttcgcgctgtggagctccggagattccttctccggcgcatcggcggcggcgaggcggccctgcctcctctcgcgtggcgcggccggccagcgagcacatccgccccggcggacgacgagctcgcggggaagagcgcctacgaggtcctcggggttggggagaccagttccagcgccgagatcaaggcttccttccatcgcctagccaaagagacccacccagacgtcgccgcggctgctggttcccgacggttccttcagatcctcgccgcctacgagatcctatcagattcacagagaagggctcactatgatagctacctgcgatcgcagaggcgggttgtggggaaacatcccaggccatctcagttcgtgtacccaagtggttcaggctcaggcattgtggtacctcgagagagcaatgttgttgaatggctgaaatggtacaggcttaccattgacgacatagttaccaagaagagggttgccactggctctggttattttgaaaggctcgaaagcgagctgtacacggctatccatgctgcatactatggccctgatgtcgactccatggatgtccttcctgattgctttgaagccgaggagagatctgcatatgaaacctctgagctattacaccttgtttcaggccgtgatctttttggtattgttactgtaactgatagtgtcaaagagctgtcagatgtttgtcgtgaaaaactggtaccctctggttgtagatcttcggaatttactcatgttgtttcaagaaatgcgaataagaattcaatatctatgaatcctgttgatatgaacaagcaagaaatgcgatatgaaaatgatgttccttcatcagattccttcaaggacattgagttgcaaatatgtgggaaattagttgctactgcgactaggagccccaactgcgattgcattgacaaatcggatttggaagaagatcacattcatgtgtatcttgttccaaatgcaaatatatctgatttaacacatgggaaacttctcctcggcacaattactgggttagccaccactggtgaggaaggatcttgctgtgtctacgatggtcacaacataaagacacacattattatgaagcacaggacattgatggttaaacacatgcactggtatcaggttggagatacagtttcaccctgtgagtgtcgatgtagtagggctcgattgccacctagcagaaatatggatgccctgaagaccatggttcgtc

SEQ ID NO: 6943 - DNA, 2631 bp, Zea Mays
ggggcaccggcgcaccgcacatcggtgcctaggtcactcgggcccactccacagaactacggaagaagaagaagcagtcggcagcaaactgaatggcgcttcgcgctgtggagctccggagattccttctccggcgcatcggcggcggcgaggcggccctgcctcctctcgcgtggcgcggccggccagcgagcacatccgccccggcggacgacgagctcgcggggaagagcgcctacgaggtcctcggggttggggagaccagttccagcgccgagatcaaggcttccttccatcgcctagccaaagagacccacccagacgtcgccgcggctgctggttcccgacggttccttcagatcctcgccgcctacgagatcctatcagattcacagagaagggctcactatgatagctacctgcgatcgcagaggcgggttgtggggaaacatcccaggccatctcagttcgtgtacccaagtggttcaggctcaggcattgtggtacctcgagagagcaatgttgttgaatggctgaaatggtacaggcttaccattgacgacatagttaccaagaagagggttgccactggctctggttattttgaaaggctcgaaagcgagctgtacacggctatccatgctgcatactatggccctgatgtcgactccatggatgtccttcctgattgctttgaagccgaggagagatctgcatatgaaacctctgagctattacaccttgtttcaggccgtgatctttttggtattgttactgtaactgatagtgtcaaagagctgtcagatgtttgtcgtgaaaaactggtaccctctggttgtagatcttcggaatttactcatgttgtttcaagaaatgcgaataagaattcaatatctatgaatcctgttgatatgaacaagcaagaaatgcgatatgaaaatgatgttccttcatcagattccttcaaggacattgagttgcaaatatgtgggaaattagttgctactgcgactaggagccccaactgcgattgcattgacaaatcggatttggaagaagatcacattcatgtgtatcttgttccaaatgcaaatatatctgatttaacacatgggaaacttctcctcggcacaattactgggttagccaccactggtgaggaaggatcttgctgtgtctacgatggtcacaacataaagacacacattattatgaagcacaggacattgatggttaaacacatgcactggtatcaggttggagatacagtttcaccctgtgagtgtcgatgtagtagggctcgattgccacctagcaggtatacaatttttactatgctgcttgtgcggccatgttgcactcatgctggatatacttttctgtattaatcggaccatgcgaattagtccttccaaacatgatttaaatgttgatgaggcgatggtatgagcacatgccttaaatttgaaacctttaggttaaataatttagaggatctaatgcagctcaacaatacttttatgtgcaacagaaatatggatgccctgaagaccatggttcgtccagctacatataagattggtagggggtatggaagaaaataggcctgtctaatctaccgttgtatcaagtgcaagcaaaatgacttatgatctgagacttcctggttagaggaccagagaggatgtccttttcatttgtaaaaaaactgtatagttgagtaatagatcaatcagaagtagtattccaaaccatgaaaaacaaccccctagttttccctagtcttgaagaaacccaacaagtaatgcatgccaacttgcatccgatacaaattcttttcaggatgaaaacatgccgaataccatcactgaaggcaacaacaaccagtcctcttatataatccttttgcaggtattggctttttgagcctcgttgttacatgcatgacactggtggatggtatatcgaaacttatgggagagacaagaaagggaggacgattccgtctcaaagacagtgggatggttccaatgaacattctgaaaagagattgcatcctgcaatgtatcttgctgctctggcttacagatctttggatcttgaagatgctggaagaagacgatggaatgtgactagcttgctgcaatggtccttatctcatcttcgtcagctgttcaaaaaaagttgctaatggagagaaaggggattgacacgagaacaccatgaaaatagttgtttggggtctcgctttaacaattagactgaacctgtggtgtcacaccctttgctggttctgttcagctgctttttagtatgctactgtatagttagaaactaatgtgctttcttgatatgatagctgataaggacatctttctgaggctgttgactaccctgcccgtttgatatacaacatgatagtaaaggtttgcagagcgtgcgataaatgatctgacactgatggtaagatagccagaatcctacatgacaatgtcttctacatcgttttatgcatatttcttagctacaagtgacatgtaacttaaaaggatggtgccatggtggtatccaccattttgcacatctgctgtatttttataagaatttaaatccaaagccgactgattgaga

SEQ ID NO: 6944 - DNA, 7002 bp, Zea Mays
cgcggctatgcccagcaattcaaaagaaaccgaacacccttccggaaattccctcgggcaatggcgtcgggctcgtctcgcccccaaatcgaccagttcttcccggccaagaagcggaggccctcgtcgcggaagggcgagtcgccgcgacccgggacgcagcatgagagccccggcggcgccaaggggtccctggaagggtacctcgtccgttcgccttgcaaccgtgccgtggcagcggcatcggtggtccccgtgggctcgcccaggggcggggacccgggcgccaggcgtagcctctcggccgcaatggatgtcgacgtcggttcctcggcttcggtggctgcggcggcaggtgacggggcagactttgatctcaggaggagcacggcggatttcttgtcccattcctgcagtgctatcctgcctttgaggggtgactgtgattacagcgagcagtgccagatgaagcagaagcggagtgcgtcccagtcattcttggttccttgtgacaacgactatgtcaagaagcagcgagttgcccattgtggtggctttgaagctctaaaggaatctgttgagggggaacatataaaagttgggttttctctagcacctgtggaaaccctaaagtctgtatcgaggaattcccttacttcacctggtgaggagttctggaatgcagcaattgaactcgctgatgggatatctgcccaggctgataaggtccgtggaaggccagaatttgatgcagcagaagacaagtcatcttgtgcagtagcagcattctttaagactcttcctagatcaggaagggatgagcttgactgtcaaaacacagtaggcagcaatgatacacatcatatagagaaattgtcaaataaagttgaatcactggcagtaaactgtcagcatataattagctcacctttgcctgtgaagcagctagatttctttcatgaggatgatattaaagtttcaggttcaaaatttgaaacaaaaggcagctatgaaacttgtaatgcacaagcagaccgtgttccactgaaaggcagtggccgcctagaaaaggaaaatctcatggaccctgtggatgtgttgaagagaagtgctattaatttgcacactgattctgcagccatgagatgtcagggtgttttcaagtcaacaactgaagggaaggttcatccaactcaagaggctgaaagagattctaatcttattaggagagatctcaatcagccaacccacaatgaaaataaatcacttgctgcatattcaaataatcgcaagacttggatagattccaagagtaaagttgcttctcaggaagtggaagctagcacacctactagctccattcctctaaaggatcactcaaagatatcaagttggcttcctcctgacctttgtgctatatacatgaaaaaaggcatttcagagctgtacccttggcaggttgaatgtttacttgtagaaggtgtcttgggcaaaaggaatcttgtgtattgtgcatccacgagtgctggtaaaagttttgttgctgaagttctgatgttgaggcagatactgtcaactgggaatatggcaattcttgtccttccctatgtgtcaatatgcgctgaaaaggctgaacatcttgaacaacttcttgagccactgggtaggcatgtccgtagcttctacggaaaccaggggggaggctcacttcctaaagatacagcagttgctgtatgtaccatagagaaggcaaactctttggtaaacaagttgttggaggatggccgcctctctgaacttggtgtaattgtcatagatgaacttcatatggttggtgaccaacatagaggatatcttttagagctgatgttgacaaagcttcgatatgctgctggtgaagggactttacagtcatgtagcggagaagtttcaagttctagcagtgggaagattgcaagtcatgggttgcagataattggtatgagtgctactatgcccaacatcgctgcggtggctgattggcttcaagctgctctttatcaaactgactttcgaccagttccactggaggaattcataaaagttggtaatcaaatatttgataaagacatgaacgttgttcgtgtccttcccaaagtagctgaccatggtggcaaggatccagatcatattgttgaattgtgtaatgaggttgttcttcagggccattctgtgcttttgttttgctccagtcgtaaaggctgcgaatcaactgcaaggcatgttgccaagttcttgaaactaccctctgttggaacaactgatgttagttcggagttttcagatgctgcagctgctattgaggccttgaggaggtgccctgctggattggatccaatattgggagaaacccttccttttggtgttgcatatcatcatgctggtcttacggtcgaggagagggagattgtggaatcatgctaccgtaaaggccttgtccgtgttctgactgccacttcaactttagctgctggtgttaacttgcctgctagacgggttatattcaggcagcccaagataggtcgtgattttattgatgggactcgctatagacagatggctggtcgtgctggtcgaactggaatagacacaaaaggagaaagtatacttgtatgcaggcctgaagaggtcaagagagttacaggtattattagaagcaattgccctcccttggagtcctgcctctcagaagataaaaatggaatgactcatgcaattatggaggttgttgctggtgggattgttcaaactgcaaatgatattcatcgttatgtgcggtgtacgctgcttaattccacaagaccttttgatgatgtcgtgaagtcagctcaagactcccttcgttggttatgccataaaagctttcttgagtggaaccatgagaccaagatatactccgctactccccttggtagagctgcttttggaagttcactcaaccctgaggaatcattggttgttcttgatgatctttcgagggcaagagaaggctttgttctggcatctgatttacatttagtttacttggtcacacccataaatgtagaccttgaacctgattgggaattatattacgagaaattcatgcaactttcttctcttgagcagtcagtaggcaatcgggttggagtaattgaacccttcttgatgcacatggctcatggggcgtcgataccttttcgtgcaaggcctgagagaaacaccgggttaagtaacaagtctgcacaagctgctggaaatactcttgttagtgagcacacaatcagagtgtctaagcgcttttatgtggctttaatgttatcgaggcttgctcaggagattcctattgctgatgtttgtgagacatttaaggtcgccagaggtatgattcaggcactgcaggaaaatgctggcaggtttgcttcaatggtttctgcattttgtcaaaggcttggttggaatgatttagaaggccttgtttcgaaattccaaaatcgtgtctcttttggagttagggcagagattgcagaactgacatcaattccatttgtcaagggttcacgtgcaagggctttgtacaagtctggtctgcgtactcctgttgccattgctgaagcatctattcctgaaattgcaaaagctctttttgaatcttctgcttggtctgggcaaggtgattctggtttacgacgaatgcaatttggtgtagcaaaaaaaataaaaaatggagcccgcaaaattgtcctggaggaggcagaagccgccagagtagcagcattctcagctttcaagtcacttggtgtggaagttccccagttcactgcacctccactcgcagctattgaggaatatccaactcacgataccatagaccaagctaagttaaataagctagcttctggtacccattctagagatgataaaaatatgaatacttgctctgattatgctactccaagggcttctacatacagtctaagaaaggacacaagtcctgctccttccattcaaatgaaagagaatgcaggactatctaaaaatgtgcaaatcactagacagggagcatcatcatctttgtcaacagaaattgctgatggatctagtagagatgtggctgaaaaaggtcctgtccatgcatataacttcccagggggatttgattgttttcttgatcaatggtccacagctagtaattttttctttgatgttcattttatcaagagatcgatgaaaccatctttgaacctttttgaagtttttgggttggctgtctgttgggaaaaatctcccatatactactgcaacttcccaaaagatctagtcactactggcaacaataacatcaaggaaatgtggggtaattttcagagaagatgggaaaaaatagcggacattatgaaacaaaagagtgtccaaaaaatgacatggaatttaaagatccagatccaggcacttaaatcaccttatatttcttgccaacggcttgaaaggtttcatcttgaccataaaatgctggacaaagttgaagtgcttaacaactcatatatgttgttatcaccagtctctgtctacaatggattggatatatgtctgctggcgtgggttctatggccagatgaggaaagcagagcggttccaaatcttgagaagtttgtcaagaggcgacttcatagtcaagaagctgctgctgcaaatcgcgatggaagatggagaaatcagatgcacaaagcagcacacaatggctgctgtagacgtgctgcacagacacgggctttgtatactgttctgaagaaattacttactcaaaatctttctgttttggttgaaacaatcgaggccccattggttaatgttcttgctgatatggagctttggggaattggcgctgacatggatgcttgtctccgtgcgaggcatattataacaaaaaagctgaaggaactagagaaagaagcttacagattggcaggcaagaatttctctctaaatgctactgctgatatcgcagacattctatatacacacctaaaattgccagttccaaaaggctgtgagaaagggaagctgcatcctagcactgacaagcagtctttggaccacctaaggtacatcatacatggaaattggcttcagacgtcaactgccactggccgtttgtccatggaggagccaaatctgcagtgtgttgagcatgtggtggaattcgatacagggaaaagcgataaagattactcaagcatttcagttgatgatcatcataaaatcaatgcccgtgattttttcatacctaccaaggagaactggttattcataactgctgattactcacagattgagttgcgtttaatggctcacttttctaaagatcatatgttggttgaacttctaaagaaacctgatggtgatgtttttaccatgattgcttcaagatgggctgagaaagaagaggccttgatttcttccaaagagagagaaaacactaaaagattcatatatggcatcctttatggaatgggtgcaaactcccttgcagaacaacttcagtgcagcactgaggaagctgcacagaaaattcaaagctttaggagattttttcctggtgtttcctcatggttacatgaagttgtgttatcctgtcgccaaaaagggctagtttcgaaatgcaacaagggaccacaatatcgatgatacagctaggcatacatcaaagaagtttctaattcgttatcactcctcagatttgttgagactttattaggccggcgacgtgttcttacaaaaataacggctggcaatagcaaagagaaagctaaagcacagaggcaagcagtaaattctatttgccagggttctgctgctgatattattaaggtggctatgattagagttcattcaataattactaacagaactagtgcagctgattccacagatgaagttacaaggaaattttcagaacttggtggccagtgtcaccttattttgcaggtgcatgatgagttggtattagaagttgatccgtgcatggtagcacaggctggaaggttgttacagatatgtatggaagaagcagcttcactattggtacctttgcgcacaaagataaaggtgggaaaaacttggggttcactagaaccattccatcctgagccttgtttgatgcaaatggtgaatgtcagttggatgccaatgtttcatgacatgcaaggtcctggaagaaggctgaacaatttccaatatgcccccacaggggaccttggtgattctgtctggtgttcttcggtagaaccttcattgctatgtctacagtcttctgtcattgctgaccgtatgtgaaatcaacgcaacagcgaccagctccattactgaggatttgctatggactggtgattatcattatgattccatgtggcatgcaagaagcatatatatatcaccaatagatgctgttaaagggtttaaggtgtatttgaaaggtcttcctagttatactgcgaatcttttagataaacccttaagaaattggagggcctagtatatggtgatttttcttttgctaggcccagcgctaaaaaaccgattatggggtttattcaaagatgaaatttcatcctgtaactacaggttcaaggtgtatttggtttgatggatatcactatggacaagcgatggttggtttttgtacaagttggatgttgataaaaatgttggtatccatgccacacaaaaaaagcctaaccagcacccatattttgtaatccttgtcaagtatgttatatggtttacttgatagctctagcgaggctatccagtacctcaccttcaccctcatatttgtaatccttgtccacataattattagtatgttatatggttatttagtaattacgatggaaatattatttttggtaagcgcaaatatgcatgtttcgtatatcatttagggaaatacatttgttgtaattagtgttatgataacaaaat

SEQ ID NO: 6945 - DNA, 7187 bp, Zea Mays
gaattttgaaaaaatgggaaaaaagagcccatacaggcgttagcgttacaggcccgtaccgccctcctctgtagtccttccctccgccactccgcggctatgcccagcaattcaaaagaaaccgaacacccttccggaaattccctcgggcaatggcgtcgggctcgtctcgcccccaaatcgaccagttcttcccggccaagaagcggaggccctcgtcgcggaagggcgagtcgccgcgacccgggacgcagcatgagagccccggcggcgccaaggggtccctggaagggtacctcgtccgttcgccttgcaaccgtgccgtggcagcggcatcggtggtccccgtgggctcgcccaggggcggggacccgggcgccaggcgtagcctctcggccgcaatggatgtcgacgtcggttcctcggcttcggtggctgcggcggcaggtgacggggcagactttgatctcaggaggagcacggcggatttcttgtcccattcctgcagtgctatcctgcctttgaggggtgactgtgattacagcgagcagtgccagatgaagcagaagcggagtgcgtcccagtcattcttggttccttgtgacaacgactatgtcaagaagcagcgagttgcccattgtggtggctttgaagctctaaaggagttagatgataatgtagcttccatgaagcaatgcatcaatcaccatggtggctcagaggctgtggaggaatctgttgagggggaacatataaaagttgggttttctctagcacctgtggaaaccctaaagtctgtatcgaggaattcccttacttcacctggtgaggagttctggaatgcagcaattgaactcgctgatgggatatctgcccaggctgataaggtccgtggaaggccagaatttgatgcagcagaagacaagtcatcttgtgcagtagcagcattctttaagactcttcctagatcaggaagggatgagcttgactgtcaaaacacagtaggcagcaatgatacacatcatatagagaaattgtcaaataaagttgaatcactggcagtaaactgtcagcatataattagctcacctttgcctgtgaagcagctagatttctttcatgaggatgatattaaagtttcaggttcaaaatttgaaacaaaaggcagctatgaaacttgtaatgcacaagcagaccgtgttccactgaaaggcagtggccgcctagaaaaggaaaatctcatggaccctgtggatgtgttgaagagaagtgctattaatttgcacactgattctgcagccatgagatgtcagggtgttttcaagtcaacaactgaagggaaggttcatccaactcaagaggctgaaagagattctaatcttattaggagagatctcaatcagccaacccacaatgaaaataaatcacttgctgcatattcaaataatcgcaagacttggatagattccaagagtaaagttgcttctcaggaagtggaagctagcacacctactagctccattcctctaaaggatcactcaaagatatcaagttggcttcctcctgacctttgtgctatatacatgaaaaaaggcatttcagagctgtacccttggcaggttgaatgtttacttgtagaaggtgtcttgggcaaaaggaatcttgtgtattgtgcatccacgagtgctggtaaaagttttgttgctgaagttctgatgttgaggcagatactgtcaactgggaatatggcaattcttgtccttccctatgtgtcaatatgcgctgaaaaggctgaacatcttgaacaacttcttgagccactgggtaggcatgtccgtagcttctacggaaaccaggggggaggctcacttcctaaagatacagcagttgctgtatgtaccatagagaaggcaaactctttggtaaacaagttgttggaggatggccgcctctctgaacttggtgtaattgtcatagatgaacttcatatggttggtgaccaacatagaggatatcttttagagctgatgttgacaaagcttcgatatgctgctggtgaagggactttacagtcatgtagcggagaagtttcaagttctagcagtgggaagattgcaagtcatgggttgcagataattggtatgagtgctactatgcccaacatcgctgcggtggctgattggcttcaagctgctctttatcaaactgactttcgaccagttccactggaggaattcataaaagttggtaatcaaatatttgataaagacatgaacgttgttcgtgtccttcccaaagtagctgaccatggtggcaaggatccagatcatattgttgaattgtgtaatgaggttgttcttcagggccattctgtgcttttgttttgctccagtcgtaaaggctgcgaatcaactgcaaggcatgttgccaagttcttgaaactaccctctgttggaacaactgatgttagttcggagttttcagatgctgcagctgctattgaggccttgaggaggtgccctgctggattggatccaatattgggagaaacccttccttttggtgttgcatatcatcatgctggtcttacggtcgaggagagggagattgtggaatcatgctaccgtaaaggccttgtccgtgttctgactgccacttcaactttagctgctggtgttaacttgcctgctagacgggttatattcaggcagcccaagataggtcgtgattttattgatgggactcgctatagacagatggctggtcgtgctggtcgaactggaatagacacaaaaggagaaagtatacttgtatgcaggcctgaagaggtcaagagagttacaggtattattagaagcaattgccctcccttggagtcctgcctctcagaagataaaaatggaatgactcatgcaattatggaggttgttgctggtgggattgttcaaactgcaaatgatattcatcgttatgtgcggtgtacgctgcttaattccacaagaccttttgatgatgtcgtgaagtcagctcaagactcccttcgttggttatgccataaaagctttcttgagtggaaccatgagaccaagatatactccgctactccccttggtagagctgcttttggaagttcactcaaccctgaggaatcattggttgttcttgatgatctttcgagggcaagagaaggctttgttctggcatctgatttacatttagtttacttggtcacacccataaatgtagaccttgaacctgattgggaattatattacgagaaattcatgcaactttcttctcttgagcagtcagtaggcaatcgggttggagtaattgaacccttcttgatgcacatggctcatggggcgtcgataccttttcgtgcaaggcctgagagaaacaccgggttaagtaacaagtctgcacaagctgctggaaatactcttgttagtgagcacacaatcagagtgtctaagcgcttttatgtggctttaatgttatcgaggcttgctcaggagattcctattgctgatgtttgtgagacatttaaggtcgccagaggtatgattcaggcactgcaggaaaatgctggcaggtttgcttcaatggtttctgcattttgtcaaaggcttggttggaatgatttagaaggccttgtttcgaaattccaaaatcgtgtctcttttggagttagggcagagattgcagaactgacatcaattccatttgtcaagggttcacgtgcaagggctttgtacaagtctggtctgcgtactcctgttgccattgctgaagcatctattcctgaaattgcaaaagctctttttgaatcttctgcttggtctgggcaaggtgattctggtttacgacgaatgcaatttggtgtagcaaaaaaaataaaaaatggagcccgcaaaattgtcctggaggaggcagaagccgccagagtagcagcattctcagctttcaagtcacttggtgtggaagttccccagttcactgcacctccactcgcagctattgaggaatatccaactcacgataccatagaccaagctaagttaaataagctagcttctggtacccattctagagatgataaaaatatgaatacttgctctgattatgctactccaagggcttctacatacagtctaagaaaggacacaagtcctgctccttccattcaaatgaaagagaatgcaggactatctaaaaatgtgcaaatcactagacagggagcatcatcatctttgtcaacagaaattgctgatggatctagtagagatgtggctgaaaaaggtcctgtccatgcatataacttcccagggggatttgattgttttcttgatcaatggtccacagctagtaattttttctttgatgttcattttatcaagagatcgatgaaaccatctttgaacctttttgaagtttttgggttggctgtctgttgggaaaaatctcccatatactactgcaacttcccaaaagatctagtcactactggcaacaataacatcaaggaaatgtggggtaattttcagagaagatgggaaaaaatagcggacattatgaaacaaaagagtgtccaaaaaatgacatggaatttaaagatccagatccaggcacttaaatcaccttatatttcttgccaacggcttgaaaggtttcatcttgaccataaaatgctggacaaagttgaagtgcttaacaactcatatatgttgttatcaccagtctctgtctacaatggattggatatatgtctgctggcgtgggttctatggccagatgaggaaagcagagcggttccaaatcttgagaagtttgtcaagaggcgacttcatagtcaagaagctgctgctgcaaatcgcgatggaagatggagaaatcagatgcacaaagcagcacacaatggctgctgtagacgtgctgcacagacacgggctttgtatactgttctgaagaaattacttactcaaaatctttctgttttggttgaaacaatcgaggccccattggttaatgttcttgctgatatggagctttggggaattggcgctgacatggatgcttgtctccgtgcgaggcatattataacaaaaaagctgaaggaactagagaaagaagcttacagattggcaggcaagaatttctctctaaatgctactgctgatatcgcagacattctatatacacacctaaaattgccagttccaaaaggctgtgagaaagggaagctgcatcctagcactgacaagcagtctttggaccacctaagggatcaacaccccattatcccattaattaaggaacacagaacattagcaaaactgttaaatggcacgttgtggtccatttgttcacgtgctcaattgtgcactcaatcacaaaggtacatcatacatggaaattggcttcagacgtcaactgccactggccgtttgtccatggaggagccaaatctgcagtgtgttgagcatgtggtggaattcgatacagggaaaagcgataaagattactcaagcatttcagttgatgatcatcataaaatcaatgcccgtgattttttcatacctaccaaggagaactggttattcataactgctgattactcacagattgagttgcgtttaatggctcacttttctaaagatcatatgttggttgaacttctaaagaaacctgatggtgatgtttttaccatgattgcttcaagatgggctgagaaagaagaggccttgatttcttccaaagagagagaaaacactaaaagattcatatatggcatcctttatggaatgggtgcaaactcccttgcagaacaacttcagtgcagcactgaggaagctgcacagaaaattcaaagctttaggagattttttcctggtgtttcctcatggttacatgaagttgtgttatcctgtcgccaaaaaggatttgttgagactttattaggccggcgacgtgttcttacaaaaataacggctggcaatagcaaagagaaagctaaagcacagaggcaagcagtaaattctatttgccagggttctgctgctgatattattaaggtggctatgattagagttcattcaataattactaacagaactagtgcagctgattccacagatgaagttacaaggaaattttcagaacttggtggccagtgtcaccttattttgcaggtgcatgatgagttggtattagaagttgatccgtgcatggtagcacaggctggaaggttgttacagatatgtatggaagaagcagcttcactattggtacctttgcgcacaaagataaaggtgggaaaaacttggggttcactagaaccattccatcctgagccttgtttgatgcaaatggtgaatgtcagttggatgccaatgtttcatgacatgcaaggtcctggaagaaggctgaacaatttccaatatgcccccacaggggaccttggtgattctgtctggtgttcttcggtagaaccttcattgctatgtctacagtcttctgtcattgctgaccgtatgtgaaatcaacgcaacagcgaccagctccattactgaggatttgctatggactggtgattatcattatgattccatgtggcatgcaagaagcatatatatatcaccaatagatgctgttaaagggtttaaggtgtatttgaaaggtcttcctagttatactgcgaatcttttagataaacccttaagaaattggagggcctagtatatggtgatttttcttttgctaggcccagcgctaaaaaaccgattatggggtttattcaaagatgaaatttcatcctgtaactacaggttcaaggtgtatttggtttgatggatatcactatggacaagcgatggttggtttttgtacaagttggatgttgataaaaatgttggtatccatgccacacaaaaaaagcctaaccagcacccatattttgtaatccttgtcaagtatgttatatggtttacttgatagctctagcgaggctatccagtacctcaccttcaccctcatatttgtaatccttgtccacataattattagtatgttatatggttatttagtaattacgatggaaatattatttttggtaagcgcaaatatgcatgtttcgtatatcatttagggaaatacatttgttgtaattagtgttatgataacaaaat

SEQ ID NO: 6946 - DNA, 3221 bp, Zea Mays
agacctcagagtgcgcctctctttacaaattacaaccaaaggaaagcacgcgcaggcgccgcgagtacaggttggcattattgaatccgcccacgaacaatgggtgagataggcacggaccagctgggtctggccgaggccgaggccgccgccgccgctgtgaaggaggagggcatcctcgacgacgacgaggagacgtcgccgatagagcaggtgcggctgacggtgccgacgacggacgactcgtcgctgccggtgtggacgttccggatgtggagcatcgggctgctgtcgtgcgcgctcatgagcttcctcaaccagttcttctcgtaccggacggagccgctggtggtgacgcagatcacggtgcaggtggcgtcgctgcccgtgggccacttcatggcccgggcgctgccgcgcaccaggttccgggcgcccgcgctgctgggcggcggggcgtggagcctcaacccggggcccttcaacatcaaggagcacgtgctcatctgcatcttcgccaacgccggcttcgccttcggtgggggcagcgcctacgccgtcggcatcatcaacatcatccgcgccttctacggccgccacatctccttcctcaccgcctggctcctcgtcgtcaccacgcagggctgatgcgcaagtacgtggtgcagccggcgcacatgtggtggccgggcacgctcgtgcaggtctccctcttccaggcattgcacgagaagaaggacgaatccgcgaaagcctcacgccagatctcccgctccaagttcttcgtggtggtgctcgcgtgcagcttcgcatggtacgccgtgccaggctacctgttcccgacgctgacgtccatctcatggctgtgctgggtcttctccaagtccgtgacggcgcagcagctggggtcaggcatgaagggccttggtcttttcgccttcacgctcgactggtccaccgtctcctccttcctcttcagccccctcatctcgcccttcttcgccaccgccaacatcttcgtcggctacgtcgtctttgtctacgtgatcatgcctatggcgtactgggggttcgacctgtacagcgccaagacattccccatcttctcctcgcacctgttcatgtcgaatggcaccgaatacgacgtcaaatcgattgtgaacaaccaattcgagcttgaccggcaagcttatgacaggaatggcaaagtgaacctcagcgtgttctttgcactcacttatgggttcagcttcgccaccattgcgtcgaccatcactcatgtcgggctcttctatgggaaggaaatctaccaccgtttcaaatcgtcgcagagggagaagcctgacatccacacgaggctgatgagcaagtacagcgagatcccagcatggtggttttactctttgatggcgctgtcaattgcagtgtccctgatcctctgcactgtactcaagcgtgaggtacaactcccatggtggggcctcattttcgcatgtggcatggcattcctcttcacacttcccatcagcatcatcaccgcgaccaccaaccagtcgcctggcctgaatgtgatcaccgagtatgccatgggtctgattatgccgggctctcctatcgccgtcgtctgcttcaaagtctatggctacatgagcatgtcgcaggctgttgccttcctctcggacttcaaacttggccactatatgaagatccctcccaagtccatgttccttgttcagtttgttggtaccattgtggctggcacgatcaacatcgggacagcgtggtggctgcttggctccatccacggcatctgctcggattcactcccgccagacagcccctggacatgccctaacgaccgtgtgttcttcgacgcgtcagtcatctggggcctcgtcggtccaatgcgcatctttgggccaggtgggaactacggcgccgtcaactggttcttcctcatcggcgcggcaggcccggtcatcgtatacgctctccacagggtgttccccagccagagctggataccgctgatcaaccttccggtgctctttggtgcaacggctagcatgcccccagcgacggcggtcaactacaactcgtggctgcttgtcggcaccatctttaacttcttcgtgttccggtaccgcaagaggtggtggactcggtacaactacatcctctccgccgggcttgacgccggagttgcgttcatgggggtgctgctgtacttctcgctgaccatgcagaacaagagcatcgattggtggggtactgcaggagagcactgccctcttgccaagtgtcctactgccaaaggggtggacttgggtgatggcgtctgcccagtcttctaagcctggagtttgatgccacaacatgctgctgtcagttccaagttatgttcataccatagatttgtggtatatacgtcgagtataatgcgacttctcttatgtgtaaatgatcatattctcatgtactacttggtagtcgattgtgcgtccataccgacaaaaatacttcatttggtttgcagatcgcaattagaatacatatgtttcagtagtttacatggagaaacaatgggaaattgtacggattagtttatttcctaacagttacaatataataatagcatatcggttctgccgtatgcatagagaaacaattcagacacagagtactagaacagacgacaccaattcagtcattgtcaacatgcagcaggcctaaatattacaatcgggcatagcaaggaagctgaggtatgaaacagagacaccaatgaagattcggtagcagctaggctcgggagactctgcgtacctctgtcttctcactacgggaggcggccgcggttgaggaggccaagcgtgtggcgcgcagcctcgacgaggtcccggatgttgtggagcgacctctcctcggcaccgaagacgaagatggctcggcattccgccttctttgccagccgcgccgcgtgccccagcggcagcgccggcgagtttagcgcccgaaggacctgccgatacagggacagaaccaccggccggcgccgcgcaagatcctccgccgtcgcccagatcatcccgctgccagcaccgcccttcgccatcattccgccgccgtgctcgcctcgcccactgccacgagcgggtttcgaagccgccggggaccggggtccaaagcgaaaggatgagaggggaggccactgggcttct

SEQ ID NO: 6947 - DNA, 3422 bp, Zea Mays
tgcccgtgtgccaggcgaaaaacgtagcctcgcactctcgcaggcggcggcgcatcgagaaacagggctgcggctgttgcttcttccacctctccggccatccggcggtccatcgttccgtgccggcggcctcccctcctacgcccctgccgattcttcaatcttcaccaacgtctgcgcgtagcaggctagcagtcggcacggcttcctcagatctgccggacgacttgctgttcgtcaccgactcaccagcaaccaacgtcagccatcagccggcagcaggggaagctgggcggagggtcattgcggcacggcgtccaggcgtacagaaggcaccagcaacagcccatggcaaacgccgcagatgaccctatggcagatgaagccggagtagaagatgccttcacacaggagatcaatcattcgtacgtccctagataccatgtgttgagttggatggaaactgtggaggggatggtggccggtgtggcgtcgcttccgccggtgtatttgatactgaacagagatcttcttgagacgggatggggatggaagaggctggtgccctacagacctggttatgttgagttgcatgtgttcaagaaataccttggggactatttcgaccataatcgtgaagcttttctttgtgccgagcagaagcctgatccatttggatggattgttgctgaaaagagtgccctgattgctgcagccaaatcgtgcctcaagatggagaaggcacttctcaggtactgtgctagctttctcactcctgacgacaaaaggctgatcctccggatcaaggaccaggcaaagcaaatgatccaatcagagggtgatcaatctttgattgtaactatatgcttggagtgtattgcgaaggaggccgagttaatgtacaattatttgccttgtgattttgacaccaccgaagaagtcgccgtctgcaataaggttcggcggtctgccttgaatcttatgctctacaaaggttctgaatctgctgttgctgctggtgccatgatggtgtgttcctgatactctctccattcattttataggctttattttgactatgcaaaaaccaatattctgctgtaaattctccctatagtattatgttggtagttacaaaatcatagtcagtagcaagtgcttttaattaggaattgttacgtaactcacattttatgggactaatgtctggtcaaagcatgaacttggatagtcaaaccacaccttataaatatgaatatagggagtaattgtgtattttttaatcctctgttatcctgtcaagcttctttaaccaaactgcaaaaacgatgtacttgaagggtatcacaacagaggctaagtccatttttgacttgcttagtcgagaccatgacgtggtcatggaagtttttacttgtgagagtataagggaacatacagcatcagttctgacccagcttgggaaggaatttgcttgcgagactgctactgtgaacagctcatcagcgcggcctatgggggtcagtgatgttagagatctgaactctgaagtatctggttcaatggaagactgtacgagtatggatggagcaaggttttaaagtcggctagtcgactctagtcgcctaagcaccgataaggtgactaatcgcgattagtcgtcgattagctcgattagtcgatcctagtcgactccctagtcgtcctatagtcgtccatctataacaggaccatatatatatatatatatactagattgcaaatctattgacaatattacaatgaaactgtagaatgaatgaatgatcatgttttcactaaaaggtaaagatcacttagacacttaccttggattggagtatacaacagcacactgcaagattagtaggacaacacttctggtatatctccagcagccttactagtgcaaaacgtcatatatctccaacaaagcaagcagaggagggcggcggcgctcacagcagcagcaagcagaggagggcggcggcgctcagagcagcagcaagcaggggagggcggcggcgctcagagcagttagcagcaagcagatgaagcggtggcgctcaactccagctaggttaaagactgtaacggcattggcacagtttcaggcttttcagcccccctggtgggccggcccaaatagaaaagagcagcctggagcccaaaacaaagcacctagtcgagaacaaccctaatcggacgactaatcgccgactaatcgcgattagtcggacgactaggtttctagtcgccctaatcgcgtcggtggccctaatcggccttgcagcagcgataagtccgactaatcgcgactaatcgcgattagtcggacgactttaaaaccattccgatggagacaatggaaacaatccagttgttggagggggtggctaagaactcgaagaatttaaagttggtggagaaccacgaaaacgagaccagggttgccaccttgatgactgaaaataactagggccttgcagggaaaccttcgttgacttctgaggtactgaaggaatccaattcatgatgatgagctacattattcaagtttagcaactattgattgtgtttcccatcatgccttggatgtgtcaaaacttgaacacaccaatttgaagattatcataccctgcttatctatccacatacaaccaaccaaacaaaaatctgctggatcatcccatttgaaaacttgcaaccaaccaaacaagaatttggctcatgcaatccgtccaacctaatgagctaatacatgtaggagcatcattctatgattctatcctaaatccatggatggccctatcccatccaaccttgcctctccaacccatacggccatacaaacttgtgaccattcattgtaattctcatttcattgtcataagtgcgcctcgtttgacactgttgtttctctcgtcatcattggctttgtgtcggacacgttcatgataatttatctgcagcaacggtcaaatttatgaagctacaaggtgcaagttatgagctgctgtaactaaaaggatctctggtttcttttgagcagctgtctgttgtgtcaagttatgtgctacttgtaacactaaagtaccattttaccttatgacatgcagtgcttggttgttctgtcgtagttaaagaccgtgttgcaataagtgctagttctgtatgtttcctgggtttatgttatcaaatggttgcctggtttgcccactaatgtcatgttgctataagtattcctagctgttgagaaatgcgtgcgcgcgtgccgatcgttgtatcattgggtgcaacatcataggtcattgtagccaagggctatgaagaggggagtttcagatagtccaaaaacaccagggtacatagcaaatacgaaggttcttaggaaggaacagaag

SEQ ID NO: 6948 - DNA, 3465 bp, Zea Mays
tgcccgtgtgccaggcgaaaaacgtagcctcgcactctcgcaggcggcggcgcatcgagaaacagggctgcggctgttgcttcttccacctctccggccatccggcggtccatcgttccgtgccggcggcctcccctcctacgcccctgccgattcttcaatcttcaccaacgtctgcgcgtagcaggctagcagtcggcacggcttcctcagatctgccggacgacttgctgttcgtcaccgactcaccagcaaccaacgtcagccatcagccggcagcaggggaagctgggcggagggtcattgcggcacggcgtccaggcgtacagaaggcaccagcaacagcccatggcaaacgccgcagatgaccctatggcagatgaagccggagtagaagatgccttcacacaggagatcaatcattcgtacgtccctagataccatgtgttgagttggatggaaactgtggaggggatggtggccggtgtggcgtcgcttccgccggtgtatttgatactgaacagagatcttcttgagacgggatggggatggaagaggctggtgccctacagacctggttatgttgagttgcatgtgttcaagaaataccttggggactatttcgaccataatcgtgaagcttttctttgtgccgagcagaagcctgatccatttggatggattgttgctgaaaagagtgccctgattgctgcagccaaatcgtgcctcaagatggagaaggcacttctcaggtactgtgctagctttctcactcctgacgacaaaaggctgatcctccggatcaaggaccaggcaaagcaaatgatccaatcagagggtgatcaatctttgattgtaactatatgcttggagtgtattgcgaaggaggccgagttaatgtacaattatttgccttgtgattttgacaccaccgaagaagtcgccgtctgcaataaggttcggcggtctgccttgaatcttatgctctacaaaggttctgaatctgctgttgctgctggtgccatgatggtgtgttcctgatactctctccattcattttataggctttattttgactatgcaaaaaccaatattctgctgtaaattctccctatagtattatgttggtagttacaaaatcatagtcagtagcaagtgcttttaattaggaattgttacgtaactcacattttatgggactaatgtctggtcaaagcatgaacttggatagtcaaaccacaccttataaatatgaatatagggagtaattgtgtattttttaatcctctgttatcctgtcaagcttctttaaccaaactgcaaaaacgatgtacttgaagggtatcacaacagaggctaagtccatttttgacttgcttagtcgagaccatgacgtggtcatggaagtttttacttgtgagagtataagggaacatacagcatcagttctgacccagcttgggaaggaatttgcttgcgagactgctactgtgaacagctcatcagcgcggcctatgggggtcagtgatgttagagatctgaactctgaagtatctggttcaatggaagactgtacgagtatggatggagcaaggttttaaagtcggctagtcgactctagtcgcctaagcaccgataagggaaaccttcgttgacttctgaggtactgaaggttagtgaagaggcagatgattacgttccaaataggaagtcttgaatactgctgtgacttgtgttttgaaatagatatagtattttctggttctcttgcaaacctcattgttgcagccctaacatttcatggtgtgtttgatttgtggggtgggggtggatgggagacggtcaacccattttttaaagttgttcagttagatgggatgcccaaccagtggggatattcccccgagatcttggatgggatgtccatgcaaatctggtggacagagtagtccatggccttgttgaatacttattgcgcgactggttgtggtcacctaatgtgccttttctttttgctccaattgttcccaatctcatccctcattaacctgtttctgactgggatgcgcacagcaattgggaaccagcaggccctctgtccagacgctggtgctttgtgctccgttgttgtgctgctgctccactggcgtttactagttctagtgccttttcactgatttgtccgcacagggatcctggtgctagtgcttggctgattgctgctgcccctgtgttctccctcaattcgtactgctcatgcaattcctggaggccctaggaattggttctgcagttgtacctgtaggctgtagctgccaatttagttcgattttgaatttggcaggtagttgttgtgcttgtttctagatgcaagagtgcttattgtttgtggtgtttgttattggaaattttggttggtggtagttatttgtccggaaaggttaatgcaatgctgtggcttgtcttgcttttagtcaatggtagtaagttgagtaaaatgttcatgtgtatgtgcagcttgtggtcggcagtgtgaaattttgacctctaattatttgttagtaatgtaattttctcagcaggaatccaattcatgatgatgagctacattattcaagtttagcaactattgattgtgtttcccatcatgccttggatgtgtcaaaacttgaacacaccaatttgaagattatcataccctgcttatctatccacatacaaccaaccaaacaaaaatctgctggatcatcccatttgaaaacttgcaaccaaccaaacaagaatttggctcatgcaatccgtccaacctaatgagctaatacatgtaggagcatcattctatgattctatcctaaatccatggatggccctatcccatccaaccttgcctctccaacccatacggccatacaaacttgtgaccattcattgtaattctcatttcattgtcataagtgcgcctcgtttgacactgttgtttctctcgtcatcattggctttgtgtcggacacgttcatgataatttatctgcagcaacggtcaaatttatgaagctacaaggtgcaagttatgagctgctgtaactaaaaggatctctggtttcttttgagcagctgtctgttgtgtcaagttatgtgctacttgtaacactaaagtaccattttaccttatgacatgcagtgcttggttgttctgtcgtagttaaagaccgtgttgcaataagtgctagttctgtatgtttcctgggtttatgttatcaaatggttgcctggtttgcccactaatgtcatgttgctataagtattcctagctgttgagaaatgcgtgcgcgcgtgccgatcgttgtatcattgggtgcaacatcataggtcattgtagccaagggctatgaagaggggagtttcagatagtccaaaaacaccagggtacatagcaaatacgaaggttcttaggaaggaacagaag

SEQ ID NO: 6949 - DNA, 4589 bp, Zea Mays
tgcccgtgtgccaggcgaaaaacgtagcctcgcactctcgcaggcggcggcgcatcgagaaacagggctgcggctgttgcttcttccacctctccggccatccggcggtccatcgttccgtgccggcggcctcccctcctacgcccctgccgattcttcaatcttcaccaacgtctgcgcgtagcaggctagcagtcggcacggcttcctcagatctgccggacgacttgctgttcgtcaccgactcaccagcaaccaacgtcagccatcagccggcagcaggggaagctgggcggagggtcattgcggcacggcgtccaggcgtacagaaggcaccagcaacagcccatggcaaacgccgcagatgaccctatggcagatgaagccggagtagaagatgccttcacacaggagatcaatcattcgtacgtccctagataccatgtgttgagttggatggaaactgtggaggggatggtggccggtgtggcgtcgcttccgccggtgtatttgatactgaacagagatcttcttgagacgggatggggatggaagaggctggtgccctacagacctggttatgttgagttgcatgtgttcaagaaataccttggggactatttcgaccataatcgtgaagcttttctttgtgccgagcagaagcctgatccatttggatggattgttgctgaaaagagtgccctgattgctgcagccaaatcgtgcctcaagatggagaaggcacttctcaggtactgtgctagctttctcactcctgacgacaaaaggctgatcctccggatcaaggaccaggcaaagcaaatgatccaatcagagggtgatcaatctttgattgtaactatatgcttggagtgtattgcgaaggaggccgagttaatgtacaattatttgccttgtgattttgacaccaccgaagaagtcgccgtctgcaataaggttcggcggtctgccttgaatcttatgctctacaaaggttctgaatctgctgttgctgctggtgccatgatggtgtgttcctgatactctctccattcattttataggctttattttgactatgcaaaaaccaatattctgctgtaaattctccctatagtattatgttggtagttacaaaatcatagtcagtagcaagtgcttttaattaggaattgttacgtaactcacattttatgggactaatgtctggtcaaagcatgaacttggatagtcaaaccacaccttataaatatgaatatagggagtaattgtgtattttttaatcctctgttatcctgtcaagcttctttaaccaaactgcaaaaacgatgtacttgaagggtatcacaacagaggctaagtccatttttgacttgcttagtcgagaccatgacgtggtcatggaagtttttacttgtgagagtataagggaacatacagcatcagttctgacccagcttgggaaggaatttgcttgcgagactgctactgtgaacagctcatcagcgcggcctatgggggtcagtgatgttagagatctgaactctgaagtatctggttcaatggaagactgtacgagtatggatggagcaaggttttaaagtcggctagtcgactctagtcgcctaagcaccgataaggtgactaatcgcgattagtcgtcgattagctcgattagtcgatcctagtcgactccctagtcgtcctatagtcgtccatctataacaggaccatatatatatatatatatactagattgcaaatctattgacaatattacaatgaaactgtagaatgaatgaatgatcatgttttcactaaaaggtaaagatcacttagacacttaccttggattggagtatacaacagcacactgcaagattagtaggacaacacttctggtatatctccagcagccttactagtgcaaaacgtcatatatctccaacaaagcaagcagaggagggcgtccagcaagcagaggagggcggcggcgcttacagcagcagcaagcagaggagggcggcgctcagagcagcagcaagcagaggagggcggcagcgctcagagcagcagcaagcagaggagggcggcggcgctcacagcagcagcaagcagaggagggcggcgctcagagcagcagcaagcagaggagggcggcagcgctcagagcagcagcaagcagagaagggcggcgacgctcacagcagcagcaagcagaggagggcggcgctcacagcagcagcaagcagaggagggcggcggcgctcagagcagcagcaagcaggggagggcggcggcgctcagagcagttagcagcaagcagatgaagcggtggcgctcaactccagctaggttaaagactgtaacggcattggcacagtttcaggcttttcagcccccctggtgggccggcccaaatagaaaagagcagcctggagcccaaaacaaagcacctagtcgagaacaaccctaatcggacgactaatcgccgactaatcgcgattagtcggacgactaggtttctagtcgccctaatcgcgtcggtggccctaatcggccttgcagcagcgataagtccgactaatcgcgactaatcgcgattagtcggacgactttaaaaccattccgatggagacaatggaaacaatccagttgttggagggggtggctaagaactcgaagaatttaaagttggtggagaaccacgaaaacgagaccagggttgccaccttgatgactgaaaataactagggccttgcagggaaaccttcgttgacttctgaggtactgaaggttagtgaagaggcagatgattacgttccaaataggaagtcttgaatactgctgtgacttgtgttttgaaatagatatagtattttctggttctcttgcaaacctcattgttgcagccctaacatttcatggtgtgtttgatttgtggggtgggggtggatgggagacggtcaacccattttttaaagttgttcagttagatgggatgcccaaccagtggggatattcccccgagatcttggatgggatgtccatgcaaatctggtggacagagtagtccatggccttgttgaatacttattgcgcgactggttgtggtcacctaatgtgccttttctttttgctccaattgttcccaatctcatccctcattaacctgtttctgactgggatgcgcacagcaattgggaaccagcaggccctctgtccagacgctggtgctttgtgctccgttgttgtgctgctgctccactggcgtttactagttctagtgccttttcactgatttgtccgcacagggatcctggtgctagtgcttggctgattgctgctgcccctgtgttctccctcaattcgtactgctcatgcaattcctggaggccctaggaattggttctgcagttgtacctgtaggctgtagctgccaatttagttcgattttgaatttggcaggtagttgttgtgcttgtttctagatgcaagagtgcttattgtttgtggtgtttgttattggaaattttggttggtggtagttatttgtccggaaaggttaatgcaatgctgtggcttgtcttgcttttagtcaatggtagtaagttgagtaaaatgttcatgtgtatgtgcagcttgtggtcggcagtgtgaaattttgacctctaattatttgttagtaatgtaattttctcagcaggaatccaattcatgatgatgagctacattattcaagtttagcaactattgattgtgtttcccatcatgccttggatgtgtcaaaacttgaacacaccaatttgaagattatcataccctgcttatctatccacatacaaccaaccaaacaaaaatctgctggatcatcccatttgaaaacttgcaaccaaccaaacaagaatttggctcatgcaatccgtccaacctaatgagctaatacatgtaggagcatcattctatgattctatcctaaatccatggatggccctatcccatccaaccttgcctctccaacccatacggccatacaaacttgtgaccattcattgtaattctcatttcattgtcataagtgcgcctcgtttgacactgttgtttctctcgtcatcattggctttgtgtcggacacgttcatgataatttatctgcagcaacggtcaaatttatgaagctacaaggtgcaagttatgagctgctgtaactaaaaggatctctggtttcttttgagcagctgtctgttgtgtcaagttatgtgctacttgtaacactaaagtaccattttaccttatgacatgcagtgcttggttgttctgtcgtagttaaagaccgtgttgcaataagtgctagttctgtatgtttcctgggtttatgttatcaaatggttgcctggtttgcccactaatgtcatgttgctataagtattcctagctgttgagaaatgcgtgcgcgcgtgccgatcgttgtatcattgggtgcaacatcataggtcattgtagccaagggctatgaagaggggagtttcagatagtccaaaaacaccagggtacatagcaaatacgaaggttcttaggaaggaacagaag

SEQ ID NO: 6950 - DNA, 3621 bp, Zea Mays
atgacacctgttgtgatattatttcttgacgctgctttaccatgagtccaggacggcgacgagctctctccgcaacggcgttcaaaacatgagcagtctttgcaagaaaaacaccctgccagggccggctcaattcatgtcccgaaaccagcccactctggccgcgaatctcagcgctccggacaggaatccaacggccttggtcgacggcagccttacgcgcggcttcgcggagttgcgaggcggctcggctctacaccctcgcgctcgccgctctcggtctcgcctcttcttcgctcacacgattcgccgcgaggagtttccccttccgctgcgtgcatcccgcgagagctcgaaaacctagccgcaaaatcgatggctcggcgcggccacgacgacgacgacgacgaggtcgatgaggaggaagaggaggatgcctatgacctggacgacgacgaggatgaggatgaggaggacgactacgaggaggagacgaggcgcgggaaggcctcccgcggcggcggcggcgccaagagcggcggcgggcggaagcggtcgcgggaagacaactttatcgacgactcggccatcgaggacgaggacgatgaggatgacgacggcggtggccgaccgaggaagaagggtggcggcggggtgcgaggattcttcgacgaggaggcccaggtcgacgaggatgaggaagaagaggacgaaggagagggcgaggacgattttattaatgatgctggggcggacctccctgatgaggatgttgttaggggttcaagacgtcattctattcctatgagggatgaagaagaggacattgatgaaatggagagacaagtgcgggagagatacgcaagatctactcatattgaatacggtgaggaagctgcagaagtagaacagcaagctctgctgccctcggtgaaggatcctaaactatggatggtcaaatgtgcggtcagaccttcaaataaagtcagtcgtggcgttggatcatctaaaaaattatatttatgttgaagctgagaaggaggcccatgtcaaagaggcttgcaaaggtctacgaaacatttatgcttcggcaaaaataacattagtgcctataaaagaaatggcagatgtcctctctgttgagagcaaatctgtcgatctgtcaagggattcttgggtccgaatgaaattgggcatatataaaggtgaccttgctaaggttgttgatgttgacaatgtacgtcaaagagtagatgtgaagctgatccctagaatagatctacaagctttggctagtaaactggaagggagagacattgtaaagaagaaagcatttgtcccaccaccacgattcttcaatatcgatgaggcgagggagatgcatattcgtgtggaacggaggcgagataaagaatctggggagtactttgagtgggttgataatttgaagtttaaagatggtttcttgtacaaatcagtctcaactaaatcaatccacaaaagtaatattcaaccgactttcgatgagcttgagaagtttaagaagcctggtgatgacatgaatggcgacatggctagtttgtctactctatttgcaaacaggaaaaaagggcattttatgaagggtgatgctgtcattgttattaaaggcgacttgaaaaatctggagggatgggttgaaaaagtagaggatgaaaccgttcacatcagaccaaaaatatctgatcttccgaaaacattagccttcaatgaaaaggagctttgcaaatatttcaagcctggtgaccatgtcaaggtgatctcaggtgtccaagaaggtgctactggcatggtcgttaaagtggaagggcatgtcttgatcattttgtctgacacaactaaagaacatatccgtgtgtttgctgatcatgtcgtcgaaagctctgaaatcaccacaggaataaccagaattggtgattatgaactgcatgatcttgtccttttagacaacttgtcatttggagtaattataagggtggaagctgaagcatttcaggttctgaaaggagtgccagatagacctgaagttgtgctcgtgaaactaagagaaataaaaagcaaaattgaaaggcgctcatcagctaaagatcgttctaataatattatctctgcaaaggatgttgtaagggttgttgaaggagcatgcaaggggaaacaaggacctgtggaacacatacacaaggggatgctgtttatctatgacaggcatcaccttgaacatgcaggttttatttgtgcaaaagcgcaatcttgccttcttgttggtggatcaactggtggccgtcgaggaaatggtatggacacagctgatgcacggcttgatgctttgcgatcttcagcaagcattctgcaatctccaggaaggctgcccccaagaggacctaatatgaattatggtggaaggtttggaggcggccgtggtggtagaggatatgatgccttggtgggtaaatgtatcaaaattaaatctggcccttataagggataccgtggccgtgttaaagaggtgactggtgcactcgtacgtgtagagcttgattcattgatgaagattgtcacagttaaaagagatgatatcgctgacacacctacagtcgcgacgccattccgtgaacctcgttattcattgggtggtgaaacaccaatgcacccgtctcgaacaccgcatcatgcttatcagactccaatgcgggaccctggagcaacaccaatacatgatggaatgcggactcccatgcgaagtcgagcctgggctcctatgagtcctccaagggacaattgggaagatggaaatcctgctacttggggtagcagtccagcttaccagccaggaaccccacaagctcggccatatgaagcccccacacctggatcggggtgggcaaatactccaggagttagtttcaatgacgctcctactcccagggataactatgcaaatgccccaagtccatacgtgccttccacacctgttggtcaaccaatgacgccaaactcagcctcgtaccttccaggcacacctggtggtcaaccaatgaccccaggcaatgctgggatggatatgctgtccccaataataggtggtgatggtgaagttgcatggctgttgccggatgttttggtcaatgtgttgaggggaggtgatgacggccctggcgtggttagggaagtactcggggatggatcttgccgggttgcacttgggtcgtcgggcaacggtgacgtggtgacggtccttgcgaacgaggtcgaggtcatcaggccgaagaagagcgacaggatcaagatattgaacggcaatttccgtgggtacacaggaaagctcataggtatagatggttctgacggaatagtgaggcttgacgaaacatacgaagttaagatcttagatatggtgattttggccaaactggccacttaagatcttagatgtatatgttgtaacgtgtccgtcatagaacgtattctgtaacaatgccctcgtttgcaataaagctttgcttatttgcaccatcattttcgattttctgcagctctttgttctgcttgagggacttttcgttgaaacgcatgtcacaaatc

SEQ ID NO: 6951 - DNA, 1318 bp, Zea Mays
acccaatccgcccaagcgcgcgcgcaaattccacactctcctcgaccctcgattcgttcccgccgccaaccaagcgacgtctcctcttccacgcatcctagggcggcgacacctgccaagaacacccgtcgccgcgctctcccgatggcgaccagcgacgagctcgcccagatcgacatctctaaggaggagaaggacaagctggtggcggaggtgatgcgctacgtgctcttcaagacgcaccagagctccgactgccccatcaagcgggaggagctcaccgggatcatcaccaagaactaccgccagcgcgcgctgcccacgctggtcatcaacgaggccaaggagaggctcgccgcaaccttcggctacgagatgagggagctacaaaggacccgcgcgccggccacgcgctctggccggccggcacagcggcagtttaacgcggatgccaagagctatgttctggtcagcatgttagaccctgaggtgtacagcaagtacgtcgaggacaaggccgccgcccatctgtccggcttcgctttcgctgtcattggcattattcatcttgctggtggcaaaatgcccgaagaggacctctggcatcagttgaagcgggtgggtttgaacgagactgatgaagctcaccttgttcttggcaacaataagcaggcgctcgaacacctagtgcagcaaaggtacttgctgaaggagaaaattgctggaccggaaggtcatttcgtgatgtacgagcttgccgagagggcgttggatgaatccatcagcgtgaagattaaagatcatatttcacaggttgtgggcacatgcttgcagaagtagattgaagtggatggatacgacaatcaccctgtaggttatctgccttgcggtaggactagctgactcttatcaggctgggaagctacatatcatcttgcatggatacgaggctcgtactctgcatgcagattttgtacaggagatgtgtgcttgacaagccctggcaactttggtgttactatatccttgattatctagattattatgtggacgacatgctgttgatcatcgcagcaggcttggcactaccttttgcagtgacctaatgtcacaaaacagcctgtcagtcattgcatgcgttgtgctctccttctgtgtgtagctgagtattcagtgacctgaccacatcgacatcataacgataatgctgtagcgcgccgagtccattcacaagtcttgactcttgactcgcagtaaaaatcaatttatttcaatttatttttgaaccaaaatttatttaggatcttgatattttgtg

SEQ ID NO: 6952 - DNA, 1284 bp, Zea Mays
caacaaggaccataaaaaagattatacggaagtaaaaggttattaatagtgccaacaatactaaaaggagaacgttatcctagatcatggttcagcacatgtattctatcatagttatcacaagctaggagcacatgcaaagatcgtgagttaactatatgtttggatgcaattaagaaatactaagaactgtatcctcctttgctttgggtgcattataattttgtgtcttgactggatgccaccaatccagtctaattgttgggctgttagcatcgcttcaatgttaggtatggtctgagtactaaatgctagtgagtaaccttaatttatatctacaggatgtagctcttcccaagagcaaatacgaagaggatgtattcattaataaccacacgagtgtgtggggttcatggtggaaagatcatcaatggggctacaagtgctgcaagcagactatcaagaatagttactgcacaggcttggctggaatagaagctgccgaggcctcagcagatctaatgaaggccaatatggcccgcaaggaggctgcagaagatgaacctgtacagcatgaagagaagcgactagccacttggggaaccgacgtgcctcaggatcttgttcttaatgagaagaagctggaggaatctctaaagaaggagactgcaaggagaaaagaggagaaggatgaaagaaagaggaagtataacgtgaagtggaacgacgaggtgactgcagaagacatggaggcttaccgaatgaagaggattcaccatgacgatcctatgaaagattttctcaactgaaaagtgtggtagataactagatgttcatggcactgtatcacattggttgcaccgtgccttgcatcagtgttgtgttactgtagggtggctacgcctgtcctaaggatatggccagcagaccgtgcatgtggcagtgtgtgttgcacttaaattatgatatgggaggggtaaggctggagatagcttaaccagagtggtggtggtgctgtgatctagtggcagaatgtaagaaactggctacaccttttacaagctgcgtgttggagatgtatggggctgtttgcgttggattgaccgctgcagttgtaatctatagagacaaaaatattgtagaagcagttgtaatctatatgtaatctatagagacaaaaatattgtagaagcagttgtaatctatagaggcaaaaatattgtagaagctgtagaagtcgatacgaattaaagccagcctgtttctgatattataatccttgct

SEQ ID NO: 6953 - DNA, 3141 bp, Zea Mays
cctcccgtaagctccacgaccggagagagagagagcgcgcgctatccaagccaagaaactccccccgtagtccgcggcccgggctcacgaccgatccggtccgggcccgatggagctcctgagcggcggcgcgctggcgtggcagcagtaccgcgcgctgctccgcaagaacgccacgctcacctggcgcaaccgccgctcggcggcgctgcagctcttctcctcgctcgtattcatcttcctcatcttctgcatcgaccgcgccgtccgctccaggttctccagtaccaccgcctaccgcaacgtgcccgacccggaggcgctcgtcgcgccgccgatcccgccctgcgaggacaagttcttcatcaagtccccatgctacgacttcctctggagcgacggcgggagcgcccgcatcaggggcctcgtcgacgccatccggaggaacaaccccggccgacccatagcacccgaaaaggttttaggttttaggactccagatgatgttgatgcttggttgtttcaaaacccaatgcgttgccctggggctttacattttcaagatataaatgccactcagataaagtatggtattcagacaaactctactccggtagcacggagaggaacatatgaagaccctaccttcaagttccagataccactccaagttgcagctgagagggaaatggcaaggcttctgattggagacccaaattttagctggactgttggatttaaagaatttgctcacccagccacggagaccttctctaccattgctcaagcagggccaactttttttcttgccattgctatgttcggatttgttttccaaatcagtgcattggtggcagagaaagaactaaagcttcgtcaggctatgtctaccatggggctctatgaatcggcttactggttatcgtggtttacctgggaggcctttcttacaacactttcagcactttttactgtgctctttgggatgatgttccagttcgatttcttccttcataataattttggaatcctattcctcctgttcttcctattccaactgaacatgcttagttttgctttcatgatatccacgttcgtagcgaaggcagcatcagctactactgttggatttgcaatattcattattgggttcttgactcagcttgttaccacctttgggttcccttattcgtctgactacaaaaagttgtaccggacattgtggtctttatttcctcctgatttatttgccaaagccctcaacattctaggcaaggcaacagccactcctgaggataaaggttttagctggaatcagcgtggggagtgcccatcttttgagactgactgtgtcattactattgatgatatatataagtggctcatatccacatttttcttgtggtttgtccttgcgatatactttgacaacatacttccaaatgtaaacggcgttcggaagtcagttttctactttcttatgccttcatactggacgggtaaaggaggcaagatggaagagggaggcctctttagcttttttggttcaagccgtcctgcagatgatgctacccctactgacgaggatgtccttgcggagcaaaacctagtaaaggaacaagctgcaaacaatgcggtagatcctaatgttgcagttcaaatacatggtctacgtaagacatatccaggaactttcagcattggatgttgttgcaaatgctctaaatctaagccgtttcattcggttaaaggcttatgggtgaaccttgagaaggaccagctattttgtcttcttggtcccaatggagctggaaaaacaactacaatcagttgtctgactggaatcacaccaattacaggaggtgatgctaaagagcacatggaattgtttgccagcatcaagggattgcatccagcagcaatcacatcagtagcagaagagtcattagccaaagtaaagctcagccaagtaactaatgctcgagcaggcagctacagcggaggaatgaagcgccggctaagtgttgcgatcgcactgattggtgacccaaaattggtttttctcgatgaacctactactggcatggatccaataacaaggaggcatgtctgggacatcatagaggaggccaagaaaggaagagctattgtcttgaccacccattccatggaggaggctgatattcttggtgaccggatagctataatggcaaaggggaaactgcggtgcatcgggacatcaataaggctgaagtcgaaatttggaacaggatacattgctaatgttaatttctctggaaatggccacatgcagagccccaacatcaacagcaacactgaggctccggttaatccgaacatagaagctgtcaaatggttcttcaaggaacggcttgatgttaatccaaaagaggagagcaggacattcttgacatttgtcatccctcatcacaaagaaccacttctgacgagattctttggagagttgcaagacagggaaggggagtttggaatatcagacattcaactcggtctgacaacacttgaagaggtgttcctgaacattgcaaagcaggcagagctggagacctctactgctgaaggtaccctggtgactctcaacctgtcatcaggaacaacaattcagattcccaagggggctcgtttcgttggtattcctggaactgagacagaggagcatccaagaggcatcatggttgaggtgtactgggatcaggatgaaaatggatcgctctgcatttctgggcactctgacgagatgcccgtgccagttcatgctgagctgaggaggcctccgtcactttctcgtagggcctcaatggaccgtggacgtccagttgggtatatgattgacctgaaccaggtcccatgaaaaaaaggatgagtccaggtgcaacgtttagattggttttgatgcagattatctggtacatatagtatataggaatcttgtattcgtgtctttgtattagaagtcgtaaccttgtattgcagtagtaattggtaaagacatgctttgtaaaatatcctatagtgtaacacagtattttctgttgtatggcaaacaaaggctcgaaatatgacgcaatagaattacatggtaactacaccctgcgtctc

SEQ ID NO: 6954 - DNA, 3343 bp, Zea Mays
cagcctgcaggcagacacgagggccccactaaaccgcgtcttcctcctgactgtctgttttcaaacgcatcccttataaatactcaaacctcatattcctcccgtaagctccacgaccggagagagagagagcgcgcgctatccaagccaagaaactccccccgtagtccgcggcccgggctcacgaccgatccggtccgggcccgatggagctcctgagcggcggcgcgctggcgtggcagcagtaccgcgcgctgctccgcaagaacgccacgctcacctggcgcaaccgccgctcggcggcgctgcagctcttctcctcgctcgtattcatcttcctcatcttctgcatcgaccgcgccgtccgctccaggttctccagtaccaccgcctaccgcaacgtgcccgacccggaggcgctcgtcgcgccgccgatcccgccctgcgaggacaagttcttcatcaagtccccatgctacgacttcctctggagcgacggcgggagcgcccgcatcaggggcctcgtcgacgccatccggaggaacaaccccggccgacccatagcacccgaaaaggttttaggttttaggactccagatgatgttgatgcttggttgtttcaaaacccaatgcgttgccctggggctttacattttcaagatataaatgccactcagataaagtatggtattcagacaaactctactccggtagcacggagaggaacatatgaagaccctaccttcaagttccagataccactccaagttgcagctgagagggaaatggcaaggcttctgattggagacccaaattttagctggactgttggatttaaagaatttgctcacccagccacggagaccttctctaccattgctcaagcagggccaactttttttcttgccattgctatgttcggatttgttttccaaatcagtgcattggtggcagagaaagaactaaagcttcgtcaggctatgtctaccatggggctctatgaatcggcttactggttatcgtggtttacctgggaggcctttcttacaacactttcagcactttttactgtgctctttgggatgatgttccagttcgatttcttccttcataataattttggaatcctattcctcctgttcttcctattccaactgaacatgcttagttttgctttcatgatatccacgttcgtagcgaaggcagcatcagctactactgttggatttgcaatattcattattgggttcttgactcagcttgttaccacctttgggttcccttattcgtctgactacaaaaagttgtaccggacattgtggtctttatttcctcctgatttatttgccaaagccctcaacattctaggcaaggcaacagccactcctgaggataaaggttttagctggaatcagcgtggggagtgcccatcttttgagactgactgtgtcattactattgatgatatatataagtggctcatatccacatttttcttgtggtttgtccttgcgatatactttgacaacatacttccaaatgtaaacggcgttcggaagtcagttttctactttcttatgccttcatactggacgggtaaaggaggcaagatggaagagggaggcctctttagcttttttggttcaagccgtcctgcagatgatgctacccctactgacgaggatgtccttgcggagcaaaacctagtaaaggaacaagctgcaaacaatgcggtagatcctaatgttgcagttcaaatacatggtctacgtaagacatatccaggaactttcagcattggatgttgttgcaaatgctctaaatctaagccgtttcattcggttaaaggcttatgggtgaaccttgagaaggaccagctattttgtcttcttggtcccaatggagctggaaaaacaactacaatcagttgtctgactggaatcacaccaattacaggaggtgatgcattcatttatggtcactctgttcgaagcactgtgggaatgtcaaacatccgtaggatgatcggagtctgcccacagtttgatatcctgtgggatgcattaacagctaaagagcacatggaattgtttgccagcatcaagggattgcatccagcagcaatcacatcagtagcagaagagtcattagccaaagtaaagctcagccaagtaactaatgctcgagcaggcagctacagcggaggaatgaagcgccggctaagtgttgcgatcgcactgattggtgacccaaaattggtttttctcgatgaacctactactggcatggatccaataacaaggaggcatgtctgggacatcatagaggaggccaagaaaggaagagctattgtcttgaccacccattccatggaggaggctgatattcttggtgaccggatagctataatggcaaaggggaaactgcggtgcatcgggacatcaataaggctgaagtcgaaatttggaacaggatacattgctaatgttaatttctctggaaatggccacatgcagagccccaacatcaacagcaacactgaggctccggttaatccgaacatagaagctgtcaaatggttcttcaaggaacggcttgatgttaatccaaaagaggagagcaggacattcttgacatttgtcatccctcatcacaaagaaccacttctgacgagattctttggagagttgcaagacagggaaggggagtttggaatatcagacattcaactcggtctgacaacacttgaagaggtgttcctgaacattgcaaagcaggcagagctggagacctctactgctgaaggtaccctggtgactctcaacctgtcatcaggaacaacaattcagattcccaagggggctcgtttcgttggtattcctggaactgagacagaggagcatccaagaggcatcatggttgaggtgtactgggatcaggatgaaaatggatcgctctgcatttctgggcactctgacgagatgcccgtgccagttcatgctgagctgaggaggcctccgtcactttctcgtagggcctcaatggaccgtggacgtccagttgggtatatgattgacctgaaccaggtcccatgaaaaaaaggatgagtccaggtgcaacgtttagattggttttgatgcagattatctggtacatatagtatataggaatcttgtattcgtgtctttgtattagaagtcgtaaccttgtattgcagtagtaattggtaaagacatgctttgtaaaatatcctatagtgtaacacagtattttctgttgtatggcaaacaaaggctcgaaatatgacgcaatagaattacatggtaactacaccctgcgtctc

SEQ ID NO: 6955 - DNA, 1453 bp, Zea Mays
gcattattggtgcacaatgtcgtcaggcaggctgtcagccttgctcgtccgatcccgcaggtgaacagacagatggactgattgggtagctgttggcaagctagttacccattattcttccactccacctcgcccgtggcccgtacccgtcgtcgtcgtccacacagccacaagctgctgctgctgctgcgcgtgcttcctcttcagttcagctgaggtagcggcgcctcacccatcccccccgctacatacacatatctccttcttcgaagaactcggtcctttgggagcgagcaggagcaggagcaggacaggaccaggaagatcattatcaggagaagctaggcggggatatggcgaacgctggcggcggggcggccgaggaaggggagtggctcaaggtcgcccagctcagggccctcgtccaggaggaccaccgcgccaaggaggtggacaacctgacgctgcgtcggttcctgcgcgcgcgcggccacaacgtggacaaggcggccgccatgctgctcaagttcctcaggtggcgggcggaggcggcgcccggcggcggcaccgtgcgggaggagcaggtgcgcggggagctggagcaggacaagatctacatgggcggcgtcgacaggaccggccgccccatcatcgtcggcttgctcgccaagcactactccgccaaccgcgacatggcggagttcaagagtacgtcgacgacgtggcccttctttcttcatcaatcaaaatgcgtgtgatccccagagggcaggagaagttcctcgccatcatggatctcaagggctggggctacgcaaactgcgacgtccgggcctacatcgcggccattgagatcatgcagaactactacccggagcggctgggcaaggcgctgatgatcaacgtgccctacatcttcctcaaggtgtggaagacgatgatctaccccttcatcgacgccaacaccagggacaagttcgtgttcgtggatgacaagagcctgcgggagacgctgcggcgggagatcgacgagagccagctcccggagttccttggcgggaagatgcctctcgtctccctcaaggactacgcccagcagcctcagcccgtttgcgagtgagtctgtcgtagcgatggtggccggccggtgacgtgagcgacccaaagccgaaagctgattcgatctagactaagctaatacagcctacaagagggaggaagagaggccctacccgtggaattaagtcattagtttgtggtccaattcaataagaaagtaaatgtggtgtgtgaagatggtatggcattatcagtctttaatcccatattatacatttagatagaagaaaatcaacttatatgtggtagtgttccctactttttatatgagataaataaagggatacggagaatgctgcacgcacgctctcgctcacgtttcatgtttttcgcg

SEQ ID NO: 6956 - DNA, 2522 bp, Zea Mays
ccaccacctcccccctccatctcgctctcgctctcgctccgcccctctctccctctctcattggccattccgcccgcatgaaaccccaaaccctcgccggcatcgccgtcgccgcagcagcgcccgcgtagcccgcccctctcgccctcgccccccctccccgcgccccgatcccgcccgctccgcagccgatcctgccgggagcacgaccgatgacgatgaacggcgccgctgcaccggagcgctcgcccccagcctcgcccccgcctctggtccaggcccaggcgcctccgtcgccatctccgactcagccgctcgagtggaggttctcgcaggtgttcggtgagcgcagcgccggggaggaagtccaggatgttgacatcatctcagcaatagagttcaataaatcgggacatcatcttgccactggagacaggggtggacgagttgttttatttgaaaggactgatgtcaaagatcaggcatcctgagtttcgctacaaaactgagtttcaaagccatgagccagagtttgattacctcaagagcttggaaattgaagagaagattaaccaaataaagtggtgtcaagcaacaaattgtgcattgtttcttctatccacaaatgacaaaacgataaagttttggaaggtccaagaaaagaaagtaaaaaaggtatctgagatgaatttggaccgttcaactgctcctacaaatggtagtcctggtggtacgggatatctgcgcccatctctctcaaatggcaatgttctaaaacctggcggacttcctttgctacgccttcctgtggttacaacccaagaaacaagccttgctgcgagttgccgaagagtatatgctcatgcacatgactatcatataaattcaatatcaaataacagtgatggtgagacatttatatcagctgatgatttgcggataaatctttggaatttggaaatcagcaatcaaagtttcaatattattgatgttaagcctacaaacatggaagatctcactgaggtgataacatctgctgaattccatcctactcattgcaatacattggcgtatagtagctctaagggctccattcgacttgttgatctgcggcaatcagccctttgcgacaatcattcccaaatctttgagcagcatgaggccccaggttcaagatcatttttcactgagattatagcttcaatttcggacataaaattttcgaaggatgggaggcatattctcagtcgtgactacatgactctgaagctttgggatgttaagatgaattctggtcctgttgcaacattccaggttcatgagtatctaaggcctaagttatgtgatttatatgaaaatgactcaattttcgacaaatttgagtgttgtcaaagtggtgatggattaagagtagcaactggttcctacagcaacatttttcgcgtgtttggttgccgttctggtagcagtgaagcaacaacacttgaagcaacccgaaaccctacaaggcggcaggtccagactacctctagagctaccagatccctaagtactctgacaagggccgttagacgaggtggagagagcactggaatagatgccaatggaaattcctatgatctgagcacaaagttgctccatttggcctggcacccatctgaaaatctaattgcttgtgctgcagccaatagcttgtacatgtactacgcataaacaagcgaaacgaacagagcgacagtttttttttgttggttgctcccggtgagaaagacacgtttagccaatggtggattgaagccaggagttggtggagatggtgtattttgtgccagtcggaagcagttcttttcggtgccatatagagctgtccagagtccaagaggaagtgactcgatcattcccgggaagcagctttgattctgattattattattttttgtgtggggaaaggcttgtctttcccccataggttcatttagatttaaatataaggtcctagcttgacaacatctgggcatctgtagtagacgatgttaaaggggatgggtatggcgacgatccaccgttgtattcatgttgccatgggtttgtaacttcagggtggccgttggagcttttcatagttttatcttacagatcgaccttattttttttcccttgcgtggggaaccttgttttcgaagaatgccaggaccttcgtcatgtttgatgcgaaccctagaataggaaacatactgtcattttattgtatgtacatttttaataggttggagtggttcttctgttgtttagttatattcttttaccagtgcaacatgtcaacatgcccttgtcagctttgtcatacccttcatcacaggttcatcttggactggagcttagaaaccgggaacatgacatggtcaccggaacgtggcaacaatttgattcatgtggtgttaaatcttagttttagtagtgtatggtgtacgtttcccaatcccatcgatccgaaacctgattactaaggacctacgttcccg

SEQ ID NO: 6957 - DNA, 1696 bp, Zea Mays
ggtgttttccccttcccgcaaggcaaccaaaccccgaaagcggagccgccctcacctgaccaccaccttcttcttcccagttcttccgcccgatgcctccgcatcatcacgcccccctcccgcgaaaccgcgtctagggttctcgccttcacccacccacccaccctactctcctctccccttttcccttccgcaacgtcgccgccgccgtcgcacgcagatggcactcctcggcgacgcgctgcggcaggccttcttgatgccacggcgcgcctacgcggcgctccgcgacgacgagcagtccttcccgccgcgtctccgccgcccgctggccgtgaccgccgcctgctgtgtcgccgccgctgtggcagctgccgcgtgcgtcagcctcgggatcgtgttccctgccgagcccgcggagcggcccttctgccgggagcgccgcatgctggaggcgctgcctgccgccgccagcagcagggaggaggagcccgaggcgtaccggtaccgcgggggtgccttctacatgaccaccgctgaggccgccgacttctactggatggtcgtcttcgtgccatccgccgtcctctttggcgcctcgttcacctaccttgtagctggcatccgatgatctgtgttgttgagaacaacttttgtgcttctagaagaggtggcgttcgttgcctggctatacttaatgtggttttcgctgtaatattcggtctcatggcaattattcttggatcaacactgctggcgctcggaagtacctgttcagttcctcttttctggtgctatgagataacagcctggggtttggtagtcttatatggtggcacggccttcttcttgagaaggaaagctgcagttgtccttgacgagagcgattactctacccacaatgtgggtctagagatgctggagtccaaaatggaagtgactccagagatgcagcgccgcatcaccgatggtttcaagcagtggatgggttcgtccctcctatcttctgatgacgaggaggaagcctcggatgactacctcgagcacgatgttcctagcccgactgccttaggtcaacaacaccagcatgagcatgatcgagagacctgactgctgtataaataaatgtacatagagcgtcccacttattcgttgaggtttgatgtagtaagtgccgggttcgggttcgattgctaacaagtgattgcctttgttctttttccataatagagggattagttagcttctcaagttcatatttgagttttgctgtttcaatgccattcatacacatgcaaaaaagtagatagcatatgtgtgggctcattgttcactggtgtcgaaagtcacgtggagtccttttagctcccccgagtgggctgatttgatgggccgatttgatgataagggaattggaggtccacaccttgctattttgtcaccaaaccagccctaagattgtacacagagatagcctcgaggtgctgaatgagtggggtctgttcatgcaaattggatcattctgtacacattgtatggtttcacatttttcgtcgctttatggcatatgtaataagttgtgcatgttatttgttttttgctatttagcgaaaggcgaaagtgatgtcatgttgtgcacttctcgttaggaggttggaccaaactcctgctttctgatgtcaatccgtgaaaacat

SEQ ID NO: 6958 - DNA, 1016 bp, Zea Mays
catccatgtgcttctcatttcctcggccaccaccaccacacaacacccacacgcgcgccgcgcctactcgacgacctagatagctgctagcgagcctgtccatcgatcggcctcgtgcttgagctcaaacctgttgcatggtgtgcgtgcgtggcatagatagatagacagatcgacgatggcgaggtcatccaacaagaagaagtcgcagcagctgaagcagaagccggtgtcggcgtggcagttcctgttccgcgggtgcctgggcggggccgcgtccgggagcaggcggcggaagaacaaggtccagccgcggtcgtccacgcagcaggggcgggcggcgccgccgtcccccgcgccgtcgtcgtcgacggggctgcagcaccagcggctgtcgctgacggacgtgatgagcacggcgtcggaccaggacctgtcggtgtcgctggccgggtcgaacctgcatgtgttcacggtgggggagctgaaggctgcgacgcaggggttcgtggacagcaacttcctgggcgagggcgggttcggccccgtgtacaggggcgccgtggccgagggcgccaagccggggctccgctcgcagcagatcgccgtcaagctgtgggaccccgagggcacgcagggccacaaggagtggctgtcggaggtcatcttcctgggccagctgcgccaccccaacctcgtcaggctcgtcggctactgcagcgaggaggagcaccgcctgctggtctacgagtacatgcctaaggggagcctcgagaaccacctcttcaagaagttcccgcccgttctgtcgtgggcaacgcgtctcaacatcgcggtgggcgccgccaaggggctcgcctttcttcacgacgccgagaagcccgtcatctaccgcgacttcaagacatccaacattttgctcgacccggtacgtaatcaatatatatatatagtattatatattcacctaatacaattcagctagtttagtcgctatctgctaataatctcttctc

SEQ ID NO: 6959 - DNA, 1532 bp, Zea Mays
atcttttcgtggacacgtagcaggtcgatgatgaggagcggcgacacgtcgtgacggacgttactttcgcgccgtattctagtcttctagagatatccatccagttctcgctatatctttttctccccaagaaaaaaaaggcggcgagagcataagaaaaaaacacacacacacacacacacaaagcgcacttttcaaatcgacaaaggggaaaggttcgcttcttctcgcatcttgctttacttcgagtgccatggccgatccggcggaggagaacgttgtctcgccgccaccgacccctgcggccccagccgtgggcgcctcagactcgcccctgcagcctgttgctgacggcgcctcaacggagaaggtgtctgccccggcgccggaggtaaggtcccggggattcaggcttcttggagaggacacttccgtgcacaaatcccttgggggcggtaaaagagaactttctgcagctgctgacgttctgttatggaaagacaagaaaacttctgctgttgtaataggcggcgcaactgtcatctgggttctgttcgaagtgcttgattaccacctcctgaccctgatatcccatgtactgattggtgtgcttgccaccttattcctgtggtccaaagcaaccacgttcatcaagaagagtccaccggatattccagtagtgcaggtatctgaggaccttgttgtgaatgtttcacgggcattacggaatgacatcaacagagcgcttcacttgttccgtgagatcgcaatggggcatgatctgaagaagtttttgggtgtgatcgtgggtctgtgggttctctccggagttggaagcagctgtgacttcctcacgttgacatacattgccgtcctgatgctccacacggtgccaatcttgtacgacaagtaccaggacaaggtggaccatgtcgctggaagggcacacaccgaggccctcaagcagtacaaggtgctggatgccaaggtcctgagcaaaatccccaggggtgcggtcaaatccaaaaagcagaactagttaggataagccgcagattgtgaatgcccgtatcatgagtatcgggcttgtggtttgcatggcatatgtaaatctgtctgttggcttcagcttggttcttctgcgactactttgttgatgttattatagtcctatgtatgtactgtgtacatgacagatgttcggacgtctcggctactgctgtagcttgtaaattccagtggtgcgttgctaagcacgatgctccccttgttttatgtggtgttggactaatgattactacactaaggtttaatgactcaattaggatcattttgtgaagaaacattttgtgaaaaaacatttggatcataatcttgaactaaaaactaaaatttatttagtattctatcattttgtgaataaatatttgatcataatctattatcacctataggtttaggtgtctataggtatccttgttttcacataaacactagttaccactggaaattattatttttatttgcatggt

SEQ ID NO: 6960 - DNA, 3492 bp, Zea Mays
ccgcacttcacatcgctctcccgctttcccactcccgcgtcggctcccagcaccagctactcctccacggtgcacggccgcatcagcacgatcgctgcctagcctgcctgcctgccctgctcccccaccatgctgctctcgcgtccccaaaccctgcccctgccccgggcccggctctcttccccgacccttcgccacctccgcgccctcgccgcgccgctccgcgcgctcgtctcgtccccgccactagggttcacgtccgcggcgcgaggccccgctccgctccgcgcggcggtgtccgagtccgatcgcgagcagcgggaggctggggtggaggcgggggagcaggggaggccgctccgcgtcggcctcgtctgcggcgggccctccggcgagaggggcgtctccctcaactccgcgcgctcggtgctggatcacatccagggagaggatttggtcgtctgctgctactacattgactgtgctatgaaggccttcgcgatatctcctgcgcagctatattccaacacaccttcggattttgacttcaaacttgaaagtttagcccaagaatttgattccctatctgacttcgcggagcatctcgccacaaatgttgacattgtcttcccagtgatccatgggaaatttggtgaagatggaggcattcaggagcttttggagaaagcaaatgttccatttgttgggacaccctctaaggaatgccagcgtgcttttgacaagcataatgcgtcgctcgagctcaacgcacaaggtttcttaacagtgcccaactttcttgtggagaaggacaagttggctaagccggagttagaggcatggttccaaaccgtcaatctgaacaaagaaaatggcaaaacgattgtcaaacctacaagggctgggtcaagcattggcgtagttgttgcttatggtgtgaatgatgctgcccagaaagctgaggaaattatttcagagggaattgatgataaagttatcatagaggttttcattgaagggggcactgagtttacagccatcgtggttgatgttgggattgctaacaacagtgagcctgttgttctgcttccaacagaagttgagcttcagtactccaacaatagtgataccaaggaggacacaatatttaactaccgcaagaagtaccttccaagtcgacaggttgcttatcattctcctccacgttttccggcagagctgaaaatagtgacaaatttggaaataccaagtatggaagtgttcttttcacggatatcaatttgataagtgggatggagcaaaccagctttttgttccaacaagcttcagcggttgggttctcacactctcgaatccttcgtacagttgttcagcatgcttgctcgcgattcccttctcttcttccatgcaataatgcttggaccgctttgtccagaaaactacaaccatcaaaacaagtagaagcaatccacaaaggaacatcaagacagaaggtttttgtgatcttcggaggggacacttcagaacggcaagtatcacttatgagtggtaccaatgtatggcttaatcttcaaggttttgatgatcttgacgtgacaccgtgtttgcttgcacctgcacatggatatttctcctcacatgatcaagatttcagtgacagttcaagagaagtttggacgttgccatattcattagtgttacgacataccactgaagaagttcatgctgcatgtgttgaggcaactgagccagaacgagttgaaataacaaaacgtttgcgtgatcaagtaatgaatgaacttgggtcagcattgagcaaacatgattggtttgcgggctttgacatagcttatgaacaacctatcaaatactctctgcaacagtggatcgaccatgtaaaagaaactgaagctgtagtctttatagcagtgcatggtggcattggcgaggatggtaccattcagacattgttggaatctgcaggagttccttacacaggaccaggaccaatagcgtctagaacatgcattgacaaagttgcaagttcacttgctgttgaccatcttgctagttatggaatccgtatcattccaaaggatgtaagagcaacagaagaagtactgaactcatctcttgttgatatctggaatgaacttaaagcaaaactagaaacagaaacagtatgtgtgaaaccagctcgtgacgggtgctcgactggtgtagcaagattgtgctgtccaaaggacctagaagtctatacaaatgcattgaggaggaagtttcagcatctgcctgctaattgcctgtccagggcacatggtgtaattgagatgccagtcccttctccagagtcactaatatttgagccttttattgaaaccgatgaaattatcattgcaaataaattagaggatggtagtgcccgccatcttgtatggaaaggtgaaaatgactggcttgaaataaccgttggtgtagttggcaaacgtggagaaatgcactcattaaatccaagtatcacagtgaaagaaagtggtgatattttatctcttgaggagaaatttcaaggtggcactggaatcaacttgacaccacctcctgcaacaattatgggcgaggatgctctgcagaggtgcaagaagagtatcgagaccatggcaaacgctctaggtttggaaggcttctcacgcattgatgcatttgtcaacgtgcgaagcggggaggtgctgctgattgaagtcaacactgtacctgggatgactccatccaccgtgctgatccaccaagcactcgcagaggaaccgcccgtgtacccccacagcgttgcgcggtcgtcgtgcacatcagagcagagcagaagcaaccctccacggacgtcaagtcaaaccaacacgtccgggccacaatatggaaagctagctatacaagtatcgtggaatataaactctcaaacttaccaagttttcatcacatcattaatatagaggtttagttctcgacattgaaatcagcagtaaaaggattgggtggactgaatgatgcagcagcttatcatcagtgtgtaccacatcaaatctgtcattgagttcttgactcttagggcatctatagcctacataaataaccagtagcatgttcggttgcaaagtgtttgaaaattgaatagaaagatatttaatcttcttcaatcccctatgatccatgcgtaacctgacaaggcctatgtagtatctaaggagataaatgtaaaaaaacacaagatatatgttgatgatggaacgcatgtagcacagtttactagtctaagatgcggtttcactcaaacaacctatataaatgaaccgtgtcacgagggattctagtgaataagatacaaacctctgatacatttggttttataaacgagtttgaataagatacaaacctctgatacatttggttttataaacgagtttcttagatgtacctagtgcttggagaactataacatat

SEQ ID NO: 6961 - DNA, 3203 bp, Zea Mays
cacagcgacggtcatcaaatcgtgctcaacttagtggccaaaccaccggtcctacctggtggcacccacgcaaaggcaacagaaacggagaaacccacgacaagcccaaacaaaaactcaaaaaaatctcgcctgccatctcgcggtccagccccgtcgttcacctcaatctccacgcgtcaccgccgccttccggcgagtctattcccctccgccacgccgtcgaagctttccagaccccgcagcggttcggataaggcggccgcccgccacccgccctcgtttcggccccactcgtctcggccccgggaccgcttcggggtggatctagggttgcgtggggaggggttctggaagcctccgccgcgatggacgaggcggacgatgacgcccgcaccttcaaggtcggattcaccgccgccggagagaagcagttccgggagctcgtgagggagaagctgcgcgggttcaggaggggcctggacgacaccctcctggattatgttactatcatgctccagaatggaaaacgtaaggatcaagccagtatggaactccatgtatttctaggggatgatagtgcagtattcgtttcctggttgtgggaacatctttctttaaatatgcacttatatgtgcaagcacaagaacaaactcaggtggttaaggatgatgaggcccccaaagaagtatctggaaaagataaatcatcagatatgttcccaagaagcaaatgtcaaactcattctgagcacccaattgaatcaagtgcagccactactaggaaacgtgataagcgggaatggaagggaattggtcgggcgggtaatgaaaaatttccacttcgaaatgtactaactgatattcttcacggggaagagaaaaaatctcaaaagtccaatgaaatacgatacccttcatcaaaacaacagaatggcagaaagcgtgacagggatgatgaaccacaacaagcaaagagagacacctcatcacgccccatgcttggtggtggtgcttcccgtcgtcttctacagtttgctgttcgagatgcagtaaaagctgtacagccagccagcacctctgctgaaccagcatccaagcgtctgcgctctgtggttgccactacttctgcagagaacatgcgtgataggagatcagaaaaatctcaggactacctgaacgatagaagatcagaaagatctcaagataactcgagtgacagaagatcagaaagaactagaccaatgctacaggtacaaggagctgctttagctcttagagctgcagcggaagctgctgcagattctacaaaggctagatctactggaagtgttttcaagcgattgggtcaagggaatgttgtgaaacaaccatctcgttctcgtgaagagaagagagattatgctgattttgagccagttacgaccgcaaatgaacatggttctgatcgatatgttaataatgaggaatctgaagaggaatatagagagctaaccatggctgatagggtagcaggaatgaatgttgattcgggctctgaagatgatgtggaccgagatgagggggttacaagataccaaacttctatttcacatgaagatactttctcatcatttgcagagaagaaaactgtatcggcacaatgcagtgttgaactagagaccgatgcaataaggccttcaagtgtgaatcacgaggagcaacctgtcccttcattaacaaatacaacaagtaaagctgtgtctatttctgttgatgtaaatatggtggaacctcccagttatgaaacaccaaaagatgttcatgttgtggagaagccttatgttgcacccatgaattcaaatgccacaagtgtggctaccaataccaaagaattaggccatgcagaagttcaaaaggattctcagcggtctgcaccatctgttccggtttcatatagcacatcacatccgacagtggatgcagattcgagaacactttatgttagcaatgttcactttgctgccaccaaggactcattatctcgccatttcaacaagtttggtgcagtactgaaagtagtcattgtcactaatgctgcaacgggtcagccaacagggtctgcctatgtagagttcttacacaaagaatcagctgaacgagcgttgtcgttgaatggcacatcatttatgactcgtattctcaaggttgttcgacgaagttctcatgaagcagctcatttttatggttggcctggtattggacgatcatcattatatggtaggcatggtaggatggcatacccaagagctgttcaccccggtggttcctttagagggcgtgctccgatgaaagctggcgctagaagtttacagtggaaacgggagccttcaggcactgattcaagtgcaggtgcgaaaaatgacatgagtgtgccattttcctgtgaacaggtcctcccgccggcaacataggggagcatactatagctgatataatgagaactgaatggtatgttactcgtcgcccctaatggctgaatatggaaagcaagctgagaagattgttccttcctgatgcagcgtaaaacaaaagtccgaaaaaacatgaaaatacaaaaaaaacaacaactaaaacttaaggaaaaaaagagggggagtttggcattaggatatggcttatcattctggtaaccggattgggtcgtctttgccatatgcgagtaggatgacagcctgagcaattttctgtggactccagctatctgaaaaaaggattcacattcgaaataatcacaacatttgggttgtgttggatggaagatgcttatcagtagaacaagatgggcagattttggacgagctactcatcatgtgggttgacactgctcgtcgttggaggacttgtatatatctttttttgcggggaggacttgtatatatctggccattagtttactgactaatggtgcatgctttgggaaaagtaatttgttggaagcttatattaactctaaaaaggcaaaaaatggcctttttcttctgtcttgtttccttggaatcacaatgctttatgtggtaaacatctttggttctcggatgggtgcgggtatggttgcgtaggagcaaccgttatgcatttatgtactctcaagtattctagtcactttaggtttataaatgtatatatggatatggacacaggatgtacttgatatgtgcgcg

SEQ ID NO: 6962 - DNA, 2141 bp, Zea Mays
gtctccgtaccttccgttccctttctcccattcgcacgccgccccgtgccgtcctcctcccagatctcgtggtctcgtggccgtcgccattcccccccgctccgctacacgccgagcgcaccgattgcaaatcagtcgtctccgctgctcctcgccctcgccccgcccgcggcgtggtgaggagaggagatcccccctgaggttgtacgagacggtgcttcaggaccgccctctggcgcggaggacgcataagctcggcggcggcggcggcgacatgaagggctcgaccatcccttcggtcgcgatcatgccctcgccgctcttcctctggcggtttaaggttgtgttgtttcttctatggggcttatgttgttgcaagataggttgggactcagttatgagaatgagtgttgatctcagagacctatttctttatgaggctttcttgtactataatcctcttcttcttgtggccttgatgatttggttgtggggagtaaatctatgggtctttgcacaatcatctgtgaattatgcaaaagtgtttgatcttgcacaaacacatttatctcaccgtgagatatggaggtgtgctacttggttgacgttaattgtccccactagcatgacagcctacctatatctgtactcacatggagaagtgtcccttgcagcatctcaaccagttctcttgtatgctattcttctgatgatcctcctttctccttttgatatgttttacttatcatcacgcttttactttctgagaacagtctggcgtataatactgcctttacaagcaattacatttcctgacttctttttggctgatatttttacatccatgtcaaaggtatgtgttagtttaccgagaagtgttgattgtagactgtttttcttgttcgacacatcccaacttggagacaaaatgtcaggaccagacttgtcatattgtgtttagtataatatatagtaatacatttttagtagacattaccttttgactatatgacacattcatgctgttccttagttttcaaaatcagagaagtgattctaagttgtaactcctccattgttttgagttatagcatgttttatctttgatgttctgttttgccatttgttgtttttcttcaactctacacaggtgttctcagatctggagcgttcggtttgtcgtatggtgaatcgccaggttgcaacaatcgcttggtttgaagcagattctatttgtggcagtcattccgtagctattcctcttgttctcgtgtttccctacttgtggcgtttcttccaatgtctccgtcagtacaaggatacaaaggagaagacatgtcttttcaatgctctcaagtactcgacagcaattcctgtgattttcctttccgctctcaagtatcatgtatatcctgatcaatgggttggcttctaccgccccctctggcttatctctagtgttgtaaattcactgtattccttctactgggatataaagcgagattgggatttgagcatcctaaccaggattttcatgttcaaaaatccaagcatatggactaatcttctttacgggcagaactgggtattctactgggtactgggcagcaacttggttctgcgatgcacatggacatacaagctctcggcgcatctccggcacaactacctgacagtgttcaccatagcagctctggaaatcctgagacggtggcagtgggtgttcttccgggtcgagaacgagtggaacaagatgacggccaaacaaaacttggagatgtcatctgacatgccttccgaaggggacaggctactggattcgagtaaccacacagtgtgagctgaacagcagcctcacatttctcgatacagattcattgccattcttttagcgtgaccattgtggccaatcttacgtcgacggttcagattttgtctgtagagctcaaaaggtcaaagggatacacaataggtttctatataaaaaagttgaaatttgttggcggcttcggatgttatacctcttgaggatgtatactgttatagccctcttgaacgattgaatctaacaggaggtattcgttgagacatgaaagaataaaagtaatgctgaaattttacgaaacttctttcaggttgtc

SEQ ID NO: 6963 - DNA, 1110 bp, Zea Mays
aaaaaagagaggagattactgcaagtttggtcaatgggctgtggttaatggtacaaggttgagtctgagttcttgccactttacagcacctatggcattggtttgactacatggagtcctctggcttcaggagtactatctggaaaatatggcaaaggggacatacctgctgatagcaggtttgccctagacaattacaagaacctggcgaacaggtccctggttgacgacacgcttcgaaaagtgaatgggctaaaacctatcgccgctgaacttggcgtttcgttagctcagctctcgattgcttggtgcgcgtcgaaccccaatgtgtcgtctgtgatcactggagccaccaaagaaagccaggtacattttccgaacttctcctaagcaagtgcggtagtgaatactgaccgtttggcgaaccgcacgagcagattgtggagaacatgaaggccctagatgtcatcccactgctgacgccggaggtcgtcgacaggatcgaggcggtggtccaaagcaagcccaaacgcaacgtcgagtcatacaggtgaaaattcggtgttcatccgacggagttcaggcctcctccacgaaacttcatccatgatccgtgtgtattctgggcgtggtgctgtgttcacaaacacaagtctgtcagtcctgtgttgtgtattctgctttccgatacagattttggaccaattcaatcctgcattgtgttgcttgcgagcagaaagatttgttggatgaccatgatcctttctggtcgtgctgcaagatttctggagcgtgagatcctctgctgtatcactgtatcagcagctcatgctgttggctgttgcttgcagaaatattcgagtccgttttagcagaatcctgccccatgattctctagcttggagacccgagttatcatcggtagagtgatttcgagtgtttctctagcagaagtcaatttatctgataaaaaccatttgacaagccgtatgtaaagtggtaaagtgagataggttaaagagtaggttgagagtgaccgaaaacagaattttttggctcaaaatctctactacaaagcaccatggatcagtttagttttttattgtttgg

SEQ ID NO: 6964 - DNA, 2578 bp, Zea Mays
tccgctcgccgtttgggcgcgccccaccgctctggtctgctcgccgccgacagaccacagccccggcccgcgcgcgccttgggtgggtgccggtgccggagcgacggcaatgccggaggcggcgcgggcgcggggcctgcgggaaccggcgggcgagggggaggcggagcaggaggacgagttctacgagtcgctggatcggatcctctcctcctcctgctcctccgcctccgcctccgacgacgacgccgaccaccgccgccgccgcagcaggcgccaccacctcctccaccagcaccagcaccagcaccagccgctgtcctccgcgtacgacgtctggatctccgagccaacctccgtggaggagcgccgccgcctcctgctccagcgcctgggcctcgcctccgacccgccgcctcgccgctcgccgtcgcctcccgcgtctaccccggcgtcgccaccggcgcccccggaggagcccagatccggcgccgggctcgggagccccccgctgacgcggaaccccagctccagcggcggggagcagcaatgccggatccggaacctggacgacggcacggagttcgaggtcggggaggtgcacgaggaggaggtggtgcgggaggtgggcaccggccgccacctcaccttcgaggagttcgagctctgcgttggccgctccccgatcgtgcacgagctcatgaagcggaccaccaccgcggcgtccgcgtccgcctccaatcacgccgcgcccgcggccagcaagccccggaggaagcccgggggcgggtggctgcggggcatcaggcagctggcgggcaccgtcgcgtacgggaggcgcggcgccgacgatggggacaaggagaaggagaaggagaagaaggagagggaggcgcggcgcctcagctctgccaccgatgacagcctcgatggcgccggctcgcgcgatgtaaggagggtccaggtgcgacagtacgggaaggcgtgcaaggagctcaccgggctgttcatgacgcaggaattggctgcccactcgggctccgtgtggtgcatcaacttcagcctggatggacgataccttgccactgctggagaggatcgtgtgatccatgtttgggaggtgtctgagggagacagaaagggtgagttgctcggggaaggttcgctggcaaaggagaatggtggtggctgcagcccgtttctcacgtttcttgggaatgattcaccggagatcgctgcattgtcattcacctgcgctgacatggataagaagagaaggctgaggaagcagagcaatcggaagtctgtagggtctgatcatctggtcgttcctgagtgtgtgtttggtttcagagacaagccagtttgctcgcttctggggcatgccgctgatgttcttgatctgtcatggtccaaatctcagttcaatcctgtggatgacaacttcttcattagtggatcactggatgagaaagttcggatttggagtgtccgtgaccgtaagattgaggattggaatgatcttcatgagatggttaccgctgcttgttattcccctgatggacaggttgcaatggtgggctctcacaagggatgctgtcatatatttgatacatctgagaagaagcttctgtacaaaagtcagatagatttaagaattaggaaaaagaaatctggccagaagaagataactggattccagattcaagaatacgtgttgttaacggcgatgaatttgttcacaagtttaaagggcttcggaacacgagtagccaaatctcagcttctgtagctccgaatgggaaatacatcatctgtgccagcgaggattctcacgtctatgtgtggagacatgacaacagttcccaccctagtaggaacaggatcacagttgatgtaaccaactcatatgagcatttccactgccatggcgtgaccgtggctgtcacatggcctggtgctgaagcccggggctcgtttggatctcgaagcagcaggcacagcgattcagatggagcagtgaactctggccgagacatcccagctgagaacagccagcacaattctgacgcaggcaccagtagacatccaggcgatagagcatccacatcctggcctgacgaaaagttaccgtcagccaagagcagccctggtcactgctcgtccgatctttgcattggagctatggatgtccagcgccggtctgcgtgggggttggtgattgtcacagctgggcggggaggcgagatcagggtgttccagaattttggcttcccggttcaagtgtaaagctagcgtgagtgagatcatgcagatagggtttgtttggttctttactgtatataccatcggtagatgtagattgccgacagttttacgaaaacttccctgtgtttctctgtctccttgggtgcttcaagattgtacccccagaaccacactatcatatagttagcaatatcacttgttgatacaatacacagagctctgtaactgtatgcttagcacacatcaacttaatttgttctcatcatgtatttttctacacacagtgatgtacaaaatgaaaatatttttc

SEQ ID NO: 6965 - DNA, 2657 bp, Zea Mays
tccgctcgccgtttgggcgcgccccaccgctctggtctgctcgccgccgacagaccacagccccggcccgcgcgcgccttgggtgggtgccggtgccggagcgacggcaatgccggaggcggcgcgggcgcggggcctgcgggaaccggcgggcgagggggaggcggagcaggaggacgagttctacgagtcgctggatcggatcctctcctcctcctgctcctccgcctccgcctccgacgacgacgccgaccaccgccgccgccgcagcaggcgccaccacctcctccaccagcaccagcaccagcaccagccgctgtcctccgcgtacgacgtctggatctccgagccaacctccgtggaggagcgccgccgcctcctgctccagcgcctgggcctcgcctccgacccgccgcctcgccgctcgccgtcgcctcccgcgtctaccccggcgtcgccaccggcgcccccggaggagcccagatccggcgccgggctcgggagccccccgctgacgcggaaccccagctccagcggcggggagcagcaatgccggatccggaacctggacgacggcacggagttcgaggtcggggaggtgcacgaggaggaggtggtgcgggaggtgggcaccggccgccacctcaccttcgaggagttcgagctctgcgttggccgctccccgatcgtgcacgagctcatgaagcggaccaccaccgcggcgtccgcgtccgcctccaatcacgccgcgcccgcggccagcaagccccggaggaagcccgggggcgggtggctgcggggcatcaggcagctggcgggcaccgtcgcgtacgggaggcgcggcgccgacgatggggacaaggagaaggagaaggagaagaaggagagggaggcgcggcgcctcagctctgccaccgatgacagcctcgatggcgccggctcgcgcgatgaattggctgcccactcgggctccgtgtggtgcatcaacttcagcctggatggacgataccttgccactgctggagaggatcgtgtgatccatgtttgggaggtgtctgagggagacagaaagggtgagttgctcggggaaggttcgctggcaaaggagaatggtggtggctgcagcccgtttctcacgtttcttgggaatgattcaccggagatcgctgcattgtcattcacctgcgctgacatggataagaagagaaggctgaggaagcagagcaatcggaagtctgtagggtctgatcatctggtcgttcctgagtgtgtgtttggtttcagagacaagccagtttgctcgcttctggggcatgccgctgatgttcttgatctgtcatggtccaaatctcagtacctgatctcatcctccatggacaaaactgttaagctctgggacatcactaccagtacctgtttaaaaacattctcacatacggactatgtgacttgcatccagttcaatcctgtggatgacaacttcttcattagtggatcactggatgagaaagttcggatttggagtgtccgtgaccgtaagattgaggattggaatgatcttcatgagatggttaccgctgcttgttattcccctgatggacaggttgcaatggtgggctctcacaagggatgctgtcatatatttgatacatctgagaagaagcttctgtacaaaagtcagatagatttaagaattaggaaaaagaaatctggccagaagaagataactggattccagtttgctcctggaagctcatcggaagttctgattacttctgcagattcaagaatacgtgttgttaacggcgatgaatttgttcacaagtttaaagggcttcggaacacgagtagccaaatctcagcttctgtagctccgaatgggaaatacatcatctgtgccagcgaggattctcacgtctatgtgtggagacatgacaacagttcccaccctagtaggaacaggatcacagttgatgtaaccaactcatatgagcatttccactgccatggcgtgaccgtggctgtcacatggcctggtgctgaagcccggggctcgtttggatctcgaagcagcaggcacagcgattcagatggagcagtgaactctggccgagacatcccagctgagaacagccagcacaattctgacgcaggcaccagtagacatccaggcgatagagcatccacatcctggcctgacgaaaagttaccgtcagccaagagcagccctggtcactgctcgtccgatctttgcattggagctatggatgtccagcgccggtctgcgtgggggttggtgattgtcacagctgggcggggaggcgagatcagggtgttccagaattttggcttcccggttcaagtgtaaagctagcgtgagtgagatcatgcagatagggtttgtttggttctttactgtatataccatcggtagatgtagattgccgacagttttacgaaaacttccctgtgtttctctgtctccttgggtgcttcaagattgtacccccagaaccacactatcatatagttagcaatatcacttgttgatacaatacacagagctctgtaactgtatgcttagcacacatcaacttaatttgttctcatcatgtatttttctacacacagtgatgtacaaaatgaaaatatttttc

SEQ ID NO: 6966 - DNA, 2739 bp, Zea Mays
acaagccgagcggaagctgtaacaacgacacgaaaccaacaaacctcgcgtataaatccgctcgccgtttgggcgcgccccaccgctctggtctgctcgccgccgacagaccacagccccggcccgcgcgcgccttgggtgggtgccggtgccggagcgacggcaatgccggaggcggcgcgggcgcggggcctgcgggaaccggcgggcgagggggaggcggagcaggaggacgagttctacgagtcgctggatcggatcctctcctcctcctgctcctccgcctccgcctccgacgacgacgccgaccaccgccgccgccgcagcaggcgccaccacctcctccaccagcaccagcaccagcaccagccgctgtcctccgcgtacgacgtctggatctccgagccaacctccgtggaggagcgccgccgcctcctgctccagcgcctgggcctcgcctccgacccgccgcctcgccgctcgccgtcgcctcccgcgtctaccccggcgtcgccaccggcgcccccggaggagcccagatccggcgccgggctcgggagccccccgctgacgcggaaccccagctccagcggcggggagcagcaatgccggatccggaacctggacgacggcacggagttcgaggtcggggaggtgcacgaggaggaggtggtgcgggaggtgggcaccggccgccacctcaccttcgaggagttcgagctctgcgttggccgctccccgatcgtgcacgagctcatgaagcggaccaccaccgcggcgtccgcgtccgcctccaatcacgccgcgcccgcggccagcaagccccggaggaagcccgggggcgggtggctgcggggcatcaggcagctggcgggcaccgtcgcgtacgggaggcgcggcgccgacgatggggacaaggagaaggagaaggagaagaaggagagggaggcgcggcgcctcagctctgccaccgatgacagcctcgatggcgccggctcgcgcgatgtaaggagggtccaggtgcgacagtacgggaaggcgtgcaaggagctcaccgggctgttcatgacgcaggaattggctgcccactcgggctccgtgtggtgcatcaacttcagcctggatggacgataccttgccactgctggagaggatcgtgtgatccatgtttgggaggtgtctgagggagacagaaagggtgagttgctcggggaaggttcgctggcaaaggagaatggtggtggctgcagcccgtttctcacgtttcttgggaatgattcaccggagatcgctgcattgtcattcacctgcgctgacatggataagaagagaaggctgaggaagcagagcaatcggaagtctgtagggtctgatcatctggtcgttcctgagtgtgtgtttggtttcagagacaagccagtttgctcgcttctggggcatgccgctgatgttcttgatctgtcatggtccaaatctcagtacctgatctcatcctccatggacaaaactgttaagctctgggacatcactaccagtacctgtttaaaaacattctcacatacggactatgtgacttgcatccagttcaatcctgtggatgacaacttcttcattagtggatcactggatgagaaagttcggatttggagtgtccgtgaccgtaagattgaggattggaatgatcttcatgagatggttaccgctgcttgttattcccctgatggacaggttgcaatggtgggctctcacaagggatgctgtcatatatttgatacatctgagaagaagcttctgtacaaaagtcagatagatttaagaattaggaaaaagaaatctggccagaagaagataactggattccagattcaagaatacgtgttgttaacggcgatgaatttgttcacaagtttaaagggcttcggaacacgagtagccaaatctcagcttctgtagctccgaatgggaaatacatcatctgtgccagcgaggattctcacgtctatgtgtggagacatgacaacagttcccaccctagtaggaacaggatcacagttgatgtaaccaactcatatgagcatttccactgccatggcgtgaccgtggctgtcacatggcctggtgctgaagcccggggctcgtttggatctcgaagcagcaggcacagcgattcagatggagcagtgaactctggccgagacatcccagctgagaacagccagcacaattctgacgcaggcaccagtagacatccaggcgatagagcatccacatcctggcctgacgaaaagttaccgtcagccaagagcagccctggtcactgctcgtccgatctttgcattggagctatggatgtccagcgccggtctgcgtgggggttggtgattgtcacagctgggcggggaggcgagatcagggtgttccagaattttggcttcccggttcaagtgtaaagctagcgtgagtgagatcatgcagatagggtttgtttggttctttactgtatataccatcggtagatgtagattgccgacagttttacgaaaacttccctgtgtttctctgtctccttgggtgcttcaagattgtacccccagaaccacactatcatatagttagcaatatcacttgttgatacaatacacagagctctgtaactgtatgcttagcacacatcaacttaatttgttctcatcatgtatttttctacacacagtgatgtacaaaatgaaaatatttttc

SEQ ID NO: 6967 - DNA, 915 bp, Zea Mays
gcatggtgctccagtttgtcattagtccatgacaaggggctcgagcagggaagcgaagaacagggaagcaaggacatggatgctttcagtgcagtgatggacaaggtaaagagccacccagaaatgatggagaaggtaagtgcagtgatggacaaggtgaagaagagccacccagaagcggtggaaaaggtcaaggacgaggtgaagagccttgctgacgctctccacctgcggagacatggatccaaagataaagaacctgagtctgaagagaaggccgtagaaggcgaggcagcgcagagcgtcgaggaggaggagggtacctctgctgacaagactgcagaacctaatgtgttggagcaggccgtacaggagattcaggctgtcgccgcagctttgcagcagacagcacctgaaactgaaactgaaattccagttgagactgctgctgctgctgctcctgaaactttggctgaaggagacaagcctgaagaaacaaacagggatgtggagaaagacgacccaaagaagcggctcgatttcgccgggttcttcgccatgctgtttgagaggttctgctccccggccaacaagaagaaagactgagtgattgcaggtcagctgtggatttctcgttttgtgatcttggacgtggaaattacattttactgggtggtgtacagtctgcacttgtgttctattaagataaatctgctcttgcttttttactttcttctggtgcaatgactacagtttacttgatgtatttattgtcgcccttgtggaattgatttagtttatgtgaacgattgatttattttgggttaagataatgcagtgagtgtgtgatgccttgtatggacatgtgagaaccgattttgctcattgtgaacaaaattttagccctactcaagc

SEQ ID NO: 6968 - DNA, 1486 bp, Zea Mays
tgtttaggccgtcgagcgttggccgcgcgtcgtatacgaagtccgagcccgacccgcaacccgaaacccgtctcgcctcgccaaggcaaggcttcctttcctctcccttcccgtccaagatggaagcagagtacccccaccagcaggcggccccctcttactccacgaccgccaccgtcttctggccgtacgcgactcgccgcagaaagagagccgaggacggcagcgacctctcgctggcgtcggatatggatctcgacgccgacgcgcagcgcgccgcagataagctgaaagcagtgtcagaggaacttggacatgagatccgggttttttcaagtgagaactttgctctacaaccgagcaagctgcctagtgcagatcatgaggaaggtgacgacttttatgagcttcagcctgctgattactacaacttgatttcaaacaggatgggagagctatctaaaatgctaaagactcgcaagatgcgggaagcagaacttgctgctcagcgagcaaagcgaacaaaggcagtaatgagggtgcgattccctgatggctacatacttgaggctgactttcttccatcagagaggattcatagtctagtggacctgctcatgaaagtacttgctagaccagatctgccattctatctctatacagtacctccaaagaagcgaatactggacacatcacaggacttctatacatctggttttgttcctggagctaatgttcatttttcttatgatctgcccgaagatgatctaaaagcaggacccttcctccgtgaaggaattctaagtttggatggattgtcacttctgctgaaacctgctagtcaacctgatgattctagaatgaactcttctactcatcaatctggtgcatctcaatctgaccctgtaccaacaacaaataagaagcctggcagaccaaagtggctgaaaaggtgataccactccaggcgtcaggtgtgtgctttcaacacagaatcagtctgtaaacactattcatggttgaacaagtttaaagtttggacagactacactgctgcagtacaaggattggaccctctgcccactgaagctgttgggggcattataattggggccccacctttttgtaggtgggagacaagtagcatgtaaacttgaatgtgttgctgactcaaacagaacagtgctctgctctggctaagcacctggccatcttacacatcgtgtaagccccatagtaacttgaatgtgttacacatcgtgtgcctgtctttgctatccagtctttacacagcatttcaggaaacagaaagtgcttgaaagtgtaccaagtgtggccgtgtggggtttcagttcgcccatgatattgtggcaagtcgctttcttgtgattgatggtgatggtgccctcaccagcgactaatttgtcgccaaatggcatgtgttttcttcttatgatggtgacttgctgtccagctataccctgtg

SEQ ID NO: 6969 - DNA, 3028 bp, Zea Mays
ttcctacctgcccccagccttctctcccacctccaatggcgctgctcttgccacctcccgccctctccacgacgcctccatttctctccgctccccgaccagcacggctaccctgtctcagatgcactagaactaccaccgccacctcaagcgtctccacctgtcctcccgcatcgacgtcttctccctcgacctcctcgccggtggcgtcggacggcgcagttggaaggaagagcaagaataagagcaggcccctcaagccgagttttgaggaacaggccctccgccgctggtccgcccgggcaccttcccagcgtgcctcggtcccctgggaacaacctcagcagcagtcgcctttgccgccttcgctgccgcaccgggctggccgaggaagtggtgatgcgggcgatcaaaaacgcagtggtggaggctcaagcgcaacgttgcgctccatcgtggactactttgctggcggctcctccgatgacgaaggagttcgagtagaggaaggggcgtgcgacaccaccgcagtaccggaccaagcggcacgggagcaggacgatggatcgcattttcggccgagctatctgcttgggagccacccattctctgcgccatggattcacagggaggaatcgaccaatgataggggggtttccggtccggtggccgaagaggaggaaaggttggacattcgtgatgcttctgatgatgaactgggcttggtggatgaggataaggaagagacggataatggtgaggagcttcttactgggggtttagaagatgaattttatgatgattatgccacaccaactatgaattcttcatatggagtggatttgtcagtggacaaagatgcttatggtagcaggttcgataggagtatgatgcagagcagtgtaaacaccatagttaaaacattgaggaattcgatggaggaaagtgacccgaatgccacggttgagttgtctaatgcagaagattttgtccagaaattgggccctgcactcctgccatgggaaagggaggaggaagatgatgaggcattcagcggtggcagggcggtgaggcgcagcaacacggagctggccgagaggtctattccagagcctgaactgcggaggcttagggacacggcgttgaggatgaaggagaggataaaggttgggccagggggtgttactcaagacatagtggagagcatccacaggaaatggaaggtggatgaggtggtcaagatgaggtttgaaggccctccaagcctgaacatgaagagaactcatgatttactagaggacaggactgggggagttgttatatggaggtcagggagatcagttgtgttgtataggggaatgaattacaactttcaatgtgtgcagtcatatgctaaatttatagaaattgattcgggtaagggagttagcgatgctaatagtgctgtattgagccatgatggtcacaacttacaggcctcaagagcagatggcatgaagagtttaacgtctactggcaatttttctctggagtcctctgaaacatttgatattgataacttcttggatcaattgggaccacggtacaaggattggtctggtcgtggccctatccctgttgatgccgacttgcttcctggtgtagtacatggctacaaaccaccatttagagtacttccctacaagattaaaagcactcttagagataaggaaatgacaactctgcgtagacttgcaaggcaaactgctcctcatttcgctctagggagaaacagagaacaccaaggcttagctgctgctatggttaaattatgggagaaaagtgctattgcaaagattgccatcaagagagggattccaaacacatgcaatgacagaatggcagaagaaatcaaggaggagtgctcttgtcaaggaacaaggagttcattgtcttctacaggggcaatgatttcatagctcctaaagtaaggcaggtcttggtggagaagcaagaacaagccattactcaacaggatgaggaagagctggctcggcttaaagcatcagcctcaattattactatccccaaggatataaagggtcctctagttgctggtactctggcagaaactacagaagcaaaatctagatggggaaagtcagttaatgataagcagagggaagaggagatgaagcatttgtctttgttgaagcatacctctcttttgaagaacttgaagagaaaactgattttggcaaaaacaaaagttgcaaaagcagagaaggctctagctaaagtccaggaatttctcactccagcagagcttccaactgatctggaaacagttacagatgaggaacgcttcttatttcgcagaatcggcctgaaaatgagggcctttttgatgcttggcagacgagaagtttttgatggaactgtacaaaacatgcatttgcattggaagcatcgagagttggttaaaattgttgtcaggggaaagagctttgcacaagcgaaacatattgcaatctctctagaagctgagagtgaaggtgttctcatttcacttgacaagacaactaaaggatatgtaatcattttctaccggggtaaaaactacaggcgaccccaaatcatgaagcctaggaatctactaacaaggaggcaagcattggcacgctctatagagttgcaaaggcgggaggccttaaagcatcacatctcaagtctgcaaggcaagatctcgaagttgcagtcgcaacttgtacaaacaaaggttgcaagtgagaaacatgatctgaagctgcttcaaacagttgaggatgacttctcatcatcagatgatgatgtagaggatgatggggaagaagcttatttgcagacttacagcagcgctgatgaagaagatgccgaggatgatgctaatgaatatatttagactggtgcggttataactaatgaggcttaaggtggtcgtgttatgttctgaagcagtaaaagttcaatggtaaagacagtctccacgtgactacacatctgcaacgcc

SEQ ID NO: 6970 - DNA, 3230 bp, Zea Mays
ttctctcccacctccaatggcgctgctcttgccacctcccgccctctccacgacgcctccatttctctccgctccccgaccagcacggctaccctgtctcagatgcactagaactaccaccgccacctcaagcgtctccacctgtcctcccgcatcgacgtcttctccctcgacctcctcgccggtggcgtcggacggcgcagttggaaggaagagcaagaataagagcaggcccctcaagccgagttttgaggaacaggccctccgccgctggtccgcccgggcaccttcccagcgtgcctcggtcccctgggaacaacctcagcagcagtcgcctttgccgccttcgctgccgcaccgggctggccgaggaagtggtgatgcgggcgatcaaaaacgcagtggtggaggctcaagcgcaacgttgcgctccatcgtggactactttgctggcggctcctccgatgacgaaggagttcgagtagaggaaggggcgtgcgacaccaccgcagtaccggaccaagcggcacgggagcaggacgatggatcgcattttcggccgagctatctgcttgggagccacccattctctgcgccatggattcacagggaggaatcgaccaatgataggggggtttccggtccggtggccgaagaggaggaaaggttggacattcgtgatgcttctgatgatgaactgggcttggtggatgaggataaggaagagacggataatggtgaggagcttcttactgggggtttagaagatgaattttatgatgattatgccacaccaactatgaattcttcatatggagtggatttgtcagtggacaaagatgcttatggtagcaggttcgataggagtatgatgcagagcagtgtaaacaccatagttaaaacattgaggaattcgatggaggaaagtgacccgaatgccacggttgagttgtctaatgcagaagattttgtccagaaattgggccctgcactcctgccatgggaaagggaggaggaagatgatgaggcattcagcggtggcagggcggtgaggcgcagcaacacggagctggccgagaggtctattccagagcctgaactgcggaggcttagggacacggcgttgaggatgaaggagaggataaaggttgggccagggggtgttactcaagacatagtggagagcatccacaggaaatggaaggtggatgaggtggtcaagatgaggtttgaaggccctccaagcctgaacatgaagagaactcatgatttactagaggactgggggagttgttatatggaggtcagggagatcagttgtgttgtataggggaatgaattacaactttcaatgtgtgcagtcatatgctaaatttatagaaattgattcgggtaagggagttagcgatgctaatagtgctgtattgagccatgatggtcacaacttacaggcctcaagagcagatggcatgaagagtttaacgtctactggcaatttttctctggagtcctctgaaacatttgatattgataacttcttggatcaattgggaccacggtacaaggattggtctggtcgtggccctatccctgttgatgccgacttgcttcctggtgtagtacatggctacaaaccaccatttagagtacttccctacaagattaaaagcactcttagagataaggaaatgacaactctgcgtagacttgcaaggcaaactgctcctcatttcgctctagggagaaacagagaacaccaaggcttagctgctgctatggttaaattatgggagaaaagtgctattgcaaagattgccatcaagagagggattccaaacacatgcaatgacagaatggcagaagaaatcaagaaattgacaggaggagtgctcttgtcaaggaacaaggagttcattgtcttctacaggggcaatgatttcatagctcctaaagtaaggcaggtcttggtggagaagcaagaacaagccattactcaacaggatgaggaagagctggctcggcttaaagcatcagcctcaattattactatccccaaggatataaagggtcctctagttgctggtactctggcagaaactacagaagcaaaatctagatggggaaagtcagttaatgataagcagagggaagaggagatgaagcatttgtctttgttgaagcatacctctcttttgaagaacttgaagagaaaactgattttggcaaaaacaaaagttgcaaaagcagagaaggctctagctaaagtccaggaatttctcactccagcagagcttccaactgatctggaaacagttacagatgaggaacgcttcttatttcgcagaatcggcctgaaaatgagggcctttttgatgcttggcagacgagaagtttttgatggaactgtacaaaacatgcatttgcattggaagcatcgagagttggttaaaattgttgtcaggggaaagagctttgcacaagcgaaacatattgcaatctctctagaagctgagagtgaaggtgttctcatttcacttgacaagacaactaaaggatatgtaatcattttctaccggggtaaaaactacaggcgaccccaaatcatgaagcctaggaatctactaacaaggaggcaagcattggcacgctctatagagttgcaaaggcgggaggccttaaagcatcacatctcaagtctgcaaggcaagatctcgaagttgcagtcgcaacttgtacaaacaaaggttgcaagtgagaaacatgatctgaagctgcttcaaacagttgaggatgacttctcatcatcagatgatgatgtagaggatgatggggaagaagcttatttgcagacttacagcagcgctgatgaagaagatgccgaggatgatgctaatgaatatatttaggccatgtttggatcctcctagctaattgtttgctaatagctaattgtttgccaatagctaacaattagtcggcaaataattagctagcaacaattagctagtgtatgcttggagtcttggctaacagatttctttttctctttatatgatctattagcatttattagtaaggttaaatggctaacgagcaaacagtttgccagtcctccggctcaagggcggattcaaggggtgagcaaggtggactatggccccacctaatttttttgaccccttatacctaggtttagatacacaccaaaataaacaaactttttgtatagt

SEQ ID NO: 6971 - DNA, 1568 bp, Zea Mays
gtcgattcgagttccgctcgccttcgtcttcgtctcgacccacggcccacggcccacggtccatcagcgttcgtcctcccttcctctagcgcctgctgcctctctcactccatggcgtggatctggatggtcctcgcggcgggagccgtgctcctgtgggcgatctctttggggcgggtcctctcctccgccgcgccgtcctgtgtgccctcgagcccgcagttcatgccccctctcagcggtgacaggaggagccggaacgtgctgctggtcgtcgcccaccccgacgacgagtccatgttcttcgctccaaccattcttttcctcaagtcgaaaggccacagtattcacattctgtgcatgtctcgaggtaatgctgatggtctgggagatactcgtaaggaagaattgtaccacgcctgtgtcagcctcaagattccacatgaacaagtcaaagtcttggaccacccaaaattgcaggatggatttcatgagaaatgggaccatggactagtagcagaacttaccatggagcatgtccaactgtgggccattgacacgattgttacatttgattcatatggagtatcaggtcatccaaaccacaaagatgttcatcacggcatatgcaagtttctccatacgaacaggcaagggaacgtggaagcttgggaactagcaagtctcagtattcttcgcaagtacagtggtccgattgacatttggctttcttcattgacgtccttcgcatggacaaaacagccaatctatactctagttaacagtagcccgtccagaagctatgaggcaatggctgcacacagaagtcagtgggtttggtaagtgctataagagtttcgtatttgcattttcatggagatagcattctcttctgccaacttggatagcgtactggagatcaatccacgtagcctctataagttcataacaaagtttctggttgcatcatattcatatcgttactcgcaagatatcatgaccaacatataatgaatcactaacttgctggttgctgccatatatcatcagagatggcatctatcaataccttacctgtatcaggaaacaagaagtaccatgtttaactcagtagttagggattgtctttttttcttgaatatagggaagctctttttttattgaagataatcaacaaattccatgtgtctttccaggtttagaagattgtttgtcatgttctcgagttatacatacataaatatgctacggagaatttaacatgtgatgtggcgtcataccatgataccagagcaagccgccattgtcgtctccaatgttgtacttgtgcatcgtcaattgtacatctatatgtatcactggattttagttgtacattctctatagacagtgctcatagggtgactgtagaatttcttttccccaatccagaattgcactgaatggctgaaatacagttgtctttcaaaagaaactgaaatacagtgatgctcactggcttagcttatgggtatggtcaaacgattctggttcgagtttgacgtccttggggaactgaccgctaacta

SEQ ID NO: 6972 - DNA, 1522 bp, Zea Mays
atacccagagctcctccctctctctctgtctgctgtgctcagataatagcgacacctcctttcctctccctcgaggtgtctctcccagaacgcacagcacagtcgcagaacaggaaggcagagagcagcgccgcgatgagaggaggaggagcggggcccactgcggcgttcatgtccgacgagccgcctccagccgacgcggaagaggtggaggagaactccggcgccgaggaggaggacgaggagacggtggtggagcaggacgacgacgagctggagctggggctctgcctcggctccaagcaacagcagcagcagcatccgccgccgtgccggatcctcacggcccgggacctgcagccgaggtccctgtcaccggattcctccgtgtcctcttcctcccccgcggcaggtgcaggtaccgcggcgccaagcaagagggccaaggcggatgcggcgcccaactcgccagggacggtcgcgtctggccacccacagagctttggagtggtgggatggccacccataagaactttcaggatgaacagcctatttaaccaggccaaagagaatgcatcggaggctggcgccaagaagcccatcgtcgaacctgacatgcaggaagacaaggaggagagcaagaaaggccggaccgtcggttgggtgaaggtgaacatggaaggagatatcattggaaggaaggtcgatctcaatgcccatcgctcttacaagacccttgcctcagcacttgagctcatgttcatgaagccgtccattggtctttgcacttctagcagttcaaagactctaaagctattagacagctcatcggagtatcagctcacctatgaggacagggacggggactggatgcttgttggagatgttccctgggagatgtttgtaggttcagtgaagaggctcaagatcatgagaacctcagacgccaaaggtccacgattccaagggtctcacagacccacagcagcttgcacgagaggcaggacgtgaaaccaccgatgtgcgtttggtgctaacaccgctggtgaagcttgaactgtatttgatatcacgtaacagtaacagcagcccatatcgctggcatagttgtgagattacggggctgtttggtttactgtctaaggcgccacaacatggctaacttttatgtctaagtttagttcttcaattcgaacgactaaacttaggcaacttcattgtgtctagtggaaatagtagaagtttttttttttgcttcttccctgtggtgccctcgttgagcttttcttatgggctatacgagcatcatcgcccccagctcttctgtccacgctgtttacctgtgaggaatggtcgcccaaagtgttggtttttatccttgtgtttgatatggcagaagtatctgctctgctgtttcatatctgtgttcatatctgaattccatgttgccgcacagtatgtctttgctaattgctgtggtctgcaatgcaacgccaaccacccacccgggtgttggatgggg

SEQ ID NO: 6973 - DNA, 2144 bp, Zea Mays
gcgttctcgcttctcttctcgtggatccccaaatcctctccggccaccggcatcgctcctctcccgcccgccgacgccgaccgctcctatccacgccaccgcgtcggtgctcgagttgcctcagagagggagagagagagagagagagggagggagggagggagggagggaacggcgctcacgctgttccgattcgaacgagctcgcccggcgatttttttttttcctggaacgggctggctccgaatctcggcgaagtgtggggagcggctccaccctccaaccaagcaccggatcaaccagaaggcgggcgcgcgggcggcaggcggcggtgctgagaacacgggtggcactgtctggacggacgctgcggatctcggcgattcttcgcggcctgcgtcaagggcggatcggcagcgatgagcggcggcggcggcgggagccccaataacacggagtggcgcttcaaccagaccctccgcaacgtgcaaggaatgcttaaaggacgcagctttcctgggaaggttttgctaacccggcgatccgagcctctctcccctcctgattattctccaagctttgagagcgagcacgatgaagatgagcgcaaggagggttctcgtcaggagggagaaggtcaagcatctggaaactcatttgacaatgcaagttcaaagaaatcaaatattctgtcaacaagtagttcaaattcattgccagatgctcaggggctagtttctggggctagagctactgattctgcaagaattgctaaattcacaacggaactatctaggccagctgttatattagacaaattgcgtgaactatcttggagtggtgtgcctccatatatgcgacctaatgtatggcggcttcttttgggatatgcaccgcctaataaagatagacgagaaggtgttctaacaaggaaaaggctggagtacgtggaatgtgtttctcaatactatgatattccagatagtgaacgctcagatgaagaaattaccatgcttcgccagattgcagttgattgcccaagaaccgtacctgatgttacattttttcagaatcatcagattcagaaatctcttgaacgcattttgtatacatgggctattcgtcacccagcaagtggctacgtccaaggaataaatgaccttgttacgcctttcttggttgtcttcttatcagagcacctagatggcaacatggatacttggtctgtggacaatctttcagcgcaggccatttccaacatagaagcagactgttattggtgtctctcgaagttccttgatggaatgcaggatcattacacctttgcgcaaccaggaattcagcgcctcgtttttcgattgaaggaactagttcgtcgtatagacgaacctgtttccaagcacattgaagagcaaggattagagtttcttcagtttgccttccgctggttcaactgccttctgatacgagaggtacctttccatctcgtaacgcgcctgtgggatacataccttgccgaaggcgactatctgccagattttctcgtgtacatatcggctagttttttgctgacgtggtcggacaagctgcagaagctggattttcaagagatggtgatgttcctgcagcacctccccacgaggacctgggcgcaccacgagctggagatggtcctctcgagggcatacatgtggcacacgatgttcaaaagctctcccagccacctcgccggctaggacccacccaagtccaccatgcctgtaagcggcagtcagttccttctgttttttttttgttaagcgcgtgcatactatactatcggtcgcgtcgcaccgatttgtatattttccgtttcctaccgaggaatgcttatctataatgaacaccagaggacaagtattagtgctcaatttgatattcagaccggtagttgtattgtattgtttgccgcgctcttggtggcgcaaggccttttttttttccccaacaccatgagatgctcgttccctgttttgtgaaacgcagagaagcgctgtggcttgtgaaaattgtgatggtccatactgtcctttttgttttcgtttgatgcattgtatagtatagcatgtgatactgatgctgagtggtggtagcactagcacata

SEQ ID NO: 6974 - DNA, 1775 bp, Zea Mays
ggtgaacgttacttataaaaaagaaaatttggtggtgaaattgacagaaaatgacaacttaaattatcttgaatgtatcattttattgtaagtcttcgtattgatatctacatgaagcaactcactacaatttaacgtttaattgcaggcgatgtttttatcccctgatgagtccaaggtttcaggccttgtgaatacccttaaagagaaaaaaatcgggattgttgcacacttttatatggatcctgaggtgcaaggcatactgactgctgcaaagaagcagtggccccacatccaaatatctgattccttgattatggcagatagcgctgttaaaatggctgaagcaggatgtgactatattacagttttaggtgttgacttcatgtcagaaaatgttcgggcagtacttgatcaagcaggatttaataaggttgtcgtttatagaatgtccagtgaaccgattggttgttcattagcagatgctgcttcaagttgtgaatatactcattttttgagggaagcttcgagatgttatccatctttgcatgttatttacattaatacttcgctggaaacaaaagctcatgctcatgaacttgttcctacaataacttgcacctcttctaatgttgttccaactatactacaggcattttcccaaataccaaatgttaatgtctggtatggtcctgattcatatatgggtgcaaacatagcagatttatttcagagaatggctacaatgtcagatgaagaaattgcaaaaattcatccagaccacaacagaaaatctttgagttcattactgccacgtctacactattatcagagtggtaactgtatggtacatgacatgtttggccatgaggttgtggagaaaataaaggaacaatattgtgatgcatttctaacagcacactttgaggtccctggagaaatgttctctttggcaatggaagcaaaacaaagaggaatgggagttgttggatccactcagaatatcttggatttcattaaggatcatgtgatgggagctctggacaaaaatgtagatgaacaccttcagtttgtgttaggaacagaatcagggatgatcacttcaattgttgctgctgttcaggaattacttcatttttattcttctcaagagagagcaaacatcaaagtagaaattgtgtttccggtatcttcggatgcaatttctaagacatcgaatggttctcatcatgttggttcttcaatggctactgatttggataatcttactattgttcctggtgtgagttctggcgaaggctgctccattcatggtggttgtgcctcgtgtccctacatgaaggacacctctcggaaaatcagttgcagaggttgggtgtgagcctattctgcatatgcggcatttccagaaaacaaggaggttacccaacaagcttgttcaccaggttgtccatggtaatggtgacaaacccttgcaatagctgttcatcaatacttgtatttattttatcaaggcggctggatgatggagtatatctcaagtgaatgccatgtttagctggcataccgaagaaatctccgggacaagattatttgccctgtacggtagacatctggacttgccctgtacgttagacatgttgacatctgcatgcgaattaatgttgaacaaatggggttggtctaattgtaaaaaataattattctgaataaatcttaattgctttgagcgaaactgataaatcttaaactgaataaatcttaattgcttttag

SEQ ID NO: 6975 - DNA, 2400 bp, Zea Mays
gccacaccaacgccacgacatggacgccgccgccgccgcctcactgttgccccgcgccgccgcctcctcactgttgccccgacgcgttctctctcctctccatgtttcccgaagcggcctccttccccgtcaaagctccttcctcgctgctcgctgtgcccactcccgtgcccctcctccacatccgcctctgccgcgcgccgactgcgatgatgctgccgccaaggcgcacccgcgcctccgtctccgcctgcttgcggaggagttccgcgcactcccatctgacgcagatcgcgcgcgccggctcctctcactcgcggccgcgctgccgcggctcccggagcccgaccgcgcccagggcaaccgcgtcatgggctgcgtcgcgcgggtgtggctcgtcgctcgctgcaacgcgtcaacgggctggcggatgtggttctcggcggactccgactctgacctctcgcgtgggtactgcgcctgcctcgtcgccgcgctggacggggccaaacctgaggacgtcctcgccgtcgaccccgccgatcccgacctcgcgccgctcggggcggggacaacggcggcctggtcgcgggccagcacgtggcataatgtgcttgtcggcatgcagaagcgggcgcgcacggccatcgcggcgcgcgagggtaggcaccccgggaagccgtttccgtcgctcgtcatcgcgcgcgacggcgccgtcagcgcgcagggcagctatgccgaggcccaggcgatgtttttatcccctgatgagtccaaggtttcaggccttgtgaatacccttaaagagaaaaaaatcgggattgttgcacacttttatatggatcctgaggtgcaaggcatactgactgctgcaaagaagcagtggccccacatccaaatatctgattccttgattatggcagatagcgctgttaaaatggctgaagcaggatgtgactatattacagttttaggtgttgacttcatgtcagaaaatgttcgggcagtacttgatcaagcaggatttaataaggttgtcgtttatagaatgtccagtgaaccgattggttgttcattagcagatgctgcttcaagttgtgaatatactcattttttgagggaagcttcgagatgttatccatctttgcatgttatttacattaatacttcgctggaaacaaaagctcatgctcatgaacttgttcctacaataacttgcacctcttctaatgttgttccaactatactacagatttatttcagagaatggctacaatgtcagatgaagaaattgcaaaaattcatccagaccacaacagaaaatctttgagttcattactgccacgtctacactattatcagagtggtaactgtatggtacatgacatgtttggccatgaggttgtggagaaaataaaggaacaatattgtgatgcatttctaacagcacactttgaggtccctggagaaatgttctctttggcaatggaagcaaaacaaagaggaatgggagttgttggatccactcagaatatcttggatttcattaaggatcatgtgatgggagctctggacaaaaatgtagatgaacaccttcagtttgtgttaggaacagaatcagggatgatcacttcaattgttgctgctgttcaggaattacttcatttttattcttctcaagagagagcaaacatcaaagtagaaattgtgtttccggtatcttcggatgcaatttctaagacatcgaatggttctcatcatgttggttcttcaatggctactgatttggataatcttactattgttcctggtgtgagttctggcgaaggctgctccattcatggtggttgtgcctcgtgtccctacatgaagatgaataccctggggtcgctaattaaaatttgccatcagcttcctgataaaaacaacaaattatctgtataccaagctaacagaattaatgtcaggacacctctcggaaaatcagttgcagaggttgggtgtgagcctattctgcatatgcggcatttccagaaaacaaggaggttacccaacaagcttgttcaccaggttgtccatggtaatggtgacaaacccttgcaatagctgttcatcaatacttgtatttattttatcaaggcggctggatgatggagtatatctcaagtgaatgccatgtttagctggcataccgaagaaatctccgggacaagattatttgccctgtacggtagacatctggacttgccctgtacgttagacatgttgacatctgcatgcgaattaatgttgaacaaatggggttggtctaattgtaaaaaataattattctgaataaatcttaattgctttgagcgaaactgataaatcttaaactgaataaatcttaattgcttttag

SEQ ID NO: 6976 - DNA, 2173 bp, Zea Mays
ctgttgggagttcctcttaattctctacttccctgccgcccgcggcaaccgtcctccctcctccacctccaccagctgcactccccacgccgcgcacccgcccctctgcccctcctccagctccaaaccggaaacgcggggataccgcgccgtccgcgtggcgtgtccgaagagatcccacgacccggcgggcggcgctgcgaggctgaaggcgcggcggcggcggatttaagggcctcaccggctcgggatctccgcgcgatcgccgctgggccgcgcgctcgaggtatacattggttgttgcagcaagctggtttcttgagatccatattgatgtggtttgttctggaaatttttattcttcatggatgctattaagagccatgcaaagaaggttgatcttgttgatgagactctaagaccaccactagttccatccgagaagcacaatgctttccgagtgaggaatgttgcatccaggtgcaaaactgatctggctgatgccactaagataagaagatgtacatcaccaagtcttggccagacctcagcaattgaaggcacaccagcacccaaaagagctcagtctgcagatagaagaaggccgacaccttcaacccctccctctaaggtgtcaacaccctcaacccctgtgtcaaggtccatcacaccagttcgtgataccactagagacttacacaagagttccaagcgtatagcaagcacaaaggctcctgatggcttgtggccagcaatgcgtaacttgtcttcatctttccagtcggaatctgtggctgcacctactactagaaatgataaggtagtcacggctttggattgtagcaaggggcaagtgagtgttctaacggagaggaagagaagtccttttagaaggaaaaacattggtgaacattgtgagaatgctcaaccttcagaggagccccctaagaggttaattgagcaacacagatggccagccatgatagctgggcaggcgccgaagaatctcatgtcaagaagcattgacctttcggacaaagctaatataccagtcgcatcatcaaatacatcaagaggtctttcaccaaggaagacgccttctgtcagacctgtgccatcatcaaatacatcaagaggcctttcaccaaggaagaccccttccgtcggaccagtcccatcatcaaatacatcaagatgcccttcaccaatgaagaccccttctgttgaagcttcagtgaaactgtcaaatcagtcattggatgaagtggcaaggagtttggctattcaatcaagcagaaaagatgataaggtagattcacagacaatagagagatccaaatctttgagccgaccaaacagaacagttacttttcctgttccaattctacaacgctcatcatcaccaagcagagcattgccagctacgtcctcaacttccagggcctttcagagcccatctcggacaaggccatcaacaccctgtcagtcccaaagtgttggagctatccaatcaagcgttccatcttctcttattaactacatggttgatgcgcggaaaggaaagaagaatgccagccaaatcgaaaatatccaccaagtgcgtttattgcacaatagacatttacagtggctctttataaatgcttatgcagaagatgctttatcttttcaaaaggctactgttgagaataccatgtataatgtttggaggaatactgtaaacctgcgggattctgttaatatgaaaagaataatggtgcaacacttccaacaagaactcaggctttacaacattctgaaagagcagattgcttaccttgaacaatggccaacgctagaaagggagaatagtatctctttactaggggcaactgaggctctgaaagcaagcaccctgcgcctgccagttacattgggagcaaaggctaacacaattgctctcaagaacgctgtaagctcagctgttgatgtcatgcaagttttgggctcatctgtttgctgcattcattcaaagatcacggacagcacatccttggtttcagaactctctgtcatagcaggacaagagaagatcatgcttgatgaatgccgagaactcttagctacagctgcaaaactgcagctcaggcagagtcacggcatgatggcatgcggcggaagccaaacaggccct

SEQ ID NO: 6977 - DNA, 1617 bp, Zea Mays
ccctaccaactacacagccgccgcctcagcgaagctgtggaagaccagcagcaagggccccttcagccttcgccgcctctgtcccttctcttccttccggtcgaccagatggcctgccgcgcgaaggtggtaggacaggtggagcgggtcgacggagagtcgctatcctacgcggagttcgtccgccgcttcatggcgcccaaccgccccgtcgttctcacgggtctcacctcatcctggcgggcccacaaggactggactctctccgggtctggtgaccttcgccgccctaatctcggcttcttcacccaaaacttcccttcctctctcgttcaggtcgacgactgctcctcgagtgatttcacggaccagaagcggcttgagatgtccatgcaggagttcatagaccactgggttgggggtcctcattgtggttcaagtgatggagatcgtgatggttctctgttgtatctgaaagactggcacttcgttaaggagtaccctgattatattgcatataccacaccaaccttctttgttgatgattggctcaacatgtatcttgacagtcaccctatacatagagattctgacattgccaatcataaaaatgaaataaactgttctgattatcggtttgtttacatgggggcaaaaggaacctggactcctctgcatgctgatgtttttaggtcatacagctggtcagcaaatgtttgtgggcaaaaacagtggttgtttctaccaccatcacaaagtcattgtatatttgataggaacatgagatcttcggtctataacttacatgatgtttctgaaaagcagtttcctgagtttaacagaatggctagaatgcattcaagagcagaatgaaatcatatttgttcccagtggatggtatcaccaagtccataacctggaggacactatatctataaatcataattggtgtaatgcctacaacctacactgggtgtggaacttgctttatgaagactacaaagttgcaaaagaatatattgaagacattcgagatatatgtgatgattttgaaggactttgtcaacggaatttggcagctaatacagcagccagaggttgcaaccttgtcaacagaaaccgcacaccatttggtctataatctgatgtcaattcgtaatgttgcatcaaaaatgacaactacagaggcttttactactgagaatcgtctttgtagtgtctcggaagataaccgcagtgctttctctaatatcaaacaaatattagaagaggagagtttcagaaggctatcgatgacactgtcaaaggcatatgaccacatagacagagggcaaagaagtctcaaatcttcgatctcgtatcggaagggctgttcgtcagtgatctgcttgaaatctgattgcaatgttgttgactacattacttctttggttgatgaaatttgtggacccgaggatttgacgagactaattgatagtgctctctctcatggataattttagtgtatctagcattgtaaacctatgcttgcatgaatccttattcatcagatatgatgggatacttaggtagtgtttggttttagagtatggttttatggagccatttcgttttcaa

SEQ ID NO: 6978 - DNA, 1637 bp, Zea Mays
ccctaccaactacacagccgccgcctcagcgaagctgtggaagaccagcagcaagggccccttcagccttcgccgcctctgtcccttctcttccttccggtcgaccagatggcctgccgcgcgaaggtggtaggacaggtggagcgggtcgacggagagtcgctatcctacgcggagttcgtccgccgcttcatggcgcccaaccgccccgtcgttctcacgggtctcacctcatcctggcgggcccacaaggactggactctctccgggtctggtgaccttcgccgccctaatctcggcttcttcacccaaaacttcccttcctctctcgttcaggtcgacgactgctcctcgagtgatttcacggaccagaagcggcttgagatgtccatgcaggagttcatagaccactgggttgggggtcctcattgtggttcaagtgatggagatcgtgatggttctctgttgtatctgaaagactggcacttcgttaaggagtaccctgattatattgcatataccacaccaaccttctttgttgatgattggctcaacatgtatcttgacagtcaccctatacatagagattctgacattgccaatcataaaaatgaaataaactgttctgattatcggtttgtttacatgggggcaaaaggaacctggactcctctgcatgctgatgtttttaggtcatacagctggtcagcaaatgtttgtgggcaaaaacagtggttgtttctaccaccatcacaaagtcattgtatatttgataggaacatgagatcttcggtctataacttacatgatgtttctgaaaagcagtttcctgagtttaacagaatggctagaatgcattcaagagcagaatgaaatcatatttgttcccagtggatggtatcaccaagtccataacctgtggaacttgctttatgaagactacaaagttgcaaaagaatatattgaagacattcgagatatatgtgatgattttgaaggactttgtcaacggaatttggcagctaatacaggcatgaacttctatgatttctttgttttcatagtgaggtttgccttagccaatgtagttgagctttaccatcttcagcagccagaggttgcaaccttgtcaacagaaaccgcacaccatttggtctataatctgatgtcaattcgtaatgttgcatcaaaaatgacaactacagaggcttttactactgagaatcgtctttgtagtgtctcggaagataaccgcagtgctttctctaatatcaaacaaatattagaagaggagagtttcagaaggctatcgatgacactgtcaaaggcatatgaccacatagacagagggcaaagaagtctcaaatcttcgatctcgtatcggaagggctgttcgtcagtgatctgcttgaaatctgattgcaatgttgttgactacattacttctttggttgatgaaatttgtggacccgaggatttgacgagactaattgatagtgctctctctcatggataattttagtgtatctagcattgtaaacctatgcttgcatgaatccttattcatcagatatgatgggatacttaggtagtgtttggttttagagtatggttttatggagccatttcgttttcaa

SEQ ID NO: 6979 - DNA, 1418 bp, Zea Mays
gctagcggtaaccgtcgcctcacttccgcagcaccggcgcggcgactattagctatagccgagtaggcgcagccgcgcacggcgcacccctcgtgttcccttttcgtccttgttcctcaacgtcgccggtgcgcccgcctcctgcctctctccccctgcgagcgatcgtgaggggatcgggatggcctcccaccattccgagcccctcgaccccgccgacgctgacgacccctcagataacaacccagaattaccatgcccctcctatcatatcgttaccaaacctggtcaactcccagtcgagtttcttgaaccctcagctgcccagaagttggtaattggatttgactgtgaaggtgttgatctctgccgcaatggtgctctctgtattatgcagcttgcattccctgatgctgtttacctagttgatgctattgagggtggaaaagaacttattcaagcttgtaagcccgcacttgagtctgatcatatcaccaaagttattcatgattgtaaaagggacagtgaggctttgtattttcagtttggcataaaactgcataatgtgatggatacacagattgcttattctctgatagaagagcaggagcaggaaggaaaaaagatgacatctgatgattacaattacatatcttttgtcagccttcttgctgataaacgatactgtggaccctaacttttggacaattaggcccttgtctgatatgatggttcgagctgccacagatgatgtccgcttccttctcagtatatatgcgaaaatgatggaaaagttaagcaaagtatctttatggcgtctggcagttcgcagtgagctgtactgtaggtgcttttgcttaagcgacaaccagtttgcagattggtcacctcttcctcctgtccctgatgacattgaggctgatgtttatgttcctgaagccgatatcctgtcagtcttagatgtgcctcctgggaaaatgggacgagttattggcagaaaggggtcaacgataatggctgtgaaagaatgttgcaaggttgaaatacatattggtggtgctaaggggcctccagacagggtgttcatcattggaccagagaaggaggtcaggaaagctgaggccatctttcgaggccgaatgctggagttctagagatgttaccctttgcgatacaggtttcaactgctttatattttgaacgtaaaaaggggaatatccaaaaggtgtatgcgggaccgtggatcccttgaccgtctgtgaatcatgaaaacaaaataaaggatttcaacttggcacttcgcgtttctggcctgttttcctcaacgcgtcaggatgcagaagcatgtttagatttcactctagcctccacctgtgcactaacatggtaacgatcgttgtaattgcggcgcattgatt

SEQ ID NO: 6980 - DNA, 1816 bp, Zea Mays
cttctctagatcttctcatcataccgataccggcctcaacgccctctttttcccagcctcacaaccaattcctgtttcagtcgatcgcagttagcatggccacgacacagagctgtcagagcaggagcagcgcctgcagcaaggctgctgcttgcttcccggccgccggaggagcgcaggaggaggctgagaacgacaataataagccggagctccggcgtggcccctggacggtagacgaggacctcaccctcgtcaactacatcgccgacaacggcgagggtcgctggaacaacctcgcccgcgccgccgggctgaagcggacgggcaagagctgccggctgcggtggctcaactacctccggcccgacgtgaagcgtggcaacttcagcgccgacgagcagctgctcatcctcgacctccacacccgctggggcaaccggtaattagtcaactttttcctcccaagtccgagatcgatcaccgacacgtcgtcttagcttgcacgtgccggagtttttggactggaaatcgtgtggacggccgcaaggtagccctgttgaaaacggcagcttgctctccagtccagtagtaatagaagctagtgcccactgcccacgtacatgatgcacctgtcactgcaccgagaccgtatggtatttgtacgtacgtgcacaggtatatacaactatcccccggcccgtaccgtatagacgtggagccgtacgtatttgtataacataacagtgcggccgatgtggcacatgacaagacaacacggcgcacacaagaggcgaattgtacaagtacatctttcgctttcactccagcactgttcacgaaagctgcacgcctctacttttagcttgcttggcgcgcgttctctctctctccacaaatccaagctgttccagttcgatccctcgcattctctctaattgcgttctcgatcctgtgatttctttttccccctccgatccactccagatggtcgaagatagcgcagcacctgccgggaaggacggacaacgagatcaagaactactggaggacccgggtgcagaagcacgccaagcagctcaactgcgacgccaacagcaagcgcttcaaggacgccatgcgctacctctggatgccgcacctcgccgacgacgtcgataccatcgctgcggccaacgacgacgacgaagaccaccaccaccacctacgcctcctcgtcctgcaccaccaccaggcccagcacctgcagcaagctgctgccgcggccggcggcgctgccaacgaccttgctgcgggcgcctacgacgtccgccagctgcacgcgctgccgtcgtcgggcatggcggcgacgtcgtcgtccgactcgctcgcgtcggagtcgtacgatgacggaggcctgcttttcgcgaacttgcgcgccggcgagatgctgatggacggcggagattgggcggcgcagcaggaggccgaccaagggctgtggccgccgccgccgccgccgccgtctgatcttgatcagtcggtggtgcaggctgctggtgccggcgctggccagtttcaggacatggagctcagtggttgggtgcaaggcttctccgagagcattacagataacttttgggccttggaggaaatttggaagatgcaatgagcgagcaattttacatcttacacatccatccaaattaaagacaacatagatacacatatacatatcatatattctaacaacaggtgccatatacgatatacatacacaagttgttgtatagttgtattccgcttatatatatattttttttgcctctcaatgaag

SEQ ID NO: 6981 - DNA, 1124 bp, Zea Mays
cttacacggtagcagctgtcacacaccggtgtaagcgccgccggcggcaggaacaccccgatctcgacgatagatcgagaaagcgatggcgctgaccaacttcatcgtgacggtggccgttgtcggcgcgggtgtgctcctcttcaccaccgacatgcgcaggtccggcgccctcttccgccgcaatgcgcgccagctccagcagtggctccaggaggacacggcctccgccgcgtccaagtccacgaaagaagcagctccgaagaaacttgactcaactgtctccaaggagaggccaaaggaaggcagtcactgattcgagttgtttatatgattgctcttgcaccacccactggtttctctgcgccctgttgaatcggaagcggtcaattataaagcagaccttgaatgaagcgaagcgtgcctttgaatgcaacctgtcgcgaagtgctgctctacaaccccatagcgagtgaaagcttggagcttgttagtagaaccgaaccgttgagcgatttgcattgctgtttacagaaatatcatggaggaagctgcatgcctgtttggacatttggtggccagagcgtgtacggggggcagtactacccagagtggcaaggtcccgtgtggcactgaacgcctgcccgactggttgttttgagcaggagacgaaatcgtcggcattctggtagagggggcgccacctgcgacaggtgccgggtggatcggctggactggtccgcggattgctggagaggtgagcagcgactgtactgtactgtactgtacccgagggctgggctttcggtggttgcaacttgcgagccggcggtgttgatggctgctgctcctccaatccaatggtgtgcgagagggacatggaatcgcctggggtttgcattggcaactttcaacgtggcgactgcgcgcctgacaagttggttgttggttcggttaggtttgcaatcatcgtgcgatcgcggccctcgcaaaatcatcacgcgtccgggggcgaggacgaacgagcggagatggatatggatggttagcacagcaaatctgaggagatcatgtcttgtcgttcggagccgggcaagcacttggctgattgatctgcatcgcgg

SEQ ID NO: 6982 - DNA, 3015 bp, Zea Mays
tctagagcctcacaggcagggtagaggaatacagaggagatagaggaaagtcactggtgatccatccggggagggcggcggtcgcctcctcttcccctgcggccgagctcgccagtcgcctgaacttgtctcgcccgctgccgatctcctctctccgctcgtcgcgccgcaacctggagaggggaccgcgctcggtcgactgccacctggggagcgggtgggcggcgtccgccctctgcactccccggtgtccccgcgaccggttccggcgcggccggcacacaggttcgcagggtttgaaaacttcttgtatgctcacgcgttcggcgctgattgttgaaagtagctttgggactctgaggacctaaattctaatcaattgtgaaatctgaaaggtgtagctatttgtacttctggaggtgtgggaagaaatggaatgcaacaaagatgaggcccaaagggcgaagggtattgcaaagaagaagtttgaagcaggggacttgcagggtgccaggaaattcgccctcaaggctcagactctctttcctgcgcttgagggcgttgatcaaatgatcgccacctttgatatctatcttgcttcagaagggaaggttgctggggagaaggactggtactctatcctttccgttcccatgaacgcaaacgatgaaaagatcaagaaacagtacaggaagttggttcttcagttccaccctgataaaaacaagtcagtgggcgctgagggtgctttccagatggttcaagaggcatacacggtgctatccgatagaaccaagcgagctgtatatgaccaaaagaggaatgtgaggacattccaacagaggacagcacaatcaggtaaagcaagcacggtccctggtgcatccaatggcttctataatttcgcagctaatgctgctactgcctccaagcggacagtaaacaagcaaacagtgggatcagcaacacatgccccatctgcaccttcaactgctactcgtgcacctgtggcaaagcctgatacattttggacctcatgcaacaaatgcaagatgaactatgagtacctcagggtgtatttgaataaccatcttcgctgccctagttgccgtcagccattcctagcaaaagaagtacaaaagccaccagcagggaacgtggtacaagattcaaacatcagtggtgctaatcaaaacacaaccactaatagaaatttgcggtggggtccattttcaagggctgctggtgcagctagtgccactgcatcgtctgctgctgctgctcaagctgctaatgtagttcatcagacatatgaaaaagttaggagggagagggaggaggcacaagcagcggcaacaagggaagaggctcttcgccggaagtacaatcctctaaagaggcatgcaagcatgtcagggaatgctaatcttggaccaggtgatgcaacatctggaaagaagacaaggactatgactaaagatgctgaagttggttcttcatccaccatatccagtccaggagcaaatttttttagagtgcctggtgtgaatatatccttttccaacaacattggggcctatgagtttcaaggcgttgatggtggccccaattggaaacccaggcctctgatccgcttaagtttagtcaagaccttctctcagatggatcttaggggtcttttgctggaaaaaacgaaaactgagcttaaaaacaagctaacagtaataaaaagtaaaacatcccaagttgctagtgaaaaagcgagcaagaaaattgcggtcaaggaaaatggtggggataatgaagctcttggaccagaagatcctacagctaataaagattctcatgattcagaacagattggttctaatactagcacagatgctgaaaatgaagatgatgaccccttatcttataatgttcctgatccagatttccatgattttgacaagaatcgcactgaggaatgtttccaaagtgatcaaatttgggctacatatgatgatgaagatggaatgcctcgttattatgcatttattcagaaagttctttccttgaaaccattcaagctcagaataagctatctcacatcaagggcaaatagcgaatttgggccttcgaattgggtttcttctggcttcataaagacttgtggtgatttcaggattggtaaatatgaaagctgtgatatagtcaacatgttctctcaccagatgaaatgggataaagggccgcgtgggcttatcaaaatttatccacagaaaggtgatatctgggctgtttatcggaattggtcctctgactgggatgaagatactccagataatgtgctccatgcctacaatgtggttgaggatgtcaggcgaagaagctgcaaatgtccccaaagatagttatgagcttgatccagctgctatttctaaagaactgcttcaggggatcacggaagcagtggagccaaatggaacctaaggcagttgatgatgcctgccttggttaacctgccattttgaagtaatcgagcaaaaagatattaacacttgctagttttatagatttccttctgcttttgactatcacctttgcatagaagagatacaatggggccagtcattcaggagtcagctgcttagcagcttctggtgtaattagcaggctctgatatgaattttgctgtgatatgttacttagggcttgtttagatgcatgtggattggaggggattgaagtgacatataatcccttactagtccatgcccctcaatcccatgcatccaaaccagcccttagcaactctagatgtgggtgtactaacgcgaagctcaagcagtttttatggtcagtgttgacacctgttatctgtcttatcttgagagtggatctgttgctttttttgcgaattcaaatgctaattgaactcgtggccgtttgttggttctgttattttgaaacacccatacgttgtatgtgaaaaactactagcattgcttcactcagtaatttcataaattccag

SEQ ID NO: 6983 - DNA, 3169 bp, Zea Mays
cgccccgatcttctctctcctttacacgccaacagctcgcccctctccgtctgcttgattctgctccaggctccagcctcagaccggcactcgctcaaaaatgtcattacgcacccaatccgcttgtagctgtatgctggaacctactctgccttgtcttcttgcatcacactaagaatgcgcgcaacccccacccacccacgggccacgactaggccggcctttgctgctgtcctactttgccacccacgacattggccggcgacgagcaccaccaggacagcagggtttgaaaacttcttgtatgctcacgcgttcggcgctgattgttgaaagtagctttgggactctgaggacctaaattctaatcaattgtgaaatctgaaaggtgtagctatttgtacttctggaggtgtgggaagaaatggaatgcaacaaagatgaggcccaaagggcgaagggtattgcaaagaagaagtttgaagcaggggacttgcagggtgccaggaaattcgccctcaaggctcagactctctttcctgcgcttgagggcgttgatcaaatgatcgccacctttgatatctatcttgcttcagaagggaaggttgctggggagaaggactggtactctatcctttccgttcccatgaacgcaaacgatgaaaagatcaagaaacagtacaggaagttggttcttcagttccaccctgataaaaacaagtcagtgggcgctgagggtgctttccagatggttcaagaggcatacacggtgctatccgatagaaccaagcgagctgtatatgaccaaaagaggaatgtgaggacattccaacagaggacagcacaatcaggtaaagcaagcacggtccctggtgcatccaatggcttctataatttcgcagctaatgctgctactgcctccaagcggacagtaaacaagcaaacagtgggatcagcaacacatgccccatctgcaccttcaactgctactcgtgcacctgtggcaaagcctgatacattttggacctcatgcaacaaatgcaagatgaactatgagtacctcagggtgtatttgaataaccatcttcgctgccctagttgccgtcagccattcctagcaaaagaagtacaaaagccaccagcagggaacgtggtacaagattcaaacatcagtggtgctaatcaaaacacaaccactaatagaaatttgcggtggggtccattttcaagggctgctggtgcagctagtgccactgcatcgtctgctgctgctgctcaagctgctaatgtagttcatcagacatatgaaaaagttaggagggagagggaggaggcacaagcagcggcaacaagggaagaggctcttcgccggaagtacaatcctctaaagaggcatgcaagcatgtcagggaatgctaatcttggaccaggtgatgcaacatctggaaagaagacaaggactatgactaaagatgctgaagttggttcttcatccaccatatccagtccaggagcaaatttttttagagtgcctggtgtgaatatatccttttccaacaacattggggcctatgagtttcaaggcgttgatggtggccccaattggaaacccaggcctctgatccgcttaagtttagtcaagaccttctctcagatggatcttaggggtcttttgctggaaaaaacgaaaactgagcttaaaaacaagctaacagtaataaaaagtaaaacatcccaagttgctagtgaaaaagcgagcaagaaaattgcggtcaaggaaaatggtggggataatgaagctcttggaccagaagatcctacagctaataaagattctcatgattcagaacagattggttctaatactagcacagatgctgaaaatgaagatgatgaccccttatcttataatgttcctgatccagatttccatgattttgacaagaatcgcactgaggaatgtttccaaagtgatcaaatttgggctacatatgatgatgaagatggaatgcctcgttattatgcatttattcagaaagttctttccttgaaaccattcaagctcagaataagctatctcacatcaagggcaaatagcgaatttgggccttcgaattgggtttcttctggcttcataaagacttgtggtgatttcaggattggtaaatatgaaagctgtgatatagtcaacatgttctctcaccagatgaaatgggataaagggccgcgtgggcttatcaaaatttatccacagaaaggtgatatctgggctgtttatcggaattggtcctctgactgggatgaagatactccagataatgtgctccatgcctacaatgtggttgaggtactggatgcctatgatgaagtccatggcatctccataattcccttagtcaaggttactggatttcgaacagtatttcagcgccatcaggatccaaatgctaccatgaagattcctaaagaagagatgtttcggttttcacacctagtgcctttttacaggatgtcaggcgaagaagctgcaaatgtccccaaagatagttatgagcttgatccagctgctatttctaaagaactgcttcaggggatcacggaagcagtggagccaaatggaacctaaggcagttgatgatgcctgccttggttaacctgccattttgaagtaatcgagcaaaaagatattaacacttgctagttttatagatttccttctgcttttgactatcacctttgcatagaagagatacaatggggccagtcattcaggagtcagctgcttagcagcttctggtgtaattagcaggctctgatatgaattttgctgtgatatgttacttagggcttgtttagatgcatgtggattggaggggattgaagtgacatataatcccttactagtccatgcccctcaatcccatgcatccaaaccagcccttagcaactctagatgtgggtgtactaacgcgaagctcaagcagtttttatggtcagtgttgacacctgttatctgtcttatcttgagagtggatctgttgctttttttgcgaattcaaatgctaattgaactcgtggccgtttgttggttctgttattttgaaacacccatacgttgtatgtgaaaaactactagcattgcttcactcagtaatttcataaattccag

SEQ ID NO: 6984 - DNA, 1287 bp, Zea Mays
ggctgctcctcctcctctcaggctctcacaccaatccccactctccctccttccgtaattgcgtctctcaccacctcggcaactccaatcccaaacggccacaccctagctggtctggtggcatcggccggcacacggcgatgcctgccacggtcttcgcctccccctccatcgccgcgtcgccgtcgccgtcgctgtctccgtgctgaagtacttgatgcgctgtataaatgagtctatgcggctgtatccacaccctcctgtgctgttacggcgtgcaatagttgatgatgttcttcctggaaactataaggttaaggctggtcaagatattatgatatctgtgtacaatatacacaggtccccagaggtttgggatagagcagatgagttcattccagagaggtttgatttagagggacctgttccaaatgagtcaaacacagatttcaggtttattccattcagtgggggtcctcggaaatgtgttggagatcaatttgctctcctagaagcaatagtggcacttgcagttgtgttgcagaagatggatatgcagcttgtgccagatcaaaagattaacatgactactggagctacaattcatacaaccagtggactatatatgaatgtaagcctgcgtaaagttcagcaagaagctgagttagcgctgagcgaatcgaaatagatggaaacgacttcagacaagaatagagctcctgaactggatacaatcatacaaatatgaaatatgcttctccagtttctcgttgaaagctctactgtactatactagatgtcaatgcgtcggcatacagattacagattcgcttctcttgaaacatgaaaggatccttcgctggctgattcgtttggctattcgtgagtgtaaaatttatcttaggctttatttagatactcaagtattgacctcaatcaacatgtgttgatgtggatttggatgtaattagttcaaattacacctaaatccatctcaatactcaatacatgtggatttaggtcaatactagaatatccaaactaggtcttagtggtaatccaagaccgaacagaaacatgtttctacttagctgacggcggcacaaatatagtattagtgctagtttgggaacttaaatcccctcagtgattggagggattgaaaaagaaattagtttattttcccctaatcttctctaatcatagaggagatttgagtttccgaactagcccttacatacacatattttgtctggttttctccccgaaacataaatccagttttaa

SEQ ID NO: 6985 - DNA, 1816 bp, Zea Mays
ggcaccaatatcttctctctccctctcaccaatatgttctaaatcagcagaagcagctgatcgatttactcaccaatatgttctctccccctctcaccctaggcggctaatttcagagcttttgttggcaactgggggaaccatagtgcgggggttcctcgcccccctctttccatgggagcttagaagctgttggatctctgcaagtgaccatgagccagagttttgacatcaacgtacttcgtgaagaagcaaggagtaggtggttaaagccttctgaagtgtactatatcttgcagaatcacgagaggttccctatcacccatgaggcaccaaagaagccacccagtggttccctattcctttacaatcgtcgtgtcaatcggtatttccggagagatggtcacacatggcggaggaagaaggatggaagaacagttggggaggctcatgaacgactgaaggttggaaatgttgattctttgagctgctattacgctcatggggagcaaaatccatgtttccagagacggtgtttctggatggaaaagatggttgctgcacttcttgctgctggtgcatcggcaacagcagttactgatcccactgcacaagacccagtgggtaaaacagcagctttcctggcttctgaacgagggcatacgggacttgcaggttatctttctgaagtgtcgctaactagctatcttgcatcactcactatagaagaaagtgatgtctcaaaaggatcagctgaagttgaagcagagagagctgtggaaggcatatctcagaggaatgcccaacggcatggtggcacagaagatgagctatcaatgaaggattctttggcggcagtgaggaatgcagctcaagcagcagctcgcatccagaatgctttccgtgccttctctttcaggaagagacagcagaagactgctcgacttagggatgtgtatggaatgacccaagaggatatagatgaacttgcagctgcatcaaggttgtaccaccaagctcatgcttcaagtggtcagttttatgatagagcagctgtttcgattcagaagaaatacaaaggatggaaaggtcgcaaacattttctcaacatgagaagaaatgcagttaaaatacaggctcatgtaagaggccatcaagtgagaaagaaatacagaacaattgtaagcactgtcagtgtgctagagaaagtaatacttcggtggcgccggaaaggtcatggcctacgtggcttccgagctgagcagcaaccaatggtcgaagcaatagaggaagatgatgaggaagacgacgatttcgatgatgatgaagcagtcaaggtcttccgtcggcagaaggtcgatcaagctgtaaaagaggctgtgtcaagggtgctgtccatggtagactctaccgaagcgaggatgcaatatcgacgaatgcttgaggagtttcgccaggcaactaattggaaggatcaaatgaagtgacatcaatatttgacagtgacttagagttattagggatcaacaatttcatgtaaagagcatttcggtttcaagatctgagcaatgacataaattaagtatctacggaatgggtttcacctgctactaactaggacctgataatggtcgtcagtttatacagtgtttacgaaatggaaagtagattattgctgctatgatgtattgccactctatatttaggtgtattttcccagtggcagttcaatgaacactacattgtggtgtttgtaacttttaataccccgtttggatgtagatattagagtacaaaattgaaaattagaatcagc

SEQ ID NO: 6986 - DNA, 1818 bp, Zea Mays
gaagcagcagactcaggcaccaatatcttctctctccctctcaccaatatgttctaaatcagcagaagcagctgatcgatttactcaccaatatgttctctccccctctcaccctaggagcttttgttggcaactgggggaaccatagtgcgggggttcctcgcccccctctttccatgggagcttagaagctgttggatctctgcaagtgaccatgagccagagttttgacatcaacgtacttcgtgaagaagcaaggagtaggtggttaaagccttctgaagtgtactatatcttgcagaatcacgagaggttccctatcacccatgaggcaccaaagaagccacccagtggttccctattcctttacaatcgtcgtgtcaatcggtatttccggagagatggtcacacatggcggaggaagaaggatggaagaacagttggggaggctcatgaacgactgaaggttggaaatgttgattctttgagctgctattacgctcatggggagcaaaatccatgtttccagagacggtgtttctggatggaaaagatggttgctgcacttcttgctgctggtgcatcggcaacagcagttactgatcccactgcacaagacccagtgggtaaaacagcagctttcctggcttctgaacgagggcatacgggacttgcaggttatctttctgaagtgtcgctaactagctatcttgcatcactcactatagaagaaagtgatgtctcaaaaggatcagctgaagttgaagcagagagagctgtggaaggcatatctcagaggaatgcccaacggcatggtggcacagaagatgagctatcaatgaaggattctttggcggcagtgaggaatgcagctcaagcagcagctcgcatccagaatgctttccgtgccttctctttcaggaagagacagcagaagactgctcgacttagggatgtgtatggaatgacccaagaggatatagatgaacttgcagctgcatcaaggttgtaccaccaagctcatgcttcaagtggtcagttttatgatagagcagctgtttcgattcagaagaaatacaaaggatggaaaggtcgcaaacattttctcaacatgagaagaaatgcagttaaaatacaggctcatgtaagaggccatcaagtgagaaagaaatacagaacaattgtaagcactgtcagtgtgctagagaaagtaatacttcggtggcgccggaaaggtcatggcctacgtggcttccgagctgagcagcaaccaatggtcgaagcaatagaggaagatgatgaggaagacgacgatttcgatgatgatgaagcagtcaaggtcttccgtcggcagaaggtcgatcaagctgtaaaagaggctgtgtcaagggtgctgtccatggtagactctaccgaagcgaggatgcaatatcgacgaatgcttgaggagtttcgccaggcaactaattggaaggatcaaatgaagtgacatcaatatttgacagtgacttagagttattagggatcaacaatttcatgtaaagagcatttcggtttcaagatctgagcaatgacataaattaagtatctacggaatgggtttcacctgctactaactaggacctgataatggtcgtcagtttatacagtgtttacgaaatggaaagtagattattgctgctatgatgtattgccactctatatttaggtgtattttcccagtggcagttcaatgaacactacattgtggtgtttgtaacttttaataccccgtttggatgtagatattagagtacaaaattgaaaattagaatcagc

SEQ ID NO: 6987 - DNA, 904 bp, Zea Mays
tggggacctatgattgactattcccacatttgatgtcagtactctgttttttctttttctttttgaagaaacatgattactgcatgccgcatggatttagatactgtctcaatcaagacatttttttgaagaaacattttggggatgctattgaccaaagttttaaaacgtgtctggggagaactaatatgcccaaggcttctggactaaagagaagcggaaggcgcctaagaaaatggacgaagggagtaattattaaggacaaagccaactggacattggttcaacagaatctgaagttgaccaggcggagattgagagattggaagagcatgcttctgctttaagaaaggaaattgaaagcaaaaacaagcaagtaaagctcctcatggatcagctccgtgacctaataactgacgtagccatgtggcagagcccttgctctgtgtgaagtgtgaactgtgaagtgtcaaagagaccctagctggacgtctggtaaaggcatattgtgcatgttgggtaactgactacttggcagttggaagggagaaatagatgggatatgactgggcttcacgaaaaaaaacataaagttttcctctctataccaactaaaattgtgttgggtcatcgatgcaaatgcacataggctgtaatatgttggatatgaatgttattttggacgagtgtagatacgcgtatcctttgaaacttgtctgattttttaccgtgacgaaattcctgtaatgctttgagaatcctgaatttctgtcatataatggcttaaatacaatgattatatttgcttcttgaacgatgaaaggaatacttaatagtgtgtttggtttgaggaatgaagatagtgtgtttggtttgaggaatgaagtaatccatcttcttctct

SEQ ID NO: 6988 - DNA, 2601 bp, Zea Mays
cttatccagagaggctagaacaaacctgaatttcatccccaccgtcgcctcgctcgacctccacctctctttcctcccggcagcaatggaggcggcacccaggtgaggcgagcaagcagccagccctggctccccgatggcgtgcctggcgccgcagttcaagtgggcgccgtcggccgccgcccacatgccttcctcgtcctcgtcctcgtcctactccaggtgctccgcgctccgcgtccactgcgccgtcacctccgccgctgtcgtcgaggaccgcaccaacggcagcgcggcgcagctgaggctcgcttacgcggctccggcgattcagagaaactttgaggcaactctggcatcagaagcacttctaaatgaagaggcggtagtagcagcggcagccgcagaggctgttgctcttgccagagcagctgccgaagctgcccaagaagttgttcagatagtacaaagaaacaaccatcagccggtaattagaccaaaaaagtgtgtggacaactacttggcaaatgaaatccttcgcacagagatgcgatcgagcagtcctgacatgtatgctaataatcctttgatggagtatctggactcttatggtatcatggatgctgaagatgaattagatgcttatgcacagtatactgagaacatagctgtgaaatctgctcgtcaatctgagagaaaagctaggagaactagagcagcaataaaagctagcacaaccctccatgcttcacaaaaggttgcattatcctcaaagaagaagcggtccaagggttcctcgtctagtatgaatcctttaggttcgttgtggaagatgaccggtaggagacttcttacagccaaggaagaggttgaattctcagaaggtattcaggatcttttgaagcttgaggcgatccaagctgagcttatagagtacaatggcggtcagccaaccttctcgcagtgggcaacagcagctggagttgatgagaaaactttgcgcaagcgcttgaattatggtatttattgcaagaacagaatggtaacatctaatgtgagacttgtaatctctattgccagagagtttgaaggccctggaatggacttttatgatcttattcaggttttttgttacaggaaggaatgcagggccttataaggggagctgaaaaatttgattcatcaaaaggttttaggttctctacgtattctcactggtggatcaaacaagcaatgcgtaaatctgtctcagagcaatcccaaatatttcgcttgcctgctcacatggttgaagcaagctaccgtgtaaaggagtgtacaaaacgacttcgccgtaagcttagaagacgacccaccaatgaagaaattgcagtggacactggtattccaattaaacgagttgaggcagcagtaaacctcccaaaatatagtgtgtcccttgatagcaaaattggttccaccgacatgacatatcaggaggtcacagctgatcccagtgctgagacagctgaagagatgctcaacagaatgtccatgaagaaggacgtacacatggcactagatactctcaccactcgcgagaagcaagttgttgttctgaggtttgggctcgaggatggtcggataagaaccctgcaggagatcggtaacatcatgggtgtgagcagggagagaatccggcagatcgagtctggcgcgttccggaaactaaggagcaagaagaaggtgaaggctttgaaggattatctggtgccagtaggcaattggtgaaccgtttgtttgcagaatttgttttccttttggttcctctttttttttttgaggattctgtacttgtaccattttacgtgggtcctcatgtaaaacacgctatcagaatacttgcatcacaagaggaaagagtagtttagttccgtgggaaatgaagtaaaattcacaatttcttagctgctggttatctcttagaaatgaaatatgtttggacaaaactgtgtaatgcatgaaaactttagaggcgcttcgccatcttaagatgggatctaccctaagcctaaaagaactcatctagttttgtaccacctactaaaacaattctaaaaaaatatataatttatttttcttggctaagttatgtgtttagctactaaccaacaaaagaacaaacttagttcatacataaagaaataaaaaaaagataaatttttgttagggagtaaattgaactagctcaaataggtggaaatgtaaaataaacttaaaaaaatactccatccgttctaatttacaatttgtttgactttttatgctaagttggaccgactcgtcttatttaaaaaatttcataattattgtttagcatataatatactttaagtatgactttgtttttttgttttttattaaaaaaatgaataaaatgagctgatccaacttgatataaaaaatcaaacaaattataatttaggatgaaggaagtactaaaggggtacatggatatcattcataggtaaggcaagagaagtaatttagacgttttagaaatgaaggctgccggtcgttgggctccgtattggggcccaacacgagcgtctaggctagggc

SEQ ID NO: 6989 - DNA, 464 bp, Zea Mays
gcaaactaatgctgtccagtttcaacataataaaatggtatcatttgtcaagtgcatgttaggacttgatgctgttgtttgggacattattgggtcgtcattgttggagaaagttgtgtatctacttacagaattggatgttaatataacatgggaagatattcttcaagatgaacacaacaaaggtatatttgacatggagcttgaggatttggctgaggatgaacataaccttggccgcacaagtgtagagacttgaattcatatatacttagttaggctcaatgttagcataaacagttgatgagcaagttttcccattagtattttagtttgaatttagagtacaattatgtatgagttatttgataatgcttatttatgagatattgaatggtgtttatctatattgtattaattatagtgttattaaatatatgtgtttgtatttttctcttttaaat

SEQ ID NO: 6990 - DNA, 1879 bp, Zea Mays
cccggccacttctctctactctagatctcactgctgcgccgtagcgctagtgccgccgcccgctcaccctcatcccctaggcctccacttctctgattggggcgacttcatggcgagcgggcacaaatccgacatgggcgcctctgctccgacgaccgctctctcctctgcgcctccactgcccctctccctgttaggcggcgacagcaaggaggaggaggaggaagggttggctgggccaccgtcggcaccacgcgaggcacgagcgcaaccgcgcctatgagttccatagctccgagccgtcgacgctaggcggcagtgccctcgtctggacctgcccgcgcccaggcggagccgccgccgacccgagatctgcctaggtcgcccgcctgctctggatgaccaaggtcacctccgcggacgctgagcagctgagctcctcccgcgaaggcgtgaacccgcccccagccgaggcactgagctccgccctgccccgctcgggcgtgcccctgcacaggcccagccgcctcgctcctgtttgccgccacggttccagtaacgacgaggctgagcgacaactccagtgtcccgatgttgaataagtgaagtggatgagtcagatggtggaggagacagtgtgtaggagcagcctgtttatgtggccgtagtggatctcgcatgttccgaagagttcctggaactcatcaagagtgcacttcttacagccctagaagcctgtttgtgagcttggtattcctcctgaaaacatcactgcaaaccaattgttatttggcacattgagggagtacgccggatttgatcccacagagcccacttcacgcagtgggggtaaagcaaaagcagtgcagcaaataaaataggaccatggctacaagacaattgttacaattggtgatggcgcaactgatctggaggctcggcaacctggcggagcagactgtgtgccgccagagctagtggagggaggcgggtcattcgattcgccatgcttaggattggagaatcaatagagtaatagtatatacatggtggggagtgaaaccaacagaggaagaatccgttcttgatcaaaattagtcgactgcttggttcgtcgtctgcgtgttcgatcggaggttggcgacgccttggcgtgggcgctttccgcaagaaagcaaggaaattggtcggcttctacgctaccagtccggtccacttcgttcacctttccctttcggtgccaccaacatctaactgtacatgcatgcttgcttagtgctgaccgccgctaatgcgctggatatttctgggagtggaaacgaaagtgtactctgaatttcaagttcctgtcaaaagtaagatcctctgacgaagtaggtgtggttgtgatcatgcataaactaactgttgctgccacatggattggagagggagatcgatccacagaaaatggtatcatttgtcaagtgcatgttaggacttgatgctgttgtttgggacattattgggtcgtcattgttggagaaagttgtgtatctacttacagaattggatgttaatataacatgggaagatattcttcaagatgaacacaacaaaggtatatttgacatggagcttgaggatttggctgaggatgaacataaccttggccgcacaagtgtagagacttgaattcatatatacttagttaggctcaatgttagcataaacagttgatgagcaagttttcccattagtattttagtttgaatttagagtacaattatgtatgagttatttgataatgcttatttatgagatattgaatggtgtttatctatattgtattaattatagtgttattaaatatatgtgtttgtatttttctcttttaaat

SEQ ID NO: 6991 - DNA, 2065 bp, Zea Mays
gtcaaacttaaaaacccggccacttctctctactctagatctcactgctgcgccgtagcgctagtgccgccgcccgctcaccctcatcccctaggcctccacttctctgattggggcgacttcatggcgagcgggcacaaatccgacatgggcgcctctgctccgacgaccgctctctcctctgcgcctccactgcccctctccctgttaggcggcgacagcaaggaggaggaggaggaagggttggctgggccaccgtcggcaccacgcgaggcacgagcgcaaccgcgcctatgagttccatagctccgagccgtcgacgctaggcggcagtgccctcgtctggacctgcccgcgcccaggcggagccgccgccgacccgagatctgcctaggtcgcccgcctgctctggatgaccaaggtcacctccgcggacgctgagcagctgagctcctcccgcgaaggcgtgaacccgcccccagccgaggcactgagctccgccctgccccgctcgggcgtgcccctgcacaggcccagccgcctcgctcctgtttgccgccacggttccagtaacgacgaggctgagcgacaactccagtgtcccgatgttgaataagtgaagtggatgagtcagatggtggaggagacagtgtgtaggagcagcctgtttatgtggccgtagtggatctcgcatgttccgaagagttcctggaactcatcaagagtgcacttcttacagccctagaagcctgtttgtgagcttggtattcctcctgaaaacatcactgcaaaccaattgttatttggcacattgagggagtacgccggatttgatcccacagagcccacttcacgcagtgggggtaaagcaaaagcagtgcagcaaataaaataggaccatggctacaagacaattgttacaattggtgatggcgcaactgatctggaggctcggcaacctggcggagcagactgtgtgccgccagagctagtggagggaggcgggtcattcgattcgccatgcttaggattggagaatcaatagagtaatagtatatacatggtggggagtgaaaccaacagaggaagaatccgttcttgatcaaaattagtcgactgcttggttcgtcgtctgcgtgttcgatcggaggttggcgacgccttggcgtgggcgctttccgcaagaaagcaaggaaattgtgctgaccgccgctaatgcgctggatatttctgggagtggaaacgaaagtgtactctgaatttcaagttcctgtcaaaagtaagatcctctgacgaaggtgtgtactctgaatttcaagtgccaacaatctatgttttccagtcaaaaagtattacatggtgcccggctgttagcttctccttttcagttgttgcccttgccggcctggcatttgttcaacctttcctctctctctctctctctctctctctctctctctttctgctacagccattttactgatgataacagtgctaattggtcaatttcacatatatttaaatatatatatatatatggagctaatactggtgaagtagtaggtgtggttgtgatcatgcataaactaactgttgctgccacatggattggagagggagatcgatccacagaaaatggtatcatttgtcaagtgcatgttaggacttgatgctgttgtttgggacattattgggtcgtcattgttggagaaagttgtgtatctacttacagaattggatgttaatataacatgggaagatattcttcaagatgaacacaacaaaggtatatttgacatggagcttgaggatttggctgaggatgaacataaccttggccgcacaagtgtagagacttgaattcatatatacttagttaggctcaatgttagcataaacagttgatgagcaagttttcccattagtattttagtttgaatttagagtacaattatgtatgagttatttgataatgcttatttatgagatattgaatggtgtttatctatattgtattaattatagtgttattaaatatatgtgtttgtatttttctcttttaaat

SEQ ID NO: 6992 - DNA, 2137 bp, Zea Mays
cttctctctactctagatctcactgctgcgccgtagcgctagtgccgccgcccgctcaccctcatcccctaggcctccacttctctgattggggcgacttcatggcgagcgggcacaaatccgacatgggcgcctctgctccgacgaccgctctctcctctgcgcctccactgcccctctccctgttaggcggcgacagcaaggaggaggaggaggaagggttggctgggccaccgtcggcaccacgcgaggcacgagcgcaaccgcgcctatgagttccatagctccgagccgtcgacgctaggcggcagtgccctcgtctggacctgcccgcgcccaggcggagccgccgccgacccgagatctgcctaggtcgcccgcctgctctggatgaccaaggtcacctccgcggacgctgagcagctgagctcctcccgcgaaggcgtgaacccgcccccagccgaggcactgagctccgccctgccccgctcgggcgtgcccctgcacaggcccagccgcctcgctcctgtttgccgccacggttccagtaacgacgaggctgagcgacaactccagtgtcccgatgttgaataagtgaagtggatgagtcagatggtggaggagacagtgtgtaggagcagcctgtttatgtggccgtagtggatctcgcatgtaagttccgaagagttcctggaactcatcaagagtgcacttcttacagccctagaagcctgtttgtgagcttggtattcctcctgaaaacatcactgcaaaccaattgttatttggcacattgagggagtacgccggatttgatcccacagagcccacttcacgcagtgggggtaaagcaaaagcagtgcagcaaataaaataggaccatggctacaagacaattgttacaattggtgatggcgcaactgatctggaggctcggcaacctggcggagcagactgtgtgccgccagagctagtggagggaggcgggtcattcgattcgccatgcttaggattggagaatcaatagagtaatagtatatacatggtggggagtgaaaccaacagaggaagaatccgttcttgatcaaaattagtcgactgcttggttcgtcgtctgcgtgttcgatcggaggttggcgacgccttggcgtgggcgctttccgcaagaaagcaaggaaattggtcggcttctacgctaccagtccggtccacttcgttcacctttccctttcggtgccaccaacatctaactgtacatgcatgcttgcttagtgctgaccgccgctaatgcgctggatatttctgggagtggaaacgaaagtgtactctgaatttcaagttcctgtcaaaagtaagatcctctgacgaaggtgtgtactctgaatttcaagtgccaacaatctatgttttccagtcaaaaagtattacatggtgcccggctgttagcttctccttttcagttgttgcccttgccggcctggcatttgttcaacctttcctctctctctctctctctctctctctctctctctttctgctacagccattttactgatgataacagtgctaattggtcaatttcacatatatttaaatatatatatatatatggagctaatactggtgaagtagtaggtgtggttgtgatcatgcataaactaactgttgctgccacatggattggagagggagatcgatccacagaaaatggtatcatttgtcaagtgcatgttaggacttgatgctgttgtttgggacattattgggtcgtcattgttggagaaagttgtgtatctacttacagaattggatgttaatataacatgggaagatattcttcaagatgaacacaacaaaggtatatttgacatggagcttgaggatttggctgaggatgaacataaccttggccgcacaagtgtagagacttgaattcatatatacttagttaggctcaatgttagcataaacagttgatgagcaagttttcccattagtattttagtttgaatttagagtacaattatgtatgagttatttgataatgcttatttatgagatattgaatggtgtttatctatattgtattaattatagtgttattaaatatatgtgtttgtatttttctcttttaaat

SEQ ID NO: 6993 - DNA, 729 bp, Zea Mays
gtgtccaaaccttctccacgcgttccttccttccctccctccctccctcccctcccaagaaacacaagagccaggcagcgcttgcgaggctcaagcgccgcagcaatgtctctggccccgtccatcccttccatcaaggtgaaggtggggcccgtctcggtggcgcccccgcaccgcgcatgccgatccttcgcggtggtcaggagctccaaggcggagggccccatccggagacccgcggcgcccccgctgtcgccaccgccaaagacgccggctttgtccactcctcccaccctgtcgcagcctcccaagcccgctgctccacccacgtcgtcggagtcgacaccaccgtctcctcagccgaaggcggctgtggccacagcccccgcggcagcgctgcagaggccgctggctggggctgtgacgctggagtaccagaggaaggtggccaaggacctgcaagactacttcaagaagaagaagctggacgaggccgaccagggcccattctttgggttcgtgcccaagaatgagatttccaacggaaggtaccttgatttacacgggagaaggacaacactgtaggattgaccgagttgcagtgtgggcaaaaaggattatctttaatcaagttgccaaatgccaataatagtatatgcttctagataaataacaacggatttagattggtattgctatattatgatgtgaatatgtcattgttctatc

SEQ ID NO: 6994 - DNA, 1650 bp, Zea Mays
atggaacccagccgagccagactctacagccctgcatccgtgcggccgtgcgtgcgtcaacgccagtcagtacgtcgctgcctttcctctcccgactcccgttcaccacactactttccctcgtgcggccgccgccctacaacaggtgccccaggtcttcgctgcgccattcgccagcgacgagcacccaacaggctcagaaacatcgctgacatccacatgcaccacagtagttcagtagagtagctgttggaacccacacaccggcgatggcaactgctcctgtgacatcctccatggctacgaactccacctgtgtgcggctgcctagcatgcccctgaggcgtgcacccgccatcgtctcctttgcctctcgtccatggtcaaccgcaatgacctcatgtactggattgtcgcggcactctgatgtggttgccgccgcggggcaccagaagttgatggggtctttgaacaacaacgagggactcatgtttggggtggttgtggcacggttcaacgaggtcgtgacaaatttgttactacagggtgccctggaaactttcgagcgatactctgttaaagcagaaaatataacagttgttagtgttcctggaagctttgaagttcctataacggcacaaaagcttgggaaatctggaaaatttgatgcaattctgtgcattggagctgtgattagaggtgacacaacccactatgatgccgttgcaaactcagctgcatcaggtgtactcaatgctggattatctgctggtatgttgttttctgttcttccctatcatgtgtcatgcagtactgggtaattctaggtacgttcattttcttctatttttaagtgttaaaaaggtggtctagcaagttgaaatattgaactcttaaacatattcccacaggtattgaaacttgttttatatgtttcattgttgtttctcagcgaatatgcatatataagtacaatggcaaaaaaaagtcacaagcatgttggggtagactaaaattttgccagtacagcttacagaaatctacaatagttaatgcgagcaactagtgtgggactggaaggttttggttatatgagagaattgtatagttggtgctataaaagtacttcacaacattaagtgaaactttgcagtgtgctcatcttgttttttctttatgatggttaattcagttaataataaaaattcagattattttggcttttaatggtgatacaggtgttccttgtgtatttggtgttctaacctgtgaagacatggatcaggcactgaaccgtgctggtggcaaggctggaaacaaaggagctgaagctgctcttactgccattgagatggcctcgctgttccggcatcacttaggctgacaccttgtgtattctgattttctatacacgaggcggcagcatttcctcctatcaagagttttggctaatagagagcttttccgccgcggctagtataatttatttccaagtttgttggtccggtgcggattggttgctttccttctgagacctgaaaagctcacaagacatgtctgtaaacctgacatcgtgaataattgtctccacgaacgaaatatggtcatgaataaagctgcacaagtgttttgttacgtatgattatcatg

SEQ ID NO: 6995 - DNA, 1141 bp, Zea Mays
tcgccagctctcaaactagcccgtggtgataaattcgccgacgcggatggagaggggagaaaacgtcgccagttcggctgtcgaaccggaactgaagcaacatttgttctgtggaaattgggatggctctggctagggtttcaccgtcttccttagcgaaccttataccgcccctgctccaatccttcttccgccctttctcctcggactttcccatccgcaattcccgccgaagaagctcccccgttgctgccgccttctctcttacttcacaatctgcccacgctgcgagggaggggctggtcatggaggcgcccaggccgagctccaggtatccttggaagcccacgtgtttgtactacacccagggcaaatgcacaatggtttgtgcgtccaactgcaatgagtgagcaaagaacaacagaatacatagaagggaaatatggaaaatttggggttgaccgtgtttggcatgacactgctacccctttcaagcaagtgctgcaagagtttgaggactggcttggaaatcacaacctgtggaaaaaggagcaaggtggatcactcaaccgtggagcatttgttacttgtggaaactgggatttgaagacaaaggtccctgagcagtgcaaggtttcaaaaataaatttacctacctattttatggaatggattaacttgaaggatatctacctcaacttctataacagaagggcaactggaatgatgacaatgatgagagaacttcaactgccaattgttggaaaccaccatctcgggatagacgattcaaaaaatatcgcaagagtggttcagcgcatgcttgctgatggtgctgtgattcaaatcactgctaagagacagtcagctactggcgatgtgagatttcttttcaaggaccgaattaggtgattgaaaagtgacacccccaattcatagtggtgctgatattagttgcctgaaaggcatttcaggattttggagcaaagatagagcgactgaacgctcaatcaacatacaaatatgtctagaaattgtgatgctttaaccaaacaagatcaaattactgtccccaagctcatcttagagtttcaactaaatcacaaattaaaggaaccgtgatatgtgaattagttaacgt

SEQ ID NO: 6996 - DNA, 1451 bp, Zea Mays
gccgtttctatgaaagcagccgcagtatattgaattcggaattagcccaatccgtgctgctgccgtctgtctttccctatcctcctcccaagaaagcctcgccgcaatagtttggcatccatgggattcttccattgcatctccaccgtcaactccacgcatcccttaacgagcactgaagcccggcaagccccggatcgccgatgaccacttccggcgcgcccaagcgcccaagcttcaagcgctcctcgcccgggaagaagtcgcggctcagaacccgtcgcgtcgccgccggtggccgagagggcgaggccgaggccgaggcggcggggacctcggcgctggcgagggcattgcttcccgcatcggtggggctagacgcggtgccgcctgttgggcgcgcattgccgcgagacttcttcgaggtggatgccctcgacctggccccccgcctcctcggcaagctccttcggcgcgatgaggttgtcctccgcatcaccgaggtggaggcttataggccaaatgactccgcatgccatggccggttcggcatcacagcgaggacagctccagtgtttggaccgggaggccatgcatatgtgtatctgtgctatggacttcacatgatgctcaatgtggttgccgatatagagggggttggtgctgccgttttgatccggtcatgttctccagttagcgctagaagaggaaaatggaaatctgtagcactagataattatgtgatcaggaggaatataggaggcgttgatcatctttgcccacaaatatccacaacaatgcattctccatgtcgctttcaactcaaggcagaaaagtcttgaaactattcagcggcgccggggtcaacaaaccgagaaaccgatcctacttacgggaccaggaaaggttggacaagctctgggcctatccactgactggtcgaaccatcctctctacgcgcctggtgggttggaggtactggacgggccagagccggagagcattttggttggtccccgcgttggcatcgagtacgcgtctcccgagcatgtcgcggcgccgtggaggttcgcgattgccggcacgccgtggatcagcgcccccaaaaacacgctacggccacgctactgaccggtgtctgaacaggaaccgttcgagtcccgttccaacccgaattgccatgtgtttgtatttgcttgacacttcggaatgctgcctataactggctcttgtaaatgtatcacagtgtgttcgacaaaaaggcctacgaactctacgagggcgggtgcccgggccgaacattctcaaatgttaaaagcgtggagtgtgtttgaagggctgagaaagatgactagagagaagtaaataagagtcaattaactatttttttcctgaaatagccgttgtcctagaaaactcaaatcaaaacatcgaactgtgtcactccgttt

SEQ ID NO: 6997 - DNA, 2271 bp, Zea Mays
agaaaacaccgcgacctctacctcacagaaataattgcctcccttcattggcctcatctctccctccctccttgacccatctgcgacttcccctgcattaaggatgacctcttctctctaggtcttacaaccctagacgtggaatcaggatcagtgtgcacggggaaccagcaacggcagcacgtacgtggaaccggcaccgacgaattgcacggggcagcagacaatcgtcgcctccttgactccatccgcgaccttcctccatccgtggtgccagcaaactgcacgagaagacctaggtgactcggtgctagccacactattacaagatgcctcctagtcgtttgcaggttggaacaaaaacaacagaaggacataaccaagcaggaaacacattacatccatatgaagtgcagcgccttagacaagttatgagaaacaatgcaaggctgcaacaactgggaattcctggtttatgcgacacactgccaaaggcatattcctttcatcacaacaaaaataagccaaattttacaaataatgaagattcagaatctgattataatccttcatcaaatgacactggtgaagaagatttacttgatgatgacaatgttcagggctcgaaggattataatatgaggactacaaacatgtctaatggtgtaatcaagctacgcactaaaagacttcttgcagagaaagaatctattagaattacaagctagtgaccctgctctatttgacgagtacacccacatggctaatggaggtcattccattgctcgccctgatgggcacaacctgatgggaaacaaagataatgtaaacatccaagttgatgacaacatgaccagtggaggtgaagctagcatcgagcctagtgtacatgtacaactaggtgaaaatgatcgatgggaaaggggagttaatatgggacatggtctccataggatgaaccgagctatgcgtggaaaactgccggttgttattcctgaagggaggataaggcccgtggcacctcttgttgctgcaaagttttcaactgaatgcaatattgcagttaggaaccatgtgccagtgtacaagcattggaaggattacaagaaccataatggcatgtttaacctatttacagataaacttagtgcaaagtttgatatcaacacaaatgatgcaccagtccaaaaggcttgttcccaaatgatgaaaaatgctataaggcaacaacggtacagactaaagaaaaaattctttgatccttttccactacatttggtgacaaaaacatcaccaatcagatcgatgagtaatgaagagtggaatgatcttgtggaatattggaagagcccaaaaaggatggagacatcacaaaagaacaaagataaccgatccaaagttaaatttcatcaaacaacgggatctcgtagctatatggttcatgtagaaaatttgggagataaaaacattggtcaagagcccgatgcattagatttgttcaaggagtgtcattacagcaggaaaaagaaatgttacacatctaccgtgcaacaagctataactcaaatggataacaagcggtctgcaactacagaaggtgaaaaatcaatgtctgcaactgaagttgttgctaatgtgcttgctgaaaatacaaagaagaatttgttccttcaaaatgtggggatacaaaatgttggtcctaggtctagtctgagaaatattgaagcacagttggaagtggagaagagggcaaacagtgaccttaaatctattgttgatgctcaacatgaacaattggatgcattgttaaagcaaatgcaagaaactgaagaaaataggatcagggagcaagaggaagtgaagaagaagcaagctgagatggaaacaaagatgcaacttgtgttgagtcagattcattcaagattgagatagtatttatgtcatgttgacaactttttttgttgttgcaacaactttctttcttttttatggaaccaactataatgttttggatatgatgtggtgttctggttggatagtctttattgtttgggattgtccatgtgaagttctagttggatatttgaatttaaatattgatattttgtcattataattgttatgttatgtgctgattgtgcttttgatgtgagaatgaaattattgaaaattattatgggctgtagttataaatggtcgataaaatttctagattttagccttggcaaaaataattaaactgaataaaataaatgcacaaattaaaatcaa

SEQ ID NO: 6998 - DNA, 1826 bp, Zea Mays
cgacggccggtcggccgccagggcgcgccgctcgagctaccagacgatttcggctgataaatttggacgcgcgggcgggagaaggggagaaaacgcggagccacaccccgtgtcgaaaccccagggcgccaagcttcccgcgggccaccgccgctgccgatgccggtgccgaagccgatggagaggaagcaagccgcctacagcaacctcgatgagaggtacgcgatccagggggagaagtaccaggggcagcagtacagccatatctacttcacgcgcctccaccacatgcggaatctcctccacgccctcgtcccctcctggaagccgcaactccctgtgttaggacttgaagaaggaaaggattgcataattgttggaactttatataagcacatgaagttgaagccttcaattcttgatgaatatgccaaagagaggtctgcaattccccttgtcaaaccacataatttcatgcatcctgatgatcatctcattctggaagatgaaagcggaagagttacacttgcaggagccatacctccagcagcattcgtgactggggttgtagtggctctccatgggaaggaaacaagtgctggcaattttcttgtggaagatgttcttgaggctggtcttccaccccaaagtgcattgtctagcgcagaagaagacaagtatgtagtattcatatcagggctaagtgtaggaagtgacacattcaatcctctacagttccaacttcttattgaccatgtcacaggacatctgggtgacgagaatgagcaatccatagcatcaaatatagtacgcattgtggttgttgggaattcagtgcatatttcaccaaggtttgtcaatggtcagacggtaccatcaaaagatcaatcaaggatagcagaacctattaaggaactggatataatgcttacccagctcgtggcttcgttgcctgtagatatgatgccggggtgtcatgatccggcaaatttttctttgcctcagcagcctctgcacagatgccttttctctggggcatccacctacaacactttttcgtcttgttcaaatccccatcaattcgagcttgacagtgtccagtttcttggaacatctggtcagaacatagatgacctgtacaagtactctgatgctaaagacaagctggaattcatggaaagaacactgagatggcgccatcttgctcctactgctccaaatagcctaggctgttatccatacacagacaaggatcctttccttgttgaaagttgcccgcacgtctactttgttgggaatcaagataaatatgaaactcgactgttggaagggcaagaaaaacagaaagtgaggctaatctccatcccaaggttctcggagagtggagttgctgtaatgctcaatctgaggaacttggaatgcagcacattgagtttctcaacaagctttgatgcctgaatatgctctgatgtttggaagtgcagaagacttcaatgtacaatgttgagcggcatgaccacgagggtgtatttgtactagagcagttctttattagatgtatgatgatgaccttaggttttgccaagtagatcttttagaatgcagatgctgtaacttgtaaccacaaccgaaactgaggctggaccgagtgtagcgtttaacaatcgagttggtgctcatgcctcgttttgcaatcacaatcagcaggcacgtttgtcagatgtgctactcttttatcatcatttctgtgcgtctgtaatgaacactcgggccaaatatttggagtaaaaacatcaactcaccaggcggtagttgattgaacgatc

SEQ ID NO: 6999 - DNA, 3256 bp, Zea Mays
cgcgcttgctctctctctccgcattcccattcactacccgcgtgctcgcgcgctcgcgctctctccgcgacgactgggtgtgggctaccgccgccctacgccaggtgccgaggcttcgtcgatctcttcgccggcgacgagcacccaccaggatgcaaaagcactcggggcttcggagcctcgaggggttccgatccctcgttggatccacctcgacagccatgaaggtcgcgaaccccaggccctccccggatactgggggtatttcgtatgggagcttcgccaaccttaagatcacagcagagaaattagtcaaggagcaggcttcagtgaagactgatctagaaatggcgcatgtcaaattgagaagagcaacagaacagataaacattatagagggaaaacttcaacaagctttgaatgaaaatgcaaagcttaaggtgaagcagactgaagattcgaagctctggcagggattagattcgaaactctcctcaacaaagaccttgtgtgatcaactgactgaaactcttcagcagctagctagtcagacagaacaagctgaggaagacaagaagttttttgaggagatgcttgggaagaattccaaagctctagatgaattcaactgcttgttgcgtgatttatcaacaaaactggagtatgcggaacaaaagataatttcagggagacaggagatgttgcagatcaaacaagagaaagaagagatggatcgaagttacaagggacaactgtattcaaatgatactacgataaaggaaaaagattcgctcatcaagcagttggagggttcacttgatgataataaatcccgcttgatatatcttgactcccgcttgcaatgcatggagcaagaactgaagctaaaagatgatgtttgtatcagcctgaaaggaaacctagctagcagtgaaagtgaaaagaacagtttggagcttatgaataagggacacattctggaaattaaaaaactatgccaggacaacaaggatcttaatgaattgtttagcagcttcatggttaaagtaactgagctagataaagaacatgcctctatgtcaagtcatgtgtctaggctgatttcttcatttgaaagattctatgaaatggcccaagaggagaaaatgctaatggcaagatcttctaaggataaatttgaacatcttcaaagccagtatgtagatttgacatcagaaaacaatgctctcaaaactgaaattgaagaactgaagtccagactcatagagttgcagagaactcaagaaattgttatggttcaacatgttgaagaatgccaagtggctgaagataagatcagaagattagagtctgaagctgaagtttctgcctccaacataaatcagttagaaaaattagcttcagaactacaagggagaattcagaagttactagaagattctacctttgctgaaaatcacaagcaagagttgcttcaaaagattttgaagctagaatcagataatcaggaactcctaggacaaatgcagtccattatggaagagaaatcaaataatgctgaatctctgcatggagagataactaagcgtgaccagcaggttgatacacttgagaatcagatcaaccagcttcgtagtgttctggatgagaaggagcaactctatctttgttctgtacaaaaagagaagactttggaggaacagaaattacaggtcgaagcattgctttctgcaacagagtgcaaacttagtgatgcaaaaaaacagtatgatttgatgcttgaaggcgaaaagatagagctatccaagcatttgaaagagctatctctcaaaaatgaccaggcgatcaatgaaatccgtaagaaatatgaacttgaaaagattgaaattactaatgctgaaaaagaaaaggcagaaaagctcataagggaaattgaaaacaaatgcaacgaaaagatatcacagaacaagcatgattctcagaggtatttgatttgccttaaggaggaacatggcacaacggtggcgagaattcagcaggataatgagcataaagagtcaactctccgggcttatcacaaagaagaactgcagcgcattcaatctcaggctgagaatgaaatgagggagaggttgtcattgctcagaaaagagcatgaagttcaaataaaatcactaaggatgcatcatgaggaagaatgccagaggatgcaggaggaactggagcttcagaagtccaaggtggaggagaagcaaagagcattgttacaattacagtggaaagtaatgggagaaagtcaacgagttgatcaagaagtgaactctaagaaggaatactctgtttcgtcgattaggaggagcgacccatatggaagaaaagaacaagaggtccagttggtaagtccggagaccaatcggaaggacgtaaacttacctgggattttacaatcaccaatttcgaacatgttgagaaaggtagagaaagtgtctcaggatattcctaaacatagaaaggtaacccaccatgaatacgaagttgagacagcaaatggaagaatcacaaagcgcaggaaaactaggagcactgtcatgtttggtgaaccgaactctcagaaaccattgcataatactactgacaaagatgttaaaaaactaaaaaaggttcctacaagatcccgtgcacatcctgcaaacattggtgaattattctctgagggttccttgaatccgtatgctgacgacccttatgcttttgactagaagctcacgcctggaagtatcatttttgcaagcacgatgacgaattctggaacacacaattaccaccaccgtgttgggtcaatcctacggcttttccctggtcatccgtccatcataatgtacatgactgccgttgactcatgtatctctgaagtattgctactgcaacaaccatcacgattgtcggatatgtaggtgtagatttgtgaatgaactgtacatgccataactacggagtaactgaatatcctcagataaaacgctttgtacgcgtcgtgcgatgctgttggattggaatcgtgtttgccctttcctccagatgccaaggcccggtggagtagatgggctccggtctggaagtggggcacagcatgtggatacaggattaatgccactgggtgtttgcatctatggaacgacggaaacaattcggatcgatatttgcttaacaaccatcaggcactgattggttggccagacgacgaattggagagggt

SEQ ID NO: 7000 - DNA, 3425 bp, Zea Mays
cgccgccggcggttccctcgtcgtcgcgcgccagcgcagctgctgcagtgcaggaagggacggtgtgaatgaaaggcgctcaggataaaaggcacagaaagaagcaggacctccaggttctcgggcccttcccgggatgcctggggaggatgatcaacatgttagacctcagcaatggcgtggttgctaccaagatgctcactgagaaggcgcatagagatgcatatgcctttgcagtttctccggccggaaaagaccggagtaatactttcaagatggcaattaatcccccagctcagactgaagataaacaaagggatagtcagacaagaaggaatttccctactaaaaggtcaaactcgcctactaaaaggactggtgcgatgcctgttaaaatgctgatggagcaggacatgtggaaagaaagacggcctgatgaggagccactgaatgttgttgcaagattaatgggcctacatgagcctccaggtcagcaatccaatttccctttaggaagacaattggataagaaatatcagtgtggtggttttgaagagaactactggaatctcaagtcaaagaaggaaagcaaatgccaccaaaaccaaaaggcagggccacgccatcagcacacttggaatggttctggtgaccaaccatcaagaatcagtagcagccagagcatgcaccaagaaaatgagacttgtgagaagaggatgtcaattgttcgcgagaagtttgctgaagcaaagcgactagccacagatgagaaacttcttcattcgaaggagttccaagatgcactgcagtttttaagctcaaatagagacctattcttggagttccttgacgagccaaatcctctattatcaagcaaccgttatgagttccaacctgttgcaccaccttctgaagtaaagcaaataaccatactgaagccatcagaaccagcaaagagaaaagacagcatctttgtggggagacaactgttttcagatggagatggaggtgaaagtgaacgaaacagatacaggcgccatcagagttcggatgtttccccagcaaattcaaatttgtctgagccaacaaaaattgtagtactaaaaccaggattccccagttctcatgactccaggattgcgaggtcttcattatcatcagcagaagacagtgaagatgaaagtatgatggcggttgatgaaaccatgtgctcaagaaggttggcaaaggagatcacttggcagatgaggatgcggctaaaagacaggcaagacgaagagagtatgctctcatgtgaataccctgacttttatatcggagatgactccttcagtaaatcagaagttgagattccaaaagagatgtgtggtgaaacaagtggggaattggagtttggcactccgacttctggccgctcttgggattttctgagtagaagtggaagtcctttctctgcgtcatgctctagtcaggcatcccatagaagggagccgtcagtagttagggaaggcaagaagaagattttagagagattgtctatggtatcatcaacagtcaatattgaggaagaaatggaaggtcgcagaagtacaggcacacttggtgacatgctcacaatatcgaaagtcaaggaccaggaagaaattggggctgaaacactggggagcccagcacctgagctggaacctgaggagcctttctcatgtttgccaagatctcgatcccttccactttctttgtcctatggagtcgctgagtcaaatggaataacctctggcactcatgaagctgaaaaggaaagaatcaggaagtcgtcatcgtttagggaaaaagtttctagcctgttctctaaaaataagaaatcaaccagggagaaggtagatccatctgtgagcaatagactcaaacatggaggggctgtgactactggtgatgtgaaggaaatctgcaaccatcttgccctagacaatcttcagaaacaacatacttgtctaaacacagatgagaagaacactgtgcaaggactcgtgactagttcttgtgagaccaatagtgcagctgatatccctgccaaggatatttcctccatttcaagtcttggtgtcccaggaatctttggtggccttcaggatgaacctagtcctgtatctgtactagatggaccgtttatatgtgataacaataggaggctactgtactcatctgaaaatttcatcacttcatccccacaagctttgtcaaggtctcccctgatcggatcattttcacggtcactgtcatgggaggatcccccgctggaagtcatgtcgccgaattcgttgagactctcaaggcttttctcgaaggctgatgaagatctagattcactgacgtttatccagaagctggtccactctcgaggcacgggtcgagaaagttgcatattagctgaccctttggacccgagtttgctcgagaagatttcggattacgaagaagatggaattaagtttgggaaaaggcggcccaaacagaggctccttttcgacgccgtaaacgaagcgctcatcgagcttgcttcgatggcggaactggctgcgtacccctggggtagatcatgctcttcggagcacggggattgcaagaacggttccagcagtaattctgcggctgaggaaatctggcgggtcattaggaactggtcgatacttgagaagtaccctcccggtgaagctattgaaagaaatctcttgctggagatgatactaaagagggaggtggcggaggcagccagcgctgacacgactcggttagagacgtttgatctcaacaccacggtctgcgccatggtcttggatggcctggttgaagagacagttgtagatctgactaactactgctagtgagttctcagaagaaggaaaagaagggtacagatgtaaacgaggagtgctgagaaagatgcatgcgtgctcttcttcatccttggtccgcctgcctttgctttgcagtgtctcttgctgctgccgtttgctgggtgttttgtagtgcagtgcttggccattgccatggaagtatggaagcccgtcttaaagactgaaggctagaagcagtataagtcggtatggattaaaaccaagtgaacgttcgagcagccgccaatttgctgtaggtcttctgcggaatgatctgacgaatggatgaatgattgccatgaaccgcttgcacgttttgctcttggtagtggtactgctaccctgtcctgtagttggctgtgtgttgttggttcttctcgttcagatccctgtacagtgactggctgacagttttgaattggggctgccatgccactgccaccttctacggcggatgcgtgctttctcaccgatccttgaagcatgaatgcgtacattaactaatttgatctggtgattgcttgtttgatc

SEQ ID NO: 7001 - DNA, 771 bp, Zea Mays
cgtttctcccgttcacctggcatccacgctcgattcggccgttttccgcatccacggtgccaggcgaccgccgccgcttccctactcacccttggccggcgacgacgagcgcccactacggatgacgacgctcaggaacctcaagatcaagacgtcgacgtgcaagaggatcgtgaaggagctgcgctcgtacgagaaggaggtggagaaggaggctgccaagaccgccgacatgaaggagaagggcgccgatccctacgacctcaaacagcaggagaatgttttggctgagtcaaggatgatggtcccagactgccacaaacgacttgaaactgcactggctgacttgaaagcaacactggctgaactgaaggagtcaaatgagcaaggtgccgagattggagaagctgagagtacaatcgcagaagttgaagcagttgtcaagccagcagaagattaaactaaaaaaaactcttggtttgctgaactgttagcgcacatcctattttctcatattcagcccttgtgagcttattacgatatgtttgaggcgtcaaatcctgtaccattatcatcacttctgtcttgaaatttgagttttatgttcccaagttcaaagcgttactgtttgttgtctgggagagcgcacatccctggcttctccgggaagttgttagtgtaaattgaaattaagaaaaaatggacgaatttgaatacagacgaaatttgcgacggtcgatggaaatgtattgtctctattacattatctcc

SEQ ID NO: 7002 - DNA, 3704 bp, Zea Mays
tttagccacacttgttcgtcggaacgaagcccaactctatctccccactcctaccggcctgcagctgtttgcgaggcaagcgtgtcttctgcgcgcgcgacggacggcgcgagggcaagcagcgcctccgtgttccgcccgtgcgaagggaggggaacgagagctccggcggcggcccccgcctcgccccatgtctgtgcctctcgtcgggttggctgatacccctatcccaacatcttcttccctcccattcccatggagctcctcccggctccctttccctctttcctccctagaccccaccaactgcctctttccagaccctgccatggccgcctccaagagcccatcacggctgctttcgcgcaggctcctcccctcgcgctccccttccaagaagcaactagaagaagcagcagctcccataccccacgcccaagtacccgtccgtgcccccccgcccagagaccaacaacaactcacccgctgccgccgccgctgccgcctggcccttccccttcctccggcagcactggcagtgagcgcctgattgtttccgagacgaagctcatcacggtgcactcctgcgctgggcgcctaggggacgctcgcaaggtgttcgaaggaatggcgtgcagggacctgctcgcctggtcggccatgatcggtgcctacgccatcaggggcctgtacgaggaggtcgtcgcgctcgcggtggccatggtcagggaaggggtcatcccggacaggttcctgatcacccggattctacaggcctgtgcgtacacagaggacctggagctcgggacggcgatgcattccctggcgatccggagaggtttcatggcggagggagcgagggacgtgcccgtggggaactcggtgctggccatgtacgtcaagtgcggagagttgggccgtgcgcgcgccgcgttcgacatgatggggcagcgggacctgtgcacgtggaactcgatgatcttcgggtgctgccgctccaacgaatgggaagaggcacggaggctgctcgacgatatgaggcgccaaggtacagagcctgggcttgtcacatggaacacgctggtttcgagctacgcgaggtctggggaacttgatgtggccatggagatgctggagcagatggaggagtccggtgttgctccggacgtcgtcacctggactagccttgtgtctggttttgtccacggtgataggggtggcgaagcactttggtgtttcgcgcgcatgcgccttgctggagtcgaaccaaacggcatgacaattgcgagtgccatctcagcttgtgctagtttgcggttgctgagtcagggcatggagctccattgccacgcaattaaggttgggagtgtgaacaatgtgctctcggggaactccttggttgacatgtatgcaaaatgtggagaaatcattgcagctaagagagtatttgatgaaatacccgagaaggatatcttctcctggaactcgatggttgcagggtatgcacaggcgggctattgcggcaaagcatatgagcttttctgtgagatggagagccttggtgttcggcgcaatgtgatcacgtggaatataatgatctcgggatacataagaaatggggatgatgagagagcttttgaactatttcagatgatggaaagctgtggagtaaaaagggacacagcttcatggaatgcactcattgctggttcggtgcataatggtcattctgatagagccctgagaatattctggcagatgcaatcactcttggtgagaccagacttcattacaatattaagtatcattccagcttttgcgaacctagctggattttggaaagtacgggagatccacgcctgcatttatcacaacaatttagaaatggatggcaaaatagcaaatgcactcatcaatgcctattcaaaatctggtgaccttgctggtgcttgtgctgtttttgataggcactcatcaaggaacattatttcttggaattgtataattcttgcacacttgctgcatggttctccaagtgaagcactggatcgcttttgtgagatgaaacaagaaggcgtgcggccagatcatacaactttgactgccgtaatcaaggcctatggcctccagggaaaggtatctgaggcgaaacgaatatttcacaatatgacccacgattacaacattattccagatttagatcattacacagctatagttgatctccttggccgctcagggagtctacaagaagcgtacgagtttattggtaatatgccactcatacccaatttagcagtctgggaggcattgcttactgctgcaactattcatggaaatgcaaggctcgcaaacctgacagcaagagagttgtcatcgcttgatccgagtgaccctagaatccaaagactggtttttaattactggggtctaactggaaagtctgttgatgtgccactcatgacggtatacaacggaggaagagagttggaagatgttgatagttgttcggttgaaatcaagaacaatgtctatttgttctcaaccggtgataatttagcattagagagtacagttgctgaattgaagctgattatgattcagatccgaatgtcattgctgaacatctctaatgagactaacgctgaagaagagaaagaagaattatcaggaatacattgtgagaagctagcaattgcttttgcaatttcaaattcccctcctttcagaagcatacggataataaagaccttaaggatgtgtagccattgtcacatctttgccaagctagtttcagaaaaatacgagcggcagatactaatcaaggattcaaattgtttgcacaagtttgaggatggaaagtgctcttgtgaagcttgtgccactcttgatgattaccttctcaagagctactacaaaaccacgtctctgatcgcagcaagcacaaggtcagctgttgatgacatccacatcccggactttacccaatcagctgagcaacttggcaaaacagtcggaagtgacttggcaaagggaaacctgacggctccagtcatctttgctttgcaagatgaaccagagctaagagagatcatcgactccgagtttagtgagactgattcgtttgctgctgcgatagatcttgttcacaagagctgtggaataagaagggcacgcgagcttgcgagagagaagggtgacttggctatccaaaacctgcagtgccttccgagaagtgatttcagaagtaccgttgagagtatggtaaaatataatcttgaaaggattgagtagatagattcagttgattcctctaccagtccactagatacaggcctccagtatgggatccatgtagctccaaaacccatctttcagcctcttcgtggaaggtgaatctttggcttggagttcaaggatcagatattacctcatctacaacaccagaatttataagcacccggttctgcagaaatataaactatggatttttctttttactttcagttggcaaaagaaattgcaatggttgaagtattttaccatttatagttgtttttcgtgcattggtaatttacacttatttgtttgggcttacaaaaagtgaagaacacttttttgctgaagatgttggtgtggaatcttccgtgacaacaggaccaaataaacaaacaattgaagatgacacaaagatttcatattcg

SEQ ID NO: 7003 - DNA, 1301 bp, Zea Mays
ctagaaaaacaaagaaaaagcgaaggcaaaatatgaaagagaaaaaaccgcaattccggttgccttcgactcaactcctcgctctggtagcccgactcccctaaacccattgtgtgcccgccgtcgacgcagcctccgtcctcccccgcatccgaatcacgcacgccacgtcccacccctgtcatggccacctccagcgacggcggcggcgaccagcggcgcctcctctccatccccaaggaaggcgagcgcatcatcgcgcccacgcgccgccccgacggcacgctccgcaaggccatccgcatccgcgccggttacgtgccccaggaggaggtcgccatctaccagtccaagggcgccctaatgaggaagtcagggcccgacgtgccgccggggtacgacccggcgctagtggccgacgccaaacccaagacgaaggcggccaaacggaacgagcgacggaaggagaaacggcagcaggccagtttggcaaatgataaaggaaagagtatgaacatagagggaactgatgctggagaaaccgacaaggtcctttcttccaaaacggataagcagaaggattcggtggaaagtgtaacaaagcagatgagtggcattgctatttctgagtcacatgcaatgccgtccacaaatactataaacaattcgcaaccagaatcatctgctccagacatagacaagaagattcgagcactgaaaaagaaggtttactcttgctctttcttgcgtctgcacattttctatgaaaaaaagatgaatatacgcttagctgaagcacaagtacaaggtgaccctgaaaaattgaaatctgaaacgctggaaaagattaaaaagattgatggatggtgtatggaactgaagcttttggaggacagcagagctcctgcggcctagacaaaatcgacttcggctctgatgtagtagaatagacagtagagccatcgcgaccacaccagggtgctgagctaaattccaaggtgcactgaatcaccctaggcttttccattacctgtgttggttactggaaaaccagtccggtagatgcgggtttgcgcagaacgatggagtgtttttccctgcacatttgatgtctcatgttcgccaccaagtttcaaggtttgtaccacaagatccatttatcagaaagaccacacagtgagataattcaaacgattattgtgacagtgtggttaaactttagtatactatgataattctgggaatctcttaagactgaatcagaatttagtttctccctcccggctagaattcatctcggc

SEQ ID NO: 7004 - DNA, 2276 bp, Zea Mays
gttctgtgaataatcatgaccagttgtatcagagtttcaccccaaatagtaatgtagctcagagttgtcgttcacatcctacaagctctgcccactaccagcagcagtacagccaatgagctaactattatgatcagtctgcacagagttcaggtggccttgcagttactagtagtggtaactggtagctctgctcctgatacaagaactattaccattggttccaattatgcacacaccagcaaccagccacctccaccaggcactacattatggaagagagatgctggtaacactgctgcaccttcgtcactgacatccccttcgttttggctaataataagattccagaatgagattctacaaatgaggtatgaaccaaacagggccttagtgaggttgcagtatacgcagacaaacaaaacgaagcatacagaacaatcccccaaccctaaggacaagctgcgtggaggttcaggagcctttgcatgcaaaaggcgacaagtaaactattcttgactctataatggtttgacacatacgaatctaacacagaaggtgacagaacgaggccccacatgacaaatggcttctacattttgtattggattttgtgccataactcacaacctcaacagaaattgataacgtgatctatattggattttgtgcattatccaacttctcaaaaaccatagggaaccaaacatcacgtaacctggattttgccacaccaaggcaaacatctatggcattctatttgcagcatatatattgtggccatgggcacgcagccactgcttcaactccagtaccgccatctccatcgactggggcaactgcaaccgtccctggtttactattgtgtacctctgctgtggggaagaaggctcatagccatgggggcggacccactggcccaactctagtgctgttgtctccgtagattggggcaactacaggctacagccatccctagcagctagcttccagtcgggtactgctggcatgtccggttggcggccaggttcctccttctacagcctcgtcagaactttggttctttctccccgacaccagcaccctttagtaaagggactccaccagcgatttcagcagcaggatctaagaaaaatgacattgatgacgacaatgacgtcgaggtcgacaggagtgccacccacgatgaagttagattggcaagtgcttggttgaatcattctaccgacccaattgatggctatgggctatggcaagaagaatgataaattctaggatcaagtttttttttgaaagggagggcaaaagatttgccgctccaatatattagaaaggagatacacttacaagacacgcactcgaagacaaagggaggagaaaagaaagaagaaggacaaaaacaaccgtctactgagcctaatcacaactccgaaactacctggcacaaactaactcaagaaagcacccactagctctttcactaaagaagcgatctgctttgcatttttctgctggttcctgaagatcctgttgtttctctctaaccataggctccaccaaaaatagatcagaagaccatcgaaatttcttctagattgcctattacagagacctcttatatttctccaccaaccatacaacgacacggaagcctggattcctctcaggaaggaacagttccccaatgtcaatattttatcccacacctctctactgaaaggataatctttgcataaataagataccgtctccaacgctgagttacaaagacagcaaactaggttgcactgtcaatgtttcttctgcaggttgttagcagtcagcaccactttattatgtaaaagagtccacgcaaaaaaaatgttaattctaggatcaagttacagatgacttcaacagcaccaggccagttgaccacaaaagaaatgttaatggactgaaaatgcattggcaagctcctcaaggcgacaataagccatttgaacaactgctggtcttgtgtccttcaaaagctggtatagtgttcttaaaaagcaaggaagttggatctcagatgaccaaatgatggatgaggcactaaagttaaatagagtagatgtgaatcaagtaaggtgggcaaaaaattagtccaaaattactagcaaaaataaaaaatatctagatttttttaaaaatagtaaaacaaatgtatagttaggttttgtcaaggattatgagaatgacataaatccatctctcaaatctaaactccttcaaaggttcaaaggacaattctc

SEQ ID NO: 7005 - DNA, 4828 bp, Zea Mays
cgaagtgaagaagttttgataaaaaagaactcaaagtttagtctttgtgacgcactagaccagtctaatgagacacctgacctattcgagcgaccatgtcggggcgtggcaagggcgggaagggtctgggcaaaggcggcgccaagcgtcaccgcaaggttctccgcgacaacatccagggcatcacgaagccggcgatccggaggctggcgaggaggggcggcgtgaagcgcatctcggggctcatctacgaggagacccgcggcgtgctcaagatcttcctcgagaacgtcatccgcgacgccgtaacctacacggagcacgcccgccgcaagaccgtcaccgccatggacgtcgtctacgccctcaagcgccagggtcgcaccctctacggattcggcggctgagaggcgctaccgccgctggtggccgtggcaaaagtcttgggtcgcggtcaagaaatcgagagtattctggatgacgtgcttagtttcgtagtattattatcactagtgcttattgttagcggttgttgggttcgaccactctaagccactgtcaaacagtaatatatgagtaccgcatttccgtgtttcgaacttctaatatatcataatcttatggacatcgggttaattcgcttaattttgtgctggctatctgaatatttgttgctcccagtatttagcatttttttcttattagattgataaatttagaaacctaatttgtcgaggtctttgcaacagcttcttctgtccgtgacgcttcagccacgcttaggagtatttggcttcagcttgttgctagacgtatgacatcttcagtcactgtttttacagcttgccaaaaatggttcactcttagataataaagaagcaaggttatagaatatatggctaaataaggggctgtagaattgatgcttgaacataactcaaatcttgcttaatgcagcatttatatatatggagtgatgctgctgttctttgaatatctcaattctactccattggttactaactgtcagttgctttagttgttaaatcaaacttgtaccaaatttatacaaaatgttaacatttacagtatcaaataaatgcactagtaaaatatatttatatggtgtatctattgaatctagtttaatgttgttgatatttatgtatttttctataaacttgtttcaagttattgatgtttaatttaggagaaaactaaaatgacttacaatttataatggagtatattagtagctatgtactccgactatagtatagtttaactgcaattattattctgttacctaacattaacaacgaggcatcacaaagaggggcggaccctaaaaaacgaaagagaaattatctttagtgtgcaataactattctgtcacctaattagtggtttaagtgttgtgttttgaagcagctagtcaccgtttgaaccctgatttttgtttcttttttatttttttcctggcacaccttaaacataagggctgggtttgccgctaatcgcaaatgagttgattctgccatggcttacatgatttacggttaaatagactatattgataatggaggaaggatttcactggctgcagtaccaaaaataatcatctattcttgttgcatatgaaatcattagtcagggtcagccaatatcatatcctgtcattagttagctctattacaatttctttagggctgatcacatgttataatagcaatgaaaaaattcttacgttgctgcattactgcatacaaatctttgttggcacttgcttcatagtctctgatgctgttcatattgattgattagtattacttatgatggccttatggtcaagtagtaagcaagcactatcagtgcctttgtggtgacttccatgctcaccatgaacctaggtttcacaatttctttccatagtcgttttgttctgccagtgccagatatgctgttctgtatggaatgctgatccgacaatggtttctctcgttgttttttctaattaccagagcaggagctaggagtaaaccattccatctctgtacctatctttacctcctagccatcatttgacttttctgactgtctacagtgctctacaacatcaaaaccattactataactatccacaagtggcaaatgattcttctgttcaatgaggagttgatcaaggtccagatgctgcttaccagcttcttacatcgtttctggattcaggatcttatgttggtccaacaagtaacacatattatactgttggtgctcatcagaccatgccaggatatgcaacaagcaattactattatcatcaaaacaatgcctggtaatggaagttctgtgaataatcatgaccagttgtatcagagtttcaccccaaatagtaatgtagctcagagttgtcgttcacatcctacaagctctgcccactaccagcagcagtacagccaatgagctaactattatgatcagtctgcacagagttcaggtggccttgcagttactagtagtggtaactggtagctctgctcctgatacaagaactattaccattggttccaattatgcacacaccagcaaccagccacctccaccaggcactacattatggaagagagatgctggtaacactgctgcaccttcgtcactggcctgtctgggacactctaaggggtcgtttggcagatctcccacagctccgctcatagcgagaattactcccgcagagccaaatgacatccccttcgttttggctaataataagattccagaatgagattctacaaatgaggtatgaaccaaacagggccttagtgaggttgcagtatacgcagacaaacaaaacgaagcatacagaacaatcccccaaccctaaggacaagctgcgtggaggttcaggagcctttgcatgcaaaaggcgacaagtaaactattcttgactctataatggtttgacacatacgaatctaacacagaaggtgacagaacgaggccccacatgacaaatggcttctacattttgtattggattttgtgccataactcacaacctcaacagaaattgataacgtgatctatattggattttgtgcattatccaacttctcaaaaaccatagggaaccaaacatcacgtaacctggattttgccacaccaaggcaaacatctatggcattctatttgcagcatatatattgtggccatgggcacgcagccactgcttcaactccagtaccgccatctccatcgactggggcaactgcaaccgtccctggtttactattgtgtacctctgctgtggggaagaaggctcatagccatgggggcggacccactggcccaactctagtgctgttgtctccgtagattggggcaactacaggctacagccatccctagcagctagcttccagtcgggtactgctggcatgtccggttggcggccaggttcctccttctacagcctcggttgtattctcttggtgggtttctaagttatcaacggtttctaagttatctacaaccaccattttctccattgagtcaagatcctgaaccatcatcagaggatttctattttgttggtagcagtcagaactttggttctttctccccgacaccagcaccctttagtaaagggactccaccagcgatttcagcagcaggatctaagaaaaatgacattgatgacgacaatgacgtcgaggtcgacaggagtgccacccacgatgaagttagattggcaagtgcttggttgaatcattctaccgacccaattgatggctatgggctatggcaagaagaatgataaattctaggatcaagtttttttttgaaagggagggcaaaagatttgccgctccaatatattagaaaggagatacacttacaagacacgcactcgaagacaaagggaggagaaaagaaagaagaaggacaaaaacaaccgtctactgagcctaatcacaactccgaaactacctggcacaaactaactcaagaaagcacccactagctctttcactaaagaagcgatctgctttgcatttttctgctggttcctgaagatcctgttgtttctctctaaccataggctccaccaaaaatagatcagaagaccatcgaaatttcttctagattgcctattacagagacctcttatatttctccaccaaccatacaacgacacggaagcctggattcctctcaggaaggaacagttccccaatgtcaatattttatcccacacctctctactgaaaggataatctttgcataaataagataccgtctccaacgctgagttacaaagacagcaaactaggttgcactgtcaatgtttcttctgcaggttgttagcagtcagcaccactttattatgtaaaagagtccacgcaaaaaaaatgttaattctaggatcaagttacagatgacttcaacagcaccaggccagttgaccacaaaagaaatgttaatggactgaaaatgcattggcaagctcctcaaggcgacaataagccatttgaacaactgctggtcttgtgtccttcaaaagctggtatagtgttcttaaaaagcaaggaagttggatctcagatgaccaaatgatggatgaggcactaaagttaaatagagtagatgtgaatcaagtaaggtgggcaaaaaattagtccaaaattactagcaaaaataaaaaatatctagatttttttaaaaatagtaaaacaaatgtatagttaggttttgtcaaggattatgagaatgacataaatccatctctcaaatctaaactccttcaaaggttcaaaggacaattctc

SEQ ID NO: 7006 - DNA, 1482 bp, Zea Mays
ccgcgctcgccttgccgtcttcatctccccgccgacggaagcctgctcccagcaagccccagccgcgtctcgtctccctctcccttgtctccctcacacacgtttctctctccctcctcttcttccttgctgcgctccacctcgccccaggtgctcggccgctcatctccctgctgccgcgtccctgcgcccggccttcgtccccgtcgcgccgatccgcgctcgcccaggtcgcccgccgtcgcccagctcggtgccttccctgctcctccaagccggcgtcctctgccctcatcttcttcctcagccggccgaggtccttcccatggcgcccctccctgctcccgtgcacgtgcccccctggtggtcggagctcgccaacgccagttgttcctccacacacacctcctgctcccctcgccatggcatggatgaccgctgtatctgctcctgtcgtgctcaagtcgtcacaggttggtgggttgtgcgcgcctagcggagtttaaaacacaagcaaccacattggcatcgcttcagcatcccaatttatgtaaactgatcggctattatgcaaaagaagattctaatgaaaggatgttggtctatgaacggctttatcatggaagcttagataagctactctttggaagatcagatggtcatttcatggactggtctaaacgtttgaaggttgccctgggtgctgccagaggtctagctttcttgcatgatgaaggaccctttcaggccatgtacaacgagttctcaactttgaacatccaaatagataaaggtttcactgctaagctttcaggatatggttgtgttggcttcaataccgaggagatatctaatgcacctgtgcaaaccattcggtggagaccttggagaagggtttactcactcagtttgtctattgctgcaacaagtcggggctggaccgttccaaagtaaatgtaaatggaggcacgattgcccttggacaccctttgggtgcaacaggtgcccggtgcgtggctactcttctaaatgaaatgaagtgccggggcagagactgcagatttggtgttgtcaccatgtgtatcggatctggaatgggggcagcagctgtgttcgagctatgttcggcccggctggaggtatcgaccatcactcgtcactgtaacccgatggtgatcgacgaccgtgagcttccatgttattgcgttctgatacttgagacttttattataactatgtatgagatattgtctcttattagtactggatgatgagatgtgtcttattatgactatggatgagacttttgtgatgtaattgatgagactatggatgagacttttgtgatgtaattgatgagactatgaatttaaatattgttatgtgattgtgtgtgagatgtgttatgtgaaaatatgttgtgttatatagctgttgatatatttgttatgttgtggaatgtggtgtaaaataaaaataaaa

SEQ ID NO: 7007 - DNA, 1571 bp, Zea Mays
ccgcgctcgccttgccgtcttcatctccccgccgacggaagcctgctcccagcaagccccagccgcgtctcgtctccctctcccttgtctccctcacacacgtttctctctccctcctcttcttccttgctgcgctccacctcgccccaggtgctcggccgctcatctccctgctgccgcgtccctgcgcccggccttcgtccccgtcgcgccgatccgcgctcgcccaggtcgcccgccgtcgcccagctcggtgccttccctgctcctccaagccggcgtcctctgccctcatcttcttcctcaggtccgaccggtgccctcattcccctggctggcgctcggcttcctcctcctgaagtccctccacgcgccgaatttcgagctccattcatgccggccgaggtccttcccatggcgcccctccctgctcccgtgcacgtgcccccctggtggtcggagctcgccaacgccagttgttcctccacacacacctcctgctcccctcgccatggcatggatgaccgctgtatctgctcctgtcgtgctcaagtcgtcacaggttggtgggttgtgcgcgcctagcggagtttaaaacacaagcaaccacattggcatcgcttcagcatcccaatttatgtaaactgatcggctattatgcaaaagaagattctaatgaaaggatgttggtctatgaacggctttatcatggaagcttagataagctactctttggaagatcagatggtcatttcatggactggtctaaacgtttgaaggttgccctgggtgctgccagaggtctagctttcttgcatgatgaaggaccctttcaggccatgtacaacgagttctcaactttgaacatccaaatagataaaggtttcactgctaagctttcaggatatggttgtgttggcttcaataccgaggagatatctaatgcacctgtgcaaaccattcggtggagaccttggagaagggtttactcactcagtttgtctattgctgcaacaagtcggggctggaccgttccaaagtaaatgtaaatggaggcacgattgcccttggacaccctttgggtgcaacaggtgcccggtgcgtggctactcttctaaatgaaatgaagtgccggggcagagactgcagatttggtgttgtcaccatgtgtatcggatctggaatgggggcagcagctgtgttcgagctatgttcggcccggctggaggtatcgaccatcactcgtcactgtaacccgatggtgatcgacgaccgtgagcttccatgttattgcgttctgatacttgagacttttattataactatgtatgagatattgtctcttattagtactggatgatgagatgtgtcttattatgactatggatgagacttttgtgatgtaattgatgagactatggatgagacttttgtgatgtaattgatgagactatgaatttaaatattgttatgtgattgtgtgtgagatgtgttatgtgaaaatatgttgtgttatatagctgttgatatatttgttatgttgtggaatgtggtgtaaaataaaaataaaa

SEQ ID NO: 7008 - DNA, 1281 bp, Zea Mays
cctccgatcagaaatcaacggtgcgtctctgctcttgtccggaaggttctcgcaggcgcggcgacctcggttttgaacacctgctcttcttcctccttccaatccaagcttcgtacgggacgaggagaaccgaagaaggaattggacgcgaggagactcgagtactcgacagggaaaagtcgaggcctcggatccatcgactcgtgaagatgtcctcgcccgccgagtactacaaatcacttccacctataagcaaggcatatgggacattgtgtttcttcaccactgtgctagttcggctccatatcctgaatccgctgtttctgtacttatattaccctcgggtgttcaagaagtttgaggtatggaggatatttacaagtttcttcttcctgggaccattttccataaactttggtattcgccttctgatgatagcaaggtatggtgtcatgttggaaaagggagcatttgataaacggactgcagatttcttgtggatgatgatatttggtgccatctcactattggtgttgtctgttattccccaattgaatacttatgtcttgggattacctatggtcagcatgcttgtttatgtctggagccgagagaatccaaatgcccagataaatatatacggcatcctccaattgaaggccttctgggtatcatggttggacatctatactactactttgcagtgttgcaccctctcgccaccggaaagaactacctcaagactccgaaatgggtacataagattgttgctcgattcagaataggtatgcaagccaacgctcctgtccgcgcaccagctaacggcaacgctgggactggtgccttcagaggaagaagctatagactcaatcaatagatcgaccaggagaagtacacaccttgtaacgctaacgcgattcctgttctgagtggcaatgtagagacagagcgcagattcctagggtcaatcaggattaagggttgcggatagggcagaggggtggtaatggatgacgatctaaatgttttttcataaaatggtagagtattaaataaattataaattttagtgtaaaatgaatataaataggatttgtttctaatccgatctttatatcttatagtgtaaaattatatcttatagtgtaaaatttagagtcactgttaccctattgcagtgccgcctttcatttactgatttagttcctaacaatgttcgtcgtccctgtttacgcatgagtatagttgtgtaatggcaatttgcgtgcacttacgtttgaa

SEQ ID NO: 7009 - DNA, 1779 bp, Zea Mays
cactcgcaccgcacaccgcacaccgcacgcgaaatccagtcggcgcgacgacatcaccaccgccgtagagttgtggaccaccaccggcgcatgcacagggtccagagatttccttgttccttccttttccccaccgccagcacgtcgtccagcacgtcctcgttcctatcgccccgtgcgcccggtccaccgcccgccaccgtccctggcccctttttcatatccactgtgcagtgcccggctgcccgccgcgccaaccccaccccgctccgcccgtgtaaaccaaaccccgcttcggcggcggcggcgactggcccacgagccttctcgaaccgacgcatccgccacccatgctgcgctgccacacgccaccgcaatgcgcccgcgcgccgctccgccaccacggaaggtgggagtcgcctccggcggcggcgcccgcggtggtagtgcggtgcgcgcggggtgcgccgcaggtgtccgggatcgaggcggcttcgccgggccacgcggctgtcacggcggcgttagctaaggcggaagggggtgacgcgcggcccagcctggccgagcggctgcggttggggaacctcctggaggacgggctatcgtacaaggagagtttcatcgtgcgctgctacgaggtggggatcaacaagacggccaccgttgagaccatcgccaatctcctccaggaggtaggatgtaaccatgcacaaagtgttgggttctccactgatggcttcgccacgaccactacaatgagaaaacttggacttatttgggtgacgaacagaatgcacattgagatctacaagtacccagcttggggtgatgttgttgagatcgaaacatggtgccaagaagatggaagaattggtacccgtcgtgattggatcctcaaggacctagctaatggtgaagttattggcagagctaccagcaagtgggtcatgatgaaccaaaatacacggagacttcagcgggtcagtgatgacgtgagggatgaggtgtttatgcactgtccaaaggctccaagattagcattcccagaggaaaataatggcagtttgaagaagattccgaatctttcagaccctgcagaatattcaagacttggactagtgccaagaagagctgacctggacatgaaccaacatgtcaataatgttacttacatagagtatacctcaagatataattgatacacacgagttacaaacaatcactctcgactacagaagggagtgtcaacaggatgatatagttgattctcttacttgcatagaggaaggagaggagaaaagcatgaacggctctgcttctgcagcagcgcctcacaaagaagagcggcagcagttcctgcattgcttgagatttgcagccaacggacacgagatcaaccgtggccgtaccgtgtggaggaagctagctagataaaagtgttctttcgtcataaatgatctcctccatttctctgctcacggctggcggcccttgtaccacaattttgtgatgtattgttgccctttggaatgtactcagccatgtatcggtgccgatttgtgacatttcttggagctgtagctgtctgtccgttttgtaccagtggacaatgtttgtgacatgcaataaactgcgtttctccggcaactctcaactttgcgtcgacatgagatgataatgggattgagatgcgatctttatggaattatgcttgtcagtttcatgggtgtaggccagacattccgcattcgaggaatagagggttagaggttgagg

SEQ ID NO: 7010 - DNA, 2141 bp, Zea Mays
gtgcccccacgcgcctacccactgttcccggctccccacccgctccactccgtcccgtcccgtcccgttacaaaaccccgagctgcaaccccacagccagagagagagactctcccggctcccctgcctgcgcgccgtctcctccaggctccagcgcctcgcggccaccccgtacgtaccacggcacggctgcacggccgatggcgtaccccgccgcgccgcacacgagcgcggccttcctcgctagcttcgcgacgccgctccccgcgcgccgcgcctcgcccccgacccggcgccgcgcggtgtcggtcgccgccatcgccaccaccaccacctgcgtcttcgccgacgccccccgtgggatcaaggaggagcaggcggactcgggcgcccaggcggcggcggctgcggctgcgcggagggacgtcagcccggacaccgtggcctccatcatcctcggcggtggcgccggcacgcgcctcttcccgctcacgcgtacaagggccaagcccgcggtgcccgtcgggggatgctacaggctcatcgacatcccgatgagcaactgcataaacagcaagatcaacaagatctacgtcctcacccagttcaattcccagtctctcaatcgccacatcgcaaggacatacaactttggtgagggagttggattcagtggcgggtctgtggaggtgctggcagctacccaaacagctggggaatcaggaaagaaatggttccagggaacagcagatgctgtcaggcagttcctctggctttttgaggatgcaagactcaaatgtatagaaaacatactgattctgtctggtgatcatctgtatcggatggattacatggattttgtgcagaagcatgttgactctggtgctgatatttcagttgcgtgtgttccaatggatgaaagtcgggcatctgattttggattgatgaaggccgacaggaatgggcacatcactgatttccttgaaaagcccaagggtgcagatttggaatcaatgcaagtggacatgggattgtttggattatccccagagtttgcaagtacgtacaaatacatggcttcaatgggaatatatgtattcaaggcagatgttctcagaaagcttctgagaggccattatcctacagctaatgattttggcttagaagtgattccaatggctgcaaaagattatgatgtgcaggcttatttgtttgatggttactgggaagatattggaacaataaagtctttctttgaagcaaaccttgctctcactgatcagtctcccaacttctatttttatgatcccgtgaagcctatttttacatctcctagatttttacccccaaccaaggtagaaaactgcaaggttttgaactctatagtttcacatggctgctttctaactgagtgcagtgttgagcactctgtcattggtatccgctcaaggttagaaccgggagtgcagctcaaggacaccatgatgatgggggcagattactaccagactgaagctgagagattatctgagctgtctgttggaaaagtcccagtcggtgttggagagaacactaaaataagaatgtgcaagaagcagacaggccagctgaaggatattacattcgttctgggataactgtggtgctcaagaatgcagtaattctgaatggtacaaaaatttagaagattatagaattatctgcagaataccaatccctcagtgaagagcacaccattgaagcccacagcagagttctacgacgcagatgcagtcaataaaaccccaatagcacaaaagattaggagactgtcgatgcagctaaagaagtgtggatataggcatggagcacctgcaacacgccaacggtacggccaaaccatgagcatgaggccatttcacgtcctttcataagcctcggctagtgccggcgcgcgcagggtatcttttgttccttttttctagcagtaatttacgtgaagtgtctgtacatgtagagggagagatagggtacaagtacgagagagcatgttatagtacctactcttattatttgtttatttattgttgtgccgaagaacgacccgtgcatctcatgtgccaagtccatgcctaattgcctattgatgcccactttcgggg

SEQ ID NO: 7011 - DNA, 2819 bp, Zea Mays
acgcagcatcggccatggcggccacccgcctcagccgatccgagacattcctgtctgggtgagggtgaggccaaccaaccgcttcgctcctctcggtaaatcggcgatccatccagcggagccgcaaccaaaaagcagagcaacgcccaaattaaaaacagggcaggggaaaaaaaaagctcgcagaagtgagctccctcctcccccctctctctctatccgtctctccgctcggagctcgcaccaccgccgaaccctcctccgatccaaaccctcctcgcatcgtgccgcatgcctccacgcgccacgaggcggcggcgctgcagctgaccaccccacttgaccagccggggggcagaaagagagagagagacaaccggacgcggacggcaggcatgggcggcgtcacgtccaccatcgccgcgcgcttcgccttcttcccgccgacgccgccgtcctacaccgtcgtcgtcgccgacgccgccaccggtcgcctcgccatcccggagatctcccgggcaccctcgcgccgtcggaggcgggacggcgccggcgccgggggctcctcctcggcctcctccgtcgtcgcggccgccgaggaggaggacggcgcggaggtggtgcgcctccggacccgccgcgggaacgagatcgtgggggtctacgtgcgccacgcgcgggcctccgccaccgtgctctactcccacggcaacgccgccgacctcggccagatgtacgggctcttcgtcgagctcagccgccgcctccgcgtcaacctctttgggtatgattattctggttatgggagatctacagggaagcccactgagtgtaatacatatgcagacattgaagcagcatataactgcctcaaggaaaaatatggtgtagcagatgaggatataatcttatatggtcagtctgttggaagtggtccaaccattgatcttgcttcgcggttgccagacttgcgagctgtggttttgcatagtcctattttatctggactaagagtaatatatccagtcaagcggacgttttggtttgacatttacaagaacatcgataaaattggcttggtaaattgtccggtgcttgtcattcatggtacatcagatgacgtggttgactgctcccacggaaaacagctatgggagcactgcaaagtaaaatattctccactgtggttaagtggtggtggccactgcaatctcgagctatatccagattacattaagcacttgaaaaagtttgtgtcaagcgttagcaaaaaagcatcatcgaaacctgacccaaaagaaacaacgacaaaggatgacactaccagtaaagaaacagaggaagcgtacccggagaaacctcaagaggccaagaagtgcccgcagatctcgcgaaagagcctggacagccgattcgggaaatccaaaacagtggatgttcctgataaaccacggatgagctcggacgacatcgacaagttccggaggagcagatgcttggtctggtgatgcctgtgttctgcacagattgtcgaacagtacctgagcgaggatactatagcatggaagtcaagcaactgtattacatcatgctgcgaggaacggcatcagcggttcctgcagcggagaggaaaggactgttaaataagaaaaaaaagaatcaggaagctaccgtcagcatccatcaaagacacagctacttgactgaaaactggtagttcctcagttaatttagcacttacaccgacaacatgttttgcagcatcggttagggtttccatattgtaaaagtgtaccgttattgtctgtaatcacgagggaccgatacaaacatttgcagagtctgaaagccttaacggaatcacgagcaccatagtctattctgggtgcaccagtattcgggctcacatgcgttgtggaaccatgtgagctttaccctgtatactgatctactcataccttattatagggaccatgctccacatatctatgggaaactgacgggtgaaacatgctgtacgtatcactaggaaacagactgacgcgtgaaacggcagcaagcttgtgcacattacagctgtgaaagatcaggaactaactacgaagcctgaaaacagatggcatgcctagcagtcacacagcagcaatacagacacgaattaaacctcggccggtctcagtcctcaagcactaactatcctagtccctgctggtgttgggcgtcgtggacctgctgtcccacggagcgtgaaccgtggtgggagagaagggcccgtccttgctcttgtccccatccttccccgacgtcagacactcgccctggatgttcctgagcacctcgagcacctccttgatcggcgggcgcatctcgccgttctgctgcaggcagcggaaggccagctccgcgaccatcgtcatcatcttcctggtggccgggtcggtgtcgtagcccaggccgaggtcgacgagctcctccagctggcacttctggatcttgctgatggccatgctggccaggttgatctcgctgcggtgccgggtgatgtcgacggccggcttggacgagatgagctccaccaggaccaccccgaagctgtacacgtcgctcttgtccgtcagctggtagcactggtggtactctggatcaacatacctgccatgcgcgaaaaaaggcacaaaaatgttatctgttcgggcaaacaatggtctggtggatgcacgaaacggaacacggcgtgacgccagccaccaccatgcgcggactacgaacgacgtacgtaccctggcgtgccctgcggagcggtggagacgtgcgtgacg

SEQ ID NO: 7012 - DNA, 2729 bp, Zea Mays
tgtgggtggagaactggagacagagaagggaggagggagacaacaggataatatgtggccagtttcgttttgttttgaactggaactgctacagcgtttgtgttgcttactgtaggagaatgccactgtgaagatgaagcgagaaaagtggtcgacaagatggtcaatcaggtccatgtcgtcggagaaggccttataggaaggactctaataagtggggagcaccaatggatttctgatgacatccccttcagtttctctcagataagcgatgaagataacctaggtttatgtcagggttatacttggtggcaacatcagttcctaagtggaataaagactattgctgtagtacctatgccggcgtttggtgtggcacagttcggttccatgcaaaagtttctggatcaagttaaaggtgcaacatttctgatggaaagtctttcatggtctccttcaacaaaagatgctcagaaagacgctttcatgtacaatccacaatttcaactcgattcttcaaccactagagagggtcttccacgcactaaggctgaaccagaaaactcaaggttggagaatgcaatatccatagattctctgaagaactttgcaattacttcaaatggtctgaatcctcacgtagtggccatgccagtgaactccaaatcgataagtactgttaaattaattcaaagtgacagcaatttgcggtacaataatatttcagagaatgctcaacaattcaaatccgccaaacaacctgattctagttgggcaagtgcagctacatgtttttcaaatttgaccaatcttcaaagaatagagcgcgggctgtcatgcacacctaacaaactacgacattgccttcaaagtgaaaaatcctcaggcttcctggattcgtactcatcaatagtttctacagatgctgagctgaaatgcactttgtttgacaatgccactccatttgttcagagtgatgtgatccaagaggttggtactagtggatctactcgtgcttgtgggctacatgaattgccaaatgaaatatgggcagaaattgcctcaggggaaatgaaaccagtcataaaagaagtcaacgaaaataatggctttctcgaaagcacagcatttgatccagtcatgaatgattggtggggtgacactgccctactagcaggaaacacttcacatctgagtgctactaccatgaactctgtttcaggacaggcaagtagtgaacaattatcaattgaagatagagggctgttttcggaatctgtctttgaggagctgcttggctttgatggtaatgtcggcccagttatggatagcaccgaaccattagctggttttgtctccggttgtcatttgccgaggtacaaccttcaaggttcactttcagtgtgcaaggcacaagtaccgccattgatactcccttccggtagctgtacatccgaaaatgttgtgatgggatcatcaaaagaagcccccgtgtcactgcagaatttatctatggatgattgtggcagtttgaacaccgcaagttccaagatcagccaggtaaagaagcctgaaggagagaaggttgttaagaaaagagctaggccaggtgaaagtacacggccaagaccaaaggaccggcagcagatacaagagcgtgtaaaggagttacgtgagatagttccaaatagtgcaaagtgtagcattgatgctttgttggatcgaacaatcaagcatatgctctttctacaaagtgtgacaaagtatgcagaaaagattaagcaagccgatgaacctaatatgataagcaaggacaatggttctgtattgaatgataactcacatggagttgtcttgaaagacaatccaagtggtggaagcaatggaggtgcgacatgggcctatgaggttgcagggcagactatggtttgtccaataattgttgaggatcttgcaccgcctggtcagatgcttgttgagatgctatgtgaggaacgcggattttttctagagatagctgacaccatacggggatttggacttacaatcttgaagggattgatggaacttcgtgatggaaaaataatggctcgatttcttgttgaggcaaacaagaacgtgacgaggatggatatatttctatcacttgttcagttactgcagcagaacagccgcaatcgatcttcggatcagctagttaaggtcatgaacaatggcattccatcttttgtggatcaccaacaatctcctgcatcaattccggtttggccttgctgagagatagtaattgccacaaacaattcttgtaggccatatttttcaacgagcgttaatgggtacggtttggagttctgattagtacttggtggtgcccgccaactgttgatagaaacgacaggtgttaaggatgtagcaaacgcacattgcggtgtcccgtgtccgaagaaaattcagttagaagatgcacagattctcatgtaacaggtttaggaacattggtgttgtcgtttgtaatttggacactggtgtagtggtgtgaggtagcctatgttgttgtgaagttggtgtgcagtcagtagcaaaattgcctgtgttgctacggtaaataacatttgaaaattaagtgtctgtgttctctttttgatctgctctatctcccgctctccatgggtaaccctatagttggattgccggtctgccatctgtgctcagcacaaactgaatgtccc

SEQ ID NO: 7013 - DNA, 2871 bp, Zea Mays
cgcccgatattcacgggatcctgcgactctgccccacgcctccactagctgagggcctccggaacgcctccgactgtgaatattttactacactagccgcttgcttcgatacgaccggtggtgtagcgtgctgactggctcgatggcggaggcgctgggagcgctgtgccgcgccgggggatggtcctacggcgcgatctggcgccctgaccggcgcgacccacggttgcttactgtaggagaatgccactgtgaagatgaagcgagaaaagtggtcgacaagatggtcaatcaggtccatgtcgtcggagaaggccttataggaaggactctaataagtggggagcaccaatggatttctgatgacatccccttcagtttctctcagataagcgatgaagataacctaggtttatgtcagggttatacttggtggcaacatcagttcctaagtggaataaagactattgctgtagtacctatgccggcgtttggtgtggcacagttcggttccatgcaaaaggtttctgaaagcttgcagtttctggatcaagttaaaggtgcaacatttctgatggaaagtctttcatggtctccttcaacaaaagatgctcagaaagacgctttcatgtacaatccacaatttcaactcgattcttcaaccactagagagggtcttccacgcactaaggctgaaccagaaaactcaaggttggagaatgcaatatccatagattctctgaagaactttgcaattacttcaaatggtctgaatcctcacgtagtggccatgccagtgaactccaaatcgataagtactgttaaattaattcaaagtgacagcaatttgcggtacaataatatttcagagaatgctcaacaattcaaatccgccaaacaacctgattctagttgggcaagtgcagctacatgtttttcaaatttgaccaatcttcaaagaatagagcgcgggctgtcatgcacacctaacaaactacgacattgccttcaaagtgaaaaatcctcaggcttcctggattcgtactcatcaatagtttctacagatgctgagctgaaatgcactttgtttgacaatgccactccatttgttcagagtgatgtgatccaagaggttggtactagtggatctactcgtgcttgtgggctacatgaattgccaaatgaaatatgggcagaaattgcctcaggggaaatgaaaccagtcataaaagaagtcaacgaaaataatggctttctcgaaagcacagcatttgatccagtcatgaatgattggtggggtgacactgccctactagcaggaaacacttcacatctgagtgctactaccatgaactctgtttcaggacaggcaagtagtgaacaattatcaattgaagatagagggctgttttcggaatctgtctttgaggagctgcttggctttgatggtaatgtcggcccagttatggatagcaccgaaccattagctggttttgtctccggttgtcatttgccgaggtacaaccttcaaggttcactttcagtgtgcaaggcacaagtaccgccattgatactcccttccggtagctgtacatccgaaaatgttgtgatgggatcatcaaaagaagcccccgtgtcactgcagaatttatctatggatgattgtggcagtttgaacaccgcaagttccaagatcagccaggtaaagaagcctgaaggagagaaggttgttaagaaaagagctaggccaggtgaaagtacacggccaagaccaaaggaccggcagcagatacaagagcgtgtaaaggagttacgtgagatagttccaaatagtgcaaagtgtagcattgatgctttgttggatcgaacaatcaagcatatgctctttctacaaagtgtgacaaagtatgcagaaaagattaagcaagccgatgaacctaatatgataagcaaggacaatggttctgtattgaatgataactcacatggagttgtcttgaaagacaatccaagtggtggaagcaatggaggtgcgacatgggcctatgaggttgcagggcagactatggtttgtccaataattgttgaggatcttgcaccgcctggtcagatgcttgttgagatgctatgtgaggaacgcggattttttctagagatagctgacaccatacggggatttggacttacaatcttgaagggattgatggaacttcgtgatggaaaaataatggctcgatttcttgttgaggcaaacaagaacgtgacgaggatggatatatttctatcacttgttcagttactgcagcagaacagccgcaatcgatcttcggatcagctagttaaggtcatgaacaatggcattccatcttttgtggatcaccaacaatctcctgcatcaattccggtttggccttgctgagagatagtaattgccacaaacaattcttgtaggccatatttttcaacgagcgttaatgggtacggtttggagttctgattagtacttggtggtgcccgccaactgttgatagaaacgacaggtgttaaggatgtagcaaacgcacattgcggtgtcccgtgtccgaagaaaattcagttagaagatgcacagattctcatgtaacaggtttaggaacattggtgttgtcgtttgtaatttggacactggtgtagtggtgtgaggtagcctatgttgttgtgaagttggtgtgcagtcagtagcaaaattgcctgtgttgctacggtaaataacatttgaaaattaagtgtctgtgttctctttttgatctgctctatctcccgctctccatgggtaaccctatagttggattgccggtctgccatctgtgctcagcacaaactgaatgtccc

SEQ ID NO: 7014 - DNA, 2318 bp, Zea Mays
gttgccttcgcatcgccggacgccgctcgccctccgcttctgcgactacgtccgagatggccgcctcggcattggcctcccgcgcgctgcggcctccgcacggccgccaccctcccgccccttcgccgcgtccgcgtccgcgctcggcaaccgccgccgctccaaggacgcgctgccgcgcggtggctgcggacgagcgccccgccgaccccgcgttccccgagcgccagaaccgcgggatttccggttgtcgaccagggcggtggagaggccggaggcggacgtggttgtgataggcagcgggctcggcgggctgtgctgcgccggcctcctggcgaggtacggccaggacgtgctggtgctcgagagccatgaccgcccgggaggcgccgcgcactcgttcgatatcaagggattcaacttcgattcagggccatccttgttctccggattccagtccagaggcccccaggcaaatccacttgctcaggtccttgatgcattaggcgaatcagtcccttgtgcgtcttatgactcttggatggtttatgtacctgaaggacaattcctctcacggataggaccaactgaattcctcaaggaccttgagatgtttgttggtgttgacgctgtccaggagtggaaaaaacttcttgatgcagttattcctatgtctgcagctgcaatggctttgcctccgctttccattcgaggtgatctgggcattatatctacagctgttggtagatacactccttcgttgttgaaatcattcatacaaatgggaccgcaaggagctctgggcgctacgaaacttctacgtccattcaaagaaattgttgattcgctggagctgaaaaatccatttgttcgtaactggatcgatcttctgtgctttctacttgctggagttaaatctgatggtgctctttctgcagaaatggtttatatgtttgcagaatggtacaaaccaggatgcttgcttgagtaccctctgggtggaactggagcaataatagatgcccttgtgagcggtattgaaaaatttggtggcagacttgctcttcgttctcatgttgaaaagatcttaatagagaatggtcgagcagttggtgtcaagctacaaagtggacaagttatccgtgcaaagaaagcggttgttagcaatgcatctatgtgggacactttggatctgttaccacccgatgctgtcccaaaatcatatgaagatagagtgaaagcaactccacaatgtgaatcgtttatgcatctccaccttggttttgatgcagagaatgctagagaggaccttgggatccatcacattgtggttgatgattggaacaaaggagttgatggtgaacaaaatgttgttttgatatccgttcccagtgttcttagcaaggacctggcaccgcccggaaagcacattcttcatgcatatactccagggacagaacctttcagtttgtgggagggactggacaggaaaagtgcagaatatcgaagactgaaggaagaacgttctgaggtgatgtggaaagctgtggagcttgctctcggcccaaaatttagccgcgaaaaatgcgacgtgaaattggtcgggacaccgctaacgcacaggagatttctccgaaggaacaggggaacctatggtccagccataaaagccggagaagccactttccctgggcaagcaacaccgatcccccagctcttttgctgcggtgactcgacctttccagggatcggagtgccggcagttgcggccagcggcgcgattgtggcgaacacgctggttccggtgtcgcagcattcagagctccttgacgctgttggaatctgagtggcagatacgtccgtcggtcctgaacgataatcaaagattttcccactgctgttggaaaaagatcgtatggctgaatggagaagaagacgacgacgacgaccgatacagtagagttttctagtcagaacggagactgggaaaatatgttgtacagtatattatttactacgactgcatgaagcttgtgctgcttctgacaaattggtcgcctcgttcgcctgcatgctccttgtattgttctaccgaaagctctgtggcgcatgcaggccttttgtcggacattttttttttctggtatacggaggaaggaccatgtgcttgtttgtacaactctagtcgcagtttgctgaagtccttgaacgacggcaacaaatgccagctgcgctgtcttttcattggagggcagcactggcctggttgttgtttattattattattattattattattattattattattattatta

SEQ ID NO: 7015 - DNA, 2380 bp, Zea Mays
cgccgcgaacggagaacggccgtcgagaggccacgtgtccacagccgtggcctcactcgcactactcgccctgctcgtcgtctccccagtccccaccagttgccttcgcatcgccggacgccgctcgccctccgcttctgcgactacgtccgagatggccgcctcggcattggcctcccgcgcgctgcggcctccgcacggccgccaccctcccgccccttcgccgcgtccgcgtccgcgctcggcaaccgccgccgctccaaggacgcgctgccgcgcggtggctgcggacgagcgccccgccgaccccgcgttccccgagcgccagaaccgcgggatttccggggcggtggagaggccggaggcggacgtggttgtgataggcagcgggctcggcgggctgtgctgcgccggcctcctggcgaggtacggccaggacgtgctggtgctcgagagccatgaccgcccgggaggcgccgcgcactcgttcgatatcaagggattcaacttcgattcagggccatccttgttctccggattccagtccagaggcccccaggcaaatccacttgctcaggtccttgatgcattaggcgaatcagtcccttgtgcgtcttatgactcttggatggtttatgtacctgaaggacaattcctctcacggataggaccaactgaattcctcaaggaccttgagatgtttgttggtgttgacgctgtccaggagtggaaaaaacttcttctgcaatggctttgcctccgctttccattcgaggtgatctgggcattatatctacagctgttggtagatacactccttcgttgttgaaatcattcatacaaatgggaccgcaaggagctctgggcgctacgaaacttctacgtccattcaaagaaattgttgattcgctggagctgaaaaatccatttgttcgtaactggatcgatcttctgtgctttctacttgctggagttaaatctgatggtgctctttctgcagaaatggtttatatgtttgcagaatggtacaaaccaggatgcttgcttgagtaccctctgggtggaactggagcaataatagatgcccttgtgagcggtattgaaaaatttggtggcagacttgctcttcgttctcatgttgaaaagatcttaatagagaatggtcgagcagttggtgtcaagctacaaagtggacaagttatccgtgcaaagaaagcggttgttagcaatgcatctatgtgggacactttggatctgttaccacccgatgctgtcccaaaatcatatgaagatagagtgaaagcaactccacaatgtgaatcgtttatgcatctccaccttggttttgatgcagagaatgctagagaggaccttgggatccatcacattgtggttgatgattggaacaaaggagttgatggtgaacaaaatgttgttttgatatccgttcccagtgttcttagcaaggacctggcaccgcccggaaagcacattcttcatgcatatactccagggacagaacctttcagtttgtgggagggactggacaggaaaagtgcagaatatcgaagactgaaggaagaacgttctgaggtgatgtggaaagctgtggagcttgctctcggcccaaaatttagccgcgaaaaatgcgacgtgaaattggtcgggacaccgctaacgcacaggagatttctccgaaggaacaggggaacctatggtccagccataaaagccggagaagccactttccctgggcaagcaacaccgatcccccagctcttttgctgcggtgactcgacctttccagggatcggagtgccggcagttgcggccagcggcgcgattgtggcgaacacgctggttccggtgtcgcagcattcagagctccttgacgctgttggaatctgagtggcagatacgtccgtcggtcctgaacgataatcaaagattttcccactgctgttggaaaaagatcgtatggctgaatggagaagaagacgacgacgacgaccgatacagtagagttttctagtcagaacggagactgggaaaatatgttgtacagtatattatttactacgactgcatgaagcttgtgctgcttctgacaaattggtcgcctcgttcgcctgcatgctccttgtattgttctaccgaaagctctgtggcgcatgcaggccttttgtcggacattttttttttctggtatacggaggaaggaccatgtgcttgtttgtacaactctagtcgcagtttgctgaagtccttgaacgacggcaacaaatgccagctgcgctgtcttttcattggagggcagcactggcctggttgttgtttattattattattattattattattattattattattattatta

SEQ ID NO: 7016 - DNA, 2460 bp, Zea Mays
gtcctggacgaggcaacggccgccgcgaacggagaacggccgtcgagaggccacgtgtccacagccgtggcctcactcgcactactcgccctgctcgtcgtctccccagtccccaccagttgccttcgcatcgccggacgccgctcgccctccgcttctgcgactacgtccgagatggccgcctcggcattggcctcccgcgcgctgcggcctccgcacggccgccaccctcccgccccttcgccgcgtccgcgtccgcgctcggcaaccgccgccgctccaaggacgcgctgccgcgcggtggctgcggacgagcgccccgccgaccccgcgttccccgagcgccagaaccgcgggatttccgggcttcgcctcctcatcgcgtcgcagttgtcgaccagggcggtggagaggccggaggcggacgtggttgtgataggcagcgggctcggcgggctgtgctgcgccggcctcctggcgaggtacggccaggacgtgctggtgctcgagagccatgaccgcccgggaggcgccgcgcactcgttcgatatcaagggattcaacttcgattcagggccatccttgttctccggattccagtccagaggcccccaggcaaatccacttgctcaggtccttgatgcattaggcgaatcagtcccttgtgcgtcttatgactcttggatggtttatgtacctgaaggacaattcctctcacggataggaccaactgaattcctcaaggaccttgagatgtttgttggtgttgacgctgtccaggagtggaaaaaacttcttatgcagttattcctatgtctgcagctgcaatggctttgcctccgctttccattcgaggtgatctgggcattatatctacagctgttggtagatacactccttcgttgttgaaatcattcatacaaatgggaccgcaaggagctctgggcgctacgaaacttctacgtccattcaaagaaattgttgattcgctggagctgaaaaatccatttgttcgtaactggatcgatcttctgtgctttctacttgctggagttaaatctgatggtgctctttctgcagaaatggtttatatgtttgcagaatggtacaaaccaggatgcttgcttgagtaccctctgggtggaactggagcaataatagatgcccttgtgagcggtattgaaaaatttggtggcagacttgctcttcgttctcatgttgaaaagatcttaatagagaatggtcgagcagttggtgtcaagctacaaagtggacaagttatccgtgcaaagaaagcggttgttagcaatgcatctatgtgggacactttggatctgttaccacccgatgctgtcccaaaatcatatgaagatagagtgaaagcaactccacaatgtgaatcgtttatgcatctccaccttggttttgatgcagagaatgctagagaggaccttgggatccatcacattgtggttgatgattggaacaaaggagttgatggtgaacaaaatgttgttttgatatccgttcccagtgttcttagcaaggacctggcaccgcccggaaagcacattcttcatgcatatactccagggacagaacctttcagtttgtgggagggactggacaggaaaagtgcagaatatcgaagactgaaggaagaacgttctgaggtgatgtggaaagctgtggagcttgctctcggcccaaaatttagccgcgaaaaatgcgacgtgaaattggtcgggacaccgctaacgcacaggagatttctccgaaggaacaggggaacctatggtccagccataaaagccggagaagccactttccctgggcaagcaacaccgatcccccagctcttttgctgcggtgactcgacctttccagggatcggagtgccggcagttgcggccagcggcgcgattgtggcgaacacgctggttccggtgtcgcagcattcagagctccttgacgctgttggaatctgagtggcagatacgtccgtcggtcctgaacgataatcaaagattttcccactgctgttggaaaaagatcgtatggctgaatggagaagaagacgacgacgacgaccgatacagtagagttttctagtcagaacggagactgggaaaatatgttgtacagtatattatttactacgactgcatgaagcttgtgctgcttctgacaaattggtcgcctcgttcgcctgcatgctccttgtattgttctaccgaaagctctgtggcgcatgcaggccttttgtcggacattttttttttctggtatacggaggaaggaccatgtgcttgtttgtacaactctagtcgcagtttgctgaagtccttgaacgacggcaacaaatgccagctgcgctgtcttttcattggagggcagcactggcctggttgttgtttattattattattattattattattattattattattattatta

SEQ ID NO: 7017 - DNA, 2749 bp, Zea Mays
gccgcctcaccacctgcacctttgtattactgtatatgcatcgcgtcttctttgatcttgaaaccaggtggtgcgcaaggaagcttggaagttggttccctctgcaccacttttcgagtctgaaacacactttccagctctcctccgacaaagactcagaccgccggcggcatgctcctcctcgacggcgaccttgtcctctcctcctccggaagcaccggcgctgcctctcgcacgagcgacagcgggagggagctcgtggcggcgctcttggagagccccgggatccgccacgcggtcgaccggctgaaggtcgcgccggagaggcggatctcggcagggcaggagggggcgccgaagcacgtctacgtgttccagcgggagtacgccacggtggatccggcgcgcgtcgaggtgcgtggagttgccttgtcgcggcttggtctaatagggttggggaatttcgttccccacctgcctttgggtgataaaaacgggatcttgttacgtcgttgatggagttccttgtgtatctgatcgattatatgtgtagctcagtgatgatttgtgctgtgaaggtgaacttcgttttcctgtctaaatcatcactgttgctgtcgagacaaagggctcaggttctgaagtagtggatcggcaagtcttcgtagtttcacttcactcgatttgggaattggttcgggacgaagcagaaacctttttgggtgcgaaggataaagcagggattcttgtgctgggagctttggggacgttgtcaggggttactgctgctacctgtaaaactagggtttggcagtcatcttagcagctttttttttaccttttattagctggtttcttaggtttttttacctgtactttaccaactttgtggattgtgatgatttactagtattggaacctgtactcctaaagcctttgtgtccaccaaatttcatgattcttatattttttatgaatcaattacttgcattttttcatggttttcttaaaaaccagtatctgtcatagctccgctatagcggtgctatagctttatagcttctgggaaaaatatgccactacttactatagcccgcaatttgaaaccttgcatatgtcatttaaaattgaataacacctgagttaatatgtcttttgcgttatagttagttggcacagatgaggctactacatgcattggtgttgtaattcgcaacaacaagactggaatgacctctgttagccatatggattttccagaaattgtggagggagggatcaagcagatgttagaattacttggtgatgacaatgcaccatttgatgttcaccttattggtggctttgctgatgcttccacaaaggttgttcgttcctctggaaagaaacacatcaaacaggaagggtattcctatccactatgttgcaaaatagttgaagtgctgcataagtcccagctacaattccaccttcgatcattttgtgtccttgagaataacacgaagagtgactcatttggaaatgcgctacctataattggtggatttgtggttagtgatttcctctcttctgcatccgttacattgttggttagttggcaccaatctgcttagaaccagtacatagcagttccgatgccttcctacagaatgtccttgaaggtctcattgaaggttaatccaaagttatattctgcagtcacctctccatttccccctacatccatttttgtgtttggtttcggtgcggatttcaaatattcatgcatacaatagagctttagcactgtgaatttgaacatacaaaacttgagattgattgttcacataggctgacctggtttcttcaggttgaaacctcatctggagttgtgataccagcaacctttgatatggattcaaggtgcccagatgaagttgtcaggagaattcgtgtgagcgttagctcttatgatccaacttggcaaggaaggttgctggagacttacgatactcaggacgatgttttccaaattgcacctgcctgctggatgccagattgggccgatatagcgtcctcactcaaccagctctcggactccgaagtcctgctgcggtgctccacctctccagccgcagaaccacctcacttcgtggaaaacgaaagaaggatctggaaatacctgatcgataacccggactgggaagagacgttcccaaaacacaagccccgggtgttccatagggcaagcgacggaagctggtcaaggtactcgtagtgcaagccaagggcttccatcgtctgctgttatcgtcggtgctcccacacatggaacgaaccagaagggaaacccccctctccgttgatttgaacagtgacatattaagtttgagtgcaaagttttctgcgcactgcgattagcacatccgtggacgcttggagatgggagtaaattttataaagtctcttggagatggcagctgctctaaggaccagctaaaaactaaaaaaacgcatgctcttgggccgaaaatgatgagcgattcctcacatctccgttctttttctttatcgaaattttcatttctacgcagttttgtatttttctgaagttataaggttccttgttttgtgcacaaacttataatgcaacttccccaaaactcatataacaccacttcctgcataaacttcaccgaggaacttgtgggcgtaagtttatttattcgtgcataacttttctcagatatatttaaatttgtctggacaa

SEQ ID NO: 7018 - DNA, 2761 bp, Zea Mays
gccgcctcaccacctgcacctttgtattactgtatatgcatcgcgtcttctttgatcttgaaaccaggtggtgcgcaaggaagcttggaagttggttccctctgcaccacttttcgagtctgaaacacactttccagctctcctccgacaaagactcagaccgccggcggcatgctcctcctcgacggcgaccttgtcctctcctcctccggaagcaccggcgctgcctctcgcacgagcgacagcgggagggagctcgtggcggcgctcttggagagccccgggatccgccacgcggtcgaccggctgaaggtcgcgccggagaggcggatctcggcagggcaggagggggcgccgaagcacgtctacgtgttccagcgggagtacgccacggtggatccggcgcgcgtcgaggtgcgtggagttgccttgtcgcggcttggtctaatagggttggggaatttcgttccccacctgcctttgggtgataaaaacgggatcttgttacgtcgttgatggagttccttgtgtatctgatcgattatatgtgtagctcagtgatgatttgtgctgtgaaggtgaacttcgttttcctgtctaaatcatcactgttgctgtcgagacaaagggctcaggttctgaagtagtggatcggcaagtcttcgtagtttcacttcactcgatttgggaattggttcgggacgaagcagaaacctttttgggtgcgaaggataaagcagggattcttgtgctgggagctttggggacgttgtcaggggttactgctgctacctgtaaaactagggtttggcagtcatcttagcagctttttttttaccttttattagctggtttcttaggtttttttacctgtactttaccaactttgtggattgtgatgatttactagtattggaacctgtactcctaaagcctttgtgtccaccaaatttcatgattcttatattttttatgaatcaattacttgcattttttcatggttttcttaaaaaccagtatctgtcatagctccgctatagcggtgctatagctttatagcttctgggaaaaatatgccactacttactatagcccgcaatttgaaaccttgcatatgtcatttaaaattgaataacacctgagttaatatgtcttttgcgttatagttagttggcacagatgaggctactacatgcattggtgttgtaattcgcaacaacaagactggaatgtaagtgaaaaagaagtgagcatttatctgatcctgacctctgttagccatatggattttccagaaattgtggagggagggatcaagcagatgttagaattacttggttcaccttattggtggctttgctgatgcttccacaaaggttgttcgttcctctggaaagaaacacatcaaacaggaagggtattcctatccactatgttgcaaaatagttgaagtgctgcataagtcccagctacaattccaccttcgatcattttgtgtccttgagaataacacgaagagtgactcatttggaaatgcgctacctataattggtggatttgtggttagtgatttcctctcttctgcatccgttacattgttggttagttggcaccaatctgcttagaaccagtacatagcagttccgatgccttcctacagaatgtccttgaaggtctcattgaaggttaatccaaagttatattctgcagtcacctctccatttccccctacatccatttttgtgtttggtttcggtgcggatttcaaatattcatgcatacaatagagctttagcactgtgaatttgaacatacaaaacttgagattgattgttcacataggctgacctggtttcttcaggttgaaacctcatctggagttgtgataccagcaacctttgatatggattcaaggtgcccagatgaagttgtcaggagaattcgtgtgagcgttagctcttatgatccaacttggcaaggaaggttgctggagacttacgatactcaggacgatgttttccaaattgcacctgcctgctggatgccagattgggccgatatagcgtcctcactcaaccagctctcggactccgaagtcctgctgcggtgctccacctctccagccgcagaaccacctcacttcgtggaaaacgaaagaaggatctggaaatacctgatcgataacccggactgggaagagacgttcccaaaacacaagccccgggtgttccatagggcaagcgacggaagctggtcaaggtactcgtagtgcaagccaagggcttccatcgtctgctgttatcgtcggtgctcccacacatggaacgaaccagaagggaaacccccctctccgttgatttgaacagtgacatattaagtttgagtgcaaagttttctgcgcactgcgattagcacatccgtggacgcttggagatgggagtaaattttataaagtctcttggagatggcagctgctctaaggaccagctaaaaactaaaaaaacgcatgctcttgggccgaaaatgatgagcgattcctcacatctccgttctttttctttatcgaaattttcatttctacgcagttttgtatttttctgaagttataaggttccttgttttgtgcacaaacttataatgcaacttccccaaaactcatataacaccacttcctgcataaacttcaccgaggaacttgtgggcgtaagtttatttattcgtgcataacttttctcagatatatttaaatttgtctggacaa

SEQ ID NO: 7019 - DNA, 3363 bp, Zea Mays
aggcccacatggcagcctctgcactgcaggatctcatcccctccggctgcccgtgcccagccgtcgtggcgcgacggcggcggtcggtctggtagggctcccctcctttccaccagatcagaacagatagtcatagatcagtgtcacaccacgacccgccagccggaccgccacttgccaaccaacgcctttccctcctcctccgcctccgggcgctagcgggaatggacgccgccgagctgcccctcgtctaccacatcggtctggtgctggccgcgctctgggccgccgccgccgtcggcttccgcggctccctcctctacctcctcgccttcctctacctctacatggtaaatgctcgctgtgcagtgagactgcggaagaggatacaacatgaagagatgaaatctgcctaccaacgaaggctcctctctgatgcagaatcagcacgctggttaaaccatgcaatcgacaagatgtggcctgtctgtatggagaagatcgtttcaaaacttctacggcccatcataccatggttcttggataagttcaaaccttggacagtcagcaaagcaagtattcaggaactttacatgggcaggaatccaccaatctttacctccatgagagttctaccagagacatcagatgatgaccatttggttcttgagctgggattgaattttctttctgctgaagatatgagtgctgtacttgctatgcagctgcacaagagtgtgggacttggaatgactgcaaagatgcatttaacaagcatgcatgtcgagggaaagatattagttggtgtgaaatttgttcggagttggccatttcttggccgtgtaagactatgttttgtggagccaccttattttcagatggctgtgaaaccactcattaatcacgggctcgatgtcactgagtttccaggaatttcaggatggctggataagttgatggatactgcatttgggcagacattagttgagcccaatgtgatagtaataaatgtggaaaaatttgcatctactccttcagaaaataactggttcagcattgaggagagacctcctattgcatatgtgaagcttgagattctagaaggaactgacatgaagccatctgatataaatggactagcggacccatatgtgaaaggtcaccttggtcctttcaaattccaaacacagatacagaggaaaacattgtcccctaagtggtttgaagaatttaaaataccaatcacatcatgggaggcaacgaatgaacttgtcatggaagttcgtgataaggaccccatgtttgatgactcacttgggcaatgtaccattagtttacatgatctgagaggtggacaaagacatgacaaatggatatcactgaataatgtgaagaaaggaaggattcacttggcagtaacaattgatgatatatccgaggaccaaaatacatcaagtttggaccaatcattgaagcaagcggatactgaactaccagtatcaacatctgtttgtagcgaagtggatgctagtgaacctcctgaagaaaagaaagtcttaatggatgaagtggagcacataaacattgatggacaagaacagcctggaggtttatatgtacatcgccctggcactggggttccaaggacatgggaatcccggaaaggacgagcacgaaacccagacacacagattcaccaagaggttgacaagcaaaaggaagtcccaacaccaaaagggagtgggcaagggggtctatttaacgtaggctcctttttccggtggaactcgaggaaggggagctccagaaatctcgatgccagccctcctgcaactccgggttctcagagcgtgacagagcttgatccaaagctccctcaaactccacgtcccaacctgaaggagctaggcgagaagcggacgtcgataaagatcgtagtggacgaagaagcaagcccggcagacaaggtgggaggtgcggagaactcaggagaagatgtggcgaaggtgatagagaaaaatgcaggtgaaccgggcaggtcactgacaagcacattgagcaggaagatttgcagaaggagagcagatgataggctatcagatatccccgagaagattgaagctcgtggatctaagccggtgagtgaagggcctattcttgttagaggtgagccaatgataacagtggaccatccgacgacggaacatagcgatggaggtggcactgagcaagatgcggtgggagcaaaggttgctactcagacctcataaggattgcgacttaagctcaggcaacagaagaaatgcaaagcccggcccagtaaaccatcatcgtctttcacggcccatcaaagaggcatccgcgttcgcacattgcagtagcttcccacacccccctccagagccggcacgttctctagactatatttcctatcttattcattttcttctatgggataatactcttgttaatatgagttatacataagcttgtcgctgcacaataatgtaatttatagggtcttattgctgaagtatccatcatcagtacatttatggatgtagtttttagctctgatctatatatcggttgataagataagaagttttctttgaaaaggaaataatccagaataatgtggcggggtcactgttcaattggtctacaacttgtttgccaaagaattggggggccttggtattctggatttagaacgttttgcaagagcgctatgactaagatggttgtggttgcgatggaaggtcaaagaaatagcccactggcatgcaattactatgtgacaagattgatgtggatctcttcaatacatccataattgtgaacattggcaatgggaagatggcaaatttctgggatcaagttggattgaaggacaggctctgaggaatattacaccaagtctatacaagaaagcaaggaggaagaacattacggtgttcaaagcacttcgaaacaattaccggatacagttttgttctcgttacaagcaggaggaggaagtgagagaattcgtctccatgtggcatgcaattagcaacacacaagacctaaatgatctagaagacaccatatcttagcgacggacgacaattgggcaatacaacacaagtagtgcctacaaaattcagttcacaacgaacttctgtagatttaaaatcagtcccatttggaaagcaagaacggaaccaaaatgtggtttttcgcatggacgttgttgcacaacagaattgtaattacagacaaccttcaaaaaaggggatgacctttgatgaggacatcacttctatacatacaatgaatggaccgataacacgatctcgtgcacgatagctaaatctccag

SEQ ID NO: 7020 - DNA, 898 bp, Zea Mays
acagaattttttgccccttcggccccacctcgtgatcacccgttccgtgctgctccgcctgccccacagcctacagttgggagttcaaacttcgagagccgaagcgaagcggggccatggggagatcacgagcgactgccgccgccgccacctccaggcccaggcgcaaccccaagccaaagccggactcccccttcctctccccgctcgcgtcgctgtctgccacaccgcgcatccgcacccgcaagggcgccatccgccgcggcggcccctcccacgcgtcgtcgtcgccgggttcttcccccaccggtctcaacgtcagattcctttcctcgccgggctccgcctccccgtcgaagcccaagccgaagctaagacccaaaaccaagcctgtcagcatctggcagatgaagttgacaaggagcacaagaagatgtctgataatataaaagaaagttctgagattgccagggcaaagtacaagcagatcatcgcagaggcacaagcttccacaactcgtgtgtgcaaggtgactatccctgagatgacaaaatctgtggagaaagctattgatggtctgtgtacccgatataatatctcaatgccagtttaattaccaagtacaagttctactcactacacttctgaatagccttcacatcaatctgagatggtgtgatcgttatttcgacatccgtagataatcagtagagtacagggacatataaatatcgaataaagttcatgagcattggaaagtatgtaatatcgagagcttatcatcatctgtatgactatcccatttttccgccgacttcaatccgtagcaaagcaggccatggaatactaaactgctgtttcgtctgagaaatcttcatctaacagtcaacaccagctt

SEQ ID NO: 7021 - DNA, 2578 bp, Zea Mays
attgaaaaaaaaggcccgttttcattggtcaatcggtcagcaggatttccctcttccatatgccgatctcccggacacggtggcctcccgctgccggagcgccatcgccgccgcagcaagcggcgcagggtacggtttccgccgtggcgccgaagcgtcgacccgtcgtgggttcccgttctcggcccgcgaaggaggcggaggccacggctcgacttccgtctgcggactactactcgtaaaggccttctcacttgctccccctttctcgtgctctgtgtttatgcaaatgtccctcagggtcgtgctactgcatcgggaactgcctagctggttccgggttcacgaattaagcggtgctggtgactcctacgtgcgcttctttatatgcacgcgtgtgcccaattgtgggtgcttaattgatactggcaactgacgagggtagtctctaacgtacatgactactttgagatgttttaggtcttgcagtttcttgtttgcttttccttgtagctcgctcagagtttgggaaaccacattgcatgtgtccaggaccaatgtggcaatgtgtccaaggccaagacgtttctgccagatgtcttatgtgctttgtaaactaatgaggattagttttcgaattgttgacaatataatttctgtttttcgacagttatgtgaggattgcttggtctttctggtttgacagttttaacagcacattgcagtgaattttcatctctgcaagttcatatggctacacaagttgtcaatagtacaaaacaagaataccttccctgcaacctgtgtttatgtaaaaactcaaaactcatgttagttcccctaggactacaaaacaagcttttatcccatggaaggcaataaggcatctcaattcatattttccaacctatccattttcttcctaacaaattggcaatggatccttgcgttgattgaaaaaatagacccctacttagtgattgttattaataatgcatcttttcaacagtttgttagtttttttacaacttcatttttatctaatgcctttagttgtgaattgtgtattctacttgtcaaatgaagctgttccttggtcactgtgaaaaccatgaaagtttacaccaaatgttctttttattactctgcatagagagctaaagaccctggagcatgtagagaaaaccaaaaaatatcagggtaagcttgcagcacagttgaaggccaaatatttttccaacaagacttttgaaaaaggatacgtgttcgaagaaattgttatagggtccaagaccatccggctaagcaggtggccgtttacaaggttgtttgcagatccagcaaaattttgccaagaaaagagctctactgtgaaggacatgtctccatctctgactggtgaagccatgtgaaatggttcagtaactcatttagctcatgaccacccgacggataagaactcagtagctcgtgtcactaacttctatctgttatccttcaaatcagtgactgtatgttttcactaggcccaagttaaccttgtacagttttgaaccaaagggatgtttcagcttttcacctgatacatgggtgtcactcatatccatgaccttggcatagtttcctattccttttcttctgaaatgatgtaatttgtggggcgccagcaccttgtctcctaatattctgtttgcagtaccaacgtcctttagcgctctggtgccaattattgcaatgcatcttgtggacaacacgaatggcaatctggaggtgccataatgacgagcagcggagcagatgaatgaacacacctgaactgcatgagctacctgttatcttcatgcatgcaacggtttgtcggagtgctatgccctcttgtactttccagttgtttcgtttcttggtagtataaggaaaggtccatgggcagcactgtgagacatggcatggtggatggtgggtgcatcggtgcttgttccaccggccctgtgatgtgagcatctcacgctggtgttcagttcacacgtacgtgatgccgcacttgctgctcagatctgttttgctttgctctgctgctcagtgctcgtgcacaggttcctctctctctctctctccagccacacaataattttgcacttgatatgtatgcaatgcagtttcagaggctgtaacatcgtttgtgtgagaataaaggcatgccttgttcatgtcttccttattatgaacggacgagggcagtctttcattttcatttgagataaaaactaggactccacttttaatttattattatgttcatttggcattggattgtatgccaaaaaggtctagatatttgtgttgcggcacatgcatgcatgcatgccaaaaaggtcccctggaatcctgtgcgataagcatctaaacgaataggatgatgttggttcggttcaagatctttgatgctacaatattcatgtacaaagattgttgtatgatttacatatatatgctgatactgataccgtgtcatcaatcatcaatcatcggttacatatatagtaataagttgtgcataaatagagtagcagaagcttta

SEQ ID NO: 7022 - DNA, 3003 bp, Zea Mays
ctcgaaccggtccagattactctgaccggaccgacctttcttcgtcttccccgttcggtatttccgccctcggcgccgggaaaccctagcccgcgtccatggacgatccctcctccgcctccaacaagcgcaagcgcgggcgcaagcccaaggtgtcgccgccctcccccgaccgctcatccccctctgcggtggccgcccccgctcccgttccggttgcgcgccgtggccgcaagccgcgacgtcatgaggaccccgccgacgcggacgccgcgcgtccgccgtccccgctccgccgcagggtgcttaatacggtggcaaatggaggcgatgcggtggcggaggcaggccccgcgagctgggacgaggtggtgagggtggtgccgtgcatggacgccgtggtcaaggtgttctgcgtgcacacggagcccaacttctcgctgccgtggcagcggaagcggcagtacagctctagcagtagcgggtttatcatcagcggccgccgtgtcctcaccaatgcccactccgtggagcactatacccaggttaagcttaagaagcgcggctctgacaccaagtaccttgccaccgtcctggccatcggcacagagtgcgatattgcgctcttaactgtcaatgacgatgaattctgggaaggagtttcacctgtcgagttcggaacattaccggcccttcaggacgcagttactgttgttggttatccaattggaggagatactatatccgtgacaagtggagttgtctctaggatagaaatactttcatacgttcatggttctacagaacttctaggattgcagatagatgcagctattaattcaggaaattcaggtggtccagcttttaatgatagaggcaaatgtgtcggtatagcatttcaatctcttaaacatgaagatgccgagaatataggctatgtgataccgactccagttattacacatttcatcgaggactacaaaaattctggaggatacacagggtttcctatactaggagttgaatggcagaaaatggagaatcctgatctccgtaaagcaatgggaatgaaaccagatcaaaagggtgttcgtgttaggagggtggagcccacggctccagaatctggatgcctacaaccgtctgatattattcttagctttgatggtgttgacattgctaatgatggaacagccagacaagctgtcccggttccctacacattgatcctcgatgtcaggatgctgagtggtgggggaggaggtgggaatggcagcagcggcggcgggggagaaggcatggacggcgggcagcgtggagatggcagatgcgatcgcgcgtcgtgcagcagcggagatgacagacatggtcgcatggcagaggaaagatggcagacctggtcgcacggcagcagagggacagcagatgtggtcgcgtggcagcggagatgtcgggcgcagccaggaggaggcagacgtcagcagaaacgaagggtggaggctgatggcgacaatgacagaagggaggaagagagaaagcagagttgggactcgtgtgtgcatctgggagatggtggagggataaggtggggacctcctccaactttggtgtatgaccctaaaacactggttgtggccaactacatgaaggaacatggctacttgttcctccacactgctgtggatactatctctaagcaggtgcttgtatcagatatcaatataggttatgaagaaatagttaatactcaggttcttgctttcaatggccagcctgtaaaaaatttaaagaacttagcgaccatggtggaaaattgcaaggatgaatttttgaagtttgatctggagtatgaccagattgttgtcctcgagacgaaaactgcaaagtctgctacccaggacattctgacgacgcactgtataccgtctgcaatgtcggatgaccttaaggcctagacgcctagtagtgagaggtgggagcatgatgcagccctgggccatcaggtgggccaacagcttgggccacattttcggttgaattgattagcgcagcatactacctggtccgggagcaaaagaaaccccaatgtttctgtgttacatgaattaaatgttttttgaggggtttatcaaagagcagactgtctaagcttccccattatagaaggtttgagggagtaccactgtcagataacgataaactggagatgttacagcagaggtgtgaaagcgatagtagctagtaagaatccgatttttttctattcacatgattacattacaactactacatcaaattattaacggtaaaggaatcattggtaaaatatttgcatcttgtttctggacaaataagatcgcaaatatttaagggttgtgtaccaaagttatcccctcatcgcttggttgtcctcatcatgccgtaggtgttctctcgattagtatggaagagtgtagctggcttccagctcaagcgatgagggaatttggattctggccttagaccatggcaccttccactcctgctttggaagcgtctgtatccgttagcgctgagaggcacaccttgccttcactcctctttgcttccctctcgcgatatgcttgcaggttggtagtggtagctcgtccggttccaatgtcttttatttcgttcaacaactatctagatgtacaagtgccattgaccttggcgacttcgcttccgcatggtttgtttttgtcgtccgttgtgcaagattactactcgagtactaaacttgatagaatagaatcaatcgagtctctggtctctattttatgtcacacaacaatacatgtcattggtatttataaaggtcgtcgtcttcatcatttcattattttctagtgtaaaatagcactaaactgtttgcttacaagtatttttgaagctcttctcaacgaaaggaggtgtttataccatgtccttggagttttcttgaactcacacaacacattgaataacctataaacatgatcaaga

SEQ ID NO: 7023 - DNA, 2272 bp, Zea Mays
ctcctccctccctcgcccgcctgcctttcgcttctttttaagcctttatttactaccactactatactcctctctctttctcactcgtcacaagctctctttcatcgcatccacaccattccacttccaccccacgaggatccagcctgcctgtccctctcgccgcacgccacgaccgtagtcgctcgccggcgtgtctagcctagccggggcctgggcctccgcgctcgtgctcccgggaaacaacgaccgacgcgtcctcatagtcatagaggcagctaaggcagccacgcattcgtcgctcgctcgaccggcgatggcgagaggtgacacggcgagcgaggcgctgacggcggactcagccgacgaggaggggcgccgcgggagcagctccagcgccagctccgacgccgcctccagcttctcctgcacgtactccccggccccgcccgacgagtggcacaaggtggccatcatcaagacctgcgtgtctgtgtcggccgacgccgcgggcggcggcggcggcaaggaccagaagccagatggagatgatgaaggagcggttctccaagctgctgctcggcgaggacatgtccgggagcggcaagggcgtctgcaccgcgctcgccatctccaacgccgtcaccaacctctgcgcgacggtgttcggccagctctggaggctggagccgctgccgccggagaagaaggccatgtggcggcgcgagttggactgcctgctctgcgtcagcgaccacatcgtggagctggtgcccacgtggcagacattcccggatggtacaaggcttgagatcatgacaagcaggccgcggtctgatctgtacatcaacctgccggcgcttcggaagctagacaacatgctcctcgaaatcctggaaggtttcagggacgtcgagttctggtacgtggaccagggcatctgtgcgccggactgcgacagctccgcgtcctaccggagaacgttccaccgccgcgacgacaagtggtggctgccggtgccgcacgtgccccacggcggtctccgcgaggccacgcggaggcagctggagcaccgtcgcgactgcgccagccagatcctcaaggccgccatggccatcaacagcaacgcactggccgagatggccgtgccggtctcctacctcgactcgctgccaaagaacgggcgcgcggcgctgggcgacgtcatctaccggtacatcacctcggaccagttctcccaggactacctcctcgactgcctcgacctgtcgtcggaataccaggcgctggagatcgccaaccgcgtcgaggcctccatctacgtgtggcgccggaaggggggcggcggcgccagatcgtcctggggcatcgtgaaggacatggtcatggacacggagaagagggacctgctcgccgagcgcgcggaggcgctgctcatgtccctcaagcagcggttccccgggctcactcagacgagcttggacatgagcaagatccagtacaacaaggacgtgggcaaatcgatcctcgagagctactcgagggtcctcgagagcctggcctccaacatcatcgcgcggatcgacgacctgctcaacgtcgacgagctgagcaagcaaccagctgacagcatcccgtccgccggagcggacgcgaaggttgcgtgcaagagcaacggcagcaagcaggccacggcggtgcctgcctcgggcacgccgtacgcgacggcgtacgccacgccgagcttctcgccggcgcagctgtcgagcccgtccaagatcgggagggccctgctggtcgaccgccggtcgcaccacgttgccggagctaagagggcaacggcgtccgcggctgatcgcgctggcgtggaggtggtcaagggaatggtggtcgacggcagcagcgccatattcgatatcatcccgatagctgtcccagcaaagatatgaagagtccgctcgtctgtgcggaccagatacgtcatacgtgttgtgttggcgtgaagtagtgggtttactgtagcatccgagggcgatttctcttgttgccgatggcagccctccgcttgcgactgtaatgcttttggtgcggtgtcgtgtagtatgttacacgtagagttttctgtatctgtcagatgttcgttggatgaaagcaccgccgacactggtcgtcggctgtcgcggagtaagattatgtcaccacactcacgatctcactcctatttcaaactactacactttacaaacattgcaatctcaaatgcaaaacaata

SEQ ID NO: 7024 - DNA, 1620 bp, Zea Mays
ccagtaataaaaaaaaactcccagtctctctccgtgccgtccgctgttcggctccggaagtccccatccgctccacctctcctcctccactcccccgccccactgatcgcggcggtgagaacatgctctttctacagctcgttgaagttttaaattatattggcattcgtgttgtcaagtctgaactaaagcctcagccaaggtggcatgtctgctaaggtgcctagaagtttgttccagtggcatggcggattgggcctctattcaaacggatattcttggtataataataaagaagcttccaatccctgattacattagattccgtgctgtgtgcacatcttggaacaacgtctgcaaggatgtgtcatactgtccaagggtggacccatggctgatgctccccccaaaccagaatcctcttggtgctcagttcttttgcattcctgaaagaaagaatcaaagtatccgcctccctaacaccgcctcactgttcgaatcggtctgggctccggttggttcttccaatggatggcttatctacttcagtcacacttacggaaccatgcagctggttaaccctgtaagtggcaaacatatccagctccccccgatagggcgcaggaccttctctaaggccaagctgcttgaaatcagcgagaggaacttcatcgtcgctgtcctctatggtgatgagaaaggctacaaaataacacggaaagggtccagcaactggtcgtcggtcgagtcaaaattcattttggatgacatcatcaagcatggaggccggctatacacgtgcgacatgtatggcacagtggagatgtgggcagagccgccccgcgcatggccagacgaggaagtcacgcatcggtggaggttccgctgtcttatagagaccccagctggtgatctggtcagggttaagcgcctgtgccagaacaagtttgctgtttggatattggacaaggcgagctcttcctgggttgggaccgagaacattggggatctcgcgctgtttgtgagccactacaactcattctgtttccctgccagtggccagcccaacctgaaagcgaactgcatctacttcatcgacatctacaacaacctgtgcgctttcaaccttgagcatgggaccaaggaactcgtccaaactcttaccatcggccgaggccaagggcgcaatgactaccaccgctggcctgagcgagaccaggtcttatggtttatcccttcactaaagtaaatactgaaggtaatggtggatgatgcgtgtccgtttacccacccagagatggagctcatatagtactgtaggctcctcctatggacggccatttatcccgatatgaaggtcgtatagtatcctgtatttccaaagtattggatgtcgcacatgcaactgcaggtctatgtatatgagtaccgaacatcgtcttaacttgttgctaaagcaactgtttgaaccatttgaagctttcgtttcaagctgtcttggcctgtaaactattccgaattttcaagttccttgaggattgaaaaaaaacctagaaagcttcctcagtcaattctgggtgtatattgcaagtcgttttgactcttttagatactcgtgca

SEQ ID NO: 7025 - DNA, 1739 bp, Zea Mays
gggtttgggtgtcggaggacgtggtgtgtggattggaggttattatgtaggatctggggcggaggatttcagttcgattatgctgccgttttagtcttctcgacgcatgtgtttgcgatcatgcaagaacatgctctttctacagctcgttgaagttttaaattatattggcattcgtgttgtcaagtctgaactaaagcctcagccaaggtggcatgtctgctaaggtgccaaggaacatgttttggttcagaagcttgcatatgcatgacgcatgcagctgacacgcccatatctatccacggggttatattatctgaagattcatatatggataagtgcctagaagtttgttccagtggcatggcggattgggcctctattcaaacggatattcttggtataataataaagaagcttccaatccctgattacattagattccgtgctgtgtgcacatcttggaacaacgtctgcaaggatgtgtcatactgtccaagggtggacccatggctgatgctccccccaaaccagaatcctcttggtgctcagttcttttgcattcctgaaagaaagaatcaaagtatccgcctccctaacaccgcctcactgttcgaatcggtctgggctccggttggttcttccaatggatggcttatctacttcagtcacacttacggaaccatgcagctggttaaccctgtaagtggcaaacatatccagctccccccgatagggcgcaggaccttctctaaggccaagctgcttgaaatcagcgagaggaacttcatcgtcgctgtcctctatggtgatgagaaaggctacaaaataacacggaaagggtccagcaactggtcgtcggtcgagtcaaaattcattttggatgacatcatcaagcatggaggccggctatacacgtgcgacatgtatggcacagtggagatgtgggcagagccgccccgcgcatggccagacgaggaagtcacgcatcggtggaggttccgctgtcttatagagaccccagctggtgatctggtcagggttaagcgcctgtgccagaacaagtttgctgtttggatattggacaaggcgagctcttcctgggttgggaccgagaacattggggatctcgcgctgtttgtgagccactacaactcattctgtttccctgccagtggccagcccaacctgaaagcgaactgcatctacttcatcgacatctacaacaacctgtgcgctttcaaccttgagcatgggaccaaggaactcgtccaaactcttaccatcggccgaggccaagggcgcaatgactaccaccgctggcctgagcgagaccaggtcttatggtttatcccttcactaaagtaaatactgaaggtaatggtggatgatgcgtgtccgtttacccacccagagatggagctcatatagtactgtaggctcctcctatggacggccatttatcccgatatgaaggtcgtatagtatcctgtatttccaaagtattggatgtcgcacatgcaactgcaggtctatgtatatgagtaccgaacatcgtcttaacttgttgctaaagcaactgtttgaaccatttgaagctttcgtttcaagctgtcttggcctgtaaactattccgaattttcaagttccttgaggattgaaaaaaaacctagaaagcttcctcagtcaattctgggtgtatattgcaagtcgttttgactcttttagatactcgtgca

SEQ ID NO: 7026 - DNA, 896 bp, Zea Mays
agctcacttcgcttcgcttttccttcacgaaaacagagcaaatccggcgagccggtgcggcggcggagggagacgcctgctcgagaaggagcattagcaggaggcagcggagatggatccggacgcagtgaagtcgacgctctctaaccttgccttcggcaacgtcatcgccgccgccgcccgcgacctccagaaggaaatggtggctaaagacaaggctcaagcagcacctgcaagccatgatgaagttgatcttgatgagttgatggatgaccctgaacttgagaagttgcacgcggagagaattgctgcccttaagaaagaggttgagaagcgtgaagtgctaaaaaggcaaggtcacggtgaatacagggaggatcatggataagcatttgaaggcccttgctcctgtctatgtgggaacaaaattcatcaagcttgatgctgaaaatgctccattctttgtagccaaactggcaatcaaaaccttgccatgtgtaatattgttcaagaagggtattgctgttgaccggttagttgggtttcaagatctcggaagtaaagacgatttttcaacaagagcgttggaaaacattctcaagatgaaagggataatcgatgagaagaagaaagatgacgatgatgatgatgaagaaagcgagtctaagaataggaggattagatcttcaactgctcaagattctgactcggactgaacatgagatggggattgaggattcaccctttttgcactttatattttgtctgttctgtactgcaattgatttgtgcgactcatgtatctataccagataaccagaacaaaagcatgtacaagagattcttaacttatctaacttatgaacacattctctcggaaaaaagttaaaccaaac

SEQ ID NO: 7027 - DNA, 1370 bp, Zea Mays
ctgtggcctctgccttctcccagacacgcttgttgcccaccccctctgccttgtccttgttatgctcgtcactgacgcccgtgccttctcctggctgcacccatcacccgccgccattctcctcctggacgccgcccgccactaacctccttttggtagcgcttgtggcctgtggcctgccctccttctgggccgtggccgtctgtactcgcttcctcggccgccagtccgccacctgccgtccctcaggcagcacggctctggatctgggggcatgctgcctatccactgctgctcccttgtggaacactgatgtttacttgtacacaactacaagtacacatgcatgtacaccgtgctcgtcatatattctcacaggttgtgctaccacagctggcgagtgtggtggttgcttgggaggtgctggggaagctgggctacctctgcttctcatcatgggggttattgtgcttgggcttttcacggtcatcggcatattctacagtgtcctggtcgcgacaatggttggccagcggatctggcagcggcattatcacattcttgcaaaacgaatgctaaccaaggaaatggtggctaaagacaaggctcaagcagcacctgcaagccatgatgaagttgatcttgatgagttgatggatgaccctgaacttgagaagttgcacgcggagagaattgctgcccttaagaaagaggttgagaagcgtgaagtgctaaaaaggcaaggtcacggtgaatacagggaggtaattgaaggggacttccttggggaggttactggcagtgaaagagtcatatgtcatttctatcaccgtgaattttaccgttgcaagatcatggataagcatttgaaggcccttgctcctgtctatgtgggaacaaaattcatcaagcttgatgctgaaaatgctccattctttgtagccaaactggcaatcaaaaccttgccatgtgtaatattgttcaagaagggtattgctgttgaccggttagttgggtttcaagatctcggaagtaaagacgatttttcaacaagagcgttggaaaacattctcaagatgaaagggataatcgatgagaagaagaaagatgacgatgatgatgatgaagaaagcgagtctaagaataggaggattagatcttcaactgctcaagattctgactcggactgaacatgagatggggattgaggattcaccctttttgcactttatattttgtctgttctgtactgcaattgatttgtgcgactcatgtatctataccagataaccagaacaaaagcatgtacaagagattcttaacttatctaacttatgaacacattctctcggaaaaaagttaaaccaaac

SEQ ID NO: 7028 - DNA, 1009 bp, Zea Mays
atggaccggtggaccggcgtcgtctacgtcccactctccagaggcggacccctcttccgcgtcgctgcctcgctcctcctctcgccagccaaaacgctcgccgttccacgagtcaacgcgatccttttcacgggcgaccgcgtccgcggcacgggcgatccggtgatcgagcggctctctgacgccgcccacctggctggggtcctcgccgggaagctccctggggaggccaacgcgtgggtggtcgacgccgcgcgctttgctgggccgtttgcggtgtaccgagagctcgttccgaccgtcgacgccgctggagaccccaaggggtatgaccccactggcttccccgccgccgccggtgttgccaacatccttgcacgcagcattgatacagaatcaagtcccggggttgtcggcgaaggattcggctggcaaccagcaccctccatcctaccatccaccggctaggactatcatccttggcttcagcaagggtggagtggtggtgaaccagctcgtgacggaactttctcggtggggggcatcaggatcaacgaaccaggcggcggcggccgacgttccacgaccagcagcagcaggtccaggtccaccaccccatccgacccagaacgaccttcttctcctgggggctcctactcggagcagcgacgacctgctgtcaagtatctccgagctccactacgtggacgccggcctcaaccgcgccggagcgtacgtggccgaccgcgcggtgatcgggaggatacgcgagcacgtcgtacgcgccggcgacaagagcctccgcttcgccctccacggtaccccgaggcagtggtgtgatccgagccgcccgtggatccgggaggagaaggacgcgatggtccaggtactcgcggacgaggcccggaggagcgaggggaggcttgtgctgtctgagaagctgtatttcgagggcagacctcgcagcctgctcatgcattttgaggtcttggaagcgatggatatataa

SEQ ID NO: 7029 - DNA, 4285 bp, Zea Mays
ctgctgactgccccgcactcatttgctctccacccctaccgcctgcctcagatctcgatgcggcgcaagcttcccggagacgcgccgctgtcggcggcgagggccggtcatgcttcgtccgcatccgcgccgtccgaggcggacctggctcagctctccgcggccatcgcagccggggaggacctgggccccttcgtgcgccgggccttcgcgtgcggccgccccgagccgctgctcgcctcgctccgcggcgcggcgcgggaccgagaggccgagatcgaggagctctgccgcgcacacttccacgatttcatccgcgccgtcgacgaccttcggtccctcctggccgacgccgatgcgctcaagggctccctctcggcgtcccactccgtgcttctctcctcggcggccccgctgctcgcctcgcttgagtccttcctcgctgcgcgcttgctcgcggggaacctctcctccgcgctagcctcctcccgacggtgcgtacggctgctcgcgctcgcggcgcgggcgaacgcgcacctccaggccggcaaccatgggctctacctcgccctgcgcgccgtcgacgccatcgaccgtgatctcgcctcgggatccgagctgctgccgctacccgcgctccgccgcatgcttctcagcgtcgtccctgcggtgcgcgcgcatgccgagcgcgagatctccagggagttttccgactggatggttagcatccgcgctgcttcgaggcacctcggtcaggtggccatcggccgctcggctgccgccaggcagcgccaggaggagctccgctccaagcaccgcccgctggagggctgcatcaccttggatgacgatggagttggtgacctcgatgattttgcggcagccgcggcaactgctgacgcggcagatggtgctgctgcagcctcttttgaccttacgccgctctatcgagcgatgcatatacaccagacgctggcgctgggtgagcggttcaagaagtactacctggaaaacaggaagctgcagctgacatcggacttcgatgtcattgcggcgacgccattcctagagtcccaccaggtgtttttctcgcagattgctgggttttttattgttgaggaccgggtgtttagaacagggggtgggcttacatctcggccagatgtagatgcactttgggatgctgctgtggggaagatggtctctgtgatggaagacaacttctccaggatgcagacagcaaatcacttgcttctcatcactgattatgctgctttgctttcggccacaatgcggcggtacggttatccagtaggaatgctgctcgatgtgctggctaagcacagagacaagtaccatgatttgctgcttgcagattgccgtaggcaggtggcagaggcactggctgcagataagtttgatcagatgctcatgagaaaggagtatgaatactcaatgaatgtccttgcatttggaattcagagctcagacatcaccccagctttcccatacgttgcaccgttctcctgcactgtcccagatatttgccgtattgttcgctcattcattgaagattctgtgagcttcatggcacaagggggtggtggggatacttatgcagcagtgaagaagtaccttggccgtatcctttctgaggtggtggatgcttccattcaaaaacttgttgattcaggcagtggtctaagtgtgtcccaggcaatgcaggtcgctgctaacatgtctgtgatggagcgggcatgtgagttcttcacacgccatgctgcacaactgtgtggtgtgccactgcgtgctgtggaccgtggtcggcgggacttcccacttcgcaggtcacgtgatgctgcggaggcgctcctgctgcggctcctatgtgctaaggttgatgagttcatgcggcaatctgatggtgttaactggatggctgatgacgctcctcctggcggcaatgagtatgccaacgaggtcatcatctaccttgagacgctcacatcaactgcacagcagatccttccccttcccgtgctccgccgtgtacttgtggcagtgcttgcccacatctctgaaaggatcattgagctcttcttgaacgattcagtgaagcggttcaatgccaatgcggtcactggaatagatactgatctcaaaatgtttgagacgtttgcagagggcatgtctagcctgttcgtggactcaggtcaagaatctgcaaaaaatgaaatgaaggctgcacttgtggaagcaaggcagctagtgaatcttcttatgagcaatagtccagagactttcctaaatccagtgattcgtgaaaagagctataacaagctagattatagaaaggttgcaatcatctcagaaaagtttagagatacctcagagagttatttctcaacattcggaacaaggggtgccaggcagaacccaaagaagaaatctctggataccctgatcaagaggctcagagaagccagttagatatcctccctgctgtaagattatatacatgcaactggcttctcacatcctgattttttcatgaaagtctgtatcttgtttgtgttatgcctgtttcttgttaatcttgtgctgtaactttgctgttgttagattctatgtttcaaatgtgtggatatcttcctgttgattctattgccatttactatatgatcgagaatctcataatggttaatttttcctgtgaggagaaagtgcttgataagctcactattttatatttttcttcagaagatagggatgcttttatttcctccctccagttccatgcacttggtgacaagcgacttgatgttatatatttgaaagttataaaggtaaactttggggctttggagttcaatttacctcgctgtttaggtatattgaaattggatgatgactaacagggtagatgattgtttggagctgcagaacctcagtcatttttccttaccaattcagaaatagcgaatctttaaatcaacagaggattttcctaccaatatagagaaaccagatccataaagaatatggtatcctctttttatacttgttttgtatcatatttgtagtactttttatataactttggccaaacttaaatcgtttgactcctcgaaaagtgacaatcgctcttttttgtggatggagagagtaataattgataacttgttgtatataaattttaaaattcaagttccaaactagggcaagtgtatggtgaacatttttttcattacttatgttttaataatttgtgcattttttatccatgtatagcagtaaaagttatgttgccattgccaagcttgaggcatttaatttaccttctgtttctgccctatgggcttatgactttccacaatactgccacacatagtcttttatactgtcttgcactgtctttttctgcaccactaaaatagttccaccagccatgtgaagccttagaaggctaatccagacagttagtcataggtttttgcaaatttgtttgggggaaacagacaaccatatctctatactgcaagctttgctaatttagacagctttgatccatttctttactatatgtgtatggctactttgtgtagcttactggttagtgttactgtctgtgtgtggctactttgtacagcttactggccagtgtcctatggtctattagagctgaaataacttcttgcaatcactggttgaatcttggttgttacggtagtaactaaggccactttggatgagtcatttacctgaaccctttatgtgtaactaatttaagtcatccgaatatgtcaattggcctataacagtgaaatatgttataagttgttctttagaattactcccattactgttttgtggtttcccttcaactcaactcattttgcaattattgtacaatgctatcaattcatctgcagcttttgcataagcatacctccataagctttgtgagctgtgttcatgtccaaaaggactcgcaaagagaacagggactacaagttggtattgtcattcggtgaaaatatggtcattgcacaaaagcgtcccatctgcgcacataattttcaactgtgatcatggcacaaaaagaaaatgttcaagcctgtgcacatttattcatgttggaagtgtgatgatcagctcatttgttacaaataagatgaagtttaaccatttagttctgcaattcatcgcctttgtagtggcaagaattgttgatttatctttaaatcaggattgttgattttcatctatgttcatgggatgggtg

SEQ ID NO: 7030 - DNA, 923 bp, Zea Mays
cgtgtgcgcagccaactctacctatccccgcccccgggatgggcgatggcaactatcctatcgcaacaatatcctggggtgggggctataaaacggagcggcccgcgtggggcgcgcctccatcagccgcagtcgcgtcgcgtcgcgtcgcgtccagtccaatcctcggagcctcacacgggcggacgagcgggagcttctcccaatctcccctgccctgccctgccctgccgccgcgcttagcttcgcatcttcccctcctcctcctcctccttcctcggccaagcgaggagcgaggcgcgggcgcgagcgcgtcgttgagatggattcggaggcggtgcagcacggccttctccctctgtctgcctgtcctcctaccgccaacagctgcgcgcattacagccgtgggtgcagcgtcgtggcgccctgctgcggccaggccttcggctgccgccattgccacaacgacgccaagaactcgctggaggtcgacccgcgcgaccggcacgagatcccccgccacgaaataaagaaggtgatctgttctctctgctccaaggaacaggacgtgcaacagaactgctccagctgtggggcctgcatgggcaagtacttctgtaaagtatgcaagttcttcgatgatgatgtctcaaagggccagtaccactgtgacggatgtggaatatgtagaaccggcggcgtggagaactttttccactgtgataaatgtgggtgttgctacagcaatgtcttgaaggattcccaccactgcgtcgaaagagcaatgcatcacaactgccccgtctgctttgagtatctgttcgactccacgaaggacatcagcgtgctgcaatgtgggcataccatccatttggagtgcatgaacgagatgagagcacaccatcaccctgtttggtctttgg

SEQ ID NO: 7031 - DNA, 2537 bp, Zea Mays
cgtgtgcgcagccaactctacctatccccgcccccgggatgggcgatggcaactatcctatcgcaacaatatcctggggtgggggctataaaacggagcggcccgcgtggggcgcgcctccatcagccgcagtcgcgtcgcgtcgcgtcgcgtccagtccaatcctcggagcctcacacgggcggacgagcgggagcttctcccaatctcccctgccctgccctgccctgccgccgcgcttagcttcgcatcttcccctcctcctcctcctccttcctcggccaagcgaggagcgaggcgcgggcgcgagcgcgtcgttgagatggattcggaggcggtgcagcacggctgcgcgcattacagccgtgggtgcagcgtcgtggcgccctgctgcggccaggccttcggctgccgccattgccacaacgacgccaagaactcgctggaggtcgacccgcgcgaccggcacgagatcccccgccacgaaataaagaaggtcagcgttccctccctctgctcaaagagcaatctcctgcctgtttcaaccattgcctatctcgtgttcgtctttgttattaccgtgagcaaagaaaggaagaaacaaacaagagcgccgccttctctcttctccttctccatgtaatggagcatttgttccgccgcgtagtcgagtgcaagcagcggttttcctcttttggaaacccacccccacgcacggttccgttccaatctcgcccttccaattgaccaacacaaacctttcctaagatttcttgtcctccttacccttctacagacaagtacgaaacgcaatcgcacaaggttatactactactagcttttagtgttctagcgaccttagatttttttttttggttaggcatccctgatttttctcacacttaaaagcttcttcagataaggccatatcagctcagctcagtgctctgggagccgttctgcacttcacttgcgtgtcactaaaaacttgactgctttccgcgatgtgctccgcaccaagtggccggcactgcgtggtccacaggatttttcaagagaaagccggggtcacgggtgccacttgaagccaaggacaggcgtctgggattggagaatatatgagaaagggataccgtcagaggcacatctcaccgtcaaactgaacagggtctaactgcttccagctgatttgattgagtttgagtgctgcatagttgaggacctggatatagtgacgtgtcctgacaggtgtctttggacctattagcagtgaatctgacgtcgatcggctaaagcaatcatgtgatctgttctctctgctccaaggaacaggacgtgcaacagaactgctccagctgtggggcctgcatgggcaagtacttctgtaaagtatgcaagttcttcgatgatgatgtaagcgtactcgaatcccagacgatgaacaaagaaactgaactcgatgcgttgtttactgcgtttcttttttcccccttcttcttcacgtacatactgtactgctcttggtccaggtctcaaagggccagtaccactgtgacggatgtggaatataaccggcggcgtggagaactttttccactgtgataaatgtgggtgttgctacagcaatgtcttgaaggattcccaccactgcgtcgaaagagcaatgcatcacaactgccccgtctgctttgagtatctgttcgactccacgaaggacatcagcgtgctgcaatgtgggcataccatccatttggagtgcatgaacgagatgagagcacaccatcacttctcatgcccagtgtgctcgaggtccgcctgcgacatgtcggccacatggcggaagctcgacgaggaggtcgcggccacgccgatgcctgacatctaccagaagcacatggtgtggatcctgtgcaacgactgcagcgcgacctcgagcgtgcggttccacgtgctggggcacaagtgccccgcgtgcagctcgtacaacacccgggagacgagggctgcgtgccccaggatctgaggcgaaccagaggccatgtcacaaaatgccagggagatgccgtccaacgatcatctgtctgcaggacgttgctgcgcttaaggttaaaggctagcgcgagaccaggcctggtagtccagtcttgagtttggtgctggagcatttgtaatgttccggtaaaatgtaatgcgtccatgagtgctgtccaggcagtaagcacacctgtggatcggggccggcgcaaggtccctaggcaagctgcaggattagtggggctattcatgtttagggcgcgaatgcaacgaaattacccgtgggccgtgggctcggtatgtaacagaaccgattatttctattacaataataacatgcagttctattgggccgagcctaatcaggcaccacgaatgtgaataattgcacatggcgcatatatggcgggcagtagatacatataaaatggagaaaatccgtttattgccatcaaaacttatactgatcactacaataccatctaaaatgatgtgctcccttc

SEQ ID NO: 7032 - DNA, 769 bp, Zea Mays
cgccttgtgttggcggccgtaggccgtagggcgagctcccaggtcgacgtggcggggatggctgcgacggccggcggtggcggtggtggaggggctaaggcggcagtgaccgagcagatagcacaagcagtgcggtccacctccaacctcctccagctgatggagcagtcctcccccgctcaggttcatttggcaaaactaccgaagaacctgctggaaaaagcatcctttgcaaagaacacagagcatgtgctgcaccagctacctcaagtaatatcatccttggatgcttatatggacaggagtttgcaaagctcttgtcaaacatggagaacactcagctgaggtacatgttgccttcctctcaaaagaagaaagatcaaaagagtactgaaccttaagaattcagagtcgactgatgtgttcaccgagacataatggaaggatatgttcttgccgttttgtgctaaagaaatttgagttttgtggctctcaagagatggcttggctttatctggtgtaaggatccatcgttgtctactgtctgtcccacatttgctgagttcggttgggggacgctgttaatggaaatattcttctttcttcaaaccatttacgggtgcctaggacctgtatcataaggcaagcatgcctgttagttgtcacacattctggtctatgaacacgttgctttcttgtaattgcattggttgttttagcagtaaattatggtagaaattatgaagtgatcaaagtgtttaacgtggca

SEQ ID NO: 7033 - DNA, 2323 bp, Zea Mays
ctcctgtcaaaaccctagtttcccaacatcgtcggctcctctctttcccaccgccttcttccactactcttcaccctcccctcctccccatcgcgaactcacaagagaaccaagtagacgagggagaaggagatggcgaagaagaaggagaaggcggtgaacgtgtcgggcaagccgcggcactcgaacgacgtcaaccgccccaatgacaagaagggcgcgggcggcggcgccggtggcgggagccggtccgcggctaccgtgcggcggctcaagatgtacaagacgcggcccaagagggaccgcgccgggaaggtgctcaggaacgatttccagtctaaagagctccccaacacccgcatcgagcccgaccgccggtggttcggcaatactcgcgttgtgggccagccacagcttgaaatgttccgggaggaactccagagtcggctttccgacaacttcagtgtcatcctgaaagaacggaagctgccactatcgctcctgcaagatcatcaaaagcaagcgaaggcacatctgcttgaagttgaaccttttgagcatgcttttgggccaaagggcaagaggaaacgtccgaaactaactgctcttgactacgaatctttgctgaagagagctgatgattcccaagatgtgtttgagcaaaagtatgcttcatcaaagttgccaagggaggaagaagaagatggcttacgtgatctagtgaggcatacaatgtttgagaagggacagagcaaaagaatctggggtgaactatacaaagttattgactcttcggacgttgttgtgcaggtgttggacgccagggatccaatgggcactcgatgctaccatctagagagacatctaaaagagaactgcaagcacaaacacttggttttcttactaaataaggatggttaaggaccctttcgaaggactatcccaccctagcattccatgcaagcatcaacaagtcatttggcaaaggatctcttctgtcagtattgaggcaatttgctcgtttgaagaatgacaaacaagctatttctgtcgggtttgttgggtaccccaatgttgggaagtcatcagttattaacacactacggtcgaagagtgtctgcaaggttgctccaatacctggagagacaaaagtgtggcagtacatcactctcactaaaaagatatttttgattgattgtcccggtgttgtatatcaaaacaatgattcagaaactgatatagttctgaagggtgtggtccgggtgacaaatttggcggatgctgctgagcacattggtgaagttcttaggcgtgttaaaaaggagcatctccaaagagcgtacaaaattcaagattggtctgatgataacgattttcttgtccagctgtgcaggaccactggaaaacttctcaagggcggggagcctgatctgacaacagctgccaagatgatacttcatgactggcagaggggtaaaatccccttctttgtaccccctccgcagcaaagcgacggcggtgcatctgaaagtgctgaacctattgggattaccaaagaggacggagtaagcagcgacaggactgccgcagccatgaaagccattgcaggaataatctcgtcacagcagaacatgaatgtgccctgccataaggaaaacaatgcagacaatgaagacactactgaaaatgcagataacgaagacattgagagttcagataacgaagacaatgatgacatcgagcctgcagagcgatctgagtgatctttgggtacagatgtggattattagagttgatatgtcaaggctaattaatttgtcagcccaggtgttgtgtagctacttgaccatatcactggcgtgctagaaaaaaaggatcatgttgagttgcactttttgtaactatcgtacctgaatctttgtaatagggcaagatcagttttgctaggtacctggttgtatcgggatggttatctgtgctgtctactacaaatacagttacatctattttacttaaatcaagtggaagttatctctaaatttttattgcggcttcatgaatttttgcgtacctacatatttcaagccccatcttttcgattgtgccacgtagaggtcgataagctaaaaatgatcgcagaggtttagaggtatctttgttgaggaacaattgtttgtcctaatatgagatgattaattgtgtcgcattcaaattttatttgtgatactgtgattgaaaggtaactgccaatggaactaacatgtttttcgatacaggagaagccaaaaaagcagagacaaagattggattgaattaaaaaaaa

SEQ ID NO: 7034 - DNA, 1193 bp, Zea Mays
ggaaagggaggatattcatcaattgcttgtttcctgtgttcttgcgaggcaattctggtttctccttcagcgagtcggcctagcagccctttccctggggttggatgatataaattttgaagctcggtggagtagatcgggtgagatgctaataatatcgtggattcaagctatggtttctctgtggttgattctaactcattggagttccttttcaacaatgcacctgaggccgccaaatggctgaaggataactctgagttgtcctttgaagaaaaatatcggtctgatagaagctcatggttggctttgtatcctgtcccattcttgttctctggaagtttaaaattccaggcacaaactgaagagattaaaaagtactaccagcatttccctcagttagctgttcaggagatctgggataacaatggacagcgaagggtgcatctcaaacttgcacttggttccttatcagaaatttggacctctgtgctcaatattactgggccactatcaaattggtccttcgctgataacatgctcccagctcctcaaactgtaagtggtgggccaccatcatatatttgtcgactcagtggaaagagcgatgtggattggtctttctggttggaggcaaactcttctgaaagtctgagagtcgatgtcgcagtacttgatcagtaccttgttgatagtacaaagaaactcaagagcctcttcccaagttgggcagacttgacagccttcacaacatttttctcaacgtatcatttatgaggaggtcaagtatttgatgttcaacaagtgtaaatcattttctctttgtagccctacgtttcggggctatatgtggttttgtcaccatgatcagctggacctgagccccgaggctggtgtttgtaaaatctttgtaagcgtgccttgatgtattcatgaatcacacaagattgtaagaatctcaagtcagtcataaattttttaccacttagtcattcacgattgacggtatggcatcactgatcattcgtgttctaagtttaaaaattctaaaaagaaatgttgcatcgacatagaagtactgcgtttcattttgtaatcgataccacctgaggtgaaaggttagattttttatctacagttcgcaatcccacttgaaaaaggaacacattatgcaggttcaaggttttggagtg

SEQ ID NO: 7035 - DNA, 2468 bp, Zea Mays
tgcagtcctagagtagtcaaacaggacggacgcacaggcgtcggcgcggcgcggcgcgtgagctcttttgcttgccgcggctgctcgccacgccacgcttcagaagatcacacggtgacggcgggcggacgcgctcccccaatttccctcccattttctactccctcccctttccttccttcaccggcatcggcataggcgtctctccctgatctacctggagtctctctcctcgtactccagcgccgcctgcccctccgaccaccgctgcggcagcgcaccgacttcccgcctgaaccccagatctcacccgcgccatacacgccgccagccccagcccagatctacggcgcgcccgccatggacgccggcgccggggccacggccatccgagtgccctaccgccacctccgcgacgccgagatggagctcgtcagcctcaacggcggcgctcccggaggggacacgggcccgcccccgccaccgcccaaggaccagccgcggagccgcgccgacaggaccaagctcgtgctcgcctgcatggtcgccgcgggcgtccagttcggatgggcgctgcagctctccctccttacgccatacatccagaccctaggaatagaccatgccatggcatcatttatttggctgtgtgggcctataactggttttgtggttcaaccttgtgttggtgtttggagtgataagtgccgttcaaagtatgggaggagaagaccatttattttggctggatgcataatgatatgtgctgctgtaactctaatcgggttttctgcagacctcggttacatcttaggggacaccactgagcactgcagaacatataaaggttcaaggtttcgagctgctattgttttcattctaggattctggatgttggacctggcaaacaatacagtgcaaggtcctgcgcgtgctcttctagctgatctttcaggtcctgatcagtgcaattctgcaaatgcaatattctgctcatggatggctgttgggaatattcttggtttttcagctggagcgagtggggaatggcacaagtggtttccatttctaacgacaagagcatgctgtgaagcttgcggtaatttgaaagcagctttcttagttgcagttgtatttcttttgttatgtatgtctgttaccctgtacttcgctgaagagagcccactagatccaaaagatacacaaggactatcagattctgctcctctgctgaacggttctagagatgctgcccatgcatcaaatgaaccaaataatgaaagatttcctaatggccatgtgggtttaaacaatgtgtcggctaacaacaacactgaggaatttacaaatgtgaattccaacacagagaaaggaggagtcttcaatgatgggccaggagcagttttggttaacattttgaccagaatgaggcatctacctcctgggatgcattcagtgcttctagttatggccctaacatggttgtcatggtttccctttttcctttttgacactgactggatgggacgcgaagtttaccatggggatccaaatggagatttgagtgagaggaaagcttatgacaatggtgtccgagaaggtgcatttggtttgctattgaattcagttgtccttggcgttggttcattccttgttgatccactatgccggatgattggtgcaagattagtttgggccattagcaacttcacggtgtttatttgcatgatggctacaacgatattaagttggatctcttctgatctgtactcaagcaaacttcatcacatcatcggggcaaataaaacagtcaagatcacggcattggttgttttctctcttctcggattgccactctccatcacttacagcgttccgttttctgtgactgctgagctgactgccggtacaggaggtggacaagatagtagtgtcgcttggagcaggtccatgggacgctctgtatggaggagggaataccccggcgttcgtcttggcttcggtcttctccctggcagcaggtgtgctcgcagttctcaagctgccaaagctgtccaactcgtaccaatctgccgggttccatggatttggctgatgctcatgcccaaaacacccccgtctgccatgtaaaacatcacaccaacacttggccccattttgccattcgtttacagagaaatgattcttttttcctcgtacaactacagaataatgacagtgaaagtaggagtttaggtgagagagagagagaggctaggtaggttgatgtgaaggtgtaaaagctgtatcctcctttttttgtttttgtttttgtttttgacagtgtatgtaagagctgtccacaagaaaatttacaagtggtgtaacctgccctcgtttgtacattgtactactactacatgacaatcatatgtcctttgtctttatccaaggttgaagacgtaaactgaggccatctatttatcttg

SEQ ID NO: 7036 - DNA, 1777 bp, Zea Mays
gttccttccgtcgcaaatgtgctgtgtccctcttcatcctcctcctttctcagtcacatacacgggagctgtccacgccggccttcccccctaccaccacataaatccgcgcctactccgcaccatcttctctgctcaccacgcgcctccaaggatgggcgcacggatttagctgatcccgtcgctgctcgcgcccgatctcgcggcgccccgccccatcagctccgcgagatgatctgagccccgcgatctggtggagaaatggagccgccgccggatctgaacacccacctgccgccgcggaagcgcctgctcgccgggctcaggacggcagccaccgccgccgagccgctaccgccgccgcccgcccacgccgacctcgccgcccgcctccgcgagatggcgctcgccgccaacgcgtcggcgtcctcgcccgaggagacgatcgaggcggcgagggcggccgcgcaggccgccgcggacgccgccgttgctgcgcgcgccgtggccgccgagaaggccgccgtcgccgcgaaggctagggcggccgcgcgcgccgccatggagttcatcgactccttctctaccagggccggcgcgtccaggaacgggagcggcctccagttcaagatcaggtctaggaagaagcatgtccaggtcaagatgctgtacaggcccaatggaaccctagggccagcggaggctcccaagcctaggagacgcaagcagtcggatgaagaggtcccgcacaatttgcaccgcctcatgaatagctcgccgaggatctctcacgctggactgcccaagaggcctcgcacgaccgctgctggggatgccaaaaatggagctgtagcacccggtggaggtaacggcgctggtgtttgtaacggttcttcagttcaggtgccgacggaggctggcggttggttgggtaatggatgctctgaggcgaaatctcatgagagaaccgttccattgctcaaccacgaggtctctggtgaagactcatccaggcacgccgcgaagagtagcggcggcattgctgacaacggagtcggggttgggaactcgagtgctggtcagaaagtgaaggtcaagaggaaggagctgctcctgaatcaaaataccggtaaagaaagagaagaaccagaagaggccacacaaacagagccctttgtacgttctatcacgctcgatgaatcgaaaccaaactcaaaaggaaaaggaaggtcaaacccaaatgggaatggaacagaaaggcttgcaggccctgcagatacgaagggccgtggcgaaggcgtgacgccaccgaagataacttccgtatggaagatcaagaagctgaagacatctcactgctcttccgacagcaaggtgctgcacaaggtctgcgtgccgcctcctacggcggctgagacctctgcttcggtgaaagctgattagcgaggcaccatagcgtatagttcggcggatgcatgtcttagctacgcttgttgtgaggtttttgtatgttcaagttgctactcggacgaggagggaaagcggagatatctgttaaattatcaggggattatgacaacaggtaagaagtcctatttgcctgtaactactagtcgaggtaattgctcttttcatgtacgagctagaaagaaattgttgtataattaatgttattaataagaccgaacatgactgatgtgtgagcctctgttttcgctgcttctgagtagattcccaactccagcatatgatgttagcatgcatgcttctgatttgg

SEQ ID NO: 7037 - DNA, 2139 bp, Zea Mays
gttccttccgtcgcaaatgtgctgtgtccctcttcatcctcctcctttctcagtcacatacacgggagctgtccacgccggccttcccccctaccaccacataaatccgcgcctactccgcaccatcttctctgctcaccacgcgcctccaagggcctcgcctcgcccgcccgccggtccaggatgggcgcacggatttagctgatcccgtcgctgctcgcgcccgatctcgcggcgccccgccccatcagctccgcgagatgatctgagccccgcgatctggtggagaaatggagccgccgccggatctgaacacccacctgccgccgcggaagcgcctgctcgccgggctcaggacggcagccaccgccgccgagccgctaccgccgccgcccgcccacgccgacctcgccgcccgcctccgcgagatggcgctcgccgccaacgcgtcggcgtcctcgcccgaggagacgatcgaggcggcgagggcggccgcgcaggccgccgcggacgccgccgttgctgcgcgcgccgtggccgccgagaaggccgccgtcgccgcgaaggctagggcggccgcgcgcgccgccatggagttcatcgactccttctctaccagggccggcgcgtccaggaacgggagcggcctccagttcaagatcaggtctaggaagaagcatgtccaggtcaagatgctgtacaggcccaatggaaccctagggccagcggaggctcccaagcctaggagacgcaagcagtcggatgaagaggtcccgcacaatttgcaccgcctcatgaatagctcgccgaggatctctcacgctggactgcccaagaggcctcgcacgaccgctgctggggatgccaaaaatggagctgtagcacccggtggaggtaacggcgctggtgtttgtaacggttcttcagttcaggtgccgacggaggctggcggttggttgggtaatggatgctctgaggcgaaatctcatgagagaaccgttccattgctcaaccacgaggtctctggtgaagactcatccaggcacgccgcgaagagtagcggcggcattgctgacaacggagtcggggttgggaactcgagtgctggtcagaaagtgaaggtcaagaggaaggagctgctcctgaatcaaaataccggtaaagaaagagaagaaccagaagaggccacacaaacagagccctttgtacgttctatcacgctcgatgaatcgaaaccaaactcaaaaggaaaaggaaggtcaaacccaaatgggaatggaacagaaaggcttgcaggccctgcagatacgaagggccgtggcgaaggcgtgacgccaccgaagataacttccgtatggaagatcaagaagctgaagacatctcactgctcttccgacagcaaggtgctgcacaaggtctgcgtgccgcctcctacggcggctgagacctctgcttcggtgaaagctgattagcgaggcaccatagcgtatagttcggcggatgcatgtcttagctacgcttgttgtgaggtttttgtatgttcaagttgctactcggacgaggagggaaagcggagatcgttttttataccgatcacaatattcatgggtggctgaacatggaagggccattggaattgcaagatgttagatcctatttgttttcacatgtgagtatattttgtgatggtgatgagtgatgactactgtcttgagggcgccctgcatgttgtggcacctgcaccatgtgtaaccagattaccagaattcagttgagtgtttgtctgtgtttgatgccagcaccatggtgtggctggagaagacaccatgcctagcttagctagtaccagaattcagttgacttgtgataacctggtggtgataggaaagttgggagcagcatgggtactgttgctggtatggcaagcatgagtgatggtggtggacctggtggccacaggtgcacctagattttttctctcttctgctgctgctgctggtggatctagcacagatgatgcatactcctacatgattgctactccctctgtctgaacaaaatgacgttctagttttctccaggaaattacagattatctcatgtttgacaaaaaaaacaagacaaattatcttatgtttg

SEQ ID NO: 7038 - DNA, 1496 bp, Zea Mays
cgtcgatttgttgaggtcccctcctcctgtaggtgtccaacttgactacagccacctctcggctccattctgcccctcctccttctcagtcggcagccaccatgccaccgcacgcaaccaaggatcccgtcgccgcgcctgcagctgcctggcctcgccgccgtgctgcgcggcgcgggcgccggcgagtgctggcacaagcacggcacgttcctggcgcacctgctggacgtgcaccggatcctccgcctgtggggcgcgcccgacgccgtggcgcgctgcggcctctaccactccgcctactccaactcctacgtcaacctggccatcttccagcctgacaccgggcgcgcccacgtcgctgccgtggtcggcggacccgcggagcgccttgtccacctcttctgcgtcgtccccaggcagcagctcgtccacgacgacctgctcttccactactccgaccaggacctcgccgacgacctagccagctccgaggagtcggtccgggacgcccggcgcggcgtgttcgacgacgcccagccgtggcggcgcaagatccagcgcctcctcccggcggacggcatcacggtcaagcacatcagtgagctgcactgcaggacaggggaggatgtgtcactgtccaggcgcatcgcagcgacgttcctcctgatgaccatagccgacttcagcgaccagctgttcgactggcaggaccgcctcttcgacaacagcaacggccgcctcgagttcagcggcaacacctggacctccctctggcccggcaccggcaagcctggcctctgggtcacctctagctcccgcatggccgcgctctacaccctcatcgtccgcgaggaggagatacacatcacgcagcgagcgcgagatacacatggccgggacgaggacatggacctggtgatccccccggtgttcaacggctgcacccgattgctcaacgccgaggaccagaaggtggcacgagacctctactgggaggcggtatgcggcgaggaggcgtcggactggctcaaggtggagcagctcctccagcagagcattgccaagaacccgtttgtgggggaaccacacctggtgcttgcccaggtgtaccttaacatggagaggtacggcgaggcgcagatgcaggcagaggaaggtctgaggctgttgctggagtggggcagcagctgggacaagaggatgccatgggagggctgggtgtcctggggcagggcgatgctgaccaaggccaccgacaaggattggccgcatacctcattcgggatcctcagccttgggcttgtcaaatgatacatatattctcaccgtatgcatatgtatgtatttgtacgaaataataaacccaaggccagggggtcaagccaaacaataatttgatgtacttggaattcagatgtgttatcaaacacaacttgtctgccagtcctcttcagtcatagttaagttcatctgacatttaatttgggttgttc

SEQ ID NO: 7039 - DNA, 381 bp, Zea Mays
aggtacttggggtgaagaaaagagaagtgtctataggctcgggttctaaatcgagggaaaaggttgtgctggtacaagatgcgactcttgaaggtgtctacgatgctctgaagaagtcttgtaattgtgcatgagcttgcaaacacaagttagaaaatgaagtgagacgaggctgaattgttcgttcttgctctaagctgtcagaataataatgcatatatgtcaatgcgatgatggtatagggaatgcagatgcaccagacattactgaaccttggtttgtatggctatctgcattgcacccgtggagacacgtacgtgctgacacgttgctcgagtgcaaactcatccgaaccgaacgtgcctacagcacttgcgtacg

SEQ ID NO: 7040 - DNA, 961 bp, Zea Mays
atgggaccacaacgaaacgaattctaactgggtttattaggtggttcgagtagcactcaagttttgagtttgattgcctataggagcgaatttcaggttgatccctttcttataccccattgtgtgggagcttccagcaaagggtggttgaggttaatgttaaggtggaaagtgcaggcacacataacatgcacaataatgatttctatgctaaagagaagttgctcaaatcaatgcgtgattgtgatccttcgtctttgcgccattggattttccaggccccattgcagcactacactgcgctaatggaccttcaggactattctgagaatggaactgtaaccgtggtatatcgagtgatacttaaaggaactgatggagaggcatatagagatgccacgggcacaacacagttccatgaggggcgcagggaagatgctgttgcagccgcagaggaagctgcattcagcaaagcttgcgcatggttcggttttggcctgtatctgtaccaccaggatgaatctcattacgacgaccacttccattgaggctcaatctgcaaaagagttgatcataagttgtaacatgcgttggatatgcccctagaaaacttcgtatctagaatcaatttttggtctttgcgtagtatcatactcataacacaaagaagtgaacctatgtagatgctatttgaaacctttttattaatattataattcttattaatattattgtataattactttttgagtggagagaaggaaggccttttgcagctaccaagtgacaaaggccttttgcaactaccaaatgacaaagccctcctctcttatccatcattctgcccacttgttgacaaatatgtagcggtatatatatctttgatccttgtcatttgttcggggtcgatttatgttaacctgggtggctgtaataaatatttgtcggccttgtgttttgt

SEQ ID NO: 7041 - DNA, 1102 bp, Zea Mays
actcttcatgacagctacccaggaaaggaaaagattagaatcgcaaggccagattctcagggtgatatgcacttccatgggcacccgacgacattaaattcacaagaataagaaaccccctccaccttaagggttcaagtaggagccaacgaagaagcaagccccatcgtcatcatggaaggaggaggccatcccacccacgctgacgaggagccaccgaaggagaaggccccaccacccaaggagaaagccgcccaaggaaaccttttcatttcaggtggttgaggttaatgttaaggtggaaagtgcaggcacacataacatgcacaataatgatttctatgctaaagagaagttgctcaaatcaatgcgtgattgtgatccttcgtctttgcgccattggattttgtggcaacggaagttccaggccccattgcagcactacactgcgctaatggaccttcaggactattctgagaatggaactgtaaccgtggtatatcgagtgatacttaaaggaactgatggagagagatgccacgggcacaacacagttccatgaggggcgcagggaagatgctgttgcagccgcagaggaagctgcattcagcaaagcttgcgcatggttcggttttggcctgtatctgtaccaccaggatgaatctcattacgacgaccacttccattgaggctcaatctgcaaaagagttgatcataagttgtaacatgcgttggatatgcccctagaaaacttcgtatctagaatcaatttttggtctttgcgtagtatcatactcataacacaaagaagtgaacctatgtagatgctatttgaaacctttttattaatattataattcttattaatattattgtataattactttttgagtggagagaaggaaggccttttgcagctaccaagtgacaaaggccttttgcaactaccaaatgacaaagccctcctctcttatccatcattctgcccacttgttgacaaatatgtagcggtatatatatctttgatccttgtcatttgttcggggtcgatttatgttaacctgggtggctgtaataaatatttgtcggccttgtgttttgt

SEQ ID NO: 7042 - DNA, 4953 bp, Zea Mays
aggtttttgtcccgcgagaatggaatctctatttgtaggcttgtctcataacaagccaaaaaaatcggtggcaaccgcaatagttcgagaagactatatttgcacgcaaggtgatcttgctctcatcgattttatcaaggaaatcccttgtgaaccaagggtagaagtcgttcttattgatgatgcctttgttgaaaggaagtggatggagtgtttatttcagccgagcgcatatttaggtgacgaggtgtttattccgataaacatccgagagacgcattggtatcttgctgtgatccatgcaagaaatatggagatacaagtgctcgattcacttggtacttcacaagaccgcaaagacctcactgactttattaaaggactgcaaagacaaatagatatgatatctcaacgtaaggagttaaaagaccacaggtggccagacctccaagttgcttcttggccgctcagagaaatagacatgggatatgcaaagcagacagatagctcttcatgtggcctctttcttttgaactatatcgaatactggacaggggatgaactgtctgacagttttacccaggatgacatgtcacactttaggaaaaaaatggctgctatattactatcttcagacctgaataagagaagggggtgtctgttatacaaaaatgaaaaagaagttgactctggaagcccatctgatgttgagatattagaaaacccaacagattctaataagaggaaactactccacgtgcttgatgatagcgaagtagtgtttgaagatgaggaaggccctattactcaagcagacttgcaaaggtggtttgttgatgattgggataaaagagctcctgtaaaagtctctaacgatggttgcaccagtgactttttaatggttggtctttccacaaaggacatgccagtgaccaaagccgattcaatagatgttttatgtgattatatcatggcaatagaagacgatgcgacactagagtaagtgctcattgatttatttattttatgtatatcgactacttagattcttgatatagagtttcgtcatgctacattataggagaacatgggtgcgaagtttcaatccttttaagatagaaatatctgtcaaagacctgcaaaacatattaacgacaactcaagatatgattctaagatgttttgatatggctgttcggctgcttgccaataaagagtcacgtaaaccgaaagaagaaatcataaataatagaaagcattatatggacatgcgtttttggagaatggttggttttggtaaacttccaaagtaccatcaggatcctacaacagaagagttggctaaaacactagattgttggccatcaatgaattattatatcacgggttgtagatatgttctcatgccatggaaattcaatggatgtcacgcccttttcgtaatagatcatgttaaaaagcatgtgacttttatcgattttacaccgactcaagattggtgtaaacacatgccatacaagaggtttaataccagctacctcgttctacaagctatggccatgtgggggaatgacagacgactgaaatttgttggggataacattggggtattcgttgatcaaaatggtaaacttattcaagacggcagaattatttggttagacacaccagcttctgttgttatacataaaccatatgctgtggcccgcctgccacgacatgttgagttttatgcaaataacgtcacaatagattatggtgaatttgagttgtctattctgcgcgctaggctcctcctccagctcctggtcgtgatggtggtggttgctccattcttggaggaattgggtccaccattgctcaagtgtctcaacgactatggcagtgagatcagcaagtgccagttctaccttgacatgttgaacgagtgccgccgtggtggtgtctgcctgagcttttcctccaattgggattattcatggcatgagcaggagttttgtaatgtgggtgatgatgcttgtcttattctgtgggatgctcgaactggcattgccccacctgttaagctagcgggtaccaacccggcggcgctggaaaggaaagcctgccgtcctgtcctctgtctccttttgctgccgcctgccggcctggaggaagggagggagggaggtgttcatctgcgcggcggcttcggtgtctggaggggctccgaggggaggcggggagccatggcgcggaagcacggctggcagctcccagcccacaccctgcagatcgttgcaattacagttttcttccttctgctggttgcgttttatgtcttctttgctccgtttttgggaaagcaagtactcgagtatattgccattggcgtttatactcctgtggcacttgcagttttcatcctttatattcgatgcacaagtataaaccctgcggatcctgggatcatgtcaaagtttgaggatggccttattaagataccaaccaatggctctggaatagaaggcatgaatttgccccagaaagcaaacaatgctacaggaacaaactccccaacgtctacttgcagaagttctttagatggacattctaatcaaagaggttcatccataggggaggcaaacatgaatctaggatcacaattgccaaagaaaagatcaagctgttggttgctaggtgggcttctgtgtgctatatttgtcaaggaggattgccgaaaaactgatgactcagagttgcaagcaaatggtgaggaggctctgttttgcacattatgtaatgctgaggttggcaaattcagcaaacactgcagaagttgtgacaagtgtgtggatggatttgatcatcattgtcggtggctaaataactgtgttgggcggaagaattatttcacattccttgctctgatggcaatcagtcttatctggcttgcaattgaatttggagcgggaattgctgttattgtactctgttttgtcgataagaatgcatcacgaaatatccaagacaagttggggaatggcttgactcgtgctccgtttgctgttatcgtgggcatatttaccttactttcattggtggcatgcatacctttgggcgaacttttcttcttccacataatattgataagaaagggaattacaacttatgattatgtcgttgcaatgagagctatgagtgaggcagctccagaggatgaggaaggagcaaatatcatttactccccatcaaattcagcaacaactgggttcagtgtaggaagttcacttggtcttcaccacaaaggtgcttggtgtacacctccaaggatatttatcgatcaggatgaaatgatcccacatttggagcctggaatggtgccttcaactgtggaccctgatgctgctggatatgctgaaagagcaaacagagctaagaaggcagtcaaaatcagtgctcgcagcctcgcaaagctcgataaaaatgaggtaatgaaagctgctgcaaaagctcgggcatcatcctcggttctgcgaccaatagatgcccgtcgtggtcatgaagctgatgtcatctccagcgacaatgccagtgtcaggagcggcatgagtggtgactacagcggcacaaaggaatcaaacatcgagatgaaactttctccacttcagaactcatacccccaaagccttgcaagccaggatgaatatgataccggcacaccaaccgcaagcagtctaagcagtccggtctacatccacaagcttgcctctcactctcagttcagtgcagcgcctcgccctgcgcctcctgaaagatttgtgccagctatggtacggccacccgttcctaccacacaaataaccaacccagggataccgcggccagctgttcccacaacacaaataaccaacccgatgttccaatcagccacgtcttatgttcgagagaaccgaagggcctctgtcatctgggatcaagaggctggtcggtacgtgtcagttcctgcacagacaagaatgggaagtggagtcgatctgccagcaagaaacccacggttcttgacgaacccaagtggcgagccaagcagccatgtgaggagcgtggtgcctggcaatgcctcgtcctcagcaatgccatcagggcagccttcagagaggttgacatattctgggcagtcaatattcttcggtggccccatgctgagcacccctggcgtgggcgccaataggaatgaggcagacgcaagagcacgccccgagggaagcagagatcctaatgccctgtgtgagaaagcgaggactggctctggctcctcgccaatatttgctcctggggcgttccagaggaacccaccctttgacaaatgacttgctcctgctcatgaagtttatctgaagtgccgttacgctggaataacctcagcctgaagagttgacagatagtttaggttgctcttttgggcttgccagaaggacggacaaaggcagccgtaggaatgaggctgctgccggctgtggcgataacgaaaaaaccacaaatatcgctcggagccagtgctgactttttccagtgttgggagagcgatggagtgactggtgtacactgtcatcttgttaggaattcatcagatacttgatgcgcgacagatagaaagagctctaatttctggcgatgtcaaacgctgatctgcagctgactttgtaggcgtcgattgcggtcactgtatgtgcgccatgggatactattcgacatgtgtaaaatgttcgttggggtgcactttcggacagtactcgtgcgtagtacttgctcgctagtagtaacaggtcttgagtttatccttgtagcagcatccttgtatgttgtgaaaccatctctgcgttttgctatgttgttcgctgttttgtcggcctttgcgtagcaagtagctgcgtggaggtttcccgccggcgcggcggacgcacacgatatggg

SEQ ID NO: 7043 - DNA, 2676 bp, Zea Mays
aacgcaattgctaataatgcaagtggggtcacggcaaaggtgtggcgcgtgcgtggacctcgccctcatctcgtctcctccggcggtccggcctgtccaataattctagtattccaccgccgcacacctcctgtcttccttcaccttcgcgctccgccgccgccgtcgattcgtgctgctctcacccctaacctgtccaacatcgccggggagggaagcagcagaagaagctccccttacctccggctatcgcctgaggataaagtggggtctgtaggggagtcttaggggggagcaaaagggataggatagggagagatgaagcaatcaatttcttcgtccgccttcgcccctgcttacgtccccgctactaaccctagttatgaggttgaacgccttcagaagcttctctactagattagtgtaaatagtagacttgttcgagtttagcttggctggaagaattagtctctggtccgtgtttatatctgctagcaataatggctgcgatgaacggagaggtattgggtgaatgtggaaggaacataaatagtctcaagagaaagcgggagagccccgctgcatatgctgctggcgtattctgcacctctgaattgcatcagcatactgtcaatgattctgctgttaggtttcatcttgataaagaccgtaaggcaaagatcgtgtgccacttcaacaagcaggttttgcagagctataagaaattcatgagtagtgcaccacctaagcgtattttgcttcgccaaggtgctgtctggaaagactttccagaaaagattgtcaaattggcccaagctgacttcagggcaaaaaagatgatcacagaaacaggatatcagaaccagctatttttgctggattttgcccatatgacattcatagacacaaagacaggttttcagaggccaattgcttggatcgatgaaaatgaaaagtgctacttcccggaatcatttatacaagatcagaagttatttatgaagaaagattttggcaacggaaatcatgagtacattagtgaagagcgaaatgggacacgagaaacgaatcaccagtttggagcatcagaaagttctgctgaaagctcaaactttgagtcaagtattggagatgtttctagtcctaagagagctagggctgaaaagaatttcattgtaaaaaaatattgtgatatgggagaagctattggagaaaatgagtcatgcactttgttgcctacagcctgtaacctactaccacaccaagctaatctgggtgaggtatcccgtgctcagcgcactattgaagccgtggagaagctgttgctgcaggggatgggttcagttattgaatccaaggacattattggaatctacaggactccattattggatgaccacggacaagtccgttaccatattcaccaaaagcaagtacaggttaccggatgtcatcgtggaaacgcaaatgtccgttatgcatggcttccttgctccaaaagcactgtgcatgtaatgatgctgaatggtgttttgcaagttgataagcctcccaataagtgtgcagcctatggagagggcactctccttacaccagcaaatcgttcggatgcctgtgtgaaatactctgatgttgatgaaaatggcattgtccgtatgatgttgtgccgtgtaataatggggaacgtagaaatagttcaccctggatctaagcagtgccaacctagtaataagtattttgatagtggagtagacgaccttaaaaatccacggcattacgttgtgtgggatatgaatctgaatagtcatatctattctgagtttgtagtcactgtcaaattgccttctaaaaccaaagattcctttgtatcgcaagaaaactgtcagaattcgtctgatctatcactggtgttgaactctagttcacctgattgtatttcacaggagatgaacctggaggcacctccagcattgggaggtggatgtgcagcccccatgctaggagattcgatggaaaaggctccaagctcaccttggatgcctttctccatgctgtttgcagcgatctctaccaaagtgtctcctgagaatatggacgtgattattggttgctatgaagagtttaagagcaagaaaataagccgaggtgaactagtgaagaagctgaggcatgtagttggtgatagagtgctaatatcgacgataatgcgtctccaagataagttacctccagtggataagcgtgaggaaccagacacatcggcgtccaaggtggtggcggaaccatgagatgggtgtcaggaggtgggcgaggaatgcagaaagggaggaaccagccgacttgacatagaaaaccctgtgggaagcagcaactatgaagcctcttgcatcagtcttgtgcatggaggctgctgtttgttctctgtatcgtaggtgtctacgtttgcgaggaaattgtatccggtgtttctctttcttcaaattaaaccacgcacatgcagctgccgtactttttggaccattgaagtgtttcgtccgtgaaaaaggctccttttaccttcccgtttgccttcctaagagcatctccagtagttttgtaaaataaaactccctaaaagacgatgtagagagttgctaaataataatagagagtaaaaaattgcatgttcttcaatag

SEQ ID NO: 7044 - DNA, 4496 bp, Zea Mays
gttcggtgcactggttctgtgggtggttcatggccccggcaaccacggggtgccggtggtaccatggcagggcgtgaaattctgccgttctagtcgttcgtggtgtggcggtggcgccgccttcgggcttcatccgggatctatattgttatacattgccgctttgattgctgatcttcttctgctgccactacttggatggagaatgccatcaagttaaaggttacaatttgaactgctggcaatggggcctcattgttccttcatcttgatcctactgctatgcttcacccccagctctgctttgactggacataatgatataaatacattgttcaaactgagggacatggtcactgaagggaagggatttctccgtgactggtttgattcagaaaaagccccttgcagttggtcaggtataacttgtgtggaacatgctgtagtggatatagacttgtcatctgtgccaatttatgccccgttcccgttatgtgtcgggtcattccaatcactggctcgtctcaacttcagtggttgtgggttttctggcgagcttccggatgccttggggagcttgcacaatcttgagtaccttgatttgagccataaccagcttacaggggcccttcctgtttcattgtatggactgaagtcattgaaagaagtagtgcttgacaataatttcttttctggtcaattgagccctgctattgcacagcttgagtacctcaagaagttttctgtatcctcaaattctatctctggtgccattcctccagagttgggcagtttgcagaatctggagttcctggaccttcacatgaacgcacttaacgggtcgataccatcagctttgggtaatctgtctcagctcttgcaccttgatgctagccagaataatatctgcggctcgatatttccaggaataactgcaatggcaaacctagttacagttgatctctcttcaaatgctttggtggggccactacctagggagattggtcagctacggaatgctcaactgataatattgggacataatggtttcaatggaagcattccagaagagatcggtgaactaaagctgctggaagagctcgatgtccctggatgcaagctcacaggcatcccttggacagttggtgatcttagaagtttgagaaagcttgatatttcagggaatgatttcaatactgaacttccggcatctattggcaagctgggaaatctgactcgtctatatgcaaggagtgctgggcttactgggaatattccgagagaacttggtaactgcaagaagcttgtctttgttgatctcaatggcaactccttttctggccctatacctggagaacttgcaggtttagaagccattgtcacattagatgtgcaagggaacaatctatctggtcccattccagagtggatccggaattggacgaaccttcgttcaatatatctggcgcagaacatgttcgatggacccctgccagtactgccattgcagcatctagttattttttctgcagaaaccaacatgctatcaggttctattcctgatgagatctgtcaggccaaatcactgcagtcactcttgttgcacaacaacaatctgactgggaatatcatggaggcatttaaagggtgcaagaaccttacggaacttaacctgcaaggaaaccatcttcatggtgagataccacattacttgtctgagctaccactagtaacagtggaattggcccaaaacaacttcacaggaaagctgccagagaaattgtgggaatcatcaactattctggagatcacactcagctacaatcagcttactggccctatacctgaaagcatcggtagactctccagtttgcagaggctacagatcgacagtaactacttagaagggcctattccgcggtcaatcggctctctaaggaatctgacaaatctctctctatggggcaataggctgtctgggaacattccacttgagctcttcaactgcagaaaccttgtcaccttggatctaagttctaacaatttgtctggccacatcccgagtgccatatcacacttgacatttctcaacagcttgaacttgtccaataaccagctgtccagtgctatacctgctgagatctgtgttggatttgggagtgcagctcaccctgactcagagtttatccagcatcatggtttgcttgatctttcatacaacagattgactggtcatataccagcagcgatcaagaattgtgttatggttacagtcctcaacctccaaggaaatatgctaagtggtgccattccaccagagctttcagaactgcctaatgttacatccatctatctttctcataacacattagttggccccatacttccttggtctgtaccgtcggttcaactgcagggcctttttctctctaataaccacttaagtggctccattcctgctgagataggtcaaatacttcccaaaatcgaaaagctagacttatccagtaatgcacttactggaacactacccgactctttactctgcatcaattacttaacctatctggatatcagcaataacagcctctctggacaaatcccattgtcttgtcctaaagaaaaagaggcatcgagctccctgatattgttcaatgggagcagtaaccatttctcagggaacctagatgagtctatttcaaacttcacacaactgtcttttcttgatatccacaacaacagcctcactggaagtttgcccttctcactttctgatctcagttatttaaactatcttgacctctcaagcaatgacttcaatggccccgccccttgtggtatctgcaatatagttggcctcacatttgccgacttctctggtaatcacattggcatgagcggcttagtggattgtgctgcagaaggcttttgtactggaaagggttttgatcggaaggcacttaattcatctgatagagttcgaagagcagcaatcatttgtgttagtatactcactgttgtcattgtcttagtttttctggtggtttatctgaaacggaggctattgagaagcagacccttggctcttgtacctgtcagcaaggccaaggctaccattgaaccaacctcaagtgatgagctcctagggaagaagtttcgagaacccttgagtatcaatcttgcaacatttgagcatgcacttctgagggtcaccgcagatgatatccagaaagccacggagaatttcagtaaggtgcacattattggggatggtgggtttggcactgtctacagggcagcacttcctgaaggtcggagagtagcgatcaaaaggcttcatggtggccatcagttccaaggtgatcgtgaattcctggccgaaatggagacaattggaaaggtgaaacatcctaaccttgttcctctacttggctactgtgtatgtggtgatgaaaggttcctgatatacgagtacatggaaaatgggagccttgagatgtggctcaggaaccgggctgatgccatcgaaacacttggatggccagaccgcctgaagatatgtattggttctgcccgcggtctttcgttcctgcatcacggttttgtgccccatatcatccaccgtgacatgaagtcaagcaacattctattggacgagaactttgagccaagggtctctgattttggccttgcaaggataatcagtgcatgcgagactcatgtcagcactgacattgctggtacatttggctacatacctccagagtatgccctgacaatgaagtcctctacaaaaggcgacgtctacagctttggcgttgtcatgcttgagctgctcactggacggccacctacagggcaagaggaaggggaagggggtggaaaccttgtaggctgggtgcgatggatgatggcacatggcaaggaaggtgagctgtttgatccttgtttgcctgtctcaagcgtgtggcgggtacagatggcccatgtgctcgccattgcccgagactgcactgtggacgagccatggaagaggccaactatgctggaggtggtgaagggcctcaagatggccgaaacgatagaatgtggacctctggttgtgacagtcaccaaggacatgtaatgctgacggcatcaacgctgatgtatggaactgggtgttcagggaatgttgttcttgtgtcgatataataatgtaggctccttgttgctgtagctgtactggtgactgtaatgagaaactaacgctgctcatgttcaggctgtagttattgatgtaaccttttcatctggacccaagcaagcacttatgatatggcagggatcgtttaagcacaaaagatgcagtgactaggtttagctcttgagattttgcattctactacattttctactttgttgttctactgctcatggtcctccccagattcaacccatgccagtttggcctgattactcagctatccttgctgtcttaatggggctataccgct

SEQ ID NO: 7045 - DNA, 3715 bp, Zea Mays
caactaatttggttaaggtactacttaacccatttaggacctaggccttctgatctttatgggaagtttacatggagaattgataatttctcccaaatcaacaagagagagctaagaagtaattcctttgatgttggtggatttaagtggtatatcttaatttacccacaaggatgtgatgtatgcaatcacctctcactctttctttgtgttgccaaccatgataagctactcccaggatggagtcactttgcgcaatttacaatagctgtaattaatagagaccctaagaaatctaagtattctgatacactgcatcggttttggaagaaagagcatgattgggggtggaaaaagtttatggaactgtcaaaattacatgatggctttattgttgaggatgttcttaccatcaaagcccaagttcaagttatcagggagaagacagaccgtccatttcgttgccttgatggccattaccgaagggaactaattagggtgtatctatcaaatgttgaacaagtttgccggcgctttattgatgaaagaagaagcaagcttagcaggttgattgaggataaactggggtggtccagtttcagtggattctggctagcaatggatccaagtgtgcgtcgacacatgacaagggaaaagactgaaactatattgaaagttatagtgaaacaattctttatagagaaagaagttacatcaaccttggtaattgactctctatatagtggacttaaggcacttgaataccagagcaagaacaaaaaggcgatacctaaactaacagagacagatgctcggagcactccaatggtacttattgatcaggacatgtttgttttggctgatgatgtaatatttctgcttgaaagagctgcattggacacactgccacaccaacatttgcccacaaaagatgataaaagttcgcaaaaccgcacaaaggatggcaactcaggtcaggagttcagcaaagattctattgagcgtgatgatagacgacttatagagctaggctggaagacattggagcttttttccttagctcatatattcagccgaatacaagtggcacatcaagaggctgtggctttgaagcgccaagaggaacttattcgtgaagaagaagaagctgggctagctgaaattgaactcaaggcaaagcgtagtgccgctgaaaaggaaaaacgtgccaagaaaaaacaggcaaaacagaagaaaaatagtcgaaaaggtaataaggggaaaagtggcaagtccaacatcaataaggaaataattatggaccacagtcattcagatgatagaatattggatgatttttgtggacaaattgaagagatgcccttaaatgctgacaaccctgaagaagtttctgatatatctgacagtagagacgataattcagacatgcttcatgttgatattgaagaccgtgaatctagccctgttaattgggagatagatgcttcagaaactcaaactactattcctggaagtagtgaggtgcaaaatgaccatgcaggaaagaggacctctactgtggatgatagctcatcgtcttgttcatctgactcagtgccttcagttactgtgaatggatcatataaaggaggtgcctggacaagcgtcagatcctcatccaataggggaaacaacaggaggaataaggatactgaagcacgggcaggatttgcacaaggtggatcatgttcatcgcataatggttttataggctctggcagcaatgcctctggccactcaaaggaaagacacgaacctgaggatgataaagttgtcttgcagaggaagcaacatgcacaatggaacattgatatcattagctcctccaagtcaagaatggcagagtcttcattttcttctgtgagctctattaagaagcaacctcaaccaaattttttgctagaaagcaccaatagtttgaatcaccgtggaagcgaagcttctggcactgtgacttccactacaacagcgggtgcctcttcaaccccggccactcagttagttttgaataaaggacctgtatccagtgctgcaacccagaatgagaagccactacctctgcaggtgcttgtaccatccaaatctgaagtgcagaagcaggcttccctaactggcagtgcaactaccgaggccgtttcagtatcaaggcccttgactgccccacaagtccctgcagcaaaacaaagtgcaccagtcacttcaacagctcagaatgcaccttttctttctcgttcaatgagtgctgttgggcggttggggaatgaaccatctgccaatgctcctagtttcgttccccgttcacgaacatatcgcaatgccatgatggagaaaagttctggtggtggaagctgtttcacacatcagcaaggttcatcggagcaagcagttgcaccatggcaatcgatgtttacatcgcaacctttcattcggccatcagagaccttgtcttggaaagaggaaacattattgagatctgggtttacatttggaactgtgaagcccgagtcactgaacccatatcagggcagagaagagaactcacagcaagcgagcagcaacagcagtgattgtgcgccatcgagttcaaacatcagaagcgagatcgagaagctgaatttgagcggaagaccacgaagcaagcaactgttgtcagaaatttcgaccagatttactccctatcagccacaaggcttggtcgctgatgagttcccacacctagacatcatcaacgacttgctggatgaggagcagagtgacagaagaagggttcttcaacctgattttgttcaacagtcctatatgcctcatggtgccagcacacctgattatggtgagccatacttgtttgaccagtccgagcaatacttcgatgaggagcctccaaggttttatagtccattgagcagtgctcctcggaggttgagggacctgagctattcgcactttgatctcccatcacactccagcagcagccagtttgatgatctgatgatgagtcagtggccatacagccgcactgacatctccatgcctagttttgggtcagacacaagtggctacccctatcaggtgtgggatctcgcgaatggatcaagcaggtacccatcgtatcgccctgccaatgggcattgagagttttaatgattgcattgacaataatgtgtggttaagtccatgatgttcgcttctgagctgagtgtaattgtaatagttccccatagcagtgatataaagaattgttcctcagtttccttgttcaatcaatagttatatgacccccctcctccctcttttctctagttcagttttgcccagtggtaataaatctaagtcggctaaaatgatctggctaatcgtgttgtgaaatgtgtatgatgcaagcaaatggtagggtgtttttaagccatgccagtgcttcagctgatactacattaaactgggagtattctttgtttctccctctgacgagtgacgacgtgttattgatcgtctcatgttctctttgtatatttcagagtaaattctggatatagcccatggacataaactaattatttgatgcacactctggacctttggggtatgttttattccattgatggatatataagctataaagtaaaatgcgacaggatcaactgcgtgttggggcagaaaaaacaatcactaaggttag

SEQ ID NO: 7046 - DNA, 4084 bp, Zea Mays
cgcagccgacgacgacgagcggaagggaagagggtcaactctcgatctccgcacggtccgtggggacgcacgcacggcgcgcgtggcggtctacccggtcgggggtcggatcctagctgaatcggggagatttgccggccaggaaggaaaacgacaagtgaaacgaagctgtacgtgttcaggtgatcggataatggctagtgatcggataatggttgacactttgaccgaggacaatggtggtgatgctagatcctcatcatctgaagagatgccaagtgaccaacagagtcatcctggggattctttagctgagtggaggtcaagtgagcaagttgagaatggaacaccatccacttcaccagcatactcagacaatgatgatgatgactgtggacctaggccttctgatctttatgggaagtttacatggagaattgataatttctcccaaatcaacaagagagagctaagaagtaattcctttgatgttggtggatttaagtggtatatcttaatttacccacaaggatgtgatgtatgcaatcacctctcactctttctttgtgttgccaaccatgataagctactcccaggatggagtcactttgcgcaatttacaatagctgtaattaatagagaccctaagaaatctaagtattctgatacactgcatcggttttggaagaaagagcatgattgggggtggaaaaagtttatggaactgtcaaaattacatgatggctttattgttgaggatgttcttaccatcaaagcccaagttcaagttatcagggagaagacagaccgtccatttcgttgccttgatggccattaccgaagggaactaattagggtgtatctatcaaatgttgaacaagtttgccggcgctttattgatgaaagaagaagcaagcttagcaggttgattgaggataaactggggtggtccagtttcagtggattctggctagcaatggatccaagtgtgcgtcgacacatgacaagggaaaagactgaaactatattgaaagttatagtgaaacaattctttatagagaaagaagttacatcaaccttggtaattgactctctatatagtggacttaaggcacttgaataccagagcaagaacaaaaaggcgatacctaaactaacagagacagatgctcggagcactccaatggtacttattgatcaggacatgtttgttttggctgatgatgtaatatttctgcttgaaagagctgcattggacacactgccacaccaacatttgcccacaaaagatgataaaagttcgcaaaaccgcacaaaggatggcaactcaggtcaggagttcagcaaagattctattgagcgtgatgatagacgacttatagagctaggctggaagacattggagcttttttccttagctcatatattcagtcttgaaacagccgaatacaagtggcacatcaagaggctgtggctttgaagcgccaagaggaacttattcgtgaagaagaagaagctgggctagctgaaattgaactcaaggcaaagcgtagtgccgctgaaaaggaaaaacgtgccaagaaaaaacaggcaaaacagaagaaaaatagtcgaaaaggtaataaggggaaaagtggcaagtccaacatcaataaggaaataattatggaccacagtcattcagatgatagaatattggatgatttttgtggacaaattgaagagatgcccttaaatgctgacaaccctgaagaagtttctgatatatctgacagtagagacgataattcagacatgcttcatgttgatattgaagaccgtgaatctagccctgttaattgggagatagatgcttcagaaactcaaactactattcctggaagtagtgaggtgcaaaatgaccatgcaggaaagaggacctctactgtggatgatagctcatcgtcttgttcatctgactcagtgccttcagttactgtgaatggatcatataaaggaggtgcctggacaagcgtcagatcctcatccaataggggaaacaacaggaggaataaggatactgaagcacgggcaggatttgcacaaggtggatcatgttcatcgcataatggttttataggctctggcagcaatgcctctggccactcaaaggaaagacacgaacctgaggatgataaagttgtcttgcagaggaagcaacatgcacaatggaacattgatatcattagctcctccaagtcaagaatggcagagtcttcattttcttctgtgagctctattaagaagcaacctcaaccaaattttttgctagaaagcaccaatagtttgaatcaccgtggaagcgaagcttctggcactgtgacttccactacaacagcgggtgcctcttcaaccccggccactcagttagttttgaataaaggacctgtatccagtgctgcaacccagaatgagaagccactacctctgcaggtgcttgtaccatccaaatctgaagtgcagaagcaggcttccctaactggcagtgcaactaccgaggccgtttcagtatcaaggcccttgactgccccacaagtccctgcagcaaaacaaagtgcaccagtcacttcaacagctcagaatgcaccttttctttctcgttcaatgagtgctgttgggcggttggggaatgaaccatctgccaatgctcctagtttcgttccccgttcacgaacatatcgcaatgccatgatggagaaaagttctggtggtggaagctgtttcacacatcagcaaggttcatcggagcaagcagttgcaccatggcaatcgatgtttacatcgcaacctttcattcggccatcagagaccttgtcttggaaagaggaaacattattgagatctgggtttacatttggaactgtgaagcccgagtcactgaacccatatcagggcagagaagagaactcacagcaagcgagcagcaacagcagtgattgtgcgccatcgagttcaaacatcagaagcgagatcgagaagctgaatttgagcggaagaccacgaagcaagcaactgttgtcagaaatttcgaccagatttactccctatcagccacaaggcttggtcgctgatgagttcccacacctagacatcatcaacgacttgctggatgaggagcagagtgacagaagaagggttcttcaacctgattttgttcaacagtcctatatgcctcatggtgccagcacacctgattatggtgagccatacttgtttgaccagtccgagcaatacttcgatgaggagcctccaaggttttatagtccattgagcagtgctcctcggaggttgagggacctgagctattcgcactttgatctcccatcacactccagcagcagccagtttgatgatctgatgatgagtcagtggccatacagccgcactgacatctccatgcctagttttgggtcagacacaagtggctacccctatcaggtgtgggatctcgcgaatggatcaagcaggtacccatcgtatcgccctgccaatgggcattgagagttttaatgattgcattgacaataatgtgtggttaagtccatgatgttcgcttctgagctgagtgtaattgtaatagttccccatagcagtgatataaagaattgttcctcagtttccttgttcaatcaatagttatatgacccccctcctccctcttttctctagttcagttttgcccagtggtaataaatctaagtcggctaaaatgatctggctaatcgtgttgtgaaatgtgtatgatgcaagcaaatggtagggtgtttttaagccatgccagtgcttcagctgatactacattaaactgggagtattctttgtttctccctctgacgagtgacgacgtgttattgatcgtctcatgttctctttgtatatttcagagtaaattctggatatagcccatggacataaactaattatttgatgcacactctggacctttggggtatgttttattccattgatggatatataagctataaagtaaaatgcgacaggatcaactgcgtgttggggcagaaaaaacaatcactaaggttag

SEQ ID NO: 7047 - DNA, 4087 bp, Zea Mays
caacaggcatcctcccccgacttccatttcgccaccccctacccgactccactgggcgctcgcgctcgcgcacgcgcacgcgcacgccgcagcccccctccgcagccgacgacgacgagcggaagggaagagggtcaactctcgatctccgcacggtccgtggggacgcacgcacggcgcgcgtggcggtctacccggtcgggggtcggatcctagctgaatcggggagatttgccggccaggaaggaaaacgacaagtgaaacgaagctgtacgtgttcaggtgatcggataatggctagtgatcggataatggttgacactttgaccgaggacaatggtggtgatgctagatcctcatcatctgaagagatgccaagtgaccaacagagtcatcctggggattctttagctgagtggaggtcaagtgagcaagttgagaatggaacaccatccacttcaccagcatactcagacaatgatgatgatgactgtggacctaggccttctgatctttatgggaagtttacatggagaattgataatttctcccaaatcaacaagagagagctaagaagtaattcctttgatgttggtggatttaagtggtatatcttaatttacccacaaggatgtgatgtatgcaatcacctctcactctttctttgtgttgccaaccatgataagctactcccaggatggagtcactttgcgcaatttacaatagctgtaattaatagagaccctaagaaatctaagtattctgatacactgcatcggttttggaagaaagagcatgattgggggtggaaaaagtttatggaactgtcaaaattacatgatggctttattgttgaggatgttcttaccatcaaagcccaagttcaagttatcagtttgccggcgctttattgatgaaagaagaagcaagcttagcaggttgattgaggataaactggggtggtccagtttcagtggattctggctagcaatggatccaagtgtgcgtcgacacatgacaagggaaaagactgaaactatattgaaagttatagtgaaacaattctttatagagaaagaagttacatcaaccttggtaattgactctctatatagtggacttaaggcacttgaataccagagcaagaacaaaaaggcgatacctaaactaacagagacagatgctcggagcactccaatggtacttattgatcaggacatgtttgttttggctgatgatgtaatatttctgcttgaaagagctgcattggacacactgccacaccaacatttgcccacaaaagatgataaaagttcgcaaaaccgcacaaaggatggcaactcaggtcaggagttcagcaaagattctattgagcgtgatgatagacgacttatagagctaggctggaagacattggagcttttttccttagctcatatattcagccgaatacaagtggcacatcaagaggctgtggctttgaagcgccaagaggaacttattcgtgaagaagaagaagctgggctagctgaaattgaactcaaggcaaagcgtagtgccgctgaaaaggaaaaacgtgccaagaaaaaacaggcaaaacagaagaaaaatagtcgaaaaggtaataaggggaaaagtggcaagtccaacatcaataaggaaataattatggaccacagtcattcagatgatagaatattggatgatttttgtggacaaattgaagagatgcccttaaatgctgacaaccctgaagaagtttctgatatatctgacagtagagacgataattcagacatgcttcatgttgatattgaagaccgtgaatctagccctgttaattgggagatagatgcttcagaaactcaaactactattcctggaagtagtgaggtgcaaaatgaccatgcaggaaagaggacctctactgtggatgatagctcatcgtcttgttcatctgactcagtgccttcagttactgtgaatggatcatataaaggaggtgcctggacaagcgtcagatcctcatccaataggggaaacaacaggaggaataaggatactgaagcacgggcaggatttgcacaaggtggatcatgttcatcgcataatggttttataggctctggcagcaatgcctctggccactcaaaggaaagacacgaacctgaggatgataaagttgtcttgcagaggaagcaacatgcacaatggaacattgatatcattagctcctccaagtcaagaatggcagagtcttcattttcttctgtgagctctattaagaagcaacctcaaccaaattttttgctagaaagcaccaatagtttgaatcaccgtggaagcgaagcttctggcactgtgacttccactacaacagcgggtgcctcttcaaccccggccactcagttagttttgaataaaggacctgtatccagtgctgcaacccagaatgagaagccactacctctgcaggtgcttgtaccatccaaatctgaagtgcagaagcaggcttccctaactggcagtgcaactaccgaggccgtttcagtatcaaggcccttgactgccccacaagtccctgcagcaaaacaaagtgcaccagtcacttcaacagctcagaatgcaccttttctttctcgttcaatgagtgctgttgggcggttggggaatgaaccatctgccaatgctcctagtttcgttccccgttcacgaacatatcgcaatgccatgatggagaaaagttctggtggtggaagctgtttcacacatcagcaaggttcatcggagcaagcagttgcaccatggcaatcgatgtttacatcgcaacctttcattcggccatcagagaccttgtcttggaaagaggaaacattattgagatctgggtttacatttggaactgtgaagcccgagtcactgaacccatatcagggcagagaagagaactcacagcaagcgagcagcaacagcagtgattgtgcgccatcgagttcaaacatcagaagcgagatcgagaagctgaatttgagcggaagaccacgaagcaagcaactgttgtcagaaatttcgaccagatttactccctatcagccacaaggcttggtcgctgatgagttcccacacctagacatcatcaacgacttgctggatgaggagcagagtgacagaagaagggttcttcaacctgattttgttcaacagtcctatatgcctcatggtgccagcacacctgattatggtgagccatacttgtttgaccagtccgagcaatacttcgatgaggagcctccaaggttttatagtccattgagcagtgctcctcggaggttgagggacctgagctattcgcactttgatctcccatcacactccagcagcagccagtttgatgatctgatgatgagtcagtggccatacagccgcactgacatctccatgcctagttttgggtcagacacaagtggctacccctatcaggtgtgggatctcgcgaatggatcaagcaggtacccatcgtatcgccctgccaatgggcattgagagttttaatgattgcattgacaataatgtgtggttaagtccatgatgttcgcttctgagctgagtgtaattgtaatagttccccatagcagtgatataaagaattgttcctcagtttccttgttcaatcaatagttatatgacccccctcctccctcttttctctagttcagttttgcccagtggtaataaatctaagtcggctaaaatgatctggctaatcgtgttgtgaaatgtgtatgatgcaagcaaatggtagggtgtttttaagccatgccagtgcttcagctgatactacattaaactgggagtattctttgtttctccctctgacgagtgacgacgtgttattgatcgtctcatgttctctttgtatatttcagagtaaattctggatatagcccatggacataaactaattatttgatgcacactctggacctttggggtatgttttattccattgatggatatataagctataaagtaaaatgcgacaggatcaactgcgtgttggggcagaaaaaacaatcactaaggttag

SEQ ID NO: 7048 - DNA, 4302 bp, Zea Mays
caacaggcatcctcccccgacttccatttcgccaccccctacccgactccactgggcgctcgcgctcgcgcacgcgcacgcgcacgccgcagcccccctccgcagccgacgacgacgagcggaagggaagagggtcaactctcgatctccgcacggtccgtggggacgcacgcacggcgcgcgtggcggtctacccggtcgggggtcggatcctagctgaatcggggagatttgccggccaggtgatcggataatggctagtgatcggataatggttgacactttgaccgaggacaatggtggtgatgctagatcctcatcatctgaagagatgccaagtgaccaacagagtcatcctggggattctttagctgagtggaggtcaagtgagcaagttgagaatggaacaccatccacttcaccagcatactcagacaatgatgatgatgactgtggacctaggccttctgatctttatgggaagtttacatggagaattgataatttctcccaaatcaacaagagagagctaagaagtaattcctttgatgttggtggatttaagtggtatatcttaatttacccacaaggatgtgatgtatgcaatcacctctcactctttctttgtgttgccaaccatgataagctactcccaggatggagtcactttgcgcaatttacaatagctgtaattaatagagaccctaagaaatctaagtattctgatacactgcatcggttttggaagaaagagcatgattgggggtggaaaaagtttatggaactgtcaaaattacatgatggctttattgttgaggatgttcttaccatcaaagcccaagttcaagttatcagggagaagacagaccgtccatttcgttgccttgatggccattaccgaagggaactaattagggtgtatctatcaaatgttgaacaagtttgccggcgctttattgatgaaagaagaagcaagcttagcaggttgattgaggataaactggggtggtccagtttcagtggattctggctagcaatggatccaagtgtgcgtcgacacatgacaagggaaaagactgaaactatattgaaagttatagtgaaacaattctttatagagaaagaagttacatcaaccttggtaattgactctctatatagtggacttaaggcacttgaataccagagcaagaacaaaaaggcgatacctaaactaacagagacagatgctcggagcactccaatggtacttattgatcaggacatgtttgttttggctgatgatgtaatatttctgcttgaaagagctgcattggacacactgccacaccaacatttgcccacaaaagatgataaaagttcgcaaaaccgcacaaagtattgctctgaaatggggccatgacttgggaaatcgtctatgatttgtatcttaacgagttatgaactgaaaaagaagagtacacgtaatctccatttccttatccaatttatctctccatgaattttatcctactgacatggagccctaacagatgctcttgttataggatggcaactcaggtcaggagttcagcaaagattctattgagcgtgatgatagacgacttatagagctaggctggaagacattggagcttttttccttagctcatatattcagccgaatacaagtggcacatcaagaggctgtggctttgaagcgccaagaggaacttattcgtgaagaagaagaagctgggctagctgaaattgaactcaaggcaaagcgtagtgccgctgaaaaggaaaaacgtgccaagaaaaaacaggcaaaacagaagaaaaatagtcgaaaaggtaataaggggaaaagtggcaagtccaacatcaataaggaaataattatggaccacagtcattcagatgatagaatattggatgatttttgtggacaaattgaagagatgcccttaaatgctgacaaccctgaagaagtttctgatatatctgacagtagagacgataattcagacatgcttcatgttgatattgaagaccgtgaatctagccctgttaattgggagatagatgcttcagaaactcaaactactattcctggaagtagtgaggtgcaaaatgaccatgcaggaaagaggacctctactgtggatgatagctcatcgtcttgttcatctgactcagtgccttcagttactgtgaatggatcatataaaggaggtgcctggacaagcgtcagatcctcatccaataggggaaacaacaggaggaataaggatactgaagcacgggcaggatttgcacaaggtggatcatgttcatcgcataatggttttataggctctggcagcaatgcctctggccactcaaaggaaagacacgaacctgaggatgataaagttgtcttgcagaggaagcaacatgcacaatggaacattgatatcattagctcctccaagtcaagaatggcagagtcttcattttcttctgtgagctctattaagaagcaacctcaaccaaattttttgctagaaagcaccaatagtttgaatcaccgtggaagcgaagcttctggcactgtgacttccactacaacagcgggtgcctcttcaaccccggccactcagttagttttgaataaaggacctgtatccagtgctgcaacccagaatgagaagccactacctctgcaggtgcttgtaccatccaaatctgaagtgcagaagcaggcttccctaactggcagtgcaactaccgaggccgtttcagtatcaaggcccttgactgccccacaagtccctgcagcaaaacaaagtgcaccagtcacttcaacagctcagaatgcaccttttctttctcgttcaatgagtgctgttgggcggttggggaatgaaccatctgccaatgctcctagtttcgttccccgttcacgaacatatcgcaatgccatgatggagaaaagttctggtggtggaagctgtttcacacatcagcaaggttcatcggagcaagcagttgcaccatggcaatcgatgtttacatcgcaacctttcattcggccatcagagaccttgtcttggaaagaggaaacattattgagatctgggtttacatttggaactgtgaagcccgagtcactgaacccatatcagggcagagaagagaactcacagcaagcgagcagcaacagcagtgattgtgcgccatcgagttcaaacatcagaagcgagatcgagaagctgaatttgagcggaagaccacgaagcaagcaactgttgtcagaaatttcgaccagatttactccctatcagccacaaggcttggtcgctgatgagttcccacacctagacatcatcaacgacttgctggatgaggagcagagtgacagaagaagggttcttcaacctgattttgttcaacagtcctatatgcctcatggtgccagcacacctgattatggtgagccatacttgtttgaccagtccgagcaatacttcgatgaggagcctccaaggttttatagtccattgagcagtgctcctcggaggttgagggacctgagctattcgcactttgatctcccatcacactccagcagcagccagtttgatgatctgatgatgagtcagtggccatacagccgcactgacatctccatgcctagttttgggtcagacacaagtggctacccctatcaggtgtgggatctcgcgaatggatcaagcaggtacccatcgtatcgccctgccaatgggcattgagagttttaatgattgcattgacaataatgtgtggttaagtccatgatgttcgcttctgagctgagtgtaattgtaatagttccccatagcagtgatataaagaattgttcctcagtttccttgttcaatcaatagttatatgacccccctcctccctcttttctctagttcagttttgcccagtggtaataaatctaagtcggctaaaatgatctggctaatcgtgttgtgaaatgtgtatgatgcaagcaaatggtagggtgtttttaagccatgccagtgcttcagctgatactacattaaactgggagtattctttgtttctccctctgacgagtgacgacgtgttattgatcgtctcatgttctctttgtatatttcagagtaaattctggatatagcccatggacataaactaattatttgatgcacactctggacctttggggtatgttttattccattgatggatatataagctataaagtaaaatgcgacaggatcaactgcgtgttggggcagaaaaaacaatcactaaggttag

SEQ ID NO: 7049 - DNA, 1462 bp, Zea Mays
cacagcagtcgagcagaggcagggcggagtggcctctggcacgccgtggccatatcaatatagtagtgctagcgctaggggtagtgtatgccatggtagagtggtagtggcagtggcaccaccactgatacgcctatagtatcccaatccccaatccaccgtctccggctcaccggctggcctttcttcctccctgcactgcacccgacgagagcggtgcgtgtgtgtgtgctgtatggccggacgacggggacactagtgcctactccctgctgcagtgctgcgtctgcgtgcgcgcgtgcggacctaaaacgcgtcctttacgctggagtaaagagcctcgccacctgccctgctatctgctctgcttgctccaccagcaagtcaacaagagccagcgccgggcgcggacccggccggccctcgcgtcgtcgcttcggttcggtttcggctcagctgccgaggctcctcgccgtggaatcagcagcgccatgagcagggagcagccgtcgccggcgccggcgcagcggcggttcatcgccatcccctccttctcctcctccggctgccgctcccactccagcgtcgacgttgtcgacaccgcgcgccacgccggcaacggcaagaagccccacccgcaaggggcggtgccaggcggcgcgtcggcggggggcaagggggagtcgctggtggcgcggctcctgcgcggtttcaagaacctgtcccagatcttcgcggtgtacgaggacgaggaggaggaggaggagcgggagatggtgatcgggctccccacggacgtgaagcacgtggcccacatcggatgggacggcagcaccagcaccaccagcagcctccgctcctggaaccgcgccgcgccgcctccaccggcctcgtcgtcgtcgtccgcgcccgccgccgcggcgcccaaggagcaggagcagtacccgctgcccctgccggcgctgtccatgcagcagttcgagctcgccatggccgcccaggccggcggaggcggaggcggggctgcccaccggcgtcacagctagcgtgaggcagagagttggtgggggtcgtcgtcgtcagtcagactcagacagcaggcgtcagtcacaggccgtcgtccgtttctgccgccccactgtgtctcccatgtggagtggagagaaaaagaagggtgggggccggcgggcggacggacggacggcgcgagcgcctggcggcgctgtccgcctgtcctctacctcccgtccgtccgtccgtccgtgctggtcgtcggagttggtgcgtgcttcgtttgcttgtgctttggcgccatcgctgcggaactgcggtgcgctgtacgtagccatttttcaacgaggggggcggggttctccttgttcgcctgctacttgtgtcacttttactgccgttacaaaatcttaattgttacacgctgctccatgccaccgccttctctctc

SEQ ID NO: 7050 - DNA, 1825 bp, Zea Mays
cgcagcactaacacccagcccaacccaacagcagccagcaacctcgcaggctcgcaccaccacctcgtccgtcgcagcatcaggccagcagccggcggcgccgggcgccgtcgtgaattaccccaggacttgtcccctccagcaaacggagcgttcagtagagcacgcctcggcgatatcgcggcgacatctgctgcagcccgtggagcccaacgagagcagcatcagcagcagctcccgatcgctcctgctacccacggcctcgcccacgcctgcgtgcgcagcagcagaagcaaagtgattaaccatgattggcagtatagtatcagattcagagttcttcgtggcattctactctgcagctcatttgtagatatatggaattccttccctgagaaatgccgtcctctacaccaccatcagtacaacccacaccaagccttcaaccgttaccatctcctgcagtaagccagagtactcgtattgatgttcgtgagatcaagtccaagatttttaagacgattgggcctgaacgagcaaagaaatactttcagcacctggaaaggttcttatcttcaaaactgagcaagaatgaatttgagaagctttgtcttgttgcacttggccgtgataacctcccattgcacaaccaccttatccgttccatcctacataatgccagtcgagcttgtggcccacctgtaattaatgatcctaggctggtcagaggtgccaccacttctggccatgtgattgttcctcctgtctgggacaatggtggtccgttgaacctaaatgtcaaagagaacagaccattaagcagaagggaaaatctactaacccaaaagccatcactgaatcattgtgacgctattatgctggagaatggtgttcatcatttgagtgatctgaagagatgtacacaatttcaaaacagtgaccatgtggagccacttttcaagcgaccgcgaatggagaaggaaccattcagtttacataattctctgcagagcaatgggtctgctaaggcttcaagagaaaacctgggacaagaaattatacaccaacccgaaggtccagtgcaagcaccacttggcattcagttacgtcctggcaattttggtgtggcccgaatacccctttcttctgtgagttcaaaggatacctctgacacttgtatcgaagttggtgaactctgtgatactttgtcagtgaagaagaggttggacaaaatggcaggagcatctgggttggaaggggtctcgatagagtgtgccaatttgttgaataatggcattgatgttttcatgaagcagttgattggatcttgtgttgaattagttagagcaaggtctcgacatggcaaactaagacatgatgcattgaagcagcagatgtgccgaaaactaataaatggtgtatcagtacatacccatgtttctgggcagagttctattatacctccagagacaaattccatctccatgcaggacttaaaggcagtgatagagttaaacccttgtttgcttgggattaatgcatcactgttactagaaaagatcaattcatatgactagttggatggagctagttgtattcatctcatcacaagatcctatgaccttgatggtctgtcttgtttcatggctgttgtaatcaggccataattttactgacgggtagtggtgaaggcagtactaaactcatttatttcctgcacctaaggaccactattgggctaaagtgcttcagagataactatgttgctggactccaaacaaattgagccatatcacagatttgatctagaacgatccggtcgaag

SEQ ID NO: 7051 - DNA, 2155 bp, Zea Mays
cgatcctcgccattccgacgccgcactcgcagatcttcccttcgtcctccacgccccacccctcgcgtcgccgctatggccgacgaggccctggaccagccgccagacgcggccccgtctccgtctctggccccagcgacgccgccggcccccgccacctcgtcccccgcggcgctgctccgcccgcgtcgggaggcgttcgagcatgggctcctgcccatccccaagctcatcttcccggagggcatgctagcgcagaccctcgcccagctcaaggagaagctcgccgcctcagtccccgacgggcgcgtgcgcgctgcggccctggctgaggcgctgcagatcccgcaggagcaggcggcgctcgccctcggcacgctcgcggcggtgctcccggccgaggaccccgtgcttggggacggcgccatggatggtgctgccgccgacatccgcgacgtgctgctcttcctctatatccagtcttacaagcgcctcgttccgcggagcgcgcacaaggactcgcccgccgtggcggacgtctggccgtccacctccgcgttcgatgggtacctctccgcgctctccccgatccagcttgttcgcagcaacagccgccgttttatgccttctcaagctgatgaagaaattcatcagttgtcctttctgcaaaagcatatggcgaatattcttactctcttggcagattctgttgagggtgagggtgacgattcactggtattgacaatggagacttttgagcaccttggatttctagttcagttctcagaaggaacttccttaagccaggctgctacattttttgcaaactcagacccagacatgcctgctgtgcctgtccctgctgctcaggttcttgattggatgtcacagaacatagctttttcgctggaatattcttctgagaggtccgtagctaaggaaagcaaccagcaaaccatgtctgatcttgatgtgaccatggctgaggccaatacaagtcactcacggaacagcacaccaagtgctaatcctgcatactacagaaatgtaacgtttgtggagggcttttccaaaacctctgttgtcaagcatgcatctgatgtcaaagggaattcaataaaggttttgaactgtcatgattctgttatctacatattagcaccactgaagtatgctactgtgtatggttgttctgatgctacggttgttcttggtgctgttggtaaggtagtaaaagtggagcattgtgaaagagtgcatatcattgcagctgcaaaacggatttgtattgccaactgccgggagtgcatcttctacctaggagttgctccattcaatacatgctacccacaactgcaggatcatatgatgcaagtgggtgttgatcccagtgtcaacaaatgggaccaaccttttgtattgggagttgtggatccacatgattcattatcccatcctgctggggttgcagatgttaaagctgaatcagcaacatgtctggatcctgatctattcaccagttttttgattcctagttggtttggggatgaagggcaagagcctataaactgcaatcctttcccactgcctgaaatttatgaggcattccaaagcaaaaagcgttctgctctggaagatatccaaaagatgattcgggagctacagcttgacgagaatcggaaaagggaattggcagctgcccttcatgctcagttcaaggattggttatacgcttcgggcaatatccgccagctctactgtctacaaggtgattaatggtgcaatttacaagactgattatcctctgccgactcctcaaaaacattcgacgattgtcgaagctgacctcttccttccatggaaaggactcccaccctgctcacctgcggtatttacacaagtatgtaaaaaatgaagatgtactattgcctattttttacagattcatttgcgtatttctccaagtcttctctttgctgcgagttgggtattaattaggatgtgatattgcttaatttcccccctgtttctactcattttttggcccttgataatgtccacgagtatgtaatagggactaatgaatcaaacgttgttaaataaacatttcattccgttttgctaaatggctcatcatgtcaaccctctatggacc

SEQ ID NO: 7052 - DNA, 2505 bp, Zea Mays
tttattataatacgactagtgaagtatatttatgttacacgagtggtcattatctatgtgtattgattttgatcaccggctattcatattcatatattggagaatgttcgaatccatatgtgtattcactacaaaatatgaatattgatgtgaaatagactatctaatttgtattcgatcagttcattttcactggaaaggcagaaagcagagaaattccatacgttcgtactcgttggctagcatattatcctctaccacttgaaaacaacaattcgccaaaaaaaaaaacattcatagcacggcccatttttgcaaaaatggtggttgggccttatcagcatcacagctcagcccagtccagcgacagtgatgttagtttgtgttggcctcctgctgctcctcctcctgctgctccacggcgtcggcgtcggtggcgccgttccggcgagccctccgaatcctactcatcctagctagcgctgcctgccctgcttcactccctcccaccctcactggcgcctcaccatgatccatgtcgactttccctcctccaccccccagcgccgctaggagccccgtcgccagggtgcgcctcgaccacctggtcccgttcgacggcgccttcaccccggcctacgcgcgcgcagtcgaagccgtcgctgcttccctcacgcgccacggcgccgccgccgtcgacctccctgcagcggacgccgctgtcgtccggtgcgccctcgagtccgcgcgcgccttcttctgcgaccgctccggcctctacgtctaccgcgccgggagggctctggatgatggagagttgtcacctgcttgcatgtctgatgctttcagatgtttgggtaagacagcccgtgctgctctctgtgcaatagcacggaaccttcgcttacgttcagatgctttcagccatttgcttgatgacaacccattgcctcttgatgaggtttcagcttcagaattgatggtgtcattttctcatgggcacccccaaagcagccaggcacctatggtgggcctcaggccatcaatggctgaagttgatagaggttttgttacactggttgcttctgaccatccaggaattgaggtgtgaagttgctcatcctgtaactcttttgtaatctttgttcagaatggcacaaataacaaagtttgtgcctggttctagtattacttatggtgaaacgcactgctgtcttgtatcctcctcctgtttagtcagttagtgttttctttccaggtttgcatttgactgacttctttacattgccttgtcactagtgctttttcatatttcgattcctgactgtttatcttcttttgcaggtttgcaacccaaatggtcattggtacccagcggatgtgggctcaagccctgatgtcctgttgcttttgactggaagagccttgagtcatgttactgctggcctacgtctaaattctcagtacaggatcattaataatgaaaacagggcatcactcatgtttaggctcatgcctcgtgccaatgcaatattggactgctctccaatttcagctgctgggcattgcacaccacagatccaccggcccatatctgcaagtcagtttatggatgatttgcgtgctgaagagaatgtttaccatcacttagaagcaccgcctgaatcacagggaaactttgttaatgaaccatcgctcagaagtgtactgtcagaccctttgtctggggcttttcttgaagatgctatggttctcccatgtgggcactcgtttggtggcctcatgctgaagaaagttcttgaattggcaaggtgcagcatttgcaacggagatgttgatgaggcctccttatttcctaacctcgctctaagagcggtagctaccgtggtgaagatggaagacgataggaggctctttcacaatgcggcccttcgaaagcgcaggaaagaagtgactgagcatatggatgcccaaaggcgaaatggaagtagcaaggacagtattgagctggggctagaagctgaaagccctagagcgttcaagggggtgcagtacccgtttgtgggaaacaaaaggacgcctgataaattcgttgggaaggaggcagtggtgacatcacagtgcctgaatggctggtaccttgtgaaggcagttgatagcggagaaagcatacggctgcagtacaggtcgctgaggaaagcaggggagctacaagtgcaagcactcctgcagagtagacgatgattttttgcactagtgttgcttgtctcgtgttttgtttctgtcctatgcgatgaaaaggaaaaggaaaggatgcagcgtccttttgtacaaatttccattcagttttgccagccaagtcacgtagctgtaaaatgacagatgttgtgtggtgttctgtggcctttgtgcttgtgcactaagtcttgttaattgtcatacatgctcccttcgtaaaaaaaaaggagtcttaagtacaagattttttttctaaatattttgatt

SEQ ID NO: 7053 - DNA, 3949 bp, Zea Mays
gtcgggggctcgtggcggcgctgcgctgtgcgcgaggatgcgccgcgcgggcggctcgctgctggtctgttgcgcgcgcccgccgcgaggtttggtgccatggaagggacggcggcggaggtgggcggcgctggcgctgacgcggccggggatgtgcagattaagggtgccaaggagaatgcgcagcccacggcggcgcagcagcagcagccgtccggcagcgaggcgctggagatgccggccacgccactccagcgggacatagactggtccgagcatttctccttcttcacctcgctgggtgggttcgggggcagctcggacggcgcgaggggcctcaccagcgtcggcctgtccaattccgagtccaggccagacagtgtggcacagcgtggcttggaccacgacactgaagagagggtggaggagctcacattgaagaattgcatcaatactggtatccagcctgaggtttctgctggtgggagcacaagcagcagggataggcctacccgtattaagggcctgtggggtaattttacacggatcgcccggagaactagcgatttggccagcagggaaaacaccgcactgagttctggcgacattgcaaacttgagggctggtgatgcttctagcatggaaaagctggcgacgagccttgccagcaatatcatctcaaggaacaacaatgcgtctggcaatgaggcacctatgagtcatgttggatatgtcaataatgagttcatgatgtgcagccagcagattctcttgtctccatggtctaatcaggataatgctcttaaagtaagcagcttctcaaataggattcttaaccggatgagaagtaagactgtggcaccctcatctagggttctacgatcaccacttcaaatcaaatcaaaaggtaaaggggttgtgtgccaaggtgcacgggaggagatccaagtgcaagctaatgcaagacccagagaccctttggacaagattccgactattcctagctcaattcatgattgtatggccagagtggaccatatgcttttcagtactggtggaaatgttacaaaatcccactctgagggatctagcctgagggaactgattaagcctgggtggcaaacaatgactaagtttgagaaaatgcatttgtttaagcagatcattgatcttgtggataagtgtcatgcacagggttttactttgcagcatttgcgaccatcatattttatggtcctttcttcaaatcaagttaaatatatcggctcttataccacacaagatttgccaacatcaatcaaacaagaggttgctagagaagatcttgtgaatagaaaaagaacttttggacagagaattgatcaccaagagtctaatgaccatggaaatttgacgctgaagtatcaaaaggttgatgagcaaggctcagtcgctatcaggcaaccagcaaatacattttggaccgacaaaatatgtgacaatcaaaatgaagatgtcaatcgaggtgttttgaggcaagaaaattttagccacactgccagagaaggttttaagttggtcgaaccatatggcagtaatatatcttgtgctcagcatgtatctagttctgccacccaacaaccagcatttgaattgaggaatcttgaggaaagctggtacaaaagcccagaggagctcagtcaatttaaaggcacattcccatcaaacatctacagccttggggttcttctatttgagctcttttgctgttctgagacatgggaggtgcactgtgctgcaatgtcaaatcttcgtcaacgcatcctgcctccaaattttctttcagaaagtcccaaggaggctggcttctgcctttggttgctgcatccagatccttgttcaagaccaaaagcaaaagagattcttggatgtgacttgataaatgggggtcaggatttgtcgttgttagatgaggcaccagtttccatcggtgaagatgacactgaatctagtttgctacttaacttcctttctcaattgaaagaagaaaaggcgatgcagtctgccaagttatcggcagagcttggaagcttacaaacagatatcacagaggttgacaaaagacactcagcaagaatgagattgagtttagatgatacagatgtactgccaagttctagtgctttgtcaggagcttctgtgagtgcccttcaaggtgcattgctgtcaggtttgttaccagcgtcatacaagtcgagcatatatgaggagagggtaatgaggaatttggtgcagcttgaaaatgcatactactccatgaggtcctcgctggacacctgtgaaacaaatgtaatcaaacggccagataacgaggctttgagggcccgtgaaaatttccatcaacttcatagtgattctgatgccaaggacgagaaaacagatcgtcttggatgcttttttgatggtttatgcaaatatgcccggcacaataggtttgaggtacgaggaattttgaagaatgcagatatacttaactctccgaatgtcatctgttcgttgagttttgatagggatgaagaatattttgctgctgctggagtttcaaagaaaataaaaatatttgaatttgatgcactcttaaatgatcgtgttgatattcattacccactgatagagatgcctagcaagtccaagcttagctgtgtctgttggaacaactatataaagaactacctggcttcaacagactatgatggcactgttcagctatgggatgccagctctggtcaaggattcacacagtttacagagcaccggaaaaggacttggtctgtgagtttttcagatgtcgaccctactaagttggcaagtggtagtgatgattgttgcgtgaaagtatggagtattaatcagaaaaattgtgttgatacaatcagaaatgtggccaatgtatgctgtgtacaattctctccatactcctcccgcatgctagcttttggttcagctgattacaagatatactgttatgatctgaggaacacaaggataccttggtgtactattttgggacatgggaaagctgtcagttatgtgaggttcttggatccatacacacttgtctctgcatcaaccgacaacacattgaagatatgggatcttaaccagactaattgcagtggattatctaccgattcttgcagcctgactctgaatggtcataccaatgagaagaattttgtagggctatctgttcatgatggatacataacttgtggctctgaaaccaatgaagtgttttcttactacaaaactttccccatgccaataacttctcataggtttggttctattgacccgataactggacaagtgacaaatgaagacaaccagcaatttgtgtccagtgtttgctggagagggaagtcaaacatggtagtggctgccaactccagtggtagcatcaaagtgcttgagcttgtgtgaatgaacgagagtcatattggagaagaaggttctagtgttgccatgcgggcctgcgatgctttcgtgcccttgggcactaaaagactcgactgctctatgcaagcatcctacaacaccgatcattggttattggaagctttgcttgaaactcacaagcaaactaaagtttttttttttccaagaaggtgcgcgggacttgctatgactgttaagagcaaacgatggaaagaaagggaaaaaaatgatcatgtagctcgaagaagttaatcgtgctgtgtgaatgtttcaaggagaatgtctcaaatagttttatacccccttcattattgtacatatatctagggctgcctaatgaaaggccttgtaagttgtaactagagtagaatgctgatcatgagttaagtataatgaatggtcttcacaaaagattaatcaatggaagattcatacaaagtataatgaatgattatccttttggctggaacaa

SEQ ID NO: 7054 - DNA, 4069 bp, Zea Mays
gcggctcgctgctggtctgttgcgcgcgcccgccgcgaggtatggctccccgccgctgaatcggtcctggggcggtttttgcctttgcgcgacttggcccgtgcgccgtgaccttattgcgcgggcgacgcgcggttttcgcagggtaggtttggtgccatggaagggacggcggcggaggtgggcggcgctggcgctgacgcggccggggatgtgcagattaagggtgccaaggagaatgcgcagcccacggcggcgcagcagcagcagccgtccggcagcgaggcgctggagatgccggccacgccactccagcgggacatagactggtccgagcatttctccttcttcacctcgctgggtgggttcgggggcagctcggacggcgcgaggggcctcaccagcgtcggcctgtccaattccgagtccaggccagacagtgtggcacagcgtggcttggaccacgacactgaagagagggtggaggagctcacattgaagaattgcatcaatactggtatccagcctgaggtttctgctggtgggagcacaagcagcagggataggcctacccgtattaagggcctgtggggtaattttacacggatcgcccggagaactagcgatttggccagcagggaaaacaccgcactgagttctggcgacattgcaaacttgagggctggtgatgcttctagcatggaaaagctggcgacgagccttgccagcaatatcatctcaaggaacaacaatgcgtctggcaatgaggcacctatgagtcatgttggatatgtcaataatgagttcatgatgtgcagccagcagattctcttgtctccatggtctaatcaggataatgctcttaaagtaagcagcttctcaaataggattcttaaccggatgagaagtaagactgtggcaccctcatctagggttctacgatcaccacttcaaatcaaatcaaaaggtaaaggggttgtgtgccaaggtgcacgggaggagatccaagtgcaagctaatgcaagacccagagaccctttggacaagattccgactattcctagctcaattcatgattgtatggccagagtggaccatatgcttttcagtactggtggaaatgttacaaaatcccactctgagggatctagcctgagggaactgattaagcctgggtggcaaacaatgactaagtttgagaaaatgcatttgtttaagcagatcattgatcttgtggataagtgtcatgcacagggttttactttgcagcatttgcgaccatcatattttatggtcctttcttcaaatcaagttaaatatatcggctcttataccacacaagatttgccaacatcaatcaaacaagaggttgctagagaagatcttgtgaatagaaaaagaacttttggacagagaattgatcaccaagagtctaatgaccatggaaatttgacgctgaagtatcaaaaggttgatgagcaaggctcagtcgctatcaggcaaccagcaaatacattttggaccgacaaaatatgtgacaatcaaaatgaagatgtcaatcgaggtgttttgaggcaagaaaattttagccacactgccagagaaggttttaagttggtcgaaccatatggcagtaatatatcttgtgctcagcatgtatctagttctgccacccaacaaccagcatttgaattgaggaatcttgaggaaagctggtacaaaagcccagaggagctcagtcaatttaaaggcacattcccatcaaacatctacagccttggggttcttctatttgagctcttttgctgttctgagacatgggaggtgcactgtgctgcaatgtcaaatcttcgtcaacgcatcctgcctccaaattttctttcagaaagtcccaaggaggctggcttctgcctttggttgctgcatccagatccttgttcaagaccaaaagcaaaagagattcttggatgtgacttgataaatgggggtcaggatttgtcgttgttagatgaggcaccagtttccatcggtgaagatgacactgaatctagtttgctacttaacttcctttctcaattgaaagaagaaaaggcgatgcagtctgccaagttatcggcagagcttggaagcttacaaacagatatcacagaggttgacaaaagacactcagcaagaatgagattgagtttagatgatacagatgtactgccaagttctagtgctttgtcaggagcttctgtgagtgcccttcaaggtgcattgctgtcaggtttgttaccagcgtcatacaagtcgagcatatatgaggagagggtaatgaggaatttggtgcagcttgaaaatgcatactactccatgaggtcctcgctggacacctgtgaaacaaatgtaatcaaacggccagataacgaggctttgagggcccgtgaaaatttccatcaacttcatagtgattctgatgccaaggacgagaaaacagatcgtcttggatgcttttttgatggtttatgcaaatatgcccggcacaataggtttgaggtacgaggaattttgaagaatgcagatatacttaactctccgaatgtcatctgttcgttgagttttgatagggatgaagaatattttgctgctgctggagtttcaaagaaaataaaaatatttgaatttgatgcactcttaaatgatcgtgttgatattcattacccactgatagagatgcctagcaagtccaagcttagctgtgtctgttggaacaactatataaagaactacctggcttcaacagactatgatggcactgttcagctatgggatgccagctctggtcaaggattcacacagtttacagagcaccggaaaaggacttggtctgtgagtttttcagatgtcgaccctactaagttggcaagtggtagtgatgattgttgcgtgaaagtatggagtattaatcagaaatgtggccaatgtatgctgtgtacaattctctccatactcctcccgcatgctagcttttggttcagctgattacaagatatactgttatgatctgaggaacacaaggataccttggtgtactattttgggacatgggaaagctgtcagttatgtgaggttcttggatccatacacacttgtctctgcatcaaccgacaacacattgaagatatgggatcttaaccagactaattgcagtggattatctaccgattcttgcagcctgactctgaatggtcataccaatgagaagaattttgtagggctatctgttcatgatggatacataacttgtggctctgaaaccaatgaagtgttttcttactacaaaactttccccatgccaataacttctcataggtttggttctattgacccgataactggacaagtgacaaatgaagacaaccagcaatttgtgtccagtgtttgctggagagggaagtcaaacatggtagtggctgccaactccagtggtagcatcaaagtgcttgagcttgtgtgaatgaacgagagtcatattggagaagaaggttctagtgttgccatgcgggcctgcgatgctttcgtgcccttgggcactaaaagactcgactgctctatgcaagcatcctacaacaccgatcattggttattggaagctttgcttgaaactcacaagcaaactaaagtttttttttttccaagagtatgatggcctcacctccatttttgtgtttggcattttgagacggtacctattcatcgtgatgcaaacttcttttgggctagaggtgcgcgggacttgctatgactgttaagagcaaacgatggaaagaaagggaaaaaaatgatcatgtagctcgaagaagttaatcgtgctgtgtgaatgtttcaaggagaatgtctcaaatagttttatacccccttcattattgtacatatatctagggctgcctaatgaaaggccttgtaagttgtaactagagtagaatgctgatcatgagttaagtataatgaatggtcttcacaaaagattaatcaatggaagattcatacaaagtataatgaatgattatccttttggctggaacaa

SEQ ID NO: 7055 - DNA, 1356 bp, Zea Mays
cgaacgatgaattcctagcagtactgcccccaccgcatgatcagctgcgagaggcggagtacagttcaagtcttgcagagctgcagctgcaggtgaggactgagagatcagagatggccagcccagctggggatctctctcttctctcctctcctcacagggcgccagggcagacgccaattgttgccagggctagaggaccagacggcagactaggagtaggctgtcctgtttccgttgtccgcccgcccaaccaccacaccctccccccggattataaacacagcgcctctcctcactcagtcgcctcctctccgtctgcgttcctgtcgtggcccacatctagccgtcgtcgtcgtcaagaaaggaggcgccacaatgacgatgatggcgcctcatccgcagccactgccgctggcacagccgccggcgttcggggacaccacgctcaccaaggtgttcgtgggcggcctggcgtgggagacccacgagggcgccctccgcgggcacttccagcgctacggcgacatcctcgaggccgtcatcatctccgacaagctcaccggccgctccaagggctacggcttcgtgacgttcaaggaggcggacgcagccaagaaggcgtgcgaggatgccacccccgtcatcaacggccgtcgcgccaactgcaacctcgcctccctcggcgccaagccgaggccccagccgctgcagcacgtcctccgtccctcgcccccgcacgcgcacgcgcttccctctcctcaccagcccacgccagccatcgcggtgggatccaggagcgtgtcgccggtgccatggtactaccacccctccacgacgcgccctccgccgccgccggccgcgcaccagcagtaccacggcgtgctcccgttctaccccgccgccgccacctacgggtactccccgaactacgtcacggacctgagctacaatacgcagtggagtggagcgggtgacgggttgcagctgaaggcacgaggcgatggtggtggtggcggcggcgactatgggcggcgcaatgaaaggcgctctgctctgttaacaagctgcacatgaagggtgtcggatgccgaagcgacgcaaggccgcattagttacattcattcaattccctctaacttcgaccacagtaccggcaacaacagtctgtaacaaacaaatgactggattcgtctctcgtttacctctgtatttttccaatggtaaacccgtttatcagtgtctgtagtgtagtagtccgatcgctgcaggtgacagcggacctcaataaaccgtcatagtatttcgccctattctatggtcgaaatatctcagttaaaaagtaaaggggcgcta

SEQ ID NO: 7056 - DNA, 1320 bp, Zea Mays
cgatcccgccgcgacccccgcccgccgccaatcgcccgccgcgaaccccgtccgccgccaaccgcaaggcgcgaacgcccgcccgccgcgaccgctcggcaaacgccgtgaacagcccgccaccaaccgcgatacgcccgtcgcgaccttccgcgaaccctgcccgccgccacgaatgcccgcctctgcgaaccctgcaagccacgatacgcccgccgcgacccgccgcgaattccctcccgcaacgcccgcacgaccgcccgcacaacccgcatgcccgccgcgagcccgccgcaaaccccgcccgcacgcccgccagccatgccgcgacagacctaccacaatttcacaaagatgttttctgctatttacagatgaatagttattgtcagggacaacaaggttccatcatttccagggaggaaaatatacttttgaagaggtgaagagcaagcgtgataggaaaaaaactcggtggcaaggcaatctttatcaaggtcaaatgtggctggctgggcaacagatggaggatttggctccaaaccttttcttgatggtctcgaagtgtataataaacaaaagaacaattctggaagccttgacagattcaagatggattcaagaccttcggggtgttttatcttgggaggtgttcatggaaatcacacttctttggaagctttcgaaggggttaacctgcagcccggcattgccggatagacacttttagaggttgtccagttccagaaaatatttagcaacctcggcttatgcagccatcttctaaggatccttgcagtaggaggcttttgatcgtgtctagaagatttgggctcctcctaggtgcactttcttcatctgccttgtgatccacaatcgatgttggacattggatcgattggctaagagaaatctccctcgaccgagctgttgtcccctttgtgaacaggaagatgagacaattaatcatatcttagtaatctgtgttttcagcaggcagttctggttctttattctccaaagaatggggctcattgctcacgacctgtgaaaataattaatcaagatttcttatctttctccggatacttttcaagagatgaagagcaagtgtgataggaaaaaagactcggtggtaaggcaaggtacgccgaggtcaaatgtaatattgttctgtacttcgatttggtgtattttgcttttttagtccctacaaaatgactgggatttagcaaagcggcttatctgttgtgcatcatttctattgtccctccgaattgcatattataaactatttctgaaatttcagtatattttttg

SEQ ID NO: 7057 - DNA, 948 bp, Zea Mays
ctgatccaacggctagcaagcgttgacgtgtgagctccgccggtacgcgcaccagatcgagtgtacccgtgcacgaggcgccggcctggagtcgcggtcgctgccgcatggccctggcctccctcgcggcctcgctcccagtcgccgccaccgccgccgcggtgagattcccattccgtttccgcatcggtcgcgccatggcctccgccgccgcaggggcctcgccggcgagggtggccgtggtacagatgacctccgtgggggacgtcgacgccaactacgccacctgctcccgcctcaccaagctgcttctggagtgaaatttctttgcttccctgaggtcttctcattcattggatccaaggatggcgaggctatgaagctagctgaaccattagatgggccaataatgcagagatactgctcacttgcaaaagaatcaagcatgtggctatctcttgggggttttcaagaaaagggacctgatgattctcaccagtacaatactcatgtattaattgatgacactggaaaagttaggagctcatatcgaaaaatacatttgtttgatgttgatgtacctggcaatatggtgtacaaggaaagtcgtttcacagccgcaggtgatactattgttgctgtggatagcccttttggacggttggggcttactgtttgctatgatttgagattcccagagctttatcaaattttgcgttttaagcatcaagcacaggtattactagtgccatctgcattcacaaagataacgggagaggcacactgggaaattctcctccgagctcgtgcaattgagacacaatgttatgttattgctgctgctcaagctggaaagcacaatgaaaaaagagaaagttacggtgattctataattattgacccatgggggacagtgatagctcgacttccagaaaaatgtggttgcag

SEQ ID NO: 7058 - DNA, 1419 bp, Zea Mays
agcgctaaaacaccccctcccgtcccgcaccgacgtcgacggagacgtgtcactggcggcgttgagaagacagaagacttcagaccttctagattttttcccggccgcaatggatctctgggagagggcccgggccttcgccggcgaggcggcgaattggtcgcaggagctctccgcggaggcgaccaagcgctcgtctgcgctggtctcggagacggcgaagaagtcgaaggagatcttttccgagaccgcctccaagtcgctggagatcgccgccgaggcaaccaagcaggccgacctcctggccggccagatcaagcacctcgcctccgacatccccgtaccctcgatcccacccatccccgcgatcccacctatcgccgccactgcctcgtcggagcccgacgcggccgagcttgagcgctacggcatcaccgacgacctccgcgagttcgtcaaggacatgaccataagcaccttccgcgacttcccactgcaagatgagcctgaaatgtctgatgtgccaacggtgtcgaatgtgcgtcaggatctgagcgaatggcaggccaggcacgccacacttgtcctctcggcagtcaaggaaatatcgaagttcagatatgagctatgcccaagatacatgaaagagcgcaaattctggcgggtatattttttgctagtaaacagctatatagccccgttcgagaagaaatccttggaggagctgaaagtgaaagcagaggaagagaaaagggattcccagaagcaagcatcccaggcatctacaactttcgaacccaaagacacaaaagcgccaatcaagacctcttcaacaaatccagaacatgatctggatgtatttcttctgggagatctgggtagcgacgatgagggacctgttgatgatgatgatgacctagatgaggacttcgataagattgatgtgaccacggatgtggagttgcagggtgatcctatagctatcaaaatgtagcatcgttgttttccatggaatctgtacgcgttatttttcatgctacgggattggaaagtgatgacgatgacaaaaaaatagcaacagggaaagcagaagatgcgaagtagtagcctatggttttacgattcgacagatgaccacaatgatagcgaactttagtattccaagatggtattgtatattagttgatcgcatgtcatcaattcatttgttatcacccagaaaaggatgttaaacacttgttttttttacaactttcgatttttaactaaactcacacatcttatcgatgttgtgactcctcttttcttattaggagttttctgcatatgtactagtctatctattgaattgaacttcagtacgactactcgaggctacaatttacatgaaataccggtgtgtgaagaatagaagataat

SEQ ID NO: 7059 - DNA, 1408 bp, Zea Mays
atatattaaagattatgctctcaaataatttgaactgtttgctatttttgcagctcgaaaaaatatagtctggaggtgacctcaatcttattggatggaataatgaccgcaactgtacaggaagtttaaggagaagaacaaagtggacaaggtagtcgtgctgtggactgcaaacactgaaaggtacaacaatgtatgcgcttgtctcaacgacacaatggagaatctactggcatctgtggacaagaacgaggcggagatctcgccatcaacactatatgccattgcctgtgtcacagagggggtgtcgttcatcaatgggagcccccagaacacttttgtgcctgggctgattgatcttgctatcaagaacaactgcctgatcggtgttgacgacttcaagagtggcagaccaagatgaaatcagtcctggttgatttccttgttggtgctagaataaagcccacctcgattgtgagctacaaccacttgggaaacaacaacggcatgaacctgtctgcccctcaaacattcaggtccaaggagatctccaagagcaacgtggtggatgacattgtctcaagcaatgccattctctatgggcccggcgagcatcccgatcatgttgttgtcatcaagtatgtgccgtacgtgggagatagtaagagggctatggacgagtacacatcagagatctttatgggcagcaagaacaccatcatgctgcacaacacctgcgaggactcgctcctcaccgcaccgatcatccttgatctggtgcttctggctgagcttagcaccaggatctagctaaaacctgagggaacgacaagttccactccttccactcggtggccaccatccttagctacctcaccaaggcaccactagttccgcccggcacaccggtggtgaacgctctggcaaagcagagggcgatgctggagaacatcatgagggcctgcgttggcttggccccagagaacaacatgatcctggagtacaagtgagcgaagtggcgtggctgcagctggatatacaggaggctgcatgaagggaactagagaggcgagattagctgtgggattgtgttggcttctcgtgttttcttttgcgttctttcctgttcatcgctgtcgagttgttgtattttatttgttggactctcgtgccaacaatgtcatcaagcgtgtatggtggtgcgtgcctgagactgacgatgtacgagggaacttctaccggcagtgtgacacgtactctgcaatgatgagacaatgcaaattgtggtatatatcgaagtctgcataataatgatggttgaaatgtagtagtgaaacgctaaattaaaataacaaaaattatgtatggccaggatcacaaatgtattatgaaacattttcttataaca

SEQ ID NO: 7060 - DNA, 1588 bp, Zea Mays
atttcctttcatccatctccgtatggaccgtatccctgtctctctctcttctccccctcccccccaatctccgaggcgagctcgagctcccaaaccctaggcctcactggggagtcacctccgccactccagcgatgtctctcgccgcagcggcttgacggtgcctgcccccaaatctacctctccgttagagagcgcggcgtggttgctgcgtgaggcgcaccggggtctgcaaatggagccgaggcgcatatcggcgagcccgcgcccatgcagcgggcggcgggtagtggccaggaagaggccgaggcaggaggcggtggtgagcagtgtgcggaagctgcagcgccgggagatcagctcccgccgcgaccgcaccttcaccatgagcgccgcgcaggagcgcttccgcaacatacagctgcaggaagagtttgacactcatgatccaaaggagaacgcttcactactcccttacttgaggaaaaggtcaaaaatcattgagatagttgcagcgcgtgatatagtctttgctttatcacagtcaggagtatgtgctgcttttagtagagagacaaatcggagaatatgctttctgaatggaagtccagatgaagttatccgcagtttattttacaacaagaataatgattcactcattactgtatcagtatatggttctgaaaacttcagtgctctgcgatgcagaacaactcgaatagagtacgttcggcgaggacaaccggatgctggtttccctctttttgagtccgagtccttgaaatggcctggatttgtagagtttgacgatgtcaatggaagggttttgacttactctgctcaagacagcacttacaaggtgtttgatttgaaaaactacacattactgtatttggtgtctgataagaatgttcaagaaataaagatcagccctgggataatgctattgatttatgcaagaacaagcagctcggttcctctgaagattctttccattgatgatggtacagtcttgaagtccttcagccacctcctccatcgtaacaagaaggtagattttattgagcagttcaatgaaaagcttctggtcaagcaggaaggagagaacctccaaattcttgatgtaaggaacttccaattgacagaagtgagcagaactgagtttatgactccatccgcctttatttttctacatgagctgcaactgttcttgacattccggaatcgagcagtatcagtttggaactttcgaggtgaactggtcacgtcatttgaagatcacctgttgtggcaccccgactgcaacacaaacaacatatacatcacaagcgatcaagatcttattatctcgtactgcaaggctgactcaactgattcaacttcagaagaaaatggtctcctggttatcttcttttggtttttcttcactgccagctagatcgtgtttcatctttcatgcgcttctaagagcaaatcatttagctaaaaccgtcgttggtcgcctgatcacatagctcatgatgcatgtttcgttctgagatggattttgttcagttcgataaattggtcaattgttttggatggagtt

SEQ ID NO: 7061 - DNA, 1801 bp, Zea Mays
atttcctttcatccatctccgtatggaccgtatccctgtctctctctcttctccccctcccccccaatctccgaggcgagctcgagctcccaaaccctaggcctcactggggagtcacctccgccactccagcgatgtctctcgccgcagcggcttgacggtgcctgcccccaaatctacctctccgttagagagcgcggcgtggttgctgcgtgaggcgcaccggggtctgcaaatggagccgaggcgcatatcggcgagcccgcgcccatgcagcgggcggcgggtagtggccaggaagaggccgaggcaggaggcggtggtgagcagtgtgcggaagctgcagcgccgggagatcagctcccgccgcgaccgcaccttcaccatgagcgccgcgcaggagcgcttccgcaacatacagctgcaggaagagtttgacactcatgatccaaaggagaacgcttcactactcccttacttgaggaaaaggtcaaaaatcattgagatagttgcagcgcgtgatatagtctttgctttatcacagtcaggagtatgtgctgcttttagtagagagacaaatcggagaatatgctttctgaatggaagtccagatgaagttatccgcagtttattttacaacaagaataatgattcactcattactgtatcagtatatggttctgaaaacttcagtgctctgcgatgcagaacaactcgaatagagtacgttcggcgaggacaaccggatgctggtttccctctttttgagtccgagtccttgaaatggcctggatttgtagagtttgacgatgtcaatggaagggttttgacttactctgctcaagacagcacttacaaggtgtttgatttgaaaaactacacattactgtatttggtgtctgataagaatgttcaagaaataaagatcagccctgggataatgctattgatttatgcaagaacaagcagctcggttcctctgaagattctttccattgatgatggtacagtcttgaagtccttcagccacctcctccatcgtaacaagaaggtaaggaacttccaattgacagaagtgagcagaactgagtttatgactccatccgcctttatttttctacatgagctgcaactgttcttgacattccggaatcgagcagtatcagtttggaactttcgaggtgaactggtcacgtcatttgaagatcacctgttgtggcaccccgactgcaacacaaacaacatatacatcacaagcgatcaagatcttattatctcgtactgcaaggctgactcaactgattcaacttcagaagaaaatgctggctctataaacataagcagcatactgtccgggaaatgcctggcaaaaataaacactggaaactccaatgcttgcaaggaaagaaagaaggcgtggaagttccggaacacagtctcggaggcccttgaggacatcacggctctgtactacgacgaggatcgcgacgagatctacactggcaaccggcacggccttgtccatgtgtggtcgagctgaaagctgaaactgcggggcggctttcaaccgtagcacggtgatctggtcttcacctgtgcgcgtattaacagctactagtgcctcacgtggcacgggggtggggggcacgaaagagggaccccccaagccactcaagtgacagttcttatttatctcagcatgccaagagcactgtccatcattctgaaatcagaggccccccagatctgttgtaacggacgtaccttgcaagtaatgaaatccattcgttgatctgaaatg

SEQ ID NO: 7062 - DNA, 1834 bp, Zea Mays
atttcctttcatccatctccgtatggaccgtatccctgtctctctctcttctccccctcccccccaatctccgaggcgagctcgagctcccaaaccctaggcctcactggggagtcacctccgccactccagcgatgtctctcgccgcagcggcttgacggtgcctgcccccaaatctacctctccgttagagagcgcggcgtggttgctgcgtgaggcgcaccggggtctgcaaatggagccgaggcgcatatcggcgagcccgcgcccatgcagcgggcggcgggtagtggccaggaagaggccgaggcaggaggcggtggtgagcagtgtgcggaagctgcagcgccgggagatcagctcccgccgcgaccgcaccttcaccatgagcgccgcgcaggagcgcttccgcaacatacagctgcaggaagagtttgacactcatgatccaaaggagaacgcttcactactcccttacttgaggaaaaggtcaaaaatcattgagatagttgcagcgcgtgatatagtctttgctttatcacagtcaggagtatgtgctgcttttagtagagagacaaatcggagaatatgctttctgaatggaagtccagatgaagttatccgcagtttattttacaacaagaataatgattcactcattactgtatcagtatatggttctgaaaacttcagtgctctgcgatgcagaacaactcgaatagagtacgttcggcgaggacaaccggatgctggtttccctctttttgagtccgagtccttgaaatggcctggatttgtagagtttgacgatgtcaatggaagggttttgacttactctgctcaagacagcacttacaaggtgtttgatttgaaaaactacacattactgtatttggtgtctgataagaatgttcaagaaataaagatcagctcggttcctctgaagattctttccattgatgatggtacagtcttgaagtccttcagccacctcctccatcgtaacaagaaggtagattttattgagcagttcaatgaaaagcttctggtcaagcaggaaggagagaacctccaaattcttgatgtaaggaacttccaattgacagaagtgagcagaactgagtttatgactccatccgcctttatttttctacatgagctgcaactgttcttgacattccggaatcgagcagtatcagtttggaactttcgaggtgaactggtcacgtcatttgaagatcacctgttgtggcaccccgactgcaacacaaacaacatatacatcacaagcgatcaagatcttattatctcgtactgcaaggctgactcaactgattcaacttcagaagaaaatgctggctctataaacataagcagcatactgtccgggaaatgcctggcaaaaataaacactggaaactccaatgcttgcaaggaaagaaagaaggcgtggaagttccggaacacagtctcggaggcccttgaggacatcacggctctgtactacgacgaggatcgcgacgagatctacactggcaaccggcacggccttgtccatgtgtggtcgagctgaaagctgaaactgcggggcggctttcaaccgtagcacggtgatctggtcttcacctgtgcgcgtattaacagctactagtgcctcacgtggcacgggggtggggggcacgaaagagggaccccccaagccactcaagtgacagttcttatttatctcagcatgccaagagcactgtccatcattctgaaatcagaggccccccagatctgttgtaacggacgtaccttgcaagtaatgaaatccattcgttgatctgaaatg

SEQ ID NO: 7063 - DNA, 661 bp, Zea Mays
gaattacccaattagcgcttgaatgtttggatgctgggtgttcattgctcaatacatacatactgtaataggaagtgagatatgctacttcaagaatggagtatgccaaggcagcgccttcaaggacattcctggagggaggtatttcccagccgcgtcactgtatacgatgcctaacgagccaaactgtgtagtcaagttcaacttcgggccagattttgagttcttcccacaagatttcggaagcctgccagttcctcaaccaatgagcgaggtaactcatcaggcacttgaagtgaagaacgaggggcctaccgagaatggcatcgctgaaaaaactagctagtgtagttagcatgcttttgtataacttatacctatgttaacactaagcaagttatgatgtataagttagccgtagcagttatatctgactggattaatgcttgtgctgttactaaatgggctctatcttctccttgcctgggttaatggtgttattgtagtgctgctgatcgtggataattgttaactggttatgttatgtaagggcaacctgatcaacaattaatcatcgtctggtcgaccactaggtgacaaggtctgaccaagcgctcaagggatatatatattgaaaaaaaatcaagagatgagttttttt

SEQ ID NO: 7064 - DNA, 1873 bp, Zea Mays
cgacctgaatttccatggtaccatttcgatgagtggacaaggccaagatttctggctcgatgtagttttccgatcgagctgggcccaacactaaaacaatctaacgacccaacgacctttgggtccgggcgtgggctgcaattttcaacccatggtcaggtttagatgcgagacaacagaagattacccccgccatttgaacctccaagttcagaaactgaccccctcgtccctccccaccatcgcgatggctgacgacgccgcggcggcggcgttcgcgccctctccctcgccaccgtcacccgtagcgcaacctctgcccgacctctccccgccgccgcccttctccccaccagccggcacccctgcttccggggcgcagacgccgagcctcccggacaccccggcctccctagatccggacacccccttctccgacgccaccccgacccccgccgacgcctccgacgccgccctcgcttcggacgacggcatcaccaacccgtcggggggcaccgccggcaagcacatgacgctcgcgccgcccgccccgcccgccaagaaaccgtccaagaagaagggcggcaacagcgtctggacccgcccggcctcccgcaagggcaagaagaaggcgaggcagccgggcggcctcggccacggctccggcggccccgccggggccgccagaggctccaaccctaggcccaacgccggcggcgaggaggagttcctcctcgtccccgcgacccgcctcgccgccgagcgctccgacgacgcgcccggccagcctgtgctcctctcccgcgtcttcaagtccgagcggatcgagctctcagaggaccgcctcaccgcggccagcaccaagggattccgcatggtgcgcgcgacccgcggcgttgcggcaggggcgtggtacttcgaggtcaaggtcgtgcacctcggccccaccggccacacccgccttggatgggccaccaacaaggctgacctccagacgcccgtcggcttcgacgcctatgggtttgggtaccgtgacgtcgatggcgccaaggtgactaaggcttggagggacaagtatgctgatgaagggtacggggaaggagatgtcctggggttctacatttctctgcctgatggggagcggtatgaaccgaagcagcctgacctgattcagtacaagggaatgccttttcacgtccaagtccccaaggaggagcagaagacgccggatcctgtccctggaagtgagatatgctacttcaagaatggagtatgccaaggcagcgccttcaaggacattcctggagggaggtatttcccagccgcgtcactgtatacgatgcctaacgagccaaactgtgtagtcaagttcaacttcgggccagattttgagttcttcccacaagatttcggaagcctgccagttcctcaaccaatgagcgaggtaactcatcaggcacttgaagtgaagaacgaggggcctaccgagaatggcatcgctgaaaaaactagctagtgtagttagcatgcttttgtataacttatacctatgttaacactaagcaagttatgatgtataagttagccgtagcagttatatctgactggattaatgcttgtgctgttactaaatgggctctatcttctccttgcctgggttaatggtgttattgtagtgctgctgatcgtggataattgttaactggttatgttatgtaagggcaacctgatcaacaattaatcatcgtctggtcgaccactaggtgacaaggtctgaccaagcgctcaagggatatatatattgaaaaaaaatcaagagatgagtttttttttagctaaaacaaaacggcacatttgcattccattagttgtt

SEQ ID NO: 7065 - DNA, 1309 bp, Zea Mays
gaggaaatccggcccatcaacaggcccattggggagtggaagtggccggagaacattgcagggcggagcgcaacccccacgcccgaccggcccgggatgtccaccggactttcgcagctctctggcggcgtcggcggcgaccggggctcctcctcctccgccggcccccaccaccagcacagccaccacccacctcccccgccgccgcccaagatcctcctcgccaagccgccgctgccgcacgcctcgtcctcgggcgccgatgacgacggcgggaccggggtcgcgggtggccgcgcgcgccaggcgccgcagccgggttcgctcagcctcgtctccgacgcgtgggaggcccacaccgacaagatccttccgtatctgacggagaacaatgatttcatggtgattggggtaattgggccgcccggtgtaggcaagtcgaccatcatgaacgagctttatggatatgatgcgagctcacctggaatgcttcctccttttcctacacaaactgaggaaaccagattgatggggaaacactgtactactggtattgacatcaggatatctaatgagcgagttatactccttgacgctcagcctgtgtacagtccctctgttctaatcgatatgatgaggccagatggttcatccacaattcctgtccttaatggtgaacccttatcagcagacttagctcatgagctaatgggaatccagattggtgttttcttggcatctgtttgtaatatagtgttggtcgtgtcagaaggtatgaatgatttgtccatgtgggagctcatgcttacagacatggcagtaatgcagaaggctgaatggcagaaggctgaatggatgttccaatacatttatgcaggttgatttattgaagcacgggatacctgatccgtccgtgttgacgtcatcagcttcccaagacaaggaaaacaaaaacgaagaccaaacgggctgcgaagactatatttccgatctctgtttcgtgcatactaggctgcaggggcaagatttttctccttcaaagttcatgcttctaaggagaactcttgagaagcacttcaactcatccacttttagagtcgggagctctaatgcaacgggtcatgcttctgattcgctggttccttcaagcacgaaagttgaagatttaacctccagtcggcaggacatatttcttcttcccctgagagggcacgacgactcgacaaagtttgagtatggaacgtactcgtgcatgctaggcatgatccgtgatcagacatggctttgtaggtctgacgcgaacactgtg

SEQ ID NO: 7066 - DNA, 1847 bp, Zea Mays
ctgtactctaggcagagccagcccgttggggacggaaggcgcgcagatccaactaagttgttaacttgacacttattgatcttcctggactgacaaaggtcgctgtagaggggcaagcagaatctattgttcaagatattgaaaacatggttcgatcttatgttgacaagccaaattgcatcatcttggctatctccccagctaaccaagatatagcaacgtcagatgctatcaagcttgccagggatgttgatccttcaggtgacaggacatttggagtcttaacaaagcttgatttgatggacaagggtaccaatgctgttgatgtacttgaagggagacaatatcgcttacaacacccctgggttggaattgttaatcgctcacaagctgatatcaacaagaatgttgatatgctttcagcaagacgcaaagaaaaagagtactttgagagtagtcctgaatatggtcacttggcacataaaatgggtgcagagtatcttgccaagcttctgtcacagcatttagaggctgtgatcagggccaaaattccaagtattatagccttgattaacaaaacaattgatgaaatagaagcccagttggatcgacttggtagaccaatcggaggtgatgctggggctcagttgtacacaatcttggatatgtgtcgtgcatttgaccgtgtctttaaagagcacttggacggagggcggccaggtggagatcggatttatggtgtctttgacaaccagttacctgcagcactgaaaaagcttccatttgaccggcatctttcaatgcaaaatgttcgtaaagttatttcagaggctgatggttaccagccccacttgattgcccctgagcaaggatacagaaggcttatagatagttctttaagctactttaagggtccagctgaagcgtctgttgatgcggtccatttggtcttaaaagagcttgttcggagatcgattgcagcaacagaggaattgaagcgatttccaacacttcaatcggatatagcagctgctgcaaacgaaagcctggaaagattccgcgaggatggacggaagactgttcttcgtctagtagagatggaagccagctacctaacagtagaatttttccgcaagcttcctactgaaccagagaaagcggctgataagaacactccagtgagtgatagatatcaggacaatcatctcagaagaataggatcgaatgtgtcatcttatattaacatggtctgtgagactctgaggaacacaattccgaaagccgtcgtacattgtcaagtgaaagaggcaaaaagaaatttgcttaaccgtttctatgctcatgtgggaagcaaggagaaacagctgagtgcgatgttggacgaggaccccgctttgatggagaagagggatgccctggtcaagaggctagagctgtacaaatctgcaaggaatgagatcgactctgtcgcatggaaatgattggtttgtgacagccactggtggatcgtagaatgtacaaccgcagcagcacacgtatggattgcagtagaatgatcaattctttttttacatttgaatttaccctggaggccttgcacgtgattttcgcgagtcttttgccgaacacatgcttatttggccgtcttggcccattcacgcgattgtgttatgggaggatgttctggtctccagttgatataagagtatatatgtattctttgttgattttactgccttgatggcctccatacttttattgggtggggtgccaggctggacaatctgtcagatgctacaaaatgaaattgtgggataggatgaccaactgtacatttctggttttgg

SEQ ID NO: 7067 - DNA, 1857 bp, Zea Mays
caggagggaacgccgagcggaggtcgctggtggaggaggggacggaaggcgcgcagatccaactaagttgttaacttgacacttattgatcttcctggactgacaaaggtcgctgtagaggggcaagcagaatctattgttcaagatattgaaaacatggttcgatcttatgttgacaagccaaattgcatcatcttggctatctccccagctaaccaagatatagcaacgtcagatgctatcaagcttgccagggatgttgatccttcaggtgacaggacatttggagtcttaacaaagcttgatttgatggacaagggtaccaatgctgttgatgtacttgaagggagacaatatcgcttacaacacccctgggttggaattgttaatcgctcacaagctgatatcaacaagaatgttgatatgctttcagcaagacgcaaagaaaaagagtactttgagagtagtcctgaatatggtcacttggcacataaaatgggtgcagagtatcttgccaagcttctgtcacagcatttagaggctgtgatcagggccaaaattccaagtattatagccttgattaacaaaacaattgatgaaatagaagcccagttggatcgacttggtagaccaatcggaggtgatgctggggctcagttgtacacaatcttggatatgtgtcgtgcatttgaccgtgtctttaaagagcacttggacggagggcggccaggtggagatcggatttatggtgtctttgacaaccagttacctgcagcactgaaaaagcttccatttgaccggcatctttcaatgcaaaatgttcgtaaagttatttcagaggctgatggttaccagccccacttgattgcccctgagcaaggatacagaaggcttatagatagttctttaagctactttaagggtccagctgaagcgtctgttgatgcggtccatttggtcttaaaagagcttgttcggagatcgattgcagcaacagaggaattgaagcgatttccaacacttcaatcggatatagcagctgctgcaaacgaaagcctggaaagattccgcgaggatggacggaagactgttcttcgtctagtagagatggaagccagctacctaacagtagaatttttccgcaagcttcctactgaaccagagaaagcggctgataagaacactccagtgagtgatagatatcaggacaatcatctcagaagaataggatcgaatgtgtcatcttatattaacatggtctgtgagactctgaggaacacaattccgaaagccgtcgtacattgtcaagtgaaagaggcaaaaagaaatttgcttaaccgtttctatgctcatgtgggaagcaaggagaaacagctgagtgcgatgttggacgaggaccccgctttgatggagaagagggatgccctggtcaagaggctagagctgtacaaatctgcaaggaatgagatcgactctgtcgcatggaaatgattggtttgtgacagccactggtggatcgtagaatgtacaaccgcagcagcacacgtatggattgcagtagaatgatcaattctttttttacatttgaatttaccctggaggccttgcacgtgattttcgcgagtcttttgccgaacacatgcttatttggccgtcttggcccattcacgcgattgtgttatgggaggatgttctggtctccagttgatataagagtatatatgtattctttgttgattttactgccttgatggcctccatacttttattgggtggggtgccaggctggacaatctgtcagatgctacaaaatgaaattgtgggataggatgaccaactgtacatttctggttttgg

SEQ ID NO: 7068 - DNA, 1422 bp, Zea Mays
tctgcctgacactcccagctccttttgtagctgcacacttcactaatctgagcttaactggcagctcagtccatggactcaatccttgaggtgctggcacaggacgatatgctgaacgcaaaggagctggtccaatgggagaatggcttgtcattcaatgacatagcggctaggcaggggattcgcatccgcagacactgccgccccactgcctccttgaaggagatagaggaggagctgggagccccccttaacatcctagagaagatcatttgggacaaggagattgaagtagctgaggggcatgctaagaagcctcttgaggaggtgattcaggctgcaacgaaagcccctccttcaagagacttctatggcgctttagaagctgcctacaagcgtaatggggtgcctgcattgattgctgaggtcaagaaagcatccccgagtaggggtgtgctcagggagaactttaatcctgttgaaattgctcaagcttatgaaaagaatggagctgcatgtttgagcattttgacagatgagaagtactttcagggaagctttgataatcttgaaaaggtgcgcagctcaggagtgaagtgccctcttctctgcaaggagtttgtcattgacaagtggcaaatctataatgctcgctctaagggtgctgatgcaattctactaattgctgctgtgctaccagatcttgacataaggaaatttcttcagatttgcgaagagttgggaatgacagctcttattgaggttcatgatgaaagagagatggaacgtgtgctgaagataaatggagttaagcttattggtatcaataaccgaagccttgagacatttgttgttgatacttcgaacaccaagatgttgctcgagaaacatggggatatcatcagggagaagggaattttggttgttggtgaatcaggtctgtttactccggatgatgttgcttatgttcagaatgctggcgtttctgctgttttggttggggaatccctggtgaagcaagagtgccctggacgagccattgttgggttatttggcaaagaactgctgcactgaatgagaggacaaagattgtagtagtacatggtttggtggtgaggtgttagtgctaggctgctagctgttagccatagcatcatttgcagtaatagcattggttttattaataataccaccgaatgtgacatgcagaataaaaataatgttcaataagttccattcagtgattttctttagttcagtgacaaacgaatgcgatctgttcatgacagagggggatctcccaagctagttagcactatgttttttttttaaatctgtaagtggatttgacgggtctaaattattggaaaccctaactaggattggagttgggagatatattacataatagagttatatgcg

SEQ ID NO: 7069 - DNA, 1973 bp, Zea Mays
agccggaaccaataaagtgaacgtaaaccaaaatcaatccatccccggtgcagaacgcccaacgggcaacggctgtgctgccaaaagtccggaccacagctcgcgctgcccgccgcgccttgcccagacgtgcgctcccttctcccgcgccgtcgcctctgccctggccgacccgctgggcccagtgtgcgcagccctcccgggttaaggcggaggtgcttggggacccgctcccatggcgagcgccggcatcagcggcagcggggacgacgatgcaggagggaagctcttggcggatcgctaccagaagggcgaggtcctcggcgagggcacgtacggagtcgtcttcaaggccatcgacaccaagactggaaatacagtcgcggtaaagagaatctgggtagggaaggacaagaaggaaggtgttaacttcaccgcattgagggaaattaaactacttaaggagctgaaagatgctgttaaaaggtctatcgttctgtcataagaaatgggtgatacacagggatatgaagccaaataatttactcattggtgccgatgggcagctcaagcttgctgactttggtctggcccggatgtttgggagtccaagaaggaacttcactcaccaggtctttgcacgttggtaccgggcaccagaattattatttggttcgaagcactatggatctggggtggatatttgggccgctgggtgtatttttgctgaactgcttactcgcagagcctttctccagggttctagtgacattgatcaacttgggaagattttcgcagcacttgggaccccaaaatcttctcaatggcctgacatggtgtatcttcctgattatgttgaataccaatatgttgctgcaccaccgctacgtacattgcttccgatggccagcgatgatgctttggatcttttgtcaagaatgcttacgtatgatccgaaagcaagaatcagtgctcagcaggctctagagcacaggtacttttcatcgttacctgctccaacaagaccatcacagcttctaaggtcacggtggaaaggagatcaagggaataacaagatgcccgatctgaacctgcagcatggccctctggtgctctctccgccaagaaagttacgtagggtgatagcgcatgaatggatggaaggtatgcacagagcagataaagtggacgagcatccttctgggatgaggcacaccgatgacatgcccagtcagaagagttctagaattccaatgtcagttgatgttggagctttgtttggcacacgacctgcacctaggccaacattgaacagtgcggacaagtctcgtttaaaacggaaacttgatatggatccagagtttggatttgcggagtaaaagaaactttgttaacgtgcaccattcttttcttactgagatgttggtttcgaaaatattctttgggagatatttccacagttcactcagagaagaggattgcattgaagccacaaaactgcaccgaaggattctgacacgatcaactgggctgttaccgtcatcggctcacgaagaggaaaactaaggagaggtcattctgatttatcctgagtcgcatggggtattatagctaaccgattccgtaaagaaggctcttagaaacagcatgctctatgccatgcgagtggagagtgttatgtggaattgggggcatagaaacgctcgctccagttagaaatgtgtgtttgtgctaaatgtgatctactagtcctccattctccgtggtttcaatttccttcaattcttgtacggacacttagctttgagcattcttcactcagccactctacgtatagtgatttttattgtaactaagagcagtgattttattgtaactaagggcagtgattttattgtaactaagagcaattgttgtgttctcgaaccaacattcaaaactgaataacacgatatcagcgcaatgtggacgat

SEQ ID NO: 7070 - DNA, 1165 bp, Zea Mays
tttgctaacatttcctttccagcgaccggcgagcgcacagccacacgcacagaggggtgttgccgtgtagcagagcagctcgcgccatgtccctgtccgtcggcggcgcgcggacctctctcctcccttcttcgttcaccgcctcttcatcccgcccgcgcttcctcgcgctccctctccaccgccgctcgcacggctccctcacctcgctgccggccgcgtgcaggcggcggctccgggtgcgcatggcccggacggagtccaccggcgtcaccatcggcttccgcgcgccggatttcgagctccctgagccactgactggaaagctctggacgttggatgacttcgagggcaactctgcactgcttgttatgttcatatgcaaccactgtccatttgtaaaacatctgaaaaaggacatcagcaagctcgcctctttctatgtggagatgcattgcagaaaggacttggtgctgttgccatatcgtccaactcagttaggacgcatccccaggatggcccagatcgcatggctgaagaagcagagctgttcaaatatcctttcccatatctttacgatgagtctcaagaggtagccaaggcttttggagcggtctgcacgccagagttctacttgttcaaaaaggatggccggaggccttttgaacttttctaccatggacagttcgatgactcaagacccagtaacaacgtgcctgtaaccggaagggacctaagccgcgcgattgactgtgcgctcagtggccaagaactgccctttgtgcaaaagccaagtgtcggctgcagcatcaaatggcacccatgaggtgcccaccttgttcggcatttgattcggcccaggctcacaggggctgaagatgagacagatctgtgggggagaaacagaaacatgggaacttctcttgtgtgacggcgaaatagtgtagcgctagcgcagcaaccagcaaaaggctcatgtaaagaattgttcacgaaacagaagagcttcacttctaccttctgtaggacatggtcatcgcaaaaggcgttggtattgtttcctgctggaagtaatttctgccgggatggatattcattttcaggatgaattttttttaaaaaaaaataaggtcaaaaagtggcttcgcccggactcgaaccggag

SEQ ID NO: 7071 - DNA, 1528 bp, Zea Mays
cgcgaaagaacttcttgtctccgtatgccaggtggaccgtgacggctcccgtcgagacttcagccgctagcgcggccgtcagggatcatactgatcaaggatctcaaggggaacacatcctaccagagagctatcccatctgctctgaccacgaggagtgcattgcccgtcctgagaggatcaagatccagaaaggtttcgtggccaaggaatccgtgaaggggcacatggttaatgtcgtgaaaggcttgaagatatatgaagatgtttttacaacatcggagatcatgaaggttgcagatttcatcaatgaaattcgtcaggctggcagaaatggagaactttcaggtgagactttcatattcttcaacaagcagatgaaaggaaacaagagggagatcatacagcttggtgtcccgttatttcaacctaccacagaggaagctaattgtcacacagaaccaatcccccttgtcctgcaggctgtcattgaccaccttgttctttggcgtttaataccagaaagcaggaaaccaaacagtgtcatcatcaacttcttcgatgaggatgaacattcgcagccctacttcaagcctccccatctggacaaccccatttgcactcttctgctgtctgaaactacgatggcatttggcaggtcacttgtcactgacagcaacggcaactacaagggacctctcacactctcactaaagcaagggtccctattggtgatgcgtgggaacagtgccgacatggcgcgccacgtggtgtgcacgtcgtccaaccggcgcgtgagcatcacgtttgcaagggtgaggccatcgacgccggtggatctgagcccactcccgtcccccaccaaggccttgacgccctggcagccgcagccagccacggcctcccaggtgccggcgcccgcgtgcatgacgcagaagcccccggtcagcggcgccatcatcggttatgccccgaccccgcagaccgtgctggcgcccgcggcctggggcatggccatgcgagcgcccgtcatgatggtggccgcagcgcctgcgaggcccatggtgatggcctcgttgggcaccggaggcggcaacatcagcaagtggatgagccgcagcggcaccggtgtgttcctgccgtggacggtcgggccgaagcggtacaacaagcaccttccgccgcgcatccagaagcgccggttctctgcgatgatgtcgcccatcgaggcgcagggctgaggacctgcccgacttcacgtcgccgtcgaacctgtgttttttttttttccttgagggctttcggtccgcctgtaatttagccgggtttgtgacttgtgacaatgtgagtgagtagcggtttagcggagttcagaaccggtagaggagtacgagcgtagggataggtgaaggcagaatcagggcagggttttccttttgttttcatcctgtccccctattttccgttccgagtaaaacttatggatgttgttgtcatacatgcatcagcagctgagtttggattcccc

SEQ ID NO: 7072 - DNA, 2288 bp, Zea Mays
cacgcgccccctactacccccgttgcccgtccggtccgaccccccgtaggtcgcaggcacaaaagcgacctggcccttaacggcaattcagcctcgacgccggatccgcgcttcccgactcgccgctacgtcacccgattggggctggccctggccacgggcacccgccgaggcatttataagtacgagcgcccgggtgagccagagccccacacaccgtcttcctctgttttgccagggccaacgccattactagaagtctagaagagaggtggggaggcagagacgagaggcgtagggaattcgggggagagagagagaggcagggcggtgacgagcttggactggcgatcgcgggagcgatgacgacggcggccggcatgccggggtcgccggtgggctcggccgcggcggctggcggtcccgcggcgcccgaggtggcggccatggacgcggtgatcgggtggttccgcggcgagttcgcggccgcgaacgcgatgatcgacgcgctgtgcggacacctggcgcagatcggcggcggcggcggggccgagtacgaccccgtcttcgccgcgctccaccgccgacgcgccaactggttccccgtcctccacatgcagaagttctaccccgtcacggacgtcaacgccgagctgcgccgcgtcgcggccgcccgcgccgccgcggggccctgctgctactcggaggaggaggtcgcgtccacggtgatccacgatcccatggaagacctcccctctgaggcggagcccgaacccaggccggagcaccagcaggatcctatacaccaggatccggctccggaggccgaggaggctgacggcaccgtcatcaaccccgccttggagtgtcacgaggaggcggacgcgggggctgactcctcgggagattcgtcggagcggaaggccccctctacggaagacgacaccgtcccagacggacatcatactgatcaaggatctcaaggggaacacatcctaccagagagctatcccatctgctctgaccacgaggagtgcattgcccgtcctgagaggatcaagatccagaaaggtttcgtggccaaggaatccgtgaaggggcacatggttaatgtcgtgaaaggcttgaagatatatgaagatgtttttacaacatcggagatcatgaaggttgcagatttcatcaatgaaattcgtcaggctggcagaaatggagaactttcaggtgagactttcatattcttcaacaagcagatgaaaggaaacaagagggagatcatacagcttggtgtcccgttatttcaacctaccacagaggaagctaattgatgaacattcgcagccctacttcaagcctccccatctggacaaccccatttgcactcttctgctgtctgaaactacgatggcatttggcaggtcacttgtcactgacagcaacggcaactacaagggacctctcacactctcactaaagcaagggtccctattggtgatgcgtgggaacagtgccgacatggcgcgccacgtggtgtgcacgtcgtccaaccggcgcgtgagcatcacgtttgcaagggtgaggccatcgacgccggtggatctgagcccactcccgtcccccaccaaggccttgacgccctggcagccgcagccagccacggcctcccaggtgccggcgcccgcgtgcatgacgcagaagcccccggtcagcggcgccatcatcggttatgccccgaccccgcagaccgtgctggcgcccgcggcctggggcatggccatgcgagcgcccgtcatgatggtggccgcagcgcctgcgaggcccatggtgatggcctcgttgggcaccggaggcggcaacatcagcaagtggatgagccgcagcggcaccggtgtgttcctgccgtggacggtcgggccgaagcggtacaacaagcaccttccgccgcgcatccagaagcgccggttctctgcgatgatgtcgcccatcgaggcgcagggctgaggacctgcccgacttcacgtcgccgtcgaacctgtgttttttttttttccttgagggctttcggtccgcctgtaatttagccgggtttgtgacttgtgacaatgtgagtgagtagcggtttagcggagttcagaaccggtagaggagtacgagcgtagggataggtgaaggcagaatcagggcagggttttccttttgttttcatcctgtccccctattttccgttccgagtaaaacttatggatgttgttgtcatacatgcatcagcagctgagtttggattcccc

SEQ ID NO: 7073 - DNA, 3523 bp, Zea Mays
atgagcgcccagtatatgctacagcaccggcgcccctggccctgccgcctgcgccgctcgttgccctgtgcactccgcgggcctcgggaatggccaaccaggacatttatcggtttcttttgtatttggataacctataaaggtctcagcacccagtatgatttggttggcaaaggatgttttctccagaataatgaaagtttagcttctggttcattttattgtctggtcgatcttttttatactgtgataaaatggggaagcactcagctgaatctggggttagtatgttgttgcatggagacttggacatacaaataattgaagcaaaatgtctccccaatatggatctcatgacagaaaggatgcgaaaatgctttactgggtatggagcttgcagcaatgattgtgggaagtcggaaccaccacacccggacatgagaaagatcatcactagtgatccatacgtttcagtttgtctgtcaggagcaacggtggcacaaactcgagtcattgccaactcggagaaccctaaatgggatgaacacttctatgttcaagttgctcattcagttagcagagtcgagtttcatgtaaaggacaacgatgtttttggggcagagcttatcggcgtggcttcaataccagttgagcacatcatgccaggtgatttggtcggtggctggtttcccatttctggtcagtacagtaatcctatgaagccatctcctgagctgcatttgtctatccagtataagccaatcgacacaaacccactatacaaggatggagttggtgctgatggccatcagagtgttggtgtcccaaatgcatatttccctcttaggaagggtggtaaggtcacactatatcaagatgctcatgttcctgacaattttcaacctcatattgagatggatgatgggaggacatatgaacaaaacaaatgctgggaagatatttgtcatgcaatcattgaggctcatcaccttatctacatagtcggctggtccttgtatcaccctgtgaagcttgtaagggaatcaacaaaacctgttcccaatggaaacccagtcactattggggaaattttgaaacgcaaagttcaagaaggagtccgtgttatagtgttgctttgggatgataaaacatcacatgacaaatttctcttaaaaacagtggaatgcaggatggtctcatgcatacacatgatgaggaagctcgaaaatatttcagacattcaggtgtccattgtgtgttgtctcctcgctatgccagcaacaaacttagcattttcaagcagcaggtttggatattgtttctcccttgttacatacatgtacgctgaattgctagtttcctcatatcatgtactctttcttattttctctgttggttctttgtcctttcatatacattgtgactcactcaacatcctgtgcattgtcttccaaaacgtgaacctacattttgagctaatggaattttgaacttgtacagaaacagaagatgtccgcttgcattttattcaggccgaggctgtatatatctttttgttcggataaaaagttgcgagttagagataaagttggtagtttgatatatatgctgctgaaaaatgaagattcaaatttgcattgtgtatgtataacattcttgtgaaccttgggtagaaaaaagtgatgaactgttggctaggtatatgagcattctgcttgctgttggttgtaggaactttgtttacacaccatcagaaatgtgtcattgtagacacccaagccacaggaaacaatcgaaaaataactgcttttattggtggtctagacttgtgtgatggcagatatgatacacctgaacacaggcttttcaaggatttagatactattttcaaggacgatttccacaacccgacattccctgttaataagaatggacccagacagccatggcatgatttacattgtaaaattgagggtcctgctgcatatgatatacttacaaactttgaacagagatggagaaaatctgcaaagtggaaagttagcgtcagaagagctgtgagttggcatcatgatacattggtaaaaattgatcggatgtcatggattgtttccccctcttcagatgaattaaatgcacatgtttgtgaagaaaaggaccctgaaaactggcatgtacaggttttccgatcgattgattcaggatctgtaaaaggattcccaaaacttgttcaagaggctgaatcccagaatcttgtctgtgcaaagaatctgcagatagacaaaagcatacacaatgcatatgttaaagcgatcagatctgcacagcacttcgtctatattgaaaatcagtactttattgggtcttcatactactggtctgcacaccgaagtgcaggtgctgagaacttaataccaattgaattggccataaagattgcaagaaagattaaggcaaaggaaaggtttgcagcatacattgttataccgatgtggcctgaagggaatccgacaactgccgctatgcaggaaatcctctattggcaggggcataccatgtccatgatgtacaagattgtcgcagatgctctacgaaaggagggtttacatgaaaggcatccacaggagtacctgaacttctattgccttggcaaacgtgaagtctcgaatgaagttccgacgacaggcaattctaatgagaactctgcagtgcgtttgtcccagaaattcaagaggttcatgatctatgtgcactcaaaagggatgattgtggacgacgagtatgttctcatcggatcggccaacataaaccagagatccatggacggctcacgggacacggagatcgccatgggtgcataccagcctcactacagctgggctggaagcggcaggcctcccagaggacaggtgtatgggtacaggatgtctctttgggcggagcacctgggcacagtgcaggagtgtttccgccggccagagtccgaggagtgcgtgcagcaggtgaaccagatggcagatgacaactgggcgagctatgtctcgccgcagatggcggatatgaagggccacctcatgaagtaccccgtgagggtcgagcaggatgggagggtggggccgctgcatgggcaggagagcttcccagacgtcggtggcaaggtgctggggacgcactcgtcgctccccaatgcgttgacgacgtgagtactgagttggatgtagctcgaagaagctcgaaggtggcaggctggtaaatggtgagctgaagctctgctcgtcagaatcactggacgtggtgcaacaaggggttgatacattggaaagttgctgatccgatttctagctttaaggctgtttgtatgtatatttatattgaaaaagcgaaagatgtgatatccaagatgaatggagactaatgagaaaatgtttgcttcaattagcttgtggttacaactgattatatattgaggacaaaaaccttcaaaaaacgatcctcttcacggttaataagtgcttgttcggtt

SEQ ID NO: 7074 - DNA, 2200 bp, Zea Mays
cggacaccggtgtctgcttggaccaaatccgatctcgtggccacggccagaacacacctcctcacgtccacctgacctcttgctcctccccaataatgcccagtgcggcagtgcctgccaccgtctaagcccaccccaagtctccgccgtcaacccgtcctcccccatggccgccgccgccgccatctctctatccttccactttcgtttccgcccgccctttccatctccacgtacccccacgcgccacgctcccttttccttgttctccccttcccttcttgccccctgccgcctccgcgtcgctcccggccgcccctcaccgtccccgtggcgccccgacgtgcgggcgcgcgctggaagcaccatcggggcgccgcctgcgcttgtgcgcccaggcggagccgtggagacggaccgcctcccctccgacgtgcgggaccgggccatggaggcggtcgaccacttcggcggtcgcgtcaccataggagacgtcgcttctcgcgctgggctgcagctcgcgcaggcggagcgcgcgctccaagcactcgccgccgacactgaaggcttcctggaggtatcggaggacggggaggtgctatacgtcttcccaaaggactacagggcaaagctggctggcaaatcgtttaggatgcgggtcgagcctctggttgacaaagccaagcaagtgggtgcttatctggtacgtgtttcatttggcactgcgctcattgcctcaattgtgctggtgtacactacaatcattgccattctctcaagctcaagtgatgaagatggtcgtgggaggcggaggagatcttatggttctactatcatcattccgacggatatgttttggtacttggatgcagattattatagaagacgtcgagtagaaaacgaaaatgggatgaactttattgaatctgtattttcatttgtgtttggggatggtgatccaaacgatgggcttgaagaaaagcggtggaagatgattggacagtatatttcatcaaatggtggagttgttacagctgaagaactggcaccatttcttgatgtgccacctccatcagaagagtccaaggacgatgaatcatttgttcttccagttcttttacgctttcagggacatccagaaattgatgagcagggaaatatcctgtatcgattcccatcgctgcaacgtactgcttcatcaaaaagtggtaggagcagggaatatgtgggtaccaaatggtctgcaatgtttagcggagttgaaaagtacttagaggagaaaccgtggaaattcagtaaagcgaatgcaacagagaaggcgatggttgctggtttgggaggactcaatctctttggtgtcatcattcttggaaacttgttgaagcaaatgacagtgacacctggtggactaatctcatttgccgcacagttatatcctttgcttcagatatacgctggctccttttttgcaatacctttgtttagatggtttctgctacgcaagaccaacaatggcattaaaaagaggaataaggccagagaacagagagctcaggagctcgtgtcaccagattcttctctaagaagaaagttgctcagtgcacgtgatatggctgaacggaaagtaatcacgccagaggagattgtctatactactgaaaaggatctattggagcaggattatgaagtcaaggagtgggagaggagatttaaggagctcgagtcagagtgatggacatgaccgatatacttgacacttgcagtagctctacatggtcctcaccatacttgtcggtgatttttatccgcatccaacggagtggaagatggatctgactgaaccactcgagcaagcgaaactggatggtactggacctcactaattgtcgtgtcaccaccagcccaccactgaccacttcgctatggaagttttgtggaagctgttggtttaattggaaccgaccattatttgcaagatgatgttcgtatctgtgccattgacctgcatatatgtatagttccaatcacggatcaaattcagaatttgacacgaaaaagaaaaaaaacagggaatatggctaggatgctactcggtttgaatggagtccaatcaaaacatgtaaaaaggtcagcctgtgaacagggactcagactgtttgctgcggctttaatccactggctcctgttttttcataaaaaa

SEQ ID NO: 7075 - DNA, 2703 bp, Zea Mays
ggaccaaatccgatctcgtggccacggccagaacacacctcctcacgtccacctgacctcttgctcctccccaataatgcccagtgcggcagtgcctgccaccgtctaagcccaccccaagtctccgccgtcaacccgtcctcccccatggccgccgccgccgccatctctctatccttccactttcgtttccgcccgccctttccatctccacgtacccccacgcgccacgctcccttttccttgttctccccttcccttcttgccccctgccgcctccgcgtcgctcccggccgcccctcaccgtccccgtggcgccccgacgtgcgggcgcgcgctggaagcaccatcggggcgccgcctgcgcttgtgcgcccaggcggagccgtggagacggaccgcctcccctccgacgtgcgggaccgggccatggaggcggtcgaccacttcggcggtcgcgtcaccataggagacgtcgcttctcgcgctgggctgcagctcgcgcaggcggagcgcgcgctccaagcactcgccgccgacactgaaggcttcctggaggtatcggaggacggggaggtgctatacgtcttcccaaaggactacagggcaaagctggctggcaaatcgtttaggatgcgggtcgagcctctggttgacaaagccaagcaagtgggtgcttatctggtacgtgtttcatttggcactgcgctcattgcctcaattgtgctggtgtacactacaatcattgccattctctcaagctcaagtagtgatgaagatggtcgtgggaggcggaggagatcttatggttctactatcatcattccgacggatatgttttggtacttggatgcagattattatagaagacgtcgagtagaaaacgaaaatgggatgaactttattgaatctgtaatttaaaagggtattttcatttgtgtttggggatggtgatccaaacgatgggcttgaagaaaagcggtggaagatgattggacagtatatttcatcaaatggtggagttgttacagctgaagaactggcaccatttcttgatgtgccacctccatcagaagagtccaaggacgatgaatcatttgttcttccagttcttttacgctttcagggacatccagaaattgatgagcagggaaatatcctgtatcgattcccatcgctgcaacgtactgcttcatcaaaaagtggtaggagcagggaatatgtgggtaccaaatggtctgcaatgtttagcggagttgaaaagtacttagaggagaaaccgtggaaattcaggtcagtatatatcatcaccatccttagtgaagttgaactaatccaggatgcaatttgtcctttgcgggggaaggtttgccttggtttttccccttccttgacccaattcatatgggagcctccggcactgggtctaccctatgccctttatacacctacctgttgattttgcagtaaagcgaatgcaacagagaaggcgatggttgctggtttgggaggactcaatctctttggtgtcatcattcttggaaacttgttgaagcaaatgacagtgacacctggtggactaatctcatttgccgcacagttatatcctttgcttcaggtatggctgggcttgatatgcctgtttagtactctataatgtggtcattactctagtcattccatttatacatatttggcctgacagaaatcacgagcccttctctttgttaaggggatttccagatgttttgaatgttgcaaaatcgatgattgctgaattacctgtgaattaataagattgtcaatgatatgtactgatacaatgtggtcatttctagatatacgctggctccttttttgcaatacctttgtttagatggtttctgctacgcaagaccaacaatggcattaaaaagaggaataaggccagagaacagagagctcaggagctcgtgtcaccagattcttctctaagaagaaagttgctcagtgcacgtgatatggctgaacggaaagtaatcacgccagaggagattgtctatactactgaaaaggatctattggagcaggattatgaagtcaaggagtgggagaggagatttaaggagctcgagtcagagtgatggacatgaccgatatacttgacacttgcagtagctctacatggtcctcaccatacttgtcggtgatttttatccgcatccaacggagtggaagatggatctgactgaaccactcgagcaagcgaaactggatggtactggacctcactaattgtcgtgtcaccaccagcccaccactgaccacttcgctatggaagttttgtggaagctgttggtttaattggaaccgaccattatttgcaagatgatgttcgtatctgtgccattgacctgcatatatgtatagttccaatcacggatcaaattcagaatttgacacgaaaaagaaaaaaaacagggaatatggctaggatgctactcggtttgaatggagtccaatcaaaacatgtaaaaaggtcagcctgtgaacagggactcagactgtttgctgcggctttaatccactggctcctaacagtgctaggaatagacgtactgttataaaaacttccaggtggaccaattcacgatgggaacctaacattttcttgcattaagctgaaacgtgtatctcctgcctgcgtttgtcattgcgaacgag

SEQ ID NO: 7076 - DNA, 1392 bp, Zea Mays
gttgtccatctatttcaggctctatgccgtgggtatcctactgagtttgcatcatatttccattattgccgctcactgcggtttgatgacaagcctgactgttcatacctcaagcgattattccgtgaccttttcattcgcgaaggttttcagtttgactatgtgtttgactggacaatactgaagtaccaacagtctcaaattgccactgctccaccccgtgcagtaggccatggcgcggggccttctgggttggcacccgtgttacagaatgataggcaatcaggccctgaggaagcaaggactagtggttggtcatcaatggatcggcgtcgtgccccactaccaattacaagtgtggggacattatctaagcagaaagcaccgatagggaatgatgctactgtttctagagatgctgtgatatctggaccaaattttatgggaaggtcaagtggatcttctaggaggcctgttgtttcgagtagccgtgatatggtggccactgacagttccgagccttcacgagcacgtgcaaccgacgcaagcccaggggcgttccgcagagcctcaggtcctcagagaagctcacctgtccattccgcagaacagaagcgctcatcctcaggccggcatccgtctaacgtgaagaactacgattctgctctcaaaggcattgaaggtcttcattttgatggcgacgagagggttcagtactagagccgcaggaaattctacatgcactgtaaaaatcataatcaggtggtaagcatcgtgtttcctgttcgggttttggatcaacaggaaatgaaatgctggaaggaggatctggtcacgggttgtgcggtttcaggtggtcctctgagcaaggtaaataaacggtcctatctgaggcgcttcatgcctagctctcataacgttgtcgttgtgtacgtaaatgcctcttgtagcctgaatgtcaggcgcccggattcatgaatctattttattgttgtattccttacgatgttccatcttgggactacaatgctgcaactggtagggcttgatttggaacactggaattcgagcatgtagaatttttaaatcggttcattggacgaatttgtctgtaacacgtacctgacttgtaatgtgatctgtcaggacaactgatgttatttgccaatgtgataatcagttcatccatctcttcacgcacctgacaatattggttggcctgtttggttcggcttttttatgaatagcttttctgaaaagctggttgtggagaaaagctggtggttagaatttaggtgtttggttcgcctgatgtggagaaaagctgttggttagaatttaggtgtttggatacgcagattctcagattgcagattctgtttgaacaaacga

SEQ ID NO: 7077 - DNA, 1066 bp, Zea Mays
gtgaaatgcatgaaaaaatattccctcaaaagaaattcataagccaatgtttcttaataggagttcccatggaggccactggttcacttcagatatggaggacatttcagaaatattcagagtcgcagataaagataagtctggaaccttgactgtgaaagaaattcaagatatccttgatgatatctacgtgaggtacccgcaagtacagctctaccttaagagcaagcagatgaacggcatcgctgatctagtgaggagcgccaaaggagacgctgagaaggaatccgtggaactgaacatcgaggaattcaagaaggctctttcgctcgtggattcacaagtcaaattcttacctgcgaccgctcaggtcgcatcgcagcagggccaatatcttgctaggtgctttaacaagatgaaggatgctgaagaaaaccctgaaggcccaatccgcatcaggggagaaggccgccatcgcttccgccccttcaggtaccggcatctgggccaattcgccccactaggaggggagcaaactgctgcacagcttcccggggactggatctccattggccacagctcccagtggctctggtactccgtgtacgcaaccaaacaaatcagctggcgcacgaggatgctggtggtatcagactggacacgccgattcatcttcggaagagactcgagttgcatatgatcaagagggaaaagattttgctgtgacatatattcagatgaacgaggccagtacagcctcttcccactttttttttagtctgatttcacataaatgttccccttttgttgttagggaagaatctgacttcccctgcactttgtatagtgcaccacgaagaaattcctttgtacctaccttttctttttgagagagttgcactgcacttttgcggtctgagtaagctcagaattcttttaatagctattttttctaccactaatatgtgatatggagaagggtcagtttggacctgattttgttgtgtgaaatcctgttttggctactcattgtgtgctgaactagtggttcagttggttacatgaa

SEQ ID NO: 7078 - DNA, 1646 bp, Zea Mays
gcccactgcttgccctcatatcgttacgctgaaattcaaacgacactgcgtgaggaaatcaaaagtgcttgcgaataccgtccatttgaaaagtgtgattacagcgcaaggattgctaatgagatatgttgcaagaagctggagtatgtactcgagaagttggatacaatgcaacaaaaccttgaacagagcactgataatgtttagcgagctggctacatattagtaagtgtacccccttttttttgcaataaagtgtaaactcttagcaaataaggactactgtataatgaaagaatccgtttaatcaagtgatgttctcaatactctgcctgcagtggtagagttggtgaattagctcttttcagttcctggtacatgcaaaatgcaaccagtatacactacatgacttccgttgcattatacgttacatgtctacagggacttttattttgatttgtgaatttgcttgcagaagttctttcaatttgtatcttgatgttagccttcatcttctcatcctcgatgtgtgattctgttgtttgtgagggtaatgtttaaccagacatttgtatgcaaatactatgctgatatcatctggtatgtgcttttgtaatatgtttatttggtttggtgatgtctgggttaggtatcttcctgtgtgcttccatatgtccacaagggggtagtcctcttttttttgccccatcgtccatatgtcctgtatacttccatatgtcctgtttgaatacaaagctaatcactagccagctaattatatgtagcccatccaaacagggagctaataagtgggctaatttttatcccaatccccaaccagtcactggccaactagctgaggaaccccatctagtttgggctaaaagcgtgtaccaaccgctcaaacaccaaaaatcccctgattctataataatctcttctggtactcatccttgacaggttgtctgcctatcttctaaatgaggaactggtttcctgagttaaattactcatactctgctgattactttcaggttgggaatacaacagatatctgatcgatcagtatgcagaaggaatgtagaagcattctatcaactcatgattggaggaactctgggattgtaacttgtgattccatgttctgtggcagagttattagttttggctgcctgctgatgtccagtagcatagcaatgggtccttgggcttgaagtcgtgggattttgaggcactatttttaccgacgagaatttcctcttctgtattttatcgacttgcttcatccttaaaacatgcctttggtacattgttaacccatttcttcactggtgatcttcatatattatgcagtgaccgctgttctgattttattgctgatgctggcccgacatccattgcattagaagctcatcaggttttatcggctgcaaatgttgtatgactgtttagtctagcaatctagtttagagagcaagtaagacataaatgagccatttatctgtcactaaccttgaagtctatgacttgtataaaatggctgggtatgccgacaatatcaacctcttcggacatctgattttcggtgtatcttcggatcttcctagtatctttcctgtttgcagacttgttctttaaagggtggg

SEQ ID NO: 7079 - DNA, 1016 bp, Zea Mays
agagcctgtttcgtgcgccagctaattaagttgagccacaagagctagagcagaggagcaccagtgttcacagcatcaaccgatcgattgtcggagccacgaccatggccgaggcagctgctgagaagctggtctgcgtgaccggagctggaggcttcatcgggtcatggctggtcaaggagctgctccaacgcggctacgttgtgaggggcaccgcgaggcaccctgaggaccccaagaatgcccatctgctggcactggatggagctcaagaacggctatctctgtaccatgctgacgtgctggactacatgtcgctttgtcgtgcgttcagcttatgtcatggtgtcttccatgttgcctccccggtgtcgaatgatcctaaccttgtgccggttgctgttgagggaacaaagaacgttctgaacgctgcagcagacatgggagtgcaacgtgtggtgttcacctcatcttacggagctatccacatgaaccctaacaggagccctgaccagactctggacgagggttgttggagtgaccctgaattctgcaaacaaacacagatgcaaggatgaaaacaagccaatggttaagccttacaagttctccacaaaacgccttggtgctttgggtatgaagttcactactttgaaagagagtttatacaacacagtggtcagcctacaggagaatggtcatatcccaatattgctacataagtcatccctatgaggaacaaggatacaaaagatagatttcaacaagatggtgttaatgcctcagttggtatacatggactatgtatgaacatgagaaatatgattctaaaagtgaataaccactcaaattgtccaataaataaaatatggcaaacttgaagttgttgttcaatgtctttttttggaagaagttggtgagcatatattcctatttttctgaaagtatccttcaatatgagtatatcacaatgtaatgtccaaccatatgagcactcaacttttttataattcaaa

SEQ ID NO: 7080 - DNA, 2539 bp, Zea Mays
gtctgttcttcgttggataactagaaaaatttcctcccaaaattgccgccgtcgcctccgtgtccttccacggcagggacccgccggagcatcaccgcctccgtccatgtcgctcaaccgcctcaaggaaaccctccacgcctgttcctcttcctcctccgaaccacggacccaaccgcgctcaccacagcatcctgcccgccttccgcggagacccccaaagacgtccctttcgcagcagctcctccgcctcgaggccgccgcctcttcatcctccttcttctcctccaggcccttacagctcccacccgcccccaggcccccgatcgagaagccgcgggaggatgtcgaaccgccgtcgtcggaggatgaggacgagagaaaaagtcgccccattatccgccgctgcctgcatccgccaccagcggccgccctcgagtcccgcgggccatacgagccacttgtgctctcgctgcctggagagcaccctgtcgtccaggtgcccccatcaataaattgcaggctacttgcgcatcagagggacggtgtgagattcttatacaatttgtatagaaacaatcatggcggtgttcttggagatgacatgggtttggggaagaccattcaaactattgcttttttgtcttctgttattggaaaaggcaatggccatgggcaatcaacaaacaaaggaaagatgactggtcctgtactcatcctctgccctacttcggtgatccggaactgggaaaatgaattttccgagtgggcagaattctctgttgctgtctatcatggtccaaatcgtgatttagttcttggaaaaattgaaaatcaaggactggaggtactcattaccagttttgacactttcagaattcatgataaggttttatgtggtatctcgtgggaacttgtggttgttgatgaggcacatcgtctcaagaatgaaaagtccaagttatatacagcatgcttggggataacaactcaaaagcggtttggtctcacggggaccataatgcagaataagatcatggaattatttaatctatttgactgggtcgtgcctggctgcttaggggaccgagaacactttcgagcttattatgatgagcctctaaaacagggtcagaggctaagtgctcctgagagatttgttcaagttgctgatgcgcgcaagaagcaccttgtttccattcttagggaattcttattgagaaggacaaaagaggagacaattggacatcttatgcttgggaaggaggataatattgttttctgcaaaatgagtgacgttcaaaaacgtgtttatagaagaatgctgcaacaacctgatatacaaatccttattaataaggatgtccgctgtagctgtggaagtcctttacctcaggttgaatgttgcaagagaactgaaccagatggtgttatatggtcttatcttcacagagagaaccctgaaggctgttctatatgccccttctgtcttgttcttcctttcctcgtcaagcttcagcagattagcaaccatctggagctgataaaacctaatccaaaggatgagcttgaaaagcagaagaaagatgctgaacttgcagctgctgtctttggtgcagatattgacttagttggtggtactgctaaaagtgagaacttcatgggtctcagtgatgctgagaactgtggaaagatgcgagcactagaaaggcttctgtcattatggactggacagggtgacaagattcttcttttcagttattctgtcaggatgcttgacatactagagaagtttctcataaggaagggttattgcttttcacgcttcgatggaacaactccgatgaatgcacgccaatcactagtggatgagttcaacagaagccctagcaaacaggttttccttatatctactcgagcaggtaatttaggtgtaaaccttgttagtgctaaccgcgtggtgatatttgatccaagttggaaccctgcccaagacttgcaagcacaagacagatcatttcggtatggacagagacggcatgttacagtatttcgcctacttggtgccggttcacttgaagagctcatttattctaggcaaatatataaacagcagctttccaacattgcagtctctggaaaaatagagaggcgttactttgaaggtgtgcaggaactagatcccaagtgttattttttcatcagcgcatcaaattcagcattgatggcgttcttccaaagttccaattgtcgtcacctagagcttcagacatgtcttgaggttcaccggtggtggtaaaacaaccatatttaatgagtaatttttccatcttgtgatcttgtccgaggacgctggtctatgtaaatagtgagaacgggaggtcggtggggtgatggagttgttggtcctgatgaaaccgtgcactgatgtcgagtcatctgaaggttctgttgcactactttctgctacttaagggaccggtagagctcgatgatgttgctgcattgtgatcaggcgcatcagagacatgatctacac

SEQ ID NO: 7081 - DNA, 3336 bp, Zea Mays
caagaaaaataggtgcccccatcaataaattgcaggctacttgcgcatcagagggacggtgtgagattcttatacaatttgtatagaaacaatcatggcggtgttcttggagatgacatgggtttggggaagaccattcaaactattgcttttttgtcttctgttattggaaaaggcaatggccatgggcaatcaacaaacaaaggaaagatgactggtcctgtactcatcctctgccctacttcggtgatccggaactgggaaaatgaattttccgagtgggcagaattctctgttgctgtctatcatggtccaaatcgtgatttagttcttggaaaaattgaaaatcaaggactggaggtactcattaccagttttgacactttcagaattcatgataaggttttatgtggtatctcgtgggaacttgtggttgttgatgaggcacatcgtctcaagaatgaaaagtccaagttatatacagcatgcttggggataacaactcaaaagcggtttggtctcacggggaccataatgcagaataagatcatggaattatttaatctatttgactgggtcgtgcctggctgcttaggggaccgagaacactttcgagcttattatgatgagcctctaaaacagggtcagaggctaagtgctcctgagagatttgttcaagttgctgatgcgcgcaagaagcaccttgtttccattcttagggaattcttattgagaaggacaaaagaggagacaattggacatcttatgcttgggaaggaggataatattgttttctgcaaaatgagtgacgttcaaaaacgtgtttatagaagaatgctgcaacaacctgatatacaaatccttattaataaggatgtccgctgtagctgtggaagtcctttacctcaggttgaatgttgcaagagaactgaaccagatggtgttatatggtcttatcttcacagagagaaccctgaaggctgttctatatgccccttctgtcttgttcttcctttcctcgtcaagcttcagcagattagcaaccatctggagctgataaaacctaatccaaaggatgagcttgaaaagcagaagaaagatgctgaacttgcagctgctgtctttggtgcagatattgacttagttggtggtactgctaaaagtgagaacttcatgggtctcagtgatgctgagaactgtggaaagatgcgagcactagaaaggcttctgtcattatggactggacagggtgacaagattcttcttttcagttattctgtcaggatgcttgacatactagagaagtttctcataaggaagggttattgcttttcacgcttcgatggaacaactccgatgaatgcacgccaatcactagtggatgagttcaacagaagccctagcaaacaggttttccttatatctactcgagcaggtaatttaggtgtaaaccttgttagtgctaaccgcgtggtgatatttgatccaagttggaaccctgcccaagacttgcaagcacaagacagatcatttcggtatggacagagacggcatgttacagtatttcgcctacttggtgccggttcacttgaagagctcatttattctaggcaaatatataaacagcagctttccaacattgcagtctctggaaaaatagagaggcgttactttgaaggatgacaagaaatttcaaggtgagctctttgggatctgcaatcttttccgtgacttgtccgataagctttttactagtgagattattgagatgcatggagaacatggcaagagtagtgcaacagaagcaacagggataagagaaatagtcgatactgatttatttggttcacaagagaataggaagtcttccacagcaacaacacatacggatgatcagaaattggttgattttggtatgctctttctctgaaaaattacttggtgtttaccatataatatactcatataatattaccgcagctattagcttcaaaggctgatacagaaaactagttactcattttagatgcaatctatacctttggagatacttctcaaaagattttgaaatactgcactgttctgttctttgtttatctgtacctagtattcaagggctgctgttcaatgtgtcgatttctagttttgggatatttgatcttattcagtcacagttcatcataaattcagagcagcttggtttttccgcgaacgtgccttagcacgtcttcattcagattcaggtagcttgcattttgtacactaaaatataaactgcttaaaaagttgaaccatcatgttattttacgctgttttggaatatcaagctattcttttgtagccagaagctgagcagctgtttatgggtccagctataattatgcagtgattctcttcgctgaaaagtgaaaaacctgtcaaaatattttctccctttgactcccgggtgtattatgtaacctctcttccctctcactgatccattttattttgaagtaataaatctggcctgtctaacagggatagtttatgcccaccgcaacgaggatgtcgtgaacatgaggacagacggaagagagaaaggtggagcagacgagactgtccagagctccttagaggagctgcttagtaagaatgaaacaaagcacactgccatggaaaaatcttattcatcggaggagaaaagggaagtggcaagatcttattcactggagcagaaaaagaaagagtttagctgcatcgcatccttcatgggtatggatgaccttgaatttagcaagtggttgctatcagcctcaccgcaccagcggtctgaagtgctgcaggactacaggaggaagaagaaaaatcagaaatgatgatgcaggtcctcggagctaaccggctaccgcaaagctttgacgtagtgattagcttgtgtagctaattgtggtagttatgacaagggaatggtagtaaaattgacccgtggcaccgatcagtatgtatgtctgcagccccgcttattttgaaccttatattggtgcaaactgagctcagcaaggccttggtcactctccctggccgttttttttcggtcaggtgaaatataatctgtattgtgtctgttagttcctgttcagctgtctaagcctttgtgtagcgagtcttatcatgttaggtggcttgcaatgttaccttggtctgtactaatcatttggatatcgtagtcttctccgtactaaaatataattcgttttagattaaatatacattcattcggtaacttatgaatgtagtttgtctgtgtgtggctacattcattggaacgagttatttacaaacattacactccct

SEQ ID NO: 7082 - DNA, 1929 bp, Zea Mays
tgaagcccagaaggtacctaatgagctctgctacttactgttaagacgagaaagcccatgcccaacccgtcgccagatcccccgcctcgccctccccgccggcctgcgccgccgcgagcaagcaaccgctccatcgcccaccatggcgctacgccgcgtcgcctccgttctcctcagaacccgcctgcgaggccccgtcacgtcccccgcgcgcaaagccctcgtacaccctctccaagcgccgccccgccgccaattctcgccgcggccgcctcctcccgtccccttcgccgccgccgccgccgcggatgccgcggaagaggcgttcgaggcagcgaggtcaactaacgacatgctcgctgcattctcccgcctcgaggccaccgtgcccgccaacgacaagcgcctcgccctcgcctgcctcaagctcggccagcacctcgaggcgtccggctccgccgacacgtcccgcgtcctcgcgcttgccctccggtgcctgggcatactcgaggccagccccaacgcctccaccccctcctccgcctcggacgccgtctcgctcgccatggcactccacctcgccggctccgcctccttcgacctctcccgcttccacgacgcgttgtccttcctctcccgcgcgctacgcctcctcgccccgctcctccccgaaacaggcgtcgcgttcgaggttggggaggaaccgggagggttcgacgtcaggcccgtggcgcacgcggtgcggctgcagctggccaacgtgaagacggcgctggggaggcgggaggaggcgctcgccgacatgcgcgcctgccttgacctcaaggagtccattctgcctccgggcagccgggagctgggagtcgcgtaccgggacctcgcggaggcgcacgccaccctgcttgacttcaagcaggcgctgccgttctgccagaaggcgctggagctgcatgagtcgacgctcggcaagaactccgtggaggttgcgcacgacaggcgcctgcttggtgtgatatacactgggctagagcagcatgagcaggcgctggagcagaacgagatttcacagagggtgatcaagagctggggtgcagctagccctgacctcctcctacatgctgagattgatgcggcaaacatcaatattgcattgggaaagtttgatgaggctgtcagcgtgttgaagaatgtcgctaagcaggtgaagaaggatagcgagacgcgagctctagttttcatatcgatggcgaaggcgctcgctaaccaggagaaggctggggacacaaagaggtgcttggagattgcttgcgacatcctggagaagaagaaattcgcgacacccgacaaggtggcagagatgtacatagaggtatcctcactgtttgagacggtgaatgagttggaaaaggcaatatctttgctgaagaagagcctgggaatgcttgagaggatgcctcaggcacagcacctggagggcaatgtcgcagcgaggattgggtggctgttgcttttgactggtaaggtctctgaagctgtcccgtacttggaggatgcagtggagaggatgaaggacagcttcggtccgaagcattatggagtagggtatgtgtataacaacttgggtgctgcttacatggagatggaccgtccgcagtctgctgcacagatgtttgcgctcgctaaagaagtcatggatgtctccttagggcctcaccattcggataccatcgaggcttgtcagagccttgctaatgcctacaatgctatgggaaggggaggaggcgaggagctgctgtgttcaggccaacaagcggcatgcctaagcaaccttcaaaataaccaactctactacttcaaagtagccctcctctagattccagatcaagctccaccaccactgcctctggccatgagttggatgatgattac

SEQ ID NO: 7083 - DNA, 3627 bp, Zea Mays
ctctcccaccaaaccaccgttctaaacgctcccctagtcccctgctcagcttctccagagatcgccaaagaagcagcatcggcagtaagctctgcggcgatggggtacacgtacactccgacatactactcgggcctgcaggacaccatcgcgtcgctctgcaagtccatcctgccctccttccgcgtgggccggcggctcaccgccgaccaggccgccgcgcggcgccacgccgagcagctcaagtggcagcaggagtccttccaccgcatcctccacctcgccgcgctccaccgcgagggcatcgctccggcctccgacgttgccgccttccgcggaaccatgctcgcggcgctcgtcgcgccgccgcagcacctcgagcagcccgctgtgctccgggacaagctcctcttcctccaggagctcctctacgccaagtgcgtctccgcggcggagtacaacgcgtccaaggcgcccctcgtgcagcggctcgccgcgttcggcgtcatcgtcgactgccccgacgcggaggtctcggccgaggagtggtcggagatcgacctccgtgacccgcctcctcccgccactgcggcggcctccgacaagccgaagcacaaggccttcgtcacgccatggaagagcagatccaagaaggaccaggacgtgaacagcagcgcatcaaggccgccgctggcccctgtggaccataacaacgccaccaacgcgccagtcttcatgaccgagagctcgccgtcggaaacggttccctccgggaaggccgagaaagggaagaggaggcatctggcagggatgttccacagcggcggcagtggcaccgagaacaaggagcctgcgggggaggaaggggtcgtcgagaaagagacggtgagaggtaagaagaagagctcgtgggggttcgatggcatcaagaagtggacgaaagccggtgcctgtaacagtggcgaggcggcagccaccggtgagcagccgcagcatgttcctccgcgctcatcttacagcgagtgccagctggaggcgagccccatggctgcttctggaccggatgccaagagggccaagacgaggctgcactcggacacggacaatgactctgcttccgagctgctgcgtgacaaggttctggtggagaacacaaagaaagagctctcaaggattcaggctgagctatcatctacaaatcggaacttgaacttctcgaatcagcagatggaggccatctcaacaaagcttccggtggacaagtctgacctcaagtcctacttcccaaaggcatggtgtgatcagcacggggatggcgtgatcaccgcggctaaggaagggttcaagcagcacgtcgaagagatggagaagcagagggacatcactggcagtgagggctgggctacctttgaggacatcgaccttgatgacaacttcaacccgagggccttctctcgccaccagccggactctgcgtttgctgatgtgctagagacaaatttatcttctatgcaatccgcgtcaacacgaggcaggcagcggtcatgcgacgtcactaagcaggtcccggtagctgacacgtgggccccggttccgtggcgctgtggcccacggcgacgccttgctcgcagttcgctccacgacatggcggcctcggtgctgcaggccgagcgccacctgctcctgctcggcagcggccgcaaccgtcccctcctccgcatgctcccgccacgcgtgctcttcccgcaccggcgccgcagctggccccgggccgtgagggtgtcacccggcgacggcgagggcgcgggagggttcgcgagcgccgtggagaagcgctcgataccggggatagttgaggaggaagggtatggagcgaggggagaggagttggaaggggacgtggccggggctttggagcagaggtggcctccgtgggatgggttggccgagcggtacaagctcatcggcgccacctccctcgccttcgtcatctgcaacatggacaaggttaacttgagtgtcgcaattattccaatgtcacatcaatatggttggaactcatcaactgctggcttagttcagtcctcattcttttggggttatgcattgagtcaactaccaggaggatggctggcaaaattgtttggcggaaggaaagtgcttgaggtcggtgttgtgacatggtctttggccactgctataattcctgttgtagcaggttttatgccagggcttgtactatcgaggattctggtattggagaaggtgtttcaccatcagctgctacagatttaattgctaggtccattccttggcaagaacgatcaagagcagttgctgttgtttttggtgggttgagctttggcagtgtcttaggactcctgtttgcccctcccatcattcagaactttggctgggagtctgtcttttacatatttggccttcttgggattgtttggtgcttaggatttgaatctcttatagtgcaacggttcggtgacaaaaaaagcctattaaatcttggacaaagttctactggatctgatggtcttatctcatatgctatgtcttcggaatcatcacactcgtcattggaagatctgcaaaattcactaaaggatgtgccttggggggcatttttcaaaagcaaggcggtctgggcaatgatatatgcacacttttgtggaagttgggggcattatacttgtttgtcttggctaccaacattctttagcgaggagctgaacctgaacttgacagaagcagcatggacaacttgatatcaaatggagttgacaccacgaaggtgcgaaaaatttgccaaacaattgcctttgtgtcacctgcgactttcatgatgctttcctctgtggatcttggactgcctccctgggaaattgttgcttttcttacaagtggtgtagcactctccagcttcgcattgtcaggtcatgttgttaagattgcaaccaagtttccatttttacacggttctgaggtccaaacctaaatattttcgttggtaaacagggctttattgcacacatcaagacatctctagtgaatatgcaagcattctcctgggaatcacaaacactgtaggcgcggtgccaggaattgtaggcgttgcactcacaggctttcttcttgattcaactcattcttggagttaagccccaggatttttccaagtcaggacctgagtctgagccgtgaatcgtgatgtatggtactcctctgcacataaggatcgtttcacaaggaaaattcgttttgagtttagacaaaagaatggagttctagggcagagaatagatgttatgttcctcttcagtcagtagcagacaagaggaagccactgataaggggacaatgcttgcgtgtatatagtataatgatgataggctttttttctggttagttttcacattttgatatggttttgatttttgaatgtgtgcagtcaggtccgcggtccgccagtttgtagtatcctgttggtttcgggtgtcttggttgttgagtgagatttagaatgtgctgatacttcgtttcagtgcttgtactttagattcgacctgttacgaaaaaaatgaagagtacccactgaattttaaattacaagtc

SEQ ID NO: 7084 - DNA, 1609 bp, Zea Mays
gcctaatcgttggagagttttagcataggttcacccagtgttaatgctgattggtttggtggccttgaatggcgaaggtcaggacatgactactcctgtgctgtgaacaatattgttgcatattgaaatttcagaataccatttcatgatactatctcattcactgcaatacgagcacagttttgtttcagaaacccagaaacatttatccaactaattaatttccccatgggacaaagagtctagcattatcacatcttgcataaataatttcttgttttgttggtacttgtgattgttgattgaaccaaacttgctaatatgaaaagttagatactttgtatgtttttcttgctcaaatcaacaggaaattatgtagtatcatcaagtaaatatacagaaagcttgaaaagcgaaactgaaaatacctactttaccccagcacctacagcctgacctgggattactaatcaaatcaggttccatgtaatttccttcaaatccaattatttggatggcatattttaatgtttttcggtagccccattttttcttattaaaacggtggctgctgatgcctagcatttacgaaagactattttggtgctaatttcaatgaccttgattattagaattgatttaaatcatttgaatttatgtagtagatgtaaactaagttcctttgctacagttttgtgtgtgtgtgtggtcatgatctttaatggattggttattttttgcatgcagctcttttggcttataaaactgtgccaggaaccaagaaactgaaaaagctagtgcaccttgccgtgcagttccttgccatgtttctgagtctaattggtctgtgggctgtatggaagttccatgatgaaagaaaaatcgatcatttatatacacttcactcgtggttgggccttacttgcttcatcttcttcagcttgcagtgggctgctgggttttggaccttttggtaccccggtggatcaagaagtggccgtgcatttttgcttccctggcatgtcttctttggtatattcatctatgttcttgctatcgccacaagtgtgactggactcctggagaagtcaatctttatgcagagcgccaaaatgattgagcgcttctccacagaagccatgtttatgaactccctgggaatgctgctggtgttgttgagcagccttgttattcttgcactcgttagtcctggacccagcatgatcgacacatacagaggctcttctgagtgagaggaaatgattacagcctagtttcttaagctacatttttaatcagtagctgagcaatttttgtgtacatgtacccagaattatgcttttcttcttttgacatggagttagtcagtgttgaggataatttcatccctgttagagtggcttcattcaagtcgcagtaataaaattgtggatgaggctgacaatgaaattacagctgagaatatgactgaagtaacaattcctggttaatcagaagttaaccaattcccaatatgtgatcaacctcttttcagaagtaacaatacgcatttacatgagattgatcaaactcaatcacagagcaaatcttcaccgagaattttttattt

SEQ ID NO: 7085 - DNA, 1056 bp, Zea Mays
tttttatccgaattcgactaaaccagtattgtctcaaatactgcatccgatatccagtccgtttatatcgtgcccaaaatagtcacgaaaactatctaaacgaaatttagtttgaatcgttaatctctgattttccgtttagtaatccaagaattataattgagctttgattctctggtaaattaccgtgaccatggaatcatatgttcagaccacaggtccactgctctgcgctcctattccacctgtctcatcccctcatcatgctcgacacttgctccctggcagcatgccgtagcagcatctgtgcttggtccatgctccactgtgccgtgctgtttctctgcacgcgtcaagctcacgcgctgaatccagccccatgttgacgcgttcatgttccaacttgtcgtgccgcgtcgtcatcactttctgtcacgagctcgattcccgttgtcatcgggctttgtgcgtgctcgcgtttgccgtcgagtcgttgaacccgtcatcccctgctcaaccctaccccgccagctcgctccagatacaatctcgttatcgtcccgcgcgtcatcaagaatcccaagaatcgggtgaagacgaagctagcagcgcgatattccccaagcgctcgacaattgcctggatcggaaaatcactaccgatctcgaggattcgagtcggctattgaaacggtacgttaattaatcgcgtgatgcggaagacgagccaagtcgaccccaagcgtgggcttcttcgcaaggcgatgctgatggacaaacctgaagatggtcgtcaagtgctcatcgactaacaacactaacctagtgttactcaggttctcacttgcttgatgcattaggtgataggagttgattgctaaaacaattcctgcattaccttccttgaatttgattaccttccttgatcccccgttttacaaaagattttgatgcttagccttgctttagaaaaacaaaatgttttgtttttacaaaagatgatgtggcaaaagtgggtgggagtttgaaataaaatttgatggtgatcatcaggctg

SEQ ID NO: 7086 - DNA, 2766 bp, Zea Mays
gcctgatgcagccagacatggacggatcttcgcgccctcatccagcccgcggcccgcagtcgtctgtgccttgcggaaggagcactcttcttccttagcagcagccagcgcccagcaggcaataccgtcactcggtcggctccttgccgattcccccacccccgcaagccgcggcgatggcctacgatctcccgttcactctcttcgtactcctcttcctcgtcctcctacagacgccgagctcctcatggcgaccggctgacgacgacgacgcgtcggtctcgaggtcggctttccccatggagggtgacgtcgcctgggtggtgcaggtcagcgacctccatatcagcacctacaaccctgagcgtgccgccgaactcgcgctcctcggcaccgcgctgcgcgcaatccggcctcaccttctcctcgtcaccggtgacatcaccgatgctaagaatcagcaaagaactagttcaaggcaggatgaatacgaatggattacctacaagaaaactattgatgcaattgttggaagcggtggcattgataagagcaggatatttgatattagaggcaatcatgatacatatggagtgccttatagaggaggaaaattggacttcttctcaacttacagcgttaactcacagtttaagcgattaagcaccatcagtagtatattgcttcagggagatagaagctaccaatttctgggtattgatgataccatgaatgttggcattcgttttcctgcaaatctttttggccattctactgataaaaggatagaagcggtaaattcagagcttcaatactggaccaatcattccaatgttccagttaccaaagtagtttttggacatttccctatgtcattcactgcatcatctgaaaaaggacagcgatatgaaagtgtgcttgcagggcagtctatttcagcatacctatgtggtcatctccatgcaaaagttagtaagcagctttggaggtatcatgaaatcagaacaacagaagatcacaagtcaagcttttgggaatgggaacttggagactggaaggactccagattgatgaggattttagcaatagatggtggtgcagtctcattcatagaccacacattgaaacatgcactccaaacttccatcttgatcacatatccaacagattcaagaagtatgaatatgttggattcagaaaagtggtcgatgagaaatgatataaatgtccttattttctctcatcaatttataagtaatgtgtttgttcttgattctcatggtgtaaaaatttcaagtgagcagagaccattttcagttgagggtaagatggcaattcccacaagtccatggaccaactatctgctctttgaagtccagtgggaaggcatgtatcaagttcttctgtggagtaatttggccttcaccattgtattgttgttcatccccaaactattgtatcactttgttaggagaagttcatcatatcaaaggtgggctgtgtcaattccgtcctcctctatccagcagagaaaaccttacttttggttggtttggtttttaatggagggcacaaggagtaaacctttctggttttctatggtaacatatgtgctctggctaattgaaatgccatggttttggggccatgcaacgtctgaaaatggagaaatcgctcaaatgtacttatctggatggagcgtgccaattcatgatgggggcttgacgggcaacaaactgagcaacccagatgtgcttgtcatcacactaccgttcctctatctggtgcttgtcccagtaatagtccttacatatggtctgtttgcagaaaaggctactgtgtttttgcagcacagaagaagagtagtatactctcttgactcaacaaatgtgcatgccgagtcaccaagattgctgccagttgctccaagggcttcactaatgaaattcgccgacaagatggtgtccatggtgatccaattttgtggtagctggacaagaagggctcttctacttgcatgcttgatcaccgcagcaatacatttgaagctctgttccaaactaatgtcagcatatggaactgtaccagtagcattgtcacccccattgacatggataccattgttgctattaggtggtgctgcctattgtacagttctccatgcagattagcgctcagtactctgcaatcctgaagtgtagtacttatttgcattggaggattagggctcataactgtgaattcctgaagtgaacgtagttgcgtttcgggtgcgtgctgctgctgtgcattaaatcctggaactgtggaacatgtcacctttcgatggttaactgcatgggtgctggctaaccaaagataaagtagaaacagtttaatggttgagacttgagagtgcaaactgcagagtagaacatctggatggatggaccaaaactggtagcggtggctcgtcgttgtgtctaaccctcgccgcagcaagaggagatggaacagtggcttggacagagaggttgttgatcggatggctgtgaggggagtgatgggggtagggacgtagggtgagagggaaaccatggcggctaggtattttttgtgctgagtaggctgttgtgtttgtgtacaggggatattttcccaagtggaccactctattggtgtgtgggcctctcggccagaatttcggtctgcatggttattttcacgagtgggtcattttgttggtggagcgtattttggttagaaattctaacggcttcgggctag

SEQ ID NO: 7087 - DNA, 2656 bp, Zea Mays
gagaaatttagagggaatcgctgcggatagcgttaggcatgccttccccgatggctcgcatcttccaccgccatctcctcctcgccgtcgtcaccttagccgtggccgcttctctccttcgcccagctgccgcagtgcgcccatttgttttggttctctccggtgaggacttcctcaaggatccggccgcgcacccgtcccttccctctgccgactccgacgacgacgatgggtgggacgacttcgccgacgattcaccggccgccgacccgctactctctccgtcctcctgggcccccctcctcgacccaaccatctctctcccctctggcgatgagacggactcgccggccgacgcgctcttcgtcgcgggcacccgcgcgatgctatccgcagcgtctgatggagacgacgcggcgttcaccacggctgccgcgcagatcgaggcctcggcagaggcggggcacccgggcgcgcagtctgcgctcgcgttccttaccggcgccgggatgacgcgtccggcatcccggtcgctcgcgttcctgctgcacaagttcgccgccgacgcaggagatctccagtcaaagatggccctcgcgtactcctacttccgccaggagatgtatgaagaagctgttatactatacgctgaacttgcagaagctgccctaacaagctccttgatatcaaaggagccaccagtgattgaaccaatccgtcttcacagtgggactgaagaaaataaagaggccttgaggaagtcccgaggtgaggacgatgaagatttccaaatcacagagtatcaggcacagcgaggcaacgctgccaacatgtacaaattagggcttctgtattactatggactacgtgggctccgccgtgattatggaaaagcatttcattggttttctaaggctgttgagaaaggcgagacacgggcattggagcttctgggtgagatctatgctagaggtgctggagtggaaaggaactatactgaagcgtacaagtggttggcacttgctgccaagcagcaacattactcagcttacaatggattgggttatctatatgttaaaggctatggggtggagaagaaaaacttgacaaaagcaagggaacttttcgaacttgcagccgagaataaggaagccggtggacattataaccttgagcatgtaatttcttgcttcatgcagttaatgctgggcaaccaaaagctatttatcaggtggcgaagctgttccagaaaggcattggtcttaagaggaatctccatatggcaacaatgctgtacaagtctattgctgagaggggaccctggagttcactgtccagatgggctctggagtcttatttgaaaggcgatgtagggaaagcattgctcttgtattccagaatggcagatcttggatatgaggttgcacagagcaatgctgcctggattctggataggtatagtgatcaaagtatttgcatgggagaatctagtttttgcacagatatggaaagacatcttcgtgcacatgctttgtggtggcatgcatccgagcagggtaatgagcatgctgctttgttgattggcgatgcctactactatggccggggcgtcgcaagggactatgaacgtgcagcagaggcatatatgcatgctcggtcacagtctaatgctcaagctatttttaaccttgggtacatgcatgagcatggtcatggactcccccttgatttgcacttggcaaaaagatattatgatcaagccgttgaggtggattcagctgctaagctccctgtcatgcttgcattaacaagtttatggctaaggacgaactatgcagacagttttttggttggttttatcgattcacttccagaaatgtatcctgttgttaaggaatgggtggaagatgttctcatggatgaagggaatgcaacaattttgactctctttgcttgccttgtaactgtcctctacttgcgagaacgccaaaggcgtcaagtagcagcagcagccaaccccctaacaacatgatgatgtggccatgtaaatgtcggttttcatgacatgggcaggccttttgcttgagggaactcgagatgtaaaatgatggctcattgacatgactcgcgcactaaattgagtagagggacatgaaagccgctggagactcagacaatgtttgctgcctggcgaatattcacctctccaagacttagggagctatgcttgtaaaggacaacaattcttggaaactggctgctcagaaatacagtttagaaatctcacagatgttgaaaagcatgctccccccttgttgcgcatatgcatggccatggaatttcgacaagcacacacggagaacatttctggaagaggcaactttacaattggtagtttagcgatcgggtaactttccatcagcatttacacgcactgtatagttttctctggatgtgttagttgaaaaggggcggtgcatgttgtgagcagcaattttgcaatagtatccatcagagtttgaagtataaacacattttttgaatagcctgaaaatagatcttacagcagagggtgttgaatgacgacggcagccgcgcgcgcggagcagccattgccgggcggcagaagtgtgcatagcgtggttctctgtagcag

SEQ ID NO: 7088 - DNA, 1766 bp, Zea Mays
gtccatccttctccctcctaggctccgtcggtctctctctctctttccttatccccggcccgtggcccgtgctaacggtgattagggttccgaatcgtgtttaagcgctgcgaaatcacggctggggcttcgtcctcgagtcgtcgtcctgctggatgtcacctcgtgtcccgcgccgacgccagtgctcgtcctcggagccgcctctctccgacgatcgccggagacggatacggtcgaagccgtcactgcaggccgcgctcgtgcgtcgtagcagatgtctagtagctccaacggccattatcctgctaatggtgcaaagattcttcatagaaaagaaaagaataaagagaaagtacagctcgacaaaaattcagccacttgggtgtgccagaaggacaggcattatgttgaaaaattagaaacagaattgatgaactgctatcaggaaattggatcagttaaatatacggagcgttgaagcaaacttcatgggagagcacattcacagtcttgaactgaagctgactgaacttgaaaagttcccagaaagagtgagagcgatggacaatgagctgatacgatctgattcccagtgctggcttctgatggaagaagtcagatgtaaagaagaggagttgcagaaggcagcctcacagatagagaagcttgaaagtacagctttagattcacaatgcgaaattgagagcttgaaacttgatttgactaatcttgagcagagactatttgacgctgagagattttcccaacatgctggtgagcacaaagctcaatttgacaaactactgggagaacatgagctccagctacatgaagcacagaaaactattcatcaacttgtatgggagaataagcaactgaaggagttgttgcctgtaagagctcctaaacaatctcctcctggatctggatggaaagttaacaaaacattggagaacggtgtgcatgcagaatgcgaaagtggcgatgtaattcttgaaaatatggcaaaacgaaatgaagaatctgaacttctaattgagcagctcaaggaagagcttcgagaacaaaagttaaaggcaaaagaggatgcggaagatctcacccaagaaatggctgaactaagataccagataacaggcatgcttgaggaagaatacaagcgtcgatcttgcattgagcaggcagctattaaacatattcaggagctggaaactcaggtttccaaagagaagacaaaactgagtggggcacttaagcgattgcaggaatcacatgaactagctcgcacacaagctatggagattaagaagttgaaggctgctttagagagattgaattcggtgacgaacctgggtacagtttgcaaatcttgctcttgcgggttctctgcaatgttggtagagctgtctaattgctcgatcgaaggaccttcaggcagcgccagatctctcaattccaaccacattgatgagaagtcacagaatcaggctctaatagagtggcgtccccgtgaagcctcagatgatgacggtgggtaggaagttagatgcctgtacattcatgtgtgcaattggccaactgttgtagataattctttgtattcaccattgttgcctgtaagactgtaaatgcatatgcatttgttgccttagctaacaatgggagttaagctccccaggaagtgaaaatgtcgccttaagatttcacgcatgtcatgaaatttaccagcaaggatctgtcatcacggtttttgatgcaaagac

SEQ ID NO: 7089 - DNA, 1326 bp, Zea Mays
tatcgtcgtattctgaagtctccaagtcgttcggctcggcgcactgggtatagcagtagcagcactgccgcggttgattttcgagctgcggtgctggagaagtgaagagctcatgctgttctcccgttccccggctgccacaaatcagccactcgtcccttcccgccggacgctgctcctatcgccatgcccgcgagccggcgcgaccccggcaccggtggccgacgctgcgctcctaccgggcgggctgcgtgcggagtcgctgccgcggcacgtggctgtggtgatggacgggaactcgcggtgggcgcgcgcgcgcgggctgccgtccgcagccgggcacgaggccgggcgccgcgcgctggaggaggtggtgcggctctcccgcgcctggggcgtccgcacgctcaccgccttcgccttctcccacgagaactggagccggcccaaggtggaggtggaattcttgatggggcagtttgagcgagcgatccgcgaaagcgtagctgaatttttgagaggaccgcgagagaagccgaggaggccacgcggaacaactcgcagctcgacctgacactggcaatcagctacagcgggcggagggacatagtgcaggcgtgccggaccctagcccagaaggtgcgcgacaagctgctcgagccggaggacatcgacgagtcgctgttcgccggtgagctcgagacgagccacgccaacggcaacgagctcccttatcccgacctggtcatcagaaccagcggcgaactgcggctgagcaacttcctgctgtggcagtcggcgtacgcggagctcttcttcacggacacgctgtggcccgacttcggagaggccgattacctccaagcgctggtctcgttccagagcagagacaggcggttcggcgtaaggaaattgtagcggcgcagaggcagcgccatgtggaaggcgtgcttcaaactgtcaatagcaggaaagcgtcggtcaataaatcgtaacgcgagaccaagatgagtagatggagtattaaagtggtggtttgcatgcagcggtgagagtgagagtaatgtagcatatcaactcaagatggtaggtactacagctagagttcaagctcacagacagcagtcgtcgttgatgatggtggctagcagctatctgccgatggccacagatttattgttaaaaaccctttgctattgcaagagtacgtcaaatgccctttattaagtcgtgataaaataatcacttagaagatactacttccgttctcgaatatttgtcgctcgctagtttatttttaaactaaacgacgataaataaaaaaga

SEQ ID NO: 7090 - DNA, 1768 bp, Zea Mays
gttcgtgattgctgaggatgtgggggtatcttgaacccagatgactatgagggttcccaagagaagtccttctgtcccttttgagtcatattatgttcctactgatggaacagcatcactggaagatagtcacttctacttggaacaatttttaagcaattcatcccatgaacagtttgcatggacttatttctttttggatgttcctcaaggttcagccggtgcccttatccatgtccagcttaagtcagataaagacttgaactacgagttgtactcgaaatatggtggcttaccatctaatgatacttgggattattatgccagtaggacaagcagcagtaatgggatgccataggaactgcaatcagaaaggtgtgtgtcattcctcagttgatgaaagtgggctgactttctacagcttctgcacatgtgatcgcgatcatggtggctttgattgcagcgatgagctagtttcccctaatgggcacatttggcagtctgtttttctaatcgcatcaaatggtgcagctattttacctgccttctgggccctccgacaaaaggtaagctacttagcacccacttgttgaatgctagtgtaaagattgttgggcatggtactggtattcatcagtactagtcatgtctatccaaatcaagtttttggacttctggctttccttcatggctgtcgtgggtacgttcatatatatggctacaattgatgaagtttcaaagagagcaatgcatactgctgtatttatcctcactgctcttttagccgcaactggtgcaacaagatctgcaaatattggaattgttattgccattggttctgttggcctgcttatggggtggctattggagttctctacagcacgaaggtttatatgctggccctcacgaattaaccttaatatgcctcaaagttggccaagcctcagaactttgttccagattactctggagatggtgaacaaacggttccgttggatattcttacttttgggtttcatgacactgtcttttgcggctatcagctggaagctggaatcaaataacaactactggatttggcacagcatatggcacataaccatttatacttcttcattcttcttcctgtgctcaatgcgtgtcagcacaaggaacagcagtccagagtcaaactatgagctaacgaggcaagactctatgccgagatccgagccaagggaaacctaggtacatgattatctgttgcagtccggagcgtaataacatatgaccaatcacacaagagggatttgggaaccacgtgtggtcagtctccgcagctgcatcgcatgagaactgtaaatagcacggggcaggtaaaacatctatttgtgggatgttcatcgagaacattgataatcatgtaaatgtgttgtaaaagtaaatccaaaatggaccgtctcttgaggttagctcatgcatcatgagtttggcacttgtcgtagtacgagtctcatacaagctttgatgtggggaacgtatccggtgaaaatcaacctctccgtgcaaccatgtaaacttctaatctgaaccacatgatgttgatccaaatagacgtgcggaggagtgagagaggggatttgaaaaaatgtgattagcaaaggacggttaagtgtaaaattatctacgctcttgcgtcccttgatcaacatcattgatcaacatcatgtagttcagattagaagtttgcaccgatgagcagggccgttcctgactttttgggggcctg

SEQ ID NO: 7091 - DNA, 2887 bp, Zea Mays
aatactctacttcctgtacgaacagttgagctcccgccgtcgttctcttctgtcaccatggatttcgctgctgacatagaccttcagagggagcgcttgaaaggcattccaagaaacaagcttgctattatctgtttgatgaattccaaccctcctattcctgatatatctgattcttatctggacaatttattatcaaactctctcccagatggaccttttggtaatagcaatataattaatcagccaaatctggtgcaatgcataccatttcagaaaaacacaacgttagtgctaacaaatgaccaggtatctcccggggtatggtacattgggtactttcatggccttggccctgctcgcacgcaatcaaagatgattagccgaggaaaagcacacttggtgagcactcgcattactgtaagaggatgtgccacttcagcattttggggaccctactgcaaccagacagttgacatgattggttgttctcaaccttcaatagataataactcaaggaatcttctagatctgaaagctgagaggaggaacagtttgtatactagagagcacaataggcgtattaatatcttatcacggccgaacggtttagtagaacaagaagttgcatctaacgccacgaccttggtgagaatggaaaactcgatcagttgttccatttccaatgactcaatatgcatcagacaaggcgacatgaagttctacttcttggatgtagtcaacctagcattgcagtttaaaattacagctacaaattttggagctctagggccatccttgatttgctacctgcggcataatgcctttcctcaaagagatctgcatgactattcaggtgatatcagccatgatcctttggttgtcaagttgccgaatattgggcgttggtatattgcaattgaaactgtcaacaaaacacagacgaatgttacagcatcaacacctgttctagacacaacatgtttctcattgaagtggcaattaactggatgcttgaatggaaaaactggaaccaattgctcttgggaggcatatgggctccatagggttcccaagagaagtccttctgtcccttttgagtcatattatgttcctactgatggaacagcatcactggaagatagtcacttctacttggaacaatttttaagcaattcatcccatgaacagtttgcatggacttatttctttttggatgttcctcaaggttcagccggtgcccttatccatgtccagcttaagtcagataaagacttgaactacgagttgtactcgaaatatggtggcttaccatctaatgatacttgggattattatgccagtaggacaagcagcaggatgccataggaactgcaatcagaaaggtgtgtgtcattcctcagttgatgaaagtgggctgactttctacagcttctgcacatgtgatcgcgatcatggtggctttgattgcagcgatgagctagtttcccctaatgggcacatttggcagtctgtttttctaatcgcatcaaatggtgcagctattttacctgccttctgggccctccgacaaaagaatggattctttacacatctagtggaatttccagtgcattataccattcatgtgatgttggcacttggtgcattctgtcttttcgtgtattgcaggtaagctacttagcacccacttgttgaatgctagtgtaaagattgttgggcatggtactggtattcatcagtactagtcatgtctatccaaatcaagtttttggacttctggctttccttcatggctgtcgtgggtacgttcatatatatggctacaattgatgaagtttcaaagagagcaatgcatactgctgtatttatcctcactgctcttttagccgcaactggtgcaacaagatctgcaaatattggaattgttattgccattggttctgttggcctgcttatggggtggctattggagttctctacagcacgaaggtttatatgctggccctcacgaattaaccttaatatgcctcaaagttggccaagcctcagaactttgttccagattactctggagatggtgaacaaacggttccgttggatattcttacttttgggtttcatgacactgtcttttgcggctatcagctggaagctggaatcaaataacaactactggatttggcacagcatatggcacataaccatttatacttcttcattcttcttcctgtgctcaatgcgtgtcagcacaaggaacagcagtccagagtcaaactatgagctaacgaggcaagactctatgccgagatccgagccaagggaaacctaggtttgtttgtgtaggtacatgattatctgttgcagtccggagcgtaataacatatgaccaatcacacaagagggatttgggaaccacgtgtggtcagtctccgcagctgcatcgcatgagaactgtaaatagcacggggcaggtaaaacatctatttgtgggatgttcatcgagaacattgataatcatgtaaatgtgttgtaaaagtaaatccaaaatggaccgtctcttgaggttagctcatgcatcatgagtttggcacttgtcgtagtacgagtctcatacaagctttgatgtggggaacgtatccggtgaaaatcaacctctccgtgcaaccatgtaaacttctaatctgaaccacatgatgttgatccaaatagacgtgcggaggagtgagagaggggatttgaaaaaatgtgattagcaaaggacggttaagtgtaaaattatctacgctcttgcgtcccttgatcaacatcattgatcaacatcatgtagttcagattagaagtttgcaccgatgagcagggccgttcctgactttttgggggcctg

SEQ ID NO: 7092 - DNA, 1929 bp, Zea Mays
ccccggtgaactggcaacgtcgtcgactcgactcggcgagcaaacctgcgtgcgcagactctcctccgtatagcatacgtgcgtgcatcagctgcctgcctgctccgaggcgccacccagctcttcctcgccccagcagccgcttcccgagatccttttcactttcaccaccagggtacatagaccgcatctgcggtgctctgcgctcctcggactcgatttgttggttcatccatccatgaaaccacaggaccgagcgtggaaactcccggaccggacattccattttccattccgaagggggggtgagaaggcggggaatgagtacaaccaaggtgaagagacgtgtgggcaagtatgagctcggccggaccataggcgagggcaccttcgcgaaggtcaggttcgcgagggacacggtcaccggcgaggccgtggccattaagatcctggacaaggagaaggtcctcaggcacaagatggttgagcagatcaagcgggagatctcgacgatgaagctgatcaagcaccctaacgtcgtccgcatatacgaggtgatgggaagtaaaacaaagatctacattgtgttagaattcgctaccggtggcgagctctttgatacaattgttaaccatggtcgaatgagggaagacgaggcaaggaggtacttccaacagttaatcaatgcagttgattattgtcatagcaggggtgtgtaccaccgggatttaaaacctgaaaatttgctgcttgattcatatggtaacctgaaggtctctgactttgggctcagcgcgctatctcagcaaatcaaggatgatggactgctgcacacaacttgtgggactccaaactatgttgcaccagaggtccttgaagatcaaggctacgatggagcaatggctgatctgtggtcatgtggagttatcctgtttgttctgctagcaggatatcaaatgcagaatttacatttccaccatggacatcttttcctgccaagaggttgttaacaagaatccttgatccaaatccaatgacgagaataacaatcccagaaatattagaggatgagtggttcaaaaagggctacaagcgcccagaatttgatgaacaatatgacaccacattggatgatgtggatgccgtcttcaatgattcagaagagcaccatgtgacagaaaagaaagaagaagaaccagtagctctgaacgcattcgaactgatttcgatgtcagcgggcctaaaccttggaaacttatttgactcagagcaggagttcaaaagagaaacaaggtttacatcaaaatgtccccccaaagaaattgtccgcaagatcgaggaagctgcaaaacctctaggatttgatgttcagaagaaaaattacaagttgaggctcgaaaaggtaaaggcagggaggaagggaaacctcaacgttgctactgagatactgcaagttgcgccctctctccacatggtagaagtccgaaaagcaaagggtgacactctggaatttcataagttctacaagaacctttccaagaccttgaaggacgtcgtctggaaatccgacgatcttcaaacgcaacatgcttcttagcagaacctcagagaggaggaatggcaaactattttgtgcaccatcctttcaagcaaactattctgcatgtaacggtgggtgcccaggaaattgcgctggtgctccaccatcgttgtatatgctgcgtcttgagttgcttgctgtagctgaagggaagttcattcagtaggttttgagtatgagttttgtatatccgtatatgcctatgactatgagccgtgctggaacactatgatcagaaactgcgaaatggagcccagaatgttcttgccatcttgctccagttctcagcaccgggcttaacttgccttgcattttttgaagaagaaaaa

SEQ ID NO: 7093 - DNA, 1550 bp, Zea Mays
ttttttttctaaaattctaagccgcaaaaatccggctccacaatcccgctgttcgcgagccactccctctcacgagtgacgacgaaaccctaggccatggcttggcgcggcgccgcctcccgctccattatcgccgccgtccgtgctcgcgccgcatccccgtcttccaccgccgcctcgcgcctccgctcgacggctccacttcccgccccctcgcgccggtccgtccccgccttcgctttcgcgaccgcgaggccgttggcggcgatgtcggggtccccggcggcggccgtggtgaagctcaccgggcactcggcgacgagcgtgcgggcgtgctgtgagctctcccagggccaaaatgggaaggatggttgatgaggagatcagacggaatgattcatatcctgatgtaggtccttttatttttctgtgtgttatcagtgttaagaaattagaagaacatagtgtgcaatatttggtgagtttaaaattgttgtttcattggtttagtgtattgtgaggttgtgtcctacacgaatgttggttttactgtttagtagtattcgatctttctagagaaacctgttttaattgttttctagatgatattagagaaaatatgctattatttttgacaaaactacttatatctgtgctgcgctactggtttttatgatgtaaattagcttcatagtcttggtgcactatagatgttggtgattttatccattgttatgtttattgatctccaaggttcggtgcaagtactcctgcacatccattatttatagaatcatgataatacttttgtactcatgcacatatattttttgtgtccatgaatttgctcttgcaatacgattttgctggtcttctgtgacaaaattgcattgctgatcaaatttgaacattaaaatgcacaagcggttactgcaccaatggtcttcacatgcattagctcataataattagttctataaaaaagttgatatggggatttttgtggtctggatctattaggaaatgacgacgatgcatgatgcttgggaagcaattttaaagcatggaaaaggcacttaatgcgcacttttgtccttaaatgcaaggattggattctttggaggttgcatcccttggaaactcatcgggcttgcgtccttttccatgcattttgcagagtacttagcgcctcgtgtgtcggcaaacggacagtatatctgctgtaacttacataaataatcatatgttagcctgctgctactcactgccccgcatcgattggaactaagttgatgtttggttcacataattgtataacgttaaatcatgtttgtttaagtctaaccttaatcggattccacactaaaaactgatattggcctattcaaatttattactgctgttatttatgttatattttgttttattttgcgaaccaaacggcactgtacaaattgttcctttgtacgagctcatgaaagaggaagatttttgtcctgcccgtatttgtattgtggttggttgatgttatctaatatattctaacaaat

SEQ ID NO: 7094 - DNA, 1800 bp, Zea Mays
aaagatgcagtactggtcattttttttgattgccagtacaggttggacctggttctgttttacggggcccacttgtaaacagaagtagcgatgatgtggccccaaagctgaattgtgaagctgatagctgccctgtggaaataattcatccaccagaagattgcaatctaaattcttcattgtcatttacccttcaggtctgtcgtgttgaagatattgatgtctggggtctcgtacaaggaactgtaattcatttcaatagggcaagaagtgtcactgtgcatacatctggaaccatcagcgcatcaggcttgggctgtcgaactggagtagggcaagggaaaatgttaagcagaggtatatgtggtggtggtggacatggtggaaaaggcggggatggtttttataagggaaaccttgctgagggtggagctatctatggcaatgctgatctaccttgtgaacttggcagtggcagtgggaatgactctaccgagttgtccacagctggtgggggtataatagcgatgggctcatgggagtattctttgccaagtcttgccctctatggctcagtagaatcaaatggtggtagctatactaatggctctgttggaggacctggtggtggttctgggggcacaattcttctatttgtgcatactttgtccttagctgaaagctctgtcctctcaagtgttggtggcttcggaaatgctggtagtggtggaggtggagggggaaggattcatttccattggtctaacattcctactggagatgagtatgtgcctgttgcagctgttaagggatcaatacttgcaagtggaggagtcagcaaagggctgggatattctggtggcaatggaacggtcacaggaaaagcttgcccaaagggtctttatggaacattttgcaaggaatgccctttgggaacatacaaaaatgttactggatcttctaaatctttatgctttccatgccctcctggtgaactccctcaccgtgctatatacataaatgtcagagttcttagtggagggtctgttcttttttttggtggtcatgggtgtcatgagctcgcgtccgtgctgggcacgctgagcaacgtggaagggttcgcgttccagcgcgacgtgtcctacacggcgttccttgaccgggtgcacggcgaggaggtggcgctcaacaagctggggctgtggcgggtgccgcacccgtggctcaacatgttcgtgccgcgctcgcgcatcgccgacttcgaccgcggcgtcttcaagggcatcttgcagggcaccgacatcgtcggcccgctcatcgtctaccccctcaacaaatccatgtgggacgacggcatgtcggcggcgacgccgtcggaggacgtgttctacgcggtgtcgctgctcttctcgtcggtggcgcccaacgacctggcgaggctgcaggagcagaacaggaggatcctgcgcttctgcgacctcgccgggatccagtacaagacctacctggcgcggcacacggaccgcagtgactgggtccgccacttcggcgccgccaagtggaatcgcttcgtggagatgaagaacaagtacgaccccaagaggctgctctcccccggccaggacatcttcaactgatgatagcccatgcatgcatgcatgttttagtttcttgggacaataatgtgaataactcccagctagcggctattaattaatctgtatatagattgatcactgcactgattgtatgtcaaggtcattatttacgttatggtaaaaaaaataccctcgtcgtata

SEQ ID NO: 7095 - DNA, 1018 bp, Zea Mays
cgacgagagaaggtccacctgatttggatctacagcggggcgggtgccggagagctcctatggctgtattgatctgggaggacgaggatatagaggagataggttttccccttaaatcattttggagctcggacctgctgcacttgcgccaatgttcatgagtaagtaaaaaaacagcccgttgacctggccgcctccctcgcataagcccaagccgcctccgtcgaccgtggttcccggcggtttcttcttccgacgatatcagcgacactcctggtcccgatcgtctccctcgctgcatagccctctcgccaggtcgtttcgttgctttgaaccatcgaggatatatttttacatcctgctttttctatcaagatcaggtcgctgaagcacttggaacaatcgtagcttgcttttgaaacgttacatcccctaaaggaccaggttcaaacagggacagcaacgcatcaaagaaaaaaaacagacaccaaatctttcaagaactgaagattttaatttctcagatcgtcgacaaccttttaacacaaaaatttgctacatctaattggataaagtggcttggccaattcggtgagccacgactcggcggcggcgacgacgcttggggcggcctcctcgatggtgggggaggcggtgctcgggcgcgaggtggtactggacggagagctgtgagcgtggctgcaacgaagaaggacaagcagtgtagaaggaggagtctgcatgcgccagctatgagatgaagcgagaaaggaaaccaaatacaaaatacattgggccaacatgggtcgtgtaatagtggattgtagttccacaaatcacaggggtgcgtttggatgcgtgtatcaagccagccagactctcgtaacgcagccaagccctatgtggccagactctatgcatgcaactggttactgtttggatgtctgtatgcgtagcatccggtccagctgagactttgtttggtttgctggttgcaccaagccccgttagtccctgt

SEQ ID NO: 7096 - DNA, 1218 bp, Zea Mays
cgacgagagaaggtccacctgatttggatctacagcggggcgggtgccggagagctcctatggctgtattgatctgggaggacgaggatatagaggagataggttttccccttaaatcattttggagctcggacctgctgcacttgcgccaatgttcatgagccctctcgccaggtcgtttcgttgctttgaaccatcgaggatatatttttacatcctgctttttctatcaagatcaggtcgctgaagcacttggaacaatcgtagcttgcttttgaaacgttacatcccctaaaggaccaggttcaaacagggacagcaacgcatcaaagaaaaaaaacagacaccaaatctttcaagaactgaagattttaatttctcagatcgtcgacaaccttttaagttgtgaaatgccctctgtataattatatatgtctgctcaactcctttaaagacatttcgtgtaaatatagcaatctaggtttaaatattgtaacaaacatattagctcctggcacatctaacttaactctattttatatataagcctgttatgctctatattgtctttcatgctctatattatctaaaaaacacaactaacatgaaccatcttcaatactaaagttacaaattatttcccacgcgtgcaaggcgcgcgaacgttactagtgatacataatcaaagatcagattgcaacaactgacctcactctttgtctctatcatgctctaactggcagcacaaaaatttgctacatctaattggataaagtggcttggccaattcggtgagccacgactcggcggcggcgacgacgcttggggcggcctcctcgatggtgggggaggcggtgctcgggcgcgaggtggtactggacggagagctgtgagcgtggctgcaacgaagaaggacaagcagtgtagaaggaggagtctgcatgcgccagctatgagatgaagcgagaaaggaaaccaaatacaaaatacattgggccaacatgggtcgtgtaatagtggattgtagttccacaaatcacaggggtgcgtttggatgcgtgtatcaagccagccagactctcgtaacgcagccaagccctatgtggccagactctatgcatgcaactggttactgtttggatgtctgtatgcgtagcatccggtccagctgagactttgtttggtttgctggttgcaccaagccccgttagtccctgt

SEQ ID NO: 7097 - DNA, 1178 bp, Zea Mays
cgcgaattgagattccgcttctccaatcgtccaatctgacaatctccatcctcagatagaacagcctcccaagcgacagaacagcctcaggaggcacccccgcggttagtctcgaagcttccgttcggaaccagggttagggtttcgcgtcctcccgtcgtcatcctcagccatgtccgggcgcgaggtccgcgagtacaccaatctcagcgaccccaaagacaggaagtttggtaaagggaaggataagatcgacgatgaggacatcaccttccagcgcatggttgcaaagatgcaagaggttgctggtgataggggaggctaccttcacggacgaggagcgatgatttgctttacctgaaagagcaaatggaagctgaagaagatgcagagcgccttcttcgtcatactgagaagcgggcatttgctgcttttaagaaagcagcaattttagctgattctacacctgctgtccctgtggctcttcgtgttgaacctaaacctaaaagtgatataaggcaacaagatcttttgaagaacattgttgggatcaaaccaaagcgaccaaaagttagcagcccttcacagccaccagatagcaataagcctaaacatacggaagaagaccctgtcggcgagttgtcgccatcacggaatccgttgggaccatctcatgggactgtgaatcctgaccacacagcgccaaggttagatgaaccaacagaggtgaagcaacagaacagagctggaagtttgcttggtttagcttatgagagttcggatgaagaatagttgatcatgcgattccaatgggaactggactatttcttgtcagatgtctgcattccaaacgacaggcctggtgtattgatgagagctctcactgagtcatcctcaggttacgggtttgaaacagcgtgggtttggaacagtcagtcaccaggtcatgccaggagtttgaaacattgtgggtttaaaacggccttccttcatatttgcagaggaaggctgcctcattttatcctctttagtatttagctgtgtaattggttttataattagattatatttaatattcataataaacattcaaacatccgatatatatagactaaattttagtgctggaaccaaacatcccctatattacagtacatcagtttgagggtttgaagaaa

SEQ ID NO: 7098 - DNA, 3336 bp, Zea Mays
caccaaggccatccgaccaccgcagcctaaatcaccttccgtcgccagctcctagaaacccctctcctgcccggcctcctccctctctcatccgatgggcaagtcaagcaagaaggcggccgccgtggctgcagcgccagcggcggtgcccaaggggaagaagcgggaggcggaggacgagatcgagatggccgtgagcgcgaagaagcagaaggcggcgccaccggcgaaggccgtgccgacgtccaagaaggacgccaaggaggacgccaagtccaagaagcagccgccccccaagaaggctgagaacagcagcagtgactctgaagaggaccccgagtccgaagaggagaatttttataatttgattgagtcggggagggcagacggagatgaggagtttgacgaggacgaggaggacgggttcgagttcggtgacgctgacgaggcgatgcaatgcgtggtgatggcggaaagcagcaccaccgccgcggcgctgcgtgctcacacgcaggactacgaggcgctagctgcgcacaagcgcaaggcccttgccgaggagcaaccccagagggaggagggtcccaaaaggccaagaccggaccaactttcagaagcagaagcagcaaccatgttcgaccaactgatggaaggctttggtcttaggcgtaaaagaaggtcaaaagatggcaagagaaggggaagaaagaaaggaacaaagaataagggcagtgctgaagttattaaaaagttgggtgatgctactctacttttcgctgaagaaaaatttaacgaggcaatacctatactacatgagattgtgcgaattgcaccaaatttgtcagattcatattatctacttggtagcatttatagtgagattggtgaactagataaagccataaacttcttgatgctagctgcatatgtttccccaaaggatgcatctctgtggaagaaacttattcccttggcaaaggggatgcttctctggcaagacactgcattttaaaagcaatgaacgcagatccagaagatgtagatctgaagtatctttgtggttatatgtatcacaacctttgtgaatatcagaaagctgcagaaatatatgaacaaatagtcagaatttatcctgccaatagtgctgttcgtaaagtagcagcccagatgtacagagagtgtggtcaaattgacaatgctattaatttgttgaaagactatgccgatactcaaactttcaacattgactggagcgttctagatttattgatatcactttatctaagaaataatgtttttagtgaagcactaaagcagatcaagagggcacaactacatttgggatctcaacagaaactaccagtacaattgcaggcaaaagaagtaatctgccatgcatattgcggtgacatgaaacatgctgagattttccttcgtgatgtgcgtttggagccatcaaaagaaaacattgatgtgctcaaggaactcgcaagcaatttagaaaaaatgggacgatatgagtatgcagtaaagttttacctgctaattgaaaatgttgctactcaaaatgatggtggtttatgctttgatcacaaagaaatgggtagttggtatgtcaaagctgctcagtgctacatgatcttaggggacaaaaaaaatgctattccttatttttataaagcgttacaaagcatgaaggacaatattggtatacgattgaccttatcctcccttcttattgatgacgacaagacagatgaagctgccactttgctttctcctcccaaaattccagagttgcagtctgctaatactccagaccaacagaaaccttggtggtgtgatgggaaagttaagatggcgcttgcaaaactttattacaataaaggaaatttggaagattttgtggacacaatttttcatcctattctagaaactttgaatgttgaatatgctaatcgaaaggtcaagtcaatgagaaagcttccaaacattgttctgcatgaaagagtcaaagtattgggtgagcaacggccagatagtgtatttcaaggattaaggccaatagcatcacctgatgaattacaaaaggcaaacagagcaaagaaattaattgagaaaaggaccgctgcaaatgaagagttaaaacatgattatctgccaagaacaaagcaagttcctcctgttcctggtctactgacaaatgtggagcatcatcagcttgtgttaaatctttgtcgaacattagctttgctgcagcgatattgggatgcactgcagattatcaaccgaaccctcaaacttggaaatgacgcactcactggtgacaaaaaagaggaactcagatccttgggtgctcaaatagcttatagagctccagatcccagtcatggctttaagtatgtccgttacgttgttcagcagcacccatattctcttgccgcatggaattcctactataaggtggtatcaagaatagaggacaggtttccacatcatttcaaatatctccttcggacaagagaagcgaatcctgactgtgtgcctccaataatcatatccgggcatcgatttactgctataagtcagcatcagtcagctgcccgggattaccttgaagcttataagctggacccagaaaaccctcttattaatctatgtgtaggcactgccttgattagtttggcccttggcttcaggcttcagaataagaaccagtgcatcgtccaagcttttgctttcctgtacagataccttcgcctttgtgataacagtcaggaagcctcgtacaacattgctcgagcgtatcaccacattggcctgaataccttggcagctgtttactacgacaaggctttgtcaaccgaggagaaggatcatcccatccccaagcttccgtacgaggctggttcacgtgcgccagaggatctgaggccagggtattgtgatgtgcgaagagaggcagcgttcaatctgcatctaatctatatgaagagtggagctaccgatcttgcgagacggatcctaaaaacttactgcactgtctaaaagctggtatcgggcaatgttgttgggatcggatatcagatccttcaaggctccttgcattagcttaggatcaagctagtctataaagctagaacattggtgtaatatgtcactagtgactttagatgtgtagctgaagagttaacaacgtgcttgatccagatttaaacgtatattctggtttcacaatgctgtgttatagtcaaatggttcagcgatgctttgcttcatgtgatttattggcaattcattattatttttctctcaaacgcacaggagaacgcatag

SEQ ID NO: 7099 - DNA, 611 bp, Zea Mays
cagaatttgtgaggtaccacggtccagccaaagcccacaaggagcaaacaacaacagaacatgaatcgtcacttcctccggctccggcgatctcctccaccgccgttgtcagcggtccggccgagatggggagcacttcctctatgctcacccaatacgatatcgaggaggtccaggaccattgtaaccacgcattctcgcagcaggagatcgtgtcgctgtaccaccgcttctgccagctcgaccgcaacggaggtggcttcgtctccgctgacgagttcatgtcggtacctgagttcgccgtaaatcccctctcccagaggctcctgaggatgctggatggtctcaacttcaaggagtttgtagcatttttgtcggcttttagcccccgcacaagcctacaggaaaagattgaatttattttcagggtttatgatactgactgcaacgggaaggttgcttttgatgacatcttaagcatcttgcgagatctgacaggttcatttatgacagagcaacagagacagattattggcaattctgagctcaagatggaggttgaagttcctattgactaaaaaccaaataagtatcatctagttgtatcgtga

SEQ ID NO: 7100 - DNA, 2404 bp, Zea Mays
gcgcaacgcagcggaaaagcgccatctcattcttcttcctccatcttgtctctacttgccccgcgccggggagccgcgagcgtcgcgccactcccatcgcctgcccacaactccggcatggagccgtcggcgtgggccgtcgccttcgccgcactctgcatcgtcgcgctcgcgccgccggcctcagggttctacctccccggcgtcgcgcccaatgacttcgagaagaaagatccacttcctgtgaaagtcaacaagctgacctcaatcaagacacaacttccctactcctactattctctcccattctgcaagccggataccatagttgacagtgcagaaaatctcggtgaagttcttcgtggagatcgcattgaaaactctccctatacgtttgaaatgagggagcctcagatgtgtcaagtagtctgcaagatatctgttggggagaaagaagcaaagcttctcaaggagaagattgaagatgaataccgtgttaacatgattcttgacaacctacctttagtcgttcctattcaaagagtggatcaagaaggtgcatatttctatcaacatggattccatgttggggccaaaggaaaatattcagggagcaaagatgaaaaatacttcatccacaaccatctatcttttacggtgaaatatcacagggatgagcaaagggatgtttccaggattgtggcctttgaagtgaaaccatacagcgttaagcatgaatatgaagggcaatggaatgataagaagacccgcctgacaacgtgtgaccctcatgctcaacgtatcattacttcgtccgagtctcctcaggaggtcgaagttggcaaggatatcatatttacttacgatgtggatttcaaggagagcgacatcaagtgggcatctcggtgggacagctatctattgatgacagatgatcagatccactggttctctattgtgaattctctcatgattgttctcttcctttctggaatggttgcaatgatcatgcttcgtaccctttaccgggatatctctaagtataaccaacttgagactcaggaagaggcccaggaggagactggatggaagcttgttcacggcgatgttttcaggcctccgtcaaactcagactggctctgtgtttatgttggcaccggtgtgcaattctttggcatgctgcttgtcactatggtatttgcggttcttggcttcctttctccatcgaacaggggtggactgatgacagccatgctcctgctctgggtgttcatggggttgcttgctggctactcttcttcacgtctttacaaactgttcaagggctcagaatggaagaacatcgccttgaggacagccttcactttccctggcagtgtgtttgctatttttttcttcttgaatgctcttatctgggggcaaaagtcctcaggtgctgttccattcaccaccatgtttgctcttgtcctcctttggttcggtatttcagtacctttggtttttgttggaagcttccttggcttcaagaaacctaccattgaagatccagtgaagacaaacaagataccaaggcagatccctgagcaggcctggtacatgaacccaatcttctcgattctaatcggagggatccttccatttggtgctgtcttcatcgaactcttctttatccttacttccatctggctgcaccagttctactacatctttgggttcctcttccttgtgttcctgattctcatcgtgacatgtgctgagatctcgattgtcctatgttacttccagctctgcagcgaagattacctgtggtggtggaggtcgtacttgacttctggttcctctgcactctacctcttcttgtatgcaaccttctacttcttcacaaagcttgagatcaccaagtttgtctcagctgttatgtacttcggttacatgctcattgcctcgtacgccttcttcgccttgaccggcacaatcggattctatgcttgcttcctgttcacaaggctgatttactcatcggtcaagatcgagtaaggactgctgagtttagctgcaagtgggctcgttttgagttttcaaagctggtagttatgatgaagatgcgattcattaccgtatgattccggtattatagctagctcagtatgtttctgtttttcttttgtttttttttgttttcgggctgtgcccgaccgtgaggatatatgcttatcaagagcttgacgctgaaagaattgtatacgggtgctgagtaatctatctcttgttcctctcagaatttatgtacttgttgatgtgcactgtgacgtacatgatatacatttatagctaccggctcggcggctcctgtttcttttgtacctgagtccagataaatggattcttatacatgtttttctaa

SEQ ID NO: 7101 - DNA, 920 bp, Zea Mays
gcaaattgttattctggccgaaacaaagtatttgagaaatcaggatccgcgctggccggacggctcggtttggccgttccgttccattccattccgctctcctcccctcccctcccctcccattcttctacacggccgatcgcgaccctcgccccgcccccacacggccacgcaccgaaactgccccgcccccgcagcacactcgtcctccccgcgccacctcggggacgtcccggtccgcgacatccctgaccaccgcgatggccgccgccgccctccgctcctccgcacgccggctcctgcgtctcaccccggcaccctcgtcggctctgttcgccgcttcccggcccaccgccagggttgcaccgctctcacgccccatcgccgctctgtcaggtggcaacaatcctatctcatggaaactgagacgcttcttcagttcaaatgaaaagcacttgcctgcaatatctgatccagagatcgaagctgcatttaaggatttgttggctgctagttggaatgaacttccagattctctcgtagcggaagcaaagaaagcagtatctaaagcgaccgatgataatgctggtcaagaggctttgaaaaatgtatttggtgcagctgaggcatgtgaagaattcagtggaaccttggttaccctaagaatggctcttgatgatctgtgtggcctgactggcgaaaatgtgggtcccttacctggttatattgaagatgctgttaaagctgcatataatcgctacatgacatatctggagtcctttggccctgaggaaaattatctaagaaagaaggtggagactgagttgggcacaaaaatgatacacctcaaaatgagatgcagtggcataggttccgagtggggaaagcaaaacaagtatgcatttgggctgattcctggc

SEQ ID NO: 7102 - DNA, 1567 bp, Zea Mays
ccacgcatcgaggacctaattctaaattcgtaaaatcatcacgcgccgtcttcagtcctctgcctcctcgtcggaaagccctaatcccactcaatcctctcgctgccgatccgacctcaattccgaatccctcccccatctcccggcgtccccaacgccctccgccatgccggacgtgcagccgctcgtcagcgacttcgtcctcaagcttaagcgccggaaggtggaggggtcgcacgcggtggcccggcagacggcggaactgctacggtcggttgtgtcgcagcatcggatgggtagcagcgccaaccaggcagccgcgcttgccgatgctgtacgcgctgtgggggagcagctcatctccgccaatcccattgtgtcagaattctatcagggtgacctgaaaactgtgttggtatccaactgtgaggtaatcctaactctaggtcgttcgagaactgtcaaggagtttctgtatgctgcgaaagagaagaagcgatctttccgtgtatttgttgctgaaggtgctccaagatatcagggccatgttcttgcaaaagagttggttgagaaaggtgtacaaactacagttataacagattcagcagtttttgcaatgatctctcgagttaacatggtcataattggagcgcatgctatcatggcaaatggtggagtcattgcaccagtagggatgaacatggttgcacttgctgctcaaaggcatgctgtgccttttgttgtggttgctggtagtcacaaggtgtcatgcttaactagacgcttgatatacagagtagcatagctgtgtcctctgtatccacacaacccacaagtgttgctgaatgaactcaaatcgccatctgatttgctcgattttggcgagttctcagattgcatgaatttcagtactcaggatggcagccccttgctaaatgttgccaacccaacatttgactatgtgccaccgaagcttgtgagcctattcatcactgacaccggggggcacagtccgtcttatatgtatcggcttattgctgagtattactcagctgatgatctggtagtgagacggaaggcaacatcttgaaagaagacgaaagcactgcaaagtctccttggtggtctgatgtgcagtcatggaattgttggtgggtccagtcactgtcaaacagcaggagatcgatggaagcattctcgcgtttgggcgtaaactgtcgagggaatgggatgtgacgtcatggaattgttgtcgtactacaggagaggttcatatacatgaatatatgattgactggttgtgtagagggtcgctgtttctgatctgggccttggctggcccaaattttgtcttataaattccagcaagctgttcggtgtcacgtattcgctgagccccttttctatttctatatactgtatatggtattacgcctgtcatgcttcttttttggcgattcaactgcgtagatgctggaaaagtaaaaaaagaagaattcgacagaatttctaggcttatacaaataggtgaatttgtagtaggaagcgaaagtatacatgtctctta

SEQ ID NO: 7103 - DNA, 1732 bp, Zea Mays
tgcagattggaaaatgagcttctccagttgtctatgttgatgggacagtaacgtatcatgcaaaccatttgggtctatggaagcacacataaatattccagaaaaatacttcctgctgaacatttgaggactgtcttattgaacctcgattcgacattcaaggagtgtctgctagtcataataatgtactgctgcaatccacgtcacttgacaatgctgatgctccaatggaccacgcgacacattcaaaagcacaggggtccattgatccacacactcgtggaagttatagtccagggccctctaaccgcacttaaccttttgcattgttcgtaaaagcttgcgggtccatgcagtaaacaattggatcctttacaaacctaataatggtgacacattctatgcataatgaaaatttggggtttcacctggatagctttcattttaattacgggctgcagcagtgcgacaatgtgcattctacttggattgagttacaactttttaacttgtataagcttccattgtgttgaacacaaaattacaccatgcaaaacatcgcgaagaggtatctgggaagtttatgattggttagcatgcacattcaatgacatatgcatgcatcagttaggacaacgcctcttcgctaaaagtgaatatccgaccagtattgacctgcagtttccagtgtcttgacaccaaatcgccatacaaaaactacagagtggtggtatacgggaagttcatggttggttagcatacaccctctttgctgaaaggctgtcatattctacttggattggccgcagcttgcaatgtatgacaccaaatagcaccatacaaagactatgaagaggtctgggaagcttatgattgggtagcatccatgtatctataactgtgaccgcaactttgaagaaacacatgctgtggctcatggcctcgagataaaaaaaggttaaattgcaatcgacaacaatctggttgggcagagaatcctgttcgcagagtgtttgagctcatttgttccttggcaaagtcgatgtcgttgacgaacacctgcattacgaattacgatatatgaacaccgtaggaagtttgtcgaaaagcgaagggaatcatccttctctatagtccaaaaacgtcggtgcattggatagtaccgatttcactcatcagggtccaggatggatgtgacatgcattggtgtggattgatccctggcaagggcaatggctcacaactcagcatcatgttgtgtccagagaagcatctcagctgcagggacctagcgcgaagaaaaccagattgcacacctgggcatatgcaattccccttgtcatactcggtgtcggtgacaccatagttgtaggtatgctccagcgttccaggcctctcaaacttgtagccgtcacccgtcagggcccacaccacgaaggcgatgacgctcttgctgccctctttatgagatctcaattgtaaccgatcgacggggaagttctaggtttgccaacagcactgctcgacgacgaaatgcgattccgcgggcccgtattcgaggaacgcgtcggtttacttctcctcagccttaggtatatatgcccatcttgctgagcagcttcatcgcccaggcacccggtttagaacatgcattaatttgtataatctgtttcagctcagacttcagagcggactgtgacttgtattgttttgtggtacctgattgtctttg

SEQ ID NO: 7104 - DNA, 2078 bp, Zea Mays
aacccgccactttgcccactctcctcttccttctttgctacccatttcgtcgcagtagtcggcagtcgaaaccctagtcccctcgctttccttccactcgccgtcgcggcgccgatagagccagagctgaaaggcgtaggaaaagctggtggaggaggggatggaccggatcgtaggcagcaagtacaagctgggtcgcaagatcggaagcggttccttcggggagatctacctcgcgacgcacgtcgacacctacgagatcgtcgccgtcaagattgaaagcagcaaaaccaatcatccacagttgctatatgaggccaaactgtacaatgctcttcaaggagggactggtatcgcaaacataaaatggtgcggcattgacggcgatgaaaacattcttgttattgatttactcggaccaagccttgaagatctgtttgtttattgtggccggagattctcactgaagacggtcttgatgctagcggaccagatggtttatgtaattgacttcgggcttgcaaagagatatcgtgattcagccaccaaccgccatataccttatagagaaaataaaaacttgactggcacagctcgctatgctagccgtaatactcatcttgggattgtcttccttggcagggcttgaaagcagccacaaagaaacagaagtatgacaaaataagtgagaagaagctttcgactcctattgaggctctatgtaaatcccatcctgtggaatttgcttcctatttccactactgccattctctgacatttgatcagcgtcccgattatagtttcttgaggcatgtctttcgagaattgtttgagcgcgaaggctatcaatttgattatgtgtatgactggactttgttgaagtgtaagcaatcccagaaggctaaggttcagcaaggatgctctcatgatgcaggcgtaagcagccgtccagttgcaacaaacgtggacaagcaccaagttggtgttgcacgcccaattaatgcttcaggtctgcttgaagcagaacaacgcccggcaatcagaatgcaattaaacagccgttccaataatctgcatcctgagagattgggagtgtctgctagtcataataatgtactgctgcaatccacgtcacttgacaatgctgatgctccaatggaccacgcgacacattcaaaagcacaggggtccattgatccacacactcgtggaagttatagtccagggccctctaaccgcacttaaccttttgcattgttcgtaaaagcttgcgggtccatgcagtaaacaattgcttccattgtgttgaacacaaaattacaccatgcaaaacatcgcgaagaggtatctgggaagtttatgattggttagcatgcacattcaatgacatatgcatgcatcagttaggacaacgcctcttcgctaaaagtgaatatccgaccagtattgacctgcagtttccagtgtcttgacaccaaatcgccatacaaaaactacagagtggtggtatacgggaagttcatggttggttagcatacaccctctttgctgaaaggctgtcatattctacttggattggccgcagcttgcaatgtatgacaccaaatagcaccatacaaagactatgaagaggtctgggaagcttatgattgggtagcatccatgtatctataactgtgaccgcaactttgaagaaacacatgctgtggctcatggcctcgagataaaaaaaggttaaattgcaatcgacaacaatctggttgggcagaggtaaatatcatgccgtgctcctgtcatagacatggttgcctgtattttatttgaatgagggttgaatagcttataacattgtgaggaagtcctaccacatattgatttttcatgttggtgttttttttgttggcattctctctccagttgtcataaaaacaatgaactgtacataatttcttagaagggctgttcttaagtgttgaggtggaatgagatgatttacttgataaaagtgtacatatttaggtatccctcatttttctgattgcatcaatatctttcaatgatataacgctggttccgaa

SEQ ID NO: 7105 - DNA, 2152 bp, Zea Mays
aacccgccactttgcccactctcctcttccttctttgctacccatttcgtcgcagtagtcggcagtcgaaaccctagtcccctcgctttccttccactcgccgtcgcggcgccgatagagccagagctgaaaggcgtaggaaaagctggtggaggaggggatggaccggatcgtaggcagcaagtacaagctgggtcgcaagatcggaagcggttccttcggggagatctacctcgcgacgcacgtcgacacctacgagatcgtcgccgtcaagattgaaagcagcaaaaccaatcatccacagttgctatatgaggccaaactgtacaatgctcttcaaggagggactggtatcgcaaacataaaatggtgcggcattgacggcgatgaaaacattcttgttattgatttactcggaccaagccttgaagatctgtttgtttattgtggccggagattctcactgaagacggtcttgatgctagcggaccagatgataacaagaatagaatttatgcattctaaaggctatctgcacagagacatcaagcctgataacttcctcatgggccttggtcgaaaagctaaccaggtttatgtaattgacttcgggcttgcaaagagatatcgtgattcagccaccaaccgccatataccttatagagaaaataaaaacttgactggcacagctcgctatgctagccgtaatactcatcttgggattgagcaaagccgcagagatgatttggaatcgatcggatacgttcttctgtatttccttaggggaagtcttccttggcagggcttgaaagcagccacaaagaaacagaagtatgacaaaataagtgagaagaagctttcgactcctattgagtttcttgaggcatgtctttcgagaattgtttgagcgcgaaggctatcaatttgattatgtgtatgactggactttgttgaagtgtaagcaatcccagaaggctaaggttcagcaaggatgctctcatgatgcaggcgtaagcagccgtccagttgcaacaaacgtggacaagcaccaagttggtgttgcacgcccaattaatgcttcaggtctgcttgaagcagaacaacgcccggcaatcagaatgcaattaaacagccgttccaataatctgcatcctgagagattgggagtgtctgctagtcataataatgtactgctgcaatccacgtcacttgacaatgctgatgctccaatggaccacgcgacacattcaaaagcacaggggtccattgatccacacactcgtggaagttatagtccagggccctctaaccgcacttaaccttttgcattgttcgtaaaagcttgcgggtccatgcagtaaacaattgcttccattgtgttgaacacaaaattacaccatgcaaaacatcgcgaagaggtatctgggaagtttatgattggttagcatgcacattcaatgacatatgcatgcatcagttaggacaacgcctcttcgctaaaagtgaatatccgaccagtattgacctgcagtttccagtgtcttgacaccaaatcgccatacaaaaactacagagtggtggtatacgggaagttcatggttggttagcatacaccctctttgctgaaaggctgtcatattctacttggattggccgcagcttgcaatgtatgacaccaaatagcaccatacaaagactatgaagaggtctgggaagcttatgattgggtagcatccatgtatctataactgtgaccgcaactttgaagaaacacatgctgtggctcatggcctcgagataaaaaaaggttaaattgcaatcgacaacaatctggttgggcagaggtaaatatcatgccgtgctcctgtcatagacatggttgcctgtattttatttgaatgagggttgaatagcttataacattgtgaggaagtcctaccacatattgatttttcatgttggtgttttttttgttggcattctctctccagttgtcataaaaacaatgaactgtacataatttcttagaagggctgttcttaagtgttgaggtggaatgagatgatttacttgataaaagtgtacatatttaggtatccctcatttttctgattgcatcaatatctttcaatgatataacgctggttccgaa

SEQ ID NO: 7106 - DNA, 2222 bp, Zea Mays
gccagtgccgagtgtactggccgccaccactcgccactcgccactcggccccaggaccctcctcttcctcgccagcaagccggcacgatccctcccttccgggaaaaaggctcccaatctgttccgagccagccggccatggcgattagggctggccgctcgccccttctccacctcctcgccctcgccttcctcatcctcgccgcctctccctgcctccaagctcgagtggaccatcgcaaacagatggccctcatctcctgggtagatcaaaggaaataacacacatgaaattaaggagagttgctgtaaggaagaaaatggaagtagtgcagcaggatgatgaagcgttagttaaacttgagaatgcaggtatcgaacgttcaaaagctgttgactctgctgtgctgggaaaatacagcatctggagacgtgaaaatgaaaatgaaaaggcagattcaagggtccgtttgatgcgagatcaaatgatcatggccagaatatattctgttcttgccaaatcgagggacaagcttgatctctatcaggagctgcttgcaaggctcaaggaaagccagcgctcccttggggaagctactgctgatgctgaacttcccaagagtgcttcggatagaaccaaagcaatgggccaagttttatcaaaagcaagggatctattgtacgattgcaaggaaattacccagcgtttgagagcaatgcttcagtcagcagatgagcaggtccggagcttgaagaagcagagcaccttccttagccagctagcagctaagacaatcccaaatggcatccattgtctttccatgcgcttaacgattgattattatcttctctctccagagaaaagaaagttccccaatagtgagaacctggaaaatcctgatctttaccattatgctcttttctcggacaatgttttggcagcatcagttgtggtcaactcaaccatcatgaatgctaaggagcctgaaaaacatgtatttcatcttgttactgacaaactgaactttggggccatgaacatgtggtttttgctgaatccacctggggatgcaacaatccatgtggaaaatgttgatgacttcaaatggttaaactcttcttactgccctgttctgaagcagcttgagtctgcagccatgaaagaatattatttcaaggctgatcgtccgaaaacactctctgctggttcttctaatctgaagtatcgaaacccaaaatatttgtccatgctcaatcatctaagattttacctcccacaagtctatcccaagctgaataaaattcttttcctggatgatgatatagttgtccagagggacctaactggactctgggaggttgatcttaatggaaatgtaaatggagccgtggaaacatgtggagagagttttcaccgatttgataagtacctaaatttctcaaacccaaatattgctcagaattttgatcctaatgcatgtggttgggcttatggaatgaacatgtttgatctggaagaatggaagaagaaagacattactggaatttaccacaaatggcagaacatgaacgagaacaggctgctctggaaactggggacattgccaccagggcttctaactttttacaagctgacacaccctctggacaaatcatggcatgtgcttggcttagggtacaatccaaccattgagcgctcagagatagacaatgctgctgtcatccactacaatggtaacatgaagccctggctggaaattgcaatgataaagtatcggccttactggacaaagtacatcaattatcagcattcctacattcatggatgcaagatcagccaatagaaaccaccctcagatattcttctgtgatgaacattgaagttggatgggactcaaaatgaaatcagtataactatcacatgttctttattcgtgttatattagatttgttagttatcacgtgtatgtagtttcgtcgcccttttgtggtgctttctcccctagctcattgttggttcttgtccctttttgtcatgaaaagaatgatgagctctatgattctcatcagctgataaatgtaatgtctgaatttctgtcggtggcaaattaatgatcccattcaaacggtatcaagtgttcgaacattcatgctagcatttgatggcaggttgagagttatttacgagcatctgttcgttcgtggttgagattgttttttta

SEQ ID NO: 7107 - DNA, 950 bp, Zea Mays
ccagccgccacacttctttctgttagcgtttttcttggcgcagctggcggctccgaacacgcaggcctcgttcggccctatcttcgcgcatgccgccatggccttgtgcgcccggagctccagctcacacgccctcgacagcagacgcatggacgccgggtccaagagcgccgccatcctctgtccagcgctgggaggaaacaaaaaatcacgcggcggtctgcacccagcggcgctgcctgcgcacggccaccagacagccgaacggcggccagcagacagccgaacggcaaagaaaggagccttcgcccctgcacctgcacgtgcacgatgccgagtggagccttaagatttgctcacctgcacccagctagcagccacatggatgaaacgacaaagtctgctgctctctcaagtgagtcatggctgtaattataaccgcaattatgcctgcccaaaagcccaaagcaggtaacactccttttctaaaggaaacttaagacaattaggccatatctatcgttcataattattaaggccatgtttggattttaatggctaattgttcgtcggtggctaataattagccagcagataattagctagccacaagttatagtatgtttgaagtcttagctaaataaatgtctttttttctctctatacggtctattagcacatgttagcaagattaaatagttaatgggcaaacagtttgccaaccctctagctaacaattagccaatttattaatcaacttgtttggaggtcaaggtgctaatataaacagataaattgtttgtcacatggattcaaacagaccctaactaggtccaaaatttagctgtgccgttaaatgtacccacaaaaacttgtagaaataggagaaatattattcgggggtcataaatattgattattcattcaatgtgtgttaacaacagtgtaac

SEQ ID NO: 7108 - DNA, 2920 bp, Zea Mays
cgcgaaatgaaacggaactgggacagcaaaggaagatacggcgcgatattttagattacaggagagtaggagaccggcgccgaaagctccgtggcctcgtctccttccccacttcggcctcggcagttccgcgtgccggccggagcctcgtctcgcttcgcatctcgcacttcgcgccttcgccgctgcgattcctcagcagctcctcggccgctccacccacccctgcgccggcgagatggagctcaagcccggcatgtcggcgctcgtcaccggcggcgcctctggcatcgggaaagcactttgtattgcttttgcaaggaggggtttatttgtgactgtcgttgatttctcagaggaaaatggaagagaagttgctacattagttcaaaaagaaaatagcaaatttcacggagatcttagaattccatcttcaatatttgttaagtgtgatgttagtaatgcagataatcttgctgcttgttttgagaagcatgtacagacatacaatggactagatatctgcatcaactgtgctggaattgctaataaaacactagtttatgatgatacatctgatggaactagaacatggaggcatgctgttaatgtgaaccttgttgctgtcattgatggtactcgcattgcaagtcaaataatgcgaaaccaaaagaagcccggtgtcataataaacattggttcagcggcaggtctttatcctatgttcctcgatcccgtatatagtgcggcaaaagggggtgtggttatgtttacaagatcactttctccattgaaacgccatggtgttcgtgtcaatgtgctctgcccggagtttgtccaaaccaatatggcggaacaaatgagccgcaaagttatagattcatctggtggatatttggagatggaagatgttgttaacggtacaccatttctgtaatctagtgttattacaggactattagctttgtaaccatattttatgtgccatgatgatcaatgcaagcgtcagatgaattgttttaaacttctagtgttatgttgaggtggggtgttttaaagatgaactgcacaaaaacatttgttatcactgtaaaacatgtgaattccattgatataaattcaataatgtacatggtaggttgtgtaacctgcatgaataggccagttctgtttctgatcttgagaactttagcaagtgatggttaaccaaccaaatggcacatttgagcttatacaggatgagagcaaggctggtgcttgcctttggataacaaaacgacgagggatggagtactggccaacaccagaagaacaaagaaagtatatggtgaatcctaacaaatcaaaaaggatgctgacaaacaatatatatcctagcatccgaatgcctgaattctttgagaagatagttgttcacacactcagccataattttcgcaatgctacaagacttgagcgtgtgcaactgagatttcctatcaaagcgcatagtgctctggttaaaataatatatgctggcgtaaatgctagtgatgtcaacttcagttcaggacgttattttagtggtaatcctaaagaaactgcttcacgccttccatttgatgctggttttgaaggtgtgggaattgttgccgctgttggagattcagtcagtcatatcaaagttggcactcctgtggcccttatgacttttgggagctatgctgaattcacggaggttccagccaaacatcttcttccagtgccaagaccagaccctgaggttgttgcaatgttgacatcaggactgactgcatcaattagtcttgaaaaggcaggacaaatgacatctgggcaagttgttttagttacagcagctgctggtggaacaggacagttcgcagttcagttcttagggacatactttggtagcttgtatttttactggattgagcaatgggcaagatattctagccttctaggacatggctggcgaaattagcaggcaacaaggttgttgccacatgtggaggtgaaagtaaagctgaacttctggcttccttaggagttgatcgtgttatcaattacagaaatgaacgagtcaaagatgttctgaagaaagagtttccaagaggtgtagatatcatatatgaatctgtaggtggggaaatgtttgacttgtgcttgaatgcacttgcagtccatgggcatctcattgtaattggtatgatctcccagtatcaaggagaggatggctggaagccaaagaactacactggactatgtgagaagattctagctaaaagtcaaactgctggatttttccttgttcagtatgctcacttgtggcaagatcatcttaacaaactttttgacctgtatgcctctggaaagctaaaggtttccctagaccccaagcaattcttgggtgttgcttcagtcgtagatgcggtcgaatatcttcattctggcaagagtgttggcaaggtcgttgtgtgtattgatccatcatacggtcagatcgttgcaaaattataatccatggacatgatgcgcattgtcttccatggtcacgtaggttattgtcttatagttacacatatacatcaagaccgtattttcccagcgggtgacaaatgaataagggaacatgttggtgtatagtttagtttcatttttccaaagtgtaagatgcacaactatactgaaggacaagcatgggcatggaaatcgattaagtttctaatcccgtgcagtaggatatgcattcgtgtggcctcgttccacgttgtatgtatacagtatatattatataacttgtctcagtgccacatgcttcaattcgaaccggtaacaataattcaaacagctcatgcagatgcattctcaaatacacagcttggaacatcgatattttcttttgaagaaaatttgtttgtgc

SEQ ID NO: 7109 - DNA, 2486 bp, Zea Mays
tctcgcgtgtaggactttagttgccacgttggtgttccgttctgttctgttggcagcaagtgcaatgagcatcaatgcatcaaccatcgtgctggtacttccaaaagagcgaaaggattgccaattctgaaggagaaagcaaaccatatctgaaatacaaagcgcggacggaccatttgagcatccaattcgtgagctttggcgtctgtgtatttttaatcgggagctgtaggctgtagctagctagagaggtttagagcagcaccaaatggcgagcaaggtggtggacctccggtcagacacggtcaccaagccctccgaggccatgcgggccgccatggccgccgccgacgtcgacgacgacgtcctgggcgcggacccgaccgcgcatcgcttcgaggcggagatggccgcggtcatgggcaaggaagccgcgctgttcgtgccgtcgggcaccatgggcaacctcatctccgtcctcgtgcactgcgacgtcaggggcagcgaggccatcctcggcgacaactcgcacatccacgtctacgagaacggcggcatctccaccatcggcggcgtgcaccccaggaccgtgaagaacaaccccgacggcaccatggatatcgacaagatcgttgccgccatcaggcatcctgatctccattacccgacgaccagattgatctgcttggagaacacacatgggaagtgagttgcacttgcacagatacctgttcctccgagtctcgctcctgttcggatgtttcatccccgtctcacacccgagcttttctctaccttcctcttcatcctcctctccgcggcgagatccgccgtcctctcgctggagtggacaggatcagaagagagaagaagaggggggaaaacaatgtgacatactccccgagtagaacatataacctttttctcatcttattaattcgtatgtatgtatcactgtttctgcagtactggtggaaagtgtttatctgtagaatacactgacaaggttggtgaaattgccaagagccatggcttgaagcttcatatcgatggagctcgcatcttcaatgcgtctgtggcacttggagttcctgtagatagactcgtgaaagctgctgattcagtttcggtatgcctatcgaaagggttaggcgcacccgtcggatcagtgattgttggttcgaaggccttcattgacaaggccagaattctccggaagaccctaggcggtggaatgagacaggtgggagttctttgtgctgctgctcatgttgccgttcgtgacactgtgggaaagcttgcggatgaccacaggaaggctaaagctttggcagagggactgaagaaaatcgagcagattacagtggattcagcttcggtcgagaccaatatggtattctttgaggtcatggatccaagaatatcacctgacaaactgtgtcaagtcttggaacaggacaacgtgcttgcactgccagccaattcaaaaaggtgaagtttcattctgtgtttgaatgcactagcgctaatagttagttagctaaaaattactagttgaattaggtagctaacaaatatctagctaactattagctaatttgctaaaaatagctaatagttggactattagttagactatttggatgattttggctaattttagcagctaactattaactctagtgcatttaaacatggcctctcttggccgatcctttattcctaccatcactttggctgtttgtgcaacattgcctcccatttccggtaacaagctagactgcatatcatagtctggctgaaactccatgttcaattagcagaaccaaccttttactccaagcaagtctataatcatatcgagtttttgtaaggtccgcatttaacttaactgtccgtattcgaacttctgtgtcgtgcagtattaggttcgtcatccattaccagatttcagacgctgatgttgggtacgcattggcatgtgtcgagaaagcaatcaaagagctactggaaggcagtactgagttggggcattcgataaacggagctaccaaaagctcgtatgggcactagatcactcggattctgccaacctgatgcatcgacacatggtacccagctgcttgttagctgctctgcttgtctgtgaccaacgcctagctgttgtagtctcgcctttcccgaataattgttgctgttcagtctctgtttggatctgcttgttctcgtgtctctgcttcatctgctttcgcttcatggtactgagtactgacgctgtgaagtggaacaagtactctctcccccaaaaaggccggtagacccaaacatcttttcttgcgggctggtaaagccaaaaatttttaaatgtactcgaacgaaaatatcatagcatagtcttgcatacaaaggaagaaatacgataagaagtgaatgtaaagcaaagcactacagatgcaaagagaaacgcaggtctcgtatgatggtgc

SEQ ID NO: 7110 - DNA, 2492 bp, Zea Mays
tgctgtcagactgcgctcgtggcggcgcgcccagttccactctcccagggcgccgcctgcgcctctcgttctctatataaaacaccgccgccccgcgtccgcgaaggccaaggttctcagcacggcgcgcggcccgcctccccaccggtctcgctctcgcagtccctcgaccgctcgtcccggcagagcagtcgcagcacgatggtgaccaacgtggtggacctccggtcggacacggtcaccaagccgtccgacgccatgcgcgccgccatggccgcggccgacgtcgacgacgacgtcctgggcgctgaccccaccgcgcgccgcttcgaggcggagatggccgcgctcctgggcaaggaggcggcgctgttcgtgccctcgggcaccatggccaacctcgtctccgtcctcgcgcactgcgacgtccgcggcagcgaggtcatcctcggggacgcctcccacatccacgtctacgagaacggcggcatctccaccctcggcggcgtgcaccccaggaccgtgcccaacaaccccgacggcaccatggacctcgccaggatcgtcgacgccatcaggaaccccgacggggcgctgctgtacccgacgaccaggctcatctgcctggagaacacgcatgccaattctggtgggaaatgcttgtctgtagagtacacagacaaggttggcgaaattgccgtgaaccacggcttgaagcttcacatcgatggagctcgtattttcaatgcctctgtggcactgggagttcctgtacatagacttgtaaaagctgccgactcagtttcggtatgcctatctaaagggttaggcgcacccatcggatcagttgttgttggttcagaggccttcatcgacaaggctagaattcttaggaagaccctaggcggtgggatgaggcaggttggagttctttgtgccgctgcttatgttgctgttcgtgacaccgtgggaaagcttgcggatgatcacaggaaggctaaagccttggcagagggcctgaagaaaattaaacagcttacggtggattcgtcttcagtcgagaccaatatggtgttcttcgatatcgtggatccacgcatttcaccgagcaagctatgccaagtcttggaacagcgcaatgttcttgcaatgccagcaagttcaaaaagtgtcaggttcgtcatccattaccagatttcagacagcgatgttcaatatgcattgacgtgtgtcgagaaagctgttgaagagctactgaagggcggtacaaagttggagcatttgacgaatgagggaggctgtcagcaacagaaagctcaccatcgacatcgagctcgctttcccgaacgttgctgtccttgcgcagagcgtcaccaaccaacgtgatagcgattgaatcgaagtactggtggaaagtgtttatctgtagaatacactgacaaggttggtgaaattgccaagagccatggcttgaagcttcatatcgatggagctcgcatcttcaatgcgtctgtggcacttggagttcctgtagatagactcgtgaaagctgctgattcagtttcggtatgcctatcgaaagggttaggcgcacccgtcggatcagtgattgttggttcgaaggccttcattgacaaggccagaattctccggaagaccctaggcggtggaatgagacaggtgggagttctttgtgctgctgctcatgttgccgttcgtgacactgtgggaaagcttgcggatgaccacaggaaggctaaagctttggcagagggactgaagaaaatcgagcagattacagtggattcagcttcggtcgagaccaatatggtattctttgaggtcatggatccaagaatatcacctgacaaactgtgtcaagtcttggaacaggacaacgtgcttgcactgccagccaattcaaaaagtattaggttcgtcatccattaccagatttcagacgctgatgttgggtacgcattggcatgtgtcgagaaagcaatcaaagagctactggaaggcagtactgagttggggcattcgataaacggagctaccaaaagctcgtatgggcactagatcactcggattctgccaacctgatgcatcgacacatggtacccagctgcttgttagctgctctgcttgtctgtgaccaacgcctagctgttgtagtctcgcctttcccgaataattgttgctgttcagtctctgtttggatctgcttgttctcgtgtctctgcttcatctgctttcgcttcatggtactgagtactgacgctgtgaagtggaacaagtactctctcccccaaaaaggccggtagacccaaacatcttttcttgcgggctggtaaagccaaaaatttttaaatgtactcgaacgaaaatatcatagcatagtcttgcatacaaaggaagaaatacgataagaagtgaatgtaaagcaaagcactacagatgcaaagagaaacgcaggtctcgtatgatggtgc

SEQ ID NO: 7111 - DNA, 1701 bp, Zea Mays
cacttgacagcaaccaactgaagcaccggaaatatatcgatttctgctcacgactgaaacagtaaacacacaaaatagggcgtctggatgatccttgtgttctttgtttcccgtcccgcggtgtgcgcgcgcacgtctgccgtctgccaagaggagtaggcagagatggcttgccctgcgcagtccatgctctccgccagcggctgcatcctcctgaggagcaagcctcgggcttcctcctcccacgtgcgagggggcatcatcggcggtggctgcagcagcaggccgttccagctaacctgcaacgcttcctcttccccgtctcctccctcgccggcgccggcgcaggaagaccccgactgcaacgacgaggagtgcgccccggagaaggaggtcgggagcttgagggccgagtggctggccgaggagaggacccaggtcgtcggcactttccctcccaggaagagagggtggaccggcttagtggagaaggacaccgccggccagaccaacatctattctgtcgagattttgcgaccactggtgtcccgccgtgtccgacgacctctagcggtctgactccctgcgtgcttataatgcaccagccggtggtgtacgtggccgagagcgccatcagctccggcgcggcgggcatgtcggcggagggtgccgagaacacggccgccatcgccgcggggctcgtcctcatcaccgtcgccgcggcctcgtccatcctcatccaggtgaacaagagccagccgcaggtgccggaagccgcctacaacggcccgccgctcagctattacgtggccaagttccagccggcgcagacccttgaggcccccgccccggcggaggcggtagaggcgcaggatggcgccgccactgtccaggactcggcggctccggaggcgcaggaagctgtcctcatcagctgattcggttttgtggcagcttacagatgaggttgtagtgatgtgcatgatgatggaagagacacatgtataatacattcattgtatgcatgagagagaaagggagaaaggagcatttcggagtcgtattacgtttcgtgtatatttacatatacatgcattcaggtcgcctatgcttattggaattcagacatcacggcactcccacaaaccattcattcagttgtaacaacggggcatgagcagagctatatatatatatatatcgcggtagcagagccattcacaataactgcgtgtaccatgggccatggacctgctctgacaccattgctgctttgataagcacttcagctgccttcaccagccgcgcagtgagttttgttgccccgacgcgcctcagggatgcatcggcgagcatccggcccttctccccactgccgcccagggtgactgcacggaatgcacagtatacggactgagagaccttcttgaagacggtgtcatcggtctggaggcttctaaggaagaccctagtcaatatctcttttctggcgttcatcctttcatgatctgacaagctccttgaggttgacgagtacatcatggcctcaatgattttctcagtgccaacatctggaaagttgtctagcagccttgtgaggacgttgaacagttccgaagtggcattctccagctcagaagaagtgatctttgggttctcactcgctaacacctgatgcaaaacaagcatgctgcaaacaag

SEQ ID NO: 7112 - DNA, 2103 bp, Zea Mays
atagttctgaagccccagtttgggaattaggattagagccccttgtgaatctcgacccattaccagacccacgcgtgcgctctcctgggccgaacaaaaccccggacggctaccgttcagtggccagcgtttcaacagtaatcagagtaatctctctgtgcctgcgacgacgactaggtgggttaccgccgtcgcgccgccgccgccgccgccgtcatactacaggtgcgaggccttcatcggtatcttaacaggcgacgaacaccaaccagtctgcactctacgatggcggcgcctccggccacggctcccgcggcctcccggtgtctctccggtgccaagtcgtgctgggctgctgagcggagctccagctcgtttgccgtctcggcgccttctactggcctccggcaaagtaggagccgcgtcctcagcgttcgtgccaaggttgccactggcgtgcagagagccagcactgtggatgatggagcgaaaaggccgtggaagctcagtgatgctcgtcttgtcctggaagatggttcagtgtggagggccaagtcttttggcgcatcaggaacacaagtcggtgaagttgttttcaacacatcactgacaggctatcaggagattttgacagatccaagctatgctggtcaatttgtcctgatgaccaatccccatattggtaacactggcgttaatcctgacgatgaagaatcaaaccaatgttttcttggtggccttatcataagaaatctaagcatatgtacttccaactggcgatgcaaagaaacacttgaagagtatctgactaagaggaacatcatgggaatatatgacgtggatacacgtgctataacacgaagattaagagaagacggcagtcttattggtgtcttgagtactgatcagtctcagacagacaatgagttgttggaaatggccaaaaagtggaaaattgttggagttgatttgattagtggtgtcacatgtgatgctccatatgaatggttggacaagactgactcagaatgggagttcaagagggatcagtcaagtgaaacttttcatgtggttgcctatgactttggtatcaaacataatattttgagacgattgacatcatatggatgcaaaataacagttgttccagcaaattggcctgcttcagaggtactcaatttgaagcctaatggtgttctttttagcaatggtcctggagatccagctgcagttccctatgctgtgaagacagtacaagacataattggaaaggttcctgttttcggcatctgtatgggccaccaattgattgggcaggcgcttggtgggaagacatttaaaatgaaatttggtcatcatggtgggaatcaccctgtctgtgatctccgtagtgggcgtgtagacataagtgcacagaaccataactacgcagttgacccagaatcacttccagaaggagcagaagtaactcacgtcaatctcaacgacaatagttgtgctggccttcagtacgccaagatgaagcttgtgtctctccagtaccatcctgagtcttccccaggtccgcatgattccgacacagccttcggtgagtttatagagctcatgaagagcaacagattgtgagggaggggagtactggcaaaggtcaacaattgtcttggtgctctctcgcagcaagctcaaaagaatttgtttcattttagtgtttttctttgggatgttcatgtacttgaattttgggtccagaggacatagcataagatgctctgcagctgtaccatgaattgaagtagtgaactggttgaatttcttgagaataacatgttatcaaattgcacggtacagtatactcagattatgctcgcgaatttctggccggcaagtaaagtggtgagcaccagtagactagttagtatagagataaaggatggccatgaaggctcgtcagtggatacttctgttgttccaagctaatcagatgtgcacaagcacaacgttgttgccagctttttaaatgactgatggaaaatcatccagcttttgttggcgacaaggttcgtgtagatcgttcgatgtgcatctgatctggaaactttctcg

SEQ ID NO: 7113 - DNA, 1539 bp, Zea Mays
gccaaccctgtcaccaccaacaggatgcaatctgatatctcacggctggaagctaagattgagagaatggatgctcaattagcagcgaaagatcgagagctagccactcttactcgaacggaggccaaaaacactgctgctctgaagtctcagattgataagctgcaacaagaacgtgatgaatttcagaaaatggttataggaaatcagcaagtacgcacccagcaaattcatgaaatgaagaagaaagagaaagaatacataaagttgcaggaaaagctaaatcaggtattgatggagaagaaaaaggaatcatcccgttctggaatggagataatgaacttgttacaggttgatgcatatgaagtgaagaaacaagagctgatgcaagagaatgcagatttacgggcactgttacgttcaatgcagatggacatgcgtgactttctcaatgccccgaatgggtcatcacaatctactgttactgataatggaagacaggagtcagggtctcctcagtctccgcttggtggcaagacggatgtttttgacttgccctttcatatggccagagatcagatagaagagagtttgcgcacaaaaatgacttcaatcaaggcacgaatgacacaacttcaagatgctcagaaaggtgcagaagtgacttctgaggcaactgaccgggagcttgagcttgaagctcaactggttgaagcaagaagcatcatccaagagcaggcctgcatcatgtccaagcacttcaagtctgataagccaaggaggcatagcggtctggatggcgagcgtgaggcatctgccgaggtgtaaaagcatgtctgtagcaaggatatatctgttctgcaagacctcctgattttagtaagtaccgaggtagtatgttgcaggatataacatggtcctgtgctgttgtagcccgagtttaggtgctgtctatgcagtatgatgtgcaggagcatatcctccagcacatggctaacccgatcacatctaagtcacatgtagcgtaactgtaatcctattcatactatatgaagaatgtcagtgtagcaacccttgaaaaaaatggacctttcggaccttacatcttgaagctctgttcgcatgattttttttttagtttattctatcagcggtgacagcacgttgtgacccttgttccctgctgaaacatgcaagttggttgccacctgggcataatctggtagtagattattagcccagctttaggatgttgagaagatccttctccaatgtactgtcacacggatccttttttttttgaaagccaaccgcttggcattgtgtactgctgtcctgtttcccccaaatatatatgacttgtgactatgaaccgaaagaaagacgcccaagctcgaatcgcctttgttaggctgagacccgcagcatatggtcaaatgattatgcatattcctgcagaaagaaggaaagacaaatgcccacagcccatccacatgtttcagattcaatcatgaatcatggcctatcattgtgttttcc

SEQ ID NO: 7114 - DNA, 1793 bp, Zea Mays
tttaactttcagagtgcaattctttggctctacctttcgatcaaaagtagaccagacaattatggaatactgttttccttgacatcacgcaatcactttgtgccatgagccaaccctgtcaccaccaacaggatgcaatctgatatctcacggctggaagctaagattgagagaatggatgctcaattagcagcgaaagatcgagagctagccactcttactcgaacggaggccaaaaacactgctgctctgaagtctcagattgataagctgcaacaagaacgtgatgaatttcagaaaatggttataggaaatcagcaagtacgcacccagcaaattcatgaaatgaagaagaaagagaaagaatacataaagttgcaggaaaagctaaatcaggtattgatggagaagaaaaaggaatcatcccgttctggaatggagataatgaacttgttacagaaagaaggacgacaacgcggaacatggaatggaaaaaagaacgacaatgattattacaaaatgattgttgatgcatatgaagtgaagaaacaagagctgatgcaagagaatgcagatttacgggcactgttacgttcaatgcagatggacatgcgtgactttctcaatgccccgaatgggtcatcacaatctactgttactgataatggaagacaggagtcagggtctcctcagtctccgcttggtggcaagacggatgtttttgacttgccctttcatatggccagagatcagatagaagagagtttgcgcacaaaaatgacttcaatcaaggcacgaatgacacaacttcaagatgctcagaaaggtgcagaagtgacttctgaggcaactgaccgggagcttgagcttgaagctcaactggttgaagcaagaagcatcatccaagagcaggcctgcatcatgtccaagcacttcaagtctgataagccaaggtgatccaatatttctttcccttcgcctctcttcagactccaactagaccttcaattcatggattccgtcacagtggcaggaggcatagcggtctggatggcgagcgtgaggcatctgccgaggtgtaaaagcatgtctgtagcaaggatatatctgttctgcaagacctcctgattttagtaagtaccgaggtagtatgttgcaggatataacatggtcctgtgctgttgtagcccgagtttaggtgctgtctatgcagtatgatgtgcaggagcatatcctccagcacatggctaacccgatcacatctaagtcacatgtagcgtaactgtaatcctattcatactatatgaagaatgtcagtgtagcaacccttgaaaaaaatggacctttcggaccttacatcttgaagctctgttcgcatgattttttttttagtttattctatcagcggtgacagcacgttgtgacccttgttccctgctgaaacatgcaagttggttgccacctgggcataatctggtagtagattattagcccagctttaggatgttgagaagatccttctccaatgtactgtcacacggatccttttttttttgaaagccaaccgcttggcattgtgtactgctgtcctgtttcccccaaatatatatgacttgtgactatgaaccgaaagaaagacgcccaagctcgaatcgcctttgttaggctgagacccgcagcatatggtcaaatgattatgcatattcctgcagaaagaaggaaagacaaatgcccacagcccatccacatgtttcagattcaatcatgaatcatggcctatcattgtgttttcc

SEQ ID NO: 7115 - DNA, 2340 bp, Zea Mays
cgagatcagatctgtgtgtgtgaccattcgtgccacagacatcgcggccctaccttaccgttgccggcctgcccttcccagcccggcagtccacaccgtccccgtcctcccactccccactcgcaaccatttcaaatcgctctctcgacccaactgtactcgccgtcgtcaattcatcatccatccccatccccccatcgactcccagatctctatccccctctccctgtcctcactctctcgagcgcgttgtggcggatgtcctcgtcggcgcgtttcgatctccgggcctcgtcgcatcagttgcagccgccgccgtcgcacgccagcatgagcagcgacgggggcgcgttcgcaaacgcggagaacctggagcactgcgcccggtacctgaaccagacgctcgtcaccttcggattcccggcatctctcgacctcttcgccaccgatccggtctcgattgcaagaacttgtaactgcatctatgcgctgctgcagcagcgacagagggacattgagttcagggagtctacaaatgaccagcggcagcggatgcaatctgatatctcacggctggaagctaagattgagagaatggatgctcaattagcagcgaaagatcgagagctagccactcttactcgaacggaggccaaaaacactgctgctctgaagtctcagattgataagctgcaacaagaacgtgatgaatttcagaaaatggttataggaaatcagcaagtacgcacccagcaaattcatgaaatgaagaagaaagagaaagaatacataaagttgcaggaaaagctaaatcaggtattgatggagaagaaaaaggaatcatcccgttctggaatggagataatgaacttgttacagaaagaaggacgacaacgcggaacatggaatggaaaaaagaacgacaatgattattacaaaatgattgttgatgcatatgaagtgaagaaacaagagctgatgcaagagaatgcagatttacgggcactgttacgttcaatgcagatggacatgcgtgactttctcaatgccccgaatgggtcatcacaatctactgttactgataatggaagacaggagtcagggtctcctcagtctccgcttggtggcaagacggatgtttttgacttgccctttcatatggccagagatcagatagaagagagtttgcgcacaaaaatgacttcaatcaaggcacgaatgacacaacttcaagatgctcagaaaggtgcagaagtgacttctgaggcaactgaccgggagcttgagcttgaagctcaactggttgaagcaagaagcatcatccaagagcagagtttctatagacagtgtatgaagggcgggcctagtgcagcggtagagcctaccgtctgtaaccggaaggtcccggattcgagccccatattatgcggataaggcttgtcgcttaaagatacccttccccagaccccgcacagtgcgggaagcctacgacactgggtacgccctatagacagtgtatatccaagtgcataacaaaaggcctgcatcatgtccaagcacttcaagtctgataagccaaggaggcatagcggtctggatggcgagcgtgaggcatctgccgaggtgtaaaagcatgtctgtagcaaggatatatctgttctgcaagacctcctgattttagtaagtaccgaggtagtatgttgcaggatataacatggtcctgtgctgttgtagcccgagtttaggtgctgtctatgcagtatgatgtgcaggagcatatcctccagcacatggctaacccgatcacatctaagtcacatgtagcgtaactgtaatcctattcatactatatgaagaatgtcagtgtagcaacccttgaaaaaaatggacctttcggaccttacatcttgaagctctgttcgcatgattttttttttagtttattctatcagcggtgacagcacgttgtgacccttgttccctgctgaaacatgcaagttggttgccacctgggcataatctggtagtagattattagcccagctttaggatgttgagaagatccttctccaatgtactgtcacacggatccttttttttttgaaagccaaccgcttggcattgtgtactgctgtcctgtttcccccaaatatatatgacttgtgactatgaaccgaaagaaagacgcccaagctcgaatcgcctttgttaggctgagacccgcagcatatggtcaaatgattatgcatattcctgcagaaagaaggaaagacaaatgcccacagcccatccacatgtttcagattcaatcatgaatcatggcctatcattgtgttttcc

SEQ ID NO: 7116 - DNA, 1151 bp, Zea Mays
acgctcgcgtccagatatactcctgttgcaaagaaacatcttgctggaaggattgatcgtgtagattgtagtttagatgaatgccaagaaattacagaagccacaaaggaagaggttacaatcatccatggagatctaagtgccttccagaaggaaatggaaacagttcatctcgtagttcgtagtctggtaggtgcattataccatgcttcttgttttctgttcaatacgaactgattcacttgtagtgctaactacaaactgatttcatgttgtgttgcaggagacaaagcttggacgcctagcttatactcaagatcggacaacacgaggaatatatgatttgtgtgaattcactaaaagattggatcagagcccgaaagctgatactcgtcaggttacatcatcaacttctcgtcctgctattgaatcctcagagagaattgttagggttgcttctttacccctggctttggaaccggagtctcctagaattgaggcacctaaggttgtgcgctcatctacagtcatgtcagcatcgggtcttagtttgctagctggaactacaataccacctaaaagagatcaaccgggtgtgtacagcagagcaagttcaatgaaggaaggatcctctgagttgccgagtggcgtgcgaaactcagcagaaccaagccccaggagatctggtgcttcaaccctgtttggagggcttgggtttctaaggaactacaccagctgagatgtatgtgctcagataggtgttttttttcccaaggagaccagcagtttgagctgtatatgtaggtagtaggtaatagggcagttgccaaaaggacggctcccttttcctattgggaattgcgaatttttgtaggaactaataccttgcagagcaatgcctcgatgccaagatacaaactttaaatttaatgttgggttagatgctggaagagaaacatcctattgtatattgcagtggaatgtactgctggaatacatgtttgggaaggagcaattacaactaagtttgtgcttttggtggactggactctacttgctggctgatgttaggatagcatgcactgtatgcagctgcaggctgcagccatgtctggaatacacggttggatttccacccagagctatgggct

SEQ ID NO: 7117 - DNA, 1056 bp, Zea Mays
cagaaataactcaagatcagtaactaagtatgactccaaacagttaaatttgtttcacgttgggcatggtaagtccttattgtgaagcttttagcttgagagtttgttttttttaggaatttttagcttcagagtgaggcaaagattatatgtgattcattggatattacatccactatgtgcatcacagcgaaacactatggcccctcttatttgtgagcatataacttgaactctacgctagactagatatgtatttaagaattgaaattttgaactgttcccttgtgcgttgatgagatatttgttcttacagaggatggaagaaatggcacatttatgatcggtaatgagagctttcctgcatctctcttggatctacctgctgtggtggagtcatacaaaacatatgatgattctgtactaattaaaactgctgatgttggtcagatgattatggtaagagaagaaaatgatcctgctccagaaggagtcgagtacaagcatgggcttactcctccaatgagggatgcacgcaggcgacgtttccgcagagaaccagacttgaacgcagagctggttaaccaagttgagaagcatcttatcagtatcatgcatggagtatctgtcaaccagaacgccagtgcgacaggaggcgaagaaggtggtgatcgtaagaaacctccagtagctcgtgcagcaaagcagcctggggttcaggagcccgccgcgaatggagaggaagctgatcctgagaggagcgacagtgatgattcagataactgaaatggaggacctggactgggtgcagcctcagtggtccaggcgagccatgccaaacttcgcaatttgaataaatcagaatgtatatatttgtaacaaacaatgtgtttgttgttcgctgaagcatgtactgtcacggtaaacatgatgtgacgctataatgccaaacaagatgatgttactgcatgtactagcaaaatagttataaataacaactgctaagtagcattttattggatttaatttgatttgaactcgttttaaaatcaagaa

SEQ ID NO: 7118 - DNA, 1923 bp, Zea Mays
ctctacctgttggagagaccctgaccgtcgcccagaccgctctctccgcggacgcaccaggcatctcgtgtatcgtcctcggatccccgcggtcatccccatctcagccgccgttgtccgccttcccctcgacaacaagcctgccgccccgagctgcctccctccgtccgttcggtatcctttagccagttagcctcttccttccgtctgccaccggcacgttctctgccctcgggtacctcgtctgttcagtcttcagagctgggttcggtctattcctcatcctctcttgttgatccggagtgccttaagttttggccgtcttgttactgtctgctgttccacagtcgacgaatcacgaatgctaatggaggaagaatgcgtagaggcaccgtcgtacatccacattgacagcaacgctttctcctacagaaagcataagagtcagacagaggaggacatagctgtgtgtgagtgccagtatgatatcttggatccagagagtccatgtggagaccggtgtttaaatttattgactaacacagaatgcacgcctggctattgccgttgtggtgtgtactgcaagaatcagcggttccaaaaatgtcaatatgccaggacaagacttgtaagaactggagggcgtggatggggccttgtggctgatgagaatattatggctggtcaatttgttatcgaatattgtggagaagtaatatcatggaaggaagccaaacggagagctcaagcttatgaaacccagtgtttaaaggatgcctatatcatttacctcaatgctgatgagtcaattgatgcaacaagaaaagggaaccttgcgagattcatcaaccattcatggaggccacgtacctgtgggaagatgatgatgacaggttttctgttgagaatatccctctttacgattctgctgatgacgaacctacaagcattaacaaggaaatcctcgtatcaagtgatggcatggttacccaatacagcaacatcagcagagtacagagtaccgaaaatcctggaaacactggaacaaatgaatttgcgccaattatcgtcgacgaactgacaagctcaaatggattagcaccaatgaacgttgaaccattgactgtaagctcaaatgagttcacgccatcgaacgccatgccaatggtagctcgtctagtcgagaatgggtcaactggatacagcgcacaggacactcacgacgcttctcagaattcagcgcccaaagctgcaaatcacgcgaaccaaactggacctcagaacaacagcaaccattcagcgttggtccctgtgaagcccgcgccgaaacgccgtggcaggaaaccgaaacgcgttgtgcacaagcagctggacatcccagatatctgcgaccggcttacatcgtctgtggcgtgcgaagaaatactgtactgtgaggaagtgaagaaccaggccgtttctgaaatcgatgccctgtacgacgagataaggcctgcggttgaagagcacgagagggacagccaagatagcgtctccacaagcctcgcggagaagtggatcgaggctagctgccgcaagtacaaggccgaattcgacctgtatgctgcagtactcaagaacgttgcctccactccactacggtcgaaagatgatgtgggcccaagagagcagaacgggttgaagtacctggagaacggctcatgatttttttagctagaagcgtggaatattacgtacgccttcaatttgtagtatagggattgcatttttttttaactgtggttggtcttgtatttaggtagaggcattgtaaggttacatgattttaaatagcgtggaatcatgtcaaacgcacatttgatctcgttctcgtgtttatgctgtcgacctcattctgttttgctaacaccatctgcactctgc

SEQ ID NO: 7119 - DNA, 2036 bp, Zea Mays
aggcttcccttcagcaaacagcctggtagttctattcagccgcttaccgcgcgctctcttgtgcggcaattgggcgaccgccgccgccctaactcaggtgccgaggtcttcgccagtaacttcaacaggtcctcgcctggtccttcgctggcgaggagcatctccaccagactttctgctggttcaggtgcgaatcatggggaagtttatgcatgacaatccaatgctatcatgtagtgaagtaaacagacatcactatagtcttgcggcagttgctgtcggtttgggactaggagttgccgggttatgcaaggcattgtatagtggtctgtccataccatgggtttctccaaggaatttgttttcgggatcagggagggcatactatgttggaggtctgcgaaatcttggcaacaattgctttcttaatgtcatcctccaggcacttgccagctgtgatggttttatttcctttctagataatttgcttgcaactgatggcttgctacctgaagaaaaggctgtaagaatgcctcttcttcttgctttaagttctctcttggaagacttaatcatagttcgagatgaaaggactgtgttgaatccacatggagtaatgcatgctttgagtttgtatgttggtcacttcaatctgaccagacagcaggatgcttcagaagcttttctccatcttctgatctcattgagggatgaatttgcccattgttatgtaccacataggagttctctggcagacatcaccctttctgactccaaagtatacaagcaaagggaaggtaacctgcctgaatgcaagcgctggaaacaaaacctatttggcccctttgatgggacagttggcagcatattgtcttgcagaaactgttcttctgtgctgtcattggacttcgagaatttccactgcttgcctctttcgccagtccttaatgcaaatggagatatttgggtgtagtttggtggattgcctaaagtacttcactgtggtggagcatcttgacaactatcgttgtgaccggtgttggcacatcattgctgccaaatatctttctcttagatcagaagttgatgaggaaaaggttagcaagcttcaatcctgtgtcgactatggcacttgcagttgcagggatatgttccccctggagtcactgccatgttcatcatcttcacgagcaacaaagcagctgattatcagtcagtgcccgaagattctgtgcattcattttctacgcgcttcagtcggtcttgacggcgagcccatcaaacatcagggacatatttctttccctttgcttctcaatctgtccccgtttacgggaggcgcgtcgagtgctggacctttagcaatgaatgcgcaaagagatggccagcaagctctccatctataccggcaactgaatatgcaggctaatgctgacgtgtccagtagttcatcatcaccaccgcagctatcaaggagcaagttatacggtctcgcggccgtcgtggagcactacgggaagtgtggaggagggcactacgcagtctacaggagagtcgcgtcgaatcctgaccctgatgatccaggcaaacctgttgcaggccttggcaagcggtggttttacatctcagacggctacgtgtcagaagttccagaggaggatgtactgcgcgcggaggccacgctccttttctacgagagattgtagccgcttgttgagtagctaacgtgtgcatcataacaaaatctaggacagttttgttgtgaggagtctgatgttcttagcggtaccgtgagcttccaagtagacgaggaaactagctgtggcacaaaaaacaaagcctctcggcatctcgacgtggactgcaggcgtgtcttaggcagtgtggcctactttttttttgggtccttgcaaacgttaaaataattcttcatgcaatacgtcagtgaggtcttcctcttgagaataaatcagatcaccattgttttgcgacattgtaagcagcagatggtggatcgtgtgagttttgttctgctg

SEQ ID NO: 7120 - DNA, 3050 bp, Zea Mays
aagacgtctgccggggaaaagagtgaaagggaaaggcgccgcgagtcccgagcacagatcacatgtccacccgcaaaaaagagcagcaaactgagcacgccgctgggcgctggaacagtagccactgtgttactcgattacgcacacacacgggtccacattcacggctgtacatcgggtccaccgatcagtgagaagtaaccaggacactcgcgtcagtgcgggtcggtcggtccccgccgtccgacacccgcacggtcagattcaccggtcgccggcctttgggtgtcgtctggtcgctgtagatcctcggggtgaaaaaaaagggagaaaagctgctcagtaaaggcggccccggacgagcgcaataaagcctgggcacccgtcgccagccttccttgcccccggtgagctgccactgccagcttccccgtgcgcgagctgtgctgctgctcggcggcgcgcccactccccggccgctccctcgtcactccgcctgccggtaatcggtggttcgaggtgatcggcagaaccacacaggcaaagatggcgagcgtgcacaaggccaccacccttgttctcatgttctgcctgctagcgctggggagagcggagtacctcaagtacaaggacccaaagcagcccgtcgctgttcgcatcaaggacctgctgggtcggatgactctcgccgaaaagatcggccagatgacgcagatcgagagggaaaacgccacggccgacgcgctggccaaatacttcataggtagcgtgctgagcggcggaggcagcgtgcctgctcctcaggcgtctgctcaggcttgggccgccatggtgaccgagatgcagaagggcgctctttctacgcgtctgggtataccgatcatctacggtatcgatgcagtgcatgggcacaacaacgtctacaaagctactattttccctcacaacgtcgggcttggagctaccagggaccctgacctcgttaagagaattggagaagcaactgctcttgaagttagagctactggaattccttacgcctttgctccctgtatagcggtctgtagagatccaagatggggacgttgctatgagagctacagtgaggatccaaaggttgtccagtcactgacttcactcatctctggcctgcaaggtgacgctcctgcggattccgcgggaaggccgtatgttgggggaagtaagaaggttgctgcatgcgcgaagcactatgtcggtgatggtggaacgcataacggaatcaacgagaacaacacgatcatcgacacacacgggctgctgagcatccatatgcctccttactacaactctatcatccgaggtgtctccacggtcatggtctcctactccagctggaacggagtgaagatgcacgcgaaccatttcctggtcacggattttctcaagaacaagctcaagtttaggggttttgtgatttccgactgggagggcattgatcggatcactactcctcctcacgccaactactcttactcaattgaggctggtgttggtgctggaattgacatgatcatggttccattcagatacacagaattcatcgacgatctgacgacacaagttcagaacaaggtcatccccatgagcagaatcgacgacgccgtctacaggatccttcgtgtcaagttcaccatgggtctgttcgagaacccttaccccgactctagcctcgccggcgagctcgggaagcaagaacaccgggaactggcgcgcgaagccgtcaggaaatcccttgttctcctgaagaacggcaagtcctcctacgctccgttgctgcccctcccgaagaaggccggcaagatcctggtcgccggcagccacgccaacgacctgggcaaccagtgcggggggtggacgatcacgtggcaaggaagcagcggcaacaccactgccggcacgacgatcctctccgggatcgaggccaccgtggaccccagcacgcaggtggtgtactcggagagcccggacagcggcgtgctggccgacaagtacgactacgcgatcgtggtggtcggtgagccgccatacgcggagacgttcggcgacaacctgaacctgacgatcccggcgcccgggccgagcgtgatccagtcggtgtgcggggccgccaagtgcgtagtggtcctcatctccggcaggccgctggtggtggagccgtacctgggcgacatggacgcgctggtggcggcgtggctgccggggtcggaggggcagggcgtggcggacgtgctgttcggcgactacgggttcacggggaagctgccgcggacgtggttcaagtcggtggaccagctgcccatgaacgtgggcgacgcgcactacgacccgctcttcccgttcggcttcggactcaccaccaagggcacgaagtgagtgagtgtgaggcgctctgatgggatgtggcctgtgagtgagctgtgtattcgtgggcgggcgtgaggctctttggctttcgaattggttgggggtgacgggcggcgagtcgtgtacgccgcacacattgcgcagcgtacgttgggttgggatgtttgcgtctgggtaataacagtgatgcattcttgagatggttgctgttagtgtgggttgtttggaatgaacaataagatcaggcgcgttacattggcacgctactacctctcctgctgagaccagagatggcgatgtgcatttacccatcggcccgtgctattccataccctatttagccgtgtactgataaaagaatttgtcaaaccgtgtacgggtaaaatcatgtatccatgtactgctcactataccgtatacgccagctacttctactaccaatattactcgtatctagtgtaaaaatgattagggtgctaatattagggcctgtttggcatggctccagagcaaaactccaaggaggagctggccagagcatgccaaacaccctaactccagagttgtaaactctatgaagtttttggagctgcagtacaattttttggagtacctcttttgctgctctgaaaactccaaaaaag

SEQ ID NO: 7121 - DNA, 2599 bp, Zea Mays
gaattgaggatatgactcagtatatagggtaatgtatgtaggactcgagagactgagccctataattatttgatgaaattttataaaatagagccaatgttggaagagtgttttatggttttgattcatataattaaaataggattatgtttagagtctttatgatcttagctacctaattccactgccaatttttagccaaataactagctaaacaaacacccctcggcactgatagaagagagaagaaacagacagcctaaagcccttcctctctcctcggcgccggaatggcgaaaagcggcggcgagtccactgtggaggttcctattcccgcttccgcgtcggctacgaggccgaaggcgaaacaccgtatagagatcgaggggtaccctgtggatggcgtctccattggcggtcaagagacttgcgtcatcttcccgactctgagcctcgccttcgacatcggccggtgcccgcagcgcgccgtctcccaggagttcctcttcgtctctcacgggcacctcgaccacatcgggggccttcccatgtatgtggccacgcgggggctcttcaggctgcgtccgcccaccatcttcgtccccgcgtgcctccgggacctcgtggagaggctatttgaggtgcaccgcgccatggaccagtccgagctcaaccacaacctggtccccctggaggtcggggaggagtacgagctcaggagggacctcaaggtcagggctttcaggacctatcacgccatacccagccaggggtatgtgatatactcggtgaagcagaagcttaagcaggagttcattggcctaccagggagcgagatcaagcggctcaagctatcaggtgtggagatcacaaatacggtgtccacccctgaaattgctttctcgggggatacaacagcagatttcattcttgatccggataatgcagatgtgctgcaggcaaaaattcttgttgtcgagagtacctttctagacgactcaatttcagttgagcatgcaagagaatatgggcacacacatttatttgagataacaagtcaggccgacaagcttcaaaacaaagctattctactgatccacttttctgctcgttatactacagaggaaattgatgcggcaataaacaaattgccaccgtctttccgtagcagagtttatgccttgaaggaaggcttctaataaaaacatgaaccaggaaatcagtattgaagttttgtcggagcagttttccaaattggattgcgtgggtatttttcaccggaaacctttttgctatgtgtgctctgatgatactataccaatcatctgaaggttcatgcggggctttttgttgtcggtactcatgcttgtgacattggaatgtttgaatggtgaaatgcgaaacatcatgtataatttacggcgtctgcagctccggcgcctctgggtatcagctcgatggtcagctatagctgccttgctccagattttccctcagttcaggctaaacctgcagcaatgttgttgagaaaacgtcggtcggatacagtttccgtatcaattgttcaaagagatgtggattagtgcatatgccaagataatcacagtttaccaatacacagttgatggtcatgattagcggccataaaagctgaaattttactacttatttgtttctttcagtggtttaccctttggagcttgtttggttaaacactaagactatctccagcagcttatccatacttatattcaaactccactctgcgaatagcatagtctacagtgctgggtaaattgttggacacggtctaatccactctaatccatgtgaggtcctgttttgctacactcatccaccttaatccatatatgaggtattggagtgtacaactagttaatttttcaccctgataccttccaccctatgtggattactacaagcccttgtgtgggagggccaccagactttcgtgcataagcagataaacacactaattcgttccatgttttctagctcatatatgatgaattggcggtacaataaagccctgtgccatctcctacactgagacaaactatcgcacttctatttggcatccttttgcggtggtttcataaggccagttggttctcaaggaatttataaacagttgtatgcatttcaacatgtccacgaatccacggtgtagatggcatctatctgtttagtagaagtagaaaatccacggtggcttcgttctggccctgtccgggcctgtggcatctcctgggctgcggtggtgtggtgccacgaattgtctctttatcatcgacgtatagatggatgggcaggacaacaacatgtgaagatgcatacgtacaattggaaaatgcatgtaatagtatgctgcctcaaatttgcaagaatttcgtagcgcaacaattgcgcgccactcactttcagttgaggggtttgcaagaattttggtccaaattcaaatgctccagaaaaggaagatgcaggagaagggaggggcgggggtcactgaatgaacacaactcaccatcttactctgaacaggagcacctggcacttggtcatgggccccaccacggcc

SEQ ID NO: 7122 - DNA, 2569 bp, Zea Mays
catctccccaaagtcccaaacgcctcgcctcgccgtcgtcgtccactcgttcgtcgctgctccctcctccaccaccttccagtcctgtccagtgccgccgccttgccctgccctcccctcccttcccccgattaccctcgcggttgacctcgccaatccggtcccgcctccgtataaatccgcccttctcgcccccgctccgaccacaaaccctagcggcgcgccccggcatgggctagggttcccgcggcgatggagtgggacagcgattctgacggcggcgatgacgaggaggaagaagaggtccgccccgggggtggggacgcgggcccggggttctcgctggccatcgagggcgtgctgggcgcgtgcggcatggtggtctccgacgcgctcgagcccgacttccccatcatctacgtcaaccgcgggttcgagagctccactggatacagcgccgaggaggtgcttgggaggaactgccggttcctacaatgcagaggaccatttgctcagaggaggcatccccttgttgatgcagcagttgttactaggattcggagatgtttagatgaagggactgaatttcatggtgatctgttaaattttagaaaagattgttctccatacatggccaggctgcaattaacacccatatacggagacgatgaagtaataacacactatatgggcattcagtttttcaatgattctaatgttgacttggggccatcttctggctctgtgacaaaggaacttgcaagatctacatggattgcacctggcaacactgactcaccaactccagtaggcaagggtaatttgtgggaacattctagtctctttctgctgagtgatgaggtaatttgccagaagatcttgtccaaactgtcgcccagggatatagcatcagtaaactctgtttgcaagcgacttcatcacatgacaaggaatgaagacctttggaggatggtttgtcagaatgcatggggcactgaagctactcgggcccttgagactgtggcaggatcaagaagtttggcatggggccggctagcacgagagttaaccacccttgaagctgttgcctggaggaaattgacagtcggtggtgcagttgagccatctcgctgcaacttcagtgcctgtgccgtagggaaccgtgttgttctatttggtggagagggtgttaacatgcagccgatgaatgatacatttgtgctggacttgagtgccagcaagccagaatggaggcacatcaacgtgagcgcagctcctcctggtcgctggggccataccctgtcatgcctgaatggatcacggctgattctgtttggtggctgtggggggcagggtctgcttaatgacgtcttcattttggatcttgatgcacagcatccaacttggcgtgagattcctggccttgcaccccctgtaccacggtcatggcatagctcctgcactgttgatggaaccaagctggtggtttctggtggatgtgcggactctggtgttcttctcagcgatacctacctcctagatgtgacaatggaaagacctgtttggagggagatacctgcatcttggtctccaccttcaaggctggggcactcgctatctgtctatgatggcaggaaaatcctgatgtttggtggccttgctaaaagtggtcctctacgacttagatctagtgatgtgttcactctagatttaagtgaagacaagccttgctggcggtgcataactggcagcaggatgccaggagctggtaatcctgctggggtcggcccaccacctcgcctcgaccatgttgtcgtgagccttcctggtgggagagttctgatatttggtggttctgtggcgggtcttcactctgcttcaaaactttacctcctggatccaacggaagataagccaacctggaggcttctgaatgttccagggcatcctccacggttcgcctggggccacagtacttgtgttgtcggagggacaaaggcaatagttcttggaggacaaactggagaagagtggacgctaactgaaatacacgagctttctctagcaagctcattagtctgaagatgggaaggtcccagcaagctttccagcttccttgaagcaatgtctctggagacagctacctgttcatatgacttgaggcagattttttttccaacagtggtgtgcaagcacaagcacaaaagggttggtgaagtggacaaccagacctgattacttgtgccatgcctgggagtcagctggtctaaaagtaccctgccttctggttgcgcctgccttcggtgacaactgatgctgtggtcttctgttttttgacccatcaactgctgtgaagcttctttgttatgcttttgcgccacttcgtgcttactcaattgctgctttctggagaagctgtaacacagacacacctgctgtatttaattttgcctttcgtatcactttgtgcttacctcagctgttagtgatacctataacattttctttttaatctgattatcaaaggatgaattatgaatatcaacagttccatcttaccgcgacattt

SEQ ID NO: 7123 - DNA, 4145 bp, Zea Mays
gcgcaaacaagttcgcatcgccatctcgctcgcagggaggagaggggagtctctaaccctaaccctacccgcccctgtcgccatagccatggctgccggcggagagctctccccctcccccgtgccccccgcatcccccatcaagcattctcgctcacccgacgatgcccagcccgacgcatccccgaagcgtcgcaagcgccaccatcaccgccgccaccaccaccaccgtcggcaccgtcacgccgattccccggtacccgtggcagccgacgaagaggtagaggagggggagatactcgaagatgccaccgccgcctctgccatggaggtcgatgctgagtccgccgccccagaggctttccttgctccggagcactttggtaatggtgctgatacagactcaaacacagatgcaaccaagatgcaagctcctgctctgcctacccttccatcctcagaagatggaaggaggtcacttcatgatgcccctgagtctgaaagaggagatattctttcaagtgatgttgaggacaacaaaggacatgaacgaaggcaaagacaaaaccgttctaaatctccaaagtctagaagggagaaggaaaggaggcacaaagatgaccatcacacttcatcttcaaaagattatcattccagaaatcactctagaacatctccttactcaaggcatcaaagtgaagctcattcgagagatctgtacttgagatatagagagaaaggtgattacactaatggttctcgtgcaaatcttagggatggttctgatcatgagagcaatgatcggaatgggaagtctggcagacatacgactaggacccacgggagtgaaagagaaaggagcagcagccatggtattcatgatagacatggtgacaggtacagtgacagacgtgccagccaggaaaggcatagagacgataggatatatagagacaaaatcgattcattagaagctgctcctaggcacagagaaagaagcaggagtcatagtagatcggatccaagggaaaatacacgtcttcgtgatcaaagcagggagagggaaagacggagtggtagttcaaggcatagggatcatgacagcaagagggatacaagtaaagatcggcatagagaatctgacagggttaacagtgcacatgaaagggatagagggagagaggctagggacagggaatggcatagggtcaagggaagtgaaactcatagagctaaggaaggacgggacaaagttagcgataatgataggcacagggattcaacacgctcaaaatatagcgtgtctgatggttacaaagagaggacaagatctggggagaaaggtagagatgctgaccataaaaaccggaagtttgaagaaatgaaggaaaattctctcaaggaggaagatgaagaggagtaccaagagaaaatagaacagcagttagcaatgcaggaggaagacgaccctgaaaaaatcaaagaggaagcaaggaggaggaaagaagctatcatggcaaagtacaggcagcagcaatcgcagaaagaggatatggaatctaaaccaagtggcaatgatgaagaagtaagagcaatggatggaaacgaagctatacatcagaaagatgatatcgatagcagctttatgggcaatgtcgaagctgaaaataagcatgattcttcagaggtatttgatggcaagacaggctttaatgtgggaaggtctcctgctcacaattatgcttcaactagcacgggagcattcactgatgagaggacaataggtgtttcaggtcttggagagggttctcccaagagtgagagatcagcagacatgttttgtgatgacattttcggagaatcacccaccggaattagaaaattgggaaaggatgatggtttgcatattgagagaaatgctcttcatgacaactgggatgatgcagatgggtactacacttatcggttcggagaattgctggatggccgttatgaaatcatagcagcacatgggaagggtgtgttctcaacagttgtgcgggcaaaagatcttaaagcgagtaaggatgatcctgaagaagttgccatcaaaattattcgcaacaatgagacaatgtacaaggctggtaagcaagaggtttcaatattggaaaaacttgcaagtgcggaccgtgaggacaaacgccactgcgtgcggtttatttctagtttcatcttttcatcgccctgaagcacctgaagaactgcaaagttttgcactgtgatataaaaccagataatatgctggtgaatgaggctaagaatgtgctcaaggtatgtgattttggcaacgctatgcttgctggtatgaatgaagttacgccttatcttgtcagccgtttctatcgggcacctgagatcgttcttgggttagcctatgatcaccctttagacatgtggtcagttggttgctgtctatatgagctttataccgggaaagtcttatttcctggtccatcaaacaatgccatgcttcggcttcatatggaattgaagggtccattccctaagaagatgcttcgaaagggtgcctttactatgcaacacttcgatcaagatctcaattttcatgctaccgaggaggatcctgtgacaaaaacggctgtgagaaggttaattttgaacattaaaccaaaggatgttggttctttgtttccgaactttcctggcgaggatccaaaaatgctatccagttttaaggatcttcttgataaaatatttacattagatccagaaaagaggataactgtatcgcaagcacttagccatccatttatcactgctctgagaaaaagtacatggatgaagcacggaacttcggaagagatggctatctgcagaccttgttgcatgcacttatcatttggatatattctgttgcttgattctgccagggcctctgctatgtgcacattttatatgcttaagggccaacataagaaggtcctgggatggaggtcgctggaccctctactcacttgccatggtaaatcctctcaactctggatgtcttccatttttttcttattaaagagttttcacctaatagttgattatgggttggtacatcaaggctgattcagttcaattttagcaacctttactgtttattaggtgcatttccaatattttgtgttttggttagtaatttcttttgccagtttcatcaaacattgatcttctaaacaatttgtttgttttttgtgtgcctgccaaacttcttcatattaatgggttatgagattcaagtactatatgctttacatgaaagctgtattctctaccattcagcgaaatgtgcgaaacatgagaaacatttttgtcttgtgtaacaatttgagagctgattattacattgactgctagttataaaaccgtgggcttattacttttactttgtatctagatttgctgcatgtagataaacactggtgggaagctgaaattttactgtgtaattagtattcaagtgcaggagagatgcgtatcatttcattgagtaaagaggctacagggaaagaaatccaacatagcccgcccctcctccctctaagcacacaagacctgaaaggttctcagcctgttagcaccatggaatgctcttatttgtgattgcctgcagcaccgccatcataacacttgcaatgatgccattaaaaagacatcatactgatgtttccagatctctcaagccaccaagatagttgaggcgcaatggaaataatccaagcctgccagattggtaaccattctttagactgccatttagtaagtcaggttgaacctattaccatctataaggacttgttcggttagctctcaatccatgtggattgagtgggattggatgggtttgaatcccaaacaagtcaaacttcttctcaattttttccaatcccatccaatccatatgtattaggaataaccgaacaagccctaagtgggcatgcaaatggcattgtgttggattggaccattgtaaacggtttctcgtgttggatgcaagcattctgtagttgttttgagttgttttttattatctgtagtacttgctgggtaaatctaaagaactggatttgtgtcaggcctggttcaattgatatgga

SEQ ID NO: 7124 - DNA, 1794 bp, Zea Mays
cgcgtcgcgtccagccgccgctcgcccgctccgctcaccgtctctgcctcctctcgcgcagatccgcccctggccaagaccatcgcgtccctcttcctggactccggggagtcgtccttcgccaactcctcggcgcggacgacgcgccacgtggactgcgcgtccgacagccagtccaccgagtccgggggctccgctccgacgaccgcctcctcttcgagccccacgggccctccagctccatcctcgagaggaagcctccggcggcgcctgccctgcggccgcgagcggcggcgtcctcctctcgtccttcgttgacggcgtcgcggtggcgttcgactccgccgacccgtcagatggtgatggtgtcaggcggcgggggtaacgcgtgggcgaaggagatgaccctccgccgcaggatagccagcatattcaacaagacgcaggaacacttccctactctgaaggactacaacgattatctggaagaagttgaggatatgactttcaacctgatcgaagggatagatgtcgaggagattgaagcaaaaattgcaagataccaacaggaaaatgcggagcagatatacttgtccagagctaaaagggcagaagatcttgcggcagcacttaaagcaagcaggatgaaccccgtaaaggccgaggccaatgatacgcttagaaatccgatagtctgatagctggttgtgtaagtacacgagcaatcccatcatgctggtgttactggtaagttacttgcatcggaaatatttggcactagtatttagcatgtcaaccaggcaaacttctagtaaacatcatgaggatatggtagtgatgaaatgctgaatcatgaagtgacagctttcagatttatcaccttgacatcttatcaacatgttctattggaaattgtgatcataatcacagtattggatgtggatgtatgctttgcactagaaaataaaattaattatgcaggagtggtgatttagtggtcaaaggggcaattgagttttagggtacgcaagaatttgctatatatatagaattctagatgcataacagaatggatgtagcgaaaaagtcaaagcggcttagaatttggaacgagagggagtactatttttttcttgagatgttgatgcattgatgctgtgttggtgtaaatgccaacacttggtgctcttgcaatctgtaacaggctgctgggagttctcagggtattagtggcggggcaggagttcagggccagtatgcacctgccgctgttcttgggggagtggctcagccccgccccacaggtatggcgccccaactaatcggcagtgggtcggatcccctgcaaggagacgacgaggagaccaggagactacgcgcagagcgagcagcacgggctggcggatggactgctgaattgagcaagagaagagcgcttgaggaggcgtttagcgccatattcatctaggattagatcaaaaggcaacacatggtctgcattggcattggtaaaacctgcactagttctgcagggcaaagaataagaactactcaatcagatgccgccatgcaaaagttaaaatgtgtctctatccatggcagggctactctaaaactaactaaatatattactagtggtctttcacatttgcatggttggtcttattgtgaccggcaagtcagtaagtgggcagccgagccttttgttctggtactagcaaaaatggaagtgtagcgacatctgagtaatcacctcgttttcattagctagatccagcttcttcatgatgtacc

SEQ ID NO: 7125 - DNA, 1332 bp, Zea Mays
atcggcgttacatcatggtaggtgacttctctgaggacaaccgatctgggatcaatcactcgttgcaccggatcagcgctatccggaaccggaaagctcaaatcataggcctcacttgccgtgttggtcgagctatatctggcagtgcagagatgatccgggaccttgtggtgagtggtggttcaatattggtgattggacctcctggagttgggaaaaccactctgatcagggaaatagctagaattttggcagatgaaggtaagaaacgtgtgatcatagtggacacatctaatgaaataggaggtgatggggatgtacctcactctggcattggacgtgctaggagaatgcaagttcccaaagttactatgcagcacaacgtaatgatcgaagcagttgaaaatcacatgccggaagtaattgttatcgatgagattggtacagaacttgaggcaatggcagctaccactattgctcagagaggtgttcaactagttggaactgctcatggtgtgacaatcgagagcataattaaaaatccttgtttgcaaatgctcgttggagggattgaggatgatgctccgaaacgtaagccatctttggaggaaattgatgccttggaggaggctcgtcttgcaatcgagtacatcgttattccaggtggggagccagttgagctcctcccaagatgttcagaaatagttgctcggcagctggagctcgtagagagctaccagctacttgctgaaacctttggaagtgactccaattctaggttacagattctccccatgaaaataaccaagaggggttctagtaaagacaatggagcatcaaagcccactaaacaaaccggatcagatttgatcgtcagtgagaatggtggtggctcaagtttttctcggctgccatttctgccaaagtgatcgtctagatcttctgatcaccactgtcgaaaatgtacatcattcctctctcttgttgttcattgtacaacattgtgcagtgttgtaaatagtgtgtcgaatgttgaagaagcgaaagagcaaaagctaactgcaattgccttccattcttttgctggaataaaatccgttcatttctggtgtcagccaggtcagctcacatgctcatgtggaaaaaaattgcacgcggccgtgccgcacgaggccgccggtgcggcccggcaccgattaacgacgcgtggatattcaacggcatctgtatctcatggataaagcctcggacgtatacgcagctcggctaagcctcggacgtatacgcggcttggcttacagaacggctcgctttaccatcgttgcttccata

SEQ ID NO: 7126 - DNA, 2041 bp, Zea Mays
gttacatcatggtaggtgacttctctgaggacaaccgatctgggatcaatcactcgttgcaccggatcagcgctatccggaaccggaaagctcaaatcataggcctcacttgccgtgttggtcgagctatatctggcagtgcagagatgatccgggaccttgtggtgagtggtggttcaatattggtgattggacctcctggagttgggaaaaccactctgatcagggaaatagctagaattttggcagatgaaggtaagaaacgtgtgatcatagtggacacatctaatgaaataggaggtgatggggatgtacctcactctggcattggacgtgctaggagaatgcaagttcccaaagttactatgcagcacaacgtaatgatcgaagcagttgaaaatcacatgccggaagtaattgttatcgatgagattggtacagaacttgaggcaatggcagctaccactattgctcagagaggtgttcaactagttggaactgctcatggtgtgacaatcgagagcataattaaaaatccttgtttgcaaatgctcgttggagggattgagagtgtgactcttggtgatgaggaagcaaaaaagcggaaggtgcagaaaaccattctcgagagaaaaggacccccaacatttttatgcgctgttgagatgatatcgaaaactgaatgtcgagttcatcacaggttagatgccacagtggatgctattcttgcagggaagcctcctaagtttgaagctcgcaagatgcataataagtctaccgagtttgaaatgccgttggtgatacctgatagagagtatgaaatagaatcactgccactctatcaggaagttatggtcacgaggtcattatcatcagatggcaacttcagcgatgattttgctgcatccaggcaaacaaaaagcaagagtatgccatcagaagataattttggtgataattttgtttatacaaggaaagcaaaagggaataaacctgtgcatggaaagtctctagtccaagtatacacataccagatttcagaagctgatattttacaagtagcaacaatgatgggatttgatgatgaactagatgtaacagatgacattggagcagctgatgtgattcttgcatcgagttctgaaatgaagcagaatccttggattcataatgttgccaaataccacaagcttcccatatttgttgtcaagactaatacgatggctcaaatagttaaggctatcagaatgattgttggaagggacaacacatcatcaagtaagcagcctgaggttatggagggagagatagagattgaggatgatgctccgaaacgaggctcgtcttgcaatcgagtacatcgttattccaggtggggagccagttgagctcctcccaagatgttcagaaatagttgctcggcagctggagctcgtagagagctaccagctacttgctgaaacctttggaagtgactccaattctaggttacagattctccccatgaaaataaccaagaggggttctagtaaagacaatggagcatcaaagcccactaaacaaaccggatcagatttgatcgtcagtgagaatggtggtggctcaagtttttctcggctgccatttctgccaaagtgatcgtctagatcttctgatcaccactgtcgaaaatgtacatcattcctctctcttgttgttcattgtacaacattgtgcagtgttgtaaatagtgtgtcgaatgttgaagaagcgaaagagcaaaagctaactgcaattgccttccattcttttgctggaataaaatccgttcatttctggtgtcagccaggtcagctcacatgctcatgtggaaaaaaattgcacgcggccgtgccgcacgaggccgccggtgcggcccggcaccgattaacgacgcgtggatattcaacggcatctgtatctcatggataaagcctcggacgtatacgcagctcggctaagcctcggacgtatacgcggcttggcttacagaacggctcgctttaccatcgttgcttccata

SEQ ID NO: 7127 - DNA, 2269 bp, Zea Mays
acttttgcccttcgaactaaaagcgcctgcatctcaaacccgacggcgctctcttctctatcctctgtgtcccctccaccaaaaccgacgacgacgtcgctctcctccaccggtgctcggcgctctccctccaccagcggtggtccacagacgctcggcgagctccaccggcgggcgctggcggctggtcagatccgctcggcagtcatccatctggcacatcggccgaagctcccagcgtcctcctgcaggccgagctgaaggttcagcgcgccggtggagttagacgacgaaactccgtcacgtcatacctctccgcctcccgtcttccagacgtctctaatcggggtcccagcgtctcggagaagaggagcagcacggcacggcagctgtggcgaggaaggctcctgtcccatcccaacccagttagcagccgcccaaggaggaggagatccaatcggcgtgcgggcgtccgcggtccatccatcgatccaattccaatctgcagccctctgttctccaccaccgcttcgaagatgccgcaggtaatggtggtggcacggaacttcatggatatggtggctgctcttcctgcgggcaagcttgatatgctctatgactcagcctttatctgtgaggcagtactcaggtcacttcccccactggcaaagaagtatgcactgcagatgttgtatgtgctggcaccagtgaccgctgcagcaatggaagagtgggtgcttgatgaatatgctgccaagcataaggttgccattgataagcttctacagctcagggtctttgttgaagtgcgcgacagacgacgggacgtgagctacaagatgaatcagaagttccagggaaacatgcagaagtatttggttgatggtggaagtttaccaagggaacctttaccattaagtgtcactggtcgattgcccacaccagcagatctggaagcctatgctcttgatcaatgggagtgcttcttgttgcaattgatcaattcatctcaagtcgaaaaagggtcaagttttagctcctccatgatgaagacgtttcagcgtggtcttctgagttcaagggatggtgaagcttcaaagttgactgaaaatggcttccaatttcttctgatggaaacaaatgcacaactttggtacataatgagagaatacatttcatctgctgaggaacgtggagtggaccctacggagctgatatcatttctcttggaacttagctttcataaattgggagcggcttatagcttgaacactctgactgatgtccagaggattgccatcagggatcttgcagaattaggactagtcaaacagcagcagggtcgaaaggatagctggttcattcctacccaattggctactaatctttcagcaagcttgtcagattcgtcatctaacaaagagggatttgtggttgtggagacaaactttcgaatgtatgcatactctacttccaagttgcactgtgaaattctacgcctttttgcaagggtggagtatcaacttccaaacctcatcgtaggagctgttacaaaagaaagtatctatggtgcttttgaaaatgggataactgctgagcagataatttcatttcttaggcaaaatgctcaccctcgtgttgctgacaagatacccgctgtcccggagaatgtcacagatcagattaggttgtgggaaactgacctcaacagggttgagatgattccatcgcatttgtacgaagattttcctagcaaggaatggtttgaacaatgctgtgattatgcaagggataatgggtacttgctgtgggaggaccccaagagaatgagactaattgtacgaggggagttccaccccgaaatgagggagttccttcgcaggcaaagatgaggaacgaccttgtacttgacggaccatgctatgcttctttgtagtgcatagaaacactgtatcgggtaatagttctcctttaaatatcaggaaagggtctagaaaagggctcagtttttgaattattttggtgacctgtgagctgtggaagcatatgaataatgtggtgttcaatggagcaaggcccaacatccttgatctgcttctaaatgttactagtgactgtaccctatgctggtgtatggctggtggccaggtcctgttggaactcttaggtaggtagtatggtgggatggagttggtatgctcttaatttgttgttatttggattgattctatataggacggagtgattttaaaaatgaaaaaaactcaaa

SEQ ID NO: 7128 - DNA, 2309 bp, Zea Mays
acttttgcccttcgaactaaaagcgcctgcatctcaaacccgacggcgctctcttctctatcctctgtgtcccctccaccaaaaccgacgacgacgtcgctctcctccaccggtgctcggcgctctccctccaccagcggtggtccacagacgctcggcgagctccaccggcgggcgctggcggctggtcagatccgctcggcagtcatccatctggcacatcggccgaagctcccagcgtcctcctgcaggccgagctgaaggttcagcgcgccggtggagttagacgacgaaactccgtcacgtcatacctctccgcctcccgtcttccagacgtctctaatcggggtcccagcgtctcggagaagaggagcagcacggcacggcagctgtggcgaggaaggctcctgtcccatcccaacccagttagcagccgcccaaggaggaggagatccaatcggcgtgcgggcgtccgcggtccatccatcgatccaattccaatctgcaggtgtatgtaattttgaagtaacaaaggatttggaacccagccctctgttctccaccaccgcttcgaagatgccgcaggtaatggtggtggcacggaacttcatggatatggtggctgctcttcctgcgggcaagcttgatatgctctatgactcagcctttatctgtgaggcagtactcaggtcacttcccccactggcaaagaagtatgcactgcagatgttgtatgtgctggcaccagtgaccgctgcagcaatggaagagtgggtgcttgatgaatatgctgccaagcataaggttgccattgataagcttctacagctcagggtctttgttgaagtgcgcgacagacgacgggacgtgagctacaagatgaatcagaagttccagggaaacatgcagaagtatttggttgatggtggaagtttaccaagggaacctttaccattaagtgtcactggtcgattgcccacaccagcagatctggaagcctatgctcttgatcaatgggagtgcttcttgttgcaattgatcaattcatctcaagtcgaaaaagggtcaagttttagctcctccatgatgaagacgtttcagcgtggtcttctgagttcaagggatggtgaagcttcaaagttgactgaaaatggcttccaatttcttctgatggaaacaaatgcacaactttggtacataatgagagaatacatttcatctgctgaggaacgtggagtggaccctacggagctgatatcatttctcttggaacttagctttcataaattgggagcggcttatagcttgaacactctgactgatgtccagaggattgccatcagggatcttgcagaattaggactagtcaaacagcagcagggtcgaaaggatagctggttcattcctacccaattggctactaatctttcagcaagcttgtcagattcgtcatctaacaaagagggatttgtggttgtggagacaaactttcgaatgtatgcatactctacttccaagttgcactgtgaaattctacgcctttttgcaagggtggagtatcaacttccaaacctcatcgtaggagctgttacaaaagaaagtatctatggtgcttttgaaaatgggataactgctgagcagataatttcatttcttaggcaaaatgctcaccctcgtgttgctgacaagatacccgctgtcccggagaatgtcacagatcagattaggttgtgggaaactgacctcaacagggttgagatgattccatcgcatttgtacgaagattttcctagcaaggaatggtttgaacaatgctgtgattatgcaagggataatgggtacttgctgtgggaggaccccaagagaatgagactaattgtacgaggggagttccaccccgaaatgagggagttccttcgcaggcaaagatgaggaacgaccttgtacttgacggaccatgctatgcttctttgtagtgcatagaaacactgtatcgggtaatagttctcctttaaatatcaggaaagggtctagaaaagggctcagtttttgaattattttggtgacctgtgagctgtggaagcatatgaataatgtggtgttcaatggagcaaggcccaacatccttgatctgcttctaaatgttactagtgactgtaccctatgctggtgtatggctggtggccaggtcctgttggaactcttaggtaggtagtatggtgggatggagttggtatgctcttaatttgttgttatttggattgattctatataggacggagtgattttaaaaatgaaaaaaactcaaa

SEQ ID NO: 7129 - DNA, 2615 bp, Zea Mays
gtccttctccttctctcacacactccactccacgtccccctccttcaaatcctaccaacacccaagcacaaggagagagaagccgccgccgccgccatggacaatattgaggtgaggaggaggaagaagaaagggagaagcagcggacgccgccaggggggacgggtacaggcggtcctgcgcgccggcctcgtcgccatggccttcgccctcctctgcctctgctcctccacgccctccgccattgccctcaccccagacggcgaggcgttgctggagctcaagctggccttcaacgccaccgtgcagcggctcaccagctggcgtcccagcgaccccaacccctgcggctgggagggcatctcctgctccgtccctgacctcagggtccaatccataaacctcccattcatgcagctcgggggcatcatttcgcccagcatcgggaggctcgacaagctgcagagactagctctgcaccagaacagcttgcacggcccaatccctgcagagatcaagaactgcaccgagctcagggcaatttacctgagagccaactacctgcaaggaggcatcccttcagagattggcgagctcgtgcacctcaccatcttggacctgtcaagcaatctgctgaggggcacaataccggcctcgatcggaagcctcactcacctgcgctttctgaacctgtctactaacttcttctccggagagatcccaaatgctggtgtcctcggaaccttcaaaagcagttcgttggaaatctggagctctgtggcctgtccatccagaaagcttgccgtggaaccctcggctttcctgctgtgttgccacattccgatccgctctcttcggctggtgtttctccaatcaataacaacaagacgtcacactttctcaatggcgtcgtgatcggctcgatgtcaaccttggctcttgccttggtagccgtacttgggttcctatggatctgcttgctgtccaggaagaagagcattggtggaaactatgtaaagatggacaaacagactgttcctgatggtgcaaagcttgtgacataccagtggaaccttccatattcatcaagcgagattattagaaggttggagctgcttgatgaagaggacgtggtcggttgtgggggctttggcacggtgtacaggatggtgatggatgatggcacgtcgtttgccgtcaagaggattgacctcagccgcgaaagtcgcgacaggaccttcgagaaggagcttgagattctgggcagcatcaggcacataaaccttgtcaatctgcgaggctactgccggctccccacagcgaagctactcgtatatgatttcgttgagctgggcagcttggaatgctaccttcatggagatgaacaagaggagcagccattgaactggaacgcgcggatgaaaatcgcgcttggctcggctcgaggcctggcatatctgcaccacgattgctcgcccgggatcgtgcatagggacatcaaagccagtaacatcctgctggatagaagcttggagcctcgtgtctccgattttggcctcgcgaggctgcttgtagacagtgctgcccacgttaccaccgtcgtcgcgggcacctttggatacctagcaccagagtacttgcaaaacgggcatgctactgagaaatcagacgtgtatagctttggagtgcttatgctggagctagtgaccggaaagaggccgaccgattcttgcttcatcaagaagggactgaacattgttggctggctgaacaccctaactggggagcaccggctggaggatatcatcgatgagcgatgcggcgatgtggaggtggaagccgtggaagccatccttgacatcgcagccatgtgcaccgacgcagacccggggcagcggccatcgatgagcgctgtcctcaagatgctggaggaggagatcttgtccccctgcatgagcgagctgtgctacgagcagcacctggagctctgagctgaggaggaagatgttgctggctgcgtgcgtgaagcgtcatggatgagactgaagttttgtactgtagatacaacgatgatggatgagtgtaggtgatgttttgtgtgctcttagggccaatgaagaacagtaagcagcagttcgtgagtgaagaaggatcgtccattgggcgtactgccctgatacgataccggttggctgcacatgagcggccggccttgtgcctcgcttgcgaattgcaaccaaaaggctgacgagaaaactccatgtgctaatgttttcaacatccacggaagggcgtatcactgaatattgacgatgtagaaattgttggactaatgtggggttagactaaattaatattcaataatagtcaatgctaatggtccactttaatgctatggtgtacaaataatttagtatcatattagaagtttaaaggacaaatcaatcaacttaaatagacggatcattgacatatattgaggggttgagaaaaggatgaatgactgtcatgcgccgtcgccggccatagccgtagttcgtggtaaatcggatcttgttttgaatattccttccaaacgtttgtgcattttggctgtagtgatgataatccatttt

SEQ ID NO: 7130 - DNA, 2617 bp, Zea Mays
aaaataatcgtactgtagaagccgagcgcaggagatccaacaacgaaactccccttcgttccttcctcgtgttcttctccctcctgccgccgcggcccgctccgctcccgagccccgttgcacctccacccgccgcttccgtcccgtctcctgccaccttcctctcaccgcaatcgagtcgctgcgcctcctcccgcccgccacctcccgcagccgcagcaggacgagctcgtcgccgccgtgtactagaacgggaggtcgctgtcggtctcccgcacaatcctgattcctggacctgcgccgcgtggtttcgcctcaggttggagtgtctcgatttgtcaggatagcttgtataactgaagctttcctttgtatgatgatgggggcatgccatggatcacaagtgagggggctagggtttagtatgtggtagtagctcctgcttcagcaaaagaagcaaggatcactacttttgctgtttgttccgtggaggatctgaatcctatcggcattgattcgggtggcgtcagctgttctgggtggggtagtatgatgaaacagatatttggacggcgcaaggcgtccaaaactgcaggcaaggagtgtggcgggaggacgttcaaccagctgctgtcaggttctggatttgctgacctgagtggccagctgccaattctgtctagtactggggacatctatgggaatggaaaccgtacggggttccaagactcgaggataaatgatactttgttctcttccaacttccgactgttgccgagctttaaggatgtgccaaatacagagaaacagaatctgctcatcaaaaagttgaacatgtgctgcactctgtttgactttgaggatgcggcaaagaacataaaggagaaggagataaagacgctaatgttgttggagatagatgaatatgttaggactgctaacgcgaagttccctgagatcattgtggaggcaatcacaaaaatgatttcagtgaacttgttcaggacactaatttccccacccagggagaagaaggtgcttcaagcttttgatctagaagaggatgaaccattgatggaccctgcgtggccacacttgtaccatgtgtatgagttgctcttgacatttgttcagtctccagaaaatgatgctaaactggctaagaagtatattgaccattcctttattctaaggctgcttgagctctttgactctgaggatgctagggagagggatcgccttaagacggtacttcaccgtatctatgggaagttcatggtgtaccggccatttatccggaaagctataaataacatattctaccagttcatatatgaaactgaaaagcacaatggaattgcagagctcttggagatttttggaagtattatcaacgggtttgctttgccactcaaggaagagcacaaactgttccttggaaggaccttaattccacttcacaagccaaggtgtacttcaatgtaccatcggcagttgtcttactgcattacacagtttgttgaaaaagattgcaaacttgcggatactgttattaggggcctcataaaatattggcctatcaccaacagcacaaaggaggtgctgttcttgggtgagctggaagaggtactagatgcaacacagcctgctgaatttcaaaaatgtatggttcctctttcccaccagatcgctcactgcttgaacagctctcacttccaggttgctgagagagtattatttttctggaacaatattcacttcgagaatttcgttaagcaaaacagtaaggtgatcctgcctatcatcctccctgcattggagaaaaatataaatgggcactggaatcaagtcgtgcaaagcctcagtctgaatgtccgaaagttactctccgatcgtgaccctcaaatgtttactgaatgcttgcgaaaatacgaggaagacaagggcagggagaaggaatttaaactgaagcaagagttggcatggaaacgtctggatgagattgcatcagcaaaagtcacaagtggtgaggctgtccttgtgtctccaaccttgcctcgtcaaccttcattcttgtagcaacctgcactgaatgagtggtccttgcagagtcgttagacattgtacaggattgggttgtagataaaagggggtatatgaagccttcaaggctggtgagcgaaattgaagaaagagatctgagaagccaattgtgcatcatttctgtaaatcccatgccatggcttcttttggcattctggtggttcagtctgcttctgtagtccgttgtttgggacaatgtattttttttcttgtaatggaaaatgttgagatgtcctgcaggcggcttaaatgataaaagttattaattttcatcacagagtgccatggcacgacagatggatacaggggcaccacaccacgtaagactttgttcgtttacaccaatcccgctctggattagtatggattggaattaaatccatgcctcaatccatgccccaaaataatccatgactacttaattttttttattcggttaaacccatcatggaatataacccaaatgtttgggaattttttaaactatggaagacatggattctatccatagccc

SEQ ID NO: 7131 - DNA, 3438 bp, Zea Mays
ctcagattttccctacgcggctacgcccgcgagctcttccactctcagctcccgtcccgaagccgcacccccgccagcggcggcgctcccgctcccgctcctccctgctcggcgattcggcgcggcgccgccacgcctccacctcacgcggccccgccctctcggcgctgctctctggcccctggcggcacgcccttccctcctccgttcctcagccgcaaggcgccaagcgggcggccctgcgtgcgcgggcgcgggcgcggaccctccgaggcagccagacgcggcggccaccgcggatcaagagcgcgagtgccgttcaccagcgaggtggcgcggagagccgagagcaccagcacagatataacaaggcagcagccgccgccgccgccgcccgccgtaaccaggtgccaccggcgtgggcgtgacccaccacgaggcggtgctggcaacacccgaccgtagcgcggcatctccgtcctcgtcgtcaatccctgcgggtgtgcaacagtagcgatgactaggtgggatgaaattttgactcttccagttcagaacccaccatcattggagttctcagcagcggatatctcgtggtcaatggtggagggctggagggattctatggataggcttgcgctgattccatattctagggtgaatgactttgtcagaggagagtcgaacaacaaagattgtccatcaagatttcatgttgaagcacggagaaggcgtcctccgacaatgaactgcaagcccaaagttgatgggatacttgagtatattctgtattggtgttcttttggtccagatgattataggaagggtggtaatgtacggcctagcaggcccatcgcggaaaagagaaaaacacctgctggccgccctaatacaaagaggggatgtgtgtgccattttattgtgaagcgcttgattgttgaaccatctgtggctcttgtgatatataaccacaataagcatgtagataagaaaggcatgccatgccatggttctatggacaagatggctgtagggacaaaggcaatgtttgcaccatacatatctgatgagttgcgtcttcaagttatgtctttgctctatgttggcattccagtggagaccataatgcagaggcatactgaaatggttgaaaagcaaggaggtccatcaaacagggacgatcttcttactcatagatatgttaggagactggaaaggaaaatacgtcgttctgtttatgagcttgatgatgatgacgctattagtattggcttatgggttgaaaataaccaggattgtgtgttcttctatgaagatttttcggatacagacacctttgtcttgggcatccagacagattggcagctacagcaaatgattcagtttggcagccatagtttaatggcttctgattcaaagtttggaacaaacaagctaaagcatccttgttttcgatcagcacaaaaatgcaattcctgttgcgtggattataacccccaattttgcacatggtgaaatatataaatgggtgggtgctctttatgatcgagcgcatacaaaagatcctacttggcaattgggtggcttcattattgatggtcccttgactgacgttcgcacaataagagaagtattccattgccctgtgctgatcagtttatggcgtatccggcatgcttggcataaaaatttggttaacaaatgttcagacattgagaagcgatcgacaatggccaaacgtcttggagatgcaatttctattatatgcagaggaactggtgatgttgaattatttgaagcctttctgcaagattttgttgagtgtgctgggtttcttgactacttcaaagctgtatggcttccaagacttggggcatggataactgtcttaaaggccacggcattggctagtgcacaggtagcttcagcaatagagagttaccatcacctgctaaaacttcggctgctgaatgaggcagatgaaagtgtctactggcgtgctgattggttggtcgataagttgggtacaaaggtccattcttactactggctggatgaattctcaggaaagaacagtttttcgcgttactggaggagtgagtggagtagtggcccaaacccatggtgccagggaatgcagattccagattccgatgtcgtcattgaaggcaattatgccagtgtggtcagccagaagaacaaggagaagtcccatgtcgtactgaatccaggttctgagtttgcgttgtgcgattgtagctggtcaatgaaggggaacctttgcaaacatgtaataaagtcggcaaaggtctgccgtgacaggggattggcactgccatcgttggccatgttccactattaccaggcattggcaaatcttgttcattgtccacccagtgatactttgattagtgaccatgcaatggctctggcagtttctgttaaaacacagctagatgcagtgttgtgcgctgttaatggaagttcttcaattaggccaggtttccaggatccacagtcaacgagtaagacaagagaagctgaaattgaggaagccaactctgagaatggtgtgtgcacaagtcaaccccagcctggtgctggtgatgatgaggatcaggccattcggactggcaagagaagaaagttaggggacgcttctggtgacactgaagatggttccatatatcaggacagtctggctcgcaagaaatgcaagtcaggggaagcttccggtgacgatgaagaggcctccacagaagagggcagtcgggcttgtgaaagtaggaagccaggagaagcttctactaacaatgaagaggtttccataggccagggcagtagagatcatgagaaaagaaagtcgggagaacctcctggcaatgaaggaacttcagcaacgcaagctacggaaccttctgagactgaaaccagccaagcaaccaatggactggttaggtccctcctcccctcttcggaatgcacctagaacgccttgcgggtcttgtaaattcctagttggattagtcaactgatgaattaaacagcagctgagcttaaaaaaaactagtagctgcgtctgttaagtgtgaacggaagcataaatcagttcatttatcattatgaatgggggggggggggggggtcgtgtgcattatgcaggacaacaattgcaagtcccagtttaactgtttggcacgatgttcaaaatctaatgatcccatgttcttttttttggtaaatgaagcaataccatatcatatggttacctaaacctaccgaattaaggtactgttttgctgtatatagcattcacacttctctagaatagcttgttatgcataagtgattactacttattattacttcctcccgtccctgtgttctggattgaactagagatacaaagttaatctcagttcctatgctttttttatc

SEQ ID NO: 7132 - DNA, 1862 bp, Zea Mays
aattagccagagcccagagcccagagcccggaacaggcgcggcggatataacacactccaccctctccgcgactccgcctcgcggcggagacgttccgcggccattcatacggcgtggctaggagcactccttcgaatcggcatcgcaattcatacggctacaacgtctattctgtgggcacttcgtctccgatcgattcacggcaagagcgagagttcatggattcgacagggcccatgagggtctccatcaaagcccaccgccccgactggaaatcggagcttagaacaaattgcctcagaagagttagaaaggacagaaatgacttgctttggaagatcaggaagcagggactgcccggcaatgtcatggtataaaaattctccttttatcacatctggaaaaggtcagatctgctgtcaggagcgtcatatctgatgaggtagagaaactcaaacagtccaatacagaaaacgaggaccaagaaatggatgtcatatgggagtatcaaggactgcatgctgctaagcctgctgaaattgaaagtgaagatatattgcttgaaatggaaagacttgtttgtgaagatattagagaagaagtaatcagaaaacaactagaggcacttgatgaggaagatgcatatttagctcaaagtgttttggatcatatgcaactaaatgacattgaggctgccgaaactgctaagctctggtgtccagtatgcaagcaaggagatctacgagaaacacgtaatctcatatactgtactctctgtaatctacggcttgaccttggagaagataagatgacgctggagttcttacgagaacggttggccaatgcacatatggatcactttgacagaggatgcaaatcagcacccaagttctgtttacagactatgtttggcctgactgcgctctacatacagtgtgcagaatgcagtacatttgatatcgtggtataaccaacaagatgctgatatgaatcaacacttcaacggaggaaagaaatgttacaaaacttacttgaagttatttcatcgcttcatgtaagattagctggtgaagttatggcaagatggctgcaatccgaaaggtggcacacactcagcacctgaacacgttcatccattccagcttctggtcaaaacaattgacatgcatgcatgcatgtggaatttccacgtatgtccaatttaaatgttgcaaccggtgtaaggtggttagtaaatatgcacttgactatggcaacatctagtttccagcttacttgaaagttgaaactgcaactacaattggaaccaaacactacccaattgatcttgaagtcgtctttgggctagctcgcattcctttgcagatctgctaccggtggcgagcgtgtagagatggcaatggttacccgcgacccgatacctgatgggtatttactctattagggtatatatgtaggctaaataatctacccgtgggtctgttattggacaaaaatcttcacccaatgggtaaacgggtattagaacattccgccttcacccatacccgttaacccgtgggtataaaatacccaatataaacttagcccaagcataaacttgaactttattcattcatcttttttactatttaacaatcttttatgccataatgtcatagaaggtttaacggcaatttaatgaccatgtaatggaacatgtaatatactatgtagtactatcctagtgttactactttatccaattatctttggtgtgttgaatgtgtggttaaatgatgctagaaattttgtaatggtatttatatggatatacttgacatttgtataatataatattttgatagatgtacaatttttg

SEQ ID NO: 7133 - DNA, 1917 bp, Zea Mays
aattagccagagcccagagcccagagcccggaacaggcgcggcggatataacacactccaccctctccgcgactccgcctcgcggcggagacgttccgcggccattcatacggcgtggctaggagcactccttcgaatcggcatcgcaattcatacggctacaacgtctattctgtgggcacttcgtctccgatcgattcacggcaagagcgagagttcatggattcgacagggcccatgagggtctccatcaaagcccaccgccccgactggaaatcggaggtcattgggtggcggatgggcgcaccaggttttcgatcgattggcagaatggtttggcggcgtagaactacctttgtggtcactcttagaacaaattgcctcagaagagttagaaaggacagaaatgacttgctttggaagatcaggaagcagggactgcccggcaatgtcatggaaaaggtcagatctgctgtcaggagcgtcatatctgatgaggtagagaaactcaaacagtccaatacagaaaacgaggaccaagaaatggatgtcatatgggagtatcaaggactgcatgctgctaagcctgctgaaattgaaagtgaagatatattgcttgaaatggaaagacttgtttgtgaagatattagagaagaagtaatcagaaaacaactagaggcacttgatgaggaagatgcatatttagctcaaagtgttttggatcatatgcaactaaatgacattgaggctgccgaaactgctaagctctggtgtccagtatgcaagcaaggagatctacgagaaacacgtaatctcatatactgtactctctgtaatctacggcttgaccttggagaagataagatgacgctggagttcttacgagaacggttggccaatgcacatatggatcactttgacagaggatgcaaatcagcacccaagttctgtttacagactatgtttggcctgactgcgctctacatacagtgtgcagaatgcagtacatttgatatcgtggtataaccaacaagatgctgatatgaatcaacacttcaacggaggaaagaaatgttacaaaacttacttgaagttatttcatcgcttcatgtaagattagctggtgaagttatggcaagatggctgcaatccgaaaggtggcacacactcagcacctgaacacgttcatccattccagcttctggtcaaaacaattgacatgcatgcatgcatgtggaatttccacgtatgtccaatttaaatgttgcaaccggtgtaaggtggttagtaaatatgcacttgactatggcaacatctagtttccagcttacttgaaagttgaaactgcaactacaattggaaccaaacactacccaattgatcttgaagtcgtctttgggctagctcgcattcctttgcagatctgctaccggtggcgagcgtgtagagatggcaatggttacccgcgacccgatacctgatgggtatttactctattagggtatatatgtaggctaaataatctacccgtgggtctgttattggacaaaaatcttcacccaatgggtaaacgggtattagaacattccgccttcacccatacccgttaacccgtgggtataaaatacccaatataaacttagcccaagcataaacttgaactttattcattcatcttttttactatttaacaatcttttatgccataatgtcatagaaggtttaacggcaatttaatgaccatgtaatggaacatgtaatatactatgtagtactatcctagtgttactactttatccaattatctttggtgtgttgaatgtgtggttaaatgatgctagaaattttgtaatggtatttatatggatatacttgacatttgtataatataatattttgatagatgtacaatttttg

SEQ ID NO: 7134 - DNA, 1922 bp, Zea Mays
aattagccagagcccagagcccagagcccggaacaggcgcggcggatataacacactccaccctctccgcgactccgcctcgcggcggagacgttccgcggccattcatacggcgtggctaggagcactccttcgaatcggcatcgcaattcatacggctacaacgtctattctgtgggcacttcgtctccgatcgattcacggcaagagcgagagttcatggattcgacagggcccatgagggtctccatcaaagcccaccgccccgactggaaatcggaggttaggtcattgggtggcggatgggcgcaccaggttttcgatcgattggcagaatggtttggcggcgtagaactacctttgtggtcactcttagaacaaattgcctcagaagagttagaaaggacagaaatgacttgctttggaagatcaggaagcagggactgcccggcaatgtcatggaaaaggtcagatctgctgtcaggagcgtcatatctgatgaggtagagaaactcaaacagtccaatacagaaaacgaggaccaagaaatggatgtcatatgggagtatcaaggactgcatgctgctaagcctgctgaaattgaaagtgaagatatattgcttgaaatggaaagacttgtttgtgaagatattagagaagaagtaatcagaaaacaactagaggcacttgatgaggaagatgcatatttagctcaaagtgttttggatcatatgcaactaaatgacattgaggctgccgaaactgctaagctctggtgtccagtatgcaagcaaggagatctacgagaaacacgtaatctcatatactgtactctctgtaatctacggcttgaccttggagaagataagatgacgctggagttcttacgagaacggttggccaatgcacatatggatcactttgacagaggatgcaaatcagcacccaagttctgtttacagactatgtttggcctgactgcgctctacatacagtgtgcagaatgcagtacatttgatatcgtggtataaccaacaagatgctgatatgaatcaacacttcaacggaggaaagaaatgttacaaaacttacttgaagttatttcatcgcttcatgtaagattagctggtgaagttatggcaagatggctgcaatccgaaaggtggcacacactcagcacctgaacacgttcatccattccagcttctggtcaaaacaattgacatgcatgcatgcatgtggaatttccacgtatgtccaatttaaatgttgcaaccggtgtaaggtggttagtaaatatgcacttgactatggcaacatctagtttccagcttacttgaaagttgaaactgcaactacaattggaaccaaacactacccaattgatcttgaagtcgtctttgggctagctcgcattcctttgcagatctgctaccggtggcgagcgtgtagagatggcaatggttacccgcgacccgatacctgatgggtatttactctattagggtatatatgtaggctaaataatctacccgtgggtctgttattggacaaaaatcttcacccaatgggtaaacgggtattagaacattccgccttcacccatacccgttaacccgtgggtataaaatacccaatataaacttagcccaagcataaacttgaactttattcattcatcttttttactatttaacaatcttttatgccataatgtcatagaaggtttaacggcaatttaatgaccatgtaatggaacatgtaatatactatgtagtactatcctagtgttactactttatccaattatctttggtgtgttgaatgtgtggttaaatgatgctagaaattttgtaatggtatttatatggatatacttgacatttgtataatataatattttgatagatgtacaatttttg

SEQ ID NO: 7135 - DNA, 551 bp, Zea Mays
ggcaggtgtgatgctcattggggaagagggatgatttgttgaaggcagaggcagcaagtccttcgtcgtcggatgaagagcaatccgagtcccactctttgccaagtaactttttgagtaccaatgatgtaaagggacacaagctctagcaatgtttctgcttctcatgtaggccgtgtaagacgtcgcaaacatccaactgaggctaccatagatgggaatagagttaatggacaaccattgcttgtcagtgatcaggacaaatataaatcagtgcttacccatacgtattctacagtatggatgattggaggctttgcctttattatttatatgggtcatctatatatctgggctatggtggttgtgattcaaatatacatggcaagagaacttttcaacttactcagaaaatccagtgaagagaaacaactgccagggttcagggtcctgaattggcactttttttcacggcaatgctgtacacttatgggcgctttcttagtcgtcaactggtgaatatagtgacttcagatcacttgctttataag

SEQ ID NO: 7136 - DNA, 1653 bp, Zea Mays
cagcaaccgccgccccctgcgaaccgctcgttcgccggcccttgatttataaaaggagccgaggcctgttcctcacttgagaagaagacaagtgagaacaatcatatatatattgttgcttaaagagaagagaagagaagagaagatcgacaagagattggcggtaatggactcctcggagctgcacatactggccttgcagagggtgaagcaggtggagccggagaacgcgagcaagatcctcggctgcatcctcctggaggaacccgacaaccaggatatgctgcagctcgcctacggcaacgacgccgaggtgcacgccaagatcagccacgccaaggccatgctggacgccatcgtcgcgtgctgctcctcctcgccggccttcggctaccactactggccgccggtgcccaataaggcgcaggcagaggagtacgcgttgcagccgcagcactacagtggcggagggtgctactacgcctctgagaacgcgctcatctacaatggcggggggccgccgaggtccaggctgtcgtcgacgcggcgcccctgccactacttcatcaagggaatctgcaagaacgggcagagctgccactactcgcaccaccggcaggaggcccaggtctgctccggcgcgctggagaagctggagctggagatcattgagctgctcaagtcgcggcacgggcagccgctgtccatcgcgtcgctgcccacgctatacggcgacaggccgcacgggcagcactatgtggttctggcggaggacgccggcaggtacaaggagttgatgagcaggggcgagagaggaggagacatgggcagcagctcgcaccagtttgtatggttcggtgcgcgacgtgaggatcccatggcaggagaaacggatgtttggcttcgtgagcttccacaatccggagacggtgaacaccatactcacgatgcgcatcccacatttcatcggcgaatcaagggtcctggtcaaacgctacatagagaaatccaagtgcatcgaacgctatcgtccgagggcgcttcgtcgcttcgtcggcatggacatggacatggacatgaacgacgatgatgatgactacgacgaccagcctccagcccggatggtgatgaggaatcagcaacgactactggcgacggagaagcggctgatcgagctcgagaggaagcgcttcttcgcgatgccgccgcagcagtaccagcacgtctacttcgactgcagcatcggggacgacgacggccagggccagccaccaccacgacatcttcccctcatcataacccaaccagctcgggcaagcagcagcagcagttacgacgacgacgacgacgacatccaactcccagaaagcccattcacgtcgtcagccgtgccgatgctgatgtaatgggccgggaaagggaaaccaaggtccacttaattagcttcctttgttacacaggacaggacaggacacaaaaacaccctcttttttgttgtagatataaacaaattaagggagtcacagtacacagagagagttggtgttcttagaatgcaggcacactggtgagttttaaacaagggtgccagaaagaattacttattagctgtgccataataataataagatcgtcgtctctgtttgtgccttc

SEQ ID NO: 7137 - DNA, 2429 bp, Zea Mays
accacttgtaccacctataactgcaagtcgtctgaattattggttccaagggctctgtagttgcttctccacactttcctatgcttttgcattaatcttgacaactgagtactcaaagctgggatatggctacttattattcgagccctgacagtgaaagagattcacaaacaatgtactcaacagagtcaggcaatgcatcatatcccgtgccatcagccctagggaactttctttatctgaacagtgcatcttctggaccttatacagaatttaatggaattgtccagtctcaacagaatttcatggaacttactggtcatccttcagcaatttcacatgattcatcatccaacgaagctactaacattggcacttcactgacagaacagcgctcttttggtcctttgaaagatatgagaaatgagatgttgatgcatttgatggatggagcacacagcagtggcagtgacctcatccacaatgatgaccatagcactgcacagctcgagtttggcatgttaaacaaccacaattcaacaagtcttccatcagcatcaggccaagggctgtctctgagcctcaatacacatatcttggcaccttcctatccatactggtctgcaaagcaggacttattaacaccaaattcttaccagggtgatgacaacagaatgaagaatatgcagtctgaggcttcacaggcaatccgaaactctaagtatctgaaggcagcacaggagttgcttgatgagattgtcagtgtttggaagagtgttaaacagaaaacagataaaggcccttctgaagcaggaaagtcagatggaaaagagactgatggggggactaaaagtgagggagtatcttttgatccacaagagtctggtgccaatacagcagctgagctttcaactgctgagaaacaagagctccagaataagatggtgaaacttatggcaatgttggatgaggtggatcggaagtacaaacactattatcatcggatgcaacttgtaatgtcatcgtttgatatggttgctggttctggagctgccaagccttatactgcagttgccctccagacaatctcacggcatttccgatgtctaaaggatgctatcaatgatcaaattagtgttatcaggaagaaacttggagaggatgacgatgcatctggcaaagagggcaaactaattcgccttcgttatatcgatcagcaaataaggcaacagcgagctttccaacagtatggtatgctacagcaaaatgcttggaggccacagagggggctacctgaaaattcagtctcgattctccgggcttggctttttgaacacttccttcacccgtatccaaaagactctgaaaagctaatgttatcgagacaaactgggttaacaagaagtcagatttcaaattggttcatcaatgcccgtgtccggctgtggaagccaatgatcgaagacatgtacaaagaagagataggtgaggcagagctagactccaactcttcctctgacaatgtgcagccgaacaaggacaagccgccatcttccgaagaaaaggaccataagacctcaacaagccaggtttgccaaaccagccagcttggcgaatccaaagccaacattggtggagtggtgagcttttgtggagcgccagccggcggcttccacaacgatgccaaccccgatgacagcttcatgagcctgatgctgaaggcccagagaccgggcgaaaccgatggcagcggtctcctccatgatgccgtcgctcatcactccgatgagagcgcgcggttcatggcgtaccacctgacagagtttgggaggtatgggaacaacaacgtctcactgactctggggttgcagcacgccgagaacacccagccgggcttccccggcgtcagagaccaagacatctacaactccacagctcctctcaacgtcacctccacatcttcagagtatgattcggcgagccaaatagatcaacaacggcagctgtttgaggtgtcacctctgatgcatgatttcgtggcctgaatttcagctgacgcactggaaaacgtggggaagtgacttgtcatttgtagtgccaggacgaacaatatgcctggactgaattttcaggcgtggaaatgtagctgtagttgtaattggggtacagaatggacgaggtatatagcataaatgttatgtaaatttagtgggggcaggggtgatagtggtaaagaaatcctgtaaagatggaatacattttatacgtgtaaaatacgagtatttaagggccacgctgtaaaaatagatttacctgtaactgtaacgagtgtttgtaatgagtgtaaagaactgccacatgccatattttcgatgggtgagaagatatagaaatcttattttctttgttaattgttaggtagcatggct

SEQ ID NO: 7138 - DNA, 3585 bp, Zea Mays
cagccaagtccctccgtccaacttgccaagttgttcgagtaggtttaagcccagtggcggatccagagggggggcaaagtaggccatggccccccctcaattttatacacccttttatacctaatgattatttagtattaagtgtaaaaaaaaatcaaagttttagatagtataaagtcttgttctagatctctaaaactaatagctagttgctaaaattacccaagaggtttagaatggatcaactaattgttagttatacccctcaaataagtattagttgttagatgccccaacccagctaaatcagttaacaattagctctaaaggtttagaacatggcctaaaacaaccatgttatgagcctgcttgccagattctctcgatcaagtccttgcatctaccagtctgactctaatcttcccgacagcacctaaaccagtctgctcgctgcctcgtttccgccgccgacccattcccgatgtgacgccacccgacttcgcccctttctgacgcctccgtcctttgtcctgtttgacgtccatccgctcgacaagctagatctcgctcgtcgcaacgatatgacttgtcccctgcagtcggcgaacttggcgaactagaaaatcatggctctcatgtgatctttttggcccccctgaattttcgtcctgcgtccgccactgtttaagcccccacagccccacccaataatccgccacgacaataaacaaccagcaccagcagtccagcggcaacaataatcaaatcaaagatcaggaggggggagaaacggcttttctctagcaggccctccggttgtttttattatattgggtgctgttgtttgttgcaggtggtgggtggtgcagggattctttatttctggaggcaggaaggaggaagaagaaagaagaaacatcagaaccgacccgactatcagagatagagagagagaggagctctctcctcttcttttgcttttggtattgttatcttgggatctgattttgtccccatactaggagggagtgagggaaggagggaggaggctgggcttgtttctcctctcttctctcatctcagttcctcctcgcaaggctggccgtcggctcggctctgttgacagcaatccctgcactgcagtcttgccatgctccccacgaggagcgcaccatcaggcaagtcgtctgaattattggttccaagggctctgtagttgcttctccacactttcctatgcttttgcattaatcttgacaactgagtactcaaagctgggatatggctacttattattcgagccctgacagtgaaagagattcacaaacaatgtactcaacagagtcaggcaatgcatcatatcccgtgccatcagccctagggaactttctttatctgaacagtgcatcttctggaccttatacagaatttaatggaattgtccagtctcaacagaatttcatggaacttactggtcatccttcagcaatttcacatgattcatcatccaacgaagctactaacattggcacttcactgacagaacagcgctcttttggtcctttgaaagatatgagaaatgagatgttgatgcatttgatggatggagcacacagcagtggcagtgacctcatccacaatgatgaccatagcactgcacagctcgagtttggcatgttaaacaaccacaattcaacaagtcttccatcagcatcaggccaagggctgtctctgagcctcaatacacatatcttggcaccttcctatccatactggtctgcaaagcaggacttattaacaccaaattcttaccagggtgatgacaacagaatgaagaatatgcagtctgaggcttcacaggcaatccgaaactctaagtatctgaaggcagcacaggagttgcttgatgagattgtcagtgtttggaagagtgttaaacagaaaacagataaaggcccttctgaagcaggaaagtcagatggaaaagagactgatggggggactaaaagtgagggagtatcttttgatccacaagagtctggtgccaatacagcagctgagctttcaactgctgagaaacaagagctccagaataagatggtgaaacttatggcaatgttggatgaggtggatcggaagtacaaacactattatcatcggatgcaacttgtaatgtcatcgtttgatatggttgctggttctggagctgccaagccttatactgcagttgccctccagacaatctcacggcatttccgatgtctaaaggatgctatcaatgatcaaattagtgttatcaggaagaaacttggagaggatgacgatgcatctggcaaagagggcaaactaattcgccttcgttatatcgatcagcaaataaggcaacagcgagctttccaacagtatggtatgctacagcaaaatgcttggaggccacagagggggctacctgaaaattcagtctcgattctccgggcttggctttttgaacacttccttcacccgtatccaaaagactctgaaaagctaatgttatcgagacaaactgggttaacaagaagtcagatttcaaattggttcatcaatgcccgtgtccggctgtggaagccaatgatcgaagacatgtacaaagaagagataggtgaggcagagctagactccaactcttcctctgacaatgtgcagccgaacaaggacaagccgccatcttccgaagaaaaggaccataagacctcaacaagccaggtttgccaaaccagccagcttggcgaatccaaagccaacattggtggagtggtgagcttttgtggagcgccagccggcggcttccacaacgatgccaaccccgatgacagcttcatgagcctgatgctgaaggcccagagaccgggcgaaaccgatggcagcggtctcctccatgatgccgtcgctcatcactccgatgagagcgcgcggttcatggcgtaccacctgacagagtttgggaggtatgggaacaacaacgtctcactgactctggggttgcagcacgccgagaacacccagccgggcttccccggcgtcagagaccaagacatctacaactccacagctcctctcaacgtcacctccacatcttcagagtatgattcggcgagccaaatagatcaacaacggcagctgtttgaggtgtcacctctgatgcatgatttcgtggcctgaatttcagctgacgcactggaaaacgtggggaagtgacttgtcatttgtagtgccaggacgaacaatatgcctggactgaattttcaggcgtggaaatgtagctgtagttgtaattggggtacagaatggacgaggtatatagcataaatgttatgtaaatttagtgggggcaggggtgatagtggtaaagaaatcctgtaaagatggaatacattttatacgtgtaaaatacgagtatttaagggccacgctgtaaaaatagatttacctgtaactgtaacgagtgtttgtaatgagtgtaaagaactgccacatgccatattttcgatgggtgagaagatatagaaatcttattttctttgttaattgttaggtagcatggct

SEQ ID NO: 7139 - DNA, 2602 bp, Zea Mays
ttttttaaaaaacgagcccgaccttgctccaactccctcgattccctctccctattcgcgttccccacttccgttcgccgccgacaccgcgtgcgctctctccccccctccgtctctgtctgcgacgactgggtgggctaccgctgccgccctacccatgtgctgaggcttctgcctacctcttcgccggcgaagagcgcccagcagatccgtcctcgcttccacgctgcagttgaagatttgatcagctatcgccttcgatgcagttgaatatttgatcagctattgacttcgctgctggcctgttttctcctttggagaccaaagaagccatggcgggccgggaggagagatatgtgaggtttcatgactggaaatcagagcaatctgtttctgttatttcagatagggtagtatcagaaaaagggcataacatctttggcttgttaaaggacagaacagcaggagccttttcattcctggggaactcttcacattctgaagccctaaacaaattaggcctaggggagaagtcaaaaacaaaagttcttgatcctcaagggccatttttgcagagatggaacaagatatttgtgatatcatgtctttttgcagtttttgtggacccattgttcttgtatgtcccagtaattgatggtggcaacaactgcctgtacttggacaagaaagtgttcggtcggggtgccttggttaaggacacatttgcaatagcaaagcgatatctatcaacattgttcctggtggatttcttagcggttctgcccctccctcaggtgtttgtgttggtggtgctgcctaagctccaagatctgctggcatacttacagagacagcatgggctggtgctgctttcaaccttataatttatatgcttgccagtcatggctttggagctctttggtacattctttccatccagcgagaagacacctgttggagacaagcatgtatcaatcagactggctgtgatcctacatctttgtactgcggctctccaaaatgtttcacaatcgacgagtttctttgaaaaactattctattgcttttggtgggggctacaaaatctaagttcccttggccagaacatgaaaacaagcactaatacattggagaatctgtttgctgtttttgtctcgacatcgggtttggttctatttgcactacttattggtaatgtgcagacctatttacagtcagcttctgtgcgtatcgaagaaatgagagtgaaaaggcgtgatacagagcagtggatggcacataggctactccctgagaatctaaaggatcggattatgcgccacgaacaatataggtggcaagaaacaagaggggttgacgaagagggccttcttaaaaatcttccaaaggatcttagaagagagataaagagacatctttgtttgtcacttctcatgaaggttccaatgtttgaaaacatggatgaacagctgttggatgccatgtgtgatcgtctaaagcctatgctgtacacagaaggaagctgcatcattcgcgaaggtgatccagtgaatgaaatgctcttcatcatgagaggaacactagagagtaccacaacaaatggtgggcaaactggtttcttcaactctaatgttctaaaaggtggagacttctgtggtgaagagctcctcacgtgggcccttgaccccacttcagcttcaaatcttcctggctcaactaggacagtgaagacgttgtctgaagtcgaagcttttgctctgagggctgacgacttgaagtttgttgccacacaatttaggaggctccacagcaaacaacttcagcataccttccggttttactcacagcaatggaggacctgggctgcttgcttcatacaggcagcttggcacagatactgtaggaagaagctggaagaggctttatatgagaaggagaagaggttacaagcagcaattgtaagtgatggcactacttcgctcagtctcggtgcagcgctctatgcttcacgttttgctggcaacatgatgcggatcttacggagaaatgccaccagaaaggcccgtttgcaggaaagagtacctgcaagactgttgcaaaagccagcagaacccaacttcttcgctgaagatagctgaacttgtaccctgtagcaagcagggattcatggtccaaccggtgaagtttgtgcagaagttaagattggatgctgtagatagacagatcaggtgctctaaagccgtctggtttaaatcacctaattcgcgaaaaggcctggtccgagttagattctccgttgaaataaatttgaagctgacgttaaaaaaaaaatccgcttttgctccacgttaaattctggcttccatagtggtcggactagggtgctgagataagggtattgagattttttagatctgtgtgaaaagattttctgtaacgtaatatctgaaggctgtcttatcctctgtaggttattttaaaaaaaacacgtatatttcgattgtatacaggtttcatgtattataaacactctaatttaccttgtgcatttgaaaaaagagagaagatgctgtgaatataatcgattaattgtttgttcatt

SEQ ID NO: 7140 - DNA, 2728 bp, Zea Mays
ttttttaaaaaacgagcccgaccttgctccaactccctcgattccctctccctattcgcgttccccacttccgttcgccgccgacaccgcgtgcgctctctccccccctccgtctctgtctgcgacgactgggtgggctaccgctgccgccctacccatgtgctgaggcttctgcctacctcttcgccggcgaagagcgcccagcagatccgtcctcgcttccacgctgcagttgaagatttgatcagctatcgccttcgatgcagttgaatatttgatcagctattgacttcgctgctggcctgttttctcctttggagaccaaagaagccatggcgggccgggaggagagatatgtgaggtttcatgactggaaatcagagcaatctgtttctgttatttcagatagggtagtatcagaaaaagggcataacatctttggcttgttaaaggacagaacagcaggagccttttcattcctggggaactcttcacattctgaagccctaaacaaattaggcctaggggagaagtcaaaaacaaaagttcttgatcctcaagggccatttttgcagagatggaacaagatatttgtgatatcatgtctttttgcagtttttgtggacccattgttcttgtatgtcccagtaattgatggtggcaacaactgcctgtacttggacaagaagttagagaccacagcaagtatcctgcgctttttcacagatatcttctatttactccatatactgtttcagttcagaacaggctttattgctccctcttctagagtgttcggtcggggtgccttggttaaggacacatttgcaatagcaaagcgatatctatcaacattgttcctggtggatttcttagcggttctgcccctccctcaggtgtttgtgttggtggtgctgcctaagctccaaggtcctgaaattatgaaggcaaaaattgtactgttggttattattatttgtcaatatgtgcctcgactgctccgaataataccactttaccttcaaatcacaagatctgctggcatacttacagagacagcatgggctggtgctgctttcaaccttataatttatatgcttgccagtcatggctttggagctctttggtacattctttccatccagcgagaagacacctgttggagacaagcatgtatcaatcagactggctgtgatcctacatctttgtactgcggttcccttggccagaacatgaaaacaagcactaatacattggagaatctgtttgctgtttttgtctcgacatcgggtttggttctatttgcactacttattggtaatgtgcagacctatttacagtcagcttctgtgcgtatcgaagaaatgagagtgaaaaggcgtgatacagagcagtggatggcacataggctactccctgagaatctaaaggatcggattatgcgccacgaacaatataggtggcaagaaacaagaggggttgacgaagagggccttcttaaaaatcttccaaaggatcttagaagagagataaagagacatctttgtttgtcacttctcatgaaggttccaatgtttgaaaacatggatgaacagctgttggatgccatgtgtgatcgtctaaagcctatgctgtacacagaaggaagctgcatcattcgcgaaggtgatccagtgaatgaaatgctcttcatcatgagaggaacactagagagtaccacaacaaatggtgggcaaactggtttcttcaactctaatgttctaaaaggtggagacttctgtggtgaagagctcctcacgtgggcccttgaccccacttcagcttcaaatcttcctggctcaactaggacagtgaagacgttgtctgaagtcgaagcttttgctctgagggctgacgacttgaagtttgttgccacacaatttaggaggctccacagcaaacaacttcagcataccttccggttttactcacagcaatggaggacctgggctgcttgcttcatacaggcagcttggcacagatactgtaggaagaagctggaagaggctttatatgagaaggagaagaggttacaagcagcaattgtaagtgatggcactacttcgctcagtctcggtgcagcgctctatgcttcacgttttgctggcaacatgatgcggatcttacggagaaatgccaccagaaaggcccgtttgcaggaaagagtacctgcaagactgttgcaaaagccagcagaacccaacttcttcgctgaagatagctgaacttgtaccctgtagcaagcagggattcatggtccaaccggtgaagtttgtgcagaagttaagattggatgctgtagatagacagatcaggtgctctaaagccgtctggtttaaatcacctaattcgcgaaaaggcctggtccgagttagattctccgttgaaataaatttgaagctgacgttaaaaaaaaaatccgcttttgctccacgttaaattctggcttccatagtggtcggactagggtgctgagataagggtattgagattttttagatctgtgtgaaaagattttctgtaacgtaatatctgaaggctgtcttatcctctgtaggttattttaaaaaaaacacgtatatttcgattgtatacaggtttcatgtattataaacactctaatttaccttgtgcatttgaaaaaagagagaagatgctgtgaatataatcgattaattgtttgttcatt

SEQ ID NO: 7141 - DNA, 846 bp, Zea Mays
gagcttactaggagtctgacactaatctcttatggatgagatgaagagtacaaatacttctattgcgcctgaggttgaggtgcatcctggattctcaccatcgaggtttgtgaaggtttttatgcaaggtgaagttgttgggaggaagataaatctggccactcaccagaactatgcctcgttgtccttcgctttaaaaagattaggcaacaactattctatgccatcatgcgagcttaatgggttagtaaacaatgaagttgatggggcatcagatgacaacaacttcattcttttctatgatacgatggatggtgaccgtttattcgttggggaagtcccatgggagattttcgtcatttctgtcaagaggatctacattgttcgtgttccacaggaacaagagaacgacaacggagaggaagaagacagagagaatggtgaagacaatgctgctgtttctgctactgccctagatggagatgatatcccagctaatgacgacgacgacgacgttgttgatgacggagatgctacggccactactcctgctgatggaggtttctgaggagtcgtagccaactcaaaatatgaagaaaacaaataaataagcagcatgcaagcatggttgtgtttggagcttggttgctgcttcatatagccaacacaagtttcaaatccagcactgtagtttcaactacacacacgcttgttttccatggcgttgaactatttctagttaactcatcataatgcaacttggacaccgaataagttgaaccttatcatgctataacctgtgttctacagaggtttagcgacgatgtagctcttggaagcttcttg

SEQ ID NO: 7142 - DNA, 1150 bp, Zea Mays
gaagcattgctgtcaatttgactctaggtgcaaatatcaggctgcggccggcactggctttgtcctctaccttagtttctgacatcatcacatcgcaccgagggcgaggaggcaaaggaataacctgtgaagctgctgccatccactcatctttctgccttgattgcagtcattcctcccccaagtccatagagtgatagagaatggaggataatctaccagttaatgtccgggaatatcaagaacttgctaagaaagcactaccaaagatgcactatgattatatcaacggaggagcagaagatgaatatacactgagggagaatattgcagcatatggaagaattctgttacggccacgagtccttatagatgtgagcaaagatagacatgtcaacaagcttattaggatataatatgccatcgccaataattgtcgcacctacaggggcacacaaattagccaatcccgaaggggaggtggccacagcaagagctgccgcagcatgtaacaccataatgatgctttccttctcatcaagctgcaggatcgaggaggttgcctccagttgcgacgctattcgcttttatcagttatatgtgtacaagagaagggatgtttcggcaacattggatgattgctccacctctgtcaaaccttgaaggtttaatgtcattagacgactttgacgatgctgaaggcggctccaagctggaacgattctcacgggagacgctggatccatcattgtcatggaaggacgtggagtggctcaagtccatcaccagcctgccgattctgctcaagggcatcgtcaccgcggaagacggtgtgcaagagaagagctgtttcagcaacattggtatggcgggttgaggccatcttcagctgatccttcgtcccatccactatctcatcctctgttttaaaatttcaatctgtaaacaatgttatctacaatttcatgtttcctattttactgtgtccactgaagatagtatgagagtttagggttcaattcagctgctttgacagttgacaggcctgtgcttggcaggcgcgaagctgatatcagaaacaagtacagtgcttgctatctttgttgaaacctcctaaagttcagtgaaattatgtcctttacaaaaccac

SEQ ID NO: 7143 - DNA, 624 bp, Zea Mays
tacgtaccccttcggccctcttgcacttctcctccccacccaacgaggcggagctccttttacctccacagcgtcggctgtgcgcctgtacttcacaccgacgtcaccctctcctccagaactcatcaccggagccaccctcacctcgtcacgccctcctccgctaagtgcagcaagtgttgatcagttagcacactctccttcaaatctagagtcacttcttcaaagtgggtgggagggagatggtgctgaggcgggcggcaaccgaatgtcctaagaaggttgtggggctgaaggatttggtgaacctgccgacccagctgtgagagttcaccggaggccggtccaaaatgtcacatatctccttcctccgtgtctgctcgtacatcaaggacaacaaacttcaggtacattgcttggcggttgccgattgttttccccctttggtgccagcttcccagcaaaacttcaacctttggatctcattcttcacgtagaaatcggcatctgccccacaatatttttttccgttatcttgcgaaattctatggttgtggtcatgtgtttgcaggtgaacctcaaggaatgttcattgctactagaattacaaatccatttgagata

SEQ ID NO: 7144 - DNA, 288 bp, Zea Mays
gcggcaaaaccctacgactgcaggactacgcccactgacttcccgcgcgcgcgctcccgctcccgctgccgggccggtttcagccccatcaggcaatcccctctccccctccgccccccagccgaagcagacccaatgtcctgcggtagaggcagcaccggcgaagtcgaaggaggcaaatcggtcgccgcgatgacgccgtggcacgacagcttggcgccgccgcctcgcgtcctcatttcccaccgtgccattgggttttgaagattgatttttttttgtggggag

SEQ ID NO: 7145 - DNA, 1415 bp, Zea Mays
gcggcaaaaccctacgactgcaggactacgcccactgacttcccgcgcgcgcgctcccgctcccgctgccgggccggtttcagccccatcaggcaatcccctctccccctccgccccccagccgaagcagacccaatgtcctgcggtagaggcagcaccggcgaagtcgaaggaggcaaatcggtcgccgcgatgacgccgtggcacgacagcttggcgccgccgcctcgcgtcctcatttcccaccgcccttctgatgccagcggtcaagggattgttctgtcacttcaacatccaagatcagggtatctatttattgatggccaactacaagagatcaactggtttaaggagcgttatggtgcttggttcttgggagattatgtttgtgaagatggtggcctttattattgcacccctgttgatcccatcttcattttcctaccaacttttgaagctgcacgtataacgataaggatccaggaaaattcagacaattggatgaaatattgtatgttgagggatatcctggttatcagcagctaatgaatgtagctaaccaccatatggaattggtttgtgaagtaaaagaagtatctaacatgaagttctttaggctggacaactccaaggtcttatcttggttgtgctgcaaggtatacgacctaaaggaggtcttccccaagttgggtaaaaattatgccgcccaaacagaaaaagaaaaattgaaggaggctgtccaaatgatccgtgaatatctgaaggacgaaccatggttagcattactatgcaagaagctgcagctggatatcaatgcgatcactgttgatgcgaccaccaaaactgctgaagcttcggtttatgcggacagttgtccggcacctgccctcccctctgagagtaagactgcgaatggtggtgccaagtcaagcaaagggaggccagcgaagaaagcaaagacagaggtaggatccaagaacatcaaagatatgttccgaagggtcacgaggagtggatcaggatcatgatgccttcctggaactttcgtgtgactgacgcctgttttgatgcatttggtccagcattcccttgttgaaaatctatgtatctgagttgctgtgtctaacaacagattgggattatattgtagcgttaattgttgattcaggcagtgaactctgctagtgtacaaccctccctcccgtcccggatgtatttgtaccacagttgcttgtagtgccgttgtctgcagtagtctatccaaagtttattaaaaaacatctgttctacattttagactgcactgttcggagagtataagctgctgaagatgacctaagcggcttgtattgcttgagtcgagaccaaatgggagagcatctctgagaaaattctcttttcctatatctctactg

SEQ ID NO: 7146 - DNA, 1461 bp, Zea Mays
cggatatcaaatccggatgcacgatgatgcacccgctctgaacccaacccaccgccatttctatacccctctcgccctgcgccccgtcacctctctggtccctctcctcttgctttgatgctttctctctccatctcgtttcccccgcctgcccagccagcgcaaaccctagcccgtactgcgaggctcttggcagcggataactggacctgtccgcatgaatcgggggagagaaactggcggtaacttacgtgaatcgggtttgtttagtggctgcgacggcgacggcggcgcagggatggaccgtaagcgcattaaggacgtgctcgagaagcacctggagaggtcgtcgccgtccacctccaggggcgtcgtgtccaaggagagggagcgcctcgctgccgggaaactgccggcgtcgcttggcaaggcggagaaggtgtctgatggtgaggaatttgaaactgacagtgaagatgaagattctgatatcagtggttctgagagcgagggcacatcctggatttcatggttctgtacattgcgaggcaatgaattcttttgtgagatcgatgatgactatatacaggatgattttaacctttgtggtctgagtatgcaggtgccatattatgattatgcacttgatctcatcttagacattgagtcttctgatgatacatacactgaggagcgaaaagaatttatcgagttgtctgcagagatactatatggattaattcatgcacgatacatcttaaccagcaagggtctagctgcaatgttggagaagttcaagaatcgtgactttggtggatgccccagagtgtactgctgtggccagccctgtcttccagcaggtcaatcggatgttcctagatcgagcacagtgaagatatactgtccaaaatgcgaagaacttaactatccaatatccatgtaccaaggcagcattgatggatcatacttcgggacgacgttccctcatcttttcctgatgacctatccgcacttgaagccgcagaagccgccacagcaatacactccaagagttttcggcttcaaacatcacaagccgtcatgacagagctgcactttcagcagaaacaccctttgcacctaggatttagggagagcaccgtggccttcaaatattgttgcctgatcgatgtacgaattcgcgaccttgggtcctgctgcaaactgctgtcaaattgacgttgaacactccactaccatggttacctcttcgtggctacgtgaaaaattcgtgttgacggctttactgaccggaagggccagcaacgtcgtcgtcctgcgggtgcggagttgccggctgcgactgggctgcgtgcacgtaaccaccggctgcagctgcaagtagaataagttgagcatacatcgagacaaatctatcggcatagatcgctctcagaattatttcgtgggcagctactaatt

SEQ ID NO: 7147 - DNA, 2023 bp, Zea Mays
cccaaaccgaaagtggcatccgaaagatcaatttattttgcactccgctgttatatcgacgtgcaccaccgtcttgccgtcgctcatttcctcctcgctcggctgcttgcctagggtttcacctgctaccgccccacctccagccgtcgcttcagatcccgccgctgccggcgctcgatcctacttcgttgctcctagctgatcccgctgagctcggatttgggcccttcctccccgccggaacagcgtccggacgcgcgggggcagatctgggttttggtggcccgcttggtgtatgagaaggcctccagagcttggaagtaatggaggtggagccggcgaggagggacgcggcagcgctggacccggagctgctgcagctggcggagctcgcgccgggcgcgcttcgtgagaactccatagctgatgcgctgtattcgcagtggctcgtgctacccgagacgaccaagctggtgaagtctttgattgatgatgcaaagactggtgctgtgcttaatgttgctggaagctctgctagcacaaatgctgcttcaagtagttctctaccttcgatgtttcctgctggtagtgctccaccactttctcctaggagcacgtctggttcccctcgtgttatgagacgaggatctggagctggaccatcatccttgggctctccattaaaattagttagtgaaccagtaagagaagttatacctcagttttacttcaagaatgggcgtcctcccacaaaagatttgaaggagcagtgcttatcaagaacagatcacctattttttggtggtgggggacttcaagttcaagaattcagatcggtcacgaaggacatatgtaaacttccttcattcttgtctagtgtccttttcaagaaaatcgatgttgaatgcactagaactgtctcaagggatgcatttgttgagtactggattaacgacaataaggttacaatggatatggctagtcaaatatttgaaatattaagaaagccaggttacacatatctcacccaggatgacttcaagcctgtcctgaaagaactactggcaacacaccctggcttagagtttttacaagggacccccgagtttcaggagagatatgcggagactgtaatatacagaatcttttactccataaatagatctgggaatggtcatctgactctgagagagctcaaacgtggaaatttaattgctgcacttcagcagttagatgaggaagaagatatcaacaaagtgttgagatatttctcatatgaacacttttatgtgatctactgcaaattctgggagctggatgcagaccacgattttttgattgataaggaaaatctcatcaaatatgggaaccattcgttgacctatagaatagttgatagaattttcgcacagatcccaaggaaattcacaagcatgacagaaggaaagatgggttatgaagactttgtttactttatattatcagaggaagacaaatcatctgagcctagtcttgaatattggtttaagtgcatcgatcttgatggtaatggtattttaactttcaatgaaatgcaatttttctacgaggagcaattgcaccgaatggagtgcatggcacaagagcctgtgctttttctggacatattatgccagatgattgatatgattggaccagagaatgagagctatttaactctacgggacttaaaacggtgtaaactctcaggaaacatattcaatattcttttcaatctcaacaagttcatggcatttgaaactcgtgatccattcctcattcgccaggaacgtgaaaatccaactctaactgagtgggaccggtttgcacatagagaatatattagattgtccatggaagaagatggtgaggatgcttcaaatggaagtggtgatgtgtgggacgaatcacttgaggctccattctgaatggcgagaactgtgtcatttcattaagaagaaaaaaaaggaagccaccttccccgggggaggggtgggatggggtt

SEQ ID NO: 7148 - DNA, 1345 bp, Zea Mays
ctgggctaggcccacgccgcagcgcccgcggacgaaccaccacgcccacgcgtagcacgagaagggacacgatcgcacacttttcctctgagccgcgacctgtctctgtctctgtctctgtctctgttcttctgccccgactccgcccacgcatctctttctcctcttcccccgcgcggcggccgcgggagtgttcgtgttcctcacttctcccgcttgcgtccccgacactccctcagatccgcggccgtttcccgatccgaggggcattccagccctaaatagcggccggtgagcaggtctccttccgccggcgcggaccacctggagggagtttatcctggagccgtcttcctcctcgcctccttttgcggcgcggcgcggaggccggagtcgcttggaggcccagctgtgtttgggttgatttcttcgtttgtcgcagggcctgtcttctgcctctgcttttgcttcgaagcaatggcgaatgcaagcaagcacttgcaaccttcaagtcaagcaggcaatgacaagaagtatcagggcacgctggttgcttcaccagcaaaggccatttcacctaagtgtgtgaaccgcattgtgccatcgaagcaactgatcttgggtgggggttcaataggccatgtggcatcatttctgatcaaggtcgttgctcttgaggcagtgagaagagtttctaaaacaagatgccctttcatatggaattctgttcaagcattgcagatccttgtgtatcctccatttagctggatccaaagatgggcaccgctcggatttctcgtgcagggaattcagaaactatccatgccactgttgtttctgtcagtcacaacaacagtaagtgagctgtcttccaagcatgatgatgaaccagataacaatacagaacattctgagacaccttccgaaacaaatgaattggcgtcaacttctggcacaagcgatgctgctgatggcacaaaggaaatcgtgcaagagaactggcttgtgttacttttcagggagcttgagaagcaaggcatcactttgcctgagaggtttactgaagatgagttacgcagattttatgttgctgcaaatggcgactttcaaagtttactctcttcggttaagaagacaattcattggagggaaacatttcacatacttacattgcaagaacttgatagatggtctcacttagtcttttggcatgggtttgacacgatgcttcggccttgtttagtagttcgtcttggacttgcatgctctagcatacctcctcatgatagaccccgtttcgggcaagcagtagaagggcagacctggtgcagtgatgagagttgtc

SEQ ID NO: 7149 - DNA, 1981 bp, Zea Mays
gtgaacctctaattcagcttatactaggacatcataattgctcggtttaggcctgaagacaccttttattacttgtttcttttggtggtcatcatgtatttaggtgtattcgcagggcctgtcttctgcctctgcttttgcttcgaagcaatggcgaatgcaagcaagcacttgcaaccttcaagtcaagcaggcaatgacaagaagtatcagggcacgctggttgcttcaccagcaaaggccatttcacctaagtgtgtgaaccgcattgtgccatcgaagcaactgatcttgggtgggggttcaataggccatgtggcatcatttctgatcaaggtcgttgctcttgaggcagtgagaagagtttctaaaacaagatgccctttcatatggaattctgttcaagcattgcagatccttgtgtatcctccatttagctggatccaaagatgggcaccgctcggatttctcgtgcagggaattcagaaactatccatgccactgttgtttctgtcagtcacaacaacagtaagtgagctgtcttccaagcatgatgatgaaccagataacaatacagaacattctgagacaccttccgaaacaaatgaattggcgtcaacttctggcacaagcgatgctgctgatggcacaaaggaaatcgtgcaagagaactggcttgtgttacttttcagggagcttgagaagcaaggcatcactttgcctgagaggtttactgaagatgagttacgcagattttatgttgctgcaaatggcgactttcaaagtttactctcttcggttaagaagacaattcattggagggaaacatttcacatacttacattgcaagaacttgatagatggtctcacttagtcttttggcatgggtttgacacgatgcttcggccttgtttagtagttcgtcttggacttgcatgctctagcatacctcctcatgatagaccccgtttcgggcaagcagtagtttctcaaattgaccatggcgttgtaaatttgatcaatgaagaagattcaaggattaccgttttactggattgccatgggatttcgccattcagatttccaatgcaaatgatgaggtcgttcatcactgtggttcaagaaaactacccgaatcgtcttggggtattgtttgtcatccgtcttcctccagttgtcagagttattgcacagacatttcttcaagtcttgaaaccagctacaaagcagaagttgcgttttgagggagattcgtacaagaaggcattggcggagttcctgcaggctgtgccagcgtttctgggcggtaaatgcagctgcccgcgatgtgagagtcctcgtgatgattcagtgatacaggcaggggaagggagcaagaagcagccccgcttggtcagcgttgatgacgggttacctgtcacagacttggacttcgacttggatgaagagatcccatcaccttatagctgcgagaacgccatcagggctgcgataatcggcctgctgatggtgtgcatcttcgtcgcgtttctggctgggatgatcgaccctgcatccgttccagccagtgcctgagagcttgtggaatagagcatgcacgtacatgtgttgctaattaggatgcagggtgctgtatttcttggcaggcttcttgtatgttgtcgtcagaccgccatagagcgctttctcccagtgtgagcgagcgcatgaataatatatatcctctgtgtcaaatgttggttagcagttcaattcgggcctactagatttcactattttcttttttatcttgatcgggcctactgaatttttgctcctctttctcatcatgatcactttgaacttgaacaaatagagcttatatgagctacgctctggccacggcctgggtggaccgcgtcatagatccgcccctgcctgccagttctgcttcacagtgaatccattaacagtgcgtttggatgttggaatttagactcgg

SEQ ID NO: 7150 - DNA, 2551 bp, Zea Mays
cggcgtaaactaatcacatcgaatggatcacataatagtgaccaatatcataatcctccgtcaacaactgctacgacaaatccagaactgcctgcccggataagccactctccaaggtctctcgaatgcggcctgtctagttgcagctgcctgctgcatacgctgtccaagaattggacgccgtttatccattgtcccagacacagcttaaaaatccctcgcagctagatggcgccaagccaaaatactcgcacggaagccaccacaccagcccacaagccgcaaccgccatcgacatgtcggcagcggaggagcaccggtggcgctcgctggtcttcggcgaggccgtggccgcgcagcgcagcgcgctggtgctcgcgtcgtacccgctgctgctgctcctcgtcgtcctggccgcgttcgtcagggagtacttcggcggatcgatcgagacactcaactgttggccgcagactgcaaggagtacttcaaggccgcgatgcagttcgtcgtcagccctggaaagttcggtgtgctgcggctcgggagggcagggcggctacaacttcaacctgaggctgcccgcagtggaggactgggtgctggactctatcccatatagcgtaaagaaacacgtgcagcaggccatctccagcggcagccggcagcagcaccacctccgcgcgcgcgggccgcaccgagagcaggcgtccaatcggtcgacggtcgtccacgcgcagctacgctacggcttggggtggtgggcgctagaactagaagaatccaaactctcccacccgaaccagtgaatgaactccacagtccatagcagtccggctcgtcactcgctgcactgcagcaggtcgcctgtgcctgtggctgccatgcctgcctggcctacaactacaagagcgagcggacaagcgccagcgccacgggcatgccaagccagttcacgagcccggccaagaacccaagcacggccaagccaaaccgcccttctcctcctggctcctcatgcctcgcttgactcctcgcgccaatttcgggaaacaggccatgccgggagacgggggagcagctggaagcgcgaggtgggtttgcgcggtcctttcggtgttcccgcttctagcggcggcggcccagggaaggtaccgcgcggtgttcagtttcggggactcgctggtggacgccggcaacctggtcacggagggcatcccggactacctcgccaccgcgcgcccgccctacggccagacctacttcggctaccccaccggcaggtgctccgacggccgcctcgtcgtcgatttcatcgcgcaggagttgggcctcccgctgccgccgccgtccaaggccaagaacgccagcttcgcgcagggcgccaacttcgccatcaccggcgccaccgcgctcgacaccgacttcttccggaagcgagggctcggcagcaccgtgtggaactccggctccctccgcacgcaaatccagtggctgcgagacctcaagccatcgctctgcagctccgcgcaaggcacacgatgcaaggagttcttcgccgagtgcctgttcgtcgtaggcgaattcggtgggaacgactacaacgccccgctgttcgccggcaaggacctcagggaggcatacaagctgacgtcccacgtgatccgagccatctccgatggagtcgaacaactgatcgccgagggggcaaaggatttgatcgtgcccggtgtgatgccatcagggtgctttccggtctacctgaccatgtacgctgaccccaaggaagggcatggctcgcgcaccggctgcctcaagcggttcaacactttctcttgggtgcacaatgcgatgctgaagcgcgcgctcgtgaagctccgagcgaagcaccctggcgcgaggatcatctatggcgattacttcacgccaatcatccagttcatactccagcccaagaaattcgggttttacaaacaaccaccaagggcatgttgtggcgcgcctgggaggggtccttacaatttcaacctgacagcgaagtgcggtgagcctggtgcctcggcttgcgctgatcctaagacgcactggagctgggatggtattcacttgacagaagccgcgtatctgcacattgccagaggctggcttcatggaccgttcgcagaccagcctgttgtacaagcatcttgagttgagtacagtacacccagcctctcctccctgctgttcttgcacctctagagtgagtgtgccacaatagcacacaccgtgcgtgacaccaaactggatccgataaggtaaggtagtagtagttccagtgcagtcgggtaaagagctgagataggtctattaattaaagcttgattcctttcattcaggatggtggtataagtacaatgtaatgcacaaaacaattcatatgagtaccagttagaaatcactatggtggttagcttgctccaacttctgtatctaacttttgtatctatttatatattttttatatatataggacatatcatgtacaaccatgtatgtcatgcaatcgaca

SEQ ID NO: 7151 - DNA, 1131 bp, Zea Mays
acggcacggggggcaacacttttggtagtagtagcgcacacacaccactgcacaaagcacgtcactgctcggcttgccttgtcgtcctctcttccttgcaatggctaccgaaatggtcctgctgtgtcgctttgtggccttcgtggcggctctcgcctgcctcctccgccccggcgcgcccgtcgagctccaccgcaagctctccgggtggtccgacgacgccggcgcgacgtggtacggcgcagccaccggcgctgggagcgacggtaagttagacgcacggccggacgctgacggacggacggcgcgcgtgaactttggacccattttttttattccaccggcatgggaaaaaaaagaattcctaacaaatccctccccggggcccggcccgggtacgtgcacgccgttttttttgtttttgttttgttgttgtattgtaggtggtgcatgcgggtaccagaacgccgtcgaccagccgcctttcgcgtccatgatcgccgccggcagcccgtccatcttcctgaacggcaagggctgcggctcctgctaccagggtgccgtgcagctggaacgggatggacatcgcgttcaaggtggacgccggctcgaacgcgaactacttggcggtgctgatcgagtacgagtccggcgacggcgagctcaggtccgtggagctcatgcagcgcgggcgaggcggcgcggcggcgtggacgccgatgcagcagtcgtggggcgcggtgtggaggtacaactccggcgccaccctgcaggggcccttctccgtccgcctcacgtccggctccggcaggacggtcgtcgccagcgacgtcatccccgcggggtggacgcccggcgccacgtaccgctcggtcgtcaacttcagcaactaacgatggcggaataacagaacaggtgtagatgcgcgcgcgcccgcccgccgcccgcctggacggagtggaaggcgtggcgctggcttggtttatgattcgagctgtgcgtgcctataccgtaccgacgcttagtttgtactgttgcgtgcgtgacatgtgcaaatccgcgcagtcaccgtgcgtgtttcgccggagtggcgtgttcgttgaataaataaaggctggattaatggaagcg

SEQ ID NO: 7152 - DNA, 753 bp, Zea Mays
cttaactgtatctatttggattgtagtgatcaaggtttataactcacaagtcacagagaggtctgaaggatgaggaaaggactgcatcctcagatgcaatggatttcatatgtgacgcagagtggtaggctgatcaatatcatgatgaccaaggtgaatcatactggcaaagtgtaccacatgagggccaagcggcaaatggctcaaagcctcggccagattgcgaagttcaaacgtcgatatgagcaggaagcagagaaaagcaaagacaagtaggatggtgttgggaaggaggtgtagcctctgtggtcttagtcagttctgttgactgcgaagttttcagctaaggatcttcgattgaatgattttattttagatcacatcatcttttgctccacttcataattgtgttgtaccccatcttgagcaaacactttggcacttgttgcaccttaaagccccaagaagatagtctatggatcgcctttgctctgacgttcgagttttatggtttatatttctccatgttattatgtttgatgatattgttttacctggtctttgacgacaccaatagtacttgttgtctcgagttgttgtgaatgaccgcagcactattcagctggcacctttgacggtcaagttcattccttatcatacattttctgttgcagacatatttggcgggcgtggccttgacactaagctgtaacaatgtatcaatctgtatattagattagatgttgtgatgtg

SEQ ID NO: 7153 - DNA, 2041 bp, Zea Mays
cggcgcggatccgcatgttgagatcgaccgttacttcgtcttagtgtgttgctgttggggacgtccgtgcccatacgtcccgacgagctctagtttgccgacatcttcactaagggtcttccctccttgctattctcagagtttcgctctagtctcaacatttgctctagctagagttttgattgcgggattgttagattatattgtgttggctgatgtaatgggttttggcccagcccatatactgtcctctcatatatatacaactctccaacctaatcagggttagatttttcaaccattctaacatatactttaagtgctattttacctagcttaagattagtcttgttaggcttataaacctaaaccatgaccaaattcattttgattttgtgggggtgacatatttacaaaaaatgtatttttagatttcaacggtagcatctgtgtgcaatgttgaatggataagttctaaccacaagtcttagcttggaaaaataatgtcgtctttcaatcaggtactttcgtcactgctgtatttttgtcaccaagtgttcatattttaccgtatgtgtcatcataggtagacagttcttttaccaaggaaggaaaactgctacttcagagcttcaaacacgggcacagtatttctttagtttgaaagagatcgaatctgcaacaaaacattttgatcctgcaaataaaataggtgagggtggctttggacctgtttacaagggcacactagcaaatggtactatagttgcagttaaaaagctatcttcaaagtcgagccaaggaaatcgcgagtttttaaatgagataggaataatatctgctctaaggcatccgaatcttgtgaggctatttggttgctgtattgatggggatcagcttcttcttatatatgaattcttggaaaataatagtcttggccgtgcgctttttggccgcacagaacatcagttaaaattggattggccaacaaggtacaatatctgccttggaactgcaaaaggcctggtctatctgcatgaagagtctgcactaaaaatcgtccacagagatattaagccatcaaatattcttcttgatggaaagatgcgacctaaaatatcagattttggcttggctaaactgaatgatgactgtggacgtgtgagcactcggatcgctggaactgtgctgaaagattgaagcagcaagggaagctgctggaaatggtggaccggcgtctcggttctgactactcccaagaacaggcactgaggctgctggatgtagctctcctctgtacaagcatacaaccaacccagcggccaagaatgtcttcagtggtgaagatgctttgtggtgagatccccgtcgagattgtacctgctgacgatgatctaagtgaagatctacgactcaacatcgctcaatcccggcaatcaatagataacagccaaacaaattggtcccagtactcagtaaataacagccaaacaaattggtctgaaacgctttcaagcgatcgttcggtcttgccccacagcagcaaggacagtggctacctcccatcttcgagctccctttctgtcaagctgtgaacttcagcatcgagaatagctagccaggtgtcggcttttttttggggcccgttgctgcagttgtacataggcaaatgttgggtttcatgcttgcaatgcaagtatttgatgtctcatctcgattgtcaagtgtcattcaagaatatcgtccacgacacatggcaattgatcacagtactgtctcaacgtcagccatatttcggctagctccttagtttgttgctttggatgtagaaagttataatgacttataatttggaacagatggagatgtagtatatcattaggacagtgcacttgagaaatgtaggccagaaatattgtttcatatatgcagatcttggagacagtgcaatactttatttcggtcttctttctattgtttacaagcgcagttgtgtgcatgcagtactgctcatgttccacctttttgtatactgtcccta

SEQ ID NO: 7154 - DNA, 2163 bp, Zea Mays
cggcgcggatccgcatgttgagatcgaccgttacttcgtcttagtgtgttgctgttggggacgtccgtgcccatacgtcccgacgagctctagtttgccgacatcttcactaagggtcttccctccttgctattctcagagtttcgctctagtctcaacatttgctctagctagagttttgattgcgggattgttagattatattgtgttggctgatgtaatgggttttggcccagcccatatactgtcctctcatatatatacaactctccaacctaatcagggttagatttttcaaccattctaacatatactttaagtgctattttacctagcttaagattagtcttgttaggcttataaacctaaaccatgaccaaattcattttgattttgtgggggtgacatatttacaaaaaatgtatttttagatttcaacggtagcatctgtgtgcaatgttgaatggataagttctaaccacaagtcttagcttggaaaaataatgtcgtctttcaatcaggtactttcgtcactgctgtatttttgtcaccaagtgttcatattttaccgtatgtgtcatcataggtagacagttcttttaccaaggaaggaaaactgctacttcagagcttcaaacacgggcacagtatttctttagtttgaaagagatcgaatctgcaacaaaacattttgatcctgcaaataaaatagggcacactagcaaatggtactatagttgcagttaaaaagctatcttcaaagtcgagccaaggaaatcgcgagtttttaaatgagataggaataatatctgctctaaggcatccgaatcttgtgaggctatttggttgctgtattgatggggatcagcttcttcttatatatgaattcttggaaaataatagtcttggccgtgcgctttttggccgcacagaacatcagttaaaattggattggccaacaaggtacaatatctgccttggaactgcaaaaggcctggtctatctgcatgaagagtctgcactaaaaatcgtccacagagatattaagccatcaaatattcttcttgatggaaagatgcgacctaaaatatcagattttggcttggctaaactgaatgatgactgtggacgtgtgagcactcggatcgctggaactgttggttatatggcccctgaatatgccacaagaggttgcttaacacgtaaagcggacatctatagttatggagtggtggctcttgaggttgttagtggaatgagcaatacgaatagcatgtcaaatgaagaatatctgcatcttcttgattgggctgaaagattgaagcagcaagggaagctgctggaaatggtggaccggcgtctcggttctgactactcccaagaacaggcactgaggctgctggatgtagctctcctctgtacaagcatacaaccaacccagcggccaagaatgtcttcagtggtgaagatgctttgtggtgagatccccgtcgagattgtacctgctgacgatgatctaagtgaagatctacgactcaacatcgctcaatcccggcaatcaatagataacagccaaacaaattggtcccagtactcagtaaataacagccaaacaaattggtctgaaacgctttcaagcgatcgttcggtcttgccccacagcagcaaggacagtggctacctcccatcttcgagctccctttctgtcaagctgtgaacttcagcatcgagaatagctagccaggtgtcggcttttttttggggcccgttgctgcagttgtacataggcaaatgttgggtttcatgcttgcaatgcaagtatttgatgtctcatctcgattgtcaagtgtcattcaagaatatcgtccacgacacatggcaattgatcacagtactgtctcaacgtcagccatatttcggctagctccttagtttgttgctttggatgtagaaagttataatgacttataatttggaacagatggagatgtagtatatcattaggacagtgcacttgagaaatgtaggccagaaatattgtttcatatatgcagatcttggagacagtgcaatactttatttcggtcttctttctattgtttacaagcgcagttgtgtgcatgcagtactgctcatgttccacctttttgtatactgtcccta

SEQ ID NO: 7155 - DNA, 1991 bp, Zea Mays
agcagcccctccaaaaaatctcaaacaactcttcagcacgggaaaacccgtacacaccacagcaccgtcgccaatgtccgccgccgcagccgactggcttccgtcagcgtccgtgacggcatccggccgcccggtgctttccgcgggcgaggtggagcggaatctcctcccgctcgtcgacctcgagcccgaggaaaatccgcgccttgctcccctccgcgcctgcctcctcgcgctgacttcccaccgcctcatcttcctccacgagccctcccgctccgcgcgcggcctgccgctcgccaccgtcgtccatgcgtaccctccccaccgcaggcacagccacaaccccctccgctccctcttctccgccccgtcctcatcttcctcgtctcagcatcaccgcatccgcctccagatctccatgccacccgtgcgatcagaggtcatcgccatcgtcgtgacctgcaaggctgacgttgatgtgttcttcgggaggctgctcgaggcgatccgtgcaagggcttgggaggtgacccctgcagctgctccgtcgagtggcacgtcggtggcagagggggccgcgcctacggaggacatcgcgatacggatgccggttgttggggtctcggggatactgcggatggagcaggagtcatgggagaacgccgggcagaacttgcaagatgcgttccaggatctcaatgccctcatgagcaaagctaaggaaatgatgcagttagcagaaaaaatgaggctcaagctattaatgaactcatccactgaatcaaattccaatgatgaagagatgggttctaagcaagacatgcaggatttgctgttgagtgttggcattgtgtctcctgtgacgaaagaaactgctggtgcgttgtatcatcagcagttgtcactacagctggcggactttgtaagaataccacttgagaaagcaggtggtatgatggcactagtcgatgtttattgtctcttcaaccgtgctaggggaacagagttgatctcaccagaggaccttttgcaagcttgttccctgtgggagaaagttgatgtatgttgatttctaatgagcagcccagtcatgctcaggaaatttgatagtggagtgaaggtgatccagaccaaaacacatagtgatgaagaggtatttgcaagaatctcatcacttgcacagaagccagatgctcttcagaaagggattagcccaagtgatgctgcattcacactgggaattgctccagctttagcaaaggagcatcttctaaatgcagaaaacaaaggcctgttgtgcagagatgttagtccagatggattccgcttttttagcaatttatttaatgacattgatccccaaaatattcactcgcaaaaaccccatgggatgtacaaggcgtggatctccgttgcgatggcgtctcactgaaaaagttcgactgggatatattgagatactggttgatcaagctggacatcgatgcaattatagtgtactctttgaaaacgtccgatcaagccagtcattggtgcgatcacaatgtatcctttgaaaacgttagtctgcatatctcgccattatgtaccataacaccaaaagatgtgatatagcaattagcaagcccatttgttctgttgaatgaagagcgtttgagtacgatgtatgaggattcgggctacattggtaaccgtattagcatgcgaccagattaacttttctgtactgactccatccaaaaataatgcaactctggtatagtcctaagctgtactacctcaattttcatcaaaattataagacgagttatgatactaaaaagtactgctagatatatatatttttgataaatataatttaacaatgggtctctgtcctttggagatgctcacaagaataaggataagatgtgtgtgtgtgtgttcataggtgtaaatgtatggacatgtatgagcatctatgttggagtgtgatttcaaaataaaaa

SEQ ID NO: 7156 - DNA, 1658 bp, Zea Mays
gctgcttcttctccacttctccttccttcccctataaagcaaggaatagtcgcagcttgccccagcttcgcaagctttcctgctaatccctgccattagtagcaagcaagcaagaaagcagtggtagtaggtgccacccacacggttttcacggctgccggctgggagcgaccgaggagatcgtcgtcacgctcgatggaggccctggtggggaggtactggggtctggggggacggcggtgcggggcgtgcggcggatcgccggcggcggcgcactgccggacgtgcccgggcggcgcgtacctgtgcggggggtgcgacgcggggcacgcgcgggcggggcacgagcgggtgtgggtctgcgaggtgtgcgagtgcgcgccggccgccgtgacgtgccgcgccgacgccgccgcgctctgcgccgcgtgcgacgccgacatccacgacgccaacccgctggcgcgccgccacgagcgcgtccccgtgcagcccatcggcgccgccgctgatcccgccgcggagaaggcggcgctgctgttcggccttgccgcggaagggaaggacggcggcgacgcggccaaggtcgtcgtcgacgccagtaagctggacctcctgttcgcggacgacgtggtcgacccgttcctcgcccaagacttcgccaggttcccgcacgccgacagcgtcgtgccgaacgatggatccaactgcggcgccgctgtggacttcgactttggtggcggcgtcgccgtcgccgccaagcagccgtcctacagctcctacacggcggcgtcgctgggccacagcgctcgtcgtcggaggtcggcctggtcccagacgtgatgtgcggccgcggtgggagcgtgaccggcggcgtcatcgagctcgacttcgcgcagtccaaggcggcgtacctgccttacgctgcaactcctacccacagcctgtcgtctttggacgtgggcgccgtgccggagcgcagtgacggggtcatggcgggcaggctcgcgacgccgacgccggcgacggccacggagagcagggaggcgcggctgatgcgttaccgcgagaaacggaaaaaccggcggttcgagaagacgatccgctatgcgtcccggaaggcctacgcggagtcgcggccgcgcatcaagggccgcttcgccaagcgcgcggatgacaacgacgccgacgccgacctcgacgaggctgccgcgccggctccgccggcgcggtcgcagccgcagccgcagccgcagccatcgtaccgctacgtgctcgacttcgccgccggctacggcgtcgtgcccacattctgatgacgcgtgccgtgtgagtgttgccgcgcgcgtcgcgtgccccatgttttcacggattgggccggcgcgcgtgcgagccatgctgcatgcgcgcctacgtgtttgctggagcggcgagctcctagttggcgatcacatgccgttttgggctagccatggttaaattagcaggctagcgtgtactgctgctgcgtttgtttgctggggcgaccagttctactaatagtacgtagtaccgtgtaattttgggtcaggaagagatgcttagcatctgtttcgattgatcgatgtagtattatgctataattggaaaggcctctcgatctatttgcaaaaaaataa

SEQ ID NO: 7157 - DNA, 2694 bp, Zea Mays
gtcgtctcacacctgcccgacgatgcagccgcctgatgcacacgcggcctccactctccgcgcggccttctctcgagtctcgacacaaccttctcactttctcagtagccgctgcgcaccgcactcgcacgccaccctgccgccctgccttgcccaaccctgccgcagtgccgcatccaaatccaactcccacggggtatggatcctgatcaggtcgccgacgccggggtccagcacgacgacctcggcggcagcgccacatccgcaaacgggtgctttgacggtggcagtgacgacggctgggggcgcgcgttgctccggctgggatgggacctgtccaggaaggccgtcatcgctggcgtggcggccacggccgcgcccgtcgtggccccgccactgcttgtcctgtccctcgccggcctcgcgctgtccttgcccttcgccgcctacctggccagcctcgccgccaccgaccgtcttatgggcgcgctcctgccggcgcctcgtactacccagccgtactgcggctgcgacctcgaagacgatgaattcttggatccatctgaagcgccgggcgccgaggccactgcactcgaccactggcgcgacacggaggacgacgccatcatggaggaaaacgagagctttgtgccgttgccgctgtcacgacaacctcgattctccgaagagccgataacatcatcgtcgacagacgtggaggataagatggctgaaggtgagtctctttcccgaggattgggccacgagtcactagtgttggacaataaggaaggcacaatcatggaggacaccgagtacattaccatggaggcaccgccgagaggctccgatgttttcggatcagcagtgcctgtgttgcgtggtgaagacgatatggttcagagagcggtagaagctcctcttacagccaaggaatcagtccaagaattatctgtatcagacagtgaggatagaacacaggacgacaagtgcaaagatgcggagtcttccaaggagattctgtcactgagcgtcgacatcactgaatcaagtgacttcccggtgccgggcaatgaaggtattgtggttcagaggggaaatggtgaaacaatttctgtccgaaaatcaggccaagattctcattcaacagagattggggatgaaatggagggccacaaaaccgaagaagagataccactgcacgacgctaatgtttcagaatcgtcggtgctggatgatacagtgctggaggagaggaagatagaaggtgatgtaacagtggggatggccgtgaaagaagtgaccatttacacggatccttgtacaggggaggtggctggtgatcaagtagattccattgccattgccctacctgctgaaagcgagttgatgcaagccagcaatgttgacgatgttatcaacgctgctttaacagaaggcattgtgctggatattggtgatactagtacagagggcacggagcactacggtgagggaggtgtttctactgccgtctcggtggtgaccgtggacgatgttgcagagacagtttccagtaggagtccagcagtctcagtcatcggcgatgacatgactagtgtcaagagtaggccagatgctgacagctccgatcaaacaactggctacgacgcgctaaggagcaaggaatttcgggagaaagagtgtgtgaaaacagaggagagcaaaaccgtgcctacagagagcacgtcaccaccacggatcattcaagtttctagatcgccagcgccagacggtcagagcagggtagaagacgaagcagccgtggggtcggtgctggaaggagcggcgaataacaccgacgatcttgccacaccacgcgcggtggtggttgctttgcaatcgagcatttctgctggtgaaagcgagccgccgtcggcgagtgaccgtgttgagtacaagccggcgaacgaaggatttaggaggaatgcgatagctgaggacacggacaactacacggaggaacagatgagggagcagcttgatgccctaagaacaataaccgggtaccgtcccacgccgtctttgactctggaagccgagctcgtgggtctctatgtattcgtgggcgtggaaccccctgtcggctccggctccagggaagactccgacctgagtgatctcagcgcaaaactcaggctcctgaaatcgatcataggcgtggagtaaagatctgaagcgggaactgatttaccaggagttctgtgcttgtgtataatgcataaggttcagcggtccagggttcatcccgcacgtgagctttgttacgctctgctggttttaatctcaaaatccatccatgtggactagagtggattgaggatgtttaaattcctagcaactcaaaaatctctcctgctccctctcaatcccctttgaccttcatggtgggacgacaggtagctgtgaactacgtatcctactctatatttttgtgtggaaaagacgttaacgaacgtgctgtatatggcctacttcgcactagtgatgcgaacaagggatggccatttgtgatccgtcactaaatttctcggcttttctttgtgcttcaaaagtcctactaaacgagcgcccacagggatggtttctgaaaacaaaagctagaaatgatgaagctgaagtcatttttagccagcgtcgctaaatggccagttg

SEQ ID NO: 7158 - DNA, 2111 bp, Zea Mays
cctccctcccacccgctctccctttccatgcttccccaccaccacctgggtcgccgaaacgctgcagccgcgaagagatagggagaagaagaaaaaaaactcgcttgctgttcccgtgtctgctccgttgaggcctgcgttgttaattcgtgcggcgcttctcgtccggcggcggagagagcgtgctcttgctctgttggtgtgccgcttacttgctccaggaattggccttcgctgcatataaaaagaataagctggctccaagataatggcatctcttactccaggaatactattaaaggttctaaaacatattaactctgatgtcaaagtatgtggagaataccggtccattcttctccaagttattagcatagtccctgcaataactggttcagaactttggccggaccatgggttctttatcaaagtttcagattcttcacactcaacttatgtttccttgtctaaggaggacaatgaactcatcttatcaaacaaactacaacttggacagtttatatatgttgagaaggtccagtcaagtatacctgttccggttcttgttggggtccgcccagttccaggaaggaacccttgcattggaaacccaaaggatttgatgcaaatgtcaactccctctggagttatggaagcactggatcatcaacggacaacttccaagtcagctgatctgtctgaaagtgaaaaggaaaatttgcagagaaaggtagttatcaaagagcagaagacagttgtcgcttcccgttacatgcttggggtgtcaagcaacaacgggaaaattaccaacctcaactccagcattgatagtgaaaaaagtaatggaggaagtaccatatctgaatcaaataaaaaatctgttgccctgaaagtcagacaagaggcaaaacctcagtcaagaagcaaatgccaaaggagagcaaaaaggaagttgctactgagagaagatcaccaccaaagcttcataggagttcgccaacaccagcgaggacttcaccaacaaagctcagtccagcagcaaagcagaatggaaactctggtccagtttcttctgtatctactgttaaaaaaagagttagtgaaactatctcttgggactccctcccaacaagcctaatcaattcaggaaaggctgttgtccggaggaagaacattgctcttattgtagcggctgaggctcaaagggaggctgctgcagctgcgtatcttgtaaaaggccttggaattttttctgagataagggaatcttctgaagtagatccacaagctgcaatcaccaagtttttcgagctgcacaggcttatcgttcagcaaagtgctgtctggaaagcttacactcctgagcctagcaaagaatctcgaccggagaaggaaaaaccgtcgaggaaagcttctgcatctcatcatcaccagaacaaagctggcacacgcgacacagctaagaatcccgaaggtgcccagggcagtgagaagacggaatgggcccgggaggacggtttcaaggagatctgcaggtcatggattgttctgaggaaagaatcgcggtcgtggtttctgagcttcctggaggatgcacttgaatcaggattcatgtccgagggccaaaccaccaagaacacgagagaacgcgtgcggggacaacccaaacccaagggtggggacgggaggatcgcggtcctgctgtcgcagctcaaggagacgagcaactggctcgatcagctgctgcaggacgaggcggacacttccgcggacggtttggccgaaaccgttgaccagctgaagcagaaggtgtacaaatgcttgcttggaacggtcgaaaccgcggcgtcggcactcggaggaagataaaaaaattgatgtaatggtgacgaagacgagcattaagttattgggtgttcagtcctgcaacaggatgttggggtgaagaacacaatgaggggaagatgtaaatagtcgggttgctcatttttaagttataaactaatttatttttattttttgggaggtgggggtgggggaatttcctggtgttgcgtgtgaaatggcaattgattttcttgggtattcgaattgttacaaatgatcttgcg

SEQ ID NO: 7159 - DNA, 2190 bp, Zea Mays
actgggaggcacagctcgtcgtgttctgctgcctaagccggtaggccccgccctgggctgcgtcagtgcgactgcgaacgccactattggccttggttcggctcggccgcggcccgcggggccggcgtgccagggggcggttagcggcggttgggcgcactgcagccgcgggctcgttttttatggcaccgccgcccgcctaggggacgggggagagagaccaaccgccgcttgggctcttccgcctccagtcctccaccacggcaccacgtcgtcttacctcgcttcggcgccgcctccttctccatctccacccaaaagaaaaagaataagctggctccaagataatggcatctcttactccaggaatactattaaaggttctaaaacatattaactctgatgtcaaagtatgtggagaataccggtccattcttctccaagttattagcatagtccctgcaataactggttcagaactttggccggaccatgggttctttatcaaagtttcagattcttcacactcaacttatgtttccttgtctaaggaggacaatgaactcatcttatcaaacaaactacaacttggacagtttatatatgttgagaaggtccagtcaagtatacctgttccggttcttgttggggtccgcccagttccaggaaggaacccttgcattggaaacccaaaggatttgatgcaaatgtcaactccctctggagttatggaagcactggatcatcaacggacaacttccaagtcagctgatctgtctgaaagtgaaaaggaaaatttgcagagaaaggtagttatcaaagagcagaagacagttgtcgcttcccgttacatgcttggggtgtcaagcaacaacgggaaaattaccaacctcaactccagcattgatagtgaaaaaagtaatggaggaagtaccatatctgaatcaaataaaaaatctgttgccctgaaagtcagacaagaggcaaaacctcagtcaagaagcaaatgccaaaggagagcaaaaaggaagttgctactgagagaagatcaccaccaaagcttcataggagttcgccaacaccagcgaggacttcaccaacaaagctcagtccagcagcaaagcagaatggaaactctggtccagtttcttctgtatctactgttaaaaaaagagttagtgaaactatctcttgggactccctcccaacaagcctaatcaattcaggaaaggctgttgtccggaggaagaacattgctcttattgtagcggctgaggctcaaagggaggctgctgcagctgcgtatcttgtaaaaggccttggaattttttctgagataagggaatcttctgaagtagatccacaagctgcaatcaccaagtttttcgagctgcacaggcttatcgttcagcaaagtgctgtctggaaagcttacactcctgagcctagcaaagaatctcgaccggagaaggaaaaaccgtcgaggaaagcttctgcatctcatcatcaccagaacaaagctggcacacgcgacacagctaagaatcccgaaggtgcccagggcagtgagaagacggaatgggcccgggaggacggtttcaaggagatctgcaggtcatggattgttctgaggaaagaatcgcggtcgtggtttctgagcttcctggaggatgcacttgaatcaggattcatgtccgagggccaaaccaccaagaacacgagagaacgcgtgcggggacaacccaaacccaagggtggggacgggaggatcgcggtcctgctgtcgcagctcaaggagacgagcaactggctcgatcagctgctgcaggacgaggcggacacttccgcggacggtttggccgaaaccgttgaccagctgaagcagaaggtgtacaaatgcttgcttggaacggtcgaaaccgcggcgtcggcactcggaggaagataaaaaaattgatgtaatggtgacgaagacgagcattaagttattgggtgttcagtcctgcaacaggatgttggggtgaagaacacaatgaggggaagatgtaaatagtcgggttgctcatttttaagttataaactaatttatttttattttttgggaggtgggggtgggggaatttcctggtgttgcgtgtgaaatggcaattgattttcttgggtattcgaattgttacaaatgatcttgcg

SEQ ID NO: 7160 - DNA, 1817 bp, Zea Mays
ctccccttctcgccaaaggggaagccctgcccgtacttccgttgcggcgctacgagcttcgacgggcctcgatctccacctctgaagtgactacttgtgatctagatctgaagctgtagtggtcagcagcttagtgtgaatcgaagatgagcgtggtggggttcgacctcggcaatgagagctgtatcgtggcggttgcgcggcagcgtggcatcgacgtggttctcaacgaggagtccaagcgcgagacacccgccatcgtttgcttcggggacaagcagcggttcatcggcaccgccggcgccgcgtcctccaccatgaaccccaaaaactccatctctcagattaagcgcctgctcggccgcaagttctcagatcccgagctgcagcgcgatctcgcctccttcccattccgagtcacggagggccccgatggttttcccctggtccatgtacggtacctgggcgaggagcggacgttcacctccacccagctgcttgccatggtgctgtccaatttgaagggcattgctgagggtaacctgaatgccgcagttgttgattgttgcattggtatcccggtctacttcacagatctgcagcgcagggctgttcttgatgctgctactattgcgggtctccggccattgcgattgttccatgagacgacagccactgctctggcatatggtatttataagactgatctcccagagaatgaccagttgaatgttgcatttgtcgatatcggtcatgcaagcatgcaggttagtgttgtcggttacaggaagggacagctcaagatgttgtcccatacatacgaccggtctcttggtgggagggacttcgatgaggccctgtttaagcactttgcagctaaatttaaagaggaatataagattgatgtgtaccagaatgcgcgggcatgtattaggttgcgtgtggcatgtgagaaacttaagaaggtgctgagtgccaacccagaggccccactgaacattgagtgcttgatggatgaaaaggatgtgcggggttttatcaagagggaggagtttgaacagatcagtgcctctgtgctggaacgcgtgaaagggccactggagaaggccttggctgaagctgggttgactactgaaaatgtgcactttgttgaggttgtcggatctggttctcgtgttccggctataatcaagataattactgatttttttgggaaggaaccaagacgtaccatgaatgcaagcgagtgtgttgcgcgaggatgcgctcttcaatgtgctattctcagccccactttcaaagtgcgagaattccaggtcaatgatgggtttcctttctcaattgcattgtcatggaatggagactcccagaatgcaccccaacaaacccttgtattccaaaaggggaatgcaattcctagcactaaagctcttaccatctttaaatccagcacatttgaagttgatgttttgtatgtcgacccagataactcacaaattccacaaaaaataagcacttacacaattggccctttccaaacctccaacggagagaaggccaaactgaaagtgaaagtgcgtctcaacatccatgggaccgttacagttgattcgatgctggaggaggatgtggaagttccagtctcatctgcaaatgaagctccaaacgatactatgaagatggacacagatgatgtgccaagtgatcctgctgctggatctgatgtgactatgcaggagcagcctcctgcagctggaaatggagcacaagataatgaggaaaagtctgtttcgatggaaactgatgcaaaggtatgg

SEQ ID NO: 7161 - DNA, 1216 bp, Zea Mays
cagggccgtacgagctcaccacgaggtggaccatggtgatgaagtttatgctccttccctggaagccggagctggtcttcactggcctgtcgatcatgggcgtcaacccgaagaatctcaagttcaacagccatgtggatctttgggattcgatacaaaacaacgagtacttctcttctgaaggactatgggatgttttcaaacagctacggatttacaagacccctgacatagaaacaccaaattaccttattctaaagaggactgcacattatgaggttaggagttatgcgccattcttagtggttgaagcaaaaggtgataaactgacaggatcgtcgggcttcaacaatgtaaccggatgtatccatccagatagttctgccaatgaacaaagacttggacagtttaccagctccaaatacagcagttactttgcggaaggtagaaggaggcattgctgcagtgaaaaaattcagtggacgaccaaaagaagaaattgtgctccagaaggagaaggatctgcgctcccagttacttaacgatggattgaagcctcatccaggctgtttgcttgcacgttacaatgatcccaggacaaagagcttcttaatgaggaacgaggtgcttatacggctaattgacttcacactggagttgtaatcgtcaatactggcatcagatcgatgtaacacactgggcttggagcttccagtgagtcattagaaaggaggctatggcaccggtcctgtcctttttttacctgcacataagtcatgtaaagctacttatcatttttcttcaaaacaatctttacatgttaaatttagagcactatcattctttctgctacactttcagccatttttctttaaaacaacatttacatgttaaatttagagcactgtatcattcttgctgctacactttcggtcatttttctgtaaaacaatatttacatgttaaatttagagcactatatctatcattcttgctgctacacttttagtccgtctgagctgcatttggttttttggtttctctgcaggagaaatgttgtagatgtcagatttgctttatgtaaatgtaaactctaaaaggtaataagctacatgctaaaacgacaggtcattttgattcgtttatcgaccaaaaatattgattaaaatataggaaaacattaaaatgaaaatacatgagaagtgcccttttactt

SEQ ID NO: 7162 - DNA, 1485 bp, Zea Mays
tctatatagtaaaacgcgaagagagagatacttctgcggaaacgaatggcagcagcaatggccaacaccacatgcctccgctcccgcctcctcgtcctcccaccgccaccggcgccccgcaccgtcgtgtcctttcgtctccgcccatgcgctactacgatctcctcgtcctcccgaaagaggagaccccgtctcgcggcacgggcggcgccgcccggcggcgctgtggccccggcgtcggccgcgtcgaaggaggatgaccagggggagatgggcagcggcgggggcctctctgcggatgatgcagagaggctgtgtcagtttctgcgggccgacctgccgcacctgttcgacgacgtcggcatcgaccggtccgcgtacgatgaccgcgtgcggttccgcgaccctatcacccgccacgacaccatcgacggctacctcttcaacatccgcctcctcaagctcctcttccgccccgacttctacctccacgccgtcaagcagggccgtacgagctcaccacgaggtggaccatggtgatgaagtttatgctccttccctggaagccggagctggtcttcactggcctgtcgatcatgggcgtcaacccgaagaatctcaagttcaacagccatgtggatctttgggattcgatacaaaacaacgagtacttctcttctgaaggactatgggatgttttcaaacagctacggatttacaagacccctgacatagaaacaccaaattaccttattctaaagaggactgcacattatgaggttaggagttatgcgccattcttagtggttgaagcaaaaggtgataaactgacaggatcgtcgggcttcaacaatgtaaccggatatatatttggcaataatgcttcatctgaaaagattccgatgactacacctgtcttcactcaagcttctgacaacacactttcagatgtatccatccagatagttctgccaatgaacaaagacttggacagtttaccagctccaaatacagcagttactttgcggaaggtagaaggaggcattgctgcagtgaaaaaattcagtggacgaccaaaagaagaaattgtgctccagaaggagaaggatctgcgctcccagttacttaacgatggattgaagcctcatccaggctgtttgcttgcacgttacaatgatcccaggacaaagagcttcttaatgaggaacgaggtgcttatacggctaattgacttcacactggagttgtaatcgtcaatactggcatcagatcgatgtaacacactgggcttggagcttccagtgagtcattagaaaggagaaatgttgtagatgtcagatttgctttatgtaaatgtaaactctaaaaggtaataagctacatgctaaaacgacaggtcattttgattcgtttatcgaccaaaaatattgattaaaatataggaaaacattaaaatgaaaatacatgagaagtgcccttttactt

SEQ ID NO: 7163 - DNA, 3377 bp, Zea Mays
gtcccctccgtcccctcttgccgcaacagatcgccaaccccgacctcacgtcctcaccccacgccaatggcggccgctctggcgagccgcgtggagagttgggtgcgggaccaggcggcgcggctgcagccctgggcggcggcgctgccgcaggcgccgcggtggccctggcccccgccgcggcccgcctggccgtggcccggggaccgcagacgccagcgggaacgcatgttccgggaggagtacgaacgtcgtagcagacagctccgcgagctctgccgcgctgtccgcgtcgacaccgtagccgagctccaggagttgctctgcgccatggtactcgccgagtgcgtctacaagagacctgtttctgagatgatgagatatatcaacaagtttaagtctgattttggtggaaatgttgtgtccctggagcgtgttcaaccatccttggatcatgtaccacatcggtatctgttagcagaggctggtgacaccctatttgctacatttattggcacaaagcagtacaaagatattattgctgatgtgaacatattccaagggaccttatttcatgaagatactgctcatgatttagctcctgatgttgaccctgaacaaaatgatacccaaaagggtgaggaaagccatgggaaatcttaccgagaaacatcaaagaagctaagaaaaccaaaacctgcagtgcaccgaggtttcttggctcgtgctaatggaattccagcactggacctatacaatcttgcacagaaaagaaacaggaaacttgttctttgtggacactcacttggttgctgcattggctactcttgcaattttgagagttattgctaccacttcatctgaagaggataacaggcttcatgtgaagtgcatcaccttctctcagccacctgttgggaatgctgctttaagagattatgttcacaaaagaggatggcaggactacttcaaatcctattgtattccagaagacttggtaccacgcattctatctccagcttattttcaccactacaatgcccagacacctgaagcatcttttacaaataaaactgatgtgaaatctgaagaagttatggaggcaagtggggaaaggcccagaggaaacaacagggaacacctcgttctcggtgttggtccagtgcaaaagtcattttggaggctttcaaaacttgttcccttggaaggggtgcggaaaagcttaagtgcaattcaaaaacaaacaaatgtttttgggaaggcaccatcacaattggatagctatttgcaatcaaaggttgatgaatcagaagaaccacctcaatctcttgagattcaagaaagttcacaaggaattgctcttacccctttatcggataaagatggagggaacactgaagataataataggactgagaaaataaatgcatctgaagcaggggggtctaaacgctggagcagggtaccttctttgccttcatatgtgccatttggtgagctttacctattgggagattcatcagtcaatacactttcagattcagaatactccaagatgacgtcggcatgtgcaggtgcagtctgttatatcggagttaagagagcgtttgcagtcgcactcaatgaagtcctatagggctagatttcaaaaaatatatgattcatgcatgtgtgcaaatgctcccatttttactggcattgagcaattgccacaattttcacatctacaagaattaattggtctaacagctactgattctgttgaacttggagatatcgtggaccctcctgttatccgaactgctacttctatccttcctcttggatggactggactccctggtggtaaaaatgctgagccactgaaagttgatataattgggcatgacctacaaatgtgcactcttttccaggcacaaataaatggaaactggtattccacagtaatagagactctaccatcagctacttcatactcaccaaatggagaactgcaacccacattacagaaaatgcggattcttgttggacaaccactaaagcagcctccaaattacattagtggggatttcatgattcctgtgatggcaggtgctgattcaacacccgactttggatttgaatcattttttgaagataaagattgctgcaagggtttgagtggatttctaatatatgggacaagtgattttgtaactgtacgtaaagaggtccacgttaggactcggagagtgcgattgcttggattagagggggctggcaaaacatccctgcttaaagcaatgttaggacaagttaaagaaagaaatagcactgttcttgaatgcatacatgtcgatttgcatggcaagggaatatcaaatggattgtgctacatagattcgacaacggtaaacttgcaggagctacctttggaggttgggcggttcaaagaagaactgttgttaggactccatgatatcagcaggaagactgaccttgttattgcggtgcataacctagcacaccgaattccacagtatcaacggtccaatacttctcagcctcagcctgctctttcacttctcttggatgaagctaaggcgctaagcattccttggattcttgcaataaccaacaaattctctgttagtgcgcatgagcagaacagattgatcagctcagctatggaagcatatcaagtttctcctgagatgacaaaagttgttaactcttccccatttctgatgccaagtgctagaaacagtttgcagcagatcagatcagctactgggaagttgaagaaggatccagcaaatagatctggttatcttcctgtaaactttggattgtcatcatttcagaggaaggacattgttatgcatgtggagggtgttagttcccttcgtcaacttgtacatcaagtagtcctcaacaatgaagaaacagcatttgaggaacttgctcgtgagagattgttgaaggagctagcgtcagagaaagcagcgtccctgcaagtgaagcagaagccccggaaaagagatggctctgttacagctgctgctgtaggtgcatctctgggcgcgggcctgggaattgtaatggctgtgataatgggggcagcatcagcccttcgaaagccgtgattcatgtattcttttgatccattatttacttcttgatttaaggatgtctgaacaaaagcactagtgtaggcatgaaaaatgaaattttagggcagaatagttagctgataccgtagtgccacattttggctgtgtatagaatgtaggttgagccttttttttgctgatctgaattttgttgtgttactggagtatggcttggatatgttctacatcatgttttaatttagttataaatctgtatcatgtcta

SEQ ID NO: 7164 - DNA, 3392 bp, Zea Mays
cttcccctccgtcctccgtcccctccgtcccctcttgccgcaacagatcgccaaccccgacctcacgtcctcaccccacgccaatggcggccgctctggcgagccgcgtggagagttgggtgcgggaccaggcggcgcggctgcagccctgggcggcggcgctgccgcaggcgccgcggtggccctggcccccgccgcggcccgcctggccgtggcccggggaccgcagacgccagcgggaacgcatgttccgggaggagtacgaacgtcgtagcagacagctccgcgagctctgccgcgctgtccgcgtcgacaccgtagccgagctccaggagttgctctgcgccatggtactcgccgagtgcgtctacaagagacctgtttctgagatgatgagatatatcaacaagtttaagtctgattttggtggaaatgttgtgtccctggagcgtgttcaaccatccttggatcatgtaccacatcggtaaccaaaaagctaaagcccacttagaggtatctgttagcagaggctggtgacaccctatttgctacatttattggcacaaagcagtacaaagatattattgctgatgtgaacatattccaagggaccttatttcatgaagatactgctcatgatttagctcctgatgttgaccctgaacaaaatgatacccaaaagggtgaggaaagccatgggaaatcttaccgagaaacatcaaagaagctaagaaaaccaaaacctgcagtgcaccgaggtttcttggctcgtgctaatggaattccagcactggacctatacaatcttgcacagaaaagaaacaggaaacttgttctttgtggacactcacttggtggggcggtaggtacccgtagataatatacattatctcattatttgctcatacatcttcaatacaactgcaggttgctgcattggctactcttgcaattttgagagttattgctaccacttcatctgaagaggataacaggcttcatgtgaagtgcatcaccttctctcagccacctgttgggaatgctgctttaagagattatgttcacaaaagaggatggcaggactacttcaaatcctattgtattccagaagacttgaagttatggaggcaagtggggaaaggcccagaggaaacaacagggaacacctcgttctcggtgttggtccagtgcaaaagtcattttggaggctttcaaaacttgttcccttggaaggggtgcggaaaagcttaagtgcaattcaaaaacaaacaaatgtttttgggaaggcaccatcacaattggatagctatttgcaatcaaaggttgatgaatcagaagaaccacctcaatctcttgagattcaagaaagttcacaaggaattgctcttacccctttatcggataaagatggagggaacactgaagataataataggactgagaaaataaatgcatctgaagcaggggggtctaaacgctggagcagggtaccttctttgccttcatatgtgccatttggtgagctttacctattgggagattcatcagtcaatacactttcagattcagaatactccaagatgacgtcggtgcagtctgttatatcggagttaagagagcgtttgcagtcgcactcaatgaagtcctatagggctagatttcaaaaaatatatgattcatgcatgtgtgcaaatgctcccatttttactggcattgagcaattgccacaattttcacatctacaagaattaattggtctaacagctactgattctgttgaacttggagatatcgtggaccctcctgttatccgaactgctacttctatccttcctcttggatggactggactccctggtggtaaaaatgctgagccactgaaagttgatataattgggcatgacctacaaatgtgcactcttttccaggcacaaataaatggaaactggtattccacagtaatagagactctaccatcagctacttcatactcaccaaatggagaactgcaacccacattacagaaaatgcggattcttgttggacaaccactaaagcagcctccaaattacattagtggggatttcatgattcctgtgatggcaggtgctgattcaacacccgactttggatttgaatcattttttgaagataaagattgctgcaagggtttgagtggatttctaatatatgggacaagtgattttgtaactgtacgtaaagaggtccacgttaggactcggagagtgcgattgcttggattagagggggctggcaaaacatccctgcttaaagcaatgttaggacaagttaaagaaagaaatagcactgttcttgaatgcatacatgtcgatttgcatggcaagggaatatcaaatggattgtgctacatagattcgacaacggtaaacttgcaggagctacctttggaggttgggcggttcaaagaagaactgttgttaggactccatgatatcagcaggaagactgaccttgttattgcggtgcataacctagcacaccgaattccacagtatcaacggtccaatacttctcagcctcagcctgctctttcacttctcttggatgaagctaaggcgctaagcattccttggattcttgcaataaccaacaaattctctgttagtgcgcatgagcagaacagattgatcagctcagctatggaagcatatcaagtttctcctgagatgacaaaagttgttaactcttccccatttctgatgccaagtgctagaaacagtttgcagcagatcagatcagctactgggaagttgaagaaggatccagcaaatagatctggttatcttcctgtaaactttggattgtcatcatttcagaggaaggacattgttatgcatgtggagggtgttagttcccttcgtcaacttgtacatcaagtagtcctcaacaatgaagaaacagcatttgaggaacttgctcgtgagagattgttgaaggagctagcgtcagagaaagcagcgtccctgcaagtgaagcagaagccccggaaaagagatggctctgttacagctgctgctgtaggtgcatctctgggcgcgggcctgggaattgtaatggctgtgataatgggggcagcatcagcccttcgaaagccgtgattcatgtattcttttgatccattatttacttcttgatttaaggatgtctgaacaaaagcactagtgtaggcatgaaaaatgaaattttagggcagaatagttagctgataccgtagtgccacattttggctgtgtatagaatgtaggttgagccttttttttgctgatctgaattttgttgtgttactggagtatggcttggatatgttctacatcatgttttaatttagttataaatctgtatcatgtcta

SEQ ID NO: 7165 - DNA, 2260 bp, Zea Mays
cagaaagccaggacccaggagaccaggctggactgctctctgctggtgcgttcgctccccgttgactgccactctccttgcgtgcactatcgtcccggcgacgactccgctgccgtcgccgcctacgccaggttccgaagtcttcgtgagccccttctcctacaacgagcactcacaccaatcaccagtgatttattgcgcatgaggactgcatctccccttgaaatttgaggctttggaaaactgctgaatggagtattcctcaagtgaagacgagggattggttggagattttatcgacgctgaggataatacgttcactaagaatattgaccaaggaactggcgtgatggcttcccagatccatggtgatgatccctcggtgggatccatgccacctgttattggaaatgagctgctgatggcagctgatgtattggccaaaaatgacgaacctcgtatgggcatggaattcgactctgatgctgctgctcgcgcattctacaatgcatatgctttatgctttgggtttgggattcgtgttgcccgatcccgtagtgagcgaagaaagggcgtcgaggtgctcgtcatgaagcgttttgtgtgcttgaaagagggacatcacaggaagaagaagccagttgagcctagcaataagaaaaagaggaaacgactctctatacgggatgggtgcccagcaatgatggaggtggtgcgtaggggcccagataggtgggtcatcacgaagttggtgctggagcacacccatgttattgttagtgcagaccgggcacgggaggtccaactccatcgcctctctggaaagtttcaggaacatgagaaccagttgcaggaggacggaatcttcatacggctggatttttgagacgtggttgacagcaatggataatggcgcatcttgtctagatgcaagaagagactgactgatgcccgcacaaggtttcctgggttacatgaggagctcaagagatgtgtcaatgggtgtgataccgcggttatttttgacatgctctggggctccattcttgacaagtatggcctgagagacgataattggctgcagtcactgtatgaaattaggcacaaatgggttcctgcatacctaaccagcttcttcttcgctgagctttccttaactcacagagtagaaacagtcatttctgaaaaccgacatggtcttggaaaaacaagcgaggagtatctacaccagagctgcatttgaaacattccagctggaattggttgaagcaatgcaacattatgccgtcaaggttcaggatggatcatacatgaaatactacgtcgaaagaaacggtgatcctcctaccaggcacaccgttttctacaacgttgctgagaagaaggcatggtgcgagtgctgcagattcgctttctcggcgatactgtgcaggcatgtccttagtgtgttcctcttggccggtgtcatcatgcttccagagccttgcatcacaaagcgatggacaaagaaggctaagtcagggcctgaactcatcgggcttaacgttggaaatggaagtagcagtccagattctgtggcatcaagatataatgatctcgttcgtgatgcgatcaagtgtgcagagaagggaactgtatcggccggcgccttcagagttgcaaaggaagtgctgcgcaaagccttcatggatatcaggggtcacggggagaaactgtgcaaggatgctctgcgctctgcatcaagccgatagcagcgattcgttattttagagggcatttgagagattaacctgctatctttgccgctaaatttgttgagcgaacacgaggaacttcaagtgcttgcgacagtgacttaagccgcatgtcaggttgtcatgaaaaatccagatttgctaatcgagacatgtttagtcttgtttgctgaatcgttcctttttctaagtctctgatcagcagaccgtatatatagttctggaaaacactattttgtactctagattgtacgaaagcaaaatttgaaataggaagtaagatagaagatgagatgaaaatgagcaagaataataagagcctccaaacaggctaggtataggggagagatgaggagaggaaagaggtttacagtcggtttagacaaaaaaaaattaagaagccatgtgagaaagacaagtggagtcatgtattaatagtgaagagctaaatattatacaaatgagctaaatggtagactgcaactgtccttgccatcaatggtcgg

SEQ ID NO: 7166 - DNA, 2409 bp, Zea Mays
ccaggctggactgctctctgctggtgcgttcgctccccgttgactgccactctccttgcgtgcactatcgtcccggcgacgactccgctgccgtcgccgcctacgccaggttccgaagtcttcgtgagccccttctcctacaacgagcactcacaccaatcaccagtgatttattgcgcatgaggactgcatctccccttgaaatttgaggctttggaaaactgctgaatggagtattcctcaagtgaagacgagggattggttggagattttatcgacgctgaggataatacgttcactaagaatattgaccaaggaactggcgtgatggcttcccagatccatggtgatgatccctcggtgggatccatgccacctgttattggaaatgagctgctgatggcagctgatgtattggccaaaaatgacgaacctcgtatgggcatggaattcgactctgatgctgctgctcgcgcattctacaatgcatatgctttatgctttgggtttgggattcgtgttgcccgatcccgtagtgagcgaagaaagggcgtcgaggtgctcgtcatgaagcgttttgtgtgcttgaaagagggacatcacaggaagaagaagccagttgagcctagcaataagaaaaagaggaaacgactctctatacgggatgggtgcccagcaatgatggaggtggtgcgtaggggcccagataggtgggtcatcacgaagttggtgctggagcacacccatgttattgttagtgcagaccgggcacgggaggtccaactccatcgcctctctggaaagtttcaggaacatgagaaccagttgcaggaggtgcgaaggaacgtgtttggagatacgaatgcgcaagggctctttaattacttcaagaaaatgcaatcagataattctagttttttcttttctatacaagttgacagtaaaaactatgtgagcaatgcagtttgggttgatgcaagagctagaatggcatacacgtactttggggatgctgtttactttgacactacttgtagtcaaaatgagaacatgctgccctttgcagctttcacaggagttaatcaccatggtgacactgttgtttttggctgtgccttaattttggacaggacggaatcttcatacggctggatttttgagacgtggttgacagcaatggataatggcgcatcttgtctagatgcaagaagagactgactgatgcccgcacaaggtttcctgggttacatgaggagctcaagagatgtgtcaatgggtgtgataccgcggttatttttgacatgctctggggctccattcttgacaatttctgaaaaccgacatggtcttggaaaaacaagcgaggagtatctacaccagagctgcatttgaaacattccagctggaattggttgaagcaatgcaacattatgccgtcaaggttcaggatggatcatacatgaaatactacgtcgaaagaaacggtgatcctcctaccaggcacaccgttttctacaacgttgctgagaagaaggcatggtgcgagtgctgcagattcgctttctcggcgatactgtgcaggcatgtccttagtgtgttcctcttggccggtgtcatcatgcttccagagccttgcatcacaaagcgatggacaaagaaggctaagtcagggcctgaactcatcgggcttaacgttggaaatggaagtagcagtccagattctgtggcatcaagatataatgatctcgttcgtgatgcgatcaagtgtgcagagaagggaactgtatcggccggcgccttcagagttgcaaaggaagtgctgcgcaaagccttcatggatatcaggggtcacggggagaaactgtgcaaggatgctctgcgctctgcatcaagccgatagcagcgattcgttattttagagggcatttgagagattaacctgctatctttgccgctaaatttgttgagcgaacacgaggaacttcaagtgcttgcgacagtgacttaagccgcatgtcaggttgtcatgaaaaatccagatttgctaatcgagacatgtttagtcttgtttgctgaatcgttcctttttctaagtctctgatcagcagaccgtatatatagttctggaaaacactattttgtactctagattgtacgaaagcaaaatttgaaataggaagtaagatagaagatgagatgaaaatgagcaagaataataagagcctccaaacaggctaggtataggggagagatgaggagaggaaagaggtttacagtcggtttagacaaaaaaaaattaagaagccatgtgagaaagacaagtggagtcatgtattaatagtgaagagctaaatattatacaaatgagctaaatggtagactgcaactgtccttgccatcaatggtcgg

SEQ ID NO: 7167 - DNA, 1312 bp, Zea Mays
aaatagtagaagcgcgtaaggattaaatccagcgaagtgttcaccttcttcaacttgaactccttgtggtccggactgacgaatcggggacggagattcacatcaacgcagatgtggaccccacgaccgagtcgtcgcgtcgtctcctccgcttccgacactctcctgctctgcctcctcctgcttgccggcgccgccgacgccgcgccgctgctcgtaggcgtttttcccaaagatgaggcgtacttcgcgacgcaggtgatcgcctgcagagacggctcgggctctttcccgaggagccggctcaacgacgggtactgcgactgcggcgatggaaccgatgagccaggcacttcagcttgtccagaaggcaagttttactgcagaaatatcggagatacccctcgattgttgttctcttcgtttgtgaatgacaaaatttgcgattgttgtgatggaagtgatgagtacgaaagtggtatccattgccagaacacctgtagaaatataaaggatactgctgaggctgatggtggtggtggcgacctcgcagtaacacatttagattctactgatgattttatgagtaaacatgcaattgctatggaagaccatatccagaacaacagcaacagagaccttgtccagaagataagaggattgagaacagccctagttattgagctgggccttgttgtatgtatttttgctttttgcattgctcggcgtcgcactagaacacgcaggagacagcatattttgaaacgttagctgaacagtagtaatatacaaagacgatagatcggtgctcatttgcaaacattaaagcttccggagatggtggagaatcagagatgggatgaaggagcctgcacgtcatcctctttaaatcacgaggtctaatgtcgatctgcattcgagattcatgcaaaatctcttatatcggaagggttttaagaatatattctagaatagtggtaaaaacatgcactgaagatcgtgcaaaatcaaatgtgtcaagttgtgaccagatggagtgtacatgtttaacataaataacttaattgttgtaactgatttgtggccccgtcgtgcttcctctgtaactatgagttgctcctaccaggaggaattgacgatgctccatgcctgaaccttgcaacttgttgtatctataatgtttgtctctagcagtgtactctatacctattctatgtgttcgttctttatgatcttctctaaaagattcactctatatctttggtagtagtatcgttctatatatctaaatacttaatattagagacatgtt

SEQ ID NO: 7168 - DNA, 1954 bp, Zea Mays
cccaacgcactccactctctttcagaacccaacacgccactgtcgcggtaacagagcagctagccaagagtagtagccgcgtgcccgcgtgcgcttcccgaaccccgagtcccgaccagagagagatacggagaggagcagacctgcccgtcgcaatggcgatgccaccgaagcccggcgacccgccgcagcgctcgccggcacgtagcccaaacctcaatctcccctgcccgctgccgccggtcccgggcggggcgccgccaccgccgcagcagcagccgggcgccgggctgcccccgccgcgcgtgggccaccaccgccgcgccagatctgaggtggccttccgcttcccggacgacctgcccggcggcgggggcggcggcttcgacgagatcggctccgaggacgacctcttctccaccttcatggacatggacaagatcgccggcgccgaccgcgaccgcgccgccgagacctcctcgccgccgcgcccagccaagcaccgccacagcgtctcctttgacggcttcgggatgggggctgccgccggcggcccgggcggccagcaggacggcggtggaggcatgttcggagaggtgatggaggccaagaaggccatgtcttccgagcagctctccgagctcgccgccatcgatcccaagcgcgccaaaagaattattgcaaacaggcaatctgcagcacggtcaaaggaaagaaaagctcgatatataacagaattggagcggaaggttcaaactcttcagacagaggctactactctttcagcacagctgacactattccaggaggtgggcatggaggtcgtggtcgtgcagggtcgtcgctgagcttggacctcgccggtgatcttgtggggctcgggtcgctcactgaagggtctgaaacgcatggacctgtgcccttggactctagcaagtagcaaccacatgaaagatccatcgagccaccatccccgaactccccatcctcttcttttcagccattcagagtcagcggacaagctcatagccagagagacacaactggactttcagcagaaaatgctgagctcaagataaggttgcaggccatggagcagcaggcccaactgcgtgacgctctaaatgatgcactgaggcaagaagtggagaggcttaagatagcaacgggcgagatgtcgaagtccaataacgagcatttcaatatgggaatgcagcacgtttcctacagcccttcattcttccagctctcggagcaacacacagtgcagcagcatggaaacattcagctgccgcaccatttccaacagcctccgctgaatgtcccgagccaccagatgctatcccaccccaactccctctcgaacatggtgcagcaagactctcttgggcgtctccaggggctggacattgggaaaggctccatggctgtgaagtcggaggctgaggtcgtggtgaagtcagagggcagctctatatctgcgggtgaaagcaacaccaccttctagctatacaatacgtctgccttccaagaagcctttgtttggtttagagttcttcttttgttcatagtctgacatccttgaactgcttcctccttccctgtagtttttttttattccattcgttatatctagttaccattgatcggttgtgtcgatcgttgttgttgtcgtggtggctgattctatagggacattggtgtgctggtttcgagtttgttatgtgtgtggtatggttggttgtttcgagctagtgactgaaagggcaccgagtgattttttggcagaatttcttttctccacctgttttagttttgttatagaacaaccatgatttctccttctggaaatgtgtacattgtgttgctatgctaatttctagtaataattttgatgatcccaactgtaccctgctgtgcatgtgcgtgaagtgtgttgtttcaggctatcttt

SEQ ID NO: 7169 - DNA, 1519 bp, Zea Mays
ctcttggagtcatgtcggatctgacgcctgttcaccacgtgcctttcttcctccttggttcttcacagctctcctgccggatcagagtttactgctcaccgcacctccgttcctctctcctgagtctcctctcctcgtcaagtcaacagtcgccactgtccactgtccccacccgactgcctccataaaaaaaaaccgagcggagcgcgagctacgcgctgtgcctcgtgcctagacgaacggcataggcaccggacggtggcgtcatgtgcgtggaggagccgaaggacgccgaacggtttggttttggagacccaggggtcgaggagcccgctaagtttcccttggctcaggtctttgatggtcacggtggaaaagatgctgcccatttcgtttgtgataatttaccaaggatgattgtggaagattcagatttccctcttcagcttgaaaaagttgtgagaaggtcctttatgcagattgattgccagtttgctgagacatgctctctccatagagcatcgtcctccggtacaactgcacttacagcaatggtttttggaaggtctcttctggtcgctaatgccggtgactgtagggcggttctttcccggtgtggcaccgcagtcgaaatgtccatggaccacaggccttgcagtctcagcgaaaaactgcgcgtagaatcgcttggtggctacgtggacgatggctatctgaacggtctgctaggagtcaccagagcacttggtgactggcatctcgagggcatgaaaggagctggtgagacaggtggtcccctgagtgctgacccagagctcaagatgaccacgctgacgaaggatgacgagttcttgataattggcagcgacgggatctgggacgtcttctcgaaccagaactcggtggacttcgcccggaagcgcctccaggagcacaacgatgtgaagttgtgctgcagggaaatcgtcgaggaggcgatcaggcggggggctactgataacttgactgcagtgctggtctcgttccacctggaggccccgcctcggatcagagtggaccgtcctggtagggtggagaggagcatatctgctgaagggctcaatagcctcaggatactcctgggaaggcagtagctgcgttcttgtcgcgattttaggtgctgtgccgcattgccgagctgtaattgtttgtagtcatctcggctcctcattgtcgttagctgttacccgttgctgcgactgcgacacgtgttacgattcttgttggtgattgaaccaacaaacctgatattattcttgttggtgattgaaccaacaaacctgatactattcttgttggtgactgaaccaacagatttgagctctgtcctgtgagagattttaagcagatgaaagtatatctggcaaagaagctgtgagttcccagctcactgtgtaatgtttgccttccgttatgtaacaaaacaaaacaattcattgactgaaatgtgtcaggactgggtcaaatttcctgttctcgc

SEQ ID NO: 7170 - DNA, 1770 bp, Zea Mays
ctcttggagtcatgtcggatctgacgcctgttcaccacgtgcctttcttcctccttggttcttcacagctctcctgccggatcagagtttactgctcaccgcacctccgttcctctctcctgagtctcctctcctcgtcaagtcaacagtcgccactgtccactgtccccacccgactgcctccataaaaaaaaaccgaggtccaacaaacaaccactgcaatctccatgcccttccttccttccttccccacacaccatctctctttcacatgaggatttctttcccttctttctttcccacaaatattcccaaagaatcttctgtgttgcttctctcctcggattcctcttcccctcctcgcctcccactccaattattcctctccttactgacttgcttcgcttctctgttatctctgtcctctcctcgtgtttgttcttcctaccagcggagcgcgagctacgcgctgtgcctcgtgcctagacgaacggcataggcaccggacggtggcgtcatgtgcgtggaggagccgaaggacgccgaacggtttggttttggagacccaggggtcgaggagcccgctaagtttcccttggctcaggtctttgatggtcacggtggaaaagatgctgcccatttcgtttgtgataatttaccaaggatgattgtggaagattcagatttccctcttcagcttgaaaaagttgtgagaaggtcctttatgcagattgattgccagtttgctgagacatgctctctccatagagcatcgtcctccggtacaactgcacttacagcaatggtttttggaaggtctcttctggtcgctaatgccggtgactgtagggcggttctttcccggtgtggcaccgcagtcgaaatgtccatggaccacaggccttgcagtctcagcgaaaaactgcgcgtagaatcgcttggtggctacgtggacgatggctatctgaacggtctgctaggagtcaccagagcacttggtgactggcatctcgagggcatgaaaggagctggtgagacaggtggtcccctgagtgctgacccagagctcaagatgaccacgctgacgaaggatgacgagttcttgataattggcagcgacgggatctgggacgtcttctcgaaccagaactcggtggacttcgcccggaagcgcctccaggagcacaacgatgtgaagttgtgctgcagggaaatcgtcgaggaggcgatcaggcggggggctactgataacttgactgcagtgctggtctcgttccacctggaggccccgcctcggatcagagtggaccgtcctggtagggtggagaggagcatatctgctgaagggctcaatagcctcaggatactcctgggaaggcagtagctgcgttcttgtcgcgattttaggtgctgtgccgcattgccgagctgtaattgtttgtagtcatctcggctcctcattgtcgttagctgttacccgttgctgcgactgcgacacgtgttacgattcttgttggtgattgaaccaacaaacctgatattattcttgttggtgattgaaccaacaaacctgatactattcttgttggtgactgaaccaacagatttgagctctgtcctgtgagagattttaagcagatgaaagtatatctggcaaagaagctgtgagttcccagctcactgtgtaatgtttgccttccgttatgtaacaaaacaaaacaattcattgactgaaatgtgtcaggactgggtcaaatttcctgttctcgc

SEQ ID NO: 7171 - DNA, 1965 bp, Zea Mays
ttggtatcaatatatatatatggtatacagtaatttccatgtcctacactgtcaacaccgttgcaagtaattcatgttttgggaaacttcatgagaatttggtctgtttactccttgtatagctacctatccaacagtggagattcaatagttggctttatcttcagttgtcttgtacccacttcagtcatattcttggtcttacagaagccttggaaaggccgacctttgcccaactcacagttgtcaatggaggaatcctggcattctactttgtattatggggtaaaggacttcttgcttgtggtccactagtgtaagtatcttgttctatcaggaccatggatttttcacatagctgcatggtctgtagtgtgtggtgcggtgcatttatgccagggaatatctagttcaatctccacctatgtgcaatgtttaaagaatgctgcgagccagtgatatcagatcattgtggaaacaaattacacttcatggacatcaaccgtaggacatttgtatgtcgtccttacctgttgatctaatgcatgatatgatgatagtcattctgacttgagagctgcacacatgaatttgcatgattgcatttggggatggggagttgcacttactctcctcgggttgtgcagtatgattctgaacacttcaacagaaaaacagcatttcattaccattaaccacatcattggtatattttgcactgctttgagcatactaaagaagcatttactggcacttctatctaaactcatttttgctgtctatcgagtctagtgctctactggcagagtatgcaggtgctgttcttggagttctctctgctgctttatatggaaggaaatctaacatctggaaaaagattggtggacttgctgctatgttggcagcatattatctcttgtcaaatggatggtctacaagaacccattctcctctatatagctttggaagtgaaccagtggagaaggcagcacaaactattggagtgaaagcaatgatggtgccaattactgctgggatcttgtctgctttaaggagagtattagctcggcgtgtttctctcaagaatcaacttaaaaggcggctccatgctataactattgcttctgctacttgtttcctttttccgtttgccatgtgggatacgatcctaggttcggcatctgacagcattgttaaattacaactaccaagttgggcatactttagtactgttttatttggaatggtgcttatattctatgttgacaatgttgctgaagaaaagttgcatctggtcttctcttctccaaggcacttaatggtctcaacaggttgcatcatcgtgttggaaacagtgtaccaaatggatttctcccttttaggatttctggtctgttctgttattttgggattcggtatttctgaagcaacctccttggaacgctcaaagaaaagccctttagagacccatgaactatcgaatggggtgttccacaatcaattgcctatttcagaacttccaagctgaagaatatatgacctagctacgacgttgtgaatggctgcggttgcacacctcaagctcaatggttcgattctttgcgtgaaggttttaacgagacagaaaacacggatgtttttgacctgccaatgcccaatgtgtctttgtaatcctccattattgttggccacctgcatcctgtacatgtgaacaactcaagtagatgtgtatccgtattccccttgcagatattgcaattgtcacagcatcctgtttaactgcttgggtagtttcgaaaatttgtttttctcacttggagacgcagatggttcaagctgttaacagaagtgcactgattgttctttttcagaggctgaaacctgtatgtaacccgtccatgatatgattaacaagctgactttatctttgacctattcgtgaatgcaatcagcgagtctcctgca

SEQ ID NO: 7172 - DNA, 1631 bp, Zea Mays
cccgagtcgtccaggccgccatgccagagcgcgcagccagccggcaaagccgtcctccctcactcccgtgtttctcttccccgtccctgtccccttcccctcgaagatgcgtggcggaaccaagcaagctgacgctcctcgccgccaagccactacaccgcagatgaagaggcgcggccgctcaaggtggtcttcggctacccggctaagtatttcattgacacatcgccgatcggggacggccgcctaggtgccatgatctggggctgcgtcgaatctgagaggctccagtgtaaccggatgaggctcctaaggaagaaggatgtaccttattacaaggtacttgcagttttttgacacttttttcttgaacacacaggagggtgaatctgcttgtgcaataacaggtgtagttaagaaaggtacttatatgtctgatatttgtgtcaattgtcataaagtccacttgttattgaatgttgatcatatggaaaatacagttccacacatgtttgcatttatttccttgcatatgtcattaaagcttctttatttcttgccttcgttaaaggacttcagttgatggatttagtattgtctctgctgctatagcatcactcatttcttttttgttgccaggattaccttctactaggggtgaagacatgcaaattaagtgtttgcttgaaatgtatgggctaaagatttgcagaagaaagtgcgatctgatatcagtgcagaatattggctacataaggaatgtgcatatcgagagaggcaactttttgatttttgggggctgatgtggatacgacatcctttgtccatgtatggaataggatacatcctttcaatggatgctgatgatgttcaccgcaaaaagagatttacagagaggatgtcaagactcgaagaggaagaaaaaaatcaggcaaatatcaggaagaggaagttctttgcagaaattctaaatgcttctagggagcaacaggtgcaattaggcactacattcaagcaaataaagcagagaaatgatgaagtttagtatggagaatgacatacttggtgcaatggcgagagttatttcaatgagtcacagggttcgaagctgcatcttcgcatttgcgaggggaaggcattgtctctgtatatcccttctgcagaattagttttttactctatctgtttatcgatctgaaatgttctagctaggataataggtagcaaataatagattgattacgagggaatagagtacaagattatgtagacagggattctctagggttttggtttatagaaatagcaccaattacagagatcttgcctaacaccaaatgctccttgacgaaacagatgagcttctcgaagaaactggaaaagctgagcatgctagttagcatgaagggagtgaagtgccaaaagtagagttggatgaaatactcgcagctcgataactcattcgactcggcttgttttaattttatagctagccaagctagtattctagctcggttctctaatgagccaactcgggttacctcataagctagctcacaagccaaacaagccaagccacagcacaaatttgtctaatcgttggtgttgtctcatctctcatagtcttgtct

SEQ ID NO: 7173 - DNA, 2219 bp, Zea Mays
cttttattcccattacaacgtgcgcacaaaaagtggcaccaaaactttgaacggtggccatgctggagcgcttccctgtggccaactggccaatggaggagaaatatgaaccaaccaatgacaagtcggacccactggattgacagcctctgacgccgaaaaagccacagatcggatcgcggcgggcagaggccacctccggattcgggcgctcggcgtagccgcgcagtggtgtgtctgcctccctccttgtatcctcctcgaattcgagcggcggcgacggcgggaagggagatggaggcggttagaggcgatgggaggtggtgcgtggtgactggcggccgcgggttcgccgcgaggcatctggtgacgatgctgctccgctccggcgagtggcgggtgcgcgtggccgacctgggccctgccatcacgctcgaccgcgacgaagaagagggtttcctgggtgctgctctccgcgaaggccaggccgtctacgtgtccgccgacctccgtgacaaggcccaggtcgccagagcttttgaaggggcagaagtagttttccatatggctgctccagattcatccatcaacaacttccaccttcattatggagtcaatgtcgatggaacaaagaatgttattgacacttgtatccgttgcaaggtgaagagactcatctatactagttcacctagtgtcgtgtttgatggagttcatggaatttttaatgcagatgaatcaatgccttacccagataagtttaatgattcatattcagaaacgaaagcggatgcagaaaagcttgtgatgagagctaatggtagggaagggcttcttacatgctgtatacgcccaagtagcatttttggccctggtgataagctaatggttccatctttggttgctgctgcaagggcagggaagtccaaatacattattggtgatgggaacaactactatgatttcacctacgtggaaaatgtggcatatggccatgtttgtgcggagaaaactctatcatctgaagatggtgcaaagatagccgctggaaaaacctatttcataacaaatatggagcctataaaattctgggagttcatgtcattgattttagaaggtcttggatatgaaaggccttcagtaaaaataccagtctctgttatgatgccggtggctcatgttgtagaatggacttaccagaaatttgccaagtatggaatgaaagttcctcagctgaccccttcaaggatcaggctgctttcatgtaacaggacattcagttgctcaagagcaaaggagcagcttggttatgaacctctcgtgtcccttaaggatggagtgaagagaacagtagagtcgtactcccatctacaagctcagaatcataggagtatatcaaaggcttcaattttcctcgggaatggaaatcttgcaaaaacagtactttgggaagatgcgaagcaaactgtgacagtgcttctactgttggctgttatctactaccacttatttacatgtggttacaccttcatcacagcgatggcaaagcttttgtcactaactgctctgttcttattcattcatggcatgctgccatcaaatctgttcggtcacaaggttgagaaactcgaggcctctaattttcacatcacccaggtttcactatctctgctggttgtcagcatccttagttccatgtcttctcaggctgcatttaaaataggtactgctctggttttcacaggcttcaaagcgtatgagaaatgggaggacagcattgatagtatggtgggcgacgcctgtaccattcttctgcactttggttctgccaaggaatcatctagctagaaacaaacgtaggtgtagcttgcagactgccagttactttgtttactgatattatcttcagctccagctgtttctgggtttcgttgacctaaattttcttctgtattcatctgatggtgttgtagaattgcctagcggcacatatgcaagttttggactcttttcctcttgatagttgatgtacaatatgaaattgtacattttccccctttcccctcggagtggttctcttcccatcaacggtgacaataggctctagtaaagatcgaattggattatgattggactctatttctattcatttttgaactaaaatttatttagagtccaaagaaattgtgaagaaacatttggatcgcgatccattacca

SEQ ID NO: 7174 - DNA, 999 bp, Zea Mays
ctgataacctcaaagcgacggctttgcacgcgttttgctgcagtaatcatgagaataagagaacccaaaaccacggcactgatatttgcatcgggtaaaatggtatgtactggagctaagagcgagcagcaatctaagcttgcagcaagaaagtatgctcgtattattcagaaacttggttttccagctaaattcaaggactttaagattcagaatattgttggctcttgtgatgtaaagtttccaattaggcttgagggccttgcctattctcatggtgccttctcaagttacgaaccagaactctttcctggccttatctatcggatgaaacaaccaaagattgttcttttaatttttgtttcaggcaagattgttttgactggagcaaaggtgagagaggagacctacactgccttcgaaaacatctatcctgtgctggcagagtttcgaaaagttcagcaatgcgttaacttgagtgctaacaagagtagataaattttggtctgcttcgtctttgaggcaggagtccttcaaagtctcttctgagtatgtttcagtgtgatgtgcgatgatgaaaaggctggcgctgtatgtaacgtgggacaagggcaaagggcaagggcaatgtactgacgactggttgtaagttatctgttgtatttgagtttgagatgctgtagcgtttgacattggggtaaatcttgctggttatgaccgtatggaggaaccggtcgattgaccatgctattggtgtgactctgttagagacaataatgtgcacttaaaccgtgcaatcaaacgatctgatgtatgcaagctattttagatgaaagatttcaaatataaaattgctataggttaaatattgcagggattaaatataaaatagtagttactgttgcattttaattagacgtctctgatagtttgattatatggttgtatcaacatgatattgattgtatatgtcatgtttttctctttgttgaagttaac

SEQ ID NO: 7175 - DNA, 1718 bp, Zea Mays
gaggccaaccgttgaggagaagccaatcgccagaagcggcaagccttgcctcgcgcaccggtctggttctggtgggtgccctcttcgccggtggccggaaggcgagggggaagccggaggacgctgagggcgggcgaggccgccgtccccagatctcacttccgccgcccgcccgccccgcttttgcagggattgagagaggaaggaaggaaaggaggtgcttcaatatgaaggcgctcattcttgtcgggggtttcggaacccgccttcggcctttgactcttagcttcccgaagccccttgtggattttgcaaacaagcccatgattctgcatcagatcgaagctttgaaagaagttggggtcacagaggtggttttggccatcaactaccgcccagaggtaatgattaatttcttgaaggactttgaggataaacttggcatcacaattacatgctcccaagagactgagcccttaggaactgctggccctcttgctctagcaagggacaagcttgcggatggatctggcgagccattctttgtcctcaacagcgatgtcataagcgaatacccatttgctgaactcatcaaatttcacaagtctcatggtggtgaggcaacaattatggtcactaaggaggcaactggcagggtggaaaggtttgttgagaagccaaaaatatttgtgggcaacaagatcaatgctgggatttacttgctgaacccatctgtccttgaccgcattgaactgaggccaacatcaattgagaaagaggtcttccctcaaattgcagctgatcaacagctctatgcaatggtccttcctggtttttggatggatgttggtcagccaagggactacattactggattgcgtctttatctagactcgcttaggaagaaatcggctgccaggctagctgctggagcgcatgttgttggcaacgtgctggtgcatgagagcgccaagatcggagaaggttgcctgatcggtcctgatgtcgcaattggacctggatgtgtcgtggaggatggcgtgaggctttcccgctgcactgtcatgcgtggtgtgcgtatcaagaagcatgcctgcatctcgaacagcattatcgggtggcactcaactgttggacaatgggcacggatagagaatatgaccatcctgggcgaggatgttcatgtgtgtgacgaggtatacagtaatggcggtgttgttctcccacacaaagagatcaagtcaagcattctgaagcctgagatcgtcatgtaagagttctccagttttaactacagtacattcttaagttcttcgagtaagtgaggattgcagatcccctttttataagtgatatctattggtatctttggcctaattcaaacagcttcagacatgttcgcttgctaaactgttgacaatgtatccttgttctttgttgaaaagttttgtacttgtagtgtcaatcatatttcacaaagtggttgtcatataatactgagaggttttggacccttgatctgcagaagttcaataccatagtagcaagaataagtttatttttaaatgttgtccaatgtaactttcagcagtaatgtttgtgtgctaaatgctctcccggagaaatgtacacgctgcccacgtgtgatgtaacttactatgttcacgtatttaatcttgtaccaatgaatatattgtcggtgtctttaaaatcattct

SEQ ID NO: 7176 - DNA, 863 bp, Zea Mays
ctccgccgccggttccccattgctgcctccatcgcccccactcctcgccggttccccattgctgcctccaccgcccccgctcctcgccggttacccattgctgcctccaccgcccccgctccgaggagggccacgacggccggatcctggactcgttgtcgcgcgccagggcaaagagtaaggactacgatgggcgaaagtgctccagagataactatgttgctggactccagacaaattgaggaaccatatcaaagatttgatctttggcacacgattttcttataatcatctgttgttgctgagacaaagcagttctatggtatcaaccaaatgaaagcctgtatgagcagaagcccgaagaaacagctcctgtcctgccatatcttgtttctctgcacttggttgcggcctgtggtactggtcgactatggcggcacaatgcctcagctacaagaaaatctttgtggactgctatatcttgcccgacagttcaagctctgcaaggtgaggtctgtttagtttggccagaaaggcatcccctacctgaacacctacgacggccgcaccatccgctaccccgatcctctcatcaaggccaacgacaccatcaagattgatctggagaccaacaatatcatggacttcatcaagttgtatttgcccatggacttcatcaagttatatacttagttaggctcaatgttagcacaaacagttgatgagcaagtttaaatttagagtacacttatgtatgagttatttgacaatgcttatttatgagatattgaatgttatttatctatattatattaattatagtgttattaaatatatgtgtatgtatttttctcttttaaatt

SEQ ID NO: 7177 - DNA, 880 bp, Zea Mays
ttctttcactttggaaccatcgtgtaaggccaccatccccttctctctcccttctttcatctcccctccccatctggatcctccgccgccggttccccattgctgcctccatcgcccccactcctcgccggttccccattgctgcctccaccgcccccgctcctcgccggttacccattgctgcctccaccgcccccgctccgaggagggccacgacggccggatcctggactcgttgtcgcgcgccagggcaaagagtaaggactacgatgggcgaaagtgctccagagataactatgttgctggactccagacaaattgaggaaccatatcaaagatttgatctccaaatgaaagcctgtatgagcagaagcccgaagaaacagctcctgtcctgccatatcttgtttctctgcacttggttgcggcctgtggtactggtcgactatggcggcacaatgcctcagctacaagaaaatctttgtggactgctatatcttgcccgacagttcaagctctgcaaggtgaggtctgtttagtttggccagaaaggcatcccctacctgaacacctacgacggccgcaccatccgctaccccgatcctctcatcaaggccaacgacaccatcaagattgatctggagaccaacaatatcatggacttcatcaagttgtatttgcccatggacttcatcaagttatatacttagttaggctcaatgttagcacaaacagttgatgagcaagtttaaatttagagtacacttatgtatgagttatttgacaatgcttatttatgagatattgaatgttatttatctatattatattaattatagtgttattaaatatatgtgtatgtatttttctcttttaaatt

SEQ ID NO: 7178 - DNA, 1649 bp, Zea Mays
ggatcctggactcgttgtcgcgcgccagggcaaaggtggagattaggaattctgctgccacggacgacgacatggctaaccatcagttggtctcctaccacgagctcgctcgtgctaccgaaaacttcagtgatgctaacctgctggggtctggaagctttgggaaggtttttaagggccagctgagcaatggcctggtggttgccgtaaaggtcatacacatgcatatggagcaagctgctgcaaggtttgacgcaaagtgttgtgtgcttcgaatggctcggcatcgcaacctgataaggatactgaacacctgttccaacctgcacttcagagcgctggtgctccagtacatgcccaacgggagcttagaggagctcttgcgctccgtcaacggaggaatgcgactagggttcgttgagaggctggacatcgtgctagatgtgtccatggcaatggagtatctgcaccacgagcactgcgaggtggtcctacactgcgacttgaagcctagcaaactaaggcatgagacattgaagcagcagctgtgccgaaagctaataaatggtgtatcagtgcataaccatgttcctgggcagagttctgttatacctccagagacaaattccatctccatgcatgacttaaaggcagaaatagagttaaacccttgtttgcttgggattaatgcatcactgctacacgaaaagatcaattcatatgactagtaggatggagctagttgtattcatctcgtcacaagatcctatgatcttgatggtctgtcttgtttcatggctgttgtaatcaagccataagtttactgatgggtggcggtgaaggcaagcgcattctgtgcagtaccctgattgttttgcatgtcatctctagtgcaatcttccaaaatgaacaaaaaactgtgtatctgctgggtgcagtactaaaataattcatttcatccacctaaggagtaaggactacgatgggcgaaagtgctccagagataactatgttgctggactccagacaaattgaggaaccatatcaaagatttgatctttggcacacgattttcttataatcatctgttgttgctgagacaaagcagttctatgccaaatgaaagcctgtatgagcagaagcccgaagaaacagctcctgtcctgccatatcttgtttctctgcacttggttgcggcctgtggtactggtcgactatggcggcacaatgcctcagctacaagaaaatctttgtggactgctatatcttgcccgacagttcaagctctgcaaggtgaggtctgtttagtttggccagaaaggcatcccctacctgaacacctacgacggccgcaccatccgctaccccgatcctctcatcaaggccaacgacaccatcaagattgatctggagaccaacaatatcatggacttcatcaagttgtatttgcccatggacttcatcaagttatatacttagttaggctcaatgttagcacaaacagttgatgagcaagtttaaatttagagtacacttatgtatgagttatttgacaatgcttatttatgagatattgaatgttatttatctatattatattaattatagtgttattaaatatatgtgtatgtatttttctcttttaaatt

SEQ ID NO: 7179 - DNA, 1044 bp, Zea Mays
accctcttcctcctgctgctgctctggcgtcgccgcccctcccaagaacaccaggctctaatttaatttaagcggagggaagcttgatcgatcagtctgacactgccctcgttaagttatagcaaatgcctcccgcttcgacggatgcaaacaatgcgatccagaagctgtacgacgtctgcagagcctcactgtccgagaaggggcctctatctcctcgtgactctctcgacaacgtccgtgctgcgttagacatggttaccccgtccgacgtcggccttgagcgcgaggctggagctgtgcgtgcttggaggagcccacgggcggccctgggccggaagagggttttccattccagcccagccatcagatatcgccatatataggagtgcgcaagcttctcgattgggatgttttgcatgccggcatcatccatcatcccgctccacaaccatcctggaatgaccgtgctcagcaaggttttgtacggcgcggcgcacgtcagatcataccgctggattgaatcagctggatcgtccattaacctgtcgaaagcgaggccagccaaggttgtaagggacggcgagatgtccgcgccgtgcggagcgatggttcttcgtccagaggaaggcggcgacgtccacgccttgagagccatcactccctgcgccatcctccacatcctgacgcccccgtactcctcgcaggacgggaggcactgctcctacttccggagacgcccaagatcacacccatcgggcgttttattgaaccgaacaggggggtctgagttcgtgtggctggaagaataccagccacgtcacaacttcatcattagaagggacctgtacacaggacccgctttaaagttatgatgacatcatgacaaacaggggggataattatttatatacgcttcccctttggcttcttattaagttatatcgatggacaatgcaagcacttagctatatgcttggcacttttttatttatatggtagtattaaaaagacagttgattatcctacgtacagggccgcctg

SEQ ID NO: 7180 - DNA, 1816 bp, Zea Mays
tatttcactgcactgcagactgagattgtagaattcatctctgtgctgcttacaattggaagtgaaactgctgaaaaagagctaagaaggcagtcagcaataaagcgctcgattgatttgttctttgagtatccatataacaactttttgcaccatcatgttgagaatataattgttgcttgcctggagggtaaaagacctgaagttgttgagcatgttcttcatgaatgtgatattgttggtaaaattcttgtctcagagaggttttcatccttgtcgactgagtctaatgggcctactgttccctctgaagggaaaacccctccaagaattggaaatgttggtcacatgacaagaatagccaataaacttattcagttgggcaatagtaacaacacaatccaggctcacttacaggaaaataatgattgggttgaatggcaaacaaatgtgctggtcaaacgcaatgaagtggagaatgtttatcattgggcttgtgggcgcccgacatctttacatgaccgtggtagggacagcgatgatgatgacttccgggacagggattacgacgtggcagctcttgctaataacttaagtcaggcatttcgttatgggatatatagcaacgatgacattgaagaggcacaaggatcacttgaacgagatgatgaggatgtgtattttgatgatgaatcagctgaggttgtaatatcttctttgcgtctgggagatgaccaggacagctccctctttacaaattcaaattggttcacatttgatggagagagaggcattgatgatcgtttatctgcctctgttccttcatcatcccccaattctctggagacttcactagaggccgaggaagctgatgatggtaaagtcattggcactgaggatgaaatggaaacagtatatcttggaaatggtagtgctgaggaggtaaaagatgtagcagaatgtaatgaacagccaaattgttgtactgaggatgagcgattgaaaaatactgaagggattgaacggcatccagatgtttcaaatcactataccgacatatgtacaaatgaggctgcctctgctgcagcagaatcttcagccccatcagttgagatagtggcaaagaaaacagtagatgaaccatcggaggcagaaagaacagtggatgaaccggcagaatcatctttggacagttctgtctctatacctttgcctgctcctgttaatggtagtgagcctgccaactcggaagcctcttccgaacaagttgcccatgacactgatgtgcagcaaccagtcaaggaagctcctgatgaggacgttaatgcaaagaaaactgatgtagccaaagcaagcgagtgaattagcaacatgttggactgagctgatcagagcaattacttgcgaactgaaaacactggagtgtagcctgtgctcagctgccacaagatagcctgaagcaaactgctgtacaataagcaagtgattgttctgccatcaacggtggcatatcactgtacaaatgagcaccattgactaacgcacataagtcgccttgtctgaaactggtcattttctttgaaattcaccctccagttcatgtgctttggtggcagacgtcgtggcatggtatatggtacctgagaacattctttgggtggcaactggttttggctacttagtcttctgttgcctgtaatatgagatgtgatgttatttctagtctagctattgttgtaatttttttggactctacatgtgtcagttcgacttcgaacaatttttttataaagattcgtcactgcattagaggacc

SEQ ID NO: 7181 - DNA, 1161 bp, Zea Mays
ccgccgccgcctcaaaaccctagctcgatggagacattgagggaggccacagcctgcaggtaggttcgttcgactagtcatgggccgcgaaccatctactgcaatttgcagcccatgagagacgatcgggctctccaagtgggcatggtgcagggtagctgggctccctgggctccaacaaggaacgaggcccatctataatgacggttagacaaagaagtggcgcagcggcactaggccatccgttgaagcgttatcccgcagcgggcaaccacggtcacgtacgcgaaatctctctctctcgtggtcgtgcgcttccttcccgagactccaatgcccctgcctcccctgctcccgcgcctttaccccacgccgcctccacttcgcgccggggacaggggtaacgccgtccctctctctcctggaagaagaaggccggcgcttctcgctgtcgtccgcgcaaagagaaaggacgaggcaagcttcaccgaccgcatccttgactacatcgagggagggccaaagttaaggagatggtatggagcacccgatttgcttcccaaggatggggctgcggaggatgaggaggacgagtctcaagatattgaggagtctcgggacgctgtgctagtcaccaatggcgacagtgagattggacagatggtgatattagcactaattctgaaaagggctagaacaaaagcacttgttaaggataaacgaaccactgaagaagcttttggaacttatgtggagtgcatggttggtgatatcggagataagtccttcacaaagagagcactaaggggcgttcgtgctataatttgtccagctgatgatggttttttctctgaaccgatcgacctcaagggtgttcaacacattgttctgctatcacagaaatagtggtggtttgcaagctattatgaacagcaagctgaagacgctagcagagaaggatgaagaagtggttcttgcatctggcatcccatgtacaataatcagaacaggttctctgcaaagcactcctggtcgcgagagaggttttgattttactgagggcatagcaagcaagggaagaataagcaaagaggatgctgctaccatatgtgtggaagctctgaatagcattcccctaaagacacacatttttgagaatca

SEQ ID NO: 7182 - DNA, 1872 bp, Zea Mays
ccgccgccgcctcaaaaccctagctcgatggagacattgagggaggccacagcctgcaggtaggttcgttcgactagtcatgggccgcgaaccatctactgcaatttgcagcccatgagagacgatcgggctctccaagtgggcatggtgcagggtagctgggctccctgggctccaacaaggaacgaggcccatctataatgacggttagacaaagaagtggcgcagcggcactaggccatccgttgaagcgttatcccgcagcgggcaaccacggtcacgtacgcgaaatctctctctctcgtggtcgtgcgcttccttcccgagactccaatgcccctgcctcccctgctcccgcgcctttaccccacgccgcctccacttcgcgccggggacaggggtaacgccgtccctctctctcctggaagaagaaggccggcgcttctcgctgtcgtccgcgcaaagagaaaggacgaggcaagcttcaccgaccgcatccttgactacatcgagggagggccaaagttaaggagatggtatggagcacccgatttgcttcccaaggatggggctgcggaggatgaggaggacgagtctcaagatattgaggagtctcgggacgctgtgctagtcaccaatggcgacagtgagattggacagatggtgatattagcactaattctgaaaagggctagaacaaaagcacttgttaaggataaacgaaccactgaagaagcttttggaacttatgtggagtgcatggttggtgatatcggagataagtccttcacaaagagagcactaaggggcgttcgtgctataatttgtccagctgatgatggttttttctctgaaccgatcgacctcaagggtgttcaacacattgttctgctatcacagctggctgtctacagaaatagtggtggtttgcaagctattatgaacagcaagctgaagacgctagcagagaaggatgaagaagtggttcttgcatctggcatcccatgtacaataatcagaacaggttctctgcaaagcactcctggtcgcgagagaggttttgattttactgagggcatagcaagcaagggaagaataagcaaagaggatgctgctaccatatgtgtggaagctctgaatagcattcccctaaagacacacatttttgaggttgcaaatggtaaggagaaggtgatagactggaaagcatggtttgaagagcagaccaaaagagaagaagaaatacagtaaaaaacaaattggaagtgtttttcgcttgttggtccatgagaaaggaaaatagaaaagagcaaaaaaaggagaggatttataaaaacttgatggctagtttggaaactcaaatgctcttcggaattgaaggggatgggagaggaaattagttcatttctacctcaatcctctccaattccgaacgagatttgaggttcccaaatagcctaaaggaaatgagctgaaggttacgtttgatcctctagccttgctggcaattgaatcatactagtatatccgatgaagaaacaaaagtgcgtggagaagtggaggcacgtctatgaactctacactctgcagttgggctgaagcccctgatccctcattgtttatcaactcattcattatcttatataaaatgcagttcaaattatttgattaaagactttaaccatccacgagtatttctgtacacatgtatctagcgtttctgccagtattgtttgttgttcaatttgaagattaggccatcaagttattacttcagggcaacagaagcctcaagtcaatgtcacatggtactggatttctgcagcaaacatgttaacatgctgccgtctttaagggtttgttcgctttcct

SEQ ID NO: 7183 - DNA, 3110 bp, Zea Mays
ctcctccctcgctcctgccttccctacaaaagccgcgacaaccggcggggacgaggaggagaccgcccgaccccgaccccccccgattgcgcttgcccccccccccccccccccccccatcccgttcggcgcattcgcgttccgccgcacccgcgtggaggccgggccggagcagccagccatgggcgtggatgaggcggggcgcgccgccggcaggaatctcacgctggcaagcatcggcttcgcggacgtccgcgtgggcgctgccgtgcccgggggcgccgggtacaaggacggcctgctcgtcgtggggctgcccgtgcccaaggacgacggcctcgacgccgccgcccgggtcgtccgggacctcgccaccaggctgcccgacgtaggcgccgccgctaggacttttctgaggaatagagaagttgcagaattcgtgagtggagcattggctggtgcaatgactaaggctgttcttgctcccttagaaactatcaggtagttgtcatattttgctctccagatttgtctattcataatcctaagtttggtgtcttgctatttcaaaatatattagtttggatgcatgagaaagttcctagaagggcaagcccggtgcagttgtgagagctgtctcactaagttactaggtcacggatttgaagtagcttctccgtatttgcaaggggagggttgtcttggtttatcctttcccccacacgacactcatgtgggaacctctggcactgggtctgcatgataaagttcgtcgcccacactaggaaatgagtttgtttacaatttttaatgatctggcaaagcccctactgaaatttattgacaaaagaaaagagagaaatcgagtttgaaccaacaacaaaaacaatgaggtcccagacctcatagcaccgagtatcaggaggcaaagaaagaaagagagacactccagaggaaggaacaaaaacaacaggaggaactaaagaaactacagaggagggttctgatcttcttttaactctgccgattatattatgatggtactaatatatatctttcaatgaagtgatacccacttgctattctaactgcagtaatttactacaccaagcacacttagctaaataatatacaattattttgctgtatgttgccattgattcagataaatatcaaaagtgctctttctacttataaaagagtatctacaagtaatctgatatgctttgatcaatttcaggacaagaatggttgtaggggtaggatcaaaacatatttttggtagctttgtggagattgttgaacataatggctggcaaggactctgggcaggtaatacaataaatatgctccggattatcccaactcaagcaattgagctcgggacatttgaatgtgtcaaaaggagtatggcctcggcacaagagaaatggaaagaggaaggatgcccaaagatacaactcggcgatttgaaaattcagttgccatttcacttactatcgccgattgcgattggaggtgcggcagctggaatagctagcactttggtgtgtcatcctcttgaggttcttaaggtacttcagagctaaatccgcatcttgaatatctgtgggcactattcatggaatgttaggttcattttccttactttctttttggggtctggtttatatttctgacttctattgcctattccaaataaatggcaaaccagcaaacttcacagaaatttgtgaggcctcttatttagttaatcgattactttttgctgttcttcgtgtcgcaggatcgcatgactgtcaaccgtgaggcttatcctagtattgccattgccttcagcaagatctaccgaactgatggcattggtggtctttatgctggcctctgcccaacgttggttggcatgcttccatatagcacatgctactatttcatgtacgagaccatcaagactaactactgccgtgcgcacaaaaagaaatctttgagccgtcctgagctgctggttatcggggctctttcaggtctaactgcaagcacgatcagcttccctcttgaagtggcaaggaagcgccttatggtaggatccctgcaagggaagtgcccaccccacatgatcgcggcgttagccgaggtgatccaagaggagggtgccaaggggcttttccgaggatgggcggcgagctccctgaaggtcatgccaacgtccggtgtcacctggatgttttacgaggcatggaaggaccttcttttgagttcacggctccatgcgtagcaggagcttgaagaagtcgggctcttgcattgtcacagaataaatttgttgcgctgtgtcggattttcaacatttttttcttcttaaaaagtcgcacacatgccaaccatttaggagagaagaaggccatcttgtgctggttgcacccttgattagcagcactagccaattggccttcgctgacctgggattatctaactactagcaactctgagcagactcaacctggactgggtatgcattggccccaggcatcgttgttgcgaaatttgtctactaatgaaaaacaaggactattcatgaaccttttgtcactgaatgttgcatgttttgtatgtgtggggcatttatccggttcttaatgagtctcaatgttacacaatattatacatctactggtccaaaaacgagtgttgttgtgggaaatgtgcaaatagactttgttctaatttctcatacgagaactatattagcatttgtgtatgctacaccctcagtgttccaattatagttcagttatgttttgtactaagtcaaacttatcaagagttagtcaagttttagaaaaatatgtgccagcatctacaagtttgaaaagatgcactagcaggacatatttcatggagtggttaacaaaaaaggtattgtagacgttgaagcatttcatggagaggtattgtttgactactaagacacatgttactgttactctataatacaagaagtcctggctgtcaagtaaatcagaccaaatttgctttggttgcattattttcgtgccagctatttgctgcaaaattccagaaccttgtgtatcgaaccacagttgtacatc

SEQ ID NO: 7184 - DNA, 1158 bp, Zea Mays
aaactgtcacaagagaacagtgccactcaaattcggcaggatccagcacgcaaggaagcttggaggatgacactatggatttgggacaaatgaaatccacaaatttttccgctggagagcgcgatcctctgaaaagtatagacaacttttttccaaaaaaaagaaaagaggaaaaaaatgttatcttctacctccttagctgctcttctccatggccgcccccattatcctttccgtccgtcgaaggcgcatcttttcctagctctccccaacaaccctacccgtttcctggcctccgcctccgtccgggtcgcctatcctccccggtggcatctccgcgccgccgacggggagcgggacaaccgcgtgcaggagctgagggtgcccgattcttggctgacgcctgcaggagcaacgcagataaaattgacaagaaacgaagaagaatacatggcattttaataatggtttttgaaggagggacattcgcaacggggacaaaaggaatctgaatggctgagggagacactgcgcaagtggctcgacgacgagtactgcccggagccggccaacgtggacatcagcagcaccgccgcgcggtcgtatcgcgaatccctgatagcggggcagtctgacctgggagagatcttgctgaggatggtgggcgacctggacaagctgtcgtacagggagagcttccacggccccttctcggccgccaacgctgcagtccgtttgatcgctcagaggatggaggagtcactgcctgatgaatgacggtggtgcgcgacctggagtttctatatggcacgacttttgatgaagtcgtaggctatatgtacttttgacgatgaacaattcgatcaccattcctcaccgaggctgtcgctgacagaaaatggtgagaataggctcgagacttcatttttctgctgaaattcgccaacgtactattctgtttatgagcatgtctttgagacgagcggtgaaatgccaacgaggtgggtcgacttaagggagtgcgtggccttctctgaagtagttttgggtgtgaatttgcagttgactagaaataaagggcgcgctccgtggcgccctaccctacggtgccaaaacagatacatgctatctttgtatgtatacagatctgatacgtat

SEQ ID NO: 7185 - DNA, 2031 bp, Zea Mays
catcactgtacatgccgtgaggtggtacaatcctgagtcctaggtcaattggtcaaatccccgctcgagcttgataaaacacgcaaggctgtctgcctgtctctgctcccatctagaaatccacttcgattcgccctggacgctcctgcctcctgctagtcgacgcgcaatccttggcaatctggcagacaggtgaggcgctgagcctgctactactaactaggagccgcggcgggaaatgagggatgcggaggcggcgtcgcgccggcggtggacgctggtgctggtgaacatggcgtcggtgctggagaaggcagacgaggtgttgctgcccgccgtgtacaaggaggtgggcacggcgctgggcgcttctccgaccgcgctgggctccctcaccctctgccgcgcgctcgtccaggccgcctgctacccgctcgccgcctacgcctccgcgcgccacgatcgggcccgtgtcgtcgccgtgggagccttcctctgggccgccgccaccttcctcgtcgccgtctccggcagcttcctccagcaacctgtggctcgcgcgctcgcatacgcatacgcatacgcactgcgcagatggcgatctcgcggggcctcaacggcatcggtctcgcgctggtcctcccggcgatcagctcgctcgtcgccgactacaccgatgaccacacccgtggcgcggccttcgggtggctgcagatgacctgcaacctcggctccatcctggggggctctttcggcgtgctgctcgcgccagtcaccttcctcggcgtcgcagggtggcggctcgccttccactccgtggccgtgatcagcgtcgcgctgggcgtgctcatgtggctcttcgccgcggacccgagcccggccgccaagtgcaagaccgcggcctccgcgggggaggaggccaaagagctgctccagcacgccaggcgcgtcctcggggtgaccacgttccagatcatcgtggcgcaggggatcgccggctccatcccgtggtccgcgctcaacttctccgccatgtggctggagctcgtcgggttcacgaattggcagaccagcgtcatcacggggctgtacctgttcgccaccgctctcggcgcgctctttgggggcctcgtcggagaccctgtcgccagacggttccccaacactggtaggatcgccctggcgcagataagctcagcgtccgcgctcccactcggcgccatcctgctgctggcgttgcccaatgacccgtccaccggtgtggcgcacgccgttacattcttcgtcatggggttcgccatctcctggaacgcatcgtcgaccaacaatcccatcttcgcggagattgtgccggagaaggcgaggacgacggtctacgcactggacaagtgtttcgaagcagtgttcgcgtcgtttgcgtctcccatcgtcggtgttcttgcagagcgcgtgttcggctataagccggtctcgtccgacacgagcgtggacacggacagggagaatgctgccgcattggcaaaggctgtctacacggagatcgccgtgcccatggccatctgttgcctgacctacaccttcctgtactacacgtacccccgagacagggagcgtgctcgaaaggaccttctgatggcatcggatgaccacctcggtggagaagccaatgacaatgagtcaagtgcggttcatacactggtagacgaagaatcttctgtcagctccttaaatcagaggctaatatcttgaggaggctagctgcaggtggagatggggaagtccaccatcgtttcctggactctgtctctctcattcatgtgtggctccacggtttcagattcgccgaaaccgtcattaccggttaccacgcatggaaatgcgaaatctacagaccatatttgcatctaaactcttaggcctactttggaaactcaacccccttcggaattgaaggatgttcagagaaaaataaactaatttctctctcaataagaaacgcaactctttagacatgataaaaaagagcgtttg

SEQ ID NO: 7186 - DNA, 1837 bp, Zea Mays
aattattagttacctacttcacaggattgttgattcatcaattgtatcacacagtagtaaattgtgaattcaagtctaagatgttgatctgtgacatgcattaggtgcactgtactgacaaaacaaataggactatataatttagattcttgtgtcttgcccaagtttgctctgtgagtgttacaaacaaggccatgaagtattgttctcctgttttagattcctgccatcataaacaaggccaacaaggcgccatcataaaaaaatgttattgttgcccttgatgtcttatttatgaatatgtcccttatcacctcgaatctaattcaggaagctctcctgttgttcccgttggaatgcaaaatgccctttggtaataatgataaaatttgcctctggcatggtctagaatgcacccctataatttgcctgattctatatatcatcagaaaagaaagggaggaggtagcatctgctactcttcctgggatcagctagctaggacttgccgacttggtattaacccccatgtgatcttttatagtttattggcctacatggcttacatgttaagcctttatggaagaaaagtgtgaatgactgaatgtggttatttgtggtgctatcttttttttttctaacactgctgcatccagattctcattcatgtagtagtgtttggatgttgaatgcaatgtacgatggtcagaacctggacaagcgaattcacaatatagagttgcagtacagttatctctacaactttgaaatggttaatcggccaattagtattttcttttccattgggcagcccaagattttgtaatggatacctttcttgcattgtgtggcaagtgcaacagcaacattcgtgatgatgttctcctcctccctctctgtggtggagttttacttcctgcacagattccccctgccttttgctggctacctcatcttcatttccatattggctggattctggggccagtgtttggttaggaagatcgtgcatgtgctcaagagagcatcgcttattgtcttcatcctctcctctgttatcttcgtcagtgctcttacgatgggtgtcgttggaacccagaagagcatttcgatgatcaacaatcacgaatatatggggttcctcaacttctgcgagtaactcaaacaccatcagactgtcgatccgtccgggagaatccaggccaatgcctaattgacctcatctccctcaaaatctagaagaataaagtcgccgagtatgtgcacaagttagctcctcgccaacatgtgcgcatttagaccgacagagtcgctgtagtgaattcagctcgtgttagctcctggctaacgagctgaccatacggctttagttttgtgaagtgggcgcgatttcgtcatgtcatgcatgtgttagctcctggctaacctgcaaatgcgtgtgttggtgcaggtttttgtcacgtctgcgtcagctcctggctgaccagcagttgtttgtcgttcattctctgcgtcagctcctggctgaccagcagttatttgttgttcattcttgcgctagcaccaggctaggctgcaaaactgcaaatatttgttgcatggaacattgtaaatatcagtcaattcccattctgtttgtgcaagccgagtgcgtttcaagccgtatttccgtgaaaatcagaacatgttcgctgcggcttccaccgacttctgttttttctacagtatttttattatagctaaagcagtccaaacagctttaatctgtctctttgagtgaagatgctgttttggacctaaaatatgatggatcgaaatcatataaagcactggcaat

SEQ ID NO: 7187 - DNA, 2374 bp, Zea Mays
cggggcgatgccaaaatcgaaacacgcctccccctcctcgtctggctccccgtgaccgatctcgtaatctcatccgcacccgcctggccgccttgcctagccttgcctgctctcctcatgccctggccgccgcctataaaagagcgaggcggaggggcaggcgccggccgttcttctctctccttcttcctcggtcctctcctctccgcatttcgggcggccacttgtggcggcgtagctagcgtactacagctccctgcatggtgatggaggggcgcacgggctcactctacggccgcctcaacaagagcagcacgcgggggttcctcgcctacaccgccgccggggctgcctgcgcggctgtcctcgcctgcttcgtgctctccgccgcggactcgccggcatctgcggcgcgcaacgatggcgagcgcctccgcctgtcctcgcgctcaccgcgcgtctggcccgacctcgcgttcaactggcgggtggtggtcgccaccgtcgtcgggttcctcggttccgcgtttggcaccgtcggcggcgtcggcggaggcgggatcttcgtgcccatgctcaacctcgtcgtcggcttcgacaccaaatccgccgccgcgctctccaaatgcatgatcatgggggcctcggcgtcatcagtttggtacaacctccaggtgtcgcacccgaccaaggaggcgcccgtcatcgactacaagctcgcgttgctcttccagcccatgcttatgctcggcataaccatcggcgtagagctcagcgtcatcttcccatactggctaatcactgtcctcattataatcctcttcgcacctcgtcgagatccttctacaagggcattctgatgtggagggaggagtccaggattctgatggagacacgcgggcgagaagagcaatccaagtctacctgcgctgcaagtgatgtggtcattgatcccagttatggggagcccctcctgactcaacctcagcccaagaagtctgcatgggagactttcatgttcaatctgaggtggaagaatatccttgtgttaatgtctgtctggtcattgttcttggtgctgcaagttctcaagaataattcaaaatcatgcagctctttctactgggtgataaacgttctacaggttccagttgcggtaagtgtgttcttgtgggaggccatgcagttatgtagggagagtcatgcacgacgtatgaatgggaacctggaatgtgtgtgtgaggcctctattgagtggtcaccagcacaactgatcttttgtgccttttgtggccttctcggtgggactgttggtggccttcttggatctggtggtgggttcatccttggcccacttcttcttgagcttgggtgcataccgcaggtggcaagtgcaacagcaacattcgtgatgatgttctcctcctccctctctgtggtggagttttacttcctgcacagattccccctgccttttgctggctacctcatcttcatttccatattggctggattctggggccagtgtttggttaggaagatcgtgcatgtgctcaagagagcatcgcttattgtcttcatcctctcctctgttatcttcgtcagtgctcttacgatgggtgtcgttggaacccagaagagcatttcgatgatcaacaatcacgaatatatggggttcctcaacttctgcgagtaactcaaacaccatcagactgtcgatccgtccgggagaatccaggccaatgcctaattgacctcatctccctcaaaatctagaagaataaagtcgccgagtatgtgcacaagttagctcctcgccaacatgtgcgcatttagaccgacagagtcgctgtagtgaattcagctcgtgttagctcctggctaacgagctgaccatacggctttagttttgtgaagtgggcgcgatttcgtcatgtcatgcatgtgttagctcctggctaacctgcaaatgcgtgtgttggtgcaggtttttgtcacgtctgcgtcagctcctggctgaccagcagttgtttgtcgttcattctctgcgtcagctcctggctgaccagcagttatttgttgttcattcttgcgctagcaccaggctaggctgcaaaactgcaaatatttgttgcatggaacattgtaaatatcagtcaattcccattctgtttgtgcaagccgagtgcgtttcaagccgtatttccgtgaaaatcagaacatgttcgctgcggcttccaccgacttctgttttttctacagtatttttattatagctaaagcagtccaaacagctttaatctgtctctttgagtgaagatgctgttttggacctaaaatatgatggatcgaaatcatataaagcactggcaat

SEQ ID NO: 7188 - DNA, 861 bp, Zea Mays
cagatctataatggggataaaatgcagatttttaattcacttttttgagcatgcagccaagcatggaattcggtcattatgttagattggcaactcatgtcaattttcgtacttttgtgaagtcagctggcattgatttttacccattgggtggtgatcctcgggttatggctcagtatatgacaaaaaacaaagggtttttcctggcggcaccgacagagattgccattcaaagaaagcagcttaaggaaatcatcttctcacttctacctgcatgcacagaacctgatttggatactggaacacctttcagagctcaggcaataatcgcgaatcctcctgcttatggtcatctacacatagcagaagcacttggagcacctctgcatatcttcttcacttttccatggacgccaactaatgaattcccacatccattggcacgaatgcctcaaagtgcaacttataggctatcgtatcttattctggatttaatagtttggtggggctccaggggattcataaatgatttcaggaagaaattaaatttgccccctattgcttacttcagcacataccatggatctatatcacacttacctactggatacatgtggagcccgcaacttatgccaaagccaaaagggcataaaatatttcttgtgcatatgcaaagctagagggatatactttacattgaacaaaagggaagtcatgtaccgtagttctctgttatcataattatacagttttctgcgtttatcaattttgttagatgaatataccttggtggcattcaaattaatttatgaatttcataattagcaaactgtgtccctgtgctagcataatcatgcttac

SEQ ID NO: 7189 - DNA, 1200 bp, Zea Mays
ctagaagtgtgctccttcatttgaaaaagcaagttaatgaacactatgccatctgtatttggccatagtaaatcgacagctactacttctggtaccattaaagggcaagataacgtttttgtaaggtcatactctgataggttgctgaagtgtgacctcactttggatatgctatcagaaaatgagaagataaagataaccgagagattggtaaagatccagaatgatggtacagtggaggtagatgtgacgcgcagtgctcttgttgcctcagaactctcggagattgatgcttttggttgtgtaccacacgatattgaagaagttacacctggaatcaccaaatcagtcccaaagctgaagattgctatacttgtagttggaacccgaggggatgtacagccttttatagcattagctaaacgactgcaggaattcggtcattatgttagattggcaactcatgtcaattttcgtacttttgtgaagtcagctggcattgatttttacccattgggtggtgatcctcgggttatggctcagtatatgacaaaaaacaaagggtttttcctggcggcaccgacagagattgccattcaaagaaagcagcttaaggaaatcatcttctcacttctacctgcatgcacagaacctgatttggatactggaacacctttcagagctcaggcaataatcgcgaatcctcctgcttatggtcatctacacatagcagaagcacttggagcacctctgcatatcttcttcacttttccatggacgccaactaatgaattcccacatccattggcacgaatgcctcaaagtgcaacttataggtttggtggggctccaggggattcataaatgatttcaggaagaaattaaatttgccccctattgcttacttcagcacataccatggatctatatcacacttacctactggatacatgtggagcccgcaacttatgccaaagccaaaagggcataaaatatttcttgtgcatatgcaaagctagagggatatactttacattgaacaaaagggaagtcatgtaccgtagttctctgttatcataattatacagttttctgcgtttatcaattttgttagatgaatataccttggtggcattcaaattaatttatgaatttcataattagcaaactgtgtccctgtgctagcataatcatgcttac

SEQ ID NO: 7190 - DNA, 2380 bp, Zea Mays
cactccgtcagtctcccctccggcctcacgccgcgctcgcggtgctgcctcccgggctcccgttccagcattccaggctcgcatcgcacggcctggccccgcccgctccgacccttctcggcgacactcctcgtaggctcgtactggcacgtccccgctctgtcttctgcccaccaggcactagcgggtgcgggtccacgcttccaagggttccaaactctcggcggcgcaagcaatggcggcgcggggccgggagcactggtagtttcgcatatcgcggcggcttgttgccacctcgccatcgcagattatggggatcaacggcgaggagtgggaggagacggtactgggcgacggcgttgggaggcggaagggtggtgctgaggcttccggtttggtcgcatcctcctcctttgctgaggggatgggggaattcgtgctgaggtctatggacgccaggttctccggatcggtcgacgacgatgaatatgtctcgtctcggcagccagtatttggccatagtaaatcgacagctactacttctggtaccattaaagggcaagataacgtttttgtaaggtcatactctgataggttgctgaagtgtgacctcactttggatatgctatcagaaaatgagaagataaagataaccgagagattggtaaagatccagaatgatggtacagtggaggtagatgtgacgcgcagtgctcttgttgcctcagaactctcggagattgatgcttttggttgtgtaccacacgatattgaagaagttacacctggaatcaccaaatcagtcccaaagctgaagattgctatacttgtagttggaacccgaggggatgtacagccttttatagcattagctaaacgactgcaggaattcggtcattatgttagattggcaactcatgtcaattttcgtacttttgtgaagtcagctggcattgatttttacccattgggtggtgatcctcgggttatggctcagtatatgacaaaaaacaaagggtttttcctggcggcaccgacagagattgccattcaaagaaagcagcttaaggaaatcatcttctcacttctacctgcatgcacagaacctgatttggatactggaacacctttcagagctcaggcaataatcgcgaatcctcctgcttatggtcatctacacatagcagaagcacttggagcacctctgcatatcttcttcacttttccatggacgccaactaatgaattcccacatccattggcacgaatgcctcaaagtgcaacttatagggggattcataaatgatttcaggaagaaattaaatttgccccctattgcttacttcagcacataccatggatctatatcacacttacctactggatacatgtggagcccgcaacttatgccaaagccaaaagattggggtcctctagtggatgttgtgggatattgcttcttaaatcttggaacaaagtatcaaccgccaccacaactgtcacagtggcttcaacaggggcccaagccaatatacattggttttggtagcatgcctcttgatgatgagaaaaaagtcactgctatcattttagatgcacttagagaaacaggacaaaggggaatcattagccgtggttggggagctcttggaagtttttcagaagttccagttgatgtcttcatcttggaggattgccctcacgattggctcttccctcggtgtgctgcagtggtgcatcatggtggagcaggtactacagcagcagggctgatagctgggtgtcctactactgtagtgccgttttttggagaccagttcttctggggcgagagagttcatgcacgaggagtgggtcctgcacctatatctatcgcagaacttactgtagaagcactatcaaatgcaataatattcatgcttgatccagaggtaaaatcacgaacaatggaactggcgatagcaataggcaatgaggatggtgtggcagcagctgtagatgcatttcatcgtcacctgccttcagaattgccgctgtcgccgcccgcacatgtggaggaagaacgcacagacttcttccaatggttttctcgaggcctggagaagtgttgtttcccattcagtttttaggtacggcagtccgtacgctaggtatatgtatgatttattcatttatgagttgaaaaggtatatcacagtaattttctaaaattggaataaatgctggtataagccaatggtgaggatgcaataaaaaagatcgacgcaattgtaaatgtttgggcagctacaattgtattcagaatttgctggtaggcctgaaatttgtgccccgatgtgccttccagtatgagtgtagtagctacagaactgagcgatca

SEQ ID NO: 7191 - DNA, 1749 bp, Zea Mays
aactctctagaacctcgcgggccattcaaaaggctgcgccgttaaccccatcccttcgcctgccctgcccacgtggccacgtacgagtgacctcgattattctgtttgctctcgttcaagtcatcgtctggtcgcgtcggcagcagacgcccagagccggagggagcgccatggccgcgtcggatctggagagcaaagccaaggaggccttcgtcgacgacgacttcgagctggccgccgaactctacacgcaggccatcgacgccgggcccgccactgccgatctctacgccgaccgcgcccaggcgcacatcaagctcggcaactacactgaggctgtggcagatgctaacaaagcaattggtcttgatcctacaatgcataaagcctactaccggaaaggtgctgcatgcattaagcttgaagaataccaaactgcaaaggctgctcttgagttaggttcttcctatgcaccaggcgattcaaggtttacccgtctattgaaggaatgtgatgagtgcattgctgaggaatctagccaggcaccagcaaagaatgtcgaggctcctgtagctgctactgttgaggacaaggaggatgtcgcaaatatggataatacaccgccagtggtagaacccccaagcaaacctaaatatagatctgtttactgataagcatattcttgtttgtggagccatacaaggaggaaagaaaaatgcttctctcttactgaaattaatgtcaagcatgagttgctagctttttgctaaagttttctcctaaataatttgtgatgcaggcatgactactacaacagtgccacagaagtggtcctcacaatatatgctaagggtgttcctgctgatagtgtagtcattgattttggtgatcagatgttgagtgtatccattgaagtacctggtgaagaaccgtaccattttcagccccgtctgttttctaagattatccctgagaaatgcaagtatcaagttttatccaccaaggtcgaaatacgccttgcaaaagctgagcaggtgacatggacaaccctggattatagtggaagaccaaaggctattccccagaagataagcacgccagctgaaacagccccaagaccttcatacccatcttcaaagtcaaaaaaggactgggataaactggaagctgaagtaaaaaaggaggagaaggaagaaaaacttgaaggtgatgctgcattgaacaagttcttccgtgatatctacaaggatgctgatgaagatatgcggagggccatggacaagtcattcagggaatctaatggtaccgttctctcaaccaattggaaagatgttggatcaaagacggtggaagcgagccctcctgatggtatggagctcaagaagtgggaaatttgaagtttggactgcccctcttgtaaatccaggtcttggaagttatgacctagttctgtccacccatttggtgtcgtaagtttggttaagtgtgtgtgtgtttttggttcagctgtcgttcgaggaaaagctattgtaagttgtggactgtgtaaaagctgcaatagattgtgggttgtgaaaaaggtgtatgctgtttaatttaaacaagcataaaacttacacgtgtctctattttttcattttcttgaaacctgcaattgttctctagtttcatttcgctattttagaaagtagaaaaccaacaaaaaacaggatctgcaataactaaaagtagctgcttctgacaagcagc

SEQ ID NO: 7192 - DNA, 1007 bp, Zea Mays
ccttactcaccatttgcctgctccagtcttagccgtccaaaaagtatcagatgaggtgttttagcacagaagtggagcgacctagttttacaaacgcaacaacacgactcactttagagagcggtaatgttgagggagacaaatctctctccaccatcgcaccgcgccgtcctcgccctcgccgctgcgcccctcccgcgtcttccgcctgctccggcggcgctctcgcctgcgccgcctgctatggggctgctcacgtcggcggagctcaactacctcgtcttccgctacctccaggagtcaggttttattcatgctgcatttactctaggttatgaagctgggatccataagtgtggcattgatggtaatgcagtcccacctggtgctcttatcactattgtgcagaaaggcctccaatacattgaactggaagcaagtagcgatgagaattatgatgaagttgagagggattttgcgcttttggagccacttgaaatcatcacaaaagatgttgaagagttgcaacagattgtgaaaaggaggaaaattgagagatctcaaactgaacttgagaaggataagggaaaagagaaagaacgtaacgaggagcatgaacgacgtccttgtggcgaaagggagagggaacaacatgaaaaagaaaaagagcaagtcagggacaaggacaaatctgaaaaagatagggaccatgataaagagaaggagaaagagagagaaaggcagcatgcagagcgtactgataaggttaaacacgaggatgattctcttgttggtgcaggacgatgggggatgaacactaaagaggacttggaggaggcctcaatctctttcatggtgtccttggctgtggtgcctggaaacattctgagaagggaagcatgttgtaagctgaatgcaccatgagcttgcacaggtgagggacctccagatcatgttgtttccaagaggtcatactatggtgagcatgaatggtgcggtggtcgcgt

SEQ ID NO: 7193 - DNA, 1654 bp, Zea Mays
gcaaacggacaactcaagtggttcagtgtagacagacacctcaagcggaagcaactagaattgaatgatgaatatatcaaacagagggagagatcagagagggagagatatggagcggggagggaaatgagagggaggaggttaggaggattacttggtggtggtggtggtcccactccaatggatgtaagtacaactgttcaggagatatctaacactgatgttactgttttggaaggacacagttcagaggtttttgcttgtgcgtggagtccaactagttctcttctagcttctggatcaggagactcaactgctagaatctggacaattccatatggtccatgtggttccgacatgcaaccatattctcctggtgttcatgttttgaaacattttaaaggtcggaccaatgaaaagagcaaggatgtcaccacgcttgactggaatggtgaaggtacactactcgctacgggctcctacgatggacaggcaagaatatggagtagagatggagacctgaagcagacactgttcaaacataagggacccatattttcattgaaatggaataagaaaggagattttctcctaagtggaagtgttgataaaactgctattgtttgggatacaaagacatgggaatgcaagcagcagtttgaatttcattcagctccaacactagatgttgattggagaaataataactcctttgcaacatgttcaaccgataacatgatctatgtttgcaagattggggaacagcgtccaattaaagcattcagtggtcatcagagtgaagttaatgctataaagtgggatccgactggttcttttttggcttcatgttctgatgattggacagcaaagatatggagtatgaaacaagacaaatgtatatttgatttcaaggagcataccaaggcccaggaacaaacaatcctaatcagcagttgcttttggctagcgcatcttttgattcaaccatcaagctttgggaagttgagcagggacgccttctgtacagcttgtccggtcataggcaaccagtgtattctgttgcatttagccctgacggcgagtacttagcgagtgggtccctggatcagtgcctacacatctggtctgtgaaagaaggcagggtcctgaagacctacagaggtactgggggcatattcgaagtgtgctggaacatagaaggcaccaagattgctgcctgtttctccaacaacaccgtctgcgtcatggatttccggatgtagcccaaccagtaggggtagcgacgtagtgcagatcaagcctaaaacaagtctggatcacaagcccttcccatggaaacgtgtgaagagagcggaattgttagcagaatgcagatcttaggtggtggtttttttttttgcccatgtacagttcttttttcctaggttatactgtagcgatgcgttagtagcatggaaatgttttggtggcaatcctcctaatttctgaatgcaatcttaccatatttaaactcttaagtattccatcgttttatatagtcgagaaatacaaatttccattattgacacttggaagagagttgtagagaaaaagaagtgtcgcacatggctagagcacactagctgagatgagacagtatataatactcctgaat

SEQ ID NO: 7194 - DNA, 2739 bp, Zea Mays
catagagctagatcagctgaaactcaagtctggaaatcaaatctactgaaactctacctgaagagagcatcccaacatggcaacatagagctagatcagctggcagcccaccacgctgctggtacgacacagaccacgttcaattcaaaacccaaatcaactccgacgctcccagacaccagaccaccgtcgctcgctcgcctgcacaacctctccatccaggccacagctcgagaccaacgaccgacgcctagacgcggctgggcggtcggcctcacctcgttcccccgcctcccttcttcctgctccgcgtctcgatctcgactcccccgccgcgtcgcgcgacccggccagatctcgcccaccctgcgccgcggccatggataacttgatcaccctcgtcaacaagctgcagagggcttgcacggctctcggagaccacggagaggagagcgccctcccgacgctctgggactcgctgccggctatcgccgtcgttggaggacagagctctggtaaatcatctgtgttggagagcgtggttgggaaggatttcctaccgaggggttcaggcattgtaacccggcggccgctggtgctgcagctccacagaattgatggtgacagggaatatgcagagttcatgcatcttccgagaaagagatttacagattttgctgctgtgagaaaggagatagctgatgaaactgaccgagaaacaggccgttcaaagcaaatatcaactgtccctatccatttaagcatattttctccccatgttgtgaatcttactcttattgatcttcctgggcttactaaagtagcagttgatggccaaccggagagtattgtacatgacattgaaaacatggttcgctcatatattgaaaagccaaattgtatcattctggctgtgtccccagccaatcaggaccttgctacttctgatgcaatcaagatttcacggggaagttgatcccaaaggtgaaaggacctttggtgtgctcacaaaaattgatctgatggataagggtaccgatgctgttgatatactggaaggaagatcttaccgtctccaaacaccatgggttggtgttgttaatcgatcccaacaagacatcaacaagaatgtggacatgattgctgctaggcgtagagagcgagagtattttgcatctacaccagaatataagcacatggcttctaggatgggatctgaatatttaggaaagatgctttcaaagcatttggaacaagtgatcaaatcaaggattccggggatccaatctcttataacaaagacaattgcagagctggaaactgaacttaatcgtcttggaaaacccattgctaatgatgctggggggaagctgtacacgatcatggaaatatgccgtatgtttgatggtatttacaaagagcatctggatggagtgcgccctggcggagagaaagtttaccatgtcttcgacaatcaatttcctgtagctattaaacgattgcagtttgataaacaactctctatggaaaatgtgaggaagcttataacagaggctgatggataccagcctcacttgatagctccagaacaaggatatagacgccttatagaatcttgtcttattagtatcagaggtcctgctgaggcggctgttgacgcggtccatgcaattctcaaggaccttgtccgcaaggctatcaatgaaacacatgaactgaagcagtttcccacccttcgtgtggaagtaggcaatgcagcttttgagtcattggatagaatgagggatgaaagcaagaaaaatacattaaagctagttgacatggaatgcagctacttgacagtagatttcttcaggaagcttcctcaggatgttgagaagggtggaaatccaagccactctatttttgatagatataatgactcttatcttagacgaattggacaaactgttctgtcatatgttaatatggtgtgttcgaccttgaggaactccatcccaaaatctattgtttattgtcaagtgcgagaggccaagcgctcgctgctcgatcacttcttcactgaactgggagcaagagagatgaagcagctttccaaacttcttgacgaagacccagcagtcatggaacgcagaactaaccttgcaaagaggctcgagctgtaccggagtgcccaatccgaaattgatgccgttgcatggtccaaatagtcctgatggccaagatatctgttcttaccccttgtctggcgattctctctcctattctggggcatatatagctgattttttgtgttgtaggtcaggtcattttatatatcaccggagctgtacggtgtcatgttccttgtgcttgaggatctaggggggcacttgtatctcgaacaagttcgtacatcgcgctttcgttccatctatgtgcagctgcatgaaaaccatgtttttctgtcacgcaaaaagtttgtcctattaaaaccctagtcctgggggtttcaaccaaaacacactaatgctgtgcagtaatcataagaaatgcggcgggaacctctgataactccagaaaacgactgttctgcaggatgtatattagattagcatctaaacattagcttcttagtcgtagtagtatacgtaaattcacccaaagcaataggcgtgatacattactgtgcgctgtattcgattcgatgatcgactatattttgtacagagttatgatcaaagctaaaaatgaatacac

SEQ ID NO: 7195 - DNA, 1688 bp, Zea Mays
cgccacggtaccacccgccgctaacctctatcgcgttcaccatcagggcaccaccgcctccattacccccgccccctgctgccacgtccaccaccacggcaccaccgccgcccccagcgcgcgcggcccaccactaacagccagcttgggtggccgctccttccctcccttgcctcaaaggacttcttcccacgcgatgttaggagcagacatgaggcggcgagagtccagcatcggagatctccgccgccatgtaggcactgcccagcaccttgcggcccgaaaaccgtcgatctaatgccctgccctccttctccgatgccttcgccctcgcctcaggcagggtccctctcccgccttgcctggctctacgtggtcggtcggttgtggcgggatgtgcagacaggacgatcgtgtccggcctcctcgagaagagctccagcaacgtatctagaaggtgctcttgatggaggacaagcttaggaaccttggatgcaaggtgattggaaagaaaactattgaggtggagatggacctgaccaaggccaagagcgagaggtacctatgggggaacaacactgcagctatgaactccgacaagaagcagcagtttacactgggtttggctccagtctcaaaagaaacgtctgtttcagtaagctgatggtcggtcacccaaaggacccattatctatttttattaatgttaatatattaaaaactggttagagtaaacatacatattatgctatcatgtacatatatgcctctatgagacataaatatatgtgtcatgtttcaactttcatgaatttttttcctcaacgagtaacatactagtgataataacaaaattatttaaaataataaccattatatataacttataaattatcatgatagatttggttatatattttaacttaaatatttgacatatggtataactataagttcataagtgcatatataaattctttgacatgaaaaacaagaaatattgatacatggggggcaattggtgtcgattgcagatggctacatctttctagaattcatatttctttgtagcaaatagtcattataataacaagtattaatatcctctccaggttagcaatactaaccattatagatctctgtttatttatattgtcccttcatacatattaatgtacatacacatcctttctttctcgttattccaatccctcctggacatagatacaacaaatatgatttgttccgtagaatcacaaactcttttgtacaggttgcaacttttaccagatcaggtatgatttcccacaaaaaatgaaccctgcttttttatagtccttgtcaatgcactcaacttaatagtttttcccatagcgccccttaattgggcagagaaaaagtagaatccatcactatgttttattaaacactatgtacgtatccatgtatgttgttgtgtaaacatttgcatatgtatataaccatacacacagacataatgtgttagtacacataatgcatgcacatggatcttattagttgtctcctagcctgcagcatcgcataatatgacttcaaattattttcattgcatttcaattaatagtatacttcattatcatttttccctttttcacatttttaataatctgtatattgggttgttcattttctagaaccaggctgag

SEQ ID NO: 7196 - DNA, 1498 bp, Zea Mays
gttgcacttgcacggtctgatgcgatagatagacagacagacagacagacagacagaccctcgcgacgactctgctctgtttaatttgcgtggccgacgttgatgtgcttcgagctggcggaccagcgcggaccgcagggcggcggcggagcggggtggccggcgaagcggcgcgcgggaggcgtgcaggacgagggcgcggccgcggccgcggggatggcaatggcggccgccggccccggggaggtgatgtccgagtactaccaggcgcaggagctgtcgacgatggtgtcggcgctgacccacgtcgtggccggcgcgccgatggggagcgcccctgcgcagcggccaatgcacggcgcctccggctactacgcgcacgagatggggagctaccgcggcgcgccatcgccggagctcgcagggtcggagctgagttcggacacccagagcgcgggcgcggcggccatggaggagcaccagtcggcagctgcgctgtccagccaggagggtcccgagacgccgcggaggcgctaccgcggggtgcgccagcggccgtggggcaagtgggccgccgagatccgggacccgcacaaggcggcgcgcgtctggctcggcacgttcgagaccgccgaggccgcggcgcgcgcctacgacgaggccgcgctccgcttccgcggcagccgcgccaagctcaacttccccgaggacgcgcgcctctacccggcgtccacggcgggcgcggcggcgcctctcgccgcggcggcctcgacctccccacctgtctactccggtggcgtccagggctcgtcggactacctgaggtaccaccagatgcttctgcaagcgtccacgggcagccagggcaccctgctcccgttctatggcggcggcatgagcaatccctacggcggcggtgccgccatgaccggttcctacggtggagccggcggcggcaacacgagtggttccttgggctcctactactcgttcccggcctcctctgtttctgtcgccaccgtgccgtcctctacttcctctgcttcggggtactactactcgtcgccgcacgactcgcaacacagcgaggcgtccgcggcggcggactggaactgggagagcgcgctggcctggcccgactcgagccagtacccgccgccacctcacactcagtagcagcagccagtagcggtcttcttcttttctctgtaacaataagtaaggtgagtacggttgcgcggagggagacgcgcggcaacgcaaagcaaaacaaagcagatcaacaagaggaggatgctttcatttctttcgtgttatgatgatgacacccgagtggtctttgtttgttgatttttagttttggtcgacgatgtggctggcggctatccccattgtttccatttaatcttggctgcgaatttaagagatgaaagctccaccccgttctccaagactccatcggtccttcctctgctgccgagcgttctgttgctttccg

SEQ ID NO: 7197 - DNA, 2119 bp, Zea Mays
cacgctgtcatgctcccaaattacggcgcctactctgttttctgattcactgaaccgagcgagttctcgtcgcatcgtatgcgcctccttctctgattccccaaaaatattccctgttttgctgttcttttcttcctcgtaatccgctcggcttccattgttgccgccgctaccgacggcgacggcagacatcaagtgtcagtcctccttccgccgaagtcttcttttggttggactccgactctccgacaggagttgcgctcctcctccccctctactctactggattacactagcgtggagatccatctctatttgtttttggtctcttctttgcttggggcaaggtcaatcacagttgataagataccacttgtactctaatctgtcagtctccacgtgcggctgcatatatactgtttcaaaatttcggagtaaggtctgaagtctgaaccctcatgctgcttcagagggattgaggctggttgttggtcgcacttgcacatggcgcagccacagcagcgggtgtaccaagcttggaagggggataacaggttcttctttggtgggcggttgatatttggaccaaatgttaaatctctaggtgtttctgttgccctcattgttatcccagttgctgttttttgtgtgtttgtcgcacaccatctccgtcatcagtttcatgcatatgatgcaggatatgcaattcttgtcatagcaatagtgctcacaattagggtgcttctattactcttaaccactgccgctcgggatccgggaattgtacctcgtgcttcacatccacctgaggatattcactatgataatttgtctcttactgacacacctggaatactacagttcccctgtgtaaaagaagttatagtaaatgggatgcctgtgaaagtaaaatattgtgaaacttgtatggtttttcgcccacctcggtgttcacactgttccatttgcaacaattgtgtggaacgctttgatcaccactgtccatgggtaggacagtgcattggaaaggatttcatacatatctcatcagcactaatcagaccacatacgaaaattttcggtacaggtcggatggcaggcttaatgtctatgatcaagggtgtctgagtaactttcaagaagtagtgtgtgccaagatagagccttctaaacataagttccgggcgcacatacaagaggaagtgcgaggtccactagctaaccgtgctggagagactgaagaagaacaagttggtggtcctcgagcgtaagcgggggatggcctcgatattgatggtgatctgatgaagatttcacataggcataaccatgaggacatcgatattgaaataggatgtggggatgctaatgaggtggaatgctcagtttcagattccaaagttaaagacaatatggatgcacatatgtgatatgtagagttagaaataaggtaaatggagaacagtcgagttgggttccagcggtttaatgaatgtgtttgtttagttcataagtaggcaaaatgccgtctcctccggtggtttcagcattattctttttgtaaatggctagtgcaggatacttaggatgctaccctgcaggttctcttgtgcattccgaccagcgtgtgtgttgaattcttaccctcggatccttcagaagacgtttgtgtatagtgtcttggttgagaaatcccaagatggtgtatgaattcagattggtagttctaaacttgttgtctttcagttccacacaggcagaagtcattgcttttcagctcaggctgtctactttagcatcagtttgctctgtccagaaagaaaataaaaaaaaagaactgcagcaagattggcatggtgctatgaccaccagagtcacatctgtctttgaacgctaatctggttggttcatgccaaacattcctttgttgccttgtggatttaaaagacttggacgcttggctgggctttggtcggcgctggcagtatcatgccgaactctgaagacaccaaaactgtcagctcctcctcttgtcaattcaacaaaatgtctgcttcaaaatggttctgcgatgccgaagaaaagtccgggagttgataaaataataccatgggacgtg

SEQ ID NO: 7198 - DNA, 2135 bp, Zea Mays
cacgctgtcatgctcccaaattacggcgcctactctgttttctgattcactgaaccgagcgagttctcgtcgcatcgtatgcgcctccttctctgattccccaaaaatattccctgttttgctgttcttttcttcctcgtaatccgctcggcttccattgttgccgccgctaccgacggcgacggcagacatcaagtgtcagtcctccttccgccgaagtcttcttttggttggactccgactctccgacaggagttgcgctcctcctccccctctactctactggattacactagcgtggagatccatctctatttgtttttggtctcttctttgcttggggcaaggtcaatcacagttgataagataccacttgtactctaatctgtcagtctccacgtgcggctgcatatatactgtttcaaaatttcggagtaaggtctgaagtctgaaccctcatgctgcttcagagggattgaggctggttgttggtcgcacttgcacatggcgcagccacagcagcgggtgtaccaagcttggaagggggataacgtgcttctattactcttaaccactgccgctcgggatccgggaattgtacctcgtgcttcacatccacctgaggatattcactatgataatttgtctcttactgacacacctggaatactacagttcccctgtgtaaaagaagttatagtaaatgggatgcctgtgaaagtaaaatattgtgaaacttgtatggtttttcgcccacctcggtgttcacactgttccatttgcaacaattgtgtggaacgctttgatcaccactgtccatgggtaggacagtgcattggaaagcgcaattgccgttattttttcctatttgttgtctcttcaagtctcctctgcatttatttgtttgttatatcggccttgtacatcaagtttctcatggatggagactatcctacagtttggaaggcattgaaacattcccctgcttctctagcactaatgatatactgttttatctctctctggtttgttggtgggctcacaggatttcatacatatctcatcagcactaatcagaccacatacgaaaattttcggtacaggtcggatggcaggcttaatgtctatgatcaagggtgtctgagtaactttcaagaagtagtgtgtgccaagatagagccttctaaacataagttccgggcgcacatacaagaggaagtgcgaggtccactagctaaccgtgctggagagactgaagaagaacaagttggtggtcctcgagcgtaagcgggggatggcctcgatattgatggtgatctgatgaagatttcacataggcataaccatgaggacatcgatattgaaataggatgtggggatgctaatgaggtggaatgctcagtttcagattccaaagttaaagacaatatggatgcacatatgtgatatgtagagttagaaataaggtaaatggagaacagtcgagttgggttccagcggtttaatgaatgtgtttgtttagttcataagtaggcaaaatgccgtctcctccggtggtttcagcattattctttttgtaaatggctagtgcaggatacttaggatgctaccctgcaggttctcttgtgcattccgaccagcgtgtgtgttgaattcttaccctcggatccttcagaagacgtttgtgtatagtgtcttggttgagaaatcccaagatggtgtatgaattcagattggtagttctaaacttgttgtctttcagttccacacaggcagaagtcattgcttttcagctcaggctgtctactttagcatcagtttgctctgtccagaaagaaaataaaaaaaaagaactgcagcaagattggcatggtgctatgaccaccagagtcacatctgtctttgaacgctaatctggttggttcatgccaaacattcctttgttgccttgtggatttaaaagacttggacgcttggctgggctttggtcggcgctggcagtatcatgccgaactctgaagacaccaaaactgtcagctcctcctcttgtcaattcaacaaaatgtctgcttcaaaatggttctgcgatgccgaagaaaagtccgggagttgataaaataataccatgggacgtg

SEQ ID NO: 7199 - DNA, 2675 bp, Zea Mays
acaaactcttcatctccatctatctgcgccaggtgccgccaaaacgaggtcggcacccacaggccacaacccaacccaacccaacccaactgaatccaacgggacacgagagcgacgtcatggtgctggaggtgggcaccgccgtgggaatacgaaccacctccacttgggctgcaggtccagccgcccggcgcagatcacggggccaggtcgtctccttcgccctcgctcccgcgtcgtcccgccgggtccggcaccgttgccgcgcgatgcaacagcacgaggaggagcaggagcggccgccgaccgtccgcgcggtcaccatccccttcgccgacctcagggtgccggacagggaccttggcgacaagatcgaggaaggtctgggtccccatgggctcggcatcgtcaccattgccgatgtacctgagtttccagagctaagaaaaaggctgctgcgcttggcacccaggattgcaaaccttcctgaagaggtgaagaaacagcttgaagatccagatagcagatataactttgggtggagtcatgggaaggagaaactcgagtccgggaaacttgacacatttaaaggttccttttatgcgaaccctgttttggatgtccctactactgatgatgtgcttgtaagtaggtatccatcatattgccgaccaaatatatggccaaacgataatcttcctgagcttgagatagcatttaaagatcttgggaagctgatgatggaagttggtttgatgttggctcatcattgtgatcgctatgtaatgaggcaaggagtagggtcatatgatggtgacagtcttgagcagacaattgctcgttcaaggtgtcacaagggtcgtctgttgtactatttcccacgacagtttagcaagcagacagacttcgactcggtttcatcatggtgtggatggcacactgatcatggatctctaacagggcttacatgtggcttgtttacgaagaattctatggaggtaccatgtccagacagtgcagctggactatacattcggactcgtgataaccaagttgttaaggttgtgttcgacgaggatcagctagcttaccaaatcggggaaactactgaaatactgtcaagaggttatctatgtgcaaccccacactgtgtgcaggcacccagcagcgaaaatgcttcaaatgttgaccgctctacttttgccttgttcatgcaaccagattggaatgagaagctgaagtttccaagcgaaatcccctatcaccaagagttgattccaccaaacggaacgctgactttcggggagtactcagaaaggctggtagacaagtattaccagacaacaacgtagagcatacctcaagaaaagctaccgtccatacgttcgtaccatcaagtgtgttcttgtgtattcatttttagctttgatcataactctgtacaaaatatagtcgatcatcgaatcgaatacagcgcacagtaatgtatcacgcctattgctttgggtgaatttacgtatactactacgactaagaagctaatgtttagatgctaatctaatatacatcctgcagaacagtcgttttctggagttatcagaggttcccgccgcatttcttatgattactgcacagcattagtgtgttttggttgaaacccccaggactagggttttaataggacaaactttttgcgtgacagaaaaacatggttttcatgcagctgcacatagatggaacgaaagcgcgatgtacgaacttgttcgagatacaagtgcccccctagatcctcaagcacaaggaacatgacaccgtacagctccggtgatatataaaatgacctgacctacaacacaaaaaatcagctatatatgccccagaataggagagagaatcgccagacaaggggtaagaacagatatcttggccatcaggactatttggaccatgcaacggcatcaatttcggattgggcactccggtacagctcgagcctctttgcaagcattgaaatatttacatattggagatgtggtaaaggctatcatcagcccacaaacaacgaccaacaaggaagctacagtatatcgaatgatcgaacaaacaaggcaagcgctacaatataatgaaattaaagtgaagaagtgatcgagcagcgagcgcttggcctctcgcacttgacaataaacaatagattttgggatggagttcctcaaggtcgaacacaccatattaacatatgacagaacagtttgtcctgttgatcgtttagtacagtgagatgttaagcagtaaataatcaactatcaagcaaaaatgcagagatcatataggccttaccaattcgtctaagataagagtcattatatctatcaaaaatagagtggcttggatttccacccttctcaacatcctgaggaagcttcctgaagaaatctactgtcaagtagctgcattccatgtcaactagctttaatgtatttttcttgctttcatccctcattctatccaatgactcaaaagctgcattgcctacttccacacgaagggtgggaaactgcttcagttcctgcagaaaggtaatcaaacagtttaaataagcatcctatagacattattttgtcgggggtttgcatggtataatagtagaaaagaggaaaacttacatgtgtttc

SEQ ID NO: 7200 - DNA, 2943 bp, Zea Mays
ttatgtgctttgttgcttcctatgtttaacctgtagcacactactcttcttgagttcataaatttacatgcaaagtgccaagcagcatgtggtccaagattggtcgtctcaggcgatcattaatgcccaggcttaccaaaggaagcacactctatggttctggagcaagtccaggaattatgtcctgtgttgctggccgtcttctctgtgacacctatttatgctctcgtgaccttctgaaggaggtgagttattccttgacacaacttgcagaaacacagttaaaaaaggtcaggaaggaggtttctccacacgatatacctatgatgttccagtcttcaggcgaactgctcaaactggttgaatatggtgagacagatgcatggctttctttggagctcatgtttcatttgagtgttctcccactgacacgacaattaaccaacattagtggtaacctgtgggggaaaacactccagggtgctagggctcagagggtagaatatctactactgcattcattccatgcaagaaaatttattgcaccagataaatttgcacgcaacaaagagctgaactccacaaaaagaaaaatgaatcctgatactgggggtgcaaatgctgatgatggtgctgctgatccttccgttgatgatgaagtgcataatggtgatcaaagtaaagctagaaaaggaccttcatatgctggtggattagttttggagcctaagaagggtctatatgacaagtatgttctacttctcgacttcaacagcctttacccttcaataattcagcatcaaaagttactggtgttttacctgagttgctgaggagtttggtggagaggagaaggatggttaaatcatggttgaagactgcttctggtcttaaaaagcagcagttcgatattcagcaacaagcattgaaacttactgcaaatagcatgtatggttgcttgggcttttccaactccaggttttatgcaaagccacttgctgagctgattacactccaaggtagagagatattgcaaaacactgtagatctggttcagaacaatttaaatttggaggttatctatggtgatacagattctatcatgatacatactggacttgatgacatctccagggcaaaagcaattgcaggaaaggttattcaggagatgtgcaaactgaagaaagatggtcttaccaagaatgcttcaattcaggtgaacaaaaagtaccgttgtctggagattgatcttgatggcatatacaagagaatgttacttcttaaaaagaagaaatatgctgctattaaagtagcactggatggcagcttacgagagaacattgaacgcaaggggctcgatatggtcagacgtgattggagtttgctgtcaaaagacattggagatttttgtcttaaacaaattctgtctggagggacatgtgatgatgttgttgagtcaatacatagttcacttgtccaggtgcaagagcaaatgagaagtggtcaaatagaactcgaaaaatatgttatcacaaagagcttaacaaaagcaccagaagattatccagatgctaaaaatcagcctcatgttcaggttgctttgagactcaagcaaaatggttactctggttgctcagctggtgacacagtaccttatataatttgctctcagcaggactcagataatgcacattctgtgggaatagctcagagagctagacatcccgaggagttaaaaagagaccctgacaagtggatgattgacattgactattatttatcacaacagattcatcctgtcgtttctcgtctgtgtgcttccattcagggcactagtccagctcgtctggctgaatgtctgggccttgattcggctaagttccaaccaagattgactgagtcgagcaaccaagatacatctatgatgctgttatctgtaatcgatgacgaagatgagagatatcgtggttgtgaaccactgcgtttgtcatgcccaagctgttctggtaccttcgactgcccccctgtatctagtctgattactagtgctagtgctacaagtgtatcagatccaattgaaggaaaggatgctactgctaatttctggcgccatatgcggtgcccaagatgcctagataatactgttgagtccaaattttccccttctatgctcgccaaccagatgaaaagacaggctgataatttcattagtctatattataaaggtttgcagatgtgtgacgatgagggttgcaaatactcgactcacagcgtaaaccttagagttatgggggattctgagagaggaactgtctgtcctaactacccacgctgcaacggtcgcctagtaagacagtacaaggagtcagatctgtacaggcaactatcatacttttgttatgtacttgatgcaacccggtgtcttgaaaagctggaccagaaggcaaggctccccttcgagagagagtttgtagcagtaggccaaacaattaaattggcactgctagagatccagaaaatccgagacagatgtgcatttggatgggttcagctaaaggaccttgccgtatcaatatgatgtttttcttgtgtgaaagggctcaattagataagtttgaattaaccgtgcaagaaattcatctctctgtaggttattctagatctcgttggtaaaaggaacaggacacggcaaacggtgtatcgaaacaccagccgtctttggtatttccctgcgtgacagaccttgtatcatctatacatgtgttttagccagtggctgtattgtacaactttatgttgtgtccgtctccataggcctcggtgcatgtgccaatgtagtcttgttaatataattatacgcagcgtgtgatgagaaaaaaaaaacaagacactagattactaatgtcgcgagttgcggtagatgggaaaaatatgggagggaca

SEQ ID NO: 7201 - DNA, 1153 bp, Zea Mays
gttcccgtcctcctcgttgttttgttccgtttccccccttgcctcgctcgtcgcgtacagctggacgcctcctttctcgctgcgggctgttgccttgcctccgtcccctcccctcgtcgcctccgactccacctcccctccccggtctctgagagagggagcccggacccggagaccgccagcaagcgcgaggcagaggaggagcatggcggccccgccgtcgaggtcgcggggcgactacgaccacctgattaagctcctgctcatcggcgacagcggagttggaaagagttgcttgctgctgcggttctctgatgacacattcacgacaagttttatcaccaccatcggcattgatttcaaggttaggacggtcgagctcgatggaaagcgtgtaaaattacaaatttgggacactgctggtcaagaacgtttccgaacaattaccactgacattaggaactggattcgcaacatagagcagcacgcatctgataatgtcaacaagatcttggtgggcaacaaggtcgatatggatgcgaagcgggtggtctccacagctcaaggtcagaagctcgcagatgaatacgggatcaagtttttcgagacgagtgcgaaaacgaaccgaaatgtggagcaggtattcttcgccatggcaagggacgtgaagcaaaggctcaccgagaccgttgccgctgcggctgagcccccgaccattcagattagcaggccagaccccgaccaggctgacgcagcctcctcgcggcggtggtcgtcgtcctgctgtaacacctgatctggcgactgccgtggcgaaatcaagcagcgtgaatcttgatgcgcgtgactggactgctaggttactgattgtcgcatgtgttcactttcattccggtgccgtgccaagccaagccgggatgtataaatttcgctgtctagtattcacctcaatcaatgtgttaactcccgctgcttcgcacgtcacgtcgtttgtttgttgagagcaaaacgtgtgtggggcagataaaaaaaaaagccctggtgggtttgctcctgtcacgtactaaacagaacgtgtctgatgattgtgtcgacggtggaacttggaagcgtgcttgtctcactattgttccgtgttttcgtccaacgccgg

SEQ ID NO: 7202 - DNA, 2307 bp, Zea Mays
gactgcccccgctccttgcccaacgaaacccccgctcccgcacgccccgccgacctctgctgccgcaacgccgcagccgccgcgaaatccgcacccacccgcgcgacctctactgccgcaaggccgcagccgccgcgaaatttgcacccacccgcgcgccgcagccctttgtccgcgccggagcctagcaccgaaccgccgcggattcgccactacatcaccggccatggcttcgggcatgccacccgcgccctcgaggtccgccgccgctctctccgcccgcttgcagcttgcctgcctggtgccggcgcgtactgtttcctgaccccatcgtctccaggtggtgaggcacctggtcaccgcagggcacgacgtgcacgtggtcatcgccgcgcccgagttcgtcttcaccaccgagatcgcctcccccagcctctccgacaagctcgcgtccccgtccacatccgagatgctcgcgcccgcgccttggatggaagcccagaatcgccttccatcgaggattctacaccacgcgtcgcgccccctccccgcacgcaagcccccgcctgcacattctccgccaccccatcccctgtccggcgcgtgtgccacggcctccctcgaccagcggcacgcgtacgccatcaccccctccctactgctcccatccgcggtgctcaccttcgccatcgcgcaatccatcaaggtcctcaccacctggtataaggagaaccggtgggacgcgaagcagctggtgggctccggtgggatgccgtcctcgcactcagccaccgtcacagcgctcgctgtcgccgtcggcctgtaagaggggctcgccagctcgttgttcgccaccgccgtcgtctttgtcttcgtgattaaatgatctctggtaactgaggagaatgctgtagatgttgattttccttttaggaaggtgaagctctccgatgtggtagggggaatggaaaatgtgcatatatgcttctgattgcagtgagattagcctcgtccaagttatgggatctgccatgaactagacaagattataagtttacagaggccttacatcaagagagtacaagattgccataaggaagtaaagtctttgaggaaagtgaccttatgagaagcttgagaaaatcaacttgtgtgtgagaagttttgtctacttgtgctaattagtcatatgatatttttagtcatgaactagacaagatcagaagtttaaagaggttttaaatcgagtacaagatcgccataaggaagtacaagtctttgaggaaagtgaccttatgaaaagtttgagcaaatcaacttgtgtgcgagaagttttgtctacttgtgctgatcagtcataccttggaatattgctgaactgttgcctttgttgctcattggcttcaatacttcatacaccatcaaatgagtcatgtgcaaaattcttcgaagcatcagttcttgctctagaagaacttcatcagaggcggggtcgaatcagcaactacggctgacatgacgctacccatccagttgctcactgctcaggttatagcgaagaacattgttttagctggatacaaggagatgcagaagctctgagttttgaggatggatctatggatggttacactatcacatttgggatcagaaatgtgacgcacattgagaaagctctatcagaagcttacagttgatggttctaaagcaagggtggaggttcctatgcttggagttgagtcatgtggatgtccctatttttaaatagatttatgatgcttactcgttttctatgattccggctattgaagagctggttgatggtgatcggcagatagaagacgggcaacatgctaaccaggcatgtgaaccttgaaccttggcaggaaaagtttgctcagatgattcaggaagccggattccagagggtggaatatgaaaacctcctgagcggtgtagttgccattcattctggactgaaactgtagagctgaatacggatggatgttttttcatgggtgcaccgcttctacaattagtagtatttgttgttttttaatgaattctataataggttcggtggcttgtaaaagcagctggtgctggctgtcagcattagcacaatatgtagaataagtagtatttgcgagaagtatgtgctggagcagtagcgtcagtggctattttggcttttaagccagctgacctcttccatttgtaaagcttttttcttggaaacgtgaaaccatccagaacatcaaattagtcttatcacatacctcctgcaatacattttttgttctaaaa

SEQ ID NO: 7203 - DNA, 1730 bp, Zea Mays
ggaaaaagaaaattggtccactttggcagaggttcgaggcgccgcgaggaaatggagcagacgatgccggatgtgcgtccaccacctccggtcacccagatctgaccggcgtcggccatgaagcggctccccatcctggtcgtccccgtcctcctcctcctactctccatctccttcttcctcttccggcctaccaccccgcctgtcctcagttcgcggcaagccttcgaacccgaccgccgtctcagggtctacgtcgcggacctcccccgcgcgttcaactacggcctgctcgaccgctactggtccctccgcgcagcggactcccgcatccaggcctcgtccgaccctgaccacccgcccccgcacgaccacccgccataccccgagaaccccctcatcaagcagtacagcgccgagtactggctcctcgcctccctccgcgccgcggcgacggcgccggccgccgtgagggtcgtcgcggactggagggaagccgatgtcgtctttgttcccttcttcgcgacgctgtctgcggagatggagctcgggtggggaaccaagggcgccttccgcaagaaggacggcaacgaagactaccggcggcagcgggaggttgtcgaccgcgtcacctcccaccccgcgtggcggaggtccagcggccgggatcacatcttcgtcctgacagttgattcaaagtcttcaagcaaaaactcgtctcgggtgatacagcacactcaagtgtcattgcttaaggatgttattgtgccttacacgcatttgcttccgacactgctcttatcagagaataaagatcgtcgcacacttctctacttcaagggggcgaagcataggcatcggggtggtttagtacgagagaaattatgggatttgctgggtaatgagcctgacgttatcatggaagaaggcttcccgaatgccaccggacgtgaacaatcaataaaagggttgcggacatcggaattttgcttgcacccagccggtgacaccccaacctcatgtcgcctctttgatgctattgccagtctgtgcataccagtcatcgttagtgatgaggttgagctccctttcgaagggataatagactacacagaaatctccattttcgtgtcagttagtaacgctatgagaccgaaatggctaacaagctacttgaggaatatttccaagcagcagaaggacgagtttcgaagaaacctggctcgtgtccaacctatctttgagtatgacaccagctactccagcagcagaggctctacctccattgatggtgctgtgagtcacatatggaagaagattcagcagaaactgccaatgattcaggaggcaatcatcagggacaagcggaagcctgatggcgtgtcaatcccgctccggtgtcattgtacatgaacttaccatagctgctgcggaacgctggtaccaccatggcaccatgggaatggcttataatgagcaattactccaagctaattcctttcttgttttttgttggtagttgcaaatatgatcatgtaaaggaatggcttatgtttttaacccaatttttgtaaacccctttagtagtggttttgcacgttgttgtgtcattggagtggatttgcatgttgggcaatgatgatttatttgcttgttcggcaatgatgattcatacgggaaaaaacccacttggattgaaaagactggaatataatttgtttctttacatc

SEQ ID NO: 7204 - DNA, 1534 bp, Zea Mays
atgccttaaaaactatggggcacaacgagatgtttttttaaccaagccaaaaattcgtccggaatcgaacctaggatctggaggtgctactcggaagccttaatcattatgctagaggcactttcgcatttctgttgacaaatgacagatgtaattttatgtttttgaccctatgattgtatacgtattgaatctaaaaaagctaaggcagcatatcaaattatcttttgtgaaatattgaattcatgctcttgctttcttttgcataagtctaatgtcattggttttatcttcagctttataccaaaaacctacatctggatgaaaaagtcgatcttcagactgttgctgcgttctgcaatggctatgttggagctgatttagaagcattgtgtcgagaagctgccaagcttgcatatcatagaatgttaaacttatgtgagggtgacaaagtacttaaactacttatggaagactgggaatgtgctagatctatggtgggaccaagcataacaagaggggtaaccaaagaaatttcaattgtttcgtgggatgatataggaggcttgaaagatctaaagaaagagcttcagaaagttgttgaatggcccatcaagcatgctgctgcattttctagacttggaataccaccagtccggggggtgctgttgcatggcccaccagggtgctccaagactactcttgccaaggctgcagcgcatgctgcccaagcttctttcttttctttgagtggtgcagatttatattccaagtatgttggagaaggggaagctctgttgcgtagaacatttcagaaagctcgtcttgcttctcccagcattatattttttgatgaggctgatgccattgcccccaagagaactggccctggtgggaattctagtggcaatgccacagtcggagaaagacttttgtcgactttattgaccgaaatggatggtttagaactggctacgggaattatcgtattgggtgctacgaatcgcccaaatgcaattgatgctgctcttttgcgtccagggcgtttcgataaggtgctgtatgtcccgccaccagatgtggaagggcgacacgagatactacgcatccatacacggaaaatgaagttgggagaggatgtagatctttggaaggttgcagagtgtaccgagctattcaccggtgctgatcttgaaggcctttgcagggaagctggaatggcagcattgagggaagatatctcagcaagtttgatacatgacgctcacttccaagccgcacgaagttcattaagcccctctcttacaaaagcagtagttgatgagtactcaaaggtagatataaatgatccatcgagtaggaaacattgatatgttccttttctatttctttgttgcacactaggcgcaatacacatttgcaaccttgccaccaagacacacagatggagatagagagatctttttaagaatattctttttaaaccaatcctcttaccgtcagctctggatgttatttaaaaaaaatgccctca

SEQ ID NO: 7205 - DNA, 2323 bp, Zea Mays
actcagtcgctcgctccctcgcttcgatccaccggcggcggctgaggtgctgagcggcgaggcagcgagcgccactgcgacctgcgtgctgctgtgctcctgcgcggctgcgcgccggtggacgaccgggccgtcggcgtggttccggctctccgcgcctgcgcggctgcgtcgcgacgagcagtgcatcggcacagtggcggtgcgccccccgcggcgaggcggcttcacggaccgcggttaccgagcgccgtcgcgccgaacgggcgcgggcggcaggcctcctgccggctgctggcgagcgctgctgcctgctgcaggccagggcgagcgggcgagacgctgagaccgcgtgggccgcgcttccctaagccagagcagccgagctcttcgtcgttcgtgattcgttgggccatcgccagcgacgagctgcaaccagaggtgaactggtgaagtgatgggcacggcgatcgtaagcgacgggggcggtgagggaagcgatggaaagtcggttgacgggtggcaggcagagaaggccgtcgcgggcaaccgtagggcactcgaggcccttcgggagctcgtggcttatcctttcctctacgcccgcgagtcccgtttgctcggcctcaagtggcccagagggttgctgctccatggcccccctggcaccggaaagacaagcctggttcgagctattgttcgagaatgcaacgcgcacctgacaacgatcaacccatattctgtacacaaagcccatgtgggagagggagaaaagttcctgcgtgaagctttttctgaagcatattctcaggctttgcggggtaaaccagctgtgatatttattgacgaacttgatgccatatgtccacgccgcaatagtaggagagagaatgagtcccgcattgttggccaacttcttactctcatggatggaaacaaaaaggcgtcaaagatgcttcctcacatagttgttgttgcatcgactaacagatgccgttgatcctgcattgagaagggcaggacgttttgactcagaggtagaggttgccgttcctacagttgaagaaaggctgctgattcttaagctttataccaaaaacctacatctggatgaaaaagtcgatcttcagactgttgctgcgttctgcaatggctatgttggagctgatttagaagcattgtgtcgagaagctgccaagcttgcatatcatagaatgttaaacttatgtgagggtgacaaagtacttaaactacttatggaagactgggaatgtgctagatctatggtgggaccaagcataacaagaggggtaaccaaagaaatttcaattgtttcgtgggatgatataggaggcttgaaagatctaaagaaagagcttcagaaagttgttgaatggcccatcaagcatgctgctgcattttctagacttggaataccaccagtccggggggtgctgttgcatggcccaccagggtgctccaagactactcttgccaaggctgcagcgcatgctgcccaagcttctttcttttctttgagtggtgcagatttatattccaagtatgttggagaaggggaagctctgttgcgtagaacatttcagaaagctcgtcttgcttctcccagcattatattttttgatgaggctgatgccattgcccccaagagaactggccctggtgggaattctagtggcaatgccacagtcggagaaagacttttgtcgactttattgaccgaaatggatggtttagaactggctacgggaattatcgtattgggtgctacgaatcgcccaaatgcaattgatgctgctcttttgcgtccagggcgtttcgataaggtgctgtatgtcccgccaccagatgtggaagggcgacacgagatactacgcatccatacacggaaaatgaagttgggagaggatgtagatctttggaaggttgcagagtgtaccgagctattcaccggtgctgatcttgaaggcctttgcagggaagctggaatggcagcattgagggaagatatctcagcaagtttgatacatgacgctcacttccaagccgcacgaagttcattaagcccctctcttacaaaagcagtagttgatgagtactcaaaggtagatataaatgatccatcgagtaggaaacattgatatgttccttttctatttctttgttgcacactaggcgcaatacacatttgcaaccttgccaccaagacacacagatggagatagagagatctttttaagaatattctttttaaaccaatcctcttaccgtcagctctggatgttatttaaaaaaaatgccctca

SEQ ID NO: 7206 - DNA, 2274 bp, Zea Mays
acagctgcgtgcccacccgatcctcgcttgacaccggggaaatccacggcctgctgctacagagcatcgccgctgagcacactggggtgacagtgacaacccgtctccctctctctcgccagatccccctacctccgcgtctctctgtctactttttttttggggagggggggggggggggggggggggggggatccgcgtcgaggcgaggtctgctctggtcacctctggcgatcctccttcgcccattgcctccgccggtcaattcccttcgctggtactcagagatcggcgccctcctcccgtcttcccacgcttgcgggcactaactcagagtagtgtcgctcaatgaatttcctctaccgaactacgcagcctgcagcgactgagctgccaagaatttcagagcaagatcacaggaatgccttacaaaagacgacttcgacactggagggtctcattgcggacgattcacaccaccagccctcctctgcccacatcgaagatggagctgctaataatgggtccagggatatcagtggggattcttcatctgttgatttgaaaagcccagtcccactggggacacatgccgatgtcatggaagacgaaggatggatcacaattccatgcagtttgaggcacttcctgaaagttggaacgacatatcagaaatggttcagttgcaggctctggaccgttccttcctttttccaggcgagcaggttcctatactggcgtgcctgtcagcttctaagcaagatgtacaggttatatccccctttagaattgctgcagtaatgtctaagaatggaacttctatgcaaaactttacaaataaatctagccctgtcagtgcaaatggtcatgataatggagcagctggagaaagtggctatcaggatgttgaacccaatggtgaagcatctccttcaggacatgatattttggagactcaatctctccttcagatggaggatcataagcagcagatcgaacatgtgttgcgaagatttagagaatcaaatttttttgtccggattgcggaatcagtggaacctctatggtccaagaaaagtgtaacttcaactacgatggcagatgaacgatcagataaccagggaaatagtaagagctcaaggagtaatgtttataataccatttctgataaaggggtttttgatggtaacacatctgggggagttgctcgagatgttgtcaagtgttattctctgcaaaatggagacatagtggttgttttgcaagtgaatgttagcgttaacaaattggaagatcctgtgcttgaagtccttcagtttgagaaaacctcttctgttcagacaccaaataatataagaccaccaccaatatctgaaagtcaagaatttatgcctgaaaaacctgcaaaaaccccagatattataaatgatgggcaactttcgtttagaggagttcctttagaacctgaacggtattctaatattgctcctactcatgcaaaagatatagtcgtattcatcgatgcaattactattgtatttgaggaggcatccaaaggaggtgctcctttgtctttaccaattgctagtattgaggttgggcatggtcacagcttgccaaacctagcactcagcaactatgtcctcaagggaacggaagaccaacagtcatgcacctctggccttatcactcccaacgatgaccggtgctactttaaatactcatacaccaaaggctggtgagccgtatgctgatctaagcgaccaatatgctgtactgatactaacactcgaagctactaatatgacatccgaaaaccttacattaactgtccttgctcctgaagcatctggttcttcttcagttgtatccttgaactcatctccaaccaccccaaatggttcttttgatggtgttaatgagtcatcaaaaagatctgggctgggaaaagatggaattggctttcgaagattgaattctgtcctagctactccaaaagaaggtgataatggaggaaacagaatgagtaatgcttcaggctgtactcatctgtggttgcaaagtgcagtgcccctagggtgtgttcctgcccgctcaagcaccactgtcaaacttgagctgctaccattatcagatggaattatcacacttgatactctgcaaataaccgcaagggagaaaggccttgcttacattccggagcactccttggagatacatgccacctctgtactggaagcagaatcccagatcatggcccggattgaacggtag

SEQ ID NO: 7207 - DNA, 1858 bp, Zea Mays
agagggatacgctgagacgcacacgcccgttcgcacagtggggaaggcagactgggagagaggaatcgagtgatctccgagatggaggcggcgctagtggagcggctggaggcggcggtggcgcggctcgaggccgccgtggcctccggcgcctcgctcgcgtcggcggcgccgcgcgacctcgacgctcctgaggcccggttggatccagccatcgtggcctaccacgagttcgtcgcggaggccgtcggccggctcacggctgcggccgagaagatcggcgggaaggtgcttgacgccaccaaggtgctcgccgaggcatttgccgtcgccaaggacctgctcgtacaggccaagcagctccagaaaccagcatcaatggctgatgcacaaggcttttttaagcccctcagtgatgttattgcaaaagcaactgcaatgaccgaaggaaggagacctgactatttcaaccatttaaagagtgttgctgacagtctcccagctttggcttgggtggcatttttaggaaaggactgtggcatgagtttcccaacagcacatgtagaggaaagctggcagatggctgagttctataataacaaggttcttgtggagtacagaaacaaagaccctgatcatgttgagtgggctaaagcattgaaggaactatacatgcctggtttgcgggattatgttaaaaagcattaccctcttggtcctgtttggggtcctgctggaagtgctgttgtttcccagccaaagcctgctgctccaacacctaaagctccagcggtcaaggctgccccccctccaccagctcctcctgctgcacctctttttagcacagagaagtcgccaaaatcttcaaagcctaaagaagggatgtctgctgtgttccaagagattagttcaaaacctgtgactgcagggttgcgaaaggttaccgatgatatgaaaactaaaaaccgtgctgagagaagcggtgttgtcagcagcgctgctactcctgctgcagctcctgaaaagacttctcgtgcggggtccttctctttcaaatctggacccccaaaactggaacttcagatgggacggaaatgggtggttgaaaatcaggttggcaagaagacccttgctattgatgattgtgattccagacaatctgtctatgtgtatggatgcaaagattctgtccttcaagtaaacggatgttgtagcagcttttgaggttgtcaactgcaatggcgttgaggtccaatgtcagggtacgtcaccgacaatatcaattgacaacacatctggatgtcaattatacttaagcaaagattcgctgggagcttcaattacttctgctaaatctagtgaaatcaatgtgatggttccaagtggcggctctgacggtgattgggtggagcatgcattgcctcagcagtacatccatagtttcaaggatgggcaattcaccacttcaccagtttcacactcgggggcgtaaatacaatttgttgctgctgtgtttgttttttatttcgcttttgccttgtttttgaagatgaacgtatgatgatgaggtttgtaacagttttgggtctcgcagcactggactggaccctgactgcgattgttgtttgtgttgccccttgctcggtgcgcggtgtgtatgttctgcatgcacgtggttccattcgattggtgtatttgtgtgccaacaaaccactatacgtggtgtgtgtgtgtgtctttagctgaccattctttgacactgaatctcactatatttgaattgatgtggacgcttgctttttcgagtctcttttcagattcttgtttaacaaagtgacaatgacaatgcagttatcgt

SEQ ID NO: 7208 - DNA, 3635 bp, Zea Mays
ctctcaatcccccgcaccctctctccctgagcgctcgcgagcctgcggccaccaccgccgtctccacgccgcgcagatccgcccagccggttcggccccactcgagaatacgtgtacggacgcaggccccgcccacctcgccgaggactcgctcctgtgtcgtgcgcgccagcactaccggtggccgtgcgcggctgggccgtgccgattcgaccgaatccggtggaattcaccgtgccgtggtgtcaaatcggtgagctccgttgggttacgcgtgggtggaggctcgttcaggtctgggcggccgtaagtggcgccgggcatggttctagggtttggttttggtcttttggcgtgagggcatggcggatgggggccggatgaagggcgtacagagcgctggcggtggcgccggtgacgacgaagaggggaatgaggaggtgcgagaggagccggaactcgcgctgtcgctggggcggcgagtctggcacctcccgccgcggcaggaggccgctccccgctcacttaactggactccggttctgccggagtggaaccccgacgccgctgggagctcgcagggtgtggaaagggccttgggcggacaatccatctcttctcttgggttccatgacatgtttggtggtatcctagacgatccccaagcgggtggcagtatggaggttgggtggggcaagctgaacgaagaggatgaagacagagacctgcagaataaacggctcagagtacgacactttggcgaagaaaacccactgcattctggtgccagtgctactccctttggctctgaatcgtcatttttgcccatttctgatgaatgtgttcatttaaagctgtctcgtttcccagaacatgaattggaatttgggttgtcacttttcgcaaatgatggtagtgagagcccaagggatgccaataatgagcaagtcgatgatgcagaaaactccggtggaagaaattctgtggatgttggaataagaatggatctctccgatgatttcctgcacatgattttctctttcttggaccagaaggatttatgcagagcaggtgtgacctgtaaacagtggcgatctgctagtgtgcatgatgatttttggaagtgtttgaaatttgagaacactagcgtatcactggagaactttgttaatatttgccgtcattaccagagtgtcacagaactcaatttgcatggtgtcataaatgcagaaacactagttctggaagcaataatgtttttaaggcatctgaagacattaacaatgggcaagggacaactgggagaatcattttttcaagctttggctgagtgcccattattgactgctttaacagtaaacgatgcttctcttgggagtggcattcaagaagtaactgttaatcatgatggactgcgtgagcttcatattttgaagtgccgtgcacttagaatatctgtcagatgttcccaacttcaaatactgtctttgaggcgaacaggcatggctcatgtatcactgaactgtcctcagttgcttgagttggacttccaatcctgccataagctttctgacaatgcgattcgccaagctgctacagcttgcccattgttggcaaaactagacatgtcatcttgttcttgtgttactgatgagacattgcgtgacatagctagctcatgtccgagtctttctgttcttgatgcatcaaactgccccaacatttcatttgagtccgtgaggcttccaatgttaatagacttgagacttctaagttgtgaaggaatcacatctgcttcgatggctgcaatagcttatagccgtctgcttgaggcactacagcttgataattgcagcctgttgacatcagtgtctttggacttaccacatcttaagaatataagtctcgtgcacttacgcaaatttgctgatttgaatttgcgaagccctgtgctttcttacatcaaagtttccagatgttcggcactccatcgagttagcataacatcgactacacttcagaaattggttcttcaaaaacaagagagcttatccagtttgtcattgcaatgccacaacttgattgatgtggatcttactgagtgcgagtcattaacaaatgcggtttgtgaagtatttagtgatggaggtggttgccctatgctaagatcattgatccttgacaattgcgagaatttgagcattgtagaactgaacagcagttctttgtcctgcctctctcttgctggttgccgctcgatgacattgttaagactctcatgcccaaatctgcaacatgtcaatcttgatggctgtgatcaccttcaaagtgcagcattctgtccagtgggtctcgaatccctaaatctgggaatttgtccaaaactgagtgttcttcacattgaggctccaaatatgtctatattggagctgaagggttgtggtgtgctttccaaggcttccatcaattgccctcgcttgacttcgttggatgcctctttctgcaggcagcttgtggatgattctctgacttgtatgtcagaggcatgtcctatgattgaacatcttattctgtcatcatgcctatccattggcatcgatggattgtcctcattgcattgccttcataagctgaccttgcttgacctgtcttatacctttttggacaacttgaagcctgttttcaacagttgtctgcagttgaaggtgttaaaactttcagcttgcaagtacctcagtgactcatcattagatgccctctacagagagggtgctcttccattgcttgttgagctagatctgtcctactcgtccattggacagaatgcgatagaagatcttcttgcttgttgtactaatttggttaatgtgaacttgaatggatgtacaaactttcaagaattggtgtgtgggtcagatgatagcagttgtgtcgatatgccagttgacttttgtgcacctagttcagcaatcaagagtgaagagatcagaagtggatttgacatgtcccaatcttttaacgttaaacttgagctcactggaggtgctgaaagcttgattgccccaagattgtccaatctccagcttctgcggcaggaggccgctccccgctcacttaactggactccggttctgcaagagtggaaccccgacgccgctgggagctcgcagggtgtggaaagggccttgggcgggcaatccatctcttctcttgggttccatgacatgtttggtggtatcctagacgatccccaagcgggtggcagtatggaggttgggtggggcaagctgaacgaagaggatgaagacagagacctgcagaatacaaacatcaagtcaggacaagctctctccttagagctcttgtacatagtacccaagcattgccggtatattgcaaggcatggtatattaggagccaggggcaatgatatcttatttttccagtccattcatgttgctgaataagtatttttgtgaatctgttttgttgccggaggtaacaaaatatctgttcatgtttttttttctgtattccttggaagtgtaccgatggagctatatgctggtttatatgcatcaataatcttgtttggatatagaattttggaaccgctttgctaatgtcatctgagg

SEQ ID NO: 7209 - DNA, 683 bp, Zea Mays
accaaacaaaccgcgtccgcgtcgagtctctactctctcggctgtccggtccggcgcggctctcgcgtctccaacctacccatgctgcagctcctccaactccaaggctcacaccaccccgcgacgggcgacgctaattaagtagagctgcaacacctgggttggaggctagagcttgcaaacaccaccagcgaaaacgtcgtggccagccatcccggtgtcgtcccgcgttctacagccaccgctgtcgtcgccgtcctagactcctagatccgtcagcttaacgagctccattccttcgaggccagccatcccggtgtctcagcagcggcggcggcggcgtcgagctcttgctttctgtgggaggacgcatggcgatgtctgcggggcgtgggctcttggtcctcttcttctctgccgccgtagtggctgagctcgcctctgccgcgaacggtcctttcctgtccgatagcgtcttccagtcgagcgccggatctacagggaggagcttgctgcaggccaagaataagtcgaccattgcgcgcagatagccgttgctccgctggtgcaccggacagtccggtgacacactggacagtccggtgaattatagcggagctgtgcctgggaaacccgaagctgaagagtttgagctgattcaccctggtgcaccaaacattgtc

SEQ ID NO: 7210 - DNA, 1215 bp, Zea Mays
cccaaggccatacaggcctatacagtctaacaaggagctatcaaaatggttgccctgtgaactttgagttccaaaactacacaatcatcacaagcaagtgcaaaggaccgaagtttccagccagccaatgctgtgccgcactcaaggaattcgcgtgcccttttaacaattacctcaatgacgagagcaatgaatgtgcatcgacaatgttcagctacatcaacctctatggcaagtatccaccaggtctgttttccagcgagtgcaaagaaggcaagatggggctttcttgcgcagatgtcccccggaaggacagttccactgcaaacagtggttatcgcgcccaaagcagcttgcttgcgttgattactgtcttgagcgtggtagcagcgttgttctactgaactacagctccattcatttcccacaaagatggtgtgttacaactgttgaggcttgagttgcaccttttggtgcttatgggttggcttcctgattctttcttttgagagcaactccaatagttatataaattttagccctctaaaccacagatttaagaagttgctaaataactttgagagtaaaaaaatatgagttctcacatagttctctaaatatatgttgtagttttattttgtatttattcacataaaaaaaataagtcacaaatgtcatcaattaccttcattatctacataatgcagccaacattttttatttaacaagttgcaaatggttgtcaaatgtagaaaggaaatgaggttagatgagaagttgctaaatttaggaagttcatttagagaactgttggtgagtagtttttatgttaactgcctaaattattgatttagaaagtcttttagataactactggtttgacaaccccattttttccaatgtaattcattgcttgctgcatatttcctgagttcgatttgatctgtcagtgtcaatgttagcttgtgtctcagttaacggtgtcattctattgtgagtcccgttgtgataaatttggacaagtatatatatgtcggttataattcgtatgaatggttagcttgtttatgttgggtccgaggaatgtaatcgatggttcaccgttcctctggaaaatgttgtgtttgcaatttagagagtattgttgcaatgactattatgtttgacaacaaaatactcagaaagtattgttgcaactccagttacgtccaccag

SEQ ID NO: 7211 - DNA, 2731 bp, Zea Mays
ctttttccctccctgctcttccagtcttgttgactcttgagtcttccaccttcctcctcccgtctcgtctccaacggtgtgcttcttcctccggacgcctcgctcgtccgaccgctttacctccctcctccggcgagctccctccgctgttcctgatatgcaggagcactagcaaagcggcttcgccatccctccggagtccggagcagccagttgtgcatcaattctaaaacagagttgataccttttttccatcttcaaggttctgctctctcatgccgcagttttacaacgttgaaggcttaaaaattctacagaactagatgatacttgcataatgcagccctcagatatttggaaggcgcatgctggttcatcacagtcagaggcttcgggtctggatatggagaggaacggatgcaatcataattgctgtccatctcctctccagccaattgcttcagctggtcagcactctgaaagcagcgctgcatacttttcttggcctacatctactctaatgcacggctcagctgaaggccgtgctaattactttgggaatctacagaagggtgtactaccaggacatcttggtcgcttgccaaatggccagcaagccaccaccttacttgatttaatgattataagagcattccacagcaagattctccgccggtttagtcttggtacagcaataggctttagaatcaggaaaggaacattgactgacacacctgccatccttgtgtttgttgctcgaaaggttcacaggaagtggctcagccctactcaatgtcttccaggtgcccttgagggacctgggggtgtgtggtgtgatgttgatgttgttgaattttcttattatggtgcaccagccccaacaccgaaggaacaactttatgatgagcttgttgatggattgcgtggtagcgaccctagtataggctcaggttcacaggtggctagtcttgagacctatgggactttgggtgccattgtgaagagtcgaactggcaacaagcaagttgggttccttacaaacaggcatgttgcggttgatctggattatcccaaccagaagatgttccatccgttgcctcctaatcttggacctggagtttacctaggtgctgttgagagagcaacatcatttataacagatgatgtttggtacgggatatatgcaggaacaaacccagaaacttttgtccgagctgatggtgcatttataccgtttgctgatgactttgaaattgctagtgtcagcacctccgttaaaggagttggagtcattggtaatgtaaaggcaattgacttgcaatccccaattggcagtctcattgggagacaagttgtcaaagttggaagaagttctggtatgacaactgggactgttgtcgcatacgcacttgagtacaatgatgagaagggaatatgtttcttcactgactttcttgtcgttggggagaaccaacaaacatttgatcttgaaggggacagtggaagcctcataatcttaacaggacaagacggtgagaagccgcaacctataggaattatatggggtggtacagctaaccggggaaggttgaaacttaaaagtggccagggtccggagaactggacaagtggagttgatcttggccgccttcttgatctcttggagctagatctgatcacaacaagtgaagggctacaagctgccttggaagaacaaaggattactctagctgccgctgcggctgcagccactaattcaactgccacagaatcgtcacctgttgctggccctcaagaggatgataaaatcgacaaaatctatgagcctctcggcattaacatcattcctcgagacggttctgccatatcaacggaccaacccaacgaggatgtggaagagctaaacctgatgtctccaatgcgcaatggtgaagaaggcaacggtgacttcaataacttgatggacttggaatcggaaaattcacctgatggtatttctattgctctgaacctgggagagcgggagccagaaagactccgctctgtttctgattcgatgctggacatagacttgcagaaatgaggctgcccgctgctatgctgcagacgtattgcaggaggctccgtatcattcagctttttttatcgatcattgcaggtatggccacaaaggaaataatctgtttctaggcgactggaccggttgttctgcttgaaacccggtctgggttaagctgtgaagctcctgcagccgcttgctcctgcagttttgcgtcaagtgtctaccaactctagcatatgtagtgctgcgtaagatgtcggcacctcagatagacagaggcgccatatttcttgctcatgtaatgttatttgttgtatgctcgtttgtatgtactgcatgaagcattgtaaaattgagcaacagcaaccagagctcgagaatcttaggcgcaaccaaccaaccccgtatcgatgaattgacaataaagctgaatattttaggtgtttagaaagtattttctcttagatttttggggagattaggatacaaactctctgattcaagcagcccctaggtgttgtcctgacctgcttgatcaaacgacctgctggctaaagtttggacagagtagtcgctctctagcttgatgagttcttaagctatcttcaacaaattactcattctatctcatatatcgtttggtttacgaaatgtaacgtaaatgataat

SEQ ID NO: 7212 - DNA, 2331 bp, Zea Mays
cggcttttaactatttcctcctctcctcccgatccagctagcctggcctcccacctcccctcccctctcttgaactgaatcccccactccgtcctccagttcgatcgcgttcgcggccccccactccgtgttccggaataagtagccggcggtttcctcaccccaggttttgcagttgctggggagtgggaaattcgtccggctccggtttggccaatgctcctgcggtttcttggagaggccgctgaagcagcagcccttgcctgagggattctccttttctcgggcggagagttcggttgcggcggaaaaaaaaaagaattctttcgtcggattggcccaagttcttggttgatccgttacaaagcccccactgtacgctgtgttagcctttttccacgcgtttctttccttactctagatccgtgtccccgcccgattatttgggggaataggcagcccatcgatcgggggaagagggatttggaggcctgacctccgatggaggtgcacgccgacgtcgatgggtccggtgtgcccctggccgtgctcctcaagcgggagctgtgcaaccagaaggtggagaggccggacattctgttcggggaggccaacaagagcaagaaaggggaggacttcacgctcctcttgcccaggtgccaccgcaccacaggcgaaggcggcggcagtggcggcggcgagaatgcaggcggcggcgacgacgacgacaccatttccgtgtttgcgatttttgatggacacaatggctctttagctgccatatacacacgggagaatctaataaacaatgtgctggctgctattcctccaaatctcacaagtgaggagtggacagctgcgttgccaagggcactagttgctggttttgtaaaaacggataaagacttccaaacaaaagctgcacgttcagggaccactgtgacttttgttataatagatggatgggttgtcactgtagcatcagttggcgattcacgatgtattctagaatctgctgaaggttcagtatattttttatcagcagatcatcgcctggatgctaatgaagaggaggtggagcgtgttacagcaagtggtggtgaagttgggagaataaatattgctgggggtgctgggattggtccgctcagatgctggccaggcggattgtgtctatcaaggtcaataggtgacattgacgtcggggaatttatagttcctgtcccacatgtgaagcaagtaaagttgtccaatgctggtgggcggcttgtcattgccagtgatggtgtgtgggatgcgctgtgttttcaagaggctctgaactacatcaggggtctaccagccgaagctgctgctaatcgaattgttaaggaagctgtcacttcaaagggattaagagatgatactacttgcatagtagttgacatactacctccagaaaagttaagccccccactaaagcgacctggaaaaggagtcatcaaaactctgttccgtcggaggccctcggatgaaatgtctgaagatcagatggacagaggatgtttagaacctgatgtcgtggaggaaatatacgaggagggctctgcaatgcttgctcgaaggttgaatataaattacccatcgggaaatatgttcaagctgcatgattgtgctgtctgccaattggagatgaaacctggtgagggcacctctgttcacggtaacatgcccaagcattcaagagttgacccctggggtggtccttttctctgttcctcctgtcaattgaaaaaggaggccatggaagggaagctacattcaagaaattcccaatttgatgttcgacctatgcctaacagcagagtgacactgcgcgccctcttgcatatcgaatttaagctatggcagccattgttttctgctgcaaggatgagttcattacttttttggccaaggcagcaagattctcaatacgggagtcatttgtatagacgttcctaatttcctactcatctttcccatgaaagagcccatacagatacagtcttccaccacgatttgaagccagttgcagtacatgtgggttgctttttactaagatgcatgaagtttagaataatgtacgtagatgctaatgcatagacatggcatggtattcttagcatcattttgctaaggggtgttttgaatgcagagtaaatacttagagcatatccaagaggcactttatttttgtctctctgtttaactctctatttaatttttcataatgattacactctatatgtagcatttcacttcaacatactatctatttagttttgctagtcagatgactagccaaattta

SEQ ID NO: 7213 - DNA, 2872 bp, Zea Mays
cggcttttaactatttcctcctctcctcccgatccagctagcctggcctcccacctcccctcccctctcttgaactgaatcccccactccgtcctccagttcgatcgcgttcgcggccccccactccgtgttccggaataagtagccggcggtttcctcaccccaggttttgcagttgctggggagtgggaaattcgtccggctccggtttggccaatgctcctgcggtttcttggagaggccgctgaagcagcagcccttgcctgagggattctccttttctcgggcggagagttcggttgcggcggaaaaaaaaaagaattctttcgtcggattggcccaagttcttggttgatccgttacaaagcccccactgtacgctgtgttagcctttttccacgcgtttctttccttactctagatccgtgtccccgcccgattatttgggggaataggcagcccatcgatcgggggaagagggatttggaggcctgacctccgatggaggtgcacgccgacgtcgatgggtccggtgtgcccctggccgtgctcctcaagcgggagctgtgcaaccagaaggtggagaggccggacattctgttcggggaggccaacaagagcaagaaaggggaggacttcacgctcctcttgcccaggtgccaccgcaccacaggcgaaggcggcggcagtggcggcggcgagaatgcaggcggcggcgacgacgacgacaccatttccgtgtttgcgatttttgatggacacaatggctctttagctgccatatacacacgggagaatctaataaacaatgtgctggctgctattcctccaaatctcacaagtgaggagtggacagctgcgttgccaagggcactagttgctggttttgtaaaaacggataaagacttccaaacaaaagggtggagcgtgttacagcaagtggtggtgaagttgggagaataaatattgctgggggtgctgggattggtccgctcagatgctggccaggcggattgtgtctatcaaggtcaataggtgacattgacgtcggggaatttatagttcctgtcccacatgtgaagcaagtaaagttgtccaatgctggtgggcggcttgtcattgccagtgatggtgtgtgggatgcgctgtgttttcaagaggctctgaactacatcaggggtctaccagccgaagctgctgctaatcgaattgttaaggaagctgtcacttcaaagggattaagagatgatactacttgcatagtagttgacatactacctccagaaaagttaagccccccactaaagcgacctggaaaaggagtcatcaaaactctgttccgtcggaggccctcggatgaaatgtctgaagatcagatggacagaggatgtttagaacctgatgtcgtggaggaaatatacgaggagggctctgcaatgcttgctcgaaggttgaatataaattacccatcgggaaatatgttcaagctgcatgattgtgctgtctgccaattggagatgaaacctggtgagggcacctctgttcacggtaacatgcccaagcattcaagagttgacccctggggtggtccttttctctgttcctcctgtcaattgaaaaaggaggccatggaagggaagctacattcaagaaattcccaatttgatgttcgacctatgcctaagtaggcattccctggcggtttctatacattggttcatacacacaaactaccactaacaacatcattatcaaataaagtagactcgacaatatcatcttattcatcaatcaatgtctgacagaatcaggaattttcacctactacattcttatcaaatggtggtcggtacagattatagagacttatgtcatttatatgatgcagtacagttgtttcgtagaaggttaaaatatgagcttatcaagttgtattcagataaaccacaactgcctctaggttcagatgaactggtagccttaagctgtgctgccttccgtagctgtcattgattatcaagtctgcacgacttgtctattagtgaataccagtcgttggttgagtcccatttagtctggacgtagtagttttttttcccacttgtcacactgcttgatgcgtgaccataaaggccgccttttccagtctgagtcacacaatgcttctcccttgttaatcctttcaccacatggattttcctttcttttttattctttaccatgtgtatagtcatgaggcacatcagtacatcacattgactacctttttttcgcatttacaccataattctgcggttgtaccattgtacatttgtactcacaattttctaacaaatatttattccttttctttttggaacttttgcttctctgaaacagcagcagagtgacactgcgcgccctcttgcatatcgaatttaagctatggcagccattgttttctgctgcaaggatgagttcattacttttttggccaaggcagcaagattctcaatacgggagtcatttgtatagacgttcctaatttcctactcatctttcccatgaaagagcccatacagatacagtcttccaccacgatttgaagccagttgcagtacatgtgggttgctttttactaagatgcatgaagtttagaataatgtacgtagatgctaatgcatagacatggcatggtattcttagcatcattttgctaaggggtgttttgaatgcagagtaaatacttagagcatatccaagaggcactttatttttgtctctctgtttaactctctatttaatttttcataatgattacactctatatgtagcatttcacttcaacatactatctatttagttttgctagtcagatgactagccaaattta

SEQ ID NO: 7214 - DNA, 3961 bp, Zea Mays
ccgattcgctattccgtaccgtgtagtagcattcagcaccgattctagcgtagtctacgagccaggccggcgtcccccaaaatcaccggcaggttttcctcggttcccgttacgtatgtggacacctgaactcaacgcaaagaccacgaactgccgtcagagaagacgctagtaaaccgcccgccgccccaactcacgaatcggcaccgccacccaacggggctgaaggcccagccctccaccctccgggcaccagtgcgtgcgccgtcgacttcctctcaccttctcgctcctcgagaacgactccatagcgcaccacaccagcgcggcgacagacagcccgcgaggagaaaaggtagaagaggaggggcagggagagccatacatactcaccggttggattcggtccaatccaatccagccggccgcggcgtgaccagccgatccagagggcgccgaatcgatctgcgggggcggcgcggcgatgcggagggctaccgctggggatcccggtcgccgcgggggatgcgcatgagggcgtccggcccgcgaatcttctggtttggcgggagcccagggggcgcgcaccccggatcggcggcgcgcggcgcgggcaggatcgtgtcggtggggctgcggcagtgaccgcgggcgcgggggagggtgagaagcggcaactagcacttcgagtcgagcgggcgcgatggtgagcggccacatcttccactgccggaagaactcgtggccggcggaggagtacgtcggccggaccgcgctgcagctgttggatttcgatggcggggcgccgccggagcaggcgtggcggaggcggctcaacagccacgcgaacatcctcaaggagttcagtgtcactttcatggaggcaatgaggatgatgagccttggcctgagactatggtcgtatgttcgggaggaggcgtcacatggacggaaagcaccgatcgatccgttcacaaaagagcgctgtaaaccgtcagcttcccagggtgtgccacttggtgggatggggagcggaagcatttcgagaggtttcaggggagagttcaagaattggcacatcatacctggtctttgtgaaagttcgccggtcatggagaaccagttctctatatttgtatctcgagacgggggtaataagaaatactcatcagttttggctcctggacatcatgaaggtctgaagaaaaatagtgactctggaatttcttcatgggactggaatttaagtggtcaacactcgacctatcatgcattgttccctcgggcatggactgtttatgatggtgaacctgatccagaccttaaaatctcatgtcgtcaaatatcacctttcattcctcatgattacaaggatagcagtcttccaacatctgtatttgtgtatactctagtaaacactgggagagatcgtgcaaaagtaagcctgttaatgacatgggcgaattctattggaggtttttcgcataattcaggaggccactacaatgagcccttcattgcggaagatggagtatcaggagtgcttctgcatcacaaaacagccaaggataatccacctgtcacttttgctgttgctgcctgcgaaactcagaatgtgaatgtgacagtcttgccagtgtttggtctttctggagaaaaccatgtttccgcaaaggaaatgtggaacaccatgctacagaatggtcactttgatcgggaaaatttcagtgctggtcccagtatgccttcttctccaggacagaaactctgtgcagctgtctcagcctcaacttgggttgagccacatggtagatgtactgttgtgtttgctctggcttggtcctcacctaaagtaaagtttcaaaaaggatgcacatataacaggaggtacacccaattctacggaacttctgagaaatcggctgttaatttggtacatgatgccttaacaaaatataaactttgggaagaagaaattgagaagtggcaaaaccccatactgaaggatgaaaggcttccagaatggtataagttcactctttttaatgagctttactttctggtagctggggggactgtttggacagatggtcaacccccagcaatcgatgagaaaaagagtcctggttttaatcaccagaagtcctcaaagaggggtactaaagacaccaatcagggatctgttaaagatagacatgtcaacctggcagtggagcaagtacctcatggtggttacatggctaatggtgatgatcacagtgtatccaagttcgcagcagttcatggatcagaaatgcaagaacaaatcaatggactcaagtcagaagagccaattccttacttgatttcaaaggatggccctgaacacgttggcaagtttttgtatctagaaggagtggaatacatcatgtggaacacatatgatgtgcatttctatgcatcttttgctctccttgatttgttcccaaaaatagagttgagtatccaacgtgattttgccaatgctgtgctgtatgaagatcggcgcaaagtaaaatttttggctgatggtacatccggaatccgcaaggttaaaggtgcagtgcctcatgacctcggaacgcatgatccgtggcatgaaatgaatgcatataacatacacgatacaagcaaatggaaagatttgaaccccaaatttgtgctccagatatacagagactttgctgctacaggtgatatgcaattcggtcgagatgtttggcctgcagtctgtgctgctatggactatatggatcagtttgaccgtgatggtgatggtctcattgagaatgatggatttcctgatcaaacctatgatgcttggactgttcatggaatcagtgcttactgtggttgtctttggcttgctgcacttcaagctgcagctacaatggctcatcgccttggggatcggcactttgctgagaagtacaagctcaagtttataaaagccaaagcagtatatgaggcgaagttatggaatgggtcatatttcaattacgacagcggcacaagtagcaacagtagatccattcaggctgatcagctggcaggacagtggtatgctgcctcgtcgggcttgcccccgcttttcgatgagcacaagataagaactgctctgcaaaaaatatttgaattcaacgtgatgaaggttaaaggaggacggatgggagctgtaaatggtatgactccaaagggaaaggtggacgagacatgcatgcaatcacgtgaaatctggactggtgttacatacgctgttgctgcaaatatgctgctccatggaatggagcatcaaggctttacgaccgcagaaggaatttttactgcgggatggtcagaagaaggatatgggtattggttccaaacaccagaaggatggaccacagatgggcattatagatccctcgtatacatgcggcctcttgccatttgggcgatccagtatgcagtttctcctcccaaggctattcttgaggcccccaaagttaacctaatggaccgaatacatatctcccctcacatggtccgagcaattagcgagataagcattagaaaggtagcacccgacaatagatgtttccctagctctgccttccactgtgaatgctgatccgaagcaccaatggcggaggaggagagaagaaacgcaagaaagtgcaagcagtatgtcgcacgtgttaatcaagctccaatgtataaaatgtattagtcgaacgaggttttaagctagcacgcacctggtgtctaatgtattgcacctcacttcctctctctctcatcttttcactcatctttgcaccttcttctgttagcaaacacaatatatgcagacgccctaataagcatgcatatttctgtgttacatgtatatatgaaccatttattgtaggttaaggttgctttgaatttttaaagtcaattctctcctgcttggagcactcca

SEQ ID NO: 7215 - DNA, 1521 bp, Zea Mays
ggaaaacgcagacagacgcagccccagatttcttttccatcaaaacaccccccgttcccctgctcccattccgccccggatttcgatttcgtcctcccttcgccgcccgcgccaatactttcctctgccggggctgcaccggcagcgcggggtcgacaacagctcgagatccggtgactgatctcctttgtttctcgggcatcttgctagtcttcttccagattgcttcctaataatgatgacacatgaatgggctgccaatttggctcttgctggtctgagcttggcgccgcttgtggttaatgtaaacccaaatgtgaatgtggtactgacagcatgccttactgtctatgtgggttgctaccgttctgttaaaccaactccaccctctgagaccatgtccaaggagcatgcgatgcggttccccttagttggaagtgctatgcttttatcactgtttcttctattcaagtttctctcaaaagacttggtcaacgctgtgctcactgcctactttttcattctaggcattgttgctctctccactctcggtggagttcacaaagtcccagattgttgcttcaatacctggatttttcttctgcttgtggtatgcgtcaaagaagcattggcttgcaaataatgttctgggattggctttctgtattcaggggattgagatgctgtcattgggatcatttaaaaccggagccattctcttgggtggactttttgtgtatgacattttctgggtgttcttcactccagttatggtcagtgtggctaaatcttttgatgctcctataaagcttctgtttcctactgcggatgatgcacggccattctccatgcttggccttggtgacattgtaatacctggcatttttgttgcacttgccttgcgctttgatgtctcaagaggtatcaagaagcgttacttcaacagcgcattttcgggatacgccgtgggtatggcggtgaccatcattgtaatgaactggtttcaagctgcacagccggctctactgtatctcgttccaggtgtgatcggattcgtcgccgtacactgtctctggtacggagaagtgaaacagctgctggagttcgacgagtcaaaagctgaggcggaggaaggcggtgcagaaggagagcaagatggtgatggttccaaagccagcaaaaaggtggactagcatgatttagttccgggaggtaaaaaagaggacagggagacatttttcgtgtaaggtcgtcttgcagctagctagctaaacgggcttgttgccctctctaatacttacttgataacttagaaaatggttcaacatgatactagttttttgtttgtttgttttcctttgcggatcatttatttggctcgttaaggaattctctcaccagtcgccagaaccctgactgggcccgccgcgacgcattcatgccatgcttactttgcttctttgcaggcaagaatttcattatggactatatttttaccgccgtgcttaattatgtagtcac

SEQ ID NO: 7216 - DNA, 2858 bp, Zea Mays
ccgcacctccccgcggacagatcgatccgtccgtcctccgtcgtgttcgttcaggccgagcgagatccactgctgactgctcactgcaccgaaccgagagagcgtggcaggcaggcgggcggccgatcaccgacgccgacgcggcgtccacacgcgccaacggccgaacgcactctctcccacccctccgtcgtgctccacggcccaacccaaccctacgcactcctcccccctccccccccgcagctacatctcccctcccgcttcgccagtcgccaccgcgcggcgggagctcgctgaagagcttcccccctctccccccaggcccgcggcggcgccggctcggcccccgtcatcgcgctatcgtaggctcgcgggctcagctgatctggtcagcgaggcgaggttgccggggggccagattccgctcccgcccgcgcgtggtctggggtgtgggcggtggatcggctgcgcgggtcattagatctatgcccgagatctaaggcgccagcgccaggtgcggaggcggaggccgtgagccggtggcggtcggaggccggggacagggatggcgtggtggtccgggaaggtgtcgctcagcggcctgcaggacatcgccggagccgtcaacaagatcagcgagagcgtgaagaacatcgagaagaacttcgacagcgcgctcggcctagaggagaagcgcgacgatgaagaagcatcaggatcgcggacatccaactctgatggaataggattcttcaatcctgtcatggctttcatgggacacaatggtgaagaagatggcactgaagtatcagaaaagccacaatttccaaaggatctgtcagtagaggaagaaaatcatagcaccccaactaagaaacagacatccgaggtagatcattcagaagtatcagtaacaacatttccagaacagccttcaaaatcagaagaagctcatagtatctccaatgagtcacctgtttctaaggcagatgtttctgagcagtccataacaccacaaactccagcacatccttcagtagcagaagaaaagcttgatggctgcactgaggcacttgcatctaaggtgggtgatgatgaagcatcagaaacatcacaatctccaggacatccttcaacagttgaagaaaaccaggaccatcaatatagtaaacattcttgtcctagtgatgaagcagagccaaatcagcttagagagtctgctggagacttacctgatggtagtgcattttcttcgcctatcaaaatagataaatcaggtgacaccgaaacaggtgaatctattgatacaggaaaggaagacacatctgatgggaatgcctctcagtcacaaccagcagaatccatgctagctagttccgataatataactgaagttgaggacaagattgctcaagaatacaatgtcccaaaagaacttagtagcccacaggagaattgcgatacagtagacaaagttactcgtcttgaagtcaaattacatgatggcaatattgataccaaaaaaagtgaggaagaaagcaataagatggaggcaggggaagtatctgttgttgtacaggaggataatgtaatggagcaacctgaagatttaatgtcaaagtccataactgcagctcatgattcacattcgcagaatgagtcagtggtcagtttgaccgatgtacctgctggactagggggagtaggccccgcagataattttacagaagaagaaaagattgctagaatcacagattttcagattgtggactctgttgtttctgttggtgagctagagaaattaagacgtgaaatgaagatgatggaagctgcattgcaaggtgctgcaagacagtcacagtccaaagctgatgaaattgcaaggttgatgaatgagaatgaacaactaaaatcaacgatcgatgatctcaagagtaagtcttctgaagccgaaatggatgcacttaaagatgaatatcaccaaagagtagcaactcttgaaaggaaggtgtatgcattaaccaaagagcgtgatacactaaggagagaacagaataaaaaaagtgacgcagctgcccttttgaaagaaaaggatgagatcatcaatcaggtcatggctgaaggtgaagaactatccaaaaaacaagctgcccaagaagctacaatacgaaaactgagagcacagctagattcgtgagtttgaagaagagaaacaacgtctgaactcaaagatccaggttgaggaggctaaggtcgaaagcattaagagagacaagatggcaaccgagaagttgcttcaagaaacaatagaaagaaatcagactgaacttgcagctcagaaggagttctacaccaatgctcttaatgcagctaaagaggctgaggcattggctgaagcaagagtcaacagcgaagccaaagttgaactggagaaccttttaagagaagctggcgaaaaagaaaatatgctgattaagacaatcgaggagttgaggctttctctcacccgacaagaacaagaggctgctttcagggaagaaagactaaaaagggactatgacgatcttcaaaagcggtatcaagctagtgaacttcgttataatgaactggtgacacaagttcccgagtctaccagacccctcctaaggcaaattgaagccatgcaggagacatctgctcaaagggaagaagcttgggctggcgtggagagaaccttaaactctcgccttcaggaagcagaagctaaagctgctgcttcagaagaaaaggagcggtctgtaaatgaacgactgtcgcaaagtttatcccgcataactgttcttgagacccagtaatttttggggtgactatttggt

SEQ ID NO: 7217 - DNA, 1002 bp, Zea Mays
cttccctcgaaatggcaacggcaggaaccgatccttgcccgccgtctaggagagaaaaactcgcatcataagaggcggatccccccatcgcaagcttcagcggcggatcggagaactcaatcgagctaggatcgcagcagcaccgaagcatttgccgatcatcagttcttccatccagaccaaccaaattaaacacagcatgcaagggatcacgaaggcgctgcggctccacgggaggcagctgaggcacgcggtcctgcagcacatgaacatgaacaaggggatcttctcctgggccaccctgatctcgcgcatacagagcgagtcgccagccgtgatcataccgcacatggggctcgagaacatcaccgtcaacgagattctcagggccaagggggaggccgaggccggagcggtctactggtgcagcaccgcccatctggtgcacgaagcggtgcagcacatggcggcacacaacgttggagctctcgtggttctcaagtcgggggacatgaaccagctcgcaggaattgtgaccgagagagattttgccagaaagatcctcttgccagggcgaccttcacagcaaacaagggtagaggatatcatgacagaagaggacaaggtgatcacggtgtccggtcgtaccaatattctgcgtgcaatggaggttatgacagacaagcgtatcaggcatgttcctgttttcgacgacaaggtagttggaatgatatccatcggtgatgttgttagaacaatcgtggaccagcagcaccaagaagtaaaacagctcaagaagtatatcagaggagactattattagaacactttttaattattattttttacattcggtgtataaacgtaatttggatgtaatcgtttatagatatttaactacaatgtatatttttctctgcgaaaacatggttgatatgtgcccttctgtgtcaagttatgacgagtgattatcgtaagatgatcggctttggttgagtttgg

SEQ ID NO: 7218 - DNA, 625 bp, Zea Mays
ccgtcttatttggatagatagacaaaacttcctgccctttctgcgtccgtgtgaagcagttgttcgagaagctcggagcaagctacaaggccattgagttggataaggaagtgatggagctgagctccagaatgccctgaaggagtggactggacagaggactgtcccaaatgtcttcatcaatgggaagcatattggcggctgtgatgatactatggcactgaacaatgatgggaagctggtgcctctgctgactgaggctggagccatcgccggttctgcctcgaagacaaccatcactgcttgacatgtgtgttaccattcccgtgcttaaaaataatgatgctttgcaagtgctgaacttgcagatgctatgtgggagtgactgttcgttccctgtgtaaaactccctagacatcagtcgagtcgtgttgctgtggtggttgtgaaatctacaataatcattgctacaataatgtcgtgttccctagacatcagatgagaaagatgagaagaaataacattataatcttattcgaactatcatctgtaagcttcttttgatacaatatttttatttatagattttaaaaacatttgtaggactaataagatttttaggcac

SEQ ID NO: 7219 - DNA, 3674 bp, Zea Mays
tcctctgtcttttccaacaataatagtataatacaggcagctcacctccaagataaaatggcctgacgaaatgagcttcagggaaggccgccgccgcctactcctcgtcctcctcttcctggggtgtcgacaagccgcggcacgctcccacggtcggagacgaccaagatttcctcttttccgaggggagcacgagcacgagcaccaacgccgaccccgacctgacggctcgcacacacatcgataatttgccaacttctgcataagttcgtagcagcctctgtaacattttggccaaaatgaggatagcttttctcgtgctgttggttctctccctgtttctcctccctaatgggatcggcaaaagcttagccgcaaggccttcggtcgtgaatattgggtcgattcttcggttgaactccaccactggaggtgtttcagatgttgccatccgtgcagcagtggaggatatcaactcagaccccacagttctaaatggaacaacgttacatgttcaaacgagggatacaaactgcgacgacggttttcttggcatggttcaagctttgcagttcatggagactgatgttattgcgatcattgggccacaatgctctcctattgcacatatcatttcgtatgtcgcaaatgagctccaagttcctttgatgtcctttgcatcggatgcaactctgtcatcaatccagttcccgttcttcgtgcggactatgcccagcgatctctaccaaatggcagctgtggcggcagttattgattactaccaatggaagatagtcactgccatatacgttgatgatgattatggccgaaacggcattgctgctttggatgatgaacttactgcaagacgctgcaaaatttcattcaagattgggttccgttccaatgctaaaaaaagtgatcttctgaatctgttggttactgttagtaatatggagtctcgtgttattattctccatactggttcggaacctggactcaagcttctgtcacttgctaatggactaaacatgatgggcaacggctatgtatggattgctactgattggctttctgcttatcttgatgctaattcatcggtatctgctgaaactataaatggcatgcaaggtgttctgactgtacgtccacacacccctaaatcaaaggtgaagagtaatctggtgtccaagtggagcagcttaagcaagaaatacaaccacagcgatctccgcaccagtgcttacggtttttatgtttatgatagtgtgtggactgtagctcgggccctggatgccttctttgatgatggtgggaggatttcctttacaaatgactcaaggctgcgtgacgaaaccgggggaactcttcaccttgaagccatgagtgtttttgacatgggaaacaaattactgaataagattagaaatgtgaacttcactggggtgtctggccaagtgcaatttaatgctcagtttgaactcattcatcctgcctatgatatcataagcataattggcaacggcatgcggaccattggtttttggtcaaactatacaagattgctatcgaccgtccttcctgaagacctatattcgaagcctcctaatacttcgcttgccaaccaacaactctatgatgtcatttggcctggtgagactgcacagaggcctcgaggttgggcttttccttccaatgccaaggagttgaaaattggtgtccctaacagatttagctttaaagactttgttagcaaagataatgctactgggtcaatgaagggctattgcatcgatgtcttcactcaagcattggcattgcttccttatccagttacatacaggtttataccttttggcaatggtactgaaaaccctcattatagccaacttgtgcagatggttgctgacaatgattttgatgcagcaataggggatatcgtaattacaatgagccgaactaaagctgttgatttcacccagcccttcattgagtcaggcctggttatcttgtctccaataaaaaagcatataacaaattcttgggcattcttgcagccatttacattggggatgtggtgtgttacagggttgtcttttcttgttgtgggtgtggttatttggattcttgagcatcgaataaataatgatttccgcggctcgccgcgacaacaaataataactattgtttggttcagtttttcgactctgttttttgcacatagagaaaacacaatgagtaccttaggacgtggtgttttgctcatatggctatttgttgtattgatcattcaatcaagctacactgcaagtcttacttccatcctaaccgtgcaacagcttgatacatctataagaggacttgatgacctgaaaaatagtgattatcctattggtttccaagttggttcttttgtcgaagaatacatgattaaggaactgaacatctcacagtcgaggctaaaagctcttggttctcctgaagagtatgctgaaaatctcaagctaggtcccaagaaaggaggtgttatggctattgttgatgagcgcccctatgttgagctgtttttgtcaacttactgcaagattgctgttgctggctcagatttcaccagcggtggatggggctttgcatttccaagggactcccctctgcaaatagacctgtccaccgcaatcctgacactgtcggagaacggggagctgcagcggatccatgacaagtggctcaagacaggcgactgctcaacggacaatgctgagttcgtggactcgaaccagctccgcctcgagagcttcatgggcctgttcctcatctgcggcgcggcatgcgtcctcgccctgctcatctacctcggcatcacgatacgccagtacctgagacacgaacagccggaaaaagaaagagaggggtggaaatgggatattccattcctggtacccttccaggcttccacctgtgctttctttatggataacgatgatgatgactatgaggcggccgttgtgggcgcgccattccggaccctacactccagctccactctcccatggcttcctccgccctgccttccagaaccttgcaccgccgcgcgctcccctcgtctacgccgtgccaccctgcgacggagaccttcgcccccggcgccgtctcccggcggcgagcagccgtgcggctcctctccgccgggttcctgaccgccgtcgcgccgccgccgtcgctcgccgcgaggaggggacgcgttgtcgtgccaccggaggactacgccactgcacccgatggtctcaagtactacgatcttgtcgaagggaagggaccaactgctgagaagggctcaaccgtgctggtccacttcgactgcatttaccgtggcatcaccgcggtgtcgagccgtgagtcgaagctcctggcggggaaccggagcatcgcccagtagccttacgagttcatcgttgggtcgctgcctgggaaagaacgcaagcgggatttcgcggacaacgccaacgggctgtactcggcgcaggcggctccgaagcctccggccgccatgtacaccataaccgaggggatgaaggtggggggaaagaggagagtgattgtccctccagagctggggtatgggaagaggggaatgagtgagataccgcctgacgctcctttgaactggacctcga

SEQ ID NO: 7220 - DNA, 1720 bp, Zea Mays
cagatttgcagccactaccaccgaaaccaaatggctctctccctatcaaaaaaattgctagggtgccccggtccttgtctcgcggttcacagtagagcggtggcaccacgtttttcctaatcctcttcctgttctacttctacccatttgttccgtcgcttcaacggcacggaagagaatcgctacccagccaatcgaagtcttctcttgccctgctgtatctcatatcctgttgcgcgagattcttggcgattctgctactggtttttatttttattttgctagttcttgaaatttctttcacgagtgtcagtagccaactgctgataacaacatcctatcgttcctgtagcccctttccgtgaccttgccaaagaatttgctcttctctgtgcgtgtgcaatttcttccgctacagctcaaggatccgctactctgctgttttgggagattcgccatgggcggcggggccgttaacgaccacttcccgggggccagcgacccgctgctccccacgaagcgggatggggacggggacgaggacgacgcaggtgcctccgcgttccacgagttcgacggcgcctccttcgccggcgcggtgttcaacctctccaccaccatcgtcggcgcgggcatcatggcgctaccggccaccatgaaggtgctcggtctcgtccctgggctcgtcatgatagtgctcgccgcgctcctcaccgacgcctccatcgagctgctcgtgcggttcagccgggccgcgggcgcgcgctcctacagcgcggccatggccgacgccttcggatggtggggtaggaggctgctccaggtctgcgtcgtcatcaacaacgtcggcgtcatgattgtgtacatgatcattataggcgatgtgctttctggatccacttctggtggtgagcatcactatggtgtgttagaaggatggtttggaatacactggtggaatgggcgtttatttgttctccttgtcacaaccctttgtgtgttcactccactagcatgcttgaagcgtattgattcactaagctatacatccacaatatctgttgctttggcggttgtattcgttattattactgcaggaattgctgtcatcaagttgataggtggacaaattccaatgcccaagttgtttcccactgtttctgatttggcatctgtttgggaactttttacagcagtgccggttcttgtcactgcttacgtttgccattacaatgggattcacaaggtattgccaagaagtgggacaaaattctggcgatcttcatgattgttcttgctgttgtatcaaatgtagtagcggtctacagcgatgcctacaaaatattcaacaaggaaagtgctccttctaatgcctggatcggggagtcaactgaaaatagatcttcgtggtggcttgtacgttagttggccaataaaatattcatagttcatttaggctttgtttttggtgatttgttccacgggccatggtctgctcaaatctcattgagttttgtgtgtatatctacgataggtatgaaaatttgcacaaaccgaagtgctccggtaccataaaaataattgtgtcaaatctgaaattacagagttacgatcatgatgactctttttgaaaaaaattgtatcggatgtgaagtaaccatcgatatctcttgtacgtgctctatgctttagtgcatttgttagaagattaagtgggaag

SEQ ID NO: 7221 - DNA, 1563 bp, Zea Mays
cgccccttcccccgagctccgacacagccgtcgccctgagcccgtcatccatgctcccttccatccttctccccaccagcacaaccacaccccctctcccccctcgccgcctccccagaccccgacacgtcctccccggccgcaatgaccgctccccgaccgtggtccccgctagcaaacccaagctcgtcggggagaagagcaaggggggcgcagaggcttgcctacctagctcgtcggggccctatggagatccagcaccaccggggctgggcaactccaaggttgtgaaggtgcagagcgaggaggcgtgggatctgttcaccgatcgagcgagcaatgaaggctgggccaggtatcggcgatgccctcggcgacatcgaaatctactccgcggccaccggcgagcccgtcctgttcagagacctgtgggactaggacgagtttagtaaatggagaagtaatgttggccgatccgcccgtagatcctctctccccattaccgcgatttatttggtacttcgggcaggagggtcctgatcggcgactccggcgtcggcaagtccaacttgctctcacgcttcacgcgcaacgagtttagcctcgagtccaagtccaccatcggcgacgagttcgccacctgctctctccaggtcgacggcaagttcgtcaatgcccagatttgggacaccgccggctaggaacgaattagagagctgtttagatgactggagttcacattcatcttctgctggcaacccaaacataccatatgtggttgtctccaagtcatcaattgtgactgctgtatgcaaagagattcttggctgctacaggaagttacttggcattcctgatctgttgaatcaaccaaacatgtcaattctgaagcaacttttgcagactttacagccaactgaaaattttgatgatgttctttctgagttccaatcatctcttggtccttgcaatgttgattacctatattgtggagaatgtaaaatgttggaggatattatggattcagtgtcctcattttcataccttttgtcttctgatgtgttaattactatacaatcaattgtaaattctgttgttgtgttgttggacaaatccggggaaccaaatgggaaaaatatacacatgggatgctccaaagcaatcatttcctttctgcgaaagcgtcttggatactcagctcataagctgctcagtgctgatttccctagcgaagatgttggaaaaggatggcagagtaaaggtgatcttatacagaagatattgcaaatatacctcaggaatagtgactctacttcagatctacttgctgagataggtcgtgaattgcctaagatggtataagctgtttataatcaaaccatagctctccaagtagcctagctggtatgtacgagtacgatacaatgaataccacatgcaacaagcaagtaggtgaacttaattgcatctcaaccagtccatgtacccaacggtgtagatcttcgcaccaaattcttccagcgcacatggagtagatgaacttgcttgtagcacttatttatt

SEQ ID NO: 7222 - DNA, 3441 bp, Zea Mays
ccgcatctcccgttcccggccgtttattattagctgagctcgtgcctcgtacacgaggccggccctctcgctctcggtgcgtgcgtgggctgaggccgctgagaggcaatacgcggtgcgtggggtgtggggagcgaggcggcggcgacgagggttttgctgctccgcacaccgcgcgcagcggcgacgcgaccgcagctcgtcgccgccccggttcgaggaggaggaggaggagccggctgaggcgcctgtggtggctgctgcggcgggagcgggagcgccatgaggggcggcggcgggaggcagccttcctatgcggcgtcggacggggcggatgcggatgcggcggcggtcccggctgcttccaggaagatggtgcagagcctcaaggggatcctggccgaccgctcggagggcgagatctacgccaccctctgcgactgcggcatggaccccgacatagccgtagagaggctcatctcccaggatacttttcatgaggtgagaagaaagcgggataagaaaaaggagactaaagttaatcaggaaacaaggcctcgtccattccagaaatctatatatggaggatataaggctggttcagatcgaagtgggagaggcggtttcaaaggccctgccaaaaaagaaccagagttacatgcttcaataaactcgtcagccttagatgtcaacacaagtgccacttcagaaacattttctgctactggcaatgttgcccaggctgatgctaagaacactttccagcctccatctcaagtgaaacatggttggggtggtgttccaggtcgcccttccatggctgaaatagtgaagatgggccggcctcaagctaaagttgggagcagatctgttgcaagtagcattgtcatgccagctattggtgattcagccattcccaatacaccaaatcttgcgcccaatgaatacaaccaaactgtatttgcatcagaagtaggccatggtgcagcagataaattgccaaatgttgccgatgaggtgcactctgtatctaaagatgcttcctcacttgatatgttaccttcagcagagggaacagatgttgaagccccttccatgagtgctaacatgcaaggttcatcaacgccagatgccaatgaagatgacgttgaaaaagacacaaatttggaagagggcaatacagaaagcttgacgactcctggacaagtttctgcttctggtaaaggtatacattcagaatatactgaacttgtcagtcatctggatgaaggctcgatggagaaaacagatgactttcagctcgatgctctttcatttgaacacaatctaacagatctgaatggagatgtgtctacaacgacaacacaatttgatcatttgactctgcttgatggaccaaaattgtctgatgagaatccggctgtaataatccctggccatcttcaggtttcaaacgctgattgtgcgcacttgacatttggtagttttgtgtatggaacacttgatgcgtccttgacaacaaaacctcttgagagtcatggggatatcgtaacaattcctgacgatgattatgaccaatcagagggcagaatccatgacgatgaaagcaaggtaacattagcgcctgctgctaatgaatatgttacttctacgtcaaacagcaatgtagagaatcttgatattacatcagtacagcaatctgaagtcactagatccaatttcctggatgtcacgagcaatacggaatacaacctatcatcacccccagattatgcaacttcaagtgcagcgctgcaagattctacttcacagagttatctacaggaaaatcgacaattccagagcatttctcctctcccaagcttcatgcaaatacaaaatggtctcatgtcaccagcaattccaccattgcgcgaatttgatccagcattctcactattgctcactaatcctcctattatgcatggtacaacgtcatcatccatgagcagtgcaactgtttctacgcagccccaagagaatgccaatccagttggtttacccaaccctcaattgactcaatctcagccaagcaccagcattgctccagggcctccactccctcagcatcttcttcatccctatgctcaaacaacccttcctcttggatacgcaagcatgattggctatccatctcttccaccaagctatgcatatctcccacctgctgcttttcagcaaccatacatgaacagtggcatgttcctccaccaagcagcagcagcagttcccaactcaagtgtgaaataccctctgccgcagtacaaaagcaacattgcccttgctagcttaccacagccaggctctttgctctcaagctatgtcgggggctttggaactgcaaacaacatgcctggaaatttccctctgaaccaaagtacaacgtcggcaaccgcaactcttgggtttgatggaacggtcccgtcacatttggaagatggaaaccagtttgtttgtcttcagcagaacgagaaccctgcaatgtggatgcatggagctggttcacgagggatgcccccacttgcagccagtaccatgtatggctatcaagggcagagtcatcagaccggccttcggcagggccagctaccttcacaatatggctctgctctagggcagtcacagccgggcctgggccccgaacaccgaaatcctagcgatagtaacctaagtggtgctgctcaggctaaccagatgtggccaaacagctactgatccacccgaccaccccccttatcaacatctgtggaagacggtcttgttgttgtgtgcgcaaacgccagaggccatgcaaatgcctgtggcctgatccaggcacgcggataccagctgcgtgtgcatgagttactgtcgtgacattttgagaggcgcaagagatatatgttggagcatgttccacctgtagggtttgtaggatatggccaaaaatgtagctggatctgttcattcaaattctgatagggaaagggccggtcgtttttcgttctatttcccccctttttttgtcgtttgcatatcttgtgacaataaaaccggaatatctaacacatcagcaccattagttccccgaggggagtgaaagatagtctgttgtctttgcatcaccagtattgcgcctgcctcgcttaaattttatgattgagatggttatttgatggatgagaatttcccaacctgtgccttgtctgatgagatgtatcgttgtatttgaacattgaatgcataaaaaagagagattgcagcacacatttgccagccaaatgttgattattcgctgaagtatgtaaatagctctcattatattgattgatttggtcaaattgtttggttatcttgcaaatattacagtggctcagtgttataaaaaaaattaaggctagtttggaaaccatatttttaagt

SEQ ID NO: 7223 - DNA, 3488 bp, Zea Mays
gagcagggtgctcttcaactctctttctttttgcagcgcaggacaggaaaccgcatctcccgttcccggccgtttattattagctgagctcgtgcctcgtacacgaggccggccctctcgctctcggtgcgtgcgtgggctgaggccgctgagaggcaatacgcggtgcgtggggtgtggggagcgaggcggcggcgacgagggttttgctgctccgcacaccgcgcgcagcggcgacgcgaccgcagctcgtcgccgccccggttcgaggaggaggaggaggagccggctgaggcgcctgtggtggctgctgcggcgggagcgggagcgccatgaggggcggcggcgggaggcagccttcctatgcggcgtcggacggggcggatgcggatgcggcggcggtcccggctgcttccaggaagatggtgcagagcctcaaggggatcctggccgaccgctcggagggcgagatctacgccaccctctgcgactgcggcatggaccccgacatagccgtagagaggctcatctcccaggatacttttcatgaggtgagaagaaagcgggataagaaaaaggagactaaagttaatcaggaaacaaggcctcgtccattccagaaatctatatatggaggatataaggctggttcagatcgaagtgggagaggcggtttcaaaggccctgccaaaaaagaaccagagttacatgcttcaataaactcgtcagccttagatgtcaacacaagtgccacttcagaaacattttctgctactggcaatgttgcccaggctgatgctaagaacactttccagcctccatctcaagtgaaacatggttggggtggtgttccaggtcgcccttccatggctgaaatagtgaagatgggccggcctcaagctaaagttgggagcagatctgttgcaagtagcattgtcatgccagctattggtgattcagccattcccaatacaccaaatcttgcgcccaatgaatacaaccaaactgtatttgcatcagaagtaggccatggtgcagcagataaattgccaaatgttgccgatgaggtgcactctgtatctaaagatgcttcctcacttgatatgttaccttcagcagagggaacagatgttgaagccccttccatgagtgctaacatgcaaggttcatcaacgccagatgccaatgaagatgacgttgaaaaagacacaaatttggaagagggcaatacagaaagcttgacgactcctggacaagtttctgcttctggtaaaggtatacattcagaatatactgaacttgtcagtcatctggatgaaggctcgatggagaaaacagatgactttcagctcgatgctctttcatttgaacacaatctaaatctgaatggagatgtgtctacaacgacaacacaatttgatcatttgactctgcttgatggaccaaaattgtctgatgagaatccggctgtaataatccctggccatcttcaggtttcaaacgctgattgtgcgcacttgacatttggtagttttgtgtatggaacacttgatgcgtccttgacaacaaaacctcttgagagtcatggggatatcgtaacaattcctgacgatgattatgaccaatcagagggcagaatccatgacgatgaaagcaaggtaacattagcgcctgctgctaatgaatatgttacttctacgtcaaacagcaatgtagagaatcttgatattacatcagtacagcaatctgaagtcactagatccaatttcctggatgtcacgagcaatacggaatacaacctatcatcacccccagattatgcaacttcaagtgcagcgctgcaagattctacttcacagagttatctacaggaaaatcgacaattccagagcatttctcctctcccaagcttcatgcaaatacaaaatggtctcatgtcaccagcaattccaccattgcgcgaatttgatccagcattctcactattgctcactaatcctcctattatgcatggtacaacgtcatcatccatgagcagtgcaactgtttctacgcagccccaagagaatgccaatccagttggtttacccaaccctcaattgactcaatctcagccaagcaccagcattgctccagggcctccactccctcagcatcttcttcatccctatgctcaaacaacccttcctcttggatacgcaagcatgattggctatccatctcttccaccaagctatgcatatctcccacctgctgcttttcagcaaccatacatgaacagtggcatgttcctccaccaagcagcagcagcagttcccaactcaagtgtgaaataccctctgccgcagtacaaaagcaacattgcccttgctagcttaccacagccaggctctttgctctcaagctatgtcgggggctttggaactgcaaacaacatgcctggaaatttccctctgaaccaaagtacaacgtcggcaaccgcaactcttgggtttgatggaacggtcccgtcacatttggaagatggaaaccagtttgtttgtcttcagcagaacgagaaccctgcaatgtggatgcatggagctggttcacgagggatgcccccacttgcagccagtaccatgtatggctatcaagggcagagtcatcagaccggccttcggcagggccagctaccttcacaatatggctctgctctagggcagtcacagccgggcctgggccccgaacaccgaaatcctagcgatagtaacctaagtggtgctgctcaggctaaccagatgtggccaaacagctactgatccacccgaccaccccccttatcaacatctgtggaagacggtcttgttgttgtgtgcgcaaacgccagaggccatgcaaatgcctgtggcctgatccaggcacgcggataccagctgcgtgtgcatgagttactgtcgtgacattttgagaggcgcaagagatatatgttggagcatgttccacctgtagggtttgtaggatatggccaaaaatgtagctggatctgttcattcaaattctgatagggaaagggccggtcgtttttcgttctatttcccccctttttttgtcgtttgcatatcttgtgacaataaaaccggaatatctaacacatcagcaccattagttccccgaggggagtgaaagatagtctgttgtctttgcatcaccagtattgcgcctgcctcgcttaaattttatgattgagatggttatttgatggatgagaatttcccaacctgtgccttgtctgatgagatgtatcgttgtatttgaacattgaatgcataaaaaagagagattgcagcacacatttgccagccaaatgttgattattcgctgaagtatgtaaatagctctcattatattgattgatttggtcaaattgtttggttatcttgcaaatattacagtggctcagtgttataaaaaaaattaaggctagtttggaaaccatatttttaagt

SEQ ID NO: 7224 - DNA, 3187 bp, Zea Mays
ctttcctcaagattttctttgtcgagggtaaagtttggttcggggacgacgccacacaggaccaccgccatggtgacttcttctgctactggtgtgcagtgcagagcctctcgtgtggtgtctgtctgttgagcatgtttcggactggaccgagctcacttcgtttcctttacaagcgaagacatgtattcccccacgcgacgcggcgtactgcctctgtagttcgcatttcgagcgggcatttcgagcacagcctcccgtgccgcgcccattcaggagggttctgtgctttctgtcaatgaactgcagttacagtagtgttcatcttcaatagggtttctgttcgatttccttcatccgtgtcttttctggaatcgccgtcttgtctccgtgcaattctttaaggtcccatgcccgtacccgaatcaccgtgcggcgatttcttggtgccgtatgagtaaatgccaggtttctgcacatgaacaacatccgcgaaaaaagtcgcatcctttcactgcattcagggcctgagggtcagggggtgctggtctcactccactttcgttaggaactgcgagagtgatgcgctcaaggatccgcatccgcgacaatggcttcgctggtgccgggcgtcctggtgaagctcctgcagcacatgaacacgggcgtgaaagtcggcggcgagcaccggtcctcgctcctccaggtggtcagcatcgtgccggccctcgccgggagcgacctcttcaccaaccgagggttctacctcaaggtgtcggactcgtcccacgcgacctacgtctccctgccagaggagcagcacgatctcatcctgagcgacaggatccagctgggccagttcgtccacgcggaccgtctcgaggcggccactcccgtccccatcctcagaggggtccggccggtccctggtcgccacgcctgtgtcggcacccccgaggacctcgtgctgaccgcctcctcgtcgaactctcacggcggcggcaagaacaagaaggcgcgaccgtcgaatgcgaaaacgaaggacgccagcgccagcgtcctgtcgctagacaaggaatcgagcaagctggagaagataaacgcctcgcgcaagcctaccgctaccggggcggaaaacaagaagccgacgctcaccagatccaactcttcgctgccaagagaagctctggatgggaggatcggtgatgacaaggtagcggcggttaagtcaaaaaaggtgaagccaggtgttactaggtccacaccttcgtcaccaaccagcgtctattctctgcctgcgtcgttcgacaggttctcgaatgacctgaagcagaggaacagagtgaaaggagcggagaataaagcttcgtcttcctctaggctttcattgttggaaaaggccgcttctgttttgaaggccactagtgccgccgggagagtgtcctctgctggcattccgatcggtagctctgtgctgagcattggatcgtcagggccaaaggccctgagaagaagctgggaaggaaacacggatgttaaagggaaaggaaaaccagaatcgaggacagccaaacctgacaggaagtctgatagcaagattccaatgactcctagacggaaatcaccagtggatgagaaggtggcgccacataaagatgacaacagtcagaaagctgctaggaagagcaccacaagtgctcccgcctcagacgacgctgctgacaaagcagtgaagaagaagcatattcctacagcgaagagaacttccgggggtttagggaactggagtgtcacaaatctagtgaagattcctcccagcagcagaaaactagcagacgttagcgcttcatggacatcactcccgccatcacttgccaagctaggaaaggagcttctcaggcacagggaatcagcacagatagctgctgttgaagccatgcaagaagcttccgctgcagagagcttgctgagatgtttgagctcgtacgcggaggtgagctccacggcggaagagcagaacccgcagccagccgtagagcagttcctcaccctccacgccgcgctctcgcgcgccacggtgatcaccgacaccctcgccaagtctgccacatctgcagcctcgccagattgctcggcagccagcgacgctgggacggtgtgttccgctaccgacgaggaggccgctgccatcacggccgagcgccggcgccgagctacgtcctgggtgagcgccgctctcgccacggacctgtccgccttcggcatctacaagctcaaaccgccccccgccaccgtgtcctcgccgctggccgtggtcgtcgtggacgagcccgcgaagctggcggcggccgcggctacgaaatcgtcgccgtcgccgaagtcgcggctgtcccccgcgaaggggaaggcgaggacgggcgctgctgcggctgcaggagcgctggccacgacgcccgcgccgccggagtgggagaggggaggaggggccgaggagaggggcgaactggcgacgcggctgggagaggagtcaaggggctggttcctcggcttcgtggagcggttcctggacgccgacgtggcggcgaccgcgcagtgggaccgcgagcgcgcggccaggatgctcccgcagctaaagcgtgtcaacgactggctcggcgagatcgggaagcgcagcgagaccgagacttcgtcgctgccgccggccgacgcggacggtgaggcgaccaccacgagcaccgcccccgtcccctcgaacggcggctgcggggtacctgaggaaacgatagagcggctaaggaagaagatctacgagtatctcctcaccaatgtcgattctgccgccgcgatgctcggaggcggcgggctggccgcgccgacgaatgggaagaaaggctgacgcgtgggtagaggtcctaattgggccgttagtagtgtgaaattttattgggccaaaaatgggctgggttaactaatgtaggcttcgtttctgttgtttctttgttgggctttgagcatttcagcttctcttggtttcttattttggtcacagaaaaaagaaaggcggtgagatattgacttgtatttatcactgatgtcgactgggtgactctggattatggagtattgctccattggatagttttctgcatttcgagacaggaaagtggttttctgcggaactgttcgg

SEQ ID NO: 7225 - DNA, 2530 bp, Zea Mays
cctgctcatcgatcttattcatttggcctcaacgatcaggattagtttggcttccactccttgagccttctgctcaaagcaaccaccgctggctcagctcactccggtggcctccggccgcctctgcctccgaggattcgcttggggggagacgtattatgaggttcgcggggtggtacctgaagattgcggcggtggggcctccattggcgctgccatggagctcttcatgatccacacgggcttttatgagaaggtaactgtcctggggtcagaaaaacgagcttgggaaagcagtctagaggcccaagctatgagagaagctctcaatccatggcaaaagcatgatgaacaagaacaacagaagaaatagtcaagagttatgtgtcttaagtgtctgcgttcccatccgtatacccttgaatcagcttccagaacacgttgaagggctatcgaagacagttataaactgcttttttcatgggatgcaaaaaaaagaggggacattgtacactatcacactgggtttcacttgtttttatgatattttaacattagaacatcagattttgggtatagaaatgggtgaaagttgtctgcttctctgtacaataattgaatgctctatggattgctcatgtaatccttttcagttatgatatttttttaaacatcatttgttggaacaaaagggtgtacataacaacagtaaatatggaggagtttgcacatagctcgattcaatgagcatcaaaaattcccaatggattttatgcaacctggctccaattgttagtattaatgcccagtaaatggaataatactcgttctgtacaaacgtaccacctcctaagctgatagtttcctatcctcttgatgtctcctgtaatgtattcatttcacgtattgtatgtaacccatttcagctagaactaaccaaaattttgtacaagctagtttctctgttaactacttaactggaaacttggtgatggtgcttacaacttgaccagctagcggcagtagaataagctggttttgttcgtatgaatagaactatgcttgatgctaaccctagaattgtgatgcaagcccacacaaagaaggtggttgagtagcacttcacccccatgcacataatcatggtgtcaacaatgccagtccagttatccactactgtcatcttttggccatttccatcgtataccatggcagcaatctggccatagaggagtgagcccagcgggatattggtaattaggatgttgtgattcactccaatgctatttggtccaaagagctcggaggtcactgacattgctgcagcaaagatgaatcctgagcttagaccaactagtgttgttcctgctaccagggtgcttgcatcttgttggttccacataaggaaaaaggccattggcatggggaccaatgcagcagcaagccaccctgtgcgagcaagtggcaccttcctgtatacaaattttagttaggaagcatgtgatatgatgacatatatgtttgtatataaagcaaaacagatacctgtgaaggatgtcaggtagtgcagaaagaagacgaccgaagaaagagcaggatgagtaggcaataagtagcatggtgagctgtgactgctggtgcaatgactgcgcaatctgccccaagttgttgctgtataccaggccaacagtggctccacagaagtaggctgtgtagtagagccagaagtccacacaccaaatgagcttctttgcactatgttcttcaccgagtgccaccagggtcagggccatctgtatccacatatgaggaactggagcaggcagggatgatgagaggaagggcgaggagaaccatggcacctatgaggatgacccatgcagtagagccagttgcggtgaaagttccaaagaccacaacatatatgccagtgatgaatgcaaggatgtagaggccgaggaagacacgcctgttatgcctgggcgcactttggaggtggctgtcatttgtgtggcagaggaggatcactgggagtgcaagaatagagacaccaagagggaggattgcattgaggaggaggcagatagacagggctaaaggggagagggcgtttgcaaagagagtgtagaaggcagcgctgagcccgttgaagcttattgagagggagagggctagggagcggttgtttgcagagaagttgcggatgcagagaacaaagcagactgtgttgaaccagcagatgctgcaccctgctatcaagcagaccaagaacacctgcaagggccaacatatgaatcagaatttgatcaaataattaagttcgatataagttgcatgttgtctttatgtcttggcagtttaacctctattgtctctacatcttgacttaaatacctttgaggatagtgtttgcaatcagtttgtccagagtcgagacgacttgtgtaatatagtttgtttactgaaagctacaggatggatttgtatactgggagcccaagccccgtatggtatcgaatacattgtacga

SEQ ID NO: 7226 - DNA, 805 bp, Zea Mays
gggaggggcaacatggtctaaagaaaaccttaacgactctcagtgaggcttaaagccgcgctatgccgtgctggagatcgtcacatgtcacaggtgtgcattttttggtagatgccatactagcaaaggcgcatcttcggggtgccaatattccaaatttctcgatcaaacatgctctattgccctgtatctatcctctatcgaagccggagaccccagaaagagtccgtaaacaactcccggccatggcgaccgcagaccgggtcgccgccaccttcctctcctctttccccactcaccatccccgccccttttcctccgtttccctcgtgacaaaccctgtcctacccgtctcccttcgggccgctgtcacaggtggcccacggctcgcctcccgtctccgggtccaccgcgtcggcgccgccgtcgcccagcttcccaccacgaatccggaggtagcttctggggagaagaagatcagatggtcatcaagggctgtgcggtcttttgcgatggcagagctggaggcccggaagatgaggtaccctaccacaggcaccgaggggctcctcatgggcattcttgttgaaggaactagtggcgcagcaaaacttttgcgtgctaatggaaccacacttctcaaagtgcgtgaggaggcagcgaatgttcttgggaaatcagaaatgttttactttagtcccatgcatccaccattgacagaagctgcacaacgagcccttgattgggctgtcaatgaaaaattgaaatcaggaggtatctagttgtctcctatcttcatgctgtt

SEQ ID NO: 7227 - DNA, 1804 bp, Zea Mays
gatgcaagtcctctggactcgacccccgcatgggctgttcgtgggctgaatcgaagacctactcctagtgttttgggccttccgggctgcacaccccagcccggcgctcatgtccgctcctacaagtggctagaccttttcttccgttcacccggcctgccgcctgcgtcctccctcgtacggcaacttgtgcgaccgccggcgccgacgccccaaggcaggtgccctgtgaccaggccttcgccggtccctttcgcgtccttcgccggcgacgagcaccaccagttcgtacgggagcacaatcagaggtgatcaccatttgctgcctgtttggtgaaagttgcgtgatggatggatatggagaggcggctgctgtggccatggagttggaggccgaggccagcccatccagggggcgctcctctcctgtggtttcagggtcaccatcccagaattctgatggaagcatgtcctcgtggcggctgggcctcaagaacagcatccagactaactttggagatgattatgtcttccaaattgcctcttgaaaccggacagtacctaggggaatgtaaaggacacgaaggaacaatccatgaaatctccttctcagctccatcgtcaccacaagtaatctgctcttgttcttctgatggaactgtcagagcttgggatacaagaaactttaagcagatatctttgctaagaggaggcgtgtcacaagaaatgttcaccttcgcttttggtggatcaaatggtagcctacttgctgcgggctctaatgcccaggtcaaattcacaccagatcaacaaagtaaactcatttctgcagcagttgatggattaatatgtgtttttgacactgatggtgatattgatgatgacaatcatctgttatctgttatgaatgcggaaacatctgttgccaaggtgggtttttttgggaacaagtataagaagctttggtgtttaacccatattgagacattaagtgtctgggactggaatgatggggctagagagttgaatatagaggatgctcgttccttggccactgataggtggaaccttgatcatgttgactatttcgttgattgtcactattctgtgcctgatgaccggctatggttgattggcggcacaactgcagggacgttaggttacttccctgtaagaaatgaccatgatggaccaataggttcagctgaagcaatcctcgaaggaggccatacaggagtcgttaggtccgtgtacccctcttcaggaatccatgggagacttgggcaaaacaggggcatctttggatggacaggaggtgaagacggtcgtttgtgctgctggcgctctgacgaaattgcagaaacaaacaaatcttggatctctagctcactggtgtggaagcagcaaaagaaaaccaaaaaccggcatcagccctactagccgcaatggataccgtttggaactttcggcactgacaagggaaagccctgtatgtgctgtgagcatgttgtatcttttctttgaattctactaggtcgtgatgaaacacagcacattgtaggtgcagttttgacgttgcttattgtttgagaatgcttgtctatttcagtaactggttattaatctagcaaagatatggtaagttgagtattgaagttttcgtgctcggaacttttagcggcccggaattgaacaggcgatgacgtgtatttggttcttggacattgtctgcagaataagtagcatataaatggagtaggttagggtgcatttggttcttggacactgtccgcataagaatttc

SEQ ID NO: 7228 - DNA, 1362 bp, Zea Mays
ccgagatgttttgttaaaaaataaatgaaaatgaattcatgtatttaaaagaaggacccctacgggtcatagacattcatgcccacaaattccttccaaacagaaacagcaccagactcctttccttttcctctcgctccctcgctctttctcccgcaactcggcgtcggcgaccgctgccgctgccctactacgccaggtgcactgctgctggtctagtagcctcgtcggtcccttcgacaggttttcttcgggtcttcgccggcgacgagcacccgccaggtggccaatgataatgttggcggtcagagggctgaacagtaaaatgctggagaaaagactgcacggatgcctgctcctgctcgtcttccttctggcagacgtatcagtaaagatgtacgtggagcctgcatgagggcagccgtgctgaaactgccgtcgatctgggtccagactcggaggacggcagcaagaggaggtcgctggccaccaccatgttctgtgtggcgaaacagggcgcggacgcgacggcgctgcaggcagggctcaactgggcgtgcgggcagggccgagcgaactgtgcgcccatccagcccggcgggccgtgctacaagcagaacgacctggaggcgctagcgtcctacgcctacaacgactactaccagaagaactttgctaccggcggctcctgcggcttcaacggcacagctacgaccaccaccagtgatcccagctcggggcagtgcgtcttcacaggaagctccatggcaggaggcggcacgccggctgcgagcgcccccagcggcctctccccgccgtcgtcgttcacgccgggcattgggagcccctccaacaccctgatccctctggacggcgccgagagcctggtgtccagcgtctggtcggcgatttgcgccccgctgctggcgttgccgctcttcttcctctgaccaccagcggcggcagatgagtggccggtgcttgctagtagagcgcttattatgtttttttgttcttgttcctgggtagatcgctctcgtgtggcggtgttgatgtacatgtcagagtcgtgttggatgcgctgggatgggagattacataagatgctacagagatctattcatacgtagaaagtggaccggactccaccgtgtttccgtgtgttctggtctcagatctgttcgtggcagaaaccagatgtaaatgtatcatgttcactactctctgtgcacagaccaagggaagctgcagtccactgaccacacacacaccacgctaggattcagactcagaggcttcgtctctgtccgatgccgtcgcgcccagcgtcggcgtggccctggacgctgctgccttctcccg

SEQ ID NO: 7229 - DNA, 1373 bp, Zea Mays
attcatgcccacaaattccttccaaacagaaacagcaccagactcctttccttttcctctcgctccctcgctctttctcccgcaactcggcgtcggcgaccgctgccgctgccctactacgccaggtgcactgctgctggtctagtagcctcgtcggtcccttcgacaggttttcttcgggtcttcgccggcgacgagcacccgccagcaggtggccaatgataatgttggcggtcagagggctgaacagtaaaatgctggagaaaagactgcacggatgcctgctcctgctcgtcttccttctggcagacgtatcagtaaagatgtacgtggagcctgcatgagggtgggtggtgttgtagacgagaacgctcttggctcttcatccgttgcagcttcacaccgtgctcggttcctacaacgtgcaggcagccgtgctgaaactgccgtcgatctgggtccagactcggaggacggcagcaagaggaggtcgctggccaccaccatgttctgtgtggcgaaacagggcgcggacgcgacggcgctgcaggcagggctcaactgggcgtgcgggcagggccgagcgaactgtgcgcccatccagcccggcgggccgtgctacaagcagaacgacctggaggcgctagcgtcctacgcctacaacgactactaccagaagaactttgctaccggcggctcctgcggcttcaacggcacagctacgaccaccaccagtgatcccagctcggggcagtgcgtcttcacaggaagctccatggcaggaggcggcacgccggctgcgagcgcccccagcggcctctccccgccgtcgtcgttcacgccgggcattgggagcccctccaacaccctgatccctctggacggcgccgagagcctggtgtccagcgtctggtcggcgatttgcgccccgctgctggcgttgccgctcttcttcctctgaccaccagcggcggcagatgagtggccggtgcttgctagtagagcgcttattatgtttttttgttcttgttcctgggtagatcgctctcgtgtggcggtgttgatgtacatgtcagagtcgtgttggatgcgctgggatgggagattacataagatgctacagagatctattcatacgtagaaagtggaccggactccaccgtgtttccgtgtgttctggtctcagatctgttcgtggcagaaaccagatgtaaatgtatcatgttcactactctctgtgcacagaccaagggaagctgcagtccactgaccacacacacaccacgctaggattcagactcagaggcttcgtctctgtccgatgccgtcgcgcccagcgtcggcgtggccctggacgctgctgccttctcccg

SEQ ID NO: 7230 - DNA, 1509 bp, Zea Mays
ttccccactgttttataggcagctggtgctcctccgaaagcgaagtccagcgccccccgctcccccgttcgcgcaaagacgccaaacccacccaccgaaatctctccccgaacttacccctcgccggcgccggcgatgtgcccgacgaagcccggtcgccctgcccaggcggccgccggctccggcgagaagagctggcgggagcaggccgtggccgccagctcgctgcggccggtcgacctggaccggggcaccaacggctgggcctcgccgccgggggacctcttccacctgcgcgcgcgcggctacttctcctgcggcggcgggaagcgcggcaaggcgccgtccgccgcggagtggctgctccgccccgccggcgtcgactggctccgctctcacgcgcgcctcgaccacgtgctcgcccgccatgacaaccgcgtcgccgccgcattccgccgcgcgcgcctcaggaacgaccccaccgcgcacttcctcctcgccgtcaatctccaggtgccgggccggccggacgcgtacagcgcggtgttctacttcgcggcggaggcacccatcgcgccggactcgctgctcgggcgcttcgtccagggcgacgacgcgtaccgcaacgcgcgcttcaagatcgccaaccgcatcgtcaacggcccctggctcttgcgcgccaccgtcggcaactacgcggcctgcctgctcgggcgcgcgctcacgtgccgctaccacaggggcgtcgactacctggagatcgacgtggacatcggcagctcggcgatcgccagcgccatcctgcacctcgcgctcggcgccgtcacgtcggtcaccatcgacatggggttcctcgtcgagtcccagtccgaggaggagctgcccgagaggctgttcggcgccgtgcgcatcgcgcggatggagatgggcgcggccaggtacgtggagctgcctcctaatgaggccatgcctgagacggtctgcagcggcagggccggggccggtttcagggtaagctccgggaaggtggtcaaccatagccgccaacaagaccgtgccggcggtaaggtgggcaggtcgatgagttgcccggagcgagagcgcggaggaaataggtgcaaagtacgcgggtgcagtgcagaaagaaaccatccaccggtgggagcgagagcggtggcgagaaaaggccgggtaacccgacacataaggcgctcaagctggtgccattaccacgaatggcacacctcgttcacgaagtactcgtcgaccccggcttggcttgagcagctcagctgcagccatccacatacatgagggcatgtatagctctaagacggtggttcggttttctaaatataaaagacagttaagaaactgatataactacgagactttacactataaatataattaagaaataatattaattctaagactctagaccataaatatagttagaaaccaatatatatggagatggaatatgtatggagatgggctgctcaggaa

SEQ ID NO: 7231 - DNA, 4389 bp, Zea Mays
caccaaaccaacccagcagcacagcacctgcagggctgcagcagacaccactccagcagcctctctctctctctctcctcaccggcacggcactccacgcggcggcaggagcacccaccgccactgacgggcgggggggaacacgcgcggccatggccacgtcggcgccgccaccgtcctccgcgccgtggctggagtgggccgcggagtataccaaggcggcgcaggccgaggcccgcccgccgccggagtgggcggcgcgggtggcggcggccgctgcggcggcgggcgagagtgaggacgtgccctggtccgcggggctcgcggaggtgctggcgcgagcgctgttccccggcggcggcggcggcggtggcggggctgccccggcggccgccgcttggaagtacgcggaggccgcgctcgcggcgcggcttgcgtccccggcgctcctcctcgcgctcctctccaccagggtaattcctcaccggctttccaggccaatggagtatagactctaccttgagctcttgaaaagacatgggttcaacttccatcatcagatgaaagcagcaaatttcagaaagatcatggatataatagagcggaatcttagactttccaagatatttggcatctctacatgtgaaccaggggtttttgttgtgcatttcattctttgtattatatggcagttgattgatgttgttctggatgatgagggcctactagagttaactccagagaagaatgctcaatggccaacaaggcctgaagatgtgagcacatttgaaggaacttttactgaacaaagaactgagaagatcaaaaagttacagaagatgaacactgtaacaactatggagctcattgagcatcttcttcgcgataaagtaattactcgtatcctatcattggcacgcgaaaacatgcaatctcactggggggcatttactaaccggttgcacttgcttgcaacaaactcatctaccttgcaaaattcagcaatatccttggaaccatttcagcatttgattctaggtgattgtgatgcatatggtgaaactaaacataatgtgcataaaagattccaccaaatagtggcttctaaccctctatcttcaccaaatggacgatgtcttggtgctagctattctgcactatggattcctattgatatgtatcttgaggattgtctcgattgttcaattgctgcaacaaattctattgagattttaagtggtttggtcaaggctcttcaagcagtcaataggtcgacttggcatgatgctttcttggccctctgggtagcttcacttcgccttgtacaaagagaaagagaaccaattgaaggtcctgtacctcacctagacacccggctgtgcatgttgttgtctatcacaacacttgcgattgctgacataattatggaagcagattcactttgcaatgaaacagaactcaacagtcatgtgaatgagaagaaagcaattggtaatctacgcaatgaattgatgctaagcttacagatacttggtgattatgaaagcttgctggttcctccttcatgtgtcatcccagcagctaatcaagctgctactaaagctgcaatgttcatttctggaatcagtataaacaatggctacatggataatgtcaatgggatgaactatactggaaatatgcgacatttgattgtggagtcatgtatctcaaggcagttgctggatacatcagcttactattggcctggttatatcatgaatcatgccaactctacatctcatacactccctagtcaacttgctggttggtcatccttcatgaagggtgcaccactgactcaaccactggttaatatgttggtatcaactcctgcttccagaggtcgacaagttatttgaagttgcagttgatgggtcagatgacgacagcatttcagctgccactgttttatgtggagccacccttttacgaggttggaattttcaggaatatcggccgtggactatgctccaatcttctcgttccatggcctgattccagagctggctgcttctcttatggcaatctgtgaagtatttgggtgtctttctccaagtgtttcctggacactgagaactggagaggaaatatctgctcacacagtcttctcgaatgcatttattcttctgttgagactttggaagtttaaccatccaccacttgagtattgcataatgggagatggtgctccagttggctcgcagctaactcctgagtatcttctgctgttacggaattcccaggtcctatcttccagcagtttgtcaaaacaacgaaacggacaaaggcaatcacaagtatcaacttcacacccatcatctggaaatcctatttttatggactcgtttccaaagttgaagttatggtaccagcagcaccaagcttgtctggcctcaactctctctggacttgctcatgggacacctgtacgtaacaatgtggatagccttcttaatcagatgttcagaaaagctaataaaggaggcacatcaataggttctttatctggaagtagcagcataagtaattcttccagtcctggtggggatgattcacatctttggcctcagttgccagcttgggagatactggaggctgttccttttgtggttgatgctgctcttactgcttgttcccatggaagactatttccacgtgaactggccacaggcctgaaggatctggctgatttcctccctgcatctcttgctacaatagtaagctacttttccgctgaggtgacgcggggtgtctggaagcctgcatccatgaatggatcagattggcctagcccctctgtgaacctatccatggttgatgagcacatcaagaaaatcgtagctgctaccggtgttgatgttccaaagctagttacaggaggaagctcttcaggtacacttccgttaccattggctgctttcgtgagcctcacaatcacatacaagcttgacaaggcatcagagtgtttcctcaaccttgctggtccagctctagagaacctggctgcaagctgcccttggccaagcatggcaatcgttgcagcactgtggacccagaaggtgaagcgatggagcgatttcctaatattttcagcttcgcgcactgtgttccaccacaacaacgatgcagtcgtccagctcctccgaagttgcttcgccgctacccttggcatgtcttcgacatcagtatgcagctgtggaggtgtcgccagccttctgggccacgggtactgccctggtggtttctcgccagttgcgccaggaatcctctacctccggatattccggtgcatcaaggactgctccatactcgccgaggacatactctcccttctgatgctctcagtgaaggatatcgcagaaacaactgtgcccagacaaaggccagacaagctaaagaagaccaagtacgggatgaggcatggccaggtatctctttccgctgcaatgacgcaggtgaaggtggcggcatctctgggggcgacactcgtctggctatccggcggcacggctctcgtccagtccctgatccaggagatgctgccgtcttggttcctgtccgcgcagaacctggatcagggcggggctagcggaggcgtggtgtacaagctaggcgggcacgcgttggcctacttcgcggtgtactcggggatgttggcctggggcatcgaccagacgcccgtgtcccggcgccgcgagagggtcatgcggtcgcacctggggttcctggcgagcgcgctggccgggaagatcttcctcggctgcgacctctccctgtggcgagcctacgtctctgggttcctaggactggtggttgaatgcaccccgtgctgggtgcaggaggtggacctgagggtgctcaagcgcctgagcagcggcctccggcactggggcgaggatgagctcgcggtggcgctcctccgccgcgccggtcccgaggctatgggcacagccgcggagatgatcttgggcagggagttgtgacgccgatgcgcgcgcgcgccgcgcggcgtatgctgttcgtcagcgatgatgcagtttttgtatataatcggttaaaatctggccatgtgtatgctcacgggtaatatttgaatgattttatctgtaaaactgttaagacgttttgatctctctaatactaaccttcatctacccgtttgcaaaaaaaagaaatgatgtaccagaatgtaaaacctaggtttatgaacggacatgtttggcacagttctcatgcagcttccactgagttgattaaagttagaccatgttccaaagctatagagttaattgtcagccagctcataagagcaacttcaatagagaccctaaactcataaacaatttc

SEQ ID NO: 7232 - DNA, 2886 bp, Zea Mays
gctatcctcccgagcggccgagtctgctccaactccaactccgcgcatggacaaccacgtgtcccggaggcctggagtccccgtccgtcccttccgcgcgcgctccccaagttttgcggagactaagcttgggatcgcgtcagggtgtggaggaggaggagggtattttggaaaggtacagggatttgatgccttgcggagtaccacgacgaaagttcagagcgggaaggcggggaggagtgtgaccaaggaaatgggacacacttcatctggcaatgaagtgcccttgaaatattcttcaggcaaagccttccccctaggagtgtcacaagttgacgatgggttaaattttgcaatattctcacaacatgcttcttctgtcaccctttgcttgaattttcctgagagaggcaaccaagatgatgtggacattgtagagtttgctttagaccgccagaagaacaaaactggagatatatggcatgtgtcagtggagggtttgcctgcttctggtgttctttatgggtatcgcattaatggtcctcaagggtggcaacaaggtcatagatttgatgacagcgttattcttctggacccctatgcaaaattagtttatggtcgaaagcactttgctgttgaaaaagagaagccaagccagcttttcggaacatatgatttcgatagctcaccttttgactggggtgacaattataagcttcctaatttgcctgagatcttgttatatatgaaatgaatgtccgtgccttcactgccgacgagtcaagcaggcttgctccagctattcgtggaagttaccttggtgtcattgataaatgctggtttcgtagattcctcatttgctggaacttggcgttaatgcagtggaactacttcctgtttttgagttcgatgagctggagttgaagaggttccctaacccaagggaccacatggtaaatacatggggatattctacaatcaacttttttgcgcccatgagtcgttatgctagtgctggtggtggacctgtggctgcttccaaagagctcaaacagatggtcaaggcatttcataattctggaattgaggttattttggatgtagtttacaaccatacaaatgaagctgatgatgttaacccttacatgacttcctttcgtggtattgataacaaggtctattacatgttagatctcaacaacagtgcacagctgctgaacttctcgggttgcgggaatacactaaactgcaaccatcctgttgtcaaggagcttgtacttgacagtttaagacattgggttaaggagtatcacatagatggatttcggtttgaccttgcgagtgttctttgtcgtggaccagatggcagtcctcttgatgcacctccacttattaaggaaattgccaaagactctgtattgtctagatgtaagatcattgctgaaccttgggactgtggtggcctttatctagtagggaggttccctaattgggacaggtgggctgaatggaacgggaagtacagagatgatattcgaagatttattaagggagatcctggtatgaagggggtgtttgcaactcgcgtttctggttctgcagatctctaccaggtgaacaatcggaagccttaccatagtgtgaactttgtaattgctcatgatggatttactttatgtgaccttgtttcatataactccaagcacaatgatgcaaatggagaaggtggtcgtgatgggtgcaatgacaactacagctggaactgtggcattgaaggagaaacaaatgatttgaatgtgctaagtcttcgttcaaggcaaatgaagaacttccatgtggcattaatgatttcccagggtactccaatgatgctgatgggagatgaatatggtcacacacgttatggaaacaacaatagctatggacatgatactcacataaataattttcagtggggccagttggaagaaaggaaggatggccatttcaggtttttctcagagatgatcaagtttcggcataaccatcctatattgagacgagacaggtttctcaacaaaaatgatgtcacttggcatgaaaatcgttgggagaaccaggacagcaaatttttggcatttacgatacatgatcacagttctggtggagacatctatttggcattcaatgctcatgagtattttgtggatgctgtaattcccccaccaccacaccataaatcttggagtcgtgtggtggataccaacctggaatcaccaaaggatattgtcccagaaggggtgccattcacaggttcagggtacaggattgctccctactcttccatcttgcttaaggcaaagccttagaatggcggaggcaagtcattctcaagtaagcacgaataatggtgttgtgatccctaactttccaagctcttagccaactgtactgcaagtatagcaaactttggtatgtgaagtcggaccaacccttgcggaaatcaacggaagccatggtttgctaaaggtatactcatggagaattggagatatggcaaacacatacgcaagtaacctccacacatctaagcaagaagagcctttcattaggggatgcatggctcgaggaaactatatttgcatttggttgattcatttttatttgttgcacatgtcagtatgtcacctgtgtgtgtcaagctcttatttgcttaaaaattggacattcctttgttacatatttgtgttgtactgtgttggagctagcgttcctggtatattgcacgggggtgggaggacgggggacgctttgtcgccgtggtcttaggctaccagcaatggttttctctatatttctgctcctgtatcacttttttgcgtcacattatcaatatttcatcctcta

SEQ ID NO: 7233 - DNA, 1844 bp, Zea Mays
acaagcaaattgattttcccgagccgctgccgaaaaattgccgctgcggcgctgccaccatcccacttctccgcgccgcctccagatcgagcgcgttattaggttttctctgtccctcacccgccgccgcagaacgctgatggcccagcgctggcgctccagggcgcggtgggactcagacctggacgaagatggttccccgccttttcggcagccgcgcaggggcgggagcgacgaggaggacgacgaggtggggaacgaggacctcagcctggagatcatcgcgcgcgcgcagcggaagcggcgttgggcgtcctgcggtggagtcaccgggttcgccaacctgctctcggtgtcctccggcgacgacgaggacgccgtggtggagctcgctgaggcggatgagccccggaggaaacagaagaagaggcagcactggaagcaaaggaaaaggcaacggaaggaggcgaccgctgctgctgcggctgcggctgccgtggacgaggaagagaaggaggttggtaccacccaggaggagcaaattgggacagcagaatcggtgctaactgaagatggggttgatgcccctacatctcacagtatgtttctgcggaagctccttcgcataccaagatactttgatcctggggaaacattgttggagacttgctttaattgtagcgaggaaggacatgtagctgcaaactgcccaatgggaaagcggaagaagccttgctttgtttgtgggttgtttgggcacaatgcaaagcagtgcaagcagggtcaagactgtttcatctgcaaaaaaggagggcatatggcgaaggattgtcctgataagcacaagaggaatgatcatcaatccacattatgtataagatgtggagaaacaggtcatgatatgtttggatgtgccaatgattacccaccagatgatatcgagcaaataagatgctacgcgtgtaatcagaagggccatctatgttgttccgacttctttgacaattctctggaacaggcaatttacattggaacttctgttacagggatgtgctaagcaacgcagggaagctagtgctgtcacaaccccaaccttatgcttcaaatgtggcgaggaaggtcacttcgcacgcggctgcacgaagaatgccaagtccgatgggccaaaaggctggtcgtcaccacacagtcagaggaagggaagatggaaaaacgatggcaagtcaccatcacacatccggaggaaggaaaaatggaagaaagattccagtgctagatcagctcctcatgatgcctgtacaacaagcaaaagcaatagcccctctttcgaggaaagaatgggcgcatctaatcataaatcgaaatggaggggtggttggactggtgatgacgatctaccatcgaagaagtacaaacccaatggatggggttcaccagctactcccaagaggtcttacacgaatcaccagtacttgtctggtggtggtgactacttcactccccagtcctcacgaaggcacaaccatggtaccgcgtcacccggtgctaggaaacacaggttctcgtcgtcaatattcgccgccagcaacacccatgtccggttcaaaagaagctagccggatgcacgtgtctgtttttgttgcttgtttagccattgataacagttatctcctggggttgaactctagctgctggttcatgcccttagataggtgtcttgtctgagattacatatttacatatgtaagcgcggttgaaactgattatttctactgtgaacaaagctttcatgccatggcgtcgccctccggataacaatgccttggtgcaaaaaaaaaacggca

SEQ ID NO: 7234 - DNA, 2162 bp, Zea Mays
acaagcaaattgattttcccgagccgctgccgaaaaattgccgctgcggcgctgccaccatcccacttctccgcgccgcctccagatcgagcgcgttattaggttttctctgtccctcacccgccgccgcagaacgctgatggcccagcgctggcgctccagggcgcggtgggactcagacctggacgaagatggttccccgccttttcggcagccgcgcaggggcgggagcgacgaggaggacgacgaggtggggaacgaggacctcagcctggagatcatcgcgcgcgcgcagcggaagcggcgttgggcgtcctgcggtggagtcaccgggttcgccaacctgctctcggtgtcctccggcgacgacgaggacgccgtggtggagctcgctgaggcggatgagccccggaggaaacagaagaagaggcagcactggaagcaaaggaaaaggcaacggaaggaggcgaccgctgctgctgcggctgcggctgccgtggacgaggaagagaaggaggttggtaccacccaggaggagcaaattgggacagcagaatcggtgctaactgaagatggggttgatgcccctacatctcacagtatgtttctgcggaagctccttgtaagtgacatgtgaatttattgggtttgttctactaaaggaagcttactattaaattgtatgcactgatcagtccaacaaaaaagcttgagttgatggtagaggtggacaattcacttatacttcaacaccacctcacgtagaggatctcttaggtctcagtcgtggaatataagtgatcaataattattttatttaattgtgcctgccaagattcgagcttgagacctctagctttgattgcatgcactgaccagttcaaccgaaagcttaagttgatagggagaggtgggtagttcacttatacttgaacacttaacattgtgctacttctacttgtgaccagcgcataccaagatactttgatcctggggaaacattgttggagacttgctttaattgtagcgaggaaggacatgtagctgcaaactgcccaatgggaaagcggaagaagccttgctttgtttgtgggttgtttgggcacaatgcaaagcagtgcaagcagggtcaagactgtttcatctgcaaaaaaggagggcatatggcgaaggattgtcctgataagcacaagaggaatgatcatcaatccacattatgtataagatgtggagaaacaggtcatgatatgtttggatgtgccaatgattacccaccagatgatatcgagcaaataagatgctacgcgtgtaatcagaagggccatctatgttgttccgacttctttgacaattctctggaacagggatgtgctaagcaacgcagggaagctagtgctgtcacaaccccaaccttatgcttcaaatgtggcgaggaaggtcacttcgcacgcggctgcacgaagaatgccaagtccgatgggccaaaaggctggtcgtcaccacacagtcagaggaagggaagatggaaaaacgatggcaagtcaccatcacacatccggaggaaggaaaaatggaagaaagattccagtgctagatcagctcctcatgatgcctgtacaacaagcaaaagcaatagcccctctttcgaggaaagaatgggcgcatctaatcataaatcgaaatggaggggtggttggactggtgatgacgatctaccatcgaagaagtacaaacccaatggatggggttcaccagctactcccaagaggtcttacacgaatcaccagtacttgtctggtggtggtgactacttcactccccagtcctcacgaaggcacaaccatggtaccgcgtcacccggtgctaggaaacacaggttctcgtcgtcaatattcgccgccagcaacacccatgtccggttcaaaagaagctagccggatgcacgtgtctgtttttgttgcttgtttagccattgataacagttatctcctggggttgaactctagctgctggttcatgcccttagataggtgtcttgtctgagattacatatttacatatgtaagcgcggttgaaactgattatttctactgtgaacaaagctttcatgccatggcgtcgccctccggataacaatgccttggtgcaaaaaaaaaacggca

SEQ ID NO: 7235 - DNA, 2206 bp, Zea Mays
acaagcaaattgattttcccgagccgctgccgaaaaattgccgctgcggcgctgccaccatcccacttctccgcgccgcctccagatcgagcgcgttattaggttttctctgtccctcacccgccgccgcagaacgctgatggcccagcgctggcgctccagggcgcggtgggactcagacctggacgaagatggttccccgccttttcggcagccgcgcaggggcgggagcgacgaggaggacgacgaggtggggaacgaggacctcagcctggagatcatcgcgcgcgcgcagcggaagcggcgttgggcgtcctgcggtggagtcaccgggttcgccaacctgctctcggtgtcctccggcgacgacgaggacgccgtggtggagctcgctgaggcggatgagccccggaggaaacagaagaagaggcagcactggaagcaaaggaaaaggcaacggaaggaggcgaccgctgctgctgcggctgcggctgccgtggacgaggaagagaaggaggttggtaccacccaggaggagcaaattgggacagcagaatcggtgctaactgaagatggggttgatgcccctacatctcacagtatgtttctgcggaagctccttgtaagtgacatgtgaatttattgggtttgttctactaaaggaagcttactattaaattgtatgcactgatcagtccaacaaaaaagcttgagttgatggtagaggtggacaattcacttatacttcaacaccacctcacgtagaggatctcttaggtctcagtcgtggaatataagtgatcaataattattttatttaattgtgcctgccaagattcgagcttgagacctctagctttgattgcatgcactgaccagttcaaccgaaagcttaagttgatagggagaggtgggtagttcacttatacttgaacacttaacattgtgctacttctacttgtgaccagcgcataccaagatactttgatcctggggaaacattgttggagacttgctttaattgtagcgaggaaggacatgtagctgcaaactgcccaatgggaaagcggaagaagccttgctttgtttgtgggttgtttgggcacaatgcaaagcagtgcaagcaggttggtcccccctatctccgagggattatcacttggtgacttggggtcaagactgtttcatctgcaaaaaaggagggcatatggcgaaggattgtcctgataagcacaagaggaatgatcatcaatccacattatgtataagatgtggagaaacaggtcatgatatgtttggatgtgccaatgattacccaccagatgatatcgagcaaataagatgctacgcgtgtaatcagaagggccatctatgttgttccgacttctttgacaattctctggaacagggatgtgctaagcaacgcagggaagctagtgctgtcacaaccccaaccttatgcttcaaatgtggcgaggaaggtcacttcgcacgcggctgcacgaagaatgccaagtccgatgggccaaaaggctggtcgtcaccacacagtcagaggaagggaagatggaaaaacgatggcaagtcaccatcacacatccggaggaaggaaaaatggaagaaagattccagtgctagatcagctcctcatgatgcctgtacaacaagcaaaagcaatagcccctctttcgaggaaagaatgggcgcatctaatcataaatcgaaatggaggggtggttggactggtgatgacgatctaccatcgaagaagtacaaacccaatggatggggttcaccagctactcccaagaggtcttacacgaatcaccagtacttgtctggtggtggtgactacttcactccccagtcctcacgaaggcacaaccatggtaccgcgtcacccggtgctaggaaacacaggttctcgtcgtcaatattcgccgccagcaacacccatgtccggttcaaaagaagctagccggatgcacgtgtctgtttttgttgcttgtttagccattgataacagttatctcctggggttgaactctagctgctggttcatgcccttagataggtgtcttgtctgagattacatatttacatatgtaagcgcggttgaaactgattatttctactgtgaacaaagctttcatgccatggcgtcgccctccggataacaatgccttggtgcaaaaaaaaaacggca

SEQ ID NO: 7236 - DNA, 830 bp, Zea Mays
gtaacatctagacgaattgattgccaacatgaaccttcattctttgcatgctcctgtttctgttcacatagttaagcccagagtctatatgtgttttcattttctctatgcctgaccacttgtatgatttggtcataagtacttattgttgattcatagttggctacttcagtgctgagccatgttgttttaaatcttagataattgtatatatcttatgtagatgctatcgcctaggaaacttcaagcgtttcttttgcatggtagcagctgaagcaaccgatcttcagttgcgccttgtagaaccttttctcaacgaggtccgagctagagccttaatgtacttcaactatagtggctacaaactccaacatcaccctttggaacatctatcaggaatcctgatgatcgaggagtcggagctggaatctctgtgtggaatatgcggacttgaaatcaccaggagcgaaggtacgaaagcttttgtgcctaaacaaacaagcttcaacctaccgacatccatgccccaaagtaatggcatttatgtctcaagggagtttgaaagattaatatagcattgtagttcaggttttcaatggattgtataatgtgtcaggattcaggaaagagtttgtcacgcatgatatgtgtaatacttactgttacaagaaaaaggctgaatatctatctcgatgcgtttttacagactgcttagcattccggtgtgcttttacatactgggccattggctctttgtgccggacggcgtttgcgcatttactttttccacaggctggtaaatcataaaagatgggaacgagcagtgtttt

SEQ ID NO: 7237 - DNA, 1914 bp, Zea Mays
cagtcgagcactcgcgtcgcggtggcacctgcgatccgaagcgagtccgagtcacacggccacgccccttggtctccttcctccgcttgcggcttgcctttttcgggccgcctccgctcctctctctctctctggctctctccctctccaatggcccgccccaggaagccgccgccgccctcgccgcctaaggcggcggcgccgtccatcgctgacgcgctgctgctggccacggtctgcatggtgggtctgcccgtggaggtgcgggtccgcgacggatccgcctacgccggcgtcctccacactgcctgcgtcgacgccggatacggtgtcgtgctaaagaaagcaaagaagattgcaaacgggaagggagatgtgaatctctcgctgggatcgtttgtggacactcttgttgtttgcccagatgaccttgtacaagttattgcaaagggtctttcactcccccttaaaggtgtctgtaaacctcttgattccaacgtggttgctgccagtggatccttgaagcctcaaatttcacatgcaaatgacccaaaaatgtctaataaaactaaaaatatgtctccacttatgcaagctgagaaatgcacctcggtgggtcaggagaaaaatacttctgttaagagaaatggtcaagataatggtattactacaagtttaagttcttcaaccagacatgtgggggcatgtttatccaataattgggattctaggtctggaagtatggtgcctaaagttgatgttatcacaagttcagcttcagctgtgcccgtggtggcttcaggtgttaaaccctctcagccagtcaataattcagttgccaagattgtcacgtcaagcaaaactgctgctaaggaattcaaactcaatccttccgcaaaggtcttttctccatcttttgcaagttctaggcaagtacttgcagctgcggcccctgttgacacatactacatttcacactctgcccctgaagtaccaatgggtgtgcctgtatatgaaccaaaatctgtgtcaggtgtttcacctctatccaacaaggtttattgtagtaatctatctcctgcaaactatgccatttcacctcagtatgtgccgtctatcatgggccataatgcatcaaggctagacccatccagaattggcacaccataccatcctatgcaggtaatggctgggaagttcagtcctgttgtttatgttcaaccaggtcctcaggatgcaatgcatggaacaaccgttggttttcaaggatggccttgccctttgttattgaattcgtaccaagctagcatgcagaaattccaaggcaaccccccggtgtatttagctcctccagtcatggcaactgggaaccttccattggtggtaccaagccctgcatcacttgtgcagccgttcgaggccattcatcccataatggtccctgctgcaagcagcatggtcccaggaaaatacatgtaaacttgtcgtaccaatgacaatctccttttgttggaagaatcctggcgtacccattttgtctgaaaggactctagtctgttgattcacttgtcagttgctggtctgtgtccgtattttagttggaagggctttgcaacttcttgtcattcttcatgcttggtgtgggtttccaattttttttaggggcgggacagtaaaatgaattagggagaaaatgcagcgattctttgttatcttagcgacacctcttcttccaagagcagtatgtacaatgtgacattgtaaaagattcatatagtgaaggccttattttcacgaggctaatgtacatccatcttgcaagtgtaacagcttctgaagttctgttttgagaaaataaacttgttcgacaatattgtttaggtaatatcagcagtatatttttggatattagag

SEQ ID NO: 7238 - DNA, 2573 bp, Zea Mays
cagtcgagcactcgcgtcgcggtggcacctgcgatccgaagcgagtccgagtcacacggccacgccccttggtctccttcctccgcttgcggcttgcctttttcgggccgcctccgctcctctctctctctctggctctctccctctccaatggcccgccccaggaagccgccgccgccctcgccgcctaaggcggcggcgccgtccatcgctgacgcgctgctgctggccacggtctgcatggtgggtctgcccgtggaggtgcgggtccgcgacggatccgcctacgccggcgtcctccacactgcctgcgtcgacgccggatacggtgtcgtgctaaagaaagcaaagaagattgcaaacgggaagggagatgtgaatctctcgctgggatcgtttgtggacactcttgttgtttgcccagatgaccttgtacaagttattgcaaagggtctttcactcccccttaaaggtgtctgtaaacctcttgattccaacgtggttgctgccagtggatccttgaagcctcaaatttcacatgcaaatgacccaaaaatgtctaataaaactaaaaatatgtctccacttatgtatgttatcaattccagccatgcatactgttatgtattgttccatatatatgagaaatcgcatatggattgcatgtatgcatcctacttggccccaatataaatgagaaatcgatttttttcacatgcggatttaagcattagatatcaagcaatctatttaactccatttccttctttccattgtcgaacaattaatactatttttgtcacaggcaagctgagaaatgcacctcggtgggtcaggagaaaaatacttctgttaagagaaatggtcaagataatggtattactacaagtttaagttcttcaaccagacatgtgggggcatgtttatccaataattgggattctaggtctggaagtatggtgcctaaagttgatgttatcacaagttcagcttcagctgtgcccgtggtggcttcaggtgttaaaccctctcagccagtcaataattcagttgccaagattgtcacgtcaagcaaaactgctgctaaggaattcaaactcaatccttccgcaaaggtcttttctccatcttttgcaagttctaggcaagtacttgcagctgcggcccctgttgacacatactacatttcacactctgcccctgaagtaccaatgggtgtgcctgtatatgaaccaaaatctgtgtcaggtgtttcacctctatccaacaaggtttattgtagtaatctatctcctgcaaactatgccatttcacctcagtatgtgccgtctatcatgggccataatgcatcaaggctagacccatccagaattggcacaccataccatcctatgcaggtgggggcaacttatactacccctagtcctcagcctgtaatggctgggaagttcagtcctgttgtttatgttcaaccaggtcctcaggtgagtgattcacaattattgtttgccttgagacttgaagtggataaatatcaagaataggaggaggatgcagagtattgttcactattttatttatacaacctagaccttgggtaaagtatgttagcttgtatgctccagcaactgagtgttcttcacatctgatgtgattgaccttcgctgccaatcctgatgttgcacagattgttctatatatcaagttagtttgttaactggaattaactgttttattttgtaatggttcttttctgccatggttggtctgttcttatctctggcaaggaaccaaccttgctccatagaaatgatatatagtctaaatataagttaactcacatattttccccttcctcctcttggctcatctattcttggtttccattgaaggatgcaatgcatggaacaaccgttggttttcaaggatggccttgccctttgttattgaattcgtaccaagctagcatgcagaaattccaaggcaaccccccggtgtatttagctcctccagtcatggcaactgggaaccttccattggtggtaccaagccctgcatcacttgtgcagccgttcgaggccattcatcccataatggtccctgctgcaagcagcatggtcccaggaaaatacatgtaaacttgtcgtaccaatgacaatctccttttgttggaagaatcctggcgtacccattttgtctgaaaggactctagtctgttgattcacttgtcagttgctggtctgtgtccgtattttagttggaagggctttgcaacttcttgtcattcttcatgcttggtgtgggtttccaattttttttaggggcgggacagtaaaatgaattagggagaaaatgcagcgattctttgttatcttagcgacacctcttcttccaagagcagtatgtacaatgtgacattgtaaaagattcatatagtgaaggccttattttcacgaggctaatgtacatccatcttgcaagtgtaacagcttctgaagttctgttttgagaaaataaacttgttcgacaatattgtttaggtaatatcagcagtatatttttggatattagag

SEQ ID NO: 7239 - DNA, 3101 bp, Zea Mays
gcgcataacagcaccaccgcgccgcgccgccgccaccccctttcccgttcgttcccaggacgagtcgcagcagccggccagccgcacagagtggtggagcctaggaacagaggaggcgccgagccatctccgcagcctgctaccggggaacgggcgggaacggactctaacttagagagagcgcgggcgagagaggtcaaccgcagccggaggcgatggaggtggtggcgctggtgagcggcggaaaggacagctgcttcgccatgatgcgatgcatggactacggccacaaggttgtcgctttggctaatcttatccccctcgacgacaccgtcgatgagctcgacagctacatgtaccaaactgttgggcaccagattgtggtgagctacgcgaaatgcatgggcttgcctcttttccggaggcgcattcgcggatccacaaggcaagctgttatctctgcagtcactgtggcctatgattcggatgctctgcaagcgatctggttccactgattcaattctgttttgttagggatcagggtctcaggtacagtgtcacggcaggtgatgaggtagaagatatgtttgctctgttgagcgaggttaaacgtcgaatcccatccatcagcgcggtgtcgtcaggtgcaatcgcatccgattaccagaggctccgggttgagagtgtttgctcgaggctgggcctggtctcgctggcgtatctatggaagcaggatcagactttgctcctagaggaaatgataaggaggggcattgtggcaataattgtgaaggttgctgcactggggctgaaaccttcttcccacttaggaattatggaatcaatgtctgtggtgaaggtggagaatatgaaacactaactcttgactgccctctatttcgtaagccagattcatctgatagaattggggatggttctgccgttcaagagagttctagttgtgtatatgaggttgatgaagttaccactcacgatgatgtgggagaaaaacaggccctgagtccagctgttgatgcttacaccaatgttgacctatgtatctcaaagacagggaacaatttgcgttcaatgagctgttggattcaggatccatccagagcttcggaaggcctgaaggcagaccttatagcagttttgagcagaattgaaaatcagctcaaggaagaagggttaggttgggtgaatgttttgtacgttcacctctacatttcaagcatgaaggaatttggattggccaatgaagtttacgtcagctttattacggaaaagaaatgctacctgggtgttccttcgcgcagtacaattgaattgccactagttcaggctgggttgggcaaagcatatgtggaagtcctagtttcaaatgaggtggtaaagagagttctacatgtgcaaagcatctcctgctgggctcctagctgcattggaccttatagccaggcaactctttatgaagatattctttatatggctggtcagctgggccttgaccctcctacgatgaagctctgtcttggaggtccaagagcggaactagaattagcactacaaaacagtgaagctgtggccaatgcctttagctgctcaatctatatctcggcaatacactttctggtgtactgctctgctcagttgacgtccagcgagaaggaagaaattgaacagacattgaagagttcttatattactcgtttggatcgctcaaaaggtggatcatatccaactgttctgtacgtattcgcgtcagaccttccgaaaggggcacgtgtggaggtaaagcctatactgtatgtcccttccactgatgattgggttgctgccgaagagacggagaccggagttccactgccagcaccgagcaaaacctggactgattgtaccgcaccatactctgcgttgcgcgattcgtgttgccaggtccacacaaccggcgggagaatttgttccgccgtggtgtcgatcacagatgacatcgcatcgaagatctgctctgcagctggacagctgcaccacggagaggagaatctgaaaataatggctagattctgtgctttccagatcgcgaagaccctggcagacaacagattttcctgggacagcgtaacgatgttgaggctctactactcggtagatctcgccgtggcggcagatgcagtgtccggagcattttccgaggccttggccgagcttgcccaagacaacccttccatgagaactgacgttcctttctacaacgttgtgcccgtagccggagctggccgctctgcgtgtgccaacgacataatggcgtgcgagttactggcatccaacgtctccagtgcgaagtccataccagccgaaccgttcgctgtgacgcctgcttgaatgcagctttccttcggaaattggaggtgggcgcacgttggaatttctgccagaggagccggtggccagtcaactgccagttggacgacgacggttgaccagcttctctagggctggcggcggtagcttcgtttctgtgctggcggtcgattaaaaaaaaagaccgtacggtgatcatcacagatgcacccatactgtattattctgtttcagcgtcctatacaaagtatacattgggtctgaattctgattagcctgtgctgatgcttgcaatgacattggttcttctgtgtacagactacggacagagtcccggtcagtaacgtgtgtgtacttgttcttcctctgtgttgacattcttgctcgatggtggaacctgtcgcagttggcggaggtgaagccgcgtagctcacttaggtctgccaaacacttcacttcttagattgtttctgtggaaatcgcttctgatgaatgcaaaatcaattaagtcgtccggttttgatgggaggaatcctacgcttcttaaactctaaattgcacatatttctttatttttctccgcatacaaatttgatgttgaatgcaaaatttatcaagtcgtcgtgtcttgatgagaggaacccgacgtttcttaaatcctaaattgcacagatttctttatctttttccacatgcaacattgttgacatctagattctcgttacagctagatcttt

SEQ ID NO: 7240 - DNA, 720 bp, Zea Mays
atcactcgcctccctccatctttgacccagtcctccgtgacgacgtcgtgttttcttccttccccagtcgcatcccacgcgcccgctcctcgtcgccgtcctcttcctccatctcacccgtccctcagcctcgttaatttttcgcccccatctttgaacgcagcggctcaacctccatcgttctctccctcctcctccccccgatcccgtccctataaattgcgcccccgccgccacagcggaccgcaagcacgcaatcacacagctcgctgctgctgccgtctccccgtgtcctgtcgttctcccgtcgccgggggcggaagagttcggcgggcggttggggattgctcgggagccccgtgatggcgaagctgtacgtgcaagcgttcccgcccgcggatctgaacaagaacaccgagtggtttatgtacccgggcgtctggacgacctacatcatcatcgtcttcttctcctggctcctcgtcctctccgtctttggctgcacccctggcaccgcgtggaccgtcgtcaacctcttccacttcgcgatcacataccactttttccattggaagaaaggaacaccttttgctgatgaccagggaatgtacaacacattgacttggtgggaacaaatggacaatggcaaacagcttactcgtaataggaagttcctcattgttgttcctgttgtcctatttcaggaatattgaccctgct

SEQ ID NO: 7241 - DNA, 2371 bp, Zea Mays
aaaaaaagtccatgaccgcgtttttctcttctgcctttcctgccgccggccgggtctactcgtcccatcttgtagctgcagcggcaccccctcaaaatcgtccaaccaatcccaccagctgctcatctcgaatccagcccgaaacctcgcgccacgcgtgccgtgggcccagttcgtgcgcgttcagctgctgccccgcgcccagggatcgggaaggcaagctctttggtggttcctaagggcgaatctcgtggcgattcgctcagatttggatttagggtttaggaggcggtgctggtgatcggtttgtgccgccgggagagatgtcggcggctgtggcgtgcgcggagagggcgactaacgacatgctgatcggcccggattgggcggtcaacatcgagctctgcgacatcatcaacatggatcccgggtgctagagactctaagcaaaaattgtggggatattgttcatcaacagattgttgagcgcgacatattgagtgaaatggttaagatagtaaagaaaaagccagacttgagcgtccgagagaagatattgagtttgattgacacatggcaagtggcttttggaggtccatctggaaaatatcgacagtatcatgcggcttaccaagaactcagggctgctggtgttgattttccgcctcgcgaggaaaattcagtcccgttgtttacaccacctcaaactcaaccattaagacatccacatctatatacacctccaggtcaaagctatgaagatgctgctatacaagcttctcttcagtctgcccctcctgcatctgccctcagtctgagtgagattcaaagcgctcgagggattgtggatgtgttagatgaaatgttaaatgctctggaccaccggcatcctgagggtgtaagggaggaggtcattgttgaccttgttggccagtgccgatcctatcaatctcgtgtcatggatcttgttaacagtactggcgacgagagccttttatttcaggctctaggactaaatgatgagttacagcgtgttgttcagcgtcatgatgacatagcaaaggggatccctcctggtactggagcacctttacctgcttctggaaatgtcaaccaagggactgccccacctaggcccactgcggtttcattttctccacttctaaatgtacatgaggacgatgaaccagaagacgagttctctgtgctttcccgcaggtctgcgagggatggtgcagtagcacagaacaatgtgccctctgctccaagaaatgagaggtcatacccaagcccacttcttcctccaccaccagcatctaagaggcctgtttataccgaggcaagcagtgttgactatcttagtggtgactcctacaagtcagagaaggtttcagatgatttcatcaacccaactgctccagctaacatatccacatcatcccattcaaaggcagaagcacatccacctccgagttatggtggcaggccagacagagtatctgacgacttcataaacccaactgcacctagcttctcggcgccttctcgtcctacaaatgaggagccagcccgcccatccgtgaagcggcaagagagcctacctgacgacgacttcataaacccaactgctcttcctggtttctcgtcgtcttcagctactaaggagtctggcgaggaccttccaaaggctccatgggaagcacaagctgccgcgggttccctaccgccgcctccggcgaggtacggccagagacagcagtacttcgagcagaacgtgtattctggcgggagcaacgaaggcggctacaatggactgacgacacagaccgaaggtctctcgctgaacccgcggagcagcgagaacgagaggagcgcggcacggccggcagcgtcccgccctgccaaacctgaggactcgctcttcaaggacctggtcgacttcgcaaagaccaagccttcgtccccgtcgaaaccggccaacagccgcaggacccgctagaacgactcgtgcgatgcatggatggacattgggtcgttcggatattcatttcacaggttagcggcttttagatggtaccatgaaataaggccgtctggagactggttttcattgcatatttgcattgcatgggaaattgttttggttgcgtttagagtggcagatgtcagaaacgttgcttgctcataatcctgggtgtgtgatgtctagttagctgctcctaaatttctgtgtcgttggcttccgattctcattttctttttctttcacttagctgtgtatatatatgttacccgattcgacagcaaatattcatagttgagtttgtgacttgaggaatgaggtgttcctattttcggtattggataaatt

SEQ ID NO: 7242 - DNA, 1622 bp, Zea Mays
acttagtgattgtgcttgtggtcctgttacgtggtcttatttaagcttcgcctccagccatgggtaaggagaagtctcacatcaacattgtggttattggccacgtcgactctggcaagtcgacaaccaccggccacctgatctacaagcttggaggcattgacaagcgtgtgatcgagaggtttgagaaggaggccgctgaaatgaacaagcgatccttcaagtatgcttgggtgcttgacaagctcaaggctgagcgtgagaggggtatcaccattgatattgctctgtggaagtttgagaccaccaagtactattgcaccgttattgatgcccctggacaccgtgactttatcaagaacatgatcactggtacctcccaggctgactgtgctgtccttatcattgactccaccactggtggttttgaggctggtatctccaaggatggccagacacgtgagcatgctctccttgcgttcacacttggagtgaagcagatgatttgctgctgcaacaagatggatgcaaccactcccaaatactccaaggcacgttatgatgagattgtgaaggaagtctcatcttacctcaagaaagttgggtacaaccctgataagattgcatttgttcccatctctggttttgagggtgacaacatgattgagaggtccaccaaccttgactggtacaaaggcccaaccctgcttgaggctcttgatcagatcaccgagcccaagagaccctcagacaagcccctgcgtctccccctccaggatgtgtacaagattggtggtattggaactgtgccagttggtcgtgtggagactggtgtcatcaagcctggtatggttgtcacctttggtccaactggcctgactactgaggtgaagtctgttgagatgcaccatgaggctcttcaggaggcccttcctggtgacaacgttggcttcaacgtgaagaatgtcgcggtgaaggatatcaagcgtggttatgtggcctccaactccaaggatgaccctgccaaggaggctgccagcttcacctcccaggtcatcatcatgaaccaccctggccagatcggtaacggctatgccccagtgctggactgccatacctcccatattgctgtcaagtttgctgagctgattaccaagatcgacaggcgttctggcaaggagcttgagaaagagcccaagttcttgaagaacggtgatgctggtatggtgaagatgattcccaccaagcccatggtggtggagacattctcgcagtatcctcccctgggtaggtttgctgtccgtgacatgagacagacggttgctgttggagtcatcaagagtgtggagaagaaggacccgaccggtgccaaggtgaccaaggctgctgccaagaagaaatgatgcgacctgtcgttgatgcagcgtctgcttttccaatacgtagctgagatgttccattttggcataagttttgtatgctgtggttgctgacttgctgttaccttgtgaactgttgagctctactattgggtgcccgtttatctgtttatgtagcatcttgttatttcacctattgcaatacaagaatgctatatatgacatatagtgagaaaaaaaaca

SEQ ID NO: 7243 - DNA, 1454 bp, Zea Mays
ctatcctctccctcagtgctcacgtctccaccggtccaccccctcggcagctcaatggcagctgcgacggcgccaccgccggcggcggttgccaccaccctctcgggcctcatgcgctgccagaacatccgtagcagcaggcctagagccttctacgcgaggtgcgcctcctccaacgcgagcgcggaggcggcggagagccggaagggaggccacggcgggacgcgcctggaggaagccgtgcccgtcggcgaggggcgctcgagggtagacgcctggatatcggcgcgtctcggcggcgggggcgttagccgcgcgcgcgtgcaggccagcatccgggccgggcttgtcgccgtcaatggccgcccggtctccaaggtttcgcatactgtgaagggaggggacttggtcagctgcacggtgtcagagctacagccgctgagggcagaggcggaggacatcccgctggacatcgtttatgaggatgaccatgttcttgttgtcaacaagccggctcatatggttgttcacccggcgccaggaaatgccaaaggcacattagtcaatgctatacttcatcactgcaagatctccacatttacctgtttagcacgcagctcagctggtgatgaatgcccggattctacggatgaagacactgatgtatttcatgtggatcagtttgctgctgaagatgtaagttcagaagtccggaatgctcttgtgcgccctggtattgtgcacaggctggataaggggacaagtgggcttcttgttgttgctaaggatgagcattctcatgctcgattagcagaacagttcaagctgcatacaatccgtagggtatacatcagtcttacttgtggcgcacctaatccaaattctggcaggattgaggcttctattgcacgtgatcctaacaatcggattcgtatgactgctattgctggatcaggccacagatatgcacggaatgctgctagtacaaagtaagagaggtctttgctggtggcggatccgcactagttgagtggagactagagacaggacgcactcatcagatccgggcgcatgcaaagtacatagggatccctcttctcggcgacgaaacatatggaggtacccagagcatggcgttatcgctcctgagaccaaggagtccttcgaaatatcacagcggcctttcgaatctgttgtctaaagtggacaggccttgccttcatgctgcatcgcttggatggaaaacgaacaacaaacaagaggatcgctgggacctagtcaggcggttcatgtgaatgatagctattgtgatatatataacataaccagtcagtttgccagcaataaacatgtatttagatattacacttgttgtcttgttgatgcatctgagactacacctgcaatagctagctgaagttatgcattcgtgatgaacagaggtgcgaagggag

SEQ ID NO: 7244 - DNA, 4331 bp, Zea Mays
ccccttctgccttctctcaccgccacggccactggcattggccgcgctcgccgcccaccgcccaccgcccccgcgccgctgtaggagcgcgcgcttgctttagcgtaggccatggcccactactagcgggtgattagccttgattagcgggcaccactccactgttacgggaggcgcgttgttttaatcgcgggcgcgcgacgcccgtcgcctgtctcgaatatctgctgccgccgccaaaagtgcggattcctcctcctccccgtcgggcggcctcgccccccctggtgcctactgggcgctggcggagtgggagtggatcgacgtgttgcggccgcggagtggaggcaataaagggaaagctgggcggagtgctcgggtaccgtagccggattagttattaatgcccgcgagcagctagtcgtaggcgtaactattttaaggcagctgtcgccgctggggacttgcgaaagcttcgcctcttttgagaagctctgcaccacgcctggctccgccccgctccccctccacctccaggcttccttcacagtctcgctgttgctagtgctgccttgctgctagtgataggggtcccggggccctcaagttctgggtgggcggcaaacatatggtgggcaccgggcgggggaataaggaggaagagaaagaggaggaggagcggcagtagatttgggccgcacaggcagggatggggggcaagtaccgcgcggcgaggacgaagaggtggtggagggggctggcagcggccgggtgggtgctaaccgcggtggtctgctccgcggtgatgcactggaccctgcgccgggacagcatggaccgcgccgaggagcgcctcgtcagcatgtgcgaggagagggccaggatgctgcaggagcagttcggggtcaccgtcaaccacgtccacgccatcgccattctcatctccaccttcaacttcgagaagtcccctccagccatcgaccaggacacctttgcaaaatacacggcaaggacatcatttgagcgaccactgctcaatggggtggcattcgcacagcgtgtattccatcatgagagggaaatgtttgaaagccagcagggatgggttatgaatacgatgcagcgggagcctgcacctccgcaggttgaatacgccccagtgattttctctcaggatacggtttcctaccttgcacgcattgacatgatgtctggggaggaggaccgagaaaacattttccgggccaggactactggcaaagctgtgttaacaaacccattccggttgcttggatcaaaccacttgggagtagttctcacgtttgctgtgtaccgccctgatctccctgctgatgcatcagttgagcaacgtgtggaagcaactattggatatcttggtggagcctttgatgtggagtcacttgtggagaatttgttgagcaaacttgctggcaatcaggatattgtggtaaatgtctatgatgtcacaaatgcttcagatgctatggttttgtatggaccttcaagtttggacgagcaagtgcctttcttgcatgttagcatgttggattttggagatccatttaggaagcatgaaatgagatgcagacaaaaacttcctatgccgtggtctgccatcaccaatcctttgggcacatttgtcatatggatgcttctagggtatagcattgctgctgcatattctcgatatgacaaagttactgaagattgcagaaagatggaagagctaaaaacacaggcagaagctgctgatgttgcaaaatctcagttcctggcaactgtgtcacatgagatcagaacacctatgaatggcgtccttggaatgctggatatgcttttaggaacagatctaactatgacacagaaggattatgctcaaactgctcaaatgtgtggcagagcattgattacactgataaatgatgtccttgatcgagcaaagatcgaggctggaaagttagagcttgaagcggtgccttttgacctgcgttctctcatggatgatgttgtttccttgttttcttcaaagtcacgggagaagtgcattgagcttgcagtatttgtatgtgacaatgttccaaaggttgttattggagatccttggaggtttcgacagatattgacaaatttggtcgggaatgcagtcaaattcacagaacgaggtcatgtatttgtgcgggtctgtttggctgaaaactcaaatgtggaagccaatcaggtcctacatggagccatgaatggcaaaggtggtagagttgagtcaacaactaatggtgccttcaatactttgagtgggtttgaagcagcagacagacgaaatagttggcaatattttaaactgctcctctccgataaggagtcacttttggatgatcttgagggcgaaaattctaatcaaagtgattcaaatcatgtcacactagcaataagtattgaggacacaggtgtcgggataccactgcaagcacaagatcgtgtttttacaccgtttatgcaggctgacagttcaacttcaaggaattatggcggtactggcatcggtttaagcatcagcaagtgtctagctgaacttatgggtgggcagataagtttcactagccatccttctgttggaagcacgttcactttctcagccacactgaagcactcatacaaagatatttcggtcgattcaagtaggagcttgacagaggcactaccaactgcttttaagggaatgaaggccatcttggtagatgggagacctgtacgtagtgctgttacaagatatcacctcaagaggttgggaatacttcttcaagttgtgaacaatatgaatgcagtagtaaaagctttcccaggacaaaatggagcaaccggttctagggaaaaagcatcaattctttttattgagagtgacttctggaggcctgagacagatgttcagttattgaaccatctacgcgagcagaagaacggtcagttgtcggatgggcacaaggtagttcttttggtcacctctgaagccgacaaggacaaatatggatccatatttgatattgtgatgtgtaagcctataagggcaagcacaatcgcttcatctattcaacaactgctcaaagtagagatagccgaaagaaaagataatcaaaaccggccgtcgtttcttcgaagcttgctggttgggaagaatatattggtcgtagacgataataaagtcaacctcagagttgctgcggctgcactcaagaaatatggtgctaatgttagctgtgttgaaagcggcaaggatgctatcagtctacttcaacccccgcatcgcttcgatgcatgttttatggatgttcagatgccagagatggacgggtttgaggcaaccggacaaataaggcaaatggagttgaaagcgaacgaggaaaggaagaacaagttggcttcgattgaaggctcgacaactgccgagtaccatctgcctgttctggcaatgacagccgatgttatccaggcaacttacgaagagtgcataaaatcgggaatggatggatacgtatctaaacccttcgacgaggagcagctataccaagcagtctccagattggtagtgggaacgacggattcggctgtttgatgttcaaaatacgatggacctgacttctcattcatcgaagtgaagcatcaccatcttgcctctgtccagctgactctatatcccttgacaatgggcctctgacatggcctctcacaagactagatgaaaaaagaagatgaaagtgccgtgagttaggtacgtgtcacacatgacatgaagttgctgcggcagcccagaggagtgtaggtagatcaccctgtaactctcttgttctttgatgtttataggctgttgtgtcttctgacaattcattggaaataccacatctcgttgcaatccccctagtttcagaactgccctgcctcgtctcatccacattatccaggaaactgtttccttcagggctagtttgggagtccaaaaaccggaggggattagagggactaaaattccctgcttattcaaaattgaataaggaggggattttagcccgtccaatccccttcggttttgtggctcccaaactagccctaagcgcgaaggaaaacacgggtaaattggctgtaggacttacttgagtattggtatttgctaatggatactaatcaatctcttctaggaatggacgtgagaagctaaaagtgactgctatgtcctgactattatatatacctttctataacccttaacagttatttaaaatagcaacatttgaagggtcaacacgtactaccaacactga

SEQ ID NO: 7245 - DNA, 3012 bp, Zea Mays
agagatcagcagacatgttttgtgatgacattttcggagaatcacctgcgggagttagaaaatcgggcaagggtgatggtttgcatgttgagagaaatgctcttcatgacaactgggatgatgcagatgggtactacacttaccggttcggagaattgctggatggccattacgaaatcatagcagcacatgggaagggtgtgttctcaaaagtcgtgcgggcaaaagatcttaaagcgagtaaagatgatcctgaagaagttgctatcaaaattattcgcaacaaggagacaatgtacaaggctggtaagcaagaggtttcaatactggaaaaacttgcaagtgtggaccgtgaggacaaacgccactgcgtgcggtttatttctagtttcatgtaccggaaccatctttgcttagtttttgaatctctcaatatgaatcttcgtgaggttttaaagaaatttggtcgtaatattgggcttaaactgactgcggtgagggcatattcaaagcagcttttcatcgccctgaagcacctgaagaactgcaaagttttgcactgtgatattaaacctgacaatatgctggtgaatgaggctaagaatgtgctcaagctatgtgattttgggaatgctatgcttgctggtatgaatgaagttacgccttatcttgttagccgtttctatcgggcacctgagatcattcttgggttagcctatgatcatcctttagacatgtggtcagttggctgctgtctatatgagctttataccggtaaagtcttatttcctggtccatcaaacaatgccatgcttcggcttcatatggaattgaagggtccattccctaagaagatgcttcgaaagggtgcctttactatgcaacactttgatcaagatctcaattttcatgctaccgaggaggatcctgtgacaaaaacggctgtgagaaggttaattttgaacattaaaccaaaggatgtcggttttttgattttgaactctcctggcgaggatccaaaaatgctatccagttttaaagatcttcttgataaaatgtttatattagatccagaaaagaggataaccgtatcacaagcacttagccatccatttatcactggcaagtgacataagatgctgattcctcttgatattgaacttagcatctacactgtaaaatacaatttgggtttctcttgtctaatcatcgacgtttctgtcttgtgtcctgggagctctgagaacaaatacatggatgaagcacggaactatcgaagagatggctatctgcagaccttgttgcatgcacttatcatttggatatgttctgttgcttgattctgccagggcctctgctgtgtgtacactttatatgcttaagcgccaacatttgaaggtcctgggatggagatcgctggaccctcctctcctcatcatggtgtatttctaattgtttttgcgttttggtaagtaatttctttttgtcagtttcatcaaacattgatcttccaaacaatttgtttgtcttttgtgtgtccgacaaacttttccatattaatgggttgtgaaattcaagtactatatagtatatactccggggattttagccccatccaatcccctccggttttctggcttccaaactagccatcaatcccatcatccaattcccttatcccaaactagccctaagaaaattgggtacagggaaaagaaatcccaacttggcctcccctctataagcatgcagaagctgaaaggctctcagcctgttgtccccgtagaatgctctcctttgtgattgcctgcacagcactgccataacacttgcaatggcgctgttaaaaacacatcattccaatctctcaagccaaccaagatagtgaattcaggcctaccatttcgcacttgaccgcctggctcaaagcacctattgataattggctgagagtttgaggtgcaatggaaataaatcaaagcctgtaagatcattctttagattgaacagttggttgaacgaacctattaccatctatacgtgggcatatgaatgacagcagtttattgtgttggatgcaagcggttttgtaacttctgttgagttctttgtatctgtagaaattgccgggtaaatctgaagaactggattgcagcccattgacccacccccgtgtagtagttatgtcagacatagtttaattgatatggcacacatgctaagatacgattaacttgtgccaatataataagttgcctttaagataccgcaggatacaggggtagtgggacggataatgtctgcgtgggggtgctattcaaatttgaatagtaaggatattcctctccatgggccatggatcctcttcatttccctgtccaccaaaccagccgtaagagttgtatgcttgtatgctcaccaaaccagccgtaagagttgtatgcttgtatgccagagcaggcatgccgtcacggcgagtctggcgacgattagtagtcagtaatcagtagcaatttagtgatcaagatcacaagttcatacttcatagtaaacaaatgtaagtggtatgtccatattgaccatagcaatcaaacaaactaaaaatcaaacaaacaaactaagaatcaaacaaacaaactcaattactcaaacatggtcaggtttatagtggtaggccattgcctaatggatatctaagcctatcatttaggccagcctcattcgcaccatcatggagaggagaggggtaggcagtagttggccatagtcacactcaacatctggatcgttgacaacaacgatgtccagatcataggcttcatctcctcttgagtcttgatcactcttcttcattagttgaggtagaaattaagggctcttaagtctctgtcacatcggatctttagatgctagttaaaagtattagatatagtccaattataaatcaattacacatatgaggattaaacgatacgattctattaaatctaatttgtttgagtcgatcatgcg

SEQ ID NO: 7246 - DNA, 1962 bp, Zea Mays
cgtttcgcggttgctccggtcccttttcctctcctattttctcttctctctctcccgtcgtccagagacccagaaggagagggagacagagccacagaggcaggggagaggaggagcagcgtggcgacgcccaaatcgagcgacctgatcgaggcccctcgcccctactcgctgaatcccaatccgagcccgccaattgggcgcccccccccgcccacgcaaaggacagatagaagaaaattattggcgctctgacaaatccaactgaggttttcttggactacagatgaagcgggctcgaagggcgtatgtgcaagagatgactgatgagggatgctagtgaaattgatgaacttgttacgggcgtgctggcgaccgtcatcgaaccggcatgcccgaacaggctcagatgttaccggtaggcaggatggacttctatggtacaaggacgccgggcaacatgtcaatggggagttctccatggctgttgttcaggcaaataacttacttgaggaccagtgtcagatcgagtcgggcccactgagttttctagattctggaccatatggcactttcgttggtgtttacgatgggcatggtggtccagagacggcctgctatatcaatgatcatcttttccagaatctgaaaagatttgcatctgagcagaatgcaatgtctgctgatgtactgaagaaggcatatgaagctacagaagatggattcttctccattgttaccaaacaatggcctgtaaagcctcagatagcagctgtcggctcatgctgcctggtcggtgtaatttgtggtggcatgctttatgttgccaatgttggggattcccgtgtcgttttaggaaaacatgttaaggccactggagaagttttggctgtccaactgtcagcagaacataatgttagtattgcgtccgtgagaaaagaactgcagtcaatgcacccagaagataggcacattgttgttctcaagcacaatgtttggcgtgttaaaggactaattcaggtttgtagatcaattggtgatgcatatctcaaaaagcaagagttcaacagggaacccctatatgcaaaatttcgcctccgtgaaccttttcacaagccaatactaagttcagaaccatcaatcagtgtgcaaccactacaaccacacgaccagtttctcatatttgcatctgatggactttgggagcagttaaccaaccaagaggcagttgatattgttcgaagtagcccccgcagtggctgtgctaggaggctgataagagcggcactgcaagaggcagccaagaaaagagagatgaggtactcggacctcaagaagattgaccgcggtgttcgccgccacttccacgacgacataacagtcatagtagtgttccttgactccggcctcgtaagccaggcgagcacacaccgaggtccaactctttccttgcgaggcggtggcggcagcgctggcctgcgcagcaacacacttgcacctacgtgactataaagtgcctggtggagtggaggctactgactgaaggagaggcgccgaagttcctcaccagcgtatctgaatgccctcaatggtgtcaagttgtggactcaagtggatagcttcgctgaatcttctgatgatgctctgtggaaagctcgaatcctttccacctgaaaaagcaagtaatatgtcttccagtgctggaattaacccctagtgcatatatatatgtatgaaataataataaggcaaaaggaggagtaacttatttaactaatgctgtgaggtgtatttatgttttgtatgtgtactgctttttgactgctactgcatctactgttgttaattgaccactggtgaagtgaaatcactggtttcgtcttgctgtctcactgttactagttgttcacagcattgctggtttgactgttcctactatatacatatagtttatatattata

SEQ ID NO: 7247 - DNA, 2933 bp, Zea Mays
aacacgctgtgcctgtgcgtgcgcttgtgtcggggcggggtcgcagcagccagccaggatataatccccgcgcgcgccgctcgtaaacagaggagggcgagagggaggccggcgaggtgagccagtcctccgatcacgcgcccgcacacacgcacggagcgcggcagccggcagggaggaagagcttacagggccacagcaggcaggcaggcaggcagggcacggagaggctatccaccaccgctgccgcacatgcgagcgggcgcagcagcgcgcggggactctcctcgtgcaatgagcgccgccgcgacgccgcgccaccggctcggggtcgcgcttcttctcctgctggtcctcggtggcgccgacgcgaaggcgcacagctacgaggacgcgctgcggaagagcctgctctacttcgaggcgcagcgctcgggccggctcccgcacagccagcgcgtcacctggcgccaccactccggcctcaccgacggcctcgagcaaggggtggacttggtcggcggatactacgacgccggggatcacgtcaagttcgggctccccatggcgttcaccgtcaccatgctgtcgtggagcctgatcgagtacggcgccgacgtcgcggcggccggcgagctcggccacgcgctcgaggccgtcaagtggggcaccgactacttcgtcaaggcgcacaccaggcccgatgagctgtgggctgaggtgggcgacggcgacacggaccactactgctggcagcggccggaggacatgacgacgtcgcggcaggcgtacaaggtcgaccgggaccacccgggctccgacgtcgccggcgagaccgcggcggccatggcggccgcgtccatcgtcttccgcgactccaacccgcactacgcgcacctgctcctgcaccacgcccagcaggtacgtagtactagatacagcagtcatggtacggtgtttgttgctatatggttcgtgcaagtttattactcggggaaaaaaaacatgggctggaaatgtgctggactagtagtagcggcagtacgcgtccggtacggcgtacccaactttggactgttgcgatcgagcacctgtctatctgcaggctgctgcgtgtgctgctgtagtcaagctagacgtgcctgcaggcgtgttcttcctttcacttgcgttgtgtcaggcaggcctctctccttcctccgcggcacatgccaagttgtgagcacgacgtttttcagatgaggggtttctgtcggttcgccggggatgccatgtggggccgccggggagccggcgcgcgcgcaacctaacgcgaaaaaaaggaacggagaaaaaaaaaacacaaagggagctaccgtctggtggtggacgtggaaagcctcgcggtttccatgattaggtcgccagttccatcgcataaactgcttcgaaactaagaaatgtaaacgtcagccagcatgtgcttgctaattcaaccactccttgttgtttttttttcttttcgtctagtttagggttttaagtaggaaccgtctttttttccttctcttctgtctttttcccatgccaattatgagagagaccagctttcgttgaataattagcctgcacgttacctgaatgaaccatctctcttttggtgtccctgcagctgttcgagttcgccgacaagtacaggggcaaatacgacagcagcatcgctgaggtgaagagctactacgcgtccgtgagcgggtacaaggacgagctcctgtgggccgccctgtggctccaccgcgccaccggcagggctgactacctcgactacgtcgtcgacaatgccgacagcttcggcggcaccggctgggccatcaacgagttcagctgggacgtcaagtacgccggcgtccagatcctagcagcaagggtaaggcataagtgacaataatgccagcaacccagcacacacaaattattaaaagagtcgatcgcgggactgactcactgacacgtgcgtccgtacttgtttcagttgctgctgagaggggagcacgcgacgcgccaccggagcacgctggagcggtacagggccaaggcggagcgctacgtgtgcgcgtgcctgggccggaacacggaaggcggcgcggacgccaacgtggagcgcagccccggcgggatgctctacgtccggcagtggaacaacatgcagtacgtgaccagcgccgcgttcctgctctccgcctactccgactacctggccgaggccggcgtccggaccgtgtcgtgcgcgggcggcgagaccgtggcggcccgggaggtggccgcgctcgccagggcgcaggtggactacgtgctcggcaccaaccccaggggcgtcagctacctcgtcggctacggccccaagtaccccagccgggtgcaccaccgcgccgcgtccatcgtgccgtacaagcacagcaaggagttcatcggctgcacgcagggcttcgaccactggttcggccgccggagctccaaccccaacgtgctcgtcggcgccatcgtcggcgggccggaccggcgggacaggttcagggacaaccgggagaactacatgcagacggaggcctgcacgtacaacacggccccgatggtcggcatgttcgccaagctgcaccggttggcgcggcaggagcgggaacaggggccgacgccggcgccggcgccggcgcccgtcacgtctgcagcggccgatgtgtaaatagataggaatgtagagggggggctgtacaattttccccattctttggttcattttttgttgggctctgaatttcattttacacagatccaggttattgtatacaaaagaaaaggtagaggcatcgacatgtgcaaatgtaaatccactaccagtacatacgagggaaagaaatggcattcttaacttattggtcgttcttgtctgtaccttt

SEQ ID NO: 7248 - DNA, 2349 bp, Zea Mays
gccgaaaaagtgcagctcagccacgaatagcagaaatggccgcagtagtgttttggtccctccgccgccccccacggtctaacacacccgcccgctaattcgccgaccagcctgccatcacccgctcgctgcagccgccgcgcccctcccactcaccaacgcggcaacgcccatggcgcccgtctgctgaaaacacccgccgccatgcctcgcgaccagatggtgaccaatggttttggagcaaaaagggataatgcaggggcaaaaaaatctccccagcaaattcagaggctggagaagttttactctgatgtacagtatccaaagccagaggaaatgggtgagtatgcaacctgtgttggtttgacttacagtcaggtccgtatatggttcaaagagcgaaggagaaaagagaggaggatggagatgggagccattgggtctcagatggaaaggcaatttagtgcacgttccagtggacctagatgcagcagcagttcttcgttttgtaaccaagctcccatctatgacatttcacgttcagagtcggacacctggggtatgagcacggcaggagaggaaagtaaaattctatcacaagttctgtttcccaaggattatatcctgagcaaaattttccgcaaggatggtccacctcttggtagtgaattcgaccccctcccccaaagtgcacatggctgtatcagagacactacatgccatcattcctctgagaaccaaagaactgtgaagaagagaaagatcatagagtcaactaaccagagatctgatgtgtatgagaatactgctcctgtgaggaaacatggaattggcaaaggtctaatgacagtgtggcatgccatgtattcccataacgtgaaatgtcaaagcggtcgaaatttcattgatgaaactggttgcttgaggtctcttagaccgtttgacgattttgatggattagaagatcgcgataatggaaggaagactcaaaatcaaggtatgacacggaaaaagatagtcaaaaggagtaaagttctggtgaatagaaaaaaggtgccgtgtaagagagttactggtccaaaggtgcatcctccaatggcttgccatctttcagttgatgaatcagaatctttagaactacagactgaactagtgactttagtggatgatgaggagctcgagctcagtgaattacaaacaggtccgaatccattgagatgttcagctcacctgtcttcaagtggtagacatgactgccccctttgtaaagatttacttgccaagtttcctccacaaagtttgaagatgaaaaagctattctctacaaaaccttgggagtcatcacctgaaatggtgaaaaagctttttcagattatccggtatgtatacactcattttggcagtattgatgtccaccccttcatatttgatgagtttgtgcaagcattccatgacaaggactcctcgttgttgggggaagtacatgttggtcttctcaagctactgttgttaaaggctgaaataggaagtgatggtgtatttgttccacgatcttctaaagactgcagatttctcagtttcctgaactttgttagggaacaagaattcgatgccaatgtttggatcagatcgttgaatgctcttacatgggttgagatacttcgtcaagtccttgttgcttcaggctttgggccaaaacagcatttgctgaatcaagaattctttaacaaggagaaaaatcaaatggctaaatatggtttacgtccccgcacactgaaaggagaattgtttgcactgttgtctaaggcaggaagttgtgggttaaaggtttcagtactagccaaatcatctgagattattgatcttaatgtttcgagcccattagaactagagcagttgatatctttagctctctccagtgacatcacattatttgagaagattgcaccttctgcatatcgtctccgtgttgacccccaaattaaaggggaagaagattctatgtcagatagtgatgattctggaagtgttgatgaggatgaggatgctagccgaagtgatgatggatctgatggttcccaaaagttaaaatttcttgagaatgaaagcagacttgctcgaaggaaggagaaaaatgcacatggaagtccaaataaatgtagtgaaattgatgaaagttattcaggtgaaaaatggcttttggcattgatggaaggcgagtattcagatctaagcattgatgagaagttggattgtttggttgctttaatagatgttgtttctggtgctggttctgttccaagacttgagaagccggttcaaaaggttgaatgaaacgcaccctatgac

SEQ ID NO: 7249 - DNA, 4141 bp, Zea Mays
gccgaaaaagtgcagctcagccacgaatagcagaaatggccgcagtagtgttttggtccctccgccgccccccacggtctaacacacccgcccgctaattcgccgaccagcctgccatcacccgctcgctgcagccgccgcgcccctcccactcaccaacgcggcaacgcccatggcgcccgtctgctgaaaacacccgccgccatgcctcgcgaccagatggtgaccaatggttttggagcaaaaagggataatgcaggggcaaaaaaatctccccagcaaattcagaggctggagaagttttactctgatgtacagtatccaaagccagaggaaatgggtgagtatgcaacctgtgttggtttgacttacagtcaggtccgtatatggttcaaagagcgaaggagaaaagagaggaggatggagatgggagccattgggtctcagatggaaaggcaatttagtgcacgttccagtggacctagatgcagcagcagttcttcgttttgtaaccaagctcccatctatgacatttcacgttcagagtcggacacctggggtatgagcacggcaggagaggaaagtaaaattctatcacaagttctgtttcccaaggattatatcctgagcaaaattttccgcaaggatggtccacctcttggtagtgaattcgaccccctcccccaaagtgcacatggctgtatcagagacactacatgccatcattcctctgagaaccaaagaactgtgaagaagagaaagatcatagagtcaactaaccagagatctgatgtgtatgagaatactgctcctgtgaggaaacatggaattggcaaaggtctaatgacagtgtggcatgccatgtattcccataacgtgaaatgtcaaagcggtcgaaatttcattgatgaaactggttgcttgaggtctcttagaccgtttgacgattttgatggattagaagatcgcgataatggaaggaagactcaaaatcaaggtatgacacggaaaaagatagtcaaaaggagtaaagttctggtgaatagaaaaaaggtgccgtgtaagagagttactggtccaaaggtgcatcctccaatggcttgccatctttcagttgatgaatcagaatctttagaactacagactgaactagtgactttagtggatgatgaggagctcgagctcagtgaattacaaacaggtccgaatccattgagatgttcagctcacctgtcttcaagtggtagacatgactgccccctttgtaaagatttacttgccaagtttcctccacaaagtttgaagatgaaaaagctattctctacaaaaccttgggagtcatcacctgaaatggtgaaaaagctttttcagcccacatatattgattggagaattaatcctgacagattatccggctttgggccaaaacagcatttgctgaatcaagaattctttaacaaggagaaaaatcaaatggctaaatatggtttacgtccccgcacactgaaaggagaattgtttgcactgttgtctaaggcaggaagttgtgggttaaaggtttcagtactagccaaatcatctgagattattgatcttaatgtttcgagcccattagaactagagcagttgatatctttagctctctccagtgacatcacattatttgagaagattgcaccttctgcatatcgtctccgtgttgacccccaaattaaaggggaagaagattctatgtcagatagtgatgattctggaagtgttgatgaggatgaggatgctagccgaagtgatgatggatctgatggttcccaaaagttaaaatttcttgagaatgaaagcagacttgctcgaaggaaggagaaaaatgcacatggaagtccaaataaatgtagtgaaattgatgaaagttattcaggtgaaaaatggcttttggcattgatggaaggcgagtattcagatctaagcattgatgagaagttggattgtttggttgctttaatagatgttgtttctggtgctggttctgttccaagacttgaggaaccgcaaagagtcttgcataatgtgcccagagtgcatccaccacaatcaggtgggaaaataaagaaatcaactaaaaacctttgtcaatatagcgatgagtccttaaatggttcaggaagtttggattgttgtcatcaaggccagtcaggaaggcgaaaaaatcaggattacaccactgaccctggaaggaacgatttacctattgctgctcatggaccacaagttgttctcttaggatcagaccgcaggtataatagctattggctcttccttggtccttgtagggaagatgatccagggcatcgtagggtctacttcgagtcctcagaggatggtcactgggaggtgattgattcaccacaggaattactttccttgctatctatcctcgatagcaggggcactagggaagcacatctccttacatcgatggagaagagacaagcctgcctttttgaagccatgaaaaaacatgtggaaggagggaaggcagccaggcttccagcctcatctgattcatactgctcccagacaagtagtggagatggaacttcgcccaagacaagtagtgtggatggagcttcatctgtatcagacattgagaacacttctgttcctacaagcctcaaagatagtaatttggattcatcgtctgccgtagtaattgaaagtgggaggggaggtgatgagaaaatatctatgtgggaacggctgcaagcatttgataaatggatctggacttctttttactccatccttactgctgttaaaagtggcaagaagtcatttaaggagtcactacttcgttgtggaagttgtcatgatctatattggagagatgaaaagcactgcagaatatgccattcaactttcgaggttggttttgatcttgaagaaaaatatgctgtacatgtggcgacgtgcagggagcctgaactttcacatgaggtaccaaatcataaatttctgccatcacagctacaggcacttaaagcagccattcatgctattgaggcctctatgcctgaggcagcttttactggttcttggatgaagtctgctcacaagctgtgggttaagcggctgcgacgaacgtcatcattgccagagcttttgcaggttcttgtcgattttgtaggggcaatggatgttgattggttgtacaaaagttcatctgcgagattgagaacaaatctggatgacatcattgtcgactttcagacaatgccacaaacaacatcagcagttgcactttgggttgtccaattggatgccctcattgcgccttatttggataatgccatggcaagacagctggtgaatgctaggtagcttacaaagatggattcttttgcgtgatgcacaagcaccccgagctgacttctttttctggcaccatctgcaagttttttcttgatgaaagcttttcatctaggtgagacagaacatggggtctgctttgagttcgagaacaagatcttgcgacttgctgtaaagcatggaatatattgttccctcccagcagagcattgcgtcatagacaatgaaaaagttttgttaataatcgttgcttcagatatgtgaaagttttggctttccatgtagcgacacaattgggatgtaagcaatttctgaaacagaccgctgtttgcaggtggtgctgtttgggacttgattaccagctgtgcccttagttttaacggaggggtggttataattttgttccttctatatctgtatgtgctaagttgctcctagtccgtgagagctttctacattaggctatttttgtatgttatgtaaccagtttctattagagtgcagttgtagacatttagaacatgtacaccaatattgtgactgtttgaacaagtgagggaggcatagaagacttcatacggatgaattcatgattagaataaaattgcaccaaaaatcaattttgaaccgttacctttttggtatctcgtatatgttttttttttgtctatgtagtgctagttgataaatttcggatagatgtaaataggaaactgaaactctattcggatagatgtaaatagaaaaatgaaactctatttgtttaaaataagttaga

SEQ ID NO: 7250 - DNA, 1128 bp, Zea Mays
gtgtccatcttcgaattcgagctcctccatcttccttcaccctcctctctctcgctgtttgaggagaactacctgctcctgctccctcttccgctcctccgcgctcccgctcgccatccccaggcttcatttcggacggggatggacgactacgcccgggagatgatggagctgaagacgctcgtcacccgcaccctcgagaagaagggcgttctcgccaagattagggctgagctaagagcaagcgtgtttgaagccattgaagaggaggatcgggtgatggagaatgatgatggcggtaatcctgctttgcttggtagctgtaatgaccgggctaagcaactgcatgcttcaccttcagagtgtaacctgcccaaggacttctggaagaatgaactgaaagacttctctaacaaaagtggagctgaagggagcaggagtgctgaaagtggtccactgcttttagatgttctcgaagaatttgtctcaagcaaggatgggcggcaggaggatgatgagttcagaatctgatccatcactaaatgctgaacatcggagcatgaggagggcaccatcagcatcagttgggaatctgcctcctatggggagacctatctcttcttcgcagcaggcatcagatcgcagaggggggtcttcagtttccaacacaaggaaagatgagtacaactggagatacgataccaccgatgatatatctgaagaggtgctgcgggcatcgactgccctagaaagtgttcagctagaccgcaaatctcggaatctgccgacatcttggaggcattcaggggatggcgccgagtaacaagaaggctttggagctggttgcttgacttgaccgaccctgtatcatgtaatttgtatgccactcatttgtggtgcttggattgctgctatcttagaaaaagaagtggtaaactggttatgtatggttgtcttgtaacgaacaaaacaaatcaaagagttaggtgccgtttgttttacatatttgtaacgtgatgggtaactgtgatgggtaactgataacgttaaaccatgtttgtttaagtccaaccgtaatcagataccacattaaaaattaatactagtttattcaaacttattatcgct

SEQ ID NO: 7251 - DNA, 1902 bp, Zea Mays
gtgtccatcttcgaattcgagctcctccatcttccttcaccctcctctctctcgctgtttgaggagaactacctgctcctgctccctcttccgctcctccgcgctcccgctcgccatccccaggcttcatttcggacggggatggacgactacgcccgggagatgatggagctgaagacgctcgtcacccgcaccctcgagaagaagggcgttctcgccaagattagggctgagctaagagcaagcgtgtttgaagccattgaagaggaggatcgggtgatggagaatgatgatggcggtaatcctgctttgcttggtagctgtaatgaccgggctaagcaactgcatgcttcaccttcaggtaggttactaactgcacttgtttgcgaatacttggagtgggcgcaattaagtcacacaatgaaagtttacttgccagagtgtaacctgcccaaggacttctggaagaatgaactgaaagacttctctaacaaaagtggagctgaagggagcaggagtgctgaaagtggtccactgcttttagatgttctcgaaggttatctgaaatatgagaaaaggtagtatattgagttggagcaataatccttcatattattggcgtcttgcttaatcgatctgtccaaaaaattggattgtttgccacaactacaatacgcatcaaggtattgccttagaacaaaaagtaggtgttattattctggaagcttagggagataggtttatcaagatcaagcacatcttcacaatttgtaaattttctagaagctgaaatattttgagaatgtagatcaatgattcttggaataaaccagaatggatacaaattgatgtactgttctctgagtttggtcggttgttttacactgcatgcatgagatttatatttacagtgcatcatcattatcattgtactgagatccgcttatatgtgatttttttcaatctcaacttattgatgaaaggcctgtactcaaggtctccttttgatggtatgtggtgcatttatgctgctttcttcctatgacctttagttcactgcacacacaaaacttgattcttttttccagcttgactttcactgtccttgagcaagtaaagttgatttgcctattatacttcattaatttacattttttatattattaacctccaaatacagtcagtatgctctagtttaagttttggttttctacagcatgctgtggtcatttaatcatattgttttggtcagaatttgtctcaagcaaggatgggcggcaggaggatgatgagttcagaatctgatccatcactaaatgctgaacatcggagcatgaggagggcaccatcagcatcagttgggaatctgcctcctatggggagacctatctcttcttcgcagcaggcatcagatcgcagaggggggtcttcagtttccaacacaaggaaagatgagtacaactggagatacgataccaccgatgatatatctgaagaggtgctgcgggcatcgactgccctagaaagtgttcagctagaccgcaaatctcggaatctgccgacatcttggaggcattcaggggatggcgccgagtaacaagaaggctttggagctggttgcttgacttgaccgaccctgtatcatgtaatttgtatgccactcatttgtggtgcttggattgctgctatcttagaaaaagaagtggtaaactggttatgtatggttgtcttgtaacgaacaaaacaaatcaaagagttaggtgccgtttgttttacatatttgtaacgtgatgggtaactgtgatgggtaactgataacgttaaaccatgtttgtttaagtccaaccgtaatcagataccacattaaaaattaatactagtttattcaaacttattatcgct

SEQ ID NO: 7252 - DNA, 2475 bp, Zea Mays
ccgatccggacgcggaggatgacctcgatcccgcgcccggccgcgtagtattgcaatccccattgtgccaacagtgagggtggttatcactttcaccaagtttgtccccctcatcgagcctgaggagttcttcactattgactaatgaagttatttttagaaacaatggtcaaggaccccactctggctctatagtatataacagaagctcaccacacaagatcgataaccctttcagatcatactataccaagctgctacttcacttcagtagaacaattgatcacacacaagaagttcagatcagaaaatgcaggctgtcgctactcccatcaggttctcggatgtgttcccatcaagggctgaccgtggagaagagcacggtggtggttagtgtccctgttgttgtcacggcggtggttccgtgaagatcaagaggagcaaggatgttgtcaagttcaaggtgcgcccgttgcaactccaacctgttcccccccaattcagcaccaaagacagattcgttgtaaggaacttcaaaatctggaggcgcttaggatgccccagcccgctgcttttgtctccgtgcagccgtccgatggtcaacccacgccgagcaacgtctcgaacaagaatatgaagcacggtggcaaggtgttgttcttggatggcgccggggaggtcgccatcaccatcagtcgcaactcgcaacagcctctctccacagtccctgcacccggtgaatcttccggtgaatatgcggtctgtgacttattcgcagagccaaaattaccaacaagatgatttccataaaactgttgcacggaccttgagccaaggatcaacaccgatgagcatggattttcatccacttcaacaaactcttcttcttgacaatggccacttctccccaagcgaaaaaaatctgctagaagaccttagagggctttaacattgggatggatatttgggcccttaccttgctttaagtggagattcagttttctgttttcacttaatatgacaactgaagagcgaaagactttgaagggcacagagtcttcagctccttctgttcctcctgatggaggagtcagcaaggaacctaaaaaagggggagattacccaatgggaggacaactggtccagcacgccgctcatccaagggcaactggactctagaaaaggtaaagttggcactctggtttcctaaattcgttaatagcatgcattttcagtacaacatttgaataatgatgtaaataacctatcttagttagctttgttgaatgttatgcatttttagttaggctcatttgctcattacttttttattttgcttgatctgttaatgaaataaaaagtaccctgtccttaaggtgcgtgaactctgtaatccttgttgatttccgaccatgaatcagctgaattgttattttttatcatgtattgttaggtacagagttcatgcccataccatttatattattcttagcctgcccataccactttgatttcatttttcgtccatgtttcagttgaattttcctaacaaactatggtgttaatgccatggatgcttgtgtgtattggtggtttgctattctcacgtgtggtttccttgtggtgttgttctgaggtctacttaacacttttgtcgtggttgtatggtgttgggattcactaggaggtctacttaacacttttgtcgtggttgtatggtgttgggattcactaggaggtctacttaacacttttgtcgtggttgtatggtgttgggattcactaggaatgcgatcgtagcggctcgagctcttccttaccaagaggaacacaaacagagctcaggtttttttttattttgctctgcattatctactgcttctccatttgataagtaaccgatcaattttttgaatattttgagcacatcggaggtgtaggagttggtgaacacccatgatctgtagatgtcgcagttggaagggtccaggaagatttatgcacagggagatgattatcacgagtacttcaagcgctcatttgaggaagacatcgctgcgcaagtgcctcaaggagtggaatggggttacaactattgattgggggaaatcaggcagaggagggcatgttgacggaccaagtggcgaggcaaaattttctaatgattttgaagttcattatattggcagtagctgatgatcccttctgtgatggaccgagtaaaccaagcaattcgggatattcaactccactttgatgactgtgtgtaccagcatgagatgttgattacaattcacgacatatttattgttgtttattttttatttttcatattatagtgatgtttgttgttccgtatctatgttttatactaacttttttacttccgttgcaacgcacgggcatatacctagtaactatatatgtgtgttcatcgatcagtcatcactctctaccgtcagttatgtaagtcag

SEQ ID NO: 7253 - DNA, 2432 bp, Zea Mays
ttccacaccacaccacacctcggctgggcctgggacgggggttgggcagggagcccccctccttccctttttttccccctccctcaaaaaagcacacccacacactcttcttcgttccttgaccgagtaaatcctctctcctcctcccgactctcaattgcttcaaggcttcatgcttcatgctttgtcggccccggcccgcccccctatggctcagccaactgctggagtggtagtggttgcttcctctctcttctcacgtcaccatgatcgataagcctagctagaatataggtggctggcagtggcagtggcagcgctatcctatatagtgccccccggccggtgtgatcgcctcgggagctagccttggaagaagaagcagagagcagagacgccgttgcgtagagggaggaggagtgcttcttcgttcgtcgttgcccaaagcagcagcagtcacttggaattggaccagagcggcgccgagcgctgccggccggccggccgacctctgtttgtagcggcggcagcaccagctctcaactgctcaagcaaaccaattaaagcagccagcagtctgtcacactcacacacacaggcggaaccgaaccggccaatgtattcttcgtcgccggcctgggagaagcgcgtgagcagccaagagcaggagccactcttttgcaattgcagctgcggcaggaggtttcacaggccggcggtcatctgcaggacgccgcactgatggcgacggcggtctcctgtccctactcctcgtctcgcgccggcgcccctgcactgctgctcgtcgcgcttcttcttgccgccgccagctggacgaccaccgccgcggcgaagaacgacacgcagaggttccggcccggcgacgagctccggcggtaccggagggtgcaggcgctgctcaagaggctcaacaagccggcgctgcggagcatccaggcacagccccgacggcgacctcatcgactgcgtgccggcgcacctgcagccggccttcgaccacccgaggctgcgaggccagaggccactggtggcgggcccgccgccggcgaggcccaaggggaatcgcctccgcgacccgataaggaatgacaccgcggaggccgccggcgtccagcagctgtgggcggcgtccggggagtcgtgcccggaggggtccgtgcccatcaggcgtgtcacggagtcggacgtgctccgcgccagctccgtcaggcggttcgggagggcgcccgcgggcagggtgcggcgcgactccgtctccggcggccacgagcacgcggtggggtacgtggccggcgacgagtactacggcgcgaaggcgagcatcaacgtgtgggcgccgcaggtgagcacggcgtcggagttcagcctgtcgcagatctgggtcatcgccggctccttcggcaacgacctcaacaccatcgaggccggctggcaggtcagcccggagctgtacggggacaacgcgccgaggttcttcacctactggacgacggacgcttaccagaccaccggatgctacaacctcctctgctccggcttcatccagaccaacagccgcatcgccatgggcgccgccatctcgcccacctccgcctacaacgccggccagttcgacatcagcctgctcgtctggaaggacccgaaccacggcaactggtggctggagttcggctccggcgagctggtggggtactggccgtcgctgctgttcagccacctggcgtcgcacgcgagcatggtgcagttcggcggcgaggtggtgaacacgcgcgcgtcggggtcgcacacggccacgcagatgggcagcggacacttcgccggggaaggcttcggccgggcctcctacttccggaacctggaggtggtggactgggacaacagcctggtgccgctcgccgccggcttccacgtcaccgccgaccaccccagctgctacgacatccagggcggcgtcaacgccgtctgggggaactacttctactacggcgggccgggcaggaacgtcaggtgcacctagctagtagcagctatagctcttcgtcatctcgtctcggcccgttaacctgatgtgatgatgccgctagctaggattttctcttcttccatatattgcccacaaaaaggttaattaatttctcaaatgcgagagtcacggatcatgtagttttcttttctttttgatttcctattttcttggtggtctctgaacgaaacaaaagggtgaagggttaagctcagttcaaacgtagtccagttcatcaggtcgtagcgacgatgatggtcgtcgagttgtaacgtacgtaaaagccccctgaacaatatgtagccacaaggcacaatctagcagtatatacacgcattgttttactcctttccaaaaaaacaaacaaaaaagaagaagaagaagagaa

SEQ ID NO: 7254 - DNA, 2518 bp, Zea Mays
attgactttggtaatatgtatttagcttctcgaaccttaaatatatgttataaaaatatcagtgacaacctttacgaaacgaaggtagtagtttttgtacattttttagtaagacaaagtttaactttgatttttaaaagtcaaacattatttgaatttaaaacgtgtgtggaattgaaaaatcgatggctagctaatcaaattggtcaataaactagtcaacgtgatcaaactaaaaaaatgttgcactttattacttgagaaattttccagtagaaattttccagttgaaattttaaaagaataaatctaaataattaatgaagtgtttcttggcgcgcttaaacttctcgaaaatattgtgctttcggctttcgcgctctgtttatccgcgccaaaaaattcccccccccctaaagtgttggaaccaccctcccatgtttctcgatcacacctcctagaaatctcctccggttcttccacctccctgtagttctcgctctcctgccaccattctcttcgtgctcctgctccatatgccctcctttcagtctgctgcttgatgatccatcgcccagctgctggttgatccgtcgcccagctggtaacagatttcttcgtgggtgcagtagtaccataactgacccaccctctaatctttactccgacctacaagggaaagaagtaatgccaatgaaacacagaagactacaaagtctgaacttagaagctgagacacaggaaaacgtggaacaacatgaagatgtccaagatccacaaccagagctcaccattgggtttcctgagggagaagcgccaacaaggaataagtcattcaaaataatatggcaaaatggagttgttcgggaggtttttagaaatttccgaacagctgaattgtgggatctgaaaggaggaagagtactagttgaaactgacaagaatggcattcccaatcagtggtctgaatccattctctcgtcataccttggtgagcttgcacagaattcatcatttgcaccattacacattccgagatgggacaacaaattattcaaaggtccaaaggaacgcatcatcaaagatgttgagaaaaaatttatctatagtagtgagacaaaatggtctactcgagattggattcttaagacagtgaataaaaggtggagagactacaagtcagacttgaagaaacaatacttcaatccagataagaggtcttttgaccagattgaaaaggatgtccctgatggtgtgaatgaaaatcaatggagttttctgttaggcatatggtgcagtgaagcacatcagaaattatgccggacaaatgcggaatctggaaagaagcagaggcatccacacactagcggtaggaaaagccatgctagacttaagaaggagatggtaatggctctgtctgttatcttgtttccattttggagtcactatgaaaacaaaatgatcctgtcagattgtgttcttttgcacaggaagacaagaagaaaggaagcatcactaaaattgatctttgggacgagtctcataagaagaggaatgggaactatgtcaatcaaaatgtgcaaacacttatgggtaaggccttcgatgaattagagaacaggaggaaaggacaaggggacactttctactagtgattatgatgatgtgtttgagaatgtcataagaaaagacttgaacattcgtgggtactatgatgatacacattggagcaatgaaactgattcacatgttcaatcagaggagaacaaaatgattagaagggacctagagcttgctatttctgggtttaggaacattagagcattcctagaaaaaagtttccagaagaggaattgctaagcacaattctagctactggatctggaagcactacacaggttgatactaaagacaatgaaaatgtctcattgcaatatgataatgtagaacgatccagttatgagaaatcaccttcaccatacaatgaacagatttatactagagattataatattgccaaggtgggttgctctgatcattcagtaccaaatgacaacatagctttcagggaatcacaagttacaaggtctagtgacttgaaccaggaactcaacaatggatcactatctctagataaagaaatgtctgataaggaaactcaaagcaagcaacaacaacaaagcaaattgcaacagcttaaaagggtgaagccaactactgagaagcgcacttgaatggttagaagactgaagatgcaactaatgaatgagcaagtgttatagtggagagtagttctaggatcaaaagttctagttgtcaatctacttgtttaattgtgttaggaacctcattttattcactcttgtatgtctaatctacctcaagaccacttcgtttggattgaaaatacttatgtattgttgcttacacatgaagcatttaattgatctgttatatatatgaaccttgtgtcttgtatatatatgtgctcaaattgagtgtttgtgtataagcaaaa

SEQ ID NO: 7255 - DNA, 1370 bp, Zea Mays
gacggacatccttttcttccccggcttcgtttcgtgctttcctcaacctcccctcttccgtgccgcacagtttatccgctgcttcacggaaatccttacggggctgcatatactatattccctgcgttccaggcggccccgcccccgccccccaccggctcttgctgtctcctctcgcacggtcgcaccccgctagcctcccggcgtcccaatcccaggaacttccgtcgcgtcaggtgatgctttcagcaactacaggtgtaggacaatgtcgatgaactatgatggggataggagtgaggaccgccaaagcgaggaggtccagtcagcatacaaaagggacagtgacgttggtgaggaaatgataataagtagcgaagagcaaaatgatgagaatgaatggagctgggtgaaccaagatagaaatggtgatccttttgctgaatcggtttcctcacttcatacgacacagcaaatcctcgaaaatggatacgaaaattatcagaacttggcaaagaacttgaggcggaggaatccacttccggtaacaaagaccaagatgtgatccttttgccgtatagtgaggctgatgtgttggaactgagtgagaagatggaacatcttgaacagaaagtgaaagaagcatcaaacaccatcagagagaaagacctgatgctttccaagcttcaaatactcatcggtactgcagacagggcagcgctggaggaggagttggaggaggcagcagctagcatcgaccaattggagacagagctggagcgccatctccaggagaaactagaggctgaaattcagtgtctgttgatgttgaaagcgagccagaattggcaggtccgagcggaggaccgggtggccttggaggagcacagggcgctgtctgccggggacaagaccagaatgctgctcaagctacgagagacggagagcaagatcgtgatgctgaaagagcaggtagacaagctggaggtccgggagaaggagctcaaccggacgaccgaggtcctgaagatgcagagcaggaccttcagagcgtccctctttggcctcgtccagctggtaatgctatgcctgtccctgaaggtgttcttcgcgcgggtctcggccccatttgacgaggctgtgccgacatgatgccgtcagctggtgctctcttctgcctgtaaattagctcgccggggttgcgatgccttaacgcgtgtcctgctgtcttactgtagctgtagccagtaggtagtatagtttcgttacactgatgcagtgtaggctgtggtgaatgacgtctgaaactacgcgtgttctgttaaaaaaattactgcaggtctgtgcataaattgggttggattggcaaa

SEQ ID NO: 7256 - DNA, 4021 bp, Zea Mays
gaagagaacacaacgcacgccgctgctaagaacgaacgagggagcgagcgagatggatatggcaggccgcagcaggtgcaggtgcagcagccatggacgactcctctggctgcttctcgcgtgctcgtgggtggcagccgcgagaggccagcaaacagcacggactgatccagccgaagcggcggcactgagcacgatcctggggcgatgggggctgaaggcgtcgccggggtggaacatcagcggcgagctctgcagcggcgtcgccgtcgacgacaccgacgtcgacaacagccccaccatcaacccgagcatcaagtgcgactgctcctacgacgacaacaccgtttgtcacatcaccaaactgagagtgtatggcttgaatgttgtcggccagataccagccgagctggagaacctcacctatctcagtaacctgaacctgatgcagaattatttgacaggtcccgtgccttcattcatcgggaaatttcccatgcagtatttatctctggctatcaatccgctatctggaacacttccaaaggaacttgggaaccttactgatcttatctcactgggcattagcttgaacaactttactggtgaacttccgcctgaactgggcaacttgtccaaactggagcaaatgtaaaatgcatcttcacaacaggaattgctcatttttatcggcccgcacaattttaggcggcctagcggtagccgtcgaaattaatggttacttttgggggtttctatagaccaccaaaaattacggttactttcggcggccattgctctagccgccaaaaattaacggataaaaatatccctgccgcccttctcttttttctctttctgtccgctcgcacgcgcggtccgcaatacgcccagccgccaccgtttcgccattgccgcagcgaattgccaaacttcacttctgtaagatttaaaatttaagtcaattacttttgcagatattttgacagctctggcttcagtggtccattcccttcaacattctcgaagcttaagaacttgaagatcctctgggcatcggacaacgacttcacaggaaaaatacctgatttcattgggaacctgactcagttggaagttctgagatttcaaggaaattcttttgaaggcccaatcccaaaaagtctgtccaatctaaccaaattgacaaccttacggatcggtgatgttgtgaatgggagctcttcattgtcctttatcagtaacttgacatctttggatgtcctgtatgcgacatactttcgctgtaaaggtactgtttcatatcttggcagtgtagatggtactgacattggttatctttctacaggatattaagaaattgcaggatatctgatactcttgcaacagtaaatttttctaatctagctggattgaccttattggacttgagctttaacaatctcacaggccaaattccacagtccatactgaacttggacaaccttggattcttgtttctcggaaataacagcctttctggaagcctgcctgatattaaaagcccttcactaaacaatttagatttttcttacaaccagctctctggtagctttccttcttgggctacccagaataatttgcaattgaacttggtggccaacaacttcattcttggtagcagcaacaacagcattctgccttcaggcctaaactgtctccaacaagatattccttgtttccgtggctctccggaatattcctccattgccgtagactgtggaagtaacaaatcatttaggggcttagataatactttttatgaaatggatcctacaaatattggagctgcatcatattatgttactggtcaaacaagatggggtgttagcaatgttggaaaatttaatgaggccccaaatggaagttatacaatagatagttccgagcagtttcagaatgcactggattcacaactgttccaaacagcaaggatgtcaccatcatcgctacggtactatggcattggacttgagaatggaaattatactgttgagcttcagtttgcagagtttgcttatccagaatcacccacctggcaaagcactggaaggagagtttttgacatatacatccagggtggtctgaaagaaaagaatttcgacataaggaagacggctggtggaaaatcatatgttgcagtatataagaaatacaatgcaactgtgtccaaaaacttccttgagatccatctcttctgggcaggcaagggcacttgttgcattccaactcaagggtattatggacccatgatctcagcattgagtgtgacaccaaattttactcctactgtgcgaaatggtgttcccaaaaagaaaagcaaagcaggggcaattgttggaatagtaattggtgcttctgtcttaggactagccgccttagctggaatctttatgctggtacagaagagaagaagagcagcacagcagcaagaagagctttacaacatggtgggaaggccaaacatcttcagtaatgctgaactaaagttagctacagataatttcagttctcaaaatattcttggagaaggcggatatggaccagtttataagggtaagctacctgatgagagggtaatagctgtgaagcaactttcccaaacatcacatcaggggaaaagccagtttgtgacagaagtggccacaatttctgctgtgcagcaccgcaatctagtgaagctatatggttgctgcattgacagtagcacccccctgctggtctacgagtaccatgagaacggaagccttgatcgagcactctttggtgacagtggtacgatccttgactggccaactcgcttcgagatcattttaggtattgcaagaggcctaacctatcttcatgaggagtccagcgtgcgcatcgtgcatagggacatcaaggccagcaatgttctacttgacaccgacctcacgcccaagatttccgatttcgggcttgccaagctctttgatgagaagaagactcatgtcagcactaaaatcgcaggcacgttgtaagtgcattgattccacccttgcacatattgtgtatatagctgcgaatgctgatctgactgaatatcctcctatccgttgtcaagtggctacctggcgcctgagtatgcaatgagaggccatctgactgaaaaggccgacgtcttcgccttcggggtattggcaatggagactgtcgcaggtcgaccaaacactgacaattccttggaggaacacaggatctatctctttgagtgggcctgggagctgtacgagagggaccaagcacttggcatcctggacgcaaggatcgaagaatccgacggtgaagaggcagtcatcagagtcatcaatgttgcgctcctctgcacgcagggttcgcctcaccagcggccaccgatgtcgcgtgtagtgaagatgctcaccggagacatcgaggtgcctgaggtggtgaccaagccaagctacatcactgagtggcagcgcaggggtgggaacagcagctatgttaccagcggctactctggcgacacgaccggggagttcagcgtgcagagggagacgactgcgcctctcaccccgtcgccggcgatgactggagtcatcgacgacgggcggtgatttgatcgcaggctgatgcatgctgggtttggtttgatctcaagggaaaatctttgaaccatagttgataaagcgcggtgcgcggagaataagagtcagctttacatgctacttggctgggttaatgatagatatcatataacataacgtaatgtaatgtaatatgctacttagctaggttagtgatagatacgatatgatatgccatcacagccttggcgttcaccgcctctccacagtggcggatctaggttttttatacaggatgtaccgtaataaattttttatatgcaactgtatatacagttttatagtagatttgataaaaagtttgataaatagatataatgtttagcaatcaacagttaagtacgaaagttgca

SEQ ID NO: 7257 - DNA, 2366 bp, Zea Mays
aaaaaaacaaattagatagagctcgccgagcaagcaagcaagccaactcggccgtccgaacgaaagcgaagcgcggccaaactcactcgctaaacgctcccgttctcctccgcctgcccccaccggctccccttgtacacgagcgccggagacgccatggcggcggcgcagccgaagccggccaagaggctgggcggcatggcggaggcgctcgccatcgccgccgacctcggattccccgcctctaccacgcaggaagatcagactagctccgacaaaagcgatgatttggtgaaggttttgagggaactgactgtcgtgcagaggaacattgccaacttgcaagtggagctacagggaagaaaggatgataaaaacattgctcatttgactcatgtgagtgagatggaaaagaagtgcgagtctttggccagaatgactgcaattttgaaagatgtaattcagaacaaggatcgtattattgctcggctgcaacagccttattcccttgactgcataccagttgaagctgaataccagaaacaattctcggagctacttctgaaagcagcaagtgactatggggcattgacagcatcagtcggcgatttccagtggagccaaaactttagggaatcaccagctgtctggggggaaatgctgcgaccgattcctgctgcacttgcttcctgcacccggttcttcgaggcaatgtctgcgatgagggaatccttttctactcttcagaaactacgcgttggccattcctctctgtcaataaccccaagtgactccagcgacgattcaaagttcttgacgccacctcagtggagagacggctcgatactcgatagctggaagcaaatggatgacatcaacctggagagcagtggaattgacgccatgaatcagaggaggttgtcttggccctccatcaagagggacccgtaggtcgcaggtcacccattggatttaggttcccatgttacataaataggattccaccttgtgtagttggcattgattctctgtatttttaatccgatcacctgcacccatttggcatgttcgacttgtgagagatggtctataagttccttaaatcaatgtcgtggcaaaatttgatatgttttaggcccctttggcagggcaacttttgctctaactttgttattgtttacataagccgtactaaacagtatttttaaaataacttttcattaattatatttttttagcatgtaaagctgactcttattctccgcgcaccgcgctttatcaactatggttcaaagattttcccttgagatcaaaccaaacccagcatgcatcagcctgcgatcaaatcaccgcccgtcgtcgatgactccagtcatcgccggcgacggggtgagaggcgcagtcgtctccctctgcacgctgaactccccggtcgtgtcgccagagtagccgctggtaacatagctgctgttcccacccctgcgctgccactcagtgatgtagcttggcttggtcaccacctcaggcacctcgatgtctccggtgagcatcttcactacacgcgacatcggtggccgctggtgaggcgaaccctgcgtgcagaggagcgcaacattgatgactctgatgactgcctcttcaccgtcggattcttcgatccttgcgtccaggatgccaagtgcttggtccctctcgtacagctcccaggcctgcaaaccatagagcgcttcagtaggtttacaagaatgaactgatgcctcttcttgggcttgagaatattttgatcagcttacgtacgtacccactcaaagagatagatcctgtgttcctccaaggaattgtcagtgtttggtcgacctgcgacagtctccattgccaataccccgaaggcgaagacgtcggccttttcagtcagatggcctctcattgcatactcaggcgccaggtagccacttgacaacggataggaggatattcagtcagatcagcattcgcagctatatacacaatatgtgcaagggtggaatcaatgcacttacaacgtgcctgcgattttagtgctgacatgagtcttcttctcatcaaagagcttggcaagcccgaaatcggaaatcttgggcgtgaggtcggtgtcaagtagaacattgctggccttgatgtccctatgcacgatgcgcacgctggactcctcatgaagataggttaggcctcttgcaatacctaaaatgatctcgaagcgagttggccagtcaaggatcgtaccactgtcacctgtatattgaaaaaacgaaaaccttgagaaatgtattttctatataaatagaaatgtgattaagggtgatgagtgaaagtgagcacaccaaaga

SEQ ID NO: 7258 - DNA, 1030 bp, Zea Mays
ctttcctctcctctctcacgagcttctctctcacatctcgtactgccgcatcgtcccacacgtccctccgtccatggtctcaccggcgttcccctcccccgctccccccattccccccgcattccgtccgtggtctcatgggacaagacggtgaggctttacgacgctgacgccaacgtgctcaagagggagttcatgcaccctggggccatcctcgactgctgcttccacgacgactcctcaggctttagcgccggagccgaccacaccattcggaggttggtattaagctcgtccaaggaagatgttttggggcggcatgatggtccagttcgttgtgtggaatactcttatgctgcagatacttttatttctatggatttgcttttggatttcttttctagcgtttctttttcttctgcaagatactggaaagggaccgctacttaaaaatggatgcttccatgaattccatccaacattacttttcagtatgagtgacacgttggggtcagatttgaacatgattattgcaagtcaagacatcgtcatataattattccaatatcaagtatgatgcaaaatcaagggatgggaactccatctgttcaacaatcagagagctcagggtcagaaccatacaggttcagaacattgactggtttgtttgatgcaactgaacaagtgcatcactttgagtatagtggagtgtgcatgctggcagctgatgaacctgcatgtgtggaacaggctctttcacaggactgctggaaaagagctatggaggttgaactgaagttaattcaagaaaatcagacctgggagattgctgatctgccaagggatcactaaggctataggactcaaatgggttttcaaagtaaagagggatccaacattagtgcgaacaattgtattttagtttagatttagagtacacttatgtatgagttgtttgacaatgcttatttatgagacattaaaatgtacttatttatattatattaattataatgttgttcaatatatg

SEQ ID NO: 7259 - DNA, 4059 bp, Zea Mays
ctcccctcccgcaccctggatgtttcacttacggtcgcgactcgcgactccgcccgcctgcccagcgatagcgccatagcggcgaccggcgagctccaatatcacgcggatcggcggcggcgcccttgccccggagccccgcggcggcgcggccctgtccccgttccccgccccggcggtaggcagccccgtctcctgtcgagcgctcccaccaccccagccccggcgcccccgctcccagcccgaccgctgtatccgcggcgaccggcgtcccgaacggacgcggcccgagcgcctggctcacagaaaatctgcacacaaaactacaaaagtttaaggtcaccaagaaccttgcaggataacacaagtgctggattttggaaatggaccatgggctttatgctccacaacatggatgggagaacaacagtgcatcaaatgggtatggtgcaatcaatgagccagattttaggtctggtggatcctacaatggtaggagatctgtggatgaaggttttcctagagattcatatgggaggggtgcatactgtcaggatacacatgatagaaatatgtatgcaccaccgccatctgttggtggaatatggtctcagcctcgaaggaatcatgatgaggaatatgcaactgcaagagatcacagaagtcgccctgattttggtgttgataggagcaaaaggattggaagcagagaaagtgcggagtttcatggtgagtttgaagaccggtaccacagttctaaccaaagcagagatgacagctatgagagagatcatgaatatggtcattatgattatgattcggaccatgagagaggcaggagagatagtagctggaaaagacgcgattcatgcgagagcaaacgtgaaagaagtggattaagtcgtgaaagagaggaaagtccatacatgcgccatagccgttctcgatcacatggacgtgatgaccgatcaagatcatggtctagatcaagatctcctcgtgcgagaagtcatggtcggaaccaaagagatggcctgtatgatgataatcgatttgacagaagaagggaatatgattgggatgataggaggcatggtgattcagtggccccatctgccactgttgttgtcaagggactgtctatgaagactaatgatgatgacctatatcagattctttctcagtggggccctctacgcagtgtacgtgtgatcaaggaacggaattctggcatgtctcgtggatttgcttttattgacttctccactgtggaagctgcctgtagaatgatggaagctactggaaagagtggtctccaaattgatggcaggaatgtgttctttcagtacagtagtaaaccaaccggtgtaatgggtgggtcttctcctggacaagaaaatcttacaaggcctacttatgggccccgcactgttgctgcactctgtgactggatttgttctatatgcggatgtatgaatttcgcccgcaggacctcctgttttcagtgcaatgaacctcgtgctgaggatgctctaccagctgatgcgacaggttcctctccacactttgggagaaagggatctgaactaggtccaactcatgttttagttgttcgtggcttagatgaaaatgctgatgaggaaatgcttcggtacgaatttgctaagcacgcaccattaaaggacatccgccttgttcgggataagtttactcatgtgtctagaggttttgccttcgttcatttccattcggtggaagatgctacgaaagctctggaagctacaaatgggattacactcgagaaaaacggtcaggttttgcgtgtagcatatgctaaaagtacacatggacctgcatcagggggctcacagtcaaacagccttgctgcagctgccattgaggctgcatcatttgctcaacagtatgatgccataggttgggctccaaaagagtacaatcctgatgacaaacagaacagtaactttgaatctcaaaaagacgatggcagtggcacagcacagtcgggatttgtttgggatgaaaaatctggttactactatgattctgcatctggattctattatgacggaacaactggcctttactatgacagcaactctggagtttggtattcgtacgatcaacagactcaacagtatgtcccttgtactgaccagagcaatactaaggcagccggggagacgtccagtgaaaacatgatctcagatagtatttgtgggaaaaaggttgtgatctctgcgcctgctgccacaattaaacaaaacaagaaaacatcactccctgatgctgttcaagctgctgcaaatgcagccctggctgcagaaaagagagaaaaggagaaggcaaaagagattaagttggcctcaaaaagtagtctcatagctaataagaagaagatgaacaatgtcctagccatgtggaagcaaaggaatcaagaagggcaggccgcacggattgtcattgatgacaaagaaccaccaaattctgatgatagatttaatcattcacatagtggaactggtttctcttcgaaaagcaagccaaattttgaatttgaaaatgctatggataattctgttcgccaaggaattgcatcgacccaaatgttggattctgatgtaaagcctagacctgtcagtaacagcttaggtactacagttatgggtgtcataagaggttctactagaggagtgatcaagtcggatactacgtttcatgcattatctgatgccgggagcactgattcccgcaccactataatcacaagatcaaatgggttaatgacaagtcctgtggaacttgtaactcctgcaccctacaaaactgatgtgtctgccttagtctctaatacttcatcgggagtttctgggagtggtaaacgtcggttttctgaggcaccagggcaatcccagtacagggatcgagctgcagaaagacggaatctgtatggatcatctcttcgcactgatgctgttggattggattcaagtaagaatacactttcttaagtttttctttatcgcgtacaattgttgtcattttcccattgtcattccttcagcacgatgtgttagtaacagcaacatactgtccgttcagattttttttgttattctcatcattatcattttgctgaagcatcattgtcagtattagtgttggtataaggctgacttggtatttctgggagtctttttgttaccataggaatatgtccttgaccaacatacagttcaggaatcttattttttgttttgtttgtaagctttttattgattttctggaaattacctgttgtcaagctggtcactatccgtcccgaaagggtccaagtgagatagggtcgatgccatttcctcctggcgtgggtgaacgttctaatggtgaaattggcaacaacgaaaactatgaagttattaccgctgatagcgcaatcgacgaaagcaatgtgggtaaccgtattctacgcaacatgggttggcaagagggactgggtctcggaaaggatggcagcggtatcaaggaaccagtccaggcaaaatccgtggacgtcagggctggactaggaagtcagcagcggaaggctgatccaatcctggaggccaaagccggagacagctacaaaaccatcatccagaagaaggccatggcaagattcaaggagatgtcctagctagaccttttttttttgtatattcggttgtcgtattttgtcgtccgtatacttttttttttacaatctgtgcactgttttgcttgtgttttttttcttcacaaacctagccactgaattgtgatttattatcctcaaaggggcaccgtgtttatcttattattactatgtagttcgagacctggatgctttttttttcatgtgtgttggggttttcatttgcacgacgaatgtgcccgatcagttgctttgccacacatgatgtggcggtactgcctctacatcttatcgtggcacaggttgttttttaaacggtgttagagattgatgattttacaaacttggcaactctattttttcgtgaa

SEQ ID NO: 7260 - DNA, 4171 bp, Zea Mays
actcgcgactccgcccgcctgcccagcgatagcgccatagcggcgaccggcgagctccaatatcacgcggatcggcggcggcgcccttgccccggagccccgcggcggcgcggccctgtccccgttccccgccccggcggtaggcagccccgtctcctgtcgagcgctcccaccaccccagccccggcgcccccgctcccagcccgaccgctgtatccgcggcgaccggcgtcccgaacggacgcggcccgagcgcctggctcacagaaaatctgcacacaaaactacaaaagtttaaggtcaccaagaaccttgcaggataacacaagtgctggattttggaaatggaccatgggctttatgctccacaacatggatgggagaacaacagtgcatcaaatgggtatggtgcaatcaatgagccagattttaggtctggtggatcctacaatggtaggagatctgtggatgaaggttttcctagagattcatatgggaggggtgcatactgtcaggatacacatgatagaaatatgtatgcaccaccgccatctgttggtggaatatggtctcagcctcgaaggaatcatgatgaggaatatgcaactgcaagagatcacagaagtcgccctgattttggtgttgataggagcaaaaggattggaagcagagaaagtgcggagtttcatggtgagtttgaagaccggtaccacagttctaaccaaagcagagatgacagctatgagagagatcatgaatatggtcattatgattatgattcggaccatgagagaggcaggagagatagtagctggaaaagacgcgattcatgcgagagcaaacgtgaaagaagtggattaagtcgtgaaagagaggaaagtccatacatgcgccatagccgttctcgatcacatggacgtgatgaccgatcaagatcatggtctagatcaagatctcctcgtgcgagaagtcatggtcggaaccaaagagatggcctgtatgatgataatcgatttgacagaagaagggaatatgattgggatgataggaggcatggtgattcagtggccccatctgccactgttgttgtcaagggactgtctatgaagactaatgatgatgacctatatcagattctttctcagtggggccctctacgcagtgtacgtgtgatcaaggaacggaattctggcatgtctcgtggatttgcttttattgacttctccactgtggaagctgcctgtagaatgatggaagctactggaaagagtggtctccaaattgatggcaggaatgtgttctttcagtacagtaaaccaaccggtgtaatgggtgggtcttctcctggacaagaaaatcttacaaggcctacttatgggccccgcactgttgctgcactctgtgactggatttgttctatatgcggatgtatgaatttcgcccgcaggacctcctgttttcagtgcaatgaacctcgtgctgaggatgctctaccagctgatgcgacaggttcctctccacactttgggagaaagggatctgaactaggtccaactcatgttttagttgttcgtggcttagatgaaaatgctgatgaggaaatgcttcggtacgaatttgctaagcacgcaccattaaaggacatccgccttgttcgggataagtttactcatgtgtctagaggttttgccttcgttcatttccattcggtggaagatgctacgaaagctctggaagctacaaatgggattacactcgagaaaaacggtcaggttttgcgtgtagcatatgctaaaagtacacatggacctgcatcagggggctcacagtcaaacagccttgctgcagctgccattgaggctgcatcatttgctcaacagtatgatgccataggttgggctccaaaagagtacaatcctgatgacaaacagaacagtaactttgaatctcaaaaagacgatggcagtggcacagcacagtcgggatttgtttgggatgaaaaatctggttactactatgattctgcatctggattctattatgacggaacaactggcctttactatgacagcaactctggagtttggtattcgtacgatcaacagactcaacagtatgtcccttgtactgaccagagcaatactaaggcagccggggagacgtccagtgaaaacatgatctcagatagtatttgtgggaaaaaggttgtgatctctgcgcctgctgccacaattaaacaaaacaagaaaacatcactccctgatgctgttcaagctgctgcaaatgcagccctggctgcagaaaagagagaaaaggagaaggcaaaagagattaagttggcctcaaaaagtagtctcatagctaataagaagaagatgaacaatgtcctagccatgtggaagcaaaggaatcaagaagggcaggccgcacggattgtcattgatgacaaagaaccaccaaattctgatgatagatttaatcattcacatagtggaactggtttctcttcgaaaagcaagccaaattttgaatttgaaaatgctatggataattctgttcgccaaggaattgcatcgacccaaatgttggattctgatgtaaagcctagacctgtcagtaacagcttaggtactacagttatgggtgtcataagaggttctactagaggagtgatcaagtcggatactacgtttcatgcattatctgatgccgggagcactgattcccgcaccactataatcacaagatcaaatgggttaatgacaagtcctgtggaacttgtaactcctgcaccctacaaaactgatgtgtctgccttagtctctaatacttcatcgggagtttctgggagtggtaaacgtcggttttctgaggcaccagggcaatcccagtacagggatcgagctgcagaaagacggaatctgtatggatcatctcttcgcactgatgctgttggattggattcaactggtcactatccgtcccgaaagggtccaagtgagatagggtcgatgccatttcctcctggcgtgggtgaacgttctaatggtgaaattggcaacaacgaaaactatgaagttattaccgctgatagcgcaatcgacgaaagcaatgtgggtaaccgtattctacgcaacatgggttggcaagagggactggtaagttcatgtcccacatatttctcagtttgagatgctctcaggcttgatagcattttccatgagtgtttatgcctcttctttatttctcttgctaatgcaattgcatctgactttgcaatctaatttatgtaagttttttatgagaaaaaggtaaatatgcctatttgtaataaggcagttgtatcaaatttattttaatgcagctctctggttttaaccggagtactttggagcttggtacgctattagtatgttagcaaatcttaagcttgtcttgttgatctctttacagaaataattaatgaagtatacctctgtgtcttgacttgattctgagtccatgtgcttcctttgtgtctagactctacaatgtaggaatcagaagtcactgacatacttagtctgagtgagaagatgcctagtttttagcctaagtgagaagatgtctagtttttaggtgcgtgcctgtagggaaacatcgctttgagaacaaagtggtggaaactgaaaggaaagacgacagaagccttcaaggaaagggtcatcaaagagggcactcggaagaagacaaacaataattgggagaagatggcaacctgcattcggaaggtggctttaaaggtgcgtggagcaagtgagcaaccaaagggagtggaggcgaagctaaagttttttggtggtggaatgaggaagtctaaagggacctattaaggagaagaaagcatgctatagacgtttgtaccatgacaggagtggacaacatagagaagtataaggtagtaaaaaagactcgtggcaaagggtagggcgtacgaggatttttatcaaacgtgaaggaaggagggtgaaaggagaggacatatattgggattgttagggttcatgagaggaagacaagggacttcaaccaagttgagtgtattaaggacaaaacagagtaccttttcatggagtatgaggtcatatgtagatggtgagggtattttaacaaagtatttaatggggacaat

SEQ ID NO: 7261 - DNA, 1483 bp, Zea Mays
tgcgcactacctgaagacgcattatgctgctattgtctccctcgtcgttgcctcgtgggtcacagtgctcctccactccctcgtcagccacaatgacagccaacaagactggtgtccaggagactgaaaagcactgctgaggagactgaaattatcttcgcgaggtggattacacattgaccacagattcagagaactatggattcatataaaacggcatggaactgattcaaaagaacatgaagtccagtgtgatttgaaaatttgggtatagctcagaagagatttgtgatgattcgaagtatcaaagaaacctgcaacatcaagaatttaaaaatgaaggtgactcgttcatctttgagacgcagcgccacaatggcataagggagctttgccctgcgaatggagagcacaagctaatccgtgcccgtgctctcatccccctgcatgaacccaattctgttgcgatcaaccatcaagggttgtcctattgtattattcagttcattgaaaaggactacaaattagcagatactatgatttggggtctactcaagcattggccagtcagaaactgccaagaggtaattggttttgaccaaattatcaactagatggctctatataaaatggcacacggaattggctgtgagcctgtctgtcaatgtccgaaacgacggcaggcgtgaagcggtggtcgggaaggaattaatgagtagcagcaatgcgtcagacagctacgtatcttcttccgcaatcccattctgacttaattaataaaacaacctttataatagtattatactgactcgatcgtctccaaagtctgaagcaaataaagggtgggtgcgtctccacctatacatatagtataatagtgaggtacccgtagagaccatataaatcagagggttttatatttcaccatttgataagaaaatactcgtattaggaagcttcaaaaaggagaggatattggatcttctatatatcttactttgtcctttatcattttcaaatgccaatcagtgaacaccaaatttcaggtttgttaaatgcctgttaccagtcaggaatgatatattatcttcggataataaataaaataactgggaactaggaattgtaccactatgctgtgtacttagttcctatgtaattctaattccttggtttattcttcaataactaggactggacaagagcttttggacatggttgacagtttgcccattgttgcgataaagagcctaaaagtatctgacttccaaggaacgatagctctctgcccagccaccagttttgagttgtattgagagcaaaaattcacatgctttccgaatgcaaatattgttctcataatttctcccagcagcaactaagccatttatcgcatggagggtcccatagataaaacatattccccaagtgccataccttgcagctttgtcaacattttcttttatttctttactgcggtact

SEQ ID NO: 7262 - DNA, 1954 bp, Zea Mays
aatgccgtgccacttatgctaagtatgcttatcacgataagaaaagaaggaaaaaggtgatggctgagtggagcaattctgttcgtccaattcagtggagatgccactggttagagttgcgtatgagggagctttcatctcaaatatcgaagtatgacaaggagcttgctctaatcaagaaacagaatgaattacaacaggcagcaagcaaagcaaatggtactatgtcagaatcgatgcagattcataaaggccatggaaacagtatcatgaagaggagaaagaggaagaggcatgaggacagtgtggatgcgtccttgtacatcaacaagcaccagatattgtcatactaccatgataaacaaaataagggagttcaaaccggtgatctcttagttgatgacgattgtggcacagttgatggtagtatcagtggtggacttgatactactacattgcttgattccgaggattatgatatgatttgtgagcaacacgctttacaggatattctcctgacaattgatgggcttcagtctcgagtccatctgctgcaagatcgtctcagcaaagctcattctgaaggagaaaatttggcattttctggggccgatactgatgtcagagtggctgggaagagacagcgtactcaaaagcactcattctctaatacaaagtctcgacatactaaaccacagaaaaggaagaatctaaatatcttgctgaaggatgatgatgatggacaagctcttgcaggcggacctgctttggctgatggggaaactgatgtgcatatgataggtgctagtaggagtactgaagaaagaagtggagagtgcaatcactcgagggacaaagccatcacagtggacctactgttgggtactggcaattccataacaaatagtgatattggggatttatacaatgtaaacactgatgatgtcctcatagccaatcaagcagccgttgaagcttgtcagcagtttcatgaggcaaagcatctgccttctggaagtccttccaaagacaagatcatttctgctccagcagaaatgaagaataattctccaccagtggaggtgaagaacacttgcggtccagtaaaaattgagagcttgtgttctccagttgaaggagaaaacacttctgatccagcattggagcaagaatcgttccttgaaaagtcaccctcgaggcagcctgtatccccggggaacaagcaggagctgaaacctaagaaaagacggaagaagaaaggctctttatttactaagaagcagcggaaggtggactccagaacacctgatgcaaaggaaaaaactgagggcacgccctctgatgtagcagaggaaactgagagcccactctctggtgcaacaggaccaggaaccatgaggtcttgctgtgctggaaagaagcgcaaatctggaaatgaacctgcagatgcaaataaaactgggaagccatcctcagcagtgaagaagcagaaaactgaaaacccgactgcagctgcaaatgcgacaaagaagcgggccacggagaagaagctagagagcgcgagtgcctcccagaagctgcaggttgagaaagctgtgcttgtcgctgtaaatagcaggaggagccaaagggtccgtaagcccaaagtttttgctgactgaagaagcaggtagaaagtcttaggctctctattgtgtatgtatcttgtagccccgtcatcaaaatcggtggccatagcaacataggaagtgcctggatcgcctcataagttagtgtacatatatcagctatgtctcacccaaattgtagatttgttagtttgttgttcttaacccttctcttctgggctgccagattaacaatgtcatgctgtgttagcgttatatcaaaaagaagaaaaaaaaaggagaaaaatatgccatgcaactgcaacttggcccgtcgcatctttgtg

SEQ ID NO: 7263 - DNA, 2353 bp, Zea Mays
ggcaacgaggagacccattttgacaaattctctcctcgccctcgcctccacttttgagccacagacccgagcgatcgtgccccggcccccgatcctgattcccacaaatttccgccatggcgatccgcccggactgatgcccgattctccatctgacgatcctcgctctacctacagccatggatactaaggacgagggcgacggtggctccaagaaccaaaacagcgtggtggtggtgaaatccgaggttgtctgcacgaatggtggccctctggtggtcgggactgaacttgtgaaatacgagggaggtgataccactgaatgctcgagctcgtttggtgacacctgctctggatttgaaggtgaggcagacaatggtgaaccagaagtgaattctagcctgtctgctcatgccaatggtgttggcccctcaaaaccccctagaaggaaaaaggtgatggctgagtggagcaattctgttcgtccaattcagtggagatgccactggttagagttgcgtatgagggagctttcatctcaaatatcgaagtatgacaaggagcttgctctaatcaagaaacagaatgaattacaacaggcagcaagcaaagcaaatggtactatgtcagaatcgatgcagattcataaaggccatggaaacagtatcatgaagaggagaaagaggaagaggcatgaggacagtgtggatgcgtccttgtacatcaacaagcaccagatattgtcatactaccatgataaacaaaataagggagttcaaaccggtgatctcttagttgatgacgattgtggcacagttgatggtagtatcagtggtggacttgatactactacattgcttgattccgaggattatgatatgatttgtgagcaacacgctttacaggatattctcctgacaattgatgggcttcagtctcgagtccatctgctgcaagatcgtctcagcaaagctcattctgaaggagaaaatttggcattttctggggccgatactgatgtcagagtggctgggaagagacagcgtactcaaaagcactcattctctaatacaaagtctcgacatactaaaccacagaaaaggaagaatctaaatatcttgctgaaggatgatgatgatggacaagctcttgcaggcggacctgctttggctgatggggaaactgatgtgcatatgataggtgctagtaggagtactgaagaaagaagtggagagtgcaatcactcgagggacaaagccatcacagtggacctactgttgggtactggcaattccataacaaatagtgatattggggatttatacaatgtaaacactgatgatgtcctcatagccaatcaagcagccgttgaagcttgtcagcagtttcatgaggcaaagcatctgccttctggaagtccttccaaagacaagatcatttctgctccagcagaaatgaagaataattctccaccagtggaggtgaagaacacttgcggtccagtaaaaattgagagcttgtgttctccagttgaaggagaaaacacttctgatccagcattggagcaagaatcgttccttgaaaagtcaccctcgaggcagcctgtatccccggggaacaagcaggagctgaaacctaagaaaagacggaagaagaaaggctctttatttactaagaagcagcggaaggtggactccagaacacctgatgcaaaggaaaaaactgagggcacgccctctgatgtagcagaggaaactgagagcccactctctggtgcaacaggaccaggaaccatgaggtcttgctgtgctggaaagaagcgcaaatctggaaatgaacctgcagatgcaaataaaactgggaagccatcctcagcagtgaagaagcagaaaactgaaaacccgactgcagctgcaaatgcgacaaagaagcgggccacggagaagaagctagagagcgcgagtgcctcccagaagctgcaggttgagaaagctgtgcttgtcgctgtaaatagcaggaggagccaaagggtccgtaagcccaaagtttttgctgactgaagaagcaggtagaaagtcttaggctctctattgtgtatgtatcttgtagccccgtcatcaaaatcggtggccatagcaacataggaagtgcctggatcgcctcataagttagtgtacatatatcagctatgtctcacccaaattgtagatttgttagtttgttgttcttaacccttctcttctgggctgccagattaacaatgtcatgctgtgttagcgttatatcaaaaagaagaaaaaaaaaggagaaaaatatgccatgcaactgcaacttggcccgtcgcatctttgtg

SEQ ID NO: 7264 - DNA, 2156 bp, Zea Mays
tagtcccgacccgtcccaccctatcagttgcgggcgcgcgtccctgtttcgctcgtgccgttgcgctgcgccaagcctccccacctctctcgtctcttctccacccgccgccctcgtgggagtgaaaccctagctagggttctgcccgccgccgccttcgatcaagacgcctgcagccttagcgcgagcccgccatggacacaggacgcaagcgcatcgcgccggggggcgccaacggcgcgggcggcccgaagcgcgcgagaggtgagcagcttctctagctccggggaatatggattggctgttgcttcacggaaggttcggctctctagggtttatagctggtcttcgttggtcggatctgcactccgtcgttcgcgacttcgctgggaactgcggagatccgtggcttttgctgctgcattggttttcgtgttttctctgattattgggagtattgggagtttggaaagacctagaatgtttttcgtgttttctctgattggtttacgtggtagctgaaggcttgatctcgtttaggtctatccacgggattttgctcgctggacgaaaatttgagggatgaaacgagacgtagttgacgtgctagattgagattgctactgttctgttttgatagatctttcggccttttaatgctttgttgaacttttaatgcttctttgctgggctaggtagaagttctccttttagtgctttcagtggtttaagcaagtatgatttttctaataacaaatcattggattggaccactgcttgcatactggaagatataagcagcattggtgaccttttaatgtgataatcccaatgtttcttcaatgaattattatctatttatattcgtattactttaccaagcgacatgatttagtaaagcaacacattattaattggcggaagtaataaatttggtgtaacagaatcggagacaactcaaatgggtgtaggaagcaaaaccaagccgtgcaccaaatttttcagcactgcgggttgtccctttggttcaaattgccattttctccataacttcccgggtggctacctggcggtttcaaagatgaccaacttgggtgggccacctgttccggctcccccaggaaggatgcctatgggacctggtggtcctgatgggccaccttcacctgctctgaagactcgcttgtgtaacaagtacaacactgcagaaggatgtaaatgggggagcaaatgccactttgctcatggagagagggagcttggaaagcccctgcagatggacaactcgatgggagctcctccaatgggtccagggccaaacggtcacttcatgccacctccaatgcctatcccagacatggttcctcactccacattcggtgcttcggccacagccaagatcagtgtcgatgcatcccttgctggcgccatcattgggaagagtggtatcaacacaaagcatatatcccgagtgactggggccaagttagccatccgggacaatgaggctgatcccaaccataaaaacatcgagctcgagggaacgtttgaccagatcaagcacgctagcgcaatggtcacagagttgattgtccgcatcagtggtaaggtgcctccacaagcaaagaacaacccaggcagggggcctggttctcatgctgggggtcctgcaagcaacttcaagaccaagttgtgcgagaacttcaacaaaggctcctgcacctttggagacaggtgccactttgcccatggcgaaagtgagttgcgcaaacctgctgctgcttgatagatgtgtttagtgtggcttgcggtgattactctgcctgtgtggctgaataacaccacagtcgcctatggtgagatgtactgggccacgtgctgcctgagagagatcatttccatcgcttgcgtagagacaatggccgttttttaggatttgtaggattgccgtattgttctgttcgatttatatctaaccctgccagaatcctatttttgtaccgtttcttagctactaattggtgccagatcattgtggttctgttgactcgagaatagttgctatcgatggtatgggtttgtgaattattgatagcatttttgaaatccagatagctaagctgaaatccagacatcattagtgttcagttgatggt

SEQ ID NO: 7265 - DNA, 1373 bp, Zea Mays
aaaatagaaaaggtggaaatttaggaagcaaacaaaagctccgctgccttgtctgcaatggcgtctggcgcttttcccacgagcgccccctgcccttctcgctctcctccataggcagacgccgcgctcccccaacgccgctccgccgaccccagtcatatctcccgcccccagctgaggcaatggggtcctcgtcctcgccgtcgccgccgccgccgcccatgatcgggcgggccgggaacctcaccgtcttcatcacgccgccgtctcctgctagcacgccgcggggcgctttgcgcacgccgccgcccgagtctccgcgctcggatttctctacacccacccgacagaggatagccccgtcgccctccccttctccctcgccgcagaaacacgagagcccgttcgcggcgcctgcggtggtgttcaccccgcccccgccgtcggctcctgtgaaggtcgcgccgccgccggtgcaggtgccgccgccgcagtacgagaaggcgtccgcgggaggcaagcacgacggatcggcgtttggcttcttctgggacgccgtcgcgcgcgtccaggaagcgcacgccagcctcgacgagtacatggctacctggttcgggttggatcagtccaagtaccagtgggcgctcaacgactactacgaggccacaggcaaggacgtggattgtgtaaagggtagtaagctgaaggagcttactactaaagtgcagaaagtctgaaaaaaaagcaactttgttttgtgttgaagaggtgtagcttgtagcgtatgtctggagaagcatgttccattagttacattttggtgggggccttcttgaaaagtggccatctctgcttcgccaggcagttggacaactggaggccgcggttgaatcaaaggagcggccgttgtttcgttccggtgtttaggatctgctgtaatcctaagatagcaaaagcacgcccataacttgatgtggcaggcgatggtacacaatcatcacttcgtttccgccagacctggctcagggttgtagatcggaggcgcttcccttctggctccttgttgtaaagctgaagagctcacgaattacgatcgtacactgcgttcccttgttgcttgtccggaccggctttggcatatgctgaattgcatgggcgaacacagcagaaatccagcgtcggtgttcagggtaatgcatgtactagtctgcatccaggtttatattcatcatttgttgtatgcatggactctcatgtagccttgcagtttctaaatcagaattacgttataaggctatttttagcaacttatccccatccctcatttgaaactccactctaaaaaaacatcacagtctacagtgtctacagtg

SEQ ID NO: 7266 - DNA, 913 bp, Zea Mays
caagcctccaacaaacaactgttaccggatgatggcaacaaaagatgatgctcagaggatgaaacaagcagcaaagtagtaggaactttacccaagggtagcattttgtggatataccatccctcatccttctgagaagaaagtgaacataagacttcagacaacaggagatgcagcaaaggatgtactgaaagatgccttgcagaatctgatgattatgtgccagcatgtcagagggacaatggacaccgcggtggttaaccatagagcaaaaaatgctgcagaagaaatggatgttgatcagaactagaatgaacgcagtgtttgttgagaccaaacacaatatcattacagcttttagtactggtcagaagctcggagagctcagtcattgttccagttgtttgtaggagtaacggtcgtattcattggcttccacttctgcaatactgaaacttcttcagtttactgcataattgcttttagcaacatctatactactgcttatgtctttagtgtaggcgtccatattttttgttctgccatcgtgcggtctgcctccctccccgtgcccacagtccccaccgccgagcacagccgccgcgcccgcagtcctgcggtccccgccgccgagcacagccgccgcagtctcgccgcgcccgcagtgcgacggcggtgccggtgagggggagccgtggttctacttctgcccgtggcaggagcgggaggcgcggggcgggcggcccagccggacgacgctgttggggtactggaaggccgctggtacgctcggggccgtctactccgccgaccgccgcgccatcggggtgaagaagaccatggtgttctattacggccgcgcgccgtcagggaccaagaccaagtggaagatgaacgagtacatggcgttcca

SEQ ID NO: 7267 - DNA, 1096 bp, Zea Mays
gctgaagtgctgatgctgtttttaatcatgctacagtagaatcgtccatcctgctcgcttgtctttctgagctgtgcatgcacaacgatttgggcttgagtggtggtgctaaagtctccatgggatgagcttgagtccgctgctcgcccgaccggagtgaggcggcgcggcgatggagcacgggtcgttgacagactcgacgtcgtcgactttctccatcatggacgaggaccacaccctcgccaactccgccagattcgtcctcaaccaggacccaagggtagcattttgtggatataccatccctcatccttctgagaagaaagtgaacataagacttcagacaacaggagatgcagcaaaggatgtactgaaagatgccttgcagaatctgatgattatgtgccagcatgtcagagggacaatggacaccgcggtggttaaccatagagcaaaaaatgctgcagaagaaatggatgttgatcagaactagaatgaacgcagtgtttgttgagaccaaacacaatatcattacagcttttagtactggtcagaagctcggagagctcagtcattgttccagttgtttgtaggagtaacggtcgtattcattggcttccacttctgcaatactgaaacttcttcagtttactgcataattgcttttagcaacatctatactactgcttatgtctttagtgtaggcgtccatattttttgttctgccatcgtgcggtctgcctccctccccgtgcccacagtccccaccgccgagcacagccgccgcgcccgcagtcctgcggtccccgccgccgagcacagccgccgcagtctcgccgcgcccgcagtgcgacggcggtgccggtgagggggagccgtggttctacttctgcccgtggcaggagcgggaggcgcggggcgggcggcccagccggacgacgctgttggggtactggaaggccgctggtacgctcggggccgtctactccgccgaccgccgcgccatcggggtgaagaagaccatggtgttctattacggccgcgcgccgtcagggaccaagaccaagtggaagatgaacgagtacatggcgttcca

SEQ ID NO: 7268 - DNA, 1867 bp, Zea Mays
ttttacgcaatccatgcccgtgtctttattcgcggccgccgacctccggagcatgagaaaaatagaaaatcccttcaaaccctaagcccctctctgctcacctctgcactccgaatctgctcccaagtctgctagggtttaacgcccgcgtcctcctcacgcattcggtctggtcgctgatcttcgcttgttcgattccgctcggctctaggacccaggctctcgaggcggctggagtggcggcgcgacgagagggtgaagcggatgcagacggaggcgagggtggggatggccgccgccacgatggacggcaccggcgccgcggcgtccgccgcccggaggtacacgacgcagcagcagcagcagcagcagctgcagcaccaccagccgcagctcgggaccgtgccccatctcctcgccggcggcgtcgctggcgcagtcagcaagacctgcaccgccccgctcgcacgcctcaccatcctctttcaggtacaaggaatgcactcagatgtggctacaatgcgcaatactagcatatggcgtgaagcatcccgcattgtctatgaagaaggttttcgagctttctggaaagggaaccttgttaccattgctcaccggttgccttactcttcaattagtttctatgcctatgagagatacaagaatatgttggtgttagattgctaggtggtggtttatcaggaatcactgcagcttctgcgacgtatccactggacttggtgcggacacgtcttgctgcccagacaaatactgcctactacaggggcatatctcatgctctttatgcgatctgcagagatgagggtgtccgtggattgtacaagggtcttggtgccactttactgggagtgggccccagcattgcagtaagcttctctgtgtatgaaactttacgttcccattggcaaatagagaggccatgtgattcccctgttctgatcagtttggcttgtggaagtctttcaggaattgcatcgtctacttttacattcccattggatcttgtgagacgtcgcatgcaattggaaggagcagccgggagggctcgcgtctaccagacaggactttttggaaccttcggacatattgtccgtacggagggttttagaggcatgtatagaggaatcttgcctgagtactgcaaagtggttcctggtgtcggcatcgtatttatgacatatgagatgcttaaggccatcctcacaggactggaatctgatgattagatatctgcgaggtcatgctacgcaattttgatacatggtgtcagaacaacatttgaggctgattagactgggagaaatatgagcatgtagcatacgttagggtttaggatgtgctaaggtttgcagtttgtgttatatggttacagatgtttatgtagtgcaccgtgaacgatgccacaggtcttccaaaatgaatatttttttggcatcaccatcattttgtgtatcttcaataacattgtaatggtacatgaagctgttgtctttagcctgatgatctttataactgtgagatatggtctccaattttaccagtgttatagcaaggttgatcaatggtggcaagagaactgtgaatagccttgacttgatatatgtttatcctgatatgaccatgggtctgtttcttgcatatcagtttagcaacttctcgttgcaggtgttcgtttatctccattttgtgagcgagaacccaatggctagtaatggaccacttcattttgttctcttttttttcttgctttggaaaccaaattgtttattttgttgagttcagaattgatccaatgacccaagagaaggcagaactttcatttgttgttagaatgatattcatatgc

SEQ ID NO: 7269 - DNA, 1927 bp, Zea Mays
ctctcctaaaactctacctgcggggggtaagacagcctccgagcattatattaagaagaccgtcgagaaaacccccgaatccctggcccacccatacaaagcggtactgtagcccatgtgagaacactaccgcgaccggaactggaccgtagacctgtgctttgtcgttggacagacgaggggattttttaaccacagctgaaattcgctcccacggaaagtcgaacctaggacctgaggagtgctactcagaccacctaaccaactcggctttacctatttctttgtaggtgcaagtgttgaacttcatttcagttcttcttgaacatgcgggggacaaggttattccatttgcatgtcagctatcacaattttttcagatgatatggaatgaatctgcgggtgaaagcttgctacagatacaattactaacagcacttagaacttttgtttcttcgcttggattccagtcacctctttcttaccacatgcttattcctatactgcaaagtggtatcaatattgacagccctgatgctcttaatcttcttgaggacagtgttttgttgtgggaagcaaccctttcaaatgccccttccattgtacctcaacttctggatttattcccttaccttgtgggcatcatgaatagaagctttgaccatctggaggtcacaatgaaaataattgaggattacattatttttggcggttcagaatttttgaaaagccatggtgcaagcctagctaacatcattgatactattgttggaaatgtcaatgataaaggacttctcactgcacttcctattgttgatcttcttattcagatatttcctctggaagctccaccattgatatccagtgctcttcagaaacttaccttcatttcgttgagtcaagatgatggccaaaacccgtctaggacaactgtccgagcatcctctggggcgattcttgctaggcttctggtgatgaatacaaacttttcggcacaactattatcagagcctgctcttttggcaagcatccaacaagcagggatttctgtgaacaataatctgcttttttctttggttgatatgtggatcgacaaggtagatgacgcaaatgctatacagcagaaggaatacgcaatggcactttctgtaatcctgacattacaggtacctcaggtcattgacaaacttgatgacatactgagtgtctgcactactgtcattataggaagccgtgaagtaaagactgatgacgatactagcggcgatatcacaagctcttcatggataggcaacgatggttcaggttattccaacacttcaagcaaagagctgagaaagcgccaggtaaaggattcagatcctatcaaacaaacatcgctagagatggtgttaagagagaacttaaaagcatgtgctgttttccatggggatgcagcattcaacgctgccatcggcaggatccatccatcttcgtttgctcagctgcaacaggccctgaatactgcataagagtgcatagctgcttactggattgtatggagcattacgtggagcaggcattgctttgtgctgacagacagttgaatcgcggtatgacacagcagtgcagtgcagagagagcatgtcctgatcttccgaaatataattggattggattggattaccgcggtcaatgtggatggccagagtttttatagctgtccttccaacatgactgactcgatcttctcccctcccccttctcaaatcatggccaggcatccatcctagttgatttttatcccttgtttagcgaggtgacgccgagattgttgtttgagaaggaaatctggaatgcaattttgttgtacgttttatgttcccattaggaataaaaatgttctttacattcacgtatatctagattctcaaatatttgtcgacaa

SEQ ID NO: 7270 - DNA, 1454 bp, Zea Mays
ttcggccgagcagacccgtggcctcactcccccgcgcgttagggttccgctctcatccttcgtgcctgctcaccgccgccacttccagctaggccgtcgtcgccgcgccccaccaggttctcgcgttttccccctctccaagcttccatccttccctcttaccttactggcgggtgttgtttctgtacccggtggttcatctcgccgcggccgattagctgttattcacggaatcgtcttctggtactattcgttcccccttctgacttgcttcttaactacactacctgtcatccagtagccctgttcgtcgtcgacactccagttcgaataaggtacatctgcagcgggaaggcccagacgaaggagaagagcacggggatgtaccagagcgccacggtccccgccaccgccgagatgtccgggtcctgccccagcgccaccagcagcggctccgtgaacaggtacacggggagctgcaccacggcgcacgccgacaggatgatccacgaccgctgcaggtagatgcccagcatgtggtactgcttcgccccgtacgactgcccgcacagcgtctccagcgcgctcgccatgcccagctgcatgcagatgcatatcgcgcccggccggacgccgacgacgcggacttgttggaacagagccgtcgtcgaccagtcgacgcctgggtgcctggccattttcttcgccgaagaagggaaaaagaagccgccgccaagaccaagagggaagaagaggaagcagcagccaagagagcaattggaacatgactgttgggatcggcacgagatgtcgtcgaggcggcggcaagctttattgattccaatgttttttttttctatctagcttgtccggcacgagttggtggctgactttattcgggctctgaaccgagagcacggatcgatcttttgaatcgaatgctgctggcgggggcgggccgcctggagctcgacgaacgaagggcaagacgacatcgactacaaaatggtccccgatcgtgttgtgcagcgtgttgctcgtgatcactatacttgcatgcatctttgaatttgaatcatgcatgcgtgcatgtccgtatatagatccacaacatgggctgtactttttttgaaaaaaattgtttcgtctttctcttttttgcgaacgataattgtcggcacgtttttttttcgttcggaggccggtgttagagagtacacatgtgaactgtctgtccacttctctctccgttagcttaatcttgtgttctaacgagagagagagtacgtgtgtgtgcgtgtatggagggagttatgcgaacaagaatcaagaacgaatggattgatagaaagacacgtacgtaccaggatgccgttgctgaacctcatgaggacggtggagacgagcgcgtaggcggcgagctcggtggcgccgatgtggccgatgaaggcctg

SEQ ID NO: 7271 - DNA, 2386 bp, Zea Mays
ttcggccgagcagacccgtggcctcactcccccgcgcgttagggttccgctctcatccttcgtgcctgctcaccgccgccacttccagctaggccgtcgtcgccgcgccccaccaggttctcgcgttttccccctctccaagcttccatccttccctcttaccttactggcgggtgttgtttctgtacccggtggttcatctcgccgcggccgattagctgttattcacggaatcgtcttctgcttcttaactacactacctgtcatccagtagccctgttcgtcgtcgacactccagttcgaataaggctctgagagcacctcaccttcacatgaagccccaccacgtagcctaggactgcgccaagaggaatgccgatcaggtagtacgacgtgacgttgacgtacgcgactacgccttgccaaccggcaccaacagcgacacctgacagcacgggctggacgctgttgagcagtatggagaaggccagcaggggcgagaggtcggcgacggctgcggccaccgcctggctctcggtgaatatgtaggcgaggctcccgcggaagaagaggaagagcacgaacagcacgagcccgatggcgaaggaggtgacgaccacgttgtagatcgcgaacttggccctcctcgcgctcccagctcccagctcgttcgccactcgcactctgaaaaagatagccaggaagcctatggagatcatcatctcccaaccattgatgttaaggctgcacatttagtaaagcagctagcaagtgatgaaagtgtagagtgatctgtggacattatcattagggttcctttaatattaccatatcgaaagggcgtcaagtgcgatctccgcattcttcatgtatcctgtgaggagcaccagtatggtgttgtaccacaattccaagctgaaagaaaaaaagactacgatgcggatggataccatccacacccacagaccacagtggcttgctttgcttaccagagcatgacaccagaagagagcgagagcctgacgatggcgccgaggtcggcgaaggcggcggacgagaatccggtccaggtgagagggcatccgccgaagaagacgaaggcgagctggccgaacacggggatccacatggcgacgaccatggagcccatgacgccggcgaggccgaggcggaggtggacggcggcgagccaggacagggcgaggtggaggccgaggttgagcatggcgaggtacgtgatgatcatgttcttgatctgcgcctgcaggtacatctgcagcgggaaggcccagacgaaggagaagagcacggggatgtaccagagcgccacggtccccgccaccgccgagatgtccgggtcctgccccagcgccaccagcagcggctccgtgaacaggtacacggggagctgcaccacggcgcacgccgacaggatgatccacgaccgctgcaggtagatgcccagcatgtggtactgcttcgccccgtacgactgcccgcacagcgtctccagcgcgctcgccatgcccagctgcatgcagatgcatatcgcgcccggccggacgccgacgacgcggacttgttggaacagagccgtcgtcgaccagtcgacgcctgggtgcctggccattttcttcgccgaagaagggaaaaagaagccgccgccaagaccaagagggaagaagaggaagcagcagccaagagagcaattggaacatgactgttgggatcggcacgagatgtcgtcgaggcggcggcaagctttattgattccaatgttttttttttctatctagcttgtccggcacgagttggtggctgactttattcgggctctgaaccgagagcacggatcgatcttttgaatcgaatgctgctggcgggggcgggccgcctggagctcgacgaacgaagggcaagacgacatcgactacaaaatggtccccgatcgtgttgtgcagcgtgttgctcgtgatcactatacttgcatgcatctttgaatttgaatcatgcatgcgtgcatgtccgtatatagatccacaacatgggctgtactttttttgaaaaaaattgtttcgtctttctcttttttgcgaacgataattgtcggcacgtttttttttcgttcggaggccggtgttagagagtacacatgtgaactgtctgtccacttctctctccgttagcttaatcttgtgttctaacgagagagagagtacgtgtgtgtgcgtgtatggagggagttatgcgaacaagaatcaagaacgaatggattgatagaaagacacgtacgtaccaggatgccgttgctgaacctcatgaggacggtggagacgagcgcgtaggcggcgagctcggtggcgccgatgtggccgatgaaggcctg

SEQ ID NO: 7272 - DNA, 2496 bp, Zea Mays
gaggaaaagcaaagccaaaggcactccactccactccaccctatgcactgccgcccctgcccgtcccagctctcgctcgtctttctcctcctcctctcgctcgcacccatcatttcggcactccccttcccggagccagctcttccgatggcgtgcagcggcctccgcctctcgctccccgccgccgtcctcgccctcctcctcctcccctccgcgctcgcttccgagcccctcaaccccgaagtgcaggcgttgatcgccatcaggcaggggctggtcgacccgcacggcgtgctcaggagctgggaccaggactcggtcgacccctgcagctgggccatgatcacctgctccccgcagaacctcgtcatcggcctgggagtgccgagccagggcttgtcggggactctgtccgggaggatcgccaacctcacccacctcgagcaagtgctgctgcagaacaacaacatcacggggcggctgccgccggagctgggcgcgctgccgaggctgcagacgctggacctctccaacaaccgcttctccggccgcgtgcccaacacgctgggccgcatcaccaccctccgatacctgaggctgaacaacaacagcttgtccgggccgttccccgcgtcgctggccaagatcccgcagctctccttcctggacctgtccttcaacaacctcactggccccgtcccgctcttcccgacacggaccttcaaggacagggacaggggcggcggcagcgggcaggtcaaaggctgctggcgcgcggctgccgatcggcgtagggacaagcctgggcgcctcctcccttgtgctcttcgccgtgtcctgcttcctctggcggcgaaagcgccggcacacgggggggcggccctcctccgttctcggcatcatccacgagcggggcggctgcgacctggaggacggcggcggcggtggcgtggtggcggcggcggcgcggctggggaacgtgcgccagttcgggctgcgggagctgcaggcggccacggacgggttcagcgccaagaacatcctgggcaagggcgggttcgggaacgtgtaccgcggccgcctcgccgacggcaccacggtggccgtgaagcggctcaaggaccccagcgcgtcgggcgaggcccagttccgcacggaggtggagatgatcagcctcgccgtgcaccgccacctgctgcgcctggtcggcttctgcgccgcctcgggcgagcgcctcctcgtctacccctacatgcccaacggcagcgtcgcgtcgcggctgcgagggaagccggcgctggactgggcgacgcggaagcggatcgcggtgggcgccgcgcgcgggctgctgtacctgcacgagcagtgcgaccccaagatcatccaccgcgacgtcaaggccgccaacgtgctgctggacgagcaccacgaggccgtcgtgggcgacctgggcctggccaagctgctggaccacggcgactcgcacgtcaccacggcggtgcgcggcaccgtgggccacatcgcgcccgagtacctctccacggggcagtcgtcggagaagacggacgtcttcggcttcgggatcctgctgctggagctcgtcacgggccagcgcgcgctccagctcggcaaggcctccggcgccctgcacagccagaagggcgtcatgctggactgggacctgggcccacactacgacaggatcgaggtggccgagatggtgcaggtggcgctcctctgcacgcagttccagccgtcgcaccggcccaagatgtccgaggtggtccggatgctggagggagacggcctggccgagaaatgggaggccacgaaccggccgggcgtggccgcgggggcgccgtgccacgacgcgctcggctacgaccaccgcaacgactccaacggctccgtcttcttcaacgacttccacgacaacgacagcagcctcagcagcgacgaagcgcggtcgatcgacatggtggaggagatggagctgtccggaccaaggtagcaagcaagcagcccttgccgctgggcgggaagagccactcccttgatatgatagcatcaaattcaaaattcagatgttccgagagcttcaaaaaaaattacaggtagagagagagaggtgtcgagttaagagttgttgcgagtcagtttggaattaaaggtattcctaggtgctttagggtctagagttcagaccacagttgtgtagtttctggtggagccgtccttttccctttgaaaaaaagatgtaaagaaaaaggatggcttctcttttgcttcttttcacaggtttctttttcttttgctgctgctgctgctctccctgctgatccagtgacacaagcacatgcagcactgcagtcctttggtattccggtccactgatctagggtaaccttttgcagcgcaaggatgtatgtagggaatgtgttgcaagtagcgaggcatgcagtcattttgactgcttttgtgacctgtaaaggtcac

SEQ ID NO: 7273 - DNA, 1936 bp, Zea Mays
acggtttccctccacaaccacttgctcctcatctacttttctcctccgccttaaactcatccttgctcctgcctgccgtcgtgcatcatcatctccggccagggccagggcattcgtctccgcctccggtccggcctcctccactccgcgcccccccagacgcgtcgctgcgtagctgctggccgccatggccaccgtcatggccgcggccgcgtccgccgtcgaggcgcccgccacggccaaggccaagaaggagtccaagaagcaggaggagggcgtcgtcaccaacctatacaagcccaaggagccgtacgtcggcaggtgcctcctcaacaccaagatcaccggcgacgacgcgccgggggagacgtggcacatggtcttcagcaccgaaggcccttctttgcctgcgcgaggtctcagaatccggggggaaaaagaaaagaaaagaaaagatgatgactgtctctacctcttgctacatgtgccgcttcctcgtccgggctcctccgctcaagtccaggagtgcagtgcgctgtccaagcgccgccccaccaggtgctagcggtgccacctccacctccaagacacaggatccagttgaaaaccagaagctatgtgcctatttggttgagaaggcagtcaacagacttccgccaggagcagagaatatacttgggatctttgatctgcgaggctttcgggttgaaaatggtgatctccagttcctaaagtttttgatggacgttttttactattactacccgaagcggcttggccaagttctttttgtcgatgctccatttgtttttcaaccaatgtggcaggttgttaaacctctattgaaatcatatgcctccctggtaagattttgtgatgccgagactgtgaggaaggaatacttcaaagaagaaacggtgcctcctgatttccgcgattagaaatgtgcaggtggtctcggaaacatgacctttaattgattcagaatcgattggcacccaggggggctggcgccttcctataccttttgattaacttctcaaaagttgctcagacggcagcaaacgattggagagtccagtaaaaaatgaccctgtacttgtataacttctgcgaagtagaatgctgagtttaggctggtgtctggagtgctcctgtaccatatttttctggttttggatgaagctatatggaccaaattcatctctgttgaacaattgccaattacataacttgtgtttgcccaattccatggtgtagtaccataacttctcagtgcagtgcagacaacacatggattccattttttgattaaagtatcatctgctacaaatatgaatcatggcttagtttgtagacttcataaagaaacacacagattaatcaaaccagtcttcgaagagtctctgtggataggaacgttccaaagcaaagtaagatgcaagttgtattgcataaaaaccaggtacacatcaatcagctgcattctggaagactaaactgcaacacaactacatctgcaatcacagagaaatcaggggctcattcaagtactctactgatcgaaaatggatggcgtctgtgatggttcattcttttgcacgtcttctacacgggtacattgacggttgatggagatggatggtggtgtagctgttttgtttagcaattagcactctaggtgttggaccactgttttgttaatggatgctatgtaacagtagtatgtaactaatgtgaacttgtttaggttgctgtgaaactgttatacaacacattgttatggggttgttacacagctgatatgttatgaacatgatatggagatatcttttcctttttggtttgggttttactgttgtgccattcgtctcataagttatgccattttattatttacttttggattgatatatattcgtctctgaagccttcc

SEQ ID NO: 7274 - DNA, 2344 bp, Zea Mays
acggtttccctccacaaccacttgctcctcatctacttttctcctccgccttaaactcatccttgctcctgcctgccgtcgtgcatcatcatctccggccagggccagggcattcgtctccgcctccggtccggcctcctccactccgcgcccccccagacgcgtcgctgcgtagctgctggccgccatggccaccgtcatggccgcggccgcgtccgccgtcgaggcgcccgccacggccaaggccaagaaggagtccaagaagcaggaggagggcgtcgtcaccaacctatacaagcccaaggagccgtacgtcggcaggtgcctcctcaacaccaagatcaccggcgacgacgcgccgggggagacgtggcacatggtcttcagcaccgaaggcccttctttgcctgcgcgaggtctcagaatccggggggaaaaagaaaagaaaagaaaagatgatgactgtctctacctcttgctacatgtgccgcttcctcgtccgggctcctccgctcaagtccaggagtgcagtgcgctgtccaagcgccgccccaccaggtgctagcggtgccacctccacctccaagcttgtcctagaggtgaaagaacggctagcaagggagcacccaggcctccccacgggcaggtacgggagggacgatgacgacatggtcctctggttcctaaaggaccgcaagttctccgtcgatgaagccgtctccaagctcaccaaggcgattaaatggcgtcaggactttggtgttgcagagttatcagaggaatcagtgaaaagcctgtaccaaactggcaaggcatatgtacatgattccttggacatttatggccgacctgtgctgattgtagtggcagccaaacattttccttcgacacaggatccagttgaaaaccagaagctatgtgcctatttggttgagaaggcagtcaacagacttccgccaggagcagagaatatacttgggatctttgatctgcgaggctttcgggttgaaaatggtgatctccagttcctaaagtttttgatggacgttttttactattactacccgaagcggcttggccaagttctttttgtcgatgctccatttgtttttcaaccaatgtggcaggttgttaaacctctattgaaatcatatgcctccctggtaagattttgtgatgccgagactgtgaggaaggaatacttcaaagaagaaacggtgcctcctgatttccgcgattaggtggtctcggaaacatgacctttaattgattcagaatcgattggcacccaggggggctggcgccttcctataccttttgattaacttctcaaaagttgctcagacggcagcaaacgattggagagtccagtaaaaaatgaccctgtacttgtataacttctgcgaagtagaatgctgagtttaggctggtgtctggagtgctcctgtaccatatttttctggttttggatgaagctatatggaccaaattcatctctgttgaacaattgccaattacataacttgtgtttgcccaattccatggtgtagtaccataacttctcagtgcagtgcagacaacacatggattccattttttgattaaagtatcatctgctacaaatatgaatcatggcttagtttgtagacttcataaagaaacacacagattaatcaaaccagtcttcgaagagtctctgtggataggaacgttccaaagcaaagtaagatgcaagttgtattgcataaaaaccaggtacacatcaatcagctgcattctggaagactaaactgcaacacaactacatctgcaatcacagagaaatcaggtatacgaccaattgttatctattgtaaatattttgttttttaggtcaacaacggagagggtcaagcgatccccacgtacagatgccagcatggtcttttacatggttccaagaggaggggctcattcaagtactctactgatcgaaaatggatggcgtctgtgatggttcattcttttgcacgtcttctacacgggtacattgacggttgatggagatggatggtggtgtagctgttttgtttagcaattagcactctaggtgttggaccactgttttgttaatggatgctatgtaacagtagtatgtaactaatgtgaacttgtttaggttgctgtgaaactgttatacaacacattgttatggggttgttacacagctgatatgttatgaacatgatatggagatatcttttcctttttggtttgggttttactgttgtgccattcgtctcataagttatgccattttattatttacttttggattgatatatattcgtctctgaagccttcc

SEQ ID NO: 7275 - DNA, 2636 bp, Zea Mays
acggtttccctccacaaccacttgctcctcatctacttttctcctccgccttaaactcatccttgctcctgcctgccgtcgtgcatcatcatctccggccagggccagggcattcgtctccgcctccggtccggcctcctccactccgcgcccccccagacgcgtcgctgcgtagctgctggccgccatggccaccgtcatggccgcggccgtctagtccttcccgtcctcctcggccgtcgtcgccaaggcgtcgccggcgtccccctgtgccgccccgcacttccgcccgagggccgtgcgggccgctatccgggcgcaggcgtccgccgtcgaggcgcccgccacggccaaggccaagaaggagtccaagaagcaggaggagggcgtcgtcaccaacctatacaagcccaaggagccgtacgtcggcaggtgcctcctcaacaccaagatcaccggcgacgacgcgccgggggagacgtggcacatggtcttcagcaccgaaggcccttctttgcctgcgcgaggtctcagaatccggggggaaaaagaaaagaaaagaaaagatgatgactgtctctacctcttgctacatgtgccgcttcctcgtccgggctcctccgctcaagtccaggagtgcagtgcgctgtccaagcgccgccccaccaggtgctagcggtgccacctccacctccaagacacaggatccagttgaaaaccagaagctatgtgcctatttggttgagaaggcagtcaacagacttccgccaggagcagagaatatacttgggatctttgatctgcgaggctttcgggttgaaaatggtgatctccagttcctaaagtttttgatggacgttttttactattactacccgaagcggcttggccaagttctttttgtcgatgctccatttgtttttcaaccaatgtggcaggttgttaaacctctattgaaatcatatgcctccctggtaagattttgtgatgccgagactgtgaggaaggaatacttcaaagaagaaacggtgcctcctgatttccgcgattaggtgacatgattatttcttcagtaattgcaaggcagttctacctctgcctttgtgtaacgattgaaattctaaattgtgcagattatttttagttcttccaatccctcctaaaagctattttgcagaaatgtgcaggtggtctcggaaacatgacctttaattgattcagaatcgattggcacccaggggggctggcgccttcctataccttttgattaacttctcaaaagttgctcagacggcagcaaacgattggagagtccagtaaaaaatgaccctgtacttgtataacttctgcgaagtagaatgctgagtttaggctggtgtctggagtgctcctgtaccatatttttctggttttggatgaagctatatggaccaaattcatctctgttgaacaattgccaattacataacttgtgtttgcccaattccatggtgtagtaccataacttctcagtgcagtgcagacaacacatggattccattttttgattaaagtatcatctgctacaaatatgaatcatggcttagtttgtagacttcataaagaaacacacagattaatcaaaccagtcttcgaagagtctctgtggataggaacgttccaaagcaaagtaagatgcaagttgtattgcataaaaaccaggtacacatcaatcagctgcattctggaagactaaactgcaacacaactacatctgcaatcacagagaaatcaggtcaacaacggagagggtcaagcgatccccacgtacagatgccagcatggtcttttacatggttccaagaggaggtaaatcgagtgtagccctaaaaagatctgccttgtgccacttcaacactttaacccagatgcaataaaaaaacactttaacccagatgctgcattgtggtgtggcaaaggcttgagaatatgacaataacagctgctcaaaaactgttggtaggaacatttatagcagcaaaagaacaaaatggaatgtgtggtttcttatctgccttagatgagataagatttcggacatgtgtattcatgttttcgagtgatttggcactatgaatgcgctagatggttggttgcttttttttgttaattgctcaggtgatatatgctgtatttctagtcactagtgttgtattgtttgtgcttgtgctaagatgatctcttttgcacttgtaacaggggctcattcaagtactctactgatcgaaaatggatggcgtctgtgatggttcattcttttgcacgtcttctacacgggtacattgacggttgatggagatggatggtggtgtagctgttttgtttagcaattagcactctaggtgttggaccactgttttgttaatggatgctatgtaacagtagtatgtaactaatgtgaacttgtttaggttgctgtgaaactgttatacaacacattgttatggggttgttacacagctgatatgttatgaacatgatatggagatatcttttcctttttggtttgggttttactgttgtgccattcgtctcataagttatgccattttattatttacttttggattgatatatattcgtctctgaagccttcc

SEQ ID NO: 7276 - DNA, 2481 bp, Zea Mays
cgagtcttgagtaacgccccacctcctccccactgatgagagaggagaaatttgaaatcgggaggaagcccgccgacaaccccaaatccccgttgctcctgctcgtcttgtcggcaggccgccaatcactcactcctatcctatccgccgatggccgcggccgccgccgaggatgagaaggggctcctgtcgtcggtagtgggcgacatccggtgctactccggctccgaccccctccgcccgtggctccgggggatgcggaggatggagagggcgctgccgccagcgacgctgcgggagaagctgcccaggttcctccagaagtgcgcccaggagttccaggacaactcccgctaccgcgacgacccgcggtacctccgcgtctggatccagctgatggactacgtgacggacgcaaagccattgctcaagacgatggagaggaatggaataggcctcaaaagggcttcgttctatatggcatatgcactgtattatgagaagcacaggagattcaatgatgcagagaagatgtaccgtttgggaatccagaaccttgcagagcctattggggagttgcacaaagcacatgaacagtttcgtttccgcatggattcatacaagaagaaagataaactgcaggaaagaatgcctaggaaagtggggtctagtgctacatctatgaaccaagtcaaaggtgaaagcagacactataaagaactgaaatccaatataaagcaaacatcagaaagcagttctaatccttcattagggccaactaaagttggtgttctctccagaggaaactcaggagcaaacaataatttgccccgttgtaatagtgatgatactgtcgttgtacggtttataggctctgctttggttgggaagtcagagactgaagatgcctgtcaccacggcctagttgagccaactataaacactaaagaggctttggatgccattaatagcatgtttatggagccactggaacctgaaactgttctcaagagacaatcaaagcggcatttggtatctttgttgatgaagatgaacctagtgggcaataatactagcatgctccagaacaacagtatgaagcaaggccatacaaaattgagtcagcaaacaagtggatttgagatctttgttgatgaggatgttcctaatggcagctaccaaaatggaacgcaaaacaggaactcttcaaaggaacagagtgggtttgagatctttgttgatgaggattgcgctaatggcaacaatcaaaatgcggggcaaaacaggaattgtaggaaagaaaacacgaagttaaatcaggaaagaaataagtctgaactctttgttaaagaagatgaggctaatgacactgtccagaatgctctatgccacaagagtaataggtatcctccaaggccattattatctgattcatctaggcatcaaggcgaaagtgacttccagaagccatttgttggagggtttgcgatattgccagatgatgaagaaccatgtgagaaaagttatggtggtgctaatataaattgcagaactgtgcagcctactcataatactaataatttgctctgtccagttcaagatgattcaggaacaaggaatcgtgaaggtcctcattctgtgacttctggacttcaagaagacactgtcattcgtaggtttgttgcatcctctattgatgatgagcccaaggtggaaaatgcatggcaccatgggttagtcgacccaactgttaatctaaaggaagcaatggatgatataaacagcatgtttggaaaaccactaaacttcaagggcgaaaaaacaaagaggaaaactaatgcacactcagatggaaaagcagctccgatttctggtttctctatattagctgatgatgacctaaaagagggctgcaccagtaaagcgagtcagagcaattctttcaaatttggggatgagaatggtctatttgaacccacaatcaccactcgtgatgtcatggcagagatcaacgatatgtttggaatgccactggatttgtaagatgcatgtgtagagtgaactgaataattcaactgctagttggacaactggctttacctttccactctctccttgagaaatatgcagtgtcttgctgacgtgaagagcttggaatcagttctcttatttggtgtataagtgcagaatgttaggattctcaggtcgtcacacttcttgtggagttgcacctgccactgaataatttatcttctcaagtgaagggaagggggagtagtctgtcagaggccaccagcaagcacaggtgcacttgttgctctgttcatcttgtatccatagttgtgctcatcaaaaacccattgtctgatgcccctatcaaattatgaaatgtaatggaataatagaaaggagtaagtgaaagaacgaaagaacttgtgttttgctttgatctgaggaccgaatatatacacaaggtgagtg

SEQ ID NO: 7277 - DNA, 2066 bp, Zea Mays
tcgccacgtaacaactcccccaatccgtcccgtcggccggacgagcagggcccaagggcccaccttaccatggcgaccgccactgccgcccccgtccccgccggcggccacccgtaccgccgcgcccgcactcgctgcggcccaccgcgcctgcaccgcctgcgcttcccggccgcagcagcagccgcttcgtcttccctgcccgccccgtcgtccatgctgccaccgctgccagatggaggcgggcggctggtggcggagctggtgtgcgcgttcaacgagctcacggagcggatgggggaggacctggcgacgtcctcctcgtcgagcctgctcttccgtgtgctgaagctggcgctccccgccctccgcgacgtggagggcggccgggcactcgcacgcgcgctcgccgtcgccgcgaccctcgctgacctccaatggatgctgaagtcatatcagccggcatactaagagaagcattagatgcaggagctgtaagaatgagggatgtaaaaacacagattgggatcagcacagctcatttgctgcatgacagcttaaggattaagcatgctccttcgaagcttgacgtattggatgatgaaggtgcaagcacattgagaaggtttattctttcatactatgatatcagggcagtcatattggagcttggaatgaagcttgatatgatgagacaccttgattacctccctaagtatttgcagcagataaaatctctcgaagtcatgaagatatatgccccacttgcacatgctgttggagcgggtaatctgtcactagaattagaggatctttcatttcgttacttgtttcctcattcctatgaccatgttgatcagtggttgagaagccaagaaggtgactgcaaggctataataaatttgtacaaggagcagttgcttcaagcactgcaggctgataatgagttgaggaggattgcacaggacatctcaattcaagggaggtataaaagccgtttcagtactatgaagaagctagtaaaagatggacggaagccagaagaagttaaagacattctaggtttgagggtaatcttggagcctcggtgtggtggcaattcatctgattggggccctagggcttgccacaggacacatgaaattattcaagctatgtggaaggaaatcccgggtagaacaaaagattatataactcacccaaaacgaaatggttaccagagcttgcatgtggccatcgatgtcagtgaacctgggaaggtgaggccattaatggaggtacagatacgcaccaaggagatgcataggtttgctgttggtggagaggcatctcactctctctacaagggtggtcttactgatcctggagaggctaaaaggctcaagactattatgttggcggcagcggagttagcagctctgcgcctacgagacctaccaggcagtgaccacgtagttgggaactgcaagaacccggctttctgtcagcttgacaaaaatggggatgggagaatcagcatcgaggagctcactgaggtgatggaggatctaggtgctggaggcgaagacgcaacagagctcatgcatcttcttgatgcaaacagtgacggctccttgagctctgacgaattcgagtcattccagagacagatcgaagtgatgagaaacttggaggacgatgataaccactataggaagatcttgaaggagaagctgcacacgatcgacagtgcaggtctcatccatgtgtaccgcaaggagctcagtgacaaattgcttgtgggctgacctggcagccatcttattgttgttttgtatgtataccacactgagaggtgactccagcactgatctgtaaatagtcgttgaacgtacgtggtatccagcaatattacggtagtgaatttatagggtggattgcgagatcaagaaatgaaggtaaatatataagagattcaaagatttagaggtaaatatataagaggttcgaagatttagacaggttcgaaccatataacaccctatgtccttttagtgttcattgtctatatacaatgtgatcagatg

SEQ ID NO: 7278 - DNA, 1084 bp, Zea Mays
ttctgctgctgtgtcccactctacaatttcagctccatatatacttacctgatggcttcacctaaaagttttgtagacagctttgttgataagacggagaagcgttataatcaaaacatgtctcctgccattccaaaggataaatggaggaaaggatctcagtgggtagtattaatcagaaaacatgctgaagttgttgttggtgacaaaaacgtattaaaagtattcagaagacattgcaagatggtagtaaccaagagcttgtttagacgaaggccaaatgctagacaactggggttcacctttcggagaaagcagatactgaaaggagtagctcaacaggagcatgattgtattccggatgaacattatgtgcagacattattttctatcaaaggacttgaagatgaactggagagaagaactttgacctatacctcgtggaaccaatcatcaaatccgaaagacaaaatgacttggcatcctatgaaatttgagtatgatacatctagccctgagcatatcaatgctatcaagagaattgatcatgtcaactatcaaatggagcacaggacagagtggtgccaatgcaatgcggtagctacagagacatggagtatcagagtattgacagcgaccagaatgcgcttagacagctaaggacttgaagagagttgatgcacaaactacagagcctcggttttgaagtttgtcagctctatcagtatgcgatttccaggggacagatggtagtgaaggacagagtacacacaacccttaccctaacaggacaggaaagttataacaatagcttgattttccttataaatattcttccccttgtatgattaaagaatagatagttttttttacttgcatacaggttatcagacatagcgaatagggaaacatgcaagaagatacatgtgtccataggacctactgtttagaacattggtcacattggcaagaagataagctgccttttcatgatctgcagctacaacatagcaatctgggctccaccaattttgaatcgacgtctatataaactgccttttcatgacctccagctaaaacaaaa

SEQ ID NO: 7279 - DNA, 1366 bp, Zea Mays
aacagtaagctttaaaagatgtttggtaatggtaattgacctagtcatatgcaattggacgtcctcctgttctgctgctgtgtcccactctacaatttcagctccatatatacttacctgatggcttcacctaaaagttttgtagacagctttgttgataagacggagaagcgttataatcaaaacatgtctcctgccattccaaaggataaatggaggaaaggatctcagtgggtagtattaatcagaaaacatgctgaagttgttgttggtgacaaaaacgtattaaaagtattcagaagacattgcaagatggtagtaaccaagagcttgtttagacgaaggccaaatgctagacaactggggttcacctttcggagaaagcagatactgaaaggagtagctcaacaggagcatgattgtattccggatgaacattatgtgcagacattattttctatcaaaggacttgaagatgaactggagagaagaactttgacctatacctcgtggaaccaatcatcaaatccgaaagacaaaatgacttggcatcctatgaaatttgagtatgatacatctagccctgagcatatcaatgctatcaagagaattgatcatgtcaactatcaaatggagcacaggacagagtggtgccaatgcaatggtacctcggccccatgttttttatttgccaggaagttctcctatagtgcggccatgcatcttttggaacaaggagccattggcacaccgaaatctgctcagctgatgattaacttttaacaaaattgtttacacaagtctgcgctcacttttttgatgggtcattataccgttcacaatttcaccagcctcaatgggagctgtacattagcagcggtagctacagagacatggagtatcagagtattgacagcgaccagaatgcgcttagacagctaaggacttgaagagagttgatgcacaaactacagagcctcggttttgaagtttgtcagctctatcagtatgcgatttccaggggacagatggtagtgaaggacagagtacacacaacccttaccctaacaggacaggaaagttataacaatagcttgattttccttataaatattcttccccttgtatgattaaagaatagatagttttttttacttgcatacaggttatcagacatagcgaatagggaaacatgcaagaagatacatgtgtccataggacctactgtttagaacattggtcacattggcaagaagataagctgccttttcatgatctgcagctacaacatagcaatctgggctccaccaattttgaatcgacgtctatataaactgccttttcatgacctccagctaaaacaaaa

SEQ ID NO: 7280 - DNA, 571 bp, Zea Mays
cacattccaattccgccaccgccacttctttcttccccgcggacgcgtcgaaaagcgagcctctggggagactcgaggccactctgccttcccctcctatcctgtgagctgtaacgcttggaggtatgtgaactatccatataagttcctgtgagctgtctcccgctcactcggtccctgtccatccgtagcgttccattccattccatctccctcctcgcctacggcttcttccaccgcggcatcgtgcccggcctctgcttcggcgcgggcctggggattacgctgttcggcatggcctacatgttcgtccacgacggcctggtccaccgccgctttccggtcggccccatcgccgacgtgccctacttccgccgagtggctgcctcgcacaagatacaccacatggacaagttcggcggcgtcccgtatgggctcttcctgggaccaaaggagctggaggaggttggtggcctggacgagcttgaaaaggagctcgcgcgaaccagaagggccatctgatggattcgtacatggagctggaggaggttgtgagtccggcgcggcgagc

SEQ ID NO: 7281 - DNA, 1055 bp, Zea Mays
cacattccaattccgccaccgccacttctttcttccccgcggacgcgtcgaaaagcgagcctctggggagactcgaggccactctgccttcccctcctatcctcgttccattccattccatcccatccccggaaagtgcaaggacgggagggagagcggccggcgcgtcacaaataccaccagcccaggggccatggccgccgcgatgaccagcttcgtcgccaagaacccgctgctcgcggccgcggcgcggcgcagggcgcctcccctcgcggggcgcgccctgccgttctctccgctcgccagcaccagggccccgcgccgcaccgtcacgtgcttcgtgccgcaggacacggcggccccggccgctcccgtgccggcgctggacgaggaggccagggccgcggcggcgcggcgcgtcgcggagaaggaggcgcggaagcggtccgagcggcggacgtacctggtggccgccgtgatgtctagcctcggagtcacgtccatggccgtcgccgccgtgtactatcgcttcagctggcaaatggaggtcgggatggagttctgggcgcggtgggcgcaccgggcgctgtggcacgcctccctgtggcacatgcacgagtcgcaccaccggccgcgcgagggccccttcgagctcaacgacgtgttcgccatcgtcaacgccgcgccggccatctccctcctcgcctacggcttcttccaccgcggcatcgtgcccggcctctgcttcggcgcgggcctggggattacgctgttcggcatggcctacatgttcgtccacgacggcctggtccaccgccgctttccggtcggccccatcgccgacgtgccctacttccgccgagtggctgcctcgcacaagatacaccacatggacaagttcggcggcgtcccgtatgggctcttcctgggaccaaaggagctggaggaggttggtggcctggacgagcttgaaaaggagctcgcgcgaaccagaagggccatctgatggattcgtacatggagctggaggaggttgtgagtccggcgcggcgagc

SEQ ID NO: 7282 - DNA, 1193 bp, Zea Mays
aaaaatccgtcggtaggcggcaggagctgagccctgagtgacaaaccgttgtgacactgacttgtgagcaaggggaagcacattccaattccgccaccgccacttctttcttccccgcggacgcgtcgaaaagcgagcctctggggagactcgaggccactctgccttcccctcctatcctcgttccattccattccatcccatccccggaaagtgcaaggacgggagggagagcggccggcgcgtcacaaataccaccagcccaggggccatggccgccgcgatgaccagcttcgtcgccaagaacccgctgctcgcggccgcggcgcggcgcagggcgcctcccctcgcggggcgcgccctgccgttctctccgctcgccagcaccagggccccgcgccgcaccgtcacgtgcttcgtgccgcaggacacggcggccccggccgctcccgtgccggcgctggacgaggaggccagggccgcggcggcgcggcgcgtcgcggagaaggaggcgcggaagcggtccgagcggcggacgtacctggtggccgccgtgatgtctagcctcggagtcacgtccatggccgtcgccgccgtgtactatcgcttcagctggcaaatggagggcggcgaggtgccggtgatcgagacgctgggcacgttcgcgctctccgtcggggcggcggtcgggatggagttctgggcgcggtgggcgcaccgggcgctgtggcacgcctccctgtggcacatgcacgagtcgcaccaccggccgcgcgagggccccttcgagctcaacgacgtgttcgccatcgtcaacgccgcgccggccatctccctcctcgcctacggcttcttccaccgcggcatcgtgcccggcctctgcttcggcgcgggcctggggattacgctgttcggcatggcctacatgttcgtccacgacggcctggtccaccgccgctttccggtcggccccatcgccgacgtgccctacttccgccgagtggctgcctcgcacaagatacaccacatggacaagttcggcggcgtcccgtatgggctcttcctgggaccaaaggagctggaggaggttggtggcctggacgagcttgaaaaggagctcgcgcgaaccagaagggccatctgatggattcgtacatggagctggaggaggttgtgagtccggcgcggcgagc

SEQ ID NO: 7283 - DNA, 1082 bp, Zea Mays
atgatccctgtaacccaccacatccagtggcagtgctgccggctcgcttcatcaattttagaatggtaacagagcctatcagctctgttcccccagtagacacctaaactttgccacatagccaataacggatcggatcgccttcgtacttttcctacttgctatctccagcgctaggctatcagctagcactagcagcgccgtcactgttcgaagagatcagcgcagcgaactcgcagccgagagatcgatcgaggccggccggggccgagatgggcagcgtcggcgtcggttgcggctcgccggacgaggagcagcagaccgagggcagtggccctctgccgccgccggctgtctgcgtcacggggtccaccggctacgtcggctcctggctcgtccgcacgctgctgcggcgaggctaccgcgtccacgccaccgccagggacacaggcaaggccttgcaggtgctcgccgtcgtggaagaagggagggaccggctcagggtgttcagggccgacatgggcgaggaagggagcttcgacgccgccgtcacgggatgcgtggcgctcttccacgtcgcggcctccatggacctccacgtatcacccgcccatcaggacaacctcgtatgcatcatcttcatcttcctatggttcaagcaacgccacctagacgggccgaccagagaatccgccacgggcttgacagttgacaccatgaaggaactgcctactttccgactaggcagaagagtgcatcgagccatcgatcatcctcgtctattgctctttcacgaaacaagtgtggtaggacatcgatacatgccaggcttggggaaatcgatgccacgacctgcaggacgacacatcaatcacacaactcgattctagattgctagtcatatcgatcttcagcaacaaggccttgacaccttgttctctctactcctatggaaaatctggaaagaatggaatgtgtgctgcttttcggaggtcgaaacgcaattctccccaattcctccacgtgataaagcgcaaggcagagcaaggagtgcggggtgggacgttcaatttaggttgttt

SEQ ID NO: 7284 - DNA, 1543 bp, Zea Mays
caagccccccacccctcgtcccaacagccagaaggcgccgtcgcctgcggcgacacgcgcacgcaggcatccctctcgtgagcgcgcactgctaccgtgccgcagtgtggttacagctcgtcgctcgaggcgaactccggcgtgcggaaccctagcgcaggcgtggagctcaccggcctcggcgccggcgccggtactaggatggctccacccgttacgccatggtgagggccttgcggctcggtggccgcgcggccgccgcagcgaggtggtgcacctgccggcgcgccgccgtcgccctctgcgtggccaacctcgtcgccgcgctgctcgtggcccgcgcgctctacgctcccggctccttcgcatttgcacccaaacgcggggagctgaagtattccagggagcagatgaggtgggtggaggagtcgatccggattcgccgcgcagctgagcccgtcgagctcattgaggcggtgaagaagctgcgcaaggcattcacgagggaagagaagacacgaaaagggctgccgctggagctgaagcagaaagtttcgcttgagattctgcagagactgcacgatttgggcgaaggttctaataccacggaacaacaagaagctgtagaagcatggcgtgttgggaagctcaaggacatgagaagtgcatcttctaagaatttatcaaattttggcctctccagtgaagattcaacgagccttggagtttaactggcaaaggatattggaggacattggtctttggatacctcccactatatatcatatcgaacatgatgacaaacctgagaatgaaccagaagatgaagagataatacccggtccacctttgccccctgaatgcaatactgaactgcatactgattatggtggcacggctgttagatggggcttaacacatcacaaagaaagtgccgcagattgctgtcaagcctgtatagatcaggctaagagggccagaccaggagccttaaagtgtaatatttgggtttactgtccgtctgagtatggatgctactcgccagacaaatatgaacacaaacatcaagaatgctggttgaagcaggctgaccaccctagattaaacttcaaagaccggtaccctgagccatacagagattctcatccgactgcccctgttgttgtgccatggatgtcgggtgtcattactgcatgagctgcttgcccacaggagcgcaatgccaatgtgcagcttccagactgaactctacatttttgttttgcaaactcagaaaaccatttttcattttcattctttagtacttaggctttaggttagtctacttggtagctgaagtttaggctgcgctggggcctttgtcaaactgtgccctagggcgtggcaaacaaactgatagggcatgttttggcagagatgtgctgtaatgtatgtacatcaaccaatcatgctcgcagctatatattgtacttcaaactgaaaactaactaacacagaagcaatcatgcccatggctatattctacctcaagctcgagagatac

SEQ ID NO: 7285 - DNA, 2441 bp, Zea Mays
caattagcatgcaagaagggtctcttgctataggcctatagcagtatagcctagcctaactgggctgtttgcttacattgggacaggcctaacaacagtagcccaacacggcctgccactaactccgcgcacggacggcgaggccgacgccgccggtactgtctctgccggagtgctggatatccgcccgctgctcctcagtcgaccctccgctcccgcccatgcctcgacccaagcccgccgctgccggtggcggctggctttcagggtgggggtgggacctcatgctcggatcgattgccgcgttctacgccgtcatggcgccctacaccaaggtggaggagagcttcaacgtgcaggccatacatgatattctttatcacacttatcacatcgagaagtatgatcatttggaatttcctggagttgttcctcgaacgtttataggagcatttgttatctctattctctcatcacccacagtctttgtattgcgtttacttcgtgttccaaagttctatagtcttcttacagttcgattaacattgagttgtgtcactttgatgagtttgagacttctcagagttcaggtaaaaaagaagtttggccatcaagcagaagcattctttgtggtactaactgctatccagtttcacttgctgttctactcaagccgtccgcttccaaatatctttgctttagctttagtcaacttggcatactctttctggttcaagggaagctacctatgtacattacgggctctggtatgccttatgcccttttctgatgccttacctaccgagggaagctcggttctcaccaaattcagacataatcattatttctagtacccaagatataattcttcgtttcagcaccaaggatctggatcaacaaaggattaaagctttcacacaattaaaatcataccgaactatgtgtattgtgcaattttcattttcttgcagattgttgcagcagttgtttttagatgtgatatgattctgcttcttggcccaatagggcttgcacttttgctcatctgtttctctcttggaagcaataaaatgttgcataagcactacccttgtatgcataggatttaccgtgctaatcgactctataatgtggcgtcgaatcctgtggccagaatttcaagttctctggtttaattcagttctgaatcggagttcagaatggggtacccattcaattcattggtactttacatcggcgcttccccgttccatgatagtggcataccctctctgcatggttggtgctcttcttgatagaaggatagtaccatacatgtttccggtcttcttatttgttgtgctctattcaaaacttccacataaggaactccgtttcataattggctcaattcccatgtttaatgtgtctgcttcactaacagctagcagactatataataaccgaaagaaagctgggtggaatttgctttttattctcatgcttggtgcctttcttgtcagtctaggatattctactgtgactttcatggcatcctacaacaattatcctggtggctatgctttaaaggctctacatgaagcagattcttcagtgaaggaaaagatggtacatattgatgccttcactgcaatgagcggggtttctcgtttctgtgaaaatgaatatccttggagatactccaaggaggaagaaattcccatcgaagaatttgagaaaaggaatttcacctatctactgaatgagcaccgctccatcggtggctaccagtgcctgttcgctgtggatggattctccagagtaaaacttacgccccaaatccccccgctctctctggtgaaagaacccaaggtgtttgcacatgggaatacgagagaccctgacattctttcactgagttggcccggttgtccttgagggcatggggacaccggacacccagattcctgtggcaggaccactaactgccagcagtgaagatgtgtttgagtcagtccgcgtgacacatatatggtatacatctctgggtcttgccatgaagctaccttacctgcaaatctagaatggggcccctcctcccctagatcccacggcttcgaaaccacagctttaaggaacactgccattttcaggtgcaaatttgtgtaacattttagagccggaagaaagacagaaagcacacggggggtggggggaatcatagcaattagcaaccttgtatttacaagttggtcgatatatttttttcccttttgaggcaactttcatactccatcttatataacaagagcttctagactttatttatcggcagcaggcatacagtcgtgctggagacgcatacttgctccattcaaagataatatatttgttttctatctgctgtggccctgctttgcgagtcgtattcggttcggtggcaggctggccgcattctatct

SEQ ID NO: 7286 - DNA, 2461 bp, Zea Mays
gttactggtgggaagcgccgcagctccacctcgtccggtccggtgtggtgtggtggactgggtgggtgtctctggcggtggtcgccgatgctgaccccctcggccggcataccgccgccctccctctccgcagctagcagcccctccacgtcctactctctcctctaccttccccgacgatgccgacgccttcccgtcccccgagcctcctccagctttgcccccaagcgctcggcgccggtccccaccaccaccctcccgcccgaggccccctccacctccgccgctgtcgaggcgccggcgcccttctcggtcacggccccggggacctaccggggaggggaggacccgctcgtctccaagctccgcacccagctcggcgtcatccacccgctcccggcgccccccatcagccgctccgtcgtcggcctcttcgccctcttcttcttcgtcggcgccgccttcgacaagctctggacgctgcggaagcgccgtcgcgccgagcgcgagctcaaggtcaacggctcctggccgcaggtgcccaccccgagcttctccctcttcctcgagaaggacctgcagcgcaaggagtccgtcgagtgggtcaacatggtgctcggcaagctctggaaggtctaccgcaccggcatcgagaactggatcgtcggcctgctccagcccgtcatcgacaacctccacaagcccgattacgtcaacagggtcgaaatcaggcagttctacctcggcgaggagcccctctccgtcaggaacgtcgagcgccgcacctcaaggcgggccaacgacctgcagtaccagattggcatccgctatgccggtggagcacgcatggcattggcactctacttgaagttcaccaaagtaccggtcgtcgtgccggtctgggttcgagattttgatatcgatggggagttgtgggttaaactaaggctcataccaacagaaccgtgggtgggagccgtatcttgggcttttgtgtcccttcccaaggttaagtttgagctttcgctgttccggctattcaatcttatggcgattcctgttctgtctatgcaagacagatccttatgttgtcatgattattgatgatcaagtaataaagagcaagaagaacagtcaaacaactgtgattggactaccgggagaaccaatttggaatcaagtaaagcttcaactctctgaacacgtgtgttttctgaagacatatttcatgcacgatatcatgcttatagatacaacatcaaacaggatttccatatgcttgtcgcaaatcctcgcaaacagaagttgaccattcaagtgaaggattcaattggtctaactgacatcactattggcaccggagaggtggagctagggtcacttaaagatacagtacctacggacaaaatcgtgactctatatggaggatggggtttgtttgggaagcgagaggctggggaagttctacttcggctgacatacaaggcatatgtcgaggatgaagaggaagaagacgaggcggtgagaagcgagattggtgcgggttacgcctcagacgaggatgtgctggactacgttagtggcatgagcaaggggactgatttcgtgggtaaagaaagggaaactttcatggatcttctcgccgcgctgctggtgagcgaggagttccaaggcatagtgtcatccgaaacaggaagctcgtcaagagaaggtgagcaggcaggcagtggaccagaaggcacagacagcgtcactgtccctactagcgctgcggcggctgatacggaggcatccaccgtgccaaacagctccacagatacggctctggtgtggctggcggccataacgagtgtgatggtgctggtgtcctccaacctcggtggctcaggctacttcaacccgtgaccgtgagtgaaggcaacactggctgtaacttgtaagggtgacaacaagagagttctcttcttgttcttttttttttcttttcttttggaaggctagtgaagagaggcaactgtgtatattcatttttgctgtcacctccttccgatttgctgaacatggaccaggatttctcctgctcgcgtcgcggcaggggtcattgccatcggttactgtttccaaggcaaatgcgattgtagttgtatcgttaaaaaatataccaagaaaatttaaggctgccttgttaggcatcagcttatgattatgacgagctgtttgaagtacttttttttttggctaaacaggcctttttgcgaatagctaatcattctctcacataggaataagaacgtgatgagatcaagtttaaaaaaacattttttgcagttttaactcacacttgtggatcctatataatatgttttaatgaactcatgagatttcgtgagaccataaattctacatgtagaactgttttgtcaaatactgtaacaaaagaggtttaatttcattggtaaag

SEQ ID NO: 7287 - DNA, 2641 bp, Zea Mays
gttactggtgggaagcgccgcagctccacctcgtccggtccggtgtggtgtggtggactgggtgggtgtctctggcggtggtcgccgatgctgaccccctcggccggcataccgccgccctccctctccgcagctagcagcccctccacgtcctactctctcctctaccttccccgacgatgccgacgccttcccgtcccccgagcctcctccagctttgcccccaagcgctcggcgccggtccccaccaccaccctcccgcccgaggccccctccacctccgccgctgtcgaggcgccggcgcccttctcggtcacggccccggggacctaccggggaggggaggacccgctcgtctccaagctccgcacccagctcggcgtcatccacccgctcccggcgccccccatcagccgctccgtcgtcggcctcttcgccctcttcttcttcgtcggcgccgccttcgacaagctctggacgctgcggaagcgccgtcgcgccgagcgcgagctcaaggtcaacggctcctggccgcaggtgcccaccccgagcttctccctcttcctcgagaaggacctgcagcgcaaggagtccgtcgagtgggtcaacatggtgctcggcaagctctggaaggtctaccgcaccggcatcgagaactggatcgtcggcctgctccagcccgtcatcgacaacctccacaagcccgattacgtcaacagggtcgaaatcaggcagttctacctcggcgaggagcccctctccgtcaggaacgtcgagcgccgcacctcaaggcgggccaacgacctgcagtaccagattggcatccgctatgccggtggagcacgcatggcattggcactctacttgaagttcaccaaagtaccggtcgtcgtgccggtctgggttcgagattttgatatcgatggggagttgtgggttaaactaaggctcataccaacagaaccgtgggtgggagccgtatcttgggcttttgtgtcccttcccaagcatcatgtgttacaaatttgacacttggctaactatatgctcacatcttttgcatggacatggtgcttatctccaccagcgattcctgttctgtctatgtttctcacagaacttctgacagaagatttgccacgtctctttgtgcggcccaaaaagattgtccttgattttcaaaaggggagagctatgggacctgtttcaggaagtgttgcaagtgatataattcaaaatgttgcaactgacctgatccaagaggggaataaggactttgttggagagctatcagtgacactagttgatgctagaaagcttagctttgtcttgtttggcaagacagatccttatgttgtcatgattattgatgatcaagtaataaagagcaagaagaacagtcaaacaactgtgattggactaccgggagaaccaatttggaatcaagatttccatatgcttgtcgcaaatcctcgcaaacagaagttgaccattcaagtgaaggattcaattggtctaactgacatcactattggcaccggagaggtggagctagggtcacttaaagatacagtacctacggacaaaatcgtgactctatatggaggatggggtttgtttgggaagcgagaggctggggaagttctacttcggctgacatacaaggcatatgtcgaggatgaagaggaagaagacgaggcggtgagaagcgagattggtgcgggttacgcctcagacgaggatgtgctggactacgttagtggcatgagcaaggggactgatttcgtgggtaaagaaagggaaactttcatggatcttctcgccgcgctgctggtgagcgaggagttccaaggcatagtgtcatccgaaacaggaagctcgtcaagagaaggtgagcaggcaggcagtggaccagaaggcacagacagcgtcactgtccctactagcgctgcggcggctgatacggaggcatccaccgtgccaaacagctccacagatacggctctggtgtggctggcggccataacgagtgtgatggtgctggtgtcctccaacctcggtggctcaggctacttcaacccgtgaccgtgagtgaaggcaacactggctgtaacttgtaagggtgacaacaagagagttctcttcttgttcttttttttttcttttcttttggaaggctagtgaagagaggcaactgtgtatattcatttttgctgtcacctccttccgatttgctgaacatggaccaggatttctcctgctcgcgtcgcggcaggggtcattgccatcggttactgtttccaaggcaaatgcgattgtagttgtatcgttaaaaaatataccaagaaaatttaaggctgccttgttaggcatcagcttatgattatgacgagctgtttgaagtacttttttttttggctaaacaggcctttttgcgaatagctaatcattctctcacataggaataagaacgtgatgagatcaagtttaaaaaaacattttttgcagttttaactcacacttgtggatcctatataatatgttttaatgaactcatgagatttcgtgagaccataaattctacatgtagaactgttttgtcaaatactgtaacaaaagaggtttaatttcattggtaaag

SEQ ID NO: 7288 - DNA, 1411 bp, Zea Mays
tggagtatggaggtcttgagaattcactagtatgttcgtacccaagcaatgtttcagttgctggatacaggctttgtgggccttatattttcttgttttagtgaagatgctcaaaaggttggaaaaatccaagtgactgcctttcagtcagagggtggacaacagcatccccttcctcttgccatcgatccagtcattgaccttgattcatcctgtagttcatcagataatgtgtccgcttcacattctgcatcggttgaaggcatggaacaggacacaggggattccagggtctcaaagaataacaaggcctggagaagatctatggattctactcccatcatgacacaaatcattccacaaattatgaacccagagaaagcgtactcgttccgcacaatcctgataacacacaagaagcgtatgttgatccatatgattcagatatgactccaagcctcctggaggctttgcactggtcaactatggacataagtggtgcagagtatagagggaaggaggtaccacttcttgtggtccctacaaggtatctcctcaagctggacaccacgatgatctcttactgtgatatgcagcgagtcctctttgaagaggagaaatcagcatataatcaagctatgcaacaaaatatttgtgatgggaagattcaccctcttacatccattcaccatacatctacatacaactctctctgcaaactaatggagtactgctatcaatgttacaagaggaggctaagcaacttgaggctgatacccaaaacatgagaaacggttctcctcgtcgcctcatgaatcatggagctggtggcaagagttcacctacggctcagagcaggcatcctttctccaaccaagggagccctagaagcccgagcggtggcagccggaggagggcttgttgatgatcctgttccgcctgatccattggcttgtggcttaaccagatgctccctgaatccccagatatatgatggatggacgaagtgccccggcaatagcactgtacctgtacatacccattgccgtccagcgctgtgctgttgtcgaatcccaacggtctcactttgctttgtagtattggcctattggggttccttatcctgttgtcggagttgtgccattatcctttccatggttgacctgagctttagcctgtacactgtagactctactagaggtttacctgaggctgaattcccgctgctaagatgtgatgttcccggccataagcaaagatgcaggttgtctttgctttgtaaagatgaaggttgtctttgttttgtaatcgaaaaaaaaaccctccgacttcgatagcaatccatttcttgaaacgatatagctataagctgcagccacaccttgcgttgatgatgccaaagctttctttc

SEQ ID NO: 7289 - DNA, 1536 bp, Zea Mays
tgcttttatagatgttcgtacccaagcaatgtttcagttgctggatacaggctttgtgggccttatattttcttgttttagtgaagatgctcaaaaggttggaaaaatccaagtgactgcctttcagtcagagggtggacaacagcatccccttcctcttgccatcgatccagtcattgaccttgattcatcctgtagttcatcagataatgtgtccgcttcacattctgcatcggttgaaggcatggaacaggacacaggggattccagggtctcaaagaataacaaggcctggagaagatctatggattctactcccatcatgacacaaatcattccacaaattatgaacccagagaaagcgtactcgttccgcacaatcctgataacacacaagaagcgtatgttgatccatatgattcagatatgactccaagcctcctggaggctttgcactggtcaactatggacataagtggtgcagagtatagagggaaggaggtaccacttcttgtggtccctacaaggtatctcctcaagctggacaccacgatgatctcttactgtgatatgcagcgagtcctctttgaagaggagaaatcagcatataatcaagctatgcaacaaaatatttgtgatgggaagattcaccctcttacatccattcaccatacatctacatacaactctctctgcaaactaatggagtactggtgagagcacagtctccttgtctcatttcagctaaattaatatactgcataatatcagttaatttatgtgattcacattttattcaatagtttgagtccagctgttactacgctccaggatcgcctgaaggaaaatgaacttcggctatcaatgttacaagaggaggctaagcaacttgaggctgatacccaaaacatgagaaacggttctcctcgtcgcctcatgaatcatggagctggtggcaagagttcacctacggctcagagcaggcatcctttctccaaccaagggagccctagaagcccgagcggtggcagccggaggagggcttgttgatgatcctgttccgcctgatccattggcttgtggcttaaccagatgctccctgaatccccagatatatgatggatggacgaagtgccccggcaatagcactgtacctgtacatacccattgccgtccagcgctgtgctgttgtcgaatcccaacggtctcactttgctttgtagtattggcctattggggttccttatcctgttgtcggagttgtgccattatcctttccatggttgacctgagctttagcctgtacactgtagactctactagaggtttacctgaggctgaattcccgctgctaagatgtgatgttcccggccataagcaaagatgcaggttgtctttgctttgtaaagatgaaggttgtctttgttttgtaatcgaaaaaaaaaccctccgacttcgatagcaatccatttcttgaaacgatatagctataagctgcagccacaccttgcgttgatgatgccaaagctttctttc

SEQ ID NO: 7290 - DNA, 2037 bp, Zea Mays
cccatgcggaccggaacggtcaattatccctccactgcccgccacaccctatcccccacactcaccctccgcaccggatcccgtcatcacctccgagcggcgcgccgggccggcatccaactcgccgccgacgcgccgcgccccagaacgagccgccggaacgatctccctaacccccgatgcgccgtcctattgcccgcggcgagcccaaggtacaaaccctagctctagctcctccctccgcagccgccccaaccaagatgggcgcccataggcgacaacccagctcccaccgccgcgttgccggcgccctcacgctcctcgccgcgtccgcgctcgcgcttcttctcctagcatcccgccgggttcccccgacctacggcgtcatcatcgacgccggcagcacggggagccgcgtccacgtcctcgcctaccgctccacggcgggactcccgcagctggactgggcacgcatggcctcgatgaaggctaccccagggctatcgtccttcgcggcggacccacgcggcgcggggctgtctctggcgccgctattggagtttgccaggcgccgtgtgccgcgggagagctggggggaaaccgaggtgcggctcatggccactgccgggctgcggctgctcgattccgcagtggccgagtccatcctgcagtcttgcagggaagtgcttcgggggtcggggttccaatttcaggacgaatgggccaccgtgatctcaggggctgaggaagggatatacgcatgggttgcagcaaattatgctttggggactcttgggggtgatccaaacgacaccactgggattattgaacttggtggggcttctattcaggtgacacttgttactggtgaacctgtgccaccgaagttctctcatatgcttaagtttggtgatgtctcatataacctgtacagccacagttttttgcatcttggtctgaatgtagcatatgaatcactccatgacttgctcagctcacctggccttagatcaatggccacacatttgatttctcaagctaagtacaaagatccttgcactccaaggggatttacacgcatagcaggatcagctaaacttcctgttggtgttcttgagccgaaggttgaatacagaccttttgctcattctgcggggaacttctctgagtgtagatctgcagcactaacactactgcaaaaaggaaatgagggatgtacatatcatgaatgccgccttggagcagcatttgtaccagagttggaagggaaatttttggcgacagaaaacttttaccatacttcaaagttctttggtctgagttcgaagcccttcctttctgatctgatggtggctggggagaaattttgccatggggattggtcgaagattaaaaataagtacagttcttttgatgacggacaactgcttcttttttgcttttcctcagcatatattattgctctactgcatgatacgcttaaaatgccactggatcataaaaggattgatgttgtaaaccaaatccatggcgtgcctgttgactgggcattgggtgctttcattgtgcagacgacgatgaacagaacagagtggagaaaacctcgtctgaagacgatctacgatatggagaaaggcaggtacatcataacaagggtcagccaatgagtcgcgcacatcagcgttgggagtgggtggactttctgcagcggagcactattgaccatgtatgtagattttcctaaattgatttcttacttagtggccaactacctccagcatgttgccttgcggagtcaacttgttgagtttgagcagcaacccctgtatatgatagaaggatgcgggttgccgtggcatttgtgcatgttcagtgttgtatgtaatgttgctaaactgttgttgatgtaattagaattttgtgcatgggcatccatccgatgatgtaatcctgagataaccatgtgtctaatgatcgattgaagttctctgccatggatcatggatggcagggcagctgtatctttgtttcatgtca

SEQ ID NO: 7291 - DNA, 2021 bp, Zea Mays
ccgctcccctcgctttcgcttcgccggcactccatccgtccatcgtggcccaggctgtcgttccgttctataaagggcgtcgagaggaaaccggtggaaccctacactgagaaccgcagagacaggcgtcttcgtactcgcctatctccgcgactcaaagctttccccaattcccccccttctcccatttctcaccaccgccgccgctccccccgttcaacaacaccatgagggagtgcatctcgatccacatcggccaggctggtatccaggtcggaaacgcgtgctgggagctgtactgcctcgagcatggcattcaggctgatggccagatgcccggtgacaagaccattgggggaggtgatgatgctttcaacaccttcttcagtgagactggcgctgggaagcacgtcccccgtgctgtttttgttgaccttgagcccactgtcatcgatgaggtgaggactggcacctaccgccagctcttccatcctgagcagctcatcagtggcaaggaggatgcagccaacaacttcgctcgtggtcactacaccattggcaaggagattgttgacctgtgccttgaccgcatcaggaagcttgcagataattgcactggtctccagggcttcctcgtcttcaacgctgttggtggaggaacgggctctgggcttggttctctcctcctggagcgcctgtctgttgactatggcaagaagtccaagctcggtttcaccgtgtacccatccccccaggtgtccacatccgtggttgagccatacaacagtgtcctgtccacccactctctcctcgagcacactgatgttgctgtcctgctcgacaatgaggccatctatgacatctgccgccgctcccttgacattgagcgcccaacctacaccaacctcaacaggcttgtctcccaggtcatctcatccctgacggcttccctgaggttcgatggtgctctgaacgttgatgtgaacgagttccagaccaacctggtgccctacccgaggatccacttcatgctttcgtcctacgctccagtcatttctgctgagaaggcctaccacgagcagctgtccgtggctgaaatcaccaacagcgccttcgagccatcctccatgatggttcccaaggacgtgaacgctgctgtggccacaatcaagaccaagcgcaccatccagttcgtggactggtgcccgactggcttcaagtgcggaatcaactaccagcctcccagcgtcgtcccaggcggtgatctggccaaggtgcagcgtgccgtgtgtatgatctccaactccaccagtgttgtggaggtcttctcccgcattgaccacaagttcgacctcatgtacgccaagcgcgccttcgtgcactggtacgtcggtgagggtatggaggagggcgagttctccgaggctcgtgaggatctggcggcgcttgagaaggactacgaggaggtcggtgctgagtttgacgagggtgaggacggcgacgagggtgacgagtactagacgctctactggcgcggcgtcgtcgggcttgtgtgccactgctatcctgtgatctgccctgagtggctcctatcgtgttatgtttctgtcggttcttatctatctgtcgttgtgtggtttacaacttacgttgtaagactttattcccccgctttgctactgggttattaagtttggcgttattgttttcttgatctctgagatgctttgctttcaccacctgttttttttttgtcatctgtgtaattgagtcgacggacaatcattttcttgcttcgagcaggcgagagcagcacacgagttgcagacagatcttactgtggcaataaaaaaaataaacaataataaatatgtagcgaatattaatcaacacattgattctctagaaggatagtatattatataagtctcgtgagcgtcccaggtaatgatatcatcgaaattaggaaacaaaacgataaaagggggacaacaattgggcacacacttgaacaacatacc

SEQ ID NO: 7292 - DNA, 1767 bp, Zea Mays
gggataaccagataaaccgttgaagagagtctgagcgggtctcgccaaactgcgccccctctttcaattccttatccgcacagtcacacggtttaatcgaatggcttcgccgtcgtgtttcctcttccgcccccgtccgccgctgtgcagccgccgccgccgcagcagcagcaggtccctctacctcctctccaagcagagcctgcaccgacttccctcaccaagaacatgccgccgtccagtggcagagcagctcgtcctgcggtcgctgccgcccggtaacggcaggcggatgggggcgacgggcttcgcctgctactgttcctacgacaccgagaacggactgcccacgccttcaccggacaagggaaaaagctcggatgagtggccaatccttcgccggtgggatgttccatgggagtggccaacgatttctctcaccatggtggcatgtgcagtaagctttcttttgacagggatagctgagcaatctattttggagcaactaggttttcgagctggggagacaactctagatgagaaagcagagatactcttcttgggacaactgtacagatctaagttcctatctctattagcacgacggtagttgtacttggagttatatttggcatgaccaatacctttcgaccattctcagatgatatatttcgctatgaattcaatgaaccacttaagctgcaaaacggatggcttctgtggtctgcaatcggcctgtttgttgcaatagttgctattgctttagcaggtgctgcaatgacatttctgaatggtgaaacaccacagagagagacagactcgctggtccttttgttgccgctgattggctcgtcaaacatcagcactgcctgtttgctgggcatcactgggattttggcacccattctggaggaaactgtgtttcgaggatttcttatggtatccctgactatgtggtttcctactccatatgctgtgcttatgactgctgcagtgtttgcctttgctcactttacaccaggagaatttcctcagcttttcgtgcttggtgtggtcttaggattttcatatgctcaaactcgcaaccttctaactcctattgcaatacacgctgtctggaactctggagtaatattgttgctaacttttcttcagatgcaagggtatgatatcagggagattttgcaggcatcttgaagatttaacgcagttagattaatttcatcctgtgttttcttgtgtcagagagggtcttgcaagttacggaactacttgtgctctgctcaaagggacattttcacgaaagtgactattttaagctgaattacggaggcatcggcaaaggtgtagaaactctgttggggttacaacaatggttctcacctacatatagaagatccttgttttcctttgtcttttctatgttagttagatccatttcccttttcccagtggtcatttatctatcagactgggcaaaagcatctcatgactcatgaggctgggcctgggatactatttccatcatcaacataaaagacaaagtttatgtataccagagtcgtcttaatgacggtgtttctgttcacttcgccgtttgtgtatgattgcagagaactgtgactgataggaacatcaagactgtataattaatcagcaaccgtagttggtgtcttacctgtaacgttatttgaaggggtaaaaaattgtttatgttgctatcttttttttttatgattccttcttttcactgagagcacattaata

SEQ ID NO: 7293 - DNA, 2104 bp, Zea Mays
gggataaccagataaaccgttgaagagagtctgagcgggtctcgccaaactgcgccccctctttcaattccttatccgcacagtcacacggtttaatcgaatggcttcgccgtcgtgtttcctcttccgcccccgtccgccgctgtgcagccgccgccgccgcagcagcagcaggtccctctacctcctctccaagcagagcctgcaccgacttccctcaccaagaacatgccgccgtccagtggcagagcagctcgtcctgcggtcgctgccgcccggtaacggcaggcggatgggggcgacgggcttcgcctgctactgttcctacgacaccgagaacggactgcccacgccttcaccggacaagggaaaaagctcggatgagtggccaatccttcgccggtgggatgttccatgggagtggccaacgatttctctcaccatggtggcatgtgcagtaagctttcttttgacagggatagctgagcaatctattttggagcaactaggttttcgagctggggagacaactctagatgagaaagcagagatactcttcttgggacaactgtacagatctaagttcctatctctatgtaaaaactttatttgtaccatagttttcagtttaatttgtgaatatgctgcatgctctgaatatcttgtgtcagagtgacattacttgccattttctgtttctgcaagtgcagtagcacgacggtagttgtacttggagttatatttggcatgaccaatacctttcgaccattctcagatgatatatttcgctatggtaaaggtttggtcttgctacgtttgtgttcattttcatgttcttttttatacattggccacacgttagttcctttccaaagattacctaatttaataagaggactgtacaagatgttaaagtgtaattaaattacttaatatctaatatggatatctgtgttcaatagtgtctctttccgtttgtactatggttgcattgtggtaattcaggttgttctgaacaatggtctagtgttgtttgtattctttaactttcagaattcaatgaaccacttaagctgcaaaacggatggcttctgtggtctgcaatcggcctgtttgttgcaatagttgctattgctttagcaggtgctgcaatgacatttctgaatggtgaaacaccacagagagagacagactcgctggtccttttgttgccgctgattggctcgtcaaacatcagcactgcctgtttgctgggcatcactgggattttggcacccattctggaggaaactgtgtttcgaggatttcttatggtatccctgactatgtggtttcctactccatatgctgtgcttatgactgctgcagtgtttgcctttgctcactttacaccaggagaatttcctcagcttttcgtgcttggtgtggtcttaggattttcatatgctcaaactcgcaaccttctaactcctattgcaatacacgctgtctggaactctggagtaatattgttgctaacttttcttcagatgcaagggtatgatatcagggagattttgcaggcatcttgaagatttaacgcagagggtcttgcaagttacggaactacttgtgctctgctcaaagggacattttcacgaaagtgactattttaagctgaattacggaggcatcggcaaaggtgtagaaactctgttggggttacaacaatggttctcacctacatatagaagatccttgttttcctttgtcttttctatgttagttagatccatttcccttttcccagtggtcatttatctatcagactgggcaaaagcatctcatgactcatgaggctgggcctgggatactatttccatcatcaacataaaagacaaagtttatgtataccagagtcgtcttaatgacggtgtttctgttcacttcgccgtttgtgtatgattgcagagaactgtgactgataggaacatcaagactgtataattaatcagcaaccgtagttggtgtcttacctgtaacgttatttgaaggggtaaaaaattgtttatgttgctatcttttttttttatgattccttcttttcactgagagcacattaata

SEQ ID NO: 7294 - DNA, 1608 bp, Zea Mays
ttacaactgtgtgtgagctgatagtgagtagagagcttcgttctcaactccgatagttgtccagggtctcgggcggcagcagctcacctctaggactaggaggcgaagcagtgtggtcagggcctcctggtccccctcggagtctctgccaccgtcctcgtcgatggcgccgctcaggatggaatcgcccgcggggcagctactctcccagattcttcacacgcacccgcacctgctgcctgccgccgccgagcagcagctcgagctgctccagaccgaccgcgaggcagagaagaataaggataaggagagcgatgctggcgacaagctggctccgacaggtgtcgacctcgtgctgtacaggcggattgctcaagtaaaggagaaggaacggaggaggactttggaggagatactctatgctctggttgttgagaagtttgttgaagccggcgtttccttggttccggcactctcacgctccatcgactcttctggaagagttgatcagtgggcagaaactgtggaaggaaggctccagcgtttgcactcgcctgaggcctatgaaatgatcgagaaccatctcgccctcattctggggcagcgtcagagtgatgccactattgcagccataagtaagctccgtgttggccaggtctatgccgcatctgtgatgtatggctatttcctgaagagagttgatcagaggtttcagctcgagaagacaatgaagagcctcccttggggatcagaagaggaagacggcgctttgtatcaagttatgacgaccgactcgatgccttcagctcagtcttctagctctcacccagagatgggctcctggaccgccgcgcctgacttcaacgcaggaggtcctagcgaatctatcaagccttgtcgccttaggtcgtatgtcatgtcattcgatccagatacgcttcagaggtatgcaacggtcaggtcaaaggaggcctttggtatcatcgagaaacacacagaagcgctatttgggaaagcagagattgtagtcacacctggaggcacggttggttcatccaaggatgagcacattaggataagctttgccgggctgagaaggctggtcctggaggctgttactttcggatcattcctctgggacgttgagagctttgtggattccagctaccattttgtgaccagctaagattgtcatcctaagtaaagaaaggttcgtggtttacgtctctggtctgaatgtctgtgggcttcggaaagacttgtacaatgatgctaggctgttaccacaccccttactgatgcgatggtatcaatgatttgcgcagttctatggcatcgcattatttgtaaagaccaactgccattatcctgatatttagccgttatgttctattaacatctgtgctgcccggggggcgtagcgatgtatttttttggctatcccctctgcaaattgtaagaggaattctaggctcatagccaattctttggcgaagctattattctcgttttacagattgccgttatgatgatttgagtctttctttttgagagcacagccatttcgtactacagaatacttgtgcgtatttgaatagggatgaagtt

SEQ ID NO: 7295 - DNA, 1621 bp, Zea Mays
tttctggattttgtatccttgcttgcggaggaatgatttggtgtgattatgctgcaatttgttcattctgtatctccggtctcgggcggcagcagctcacctctaggactaggaggcgaagcagtgtggtcagggcctcctggtccccctcggagtctctgccaccgtcctcgtcgatggcgccgctcaggatggaatcgcccgcggggcagctactctcccagattcttcacacgcacccgcacctgctgcctgccgccgccgagcagcagctcgagctgctccagaccgaccgcgaggcagagaagaataaggataaggagagcgatgctggcgacaagctggctccgacaggtgtcgacctcgtgctgtacaggcggattgctcaagtaaaggagaaggaacggaggaggactttggaggagatactctatgctctggttgttgagaagtttgttgaagccggcgtttccttggttccggcactctcacgctccatcgactcttctggaagagttgatcagtgggcagaaactgtggaaggaaggctccagcgtttgcactcgcctgaggcctatgaaatgatcgagaaccatctcgccctcattctggggcagcgtcagagtgatgccactattgcagccataagtaagctccgtgttggccaggtctatgccgcatctgtgatgtatggctatttcctgaagagagttgatcagaggtttcagctcgagaagacaatgaagagcctcccttggggatcagaagaggaagacggcgctttgtatcaagttatgacgaccgactcgatgccttcagctcagtcttctagctctcacccagagatgggctcctggaccgccgcgcctgacttcaacgcaggaggtcctagcgaatctatcaagccttgtcgccttaggtcgtatgtcatgtcattcgatccagatacgcttcagaggtatgcaacggtcaggtcaaaggaggcctttggtatcatcgagaaacacacagaagcgctatttgggaaagcagagattgtagtcacacctggaggcacggttggttcatccaaggatgagcacattaggataagctttgccgggctgagaaggctggtcctggaggctgttactttcggatcattcctctgggacgttgagagctttgtggattccagctaccattttgtgaccagctaagattgtcatcctaagtaaagaaaggttcgtggtttacgtctctggtctgaatgtctgtgggcttcggaaagacttgtacaatgatgctaggctgttaccacaccccttactgatgcgatggtatcaatgatttgcgcagttctatggcatcgcattatttgtaaagaccaactgccattatcctgatatttagccgttatgttctattaacatctgtgctgcccggggggcgtagcgatgtatttttttggctatcccctctgcaaattgtaagaggaattctaggctcatagccaattctttggcgaagctattattctcgttttacagattgccgttatgatgatttgagtctttctttttgagagcacagccatttcgtactacagaatacttgtgcgtatttgaatagggatgaagtt

SEQ ID NO: 7296 - DNA, 1958 bp, Zea Mays
ttatttttgaaaaaaatcaatccgccacctgttctaacacgcgaggagaagaacatggcgactgctgtttcgttaccgtccgcgtgctctgacccctagcgagcccacggcgtcgccctataattggggtcccaaccgaaacctctcctcgccgcaacgaattcccggtctccaaccagccgggcagccaccgcagacgatccctagttccgcgtccccgacccgaaccctcgagttcgcacgggctccggccagattcgcgcggtctaagcttcgaatcggcgcatggaggcagcagtagccgccgcactcaagtcgcccaccgccgcacgtccctcgtggcggcccgcggccccgggcgccacctcgctcccctttgaccggaggcgcagctttgccttcggctccatcaagggtctcgggcggcagcagctcacctctaggactaggaggcgaagcagtgtggtcagggcctcctggtccccctcggagtctctgccaccgtcctcgtcgatggcgccgctcaggatggaatcgcccgcggggcagctactctcccagattcttcacacgcacccgcacctgctgcctgccgccgccgagcagcagctcgagctgctccagaccgaccgcgaggcagagaagaataaggataaggagagcgatgctggcgacaagctggctccgacaggtgtcgacctcgtgctgtacaggcggattgctcaagtaaaggagaaggaacggaggaggactttggaggagatactctatgctctggttgttgagaagtttgttgaagccggcgtttccttggttccggcactctcacgctccatcgactcttctggaagagttgatcagtgggcagaaactgtggaaggaaggctccagcgtttgcactcgcctgaggcctatgaaatgatcgagaaccatctcgccctcattctggggcagcgtcagagtgatgccactattgcagccataagtaagctccgtgttggccaggtctatgccgcatctgtgatgtatggctatttcctgaagagagttgatcagaggtttcagctcgagaagacaatgaagagcctcccttggggatcagaagaggaagacggcgctttgtatcaagttatgacgaccgactcgatgccttcagctcagtcttctagctctcacccagagatgggctcctggaccgccgcgcctgacttcaacgcaggaggtcctagcgaatctatcaagccttgtcgccttaggtcgtatgtcatgtcattcgatccagatacgcttcagaggtatgcaacggtcaggtcaaaggaggcctttggtatcatcgagaaacacacagaagcgctatttgggaaagcagagattgtagtcacacctggaggcacggttggttcatccaaggatgagcacattaggataagctttgccgggctgagaaggctggtcctggaggctgttactttcggatcattcctctgggacgttgagagctttgtggattccagctaccattttgtgaccagctaagattgtcatcctaagtaaagaaaggttcgtggtttacgtctctggtctgaatgtctgtgggcttcggaaagacttgtacaatgatgctaggctgttaccacaccccttactgatgcgatggtatcaatgatttgcgcagttctatggcatcgcattatttgtaaagaccaactgccattatcctgatatttagccgttatgttctattaacatctgtgctgcccggggggcgtagcgatgtatttttttggctatcccctctgcaaattgtaagaggaattctaggctcatagccaattctttggcgaagctattattctcgttttacagattgccgttatgatgatttgagtctttctttttgagagcacagccatttcgtactacagaatacttgtgcgtatttgaatagggatgaagtt

SEQ ID NO: 7297 - DNA, 2824 bp, Zea Mays
ccggctctcctcttcccacctcctcttcactgtctactactgccgctagccgcgcctgcttgctgcttccccctctctttttctctcgtctccattccagcatcgccaccaccagtccaccattccagcatcatcaccaccacccgagacaaaaaaataaaaaaaacccaacaacactgtaacgagaatatacggcaaaaccctagatctctctctcctctcggcattgctggctggggtgtgcggcggcccgcagtggtgagggacgcacggcgatggcctccgccgccgccgtcatcgcctcgccggcccccggcgccgccgcggccgagcccgccgcctggctcgtcgacgagcgcgacggcttcatcacctggctgcgcggcgagttcgccgccgccaacgccatcgtcgaccacctcatcttccacctccgctccatcagcgagccgggcgagtacgaccacgtcttctctctcgtccagcagcgccgccaccactggccgcacgtgatccacatgcagcagttcttccccgtcagcgacatcgccttcgcgctccagcaagccagctggcgccgccacgcgccgccggcccaggcgctcggggctggcgcgtcgccggccgcgctcccgccgccgcctcctcgccgcgcctcgttctcgcagtcccatcactcccaccagcaccatcgccacggcgcccactaccgccccgatccagcgcgcggcgccgccactgcggcgactggatccgagaaagatgtataatgtctgtttcgttgccacacggagttctgatgggtcaaaaacggacgtgaagttcataataacaaggaagggagggggctgaaagaagcggggaatgtcgtcgatactaaaagtttgcggttggattctcctataactgatgaaggtgaggaaaaatcaaagctgcaagctgtttctgaagaaagtagcaaaatggttgcaacccctgtagagtattcaaccaatgagatcattgatggcagcatggttaatactgttgaagggctcaaggtttatgaaggattactaaatgtaaccgaggcaaataagatcctttccttagtcaatgaaacaagagcctcttaccggcgaggggggcttgaagctagacagaaggttattattgctaaaagaccaatgaagggtcatggacgggaaattgttcagctgggtgttcctattattgatggccctcctgatgatgaaaatctaagagagacaagggtggaggcgattcctgggctgctgaatgatctgtttgatcgcttgtctcagcaggaaattatacccttcaagccagattattgtgtcattgacatcttcaatgagggagactattctcatcctcaccaatccccttcttggtatggtagacctctttgtaccctctgcttaacagattgtgatatggtgtttggccgttatatatcaggagaaaaaggcgatcatagaggtcctctgaagctctcgctcgcaactgggtcacttctactcatgcaagggagaagtattgactgtgcaaagcgagctattcctgctacacgcaagcagagagtcatactgaattttggaaagtccgtagcaagaaagcacatcccagctgaaagtgcctggtctactccattaacacctcctatgccctggggtcagtcatcaaggccagttaacggctcccgccatccccaaagtcctaaacactatgggtatgctccaatcagcggtgtacttccagcaccaccagttggagctcatcacgtcccaccgtctgatgggatgcagccactatttgtagcccctgctcctatttctgctgcagccatacctttcacgccaactgttcccttgcaaaatacatcagctgcttggatacaagaagttactccaaggcctgctccgccacgattccctggtcctggtacgggggtcttccttcctccgggatcaggccaccctctgcctcatcagatgatgccggcttctcatggccatggcgaacccaactctccacaaggttcatccgcttacctgcatagtaaggtcaatggcaaggagacatctaatggcaatctttctcctaagaactcgccgagaaagacatcttgcacagccgaggagaaaccagaatgcaatgggagcttaaatggtggtggcggctctgcggatgagaagtcaactgtaggtatggagcagcagaatggtgttcagaagaatgttgggagtagcaaggtccagccacatggacatgcaactgaatagagtgggacttatagtacatagacaacagaaaactgaagagacgaggagttgaattttgggccgtgaatttgcggtagtgcgcagagctcagcagaggtctttgctggcactctcttgtccctgacaagaatcatcgtgtcaagttctcgagacggaaaacatttgtcctaaactttgtagctgcactgttgcaaatctagattatcgacattgcctcgggttatcatctgctatcagagtcgtgggcagtgaaaaccatttctgatggtttatgttgcccaaatattatcgacctagtacatctgaaatgggaaaaaatgtggacgaaatttcttgcatcgaactctcttgtgatcgactggcctttgatgcatctgtagcagactacttatggtagactgttacttgctgatagatggttctgctacaggtgtttgctgtggatgtcaattataacctagactgtgaacttatcactcttttgggtcctgaacgttttgcaagtgttcttattcaggacgtgggcaaagcatatggat

SEQ ID NO: 7298 - DNA, 846 bp, Zea Mays
tattgaagtccattctgttggcatcgtcccatctcccttgaaccctttcgcccacaccacagcaccgctgccgaaggtgggaaagaaggcggcggcggaggcaccggcaccggcaccgcctaggaaaggaaaccgaggaaactacagccatggtggtacggatccgtctggcgcggttcgggtgccggaatcggcccttctaccgggtgatggccgccgatagccgctcccctcgagacggcaagcacctcgaggtcctcggctactataacccgctcccagggaaggatggaggcaagaggatgggcctgaaattcgaccgggtgaagtaagtttcacgtattggctgtcagttggggcacagccatcagatcctgtgcagagtattctctttcgtgccggacttctgccaccacctccattgctagctatggcacggaagggtgggccacgtgataggcgccccattcatccaatgactgggcgccctctggatctcgagggtgtcgcaattattgataattccaatgctcctgaaggcgatactgaagtgcctacagatgaggtggctcaataagccttttgtattagcatagcatatgtagcggtgctgcaaaagaaaacttgtttgatgtgcttgtggcaagactttgggtactcgtacaatgtggcaaacttttaaacaggtgttggcttaaattgagactattagggtgtgtttggttgaatgtataagaagggatggaagtggacggtcatattttctatagtgttttaacgagagtcatgtggggtcgaggtgaacaccatgctcatcctattttaacctcaaaccatacacatcct

SEQ ID NO: 7299 - DNA, 887 bp, Zea Mays
atggggtttaatagaatattaactaacggtgcacctatcggcttattctttggtggttccctattcctttacaatcgtcgtgtcaatcgttatttccggagagatggtcacacatggcggcggaagaaggatggaagaactgttggagaggctcatgaacgactgaaggttggaaatgttgatgctttgagctgctattacgctcacggggagcaaaatccaagtttccagagacggtgtttctggatgctggaacctgcatacgaacacattgtgctggtacaatatagagaggttgatgtggttagaaattattcatcacaactgtcaaatggcctcccagaacctctttcatccttgggatatccaaatgccatctgtggaaaccaataccacagctcctcttctggcgctagcgagtgtagtgagtcccatcagagctattctaatttgagttctgtaactgaagtaagttcctattccggtaacaaagagtacaccaaaaatgatggcggtttactgagcataccggaggttggacacacttgtctgcaacaaaatcggactgataatggtaactcgaaaaataaatctgggcttaatattgctttaaagaagatagctgagcagttaagtttgggtgaagatgatgatgactatattttctcaaatcaagctcattctgtgggaggagtatgctagttgtatgtaagagatttttttaaaaaaaaggatgtcaagttcacaggcttgttatatgtgtaacttaggaaaacttcataatagctgaatttgatgaaaggaaaaaagattagtgttttgtactagagtgaaatctgtcaggattaggatggtgtcaatttttttgttaaagtttcatttttccc

SEQ ID NO: 7300 - DNA, 1712 bp, Zea Mays
gtccgaacactgggccggcaggttgtccgccgcatccccttgcgttgcgttcacggttctcctctctgtctctcgcgcacgggatctcgttctccgcggcagctggtgtttcgctcccttctcgccctccgacggctggtgggctgccggcgccggcgccgccaaacgccaggtgctgaggccttcgccagtgtcttcgacggcgacgagcacgtaccagcaccaagcatcatgtcggaaagaggtcgcctggcaggacgattgattgataaccgcagcagagggtaccatgtagtccctctagttgaggatcccagaggccatcctgaagtcctcgtggatggggatcggaggggctactctgacattcgtggggttcagcagcgtcggggctaccctgacacccatctgcttgaggaacctaggggctaccctggtgttcgtgtggtcgaccataggggctatcctggcagtcgtggggttgatgaacgcagggcctatcctgagctccatcaaggctcacgcatgagggcggctcctcccccttacccagctgccttcgaggatgagcttgagttacaggaagttgaactccggaggctttcggcacataaccgtgctctagttgaggagcgtgaactgttaagcagggaaatacaagctggaaaagatgaggtccgccacttgaatgtgatcattgctgacattaacactgagaaagaagcttatatcagtaagcttatggacaagaggaggaagcttgaagctgaacttggagcaagtgagcacttgtgtgatgaggtcaggcatcttcgtggtgaaattgacaagctcgttaccgctcggaaagaactatctgcagaggctgcatctctcgtggaagagctgaacagggagcaatctgttaaacagcagctacctgtgctgaaaacagaaattgatggtctgcaacaggaacttgttcacgtgaggactgcttgcgggttagagcagaaggggaatttggaattgctggaacaaaggaaggcaatggagaagaatatgctttctatggcacaagagatcgagcagatgcgaggcgaattagctaattttgaagttagaccaaggggcccagcatatggcagagttcttatgcaattacctttatgtaacattttaggtggagcatatgggatgcagattgggagttcggaagtgaccttcactaagaacccatatgaagatggttataatgcttatgtgggggttcctgagaaagatcctttgcatcctcctgaatatgcttcgtgggggacatatgacaggagtcgccttcagtaccgctaagaccagaacttagtcattggagaaagaattgccttctaggttttaatggccatgtcttgtcgtttacagtaccgaagctttatgcctgctgcttggttttccattaagagttgtccttttcaatgcttctaatcataactttttccattacaaactggctagattattaaactattggtaccaagatgtccagcaatgtgcggaaagcaccttacatacatgtggttttgcgtgtctgttgacttcaccttctaccataacgtggatgaggatgtgcatagcttccttgtatcccaaatccacgggtttctttttcttctgcggggatatatatgtatttgcatgggtgttctgctggaagcattctcttttttcgtgtccgg

SEQ ID NO: 7301 - DNA, 763 bp, Zea Mays
gaacattggtactgctgtgcaaatgtatctttgtttctttcttgctttcatgtgctgatgtgttctacttttttcttcacttggtgtgctaatgttacatgtaccaaccttctgcagggaaccagcatccagtgcttcaggtagggcagcatctggcatgtcaagtgatgaaaagaaccagcgtcagagagatgctcgagttcttatgccgccaccacgctcattagccccaaatagaggcagacatgcagataaacgtgcgatatccagctcgagcagtacttcaaacagcacaagcggcgaatcatttaaaaatagaagagtaccaaatcgccccgcggataataacagtaatctgagctcaaattctgatgttcataaaccacggcgcaaaaggaggcataagaagaaaagaaagctggcatgatgaatattcccaaagcgcgtgaactgtggggggtacggtggaaattcagattcccagcgaagtttggactttcagcatggccaatttggagaagttgaaaaaaaagaagacacagcatgtgcgatgtgtctgagcaagttgattgattctgtatcctcactcctaaatcctgatgtaaaacgactgtacatccatctgttcatggatatcacttgcggtggtcagatcttgccagtgtaccgaatgcgtgtccgtcatttccgccgtgaaattatgtatgcttttttcccccgatggtctccgatgattctgtagtacttgggaagcgcggaacag

SEQ ID NO: 7302 - DNA, 1046 bp, Zea Mays
ccagtatttccctgtaaatcaggtcgagacatctgacatctggattcagacagctagagagatgccaccattgcaggttccttcatattacaacataccaggtcaagcaacacctggtgcttttgtgccaaatccagcaaatgcatctttcaatgctacatctcaatcccctcatgcgcagttcccaggcttgtaccatcctcagcaacctccctctattgtaagtccgcaccccatggtgcatcaacaggtgccatcggccattggtcccaatgttggggtcggggtggcagctccaggcccacaagttggggcatatcagcaacgacaaattggtcatatgaattggagacccagcttttgaagaaggtttcttaattatctgtaattaggggggtcacaagagcctttatgtaacatcagtaggctccttttgacgggaagcacctttgtttttagtgcagctctttctgatctatttaagctataacaaggtttttgttagcttttccttcccccaggtgaattcaatgtcccatctgaactggtatgtagattgtgatttaaacattgggcaagatctcgcacgagcaccaaggttgagtgccttccattttgttctattgttttgttttttaatctaagttgtgtaggttgcgtgccttccattttgttcccttatctgattcatgcacacataaggttgttagttttagttttttagtagtgcaagtgtcattgtagtgtgctgttaccgagcgctatgtggtaacttggtcagtttacaacctaattgcatgtgataattttctgtggtacctctacttttgtagtagtctgtgctgtatgtagttgaagactgttgagcactgatttagttcttctggaatattatgtatcttggatatgaagttcaaatgggcatgacggagcaaattacggcacttcatatatttttccaaccatctcggcgatgagctagattaagtttttttgacgaggaactcaactaacttttctttacgaggatctcgactaacatttct

SEQ ID NO: 7303 - DNA, 2923 bp, Zea Mays
cgcggtcctcggcgctaagggctacaggcaaaccacaaatacaacgcgggtcgattgggagcgaactcaagggcgagcgtgtgcgatgcggtgtcggcggagcggagcttacctgcagcggccgcggggagggaggcgttgaggtcggagataacgtagggttcgttctcgccgtccatagtcgactcttcgatcaagcccgtctcgcgctcgattcggaattgatcgccgcggcgtcggagaggaggaagaggggacgggggagctgggcagcgggagaagagagggaaatgaggtaaaaaactaaaaaccccatatgtctcccggagaagaatgggaggcggttcgggaaagaggcgcgtgttttttcgtttcagaccttggattcgggaactagcaacgcggctgaaaaacaactgtttggaagaaggaacggcccatatgcctcaggccctcagcacaaggcccgtgttcgtgtccgcaccctcggccgaacagttccccgagtccccgactgctctctgtctctctattggcgacgactgggctaccgccgccacaggcgccctacgccaggtgtccaggtctcgggcccttctccggcaccgagcacccaccagcggaatataccatggaggtcaggcccatggtagctctgcgtgccgccctagttggtggggtagcggcatttgcgaagatcggtggggcgatgaaagccgcaggcggtgtcaagattggtgcagccgctgcagccgtcacggctgcaacatcagctgccatatcgggaaaagacgcaaaagaagacacttcaaagccggaaacgaaatgatatgacccatggattggtcgacaagtatgaaatcgcctctccagaggtttagaagagagagggtgccatagtcaataagttacaggagtaaattttgatgctccgtgtgttttttatctcgggaataagaatgacagtacagttttccccagaagtatgattttgtgttgtgcaacagtttcggctgttgaatgcttttagtcacactgtctgaatggcttgatttctgctgtgccacattctggggcgcgatgcatctgtgatctgttgccatattctgtttgcacagggagatcctgaaggccttgtgcagtctcatgcgtaaggcagtgcatctaagatctgcttgccaaattctgtttgcacaggaagatcctgaaggccttgtgctgtttcatgcgtaagatcctagtgatctacatcggcatctgtatatttgaagtatctcaaactgtagaacgctatggaagacattcttatgatatgttgtatgctgttgcgaaaaccatcgtgctatcccctaactaccagtgtcttttccttttaccatattataaggaagagggagaaatagtatctcgtatgggaaccattgctgcggagttaataaaccatccttcctatcatgtccttcctagtgacgattcaaacccaccaaggttgcttttatggcatcttgatccatcaattattaggcttgatctctcagtgatgctcaaggaggggtttgagttgtgtgctagaacttcacaatgcattggtatcatcggcactagacattcttctcaagcctatgccatgaggaatatccatagatttggggcagagatttcccttttcacatgcttacttcctaagccatcaaagaaacttgcttgcaatactaactggacccttatcttgtaaagcttttttggacctaatttcttatatcagtgccttgattgatttggataacacaagaactagatgctcttcacaaaaaaacttacaactacaaccattgaagggattggtaatgtgtttttaaatatgcaacacaactagatgtttagcatttgtctgacagaagttaactgcacctgctataattgtgcttctgcaggtacatgattattagttttcctgtttggttcagttttgcaactgctttacttttctacagagaaggctcacacgattctttatcagaaacattatccaaagagccaactgctgaatcaataagtgacgtcagtcttgttcagagggcagccttttacctttcttgggtgctatgcccttctaatgatgatcaatgcgagatgctatcaaacaatatattggaaatatcacattcttgggctaggaacaacaaaaagtgcctgagctaccaaattactatgaaccataggaggaaactgcaaatacccacagctgcgaagtcagagaaatttcatgtgccaataaacactgcagctgcattgatagctgagagatgggctttgattggagcatatctcatctttatctggcttgacgtagttgaggatatgtcctcattgatatttggttgcgaagatagatgtcatcgttctgtcagccaactcagaaacaagactgccccataccctgctcaaggttctaggtttgcacggctggctcctaatccagacacccaagaccaccagctgcgcatatatcaagcgaatggactgccgtcttctctgaacacactgctagtgctagtgctagtttcttctcgatacatggttctgggaaatgaagaaagaatagtctactctgaacgctgcacgttcccactgctagtgctagttgagacgccggagcacaaatggactgccgtctgcaggtaacgtgttattttcctgttgagttaatgcagccgaatgaagtgtgtttccttataggacatcagcattaatttcagcagctgaatttgatatatacctgtactctgttgccgctttgtccctttctgtatgaacccgtcgtcaaacacacaaagttgaagatgctggttgaactttgttagttagtattagtcagttattattggattcagaatttcaatgtattatattcttaataccc

SEQ ID NO: 7304 - DNA, 3278 bp, Zea Mays
ggccgcggggagggaggcgttgaggtcggagataacgtagggttcgttctcgccgtccatagtcgactcttcgatcaagcccgtctcgcgctcgattcggaattgatcgccgcggcgtcggagaggaggaagaggggacgggggagctgggcagcgggagaagagagggaaatgaggtaaaaaactaaaaaccccatatgtctcccggagaagaatgggaggcggttcgggaaagaggcgcgtgttttttcgtttcagaccttggattcgggaactagcaacgcggctgaaaaacaactgtttggaagaaggaacggcccatatgcctcaggccctcagcacaaggcccgtgttcgtgtccgcaccctcggccgaacagttccccgagtccccgactgctctctgtctctctattggcgacgactgggctaccgccgccacaggcgccctacgccaggtgtccaggtctcgggcccttctccggcaccgagcacccaccagcggaatataccatggaggtcaggcccatggtagctctgcgtgccgccctagttggtggggtagcggcatttgcgaagatcggtggggcgatgaaagccgcaggcggtgtcaagattggtgcagccgctgcagccgtcacggctgcaacatcagctgccatatcgggaaaagacgcaaaagaagacacttcaaagccggaaacgaaatgatatgacccatggattggtcgacaagtatgaaatcgcctctccagaggtttagaagagagagggtgccatagtcaataagttacaggagtaaattttgatgctccgtgtgttttttatctcgggaataagaatgacagtacagttttccccagaagtatgattttgtgttgtgcaacagtttcggctgttgaatgcttttagtcacactgtctgaatggcttgatttctgctgtgccacattctggggcgcgatgcatctgtgatctgttgccatattctgtttgcacagggagatcctgaaggccttgtgcagtctcatgcgtaaggcagtgcatctaagatctgcttgccaaattctgtttgcacaggaagatcctgaaggccttgtgctgtttcatgcgtaagatcctagtgatctacatcggcatctgtatatttgaagtatctcaaactgtagaacgctatggaagacattcttatgatatgttgtatgctgttgcgaaaaccatcgtgctatcccctaactaccagtgtcttttccttttaccatattataaggaagagggagaaatagtatctcgtatgggaaccattgctgcggagttaataaaccatccttcctatcatgtccttcctagtgacgattcaaacccaccaaggttgcttttatggcatcttgatccatcaattattaggcttgatctctcagtgatgctcaaggaggggtttgagttgtgtgctagaacttcacaatgcattggtatcatcggcactagacattcttctcaagcctatgccatgaggaatatccatagatttggggcagagatttcccttttcacatgcttacttcctaagccatcaaagaaacttgcttgcaatactaactggacccttatcttgtacatgattattagttttcctgtttggttcagttttgcaactgctttacttttctacagagaaggctcacacgattctttatcagaaacattatccaaagagccaactgctgaatcaataagtgacgtcagtcttgttcagagggcagccttttacctttcttgggtgctatgcccttctaatgatgatcaatgcgagatgctatcaaacaatatattggaaatatcacattcttgggctaggaacaacaaaaagtgcctgagctaccaaattactatgaaccataggaggaaactgcaaatacccacagctgcgaagtcagagaaatttcatgtgccaataaacactgtaagctcccttgttaaagaatttgatgatagctgtgtgcctgtgtaaaatgttgtagcacaactgcctttcctcaagtgcaagatggaaaactagcggatctccatccttcaaactttaacctaatattgcatcagtggattcctttaggagtattgcttatatcacctagttgtgctaacgagcagaactgtgacatccttctgtgctacacaagcactggggaagattctggtatcaaatgaagcacaaataagaacaaaagattattccagtaatgatggtttcttaggcagctgcattgatagctgagagatgggctttgattggagcatatctcatctttatctggcttgacgtagttgaggatatgtcctcattgatatttggttgcgaagatagatgtcatcgttctgtcagccaactcagaaacaagactgccccataccctgctcaagtgtgtaaaatcattatttaaagtgttggaacaggcaaatcaagatagagattttgtgattgatcttcatagtaggttgttgaactggaatcagaatgggcaaggcggtgagatatttagggatgttatccttgaaatgagcaagaagattaatctttctttgtagcagtgaccaggaattttacgcagatcttgaatatttgaatttctaggtttgattgccagcttccattttgatggtaatgacaaaggttgtctccagcagctattctattacatcccctatttcaaacttcactatatgaatagagtaatctacaatgcaaatttcctatttttcacgatctgatgtgtactgcctaatgtggttgaaggaggcaaaactctgaactgttgagttggaccagatccattgcagacaacgatcatttccctccagagcaggttctaggtttgcacggctggctcctaatccagacacccaagaccaccagctgcgcatatatcaagcgaatggactgccgtcttctctgaacacactgctagtgctagtgctagtttcttctcgatacatggttctgggaaatgaagaaagaatagtctactctgaacgctgcacgttcccactgctagtgctagttgagacgccggagcacaaatggactgccgtctgcaggacatcagcattaatttcagcagctgaatttgatatatacctgtactctgttgccgctttgtccctttctgtatgaacccgtcgtcaaacacacaaagttgaagatgctggttgaactttgttagttagtattagtcagttattattggattcagaatttcaatgtattatattcttaataccc

SEQ ID NO: 7305 - DNA, 1773 bp, Zea Mays
gtttcgtgttcatacgagctagaataattaatatccaataataataagtcagatttcaacatatattgcatgtaatgtatagacaggttggccagtaaaaagaaaaagaaaaaagataaaaacgtagggcctagtgatcagcacagcatgcagaattgcagatgcggcgcacatgcgaacgtaacaaacacagcaacacgcccacgctagcggtttccatttccggccctgcaatcctgcaccggcgcgaaagccccctcacggcctcacctccactccggtgatggccgcctctcctttacttctcagatctcagtgctcacgccgtccacggtccactagttgcatcggctcccgcataaagatccacaccacttgagcagcagctagctcaagggaaggagaaggctggaagtggaaagaagtgggttcttgcttgagctgagctcttgctgcccttgaatctgttagggagtggagaacggagtatggggcgcggcaagatcgagatcaagaggatcgagaactctaccaaccggcaggtgaccttctccaagcgccgggccggactggtcaagaaggcacgggagatcggcgtgctctgcgacgccgaggtcggcgtcgtcatcttctccagcggcggcaagctctacgactactgctcgcccaggacctcgctgtccaggatcttggagaagtaccagaccaactccgggaagattctgtggggtgagaagcacaagaacctgagtgcagagatcgacagagtcaagaaggagaacgacaacatgcagattcagctcaggcatctgaaaggcgaggacctgaactccctgcagcccagggagctgatcgctattgaagagggcctccagaatgggcagaccaacatgcgcgagaagcagatggactactggaggatgcacaagacgaatgggaagatgctggaggacgaacacaagatactgacttttaggatgcaccaacaggctgttgatctgagcggcggcatgagggagctggagaccggataccatcaggtccagcacgacagggatttcatttcccagatgccgttcaccttccgggtgcagcccaaccaccccaacctgcaggaagacgagtagctacagcctgctggatagtgttctgcatgccgctctgaactgaagctgcaggaagacgagtagctacagcctgctggatagtgttctgcatgccgctctgaactggagctcctcacctgcagcttctatctcgcgtttcatcattcagcgttagctggtgatgatgatgttggggcgaaggcggagacgctacccttggctcgatgccttcgtcgccttcgtcgtctcgcttcaccaacgatgccaaagacgtcggtccgatgaggacttcgcgactggacttcgcgggcgtccttcgcccttctccattgcgagacgaaggcaagactccgacgatgtctgctagcctcacgtcctcatcgggtccggaagcccaagggagattcggtccactgtaacgggccccgcaaggataagcgtgttacgggcctcatctgtaatagtcttttctgtaatgacggtctgtaacctcccctggggaatattctaaggatactttgggttcccgagggcataaacgtcatttttttagcgcggtaggcactcgggcacctataaatacccccgtacagtacccttgaggggacagattaacagagctattgtcgttccccgttgaaccttgcgaactatttcttcactctcc

SEQ ID NO: 7306 - DNA, 1707 bp, Zea Mays
gcgagcatatccgtcccacgcccggacgtcccatgtgcagagcaggcgcggcatctctgagcatcagaagcgccatgcactgcttccggttcgcgagctgggagcgggacgccgacgagcggcgcgagtcggcggcggcggcgaccacggggcggtccttgtccgcgcggtccaacggcagcaccacgtccacggaccgcgacgtgcggcggtcggcgtccgagtgctccctgaaggcgtcggagctcagcagcgccagctccttgggccggggccggcagctgtcgctgtcgcagcggccgccgaacacgctccgcgtcttcaccttccaggagctcaagtcggccacccgcgggttcagccgcgcgctcatgctcggcgagggcggcttcggctgcgtctaccgcggcaccgtccggagcgcgctcgagccgcgcaggagcctcgacgtcgccatcaagcagctcggccgcaagggcctgcaggggcacaaggagtggatgacggaggtgaacgtgctcggcgtggtggaccacgccaacctggtcaagctcataggatactgcgctgaggacgatgagagggggatgcagctgctgctggtctacgagttcatgcccaacggcagcctggcggaccatctctcctcgaggtcaccgcggccggcgtcgtgggccatgaggctcagggtggcgcttgacacggctcgagggttgaagtatctccacgaagaatccgaattcaagattatatttcgcgacctgaagccttccaacattcttctcgacgacaactggaacgccaaactgtcagacttcggcttggcgagattaggacctcaagaaggaagccatgtctccacagtggacgcctcagcaccaagaacgacatatggagcttcggcgtcgtgctccttgagctccttacaggccggcgacctctggaccgaaacaggccaagaggcgagcagaatctcgtggactggatgaagccctactcttccgacgccaagaagctcgaggctgcaattgacccaaggctccaggggaactacagcaaaagatcagctgcccagcttgcgtcggtggcgaataagtgcctggtgcgccatgccaggcaccgtcccaagatgagcgaggtactggagatggtgcggaagatcgttgagaacagcgaaaccggaacgccggagcatcccctgatcagcaattcagaggagttagttagtgacgaaaggaagcggaaacgccttggcttgaaaagaaggattgcagatattaaagctggggaagggagatggtttgcatggcaaaggtggacgcctaagcttgtgagaacacagtgattcagatcatcggtagataaggcgtttcttgcatggcttgacttgcatagttagtagcaaaaacggtaagtcacctgggttttcttttagcaaacaagtcacagagcatggcaattgtaaacaaacggtttggtgcagtccatggcagacaccactaataaataatggataggttcacattttctgggatcacaaataggctgataggaaaccttctccacaaactcggggggttccatgtttcttattaagctcaagcagtcattttctcgtgtagaaggcatatcgtatagtttactcggttttgtagagtgacttttgagatgcatgatgtgccaaataagagtgttcttgtagtgcca

SEQ ID NO: 7307 - DNA, 1920 bp, Zea Mays
ggcggggacgtaacgccattgacagcgattgcgtgtacggtgaaggttggttgggaggttggaggggtaagggaagggccggcttgaaaaaaaaatgtttgctgccatggctgcctcatcgactccctgggcgtgacgacgtcgttgctctcgtgggcgtggtcgtgctcgtgcctgcctgccactggcctaatttctccagatttgagcaggcgcggcatctctgagcatcagaagcgccatgcactgcttccggttcgcgagctgggagcgggacgccgacgagcggcgcgagtcggcggcggcggcgaccacggggcggtccttgtccgcgcggtccaacggcagcaccacgtccacggaccgcgacgtgcggcggtcggcgtccgagtgctccctgaaggcgtcggagctcagcagcgccagctccttgggccggggccggcagctgtcgctgtcgcagcggccgccgaacacgctccgcgtcttcaccttccaggagctcaagtcggccacccgcgggttcagccgcgcgctcatgctcggcgagggcggcttcggctgcgtctaccgcggcaccgtccggagcgcgctcgagccgcgcaggagcctcgacgtcgccatcaagcagctcggccgcaagggcctgcaggggcacaaggagtggatgacggaggtgaacgtgctcggcgtggtggaccacgccaacctggtcaagctcataggatactgcgctgaggacgatgagagggggatgcagctgctgctggtctacgagttcatgcccaacggcagcctggcggaccatctctcctcgaggtcaccgcggccggcgtcgtgggccatgaggctcagggtggcgcttgacacggctcgagggttgaagtatctccacgaagaatccgaattcaagattatatttcgcgacctgaagccttccaacattcttctcgacgacaactggaacgccaaactgtcagacttcggcttggcgagattaggacctcaagaaggaagccatgtctccacagtggtggtggggacaattggatacgcagctcctgaatacatccacacaggacgcctcagcaccaagaacgacatatggagcttcggcgtcgtgctccttgagctccttacaggccggcgacctctggaccgaaacaggccaagaggcgagcagaatctcgtggactggatgaagccctactcttccgacgccaagaagctcgaggctgcaattgacccaaggctccaggggaactacagcaaaagatcagctgcccagcttgcgtcggtggcgaataagtgcctggtgcgccatgccaggcaccgtcccaagatgagcgaggtactggagatggtgcggaagatcgttgagaacagcgaaaccggaacgccggagcatcccctgatcagcaattcagaggagttagttagtgacgaaaggaagcggaaacgccttggcttgaaaagaaggattgcagatattaaagctggggaagggagatggtttgcatggcaaaggtggacgcctaagcttgtgagaacacagtgattcagatcatcggtagataaggcgtttcttgcatggcttgacttgcatagttagtagcaaaaacggtaagtcacctgggttttcttttagcaaacaagtcacagagcatggcaattgtaaacaaacggtttggtgcagtccatggcagacaccactaataaataatggataggttcacattttctgggatcacaaataggctgataggaaaccttctccacaaactcggggggttccatgtttcttattaagctcaagcagtcattttctcgtgtagaaggcatatcgtatagtttactcggttttgtagagtgacttttgagatgcatgatgtgccaaataagagtgttcttgtagtgcca

SEQ ID NO: 7308 - DNA, 1551 bp, Zea Mays
tccttgtgtagctcgccacctcattagagccaagaagccaatttcctttcccaaaaacaaaaagaggcaccaagggagaatcagcaagacgacaccatggcagcggcccactacggcaacggcagctcgacgagcggcggcggcggcggccgtggccgcgggaagcccatcacatgcaaagcggcggtggcgtggggtcccggagtgccgctgtcgctggaggaggtcgaggtggcgccgcctagccccatggaggtccgcgtcaaggtgcttttcacctccatctgccacaccgacctcagcgcctggaagggagagagtggtagagagcgtgggcgaaggagtagaaggcctcgccccaggagaccacgtcgttccgatcttcaccggggagtgcgagaaatgcgtgtactgcaagtccgacaagacaaacctgtgtggaacctaccgtgtggatcctttgaagagcagcatggtctacgacgacggcacgaggttctccgtggtggaccaggcgtcaggccagcggcggccggtgtaccacttcctcaacacctccaccttcaccgagtacaccgtgcttgacgcggcatgtgccgtcaaaatcaaccctgaggccccgctgcagaggatgtgcctcctcagctgcggcatctccacaggagtgggagctgcgtggaacactgcaaacgtttctgctcggtccaccgttgcagtgtttggactcggcgctgttggtcttgctgtagctgaaggtgccaggctacgaggggcaactcggatcatcggcgtggacgtaaacccttcaaagttcaccaaaggtaaagagatggggataacagacttcatcgaccctaacgacatctgtgacaaaccggtccatgaggtgatcagggagatgactgacggaggtgtcgactacagcttcgagtgtaccgggataaatgatgtgctgagagaggccttcttgtccacgcatgatggttggggcctgacggtggtgctagggatccattcaacgcccaagatggtgccgctgcacccgatggagctctacggccgtaggatcaccggctgcgtctttggcgacttcaagggcaagtcccagctgcccgacctcgtcgataagtgcgtcaacggggaggtcaatataaacttcgatggcttcataacacacaagatgccattctcgtacatcaacaaggctttccggttactcgaggaaggcaagtcgctgaggtgcctgctcagtctctgatcgacaatacttcatcagcgaggacagttttggattattgagtagcaaaataaatgtacaaggaaagtttttccctagtacattcgcttcttataaaacgaatgcatgcaacttctttcgttctttgaagaagacaaaagggcacaattattctggagcaggtattgctaatcattttatcgctggttcactgccgaccaggacaacattcaggcagctttgcttggcgctctgatcctcccagacctaggattctgctggcaccgtctcaactacagtttcgtttgcattta

SEQ ID NO: 7309 - DNA, 3426 bp, Zea Mays
gttgaattgagggatttgggcgtataaatggccccctccctttccaaacccctcctccgtctatccccacagccgccttgcctccattgtctctccactcccttctcttccctctcacctcctaaaacctccattgcccgcgcgcacgagcgcccgcgtcgaggactccagctcgtgtgtccgtgcgaacgcgcggttttcttgtcacgaactgtcgctccggtcaggggattgaggaggtggggcggcggcggcggatttgtcgggcccgagattcccggacaaggagaaatgaagtacgtccttgtcaccggcggggtagtgagcggcctgggcaagggcgttacagccagcagcatcggcgtcgtcctgaaggcgtgcggcctccgcattacgtccattaagattgatccttatcttaacactgatgctgggactatgtctccattcgaacatggtgaagtgttcgtactggatgatggtggcgaggtggacttggatcttggtaattacgagagatttttggacattaaacttactcgggacaataatataaccactggaaagatctatcagtctgtaattgacaaggagaggaaaggggaatatttgggaaagactgtccaggagtggatcgagcgtgttgctaagataccagttgatggcaaggagggacctgctgatgtctgtgtgatagaattggggggcactataggtgatattgaatctatgccatttattgaagctttgggtcagttctcttatcgtgttggtcctggcaacttctgcctggtgcacgtcagtctagttccagttttgaatgttgttggtgaacagaaaacaaagccaacccagcatagtgtacgtggtttgaggggactcgggctcaccccaaatattttagcttgtcgcagtactaaggaattagaggaaaatgtgaaggagaaactctcccagttttgccatgttccggcagcaaatattatcactttgtatgatgtttccaatatctggcgcattcctttgttgctacatgaacaaaaggctcatgaggctattcttaaagttctgaatctggaaaggatggacagcatcgctcgagagccaaagttagacgaatggattgcaagagctactatatttgatacccttcatgacactgtgaggattgctatggttgggaagtacactggcttatcagattcatacctctctgtgttgaaagccctcttgcatgcatctgttgattgccacaggaagcttgttgttgattgggttgcttcaacggatcttgaggactccactgcaattgaggcacctgattcatataaaactgcgtggaatttactgaagggggcaggtggaattttggtacctggtggctttggtgacagaggtgttcaagggaaaattttggctgctaagtatgcccgtgaaaaaaatgtcccatatcttggtatatgtcttgggatgcagatcgctgtggtggagtatgctcgtcatgtcatgaatcttactgatgcgaacagcactgaatttgatccaaataccaagaccccttgtgttatttttatgcctgagggttccaaaacacacatgggtgcgacaatgcgattaggatcaaggaggacatttttcaagattgctgattgcaagtcttctaaattgtatggcaatgtcacttatgttgatgaaaggcatcggcacagatatgaggtgaaccctgatatggttccagagttcgaaaatgctggacttcagtttgttggcaaagatgatactggaaggaggatggagattatcgaaatacccaaccaccgatattttgttggcgcacaattccatcctgagttcaagtcaagaccttcaaaaccttctcccctatttgtggggctaattgcggctgcatctggacagttggatagggtcctgcaagaccgctgcactggtcatgctgtttcagagaaacatgttctgagcaacggctcatatacacccgcaatacaccaaaatgggcacccaaagaagctcccaaatggtctatcaaacggaacatactatggcaatggcaatggcgtgcatgcttaggagcatcagtggatggatcgaggatttgcaactttttgcttacagatttgcgattcctaatgcatcagttttgtcgtggctggcttgactgactaccatcatggtcgctcgagaaacaaaaagttcctgtgctcgatgtggactgtctggtagggatagtgctcgttcggtggtttctagcgaagcgcgagatagtggtttctgtgttcgccgatctctaccctcttctgtaagcaaatggagcagatttgggtcagaagagtttacatgctgtacatcctaaagaaaagctgaatgttttggttgctcaaattaggttttcagtgaggtctagagctgatgcttagaaatgcgcagcagtgcaagagagtatttcgaaattaagcaagtctgtattttgaatttggatacttttttttgtgcttgtgcgcaaataagttgatgccctgcttcatgatcatatcaatttgtcttccctctagcgcttgcttctccggagagcatctcgaagagatcccaaaatttaatgtcccaataccagagaattaggatcttctttccagaaaaaagtgaagagatcctaaaattaaatgtcccaataccagagaattaggatcttcttaaatctcttaattcttaaatctcttaattccaaaaataggtgaatcatctctaacagcttccaatatattctcaaaaatgcaatgaatagagccctgcacaactgtatctacggccatcgttcacaataatcctccctgcgccaccaaagttgcctcgcccagcaacctccgtcgttgctcacgtgtatgcagtcatttgcttgaataccggcatcaaaggatcaccgtcgctttaaatttagctaatattagaaaaaagcgtctccaataaactatgtaaatagctttttaaatttagtggctctatatgcttccaacttcgttctctatttttggatagtctgctttactgttcctttagtccttaagtttactgagtctattggattatcctacactttttctgtaaaatctatttccaagggtatctaaatcagtaaatttggctatctttaggtgctggtaggcaagctgaaaacatataagctacaaacatccaaaacttcaatccatataccacgataaactctttgtgtcaacaactagaccttgaaaaggtttgtataattgttattcttacaaccatcgagaacttaaaaaaaaatgaacgttcttctgtcaacaactataacgtcaaaagatagaaaaaatataaaactgaaattctatcaagagagctgaaacattattctgtaaggaacaaggctcggtattc

SEQ ID NO: 7310 - DNA, 1272 bp, Zea Mays
atgtctggcagtagccctgcaaccgttgcgtttagaaagtgctgccaatttagaaagagctcgcttgcaaagaagctccacccagacacaaataaaggtgatgcggatgcagaacgcaagtttcaagaggttcaacgagcttatgagactttaaaggatgaacaaaaaagatcattatatgatcaggttggccctgatcagtatgagaaaactgcttctggcggaggcggaactggcttcgagggtggttttggaaatccatttgaggatatttttggtggtggcggtggcggtggtggaatgaatgatttctttaggaacattttcggggatagggactttggaggacgagatgttaaggttgcactcgaactatcatttgtggaagcagttcaagggtgcagcaaaacggtcaccttccaaacgtctgtaacatgtgaaatctgtggtggagccggtgtgcctcctggaaccacacctgaaacatgtctatcttgcagggatattcatgcaaaccgggccattcaggatgcaatcaacctgcacaaaatgtggtggttctgggaaaactgtgaaggaattctgcaaggcatgcagaggaaacaaagttgtgcctggaaggaaatcagtccgccttgacatactgcctggttcggataatgaggacaccataaaggtggttcgatcaggtggagaagacccagatggccgtccaggtgatctttatgtgaccctcgaggttcgtgaggatcctgttttccgaagagagaaaggtgatattcatgttgatgctgtcctgaatgtgactcaggcaattttgggagggacagttcaagtcccaactctcagtggagacgttgttctaaagatcaagcccggtactcaacctggtcagaaggtagttctgagaggaaaagggatcaagacaagaaactcaccgtaccacggagatcaatatgtccatttcaatgtcaacatccccgaaaatttgacgtctagacagcgggagctgatcgaggaattcgcgaaggaggagcaaggcgaagacgagaaggacgccaaggcagcagctggagcatcggggggatagccggttttaggagccacagtagtgccttttagctggtatttataccgtgaccgtagacctgtctcaaattcgcagcggaaagatttatagataggtctttgtttcggattttgtagctggaataaatgaataatacgtctagaactgattttctgtctttttcgtaaaaaataaaaacaaat

SEQ ID NO: 7311 - DNA, 1349 bp, Zea Mays
agggtcaatggtgtgccagataggcccgcgcaaactaactattggacgcattggaaggcccgcgactgcggctgcgcggcctgcgcctgcgcctgcgcaggcgcgcgtgtgaacaaacgtaggaggacctatctcttttcgttctccgagagaagtcttctctgtcacagcgccgacgcttctcaattccttccaatcggcacctcgccgtcctcgtgtgcaatccccagctctcctcgcccctccctcccaaactccagcggcccccctgaccaagctccggggacggatggacggaggagccggctttccgggcacgcagccggtctcccgctcgccggaggacgtcttccgggactaccgcgcgcgccaggccggcctgatcagggcgctcaccaccgatgtggagaagttctacgtgatgtgcgacccagagaaggagaacttatgtttatatggacttcctaatgagacatgggaaataaacttgcctgctgaagaggtccctcctgaactgccagagccagctcttggaattaattttgctcgtgatgggatggatgaaaaagattggctatcacttgttgcagtgcatagtgattcttggctaatgtctgttgcattttattttggagcaaggaaacgtctcttcaccatgatcaataaccttcccagcatatatgaggttgtcacaggaacagccaagaaagagcccaaagaaaaaactcctaaaagcaacattaagactaacaaatctggctcaaagccctcgcgccatgcggaacccaactcaagggtcccaaagatgccacctccaaaggacgaggagagtgaagaggaggaaggggaaccacaggaagaccaggagagtgcgctgtgtggcgcatgtggcctaggttatgacgacttctggatctgctgcgacctatgcgagacatggttccacggcaagtgtgttaagatcaccccagctaaagcggaccacatcaagcagtataagtgcccctcctgcacgggaagcaagagggccaaggtttgatccacgatccaaggagcctttgacgagagctgtaagctgactcttcgtgctagggcagctaatagattcgaatgcttgttttgatacaaattatgagtactgacgaaccgtaaactgatgtagtttgtgtggccctcaaagcatctatgtcctgacttgtgtggtttaggtttcctttggcacagtttctaagagctgattgtctatgaatctaatatgagttttgtcaattagagagaagttgctatgctgaatttatgagctgattttataaagtgatgatataaaataaactaaaagaccagagccg

SEQ ID NO: 7312 - DNA, 4143 bp, Zea Mays
ctcacgttcattccgcgggcgcagggttctctctcgtggcgatcgctgaccgtagcggccaccctccgccaggtggccaggttttcgtgtggccctccgccatgtcttcgcaggaccctccgccggcgacgagcacccaaaagcagaagcaatcggagagtttggtaaacctactggcagaggcaagcagaattgttcaaggacctggtgtcctgcatccatggattagttgctgtattggccatactattggttcacgtgccagctaaattcaggaccttcacgattgaaggctcttctcacttaatgtgcctttgaaacattggcatctcccacaaagacaataaagaacatgttgactgttcctagttcccctttgtcacccaccaacggtggttcagtcaagattgtgcaaatgacaccaataacttctgccatgacgacagctaagtggcttcgtgaggtgatatcttcattgccagagaagccttcatctaagcttcagcagttgatgtcatcatgcgatagagatttgacaaatgccgtcacagaaagggtcagcatagttctggaagcaatttttccaaccaagtcttctgctgatcggggtggctcattaggcctcaattgtgcaaatgcctttgatactctatgggcagatgccagaaaaatggaggcttccaagttgtactatagggtattagaggcaatctgcagagctgagttacaaaacagcaatgtaaacaatctaactccattgctgtcaaatgagcgttttcaccgatgtttgattgcatgttcagcggagctagtattggcgacacataagacggtcatcatgatgtttcctgctgttcttgagagtactggtctaacctcatttgatttgagcaaaataattgagaactttgtgagacatgaagagaccctcccaagagaattgaaaagacacctaaattccttagaagaacaaattttggaaagcatggcatgggagaaaggttcatcattgtataactcactgattgttgccaggccatctgttgcttcagaaattaatcgctttggtcttctggctgaatcaatgccatctcttgatgacttagtggcaaggcagaatattcatattgagggcttgcctgctacaccatctaaaaaacgtgctgctggtcgagacgacaatgctgatcctcgatcaccaaagagaccatgcaatgaatctaggagcacagtagtagaacacaatttgcagacacctccacccaagcaatgccacatggtgttgactagtttgaaagcaaaatgccatccactccagtccacatttgcaagtccaactgtcagtaatcctgttggtgggaacgaaaaatgtgctgacgtgacaattcagatattcttttccaaaattctgaagttagctgctattagaataagaaacttgtgtgaaaggattcaatatatggaacagacagagcgtgtctataatgtcttcaagcagattcttgatcaacagacaacattattttttaatagacacatcgatcaacttattctttgctgtctttatggtgttgcaaaggtttgccaattagaactctcattcagggagatactcaacaattacaaaaaagaagcacaatgcaaaccagaagtttttttaagcatctatattggaagtaggaatcataatgggcagccaagcctttcctggtgtcattaatatcatctggtactcgtccagaagacaagaagaatgctagtggccaagttcctggatcaccgaagctatctcctttcccaaatttaccagatatgtccccaaagaaagtttcagcttctcataatgtatatgtgtctcctttgcggcaaaccaagatggatttactgctgtcaccaagttccaggagtttttatgcatgcattggtgaaggcacccatgcttatcagagcccatctaaagatttggctgctataaatagccgcctaaattagtatgaatctcaaaacgacactttcttttgtacatcatgatttcatgtctacaacactaatttataccactccgtttcatgttaaatttgcagtaatggtcggagagtaaacagtcgattaaactttgacatggtgagcgactcagtggtagctggtagtctaggccagccaaatggtggttctacttccttggatcctgcagctgcatttagccccctttcaaagagaaagccagatacttgatcaaatataaatggcgatctctctcgtatatagctcacagctccatagcagtctattcttctgaataagtgggttgactggagtgatttaactgtacatgtatgtgttagtgagaaccagcagtttataggcagcaaactgttttaaattagctttgaggttttatcaccatttccctgctgattgaacatattttagattgtaacatctgctttgtagaatgctaatgaatctttagttttcagtgggttgacattaaaaatccttatcctagttggctggttgttgggagacattcatcaaggttatatttggtcgtcaaatagtactgtacttgattcatatctttcatatttttcactagcgttggcaaccgtaaattgctttcctgactaggaacatattcttcacaagtatggcaactctaaactatttgaccttttatattctcatttttaagtactttctctatttctgctacttttgtactgtgtatttccagcttctccaccagactgattgttagagtgtatgctcctatattatccatgtatgtgtaaaatgggctgctagcccattagggttagggttcccctgggtctatatatgtaaccaccctctatgcaatagaagttgaatatcagtttctatcactaatgattccatattcagtgggctgcaagtgatttgacatacgtgccttatccttcaggtatgtctcatgttgactttgcttttgtaatggtactgttggcttcattgctggaatgctggttataatcaacctttactgctctatattgttctttttttggtttgcacaaccagggtggttggttttctgaatcaatcaatccatttcctcggacacaagataatttttgtatgttacacttcccaaaattgcaattaattcagaagtctgcctactttcattcagttagttctcagcaacactgaaaggatatgaatcagtcaacccgatagatgtttatctggttattccaaacaatctgacatcacatctgtttctgcaggcgagataaggaaaatctgaaatgctatcaccatttaaaacattggctcctggaagttcaggtgattaacaaacctccttcatctacatctgacattggcatgtatggtagagtccagcaactcttgtgatggcaggagtcgttcttaaacagcaactgctccttcgttcagcgcttctcatttctgattgtattgaccgagagcatccacctttccttctggtatcaactgaatgagttgccgacaccgacccatctgcgcataatggcaggttaggtgttgctgtagaatgagatggttaccatctttacaagctcaggctatatgatttcagcagcactgtaacctggggtgcaaatgttaaggccctgcaagcactttccaggccacaccaattctgcttggttcttgaagatacattcttcctatggtgccccctatataaaagccatttctggttgttatgtttatccttgacatgtcaacagattagtgttgggttgcagtcatgcggtccttaagtctcggagaaggcgagaagtcattgctgctagcattgtgatcgtcggccacgaaagtaatcaaaaagtgagagctacttgttcctagcaaatggagaagggcgatatataggtttatgatcaaattcagtgtatgcaagcagcatattttgtttagagttagcttttgaggttcatcatttcatttcacagctgattctctatgttgtaactccttagtcgtgtagaaattagaatgctatctgcttaatttttagtgaataatttgctagtatattttttaatgtaattgcagtagctctgcctcttcattaaggaattgaccccgttttaaggaaaaaccagtcca

SEQ ID NO: 7313 - DNA, 2342 bp, Zea Mays
ttctattataagtagcgggaagagagattgataccttccgaactccctctccctcgtagccccaagtggccagctaattttagccgaggctccaactccaaggcaacggacgcacagaggatcaggaaggaagaaggggtcgcagccacaagggtgctttccaaatccacggctagcttacgcttacggaaagatcataggggcttactcggagcaaggaggcgcctgtttgcaacgacgaacgcgagattagagggagaaaccaaacgccgcaggggatgaagtcgccgttgcgcaggctcaggggcttcggccaccaccaccccaaggagcggagggggcaccagccgccgccggccaagctcgacgagctcgtctgcgccgcccatgaggtggaagacatgagaaactgctatgatggcttgatttcagctgcagccgctacaacaaatagtgtatatgagttttctgaggctcttgaagaactgggaggctgctttctcgcaaaaactgcactaaatggtgatgacgatgatagtggtagagtgctgatgatgctgggaaaggtccaatttgaattacaaaagtttgttgattcttatcggtcaaatatcatttatactatcacaaccccatcagagtctcttctcaaggagctacagacggtagaggaaatgaagcagcaatgcgacatgaaaagagaggcgtatgaagctacgagggcatcctatagagaaaaaggaaggtcaaggcattccaaaactgaaacatactctgcagaacaactgcaaagtgctctcgctgagtaccaagaagatgcagcgctgttcatatttcgcttaaaatcattgaggcaagggcaattccatagccttttaacacaggcttctcgccatcatgctgctcagttaagctttttcaggagagggctgaagtgtcttgaggcactcgaaccccatgtaaaagctatagctgagagacagcacattgactaccagttcagtggtcttgaggatgatgaatctgacaatgatgattacagctccgaccaggatgattgcagcgaagacggagagcttagtttcgactatgaaataaatgacaaggaccaagattttcttgcttcaggaggttcgatggatttagataaaagagatgtgaagaattccccgcagccagtaaaagaaagcatgcaggaagaggtcaaacaaaccaagggaaatgttttgactccacgagtgaagccagagttgaatgcacactcaggcaatttacaggatccatctgagagattatggcaaatgaagccatcttcagccaagcattcgtacaaacttccaatgccagttgatgacaagcaggatcccagaccagtaggtgctcccagatcacatcattcccagcagttggaaagtaagcctcgtgtctcgatgaatccgtggcactcatctccactgacgaaagacttcaggccgggtggccatgtgaaaacggtatcgagtacggaggcgacatcgacgttctcccagtcggtttctggctacaagaagacgaagagggagtcttggtctggtccaataccaagcagaccagggctaagcaagccatcttctctgaacggccacaggtcaccacccatggcacatcttgtgacgccaggaaatctacagtgccactctcggcagccatccgtgtccccaaaagtctcccccaagatgctgccacatccaacgagatcaccaacgatcagtgagctgcatgagctgcctaggcctccagcaaacgtggagtccctcaggccttctggtttgatcggttactctggtcctctggtacccaagcgtcagactgaaatgcctgcagcatcacaaaccccctcgccacttccgctgccgcccgctaccctcactcgcagctattccataccctcgaatagccagaggataccaatcatcactgtggacagactgttggaggctagaaatagcagggacggcagtgacaacttcttccccaccacttactccgttgtcactggctgatttgtcccaacagcaaggaacaaaaacaagtacaagtcgcacaaggataaagggagccttgtgacagagagcaaccaaatgcagactaatcttagttgattttgcaagtagtgacgtattgtaaattcatattcatgatattctttcattcaccatctttgttgcaaaggaaaaggatggaaaagtaatatatactttggttacataatgcaagaataaaagtcctttgttccttcaatctatccaatggatagaaaggaggaataatatcatgatcatagacatttcaataatacaatt

SEQ ID NO: 7314 - DNA, 747 bp, Zea Mays
tgcaaaattgcaaatattcgtgtttgttgtgtcatccctgcgttctgatccaagatgtatctccagtattacatcaacgagaagggtgacaaggtctacaccaccaagaaggagtcgcctcttggggtgccgacgcagtctgctcacccagctcgcttctcaccagatgacaagtactctcgccagcggtacctgttgaagaagagatttggacttctgccaacgcagaagccagcactgaagtactgaagcttcaactttccaaccatggatgtgcagtttgtgtcactgcttaatgcttgttggttggaatgtagaaataggtatctgaggaaacatatcaaacactgctaggcactactatgacatctcagcgcattcaggcactatatgtaatgctatgtgtttgacaggtcttgttcttattatgtacttggtgtgtgggccaaagcatcgtttttggcgttctcttttcgtcttgattgatgacgtcccctttgctaaatcaatttgaagtcaggtctcaagtgctaatcaaggagggtaacagctttggacagctcgaatgtccagaggagacttgggaagaggttgctgaaaaagttcacaaagaccaatggcttaaattcaatggcacaatgatttatattatatggaacctttgaaggatcaattactaaattcaacggcacaatgatttatattatatatggaacatttgaaggatcaattactaaattcaatggc

SEQ ID NO: 7315 - DNA, 478 bp, Zea Mays
gaaaaagcggggttgtggttgtgggacagtgagaacgactagcgaggggagaccgagagagcagaggcgctcagcacggagcgaggcgccgcgccgtttccttttctgctccactgcaaccggagtccggagcatagcaacctcgctgggctcccatatagcgggcccgcggagccgggatatactccagggaagtcgagcaaggagagcgtggattgtggactacaggggtaaagatcgagtgagcatcgcttcaccatgcgcccttctctctgctgcgcacctctttttcttctgctactattacatttggcatttgctagacctctctttcctctaccgagtaagacaaagaatgaagagaagaagcccatacagacgtttcggccatataacattgctcatcgtggatcaaatggggaaattcccgaggaaacagctgctgcatacatgattatcagatatcgattactgcaaa

SEQ ID NO: 7316 - DNA, 755 bp, Zea Mays
gttgtagcaacctgtcagtgactcattggttggggagaccgaaagaaaaagcggggttgtggttgtgggacagtgagaacgactagcgaggggagaccgagagagcagaggcgctcagcacggagcgaggcgccgcgccgtttccttttctgctccactgcaaccggagtccggagcatagcaacctcgctgggctcccatatagcgggcccgcggagccgggatatactccagggaagtcgagcaaggagagcgtggattgtggactacaggggtaaagatcgagtgagcatcgcttcaccatgcgcccttctctctgctgcgcacctctttttcttctgctactattacatttggcatttgctagacctctctttcctctaccgagtaagacaaagaatgaagagaagaagcccatacagacgtttcggccatataacattgctcatcgtggatcaaatggggaaattcccgaggaaacagctgctgcatacatgagagctattgaagaaggggcggattttatagagtctgacatccttgctagcaaagatggggccttgatttgttttcatgatgtaacacttgatgatacaactgatgttgccaagcgtaaggaatttgccaatcgaagaagaacctatgaagtggagtggtttaatgttactggatggtttgtaggaatttattacatgctcatctatactggaacactatttacatataatatgttggcagtttgatgttacttggag

SEQ ID NO: 7317 - DNA, 517 bp, Zea Mays
catccatgtatccatccatccacacacacaaacagacaagcatacaacaccgttgccatttagctgttcttgctaggcagttgcgcgcttacattgagccgcagctagctgtctactacggcacaactatctcctgcgcgcgtgctcgatcgatctgaaggccagacctgtgcctgtccaattttgccttgttctacccaccacaccagtagtcgagaaggttccatataagcgcaagcagacagcagcaaaagagctaaggagagtctgagacaaggttcgaacagatggaggatgtggtgaagttcgtctttggagtttccggaaatgtcatcgctctcttcctcttcctttccccagtgcctacgttctggaggatcatcaggaggaagtcgacggaggatttctcgggggtgccgtacagcatgacactcctcaactgcctcttgtcagcttgttttcgaagccttgattccacgatgaaataaactcgccttcgcctagctcgtccaaacag

SEQ ID NO: 7318 - DNA, 1363 bp, Zea Mays
catccatgtatccatccatccacacacacaaacagacaagcatacaacaccgttgccatttagctgttcttgctaggcagttgcgcgcttacattgagccgcagctagctgtctactacggcacaactatctcctgcgcgcgtgctcgatcgatctgaaggccagacctgtgcctgtccaattttgccttgttctacccaccacaccagtagtcgagaaggttccatataagcgcaagcagacagcagcaaaagagctaaggagagtctgagacaaggttcgaacagatggaggatgtggtgaagttcgtctttggagtttccggaaatgtcatcgctctcttcctcttcctttccccaggcctacgttctggaggatcatcaggaggaagtcgacggaggatttctcgggggtgccgtacagcatgacactcctcaactgcctcttgtcagcttggtacgggctgccgttcgtgtccccgaacaacatgctggtgtcgacgatcaacggcgcgggcgcggcgatcgaggccgtgtacgtggtgatcttcctggcgttcgcgtccagccagcggacgcggctgcggatgctgggcctggcgtcggcggtctcggcggcgttcgccgccgtggcgctggcgtcgatgctggcgctgcacggacagggccggaagctcatgtgcggcctcgccgccaccgtctgctccatctgcatgtacgcctcgccgctctccatcatgaggctggtggtgaagaccaagagcgtggagtacatgccgttcctgctgtcgctggccgtgttcctgtgcggcacgtcctggttcgtctacggcctgctcggccgggaccccttcgtcgcgattcccaacgggtgcgggagctttctgggcgcagtgcagctggtcttgtacgccatctaccgcgacagcaacagcggcggcaagcagcaggccggcgacgacgtggagatggcctccgacgccaagagcagcaagaaggtcgccgacgacgtcggcggcaaggaggaccgcctggtctagcatggagctagccactttctctttcggtgcgcgagcgtatgtttcctccccccgtgattgtgtgtgtgtgcatgtatacgagagtgcgtgctgtactgtactacctctgcgtgtgtgcaataatgtaactgggtgtttcatctcgcaatggggtgtctctctccaagcgcgatttgctggccgtcggaggccaaggtggacgatagggatgccgtagttttccggcgccgctatgctagctgttcacatggtgccgatcggcgatcgtgagccacggacggagtgccttccaggccgcatggctgcttcgcgggcccagccata

SEQ ID NO: 7319 - DNA, 2608 bp, Zea Mays
atcagtcggatttggaggagccgaataaataaccaaggatactgcgaagggactcctcccggccccaaaagcactttccttgcgtccccgtcagggagggagggagggaggggagcattgctgtgcgggatggcgaggaggaggatgaggaggggaggcggtggcggtggcggtggcggtggcggggtggtggatgtggtgcgggtgcggcggctgctgctgctgtccctgacctgctgcagcagcatttggccaggcggacggatcttcgctgctgcggacactgaccccaacgatcttaacgtcctcaacacgctcttcaccagtctgaattctcctgggcagctcacaggttggcaggcgaatgggggtgatccttgtggccagtcatggaagggcattacttgctcaggatcaggggtcactaaaatccaattaccaaacttgtcactcactggaaatttggcctacaacatgaataacttgggttcattagttgagcttgacatgagccaaaataaccttggcggtggaggtcaaatacagtacaatcttcccaatatgaagcttgagaaactcaatcttgcaggaaatcaatttggtggaaatttaccctactcaatttcgacgatgcctaatcttaagtatttaaaccttaatcataaccaactacaaggaaacatcagtgatgtattttccaacctttacagtttgtcagaactggatctgtcctttaattcccttactggtgatctaccacaaagtttcactggattgtcaagcctgaaaaaagtgtatttgcagaacaaccaatttactggtaatatcaatgtcttagccaatctcccccttgaaactttgaatgttgcgaacaaccatttcactggttggattcctagtcagcttaagaagataaacagtctacagactgatggaaattcttggagcacaggaccagcgccacctccacctccatacacagcgccgcctcctcctccaaaccattggaatgctgatggttcatcaagttcatcaagttctggtggaagatctgggataggtggtggaggtgtagcaggaatcattatatcgttgctggttgttggatcagttgttgcatttcttgtgatcaaaagaagaaaacgcaaagctgctatgaaagaacattttgaacagcaccagccattcacttccttcccttcaaatgaagttaaagacatgaagcctgtctacgaggccaccacagtagacatagagtctttggcttcacctgcttcagttaatctgaaaccacctccgaagatagaacgaaacaaatcatttgatgatgacgatgatttttcaaacaagcttgttgcaaagaaaagtaatataacacctataaatgcaactgtttattcagttgcagatctacagatggcaacagatagctttagcttcgacaaccttgttggagagggtacttttggacgtgtttacagggcacaattcaatgatggaaaggttctggcgatcaagaaattagatagtactgtgatgccatttcaatcatctgatgactttgctgaactggtctcgaacatttcaaaattgcaccatccgaatctgaatgagcttgtgggctattgcatggaacatggccagcacttgcttgtgtatgatttccacaggaatggatcacttcatgatctactccacctttcagatgagtacagcaagccacttagctggaacactcgtatcaagatcgcactcggctctgcccgtgcactggaatgctggacttgcaagctttattcctgatgctgaattccaggcagcagaacaaagtgccggatacactgccccagaagtggacatgaccggtcagtacaccctcaagagtgatgtctacagctttggagttgtcatgcttgaactattgacaggacgtagaccatttgacagctctagacccaggtcagagcagtcacttgtgcggtgggcaacaccccagctgcatgacatcgacgcattggacaggatggtcgatcctgcactcaagggtctatacccagccaaatctctatcccgatttgctgatgtccttgccctgtgtgtccagcctgaaccagaattcaggccaccaatgtcagaggtggtgcaagcattggttcgacttgtgcagagggccaacatgacgaagaggatgcttgatggggatacttctcggcgaccagatgacctggaccaagatttcatatgacaagctgaactcttgtcagattgtatttatttcgttcgactagcggcccagcagagacataatcacacaagaggaagaaacagaactctgtcagcttcgccagtacataatcacaagtttttcttggtagcaaagttgtgctatatggttgtactgtgtctacaaaatagtaccttgatcttacgctaatggcatattgttataattctttggtaacttatatgcaaatgccccagataaacaaaactatggtgaagtgtgccgaatgttaaaataactgattagtccagtactgctgcatcaactgaaacaagttgcacagtggaaatatttatcttggtccctcaactatccccttgaggc

SEQ ID NO: 7320 - DNA, 1609 bp, Zea Mays
cctcaagcctcaacctccaaattctccctcgttgtcttaccgtgtcgttgttgccgggttttcttggcgagcgacggagccacagaaatggagtgcaatacgggcgcctaattttagcggcggggaggggagcgaagcctgggcagccactcgccggcctccaagaaaccgtcgccattttttcatccgagtgccgccgattttgatttcattattgtctgtcttcgtggggaaccaattcggttttgtttcggaagaagggagaggaggatgcagtgggcgggtctgagatcgcaggcgccggttcccacggcggcgtggacggggccgaggccaagaaccgcgaggtgcccgcagggtagattccccacagcgcgccgggcgctggtggcgtcggcagcggcctcggacgctaattcgagctcgaattcgccggggaaggacgaggagggggaggaggtggtgcgaagggagaaggaggagaaggcggtcgcgtcgcttctgatgagaagccagaagattacaaggaagcagcgaggttgagggactcgctgaggtccttcgaggagaaggagcctgtgttgtgcctccgccggttgatgaagaaggccattgaggaggagaggtttgaggatgctgctaaatacagagatgaattaaagattttggctccacactccctcctcaaatgttctagtgatgcaactactttggggataagagttcaagtcaggagcgtctatattgaaagccggagccagccattgaaagggcaattcttttttgcttatagaattagaattacgaatagttctcagcgccctgttcagcttctcaaaaggcactggattgttacagatggaaatggaaggacagaaaacatttggggagttggagtagtgggagaacaacctgtcatattcccgaagactggttttgagtactcttctgcatgcccattgagcactccaaatgggagaatggaaggtgactttgagatgaagcacatcgacaaggctggatcatcaacattcaatgttgcaattgcgccattctctctgtcaattcttggtgacgataatgatgttctgctatgaactacactgaggacttgcttgggagcaaatggattgaagggaattaagggggctacaatcccttactattcaattttgaatagtaagggattttagctcacaatccccttctgcaaacaagccctgagatttaaactagacacacaaacacaaatatttattgtaagtgatgtaattgagcgcaaggttcaggtggaactactatggttgacttatggctggagccaagtgccctggtgcaaggtcaggtagagttctctgggatgttgaatctggaccatgcgagtatcaattgtgaggcacaataggacatcctaccaattgtacttctaaatgtacagcatggaacttagagcttgctacatgtattatacagtacctttttatttttcccatcacggtatcaccttagttatcgcggcctttgattatattgtatatcagctcagcaaaatatggtgttttttgttggaactgcaatgtaagatgtttgatatgaccgttggtgcttc

SEQ ID NO: 7321 - DNA, 3661 bp, Zea Mays
gcctctttcagtttcaggcgttcaatcactagcgcggttatgctctgagctaaacccttgtagcagagcgaacgaggaaaagttctccgtttccactttcctcctttctccacgccccgaacctgcagaaatcaccctttccaccccaccccccgccgctcggatccccaggccagcacggcctcccctcctccccggcccggtccagcgggttgcatggtccgcggccgccgcttgtgagcccgatcgatggccacgacggaggcgcgccgcctcgcggtcgtgccgcagctagatatcgagcagatactgaaggaagctcaacaccgatggttacgccctgctgaaatatgtgaaatactgaaaaactacaggaatttccgtattgctccagaaccaccaaacagaccaccaagtggctcactttttttatttgatcggaaagtattgagatacttcaggaaggatggtcataattggaggaagaaaaatgatcagaagactgtcaaggaagcccatgaaaggttgaagggactatatgcacattgtacttgtgcattatcttgagacaaagggtggcaagtcatctcgtgctagaggaaataacattattcaagaagctgctgtgggtagtccttcacagattatggaggtagaaagctcacttagtggacaggcctcagaatacgaagaggcagaatcagaatatctaaagcaaaattcggtgcagcagatatttattcaggaggagctggatacgactctttcacttggatgcaacagcatgaaaatggaactggacccgtgatagattcttctctcttcagctcttacacacctgcttcgtccataggtaattaccaggggcagcatgccacacaaaataaaagcttctatcctgttaaccaacataatggtcctctcattcttaatggatcaagtgacatgcttggaacaaatggccgtgcaaatcaaactgatcttccatcatggaattctgtgatagaactggacgagcctggtcaaatgccccatctccagtttcctgtcccttctgatcaaggtgctaccacggaaggcctgggagttgattacttaacatttgatgaagtatattctgatggcctcagtctcaacgatattggtgcagcaggaactcatgggaagtcatatctgcagttctctagtgctactggtgatttgtctgcaacagagaacagcctccctcaacaaaatgatggttctctggaggaggcagccattggctatccatttttgaagactcagtcatctaatctatctgatatcctaaaagacagctttaagaaaactgacagttttacaagatggatgagcaaagagcttcctgaagtggaagattctcaaattcattctagttctggggggttctggagcactggagaagcaaatgatatcatcgaagcatcaagccatgagccgctggatcagtttactgtttccccgatgctctcgcaggagcagctctttagtatagtagattttgctccaaactggacatatgtgggttcaaagactaagattttagttgctggtaacatcctgaatgacagtcaaatcaccgagagatgcaagtggtcatgtatgtttggagaagttgaagttccagcaaagattttagcagatggtactctcatctgttattcgccccagcataaactcggtcgagttcctttttacattacctgctccaacaggttggcctgcagtgaagtgcgggagtttgaatttcgaccaactgtttcccaatacatggatgctcctagtccacatggtgaaacaaacaaagtttatttccagatacgccttgacaagttgttgtcccttgaaccagatgagtaccaggcaactgtatctaaccccagcctggagatgattgacttaagtaagaagataagttcactgatggcgagtaatgatgagtggtccaacttgctaaagttggctgttgataatgagccttctactgctgatcaccatgatcagtttgttgaaaaattgattaaggaaaaattgcatgtctggcttctaaataaagttggtatgggtggcaagggacccagtgtgttagatgatgaagggcagggcgtgcttcacttagcagctgcccttggatatgattgggctataaggccgacacttgctgctggcgtgaatattaatttcagagatgttcatgggtggactgcactccattgggctgcgatttgtggccgagagcggactgtagttgcgcttattgctctaggagcagctcctggagctttgacagacccgactcctgatttccctggaagtacaccagcagatatcgcatcagctaatggccaaaagggaatatctggtttcttggcagagtcttctctgaccagtcatcttcaggccctcaatctgaaggaagctaatatggctcaaatatctggtctacctggtattggagatgttactgagagagattcactgcatcctccaagcggagattcattaggtcctgttcgaaatgctgctcaagctgctgcgcggatatatcaagttttcagggtgcaatccttccagagaaagcaagcggctcaatctgaggatgataaaggtggaatgtctgatgagcgtgccctctcactcctttctgtcaagccacccaagtcagggcagcttgatcctctgcattctgctgcaactcgcatacagaataagttcagaggatggaaggggagaaaggagtttcttcttattaggcagcgaattgtgaagatccaggctcatgtgcgaggtcaacaagtgaggaagcattatcggaaaatagtttggtctgttggcatcgtggagaaagttatattgcgttggaggcgtagaggggctggcttacgtgggtttcggtctacagaaggttcagtggagagcagcaatggcggaacgagtagcagttcaatccaagataagccttctggggatgattatgattttctgcaagaaggacgaaaacagactgaagaacggctccagaaagctcttgcgagagtgaagtccatggctcaatacccagaagcaagagatcagtaccataggattttgactgttgtgtcaaaaatgcaggagtctcaggctatggaagaaaagatgctggaggagtcagcagggatggacttcatgagtgaattcaaggaattgtgggatgacgacacacctatacctggttatatttagttttcaaacctactttgttggatttctctgtagattgcctcctttgtcttgagtgctactgaattgatggcgcacatagctgataacccgaagtagcgttgctggagcagtggagcatgacctgacatgcttgaatttggacttagatgtagtatttcatttgccttatgtacagtagaatgttctctacatttgaggaagccttgtatttactgtgtgaaatcggtgtaaagagtttgacattagagatcttaccagatgacttaacggttgcatgtgtggcgtgcagtccagaagttaggaatttgacccgtcgtggctttctgaaccgatcaaaggctgtggccgtgctcatcatctactaccaccatcgcctcggccagaaccacgccgctcgcctagctagctggggtttgaa

SEQ ID NO: 7322 - DNA, 448 bp, Zea Mays
gccttgtactgcgaactctggacaaagtttcatgctgctacaaaggtttatagcgcacttgggcatggcttatgccatcacattttttgcctgttatctactattgaaggatgctctgcatacctcgtgagtgtttaatcaatctcggtgctgatttgttagttgtctttgagagggagttgccgagctttctcaacaatagcgatcgtggaaggcgtcaaccagattgtggatgttgaaactattctatctacttttggatctaagttataggatatttaaacatttttaatgtttgatacctggatgctttatgctttagttatatgtggatgctagaaaaagttgtgtacacatgtttttgacaaaattgtacacacgatttggattgcattcaattgaatgatcgttttattaactgacggtgaattaaatacgttataaacaa

SEQ ID NO: 7323 - DNA, 859 bp, Zea Mays
cagcacaccaatctttctcatggacgcacggacatgcctgctttctcgggcgtgctaggcgctatccctcctgagccgccacaaccaccgcctgctagcgcagccagcaagccgcttgccacgcgcgcgacgtcgtgtttggcccccaccgccgttcggccgccttccccgccgccggtccgcctactcttcttcgctagactgctccccttctccattgatcacttgctccactacacgcaagacgcaaccgtgcatgcggcctgctagtgcctagcttcctccccctctctatgcgcgccactccaggcgtcgagctcgcctctgcgggaccgtagcccccacccctcattggctctctgcgcgagcgtgatcgcgcttccgcatcccatgttcaatggagccctaaaggttgtgcttctacgaagatccaaaattccttggaccaaaagcttcagcttccaatagttgttaagggccttgtactgcgaactctggacaaagtttcatgctgctacaaagtgctctgcatacctcgtgagtgtttaatcaatctcggtgctgatttgttagttgtctttgagagggagttgccgagctttctcaacaatagcgatcgtggaaggcgtcaaccagattgtggatgttgaaactattctatctacttttggatctaagttataggatatttaaacatttttaatgtttgatacctggatgctttatgctttagttatatgtggatgctagaaaaagttgtgtacacatgtttttgacaaaattgtacacacgatttggattgcattcaattgaatgatcgttttattaactgacggtgaattaaatacgttataaacaa

SEQ ID NO: 7324 - DNA, 3176 bp, Zea Mays
aaaacctatcagttattcggtaccattgccatcactctctagtacgccgcaaaagacatcagccagacttcccaatttccggccacaaccatacctgctacgcttgcgccgccgcctccccccttgtcttcgcttcccgtgcaagcttcaccgccgccgtctccgactcccttcgcgatgcgaccgctttcgcgccacgattcctctatccccgccttccccgcccgcgccggttcttgcacttgaccgacccaatccgcctatctgttcccctcttccgtgcgagaggtactatcgccggccgtttcgtttcgaggctgatcggatcggcggcagatgggccgcgacgctgaggatacttcgtctccggtgtcctcgtcggaattggagcaggaagacgacgacgattgctacctgagcgatcagggggacgatgccctagaagagtctgttctccatgttctcgaggacgagcacctcgaggactgccattggtgatcaccaaggaatcccttttggtggcgcagagagaggatcttaggaaggtgatggagctgctagggttgagggagcaccatgcccggacgctcctcatccactaccgctgggacgtggagaggattttcgagcttcttgatcagaaggacagggataggctcttctcggaggctggtattcctcttcagtacaccaggaatgccggcccaacctcctcggcggaggtgacctgcaatgtttgttatgatgatgtgccaccctcggctgcctccgagatggattgtggccatagctactgcaatgattgttggactgaatatttcattgtgaaaataaatgagggtcagagccggcgtgtcaggtgcatggctccaaagtgcaatgctgtttgtgatgaagcaataattcgaaaactagtcactgcaagacacctatatatcgcagaacgctttgaaagatttttactggaatcatatattgaagataatgatacagtcaagtggtgcccaagcacaccacattgtggaaatgctatacgcgtcaagggcgatatttattgtgaggtggagtgcacatgtggatgccagttttgttttaattgctctttacgagcacactcaccgtgttcctgcatgatgtgggagctctggatcaagaaatgccgtgatgaatcagaaacagtgaattggataacagtaaatactaagccctgtcccaagtgtcacaaacctgtggagaagaatggtggctgcaacctggttgcatgtatatgtggacaagcattctgctggttatgtgggggtgctacaggtagagatcacacatggtcaactattagtggccacagttgtggcaggttcactgatgatcagactaagaagacagaacaagcaaggcgagacctctatagatatatgcactaccacaatagatacaaggctcacaccgactctcttaagcaggaagcaaagctaaagaatgagatccaggggaagatatccatttcagaaaataaggaatcaaagataaaagattattcttgggtcataaatgggttaaacaggttgttcagatcaaggcgtgttctttcatattcgtatccgtttgcattctacatgtttggtgatgagattttcaaggatgagatgactcctgaggaaagagaactgaagcagaatttatttgaggaccagcaacaacagttagaatttaatgtcgaaagactgtctggtttccttgagaaagattttcaactttttaccgatgatgaggtcatggatacaatgaagcatgttataaatctttccaatgtggttgataggctctgcaaacaaatgtatcaatgcattgagaatgatttgttatatcctctacgcacacctcacaacattgctccatacaaatctaagggcattgacagggcctcggagctcaatattagttgggatcctggtgaacaaagttcacagtcaacaaaacatagccaggatgaacacaggaacaaacaagcatcaaatatttcgggtaaacgaactcatgaattgcatggttcgagttcttctaacaagcgagagagggtagatgttaacggtggtggtggtgcactttttgatctcaacgtgccagctgaagtggtggacaagatctgaaacttcattatctgatgggtgatggcacattcctttgaactgtacagctgacttaagcttcgtcaccaacataaaggaaaaaatactgttcttttttgctgccttaccaccatagagtacctgcatgtcaaatttttaccctggtgcttgtatcccaaggtatagagtagcttttaagttatatgttgtatttcatggcatgatctgaagccaatgttcatagttctgatgaagttgtacccctcaagcaagatgaggatattttggaatagaaccatgcctgtgttgcaaattccagatataatgtatgcagcatggtgaaaagggaattgtttgttgagaagaatgtgagtgattatttcctggcaaatgggtggttctattgacaatgaagacaatgactgattcgtcgtattaaatgtgcactttgttgcaactggcaaccatcttgtttctaggacagctttgtattcaacctgtgaaaatcccggttttctgggcacacattccagattattatggataactgcattctactgtagctgcgggaggagctgcaagatatcaatcaggtgcggtgcgtgttgacagtgtgttccttcgtttcttcacattcaagtgttatccgccctcctgtattttaccaagataacactttctcgagaaaagggtcttagagttgtgttttgatgtgggactgaagaagagttttttttttatttcaacctaaattttgttttcaaggaagtcagaatttaagatctgaggagtgttaactagactgcttaattgattaaactgaaggctcttttgccaaattggatcaaaattgaaagttctgtttttgtacatagaaaagaaagaactctgcttacgatttggaatggagtgggtacatatttgtcaggtcaatatatgtttgtcaagtcaagctttggaccgtgcgttgaaacgtagcatcaagctatgccgtagctttctagaacccatgtagagacacgcatatggtgatccatggaaattgggagc

SEQ ID NO: 7325 - DNA, 1536 bp, Zea Mays
cccgtcgtcctctccatttccttctgtctgcttgccctcaaaccctagcccgtaccggcgtccaccttcgcgcaccctcgcctcaccaaacacccacggcgcattggcgcttccacctcttatcgtacgaaggcgagcggctttcacggtgtctctctgtcgcatgcaatggcaccgctgtttgaggggcgcccaacagctgcctgcccacggcatgctcaggggcgctggggtcccttgccgctgtccctgaagtctagcctgggttgttgatcttgccgcagatgcggtactccattacttctccgcccgcgccatcatttcggccacacctcagtctgttggtcggtcgcagatcccttgccccgtcgagcttaatatgcaatccgttgcttgtgaaggttgtggcttccttgggtgatgcttatttgagaacatagctgttgtgctctgagcatgtcctgtgtgcctgtcatggcggcttcttttggcgacatcataccaacatattcaatgtcaggctttaaaggagtgagctggtttctatattttaactgatgcaccttgatgctttattgagcggtgtctatgaaatgatttggatggaaggctatcctatgctgctgatcagtacttaatggatgggagaagggtcagacctcagataagtacctaacttgctatttcctatttttttatcacttttattgatgcccaattgcatctaaagtgttgtccacttctattgcagcagtgcttgaggattcagtgatcagcagatctgcaaggacaaaaggaccaaaggagtgagctggtttttatattttaactgatgcacctggatgctttattgagcggtgtctatgaaatgagttggatggaagattgtcgtgttttggacaatgccaacctttgtttccgctgtgcctgccaaggttgtggcttccttgggtgatgcttatttgagaacatagctgttgtgctctgagcatgtcctgtgtgcctgtcatggcggcttcttttggcgacatcataccaacatattcaatgtcaggctttaaaggagtgagctggtttttatattttaactgatgcacctggatgctttattgagcggtgtctatgaaatgatttggatggaagattggagaaacgcccatgggcctggcaaactgtggcatgtggctttgaactttgccaattggagacctgatgtggatcattttgggacgcgagttaagccccctgtttggagtgccagaaacaaaacagatggagaagggaaaaaggtgtcaggggataagagccagcgcctgatcaccgttttattcgtttttgagtaaactgtagcgagcaacaggtagcctataattgagacaatgctgaatggattgtagaaaaggatctgctttaatttccgttaatttagcgccttcagtgatgttcctagttgctggagtacatgttaagtatatttaccatttaaatcctcccaccactctcgcgtagctttataaaaaagctcttaataaacca

SEQ ID NO: 7326 - DNA, 772 bp, Zea Mays
cggttgccacacccggcccagcacaggcgtagggtttattggcatctgtctcctgtcgcgccggccaccacagcgcagaagaacacagcacccgcctgcctcgccgccgcaatggccgccgccgcctccgctgcgagatccttcctccggtccagcggctcatcgtctctccgcagcgcggtggccagagccgcctcgcgtgcgggaccgggaccggctccgctgccgaggcggatgcccacctctgccccccgtgtactcctaaggtcgccggtggaaatgagcagcgtgtgtctggagtccttgatgcccatgcacagcgccacggcttcagcgctcatgacgtcgcttctcgccgccccggcttgcaagggattcggttggctatcagaaggtcaagctgaaactagatgaacttcatgggacccaaaagctggtaatgatgacgtgtgacggtctctagatgggaattagcagattattatcccgtcacctcagatcttcagatggatgatttgtcgttactggagatctgcagtgatggtatcttgtctggattatggatacctcgtgaatttaaagtacttggttggcgtctcagttaacatgttttgtgctctgggattgcagtttgtatgaaatttgcagaattgatcctgagatttattttggctggttagctgtcaaaaagactttggtcttgacgacttgcctgatcaagtagatctggaatgaataaacttaatagaagggttttcacaccttttgcgtt

SEQ ID NO: 7327 - DNA, 1276 bp, Zea Mays
cggttgccacacccggcccagcacaggcgtagggtttattggcatctgtctcctgtcgcgccggccaccacagcgcagaagaacacagcacccgcctgcctcgccgccgcaatggccgccgccgcctccgctgcgagatccttcctccggtccagcggctcatcgtctctccgcagcgcggtggccagagccgcctcgcgtgcgggaccgggaccggctccgctgccgaggcggatgcccacctctgccccccgtgtactcctaaggtcgccggtggaaatgagcagcgtgtgtctggagtccttgatgcccatgcacagcgccacggcttcagcgctcatgacgtcgcttctcgccgccccggcttgcaagggattcggttggctatcagaaggtcaagctgaaactagatgaacttcatgggacccaaaagctggtaatgatgacgtgtgacggtctctagatgggaattagcagattattatcccgtcacctcagatcttcaggtccgttccgattttaaggaacatccatgacatgatacgtttattacaattttctagcaaatttctgttttcttacaaaatgtcctctgtggtagctgattctgataggcatagcgtgcaataatgatgtttatttctccaataagggctagttggggaactccaattttttgagggattttcgttttcccaagggaaaatgaactaatttcccttgaaaaaaatgaaaatcccttgggaaaatgttgttcccaaactagctctaaatattatgttacctcagttgtatttgttttcttgactttattgcatctctataggcctgtgattagtgcgatggaggtcaacttggatgaagactagactgctatttattttgccatctctgttgccttggttttgcccattataaatggaacatagagcaatgtagctttcgtcgctgttaatttatatgatgttattctagagcttgagcccagattattgtgtttctatttgtagatggatgatttgtcgttactggagatctgcagtgatggtatcttgtctggattatggatacctcgtgaatttaaagtacttggttggcgtctcagttaacatgttttgtgctctgggattgcagtttgtatgaaatttgcagaattgatcctgagatttattttggctggttagctgtcaaaaagactttggtcttgacgacttgcctgatcaagtagatctggaatgaataaacttaatagaagggttttcacaccttttgcgtt

SEQ ID NO: 7328 - DNA, 2270 bp, Zea Mays
ttcctcctgtcagggcgcgtgcatcccctacgaccagggcagcgtatatccttgtcgctcttcgtcgtctccccccacaactgttatattcccaccggcgccgccggctcttcgtcgtcctcctccgggtgtgccccagttcgctgcccgttccccagccgccgatccctcgatctccgctagcttcgttccttcgtacaggtgcttcacttcatccttgtgctttctatctgttcttctcatattgcgtgagaattttcatttcagttcatgtgagtcgatccttcaattttaaaactatgtatgtatgtcgggtgaacccggttcctcgattccccacaggaacggttgtgtttcagttcatgggagttggtccttcatttttaaaaattatgtatgtatgccgggtgaaatgaatccggttcctcaattcaccacaggaacggtcgagcagaaactagcagccactcccgagtcccgactcccgatcgcgattacttgccgcggcaccagtactccagcggccaccatgagcagcgggaagcgatccttcttcgcgcccaagaagaaggccaccaacccgttcgattccgactccgacgacgacaaaccgcagcagcggccagcgcgggcgtcctccgtgcctcccccggacgagcagcggggctcctcctctctcttcggcgccggcgacagaggcgggctcttctcttccgcggccaaccatcactaccggaacgacttccgcgacgctggcggccttgagggccagtccgtgcaggagctggagggctacgcggcgtacaaggccgaggagaccacgcgccggacgcgggggtgcgtcaggatcgccgaggagatgagggacaccgcatccaagacgctcgtcaccgtccaccagcaggggcagcagatccaccgcacgcacatgatggccgtcgacatcgaccaggatctctccagggtaactatagccttttcgaatttctttcgtttgcggtgtggcatcagtttatgagattgtttgtaccgctagcttagttctgttcgcctgaagaggggatagtcactgttctttcaaatctagtccgtttcagaaaccctgaaacccaacaagaggaggtgctaactgactaatttacagagggtaaattaaacctgcaatcgccaacatttttgcaagtttatgctgctccatttgcacaagccacaaggctaaccccgggatataaaagatcttatgctaataacgagccttattctgctcaagtagggcataatcgcacagcactctcaatttcaaaccagaattggacagttcctgaaatcctgaaatcagcagagtgagaagctattgggcgatcttgggggtctattttccaaaaagtggaagccaaagaagaatggcgccatcaggggtcctatgctaactagagatgattccttcataaggaaggggagtcatttggagcaaaggcagaaactagggctggcagatcatccacctccatcaaatgcgcgccaattccgttctgaaccctcatcagcacttgagaaagttgagatagagaaggcaaagcaggatgatgatctgtctgatctaagcaacatactgacggagctgaaagggatggccgttgacatgggctctgagatcgagaggcaaacaaaagcaatgggggatgcagagaaggattatgacgagctgaacttcagggtcaagggagcaaacactcgagctcgccgtctcctcgggagataaaaaaatgcatatattcttgtctcttggatggtccataacacattaactatatgggggcatcaaattctgatgattttgtgcatcagattttgattagcattgttaccgtggacatgtcggcgtgtatggtagttgagacatattttatatgtttgcttcttttttctatttttttagcattgcacgagcttaggatttcagtggattttacatggaaaaccttgtctgattagaaacttcttttcgggtaaataatgctgatacatagtgatttgtcgccgtacactcttcacaccatcaagtacctacgtatgagtagaaactttgccagcgatttacgaatgtaaacaccatatatactgatacggggcctgttgcatttatgcccgcattttatattgaaattgtgatggttgggttttgacaagtggaacccaaacaagaggaagtgtttgagcacagtaacgagacaaatatgaaataacggctcaaatgtcgtcaaccgttg

SEQ ID NO: 7329 - DNA, 6159 bp, Zea Mays
tccctttctatctccgtccccgtgaacccgcaccctccagcctcccgtgctccactggcgcccttctggaaccctcagccctcctaatctcagccgaagttattaacctctttttttcttatataggccaaattagttcccctcccgcgattccaaggctttgctcttcgatctcagccgcgccgtgttcttcgcggcgagttcggagcgttggtgcccaatccgtcgaggttgtgagttgcttccgctgctgctactgccgccgccaccgctggtgttagtgatctgatctggtgggcggattgcggcgcggaggtggaattgttttggctctggggaaagctagctatgcggattgaggcgtcgccggattgagcatgaggggcggggctgctggcggtggcggtggtaagcgtggcgcggatgatgggatcgccggatgggcggctcgtggagttgttcggtgcggtgaagtcgtggatgccgcggcggggcgaccactctccgccgcccgcgttgcagtcggacgcggcggctgggcagccgctgccgcatgacttgtcgagggacttctggatgccggaccagagctgccgcgtgtgttacgactgcgacgcgcagttcaccattctgaatcggcgccaccattgccggcactgcggccgtgtgttctgcgcccggtgcacggctaactctgtgccccgctcgccgggggacgccgcgagggaggacggcgagaggattagggtctgcaattactgctttaagcgctggatggaggaggaacccgcagcgcggggggccgctgcagggcaacagccgtctagcccgtctctgtctgccgctagtgtttgcagtgacaagtccagcttcactgggacgaatgggcaaatgtcgtcttatgcgaatattagctactccgaatttccggtccatggagagggcaactgcggcgaggatgacggctatcgtgaggagcagcagcctgctatggaccccgctccaaccatggagcctgcagcttacgctgataactcgtctgatcgattcaacttttgcttgcagaggagtgacgacgaagatgatgattacacagttttccgttcagatttggaagagcagcacatgcaaaattctgataaatattatggacctatgtattttgatggacatcatgttagctgtagtgatgacgcaaaagaatctacatccccaaggaaaaaattgacaaccctagttgattctttgggagcagataagaatgaagatcataacgttgatgagtgctgtaatgctcggtcttcttccatgtatagcatggaagtgctagataatgagcccgtagactttgaaaacaatagcttactttgggtagctccagaacccgaggacggagaggatgatcacgatggtgaacatgatgatgatgagggggtggatgctacaggagagtggggatatctacgcacaaacagctttggcagtgggcactgtcgaagtagagataagtcagctgaggaacacaagaaagccatgaaagacatagttgatggccactttcgggcgttagtttctcaacttcttcaggctgaaaaggtaccattagttgatgggagtggcaaagaaagttggctagatatagttacttctctgtcttgggaagctgcatctcttttgaagccagataccaccagcaaaggcggtcagatggaccctggtggctatgttaaggtgaaatgcttagcttgtggtcacccaagtgaaagtttcgttgtaaaaggagttgtttgtaagaagaatgttgctcaccggcgtatgtcatcaaaaaaggaaaagcctccaatcttgattcttggtggtgcactcgaatatcagcgtgtatcaaatttgctttcaagttttgatactttactgcagcagattatttgaaaatggctgttgcgaagatcaaagcacaccaaccaagtgttgtattggtagagaaatctgtgtctcgttatgctcaggatttatttctagagaaaaatatctcccttgttctgaatatcaaaaggccactgctggaaaggatatcacgttgcactggtgctcatatagttccctcaattgattgtttgtcatccgagaagcttggacgctgtgatttattccatgtagagaagtatgttgaagagcatggaaccgctggggaaggtgggaagaaaatgctgaagaacctcatgttttttgaaggctgtcccaaaccgttcggttgtacaatcttgcttaaaggtgctaatggtgatgagctaaaaaaggtgaagcatgttttgcaatatggagtatttgcagcctaccatttggcacttgaaacatcattccttgtggatgaaggtgcaactcttccagaactccctttgaagtcgccaattattgtagcttttccagacaaaccttccagtgctgatagatctatctcgacaatacctatcataccaatccctagtgcttcaccgccaaacagttgcctgcaagcatttggcttgcaaaatgatgatctgacatttgatggcactaaacgaatggaacaaacagcattgggagttccttatgaacaaacagcatctgttcagatcaatagccaaaatggacatattaccggttttctggatatggtccctcaatcatctgttggtcccttgtttcagcagtcggacattcactgtcctgatggtactggaggtgtgaacagaaaaatgaatttacaaggcagcctacctggaaccactagaaatgtgttggttaatgactttagccatagtgtatctactgctcatccgacaaatttggtgtcagctaagggtgacggttcacttgccaagaatcctgagattggtgacaagatagcagataagccggctgcccctctcaacgtacagatttctcatgacgatgagagcataaagaataattcagttgcaaaaacagatgaaattccagcatctccagcagaaaatcagagtatattagtttctttatcctctcgttgcgtttggaaagagagtctgtgtgagcggccacaccttcttcgcataaaatattatggtaactttgacagacctttaggcaggtttttgcgtgaccagctatttgatcagagcaagctttgccaatcttgtgagctaccaccagaggcccatgtttattgctatgtacatccccaaggcagtttaacaatatcagtaaggaaactttcaataaagttgcctggcaatggtgaaaatgatggtagaatttggatgtggcatagatgcttacgctgccctcgagtcaatgggctccctccagcaactaaaagagtagtgatgtctgatgctgcttggggtttgtcttttggaaaatttttggaacttagtttttcaaaccatgcggcagcaagtagggttgccagctgtggtcattcacttcacagggattgccttcgcttttacggcttcggtgaaatggttgcttgcttccgatatgcatcaattagagtccactctgtgtatttaccaccaccaaaacttgattttacttctgagcatcaggaatgggtagaagaagaagcaaaagaggtggatgactcagctgaacttctgttctctgaagttctgaacgcactccacaaaatttcaggaggaaggccaattacaggttcttttgatggcaacttgaagattcttgagttgagaagaaatattggagaactggaagagatcctggtggcagagaagactgactttatggagtcattaaagaatctactgaaaacggatatgagaaaggaacagccgttcattgatattcttgatgtcaacaaactaaggaggcacttattatttctgtgttacttgtgggatcaacggctgaaattcattgcaaattcaggtggcaagtactgtgatgcactagctggtttacggattgggagtgggaattctgattttaatggtaaaccagttggtgcagccccaaagctagagaagggctcaaaggctacagttctttcaattgctaaggaagggtcgttacaacagagctcttgtccatctcatggtgaagatgaggggttcaaccaagccaatgaatataatgaaaatatctcaaggaatgctgcagaattgagcggcactgaagattccattgcaaaaatcaatcatgctaccagtgcagatgttaaggatcgactggataaccaagaatccagaactggtgtacgcagggttgtttctgatggacaatttccagttgctactgacattccagacacattggatgcaaaatggagaggtcagaatgaacctgctcctgattcaaacttggcaaaaccaccactttcagtcgaagacacaacagttgatgttaaaagtcaagccaaggctgtgcatacttttactttcactgttcgttctggagatgcagcagaggaattacttagatggattaagatgccatacatgacatcaaacagttccttaaacacaacttctagttcaccactgagattcacttccttggcagagtacattcctaaatacgtcgagttgttttgtgatctatcacagaaaggtggagcaagacttttcttacctactggagctaatgacattgttattcctgtatttgatgatgagccaacaagtgttatttcgtacgcacttgtttcacccatgtactgcttccagttgtctgatgacagcagcaaaaatagagacaaggagtcttcacttccattgcctgtatatgattcaggaaattttaatccatttcatttgtttgaggaatttggatcccactacgatgttacttcatcagtgtctggagttagaggatcctttgctcctgatcaggtgcacttgagtgtttcttttgaagatggtgggccacttgggaaagtcaaatataatgtcacatgctactatgcaaaaaagtttgaagcactaagaaggtcttgctgtccatctgagcttgatttttttagatccattagtcgatgtaaaaaatggggagcacagggtggtaaaagcaatgtgttttttgcaaaatctttggatgatagatttataataaaacaagttacaaagacagagcttgaatcattccttaagtttggcactgaatattttaaatatctgtcagagtccataagcactggaagccctacatgcttagcaaaaattttggggatctatcaggttactagtaagcatgtaaagggtggcaaggagtcaaagatggatttgcttgtgatggaaaatcttttgtttggacggaatattaccaggctctatgatctaaagggatcttcaaggtcaaggtataatgcagattcaaatggtagcaacaaggttcttcttgaccagaacttaattgaagcaatgccaacttcaccgatttttgttgggaacaaggcaaagcggctactggaaagagctgtttggaacgatacatctttcctagctggaatcgatgtgatggactattccttgcttgtgggagtcgacgaggagaaacatgaactggtcttaggaattattgattttatgaggcagtatacatgggacaagcaccttgaaacatgggtaaaatcttctggcattctaggtgggccgaagaacgcttctccaactgtcatttcacctatgcaatataagaagcggttcaggaaagccatgtctgcttattttattgtcattcctgagcaatggatgcctgcaataatcaatccaagcaaatcatcatcaaatatttgccaagaagattctcaaaatgggtctcaagagtgatatgatgttcgataagtccggttttttgtcctgtcctgtcgtgaaaagttctgaactgctagtctggcgcaatgccttggctgctactgttgcgtcaaagtgatattctggctgaccgcattctcttgtgctaattggcacaggtccgattgcatcattgagtccctcaagcatcggatgtgtatattcccaaagatgtaattatgccctagtcgtagttttccccccttcaataaatcagttccatagtatcatcacttgtgtcgtcgtcgcttaatttttgttgtatgtatagaactagcaggacgcttgtttttgtggtcgttttgtatattattaaatcttccatttt

SEQ ID NO: 7330 - DNA, 1573 bp, Zea Mays
agtatatttgttccactgattcctctctttgcctggcagacaaatagcacacaatcaaccgtcgtctccttcctcgccttcataggcttctccaaattccaaatcgttgctagagaaaccaccaaaccggccggcagcccggcacctctcactcagtctctcaccccttgccaccactctcccgtggcgccttctagaagcttccggaaccagacaaccactgtgcgccgagttttctgaaggcggctttggtctttcgagatctcgttgtcggtgccatggcgggtcagtactgagtgcgcgggcgggagcaggtgaaggtctgccagctcgagatcccgatgcagatccgggagggcccggcgcggcggcaggcgccgtcggccgcgggggcgctgcggtcgccgttgtccgccatgatgctcgccatgttcgctaccatggcctccttctacgtcgccggacgattgtggcaggatgctcagaaccgagtctacctcattaaggagctagacagacgaacaggccagggacaatcagcaatatctgtggatgataccttgaaggttgttgcatgcaggcagcaagggaagcggttggcatcgcttgagatggagctggctgcagcaaagcatgaaggttttgttggcaaatatactcccgagacaaatggaactcattctgggaaaaagccactggttgttattggaataatgactagctttgggaggaaaaactaccgtgatgctgtcaggaaatcatggcttccgacaggttcaatgttgaagaaactagaagaagaaaaaggcattgtagtacgttttgttgttggaagaagtgcaaatcgaggagatacttttgatagggagatcgatgacgaaaataggagcaccaaggatttcttgatattggatgatcatatagagtcagatgaagagcttcctaagaagacaaaaagtttctttgctaatgcagcaaatacattcgatgctgcattttatgctaagacactttaagtgcaatgctcgaaactcactgggacaagccccgtgtatatataggttgcatgaaatcgggcgaggttttctctgactcaacccacaagtggtatgaaccagactggtggaaatttggtgatgggaaatcgtacttccggcacgcttctagtgaaatgtttgtcatatcaagggccattgctcagttcatttctataaacaagtctgttctccggacatatgcccatgatgatgttagtgtaggatcgtggatgattggccttgctgtgaagcatgtaaatgaagcaaagctgtgctgttcatcgtggccctcaggtgcaatgtgttcagcgctataacgagcaacaatgcatgctgaggagttttgcaaacatcgtgcctggtggataatacatgcaatatgagacactaccattgttggagtgacagaaatcaatagcaattcaggaaattattttggtccagaatatatatgtatgcgtaatgcgtgtcttcagacctgttgtcatggtggtgaagttggcacatacataaggatgtccttttgaagtcaagaa

SEQ ID NO: 7331 - DNA, 1847 bp, Zea Mays
ggtgctttttaccgtttcctttgttgcaaacgctaaatttctcacgaattcttccgtcgtcggcggcgcagattgaatgccaaaaccctagctcgccctccccaattccccatttcggccacaccctccttgcctccacggctccacccctgcttcaggttacctgtgccagcgacgccggtagaagccatggacagctctctcgcgagcgcggcggcgatagccgatcagcgccagaagatcgagcagtaccgccacatcctcgcctccgtcctctcgtcttccccaccggacatctctcaggccaagcgcttcctcgaccacatggtttcggacgaagttccgctcgtggtgtcgcgtcaattgctccagacgttcgcgcaggacctagggaagctggagtcggacgcgcagaaggaggttgcccactacgcgctcacgcagatccagccgcgtgtggtctccttcgaggagcaggtggtagtgattagagagaagcttgcagagctatatgagtctgaacaacaatggtcaaaagcagcacaaatgcttagtgggattgacttggattcaggaatcaggatgcttgatgacaccaacaaattatccaagtgtgttcaaattgcacgactctatttagaggatgatgatgcagtgaatgctgaggcttttataaacaaggcttcatttttggtcaccaacagccatcaggaggttctaaacttacagtacaaggtctgttatgcaaggattttggatctgaaaagaagatttctggaagctgcacttcgatattatgacatttctcaaattgaacaacgcaagattggagacgaagagattgatgaaaatgcactagaacaagctcttagtgctgctgtgacatgcacaatattggctggtgctggtccacaacgctcccgtgttcttgctactctgtacaaggtggtgcaacaaataccaattaatctggatgtttatggcttttctggatgaaagatgctcgaagttgaaaatatacccaatactgcagaaggtttaccttgaaagaattttgaggaaaccagaaattgatgcatttgcagaggagctgaggccgcatcaaaaagctttattaccagataagtcgactgtgcttgaccgagcaatgatcgagcataatctccttagtgccagtaaactttacacaaatatcagctttgatgagcttgggacattactggggattgatccaaggaaggctgagaagatagcatctcggatgatttatgaggatagaatgcggggctcaattgatcaggttgaggctgtgatacattttgatgatgacacggaagagctgcagcaatgggatcagcagattgctggactgtgccaagccctgaacgacatccttgacagcatgtcaagcaagggaataactattccggtgtgaataaatatctcatgctgtcggtcgatggtgcatggcagaactgcttccatgccccggaatccagaatcaacattttgtatagtttgcagctgcaaatgtgtatcttgtgattttggggggaggatgcttgtttaagtaacgctcactggataccttgtagcactactgtttcaagagcgctcgaatgattcagtaagggctttcggtttcatcagaatccatatgtggattggctgagtttcaatccatagcaagtcaaaattctttataatttttccaaactttttcaatccctgaggcataggaattaccgaacatagaattaagggaacaaggcctaaaccggcgggatactatgccagcaagtactagtagtataactgaaaactgctcaaggcaagagcagcataga

SEQ ID NO: 7332 - DNA, 1990 bp, Zea Mays
tttagatctcgagtttaattagacagaaatataaaaccctttttaagggacgatggccgaaaccaaactggtgctttttaccgtttcctttgttgcaaacgctaaatttctcacgaattcttccgtcgtcggcggcgcagattgaatgccaaaaccctagctcgccctccccaattccccatttcggccacaccctccttgcctccacggctccacccctgcttcaggttacctgtgccagcgacgccggtagaagccatggacagctctctcgcgagcgcggcggcgatagccgatcagcgccagaagatcgagcagtaccgccacatcctcgcctccgtcctctcgtcttccccaccggacatctctcaggccaagcgcttcctcgaccacatggtttcggacgaagttccgctcgtggtgtcgcgtcaattgctccagacgttcgcgcaggacctagggaagctggagtcggacgcgcagaaggaggttgcccactacgcgctcacgcagatccagccgcgtgtggtctccttcgaggagcaggtggtagtgattagagagaagcttgcagagctatatgagtctgaacaacaatggtcaaaagcagcacaaatgcttagtgggattgacttggattcaggaatcaggatgcttgatgacaccaacaaattatccaagtgtgttcaaattgcacgactctatttagaggatgatgatgcagtgaatgctgaggcttttataaacaaggcttcatttttggtcaccaacagccatcaggaggttctaaacttacagtacaaggtctgttatgcaaggattttggatctgaaaagaagatttctggaagctgcacttcgatattatgacatttctcaaattgaacaacgcaagattggagacgaagagattgatgaaaatgcactagaacaagctcttagtgctgctgtgacatgcacaatattggctggtgctggtccacaacgctcccgtgttcttgctactctgtacaaggtggtgcaacaaataccaattaatctggatgtttatggcttttctggtaaatatgggttgacagaaattatagcttctggcttgagctgggtggtttcagatcttgtccagtgccaaccagatgaaagatgctcgaagttgaaaatatacccaatactgcagaaggtttaccttgaaagaattttgaggaaaccagaaattgatgcatttgcagaggagctgaggccgcatcaaaaagctttattaccagataagtcgactgtgcttgaccgagcaatgatcgagcataatctccttagtgccagtaaactttacacaaatatcagctttgatgagcttgggacattactggggattgatccaaggaaggctgagaagatagcatctcggatgatttatgaggatagaatgcggggctcaattgatcaggttgaggctgtgatacattttgatgatgacacggaagagctgcagcaatgggatcagcagattgctggactgtgccaagccctgaacgacatccttgacagcatgtcaagcaagggaataactattccggtgtgaataaatatctcatgctgtcggtcgatggtgcatggcagaactgcttccatgccccggaatccagaatcaacattttgtatagtttgcagctgcaaatgtgtatcttgtgattttggggggaggatgcttgtttaagtaacgctcactggataccttgtagcactactgtttcaagagcgctcgaatgattcagtaagggctttcggtttcatcagaatccatatgtggattggctgagtttcaatccatagcaagtcaaaattctttataatttttccaaactttttcaatccctgaggcataggaattaccgaacatagaattaagggaacaaggcctaaaccggcgggatactatgccagcaagtactagtagtataactgaaaactgctcaaggcaagagcagcataga

SEQ ID NO: 7333 - DNA, 1499 bp, Zea Mays
gtcttccacagttccaccgcccgcagccagagccgaccaggtcactcgcgtcacatctgtgtcggtgctgggcgcgctccccgccggggacggacggttggtgcaactggaaagcgaggcgttttgttttctcccgtgctccccctcccggggaaggggcaacgagaaatcgaacccacacgcaacgcgacgcctccacccgctcgcctagtccagaatccagatccagcgcccgcatctctctctctcgcgcgcgcgcgcgagcgcgatgagctgccgcgacgggcgatcgtgctagcggtaacagcgagcggtgcgcgagggcggagtgggagtgtggatccgaggggcggcaaatctggcaggcgccgcggtggggctgcgggcgcgggggagggcggggggctgggcggacggcggggagggaggggaggactgcggtaggctcaggccctggcgcaggaggctgctcgcgtccatggcgctctcgtggtcctcggccctccgcctcgccgtcgccgccgtcctgctcgtcgccgtcgtcgtcgcgctcttcactctccccatcgagaagattttgaaggactttctggtttggatcaaggagaatttgggtccatggggtcctttggtgttggccctcgcttacatccctctgacagtcttagctgttccagcatcaattcttacacttggagggggctatctatttggcttgccagtggggtttgttgctgattccattggagcagcaattggtgcgactgctgcatttctgcttggcaggacgattgggaggtcttatgttctctccaaatgcaaagattaccctaagtttcaagcagtagctattgccatccaaagatctggcttcaagatcgtgttgctactaaggcttgtacctttacttccgttcaacatgttgaactacctgttatctgtcactcctgttggtgttggagaatacatgctggcttcttggttgggaatgatgccaatcactcttgctctggtgtacgttggaacaacactaaaagatctatcagatgtgacacatgggtggagtgagatctcgactactcgacggtggtcttgattatctgcgtcacaaaaattgcaaaatcatctctggagaaggcattggctgagaatggagagctccatgtaggaacatcgcagcttccaggtgtaacctctcccttggatctgcaacaacctcttgtaatcaagattgacacatcaaatgaagaccacgagaagtaaaagtgttgtgtttacaatctcagatgtaaattctttggttgttgagtcggtagactgtatatacacccatactctggtgaggcccgtaaatgggtaaaaaagacatcatccccccttccaaaaaagggaatgaagtttagtttactgataggttatagtaatacgatatgcgctttgtttcactccacgtgctaccttatctttggtgaaaatactcgcacttaactgggttgaga

SEQ ID NO: 7334 - DNA, 1671 bp, Zea Mays
ccagtcttccacagttccaccgcccgcagccagagccgaccaggtcactcgcgtcacatctgtgtcggtgctgggcgcgctccccgccggggacggacggttggtgcaactggaaagcgaggcgttttgttttctcccgtgctccccctcccggggaaggggcaacgagaaatcgaacccacacgcaacgcgacgcctccacccgctcgcctagtccagaatccagatccagcgcccgcatctctctctctcgcgcgcgcgcgcgagcgcgatgagctgccgcgacgggcgatcgtgctagcggtaacagcgagcggtgcgcgagggcggagtgggagtgtggatccgaggggcggcaaatctggcaggcgccgcggtggggctgcgggcgcgggggagggcggggggctgggcggacggcggggagggaggggaggactgcggtaggctcaggccctggcgcaggaggctgctcgcgtccatggcgctctcgtggtcctcggccctccgcctcgccgtcgccgccgtcctgctcgtcgccgtcgtcgtcgcgctcttcactctccccatcgagaaggaactacttgcatccagctcacggcattacctgccctggtagctttcatcttgactgagagaatttttctctgtatacaatgtgctatgggagcatgggtctatgggaaatataagaaactattcagagtcaggagagtttgatctgatccaagttgagtgccatgtttattttgaaggactttctggtttggatcaaggagaatttgggtccatggggtcctttggtgttggccctcgcttacatccctctgacagtcttagctgttccagcatcaattcttacacttggagggggctatctatttggcttgccagtggggtttgttgctgattccattggagcagcaattggtgcgactgctgcatttctgcttggcaggacgattgggaggtcttatgttctctccaaatgcaaagattaccctaagtttcaagcagtagctattgccatccaaagatctggcttcaagatcgtgttgctactaaggcttgtacctttacttccgttcaacatgttgaactacctgttatctgtcactcctgttggtgttggagaatacatgctggcttcttggttgggaatgatgccaatcactcttgctctggtgtacgttggaacaacactaaaagatctatcagatgtgacacatgggtggagtgagatctcgactactcgacggtggtcttgattatctgcgtcacaaaaattgcaaaatcatctctggagaaggcattggctgagaatggagagctccatgtaggaacatcgcagcttccaggtgtaacctctcccttggatctgcaacaacctcttgtaatcaagattgacacatcaaatgaagaccacgagaagtaaaagtgttgtgtttacaatctcagatgtaaattctttggttgttgagtcggtagactgtatatacacccatactctggtgaggcccgtaaatgggtaaaaaagacatcatccccccttccaaaaaagggaatgaagtttagtttactgataggttatagtaatacgatatgcgctttgtttcactccacgtgctaccttatctttggtgaaaatactcgcacttaactgggttgaga

SEQ ID NO: 7335 - DNA, 1501 bp, Zea Mays
aagtctcagtgcgctctgcctcgccacttcgccagtcgtcactcgtcaccaccgtcccgcccccgcgccgtcccacccttgctcccactcgttgcgccgcgccgcgcgatgcaggcccgcgtcgtcgtcttccccgtcaagggccgcgcctggtgcttcgccctcccgcgcgcctccgccgcagcgcccgctgctgatggcgccctcccgcgcccgaccctgagggacctctggcgcggcatctcctccgggtcccgcacggcgccggagaaggccgaggcggtcgtcgacttcgtcgctgacaagatgaacagggcgtgggtcgggttcgggagcgcgccggaggggtcgatgaagagccggatccacagcttcgggctgaagctgctgtcccgggtgaggccgtcggaggtgctcctgaagtccgtcaccaaggacgtgagcgcgctcgagatcgtgcatccggcgagcataaattctcgtcttgtgcgtcgacgtttgcggcatattgctgttaggtactaccgttaccaaacattccattcttttgggtgctatttcgtgcttattctcattggagagctctacagggaagtgagaggctcgagttactagtttctgactgctcagataagtggaaagttcttgaggagaagattaattcagtaaaggatggcaaacccagtgaaaatgcaaggaattctccttggaagctgcggccatcagaaaagcttgacaggtttcttgagggtagaaacttggatgaaggtttggattgtgataccattttgagtatatgccaggagtacgatttggacaagatcgatgttctcaagtacagggatcttctgtagccacatccagattgtttctctgaggtttatacgtttaaattcttctgctagtgagatcaagatgaagggtacaagagttgcatgaacccactaaccattggcggtcaaatgagttcttttaaatagcttcagattttcttgttatgtaccaaaccggtctgccactagtgcaatgatctcagaaacaaagaggacatcttatgaaactatagaagcccagggcagttgttcccaccgtgcaaatagagattgctagctgccaactttcccccgtcagccatcacaaattttagttgggatcaatgaacgacaaatgcaaagagcagggttgaaaattgagattggccatccgtacatgcttctctctctctctctctctctctctcttgtttgtggctctcaatctatctttggttgtatttgaatcttgtactgggatccaatgcatagccttctcgatctggagggattctagagctttgatctctcaggtgcctttttctgcacaaatgcatgactagcttcatatctggactgatgtagctgctcattgattcgatgtgcaacgactagtgatgagtgacgagattggatcagttcaggatggtgctaaccaccatctcctgccaagattgttcacagtcctg

SEQ ID NO: 7336 - DNA, 2473 bp, Zea Mays
cgcgaatgtcgcaatcccgtccgatccatctcgatttgaaaaccgcgcaggagcttcgcgtctcttcctccctcactaccgctccgctccgctccaaaaccctagacggcgcccgcagcccggagccccggatccgcgtcccgctcccccggcgtctctgcccgctgtcgccggctccccgatggacctcgcggggccgcgcggggccacggatcccgccggatcgagggccgcgccgccgcacgaggaattggacgggagaggaggaggggcgtgcagcggcgcggcagcagtggaggggagcgcgtggcggctggcggtcgctggactgggagatccaagggccggagttctggaatctttgggtcaacctgaagcacatttgcacacatgtaccatggatgttcctcagttgactgctgaaggtgccacacaacttggagatagagtgtctttattacaccagacagggacacttcagtcagaaactccttgtctgaccttaggccgtgattctaatgcagtatcaatggagaagctgcatgctagcgattgcttgccctgtggtaaagagaatgtcgggacaggactacaacctaaatctgatccagaacgtgctgataataggatgagtgttgcacgtcttgggttggaccttaacacagtagatagtcctgatgtagcagagcctaaccctttcttcccttacaagaaattggggcagtcaaaagtcagcgatccatcggaatgtggcagcactactggtgctatagaagaaagcgagtcacacagaaagtggagagaaatgaagcagaatggctttctttcttcatttcatgggaatgcggtggtgcctaggccacgtggtcgaccccccaaaaggaaaagggatgatgaattcaaaaagagcagttccacacagcatgtacaggctaacaagtctgtgaaggttgctgctcctagtggtctattatctgggctaaaccctggaatcattaaccatgtgagaaatagcaagcaagtttactccataataaaggctatggtacactctgagaggcttgagaatgagaaccactctagtcaaacaggtgaaagagggagagaagttaatgagagaattcaggatcagaaatatggtggtggtttcatgaagtgccatttgttgataaatgataataatgcggtgtttcaccaaacactgcctaacacatcgcagttccttgcacaggatggtgatagtcttaaactgcaactcccatccgcagtcactatgtcttcagataggaccttcagtacgtcagctgatgatcctgcatctaatcatgattacatgactgtactgtcagtaaaagcggctagtgttgcttctcaatggttggaattactgcatcaggacataaggggacgtcttgctgctttaaagcgcagcaggaagagagtcagaaatgctcttcacacggaactgccatacctaaccgcgacagaattttcatctaatcaagagaacgaatcatccattgcaaatacttctgagattggatgtactgacaaagcggtttcagaagctcatgtggcacgatggaggtctctgtttgttcagatggacaaaacacttcaggaggaagggaaacagctggctcgtcacgcgcgttgaccgcatgcatgcatatgattggtgacctgcaccggccgagcgtagtctgcatgcgcgagtacaacctagttattttccaccacttccacctgcacacgcagagatgctaggagagagcttcgctggtcacccaggccgacgcgagcctgattcccacgaacacatcaaccaatcacgcagattgagaacaagttgaagcaagtgcaagaaatgcaattgaattgtgataaaggcctcaaacacatgacctgtgaagctcctctgctaggacctatggctgaactatggaagctgaagaacccaaatatttccgagagcgagtgggcggtgcaagccgctgccgcatcgatctactcgacctgcaacatggtcatgagaacggagaacgtgccttgcttttgataccacacttgtactttagttttttgctttgggcgtgttcggctggctacaagccgacactgttgcagctgtttggattgctgcagctgcaatccatagagagaaaaatactgtagaagccgcagccgcagccggattgcagccgcagcaagccgcagcgaacaagcttacctcaaaccaggtcttctttcttacctttaccctatgtgaatcgtgatcccttgtccattacagtagtggcgactggcgagtgatgtaacaagaacaaacttgtgatgtatgttatcccgagcctacaatttcacaggcacatgaaacagcacattctttttcatggagttgaggatattcatatcctaccgttttggttcggtgagatggtcgaaatagagattgccaccttgttaaattttt

SEQ ID NO: 7337 - DNA, 1609 bp, Zea Mays
cgctacattctcacaaatggctgcgggtcgcacccggcgctcggcatccctccccgccgcaaagtcgcgccgccgtcgcctcgcacgcacgaacgccatcacttcgtcgcttacccatcagacagacaaacaaggccgaaactccacgacgtcccccgctcggcagcagcaacagccgagaccctagcgcagcatggcttggacaactgcggccacagtgtgctggcgcctgctccacctcccctccgcccgctgccctctctcgtcccgggcccggtgttccgctgcgcagagcccagacgccgtggacaaggagtacgccgacctcaacctccggcctctgtaccccaacaggggccatcacatgcgcatacggcagcacgtgaacccgctcagctcatccttctcggagcccacggggccgccagagtggaaggaggtgttcgacgaccccttgcttcccctcatggtcgacatcggctgcgggagtgggaggttcttgatttggcacgcgaagaattctggcaagagtcagaactaccttgggctagaaatccgccaaaagttggtggagcgggcacagttctgggtgaatgaattggagcttatgaacgtctattttatgtttgcaaatgcaacagtgtcttttgagaaaatcatatcgtcataccctggtcccttgtcacttgtttcaatactggtgagtgtagctgggtgctacatcagttccttagttatatctgttggctcagtgataattaatctgatcagcactttgttatttcctgatgttatggaaatggaactgagatttcagatgtctattcgctggttttgtagtgtcctgatccacacttcaaaaagaggcatcacaaaagaagagttctgcagcaaccattggtcgattcaatcataaataatctctgtttaggcggacaggtatagcaattccatagtccaagcattgtctttctaatctcaaaggcacggacccgttacttccaaatgctgtaataatcgttgctctactcatactaatcctgcaggctctatgcgttgcacggtgatagttaattcaagataacctaatgcattaatgccatacattttaattttgagctaaggccattttttgttatgtacatcattctagtttttgatgctgtgatctcccttgtgtctatcatgtctacacatgtccttcatttcttcaagctaacttagtgtattgatactaggttttcatacaatctgatgtactggaagtatctgtagacatgagggaaaggatggcttctggacaacccaatgggaatccggacagagcgagaaatccatgcagagcttgaaggagcaacgatatacaggagggtgtaccaaaagttgggaaaaaaaacaaagcatccaagtacaaagcctggcgaaccaaaacaaagagaagcccaagcaattagccaatgcttttgatgaagatgacaactggcataagtgttcctttgttggtcagattgtacttatggtgtttagcatcgggtgctgtcttcgttctgtccagaattcaggtctggaattgctcaccatctatcggtatgacatgtgcaatgactaa

SEQ ID NO: 7338 - DNA, 1980 bp, Zea Mays
cgctacattctcacaaatggctgcgggtcgcacccggcgctcggcatccctccccgccgcaaagtcgcgccgccgtcgcctcgcacgcacgaacgccatcacttcgtcgcttacccatcagacagacaaacaaggccgaaactccacgacgtcccccgctcggcagcagcaacagccgagaccctagcgcagcatggcttggacaactgcggccacagtgtgctggcgcctgctccacctcccctccgcccgctgccctctctcgtcccgggcccggtgttccgctgcgcagagcccagacgccgtggacaaggagtacgccgacctcaacctccggcctctgtaccccaacaggggccatcacatgcgcatacggcagcacgtgaacccgctcagctcatccttctcggagcccacggggccgccagagtggaaggaggtgttcgacgaccccttgcttcccctcatggtcgacatcggctgcgggagtgggaggttcttgatttggcacgcgaagaattctggcaagagtcagaactaccttgggctagaaatccgccaaaagtttaagagagaaaagaaagatcacaacagttttagaaacaaagaactgggaagctcaagcagcacccccccccaaaaaaaaggcataccgcaccctcataacacggaacaaagaaaatgaactgcagaatcgcatgccatcattttgctttcaaagacatttgctttgctgtttggaacaattctcgaagatgattcagtttcgttctttcctgaggttccacattacatagattgccaggctgttgaaatattttggcataaaagatataagcgtatgccagtctcacacggtccattgcgcataatgcaattatcttgatgtggacaaccccttaaatccaagttgtctgctgcggaatttcgtcttgtttggtggagcgggcacagttctgggtgaatgaattggagcttatgaacgtctattttatgtttgcaaatgcaacagtgtcttttgagaaaatcatatcgtcataccctggtcccttgtcacttgtttcaatactggtgagtgtagctgggtgctacatcagttccttagttatatctgttggctcagtgataattaatctgatcagcactttgttatttcctgatgttatggaaatggaactgagatttcagatgtctattcgctggttttgtagtgtcctgatccacacttcaaaaagaggcatcacaaaagaagagttctgcagcaaccattggtcgattcaatcataaataatctctgtttaggcggacaggtatagcaattccatagtccaagcattgtctttctaatctcaaaggcacggacccgttacttccaaatgctgtaataatcgttgctctactcatactaatcctgcaggctctatgcgttgcacggtgatagttaattcaagataacctaatgcattaatgccatacattttaattttgagctaaggccattttttgttatgtacatcattctagtttttgatgctgtgatctcccttgtgtctatcatgtctacacatgtccttcatttcttcaagctaacttagtgtattgatactaggttttcatacaatctgatgtactggaagtatctgtagacatgagggaaaggatggcttctggacaacccaatgggaatccggacagagcgagaaatccatgcagagcttgaaggagcaacgatatacaggagggtgtaccaaaagttgggaaaaaaaacaaagcatccaagtacaaagcctggcgaaccaaaacaaagagaagcccaagcaattagccaatgcttttgatgaagatgacaactggcataagtgttcctttgttggtcagattgtacttatggtgtttagcatcgggtgctgtcttcgttctgtccagaattcaggtctggaattgctcaccatctatcggtatgacatgtgcaatgactaa

SEQ ID NO: 7339 - DNA, 1739 bp, Zea Mays
aggaggcaagtcgtgccgtgccgtctgctccttgcctgctctgctggtctcgccgttgccggcttgccccgtccgtgcgtccatctgtttcctccttggatcctcgacaagcaatggccatggaggaggagcagacaccacccgagctgcgctacctctcgggcctgggcaacacctccttcaccaccccgcgcgcccggaacctgcgcacgtggctgtaccggatcaagccgtcggtgacccacgaacccttctatccgcggaaccccaccaacgagcgcctcgtcggcgagttcgaccgcaccaccaccgtcgccacgcccacgcagctgcgctggaggcccgccgacgtgcccctccacccgggcctcgacttcatcgacggactctacaccgtctgcggcgccggcagctcatgcctccgacacggatacgccatccacatgtatgctgctaacaagcccatggatggatgctccttgtgcaatgcggacggtgacttcctcattgttccccagcaaggaaggttatttatcacaaccgagtgcggaaggctgctggtttcacccggcgagatcgtcgtgatccctcaaggtctccgatttgctgtcgacttgccggatggcccctcgcgtggctatgtctctgagatcttcggcgcccattttcagctccctgatcttggcccaattggtgccaatggcttggcttcgccgagggatttcctttccccgacagcatggtttgagcaggagcaccaccctggatacacaatagtgcacaagtatggtggcgagctgttcagcgccacgcaggatttctctccattcaacgtggtcgcgtggcatgggaattatgtcccttacaagtatgatctgagtaagttctgtccattcaacaccgtcctcttggatcatggcgacccgtcagtgaacacagttctaactgcgccaactgataagcctggcgtcgcgttgcttgattttgtaatattcccacccagatggctggttgctgagaatacattccgcccaccctactaccaccgcaactgcatgagcgaattcatgggcctcatctatgggattggcagcagtcatgtgaagagatgtaaagacgatgcacatctgcaggctaaggccgatggttttcttcctggtggcgccagccttcacagctgcatgacaccgcatgggccagacaccaagacgtacgaggcaacgatcagccgtgctgctgccaacgagccatccaggctcagtggtacgttggcgttcatgtttgagtcttggcttatccctcgcgtgtgcccatgggctctggattccccgtgtcgggacctcgactactaccagtgctggatcggattgaagtcacacttttcacctcctgctgctgctgttgatgatgagaacgagtagctgcttacagcagcagtcttggaacggacaggcagcgaactgaaactggggtggatatgctgtacgtcgtgtcctgcttgctgtcggtttctgaagcttttagctggcagggacaggcggctgttggctttgctgattgcccaaccctctcctgtaatattaatcctaccagagaaacttaaacttgactcaaccgatatgctattaaataaataaagcaagcaagttaggatacgagttaccagagttgtcacggttccagcaacccgtagccagtgctgtcacgtatcagtgagtacgtgattgcgacaaaaacac

SEQ ID NO: 7340 - DNA, 2567 bp, Zea Mays
caagaattaaaagacgcggccgagcgagcgagggccggggggctaggacgccggccattgccgccctcctcttctcgctccatccccatcttcgcctcctcctcctcctccttggcttcaactccactcctcgcacgcttgcttgctttccaaaccaagggataacggataacataaccgccgcccgtctaagcgcttccaccaccaccacgtactacgccgcccatcccaactgcactgcactgcacccagcaacagccaacagggcctgtctgtctggtggtctcaaaacctgcatcaggagcctctgtgcctgctgcatgggccctccgcggccggcctcgccggcctgtgccaccgccggcgtcacggtcaaggtcgagatcaaaaacggcatctttgacctgacgctgtccaacccggacgggatcgtcaccggcgtgcgctacaacggcgtggacaatctcatggagattctcaacaaggaagacaaccgagggtactgggaccttgtttggaacccaccaggacagaaaactggcatctttgatgtgatcaaaggcaccgaattccgcatcgtttaccaagatgagaaccaggctgaggtatccttcaccagaaattgggatccttcccttgaaggaaaagctgtccccttgaacatcgataagaggttcatcgttctccgtggctcatccgggttctacacctatggtatctatgagcataaggaaggatggcctgatttcggcttgggagagacgagggtggctttcaagctgcggaaagacatgtttcattacatggcattggctgacgacaggcagagaattatgccaatgcccgatgaccggttgcctcctcgaggacagccattagcataccctgaggctgtgctccttgtggacccaatcaaccctgaacttagaggggaggttgacgacaagtaccagtactcttgcgaagaccagtacaacaatgtccatggttggatgtcattcgatcctccaattggcttctggcagatcactccaagtgatgagttcaggacaggaggacctctgaagcaaaacttgacttctcatgttggccctactatgctggctatgtttcttagtgcacattatgcaggagatgacctctcaccaaagttcacgaatggagagtactggaaaaaggtccatggaccggtattcatgtatcttaattccagttgggatgcaagtgacccaactatgctatgggaagatgcaaaagttcagatgatgattgagaaaggaaactggccgtactgttttgcactttcagaggattttcagaagacagagcaaaggggttgtgtctctggtagattactagtccgagacaggtatatagatgatcaagacctttatgcctcaggagcctatgtaggcttggccctaccaggagaagctggatcctggcaaagagagtgcaagggataccagttctggtgtagagcagatgtagacgggagcttctacataaggaacattgtaactgggaactacaacctgtatgcttgggttccagggtttctaggggactacaagctagatgccacagtgaccatagcttcaggggatgatatttatctgggtgacctcgtgtatgagccgccaagagacgggccgacgatgtgggagattggagtacctgatcgatctgctgctgagttttatgttccggatcctaaccccaactacgtcaatagattgtacgtcaaccaccctgcagatagatttagacagtatgggctctgggaacgatacgcggaactataccctgacagtgacctggtatacacagttggccaaagtgactatagcacggattggttctatgctcaagttaacaggaaaattgatgacaacacttaccagccaacaacatggcaaatcaagttcgaccttgacagtgtcagcccaagcagcacctacaagttcagggtggctctggcgtcttctgcgctcgctgagttgcagatttccttcaacgaccaggacagggctgttcctcacttcgccaccgggctgatcggcagggacaacgccatagcaaggcacgggatccatgggctctactggctgtttaacatcgatgtggccagtgcttggcttgtgcaaggggtgaacaccatctacctgaagcagcccaggagccagagcccgtttcaggggttgatgtacgactacttgcgtttggagggaccgtgcggctgctaatcgatttgtgtgtgaaattgcgttgctagatgtgaaattacaactgcattcactgtgtaaacccaatgcatacgattggggaaaagatgttgcggtattataggcattggggttacgtgtaggtaatgttagtttaattttcgcatttataaccgtgcagctatgctgatttgtaactataatgatgtaagtgtgtacgcaataatgggtgtttttagtcaggtaactaattacggacaacttcaacacaaggtcaaaaacggaggttgtttgaagggtattgtagaccactttatctataaagcaaaggtgatactcggg

SEQ ID NO: 7341 - DNA, 2859 bp, Zea Mays
cgggagacgggagacgggaggagagaaggacacctctgcaaggccactgagagatcgccgggagagagggacagatcatgctcggggaacggtgtgtggcgaggaatgttgactagttgtttaatacgagatcaagaaggacaaagcaattaaacaagcagcaggctttgtgctttgtgggtgtccctcctctggttcactgccccgctctccactccagctccatacattagtttactcctcctgaggtactttgtgctcctcccccttctggcccctcactgcctacgatagcagcagcaccggccgcataagtaggttgggcgctagagtgcgcttcaagcagcagcgctgttgctgcatcggaacccatccccactatttgtttgttttcgctgtacgagcgatctcctggccggctccggcacgttgcaatattcggtcttctcttctcggcgcagcagcaacttgttcttgtgcgctgcctcgctgctctgagccatttgccgttgctgcggtggacaagtatgggatagtggttgtggtgctgtgcagttcttgcttcttacaagtggtggtggtggtggtggtctggacgtctggtctctgcgtgagcattggactagaggagcgggaagctgtgcggctcctctttcgtggtcaagatgaagttcatgaagcttggatcaaatccggatacatttcagggagatgggaatgaagtcagtattgcggcatctgaattggtgagcgacatcactgttcgtatagggactacaaagttttaccttcacaagtttccgctcctatccaagtgtgctcgcttccagaagttgattccaactactggcgatgaaaatattgagatccacatccatgatattcctggtggtgccaaggcttttgagatctgtgccaagttttgctatggcatgattgtcacactcaatgcctacaatgtgattgccgcccgctgtgccgcagagtacctggagatgaacgagactgttgacaagggcaatctgatctacaagatcgatatcttcctcagctcaagcatacaccggagctggaaagactccataattgttcttggtacaacaaaggctcatttaccttgggcagaggatcttaagctggtcagccactgcattgactctgttgcttcaaaagcctctattgacgtttcaaaagttgaatggtcatacacatacaaccgtaagaagctcacagttgagaatggtcatgattcgccatggaatggagtcaagcagcagcagtttgttccaaaggattggtgggtcgaagatctgacagatctcgacattgacgcctacaagcaagtcataacagcagtcaaaaccaagggtacggtgcccaaggatgtgatcggtgcggcgattaaagcctacacttacaagaagctcccgtcactaagcaaggtctcgatgatccatggcgacgcaaaagttcgggctatgctagttaccatcacatgcctgttgccatccgagaaaggttcggtttcgtgcagcttcctcttgaagttactgaaggcaacaaacttgctcaagtgtggagagatgtgcaggaaagagcttatgaagcgcatcgcacggcaactggaagaagcgtcagtgtcagatcttctgatccctacggtggatggggataccaccgtttacgacatcgacctgattcttagcattgttgaagaatttgtcagacaagatagcaagaatgcccagagacataacggtggtgaggtgaacgaccacgtatctgctcctagtgcgtcaatggttgcagtggccaaaactgtcgatggatatctcgcagaggttgcaagggacccaaatataccggtctacaagtttttcagcctagctgagacggtttcgggaggttcaaggccggttcatgatggactgtatcgtgccattgatatgtatctgaaggagcacccaagcttgggcaagagcgacaagaagaggctatgtgccctgatggactgcaagaagttgtcgcccgacgcgtgcgctcatgccgtgcagaacgagcgcctgcctctgaggatcgtggtgcaggtgctgtaccacgagcagacaagggcctgtgccgcagccaccgccatccgagccgacagcatcggcatcggctcctacgagagctcaaggtcaggcgccacaacgaacacagaggacgagtgggacggcgtcatggccgtggaggacctcagcctgtccaagacgacgaagctggtggacaaatgcgacacggcggccagtacggtcgtcgtggggaaggacaaggaccacggtggcaacaagggcgccaccggcagggtggccaaaggtggcgctggcgcggcgacaccaaagaaggcgctcgggaaaacggtgtccggcaaagggcagaccggggagcgcagcagctcggactcatccgacagcgccgtcgccgtcgcagtcttgaccagccaggagcatcccaagaggacgacccgcgcaaggaacgccgccaagtcggctgctgcgtagcccttccgctgagagaaatgctcaaggagcactagctaggttttagcagtcgtctgttctttgttattacgagtgttgcatagaagccaggaccatgttttttacacgtctgtagctgcctgtagggatggtgtaataccaggtacgtgcgttgttaggtgatgctgttagcacgtaggttccaaacctatgagaccttgggctctgctgggtttatgtcgaactcgcagttgtgttataagaatcctactttgatagacttaaactgttctgcagctgtgagatcttttgaactcatcatcctgagcatgggtaatct

SEQ ID NO: 7342 - DNA, 3012 bp, Zea Mays
ctggctccatccattgcccgggagcgcgcgggtggacccttttttttctcgggtgggtgggtcacgctgctcccctttctcgggccatgcctgacgctgcccttcgctttgcctttgttcttgcgtgccttgttggctagcctgtgttgttgccttccctctcgtttgctataaaccctcgatgcgatgccgcctcatgcacgcctctcacacattgtgcagtgcctggtgcctcagtgcctgccctgccctgccctttgatatggtttctggttatttttattattccctcccttctgctggcccggcgcgcgcgtctctctcccttgccatctgatcgatctcggcaaaaaaactgcgagatcttggcgtgctgccggcgataagattctccccggcgcaagcacatcaccagagcgaagatcgccgggagagagggacagatcatgctcggggaacggtgtgtggcgaggaatgttgactagttgtttaatacgagatcaagaaggacaaagcaattaaacaagcagcaggctttgtgctttgtgggtgtccctcctctggttcactgccccgctctccactccagctccatacattagtttactcctcctgagcaacttgttcttgtgcgctgcctcgctgctctgagccatttgccgttgctgcggtggacaagtatgggatagtggttgtggtgctgtgcagttcttgcttcttacaagtggtggtggtggtggtggtctggacgtctggtctctgcgtgagcattggactagaggagcgggaagctgtgcggctcctctttcgtggtcaagatgaagttcatgaagcttggatcaaatccggatacatttcagggagatgggaatgaagtcagtattgcggcatctgaattggtgagcgacatcactgttcgtatagggactacaaagttttaccttcacaagtttccgctcctatccaagtgtgctcgcttccagaagttgattccaactactggcgatgaaaatattgagatccacatccatgatattcctggtggtgccaaggcttttgagatctgtgccaagttttgctatggcatgattgtcacactcaatgcctacaatgtgattgccgcccgctgtgccgcagagtacctggagatgaacgagactgttgacaagggcaatctgatctacaagatcgatatcttcctcagctcaagcatacaccggagctggaaagactccataattgttcttggtacaacaaaggctcatttaccttgggcagaggatcttaagctggtcagccactgcattgactctgttgcttcaaaagcctctattgacgtttcaaaagttgaatggtcatacacatacaaccgtaagaagctcacagttgagaatggtcatgattcgccatggaatggagtcaagcagcagcagtttgttccaaaggattggtgggtcgaagatctgacagatctcgacattgacgcctacaagcaagtcataacagcagtcaaaaccaagggtacggtgcccaaggatgtgatcggtgcggcgattaaagcctacacttacaagaagctcccgtcactaagcaaggtctcgatgatccatggcgacgcaaaagttcgggctatgctagttaccatcacatgcctgttgccatccgagaaaggttcggtttcgtgcagcttcctcttgaagttactgaaggcaacaaacttgctcaagtgtggagagatgtgcaggaaagagcttatgaagcgcatcgcacggcaactggaagaagcgtcagtgtcagatcttctgatccctacggtggatggggataccaccgtttacgacatcgacctgattcttagcattgttgaagaatttgtcagacaagatagcaagaatgcccagagacataacggtggtgaggtgaacgaccacgtatctgctcctagtgcgtcaatggttgcagtggccaaaactgtcgatggatatctcgcagaggttgcaagggacccaaatataccggtctacaagtttttcagcctagctgagacggtttcgggaggttcaaggccggttcatgatggactgtatcgtgccattgatatgtatctgaaggagcacccaagcttgggcaagagcgacaagaagaggctatgtgccctgatggactgcaagaagttgtcgcccgacgcgtgcgctcatgccgtgcagaacgagcgcctgcctctgaggatcgtggtgcaggtgctgtaccacgagcagacaagggcctgtgccgcagccaccgccatccgagccgacagcatcggcatcggctcctacgagagctcaaggtcaggcgccacaacgaacacagaggacgagtgggacggcgtcatggccgtggaggacctcagcctgtccaagacgacgaagctggtggacaaatgcgacacggcggccagtacggtcgtcgtggggaaggacaaggaccacggtggcaacaagggcgccaccggcagggtggccaaaggtggcgctggcgcggcgacaccaaagaaggcgctcgggaaaacggtgtccggcaaagggcagaccggggagcgcagcagctcggactcatccgacagcgccgtcgccgtcgcagtcttgaccagccaggagcatcccaagaggacgacccgcgcaaggaacgccgccaagtcggctgctgcgtagcccttccgctgagagaaatgctcaaggagcactagctaggttttagcagtcgtctgttctttgttattacgagtgttgcatagaagccaggaccatgttttttacacgtctgtagctgcctgtagggatggtgtaataccaggtacgtgcgttgttaggtgatgctgttagcacgtaggttccaaacctatgagaccttgggctctgctgggtttatgtcgaactcgcagttgtgttataagaatcctactttgatagacttaaactgttctgcagctgtgagatcttttgaactcatcatcctgagcatgggtaatct

SEQ ID NO: 7343 - DNA, 642 bp, Zea Mays
caaacttccgcgcggccggatccagtggccagaaccctcgctggtctgcgtttcccatctcgtgattctacacttctaccgttccactctcgtgcgctcttgttttcttctctccgttgccgccctacgtcaggtgcccaattctccattttcgggcccttctccagcgacgagcacccgccaggtccgatccatctcacccggatcttctgtatctcgggttcttggcagaggattatggattggctggggcagaaacgcgcggagatgctgatgcaggtgctgctggtggcgtctgcggtggtggcgttcctggtgggctacgtgcgcgcggacttccagctcatgctgctcgtctacgccggcggcgtcgtgctcacggctctggtcaccgtccccaactggcctttctacaaccgtaacccgctcaagtggctcgacgctgccgaggccgagcgccacccgcggccccaggtcagcgccgcccccgcggcagggggtaagaagaggtccgggaagaacaagtagttggtcgatgtgtgtgttcttggtcgacctgactcaacctgtttaagatctattcgcagaactaatcaattataaaaagagatattgagatatttgacaaaaggaaagaaaaca

SEQ ID NO: 7344 - DNA, 929 bp, Zea Mays
agacaccaccaccaccggtcaccgaaacgcagcaactgacaggcacctgacggagagctagtcgctctgcagccgagtcgagtcgaactagcgcgcgagcgagcgaggaagaagaagagctagctatactgctgcttcctcgcgcgcagcagcagcagcaaacgaagaaaccagccccatgggcggcagcgcggatgcgaacggcgcggggtcggtgcgggtgccggtgccgccggcgcggccgttcctggacacgttccgcgggaacctcaaggagaccttcttcccggacgacccgttccgcggggtggtgcgggagcgcggggccgggcggcggaccgtggccgcgctgcgctacttcttcccgttcctcgagtgggcgccggcctacgcgctgtccaccttcaagtccgacctgatcgccggcatcaccatcgccagcctcgccatcccgcagggcatcagctacgccaagctcgccaacctgccgcccgtgctcggactctactcgagcttcgtgccgccgctggtgtacgcgctgatggggagctccaaggacctggcggtggggacggtggcggtggcgtcgctgctcatcagctccatgctcggcagcgaggtgtcgccgacggagaaccccgtgctctacctgcacctcgccttcaccgccaccttcttcgccggcgtcttccaggcctcgctcggcctcctcaggttgggcttcatcgtggacctgctgtcgcacgcgacgatcgtggggttcatggccggcgcggcgacggtggtgtgcctgcagcagctgaagggcatgctgggcctcgtccacttcaccacctccaccgacgtcgtctccgtcatggaatccgtcttcagccagacacaccagcttgctgcagggttccatgtcacgggcgagcgacaccatgttg

SEQ ID NO: 7345 - DNA, 1407 bp, Zea Mays
cccgtgctcgcgcgcgcgcgcgctctctctctctctctctctcccctccctgtctccctccccctctcggagtctcggtcgtggcgacgacgactgggcaggccgacgagcacccaccaggaaaagtattgctcctagcctcctacagctagttctttttatgattaagctccaatgaaggattctcaggatattcagagcacaacagagttgcagtcatcagcacagggtactaatgaagtgcaaagtcagcaaccaaacccgatgaccactgatgctcctgcaggaaattcgggttccttgtctatagctagtaatgacagtaagaaggtgtctcgcgaagacattgaacttgttcagaatttaatagagcgttgtcttcagctatacatgaacaaaggagaagttgttagaactctttctactcgtgctagaatagaacctggcttcactactttagtatggcagaaactcgaagaagagaactccgagttctttagggcttactatatccggttgaaattgaaacggcaaatcatcttgttcaatcatttattgcaacaccagtacaatttgatgaaatatccagcacctccaaatgttccattggctccaatacaaaatggaattcatcatatgccagtgcagttagcaatttaccaatggggtatccagtacttccgcagcctatcatgccggctcccggccagcctcacatggacccaatggcctgtggtctgtccaatggtcatgtggtcaatggaatacctgcaccaggtggttatcatccgatgcgcatgaactctggaaatgaaagactatggcccaaccagcgttctggtagtagcaacccctctgatgataaaatgaaatggccgctcccattcgcagcagatttggacgtgctggagaactacaccggcacccctttcctgccttcggactcggacattctgctcgactccccggaccaagatgacatagtcgaatattttgctgacgccatcaacgggtctcagtcagacgaggagaggtcatagcgaagctagctcaaggtttttcaggcagggcgcagggatgtgtcttctcatggcctgctgcgagagatgctgcggctaatgtaatgtaactgtgccttgggcccgcgcccctgtgtgctgcggcaagtgtagctggtttaattagactttttttttaatttgtagctggttaattagaatcctaattctttggaataaaaaagtagtagctggagttatcggtaagaatcgctggatgtaatgcaaagctcgctctcacagtcacagctgggtgaccacaggaggacctcctttttgtttgttgtatatttgctgctacagaagtaaaacggtctcataggtctcaggcttactcggcgcagctcgc

SEQ ID NO: 7346 - DNA, 3529 bp, Zea Mays
ataaaacccaactacgactagggaaacgaaaggaaaggaaaggaaaggaatgcaaggaaggagagacacaatcggcggcaacagcgattgatttcgtccgccgcacctctcctctctctccgccgccgtcgccgccgccaacaagggcgaaaccttccgatttcttccacttctgctgttagggttccgcctccacctgctctgctctggtatcttctgcgcaatgccaatgctgtaatggatcgatcgtcagattcttccaatccaccaggtcttgccgtgcctgccgcctcaaagccaccacagatggccgcaaataacaacccttggagggcccctctgccaccgctgctcaatgctcgcgctggttttggtggcgatacaagcctcttctcaacctcgctgccggttcttcctcatgaaaagtccatttctttcagtgatctttgctgattcttctcatggtaccccaccaatggatgacactttgaccaaaatgaaagtcctggctaatgatcctgatgagaaggactacaaatttgattttgatcttcggcagatagatgacttgttgccagatgaagatgagtttttcgcggggatcactgatgagactgagcccgttgcgcagacaaataccacggaggaattggaggagtttgatgtgtttggcaatggagggggcatggagctggacattgaccctgtggagagcatcacagttggttttgcaaattcaagtattgtcgacggggctagatgcaatagcatcaacccttttggtgtcccaagcactgtaggaactgtggctggggagcacccgtttggagagcacccttcgaggaccttgtttgtaaggaacatcaatagcaatgtcgaggactctgaactgcgatctttgtttgagcaatatggggacatccggaccctttacactgcaacaaagcacaggggctttgtaatgatatcttattttgatatcagagctgcacggaatgcaatgcgcgcattgcagaacaaacctctgaggaggagaaagctggacattcatttttccatcccaaaggagaatccatctgacaaagatttgaaccagggaactcttgttatttttaacttggatccgtcggtttctaatgaagaggttcgccagatttttggggcatatggtgaagtaaaggagataagagagacaccaaacaagaaacaccataagtttattgagttctatgatgtaagagcagcagaggctgctcttcggtcactgaataaaagtgagatagctggaaaacgaatcaagttggaaccaagtcgtcctggtggaacacgcagaaacttgatgcagcaacttggtcacgatttggaccaagaagagccaagaacctacagacattctcatgttggttcacctattgctaactctcctccaggggcatgggctcagtacagtagtccaacagatagcaatatgctgcaagctttcaccagatctccaactggaaatggaatgagtcctatcggaattccttccctgatttcaaatgctccaaagattgctcctattggcaaggatagcaaccggtctaagtatgatcaagtgttttcaaatggtaaccagtccgtgggagctgcatttcagcactcccactcataccaagatcacaacagtgaacacatgagttctagtcctgggactttatcagggccccagtttctctggggcagtccaaagccatattcagaacattcaaaatcccctatttggcatccaccaggaatcggatctgcattgtcatccagcagtcgcactcagggccaaggattcttgtacagtagccgtcaggcttcattatttggttcttcggatcagcaccatcatcatgttggctctgccccttcaggtgctccatttgagagccattttggcttcttacctgaatcgccagagacatcttttatgaagcaagccaggtttgggaacatgggtaattttggtactggccgaaacgggggaggtctcctgctgggcatggctaatcgtgcttctgtgaatcctggttcttctctaattggaagtctgacagataacagctctactaacttcagaccgatgttgtcgcctagattgggacagacattttacactaatcctccataccatgggattggtacattcggacttgacagctccattgaccgtgtccgcaaccgccgggttgacagcagtgtgttgcaggctgatagcaagaggcagtatcagcttgacttggagaagattcacagaggtgatgatactcggacaacattgatgattaagaacatcccaaacaagtatacatctaagatgctcctggctgcaattgatgagcttcacagaggaacttatgactttttctacctgccaattgatttcaagaacaaatgcaatgttggatacgcgttcgttaacatgatatcgccggtgcatattatatccttctaccaggcttttaatggtaagaaatgggaaaagttcaacagcgagaaggtagcctcgttggcttatgctagaattcaaggacggtctgcactgatatcacattttcaaaattcaagtttgatgaatgaggataagaggtgccgccccattctttttaatcccaatggtcaggagtctgtgcaccaggaagcatttccaatcaatggcatatgcatccacatgcttccggaagatgattaccttgacaatgaagatggcaagagtctgaacgagaagactggagagagctcgaccgatatggccgggagtttgtgacgtctgcgatgatagcagacaggatcagaatggccatacatataaatctaactgtctagagagagtatccaccccccaaattgtataaaaagcgaggaaggttgatggttagcgctgaattttgtggtctggtgtggcatggcacgtcttttggtttcagatgtcgccccggcagtggaaatgggagctgaagctcaagcgatcgagcttcgaactggagccgggagcttgcttgtagaatcccccccctctgtagatagagatgtgggggtggaaccgcccaaaccgctgcttctcatagtcgtgcttgtttttgattgcttgctgtaaaaaggtgaactgaactgaagaaaaaaaaagccaaactgtacagtttagaacttttgtgcatattttgcattctggcatcttaatgtgcagtgctgaagttggggcattgatcatgcaaagttatttgcatgattgtatccatggaatctgaccaaaatatagaaagctgcttgcgtgctttctctgttctgttcacaaggaaaagggatgtaaatccgacgttaattacagttttctcgtctagcagttgccccaattgcaatattggaacaatttgatgcaaactgtgccaatgcccaatggtcatcatgatttttcaaaacaatcattgtgtaccagcttttaaaatgacccctagttggttattttatttggattcttcatatctcaatcaacctctattgt

SEQ ID NO: 7347 - DNA, 991 bp, Zea Mays
acccggtaaggtcaagccaactgccaacccgaccgcgtcgcctctctcctcctttcgcgtcgtctccctcctccactctcctctcctctcgcgtccgcagcttcccttgccggctagggtttgcagatgacgacggcggcgcgccccacctgggcgccggccaagggcggcaacgagcaagggggcacccgcatcttcggcccctcccagaagtactcgtcccgcgacctcgccgcgcatacctcgctcaagctcagaaaagacggtcaacagacccaagaggagttacagaagaggaatctcagggaggaacttgaggaacgtgagcgcaagcactactcttccaaggataagtcctatgctgaaagagaccggcggaaaagctcaagccagctactcctagaaggttcaaagagagaggcagaggataagatagttccacgagaaatcgatgcagatgactccgatgtggagcctaaaagtgatgatgagagcgatgaagatggcgacgacgacgacaccgaagctctaatggcagagcttgagaggattaagaaagagagagcagaggagaagcttagaaaggagcggcaacaagcagaggaggaggccaagatgaaggaggctgaactgatgcggggaaaccctttgattaatatcaacaatcctggctccttcagtgtcaagagaaggtgggacgacgacgtggtgttcaagaatcaagcacgtggagagaccaagacgccgaaacggttcatcaacgacaccatcaggagtgacttccaccgaacaggaaggaaagaagccaggagtgcaaaccactatagttatcaagtgttcaggattgcaagaagcaactctagacttccaggatcttcttgtactttatttcccataggttccttttgaaaacttacacgtttgggaacattgatgtttccagaaactgttgctccctccttgaagtcgtagaaacagggactacttttcg

SEQ ID NO: 7348 - DNA, 2558 bp, Zea Mays
ggccagggccgccgttgtgtccgtctgggtctctcggactgtgtgcttggtcgtttgccaccccctgtggccttgtcccttgaattcgaaccccgcctcctgcttcccgatttcaaatagctggcccgcggtgcctgcagtgcagcactgcactgcacgcctccgccatactgcgacgccgccgtgcatcgcttcacgcagagcagtgatggaatcccatcacggcggcgacgggaaggcgcgggacaagttctcggtgtaccagaacccgtccctcacccgcgccctagactcccgcagcgcccgcccctccgtcacagtcctcctcgtcctcgcggtcatatccgtcgcctccgcatcctccttcctcgccctcacctcccgtttttgtcattaggttggtggaagcagcactcggtcttgttgcacttttcacactgctggggttcttcagggcactgatgttatacaatgggcagaaggcactggccaaggccgacaaggttgtcttgtctgaacgccaactggggcttcttgggttaaagatggcaggttcagaaggaggtgggaaaggtgagcaaatcaaaaggcctcccaagaccaagccatcaacaccatcggaaccaattgtgcctatcaggaggtcttcgttcagctatacaccatctcggccttcggggcaatctaggattggttccagccatttgagccctggtggtgagagactgatcatggcattgccaatgtcaccctccacaccattgcagaagcatgtctcttctccttcaactccatggtcaaggaaaagctcaggcagtgccaagggcatacagacagaggcaatgctggaccagttcttggctggcttggatgtaaacattgacaaaatcatggatccagagactaagactacaacacctccagcaaccattacaagctttggtgttgctacccctgtttcaattaccacatcgaccaccccttctggtgctgcaaggagcacacctctgagacctgtgaggatgtctcctggctcccatcagaaatacagcacgccaccaaaaaagggtgagggtgaacttccaactccaatgtccttagagcaagcagtggaggcctttgagaacttgggtgtatatcctgagattgagcagtggcgagatagtctcaggcagtggttttcttcagttgtgatgaacccacttgtacaaaaaatcaaaacaagccatactcaggttaagcaaacaacagctactgttggggcttcagttactgttagccaagttggaagtgatctgccaagcacaacaccaccagttgccttgtctcctcttggtgggactaaagattggcaaccgactgtcacggtagatgaggatgggatccttaaccaattgcactctgcactcctacattctcgagatgcccctgttgcgcaaacttttggcagtctacaacagccacaacggaacccccaccttccagctattcaagcatgtattgatgcaatcacagagcatcagaggctcaacactctgatgaagggagagctgataaaaggcttgttgccacagagtagtgtccgtgctgattacactgtccagagagttcaagaactcgctgaaggaacatgcttgaagaattatgattacatgggtcatggaaatgactatggtaaatcagaaaagaaatggaccaccgagctacctactgactcacaccttcttctgtatctgtttgctgctttccttgaacatccaaaatggatgcttcatgttgaccctacctcgtactctggttcccagtccagcaaaaatcccttatttctgggagttcttccaccaaaagagaggttcccagaaaagtatgttgctctgatatcaggtgttccagcaattattcacccaggggctcttatactggctgtgagcaagcagaatcctccaatttttgctctatactgggacaagaagcagcaattttctcttcagggaagaacagctctgtgggatgccattctacttttatgtcaccaaataaacgttgggtatggcggtgtggttagaggaatccatatcggttcgtctgccttgaatctcctgtcagttatagattcagattcagaaagctgaaagttagtttggtagtcttgaggggatgaattatgtcaagctagtttactggtgttaatgttgtaatttacactagcatgtttggaattgacatagctttatctagctgtaatatgccctgtggtaccttggatttgtgactatattattattgttctttgaatccttcattaatgtaccggtactttctctttacaacctgagttgcctaatcacataattcagttgtatgttctctttatcccaacttcaacgcttcaatagagcaaaatacaaggatatacaatgcacaatttagatataagtaggacctacgaagaacaactatacaataatagccattttcaatttgttactcataaaatcatctaactctcatttccatgtctcccggttgactcggcaaccgaagctttacagtaatcc

SEQ ID NO: 7349 - DNA, 1640 bp, Zea Mays
actcagcacacacatcagatcgccacatctccgacaccaaccctcctccccctctcgccgtcggccccgcccgtcagcctcggccgagtgcgtctgcctcgcactcccgcggcccctatagacagagcagccgctctagagcgggaggaaaggcgagcagaggagacagagatggggaagggaggaggagaagaggacggcgcggcggcggccgcgcgcgcggcggagcaggcgcgggagctgcaggacgcggcggctgcgctgctgacgcagacgcgggcggaggaggaggcgctgcgccgccgcgccgccgcgttgcagggggagctgcggcggctacgcgaggccgccgcggcgcacgcggacagcgacaaggttgaggaggacttggatcgagcagcgtgcctcatcgctgaaggtgacgttgcgtcgctgctcccgagcaagacgcaaggcgcttttctgaaaatgttcttgggaccagtaaatttgcgggcaacaaggaaggaggtgcagctcaaggtgaaggaggagtacaatagctacagggacagaactgccttgctgtttctttgttttccggtgattttgttgtttcttcgacaatggttatggaatggatgttttccagtattgccagttcagctataccaggcttggttattattcctgtataccagtttagctttgcgtgagaacatactgcgagttaatggaagtgatattcgtccttggtggatacttcatcactactgtgccatgctgatgtctcttgtaagtctcacatgggagataaaggggcaacctaattgtgcacgcaagcagagaggcgtggaacttttcctttgctgggccataatgcaaggatttgtcatgatgctgcagaatagatatcagcgtcaaagattatatactaggattgctttggggaaggctaaaagaatggatgttgtatggggagagactgctggtgttgaaggtcaattgttgctgttgtgccctctccttttcctcctgcaggttgtggtatgcgggatcctgctgatcgcgatggcaatcggtaactttgcaaacacagtggacaccctggtaaccaagtcccggttcaaggcgaagatgaagaaatccaagggcagacgggacctcgacacatgcccctcgccaacaggttcatcatcgccgatagattcagcgaccaccaaagcatgaacaaggccaagaggaaaaggtgcccgtgtttaacccgggtgtgttaccactgtaaagcattttagtgtttttttttcttggccgtcagctcgtaatcctgtccgtcgtctgtgtcgaagctcatactcgtgtaatcaatcatcaggcaagtaggctgctgatggttctaggctggaggtggccgagaataaacttgtggtgtttgtttatatacctgtaccctgaatgaacatcgagtgggctagggtggtgggcttaggactatgtaaggcttagcaaaattttccaagtatagttgtgagacaggcaggcatttgtcacaatgaatgaaacatgcgaagttgtatacacgttgtggcaatgtgttgctttgtatgttggttggtgcatgcttacgttgctctgaaatgtttgttgtgtcacgaattaaa

SEQ ID NO: 7350 - DNA, 1902 bp, Zea Mays
ccttcctcggcatccttcggtcccggaatatgcccccggcgtctccctcctcgcgttcctctcgtcggtgagctcctgccgcctggctcgcacagccgatttgcctcagtccagatcgtgcctccttcttcctagatcgggtccgaattcggctaccctcgccaccgccctacgccaggtgccgaggcctccgccgatctcttcgccggcgaagagcggccaccagaattatcactatgcagacacctgttatctgaaggcatgggggaggatgctgcttgcagtgcatttgattctgagaaggtaaccttagaggagttccgtaacatgaagcaatcactgatgcgaaacaacaaactagttgttaggattgctggccgctactttccctgggatgctgctgcacctatagtactcggtatgatttctttcagtgaggaacaagtttttgaacccaaaggaatgataaatgtggagcgagttgagcaaagtgcagctccaggtggcagctggagcatctggccatttagtttcagacgaacaaggactattactgctatccagccagtttgtgaaagtattgttgagacttctgtatccactcctaaagaattgacacattttaaagaactagatagagaaaggaataaatccagggtaaagaggattgagaggaaggtgcgatcactcactccaacatctgacgagcttgcatctcttgatctcagagagggcaggaacgtggtaacatttacgttctcaactgcaattgttgggaaacagcaggttgattgccacatatatttatggagatggaatacacgcattgtaatatctgatgtggatggaactatcaccaagtctgatgttcttgggcagttcatgccactagttggagttgattggtcccaaaacggagttgctcatttattttctgcaataaaggaaaatggataccagcttctatttctgagtgcacgcgctatttcacaagcccacatcacaagacagtttcttttcaacctaaagcaggacggcaaagcacttcctgatggccctgttgttatatctccagatggtctcttcccgtcactttacagagaagtcatcagaagagctccgcatgaattcaagatttcgtgtctagaggccatcaaagatttatttccacacgactcaaatccgttttatgctggatttggaaatagagacacagacgagcttagctacctcaagggtgaagtcgcagtgaaccgacgggtcgatacaaagtcgtacacatccttgcatgctcttgtccacgggatgttccctccaatattgtcgtcatctgagcaggaggactacaatgcttggaattactggaagatgccattgcctgatgttgatttgtgaggtacaagtcgagtctgcacaacagcactgcactaattttatgatgtgccgtagtgatcatgagaaggccattacttggttggctacatgtggatgctcctgctcctgatataagttcctgcaagatggaattttgtatatataggatcataatagatgtagtagctatttcttgtgtctcctgttgttgttgttgttgtcgtcgtaggactggaaatcatacctccgtgtgtcctgtaactgaaggtacaaaatttactggatggagggatctgatagtatgttgcagccccccctttttcgtttcatccttgatgtaattgtggtaccgatgtattttgtacaagaacaaatcaataataatgcaatcgaaagcgagctgttcatacgcagacacaacatgttgcattgaccctaggtgcattcggtaactgaaaatcggagctgtgtatactgtggacatgtcatctttggtatgcctgcgacttttagctgcagctaatgtgc

SEQ ID NO: 7351 - DNA, 672 bp, Zea Mays
tcccatttgatttggcccactgcagcccactaaaccgtcctgtacgcagagcccatgcacggttttgagacgagagcagctcagcagcagagcgccagccgccggactcccacgcagcacgtacggacgccatcgaggaaccctaacaagagcacatcacacggggcgacggtttggcgccgcgccaccggcgactggcggctggtgccccctctcggtccccactccccagcacggtgacggcctgctgcagcagatggtaaattatttctcagactcagagtgcaagaaagttggttcgtccagggaagaggaatagaggttatggttttgtgtgagattgattagcatctaccttcaaatcattctcttggtatttattgagcactgcaagtggttgaggacttgaggtaaacatgctgaagtgcatcttgagccagtcatggaagagaggagcacatatgctacatgcaggaaattcagcaccagctgtactaacttgctggagtcaatttcacagtgggcagttcctggtgttccctacctgtgcactagattagatggttttgccaagtaggaagacttttgttgatcgacctagccaattaggttattttattccatggaaaggttaaatagctcatgttgactaaacataatgatacaatgttc

SEQ ID NO: 7352 - DNA, 1343 bp, Zea Mays
agctacgaaccgaaaggcctggtctccctccaccctcctctgtcagggtcctccgaatccttcctcggccgccgcgccaaatcccgtctcgttgctccggtccgctgcgcatcctcaggaatggaacttggcgccaccactgccctctaccctctgcaccgctgcaaaaccatttacctggtcaggcatgcccagggcattcacaatgtcgcgggggagaaggacttcggcgcgtacatgtcacatgaactgttcgatgctcagctcactcctttgggttggaaccaagtcgatggtctgcgggagcatgtgaagaaaagtgggcttgcagaaaagattgaattagttatttcttcccctttactgaggactatgcaaactgcagttggtgtctttggtggtgaaaagtatactgatggtgtaaatgcacctccactaatggtcgaaaatgccagacacagtggccgtccggcagtttcaagtttgaactgccccccatttattgcagtcgaaacctgcagagagcacttgggtgtccatccctgtgacaagaggaggagcataacagaataccggcctctctttcctgcgattgatttttcattgatagagaatgatgaagatgttctttgggaaccagatgtgagagaaccaaatgaggctgtcgcattgaggggtatgaagttcatggactgctttgcaaactgcgagctacggtcgatggtgttggttgacagaagcatgcttgggtcatattcctcaagattcaactatgctggcaagaatccaaccggactagatgtgccaagtgatattgcagataagaagcaggttgacgaagctcagaagaactaaagcaacctcgaaagcataccatatatgacttggattatcaagaaattctgacctttgcgaagcttgtttgctttgaagaggacaagctaagagggcatctacagatagagtttacgcataccattttgttagtcgagttgaactacgcagcaatgtattagcatgtctgctcttttgtctcagcctacattgaggttcagggcattggactaggatcatctatttatgataataataaccggatcacctacattcaccaggtgatgcatggcaaagttctcttggtttccgagctgttctagtctaggggtggctgtacaacgtccacggctccacgcaattccgtctcatggatggtgataaaaccaatcgatgtatggttttggtttctgcagattacatttgatggttgggttcgctgtattatggcttgcgtatttttattatttttgtcaacttgcttgtttttattaattttctgtttttac

SEQ ID NO: 7353 - DNA, 1401 bp, Zea Mays
agctacgaaccgaaaggcctggtctccctccaccctcctctgtcagggtcctccgaatccttcctcggccgccgcgccaaatcccgtctcgttgctccggtccgctgcgcatcctcaggtcaggcatgcccagggcattcacaatgtcgcgggggagaaggacttcggcgcgtacatgtcacatgaactgttcgatgctcagctcactcctttgggttggaaccaagtcgatggtctgcgggagcatgtgaagaaaagtgggcttgcagaaaagattgaattagttatttcttcccctttactgaggactatgcaaactgcagttggtgtctttggtggtgaaaagtatactgatggtgtaaatgcacctccactaatggtcgaaaatgccagacacagtggccgtccggcagtttcaagtttgaactgccccccatttattgcagtcgaaacctgcagagagcacttgggtgtccatccctgtgacaagaggaggagcataacagaataccggcctctctttcctgcgattgatttttcattgatagagaatgatgaagatgttctttgggaaccagatgtgagagaaccaaatgaggctgtcgcattgaggggtatgaagttcatggactggttgtggacaagagaagagaaagagatagctattgtcagtcacagtggtttcttgtttcacaccttaagcatgtacagcaaggagtgccatccaaccataagcgacgaagttagcaagcactttgcaaactgcgagctacggtcgatggtgttggttgacagaagcatgcttgggtcatattcctcaagattcaactatgctggcaagaatccaaccggactagatgtgccaagtgatattgcagataagaagcaggttgacgaagctcagaagaactaaagcaacctcgaaagcataccatatatgacttggattatcaagaaattctgacctttgcgaagcttgtttgctttgaagaggacaagctaagagggcatctacagatagagtttacgcataccattttgttagtcgagttgaactacgcagcaatgtattagcatgtctgctcttttgtctcagcctacattgaggttcagggcattggactaggatcatctatttatgataataataaccggatcacctacattcaccaggtgatgcatggcaaagttctcttggtttccgagctgttctagtctaggggtggctgtacaacgtccacggctccacgcaattccgtctcatggatggtgataaaaccaatcgatgtatggttttggtttctgcagattacatttgatggttgggttcgctgtattatggcttgcgtatttttattatttttgtcaacttgcttgtttttattaattttctgtttttac

SEQ ID NO: 7354 - DNA, 1978 bp, Zea Mays
ctttgttagttaggtttacttattcatagagggtaatgtttacatgagaggtttgtttttaaaagtgattctgaaactcagattacaggtgaatactaaattgaaagttgctacagtgaagcttaaaaaaactagagaggaacagaaccaatttgatgaagcaagcaatcagattgtgttgcacctaaaaccaaaggttaagtttttgtaggggtcgtaatgggatctaaaatttaaggatcaaatcagattaggatcatgctctatttttgttcatttttgaaaatcctatataagcatggtgaaagctgagaagagatattctcaacagaaacacctttgccatggaagccatggatttcctataaacaaatagctccagtgagtaaaattataaatgggtagtcataagacgtgtaaacgtacctaaagcagagcatatagttcaggaatattctccacaagtgtctcaaataatcagatccaagcaaccatgagcatgacaaaattaagtattaggtatgtattgtttcatttgataattctaggatgtttgtacttcacatcagagttcagttgtttcaacatctttgtttctctaatgcagctactactacatcctgaatctgatgattcagctcaactttcctagattgagactgaaaagctgctagcccagttagttgagactgagatgaacagacgtttgaaggaggacacttacaaaggaaagaagtttaatgcattctgtcacttcttgggctaccaagctaggggagcactgcctgcaaagtttgattgcgattatgcctacgttttggggcatgtgtgctaccacatcatagctgccggattgaacggataacggatacatgactacagtgacaaatcttaagaatccagtgaacaagtggcgatgtggtgcgactcctatttcgagccgcgtgagaggaagctaaagggttctggcttaagctgtatcaggtcaaattttcaccattgatccaacctctgctacggcaatttccagcatcggcggtgtgctctttacaaagccttagagctgcctctcctgcaaagtctgaacttgcagagatagtcccacaagagaaatcaccaaaagattccattcaaccaatgtcaccgagtccaaggtattctacctcaagatgaagggcgactaccacagtcaggtgcatagaggaaggatgctgcggggagcaccatgaatccctacaaagctgctcgagtttcctctgactgttcaccattattggaagcaggtcaggcagagagccttggaaccgaactcttggagatggtgcctagcagggaagaggagattaagttgaaagaataaagggaggatgctttgtcgacttttgtagttaatgattatgtgagacttcagtttaagggctcaacttttactggttcttggaagtcatttagtagccctaagatttcatcagcattcttagtagtaattgctatagtatcaaatgggattgtggtatgagttgctcgagtactaagtactaacgttgttgtacattgtgaagctaagtgggtaatatcaaaagggattaagatttatgtgtggtgcttactgtatttgtttttattattttattgtgctttgtacatgtaccgtcattcttactctggtgttcttttaatgcaaagtttgacacaatatatttttatacgagagaccgaaggttacttagtattgttttctgtttcttttatcgtctttgcagatctatgtttggatgatgaaaacagtgctactcgatgtgaagtccaccaatactatagtttaaattaagtctaagatcggtgctttagagggaattggtaagagccagcaagcacttttttttgctggaattatggtagcagtcaggtttcagatttctatgagttcggtgaataaaatgagcttatgggtgttgtcaatcttttttaatttcct

SEQ ID NO: 7355 - DNA, 6856 bp, Zea Mays
ttaggcgagggtttctccattatagaaaagctgggcatagccaacactctaaaatgaacatgacgactccattacacggttcgaaccacgattactgtcgttgataccggcgccgtcccaagcgccgtgagttctccatcgccatcgagttttcccttctctcctcctcgcagatatctcccttctctctcgctctctcgcaccagagccgcaccctcgcaccagagagcaggtagaccatgtccttgtacttccccgtcgcatgacgtggtcgtcgagcagcgacgcggcggaggcggagggcggggaggagaaatttgccattacgcatggcgccgtcgttgtaggtgcggagcagccccgacagggaggagaaatttgccattacggcgtgggcgggctcgcctaaccacgacatcgccttcgactcctcctgggggctcctcgacgacctagatatactcgtcaagcgcctccgctcaaagcaggtgcggaagggctccatcgacgggagcggcggcgccggcaacagcaacttcgactccttctccgaggccgggtggtccagggagatctccggcgcggcggattcggcatccaccagcgccccgtgggacgagacgagccgtgactacctcaccttcgtcaaggagtaccgagaagccgccatattgtgcccatctcatgccagggcactcaagctcctggggagcgctctctttggcgttggggagtaccgagctgctgagaaggcactggaggaggccatcttcctgaaggaagactatgctgatgcgcactgtgaccttgggtcggccctgcatgcagtaggggaggatgatcgtgctatccaggagtttcagacagcaattgatctcaaacctggccatgttgatgccttatacaatcttggtggattgaacatggatgctggccgcttcgtacgggctgcagagatgtatactcgtgtgctgagcatccgaccaaaccattggcgtgcacagctaaacaaggcggtggctttgcttgggcagggtgaatctgaggaggctaagaaggcactcaaggaggcgtttaagatgacacagagggtgaaagtgtatgatgctatctcacatttgaagacattgcaaaagaaaaagccaaagccttccaaaggaaaaaatgatggtcaaggggagcagacttatgttaatgtggaggcatccaagttcaagagggttggcaggaagactaccttgcggcaggatttggccaatgctctagatataagggccttcgagaggatgacgaagctaggccactgcgatgtggagcttcttagaaaagagatgaatgagactgatgtccccgtatcttactcagacactggcatccctgagaagtcaatacgcaaagcagctcttgaggttattctccgcaggctcctctcttttctcaagccaaacacctttcaggtgccatcaaggcaatcaacgaaagaattctctctgtccttgatgctcctggttctggtcgtgttgatctgggtatgttcttcgccatcattgctccaatctgttcaggccctgtggataggcgcaagcgtatcgtctttgatgcacttctttggcgtcatacacggaattattagagatgttcaatgacccggattggggatttgggatcctgagcactctggtgaagctcgaagagggtgaccacatacgccatggtagccacacatcccagtcccccgagctcgtagtagtcgctgccaccgtgacgggctccgctgcgggcgccgaggacgcatggcgatgacggtcgtccttggcagacgcggaagcggaagtcgcggaggaagaggagtccccgtcgccgccgccgaggagaccacagaggatggcgaagagcacgaggcagaggagaccacaacggaaatatgacggcgtgagtttgagatcgtcgttaacggaaatatgacggcgtgagtttgagatcgtcgttacttgttaatagagttgtcatgttcattttagagtgttggctatacccagcttttctataacggagaaaccctccgagcctctatttcgtcgtcgtgtttcataatgtcaagtctctctagcacgcctgtacctaaacctcgcaaaagcctaacccaaaccctagcacctctcgaaatctccccgcgaaagacagccttctggtcacatggatttcggtcgccggaaggcggcggcgctggctgcgctctcctcgccgacgccggacaggtccccgaagggcggtgtcgacgccccgatcgctccgctcctcgatgccctcaactcccacccggacctcttcactacctcctcctgctccggccgcgtctccgtcctcgcgcagcctccgccgccgcatgagggctggggcgagggcgcccccaagccgaagaagaaggcgcggggcggcgggtgggtatacgtatcgcacgaccctgccgatccggacgctgtggtggagcagctgttcggcgggagcgggtcgggagtggcgggggacgagctggtgttcaggttcgagccgatgatcgtggcggtggagtgcagagacgttgccgcagctgcggcgctcgtcgcagccgcgatcggtgcggggttccgggaatcaggtatcacaagcttgcagaaacgtgcaatggtagcaataagatgctcaattcgcatggaagtgccactggggcagattgacgaacttgttgtttctccggagtatgtccgctaccttgttagaattgccaacagtaaaatggaggcaaataaaaggcgaatgaatggatttttggatctcttgcaaactaagggtttgtcatacccatcagggttatcaaacaactctaatagtggtggtcagtctgatgattacgaggcttctgtgggtcctgaagttaagataccatcagatacaagtgccaaaacaaatgatgagtacttagttacaaaaatgagaaatggtggacgtagtcgtgatgatgatgatacaggttcaatagaagcacagtattttggaaaacaagactctgcatggagccagggtgtcaatcatggttctggtaatgctaaacgattattaacgctggagaagctgcgagaaaataaaaatcatctctctaccacaacattgaagattagcggtgaaccaattgagaagctcttcttatggggccaagcctcttgtgtgtttactattggagaagagcagcaggtcctaacttttggtggttttgggggaccagggcgacatgcaaggagaaactattcccttctactcgatcacaaatctggtctgttgacagaaatgatctttaaagcatctccttcaccacggatggggcatacagttactgcagttgataataccacttatataattggaggtagaggtggcccttcagaaattcttgatgatgtctggattttgccaagtgttgggaatacatggtcaaaactggagtgttgtggagatctgttccgaccaaggtactctttagatgaaattatgtaccccctgcccgttctcgattttttatggacgttctatctcgttatgcaggcaccgacatgcagctgctgcagtagcttcaaaaatttatgtatttggcggactcagtaatgaaggcatatattcttgtatgaatgtattagacacaaaaaatatgcaatggagtgtacttgctgcttcaggcgaatggccatgtgctcgacattcacattctatggtctcatatggtacaaatctattcatgttcggaggtcatgatggccaacgggcactgaaggacttctacagttttgatacaacaaaacttaggtggaacaaggaaaacacaaatgggggaactccgtcacctagattttcacactgcatgttcatctacaaaaattatcttgggatacttggtggctgccctattacagaaaacaatcaagaagttacattgctgaacataaatcatcgagtctggttttgtgtttcggttccattgctgagccagtccctctgtgtccgtagttcatcggttgtcattaaagatgatcttgttattttaggtggtggtgcatcttgttatgcattcggaaccaaattcagtcaaccaatagttcttgatctgcattcagtggagtctatgtttaaatatgataggaacaaagatggcacagttcaaaggcgtgatgcaatatctgttgttgaattgtcaagagatgaacaaaatggcatccttgatcatgacacaaaattacaagatgcttgttcgggtagtttgacggactctagccctctggttcttcaactggggaagacatatgccaaattagcaaaggacattatgaaaaagtttggatggttggatctttctagaaaagttcgaataagtcatgataatggccatgttctttttcctattaacgaatctttctgtgccctaaatgctgaagagcatatcaataggaatcttgatgattcatgtacctttggggaatcattagtattttctgaaaagaagcttgtaggggacaacctatctcttcaggatgcattaatttttttttcatcttgcaatggttccgttatgaaagatgaactagccatcagccgaaagccttccaagtctcctcaaactatcatgaaagaacttgtatcttctctactggaaagtaaagggatgccctctcagttgttgcagcagcttccggctaggtgggagacacttggtgatatcgtcatacttccaaagacatgttttaagaatccattgtgggaatctgttagcgaggaactttggccactagttgccaagtcacttggtgcacaacgtcttgcacgccaaggtaaaatcatgccaaatggcacaagagatagtacactggaacttcttctgggtgataacggatgggttacccattatgaaaatggcatctgctattcacttgatgcaacaaaatgcatgttttcttctggtaatcgttcagagaaacttcgcatgggacagctaaactgcagagatgaggtggtcgtggatttgtttgctggaattggatattttgttcttccatttcttgtgaaggctaatgccaagctagtttatgcatgtgagtggaatccacatgctctggaggctcttcggcgcaatgttagtgacaacagagtggaggatcgatgtattatacttgaaggagataaccgggtgactgcacccaaaagtgttgctgatcgagtctgtcttggattgttaccctcaagtgaatgtagctgggccactgctgtcgaagctttaaggtgatctgtcttcatcaccacctgagttgtttcagtcatgcttatttcattctaggtttcttatagtgttccaagaatattttatatagaggtctaactgcctaggtaaactttgtcttggcctctagtcggacctgctgaggttcttgtttctattgcacaagtagctgcatcattgagtaattaagatgatttattagtattgcttgagttggttttaccagggagacaggttgtgttagggagtcaattgggaatgtgcctatcttttgaaagtcttgtgcctatgttttaggattggttagttcataataatgggctagctcagagtccacagggtttcatatcccttctaattttctcttctacgcctgctttccttctctaatcaccaatccacaccaagggtttcatatcccatacaaccttttaatcgcgaaggtgtacttgacagcagcaaaatgttgtttctgaatattgtaaatgttctttaaaaactctgctcaacaacatattgatgttagataatctgacatccaaaagacatcctaccatttttttagagaaaaggttccccctcccccccactgaatcaacaaagcacaattgagtttacatctagcagatcattttcaaggaggctgggatactaaagattctcttactgaagttcatttcatgtgaaaagatcatttgattgctatcgtcctccgattcatgctgaagtatcgtctctcctgatatggccaactggagttgctggagaccgccgtctcgatccttccatttacatgcttgccaagtttggttatctgacacactgaaaatgcctgcatggtggtgctttcagtgtgtagggcatgaaatacgttgggctgcttgatggaatgtgtggcctcacttgggaaaaacttctctataatttttaatgtgatgtttggaattttgtcaatttgctggatccacaaacctttgatgttaacattttactctattactatgcatagggttggcgggggcgtgttgcatattcatgggaatgttaacgactctgatgagacacgctggttggacagtgttgttgaatccatcagtaatgtcgccaaaaatcatggactatcttggaacgtgtcagtggagcatgttgaacgtgtcaaatggtacgggccgcgtattcgccaccttgtagttgatgttacatgcaggcaaatctagcaaagcagatgcgttcacagaatctttgtgcactgtcaggccttggattcttggatagttggatgcatatatcattgcagattgtaatgctcaacagcttgcatcgtttgtgttttagtcttaagtgggttacagtactcttagtcatcatggagccctctgttgtgaccttgaaagcatgttcaggttcttgacgacagtttcgcaactgtattgctactgtaaagttgtgttcttggaccgagtgtatttatcttatgtatcttttgttttcttatataagatgctttattacgttgtttgaacatcttagtaccaccttttgcattggctgatg

SEQ ID NO: 7356 - DNA, 3677 bp, Zea Mays
actatttttttttctcccgttcacctagcgtgaggcgtgcgctctcgtggcgactttggacaccgccggcgcctaccctctgtctcgtggcgacgagccgccgccgccgacctaagcgaggtctctgtgggactctttgctggtgacgagcaaccatcaggtccgcccctgatgagcaggcccaacactcgcaacaagagcaagaggccacgatctgatgaatccattaatccgtctgcggctgttttcaagaagatacactccgccggtgatatctcgaaagacgatatctgccagctttacatggtgtggaaaccgccttgccatggctgccatggcaatactaaggattccccaaattgtttctgtgggttgatccctgctgccaatggggttcggaagactggcctctggcagaaaatgcaggaaatggttcgtggtctcggccccaatccatccaaggacctccgcgattccactgatacgcctgctggattgactaacctgggtgcaacctgttatgcaaatagcatacttcagtgcctttacatgaacattgcattccgctcaggcattttctctttggagctggacgttttggagaagcatcctgttctggatcagctagcacggttgtttgcacagctacactcaagcaaaatgttattcattgattcagcgccttttattaagacactggaattagacaatggtgtccagcaggacagccatgaatttctcactttgtttctgtctctgctcgagcaatcgttaagtcattccaaggttcctggagccagaacaatcgtgcaaaatctgttttgcggcagcgtatcacatgtaacaaggtgctcgtcatgtggaaaggaatctgcagcatcttcaaaaatggaggacttttatgagctggaattgaatatcaaaggtttaaataatttggaagaaagtctgaatgagtactttagcgaggaagcactggatggggagaatcaatacttttgtgagtcatgtcaaaaaagggtagatgccactcgttgtataaaacttcgatcacttcctccagttgtcaattttcaactgaagcgttatgtattcctcccgaagacaacaacaaagaaaaaaatttcttcaacattcagtttcccaggacaacttgatttgggaaaacgattatcagagccttcatctagttgcacttatgccttgtctgctattttaattcacaagggtactggtgctaacagtggacactatgtggcacatataaaagatgaaagcaatgggcaatggtgggagtttgatgatgagactgtatccaaacttggtttgcatccttttggtgaaaaaccaggaaaggcatcaaacaaagatgatcagaagtcccaaaatacctccacagaaggttctgtcacaaacaataataataatggccaccatgaggcagcgcctagttctaccatgggggagatgttttcatctaccgatgcttatatgctgatgtacaaatgtatcactaaggatgtcaatcccactgaaagcaataaaattgtggagataaataatgatttacttccacaccatcttctagatgaaattaatgaactaaatgcatcatatacaaaattgtgtgtggaataccaaagcaagaaggacagccatttggcatatataacagagaggcgtcaagaagtaaaatctgttctgacagaagcacctgcaggcccaggagatgattcatatttttggatctcaacagactggcttcgtcagtgggcagataatattactcccccctcttccatcgacaatggtgcaattcaatgtgaacatggaaaggttccagcatctaaagtcacatcaatgaagcggttatcatctgtagcttggcagaaattacattcgaaatatggagggggacctatattgaacagtgacgatttttgcatggagtgtcttaaagacggggcaaaaagtgcagtatctgctgatgtttaccgtgaacgaagagcatcattgaaaacactcgcagaagcagcacttgctggtaattgtccagatggtccttcttactttatctcaaagacatggttgactcattggctgcgtagaaaaaatgctgatatcccttctgatggggataacggaccaacaagtgctttaagatgttgccatggggattttctgccagaacatgctccaggggcaaaacgggtatctgtaccagagatcctctggctatttctctaccaaacagtccatgagaagaaggctgatgatacagtgacttttccatcagatagtcatccatgtgaaacctgcagccgagaattgtctgatgttgcttctgtggaggttaatcttagagcagtgaaactcaagcaacgacagaaccatgaaaagttgatatctgggaaaagctttgcgcttcatcctggtcaaaaatattatttggttccttcatcttggttgtcagaatggagagcttatattacagcaactgggaaaaacatttcttcattaccagaacctcaaactctggaagctgttgccaggtcacttatatgtgaaaagcattcaagattgctgcaaaggcctttggatcttgttttaaagcgtgggagcatcattcagaaagcatcaaatactgatgggttaaccataatcccagagtatgattggaaattattctctgaagagtggagtgctacacctggaaaaggtatatctgctgaaattgcttttagcaagagttctcaagacaaactgcatggatcatctgaagcagtgccgattacggatggaaatctaggccagtctcttgatgacacaaacgatgatttgggagccagagagccttatatcagaactgatcccgaggtttgtgaagaatgtattggcgaaagggagagctgtgcattggtggaaaaactcaactatcaaaatgaagatatccacgtttactttgtccatggaaaagaagcaccaaagtctattaaagaagcatctaaagctgttactgtaccagatcgtcggacatcgaagcgttcccggagaacaagctctggaaactcaatcagtttgaaaattgttaaggagaaccaaatgcttcacaaaggctctgttgagattgaagatgattttgctactcttgctgataagagtatttttcctggggattttctctgggtcagagactctgaaatatatgagaaccgtgacattgcagatgagatttcagaacaaaaggatgatatgctacaggctgaggaaggctttcgaggaactctgttgacatcaactgtctcagctcagctttgtcaggatatagcttttagtgaatgagttcccacatcagatatgtagctgcatatctgctgacttaagctggtgaagcctgctgggaggtgatgctgactagcttattctttgtttttattgcatattgctgttttttctgaatggcgatcactacttctacatccttctccctctgactatcaaagtcccacttgtatatgcacctgcttccactgtcgatcatgcaaccgacagaacttcaaagttaactacggttttgaacccttattttcattatgtatatattattcatcttccgttccatgcgccgtgtatgaaatgaattttaggatatcaacaaagttggaatgtcagtttta

SEQ ID NO: 7357 - DNA, 1243 bp, Zea Mays
ctcttgaactggaggcgtgatggaggcgaagcaggcggcggctgcggtcgaccggctctcctccctcccggcggagctgcaggacgagatcctcgtccgcctcgacctccgggacgccgtgcgcacctctgcgctctcccgcacctggcgggacctctggaagtcgctctcggtgctctccctctccttccccgtcggcacgcagccctcagtcgtcgacagtatcctcctcccctacataggccctcgcgtctccctattcgacttctgcgtcaacgaggcgtctgtcggccgcatcgacgactggctcgtcgcgctctcccgctgccgcgttgagtccatccacatatctaacagactcggatcatgcgactacttcaacctccactcctcaatcttctcattaggtgatctcgtgtccctgcggctggaaggctgcaacatcccacccctccctgtaggattcgccggctttcctgcgctccaggagctagacctcgcctttgttaacttcccatcgaacgaggacaaacagttggaggctatcattcgtcggtcgcccttgcttcataccctgtttatgtgtaatgtgtgcatccctgatggttacccagactcagtgattgaggcgcccaatctccgtgtgctgtcattcgtttcagagtatgactatggatgccgatttggagagctgccgtgtctcgagtatgccgacattgatgcgttattctgtccgcagcatgaacatgattatggatttttccttgctcggtttgctcacgttcaaaggctcaccatcttctgtccagtacgctatttttactttgttctccttattatgtgctttgttataaatcaaggctgaaacgctagcgattggctcaagctgattacatagttcagaaatataacgtcgtctcctatacttgtgaaatagcatgaaaagctacactaattattaataataaaaaaagaaacaatcctttcattcctgccttacttccatctgcctgtggtcctttgtttcgcagaaatcccatccatatttctagaccttgtatggcttttatccactttttgtcacaggctgccgatgttaacatgccgtacacacttccattcaccttttataacctgaagaacttggagttatgtctgaacttcggtgaaatggactccattttgttcatgtttaccttgctaaggagctgtcgcaaccttcagggcatagaaatagagtcgc

SEQ ID NO: 7358 - DNA, 1686 bp, Zea Mays
gacgcacggagcctttgccggcggcagcctagtacgctgtacggctgtagtcgctgccaaaaggagaggcggagactcttgaactggaggcgtgatggaggcgaagcaggcggcggctgcggtcgaccggctctcctccctcccggcggagctgcaggacgagatcctcgtccgcctcgacctccgggacgccgtgcgcacctctgcgctctcccgcacctggcgggacctctggaagtcgctctcggtgctctccctctccttccccgtcggcacgcagccctcagtcgtcgacaactcagtgattgaggcgcccaatctccgtgtgctgtcattcgtttcagagtatgactatggatgccgatttggagagctgccgtgtctcgagtatgccgacattgatgcgttattctgtccgcagcatgaacatgattatggatttttccttgctcggtttgctcacgttcaaaggctcaccatcttctgtccagtacgctatttttactttgttctccttattatgtgctttgttataaatcaaggctgaaacgctagcgattggctcaagctgattacatagttcagaaatataacgtcgtctcctatacttgtgaaatagcatgaaaagctacactaattattaataataaaaaaagaaacaatcctttcattcctgccttacttccatctgcctgtggtcctttgtttcgcagaaatcccatccatatttctagaccttgtatggcttttatccactttttgtcacaggctgccgatgttaacatgccgtacacacttccattcaccttttataacctgaagaacttggagttatgtctgaacttcggtgaaatggactccattttgttcatgtttaccttgctaaggagctgtcgcaaccttcagggcatagaaatagagtcgcaggacatcgatcagagttttgaggcagattgggagttcttaaatgctctgtggactcatgacatgtgttccgatcttcaaactgtgcacatgatgtgtatcagttggcttccaaatgaaatttcatttatgaagcttatgctctctaaagcaactgttcttcgcacattagatgttgatagacaccctgctgattttgatgatcccataattgacatgctaacatgcaaaagagcttcagctcaagctcgtgtcctgtttggaggtttggagcaacagtggtagttgaggtggtgtattactgagtgcaagattggttcacttgaatgatacaagacccgctttccctgctccctgctgaagtgtttttttttgtttttctccatcatcaccatgatacacgaatcatgtagaaaatggcttatccagggaactggcatgatttgtttgtcttgttcagatgaagctgatttggtattggttgttcactagatcagtagagatattcgtggcagcaagcgcccagagtcgattggttaacgaagcatacctccaaacttgcctgagtaggtgaaattcggctacccattcgttagaacttgttgcttgccaagcagagctcatgcaataagcaatccatggggggttttgtttctagctaaatttcttctctgtttagtgaaagcttctcccctttacttcatactcctgtttgtattgttgtccggttccagttaacgtgccgaatctatttccaacatt

SEQ ID NO: 7359 - DNA, 1801 bp, Zea Mays
ggatccgacgcacggagcctttgccggcggcagcctagtacgctgtacggctgtagtcgctgccaaaaggagaggcggagactcttgaactggaggcgtgatggaggcgaagcaggcggcggctgcggtcgaccggctctcctccctcccggcggagctgcaggacgagatcctcgtccgcctcgacctccgggacgccgtgcgcacctctgcgctctcccgcacctggcgggacctctggaagtcgctctcggtgctctccctctccttccccgtcggcacgcagccctcagtcgtcgacagtatcctcctcccctacataggccctcgcgtctccctattcgacttctgcgtcaacgaggcgtctgtcggccgcatcgacgactggctcgtcgcgctctcccgctgccgcgttgagtccatccacatatctaacagactcggatcatgcgactacttcaacctccactcctcaatcttctcattaggtgatctcgtgtccctgcggctggaaggctgcaacatcccacccctccctgtaggattcgccggctttcctgcgctccaggagctagacctcgcctttgttaacttcccatcgaacgaggacaaacagttggaggctatcattcgtcggtcgcccttgcttcataccctgtttatgtgtaatgtgtgcatccctgatggttacccagactcagtgattgaggcgcccaatctccgtgtgctgtcattcgtttcagagtatgactatggatgccgatttggagagctgccgtgtctcgagtatgccgacattgatgcgttattctgtccgcagcatgaacatgattatggatttttccttgctcggtttgctcacgttcaaaggctcaccatcttctgtccagctgccgatgttaacatgccgtacacacttccattcaccttttataacctgaagaacttggagttatgtctgaacttcggtgaaatggactccattttgttcatgtttaccttgctaaggagctgtcgcaaccttcagggcatagaaatagaggacatcgatcagagttttgaggcagattgggagttcttaaatgctctgtggactcatgacatgtgttccgatcttcaaactgtgcacatgatgtgtatcagttggcttccaaatgaaatttcatttatgaagcttatgctctctaaagcaactgttcttcgcacattagatgttgatagacaccctgctgattttgatgatcccataattgacatgctaacatgcaaaagagcttcagctcaagctcgtgtcctgtttggaggtttggagcaacagtggtagttgaggtggtgtattactgagtgcaagattggttcacttgaatgatacaagacccgctttccctgctccctgctgaagtgtttttttttgtttttctccatcatcaccatgatacacgaatcatgtagaaaatggcttatccagggaactggcatgatttgtttgtcttgttcagatgaagctgatttggtattggttgttcactagatcagtagagatattcgtggcagcaagcgcccagagtcgattggttaacgaagcatacctccaaacttgcctgagtaggtgaaattcggctacccattcgttagaacttgttgcttgccaagcagagctcatgcaataagcaatccatggggggttttgtttctagctaaatttcttctctgtttagtgaaagcttctcccctttacttcatactcctgtttgtattgttgtccggttccagttaacgtgccgaatctatttccaacatt

SEQ ID NO: 7360 - DNA, 2762 bp, Zea Mays
ctcagactctcagtgttgtcctatcgcattgtcatgtcaggtatggattgcctgcagaaaggttgtggattagtgtttttgaagatgacaatgaagcattcaacatctggcacaatgaggttggtgtgccaaaggagcggatacagaggatgggtgcagaagataacttttggactagtggcgcaactggaccttgtggaccttgctctgaaatttattatgatttctatcctgagagaggatcatcagatgtggatttgggcgatgatagccgattcattgaattctataatcttgtctttatgcaatataacaaaaaagacgatggatctctagaaccgttgaaacaaatgaacattgatacaggaatgggccttgagcgtatggcacgcattcttcaaaaggttccaaacaactatgagacagacttgattttcccaattatagaaaaggcagctagcatggcgatggtgtcctatgcaaaagctgatgatgccacaaagacaaatctcaagataattggagatcacatgagagcagttgtttatctcatatcagatggggtaattccctcaaatatcgggagaggatatgttgttcgaaggctaataagaagagtagttcggatgggtagattgataggaataagaggtgacgggcatggaaactctgaaggtgcatttttaccttcactagctgaggtagtgatcagccttagcactgagatagattcagatgttgaatcacgacggagatcgatccttggagaacttcaaagggaagagatgcgatttgttcagactttggaaagaggagaaaagttattagctgaacttctggatgaagctttattaaatgctggtaataatggaaacaagccttccttatctggaaaaaatgttttccttttgtacgatacatatggtttcccagtagagattacagctgaaatagccagtgaacaaggcgttactgttgatattgagggatttgatattgaaatggaaaaccagaggaaacaatctcaagctgctcataatgtagtcagactttctgtaggaaatgagaccgagatagtaaagaacatcccggatactgaatttttgggatatgattctctctctgcttctgctgtcattaaaggtctcctagttaatggaaacccagttaatgaagtttctcaaggttctgaagtagaaatattattagaccggacaccgttctatgctgaatcgggtggtcaagttggagataatggtttcttatatgtgaatggaggggaagatagaagacaaacaacagttatagaaatcaatgacgtccaaaagtctctgggaaatatatttgtgcacaaaggcatgattaagcaggggtctgtagaggttggcaaggaagtagatgcttctgttgatgcaaaattgaggcagggggctaaggctcatcacactgcaacacatctactacaatctgctcttaaaagcgtagttggttcagaaacttcacaggctggttcccttgtggcgtttgaccatctccgatttgacttcaatttccatcgcccactttctgaagaggaattaacaacaattgaagcacttataaaccaatggattggcaatgcagcacatgttgagacaaaagtcatggctttgcaagatgcaaaaaatgctggtgcgattgcaatgtttggagaaaaatacggtgaacaggtcagagtcgtagaggttcccgggatctcattggaactctgtggtgggactcacgtcagtaatactgctgagattcgtggtttcaagataatttcagaacaaggaatagcttctgggatcagaaggatagaagcagttgcaggtgacgcttttgttgactatgtgtgtgctcgggacaattacatgcggcgcttatgcttatcccttaaggttaaggctgaagatgtgaacagtagagtagaaacaattcttgaagagctaagagcaaccagaaacgtagcatcatctctacgcagcaaaattgcagtgctaaaagcagcttctcttgcaagtagagctacaactgtggagccccagaatgtcaggattgtggtcgagaacatgggtgatgtcgacgcagatgggctgaaaagcgccgcggagtatctcatagataccctcaaagaccctgctgcggtgattttaggatcaagcccaggggatggtaaagtcagcctggttgctgccttcagccctgcaatcgtcgaaatggggctgcaggccgggaagttcgtgagtggcatagccaaactctgcggcggaggcggtggaggcaagcccaatttcgcccaagctggggggcggaagccggagaacttgcccgacgcccttgagaaagcccgagctgaaattgtggcacgggtatcaggttcgagctgattctccgctgcctcacacctgatactggaagtatagggataggattcatatgaaatgtatatgtaattgtcattggcattctaagcgaaaacacttgtatttctccctaccttgccgtgtacgctttctgcagatgacggagcaaattttgtagcttgtaattgtaactagtggccgaacagaacggggaaaagatcaaatcttcacacagcaaaactactgctcatgtttaatctaatcttaaaaacataagaaattatttgtcacatgatcaactaatagtctaatacctagactagaccaaatacatctgatcaagtcagccagccacgtgcgtccaagcaaagattgagc

SEQ ID NO: 7361 - DNA, 1020 bp, Zea Mays
cccctcccctgaaacaccacccaaacccaagcagagaagcagagacacatttggctcactcactcacactcactcgctcatagattgtcctgtccgtccatcatctctagctagcagcttccagtgagagcggcaagcgacaccacaaccagacaacacaccaccaccgagctgtgagaataagttcgcagacaggatgggcaagctgtggacgatcctcactcacctccactccctagcaggccctttgtcagttcagttccgatcggtgatgctgagaactgagaaccgtctgctgctcttcgttccctttttgcaggccaacggtgatgctgctgtaccctctgtacgcgtccgtgcgggcgatggagagcccgtccaagctggacgacgagcagtggctcgcctactggatcctctactccttcgtcacgctcatggagatgctcctcgagtccctcatatactggatccccatctggtacgagctcaagctgctgttcatcgcgtggctcgtgctccccaacttcaggggcgccgccttcatctacgacaagttcgtgcgcgagcagctccggaagcacggcctcaccgccgccggctccgtcaagtcgtcgtcgccgtcgtccaaggacaaggacaagcccaagaacaagttcctcgccttcgtcacgcccaagaaggatcatgaagcttactgaagtgggttgcagtgatcccattcctggaccatgtcccggcaacctgtagtgcactccactagatttctgttgtgtttgttctcgacttgaaatagagcccgttcgatgtgtgtgtggccattctgtatgtgtgagcatcaactctaacatggaatggagacaagtgccaactttcggtgctgatgatgatgtgaatgtgtgaaatttatgtctgccttttctctcttctctctctctgtgaaaacggccgtgttttcgttgtttgggccggaatcttatgattaagtgcaaatttgaagagagtcattaaaacatcaat

SEQ ID NO: 7362 - DNA, 3085 bp, Zea Mays
cgggtcacatcaaacgtttgacttttaaataggagtatgaaatatagacccaaccaactgaactagattcgtctcgtcttttaattttcggctgacaaattagttttataatccgactacatttaatacccggaacggaggttcaaacattcgatgggacatggctaaattttagcgggttgtgcgatacggcccaagtgtggttcagcaacgccgaagaaaaatcagacaagaagcccctccggccctcgccctccctagtccctattcgccgcgcccgcgcccgcgccgtctcgaggtccgccggtctccttccgccgcaagctttgctccattccaccgccgcctcttccgcctccgtcggcaaaatgccggtctacagcatccgcggcgtcaacgtcgacttccccttcgacgcctacgactgccagatcacctacatggaccgcgtcatcgagtccctgcaacaggggaagaacgcgctgctggagagtcctacgggtacggggaagacactgtgcctgctgtgtgcgtcgctcgcgtggcgccgcactttcggcgagttcctgcgggtcgggcgtgggggcggtgggactaagcagttgccctacgggagtcagccgtccgctagccagcagtcagaggactctacgtctcagaagcagcagcagtcgcggtacccagtcatcatctacgcctcacggacccacagccagcttcggcaggttatcaaggagctcaaggctaccagctacaggccgaagatggcagtgctaggttcccgtgagcagatgtgcatccacgacgaagtgagcaaactccatggaagagcacagaacaatgcctgtcacttcctctgcaagaaacgacggtgccctcataataaccatgttgctgagttcataaaaaacaaacctgagcttgggaatgagccttttgatatagaagatttgataaatattgggaggcataagggcccgtgcccatattacatctcccgggaactttcaaagtcggttgatattttgtttgccccttacaactatcttattgatccgggaaaccgtcgttccctaaatggcataccatgggacaatgcagtacttatatttgacgaagcacacaacttggagagtatatgtgcagatgcagcctcttttgatttatttccgaataacctcacagcttgcatagcggaagctcatgaatgcatcaaactgtgttcagcaaagaggtccattgaaaattctgctgataaacaatttgatcctgaaaactatgcaatcctcaaagctcttttaatggcacttgagaaaaaaattgctgagctgttaattggatccgagttgggctacacaaaagctgggagttacatatacgattttctctctgaactgaacattacatcagacacatccaaaaaactgattgagacaattgattgtgcttctttgctactagaggaaggaaattctgctcaaactgggccaggggtccaggcaaaggctgcagtgtctagattggagtcaattagggacatgttagacataatttttaggggtggtggtcaaaaccatgcaaaatattatcgatttcatgtgaacgaatctcaacaaacacatggagatgcattgaaatttttgggtaagtcttcaaggacccttagttggtggtgtttcaacccggggctggcgatggaagaatttctcaagttgggtgtgcgctctatcatattaacctcaggcaccttgtctccgttggattcactagccatggaactaaacctgttagtgagggtcttgattttgctgatcgtgctgggagggcagtaatagttactggaatgccctttgctactccaactgatgccaaggttcggctcaagcgcgagtatttggataagcaggggacaccatctaataaaaacacaaagatgttgacaggagaagaatggtatgtgcaacaagcagcacgggctgtcaatcaggctgttggacgtgttatcagacatcgccatgactatggagctattatttattgtgatgaaaggtttgtgtggccaaattatcaatctcagatgtcatattggctccgacctcatataaagtgctactcaaagtatggggaagtagtccaaggattgacccgattttttcgagataaagcttcttcagatcctttgacactagagccaacagattgtaatagaggccaacaacagggactgtttcttgagcctatttttaagccagctttcggccggagcgagggtcatgtgatcttgagcgatttcaagtttatgcagcaacttctttgccagacaaagctgagagacaatatgccctacctgcttatcactccagattgtatagcaccaccagcaaacaaacacatgcttaaagagaagctatcagatttggctgccagtgcacaagatgagtgcccacaaatcacattatcaggaaattcaaccatgagaagaagtaacttcatgaagttggctcagatcactcctgctaatcgttcaacccttactacaaaacacaactttgtgtctacatctacgaagcacaacctcccagaagaccagctgtcacaggataccaatgttgatattactgttgacttggcaatacaagggcatttgaaggaacataccttcaagtctttagggcttaagaaagctaaaacaatggacagatccaaagatgctgttgttttagatgacgtctcttcaaaattgcctcaaaatatagggtcaagagctttggccagataccaatgtggtggacctacacctgaatcaaagaaaagcactatagcaacagcatgcggaaagaatgatggggcctgtgaaaaaactgaaggccaggaatctaactcagggccagccttcttgaagctggttcaagaaaagcttagtcctgcagagtacacagagtttgttgaatacatgaaggccttaaaattgaaaactatgcataccaaggactcacttgaagcaataactaagcttttttcgtccccaggaagacttccacttcttgaaggcaggtgtgcctcttcatgcatgccccgcgcgagc

SEQ ID NO: 7363 - DNA, 1124 bp, Zea Mays
atggggagtgaggaattggaaactgctttgatggagatggtcgagcatgacaacagacgtatgttgagtgcaaaggttgagaagcttgaaacagaggcatatgaactgcgcaaagctttttcagacaagcaagagcaagagcaaatcttgttaagaatggagcaagaacagaaagtggcagaagatgcccgcatagccgctgagcgagatgctgctgaacaaaaacacgctgctcacttgctccaggagaagtatgaagcagcaatgacagcactttcacaaatggagaagagagctgtaatggcagaaacaatgctggaagctacaaagcaataccaggttgggcaggttaaagccaaccaatctttcacttcaagttcacctcgtgcagaccatgttcctgcgaagataaatcaagaaccaaaccaaactgcacctatcaggagaatcggcctgctttctaggggacttggatggcttgacaagggcaagcagggaaggcagaattccaatgaaacatctggagcctaaactcatctaaagtccaggatgaagtcatagctcccaacaagatctggattgttcattaacgcttggattgcttgatcaccgtaagagtgttgaaatcagcatcgatacatgttttctcgggaagattcagctggtatattccatgaagttttgcaggaagtgtatcttgtatcatattgagttcaattgtcagataaagttttgttggtaggtcagaaaggcttctgcaagtcatcggtgtaaattttcttttattagttccattaagattgtcaatagttagtgttccaaataggagaaagaaaagaacgacttactacacacaagaaaaatttctgttagattagttacagtatcatggagttgttctggagaagagcatgttttttttatctcttcagaaatgtcaaaaccaccgaagagattctctctctgtatttttgtctgatacgtgtggctcatacattcttcagtcacagttgacatgtttgatgtaaggcaattattgtcacgaggattctgattacgaatacaacagcagaaactccactatagggaggcgttttggaaagttaattgttgtcagttcctca

SEQ ID NO: 7364 - DNA, 2619 bp, Zea Mays
gcgctgccccctttttctccaattcaattcctcttcgtcgcctcgcgcatgggcattcctcgtgcgccgcggcagcgcagttaacgccagcgcgcgtggcttcacccggtcttgccacgacccgttgcaatcctgattcccttcctctccagaattcctcctcccatgtgcgtggatctcggggcccgtgcgggctagggtttatggctttggtcaatccatggcgtgcggtggcgaggtcgcgctgtcgcttcttctttaatgcgcgctgatccccatggacgccgagtccccacgggacgcttatggtttcgcggtgcggccacagcatctgcagcgtttccgcgagtacgccaagatttacaagatatggcaagcatttgtgggtgttggtgctcgaaggattcctgggtactacaacaaattgcttgatgacaggactgagacattggatgaaaaggatcttgtggacccagtggtcaacgaacagggaagtgcacccagaaaagttacccagcctgagaaatggaaaggacagatagagaaggatttgccacgaacatttccaggacaccctgcattagatgaggatgggaggaatgctttgaggcggttgttaaccgcatatgcaaggcataatccatcagttgggtactgccaggccatgaacttttttgctgggctatttttgttattcatgcctgaagaaaatgcattttgggccttagtaggggttattgatgattattttgatggatactacactgaagaaatgattgaatctcaggttgaccaactcgtccttgaggaggttgtacgagaaaggttccctaaattggccaaacatatggaattcttgggagttcaagtgggatggataactggaccatggtttctttcaattttcatcaatatgcttccatgggaaagtgtacttcgcatttgggatgtcatcctttttgaaggaaatcgcataatgttgttcaggacgacacttgctttgctggatttatatgggcctgcactagtgaccacaaaagatgccggagatgcaattacactactgcagtctcttgctggatctacatttgacagcagccagcttgtattgacagcttgtatgggttttcaatcagttagagaaatgggattgcaagagttaaggaaaaagtacaggcctgaaattttaactgcaatggaggaaagatcgaaagaccgtggctcctggaaagataagaaggggttagcaaccaaactttatagctttaaacatgatccttcatatgtgtgctcaccagttaagtccaaggaagggctagatggttcaaaggtgaatggagagactgggccagcaaatcttgagacctaccttagtactagttctatactggataatgatttggatcagggtgttgatcttcaagatcaggtgtcatggctaaaggttgaactatgcaagctgctcgaggagaaaagatcagctgatctcaggagtgaggaattggaaactgctttgatggagatggtcgagcatgacaacagacgtatgttgagtgcaaaggttgagaagcttgaaacagaggcatatgaactgcgcaaagctttttcagacaagcaagagcaagagcaagtaatgcttcagatcttgttaagaatggagcaagaacagaaagtggcagaagatgcccgcatagccgctgagcgagatgctgctgaacaaaaacacgctgctcacttgctccaggagaagtatgaagcagcaatgacagcactttcacaaatggagaagagagctgtaatggcagaaacaatgctggaagctacaaagcaataccaggttgggcaggttaaagccaaccaatctttcacttcaagttcacctcgtgcagaccatgttcctgcgaagataaatcaagaaccaaaccaaactgcacctatcaggagaatcggcctgctttctaggggacttggatggcttgacaagggcaagggaaggcagaattccaatgaaacatctggagcctaaactcatctaaagtccaggatgaagtcatagctcccaacaagatctggattgttcattaacgcttggattgcttgatcaccgtaagagtgttgaaatcagcatcgatacatgttttctcgggaagattcagctggtatattccatgaagttttgcaggaagtgtatcttgtatcatattgagttcaattgtcagataaagttttgttggtaggtcagaaaggcttctgcaagtcatcggtgtaaattttcttttattagttccattaagattgtcaatagttagtgttccaaataggagaaagaaaagaacgacttactacacacaagaaaaatttctgttagattagttacagtatcatggagttgttctggagaagagcatgttttttttatctcttcagaaatgtcaaaaccaccgaagagattctctctctgtatttttgtctgatacgtgtggctcatacattcttcagtcacagttgacatgtttgatgtaaggcaattattgtcacgaggattctgattacgaatacaacagcagaaactccactatagggaggcgttttggaaagttaattgttgtcagttcctca

SEQ ID NO: 7365 - DNA, 1279 bp, Zea Mays
taactgcaaaaatcgggggacagagaagcgttcgcctgactcgcccccactcccgagtggccgaagccccgaccggcgaccccgcagatctgtccaagcgttcgcctgactcgcccccactcccgagtggccgaagccccgaccggcgaccccgcagatctgtcccattgttctccgtcctccccgtcgtgtcctccttgatccttcttcgagtggcaagtgctgacctcgcctcctattcctccggtagccctactggggcgccgggcgcacagatctgctcacccctggacgctaggcgctgcccagctcttccctgccagccggtcgcggcggctgcaagccagcacggcagggctgctggtgcctgctcttgtcctccggcacagcgcagggtgtcggggtcgctcccagctggccatcctctcggcccccttgttgcacagcgagtcatggcctggacaactcggggaagacaaccatcgttctcaagatcaatggggaggacaccagcatcattagcccaacccttggattcaacatcaagaccatcaagtaccacaaatactctttgaacatatgggatgttggaggacagaagacaatcaggtcttactggagaaactactttgagcagactgatggattagtttgggttgttgatagttcagacataaggaggcttgatgattgccgtgctgaactccacaatctcttgaaagaagagagactagttggagcttcattgttggtttttgcaaataagcaagacatacagggagctctaaaaccagatgaaattgcgaaggttctgaatctggaagtgatggacagaagcaggcactggaagattgtgggctgcagcgcttacacgggagaggggcttctcgagggcttcgactggctggtccaggacgtcgcttctcggatctacgtcctagactgatgctatttgccgcgtcagtcatcctagactgatgctatttgtcgcgttggtgctacttgagcatcattagagtttggtgcgtgcattaaagcctgtactaaggccctgtttgtttagggtttatggttttagggtttagggatttgtgttcactcttactcgcttcggatttgcggtggtatttgtttgcttgtgttacattgaggtaaatctaaacgatcatgagttcatttctctttatttacatgtcagattaagtttttcccaacgtgagtagttatatacttatatttacatgctcgattaagtccatttctctttgaagggatttgc

SEQ ID NO: 7366 - DNA, 1396 bp, Zea Mays
cgcacacgttactagtaactgcaaaaatcgggggacagagaagcgttcgcctgactcgcccccactcccgagtggccgaagccccgaccggcgaccccgcagatctgtccaagcgttcgcctgactcgcccccactcccgagtggccgaagccccgaccggcgaccccgcagatctgtcccattgttctccgtcctccccgtcgtgtcctccttgatccttcttcgagtggcaagtgctgacctcgcctcctattcctccggtagccctactggggcgccgggcgcacagatctgctcacccctggacgctaggcgctgcccagctcttccctgccagccggtcgcggcggctgcaagccagcacggcagggctgctggtgcctgctcttgtcctccggcacagcgcagggtgtcggggtcgctcccagctggccatcctctcggcccccttgttgcacagcgaatttggtgaatcccccctcccctctcacgctccaccactgatcatggggctactcagcattatccgcaagatcaagcgcaaggagaaggagatgcgcatcctcatgtggcctggacaactcggggaagacaaccatcgttctcaagatcaatggggaggacaccagcatcattagcccaacccttggattcaacatcaagaccatcaagtaccacaaatactctttgaacatatgggatgttggaggacagaagacaatcaggtcttactggagaaactactttgagcagactgatggattagtttgggttgttgatagttcagacataaggaggcttgatgattgccgtgctgaactccacaatctcttgaaagaagagagactagttggagcttcattgttggtttttgcaaataagcaagacatacagggagctctaaaaccagatgaaattgcgaaggttctgaatctggaagtgatggacagaagcaggcactggaagattgtgggctgcagcgcttacacgggagaggggcttctcgagggcttcgactggctggtccaggacgtcgcttctcggatctacgtcctagactgatgctatttgccgcgtcagtcatcctagactgatgctatttgtcgcgttggtgctacttgagcatcattagagtttggtgcgtgcattaaagcctgtactaaggccctgtttgtttagggtttatggttttagggtttagggatttgtgttcactcttactcgcttcggatttgcggtggtatttgtttgcttgtgttacattgaggtaaatctaaacgatcatgagttcatttctctttatttacatgtcagattaagtttttcccaacgtgagtagttatatacttatatttacatgctcgattaagtccatttctctttgaagggatttgc

SEQ ID NO: 7367 - DNA, 1171 bp, Zea Mays
gacgacactgcacacctctcaccagtccccacacggccacaccacacccagctgtccccatcgcgcgcacactctctcggtctctccctcccagtcccagcgtttgcggtccagtccagagagctcgagcagccatggcggctcccctgttcctcctcctcctgctgctggctatgttcacaggctcaggtgagcgagctctccggatctgcatgctgctccctgcggcgcttaacgtttgtgtgagaagatgagcagacgcggcgttctgcgtgtgcaagacgggcgtgcccgaccaggcgatgcaggcggcgatcgactacgcctgcgccaagggggccgactgcgcctccgcctccaagggcgcgccctgctacggcaacggcaacaaggtggccgtctgctcctacatctgcaacagctactaccagagccgcagcgccacgggcgccacctgcgacttcaacggcgtcgccacgctcaccggcaccgaccccagctccggcacctgcaagttcgcctccggccccagcagcgcaggcaccggcggtggcatgggcgctggcgcgggtaccggcggtggcatgggcgcaggggtcgcgacccccgggagcgccctgagcccaccgttcggcggcactggcgcgtacggcccgtcaggggcaggcagcacggactacaacgacgccgtcgccccgcgcgccgccgggctgcacgtggtggctgccctcgctctcgccgtcgccgtcgccgcacctctccaccgctaggggcggtgccatggcaactgggagctggcgggcacgacactcgcagacgggatcccgcctcggcggcccgccagcgcgggctctggtcgatgtccggcgttagtgcgtgcgcgtacctgatgaagtgatgatgggttttgatcgaccagccgtcagcgtagtgcggtcacggggtttacagtgttattcgaactgacctctctgcttcctcgtgctagtagtggtggctgccatgtgtgtgtgctgctggtagagaactagggattctttttttttcttctgtcgcttccttgcttatatgtcccgtcgtgttaggctgtgtttactatgcagtgtttggtggtggccgctttccatgagaatatttggtgtgcgcgctcatgttgcactgcacgtttggc

SEQ ID NO: 7368 - DNA, 3824 bp, Zea Mays
cgcacgccggatgggtgggtcgcggactcgtacggccccgcaaaaaaccggatttgatagcggccgatacgtccgccgcggcggctgaataggagagagaaaccgccccccctctctcctcaccctttctcgacgaacccgtcccacaagcacgcgcgacgcgagccaaggaagacgagagcgaggtggagagagagagagagaggaaaaccctgccccgtccaggcagccgtcgtcgacgcaaacggcggaggccacagagacgccacgcgagggagccccgccgcagcagcacccgcgccgtcccaattcggcgccccgatcgccggatctcctcgccggcgccggggccctcgatcgccctctccccatgcccgtgcccctccgggggtttcattgcgcgggcgccggccatgtcggacctcgcttccagctgcaaggataaacttgcgtattttagaataaaggagctcaaagatatcttaaatcagctggggttaccgaagcaaggaaagaagcaggaccttgttgacagggtattggctattttatcagatgagcaaggtcaacatcatcatggatggggaaggaaaaatgctcttacaagggaggcggtggcaaaagttgttgatgacacatacaggaaaatgcaagtatgtgctcctgaccttccctctagaagccacagtggatcagatttcagtcatttcaggcccaaagaggaagcgcctgacttctaccatgtggatactaaggtccgctgcctttgcaatagcacattgctaaatgacaatatgattaagtgcgaagatggcaaatgccaggtgtggcagcatattacctgcgtactcattccagataagcccacggagggtgctggccctgatattccacctcatttttattgtgaactgtgccgactgaaacgggcagacccgttttgggtgactaccggaaatccattactacctgtgaaatttatgtcatctggtgttggaaatgatggagcaagtgtacctcaaattgtggagaagactttccaactttcccgagcagatagagaaacagttcagagacaagaatatgatctccaggtttggtgcatccttataaatgacaaagtccagttcaggatgcaatggcctcaatatgcagaattgcaagtgaacggtattcctgtacgagtaatgaccaggcccggttctcagttactagggataaatgggcgggatgatgggccactggtaaccacatgcagtagagaagggatcaacaaaattagcttatctagagtggatgctcgaaccttttgctttggagttcgaattgttaggaggaggactgttcctcaggtattaaatttgatcccaaaggaaggtgaaggggagtcttttgaggatgctcttgctcgtgttcgtcgctgtcttggaggtggaggtgctacggacaatgctgatagtgatagcgacctggaagtggttactgaatctgttacagtcaaccttcgttgccctaatagcggatccagaatgaggattgctggaaggttcaagccttgtgttcacatgggctgttttgatcttgaaacttttgtggaattgaatcaacgctcacgcaagtggcaatgcccaatatgtttaaagaattactctctcgagaacttgatgatcgatccttatttcaaccggattacatctttgttgcacaattgcagtgaagatgttaatgagcttgatgttaaacctgatgggtcatggcgtgtgaagggtgatgccgctaccagagatctatctcagtggcatatgcctgatggtactctttgtgactcaaaggaagatacaaaccctggtgtcgttagtgttaatgagttcaagagagagggtacttctgatggacatagaactttgaaacttggaattaaaaaaacccctaatggattatggcaggttagcagtaaaccagatgataagaaacccgtggttagaaatcacatccaaaacaacacggggtactcaataccaaacatagtacctatgatcagtagccccactgggagttgcagagatggtgaagatgtaagtgtgaaccaagaagggggtggtattcagtttgatatatcattgaaccaagagtttgacagttttgcgcataactttggtcaaacatacaatacagaggataggcaacaagagccacaacataatgctgcagatgtcattgttcttagtgattctgatgaagaaaatgacccgattgttcgcctgccagctgtctatgcaaatactcctacaaatggtgacagtttccctttcgtcactgatgctgctgtatctggatatcctgaagggtaccaggaggatgctggggttggtacaagtggccttggtttattgagcaacaatactggtgattttgaaataaataactggcaaatgcattcttatccacaaccagagcaagggttccagttttttgggactgatactgatgttggcaatccttttgttggtccgcataattcctttagtattacaccagaagactactcccttgactgtaatgttggcatagaggatccatctgcagctcacgatgtctcaatttgccgaaacagtaatgatgtgcatggaagcttggttgataacccattggctttagcaggtgacgatccatctttgcaaattttccttccaagtcaaccttctactgttccccttcaggaagaactgagtgagcgcgctaatactccaaatggagtccaccctgatgattggaggatatctcttacgcttgcggctggtggagggggtaatgaagaacctacaagtgttgatggcctaaaatcacagccaaaagttccatcaaaagaggcaggagttgaacctttacttgatgctgcctgtcaaccatttccaggatcatcgaggttaacttttgaaggcaggcatcttagcttctgctctcccaagcatgaacaatgacagatgtaatggatctaatctaaacccgagaaggattgaaaatatattttctcatcctcgccaaccacgaatcttgatttttattgtggagggctatcaagttattctggttgatacaaagagaaacaccagtgtggatgctttattgcattaacctggtaagattcaagtgttctatatgatccaagtgggatctccatagagttcatctaatggttggtacaggatattttctaactgggagtggtttaacgtggctagtggagcaggctgtacattttccctgacatttactgggtataaggaatagggggccatcacttggcacaagacaaatacatgtgaatgttttgtgtgtaccatcattgtatttagggttcgggtgttaatttagatgtttatgaccctgatgtttgatggaaaataaattattccttgatgaagcggcggtcaatgaacagagcccttcggttttcagtcggagctactgacccttcatctgttcctgtggtgaagtggttgctgccgcttccgtggtgggaccaaccatgccgaagtcgtgtctagcagagggcaatcaatctccttggtgtctagcaggtttctttgtgcatcatgctgtattattctggtgtcctttgcaggtggtggtggattgtatcggtgttgtgaacccttctgattgaaaggtgctgggatggagtactggtatgaagaacttatcttctttcagaacatggcagcgcgttgtcggagcatggatgacgaaatcaccctgcgcacaaatgtgtcttgatgccagctgatcggtaggcttaggcctgtttgagcaaaaccgtcccg

SEQ ID NO: 7369 - DNA, 1576 bp, Zea Mays
ccgctgcctcctcctccaaccccgacgaggcctccctggacctctccttcttaggtcaggtgcagtggggcttccaagcgccgggaacgcgtgaggctggtaaccggttgtatgtgggggcttccaaggcgctggcgacacgtgaggttgtatgtgggggcttccaaggcgcttgctccagactttgtggtgataggtttatgtgtggtgctagactgttggtttattattcaattggcgttgggattattgacttagcatggatcaacttgcttgtgaatttaagagattagtcatttggaaattccttgaagtgcttaagtatttataggttagtcgatcagaataatagggttctttcataatcgacagtcaaagcaaatctgaacaaaacattccaagcttgtgttctggttcaaggtagcagtttcagccatctgattgctttacctttagataagccttgatattaatcacgtactgaagatccatttattatgggatgcattggtcaatatttagcagctgatgtaataatttaatggtgaataattcaaaaattaggaaccacctattagcagctggatccaaatggtttcttgctaaaaattagcagcaatttgctatctattgtttagtgccaatggatccaaacatgtcctaagtctgtactttttttacagtttcaagtttgcaaactgtcactctctctcattcatggtttttgaggtgttgcagcgtcgtgtggtgctggaggtacgcctggatgcctaagtgatatggcgtaattagggtacgcctcagcgcctagggtacgagtaggcgacacctcaaaaaccatggtctcattatttttctcctgaccgataaaggataaacttcattacataaaacataaggacttctttcttttgcataaccgccccttcacaaccaaattctgtagcactgtaggtctgtgcatgtgacgccggttgcaaaagagggaaataaatggaactgtcaaacttggatgaggacatccaaatggtgaactgttgttggggcccaccttgctgccttattatgcgcagtttggcaatgtgacctggtatagagagctgtagcggtgacagaagacaaactcaaatggaggtgcttctttctgggtagcacaggggactaatgacaggcgccaggtgattggtgtggcgtgattacagtactacacgcaactggttacaacattgaactgtcaagattacatagctgaaaaaggtaaccgctgagcagtctcggagggaacatcggataaaggctggccagcttcgtgttgtaggacgactggacgagatagcattgtcggccaggccgagatggaagtgtccagcgataatcagtggatcatgagttcacgagagaagacccttgatgatgtcttagatcttgttccgttgcgtctggatcaaagttatctcatgcaactattcttgaagagtccatgcgggctattcttgaagagtccatgcgggcacgtgatttactaatggagcagaatgttgccctggatttagctcgaagagaggctgagatggct

SEQ ID NO: 7370 - DNA, 793 bp, Zea Mays
aaaaaaactaatacatggcagggagagagggatgtgcatttacttctccgatatttcagcacaccgaacctttcgcctctcttccccaccctcataccaggcggctgcaagatccggtgacctccacacgacagtttcatcattagaccaagatgcctccacggaagagatccacacggctcacccaaaaattcgaagaaattgacacaagatatgaagcgccaaatgaggtatagactgaaacagaactacagaagtacttcaatgggatatctgcaaatcaagtgtggactacatcgcctatttcaagcatgtctgacaatgactggagaaagttggtggagaagttgtctaccccaaatcacaaggtgaagggagccgagccgcgcgggcatgaatgggagccgagcgggcgtgaagggagctgttgggaccatgcttcgtcgccgtaggtcctgcaggaagaaacagcttcggctgaagctgtccgcatgtgatgaccgaaggttcctctccatgaagattcagaattacaaaccgacttaaaaatagaatgaccgtttagtccataaatgtttgagtcgttgttgtaaacttttatgagggacatgattgtaattcctcacaggctgtgtcttgtgcctataaatagtgaacagtactcctttactattcacgaattcctgtaattgcaatcgcgccaatcgggaattaatctttgtcaaggcagaggtataaatgtatttagtacttgaatacattaaatggagataatataaaagtgatgttgttc

SEQ ID NO: 7371 - DNA, 2091 bp, Zea Mays
agacaatctactagctagctaagctagccggccgcccctcctcgcacgcgtgcgcgcaccagcatctatcatcagagctagccacgaaacggatcggagcagcagatctcgatcggcggcccacatgggggatcacgctgagatgttgcatgccgctccggccatgtacaacggcgctggcgctgcccctcatggcgggtggtggaatacggcggtgcccgcgacgacgtgctcgacgacggagctggctgggttcaccacgtggtcgtccgccctggctgctagctacgacctggcggccgaggggacaaaggccaagagcgccgccgcctcttcggagtcccccgggaacaacagctccgtgaccttccaagaaccggcctgcgtcacggatcctcccggcgtcggaaccgccgtggtgcaagtgcaacagcctcttgccaccggttacgccgactggacacatccctatatgagcagtggcgctactactttgcatgggtttctgcaagacggtcaccagcaggacatgagctcagcaactgagcagagctccatgaccgcatcaagcctgatgaacccttcatccaataacctagccctggcgctgcaaggtcaccaccaccaccaccaggagcatgagcaccagcagcagatgctgtccagcttcggatccgagctgctcttgtcgccgacgacctcaccctacgggttccagtcctctctgctacgaagcctcatggagccggccgcggcgacgaagcaggctttgccggggtaccagcagcagcagtatgatcagtaccagcagcagatgggcatgggccaggcgaggtttgcaccaccggcggccggagctgccagcagggaggcactccagttcagcaacgacgcgctgttcagctggaacccttctgctgctgggttcggcttcggcctcggcgtgccgccggcgccggaccaagctagcagcgtacgttctgtcgtcaaaccatcgccggcagcggcgcgtgctacagcgacccttgcattaaagactgcgctggaaggagtaggagagtctgctagctcgatcatcaccaagaagaaggcgaacggcgagccggccttgaagaagcccaggctcgagacgccgtctccgttgccaacgttcaaggttaggaaggagaagctaggggacaggatcactgcactccaacaactagtcgctccttttggaaagacggacacagcatcggtgctccatgagaccatcgagtacatcaagttcctccacgaccaagttggtgtccttagtgctccatacttgaagaacaacggccatcatcaagtgctccgccacttgaagagctcaagtcctgacaagtcgtccaaggacgacgacagccatgccagcgagatttcgctcaagggccgggggctgtgcttggtccccatatcgagcacgttcgccgtagccagcgaggtgcccgtcgacttcgtgtggagcactccgttcgctgccaactttaggtagaagaaggatgagaattgagaaagagccaaagctctgatcgatcagaggcgtcgaaagagaaataactactacctcgttaccacagatcgatcgacctgctggccctgaatcctgattatatatatatatatatatatatatatatgtttcttagtctagtgacctagtagctagcagtgtatgactgtgtatggtcatggttatctctcataactgtactagtactaagcttattgcagactaagctttgctagctagagatgaacctttggaatgagtccttgaaagacttggactcattctccaggttcatctatctatccacccagggtgtaagctaataagggatcacctaatatatttgagagggcacaacaagtctctctactgatcgtcatcagcttctaattatgattggtttgttaggttgcatcattgggtagttgtggaaagatttgttaaagatgtgtaatggtttctataccttaaactagtgacgacggaatggatcaaagtgcgtagcaggtttctattgattgtactacgtacccaataaaagtggcatctctttgatt

SEQ ID NO: 7372 - DNA, 1464 bp, Zea Mays
agctcaaagaccgtgtgtgtcaaagagagaaccagcacacagcagagtagcacctgatcgatcgatctcctactactagctcgttcgctttcacaaccagggagcagcaatggcatctgctgctactactctcctcaagtcgtcattcctccccaagaaggctgaatggggatccaagcaccagctggttgccgctcatcccaggccggcgaccgtcgtcgtctccatggttgcccgcgctagcgcctacgctgacgagcttgtccagaccgcgaaaaccatcgcgtcgccgggaaggggcatcctcgccatggacgagtcgaacgcgacctgcgggaagaggctcgactccatcggcctcgagaacaccgaggccaaccgccaggcctacaggaccctcctcgtcagcgctccaggcctgggacagtacatctctggtgccatcctcttcgaggagaccctctaccagtcgaccgtcgacggcaagaagatcgtcgacgtgcttagtgagcagggaatcgtgcctggtatcaaggtcgacaagggtcttgtgccactcgctggctccaacaacgagtcatggtgccaaggtctcgatggccttgcttcacgtgaggcagcctactaccaggccggtgcccgcttcgccaaatggcgcactgttgtcagcatccccaacggtccatctcaactagccgtgaaggaagctgcctggggcctcgcccgctacgccgccatctcacaggaaaatggtctggtgccgatcgtggagcccgagatccttctggatggcgagcacggcatcgagaggaccttcgaggtggcgcagaaggtgtgggcggagaccttcttctacatggccgagaacagcgtgatgttcgagggcatcctgctgaagcccagcatggtgacccctggtgccgagtgcgaggagaaggccaccccggagcaagtagccgagtacaccctcaggctcctgcgcacaaggatccctcccgccgtgccgggcatcatgttcctgtccggcgggcagtctgaggtggaggcgacccagaacctgaacgccatgaaccagagccccaacccgtggcacgtgtccttctcctacgccagggcgctgcagaacacctgcctcaagacgtggggcggcaggcccgagaacgtcaaggcggcgcaggacgcgctgctgctgcgcgccaaggccaactccctggcgcagctcggcaagtacaccggcgatggcgaggccgcggcggcaaaggagggcatgttcgtcaagaactacagctactaattaaagacgacggcgatacaccactcctgctgctagtcttcaattatgccatacaatgcaccttcgatcaagttctccggatttacttgttgaaattcctgtaaatgaagtttataaaatcatctattcacagtcaataaattgcatctttaatgacataaatacaaaca

SEQ ID NO: 7373 - DNA, 1656 bp, Zea Mays
agctcaaagaccgtgtgtgtcaaagagagaaccagcacacagcagagtagcacctgatcgatcgatctcctactactagctcgttcgctttcacaaccagggagcagcaatggcatctgctgctactactctcctcaagtcgtcattcctccccaagaaggctgaatggggatccaagcaccagctggttgccgctcatcccaggccggcgaccgtcgtcgtctccatggttgcccgcgctagcgcctacgctgacgagcttgtccagaccgcgaaaaccatcgcgtcgccgggaaggggcatcctcgccatggacgagtcgaacgcgacctgcgggaagaggctcgactccatcggcctcgagaacaccgaggccaaccgccaggcctacaggaccctcctcgtcagcgctccaggcctgggacagtacatctctggtgccatcctcttcgaggagaccctctaccagtcgaccgtcgacggcaagaagatcgtcgacgtgcttagtgagcagggaatcgtgcctggtatcaaggtcgacaagggtcttgtgccactcgctggctccaacaacgagtcatggtgccaaggtctcgatggccttgcttcacgtgaggcagcctactaccaggccggtgcccgcttcgccaaatggcgcactgttgtcagcatccccaacggtccatctcaactagccgtgaaggaagctgcctggggcctcgcccgctacgccgccatctcacaggaaaatggtctggtgccgatcgtggagcccgagatccttctggatggcgagcacggcatcgagaggaccttcgaggtggcgcagaaggtgtgggcggagaccttcttctacatggccgagaacagcgtgatgttcgagggcatcctgctgaagcccagcatggtgacccctggtgccgagtgcgaggagaaggccaccccggagcaagtagccgagtacaccctcaggctcctgcgcacaaggatccctcccgccgtgccgggcatcatgttcctgtccggcgggcagtctgaggtggaggcgacccagaacctgaacgccatgaaccagagccccaacccgtggcacgtgtccttctcctacgccagggcgctgcagaacacctgcctcaagacgtggggcggcaggcccgagaacgtcaaggcggcgcaggacgcgctgctgctgcgcgccaaggccaactccctggcgcagctcggcaagtacaccggcgatggcgaggccgcggcggcaaaggagggcatgttcgtcaagaactacagctactaattaaagacgacggcgatacaccactcctgctgctagtacgttcctcgatcgggggcggtgccgttacaggtgacgaatcttgcttcaaaatccttcttcatattctttagacgctcatcaacttcttcgtctgtctttccctttaactcttcgttgtctttcccgattctgaaagtgtggctttcctcggatgtcagtattcggttgagatacccaatccttttaccggcactagcaccggtcttggtaccctaaagaatctcctactgatcatgttgcattctacaagtcacacgtccatgtcagacattgaaaatttatacatctcactaataataactcatatatgtggaagtatgagc

SEQ ID NO: 7374 - DNA, 1050 bp, Zea Mays
ctggattcctccacatccaaacgaccaaacgcggcggccgggctcctgtgcagcggcttagctctcttctcgccctcccgccgtccgccgccttggcgtcgctgtactcgcgcccgtgccgtgcgctaccgaccaagcctaagagtgacatgtcggcgtcggatcttcccgacgagctgtgggcgcgtgtcctggagctgggagccgcgtcgtccgcgctggggttccgcgacctctgctccattgccatcgcgtcccgccgcctcggacgcctctccgtctaccccgccctctggtcgaaactcctctctcgcgatttcccctcccaatccgaaccctccacgtcctcggcctccacctcccagccgccgccgcagcggctccaccccaaatccctttacaagaccaagtttgagaggcacaaggtgaggatggctgaggcgaggcggcgggcggtgttcgaagcggaggcgcgggtgctagcttccaggaggcgactggtggagctggaggagtccattcgggaagagggggagaggatgaagacggctgcgcaggagctcgacaacctcgagagggtcaggagagcttctgtggcattaaacgtatggcaaccacaagttgttcgtggtcgtcagaagcagttggttcagcaatgcacagttcctgttgattcccgtcttagtgatctaaacatggagctgaaagtttgtaagcaacaaatagcaacttataagaatgcctatgtatgtgatcacgggtttaactacaattggcagagaagaaaaaggctggctttactatagttgtgcttttgttattgtcatcagagcaaggagaagcacaagctgaatgattgtgaggaagcattgaaacgagcaaagtatcacccactgcaggatagtcatacaagtggaactatcaatgagccacgtgcaaagaggaagaaactgaaatgagccatacgatttgcctccggactcaaggtatagcttttgctatgcataatgcatcaatatatatgccaacacagcaacacctgctttgcac

SEQ ID NO: 7375 - DNA, 4390 bp, Zea Mays
ttcgtcttccctttctcggactccgagtcccatctggccatcacgccgtatcacgcgttcctctcctttttcttttccttattacagacaaagacttttcccactcccgttctctgtctctctcctgctcgttccccctttgtctagcccgtacgaaaccctaggctccgccgcccaaaacctcgccgccgcgccgccgtacggcggcgccccatggccccggccttctccgtccctgacgcagaagacctcccagcccgcagatccgacgcctccgacgtcgcaggcaacgtctgggacctcgccaccctccccacgccccccgccggcggcggccgcgaaatatacatctaccgcaacacgtttaacctcgtcccgcgctccatcggcggcagagcccgcggtctcaggtcgcttaagttcttcggcaacgatgtggaggtgctacccgcggattccggggacgagctggacgggctcgaaagcctccaggtcaaggtgtccgcgcccagggtctcaggggcgccgctccgtcggatgcaggctctcaaggagctcgagctctcaatggtgccgcccaggccatcctcgtgctccatactggcggaggttgcccggctcaagtgcctcaccaagctcaccatttgccacttctcgattaggtacctccctcctgagattggttccctcaagaagctccaagaacttgacctctctttcaacaaattgaaaaactttcctaactgtataattgagttgagtgcattgaagtttctcaaagtgaccaataataagttggtggatgtaccctcgggaatctcctctttgagatgtcttgaaagccttgacttatcaaacaacagattgacttctcttggttcagttaaacttatttctatgcttacgctgcagtatttaaaccttcagtttaataggctctcccattcctatgtaattccttcatggatatgctgtgacatgaggggaaatgttgaaaatactatgaagggttgcaagttaaagtacacagaatcttcgccaaatttgaaacaccatgctccacataaaattaagaagggctggaggagacgggattgcttgcaacaacgagctcgtcaggaacgtctggagtcgagcaggagcaagctgaatgaaaaatacatagatgaaatggctgtgaacatggctgaagatgaatgcccttctagtttgcatgatatggaaaataagctaggcatcagaacaattgatgaagaaacttcagtacaggattcgttgaaagaaacaagttctatatctgaagatctattttcaatagttgacgatgacttggatgggcttacgaaggattgtggcacgatggtacaggatcactatgatgaggagaaacctggattcaatatgagaggttacaatgatgacaattcttgtatcagtggggagcctgcttgtttcagcagaagcagggtttgcagtgttgaaaaggaactagatgatactgcttcatccgtccatgatgttggtgagattgctcgagacaattcttcagtgacacccaagtttgctttaaaatctaaaaggcaccctgatatggacagcaatcctaaaccaagcaaatgccctcgaccaattgatgaacgctcaaaactttcatataaatacagtgtggaatcattttgcagcatagatgaccatctaccagatggtttttatgatgcaggccgagatatgccattcatgtcattagaggagtatgaaaggagtcttgggctgtatgcacgggaggttattctcttggacagagaacaagatgaagaattggatacaattgcttcttcagcacaattactgctatctagtttgacaaggccaagctcttgtgaaatggaggaagatgcaggccatgatttactgagggcatcagtgctcgctttgtttgtttctgactgctttggtggttgtgaccgaagcgcttctcttgggagaacacgtagagctattgttagcttgaggaaggagcagccttttgtttgtacttgttctgctgggaacttgggcgacaacaatgaagctaagcagaccaatattctttctgggcactttgattttgctggtttgtgtaatagatcaatacatctcatcaaggaaagaagaaattcgggtattgtacctataggttcactgcaattaggtgtttgtaggcaccgagctgtcctaatgaagtatttgtgtgaccgggcggatcctccaattccttgtgagcttgtgaggggccatcttgactatacacctcatgcttggaacattgttcctgttaaaaagaggaatggctgggtaaggatgattgttgatgcttgttaccccaccaacataaaggaagagacagatccagagtacttttgcaggtatataccactcagtcgacttcaaattgtgctcgatgatgagggctatactcctcggtgctctttcccatctgtgtcatcatgcaaagaaattgaagttacaccttctagttctgtctatcactgtaaaattggtgctgttgatgctgctgcaaagatacgatatctggatactcgtagggtctcaaatgatgaagttaaactttttgaatacaagcttctgggggaagtaaggatgctgggtgcgctaaggaagcacagatccatagtggacatatatggacaccaactttcatctaaatgggttcaagtcgatggtgataaagaatataggatattgcagtctataattttaatggaatatgtaaatggaggttctcttaagggatatttgacaaagctactgaaggagggcaagaagtgtgtccccattgatctgtcagtttacattgctcgggaagttgcttgtgcattgttggagatgcacaagaagctagttattcacagggacataaaaagtgagaatgttttgattgatttggaccccaagaggaatgctggtgcacccattgtcaaactatctgattttgacagatccgttcctttgtattctttgtcccatacatgctgtatatctcagcttggtacacacccacctgatgtttgtgttggaacaccttgttggatggctccagaggttgttaaggccatgcatgaaaaacaccactatggactggaaatagatatctggtcatttggatgttttttattggagatgcttacgcttcagatgccttaccagggactttctgacactgaaatatatgatctgatactgaggaagaaacagaggccaaggctaactcaggaactagaagcattctggacaatggatgagccagctacgagactcaagttagggatcacatctgatgctcatgcagataaattgagacacctgatagatctcttctaccagtgtaccagaggacatgcatccaggcggcccaaagctgtgcaaatttacaactcactgtgctccttgcccacatgttacgacatgaggtgaacgttctgatactgtatgaacgcgaaacttgatgcagaagtgcaggggaaggtcaaggcaggacatctagccagcctcagagggtttggtgctctaacccgaacatttcaccgtgagttggccttcaggtgctgccaggcagaacatgagaagtgggaccaaggctagcggctgtggtcgccagagctcctcctgagttggtcagttttgtagcggcacggcatctgcgtccacttgtagtcatcatcagttggtcagttttgtagtggcacggcatctgcgtccacctgtagtcatcatcatgtatgtgttatcacatccattgtttccccttttcatggttgctgccatcacaatggggtttaagttatcaaattaggtcattggtgccccaggggcatttgtctgctagaccgctgcatttacttctctatgtgtattgtattgtttatatctgtttagaaaaaaatgactgttgtccatgtaacaattgatgacatctgctatgtgttattgcgaggttatttgtttatgctgattttaccagccattttcgggcatgagctcttgggaaacctgtatcgtgtacagtctcgacagacaagaatatactgatgaatcttgatttatgtgtcagtcttttcaccatttattatatatatgctcgcctacatttaaaacttagtttgttactttcttttttattaaggtcgacacaaattgattaaattcgttaagatgcgcttgaatacatataacttccggcatacgaatagtataagacgttatttgagacagagcttattagtaagactcttggtcatatataacttcttttttttccacaattttaccgcagactttatattcattacttcacgcaaaacatcaaaagataaacggatctgtaatgtgg

SEQ ID NO: 7376 - DNA, 2202 bp, Zea Mays
ggtcacgatccgtgcgtactgagaccgtgcagcagcgtcgagggaggttcgtcggtcgggttgacttgggcgcggatgggcgggaccggcgcgagcagccggcggaggtgggcgcggcggtccttccggacggcgggtggtggaggaggaaggggaaccggtggggttgtcaggcggaccgtcgcggcgtcgacgaccatggctccgcggggtacccaagggtttgctcatgtggacaagcaacagcgtcatgttcatggagtattatcagatttcagatgcaacagtggatcaacagatcatctttctttgtatgtcgaggaatttaagcataagagctcacacagatcatctgttagatgtcttcctagtgcacagggaaatgtaacagaaatcagtcgcatgcaacctgttgcaaggaaagttcaggtagatatgaccttcaatgataaaggattgtgtcgtgctagcagaactgtttcaggaatgcgaattcaacctaaatattatatcagcagtcccaacaacaatttgaagaattctcctactgtgaagagttatagtgggatgagtgatttcaattatcaactggtcagaagtgctaaaagaaccaaagccgtatcagtgctttgaatcgaagaaacaaaattgtgaatcctaggggagcagctcacctgctaagtaaagataaggttcatgaacaccttaattcctcattggaaagacattcacaggctttgttaagtaatgcattgattcgagaaaagcaactgtgctgttcagatatactcaatcaaaaagaacctgaacagctatggagctctgcttacagtgaatctgagaagatgttatgcttttcctccagtgacagcattgatgatctgcaagtatcgtcttcaagtgacactagtgatagcttcaacttatcatctctgggtgtaatagatggtgatgaatggaatacgaccttcaagagggtgtactaccctcatgctgcatgcctagactctatatctgtcatatacgctaaagaaataggtcaggttagcccaatatctgttcttcagcctctatctgaagattgctcagattctgaaaacatcagacacgagcctgcagatccatatgatctccaactcagacttgagcttggcacatctgcaccaagggagactgctgcagaggcaagtaattttcgcggaactagtgtctgtttaacctccgaagtgcagtcaagcgatgagaaacccatacaactggttgaagacatccttgaagaatttgaagatgatgaggaaagggacttctcttacttgctggatatactgattgcttctggaattcatggaactgccgaggatcaaatgtacaaggtgtgtcagtctctcgaccaccctgctggtgatgacgtatttgagaagctggaaaagaagtacaacaaagttgttcagtggtcaagatcagacaggaagcttctattcgacatggccaacacaatactatcacagatccttgccccgtgcttgaacatgcaaccttgggtctataccactaggaacttggccccactttggggcccagatggtcttctggagaaagtcttgcagatgctagttcagagacgggaacaccttgcacccagtgagactaagccagagaagaaaggatttgatccgaagtggccaggtttagcagactgcatcgacagggcaggaagggacattgagagaatggtaaaagatgacctgttggaagagctggtcgttgagctactgtccagttaggtttccacaattccacggccgtagtaggttttatcatagcagtacagattctttgttcttttgtttagtttttttagtcagttgtagttgttcctttggtccctgtccctgctatcactgctattttttttctcttcgttgttaaagcagtgggggagagttttttttttggtctagtcgccgtgcttccggtggtattatgacgtgaattccattggattagaggatctctgtagggaaaagttcttttctacctctccataaagagtaccttttgaagtgaggtttgtaagaatataaaaatttcctgtcgagctttgtcggctgtgagccctcaaatctgtatatgaggtaaaattataacttaattgtgttatgctttaaaggaaaaggaagatagtggcctatgctttggtct

SEQ ID NO: 7377 - DNA, 2034 bp, Zea Mays
ttaaatataaataaaaaagctaaaatctattttgggacggagggactattataaagacacatcccaaagcggcctctcgccgcaccaacagccaatccacacctcgcttgcgttgtcctcgccgcggcctcgccctgattcggttcccccgttcctcgcctctgtcatcgtctcctctgacccaaattgagccaagcgaagccgtggccgtgatccggtccatgcgcggagcgtggtagccggattctatcgccgtcgcctccccttcgccgctattttccagtcgccgggatcagccgagttggatctcgaggcataaagcgttgcgggcgcccggcgaggatacgatgcctgcgcttggtgtctggattcgacctgcagatcggaaggaaacaaggtggtcattatcacctacaagataagagaaatttctctttgtaatttgggatcaagcctgtggatggacgaaccctcggtggacttcagtgctgaaggtgttagtagcagatcaggtctctgccaaagcacctgtttaaatcctggttgtaagcatgaccgtgcttgctgggaagatgattatgtcaaggctgtaatatctcatgggcaagatgatttggcggtcgatgaaattggattggctcttactgaagtgatgcatgcatatgatgatgacaaatggtcaagtctgtatgaagattttgacgacggtgtcggcgatgaaccaattcttcctctggaatcagattcaactggtgattttgtggacattgactccgcatcacctacctttcctagtgacgatgcaatggaatcatcaattaccaattcatttgctcggaattgttcaattaatggcactccaagtttagtttctgcaatgaaaggaacacgtgtgaagaagggaatcacgacaaagttgagcgtttcttgggcccctgatgtatacgaccctcctattacttctgactcgcacacggtgaaagggcaccatacgagttcaactaagggtaactacaaatacaagacctccaagagcagcagtaccactagaaggaaaaaggacaagaagcattctaggcacagtagtagcaatggaggtggcagcaaaagagacaagaagcattcttaccgcagtagtgccagcagcagcagagctattaccagtggttctcaatattgtgacgcatacagtggtggtggcatcaacagcagaactgttcctgaatctgccaagatatctccattggtggtagctgaaaatgtcacaccgcaagagatggttcctgtactgaagacactggaaccaatcaaatgtactaccagctgcggcaaagagaagccatttgccttgctgtcgcgccagttttcccctgcaaggtacaaggggatgttcaccttttggaaccaaaaccaactggcttcttgacaatttgctatgcggaagctcacctgaaagtttccttgccaagggctgttcggatcccctccaaactttagagcttcaaaaattttagagcattttagctcacttttgaactctaaagctctaatctaaggttgaccaaagtttagatctaactgagctttacctctaaagtttagagaaggaaatctaaacatgctctaatttgattgtatcaaagattgttgctattgttctcttcgttaccatgtttgtttcgcctgtctgaaacttcagagatcatgttttggaaaattgcttggcaaagtgcttgtgttgtattatttgcacacctacattgtaggggctgattcagtcttctgtgcttttgttatgttgtatcacgacataggttgatttattaggagatttgtttggaactatggaaaacacgcatggaacaacatgtcagtatttgtaaaaaaagagtcgctcattgcggtgaagttgaagaagttatcaagaggcaatagcgcagttagtcaaacatgaaaatagcagcagcagaagaaaattattcttcttatggcaaaaggtgtcctaagaaagaacaaaaccaagaaatattgcta

SEQ ID NO: 7378 - DNA, 855 bp, Zea Mays
ggctggggtcttaattggcgtcacatgctccctccctacactttctcccctgtgtcccgttgctaaaagcttaaagagaaaaaccaaatcggacagtactgtggcccagcagcgcgcgcggggggcgtacgccggcggcgagatcctgcggtggcggggggatggcggcaaggaggcggggcccggcggagtggtggcgctagcggagtgcagctgctgggtgggtgtgtgaggggtttcggggtagttgggtgacaaggacatgaaggcgctgcggcgatccagcacctcgtcctccccgtcgtcctcctcctcgccgacggccgcgtcctccccgccgtcctcatcgtggatccacatccggtcgctcctcgtcgccgccgcgtcctcgtcctcatcctcgtcgtcctcgccgcactcggatcggggtggtattaaatctccatggtcccgaaggaaaagaaaacgagcactttctcgtgaacagtgggagagtctgttttcagcaaatgggaagcttcgtgatggtgggaagaagtttctcaagaaagttcgcagcggtggcattgagccaagcattaggagtgaagtttggcccttcttactaggagtctatgatttgaatagctctgaagaggaaaggaactctgttaagataaagaaaagtgttcatttggctcgatgtaccatgtccgtatttccatgaagcaagagtgtgagactaagaaatatcatggagcacttgagcagaatccattgactttatctgtttagtaatttcagaagaggttaatattgtaagtttgaaaggaaagtaaatggaactaggccatcctattgacattcatgtactgt

SEQ ID NO: 7379 - DNA, 3165 bp, Zea Mays
tcggtgagatgtttggtgtactgtttgatatttttttgcccacctcatcctctggcatcccctccctctaaaaccccaccctgtaccccctgctcttgaaccctttcttcctcttcctcccccagtatactccaattcccacgtactcttcctccttgttctcctcctcctctctccctctctctcgccagaggatccaagaagtaccattgcagctcgctccattcgttcccaatcccaacacagcctctcagctgagctcagctcagctcagctcagggagttcccctgcttgtttttgctctagtgctcttggctgcctcagaaaaggactgcatgtgcagcagctgcaaagatagaatttctttatttttttcaccccaccttctcccaaggtgctgttggtgccccaggtggaggcaactggcgaagtgtgtgcgttctttgcttgatcaactaggttaagccatttcttgccccagtgttctccgattcatggttgtggaactagtccgagaatagctggagctgctcgttttcccttccaagaagacgaaggcggggggcgaggcgatcgtttgagcggtacctgttgcgcgcctgaggcggtgcaatcaatgtcgtcttcctgcataccgaccggcctgcggctggacctggacatggtgaaggcggcggcgtcgccggtgggcgcgcactcgtcgccgctgcgcccggcgcactactcgtcgccgtcgtcgacgctgtcgtcggaggcgtccaacgcctcgtcatcgtcggcgacgtcggtgtcgctcaagcgggctcgcgcgccgcggaagcggcccaaccaggcgtacaacgaggccgccgcgctgctcgcgtccatccacccctccgtgttccccgtgaacaagagccccaagacggcgccgccgcgcccgccgcagctctccgtgctggcggcggcgctcgacgcctcgcccgacctcctcccgccgctccccgtcctcgcggactccgcattcctgctccgggaccaggacacgccgtcgccgaagccgcggagcccgtccggcgccaagaactgcccgtcgccggcccccgtgagcagcgcgttccgggacttccgcgacccgccgtcgtcggcgagcctcgacgcggtcggcgccgacgagcttggcgagatcgacttcgacgacgacggcttcaacgccgactccatcctcgacgtcggtgacgccgcggccgggggcctcgacggcatcatgggcagcctcaccgtcgacgtcgagagcggcaccgccgccaggtccgatgactccatcctttccagctccggcatacacccctacctcaggaggctcatggtggtcggcctcgccggcaggttcgagctcggcctcgggtcccagcacggtgctcggcccagcctcaaccgcgcactgaagcggcgggacgacgacggcgcctggtggatgtggccggcagtgccggtaaaggacttgacgatcgcaccaccggcaccgccagcaccaccggcgccgaacgccgcagtgccgcaggccgccgccgccgccgcgccagaaaagaagaaaagcaagaagaagaaggtggtgaaggccatggcgaagggaaatgaggagcttcttcccaacgcgaagtgcaaggaggaagaagctgacgcctctgttgatgacgccgccgctaatggcgacggtgactccgacagtgcgccgacgaacgcaccaaaggccggtctggggctgaagctggacgccgacgaggttctcaaggcgtggtccgacaaagggtccatgtttgccgagggcagcgggccggagttgccgacgtcggccgccgaagtgcgggctaagcttgcagacatcgacctgtttccagagaacggagcaggcggcggtggggtcagggaagccagcgtgctgcggtacaaggagaagaggcgcacccggctcttctccaagaagatccggtaccagggaaggttcgttaggagcccgtctcttcttcggcaggccctggaggaagagacctagctagacaggcagtaatctttgctagccatttcttcttcttcttttttcccagcgcgtttttggccttttagttcctcattaactaagatgtgagtgagaattttcagtttttttttggtcggagttttgctctggagagaagaggatagggtaggatgcctttatagtggattgtcatggcatggtggtcagatagtttgtctcgggtttacagtgtgaggtaaaggaaggaaaaataaagtgatgttagaagaatacaaagcttcatacaggaagcagctcaggtgatgggttctgtttcgcatttactgctccgaaattaccgactgaatatctcattgctgtgaaacatccattgcaaagaagaagaagaagaaacggctacaaatcagcacggattatggtgtaataataagtaacagttgacaaaacctgctgtttttcatgcagcaggcctgcctctgctttggaaaggtaaattatgtgcagctgcaggcattagcaaaatacagtagaaatcagaccgaaaagagagagagagaaaaaaggcactagagatctcattgaaacttcatcagcacctgaaaaaccatgtgatttcacaaggcgcggatcaggtaataagaagtgcaaacagtaaataaaccaacacttggctggttgaagcaagttggggttcaagctatcagatattcagatggcatcttttattttctttctttttttttacttgcagtgcatcagacaaaagagcgaaatggatatggttgggcagaggcactgacctgctctgctcagctcagttatgcacacacatctgcgcaaaattccaaccgacggcatggacagcgcagatgaaatttgtcagatggcaattggatgatcctcctaaaagcatatacacgtagtagattaattctatttaaaacacatctagcagaaacaggagagataaactcgtcattactcacatctgtgattattccagcctagtcgaggtgcatataaactcatcgagtagtcgcgtgatcactgtccaaaaatctgattcaccctaacccgtgcagttttttcagcggtcctgatgtcgatgattgagaccataatggattgattatttaaaatccta

SEQ ID NO: 7380 - DNA, 2010 bp, Zea Mays
gcacgaatcttatcgtagtccactcgaagtcgcctcccatttcgcgggtcaccggctcgccgctgcgtcaagcgagcgcttccccccagatctcgacttctcgagcctgtcctccgccccccacaggctctgctggatccagaaccttctagaacccctgcactgcgcggtgcgcgccatcctcctccttccttccatccagatctcgacacccctcgccggcccagacctccggtcctgtcgtggccccggggttcgggcggctgccaaagaatcagtggccatgggatctgctatcctcaacagcattgcccccgaggagcctaaagtggtcgtgccagagtacggtgagacggctgatatccaggacaaggaagttagtatggaacagctctgctccataagcacctatgatcagtggacgccactctctgtttctggccagcttcccaaaccacgctataagcatggagctgtggtgattcagcagaagatgtatgtctttggtggaaaccacaatggccgttaccttggcgacattcaggttttggacttcaaaactttgtcatggtcaaagctggaagctaaatcacaagcagaaccatcagaatcagctggagcagttccgttttctgcatgtgctggccattcagtgattcaatggggaaataagatcctatgtcttgcaggacataccagagaacctgcagaaagtctcagtgttaaggagtttgatccacaaacctgcacttggtctaccttgcgtacttatggaaggtcacctagttcacgtggtggtcagtcagtgacccttgttggagacactctagtggtctttggcggtgaaggtcatgggagatctcttctgaatgatctgcacattcttgatcttgagaccatgacttgggatgaatttgagaccacaggcactcccccttccccaaggtcagagcatgctgctgcttgctttgcagagcggtatcttctgatatttggcgggggttctcattctacatgtttcagtgacctacacctccttgacactcagacaatggaatggtcaagaccaaagcaacaaggtgttactccagaatcaagagcaggacatgcaggtgtaactattggagaatattggtttattactggtggtggaaatagtaggaaaggtgtctcagatactcttgtactcaacctgtctacgtatgaatggtcagttctcactaatcttgaggcccgtgcaccccctgtaagtgagggctcaagtttagtaatgcacacaattaatggagaaaattttctggtgtcatttggaggatatagtggccgttatagtaatcaggcttatgctctcaaggcaagtctcaaaccaagtgtcccatctcaacaaataaatgaatcagatacaaatggcttttctcccttatctgtggcagaaaattctagcaggaaagtcatatttgaaattgaggaacttaaagatgaaaaggaactccacttagttcaagatcaactttctatcgaacaaaccagggcttccaaatttgagaatgaaatttcagatattcaacaacgactacagaagatggataccctagaaaaggagattgaatcacttcgctatgaactggacagcactgtatccgaagaagaatcttcaagtggcaacgagttgcaccgcagtcggggcttttggaggtggaatgggtgaactcctcgagactcaaggagtgagtattgaagagaatactcttccaaatagttgtcattattttaatttttatgtctttcacaaaaatatatgaattcgtggatggtactagttcggaagcatatagaggatctaagcaaactgcagcaacatcaactgtgaaaagcatcttacagaaagtaaaacgagtatcatgtggcccagaatttcctatgttagaatagtttcttatctgataatgacaccgacaatgatcaccataacgaattattttttttcatacatatgtggtgggatattaa

SEQ ID NO: 7381 - DNA, 2060 bp, Zea Mays
gcacgaatcttatcgtagtccactcgaagtcgcctcccatttcgcgggtcaccggctcgccgctgcgtcaagcgagcgcttccccccagatctcgacttctcgagcctgtcctccgccccccacaggctctgctggatccagaaccttctagaacccctgcactgcgcggctgccaaagaatcagtggccatgggatctgctatcctcaacagcattgcccccgaggagcctaaagtggtcgtgccagagtacggtgagacggctgatatccaggacaaggaagttagtatggaacagctctgctccataagcacctatgatcagtggacgccactctctgtttctggccagcttcccaaaccacgctataagcatggagctgtggtgattcagcagaagatgtatgtctttggtggaaaccacaatggccgttaccttggcgacattcaggttttggacttcaaaactttgtcatggtcaaagctggaagctaaatcacaagcagaaccatcagaatcagctggagcagttccgttttctgcatgtgctggccattcagtgattcaatggggaaataagatcctatgtcttgcaggacataccagagaacctgcagaaagtctcagtgttaaggagtttgatccacaaacctgcacttggtctaccttgcgtacttatggaaggtcacctagttcacgtggtggtcagtcagtgacccttgttggagacactctagtggtctttggcggtgaaggtcatgggagatctcttctgaatgatctgcacattcttgatcttgagaccatgacttgggatgaatttgagaccacaggcactcccccttccccaaggtcagagcatgctgctgcttgctttgcagagcggtatcttctgatatttggcgggggttctcattctacatgtttcagtgacctacacctccttgacactcagacaatggaatggtcaagaccaaagcaacaaggtgttactccagaatcaagagcaggacatgcaggtgtaactattggagaatattggtttattactggtggtggaaatagtaggaaaggtgtctcagatactcttgtactcaacctgtctacgtatgaatggtcagttctcactaatcttgaggcccgtgcaccccctgtaagtgagggctcaagtttagtaatgcacacaattaatggagaaaattttctggtgtcatttggaggatatagtggccgttatagtaatcaggcttatgctctcaaggcaagtctcaaaccaagtgtcccatctcaacaaataaatgaatcagatacaaatggcttttctcccttatctgtggcagaaaattctagcaggaaagtcatatttgaaattgaggaacttaaagatgaaaagcctggcaatagggcagataacagcaaaaccttgggacaagtagttatggttgaacaaaacgaaatagaaaacagacttaatcaagagcacttgcagagtctccgcctgaagcaggaactaactggtcttgagaacagaaatgcagaacttactgaggaactccacttagttcaagatcaactttctatcgaacaaaccagggcttccaaatttgagatattcaacaacgactacagaagatggataccctagaaaaggagattgaatcacttcgctatgaactggacagcactgtatccgaagaagaatcttcaagtggcaacgagttgcaccgcagtcggggcttttggaggtggaatgggtgaactcctcgagactcaaggagtgagtattgaagagaatactcttccaaatagttgtcattattttaatttttatgtctttcacaaaaatatatgaattcgtggatggtactagttcggaagcatatagaggatctaagcaaactgcagcaacatcaactgtgaaaagcatcttacagaaagtaaaacgagtatcatgtggcccagaatttcctatgttagaatagtttcttatctgataatgacaccgacaatgatcaccataacgaattattttttttcatacatatgtggtgggatattaa

SEQ ID NO: 7382 - DNA, 2112 bp, Zea Mays
gcacgaatcttatcgtagtccactcgaagtcgcctcccatttcgcgggtcaccggctcgccgctgcgtcaagcgagcgcttccccccagatctcgacttctcgagcctgtcctccgccccccacaggctctgctggatccagaaccttctagaacccctgcactgcgcggctgccaaagaatcagtggccatgggatctgctatcctcaacagcattgcccccgaggagcctaaagtggtcgtgccagagtacggtgagacggctgatatccaggacaaggaagttagtatggaacagctctgctccataagcacctatgatcagtggacgccactctctgtttctggccagcttcccaaaccacgctataagcatggagctgtggtgattcagcagaagatgtatgtctttggtggaaaccacaatggccgttaccttggcgacattcaggttttggacttcaaaactttgtcatggtcaaagctggaagctaaatcacaagcagaaccatcagaatcagctggagcagttccgttttctgcatgtgctggccattcagtgattcaatggggaaataagatcctatgtcttgcaggacataccagagaacctgcagaaagtctcagtgttaaggagtttgatccacaaacctgcacttggtctaccttgcgtacttatggaaggtcacctgtatgattatgcttttctgtgttttattgccaaagcttctatagtatttatacaaattagcttgttacctgaagcttgcttttgtttttcgttgttttcccccaaatctgtgatgaattttcctatttcctttagagttcacgtggtggtcagtcagtgacccttgttggagacactctagtggtctttggcggtgaaggtcatgggagatctcttctgaatgatctgcacattcttgatcttgagaccatgacttgggatgaatttgagaccacaggcactcccccttccccaaggtcagagcatgctgctgcttgctttgcagagcggtatcttctgatatttggcgggggttctcattctacatgtttcagtgacctacacctccttgacactcagacaatggaatggtcaagaccaaagcaacaaggtgttactccagaatcaagagcaggacatgcaggtgtaactattggagaatattggtttattactggtggtggaaatagtaggaaaggtgtctcagatactcttgtactcaacctgtctacgtatgaatggtcagttctcactaatcttgaggcccgtgcaccccctgtaagtgagggctcaagtttagtaatgcacacaattaatggagaaaattttctggtgtcatttggaggatatagtggccgttatagtaatcaggcttatgctctcaaggcaagtctcaaaccaagtgtcccatctcaacaaataaatgaatcagatacaaatggcttttctcccttatctgtggcagaaaattctagcaggaaagtcatatttgaaattgaggaacttaaagatgaaaagagtctccgcctgaagcaggaactaactggtcttgagaacagaaatgcagaacttactgaggaactccacttagttcaagatcaactttctatcgaacaaaccagggcttccaaatttgagaatgaaatttcagatattcaacaacgactacagaagatggataccctagaaaaggagattgaatcacttcgctatgaactggacagcactgtatccgaagaagaatcttcaagtggcaacgagttgcaccgcagtcggggcttttggaggtggaatgggtgaactcctcgagactcaaggagtgagtattgaagagaatactcttccaaatagttgtcattattttaatttttatgtctttcacaaaaatatatgaattcgtggatggtactagttcggaagcatatagaggatctaagcaaactgcagcaacatcaactgtgaaaagcatcttacagaaagtaaaacgagtatcatgtggcccagaatttcctatgttagaatagtttcttatctgataatgacaccgacaatgatcaccataacgaattattttttttcatacatatgtggtgggatattaa

SEQ ID NO: 7383 - DNA, 1595 bp, Zea Mays
ttaactccaactagacgaggtcagccacgcgcaacggcgcaagccgaatccaccaacgccaaacgaccgcaccagccagtccacttcgccagtgatctgtctcagctcgtcgcgtctccggcgccgacagacacgggcgagtgggcaacgcggctccgagatcggcgggcaggatgatgatgctgatcgactgctcgaggtgccgtaccccgctgcagctgccgcacggggctccctgtatccgatgcgccatctgtggggctatcacgcacgtcgcccccgcccctcctgtcgagcccaaccgcggtgccgtacagccgccgccggggtggggtccaccgccgccgccggtgcacgggcgaaagcgagccgtggtgtgcgggatatcgtatcggcactcgcggtatgagctgaagggctgcatcaacgacgtcaagtgcatgcgccacctcctcatgacgcgcttcaacttccccgacgactccatcattatgctcaacgaagaacaaaccgacccctacaaaatcccaacaaagcataacatagggatggccatgtattggcttgtgcaaggttgtcaacctggagactcattggtgttccattattctgggcatggagcacagcaaagaaactacaatggagatgaggttgatgggtttgatgaaaccctctgcccattggattttgagacacaaggaatgattgtggatgatgacataaatacagcactagttcgaccacttcctcgtggagttaaacttcatgcattcattgatgcttgtcatagtggaactgcacttgatttgccttacctctgcagaatgaacaggagtgggcaatatgtatgggaagatcaccgaccaccatctggtgtctggaaaggcactagtggtggggaggctatttcatttagtggttgtgatgatgatcagacctctgcagatacctctggcaccacctacggtagtatcctgaactccatgcgttcgacaatacgcaacacagatgactcagcaggtgtaggtggcggtgctgttacatcactaattacaatgcttcttactggagggagcctatctgctggtggtctgagacaggagccacaactgacggcatgcgagccatttgatgtctatgcgaagcccttctccctatgacgcgttcatggtgctgctgctgcccacccatttcacgttatcaacttatcatcgtgtacatttcaccatcccgattgttaacagcgcgtggaattacaatccgtataaggaagctatgcatatatatcgtttgtttcacaggtacaatccgtatatgcatgaataattttttgtgcacgctggcccgacaaggctaatctcagtcctataattggctagaatgtagagatggtaatgggacctgatacccgattcttcgtttggaatttttcttttaggggatgaggaagtttcttcctctacaggggatgtaaatgggaaaaatcctctcccgatgggtaaatgaggatggggaagcattttcattcccgttctccgcgcgaggacctgttaaacttatatttgacaatgttttcatttaataattaattatag

SEQ ID NO: 7384 - DNA, 171 bp, Zea Mays
gccgaactgggcctcaaccggaacttgttttaccccatctcatcccactgactccacccacccgcccgctgcctccgccggatctcgtcggactcggatccgcccgaccaccccgcgccgccgccgcgcagcagcagcagcattaaagagaagctgtcccatctgaaatta

SEQ ID NO: 7385 - DNA, 2526 bp, Zea Mays
gtagccctttcctttccctcccgcgagcacgctacgaatcgccgtggtaaatgctcggccgcggcggccattagaaggcgctaatcacgcccaggattaaagagcccccctctccgccttggcctcggctcgcgcacctgcctgcctcactgcctgcctacctacctgcgttgttgccttcttcgcctcctccccctgtggccgcaccgcagcagctgcggcggcggcagaggtgaacagcttcccgcggccttgtcctgtccggactccggggccgggaccggcagcgcagcgggctcgcaggatctcccgagtcccgacccccatgcgtcggcctcggtgacagggtttgctagcggagtccatccaactataatgaattaggcacccagtacgtaatggcaacggaagtcaaacaaacttatttttcatggtcacaaggagagtcaactgaacgggatggtcctcaaggagtatctgtatcccagacacttgatcatggttccatttccttcggaagatttgaattagagtcactatcatgggagaagtggtccgtatttactaatgacaggcgcaatgaagaatttggaaaattcaatggtttagtcgctcagaaaaaggcttattttgaagagtattacaagaagatcagggaactaaaggcttcacagcagcaaaaccagcaaactgaacttattctggaatacagcggtgatggtagtgactccagccaaacagcagaagaggagcagggtgctgatcttgaaacccccactggatctggagcagctgttgatgtttatgtggaagaagttccatgtgaaaccacatcggagcatggactgcagtgctataatgaccaaggaaacgaaaattttgatacagaattttcctcatctaatctttcttcgtcaggtggatttctgcagcaaactgaccatgatgttagagttcctgttcgtggtgacaattctaccagtaaactgtatgcggcgccgcagaatgctagttctgttcacgatggtactagaaaaacatatgaagctgcaaggactcctagaaggattattgagaaagattccaggcttagacacagccccaagataataccaaaatccgtcaaagccctttcacaaagtgctatggattacacatttactagtgagaggcctggttcagtgaagcccaatacaactacgagccagaaggctaagccagtgcaaagaccaaatgcagcaagccagaagatgtctgcatctacagaaaggagcaagcttacaggtctcagaagaccttcctcagcaggtgcgcaacggccttctactggagagcgacatgctattgccagggagaattcacaattacctgtggtcgtttccaccccacggcgaccttccactgctgagagacgcccagtcacccgagatcgtgcagagaagcaagccaatgtcaccacaccacgccgaccttctacttctgaaagactccccatcaaaagagagactgcagcaaagcataatgatatttccgctgtacgtcgaccctctacaggagagagacgtgcttttactagagatggtgttctgagaactgatgtgaagacacctagtaaggcaagagcaactgtggctcatccgatgagtgaaatgactacagtgggcaatacgagaaaggctatcactccaaatgcagctagaagtagcaagctggaaacaaaaagcaataactacagactgaagggaccttcagcattggatagccactctactaggtcaaacagaatggacttgcaagtgtctggcaagcagaaatcgagttctgttaaccttcctccaaggaaaattttcagttctactgctggagaaccatcagttggaaccatttctaggtcaaaaaagaaagagggcgttcaggcgacagtgcaatctcgagcatccacttcaaagagaacaactcctttgcagactggaaacttaaaggcgaggggtccaaatccaccagcaccgccacctccaccacgtcggccatcacgaacgactaccaaaccaagtgccggtgcctcatcgattggcggaagaaagccaaagcttcagcaccacaatggcactgatgcagtggaggagagcggaaagcgcttcagtacagtggcccgcagagcatggtggatctgagggacgtcagtaccggccttcctttgtatggtgtgtactcccgttggcccgtgcagagcagctcccaagtgtagtctcagtacaacccccgttggcccgtcccttcctttgcagagcagcagtctagtgtatgtagtcgcgcgtatcatatcccaccggtgcctagtttcgtcgtccacaaggaacttagaacattgtaaatacctggaaataaatttgcagcttagctctaaagtaaatccagcccaagatttgtgaacatccatgtatgtcattagcaatggaagcccttgtttatcagcttgttattggtgtgttctttttaagggttattgtcagatttgattcttcg

SEQ ID NO: 7386 - DNA, 2775 bp, Zea Mays
ctctcacagtcacagcatccttccttgcttctcgtctcgtcgcctctcggagatcagaaagagaacaccggacacctagcctgcgcccttgccttccctccgcgcgcgcgtgctatctatggcgatggaagacgtcgcgggtgcctcctcctcctcggtggcggccgccgcctccgaccccacgcacggctggcagacggtgtcgtaccccaagcgccaccgcaagcaggcgcatcagccaccccgcgccatggctcccgatctggcgctgcaggccaacggcaaaggctccggtgtcttcgacgccgtcgagaagcgctcccaggagcgccaccgcgcgctgcagcagcagctcgcatccagggcggccgacctcgacgacgcgcggatcgccccggtcacaggcggcgcttactccgacgactccgactccgacgaggccaccgccccgcgccaggtgggggaggtgaagaagcctaagaagcctaaaaagcctaaggtgacggtcgccgaggctgccgccctgatcgacgccgagaacctcgcagcgcacctcgtcgagatctcgtcatcatacgagaatcaacaggacattcaactcatgaggtttgctgattactttggccgggcatttgtagctgtaagcgcatcccaatttgcatgggcaaagatgttcaaggaatcaacagtgtctaagatggttgacatcccactgtgccatattcctgaggctgtcatcaagactgcgagtgattggatcagtcaaagatcttatgatgccctgggagactttgttttgtggtgtatagatagcatcatgtctgaattgtcaggcccatcagcaggacctaagggttcaaagaaggttgcccaacagtctccaagggcccaggttgcaatctttgttgttcttgccatgactttaagaagaaagcctgatgtacttgtaaatgttatgccaaagataatgggaaacaataaatatcttggacaggaaaagcttcccatcattgtctggtttattgctcaggcatctcaaggtgacctagtgactggcatgttttgctgggctcattttctatttcccacgttatgtgcgaagccaagtgggaatccccttgcaagagatttggttttgcagttgcttgaaagaattttatctgtcaccaaagctcgttctatcttattgaatggtgctgttagaaagggggaacgcctagttccccctgtttcatttgacttgttcatgagagccacatttccggtttctggtgctcgggtgaaggctacagaaaggtttgaagtagcttatcgaacaatcaaggagttggctcttgccggttctcctggctctaaaactgtgaaacaagcatcacagcaacttttacctttgtgtgcaaaagcaatgcaagaaaacaatgcagagctcaccagggaggctgttgatgtgttcatttggtgcttgacacaaaatgcagagtcctacaagcagtgggaaagaatttatcctgaaaatactgaagccagtgttgctgtcctgagcaaaattgtgattgattggaaggatgtgtctcctaagctcagttctgaagctctcaaggcaacagtgaagaacttgaaggctaagaatgaggcagcgctggagtcagcaacagatgctggaaagcaggcatctatcaagaagcagacaagcactgcaagacttgagcaggggtcagagcagctgctcggaggccggcctggccctgccctgggtgtgctcgccactgtcgcagagtgctcagtggaacccgcggcacaaactacaaagggacctgactcgaatggcagctcgtcacctctcccacctgtcctccccagcgtctgcttccctcctcggccccgagccatggcgccctgcgcgtccccgtccgccctcgcgctctccgccagcacgcgggtcagcagcttcccactgacgctgcgcccgcggccgcggccggaggcgcgtgtgccgcgcgcgcccggcggcgcccagctccgcccggcgaccgcgtgctcttggccgcgccccttgctgcccgagctcgcgccggcgttccctcgtgccggcgcccgcagcgccggcagaccgcagccgctgttccggccccgcgcaatgatgacgacgtctcagatcgccagctgcgccttcaccgtgggcacggtcgccgtcctccccttctacacgctcatggtcgtcgcccccaacgccgacatcaccaaacgcacggtggagagcagcgccccctacgtcgccctaggcctcctctacgcctacctgctctacctgtcttggacccccgacacccttcgcgccatgttcgcgagcaagtactggctccccgaggaatgggatgcactttgcagctgccgggcatcgtcaggatgttcgcgagcgagatgaccgtcgcctccgcatggatccacctcctagcagtcgatctcttcgcggcgaggcaggtctaccacgacggtctcaagaacaacatcgagaccaggcattcggtctcgctgtgcctgctcttctgcccggtcgggatcctggctcatgtggtaaccaaggtattggcaggggcagctggccgctcacattgatgattggaattgggtggttgtatctaggattcccgttttgtttagctggtggagtttatgagatctggatatgaataaagcttgttcaaggcactgattctttcaatgtggggtcaccttaaaggaaagaaattagttagacaaaaaaatagtttaaat

SEQ ID NO: 7387 - DNA, 2807 bp, Zea Mays
ctctcacagtcacagcatccttccttgcttctcgtctcgtcgcctctcggagatcagaaagagaacaccggacacctagcctgcgcccttgccttccctccgcgcgcgcgtgctatctatggcgatggaagacgtcgcgggtgcctcctcctcctcggtggcggccgccgcctccgaccccacgcacggctggcagacggtgtcgtaccccaagcgccaccgcaagcaggcgcatcagccaccccgcgccatggctcccgatctggcgctgcaggccaacggcaaaggctccggtgtcttcgacgccgtcgagaagcgctcccaggagcgccaccgcgcgctgcagcagcagctcgcatccagggcggccgacctcgacgacgcgcggatcgccccggtcacaggcggcgcttactccgacgactccgactccgacgaggccaccgccccgcgccaggtgggggaggtgaagaagcctaagaagcctaaaaagcctaaggtgacggtcgccgaggctgccgccctgatcgacgccgagaacctcgcagcgcacctcgtcgagatctcgtcatcatacgagaatcaacaggacattcaactcatgaggtttgctgattactttggccgggcatttgtagctgtaagcgcatcccaatttgcatgggcaaagatgttcaaggaatcaacagtgtctaagatggttgacatcccactgtgccatattcctgaggctgtcatcaagactgcgagtgattggatcagtcaaagatcttatgatgccctgggagactttgttttgtggtgtatagatagcatcatgtctgaattgtcaggcccatcagcaggacctaagggttcaaagaaggttgcccaacagtctccaagggcccaggttgcaatctttgttgttcttgccatgactttaagaagaaagcctgatgtacttgtaaatgttatgccaaagataatgggaaacaataaatatcttggacaggaaaagcttcccatcattgtctggtttattgctcaggcatctcaaggtgacctagtgactggcatgttttgctgggctcattttctatttcccacgttatgtgcgaagccaagtgggaatccccttgcaagagatttggttttgcagttgcttgaaagaattttatctgtcaccaaagctcgttctatcttattgaatggtgctgttagaaagggggaacgcctagttccccctgtttcatttgacttgttcatgagagccacatttccggtttctggtgctcgggtgaaggctacagaaaggtttgaagtagcttatcgaacaatcaaggagttggctcttgccggttctcctggctctaaaactgtgaaacaagcatcacagcaacttttacctttgtgtgcaaaagcaatgcaagaaaacaatgcagagctcaccagggaggctgttgatgtgttcatttggtgcttgacacaaaatgcagagtcctacaagcagtgggaaagaatttatcctgaaaatactgaagccagtgttgctgtcctgagcaaaattgtgattgattggaaggatgtgtctcctaagctcagttctgaagctctcaaggcaacagtgaagaacttgaaggctaagaatgaggcagcgctggagtcagcaacagatgctggaaagcaggcatctatcaagaagcagacaagcactgcaagacttgagcaggggtcagagcagctgctcggaggccggcctggccctgccctgggtgtgctcgccactgtcgcagagtgctcagtggaacccgcggcacaaactacaaagggacctgactcgaatggcagctcgtcacctctcccacctgtcctccccagcgtctgcttccctcctcggccccgagccatggcgccctgcgcgtccccgtccgccctcgcgctctccgccagcacgcgggtagctggttgatttgctctgcctcggcctccgcctgaccgccttgctgcaggtcagcagcttcccactgacgctgcgcccgcggccgcggccggaggcgcgtgtgccgcgcgcgcccggcggcgcccagctccgcccggcgaccgcgtgctcttggccgcgccccttgctgcccgagctcgcgccggcgttccctcgtgccggcgcccgcagcgccggcagaccgcagccgctgttccggccccgcgcaatgatgacgacgtctcagatcgccagctgcgccttcaccgtgggcacggtcgccgtcctccccttctacacgctcatggtcgtcgcccccaacgccgacatcaccaaacgcacggtggagagcagcgccccctacgtcgccctaggcctcctctacgcctacctgctctacctgtcttggacccccgacacccttcgcgccatgttcgcgagcaagtactggctccccgagctgccgggcatcgtcaggatgttcgcgagcgagatgaccgtcgcctccgcatggatccacctcctagcagtcgatctcttcgcggcgaggcaggtctaccacgacggtctcaagaacaacatcgagaccaggcattcggtctcgctgtgcctgctcttctgcccggtcgggatcctggctcatgtggtaaccaaggtattggcaggggcagctggccgctcacattgatgattggaattgggtggttgtatctaggattcccgttttgtttagctggtggagtttatgagatctggatatgaataaagcttgttcaaggcactgattctttcaatgtggggtcaccttaaaggaaagaaattagttagacaaaaaaatagtttaaat

SEQ ID NO: 7388 - DNA, 3009 bp, Zea Mays
cggtttttttcggcttgcctcgtcctcgtctctcacagtcacagcatccttccttgcttctcgtctcgtcgcctctcggagatcagaaagagaacaccggacacctagcctgcgcccttgccttccctccgcgcgcgcgtgctatctatggcgatggaagacgtcgcgggtgcctcctcctcctcggtggcggccgccgcctccgaccccacgcacggctggcagacggtgtcgtaccccaagcgccaccgcaagcaggcgcatcagccaccccgcgccatggctcccgatctggcgctgcaggccaacggcaaaggctccggtgtcttcgacgccgtcgagaagcgctcccaggagcgccaccgcgcgctgcagcagcagctcgcatccagggcggccgacctcgacgacgcgcggatcgccccggtcacaggcggcgcttactccgacgactccgactccgacgaggccaccgccccgcgccaggtgggggaggtgaagaagcctaagaagcctaaaaagcctaaggtgacggtcgccgaggctgccgccctgatcgacgccgagaacctcgcagcgcacctcgtcgagatctcggtaacaccgcatcaaaacctctcctctccgtcgagttcctgcttgaaaatcagatcttgggtcgacggtccggatcgaaggttttgtccgtttcttagggatcggatctggatagggtttagcaatggatcttgctggacttcatgaaattccgacgaaatgctaggtcctacgggattttggatcaagttgaatcaaaattctatctgttttacctgaaagtcgaattttaggatgtaaagatgggatgtcggggagctttgggttttggtgctaggagtagatcctaccaaagctgtaagcgcatcccaatttgcatgggcaaagatgttcaaggaatcaacagtgtctaagatggttgacatcccactgtgccatattcctgaggctgtcatcaagactgcgagtgattggatcagtcaaagatcttatgatgccctgggagactttgttttgtggtgtatagatagcatcatgtctgaattgtcaggcccatcagcaggacctaagggttcaaagaaggttgcccaacagtctccaagggcccaggttgcaatctttgttgttcttgccatgactttaagaagaaagcctgatgtacttgtaaatgttatgccaaagataatgggaaacaataaatatcttggacaggaaaagcttcccatcattgtctggtttattgctcaggcatctcaaggtgacctagtgactggcatgttttgctgggctcattttctatttcccacgttatgtgcgaagccaagtgggaatccccttgcaagagatttggttttgcagttgcttgaaagaattttatctgtcaccaaagctcgttctatcttattgaatggtgctgttagaaagggggaacgcctagttccccctgtttcatttgacttgttcatgagagccacatttccggtttctggtgctcgggtgaaggctacagaaaggtttgaagtagcttatcgaacaatcaaggagttggctcttgccggttctcctggctctaaaactgtgaaacaagcatcacagcaacttttacctttgtgtgcaaaagcaatgcaagaaaacaatgcagagctcaccagggaggctgttgatgtgttcatttggtgcttgacacaaaatgcagagtcctacaagcagtgggaaagaatttatcctgaaaatactgaagccagtgttgctgtcctgagcaaaattgtgattgattggaaggatgtgtctcctaagctcagttctgaagctctcaaggcaacagtgaagaacttgaaggctaagaatgaggcagcgctggagtcagcaacagatgctggaaagcaggcatctatcaagaagcagacaagcactgcaagacttgagcaggggtcagagcagctgctcggaggccggcctggccctgccctgggtgtgctcgccactgtcgcagagtgctcagtggaacccgcggcacaaactacaaagggacctgactcgaatggcagctcgtcacctctcccacctgtcctccccagcgtctgcttccctcctcggccccgagccatggcgccctgcgcgtccccgtccgccctcgcgctctccgccagcacgcgggtcagcagcttcccactgacgctgcgcccgcggccgcggccggaggcgcgtgtgccgcgcgcgcccggcggcgcccagctccgcccggcgaccgcgtgctcttggccgcgccccttgctgcccgagctcgcgccggcgttccctcgtgccggcgcccgcagcgccggcagaccgcagccgctgttccggccccgcgcaatgatgacgacgtctcagatcgccagctgcgccttcaccgtgggcacggtcgccgtcctccccttctacacgctcatggtcgtcgcccccaacgccgacatcaccaaacgcacggtggagagcagcgccccctacgtcgccctaggcctcctctacgcctacctgctctacctgtcttggacccccgacacccttcgcgccatgttcgcgagcaagtactggctccccgagctgccgggcatcgtcaggatgttcgcgagcgagatgaccgtcgcctccgcatggatccacctcctagcagtcgatctcttcgcggcgaggcaggtctaccacgacggtctcaagaacaacatcgagaccaggcattcggtctcgctgtgcctgctcttctgcccggtcgggatcctggctcatgtggtaaccaaggtattggcaggggcagctggccgctcacattgatgattggaattgggtggttgtatctaggattcccgttttgtttagctggtggagtttatgagatctggatatgaataaagcttgttcaaggcactgattctttcaatgtggggtcaccttaaaggaaagaaattagttagacaaaaaaatagtttaaat

SEQ ID NO: 7389 - DNA, 1417 bp, Zea Mays
ttttcttccctcgtccccgcgtgtgcctttatccctacagcaacgacttggggcgaccaacgccacaactccacaaggtccgcatacccctttcccccgcgccctttatccctgcagcaacgacttggggtgacgagcaccacaagaggatgatgcttctcgccaagctcggggcgccgagcgttccagggaagcgtcgagttgaagaagatgctataagttgcagaatagaaacataccatggttgtgtcatggacagaaggaaactgctgttggtccctgcgattagtatggccattgcctcctttcagtacacttttgtcaagggaatagcaaaagctgaatttgctgatatgcctgcacttcgcggtaaagattatggaaagacaaaaatgcggtatccagattacactgaaacggaatcaggcctccagtacaaggacttgcgggttggtgatggcccttctccaaaaaaaggggagactgttgttgttgattgggatggctatacaattgggtactatggtcgtatctttgaagctcgaaacaagaccaaaggaggttcatttgagggtggtgacaaagacttcttcaagttcaaagttggatcaggacaggtcataccagcttttgaggaggctatatcaggcatggccccaggaggtgttaggaggatcattgtaccaccggatcttggatacccagataatgactacaacaagttgggtccaaaaccaacgacattctcgggacaaagagctcttgattttgttctacgtaatcaaggcttaatagataaaactctcctgtttgacatcgagcttctcaagataattccaaatcagtagtgtgagattctaatgattacctttgaagaaaaaagctcatgttattcaggtccgtcgaagatcagcagtaaatgtatgcaattgaatatgaaaatatttttttaggcatacgcacatacaacatgatgtgaacacatctacctacatctccattaactacgcctcttttaaaagatgccattgtgtgcatctgcggtttctacagaagctctattagatacgtctgtgatcatacctcgactgctgagcaaatagagaatgaccaaatggcgaattgttgaaatgaaggcattctagttggaaatgttgtaaataccccaaatattgcctgtctgtcgtaatagttcatttgggacgtctggggggtgcatggtttcttttggtgattggtcgccccagacaaatcagaactctctactttaccagaaggtaccatccaaacaggatttcaatccagttttagtgaatgttcaatatgttttagtaaataatgtaaaaacggctttttattgctccaaatatgtaattcaggtttctaattttaaatcccatttaagaaatattttgcg

SEQ ID NO: 7390 - DNA, 1462 bp, Zea Mays
ttttcttccctcgtccccgcgtgtgcctttatccctacagcaacgacttggggcgaccaacgccacaactccacaaggtccgcatacccctttcccccgcgccctttatccctgcagcaacgacttggggtgacgagcaccacaagaggatgatgcttctcgccaagctcggggcgccgagcgttccagggaagcgtcgagttgaagaagatgctataagttgcagaatagaaacataccatggtgatctatacaactaatttttatctcacatcctatgaatttaaggttgtgtcatggacagaaggaaactgctgttggtccctgcgattagtatggccattgcctcctttcagtacacttttgtcaagggaatagcaaaagctgaatttgctgatatgcctgcacttcgcggtaaagattatggaaagacaaaaatgcggtatccagattacactgaaacggaatcaggcctccagtacaaggacttgcgggttggtgatggcccttctccaaaaaaaggggagactgttgttgttgattgggatggctatacaattgggtactatggtcgtatctttgaagctcgaaacaagaccaaaggaggttcatttgagggtggtgacaaagacttcttcaagttcaaagttggatcaggacaggtcataccagcttttgaggaggctatatcaggcatggccccaggaggtgttaggaggatcattgtaccaccggatcttggatacccagataatgactacaacaagttgggtccaaaaccaacgacattctcgggacaaagagctcttgattttgttctacgtaatcaaggcttaatagataaaactctcctgtttgacatcgagcttctcaagataattccaaatcagtagtgtgagattctaatgattacctttgaagaaaaaagctcatgttattcaggtccgtcgaagatcagcagtaaatgtatgcaattgaatatgaaaatatttttttaggcatacgcacatacaacatgatgtgaacacatctacctacatctccattaactacgcctcttttaaaagatgccattgtgtgcatctgcggtttctacagaagctctattagatacgtctgtgatcatacctcgactgctgagcaaatagagaatgaccaaatggcgaattgttgaaatgaaggcattctagttggaaatgttgtaaataccccaaatattgcctgtctgtcgtaatagttcatttgggacgtctggggggtgcatggtttcttttggtgattggtcgccccagacaaatcagaactctctactttaccagaaggtaccatccaaacaggatttcaatccagttttagtgaatgttcaatatgttttagtaaataatgtaaaaacggctttttattgctccaaatatgtaattcaggtttctaattttaaatcccatttaagaaatattttgcg

SEQ ID NO: 7391 - DNA, 3626 bp, Zea Mays
ggttgagcgagcgagtacggatactcgtgtctgcgctgcgcaccgagctgagacacgtcgtattcaaagggagaggccgcaaggcaccgagtcgagccgctgctcgagcagacagggacgcaaacgcaaggagacgatgaggcctggatcgacccccggaccatcttcgcgccggtgcatccatggctccgccgccgcgctcccaacgctgctgctgctgcttcttcttcttctggctgcatcgtccgcgcaagctcagcaaacgtcaaggatgaagaccgatccagtcgaagcggcggcggtgaacgcggtgttcgccaagctcggccaggcggctacgtcggcatggaacatcagtggcgacccctgcacaggcgccgccacggacggcacgaacatcgacaacgaccccactttcaacccggccatcaagtgcgagtgctccgtccagaacaaccgcaccgtctgccacgtcaccaagctgaagatatacgcactcaatgcatttggccccataccacaggaactgcagaacctcacgcgcttgaccaatctgaatttagcacaaaattacttaaccgggcctttgccatctttcctcgggaatttgactgctatgcagtacatgagtttgggcatcaatgcattgtctggatctgttccaaaggagcttgggaaccttgtgaatcttgtatctctaggcattggctcgaactacttaaatggttcccttccttcggagttgggaaacctggcaaaacttgagcaattgtatattgacagtgccggcctaagtggtcccctaccgtcatcgttttctagactaacaagaatgaagacactgtgggcatcagataatgattttactggggaaataccagattatattgggagctggactaatttaacagaactgcggtttcaaggcaattcatttcaaggtccacttccagccactctttctaatctcgtccaactaacaagcttacgaataggtgacattgtaaatggaagttcttcaatgatattcatcagtaacatgacatctttgaacacattaattttgaggaattgcaggatatctgatagcctggcatcagtgaacttttcacagtttgcaaagttaaacttattggatttgagttttaacaatatcacaggccaagttccagaagcccttgtgaaattgaattcactcagcttcttatttctcggtaataatagtctttcaggaagcctgccgagctctataggaacttctcttaaaaatttagatttttcttacaaccagctgtcaggcaactttccttcttggactactcagaacaatttgcaactgaacttggtggcaaacaatttcgagacgaatagtgtattaccttcagggctgtcgtgtcttcagagagacacaccctgttttcttggctctccacaatctgcctctcttgctgtggactgtgggagcagtagatctatatctgggtatcaacctgatgctgccagtcttggtgctgcatcctattatgttacaggagcacaaacgtggggtgttagcaatgtaggcaagttcatggaagcatcaaatggaagttacataatttacagcttacaccaatttcagaacactctagattcagaactattccagacagcaaggatgtcgccatcatctttgagatactacggtattggactcgagaatggaaactacacagtcacacttcaatttgcagagtttgactttgaagattcacaaacttggaagagtgttgggagaagggttttcgatatctatctccagggcgagcgtaaggagaagaactttgacataaggaaggcatcaggggggaaatcttacactgctgtcgagaagcagtatattgttcctgtcactagaaactttcttgagattcatcttttctgggctggcaagggcacttgttgcattcctgctcaaggctactacgggcctgcaatctcagctttgagtgcaactccaaattttacccctacagtgcgtaattctgcacagaagaagaacagtagtaaaacaggtgtaattgttggggttgtgattggtgcagcagttttaggagtactagcacttgctggaatctgtatgtggaggcagaaaaggagaaaactattattggagcaacaagagctttacagtattgttggaagacccaatgtatttgtttatggtgagctaaggaccgctactgaaaattttagttccaataaccttcttggtgaaggaggatatgggtcagtttataagggtaaattagctgatggaagggtggtggctgtaaaacagttatctgaaacatctcatcagggaaaacagcaatttgcagccgaaatagaaactatttctcgagtgcaacaccgtaatcttgtgaagttgtatggttgctgtcttgaaggaaataaaccactgttagtttatgagtacctagagaatggaagccttgataaagcattgtttggaaacgggaaactgaacctagactggccaacacgctttgagatatgcttaggcattgcaagaggcctcgcttatctccatgaagagtctagcatccgtgttgtgcatagggacataaaggctagcaatgtcttgcttgatgcaaatctcaaccctaagatctcggatttcgggctcgccaaactttacgatgacaagaagactcatgtcagcaccaaagttgcgggtacattgtaagtgcatttccatattgcctcctctacacccaagttattttcaaatgtgagctggtgtcaatttcttactcttctgtgaagtggttatcttgcacccgagtacgccatgaggggtcatatgaccgagaaagttgatgtgtttgcatttggagtggtcatattggagactctagctggaaggccaaactttgacaatacgcttgatgaagacaaggtttacattttagaatgggtctggcaactgtacgaagaaaaccaccctctggacatgctcgacccgaagctcgcagaattcaacagcgacgaggtgctccgtgccatccacgtggccctcctctgcacccagggctcgccgcaccagcgcccgtccatgtcacgggccgtgtcgattctggcgggagacgtggaggtgggccaggtggcgaacaaacccagctacatcaccgagtggcagatcaagggcggcaacaccagcagcttcatgagcagcaacgtcagtgggcagtcgggcgtggcgccgaggtcggcctcgcacgcctcgtcgcagttcctgggctctgtcatcgaagaaggccggtgatgatgagtagcaagttttctcaagcgacggactgttccttgtaattaaacgcacgcacgttacaaaaggctctcggattatctggttttgacctttttcgttttccttttgaaaattttcggtttgatttcgatttgtgcagttggaatttgtatgcaaatgatgatattggatggttaagtctatttgtaattttggatgttttgaggtgtgtgtgtatatatatgatgtgatctgcaagaactaaaaaaataaatatcaatacccccaagtcgcttgttatctgctcagctcaaatttaaatccaataagtcacaaa

SEQ ID NO: 7392 - DNA, 2851 bp, Zea Mays
gcagattccatctcgtcgcccccttctccgatccgatcggtctctgatcgctgcgtttcctggttcctcaaggtttattggggaatttttttagcgagttacctctttcccctcttgtgggctctgcggggaaatttagggtttagtattggggttgatcggacgatctagtgtggttaggccaacgattctccctgctgtggctcatgattttccaatttcgtgtaaatccggttcggtgtggtgccttgtttttttttctgttttctttattagggctcggattctgagtcacgaaatgaatgatcatctgatcttgtagttttgggggacttcgtctctcgtaggagggattctttggctgaggtagtgaggttgccctcggattggtccaaaaacgaaaaagttagccctcttcctcaggtccaatttggctgcttctgctacacgatccattaactgctttccgatccgtgttctgtgatgtttgccctcttcctcagggccaatttggcaatttgtcagaacacacacaggcaacttttggggaactacacgtgtatggagttttattagtattccaggggcgtcacaatggcatactttcctgatgaagtagtagggtatatccttggttatgtaacgtcgcatcaggaccgcaacgcggtgtccttggtctgccgggcatggtacgacattgagcgtcatggccgccattcagtgcttgtaagaaactgttatgcggtgtgcccagagcgtgtacacatgcggtttcccaacatgcgtgcactgagcttgaagggcaaaccgcactttgctgaattcaaccttgtcccggcgggttggggtgccactgcaaatccatgggtggatgcgtgcgcccgtgcatgcccaggtcttgaggagctccggctgaagtttatggttgtgactgatgaatgcctcaagttgctttctctatcctttaccaactttaaatcacttgtccttgtttgttgtgaggggttcagtactaccgggcttgctaatattgccaccaattgcaggtttcttaaggaactagacttacaaaagagttgtgtgaaacatcaagaccatcagtggattaattgttttcccaagtcttcaacatcactagaatgcttgaatttttcctgcttgactggggaggtgaatgctgttgcactggaggaacttgttgcaaggagtccaaatcttaaaagtttaaggctgaatcttgcagttccatttgatgttttgtccagaatcctttctcgcacacctaagctagaggatttaggcacaggatcctttttacaaggcaatgaccctgctgcatatgccagtttatgtagagctcttgagaactgcacttcactgaagagtatatctggtttttgggatgctccaggcttttatgttcaaggaattttgtcaaattgcaagatcagaaatcttacatgcttgaatctcagctatgctacattgattcagagtacccagcttatcggtattattcgtcattgtaagaagctccatgtcttatgggggtaaggcttgccttggttattgtttccccagatcccactcatgtggaaccgccaaaattgggtttgttttgtgtttgtcttcacaagaaaaggttgctccctcaactgtatgttaatggtatccttaggggtgttagatcacattggtgatgagggcttgaaggctgtgtccttttcttgtcctgatcttcaggagttgagggtatatccaagtgttgttgcaccaagaggtactgtgacggaggaagggttggtagccctatcttcgtgtcggaagttacagcatgtgctcttctcttgtgttcgaatgacaaacacggcgctgatgacaatagcaaggtactgcccacggctaacgtccttcagactatgcattcgcaagcccaggtcagcagacgccgtcacaggacagccactggacgaaggctttggggcgatagtgcggtcctgcagaggcctgaggcgtcttgccatgtccggcctcctcacggacagcgtgttcctgtacatcggcatgtacgcggagaagctggagatgctctcggtaacgttcgcgggggacaccgacgacggcatggtctatgtgctcaatggctgcaggaacctcaagaagctggtaatcaaggagagccccttcggtgacgccgctctcctcgcgggcgcgcacaggtacgagtcaatgcgcagtctctggatgtcgtcctgccagatcaccctgggtggctgcaaggcccttgcggccaccatgccaaacatcaatgtcgaggtcatcggtggggcgagctttggtgcgatggatggtggtgtcagcggtgcgaggaaggtggacatgctctacctctaccgtactctggctggacctagatgcgatacgccagggttcgtctcgatattgtgagctgtatctatggctactgttggtggcgttcagggaaacccgatgttcttaaccgtgcctgctgcgggctgtggctgtgctactgtctggtagtgtttcggaaacatgatgtttatttgcgtaaggtagtgtttggttctggaaccattttaagccttgttcagatattcatatacctcatggattggaagtgattagaaaaaaatatgaataattttgacttactatgtattgaaactcacttaatcccctctaatccatatgaaattgagatgaaaccgaacagacccttaatccatatgaaattgagatgaaaccgaacagacccttagatgaaatggctctgttttctagatcctaagaacagaatggcttagatgaaatggctctgttttctagaacc

SEQ ID NO: 7393 - DNA, 2314 bp, Zea Mays
tcaagtcgtggcaggaatctcgctccatccacgtctaaaacaatcaaaacaaacgatgaaaccaaacacaaacacgtacatcctcccgtagatgcctagcagagatcaccaacccatgcggtgcaggacgtgacggcgatggcgaggcggcagctgtgccggaccaagcgtaccaaccgtccccgtcggccgtcgggaactccccacccccgcattttctccgcgttttgtcaacgtcacgcctcgcccgccgtcctttcctctcccactcccacccccaccccgctatctcccactctttctctgcacggcggggctccactcgtccgccactccaccgcttctacaagatcctacaccacgtcaaaccagacccagccgcggagaaagctagctgtagctacctacccggtccggtctccgcttctcccgcacgcgcagcctgctgcatcctccttcctgcgaccgcccgcttcgttcgcggaacataaaggtcttgctccggtcagccacggcggcatcggcatcggcatggcggggcggatggtgcggagctgcgtgcagacggcgctcaaggcggccaactccgtcgtggggctcgccggcatggccgtcatcctctacgcgctctggatgctccgcgcatggtacagggagatcgccggcctcggccaacgccccccggccccctggttcatctacacatttcttggcctggggatctttctctgcatactgacttgctctgggcatattgctgctgaaactgcaaatggtcactgcctctactgtgtatccttttagttagtaggtacatagtagatttaaatgttgttccatataccagcctccattggttgtgtttgattgctgactacctatgctaaatcacatggagttacatgttatccagctgccatcacctgggttttttgcttgttggctacatatagtgaatgagtggttagcagcttctgctggttcatccaaggttttcagctaggtgcagaaaccacatcttttttctaggttatataattatctgtacatgagatgccaaaaagaactgatctgagagtgagagtgctggcctcgaattgcagttacattctttaagctctgtaatgtttagtgcagtgcgacctcccagtgatattgcccttctttttccttaacccacatgtagtacatgaccatcgtatttatgcttattatactggaaggcgcaatcactttggatgtatttctgaatagcaactgggaagagggtttccctcctgacccatcaggcaagtttggggatttcaagcactttgtgagatccaattccgagatatgtgaatgggtaggcctctcagtggtggctgctcaggtgctatcaatcgttcttgggatggtgctcaggacccttgggcctgaccgtgagaccgactatgacagtgaagacgacacagccgtgcccgcaaggctgcctctcctgagaaaccagtcccagcatggatcttgggactacgctgaagctaccacgtctcgtcagggacttccgttattacattctaaatgtgttcagcgttaataaaagccttgcgacgttccattgcaggtgaagaacaacagacccttcaggatggtcatagattatatctttttcttcttcttatatggagagagtattcctatgttagaatagcagaagcagcagcagcagcagcggtagagtagttctgaaacctggacgccaatcagcatgctcagatatttgagtagcatgtgaactgacccttataaccccgcatactggggaaggaagagatgaggtcacgattggtgccttcactgaccaaagacagagatgtttgttctttcccttgttgtttatccatcagctgcaccatccattttaatctgcttgtttgctgccagatttccttcctattcgcatcacctgtcaacagccttgcctttcatcactccggcggtggtaagcaaggaatgaaagcaacccgacgctgaaactacagagcatttcatttcaagcttcaaactgaacccaatacatacatgcacgacatggtggtggtgctcccatccacataaaccttgtagattaggatcatgagcagccccagcgcgtcggccaggctgcacgaggaagaggaacatgcgcatctcgagaaatccgctgccctgtccacttgtttcagcagtcatcaggcacgcgtcgggctcgggcagccatccacacgagcacggcaaggcaacttgatgtggctcaggaagaatcagctgggagcgggacggcactcacagggtg

SEQ ID NO: 7394 - DNA, 1885 bp, Zea Mays
cccacgcggttttcgtgtttgctgccgccgcggtttccattgcttctcccgtcgctagggcgttcgtgaatacgtgatccatcgtctccatctccgtctggtgtggtgtgttggtttgagagactcgaggtgtgggcgtcgcttcgtctggaatcggctctcccatttgttagatagatccttcatatctccccacgtctgggcgtcgcttcgtcggctgcgacctgcgagacgccggcgccgccggcgacggtggacgaaggcgatcaaggattaggcgatccgatccgatccgaaccaattctccattcttcgattccttccttgggtgggcggctcccctcagattccttccacatggctcgttccccgccgccgccacccccttccccggcgcaagggaacgggaacgggagtgggagcgggagcctcaccgccagagacgccctcgcctacatcaaggccatcaaggacaacttccaggataagcggcacatgtacgaacagttcctccaggtcatgcgtgattttaagagcaacaggctcgacagcgccggcgtgatcgcccgtgtcaagaccctcttccacggctacccggacctagtcctcggcatcagcgccttcctgcccaaggggcatgccatcaggcctcaggacctcagcgaggacaaggagcccgtcgattatcccagggccatcaaccttgtcaacaggattaagatacgattccagcaggaggaacatgtctacaagtcattcctgggaatcctcagtatgtaccgcatggataacaaacccattcaagatgtttacgacgaggtcaccttgctgttccacggccatccagatttactcgaggagttcactcatttcttgcctgatacgcccatacctcctccggaggcaggcactacctctaaagttaggaatgatgacaagaatgctataacgcattctgccatgagagctcagacagttcaggtgaatcaacaaattatagaattttcaattctagttgattcttcaattgctataatttatactctcctccaacaatgtaggccatatcatttttaggacagtctccacaattgcgataacactaagttaatcttaaatttcctttgtatgtgaatctattgatgacacttttgtacactgaactggtaaataggttggcaaattgttgttcaaatgttacatactttgacttattcaaataaaatatttgttacttttttgaacagagagattataaaaggaacaggaagaatgacgaatatgaaaacgaagatttggattcagaacaatctggtctcaaatctcaaagaaaggtggagggtactggtgatgatacaccagggattgctaccatgtcctcattcaattgtaatgagggggacaacgatcctgaggaagagtctaaagttaggaatgatgacaagaatgctataatgcattctgccatgagagctcagacagttcagagggagagagctcttccatcagctgctgattcggactccagtgttgatcgccttgatcttgagcatgatattcaaaaagggtgtattgagaaggacaaagtccgtaatgcctgccatggtcagcatagaagatattataaaaggaataggaagaatgacaaatatgaaaacgaagatttggatgcagaacaatctgttcccaaatctcaaagaaaggtggagggtaccggtgatgatacaccaggggttgctaccatgtcgtcattcaattgtaacgagggggacagcgatcctgagaaagagtctaaagttaggaatgatgacaagaatgctataatgcattctgccatgagagctcagacagttcagagtgatttgttcctgcatttacctttaaa

SEQ ID NO: 7395 - DNA, 883 bp, Zea Mays
gcgcaagagagattaataaggacctggaaagaagaatctcgtgttaagctcaactgaaggaatgtacaaaataatccggcctgctattggtgaagcattgagggagatgccttcaagtgaactgaaaagcaagtacaggaaggtgtcatcaatagacaaagttagtaaaggatggcaggaagagtacgatgcttcatcgaagcagtgtatgcatggatctaaatgtaaaattgggagctactgtactgtaggaagaaggttgcaagagcttaatatattgggtggcctcatacttccagtttggggtacaatagaaaaggccctggccaagcaggaacgcctcattcacaagagaatacgggttgtccgtttagtcacaacaaatgacagtcagcgaatcgttgggctgctgattccgaattcagcggtagagtcagtactaacaggtttgcaatgggtgggacattgatgactgacatggaaaggcttgaattttgtttctcagctgcattcagtttgctgggctttttttaacttcgtggcactgttctgatattagatgcagcagcatctagggcacacttgattttgtttgtagggagatagcaaggtaacttacccgaagcgatgaaattcttagcttacaggtcaggcaggtatatgctgacaacttttgtatgtaaaatacgcggtgcggtgtggtgcggctgtaagacatgtaatgtaaagctactaaaaaagctcaggttaatctcaaaagaaagtcgcacctcacaatctggtgctgccacaatgataatgtttcatgtggagttactgcttatgtcggactgaactgcacaagaaaaactaaggcttatttatattatagccaaattatcta

SEQ ID NO: 7396 - DNA, 1953 bp, Zea Mays
gtgaggggctcagggcttttcgcgagacattgaaggcgcagaacccaaagaatgggtaagagaggaaagtggtttagtgcggtgaagaaagtcttcagctcctccgatccagatggaaaggaagccaaggtacgtcgaaattccttattcacaacaaaaaaaaaagtccacttggtgacatgtggctactatgaaggcccagaaggcagacaaatcgaaatccaagaggagatggccatttggaaagtccaagcactcggagccttccatatcgacggtgccaggcactgctccagcagtagctccgttgccatcaccaccagcaactcagccccactctctggagatcaaagatgtcaatccagttgaaacagacagtgagcagaacaagcatgcctactccgttgcgcttgcgtctgctgtcgctgctgaagctgcagcagttgctgcccaggctgctgcggaagttgtccgcctcacagcagttaccacggctgcaccaaagatgcctgttagttcgagggaagaacttgccgccaccaagattcagactgccttcaggggttatctggcaaggagagcattgcgtgcactaagagggctagttagattgaagtcgcttgttgatggaaatgctgtcaaacgccaaaccgctcacaccttgcaatgcacacaagcaatgacaagagttcaaactcaaatctactctagaagggtgaagttggaggaggagaaacaggctcttcaaagacaactccaattgaaacatcaaagggaacttgagaaaatgaagattgatgaagattgggatcacagccatcaatccaaagagcaaattgaggccaacctaatgatgaaacaggaagctgcactgaggcgagagagagcacttgcatatgcattttctcaccagtggaggaattctggtcgaactataacccctacttttacggaacctgggaaccccaactggggctggagctggatggagcgctggatgacagcaagaccatgggagagtcggttggcggcggcatcggacaaggaccctaaagaacgtgctgtgacaaagaatgcgagcaccagtgctgttcgagtacctgtatcccgtgccatctcgattcagagaccagcaacaccaaacaagtcgagccgcccaccaagccggcagtcactttcaaccccgccatcgaagaccccgtcagcctcaggaaaggccaggccggcaagtccaaggaacagttggctgtacaaggaggatgacctgaggagcatcacgagcatccgctccgagcgcccaaggaggcagagcacgggtggaggctcggtccgggacgataccagcctgaccagcacaccacctctccccagctacatgcagtcgaccgagtctgcacgggccaagtctcggtaccgcagtctactactgactgagaagcttgaggttcctgagagagcgcctctggcccactccgttgtcaagaagcgcctgtcgttccccgtcgtcgagaagccaagcgttgtgccgacagagaagcccagggaaagagtgaggcgccattccgaccctccgaaggtcgatcctgcgacgctcaaggatgcccctgctgcctgaccagtgaccaggccttatgtgattgttaggtttcgtgctcttttaacaccgtgatgtattatctgagttaggttgctttgttcgtgtcatcgtatgatctgtccgggttgattttgagacagttctaactgtgtttacagacaatgcgtgatgctaaatgtatgtgtggttggttggctttaaatgtactgatatgatagtatttgattttaactttgctaaggacttgaggtgcaatgtgaatagatttcagggtgcgggaacaaagtttttctacagtattgactcaacagacgtattaagcaatattgtagtattatatactttgaggtatttag

SEQ ID NO: 7397 - DNA, 2015 bp, Zea Mays
attgccgtttacggcgaagacttgtgcgctggctcagtttcacctagttcgtgcttatttttactcgatccactccaatctttgcgagacattgaaggcgcagaacccaaagaatgggtaagagaggaaagtggtttagtgcggtgaagaaagtcttcagctcctccgatccagatggaaaggaagccaaggtacgtcgaaattccttattcacaacaaaaaaaaaagtccacttggtgacatgtggctactatgaaggcccagaaggcagacaaatcgaaatccaagaggagatggccatttggaaagtccaagcactcggagccttccatatcgacggtgccaggcactgctccagcagtagctccgttgccatcaccaccagcaactcagccccactctctggagatcaaagatgtcaatccagttgaaacagacagtgagcagaacaagcatgcctactccgttgcgcttgcgtctgctgtcgctgctgaagctgcagcagttgctgcccaggctgctgcggaagttgtccgcctcacagcagttaccacggctgcaccaaagatgcctgttagttcgagggaagaacttgccgccaccaagattcagactgccttcaggggttatctggcaaggagagcattgcgtgcactaagagggctagttagattgaagtcgcttgttgatggaaatgctgtcaaacgccaaaccgctcacaccttgcaatgcacacaagcaatgacaagagttcaaactcaaatctactctagaagggtgaagttggaggaggagaaacaggctcttcaaagacaactccaattgaaacatcaaagggaacttgagaaaatgaagattgatgaagattgggatcacagccatcaatccaaagagcaaattgaggccaacctaatgatgaaacaggaagctgcactgaggcgagagagagcacttgcatatgcattttctcaccagtggaggaattctggtcgaactataacccctacttttacggaacctgggaaccccaactggggctggagctggatggagcgctggatgacagcaagaccatgggagagtcggttggcggcggcatcggacaaggaccctaaagaacgtgctgtgacaaagaatgcgagcaccagtgctgttcgagtacctgtatcccgtgccatctcgattcagagaccagcaacaccaaacaagtcgagccgcccaccaagccggcagtcactttcaaccccgccatcgaagaccccgtcagcctcaggaaaggccaggccggcaagtccaaggaacagttggctgtacaaggaggatgacctgaggagcatcacgagcatccgctccgagcgcccaaggaggcagagcacgggtggaggctcggtccgggacgataccagcctgaccagcacaccacctctccccagctacatgcagtcgaccgagtctgcacgggccaagtctcggtaccgcagtctactactgactgagaagcttgaggttcctgagagagcgcctctggcccactccgttgtcaagaagcgcctgtcgttccccgtcgtcgagaagccaagcgttgtgccgacagagaagcccagggaaagagtgaggcgccattccgaccctccgaaggtcgatcctgcgacgctcaaggatgcccctgctgcctgaccagtgaccaggccttatgtgattgttaggtttcgtgctcttttaacaccgtgatgtattatctgagttaggttgctttgttcgtgtcatcgtatgatctgtccgggttgattttgagacagttctaactgtgtttacagacaatgcgtgatgctaaatgtatgtgtggttggttggctttaaatgtactgatatgatagtatttgattttaactttgctaaggacttgaggtgcaatgtgaatagatttcagggtgcgggaacaaagtttttctacagtattgactcaacagacgtattaagcaatattgtagtattatatactttgaggtatttag

SEQ ID NO: 7398 - DNA, 3238 bp, Zea Mays
ccaagccccaaacagctagctcttccccacttcgcctgcggcggcgctccctcccgccggtttgctcgctgggccctggcgcgttcgtctcaacgaagcactcgcaccgccggccaccccgaagcaatcgccactgctatctcggtgtcctctccctccacccggactcggattgacttcctatctctcgtcgggggccaagcatgatggaggtgggtttgaacccgggggaggagctggacttcggggacaaccaggaggacgacgacgacgcgggggacatctcacccgccagcaaggagctggccgccatggtggcggcggcggcggcggcggagacagtcgagcttgacgacggcggcgccggtgtcgaggcggccgcctccgctgccgccgccgcgtcgtcgtcgtcagcggcggcgcggtacggggacgaccgcacgccgcgggacgggatggtgttcaagtcctacgaggaggtgctcaacttctacaagcgctatgccctgcgcacgggcttcggcgtctgcgtcaagaagtcctccttcaccaaggccggcctctgccgccgcctcgtcctcgtctgcaacaagtggggcaacggcaaggaggacgcctgctaccaggccaggcccacggccaagaccaactgccaggccaccgtcgtcgccagactcctgggggacgacttgctgcacctcacggatgtgaacctggagcacaaccacgcgctcaacccatccgccgcacgcttcctcaggtgctacaagacgctgcctagcgggttgagcaaagatctcgtggtgagggctgccagaggggaatgctcggtggcgggtgacatcgatgtcccgatatttgatgaatgggggcggcttaagaccgggcaagctgatgtcctggccatcaacgctttcttcacccagatgcaggcaaagcttccaaactccttctatgtcatggacttctatgtggagggccatctgaggagtgttctctgggctgattccagatccagggcagcgtatcagtatttcagcgacgctgtttggattgatacggcatgcttaaggaacaagtatcatgtcccgcttgtttcgtttctgggtgtcaatcatcatggtcagcttgtattgctaggctgtggattgctgtcagatgagagcacagagagcttcttgtggctgttcaagtcatggttaacttgtatgaagggacagcctccaaatgccatagttaccgatgaatgtgtggcgataaaagccgcagttcgagaagtgtttccgaagacacgccatagaataagtgattggcatgtagtgagaagtatttcagaaaaaataggtgacttgccagaatatgaagcgatgagaaccaatttggttactgtaatatatgattctttaaacgacaatgagtttgaggcaaggtggaagaactggattgatagatttagccttcaggataatgaatggatcacctttctgtatgagaatcggcacttgtgggcccctgccttccttagggacactttctcagctgggctctgtactgttagccagcgtgaaagtccaagtacattttttgaggatgcagtcagttcagagaccacattggtgacgttccttgccagctacatgacacttttggataacaaatacaaaatggagcaacaagatgattttgattcattaaatagcagcaggctcctgatatcaaagtaccaaatggaagaacagctatccagattgtacaccttgaatatgtttatgaagttccaggatgagctaaaggcaaccatgcattgtcaagttcagctggatgggtcagcatcttcttttatagttattgatttgactgaagcagggagtgaaatgctgaataaaaagtacgaggttgttcactgcatggcgacaaacaggatggagtgtaactgtggcctatttcagtttcatggtatcgtttgtcggcatgcattatctgtgcttaaatggcagcaagtatacgacatccccccttgctatgtacttaacagtttcttcgtctcgtcgagattgggatggtatccgacgagaagtataggcatgcagtaaggcttcttaaagacatgaaagagactcttcttgatgataatctgtgccgtgatttggagcagaagcttacaccagctgagcgtgcaattgtgaatggtgacaaccatacacaacctggttcatctgagggcggtgctgcaaaaaagcggcgaggccgtcctcctaaaaagaataaagagataaacatggattccatggtaaacccgtatggaaataaggaccctttactagtatcctcggatgtaactcagaaggacacttttcattctgcttcaactacctcaaaccttggcactcatgtccggacgcatggcattgttgatctcatggaagaagtcaatccaagcgagctgtcatttgatagccgttacggggtgcaatctggccactcgcaccattttggtaataaccaactaaatacaggaaacacactgcggtttggccaatctacatcagcagcagagcagtctagggttcagtgggtgtttcataatggcatgtatcaggatgaccaagtgacttacggcagacggacatcataacaattggacttgttaggctccagggtttgccgtttcaggaaatcgggtcaggggtcctcggtttttggactttggagcaccgatgacttaagtgatcctccattgtgcttcgaacgttgagccttgggagatgcatgctggaactggctgctggtgatggtggcggcggcggcatctgaaggcaggatacactgtagaaacagaagtttgccactaagccagccgaacgcttccataagccatcaatgttagccaactaactgacatgtgtatatacacacacatcatctcagaaagaagccgtcattccgtgggaagtgctgcgtaaactcctgataataggcgtggtcagcgtcggacaagaaattgagagcttcattttctttctttcacgtgggaaagatacaattttgttgcctcctgacgatcagctaaaagggggaggaaatatccatgctcttcatctgggaaagatgcaaaaaccatccagctttatcatctttgctccttcagtaccgtgcctggaatcctgctttaccaatttttagcacccaaaaaaagaaaaacaaaaaaaaactatctgtggcgccccttgacacaaac

SEQ ID NO: 7399 - DNA, 1384 bp, Zea Mays
acgatttcaattgccacgatcatggtgccaatagtctgaagccggggcatagacggtgccatgtttgcaaaattctcaccgtatctaggggcaacaactaaaatcactccaccttagcccaaaatcaattcggatccgcctccatggctgccgcttcgcagctcctctctctgttcttcctcctcctcctccctgcttgtgatgccatctactgcgacgaagacgactgctacgacctcctaggggttaagcaggacgcgaacgcgtcagacatcaagaaagcgtactacaagctctctctcaaacaccacccggacaagaatcccgatccggagtcgcggaagctcttcgtcaagatcgccaatgcttacgagattctgaaggatgaatccactagggcgcagtatgactttgccattgaacatccggaggaggttttctataacacagctcagtactatagggcatactatggacataaaacgtgttgattggtcttcttctaattgtttcagcatttcaatacattaatcagctaacgaggtataaccaggccatgaaaagtgtcaagcaaactcctgcttacaaaaataggttaaaagctttggagtatgagcgaacaggaggaattgctagcaaaaagaagggcatcaagcaggtggataagaaagttgaagaagagctaagtaatgaagttgaattgcaaattcatggggttgaaaaaccgtctgtttggaggctgtttggtgtccaatttatactttggccttactctgttggcaaggcgcttacttggaagatttgttggttttggagataccgggtaaagaaattaccatatacatgggaggatgcttgctacttgacctggatttcactccaaatacctgcgaatgcatggaaaaatatggatgagtccaggaaggaggaccttgtgagaagacacctctgggaaaagagcaacatggagaggtatacttcagggacgaggaaggaaccaaagcgtaggaggtagctgtgcaacatttttgacctgagactacagcaactttaaacaatacaacatactcctatattggagtgaaaagttattgaccaggcttgagttcaccgatagctaattgctaggatccccgggaagtggcatggctaaggaatcatgtttggaggacaattcatgtaataaagtgatcaaggcgacttttgtaggtgtttcttaatcttaatttctgagtagctaataactgtaaacgaacgagtcatgcttcatcgctccactcaacgtaccaaaatcactgcaaagagaacatactaatgcacttcctctcgtctactgctgtatgcacctgcagccattttggtagtcatcaagttgaacacatgc

SEQ ID NO: 7400 - DNA, 1387 bp, Zea Mays
acgatttcaattgccacgatcatggtgccaatagtctgaagccggggcatagacggtgccatgtttgcaaaattctcaccgtatctaggggcaacaactaaaatcactccaccttagcccaaaatcaattcggatccgcctccatggctgccgcttcgcagctcctctctctgttcttcctcctcctcctccctgcttgtgatgccatctactgcgacgaagacgactgctacgacctcctaggggttaagcaggacgcgaacgcgtcagacatcaagaaagcgtactacaagctctctctcaaacaccacccggacaagaatcccgatccggagtcgcggaagctcttcgtcaagatcgccaatgcttacgagattctgaaggatgaatccactagggcgcagtatgactttgccattgaacatccggaggaggttttctataacacagctcagtactatagggcatactatggacataaaacggatcctcgtgcagtgttgattggtcttcttctaattgtttcagcatttcaatacattaatcagctaacgaggccatgaaaagtgtcaagcaaactcctgcttacaaaaataggttaaaagctttggagtatgagcgaacaggaggaattgctagcaaaaagaagggcatcaagcaggtggataagaaagttgaagaagagctaagtaatgaagttgaattgcaaattcatggggttgaaaaaccgtctgtttggaggctgtttggtgtccaatttatactttggccttactctgttggcaaggcgcttacttggaagatttgttggttttggagataccgggtaaagaaattaccatatacatgggaggatgcttgctacttgacctggatttcactccaaatacctgcgaatgcatggaaaaatatggatgagtccaggaaggaggaccttgtgagaagacacctctgggaaaagagcaacatggagaggtatacttcagggacgaggaaggaaccaaagcgtaggaggtagctgtgcaacatttttgacctgagactacagcaactttaaacaatacaacatactcctatattggagtgaaaagttattgaccaggcttgagttcaccgatagctaattgctaggatccccgggaagtggcatggctaaggaatcatgtttggaggacaattcatgtaataaagtgatcaaggcgacttttgtaggtgtttcttaatcttaatttctgagtagctaataactgtaaacgaacgagtcatgcttcatcgctccactcaacgtaccaaaatcactgcaaagagaacatactaatgcacttcctctcgtctactgctgtatgcacctgcagccattttggtagtcatcaagttgaacacatgc

SEQ ID NO: 7401 - DNA, 1841 bp, Zea Mays
cccgctccaagtgaagtctgggcctggaactcggaactcacgtaactcccacccgacccgactcaaagtcacccgatccgcggccgcgtctgccgtctggtggcaccagaattgaaccccacccgcggccgccgccgcagcaacgtcggcaatccgagacgccggaggcctcctcctctcctaataccgccccccctcgggaccgggagggagtccgccgcggtgcggatcgcggccacggccacggaaaacaccggggcgcggctcatggaccgcatcgtcggcggcaagttcaagctcggccggaagatcggatgcggctccttcggcgagatctacctcgccacgcacgtggacacctacgagatcgtcgccgtgaagatcgagagcagcaagacgaagcatccacagctgttctatgaggcgaagctgtacaataccctccaaggaggaagtggcattgccaacgtcaagtggtgcggtgtggatggagaagagaatgttctcgtcattgatttgctggggccgagtttggaggacctgttttgttattgtggccgaaaattcacgctgaagactgtcctgatgttggctgaccagatgattacaagaatagagttcatgcattccaaagggtacttacacagagacatcaaacctgacaactttctgatgggtcttggtcggaaagcaaaccaggtatatataattgattttggtcttgcaaaaagataccgtgattccactacgaatcgccatattccttacagagaaaataagagcttgactggtacagcgcgctatgcaagttgcaacacccaccttggaatagcctcccttggcagggactaaaagccgcaacaaaggcacagaagtatgacaagatatgtgagaaaaagatatcgactcctatcgaggtcttatgcaaatcctgtccggtccagttttcatcttacttccattattgccattcattggcatttgatcagcgacctgactatgcatttgtgaagcgacttttccgtgacttgtttatcagccaagattatgagtttgattatgtcttcgactggacagttttgaaatacaaacaaggccacaaacaaaagcaaagtcctggggcacctattgctcgacctattcaagcacatggaccgaaacaagcaggtgtaaatggtgttattaatcataacgaagcccaggagcatgtagagacaagtcgtccaacagggcaagctgcatggtcgcaagacaaacaggcaaccaacaatgatcggaatcctgacgtgcggcataccgtgaaccttagacaagacatggctgctggaaaagcacagctgacaacatctgtggctcttcctagttcccagtggaaaaattatagtgattcaagacataaaggacaatttgatgctgttcaccacaatcagggtattgtaaacataactagctcatctaacagttggcttcctacattccagcacaatgccccaggaaaatgacagatcatatctggtggagcaaagaggaagtgctttgagagttagaggaggcccctgttcatctgagttggttcagagttaagcattgcacaatctgtagacttgatgtctcatgtattgttactgaggtggctcctgaagcactgatgcatttgatgatactattagctgataatatggaaggtttgctcgcggttgtgatgactcttgaatgcttgggcagtttgttggaccgctgcttaaatgcttctttgtagtagttctggatgccttgtaaattgcttacatgttaatatatgtatgggttgaacattgcaaataagatgatctgagctttgc

SEQ ID NO: 7402 - DNA, 1521 bp, Zea Mays
aattatacttggggattgaaaccataccagccgaacacagcctcaatgggttctataggaggacacacaaccacagctaccgccgaccggcgccgccgcgtgctgttcttcccgctcccgtaccagggccacatcaaccccatgttccaactcgccggcctcctccacttgcgcggtttctccgtcaccgtcttccacaccgacttcaacgctcccgacaagtcccgccaccctgcctacgacttcgtccccgttcccgtccgcggctgcttgccgaagggcagctcggatgccttgcaggtgaccgtggagcgcatcctcgccgtgaatcgcgcctgcgaggctccgttccgggagcgcctggcctctctgctggcgcgggaggacgtcgcgtgcctggtcgctgacgcccacctgctgacgctgctggacgtggcgcgggggctcggcgtgccgacgctggtgctgcgcaccggcagcgcggcgtgcctccgcatgttcgcggcgttccccgcgctctgcgacaagggagtcgcagctggagacgccggtgactgagctgccgccgtaccgcgtccgggacctgccgtccaccaccagcgcctgccacggcgtaataagcgaggtgatttcccgtttagtgacggccgtgacgacctcctcgggtctcatcctcaacaccatggacgcgctcgagtgcggcgagctggcgtcgctccggcgagacttcggcgtccccgtgttcgacatcggcccgctccacatgctctctccggctgcctcgagcagcttgctactgcaagaccgcggctgcctcgagtggctcgacgcgcaagccccggcgtccgtgctctacgtcagcttcggcagcctcgccagcatgtccgccgccgagctggtggaaacagcctggggcatagccaacagcggctataccttcctgtgggttctccggccgggcctcgtccgcggctcgcagacgtcggaggcggcgccacccctgcccgacggcttcgacgccgcgacgcgcgggcggggcatggtcgtgagctgggcgccgcaggaggaggtcctggcgcaccctgccgtgggcgcgttctggacgcactgcggctggaactcgacgctagagagcttgtgcgcgggcgtgccggtcattgcccgcccgtgcttcggcgaccagatggggaacgcgaggtacgtggaccacgtgtggcggaccggcctcacgctcgacggcgtgctcgagaggggcgaggtggaggcggccgtcgcggcgctgatggcgccaggagagcccggcgacgggctgcgtcggagggcgcgggagctcgagagcagcgcggcggattgcatgaccaaggatgggtcgtcctgcacgaatgtcgacaagctggtagaccacattctgacactgtaggcgtttggtacaggagcagccacgtggtgctgttcttgggtactgtttttctttgcggttgaaaaataaataaaaaactggctggagcttatgatcctcaa

SEQ ID NO: 7403 - DNA, 3074 bp, Zea Mays
aacaaaataaaaaacaacagaacccaatcaattagtaacttagtactaacagctacttttttattctttgtcaaatctaatttatctcagcctcatatatggatagatcatattatggatcactaaatcaagaatggctgcattgtcatgccatattctggtacgaagagagagttcgtagcaaccatcatgtcagatccattgtttagaacaaatgttgcaaagctgttgacgccagagtccgatcttggttatatggtcactcacatatcacttaacactgatggttcatcactgctgcttgttggatcacataacttaaatatcatgtatgtacatgagaggatatctgaagatggggatacaatcatatgcaggactgcaccgattgcttctcagatcctacccagtgacagtgatggcataaaagttctccaggcatcttggcatccctttagcaataaccattttgcagttttgacatcagatgctgttttcaggttatttgatctttcatccgatttagaacagccagagcagggattttatttgcagccaattgtacctgggaaatgtcaaaatgcttcagcgatttgtccagtgggtttctcttatgggagcgatcatctatgggatagattttcggttttcatcttattcagtgatggttcaatttttgtcctctgcccagttgttccatttggaagtgactatagcaagaagcatattcaggaaatatatgaagatgttaatgcatttggattgaaatcttcaaatccaaatgttgtcactaattcacatttggccatagcttggttggaggcaacatttcctgacctgttacatcaatcaacagataccagttttctgatgtcaaaagctcatgcatatgcgccattagatgattctctaacattacaggggcctctttgtacagtttgtgaggaaagtaatgaatctgaaagcaagagcagcagttgtgaaggaaaagctgtaggttttatgtacagttctgctggcaaagattcagttcttgtgactgcctggggtagtgggctgcttcaggttgatgctcttgcagatgaaattcaaccgcggtggaacattggggttccttcgcgtcttaatgtcgattcacatggacaaataaataatgttgccatgatatgtgactccaattcgcaagatccattggcgttgagatcgcatcgaccatctagtacaggatcaaacgtgaagagcaacatagaagctgtttggatgggacactctcctcctttgctaaggctcgcaattgtggatttggcattaccaaaaactcctaatgataactctctgtcattgtttgctgatccccttgttccagagagattttattgtgcgcatggtggggggcttgacatggtcacactgcacttcctaccattttcataccctgaaatgtcttcgacaccaccctctgtgcatcctgtcctcactacagggaacagcgaaacaagctcaccttttctttctggatttgttaccatagctgatgcatatggtcatgtacagttagctggcatcacatgcttgggtgagtgctttgtggtggagatgaagggttggaaggaaccggcacctcttcagcttgacttagaaagcaaaatcgtcaaggatgtggagcctcctgcaactggaatgatcagcaaagaacttattgctggtccagacccacccatacttccatcatcttcaagcctgaaatcgttgaccccagactctattgaaggaaaatctacacttcaccactatattaaggtcttccatgagtactatgtggagtacggacacaaggtgttcattgaactcaaggagcatgcggactatttgaagacagaaatggaagataaacagaaacgcttggaagcagtgaagaaatcacttatatccgtagaagccaaagatggagacatcaacaagaggatagatcgggccttcaaggtgtatgaactgttggagaagcgaatagatagcttcaagatgcttcctgctgcaaacaagaaaccattaacccaggcagagcaggagttcaaatcacagcttgatcggttcgcagatgtggagctggatgctttgcgttcctccattgccgccctgagtgctaggatgaaacgttttgctcagcaatccacgggcagtgcggctagcacaggaatggtgccatggcaggcacaaagggctggacggagccatatctcagaatcccagatgtcacttctgaaatcttcgcttgagaagctctccctcctcaacgaagagaacagtctgaagctccggcttattgatcatgaactcaagaaccaggaacgataggttggcaggtccatgtgcgacttattgccatattggtattttgttgttcggacactaagtacaggatccataggagcctgtttgctgtcactttctgtggggggctcgcgaactgcatttgcatgtcagcgtgttgtaagttgtaactagcaatacagaaccaagtgcaaaccgctacaccttttcctcctgcagatcgggaccggtagggaaggtttaaggcgtgtttggtgtgtggcgtatggcgccacgccacgcctaagttgcggcggccgaattggccgccacaactgcggcacgaaaagtgcggcggatggcggtggcgtaggcaaggtaccaaacacgcctttagtgctctgtgttttgtactgcatggtctgaagctgcagagtgcagactaccattggagggtaacgagtagtcccagcaagtggtacagccatacaggcgagatggcatgtgcctgggaaatgagaatagagtgatcgaacctgcttcgaattatttaggggactgactgctcttatttcattgttttgctttttcttttgcgtgtactagggtttagtggccacgcttttgtttattttaccatcaggaatacatctttaatcagttaccctatcgtatctattatcttatctcaaagtttactctatagttagtgtaatctataatgcaaaattttcatacattttatatgatgtgctgcagacagc

SEQ ID NO: 7404 - DNA, 3014 bp, Zea Mays
ctcgcaggcggccgaccgtggcccccaccaccgcctgccgccgccactgcccccctctccactcgggatcccgtcctatcgcggccgccgcaagccataatggtgagggggctggggtcgaagcggagggtggcggaggaggagtcctcggaggaggagtacgaggtggaggtggtccgcgaccacatcgcctcctcccgcggcagccgcctcgcgctcttcggctccgagctccgcctcggccgcttccgcccgcgccgccgcaggcgcctcccgctcgccgggggaaggcgccgccgagggcttcttccacggcctcgtcatccaccccgacaacaagtggtaccggttatggaccaagttcatactggtttgggcggtgtacagctccttcttcacgcccctggaattcggcttcttcagaggcctccccaagaacctcttcttcctggacgtagctgggcagactgcattcctcatcgacatcgtcgtcaggtttttcgtggcgtaccgtgacccagacacgtaccgggtcgtctacagccccgccgccattgcgctccgctactgcaaatcgagcttcgttttcgaccttcttggttgcctcccgtgggacgctatctacaaggcttgtgggagcaaagaggaagtaaggtacctgctgtggattcgcttgacacgggtcaccaaggtcacggagttcttctggcgtttagagaaggacatacgcgtcaactacctcttcaccaggatagtgaagctcatagtcgtggagctctactgcacgcacacagcggcctgcatcttctattacctggctacgacgcttcccgaatccatggaagggcacacgtggatcgggagcttgcagctgggggactacaggttcacacatttcagggagatcgatctcgccaagcgctacataacgtccttatatttcgccatcgtcaccatggcaaccgttggctacggggacatccatgccgtcaacatcagggagatgatattcatcatgatctacgtgtccttcgacatgattctaggagcctacctgatcggcaacatgaccgcgctcatcgtcaagggctccaggaccgagcggtttagggacaagatgaaggaggtgatcaggtacatgaacagaaacaaacttgggaaggaaataagggagcagatcaagggacacctgaggttgcagtatgagagcagctacaccgaagcatccgtccttcaggatatcccgatttctatccgtgcaaagatttctcaaacgctgtataagccatatatcgaaagcattccactgttcaagggatgttccgcagagttcattcaacagattgtaagtgtcatctctttcatcccaactagctatgtgtgctgaatgaactacaaggtgatcaggttgcaagaggagttcttcctaccaggagaagttatattggagcagggaagtgcagtcgatcagctgtacttcgtctgccacggtgcactggaaggtgtaggcatcggtgaagacgggcaagaggagactctgctaatgctggagccagagagctccttcggcgagatctcaatcctctgcaacatcccgcagccctacacggtccgcgtctgcgagctctgccggctcctgcgtctcgacaagcagtccttcaccaatatcctggagatctacttcgtcgacgggaggaggatcctgagcaatctctccgagagcgagtatggcggacgggtgaagcagctggaatcggacatcacgttccacatcgggaagcaggaggcggagctcacactgcgggtcaacagcgccgccttctatggcgacctgcaccagctgaaaagcctgatccgggcaggggctgatcccaagaacaccgactacgacggccgctcccctctgcatctcgcggcttccagagggtacgaggacgtcgtgcagttcctcatcaacgaaggcgtcgacatcgaccttaccgaccagttcgggaacacgccgttgctggaggcggtgaagcaggggcacgaacgggtggcagcgctgctgttcgccaagggtgcgaagctgagcctcaagaacgccggcagccacctgtgcacggcagttgccaagggggactcggacttcatccggcgcgccctggcctacggcgccgacccaaactgcagggactacgaccaccgcacgccgctccacatcgccgccgccgagggcctctacctcatcgccaagatgctcgtcgaggccggcgccagcgtgttcaccacggacagatggggcaccactccgctcgacgaagcgcgcaagtgcggcggccgcacgctgggggcgctgctggaggaggcgcgggccagcgagctgtccatgttcccggagcgcggcgaggaagtcagggacaaggtgcacccgcgacggtgctcggtgttcccgtaccacccgtggcgggcgagcgcaggcgaagagcggcgcgcggagggggtggtgctgtggatcccgcacaccatcgagagcctggtcgcgtcggcgcaggagaagctcggcttgcctggcccggcggcgtcgcggctgcggctgctgtgcgaggacggggccagggtgctcgacgtcgacatggtcaatgacggccagaagctctacctggtcggaggcgaggacggcgatcaggaaggtggtcagtagattgggcatccctgtgtggcatttgcatgctgcttttttttcaaccttgtatgccggttgttgtttttttggctatatatacgtgtgcagtagaagaaaatgtaatcaagtccatcatccgtgctggacactgtacagaactacaaattgggaataatgtaagatgtgaaatgaaaatgcaatgttaagtcgccccaggtcgggcggctctagccgccgccacctcctctctgcctcactgccgtcggagctagccagtgggatgttcgcgcggctcgcggtgaaggcgggacgattcggccggctctgggctcctgcgcggcgtcttcgc

SEQ ID NO: 7405 - DNA, 763 bp, Zea Mays
aggggctatctggcctagcctcacgaggtcgggctggaaaccctcgcctctcgcggtctcgcctctccaagacacccaggccgccgccttcgcctacaggcaccttgccgcctccgtccgctgcccgtggcttccgtccacctccacctcactcacccactacatcgccgaccaagcgcagcaccgcgcgtggaccagacaccgcccgtggcttccgtggaccagacgccgcccgtggcttccgtggacgcagcaccgtgcgtggaccagccgctgctacatcgccgaccaggtagctgcgaggactgctatttagttaccaacaatgtgtccgattgttgtggcttagggacgagattcacaagcaggtgatacacaagggattttcatcaacaagtggtcgccagaagaactgaaacatcaagatggcgtttgcttttaggtcgtgtatgttgaaactatatgttttattattatgcactgagactatgtttgacattggtcgtgtacactgagactatgttttattatgagactatgttttattatgatgcactgagactatgtttgtgcacacatgttttattatgactatgtttttttatgagactatgttttattatgatgtactgagactatatttgtgtacacatgggctatgttttattgtgagactatgtttgacattggtcttgtaaagtagctgcacacattggttatatgtacactgcacacatgagcagtgtggagttctttgttggct

SEQ ID NO: 7406 - DNA, 797 bp, Zea Mays
gccgaatccacgggagaggaaggggctatctggcctagcctcacgaggtcgggctggaaaccctcgcctctcgcggtctcgcctctccaagacacccaggccgccgccttcgcctacaggcaccttgccgcctccgtccgctgcccgtggcttccgtccacctccacctcactcacccactacatcgccgaccaagcgcagcaccgcgcgtggaccagacaccgcccgtggcttccgtggaccagacgccgcccgtggcttccgtggacgcagcaccgtgcgtggaccagccgctgctacatcgccgaccagatgtgctgatccaattcagttttcagagtatgttgacaatctgaatttagttcaagcaataccttctctttattacagatgtttaaccaggtgatacacaagggattttcatcaacaagtggtcgccagaagaactgaaacatcaagatggcgtttgcttttaggtcgtgtatgttgaaactatatgttttattattatgcactgagactatgtttgacattggtcgtgtacactgagactatgttttattatgagactatgttttattatgatgcactgagactatgtttgtgcacacatgttttattatgactatgtttttttatgagactatgttttattatgatgtactgagactatatttgtgtacacatgggctatgttttattgtgagactatgtttgacattggtcttgtaaagtagctgcacacattggttatatgtacactgcacacatgagcagtgtggagttctttgttggct

SEQ ID NO: 7407 - DNA, 2431 bp, Zea Mays
tgatagtcttccgagtatcacggatgatgccctggatgtagatatttcattgtgatcgatgatttatgggctacatcagtgtgggatttcttgagccgtgcttttcccaaggataactgtggcagccgaatagtaataactactcaagttacagaagttgcatttgcttgctgtaacaaccacacagttgatatattcaatatgaaacctctggacgacgatcagtcactgcaattgttttacagtcgagtaaagcatataaatggttataatgctgaagaatgcaaggccatatcacatggaatcgtcagcaattgtggtaatctttcaccgctagctatcataaatatagctggcatgttagcaggctgggcggatttcaatatgaatgactgggagtacgtaagcaagtgttgtacatcaacagcaaatcttactaccgaggaggcgacggagagatttctgaaccttatgtacaacaagcttccagccaaattgaagacgtgcctgctctatctcagtatgtatccagagggctgtgtcatcggaaaggatgatttggtgagacaatgggcagctgaaggtattttcagtcaagtggtggaaccaaaaggtagagaacatgaagtgggttttatttattttgatgagctcctgaaaagaggattgatccagcctgtagatacagactacaatgatcaagtgttgtcatgtatagttcatcaagtggtactggaatttattacaaagaaatcaatgcaggaaaacttcatcactgtcgtggattatcgtgaaacagggacagtgcttgatgataataaggttcatcgactgtctgccaggtttgaaggtgccaaaagtgcacagataccgcggagcttcagagtacgccaagttcggtcctttatgttttctggattcattaaatctttaccttcccttctcaagtattgccttgtccgagttctgattcttcatgtttggagtgatgatcaaggcaagactgtggttctagacctttctccagttggtaatatgcttcatgtaaggtacctgaaggtggtaagcaacatgatagtcaaactcccactcattattcgaggcctgcgacacttagagacactcgaggtggatgcagaagaagtcgctgttccactggatgttttcatcttgaagagcctgttgcatctccgacttccgagcaaggcttatcagcctgattcagatattcaaaggattgatttaacaaatacatttcctttaagatttctgcccttcgtcagagcgttgtcaatgctagggcggtttctcctctcccatggccatcggattcgccatttgacatcacttcaaagtcttggctactttgacctaagcacttgctccagatatactgtgtggcaacttggcaagctgaccaatttgagggatcttcatctaacctgctctgcagttcgttccaggcatcgaattagcaacatccaatgccttgcctctgttctggggaaatgcaccagcctcgaatctctaactatccgtggcgaagcatcttcaaaccagagcatttcttttgatggcttaagcagcttgtcttctccaccgtacaacctcgtgagctttgtgctgtccccgaggattttcaaaatggcgaagctcccaaagtggattgggcaactcagcaggctcagtacgctaaagattgctgttggcgagctgtcaagtgaagatgttgacatcctcaaaggactctctgccctcactgctctttctctctacgttcggagaaaccctaagaaaggaagctggatcctattcacagtacaggccggaagatgcaggaatttggtacctgtcaggccttcaagttatctctgccagaataggagctgccggtattgatcaagccagcagagaagccgcgaaatctaggttgctggacgccattcttagcaaccatccaaagcctcctcctatcagaaacgtgcaaatggtggactgggttattcatggcgacacagaggagtgttcaaccggtgtgatgatacgtaaagatgaaagcagccgtgagcatactaggtcatttttaagtcagttcccgttcagaagacgacccctgcttccctccatattcacaaggcgtggccaggatgatgagcaacataaaatcgaagaaaatgatgtgctacaagatagtattatcttaaggaaatcctcttcgctaatgcaaaaaccaggactcccctaccgctacaacggtgctccctaccgctgctacagtggtagcggccgatggtggggtataggggaaggatttagggggaaccgttgtacagggtggagatataggggggaagagaacactgacgtgacacgtgaatgagatatagagggagaaatttaggggtaaccgctgaacacagtcttacacgag

SEQ ID NO: 7408 - DNA, 3450 bp, Zea Mays
atggctgaggttaaggtcatgcgggctcgtgctgatggaccggaagcggtgaagggcgagtgctgggtcttgactgatggatcagagcagccaggtgaccaaccgcagtggctgatgcgcctgggacacgcacttgtgcaaggatgtggtggagtggaccgtgttgtcggcgtggtcgaggactggcgggacacacgtctgatcgtggaggacgtgcacgaggtgcggtgctcacggcaggtttgctacggcggcggtggccacgaaacgatggaattaggtgcttctgtttccatgtctatcctggaaaagctcgtccagagctgttcctttccagattcatggcgggggccgccagacgctgaggtccaggctctcataggatatctcgaagagctacggtcctccgtcctggatctttccaaggaggatgaggacgaggatgactctgctacgtcgtcgtccacgctgaagatgagcctgacgagccagttgcaggaactttgttatgatgctgaggactatctggagatggcgcagcactcccgtggtggctgctcctggcagatcagttgggtccggagcaaggcgacgaggcagcgccccgctctaatcagcgcaaaagatctctccggcctcatctcccgtgtgaatccggcgaaagaaatagcccaagcgtacatcaagtctgctagttcaagaaccaccaccaaagagaatggccctaggccacaagaagagcctgcaaaaagcagtagtcgccgtgccgtctattctgatgatactctacagcctgacagccatgacgagcagctagtcaggttgctggctttggaaagtgatcagcagctcaagacggtggcaatccttggcctgcctggcgttgggaagacaacacttgccagaagactgtaccactgctatgaagggaggttccattgcggggctttccttcgggcgtcccgtaacctgcaggataccaccaggcttctcgccaccatgctatccaagattaagggccaacaagggtgccgctactgggggggctccggtgatgagcaagatctaatcgacagcatcaggcaacatctacaaggaaaatcatatttcattgtgatcgatgatttatgggctacatcagtgtgggatttcttgagccgtgcttttcccaaggataactgtggcagccgaatagtaataactactcaagttacagaagttgcatttgcttgctgtaacaaccacacagttgatatattcaatatgaaacctctggacgacgatcagtcactgcaattgttttacagtcgagtaaagcatataaatggttataatgctgaagaatgcaaggccatatcacatggaatcgtcagcaattgtggtaatctttcaccgctagctatcataaatatagctggcatgttagcaggctgggcggatttcaatatgaatgactgggagtacgtaagcaagtgttgtacatcaacagcaaatcttactaccgaggaggcgacggagagatttctgaaccttatgtacaacaagcttccagccaaattgaagacgtgcctgctctatctcagtatgtatccagagggctgtgtcatcggaaaggatgatttggtgagacaatgggcagctgaaggtattttcagtcaagtggtggaaccaaaaggtagagaacatgaagtgggttttatttattttgatgagctcctgaaaagaggattgatccagcctgtagatacagactacaatgatcaagtgttgtcatgtatagttcatcaagtggtactggaatttattacaaagaaatcaatgcaggaaaacttcatcactgtcgtggattatcgtgaaacagggacagtgcttgatgataataaggttcatcgactgtctgccaggtttgaaggtgccaaaagtgcacagataccgcggagcttcagagtacgccaagttcggtcctttatgttttctggattcattaaatctttaccttcccttctcaagtattgccttgtccgagttctgattcttcatgtttggagtgatgatcaaggcaagactgtggttctagacctttctccagttggtaatatgcttcatgtaaggtacctgaaggtggtaagcaacatgatagtcaaactcccactcattattcgaggcctgcgacacttagagacactcgaggtggatgcagaagaagtcgctgttccactggatgttttcatcttgaagagcctgttgcatctccgacttccgagcaaggcttatcagcctgattcagatattcaaaggattgatttaacaaatacatttcctttaagatttctgcccttcgtcagagcgttgtcaatgctagggcggtttctcctctcccatggccatcggattcgccatttgacatcacttcaaagtcttggctactttgacctaagcacttgctccagatatactgtgtggcaacttggcaagctgaccaatttgagggatcttcatctaacctgctctgcagttcgttccaggcatcgaattagcaacatccaatgccttgcctctgttctggggaaatgcaccagcctcgaatctctaactatccgtggcgaagcatcttcaaaccagagcatttcttttgatggcttaagcagcttgtcttctccaccgtacaacctcgtgagctttgtgctgtccccgaggattttcaaaatggcgaagctcccaaagtggattgggcaactcagcaggctcagtacgctaaagattgctgttggcgagctgtcaagtgaagatgttgacatcctcaaaggactctctgccctcactgctctttctctctacgttcggagaaaccctaagaaaggaagctggatcctattcagtaagggcttcgcagtgctcaagtattttaagttcacttgcactgcactgtgcgtgaaatttagtgaacaagctatgcctgctgtccaaaggctgattgtgtgcttcaatgctaacacaatgcagcagtacaggccggaagatgcaggaatttggtacctgtcaggccttcaagttatctctgccagaataggagctgccggtattgatcaagccagcagagaagccgcgaaatctaggttgctggacgccattcttagcaaccatccaaagcctcctcctatcagaaacgtgcaaatggtggactgggttattcatggcgacacagaggagtgttcaaccggtgtgatgatacgtaaagatgaaagcagccgtgagcatactaggtcatttttaagtcagttcccgttcagaagacgacccctgcttccctccatattcacaaggcgtggccaggatgatgagcaacataaaatcgaagaaaatgatgtgctacaagatagtattatcttaaggaaatcctcttcgctaatgcaaaaaccaggaacttggattatgtgatgcaacccatgc

SEQ ID NO: 7409 - DNA, 1906 bp, Zea Mays
accactacttcactcgctcgctcgtgaagcgtctcgctgccctgcccccaccgatccaccacccccccactcatcacccctcagccaccgcccaccggccatgtcgtcgccgtcggtagccagcctccgtctcccgatgctcccagcgtcgccgcccctctcccgccgcgctatcgccggagttaccccgagcgcggccgcaccccgcgctcttctcctacaacccctcgcgcccaaggcgctcgcggcgtaccaccagcctgcgctcctcctccaccagcgacgccggcatggaccgccccccgtcgccgctgtcactgcctccaagccggttctcaaggacccgaagaagtaccaggagtgggactccatgacggccaagttcgctggcgccgccaacatccccttcctactgctccagctcccgcagatcgtcctcaacacccgcaacctcctcgccggcaacaagaccgcgctcttcgccgtgccgtggcttggaatgctcactgggctgctgggcaacctctcgctcctctcctatttcgccaagaagaaggaaacggaggctgtcatcgtgcagactcttggcgtcatctccacctatgcggtcctcgtgcagctcgcaatggcggagtccatgccggtgccgcagttcgtggccacttcggttgttgtggccgcagggctcatcctaaacttcctcaactactttggctggatccctggaaccctcttgctgctgtgggaggatttcattacagtcggcggccttgccgtgctccctcaggtcatgtggtcaacttttgttcccttcatccccaatagcgtactgcctggcataatctctggttctttagctgttgcagctgttgcgatgggcatacttaccaacttatcaatcaagcactaaaagtaggcaaggatgggcaagctttccaatgcaggggttaaatttgttgggtcattgtctggttggacagccacacttctcttcatgtggatgccagtggcacagatgtggacaaattaccttaacccaagtaacatcaaagggctgtcagctttcagcatgttgcttgcaatgcttggaaacggacttatgattcctcgcgctgtattcatccgtgatttgatgtggttcactggttctgcatgggcatctgtcctacagggttggggtaacctggcgtgcatgtactgctttaatagcatcagcggagaagttttctttgcaacatcagctggtctgcttctatggctaggatttactctatggagagatgccattgcctatggcaacagctcgcccttctcttccttgaaggagctgttttttgggaagtgatgaaccgtcggcaaccttgtttctcttgcactttaagcagctaactgttcccgggtaggacgctctcctgcaataaatcatggtagctgttaagaacggtggttcagttgctcccatatggtctgaagaaacggtgcttcagtctttagcattttgaggaggaaacgtgaaacttactggtcagctgaaggctataaacattgccatggccctggactggaagccccaactttcccaagcctgtagaaagcgccgtgtgcctctacagaagccaccgcgtgatgaccagcttcatccggcagggtgggtacagtagcaagctatagccctagtctgatgtaagaacaaatttatattatccatcccatattgtctttaattagattcatttttgaaaccaatgcaatttcagctcttgctgtcgtgcaaatctgtacccattgtccatggatgagtagatgacctgggagaatcacacaatacatattgtaatatcagttcacgttttaaagaagtgaatatgagtagatgacctagggtctcattgagctagaccaaaat

SEQ ID NO: 7410 - DNA, 1261 bp, Zea Mays
tctcttttgttacaggaagatcttctctatccatactcacaagtgaaaaatattatttttacttgtctcaacaagtttgtggagccaatgttaaattgttggccaattaacaaactcagagagagagctctacataacctcatggaacatatacattatgaagatgaaactactaaatatatttgcctttgtcctgttaacaaggcacttaatatgatttgctgttgggtagaaaatccaaattcaaatgcattcaagcaacatcttccaaggatctatgattacttttggcttgcagaagacggcatgaaagcacaggtttacaatggctgccaaagctgggagacgattctgacagtttacgccttttgctcaactaatcttattgatgagtttggttcaactatagaaagagcacatgaatatataaaaagatcacaggttcttaaagatcaaccaaattatcaaagttattaccgccaaaggtcaaaaggctcgtggactctttcaacagtagatagtacttggaattcaccagatattactgcagaagctcttaaggtattaatgttgttatcaaagatttctcctaaccttgttggcaatccgatagaagaacaaaagttgtatgatgccgttgactgcatcctttattctatgaatgaaggtggaaccttttcttcatatgaatgtcaaaggacagcttcttggttagagattatcaacccttgcgagaattttatgaatattgtcgtcgattatccatatgttgaatgtacatcatcagtgctagaagcttttatatttttcaaagagctatatccttcctaccgtaccaaagagatagataaatgcataaacaatgctgccatgtttattgagaacaaacaaaggaaggatggttcatggtatggcacatggggtatatgtttcatctgtggaaccttttttgcaataaaaggattagtagctactggaagaacgtatgatactagttcttccataaggcaagcatgcaactttttgttgtcaaaacaacaagctacaggtggatggggggaaagctacctttctagtgaaatagggaattatattaatggaaatacccatgtagtgaacactgcttgggcgatgctgtcgttgatatatgctggacaggttgagcgagatcccataccactgtaccaagcggcaagagaattaattaacatgcaactagacacaggagactttccccaacagttcaaaggatgtagagtga

SEQ ID NO: 7411 - DNA, 1106 bp, Zea Mays
gcacatcctactgacaaaccggtcccactagctgctgatgcgcatccatccggcaactactcacgctcaggtcgccgtcgcgactcgcgccgcctctcggctcgctagccgctacgctatctacgccgccccggcacctcccatgagatgagagccgcagccgcagccacatccacagccgccgcgctcctcgcccccggtctaaagctctgcgcgggcggcgcccgcgcgcgcgtctcctgtccctcccgctcccgcctcccactccaccgcatcgccgccatggcctccgcccccaacccctccttccgcccggaggaggcacgctcccctcccgccctcgagctcccgaccccgccgctctccaagttcaaggtggcgctgtgccagctctcggtgacggcggacaagaatcgcaacatcgcgcacgcgcgcgcggccatcgagaaggcggcctccgagggcgctaagctcgtccttctcccagagatatggaatggtccgtattcaaatgacagctttccagagtacgcggaggacattgaagctggcggagatgcggccccttcattttcaatgatgtcggaggttgctcgcatcttacaagtcactcttgttggtgggtccatagctgaacgttcgggaaacaacttatacaatacatgctgcatctttggttcagatggcaaacttaagggtaaacatagaaagatccatctttttgacattgacattccaggaaagatcactttcaaggaatcgaagactcttactgctgggcagaatcctactgttgtagacacagatgttgggcgaattggtattggtatatgttatgacatccgtttccaggaattagcaatgttgtatgctgcaagaggtgctcatttgttatgctatcctggtgcattcaatatgactactggaccactgcattgggagttgctgcaaagggcaagggctacagacaaccagctgtttgttgcaacatgcggcccagctcgagataccagtgcaggatatgttgcttggggacactccactcttgttggacctactgatactatgcaccaccacaaaactaattctgtacctgttgtggtttt

SEQ ID NO: 7412 - DNA, 2358 bp, Zea Mays
gcacatcctactgacaaaccggtcccactagctgctgatgcgcatccatccggcaactactcacgctcaggtcgccgtcgcgactcgcgccgcctctcggctcgctagccgctacgctatctacgccgccccggcacctcccatgagatgagagccgcagccgcagccacatccacagccgccgcgctcctcgcccccggtctaaagctctgcgcgggcggcgcccgcgcgcgcgtctcctgtccctcccgctcccgcctcccactccaccgcatcgccgccatggcctccgcccccaacccctccttccgcccggaggaggcacgctcccctcccgccctcgagctcccgaccccgccgctctccaagttcaaggtggcgctgtgccagctctcggtgacggcggacaagaatcgcaacatcgcgcacgcgcgcgcggccatcgagaaggcggcctccgagggcgctaagctcgtccttctcccagagatatggaatggtccgtattcaaatgacagctttccagagtacgcggaggacattgaagctggcggagatgcggccccttcattttcaatgatgtcggaggttgctcgcatcttacaagtcactcttgttggtgggtccatagctgaacgttcgggaaacaacttatacaatacatgctgcatctttggttcagatggcaaacttaagggtaaacatagaaagatccatctttttgacattgacattccaggaaagatcactttcaaggaatcgaagactcttactgctgggcagaatcctactgttgtagacacagatgttgggcgaattggtattggtatatgttatgacatccgtttccaggaattagcaatgttgtatgctgcaagaggtgctcatttgttatgctatcctggtgcattcaatatgactactggaccactgcattgggagttgctgcaaagggcaagacaaccagctgtttgttgcaacatgcggcccagctcgagataccagtgcaggatatgttgcttggggacactccactcttgttggaccttttggagaggtgattgcaacaactgagcatgaggaggcaactataatagcagaaattgactactcactgattgagcagaggaggcaatttcttcctctgcaacaccaacgccgtggcgatctctatcagctggttgatgtccagaggctgggttctcattagcacagggacgaagcaggagagcagttgactctgcaggcttgctcgtactacttcgttcatgagatgcatgcccatgcccatcgagagatcgatcaacttgatgtgtgaaggtggagaggacggaataaagcgactatagtttgtaccttcagcgctagtttggcaactctattttacaagagattcttatttttctaaggaaaaattgattaatttttcttaggaaaatagaaatcacttgggaaaatatgattgccagactagccctcagtgtaaatgtctccatttgtcgaataaattgattactttaacctatgaagaaaacctttctccatgaaacaaagataaacggaggatcttctccgatttccttttgggccgtaccaatttgaattttgaactagcttgtgcgcctcctggagccgatgtagcaatggatactccagtgtttggccatcagcagccacagtactagagtatgcatgggtatattttcgtatgggtatgatggcagggaagggcaaacctgtgaacaggttccctgtcgatgctgcagagggcggcagacctgcacggtgcacaactgtcagctgtttgttgcagcatgcgctccgggtcgagataccataccagtgcaggttatgttgcttggggatggggacacactactcttgttggacttatgtgattgcaacaaccgagctagcatggagaggcaactatagggaggtacgcagagtgaaacacctttggttgaacggggtggcgcaagatcttctctaggcaatttcttcctctgcaacaccaacggcgtggcgatccctaccagctgcaagatgtcccggagactggatggatcctcagcagcgagcctggatgcagctgtgaggctggctgtgacgaagcaggagagcagttgactctgcaggcttgctcgtactaccgcgttcatcatgacatgcatgtcgatgccctgtctagagatcgatcgacctgatgtgtgaaggtggagagcaggggacgagggcgagtaaaggcgacaatagtacgtaccttcactgtgtctccggttgccaaataataaatagattacagtaggaagaacaccgctctacatgaaacaaagataaacggattatctacccccg

SEQ ID NO: 7413 - DNA, 1415 bp, Zea Mays
attttcttaaaaaaaatctcaatcgcaacaacacaaaaaagacccgcaatatcgattagcgagagtcgttcctccaccaaaccaaccaattcgcttctccgtcaacttcacttcctcgtcgacgcctccgtcccaccaaccatgccggcggccatggcggctgcggcggcgcagaggctcctcgcggcgagcacgaaaatcatcggcgttgggcgcaactacatagcccacgccaaggagctcggcaatccggtccccaaggagcccgtcctgttcctgaagccgacctcgtcgtttctccacgctggtgtggccaccgccgccgtcgagatcccggagccgctcgagtcgctacaccacgaggtcgagctcgccgtcgtcatctcccggcgtgggcgcgacgttcccgaggcgtccgccatggactttgttggaggttatgcacttgctttggacatgacagcaagggaccttcagtctgttgctaagtctgcaggccttccatggactttggctaaaggacaagacaccttcaccccaattagtgcagtagttccaaaatcagctgtcactaatcccgatgatctcgagctctggctgaaggtagatgatgaactaaggcagaaaggaccgacaagcgacatgctattcaagattccttttctgataagctatatcagttccatcatgacattaatggagggtgatgtgatactaacaggtactcctgagggtgtgggtcctgtccgagtaggtcagaagattacagctggtataactgacctaattgatgttgagttcgatgttcagaggcgcaatcggtcattttccacatgatgcaataagcaagaaagtaatggtgaatacaaagtgcagtactcgtcctcgaccttgaatcgcattactggacctggagccattgcagatagctcttgagccttaccttgatttaatttacctgggttttgagagactatctatgaatatgctaactccgacttgaaacagcttccgagtggggtgcacggccgatctatgtaacgtacgcgcataagaaatggtgtcctacaaaatgccttccacttgcttgaaacgatatgtagatggacagcgacgacgaacaccttaactccctctcgctagatatcgagccagcttagttcggttcgactgagcttgagctgactcgttaaggtaaagagatgacttggttcgttaaacaattgagtcagagaattagcttggctcgtttgcaagtttgggctggctcgtttacctcgcgagtaaaaaaatacatgtatatataaaatagtatagtcaattgctagttaattttatacaaatttaacattagaaaagagtaattatactcataatttcatatatattacatcttttaaaccctatattaacat

SEQ ID NO: 7414 - DNA, 1424 bp, Zea Mays
attttcttaaaaaaaatctcaatcgcaacaacacaaaaaagacccgcaatatcgattagcgagagtcgttcctccaccaaaccaaccaattcgcttctccgtcaacttcacttcctcgtcgacgcctccgtcccaccaaccatgccggcggccatggcggctgcggcggcgcagaggctcctcgcggcgagcacgaaaatcatcggcgttgggcgcaactacatagcccacgccaaggagctcggcaatccggtccccaaggagcccgtcctgttcctgaagccgacctcgtcgtttctccacgctggtgtggccaccgccgccgtcgagatcccggagccgctcgagtcgctacaccacgaggtcgagctcgccgtcgtcatctcccggcgtgggcgcgacgttcccgaggcgtccgccatggactttgttggaggttatgcacttgctttggacatgacagcaagggaccttcagtctgttgctaagtctgcaggccttccatggactttggctaaaggacaagacaccttcaccccaattagtgcagtagttccaaaatcagctgtcactaatcccgatgatctcgagctctggctgaaggtagatgatgaactaaggcagaaaggaccgacaagcgacatgctattcaagattccttttctgataagctatatcagttccatcatgacattaatggagggtgatgtgatactaacaggtactcctgagggtgtgggtcctgtccgagtaggtcagaagattacagctggtataactgacctaattgatgttgagttcgatgttcagaggcgcaatcggtcattttccacatgatgcaataagcaagaaagtaatggtgaatacaaagtgcagtactcgtcctcgaccttgaatcgcattactggacctggagccattgcagatagctcttgagccttaccttgatttaatttacctgggttttgagagactatctatgaatatgctaactcgttcgtaaacgacttgaaacagcttccgagtggggtgcacggccgatctatgtaacgtacgcgcataagaaatggtgtcctacaaaatgccttccacttgcttgaaacgatatgtagatggacagcgacgacgaacaccttaactccctctcgctagatatcgagccagcttagttcggttcgactgagcttgagctgactcgttaaggtaaagagatgacttggttcgttaaacaattgagtcagagaattagcttggctcgtttgcaagtttgggctggctcgtttacctcgcgagtaaaaaaatacatgtatatataaaatagtatagtcaattgctagttaattttatacaaatttaacattagaaaagagtaattatactcataatttcatatatattacatcttttaaaccctatattaacat

SEQ ID NO: 7415 - DNA, 1032 bp, Zea Mays
  misc_feature (1)..(1): n is a, c, g, or t
naagcttgtcgataaaaaacttggaaactaacagaacatgtccggaaataatgtctcaagttcattagtgaaggggaaaatattacctacattttttactcaaattgtggccattatggcatcatatgattcctactgccccaatggtcacctgaatacttgcagaactagaatcaaaactttctttttcagtctataactgcccctcacttatatttagctgtcttatgcagtcgtcataccttctgatgcaaggaaacaactggctctttctatgaaaagagctgcatctcttgtgccggatctctatgccgttgatgcagactatgcgctttctgaattgtgcaaagatgaacagaagcttgagaaagtgcttctgagcagggagtttcatgtactggatggagttcaataaatgggagcactttgtcaatgatgattgtacacggtcatttgtttcactagaagttacaagaactggtttgccagagataacgaggcagatacttatggtagatgaagtgtatcgattgcatggtcttcctgaattttacacgaatccacggccacatatatcgttggtgtgggcattgggtgatgtcagcggcaaactaaagcaggcactaaaggacattgaaaaatatcagagcagtatgagctcattgcaaaaatgtaatgttcgatgcaagttcagtcgtgtagtttgtaaagtaggcaagaaggtgcatgatatctgtaaagttgcagattgaaacacacatgaattacgctcgataagcttcgaggtactgacctcgtatggtctggaccaattcttgtgattggaacagtgaaacacaaattcattctcttcttcagtacatggcagttactgctaacttttcccatgcaaattacgaaatgataaagaggtcattgaaacctggcaagagctatggtacaaaaaaaatatcaaactgtgtgattctgctacccttgttttagctctccccaactattccttctacagcacccgcttcttctgggtttagg

SEQ ID NO: 7416 - DNA, 1858 bp, Zea Mays
gtcgccgctggtacctctgcgtcccctccggaccgtcctcttccacatcggtgtcagcggcgtctctgtcaaggacctccacctccgccgcgttgtccctcccgctgccggctccctcgacacctctccccgcccccatatcctgcgccagcgctgctcatcccgctagcacacgccactgtggatctagatccgacactggctgtgcgggattagtcggcgtgcgtgcttagcagcgtctgccgatggatggagaatggtggaatcgagaaggccggtgtcacccacaagatcgacatcagcgatggccccgtgctcccagtcccgtccgcctcgaatccattcgtttgcctgcacaggagaagaaccacgcgtcgttcgacttcatcttcatggacgccgacaaggacaactaccccgagcgactgctcaagctggtgaggccgggtggcctcatcggctacgacaacatgctgtggaacggctccatcgtgctcctggacgacgcgcccatgcgcaagtacatccgcttctaccgcgacttcgtgctcgccctcaacatggcgctcgccgccgacgagcgcgccgagatctgccagctccctcgttcatgtggtgctgtgtatcggaagaaaatgcgacatcaaacttcgccgccatcgacgcaagcttgggagatgcgacgggggaaggtgtggcggcgcgggggcttgcgacgagaggcgcgcgcgcggcgagctcggccgtggcactgggcttcagcggggaggcggagaagccccgcgaggagggcaagctgatgttgagttcggcggacgaggggcccggcgacgacgacgcagttgaagagccgactccacggacggtgcaattgcggatacttggaggtatttgggctgataggattggtgatctaggatgcaagtcgttgtaaaagaataagaactatggaaagccatcgcatgcgtgtaggtgctcttgcatggagttctttgctttcttctagaagccgtgataggagcatcctccaccatgatatccgtgctcaagaagattatgttagcaagcttaccgggcacaaatctgaggactatggcgcatcacagtgtatgtctgcaattgctggctcctatggctatattgctccaggaatgcatatacccctaaggtcaatgagaagagcatgtctacacctttggtgtcgtgcttcttgagctggtcaccggaaagaagccagtaggtgagttttgggacggcgtcaacattgtccatcgggtcaagtcgatgacaaacacaaacaaggagcaggtgatcaagatcattggccctaggctgtcgaccgtgcacacaaggtcatgcatgtattctgtgttgcacttctctgcgtcaaggagcagagcgtgcaacagcctatgatgcggaagatggtgcagatgctcaacgaacttcccaatccagctgcaggcaaggagatgaggttcccgacggcgacgatttttccactacacaatcggattcttcagcagcagatggatctattgaagcgtcgtgtgacgaagtcaccaaagagcagcagcaaacgagatctttgctatgtttccttctccttgctaaccactgatctcatcaagcttggtttttctcattgctatgtttccctctcctggtgatgttaagatatttggacatttctagcttattagggccttgtgtggaacatgtttgaacaattatctcatttaaacaatgtcaacatgtgtgatatatagaaaccgtagcaacgcacgggcacctaattagtagagttttaaattccaaaacttgtaaaatccataacttttgcatagagactccaact

SEQ ID NO: 7417 - DNA, 1867 bp, Zea Mays
ctccgccgcgttgtccctcccgctgccggctccctcgacacctctccccgcccccatatcctgcgccagcgctgctcatcccgctagcacacgccactgtggatctagatccgacactggctgtgcgggattagtcggcgtgcgtgcttagcagcgtctgccgatggatggagaatggtggaatcgagaaggccggtgtcacccacaagatcgacatcagcgatggccccgtgctcccagtcccgtccgcctcgaatccattcgtttgcctgcacaggagaagaaccacgcgtcgttcgacttcatcttcatggacgccgacaaggacaactaccccgagcgactgctcaagctggtgaggccgggtggcctcatcggctacgacaacatgctgtggaacggctccatcgtgctcctggacgacgcgcccatgcgcaagtacatccgcttctaccgcgacttcgtgctcgccctcaacatggcgctcgccgccgacgagcgcgccgagatctgccagctccctcgttcatgtggtgctgtgtatcggaagaaaatgcgacatcaaacttcgccgccatcgacgcaagcttgggagatgcgacgggggaaggtgtggcggcgcgggggcttgcgacgagaggcgcgcgcgcggcgagctcggccgtggcactgggcttcagcggggaggcggagaagccccgcgaggagggcaagctgatgttgagttcggcggacgaggggcccggcgacgacgacgcagttgaagagccgactccacggacggtgcaattgcggataaaattttgtatcatagatatattagtgcagccgatgggtgaggagcggctgtagccctacaggaacccggcaaggacaggccaccgtcccaactcgccttgtcttacctcatcagtcatccctgccctcaccttctcaggcatctccagatacttggaggtatttgggctgataggattggtggtgctcttgcatggagttctttgctttcttctagaagccgtgataggagcatcctccaccatgatatccgtgctcaagaagattatgttagcaagcttaccgggcacaaatctgaggactatggcgcatcacagtgtatgtctgcaattgctggctcctatggctatattgctccaggaatgcatatacccctaaggtcaatgagaagagcatgtctacacctttggtgtcgtgcttcttgagctggtcaccggaaagaagccagtaggtgagttttgggacggcgtcaacattgtccatcgggtcaagtcgatgacaaacacaaacaaggagcaggtgatcaagatcattggccctaggctgtcgaccgtgcacacaaggtcatgcatgtattctgtgttgcacttctctgcgtcaaggagcagagcgtgcaacagcctatgatgcggaagatggtgcagatgctcaacgaacttcccaatccagctgcaggcaaggagatgaggttcccgacggcgacgatttttccactacacaatcggattcttcagcagcagatggatctattgaagcgtcgtgtgacgaagtcaccaaagagcagcagcaaacgagatctttgctatgtttccttctccttgctaaccactgatctcatcaagcttggtttttctcattgctatgtttccctctcctggtgatgttaagatatttggacatttctagcttattagggccttgtgtggaacatgtttgaacaattatctcatttaaacaatgtcaacatgtgtgatatatagaaaccgtagcaacgcacgggcacctaattagtagagttttaaattccaaaacttgtaaaatccataacttttgcatagagactccaact

SEQ ID NO: 7418 - DNA, 1820 bp, Zea Mays
gtggaaatgataaagcctcggcccttcaggctggctctgctcctcctcctcctcgccattgctgtgcgttctccgcctcaccagatttcgcaacagaaccttcgttccctgccgtctcttgtcggtctggccggccgaggtgggtgatctgtagagcgaaacgccgagccgggagaggagggaggccgcaccggcgattgtagaagcagaaccggtggaggagtagaggagggcgccgaatcgatgcgcggctccgcggacgccgtcgtggttgctcgggacgtggtggcctcgtcgagcccgtccaaggccgcgtcggcgttggacatgacgagatacccgaggctcagcccagatggcctcccgctgcccaatggcagcggcagcggcgcgagcaagaagcctgcagcgccggtgtcgccggcccccagatcgagcaaggatgacgtggcaccggccgtcgccaccgacagctcccgcatcgcggcgttcctagcctcgacgtcgctcgagcccaagccgcgcgctcgcgcaccgcagccacagccgacggctcctaactcggcgcccaccgcagccgtcgccgcgaacaggagccccgcgcgcgaccacggccacggccactgctccgaccactccgatcccgcctccccgagctccaccggggcccgcgaattgctgctccggtggggacagaacaagcgcatgcgctgccgccgcgactgcgcgtccgcgtcgccgcagcggcggcaggcgggcggcaagataccgcgccgctcatcgtcgccggcggcggacaatctgatgccgccgccgagcgcagcgccctacgcccgcgggtccaacctccgctacgccacgcctcgcccgccgcgctccggcgccagcgacgcgcaccacggccgcggggccctccccaacccgctcagatcggcggaggactgtgccggtgcctgtgccggtgccggggagaagttcttggcggttgctgaggcagcggcgagggcccagaagcagcgggcggtgtcgccgcataaggtgggcctgggcgtcccggacccgaagcagcagcagaaccagtggggcagcagcggcagtggccatcagcagcaggccggcgcggcggcgggggcgtcgtcgaagccggcggcgaagctggaggtgccgcggatctacaccacgctgtcccgaaaggagaaggaggaggacttcatggccatgaaaggcaccaagctgccgcagcgccccaagcggcggccaaagatcatcgagaagaccgtcagtgcgatctgtcccggggtgtggctgacggatgcgaccaggagcaggtacgaggtgcgcgagaagaagtgccccaagaagaagcaccggggcctcaagggcatggagagcatcgacagcgactccgactgaccaccgaccgacggcagcaggccgaagggcgtgcggtggcagcaacgcggcgagacgaagaagaaggaggaggttcggcgacagcgaagggtgcgtgtcaacagccacgcgctctcggagactcacattgtcgcgctgggttaagggatgccaaaaagaacaagaggagggtggattcagtaggaaaaagacaattctttttcgtgttaaccatagcggcgccgtgctatatagccggcgttttgtatatctgggtagcgacgagacgatgtcgtagccggcgtctttttctttttcgtttcgttcgcgacactgggtgggttgcccgccgcgtttatttgtggttgggtttgtgcatactactagactgtctcagcaagaggaagcaactagacttttagacccta

SEQ ID NO: 7419 - DNA, 1166 bp, Zea Mays
agaagcttctcttggtggtggtttctgctattgctaaagtggcactatgagtacaagggctgtcatgcgtgtggacaaagaagacatctgctgcaccatctgccggtggaagtcgaccatcatcatcttcaagtcccccacatcgctgggttgaggagcagcgggcggtggatccatgttggctggggcgccattggaggcgggtgccatctctgtcccggacatctccgataccagattggtgcatggatttgtgcaagataatagaacagggcaaaaagtagctatgttaattggaaaatgggatgaagctatgtattatgtgcttggggatccaagtgttaaacccaagggatatgacccaatgtcagaagcagttcttttatgggagagggacaagtctcttaatcagacacgttacaacctttctccttttgcaatttctctaaatgaattgacaccacatttgttgaacaagttggctcctactgattctcgtttgagaccagaccaaaggcatctggaaaatggtgaatatgagatggcaaattcagagaaacttaggcttgaacaactgcaacggcaggcacgacaactgcaagaaaaaggatggagaccaaggtggtttaagaaggatgatggcgacagttaccgctatatgggtggatactgggaagcgagggagacggggaactgggacggtattccggacatctttcgccagaatagtttgtctccaggactgcactaactacccttcttccctatgttatacttgtgtatctccaccaaacatttaacgaagttatggtggcaacaaggcagagccaaagcatagcgtttcttcgtgggcatggtcaacctcgtgtcggctggggttggacaagtggttggaaacgtaggtttcatttttgaatttcaggactaattttgtcttggaatgcggttagtttagatttgttttttatgccttggcggctaatccacggatggtaggctttgccgcgcgctctagtgtcttgggccatgtatggagtattatctatggacatcgggtgatttcaatcgtcgtcacaatacttcttgactgttacaatcgaatttacacaacataagatgtgatatctggctcaatttggattgaatctataattgtccttgtgtca

SEQ ID NO: 7420 - DNA, 1641 bp, Zea Mays
atacgcatggctacacaagagatgggtgggtcttgtgtccagtcggggtgggagttgggctcgtgcagtgcagtgcagtgcactgcaggtgcagtcttgctcgcctgtcttcctcggcaccgggacagcggacctccaccgcaactgggccatctgttctccttcctcctcttcctccgccaccgcgcttctgaggaggctagggcgatgcaaccgcttccgctttgttattagcaaagggtaataacagggcccgttatcatcatgcaaatccaaatccaattccctcccaacatctcttgcgttgattttgcaggaaccgtccgagaacgggcagccaattctccgatgccgtccgctatggccaaatccctcctcctccctcaccctttcttctccgtctcaccccgcccacaccctcatccgcgcgccggattccctgttctcaagccccgccgcgccgcgctgctcgcggccacgcccgcgccggacgccaacaccagctccaacaacaaccccctcgccgcgctctggcgccgcaccctgcagcccctcggcgactacggcttcggcaagcgcagcgtctgggagggcggcgtcggcctcttcatggtctccggggccgccctcctcgccctcgccctcgcatggctcaggggattccagctccgctcccgctttcgcaagtacaacaccgtcttcgagttcacgcaggcgtgcggcatctgcgtcggcacgcccgtccggatacgaggggtcaccgtcggatccgtcgtccgcgtcgactcctcccttaggagcatcgatgcaactgtcgaggttgaagatgataaaatcatcataccacgaaattcaatggtcgaggtgaatcagtccggtcttctaatggagacactcattgatatcacaccaaaggatccactgcctgcaccttcagtaggaccacttgacccagactgcaccaaagaaggcttgattctctgtgacaaagagaggatgaaaggacagcaaggtgtaagcttagatgcattggtgggaatatttacccgtctgggtagagacatggaggagattggtgttagcaaaagctataagttagctgaaaaagttgcatctataatggaagaagcacaacctcttcttacacggattgaggctttagctgaagaaatgcaacctttgctctctgaggttaatgatagtgatctgctgaaggatgtggagactatagctaaaggcctggccgacgcgtctggtgacctaagaaggctgaagtcgtccatgcttaccccagagaacacagatcttattaagcagtctattttcacccttatatttaccctaaagaacattgagagtatcagctccgacatctctggtttcacgggcgatgagacgacaaggcggaacatcaaacttctgatcaagtctctcagcaggctattgtgattggtgtgcataatgatggattgctttgcatgggacggggaatggggaaatggttgctggtggggggtctctcggtctcggtggcacagaggttattcacccccgacagtagccctcgagcctctagagaagtcgggcgcacctttggagcatgtgaagtggattaaacttgggcactaaggatacaacacc

SEQ ID NO: 7421 - DNA, 834 bp, Zea Mays
tttcgcaagaagatcgacgacatgttcgctgcggctcaggatgcggacaaggaagctgccaatgcacacattcgtgtccagttccgagctttggctgatcagatatatcacaatcctgactatcataagcatgtgagaaaagctgtcatgaaacagctgaaggaattcagaaaacaatatgaaagttacgtaccgatggaatataaggtgtacttgaagaaaatgaaaagatctggggaatggggagatcatctgaccttacaagcagctgcagatcggtttggtgccaaaatttgtttgctgacatcatttaaagacacctgtttaattgagatagtccctagggatctaactcccacaaaagagctttggctaagcttctggtgtgaagtacactacaattccttgtatggaatcgacgatctcctgacccgcaagacgaagaagaagcactggctgttctaggagggttctgaaggatccaaattctttcagcagctcctgctctgtccagccagcgcagcctctgtcttagtacttactagttggccaacactgtatcatatcctaagttgagtctaggctttacgcttttatgtacagtcgatctagatcttgtaaaattccctcaaggagcaacaggaactgtacaactcttagatccatgagattttggtgatctctcctccatgggaatgatagtgcttgggtgtatgtacattataaaagctaccaggggcattttgacgtgggcgtttggatgccattctccataatttttattctgaattcgtagagtggccatttccaggcatggggatctgccggattttg

SEQ ID NO: 7422 - DNA, 1197 bp, Zea Mays
attgagcccgacagcaaaaagaaaggtgacgtttctctttcttggttccggcgccccaccgggagagtgagctgctgcctgcgcaactcgagcgccgcttgtcgcgagcaccgcggcctcgatccgtcaagctacatgtctggacagcaggaccacgctagtaaaagctctagctcaagcatcagcagcagtactcaagagagcgaggaggaagcacctgtccgaagcgtcaccattggtagcctccttgcccaagcaaatagcaccagtggacatagtcttgggaagcgcctgtcccatttggggtcaatcccgtatactccccgagttaatggaaaaatccccaatgttggtaatgcaacactggaccacgaacgattgctggaaaggttgggcacttatggtctagctgaatttcagatagagggggatgggaattgtcagttccgagctttggctgatcagatatatcacaatcctgactatcataagcatgtgagaaaagctgtcatgaaacagctgaaggaattcagaaaacaatatgaaagttacgtaccgatggaatataaggtgtacttgaagaaaatgaaaagatctggggaatggggagatcatctgaccttacaagcagctgcagatcggtttggtgccaaaatttgtttgctgacatcatttaaagacacctgtttaattgagatagtccctagggatctaactcccacaaaagagctttggctaagcttctggtgtgaagtacactacaattccttgtatggaatcgacgatctcctgacccgcaagacgaagaagaagcactggctgttctaggagggttctgaaggatccaaattctttcagcagctcctgctctgtccagccagcgcagcctctgtcttagtacttactagttggccaacactgtatcatatcctaagttgagtctaggctttacgcttttatgtacagtcgatctagatcttgtaaaattccctcaaggagcaacaggaactgtacaactcttagatccatgagattttggtgatctctcctccatgggaatgatagtgcttgggtgtatgtacattataaaagctaccaggggcattttgacgtgggcgtttggatgccattctccataatttttattctgaattcgtagagtggccatttccaggcatggggatctgccggattttg

SEQ ID NO: 7423 - DNA, 1392 bp, Zea Mays
tttcgcaagaattgagcccgacagcaaaaagaaaggtgacgtttctctttcttggttccggcgccccaccgggagagtgagctgctgcctgcgcaactcgagcgccgcttgtcgcgagcaccgcggcctcgatccgtcaagctagaccacgctagtaaaagctctagctcaagcatcagcagcagtactcaagagagcgaggaggaagcacctgtccgaagcgtcaccattggtagcctccttgcccaagcaaatagcaccagtggacatagtcttgggaagcgcctgtcccatttggggtcaatcccgtatactccccgagttaatggaaaaatccccaatgttggtaatgcaacactggaccacgaacgattgctggaaaggttgggcacttatggtctagctgaatttcagatagagggggatgggaattgtcagttccgagctttggctgatcagatatatcacaatcctgactatcataagcatgtgagaaaagctgtcatgaaacagctgaaggaattcagaaaacaatatgaaagttacgtaccgatggaatataaggtgtacttgaagaaaatgaaaagatctggggaatggggagatcatctgaccttacaagcagctgcagatcggtttggtgccaaaatttgtttgctgacatcatttaaagacacctgtttaattgagatagtccctagggatctaactcccacaaaaggtaagggcttggctaccctgctgctcagttatcagatgcttggttccatatcgaacttctctggcaccagcattgcagcatctattctgctcttgagacaattctgcattcaaccattgcaagatgcaaaccacaatagtatatttaggttctgcaggaatcattaccacctaatcccagtgatggtacacatttttgcagagctttggctaagcttctggtgtgaagtacactacaattccttgtatggaatcgacgatctcctgacccgcaagacgaagaagaagcactggctgttctaggagggttctgaaggatccaaattctttcagcagctcctgctctgtccagccagcgcagcctctgtcttagtacttactagttggccaacactgtatcatatcctaagttgagtctaggctttacgcttttatgtacagtcgatctagatcttgtaaaattccctcaaggagcaacaggaactgtacaactcttagatccatgagattttggtgatctctcctccatgggaatgatagtgcttgggtgtatgtacattataaaagctaccaggggcattttgacgtgggcgtttggatgccattctccataatttttattctgaattcgtagagtggccatttccaggcatggggatctgccggattttg

SEQ ID NO: 7424 - DNA, 1502 bp, Zea Mays
gcctgcttcttcaacatcatcatctcctcctccgatgctgcttacctctcagtcctcaccactcccctcatggtgaatgacccttctggcagttttcccaaatcaagtctgaatcgagcacttcagttgagagtagtcactctggagtagagcaatggagaattcatttgcacctctacatattcaagaaatcccttgggaaactcaaccacaggtgtcaagtgggttgaagctttgggaaggttcattagacttggtgaaggccctgaattctgatatcaaagaatataaattgcgtgtagaaggcaaacacgtattagagcttggatgtggacatggactccgtggcatttttgcaggtctcaaggcaggcaagagcgctccacattcattaaggcatacattcgtagatggaagcataagtgaactatttgagtattgtgatttagtgcttgctcgttcgtggagtatagtgaactacatcataagctgtagcattcatcgatccagatccaaacgtccttcggactcttccttctgcatttgtgtggagtggggattcatccggccttcttctcttgcagatgaaaagcgtcatgagaaaggcaaagctgagtttaagaaggttgtagaatcactgggacatgtaatactcgggtggcgtctggttccgactgacaactcagacttgggtgaatctgcactcgagactgagccagtcattgagcaggttttcgttaccaagagctcaagatcagaggctgagtttgagcaacaggaaaggtgccatttttacccagcggctgcctcgccaccaaattaaaggttgcattttgtctccggtctcaccattcccattttattctccgcgtgttgctgcctgctccagggcggcggtgggcatgctgctcggcggcgaggacatgcacaggttcccggtgcgctccccgcggatggaccgcggcgacctcatctgcagtcccgccgcgcggcagatcgtgtccaactacttcagcatgttcgggccggtgcaggacgtgcgcatcccgtaccagcagaagcacatgttcggcttcgtcaccttcgtgtacgccgagacggtgaaggtcatcccaagcaagggcaacccgcacttcgtgtgctacgcgcgcgtgctcgtcaagccctacaaggagaagggcaagatccccggcaggttcaggaagctgcagcacgcgcaccatggcggagccgagttcggcgattgcgcgtcgcccaccagattgctggatttcagggacccctacgccctcctgcttctttcaggtgcccaggttttctcctgggcatgaagccattgggctatgatgtgtgaggtgcatagagcaaaaaaaggggaaggggggccctccattcctctaatctgggagggactactaatatggctacatgatggccggccctatcaaccgagcgtagagaagctttgacaaagaaaaaagaaatacctttggagaggtgta

SEQ ID NO: 7425 - DNA, 2705 bp, Zea Mays
cgcctccgcccgcccgcacgccagaaacctcgccgcaggaaaccgccgaccctaccacccgcccaccctaccgccctaccgcccgcccgcaaatccttccgccgcgaaccgcccaaccactcgctcccacgccgcaatcccaccgcgaaagccgcgaacccgacgccttccaccatcccgccggccgggcggcttctggggccaccccgaggacggccaccgctcgggcgacgcgaccttcaagggagggccccacgacgcgcgcctcaaggccttcttcgtctgcaacacccacatgtagccggctcgacgttctccgctaattcgcttggacgcctcgccggccggagggaaaggaagagtcggagtagcctgcccggctgggaaccgacagcttctccgtttcagaagcacgcgggcggggaggtggggtcgggagatcgcggggtgctcctttgtctccagggcagaggagaaacgcgcacggctggggaagaaccgaagaaggaagaggaaggtgccggtggaccaaacacggatctttcagtggagttcgggaagagtactggcacgcacgccaaggttgcatctccgccgtccaccacgaagcgcacgcgaacccgacgccttccaccatcccgccggtcgggcggcttctgggaccaccccgaggacggccaccgcccgggcgacgcgaccttcaagggagctcggcatgttcgacggggaccccgcggccgagccgttcgggcgcctgggccccgcggacgtgtgctccagggagcaccaggacctggcgctcgacgcgccgcgccagggcgtcgtgctcctcaagaaccggagcggtgggtggctacacccatactttgcagctacacccatactttgcagttacttaattcggagcggtgggcggccgctccctgccccgctccatctcgccagagaaggcaaagatctagctgccaagttctggcagctctctctgtgtgaatcaaacgatacgtacaggtagatgtattggtgggcctgcttcttcaacatcatcatctcctcctccgatgctgcttacctctcagtcctcaccactcccctcatggtgaatgacccttctggcagttttcccaaatcaagtctgaatcgagcacttcagttgagagtagtcactctggagtagagcaatggagaattcatttgcacctctacatattcaagaaatcccttgggaaagtgagtacatctgacgtgtttgatgtcaaagactctgatttggtcccaggaaaatatgaaggtgtcaagtgggttgaagctttgggaaggttcattagacttggtgaaggccctgaattctgatatcaaagaatataaattgcgtgtagaaggcaaacacgtattagagcttggatgtggacatggactccgtggcatttttgcaggtctcaagtggagtatagtgaactacatcataagctgtagcattcatcgatccagatccaaacgtccttcggactcttccttctgcatttgtgtggagtggggattcatccggccttcttctcttgcagatgaaaagcgtcatgagaaaggcaaagctgagtttaagaaggttgtagaatcactgggacatgtaatactcgggtggcgtctggttccgactgacaactcagacttgggtgaatctgcactcgagactgagccagtcattgagcaggttttcgttaccaagagctcaagatcagaggctgagtttgagcaacaggtaattccataccacttgagatgaggcaaccgacttttctggtcaccttgtaatgctgacactattaggcacaaatgagggaaatgtactgccacattaggcacaaagtagtgtatattgctaggtgcttattcctagaccatgctctgcttttagtttgtatttctcttatttttcttagggtgtgtcgttagctgtttccttcctgtaatcctgtgtagcgtaggaggcttacctgctctgtaagcttccttgtattgttctataaatgctttaatacagtcaggtattatcaagaaaacaaaaagaaaagaaacagatggctactttgagggcggcggtgggcatgctgctcggcggcgaggacatgcacaggttcccggtgcgctccccgcggatggaccgcggcgacctcatctgcagtcccgccgcgcggcagatcgtgtccaactacttcagcatgttcgggccggtgcaggacgtgcgcatcccgtaccagcagaagcacatgttcggcttcgtcaccttcgtgtacgccgagacggtgaaggtcatcccaagcaagggcaacccgcacttcgtgtgctacgcgcgcgtgctcgtcaagccctacaaggagaagggcaagatccccggcaggttcaggaagctgcagcacgcgcaccatggcggagccgagttcggcgattgcgcgtcgcccaccagattgctggatttcagggacccctacgccctcctgcttctttcaggtgcccaggttttctcctgggcatgaagccattgggctatgatgtgtgaggtgcatagagcaaaaaaaggggaaggggggccctccattcctctaatctgggagggactactaatatggctacatgatggccggccctatcaaccgagcgtagagaagctttgacaaagaaaaaagaaatacctttggagaggtgta

SEQ ID NO: 7426 - DNA, 2137 bp, Zea Mays
ccacagcaatccttcaccatcctaagctagccaagcatgtggaggctaaagatcggcgagaggccaagcaacccgctgcttcgctcgcccaatggcttccttgggagagaggtgtgggagttcgaccccgccgcaggcacgccggaggagcgcgccgaggtcgataggctgcgccaggagtacacccgcaaccgcttcacgcgacggcaatgcagtgaccttctcatgcgcatgcagtatgcaaaacagaaccttcataatacaaaccttccggctatcaagattgaccaggattcagacgtcacagaagaaactatactaattacattgaggcgtgctcttaatcaatattcttctttgcaaggacctgctgggcattggcctggggattacggcgggatttcgttcattttaccactcatgatgataggtgtatacgattgggctgggaacaatgcaatcattcctgagttatggatgcttccacattttctcccaattcatcctggaaggttttggtgcttttgtcggatggtttacatgccaatggcttacatttatggaaaaaagtttgttgggcctatcactacaactattttagaaataagaaatgagctctacaatataccatataataagatcaactggaacaaggcttgcaattcttgtgccaaggaagaccttatctatgagccttcatggttgcaaagtattgcaatggcttatttgaataagtttatagaaccattatcaaatctttggccaatgaataagctacgagaaagagctatgagtgacctcatggaacatatccactatgaagatgaaaccagcaactatgttggcttatgccctataaacaaggcattaaatatgatatgttgttggatagaaaaaccaaactcaaatgaatttagacaacatctcccaaggattcatgatttcctatggcttggagaagacggaatgaagtcaaaggttatcaaaaacattcctgattacaagagctactaccgtgaaagaactaaaggttcttggactctatccaatggagaaaacttttggcctattgctgatacaactgctgaggcacttaaggcaatactgttgctgtctaacattccttcagaacttgtcggggatccaataaaacaagaacgactatatgatgccgttgattgcctcctttctttcgtgaacaaagatggtacattatcatcagctgaatgtaaacgaacaacttcatgggtggagtttatcaatccttctgagagttttcgtaatatcatcgtcgactatccatatcctgaatgcacatcatcattaattcaagctttagtgctgtttagaggcaagcatccaatatatcgtcgtgatgagatagacaaaattatcaaaagtggtgcatcattcattgagaaagtacaacgaaaggatgggtcctggtatggttcttgggctgtgtgtttcacttatgcaacattctttgctataaaaggattagttgctgcaggaagaacataccggaatagtttggctattaggaaagcatgcaacttcttgttgtcaaagcaactaggaaccggtggatggggagaaaactatcttggttgtcaaattgaggagtatgttgacagtggcagtccacatggagtcaacactgcacaggcgatgctagctttactctacgctgggcaggtcgaacaagacccagcgccactataccgtgctgcaaaagaattaattaacatgcagatggagaacggagaatttccccaacaagaaattgttggcaacttcaactcctcacttttcttcaattacccgaactaccgaaacttatttcccatctgggctttaggagaatttcgccgccgacttgttgcaaaaaaaggttaagatgggtatcttaagctatttctaataattgtatttgggatacaagtatccatgtatattttatttttcgtgatgatgggaatgtaacacaaaataaaatttatatttagtacgtatatgttaatatttgtaagattatcacaaacaagttgataatcatcagtgatctggttcctcaaattcaataacaaggatgcaaaatgtttggtagcaagaatactgcaatggaatggaatag

SEQ ID NO: 7427 - DNA, 2443 bp, Zea Mays
cagcaatccttcaccatcctaagctagccaagcatgtggaggctaaagatcggcgagaggccaagcaacccgctgcttcgctcgcccaatggcttccttgggagagaggtgtgggagttcgaccccgccgcaggcacgccggaggagcgcgccgaggtcgataggctgcgccaggagtacacccgcaaccgcttcacgcgacggcaatgcagtgaccttctcatgcgcatgcagtatgcaaaacagaaccttcataatacaaaccttccggctatcaagattgaccaggattcagacgtcacagaagaaactatactaattacattgaggcgtgctcttaatcaatattcttctttgcaaggacctgctgggcattggcctggggattacggcgggatttcgttcattttaccactcatgatatttgcattacatgtcacacgatcaatggatgaagttttgtcaatagagcatatacgtgagatatgtcgctacatttataacatgcagaatgaggatggaggctggggaacacataccttgggaccaagctccatgtttggcacatgtgtaaactatgcaaccttaaggattctaggagaggtgcttgatggagaaaatgatgcattatccaaagggcgttcttggattttgtctcatggaagtgcaactgcagcaccacaatgggcaaagatatatctctcgatgataggtgtatacgattgggctgggaacaatgcaatcattcctgagttatggatgcttccacattttctcccaattcatcctggaaggttttggtgcttttgtcggatggtttacatgccaatggcttacatttatggaaaaaagtttgttgggcctatcactacaactattttagaaataagaaatgagctctacaatataccatataataagatcaactggaacaaggcttgcaattcttgtgccaaggaagaccttatctatgagccttcatggttgcaaagtattgcaatggcttatttgaataagtttatagaaccattatcaaatctttggccaatgaataagctacgagaaagagctatgagtgacctcatggaacatatccactatgaagatgaaaccagcaactatgttggcttatgccctataaacaaggcattaaatatgatatgttgttggatagaaaaaccaaactcaaatgaatttagacaacatctcccaaggattcatgatttcctatggcttggagaagacggaatgaagtcaaaggtgtatgttggttgccatagttgggaaactgcgctcatagttcaggctttttgctcaacagggctcaccgaggagttttgttcgactcttcaaaaagctcatcagttcttaaaaaatgcacaggttatcaaaaacattcctgattacaagagctactaccgtgaaagaactaaaggttcttggactctatccaatggagaaaacttttggcctattgctgatacaactgctgaggcacttaagaacaaagatggtacattatcatcagctgaatgtaaacgaacaacttcatgggtggagtttatcaatccttctgagagttttcgtaatatcatcgtcgactatccatatcctgaatgcacatcatcattaattcaagctttagtgctgtttagaggcaagcatccaatatatcgtcgtgatgagatagacaaaattatcaaaagtggtgcatcattcattgagaaagtacaacgaaaggatgggtcctggtatggttcttgggctgtgtgtttcacttatgcaacattctttgctataaaaggattagttgctgcaggaagaacataccggaatagtttggctattaggaaagcatgcaacttcttgttgtcaaagcaactaggaaccggtggatggggagaaaactatcttggttgtcaaattgaggagtatgttgacagtggcagtccacatggagtcaacactgcacaggcgatgctagctttactctacgctgggcaggtcgaacaagacccagcgccactataccgtgctgcaaaagaattaattaacatgcagatggagaacggagaatttccccaacaagaaattgttggcaacttcaactcctcacttttcttcaattacccgaactaccgaaacttatttcccatctgggctttaggagaatttcgccgccgacttgttgcaaaaaaaggttaagatgggtatcttaagctatttctaataattgtatttgggatacaagtatccatgtatattttatttttcgtgatgatgggaatgtaacacaaaataaaatttatatttagtacgtatatgttaatatttgtaagattatcacaaacaagttgataatcatcagtgatctggttcctcaaattcaataacaaggatgcaaaatgtttggtagcaagaatactgcaatggaatggaatag

SEQ ID NO: 7428 - DNA, 2482 bp, Zea Mays
cacagcaatccttcaccatcctaagctagccaagcatgtggaggctaaagatcggcgagaggccaagcaacccgctgcttcgctcgcccaatggcttccttgggagagaggtgtgggagttcgaccccgccgcaggcacgccggaggagcgcgccgaggtcgataggctgcgccaggagtacacccgcaaccgcttcacgcgacggcaatgcagtgaccttctcatgcgcatgcagtatgcaaaacagaaccttcataatacaaaccttccggctatcaagattgaccaggattcagacgtcacagaagaaactatactaattacattgaggcgtgctcttaatcaatattcttctttgcaaggacctgctgggcattggcctggggattacggcgggatttcgttcattttaccactcatgatatttgcattacatgtcacacgatcaatggatgaagttttgtcaatagagcatatacgtgagatatgtcgctacatttataacatgcagaatgaggatggaggctggggaacacataccttgggaccaagctccatgtttggcacatgtgtaaactatgcaaccttaaggattctaggagaggtgcttgatggagaaaatgatgcattatccaaagggcgttcttggattttgtctcatggaagtgcaactgcagcaccacaatgggcaaagatatatctctcgatgataggtgtatacgattgggctgggaacaatgcaatcattcctgagttatggatgcttccacattttctcccaattcatcctgtttgttgggcctatcactacaactattttagaaataagaaatgagctctacaatataccatataataagatcaactggaacaaggcttgcaattcttgtgccaaggaagaccttatctatgagccttcatggttgcaaagtattgcaatggcttatttgaataagtttatagaaccattatcaaatctttggccaatgaataagctacgagaaagagctatgagtgacctcatggaacatatccactatgaagatgaaaccagcaactatgttggcttatgccctataaacaaggcattaaatatgatatgttgttggatagaaaaaccaaactcaaatgaatttagacaacatctcccaaggattcatgatttcctatggcttggagaagacggaatgaagtcaaaggtgtatgttggttgccatagttgggaaactgcgctcatagttcaggctttttgctcaacagggctcaccgaggagttttgttcgactcttcaaaaagctcatcagttcttaaaaaatgcacaggttatcaaaaacattcctgattacaagagctactaccgtgaaagaactaaaggttcttggactctatccaatggagaaaacttttggcctattgctgatacaactgctgaggcacttaaggcaatactgttgctgtctaacattccttcagaacttgtcggggatccaataaaacaagaacgactatatgatgccgttgattgcctcctttctttcgtgaacaaagatggtacattatcatcagctgaatgtaaacgaacaacttcatgggtggagtttatcaatccttctgagagttttcgtaatatcatcgtcgactatccatatcctgaatgcacatcatcattaattcaagctttagtgctgtttagaggcaagcatccaatatatcgtcgtgatgagatagacaaaattatcaaaagtggtgcatcattcattgagaaagtacaacgaaaggatgggtcctggtatggttcttgggctgtgtgtttcacttatgcaacattctttgctataaaaggattagttgctgcaggaagaacataccggaatagtttggctattaggaaagcatgcaacttcttgttgtcaaagcaactaggaaccggtggatggggagaaaactatcttggttgtcaaattgaggagtatgttgacagtggcagtccacatggagtcaacactgcacaggcgatgctagctttactctacgctgggcaggtcgaacaagacccagcgccactataccgtgctgcaaaagaattaattaacatgcagatggagaacggagaatttccccaacaagaaattgttggcaacttcaactcctcacttttcttcaattacccgaactaccgaaacttatttcccatctgggctttaggagaatttcgccgccgacttgttgcaaaaaaaggttaagatgggtatcttaagctatttctaataattgtatttgggatacaagtatccatgtatattttatttttcgtgatgatgggaatgtaacacaaaataaaatttatatttagtacgtatatgttaatatttgtaagattatcacaaacaagttgataatcatcagtgatctggttcctcaaattcaataacaaggatgcaaaatgtttggtagcaagaatactgcaatggaatggaatag

SEQ ID NO: 7429 - DNA, 2483 bp, Zea Mays
gcaatccttcaccatcctaagctagccaagcatgtggaggctaaagatcggcgagaggccaagcaacccgctgcttcgctcgcccaatggcttccttgggagagaggtgtgggagttcgaccccgccgcaggcacgccggaggagcgcgccgaggtcgataggctgcgccaggagtacacccgcaaccgcttcacgcgacggcaatgcagtgaccttctcatgcgcatgcagtatgcaaaacagaaccttcataatacaaaccttccggctatcaagattgaccaggattcagacgtcacagaagaaactatactaattacattgaggcgtgctcttaatcaatattcttctttgcaaggacctgctgggcattggcctggggattacggcgggatttcgttcattttaccactcatgatatttgcattacatgtcacacgatcaatggatgaagttttgtcaatagagcatatacgtgagatatgtcgctacatttataacatgcagaatgaggatggaggctggggaacacataccttgggaccaagctccatgtttggcacatgtgtaaactatgcaaccttaaggattctaggagaggtgcttgatggagaaaatgatgcattatccaaagggcgttcttggattttgtctcatggaagtgcaactgcagcaccacaatgggcaaagatatatctctcgatgataggtgtatacgattgggctgggaacaatgcaatcattcctgagttatggatgcttccacattttctcccaattcatcctggaaggttttggtgcttttgtcggatggtttacatgccaatggcttacatttatggaaaaaagtttgttgggcctatcactacaactattttagaaataagaaatgagctctacaatataccatataataagatcaactggaacaaggcttgcaattcttgtgccaaggaagaccttatctatgagccttcatggttgcaaagtattgcaatggcttatttgaataagtttatagaaccattatcaaatctttggccaatgaataagctacgagaaagagctatgagtgacctcatggaacatatccactatgaagatgaaaccagcaactatgttggcttatgccctataaacaaggcattaaatatgatatgttgttggatagaaaaaccaaactcaaatgaatttagacaacatctcccaaggattcatgatttcctatggcttggagaagacggaatgaagtcaaaggtgtatgttggttgccatagttgggaaactgcgctcatagttcaggctttttgctcaacagggctcaccgaggagttttgttcgactcttcaaaaagctcatcagttcttaaaaaatgcacaggttatcaaaaacattcctgattacaagagctactaccgtgaaagaactaaaggttcttggactctatccaatggagaaaacttttggcctattgctgatacaactgctgaggcacttaaggcaatactgttgctgtctaacattccttcagaacttgtcggggatccaataaaacaagaacgactatatgatgccgttgattgcctcctttctttcgtgtttatcaatccttctgagagttttcgtaatatcatcgtcgactatccatatcctgaatgcacatcatcattaattcaagctttagtgctgtttagaggcaagcatccaatatatcgtcgtgatgagatagacaaaattatcaaaagtggtgcatcattcattgagaaagtacaacgaaaggatgggtcctggtatggttcttgggctgtgtgtttcacttatgcaacattctttgctataaaaggattagttgctgcaggaagaacataccggaatagtttggctattaggaaagcatgcaacttcttgttgtcaaagcaactaggaaccggtggatggggagaaaactatcttggttgtcaaattgaggagtatgttgacagtggcagtccacatggagtcaacactgcacaggcgatgctagctttactctacgctgggcaggtcgaacaagacccagcgccactataccgtgctgcaaaagaattaattaacatgcagatggagaacggagaatttccccaacaagaaattgttggcaacttcaactcctcacttttcttcaattacccgaactaccgaaacttatttcccatctgggctttaggagaatttcgccgccgacttgttgcaaaaaaaggttaagatgggtatcttaagctatttctaataattgtatttgggatacaagtatccatgtatattttatttttcgtgatgatgggaatgtaacacaaaataaaatttatatttagtacgtatatgttaatatttgtaagattatcacaaacaagttgataatcatcagtgatctggttcctcaaattcaataacaaggatgcaaaatgtttggtagcaagaatactgcaatggaatggaatag

SEQ ID NO: 7430 - DNA, 1726 bp, Zea Mays
cacatgcaggcaggcaggcaggcaaggcaactgaaacggggcgctccgtttcttctctcctttctcgagagagaacctagagagaacccgggatggggaacatctgcggcggctgcgggaaggacagggtcgccgaggatttcaggccgtctagcccagggacgacaatgacctccaagacgagcggcagcataaccaccaccagtcagagcaccacggggaagctctcctccgtgggcagcagcttcatggcgtccgccggcagccgcagcaccagcggcggattcgacgagggggccaagtaccccgacggaggccagatcctggaggcgcccaacctccgtaccttcacattcatggagctcaagacggccaccaagaacttcaggctcgacagcgtcctcggcgaaggcgggttcgggacagtctacaaagggtgggtggacgagaagaccatgaccccgaccaggaacggcaccggcatggttgttgccgtcaagaagctcaactcggagagcatgcaggggtacgaggaatggcagtcggagataaattttctaggaaggctctcccatccgaacctagtgaagctcttgggctactgctgggaggacagagaactgcttctcgtgtatgaattcatggccaaagggagcttggaaaaccatctattcaggagaggatgcgccccgttgtcttgggaactgaggctgaagatagccatcggcgcagctcgaggactcgcattcttgcatgcatcagaaaagcaagtgatctaccgtgacttcaaggcgtccaacatacttttagatgcgaactataacgctaagctctctgattttggccttgctaaacttgggccgactggtagcaagtcacatatcacaaccagggtgatgggaacgtatggctatgcagctccagagtacgtagcaaccggccatttgtacgtgaagagcgacgtgtacggcttcggcgtggtgatgctggagatgctgtccgggcagcgcgcgctggacccgaaccggccgaacgggcagctgagcctggccgactgggcgaagccgttcctggccgaccgccggaggctggcccggctcatggacccgcggttcgaggggcagtacaactcgaagcaggcgttccaggcggcgcagctgacgctcaactgcctggccggcgagccccgcagccggccgtcgatgaaggaggtggtggagacgctggagcagatcgagtcggtgaagagcagggcgcgggaggcgcgcggcggctcgtcgcgggaccggcaccacggccgcgccggcgcgacgcaccagcggtcgccgcgcgccggtggcgagccgcgcggccgcggtgggtcccgggccgccgccaacggccacgccgccagggccgccgcgcggtgacgcgtccagacgatgacgattcttcatgtaaatggcgttttttttttgcctaatctgtgtgcctctccttctgcttgtggtgtttgtcatggctcacgaggttgttcttgcccaatcattgatgagatgtattattattataagattaattagcagtgaatttgagaagggatgggtgttgttgcaagttgtagccagtagtgcaatgcaatagtagaagaaaggatcaatcatccagaatctgtaattattctaaatcaaattgtattttggaatagagggagtagttatcagagataaacaagaacatgagaaaa

SEQ ID NO: 7431 - DNA, 1409 bp, Zea Mays
ctcgactctggggtctggaactctggactcttccaccgaactgccccgctctctcttgactagcgcagtcgcacgctcgacggctcgagtaaacaataaactactaaaaaaatgcgcacaaaataaaaccgctggcgaaccaaaaaataagaatccccaaagctacctctcctgccgctcctcccctctcatgcctcctcccctcgctgccgccgccgccgccgccgttgagagaactaggaccacgggcgggtggagcactggcatcctgcggactcgccgccgctccacgggcgcaggcgctagccgtcgcggggtcgctctgtgagccctggtcggtgctggggggttcggcggcggtctggtagacgggcggtggcgggcgatggcgccggcgaagaggaagcgcgcagcggctgcggcggccgcggcggcggctgccgcggccaagtggaaggtaggggacctcgtgctcgctaagatgaagggcttcccggcctggccggctatgattagtgaaccagaacagtggaagatgccttctactaaaaagaaaccgctggtctatttctatggtactaaacagatgcatacattctcatctctggcgttgaaagaactgaaccatagaaaaattaaggacagaagcacttctccagattcaatgccgatgaaagaacttatagctgtggcacaagctagaaggttttctcgactgacttcctttccagatatcttcctaaatgccaagtatattcctgaaagagccacaaatacacctcccaaggaaggctcacacaggcagttgtcaccctcaaatcggatattcaggtccacctctggaaatgataatgttcattctaggagtccttttgatattatccaacagaagaaattagcagggcatgttgaagccaatgcagcacgaaggtctttcaaagatttcctcagtacattgacaagaaccaaagaaagtatatcacgcgcgacgcgtcttgctattgagtgtgctaagtttggcattgctggtgaggcaattgacattatcgttgaacacttggaaaaggaatcaaatttatataagagggtggatctcttctttcttgtagattcaataacacaatgctctcgcaaccagaaaggtggagctggagatgtatatccctctctcattcaggcagttctacctcgaatactctatgctgctgcacctcctgggaactcagcatgggagaatcgaaagcaatgcctaaaggttttgaaactttggcttgaaaggagaacactttcagaatatattatccgtcaccatattaaagaaattgagactatcatgaggcatcatttggaagttctcgccgtccttcatgcccggggagagctctaaatgaccctttgcgagataatga

SEQ ID NO: 7432 - DNA, 1604 bp, Zea Mays
aaccctaataacatttcctactcctgccggatcagactagcgagccaagccaccgacggccgacgtcgagcctccgcggccgagcctccgcctagcaccaactccgtcgtcgatcgtcctatgcgaccacgcccccgtccgccttccgtctcctgcctccactgagtcgcgggcgcgacatcggggaacgccaaggctgagcttcgcccgggccaggagcttctcccggcagacccacccccgcccaacggagctccatgcctccgcccagggccattgtccgagctacgccccacgctcctgtccagtgccctggccacttagatggttctgctcagtcatgtttagtgtctggttcaacaacttcaacttcaaccaagggacgcatctatcacaagacgtatggttgccaaatgaatataagtgacatggagattgtgctttctatcatgaaaaatgaaggttatattgaaattgttcctcatcctgagagtgcatataatatttatcaacacctatgacatctaggacaatgtagataatatttatcaacatgatactgatgtatccttaatccttactgttctccatatattactcccatggtacattgttgctctggagattttcttacctatgctgttatgatcataactagaatgaccaattcgttgaacaggagtgcaagaaacttgtcattgttcacctatccgagagtattttgttgttctaaggaatttaaaactgcttgttgttccactatttgaactctgcaacaatgttcaggtgatgcagcattcatagtctcgttgtcgatggtgtccggctgaaactttggaaactttacacatccattgagttctcgatctgggagcagtaaatttatcttttttgaagtagagattgtacatggcattcttgttttatctattttgtttcgattaaccttgtttgtcttaaactgcttacattccatatataggttactgcctccattctacagggtattgctagtatgatgattgaaatacacaatttattgatattcagacttaatatattcttgtgagcctttccagccataactgttgtacatggttttccttcttttgtttggccataaccagtgtgtgctaatattgtatattgtgtcatgctttcaagtttcaagaatttattaagattttgtttctaaaacctgtttcatgtacattgatgcagcgatacgggtctgccatctctatatgacatttggctgtaaatggattatgatcatagttgaataagttggagcgtcaggtcaatggtccccccaataattaaactagatggtggagtggagctttgttttgggatgatgcaagcaacttttatgtttcagaacattgtactcaactgatgcttgtggccgttgaacctattctacttacttttggatttaagttaaggatagttaaaaatatttgatgtttaatacttgtgttggatgttttatgtgtcaattctatgtggatgctagaaaagttgtgtacactcatgttatttgatgaaattgtatgcacgatttggtttgaattcaattgaatattgatttttattaatta

SEQ ID NO: 7433 - DNA, 943 bp, Zea Mays
gcctgaacgttagtcgtcgtcttccaaaatccaaaccgctcgctcctcaccgaagacgccattagccatgagcagcttggcttatccgctcctccggctcccgtgccgctgctctatcgcgccggcgccggcgccggcgtctcagctccccgcaccggtgtgtctatctgcttcggcttccgcaaatgcagggggcgatctgacggcgcgggaaaagcgagcgcagcgtcgggaacggcgggagctgcgtgcgacggactggaaggaggaggtgcaggaccggctgatccacgagccagcgcggcggcggaagaagcctcctaagcgttcgtggagggaggagctcaacctcgacctcctcgccgagctggggccgcagtggtggctcgtgcgcgtctccatggcgcccggcaccgactacgtcgacctcctcaccaaggctatctcacggcgctactcggaagtccccttcaagatttacaatccatcaatccaagtaaagaggagattaaaaagtggtgcaatcagtgttaaatcgaagcctctgcatgccgggttggtctttctgcattgtaccttaaacaaggagcttcatgactttatcagagacacagagggttgttatggctttattggagctacagttggttcaatgaatcttgtgtttatgtatcacagtagccgataactttttatcaacaacccagatctccagctgggcctgagtgaatgaagcaggaacttcagtgggtgggcagtggaccgttgaagacccagctatcagcaagagaaacagttagcacacctgcgcatgagctaccgtcaaaattaaccatttataaacaatgaggatgctgaggttagaaagctcgctgatttccactaggctgttcacattattttccctgtgctcgaatgcagaaagcagtcccttaggccattc

SEQ ID NO: 7434 - DNA, 748 bp, Zea Mays
ccaccggtactgagtggcccagcgagcagctccggccggtacacggaatccgggcacccacggtttccaccaaagcgacgcgccccgcgacatggcggtggtgcgcctgcgcgtatctccacgcctccgctccattcccctcctgctctcccagccagacgccgctacagtccggcgtagtttcgcctgcgccagcgcctcccaagcccccgcacccgcgcgggctatggcggccccgtcctcctcatccgcgacgccctccccgtacacgacgctcgtcgggcgcgtgagctgcgagcgcgagatcaagcgcagcaagttcatcgccatcgcggccccggtccccaacgagcgtgccgccatggccttcctggatcaggtcaaggatccacgtgctacccataattgctgggcatacaagctgggagatcaattccgttacaacgatgacggtgaaccttctagtacagctgggaagccaatatactctgccatcatttcctctggcattgataaggtcatggtggttgtgattagatattttggaggcataaaactgggaaccggtggactggtgagggcttatggtggggttgcttctgaatgtcttaaagatgctcctacttgtcttgtgaaaccaaaggctcgtgtgggtatggaagtaccatttaatctgttgggaacagtctatcatcaggtccgctgttgccccccttcccttttctcctaaaggatggttagccctagg

SEQ ID NO: 7435 - DNA, 1203 bp, Zea Mays
cacggtttccaccaaagcgacgcgccccgcgacatggcggtggtgcgcctgcgcgtatctccacgcctccgctccattcccctcctgctctcccagccagacgccgctacagtccggcgtagtttcgcctgcgccagcgcctcccaagcccccgcacccgcgcgggctatggcggccccgtcctcctcatccgcgacgccctccccgtacacgacgctcgtcgggcgcgtgagctgcgagcgcgagatcaagcgcagcaagttcatcgccatcgcggccccggtccccaacgagcgtgccgccatggccttcctggatcaggtcaaggatccacgtgctacccataattgctgggcatacaagctgggagatcaattccgttacaacgatgacggtgaaccttctagtacagctgggaagccaatatactctgccatcatttcctctggcattgataagatattttggaggcataaaactgggaaccggtggactggtgagggcttatggtggggttgcttctgaatgtcttaaagatgctcctacttgtcttgtgaaaccaaaggctcgtgtgggtatggaagtaccatttaatctgttgggaacagtctatcatcagctacaacatttcgaagctgaagatatcaaacaggactatgacactggaaaagatggtaccgttatggtcatgttcgaagtggaatatgaaaaaattgagaatcttggaaatgcagtgaactcagcttgcagtaggaagatagaactatatctataaaccacaatcacgggttaaggatgagtgtaagtgtggagacacgcaatcgtatgtacttgcaagcctctagttcttattcatttgcatcgatatttattctggaatctccatggttttttttttcaccaagcatgtaggcaccagaaatattcagcgccttatccaagctaactgctagagtgctaggccatattgaactgctccagtgtaaactgtacagtcatctatcttttgaatttcaccatggtaattgtttcatgaccttttttttattatttgttttggttcattgtgttgacatgatggatggtatcttttctttaatatcagtcttcacggtaagccaccaatattttgatcttgagggacattcttgccttccaaatgtttttgtagctactattatgttctgaacgacatcggtgttc

SEQ ID NO: 7436 - DNA, 2540 bp, Zea Mays
ggaatttctggccatatccgaagcatataacttccttatctttatagatcctgtacgcggccagcggcggaaatctctccgagagccctcgcgaattgaagctgctgggcacggctatctagctgtatcgctcgtcgagtcaactccccgcgcgcgtcgtctcgttcgagttctctcgcatctcgatcgggtgcgctacacgtagacgtagcgtccgctgatacataaaccgcacggcggaagctgctcggtgctctccctactagttccaaaaggaagcaaggaagatagcatcatcgatcgtgtcatgagaccggcggaaggcgcggcgcggttggtttgcctgctcctgctcgccgccgtggccgcggggcacgccggcgtgcagccgctggcgcgcatcgccatccaccgcgcccgcttcgcgctcgacgcgtccgccgccgtgcgggcctcgccggagctgctgggaaccaagggcgaagatactgcctgggtgaaggtagaccttgttactccccatccaagtgccgatgattgggtcggcgtgttttctccttcgaagttcaacgcgtccacatgccttggttctcacggatctggcccaggccctgtgatatgctcggctccaataaaggtccgtcagacgagaacaatatcagttcgccaactattcgtcgggctacggggagtccgggaaaggcgcgctgcagtttcagctgatcaaccagcggcaggacttctcgttcgcgctgttcactggcggactctcgaatcctaagcttatcgcagtatcgaacgccattgctttcgcgaacccaaaggctccagtctacccacgcctggcgcaagggaaatcctggaacgagatgactgtgacgtggacaagtggctacgagagcgacgaggcgtacccgtttgtggagtggggaatgaaatggagccccccggtgcgcagcgcagctggcaccgtcacttttgaccgtgaaagcgtctgtggagagcctgcccggtctgtcggctggagagatcctgggttcatacacacagccttcctcacagacttgtggccgaacaaagagtactactacaagatcggccatatgctgccagatgggagcgttgtttggggcaagctatcttccttcaaagcgcctccgtttcctggccagaagtcactgcagcgcgtcgtcatcttcggagatatggggaaggccgagagggacgggagcaacgagtacagcaactaccagcccggatcactcaacaccaccgacacccttgtcaaggacctggacaacattgacatggtgttccacatcggtgacatcacctacgccaacgggtacatctcgcagtgggatcagttcacgcagcaagtggaggagatcacctcgcgggtcccttacatggttgccagcgggaaccatgagcgggactggcccaacagcgggtccttcttcaacggcaccgactctggaggggagtgtggcgtggtcgctgagaccatgtactacacacccacagagaaccgagcaaactactggtactcggcagactacggcatgttccggttctgcgtggcggacagcgagcacgactggcgggaaggcacggagcagtacgagttcatcgagagctgcctcgccacggtcgaccggaagaagcagccgtggctggtgttcatcgcgcaccgcgtcctcggctactcctccggcttcttctacggcgtcgacggctcgttcgcggagcccatgtcccggcagagcctccagaagctctggcagaagtaccgggtggacctggcgttctacggccacgtccacaactacgagaggacatgcccggtctacgaggaacaatgcatgagctcggagaaatcccactactcgggcaccatgaacggcaccatccacgtcgtggtcgggggcggcggcagccacctcagcaacttcaccgcccaggtcccgccgtggagcgtgtacagggagatggactacggcttcgtcaagctcacggcgttcaactactcgtccctcctctacgagtacaagcgctccagcgacggccaggtgtacgacagcttcacgatgcacagggagtacagggacttgctggcgtgcgtcaaggacagctgccctccgacttcgccagcgacgtgacatgcattgcagccgcgcgtgaggagcagaggggggacaggggtcgcttctgtgacagtgggttaggttccacttcggcgtgtaactgtaactgtttaattaggtggtcgagcgagacccacattataaatcctacactcaataaagagcatgttgaccctgattagttggcttacaggtaaggagctaagagcagccctgtcacatcagcaatttggtgatatggcaataaaattaacgaggaagaggaggaaatggtttccagcatggtctacacttgtaactaagacacaaaaaaccattattttagcattggggaccagcacctagtttccatctctggagtccacatgccagacttatcacacccagatttag

SEQ ID NO: 7437 - DNA, 1155 bp, Zea Mays
ttgccccctcacttcgcgtgctccattcccatctcccccctccctgcgcgcagccgcacaccaccaacacctttcaccagacgccgccgccgccaccccccatccctgtcccgtcccgcgcgcggccgccacatccgtccgggcatcctcgtctccccagccccgctgccgcagggttcatcagcagaagctgcttgcaccgccgccgccgccctcttcctgttctactggtacgctcgctcacttgcatcggtttcttctcttcccacgcttctattcagagcataacagttgctaatccccttgttgcgctagcttaatcttagattttgcttcgggttcggctaaatttcgtcggatggatatcgatgccagcgccagcgtcatgtgccagctgctgagccccgagggagaccctctaggctctgcgctctatctgccccagaacgtcgggcccccgcagctccaggagattgtcaatcagctcctccacaatgaggagaagttgccctatgcattctacgttggagacgaggagctctctgtctacctgggtgcttacatgcggcagaagaacgccaatgttgaggttactctgcgcatagtatgccaaccacaagcacttttccggatcaggccggtcaaccgatgctctgccacgattgctggccacacggaagctgtaattgctgtttcttttagccctgatggaaagagtttggcgagcggttcaggtgacaccactgttcgcttttgggacctgagtacacagactccactgttcacatgcaaaggacacaaaaattgggttctctgtattgcatggtcacctgatggaaaacatcttgttagtggtagcaagtcgggagaacttatattatgggacccaaaaactgggaaccaattgggcactccacttatgggacacaggaaatggattactgctgtatcatgggagccagttcatttgcagtctccgtgccgccgctttgtaagtgcaagcaaggacggtgatgctcgcatttgggacatcaccacaaggaaatgtgttatttcccttacaggtcacactagttcagtgacctgtgtcaagtggggtggagatggtttgatttatactggtaggatcaagttgtgtcttcatcatagattcat

SEQ ID NO: 7438 - DNA, 2536 bp, Zea Mays
cctgatcttgccgggaaccgtgtacctccgcctctgtcctctctccaccgatgaagggaaagcagaagcttcttttccccttcctccaaaaaaggcatcaaaattctttgctaaaaaaggcttcaaaattctccgcttagggaaaaaaacttgattaggagcaatccatcgtttctttactcctcgatcgagagccccattcgttaggggttagggtcgtagcgagggctctgaaattggaatcccaacagaggaattacacccgctttgggacttcggagaagggaatgtcggcaaccatcgaccggctcgcgacaccgagtcatgagggtcgtgcacacagtgacgaaaagcgagagtgcaattctgatgaagagaactcagaaggagaaagaaagcccaaaaaggattccttcaagaagagagcagttactacagggtatagatttaggcattccttaaggagaaagagtaaaacaaagaatgataaccatatagcctcaatagaagacataagagatgttcaagagctggagattgttgaaaggtttcgccagtgtttacttgatgatggtctgttgccagaacatcacgatgattatcacacgatgttgaggttcctgaaagcaagaaaatttaatattgacaaagcaaaacatatgtggtcagagatgcttagatggaggaaggaatttggtgctgacaatatagaggaatttgactacactgaattagatgaagttgtgaagtactatccgcagttttaccatggtgtggacaaagatggaagacccgtttacatagaactaattgggaaagttgataccaacaaactagtgcagatcacaactattgaccgctatttaaaatatcatgtcaaggagttcgagagatgtctccagatgaggtttccagcttgttctattgctgcgaaaaggcacatagactcgtctactacgatattggatgtgaaaggcgtgagcctaaagaacttcacaaaagatgcaagagagctaattatgcggttgcagaagatcaacaatgacaactatccagagaccttatatcaactgtacatcataaatgctggccaaggattcaagatattatggggtacaataaaatcatttcttgatccagaaaccgcttcaaaaattcatgtccttggaaacaagtaccaaactaaattacttgaaataatcgatggcagtgaactcccagaatttcttggtggcaagtgcaggtgtgaagaatatggaggttgtccaaaatcagacaaaggcccttggaaggaccctgaaattttcaagagggttatcaatggtgaggcaaactatggtcgacaagttcttgctgtatcaagcataaatcagaaggaagttggttgtactgaacacacaactgtggaagatgtttcttcttcaacggctttagtggatcccatcataagccctaatttgacccatgtggatgagttaaaatttcaaggacatgcttcctcatctgatgctcctcccattataggggatagcatccctgctgctggcaaggtcatggatgcatgctccaatccaagaaacagctcgacaccttccagctcaggttctttctctttgagaaatataccggcaacattgggaggacttaaaactcgaattgttgcatggtcaacattcgtaatcctgaccttgtcagcattcctctgttctgtgctgagcatagtgaccaaaaggctctcaaaccaggccatcacatgtgaccactatagtgctgacttccatcaaggatatatgggaaatggcacccttacatccgtattgacacggcttggtgagctggaggagaaggtacaagcacttgaagcaaagccaccccaagtgccatttgaaaaggaggaattgttacatactgctgtttaccgcgtggatgtgttggaagctgaactaatttctatgaagaaggccttgtatgagacattgattcggcaggatgagctgcttgcatatattgaccaacaacagacagccaaattttgtcggcagaagttctgtttctaagtactggagtacctgccacctattttcgtctctttggagatcgcatgcagctattgtggacccagtatacttgcaaatgttttcatatttgttgcagtgtaaagaaatgcaatttttagaaatacataggattgaggagcatggtagcttgtcttgagatcgtgttttagcgacaaaaacagaaaagcttgataccttgtacgcattttcaaccagatgcaggcgtaatctttccccagtatttggtgcaaggctccagtatttggtttgcttgtattatactatctctattctcgaatatttgtcatctgctagtttatttttaaactaaaacacgacaaataaaaagaacggagggagtatatgtctttgtttggggatgtaaatagagtggaactgtattttagaaaagaaagtgtttgatgaggctgtgagcagacgaaaaaaaagttcgttacatgtatgagtgtattggaaaa

SEQ ID NO: 7439 - DNA, 1536 bp, Zea Mays
cttgacaaaaaggctttcaaatctatgatatacttttccatatatttgggatatattggtctcatctattcaattggttcagttggttcactaattggagttttactataccaaagcaccctaaaggactatacttttcggagcatgctattatggggtcaagtgctctcaagtctggcaggaatgcttgatctggtgttagtgacccggctaaacctgaaaattggcatgccggattacttctttgcggtggctgataacacagtttcccaaatggttggtaggctccaatggctaccactacttgtgctttgctctaagctttgtcctcctggcaccgaagggacattgtatgcattactcatgtctctacaaaatgccgggttgctgatgtctgcttggtggggtggcctgctgctgcacatgctgaacgtgacccgattggagttcagtaacctctggatcgccgtcttgattagaaacatatcaaggtttgtccctttgatgctactgtttcttgttcctgactgtgatcagaactcagcactcctgcctgcagagatgcttcatggcagtgaatcaacagaaaccatggaaaaaggatcaaatgagttttctgttcttgttggagacgattgtggctgcatttctcctgatgtgacagttgataatgagcaaatcaaaatgtttgatgctgaaattgatgatgtcgaattgatcccactggttaacaagagcggattgaccatctcatgatgccttgaatgccaggatccttatgctgattctactagacattgttcggttattcccatcctatatagattggatgggattggaaaaaattgtgaggaattttgacttgcttgagatttaaacgcactcaattcccctcaatccaattgagatgaaaacgttttgccccctactgattctttccacctttgttgttgaagatgaggagacttttttactgcgacatgaacggtaaagggaattgaagaatttggtaatgaaggccgatgaattactgttacaggggtggtggtaccagtcatgtgctggagtactttagttggcaattcagttccttctgtcactgtcgccctagacgagcgactgactgaccacaaagtttcttgttacagaaagcccattacttatttaatttctttcttttgaaaggagaaaatatcgtgaaagtgtctctagctgagttggttaggtggtaatataatgaccccatccgatgctacaatactgctggcattgaagctaatgaccccaaaaatcaggtttggagtttaattttgaggggtacttttcccgacgacacaccatgccaggataggaccattctgcctctatttgctcagtattcaactcccccctgacaaaattgagaaactcccttgttgttcgagataaagaaatttccttccttttaggtatttagctttcaccagcttaaaccaagtttcatcagagcctttgacttttccatatccacttaattaatagatattactcatttgg

SEQ ID NO: 7440 - DNA, 1048 bp, Zea Mays
tccggcgcctgtagtggcggccggtcataacactagaccaagtgaatttccgaccaattaaaggaagctcacttagagcaagatcattgatgaagctacgaaatcttcccatcataactcggttgatgtgcaaggtgttgttcaggatagaaatggtcgaactgttgctacactatttggaaaatgggatgaaagcatgcactatgtaatgggtgattgctttgggaaaggcatgggaactgaacagttttcagaggcccatttgttgtggaaaagaagcaaaccacctaattttcccactagatacaatctcactcgctttgcaattacactgaacgaacttacccctggattgaaggaaaaattgccaccaacagactcaagattacgaccagaccagagatgtctggagaaaggtgaatatgaaagggcaaatgctgagaagttgaggcttgaacagaaacagcggcaggcacgaaagatgcaggatagcggatggaagcctcggtggtttgcaaaggataaagctactgacacataccgttacctcggtgggtactgggaatccagagaaaagagcagctgggaaggctgccccgacatcttcgggcaagaccctaacgatctgatgatagctgactaggtttgagtaggttataggtcttttggttctctttttcgggaacgcataattccggaaatttttagtggttcatattatagagcaattaaatggccgttgatatgtaagcattggcagtgcctcagggagtattgatctcgtacataataattagacaatggttcgtctcacatgtcaccttatttttttggcaaagtatttttagccctcttgtgaggttttcacgctcacaagttcagtcttcagagtggtggtataaggtgggcgatcagtgattcaccagtatatggctattattattatataaatgtagtcttatactggatatgtaactacacatacaagtgcaggagggcgtgactttgttcatcattttggtggagtgctagtaaagatattaagctg

SEQ ID NO: 7441 - DNA, 2892 bp, Zea Mays
caaaggcaaacatagctcctgtagtcctgttcaccacccttttcgttctcgtcttcctggctcccggcggcacccacccgttcccggagcaaaaataaaacgatcccaaaacacaaaagaatccgccacctcgccggcgacaggggcgacctcgcgcgccccggccggtgctgaccccgacttctccatgcatccattctgctgcgcgcctctcgtgcccgtatcgcccgcggcctctgccgcccccgctgcgtcctccgctgtggcgggcacccaggccgtgatgccgccaccgcagcccccgccgttgccgcctccgccgcctcgaaacaactccgccactggcggtgagaggcgcgcgcgcgcagcgggggtcagcggtggtggaggaggcgattcctcgccgctcgagggggtgaagctgaacgagatcgtcggcggcggcatctcgggaatcatgtacaagtgggtgaactacgggcgcgggtggaggccgcgctggttcgctctccacgaaggcgtgctctccttctacaagatccacgggcccgaccgcatcatcctatcgcgcgagaccgagcggggcgccaaggtcatcggcgaggagtccctccgccgcctcaaccgcccctccgccttctcgccgtcccactccaacggccaccaccaccctcgaaatcccatcggcgaaatccacctcaaggtgtcaaccgtgagggagagcagatcggacgacaggagattctccatcttctcggggacgaagacgttgcacctgcgggcggagaccagggaggacagagctgcgtggctcgaggcgctgcgggtgaccaaggacatgttcccgaggatgtcctctagcgagatggtcgggccaggggacaccgctgcggcagtggccgtctcaaccgagcgcctaaggcagcggctgcagcaggaaggggtcagcgaggcggccattgctgacagcgagaggatcgtgcgagaagaattcgaggctctgcacaagcagcttgtgctcgccaagcagaagcatgcgctcctcttggaaactcttcgccagctagagaaggaagtgctagcgaatctgatgattataatgaaccacaagatccagctgaagagactgacgatgaagcaaatctttactttgatacaagagattttctatcctcaagctcttttaaaagtagtggatctgatttccaaaggtctgaagctggttcggatgatgaagatgattatccaatggatggaattaatccttctatgaagtctatcggagttagttatgcatatgtaagaagacggaacaggctgccagatccagttgagaaagaaaagggtgtaagtttgtggtcaatgatcaaggacaacataggaaaggatcttacaaaagtttgtctgcctgtttacttcaatgagccactctcatcgctacaaaaatgttttgaagatcttgaatattcctaccttattgatcgtgcatccgaatgggggaaaagggggaatagtcttatgaggattcttagcatagcagcatttgctgtttctggatatgcctctacagatgggaggagctgtaagccttttaatccccttcttggggagacatatgaagcagactatccagacaaaggcctccgttttttctctgaaaaggttagtcatcaccctatggttattgcatgccactgtgtgggaactggctggaggttttgggctgatagcaacctgaagagtaaattctggggtcgttccattcaacttgatcctgttggtgcattaacactggagtttgatgatggtgaagttttccaatggagcaaggtgacaacttcaatttacaatctcatattgggcaagctatattgcgatcactatggtactatgcgcatacaaggtaattgtgaatattcatgtaagcttaagttcaaggagcagtcaattatcgatcgcaaccctcaccaggtgcaaggtgttgttcaggatagaaatggtcgaactgttgctacactatttggaaaatgggatgaaagcatgcactatgtaatgggtgattgctttgggaaaggcatgggaactgaacagttttcagaggcccatttgttgtggaaaagaagcaaaccacctaattttcccactagatacaatctcactcgctttgcaattacactgaacgaacttacccctggattgaaggaaaaattgccaccaacagactcaagattacgaccagaccagagatgtctggagaaaggtgaatatgaaagggcaaatgctgagaagttgaggcttgaacagaaacagcggcaggcacgaaagatgcaggatagcggatggaagcctcggtggtttgcaaaggataaagctactgacacataccgttacctcggtgggtactgggaatccagagaaaagagcagctgggaaggctgccccgacatcttcgggcaagaccctaacgatctgatgatagctgactaggtttgagtaggttataggtcttttggttctctttttcgggaacgcataattccggaaatttttagtggttcatattatagagcaattaaatggccgttgatatgtaagcattggcagtgcctcagggagtattgatctcgtacataataattagacaatggttcgtctcacatgtcaccttatttttttggcaaagtatttttagccctcttgtgaggttttcacgctcacaagttcagtcttcagagtggtggtataaggtgggcgatcagtgattcaccagtatatggctattattattatataaatgtagtcttatactggatatgtaactacacatacaagtgcaggagggcgtgactttgttcatcattttggtggagtgctagtaaagatattaagctg

SEQ ID NO: 7442 - DNA, 1878 bp, Zea Mays
tgtagatacgtcagaaattaaagctattgtatgcgctcaaacagttcgtgaaaacaccagagaaaatcaaaccacggctcccaaatcaaaaaaaaggaaaaagaggaaaggaaacaaaagaaaaagcaattctattttactttcggttctatttcgcgtatcacgagcacaagacacgcaagtcacacgaacacagcggattcgagtgtcatagtcatagtccttagccatgtcgcatgttttttttgtaaaaaaaaatagagagagacaaaatcatggcttgtagccttaagcccttggctccagtggagcgtttggagctataccgctcgttcctttcgggcacgtatatgttaacaaagacaatggtcacgccttctcgctgaaaaaaaaaatatgataaaatgcaaaaactaaatttggaaacaatatctctaagaccccaactgctatggccaaagccaaaaaaaaccagtgggtgaagagcataaagttggcaggtaattaagagctagcatatccttgcgcgcagtgggggagatatagcacaattagcttagaaatcattgatgacacttgcaaaaatgctccttcgcccctgaaaaaagctgagcccacatcagtctagttctgctccttctctgaactgaagccatacgcgaaggcaagactagagggcgattttgggcacgaatagagagatggcaagctccactgcgattgcgactgcgcgcgcccatgatgctgctgtttatggcgcggcagggacccactccaatctgaggagttttcttgacagtgttacgccggttgtaaaggcgcacacggtccctatggcatcctaccttccattgtcaaacggatattatgaaaagattgcagatggggttagatgtttctaccttggagatctttggaattcattctatgagtggagcgcctgtggcgttggtacttcagtgtgcatcgctccgggtgagacagtggttcaatacttcgtgccatatctttcagcaattcagttgtacaccaacacgagaaatgctcctgtttcacaaagcatgatttatgatggaagattcgatcggaataaccattatagtgtcgggatgtacactcatggatatcaagcaccattacgcatgcccactattggagttgaagggaagggggagttgttcttcaagtattttgagcctgactccccttacgagaggatacctttcgcagacaaggtatatgagctttgctatagttgtccttccctatcatctttaagcagtgcagagctctcaccatcaagttggatgtccgttttttggtatccaacaagtcatgtccctatgaagaatagaaaagatctgaatacttgctttttgacctaccatagcctttcaacatgcaaaggtacgcaccaatgataaaagatattgttgctttagatagcatgcaagccttcaatcatatgtcacttgcgccgttcggccttgcaacatacaagttagatgccaaagtgtgggcaagtccaaactccggtgaccaagagcatatttcctctctcttcgatgcatcacaatcatggctaaaggagcataacatccaccactacgacttcaactactttgcccatagatgctcctccaaatgaataacatgaacatgaccgatcaacaagttcatagtctttggggactcaagtgtgttgtgtgttgtttttaacacatctctgcatgtcgtgaagggttgtagtagtttttccattgtctttttattaatgcttactttctatggttgtattatgtgaacccttggagcgtaatcattgcgatatcatacttgatacattatgtaactcttcgaaattctagatgattttac

SEQ ID NO: 7443 - DNA, 1448 bp, Zea Mays
gtcttcatcttgtttcatctcttcttgataaagttgttgtagatgctgcacttactctcgtcaatgatgagaaggatttggaggatgacagaagctgcagttacaaggtactggtgccatggatgtgtgagggttgttgaggaggccatgggggaggagatcaagtgcccattttgtggtggtggattcattgaagagatgattggtgaggaatttgatgggttggccagccagcagtcagagcgggattcatcacaatggggagcgtcgaacaacccctttgagcagccaagggcggaggcggacagtgaggatgaagaagatgatgatgattacgatgatgatataggccgtgcatttgagagtttcatcaggaggcatgggcggccatcagctctccgtcgggcgtttgacagcatccaggacgaccttagagctgatagggatagtgacttctccattctgatcaatgccttcaaccaagccctcgctttgcaacgctcagtgcttgatgctgatgaggcccgagatgaccaaggtggatctagcaatgatgatggcttgatggaagaatatgtcctgggggctgggctaaccctgctgcttcaatatttgactgagaatgatccaagccagtatggcacccctcctgcaaacaaagaggcggttgacgctctgcccactgtccaaatagcagaggctgtcagctgttcagtctgccttgatgatcttgagctagggtcccaggcaaagcaaatgccttgtgagcataagttccactctccttgtatactgccatggcttgaactccatagctcctgccctgtgtgccggtttgagctgccatctgaagagacagaagatttggatgagcctagcaatgtggacagaacagagaacacccatgaggaagtcagggccgatggccctgaagatgacagtgagagcagtaacagagcgtgggcccttgttccttggttcagtgggctattctcaacacctgaaccacaaactgtcagaggcgctttcactgatcagcagactcgctccacttctggaaccaacatgaatgctggcgaaagctgatctcttcctcctttgtgaataatgcccatacatctgagaatagcaatggaccttgtcagtagataacttatttttctgtactgataatccttcttggatgaatcgcaaggtacaaagtttgtgacagctccattttttgccaggattttagcgatcatttcactgttgattgatttcatagctactgagcatctctgcatcctatgtgtgcgatcatttactttcttggctctgagaatccacccatgtttattgtcttgaactagtgctagtcgtaaaatgtttgtgatttgtgaacaccagtagaggtaagcctcgtcatgggaagacaccaaacattcttggggagaatctgtcggcca

SEQ ID NO: 7444 - DNA, 1647 bp, Zea Mays
gatttctcgagggaattggttgggggagatgagttcgcgaacagtgtgcaatgtgagtgaatcctgagaggacagggaattagtttggtgttgcgccgcgaaccacaacgacttgtgatagggtggaatagaatcttgttcttctaatggaaagtatggaattgggacctattcgagtattcttatgaggaactattcttctgagaatctcgactcctaatctctaccttccccgtctagaagatctgccagtgctgccccgtctccaagaaggatttggaggatgacagaagctgcagttacaaggtactggtgccatggatgtgtgagggttgttgaggaggccatgggggaggagatcaagtgcccattttgtggtggtggattcattgaagagatgattggtgaggaatttgatgggttggccagccagcagtcagagcgggattcatcacaatggggagcgtcgaacaacccctttgagcagccaagggcggaggcggacagtgaggatgaagaagatgatgatgattacgatgatgatataggccgtgcatttgagagtttcatcaggaggcatgggcggccatcagctctccgtcgggcgtttgacagcatccaggacgaccttagagctgatagggatagtgacttctccattctgatcaatgccttcaaccaagccctcgctttgcaacgctcagtgcttgatgctgatgaggcccgagatgaccaaggtggatctagcaatgatgatggcttgatggaagaatatgtcctgggggctgggctaaccctgctgcttcaatatttgactgagaatgatccaagccagtatggcacccctcctgcaaacaaagaggcggttgacgctctgcccactgtccaaatagcagaggctgtcagctgttcagtctgccttgatgatcttgagctagggtcccaggcaaagcaaatgccttgtgagcataagttccactctccttgtatactgccatggcttgaactccatagctcctgccctgtgtgccggtttgagctgccatctgaagagacagaagatttggatgagcctagcaatgtggacagaacagagaacacccatgaggaagtcagggccgatggccctgaagatgacagtgagagcagtaacagagcgtgggcccttgttccttggttcagtgggctattctcaacacctgaaccacaaactgtcagaggcgctttcactgatcagcagactcgctccacttctggaaccaacatgaatgctggcgaaagctgatctcttcctcctttgtgaataatgcccatacatctgagaatagcaatggaccttgtcagtagataacttatttttctgtactgataatccttcttggatgaatcgcaaggtacaaagtttgtgacagctccattttttgccaggattttagcgatcatttcactgttgattgatttcatagctactgagcatctctgcatcctatgtgtgcgatcatttactttcttggctctgagaatccacccatgtttattgtcttgaactagtgctagtcgtaaaatgtttgtgatttgtgaacaccagtagaggtaagcctcgtcatgggaagacaccaaacattcttggggagaatctgtcggcca

SEQ ID NO: 7445 - DNA, 1799 bp, Zea Mays
gcccagtgggacaggcatcatttggcgtcgggccggtacggtattggcggcgggccagctgacgagaaggaacggccgcagcccatcctgattcctgtcctcccagcaccggtgtctcatcaggaacaggaagcgaacaccggcggttgtcccgttccaattccaaccaacctacctaggctccgcgcgcacctaccccgtctctgctccggggagcgtcaccagtcagtcacggcggctctaaaatctcagataccaccagaccagaccagatccgtcccgcgaatctaaggtcaaaccaaccgcgatccgcgaatccgcggagaggaggggaggggaggggaagggcgcgggggcatggagttcctgcagggccagaggctggagaccacgctggccgtcgcggccgccgtcgttgccgtcgcagccggctccgcctacctcttcctccgcagtaggaagcccaggggatgcctagaccccgagaacttcaaggagttcaaacttgttgagaagaggcagctgagtcataatgttgccaagttcaagtttgcgctcccaacacctacttctgtattgggtcttccaatcggacagcatataagctgcagaggacaggatgcttctggcgaggaagtgatcaagccttatactccaactactctggactctgatgttggatcttttgagcttgttataaagatgtatccccaaggaagaatgtctcatcatttccgtgagatgaaagttggtgattatatgtctgtgaagggacctaagggccgtttcaagtacctacctggacaagtgagagcattaggaatggtagctggaggatcaggcattactccaatgttccaagtcacaagggcaattcttgagaacccaaaggacaacacgaaagtacacttaatctatgcaaatgtcacgtatgaggatattcttctgaagcttgatgcaggaagaacttgacggcatggccaaaaactatcctgatcgtttcaagatctactatgtcttgaatcagcctcctgaagtctgggacggtggcgtcgggttcgtgtcgaaggaaatgatccagactcattgcccagcgcctgccgccgacattcaggtattgcgatgtggacctcctcccatgaacaaagccatggccgcgcacctggacgaccttggctacacgaaggagatgcagttccagttctaagcgttacattctctctaccagtaccagaataaacgggggtggaacaagtttcgtcgcctctttgagcagacgaagcctgaccatatcgccatatagctccaaacagacgcggtttgccactgacagtcacagagcgtcgtacttaaggggtgtttggtttatagggactaaactttagtctctccactttattccattttagttcataaattattaaatagggaaacttaaatagagttttagtttctatatttagtaatttagggactaaaatggaataaaatagaggactaaaaattagtccctagaaaccaaacacccctttactctacctggatgaaagcagcagtacagtacccacctaatttgtatcggtgtcgggacattgtaccatgccgttcttttgtatcggtttgtcactcactcactccgcgagccagcagcccagcacacgatccatcgtgtcattttggcaacgtcatacagatacaaaaaactgcatgtgcagcagatgtgctctgttctctcctgcagagcgatgaacgcgtacgcgcacggtagcaagcaggcgagcaggccgacatgtgttcgc

SEQ ID NO: 7446 - DNA, 4024 bp, Zea Mays
cccaaccgtctcgcctccctcgcgccaaacccaatccgacgagccgcacgtgcgccactcaagctctcctcccccctcccactcctctccttcccacggtcgggtcaaccacccccaccggaaaccgtgctcgcgccgcgtccgttcccgtaaacaattgctggatccccatttccccaccaagaaaagcagtagaaccgcgccggcccacgccccgctgtacagttgtcgcgctcgggcggccgagtagtttaatcctcgaggaaggaggggggcggtcgccccggatggccgtgtcctcgtcgccttcctgcagacccactcccgggtttgaggcgtccctcctcctccgccgccgctctttccggttgcgtttgggaggaatggttgtggagttggtggattctcattctccgctggggttttaggaggattccgggctcttggccggggaagcggagatcggaggttctgccaggcgtacggattgggcgctggagctcctgtttgtttgaattgaattttggggaaaagcttccacctttcttctgcctttaaaaggagatggctttttcacacgacggaaagatgaagggctgtcagacaaaccttttccggacaaaggataagaaagtcgtcaagatgacagatagtgcaagctgctccacagctaagtatggatcaagcaactcaaaatcaccatcttcatcccccttccggaagctttcagaagttaggagcatacgtctcaaccattttctaagtcactcttcaaatgctacaaaatatgaacatgtcaggatatttgtctccacatggaatgttggaggaaaagcacctactgccgagttgaaactggatgactttcttcctgttgatgaccattcagacatttatgttttaggctttcaggaaattgtgcctctcaatgctgcataaaccatatccctccctggattcaacctcatcccggtcaacaccatgccttgatggttccttctccaaccgttcaagaacagccagtggttctataatcttccaaaagtccttgaaatccatcaagaaatcttacatgccatcccagagaaaacaactcaaattctgcaattgcccagtggaaatggccaagaaatcctacaaagatgcttgcttttggtgtccacaagcatatgccaatgacatggactcctcagaagaggatgaattggatgacaatttgaatgatatttttggccttaatgatgatggcgttacttcgtctgtttctgcctccagggaccagctaaagtataacctcatatcttgcaaacaaatggttggtatttttgtcacagtctgggcaaagaaagaattaatgcagcatattggacatttgagaacgtcctgtgttggtcgcggaataatgggatatcttggaaataagggatgtatatcagtaagcatgacactataccagacaagcttttgtttcatctgcagccatttggcttcaggtgagaaggaaggtgatgaattgaggcgaaatttagatgtgttagagattctaaggctcacacaatttcgaaggatttgcagaagagctgggcgaagaatccctgagaaaattcttgaccatgagcgggtgatatggttaggagatctgaactaccgaatttccttgagctatgaagataccaaaaaacttctgactgaaaataactgggatgccctttttgaaaaggatcagctcaatatccagcgtgcttctggaagtgtgttcaaggggtggagtgaggagaagatatattttgctcccacatacaagtactcttgcaattcagattcttatgctggagagactgccacatcaaagaaaaagaggagaaccccagcctggtatgtactacaatgtttgagatagtttcagagagttcagatctcattctcatatgataacactcgtcagtggctatgaagtatcctagagtccacaaacctctttgcaacccgaaaaccttgtgtttcccctttctgtaccatcttttgagatgagttaaatcagatttggacagcaaggtaagttgtaagcgtggggaaacacaaaagaggaatcattctcatgtgcaataaataaacaaatcaagatgattcacatattctgaattcaggaatcacacttcccaaaccatgaatacataatactattaatgtccggtttgttgcaaatgttcaggtgtgatagaatactatggcatggagatggtattgcacagttgtcctacttccggggggaatctcaattctctgaccatcgtcctgtttgtgggacatttattgttgaggttaaaaggctagatggtcaatcaaagcggcgcccatcaaacaccaacattaaaatcggtgctgaagagttgttaccgacaagagacaggcataactaaggaagcgaaggtggatccgacgccgtctgcccccgcccctggtcatcacaacatccgggcctcccgcctcctcgacaacgagatccgcgtcctcaaggacgagttgcagcggacgaaccttgagttggagtcgttcaaggagaagatcaaggaaaaccaggagaaaattaagctcaacaaacagctaccctacctcattggcaatatcgttgagaccttggaaatgaatcctgatgatgaagctgaggaggatggtgctaacattgatttagattcacaaaggaaagtaaaatgtgttgttctgaagacctccacaagacaagtacactggacagcagtgtggcttgctgagcctgcagtgagaatgcgcctaatggctgttctggttgatggatgccagggactgagcggtggtgctatggctggtgtgatccatgggcaagcacaacacggagatcctatgtttcaggagtttgcgggccgattactgcgccgggtgtgctcgccgttgtttgagatggtcaggagctgggtgctagaaggggaattggaggatgtatttgcagagttttttatcgttgggcagccagtgaattaccagccagaacgaagtttagcttgtttcagaaggaatgtagggctaggtgatctcaactataggatcaacttaccatatgagaagacacacgaactcatatccaagcaggactggaacgaattgtttgggaaagaccagatgtgatctctagaatgtgctttgtaagcggctacatcaaaggaaaggaaatctttatgaagaccagagaactctagcaggctgtctgaagacaaatgtgctagctgaaatgactggcctaagacctgtaaattgtaaaattaaaggtgatgatttggaggccatggttcatgtttgtgagctcgttgcagaatggcgacagccatttcattcaaatgtagtggtgcacattgtatgctactgacgatttggccataatgaaattgatgagccgcccctcagtccctcacccaacctaagatgtacaaggtgattaggaaccatccaagtgtgtttgagatttatcaaagaaagttgttagagcctggaaagatctcaaagaaatatattgataagttaaacaagaaggtcagcactgtacttaatgagtatttcgagaatagcaaggactatgttccgaacaagagggactagattttagcttattggcagggttcaagtcaccaaagcagattttatgtatctgaaacattggagtcaagccagagattctaaaacgtgttggagaagccatgactactctgccaaaatttcaatcctcacagggctgtgaattttttttatcaaaggcatcaaatgattgagactagagaagacattgattggacagttggtgaaacacttgtttttgctactcttatcattgaagggaaccacgtcaggttaagtggttaggatgttgagaggggtacatttagccaccgtcattctgtcatccatgaccaaactagagaatagtactacccactgtaccatcttgttatgaaccaagatgaggagatttttactatgagcaacatgtatgaac

SEQ ID NO: 7447 - DNA, 5033 bp, Zea Mays
cccaaccgtctcgcctccctcgcgccaaacccaatccgacgagccgcacgtgcgccactcaagctctcctcccccctcccactcctctccttcccacggtcgggtcaaccacccccaccggaaaccgtgctcgcgccgcgtccgttcccgtaaacaattgctggatccccatttccccaccaagaaaagcagtagaaccgcgccggcccacgccccgctgtacagttgtcgcgctcgggcggccgagtagtttaatcctcgaggaaggaggggggcggtcgccccggatggccgtgtcctcgtcgccttcctgcagacccactcccgggtttgaggcgtccctcctcctccgccgccgctctttccggttgcgtttgggaggaatggttgtggagttggtggattctcattctccgctggggttttaggaggattccgggctcttggccggggaagcggagatcggaggttctgccaggcgtacggattgggcgctggagctcctgtttgtttgaattgaattttggggaaaagcttccacctttcttctgcctttaaaaggagatggctttttcacacgacggaaagatgaagggctgtcagacaaaccttttccggacaaaggataagaaagtcgtcaagatgacagatagtgcaagctgctccacagctaagtatggatcaagcaactcaaaatcaccatcttcatcccccttccggaagctttcagaagttaggagcatacgtctcaaccattttctaagtcactcttcaaatgctacaaaatatgaacatgtcaggatatttgtctccacatggaatgttggaggaaaagcacctactgccgagttgaaactggatgactttcttcctgttgatgaccattcagacatttatgttttaggctttcaggaaattgtgcctctcaatgctgcataaaccatatccctccctggattcaacctcatcccggtcaacaccatgccttgatggttccttctccaaccgttcaagaacagccagtggttctataatcttccaaaagtccttgaaatccatcaagaaatcttacatgccatcccagagaaaacaactcaaattctgcaattgcccagtggaaatggccaagaaatcctacaaagatgcttgcttttggtgtccacaagcatatgccaatgacatggactcctcagaagaggatgaattggatgacaatttgaatgatatttttggccttaatgatgatggcgttacttcgtctgtttctgcctccagggaccagctaaagtataacctcatatcttgcaaacaaatggttggtatttttgtcacagtctgggcaaagaaagaattaatgcagcatattggacatttgagaacgtcctgtgttggtcgcggaataatgggatatcttggaaataagggatgtatatcagtaagcatgacactataccagacaagcttttgtttcatctgcagccatttggcttcaggtgagaaggaaggtgatgaattgaggcgaaatttagatgtgttagagattctaaggctcacacaatttcgaaggatttgcagaagagctgggcgaagaatccctgagaaaattcttgaccatgagcgggtgatatggttaggagatctgaactaccgaatttccttgagctatgaagataccaaaaaacttctgactgaaaataactgggatgccctttttgaaaaggatcagctcaatatccagcgtgcttctggaagtgtgttcaaggggtggagtgaggagaagatatattttgctcccacatacaagtactcttgcaattcagattcttatgctggagagactgccacatcaaagaaaaagaggagaaccccagcctgaatactatggcatggagatggtattgcacagttgtcctacttccggggggaatctcaattctctgaccatcgtcctgtttgtgggacatttattgttgaggttaaaaggctagatggtcaatcaaagcggcgcccatcaaacaccaacattaaaatcggtgctgaagagttgttaccgacaagagacaggcataactaaggaagcgaaggtggatccgacgccgtctgcccccgcccctggtcatcacaacatccgggcctcccgcctcctcgacaacgagatccgcgtcctcaaggacgagttgcagcggacgaaccttgagttggagtcgttcaaggagaagatcaaggaaaaccaggagaaaattaagctcaacaaacagctaccctacctcattggcaatatcgttgagaccttggaaatgaatcctgatgatgaagctgaggaggatggtgctaacattgatttagattcacaaaggaaagtaaaatgtgttgttctgaagacctccacaagacaagtacactggacagcagtgtggcttgctgagcctgcagtgagaatgcgcctaatggctgttctggttgatggatgccagggactgagcggtggtgctatggctggtgtgatccatgggcaagcacaacacggagatcctatgtttcaggagtttgcgggccgattactgcgccgggtgtgctcgccgttgtttgagatggtcaggagctgggtgctagaaggggaattggaggatgtatttgcagagttttttatcgttgggcagccagtgaattaccagccagaacgaaggtgatgagatggcgtcaaaggtagcttttgatcacccagaacgattctccgaaaagttcgagttcagtgcagccaacattgagcccctggttcagacatgcatgacaactctatcctcaaagatgtaagtcgtaacaaatctttgacattatgttccatcattcagcctttgtgatgcagatcttttcatttcatttatgttctttggtaattcctacatctatggttaatacttaatattttttcacagaagtgatgtgattttttctctgtgaagtgctgttgcaccacttttttgtgttgttttggtaaaacaggaaaaaactttgttagggaagtagtaacttttcagggttttcttttctttatatgggccaaccaaacagaaataattttggagatttaatcggttctcacatgtcattaatccttataccaaacacacgaactcatatccaagcaggactgtaacgaactgtttgggaaagaccaggtaggcttttatgttttatcgtcacattgcaaaataccctttattcagaagtcctagctcatctttccattccctttaatgatatctgaaagtagagctgaagaaggggcatctgtttgaaggatggactgaaggggtcatcaacttttgggtgctattaaagtgttcatataccaaacacagttttgctttatatgttgtcacctgacctatggagaaaaggaaggagatgaactaaaaaggaatgctgatgttcaagaaatccactggaggacaatatttaatccagtttcgagagtcaacatgcctaaaacgatatatgatcatgaaaggaatgtagggctaggtgatctcaactataggatcaacttaccatatgagaagacacacgaactcatatccaagcaggactggaacgaattgtttgggaaagaccaggtaggcttttatgtttcatcgtcacattgcaaaatatcctttattcaaaagtcctagctcatctttccattccatttaatgatatcacagacattaagatcgatgatgacatcagggcttactctgcagatgtgatctctagaatgtgctttgtaagcggctacatcaaaggaaaggaaatctttatgaagaccagagaactctagcaggctgtctgaagacaaatgtgctagctgaaatgactggcctaagacctgtaaattgtaaaattaaaggtgatgatttggaggccatggttcatgtttgtgagctcgttgcagaatggcgacagccatttcattcaaatgtagtggtgcacattgtatgctactgacgatttggccataatgaaattgatgagccgcccctcagtccctcacccaacctaagatgtacaaggtgattaggaaccatccaagtgtgtttgagatttatcaaagaaagttgttagagcctggaaagatctcaaagaaatatattgataagttaaacaagaaggtcagcactgtacttaatgagtatttcgagaatagcaaggactatgttccgaacaagagggactagattttagcttattggcagggttcaagtcaccaaagcagattttatgtatctgaaacattggagtcaagccagagattctaaaacgtgttggagaagccatgactactctgccaaaatttcaatcctcacagggctgtgaattttttttatcaaaggcatcaaatgattgagactagagaagacattgattggacagttggtgaaacacttgtttttgctactcttatcattgaagggaaccacgtcaggttaagtggttaggatgttgagaggggtacatttagccaccgtcattctgtcatccatgaccaaactagagaatagtactacccactgtaccatcttgttatgaaccaagatgaggagatttttactatgagcaacatgtatgaacaatatgcaggacaacaggaaaactgaaggcgcactgcacagtttgggtgagagcgttgcttcatttacaggagtagttcaagtgacaacatctgtggttggtgcggcttgcagcagctaggccagtagcactgctttgaagagatcgattcagctgaaagtgggaaatcctgctaaaagatgaagggatgaaggccatatacatacactccttcaggtgctttgttggatgcgcccaacattttcgtccaagagtaaatacacctgcgaggtctggcacaaagttaaacatctggccatgtactccttcagccatgaaattttctccaaagtttgtgcaagagtttcagggacctatttctttgttccgagggtgtacatatcaaagaagttgtccatagcgttacaatcctctgaaat

SEQ ID NO: 7448 - DNA, 1274 bp, Zea Mays
agacatgataaaaaagaaccgtgcccgataaataagaagcgctgcctccgttcagggcctccgacacctcccaataaaaacgttcctccccgtcccactcgccggagcctggccgacgggatgcctcgagattcgcgcccagccgggatgcgcctcttcggcgtcaccatcgcgccggcgccggaggcggatccaccggtacgggatccgagccccaacccgcccgtggcggccagggaggacgtgatgcgtaagtgcaagagcatgggcaacctcgccgcccttggcgctgtcgtggacggtggaggaggtggtgcggacggcggaggcgccggcgacggctacctctccgatggcgggctgatgcagtcgtccgggaagcggcggagggcgcaggagaggaagaaagctgttccctggactgaagaagagcataggacatttcttgctggtcttgaaaagctagggaagggagactggaggggcatagcaaaaaattttgttaccaccagaacaccaactcaagttgcaagtcatgctcagaaatattttcttaggcaaactaatccaaacaagaagaagcgcagatctagtctttttgacatgatgccaagagagctgtcaccagcaccaaattgccccatattaccaccatcgatggcaaaagtacacgatgtggtagctatgacgaaacaacttcagaatagcaacttggaaggaacctcctcttcaaatgcagcatctcaagttggaagagatctccccccagttccatcttttaaggcaacaaatatggatccaagtttcagcaaatttagccacatggagcgcgtctggagaactccctacccattcggaccagttcccagagcccctgaagggacgccttcaccaactcctgctgctgctgctgctgctgctgctgcggctgccaatgcagctgttccggtctctcaagctaacctgacgactgcctgtactagtaacacattcttgagccagccaaagccaagtgatactccgtcactgcctccgaagggaggtcctccatcagaggaggacggtttggaactgactgttgccccaccctcccaacagaacatgacgaacatgtcttcccagaatgcggaaatattaaacttatatacaggcatatccgtgcattcccaagggtgtgttccttagggagaaactgtcgcactccttgaaagggattgatcatatatgttgtaacatattttgtaacacttcctcttgatcaatccaagtctatt

SEQ ID NO: 7449 - DNA, 960 bp, Zea Mays
gtccttctgcagaattcttcttgttgtcttgttgaagtgagttttggtgtgcatatgaagtaggctagttgggatttcaaccctcaatgcttcaaattgtttcataaaaaaactcgatatatgggggtacgacagcctccgagcattgcattaagaagaagaccttacacaggagagagagattccagtgctggtattttctgcaggacttgcagacataattgaagaggtcttccggcagaaattacacaaaacattcaagaacatcaaggttgtctccaacaggatggtgtttaatgaagaaggccgcctcatagcatttaaagggaaaacaattcacgttctaaacaaaaatgagcatgccttggacatggctgctccagtgcatggcaatccgggggatccaaacggatctatggatgactattcattggtgaagaaaaggaccaatgtgctgctacttggcgatcacattggggacttggggatgtctgatggtttaaactatgacaacaggatcgctgttggattcctgaacgccaacatcgagaaatctttgaaggattactctagcgcgtttgacattgtatatctgaacgatgctccgatgcacggagttgtgcaacttgtgtctgaattatgtccataatccagtgatcttcgaatcgcccctcagaaaaaaagtatatcttcccatcaactttgcagctaccgaagttcgctcacctggaaatgtaaggattccactcttgctaactagggcttgcttcatgagcagctgttctataggctcatttcagggctaaagagcccttggaacaatgttttttagcactagtgcattcaaacacccactgtagatattttctcctcctcttccaattcgaaagatccgtgaatgtttttttctgggctgtggagtgaatctggtctttgctgcgttctggcgctagacccaag

SEQ ID NO: 7450 - DNA, 1384 bp, Zea Mays
gcgaagaaagaagtatgaataaaacaaaatttgaagacgcctaacagcccgactgcttcgtttccacgcgcacgaaaccctagactagataaaaagttcccatttccctcaattccccaacttccctcgccgcaatctctcgccgcctccagtccagagccaccgtgagatctgcccgattccgccgcccggacccggggactccctcccctcctcgatccgttcgggcggccggccggcctagcttcaagtgcggggatggtgttctacttcaaggcgcggcccgaggccggcgactataccatcttcatgggtcttgacaagtacgagaacgaggacctcatcaaatacggcttccccgaggacatctggttccatgtagataagatgtcctctgcacatgtgtatgtgagattgaataaaggtcaatcaatggatgacatgagtgagggtttgctggaagactgtgcgcagcttgtcaaagctaattccattcaaggtaataaagtcaataacattgatgtagtttatactccatggtacaatttgaagaagaccccttcaatggatgtaggccaagttggttttcacaaccctaaattgggcatggcacgcatagtgacaatgtgcatcggtcggcaggagttcgccatcatctgcttcagcatcaaccttggttcgcactattaaagtggaaaagaggatcaatgagattgtgaaccgcttgaataagacaaaggtggaacggaaacctgatttaaaggctgaaagagaggctattagtgctgctgaaaaggcagaaagaaaggcacagcttagagacaagaaacgtagggaagagatggagaggcttgagaaagagaagcaggctgatatcaggagctacaagggtctaatggtccaagagaagatgacttccaacaagcaaatcgcttctggcagcaagaccctgcaggaacttgaagaagactttatgtgagaggcggacattataaatgccatgctgaagatttccttgaactgcttctgtcgaagacagaaggggtaccacaggcttgtgagatactggatgactcatgggcaggccatggtctgttattatctcctcttgctgttgtggtctatgtaaaccttgtttacttgctgaaaaaacaacggtgcatgctctaactgtggttgatgtaatggtctgttgcccatcaagttgaaatggtaatggaattatggtttcctggatttttttcaaacaataaagacatggcagcagataacttacatattccattctttgcatggagaacggctcaggaacttctttgtttgtgtaagagtgttatagaaatgaaccacacttagcttacatttggagattctttaattgaag

SEQ ID NO: 7451 - DNA, 2247 bp, Zea Mays
cgctcgccgccgcgaatcccgctgctaccgaagggcccgcacgccctccgccgtgaatcccgccgctaccgaacgtccacgcaaccgccctacgcccgccgccgctaccgcgccagcacgaccacgcaactgcccgcgcgaaacacccgccagccgctctgcacgccttcctcctcctactcctcttcagcgacggccaccacctcaccaccattgcctttgtaggaagcgaaggtggatccgacgccgtctgcccccgcccctggtcatcacaacatccgggcctcccgcctcctcgacaacgagatccgcgtcctcaaggacgagttgcagcggacgaaccttgagttggagtcgttcaaggagaagatcaaggaaaaccaggagaaaattaagctcaacaaacagctaccctacctcattggcaatatcgttgagaccttggaaatgaatcctgatgatgaagctgaggaggatggtgctaacattgatttagattcacaaaggaaagtaaaatgtgttgttctgaagacctccacaagacaagtacactggacagcagtgtggcttgctgagcctgcagtgagaatgcgcctaatggctgttctggttgatggatgccagggactgagcggtggtgctatggctggtgtgatccatgggcaagcacaacacggagatcctatgtttcaggagtttgcgggccgattactgcgccgggtgtgctcgccgttgtttgagatggtcaggagctgggtgctagaaggggaattggaggatgtatttgcagagttttttatcgttgggcagccagtgaattaccagccagaacgaagtttagcttgtttcagaaggaatgtagggctaggtgatctcaactataggatcaacttaccatatgagaagacacacgaactcatatccaagcaggactggaacgaattgtttgggaaagaccagatgtgatctctagaatgtgctttgtaagcggctacatcaaaggaaaggaaatctttatgaagaccagagaactctagcaggctgtctgaagacaaatgtgctagctgaaatgactggcctaagacctgtaaattgtaaaattaaaggtgatgatttggaggccatggttcatgtttgtgagctcgttgcagaatggcgacagccatttcattcaaatgtagtggtgcacattgtatgctactgacgatttggccataatgaaattgatgagccgcccctcagtccctcacccaacctaagatgtacaaggtgattaggaaccatccaagtgtgtttgagatttatcaaagaaagttgttagagcctggaaagatctcaaagaaatatattgataagttaaacaagaaggtcagcactgtacttaatgagtatttcgagaatagcaaggactatgttccgaacaagagggactagattttagcttattggcagggttcaagtcaccaaagcagattttatgtatctgaaacattggagtcaagccagagattctaaaacgtgttggagaagccatgactactctgccaaaatttcaatcctcacagggctgtgaattttttttatcaaaggcatcaaatgattgagactagagaagacattgattggacagttggtgaaacacttgtttttgctactcttatcattgaagggaaccacgtcaggttaagtggttaggatgttgagaggggtacatttagccaccgtcattctgtcatccatgaccaaactagagaatagtactacccactgtaccatcttgttatgaaccaagatgaggagatttttactatgagcaacatgtatgaacaatatgcaggacaacaggaaaactgaaggcgcactgcacagtttgggtgagagcgttgcttcatttacaggagtagttcaagtgacaacatctgtggttggtgcggcttgcagcagctaggccagtagcactgctttgaagagatcgattcagctgaaagtgggaaatcctgctaaaagatgaagggatgaaggccatatacatacactccttcaggtgctttgttggatgcgcccaacattttcgtccaagagtaaatacacctgcgaggtctggcacaaagttaaacatctggccatgtactccttcagccatgaaattttctccaaagtttgtgcaagagtttcagggacctatttctttgttccgagggtgtacatatcaaagaagttgtccatagcgttacaatcctctgaaat

SEQ ID NO: 7452 - DNA, 1185 bp, Zea Mays
ttatatataaatatgttatattgttatgagaaaagttttttgtaatccattggtgatcctgtctatacatataaattttgttatgagaaaagtataattgctatccttgacaaatatatgtattatgcagacatgcggagagatgttcaggagatcttcaaaatgactcctcatgataagcaagtcatgatgttttcagcaacgctcagcaaggagatccgtcctgtatgcaagaaatttatgcaagatgtaatgccctgcagccttctccagctctcctttccaaagtcgtcgtattttattcccattgctcctgtggtggtcctcctgtagctgttagtcatctaccagctttggagttgtagttgtgtcttctgctctttctaggtgggaggattctattcctcagtgtctccatttgtagtacataagtaagttctctttgcttctgtcctgaagatgcggtctccgagctcctggtcgacatctccagtttgctgcacactcaatgttcacttggtttcacttaattggacttcactggtgttggttctccaactatctcgtgcgggtggagaaagaattcttctgctggagttgtatttggaagcactgttgcaaaacttaagcatatttggagagaatctagtgttgaacagtgcataactgaacttctgtatggaggctgcatccgatggaaatatatgttgatgatgaggcaaagttgaccctccatggtcttgtacagcactatataaaacttagcgaggtagagaagaactggaaactgaatgatctcttggacgctcttgatttcaaccaagttgtgatattcgtgaagagtgttagcagagctgccgaactgaataagttactttgtgaatgcaacttcccatcaatctgcattcattctggaatgacccaggaagaaaggtaaatttgctcagaaatatcagcctatgcccttgaatatatcagcttataaataaggcatgactctaaattaccatgctctgaatacatattggacggcatatctaaaactacctacattattctatcattcctttttaggtgtatttgctggttaatattaattgagtttgtagaaatagtataaatataactaaatgtgtttgatattagagaaatagtagcctgtaacatgataacattttaggttta

SEQ ID NO: 7453 - DNA, 1273 bp, Zea Mays
acacgcataagcaaaaaaatgttttcattacaacatgtacccctgcactaggaaaataaggcactcggcactcgtgagccgtcgcatttccccccgtgtgaccaattcctctccgggccgagcagccgttccaatccgctcacgccgcctctctcgctgccccgcttgaccgcctgctagcgctgcagtttgatgctgatgacctgatccctccgttgggtaggttcttgggcgcggaaagaacaaagaactcgtggtgggtccgggtccgcaagaccctaggtgttcgtcagcagcgaggatgcccggcctgcctctgcctcaatcgttaaatcagaatattggatgtgaatatgcctatcctgggtctacaggccaggccttccgtcagcagctaagaactgcattgtctccagatgagaaacttaccgctgaaaaagatttggctctgtattgcaagccagtcgagctctacaatattattcaacggcgagccatgaaaaatcccctttttattcaaagatgccttctttataatatacatgcgaggaggaaaaagaggattcagataaccatatcactttctggaagtacaaatactgagttgcaaacacattatgtctttcctctttatgttctgttagctagacccactagtaacctttcacttgaagggcattctccaatttatcgattcagtcgggtttgcttgcttacttcctttagtgaacatggaaataaggacaacagtgaagctacattcatcattcctgacgtgaagagtttgtcaacctcccgtgcttgcaaccatgatattatctttattagctgtgggcaagttggacaaagtaatggtgaagataactgctctgggaaccatgtggaagattcttctctccaaatgcttgaagggaaatgctcctggggtaaaataccaactaatttacttgcttcatctttggagagttgtgtcaatttaagtttgggacatattgtggagttggcatctaaagttacaatgagaccaagcttcttagagccaaaatttctggagcaagacagttgcttgacattttgctctcataaggttgatgctgtgggttcatataaactacaactatgcatgtccgcacaagaggctggtgcaagagatatgtctttgtctccatatagtagttactcatataatgatgtcccaccttcgtcattatcagatatcataaggctggtcccttctaagttcaagcggggtagaacggtgcaggaggctttg

SEQ ID NO: 7454 - DNA, 1273 bp, Zea Mays
gtgacttagcccttcacggctaaacttctcaacttcctgttaaatgctgatcatggccaagatttagaatcactgaagatttctcttgtccattttgctatgtacgatgtggaagcttcaagggtctaggatgccatttaaactcatcacatgatctattccactatgagttttggatatctgaagagtaccaggttgttaatgttagtctgaaggctgatgcttggagaacagagctttttgcggagggcgttgatccaaggcatcaaacattttcttatcgctcaaggtttaagaagcgtagacgatcaaagaacacaatggagaaaatcaggcatgtacactcacatattatggaatcaggttcacctgaagatgaggcaggatctgaggacaactttgtgcaaggggagaatgggacttctgtagcaaatgcttcgattgatcctgctcaatctttacatggcagcaatctttcaccaccaacagtactacagtttgggaagacaaggaagctatctgagagatctgaccctagaaatcggcaactcctgcaaaaacgacagttcttccattctcacagggcgcagccaatgcaactggagcaagtgttctcggaccgtgatagtgaagatgaagttgatgatgatattgctgacttcgaggatagaagaatgcttgatgattttgttgatgttacgaaagatgaaaaacttattatgcatatgtggaattcatttgttcgaaaacaaagagtgttagctgatggtcatataccttgggcctgcgaggcattctcccagttgcatggacgacaacttatacaaaatcctgctctgctgtggggttggcgtttcttcatgattaaactttggaaccataacattttagatgcccgcactatgaacacatgcaatacagtccttcaaattttacaagaagaaagcacaggactaaagtaattttgatgcttctgatgaaaattcaagggaagaagatttctttaccatttccaagaagaaagcatagaattggagtaactttttattgataatttcattcatatctattgtcaattgtattaatggtttttaaaagagacaaatcatgtctaactctcacgctgtaatattctaagtcgtacgtgaatttgatgaatattcattgttgttttacttaagagttatcgtattgagatccttaacatattattttatttttcatctaggttcttaaattataaaataatggattgagattagaaaatatttca

SEQ ID NO: 7455 - DNA, 1562 bp, Zea Mays
gtaaatatgagtggtttctttgatgataatgtctaacatgtgacttagcccttcacggctaaacttctcaacttcctgttaaatgctgatcatggccaagatttagaatcactgaagatttctcttgtccattttgctatgtacgatgtggaagcttcaagatatctgaagagtaccaggttgttaatgttagtctgaaggctgatgcttggagaacagagtgttcttccaaaggttcgtttaaatggaggctccacttagttgggcaaaccgaaggcattgcatgttccttagtccaggacgactccctgctttgtgatttccttcctttcttgagtgcagaagccaaggatgaaagagcattggctattctatatctccaatcaaattccttacatagtgtattgtgtacctcaatgattttttggtggataatgttttacatgcttaacaatgcatggttactatttctttaaatggaagcactcttaactgtatttggtaactaatgatcctaactggcagctttttgcggagggcgttgatccaaggcatcaaacattttcttatcgctcaaggtttaagaagcgtagacgatcaaagaacacaatggagaaaatcaggcatgtacactcacatattatggaatcaggttcacctgaagatgaggcaggatctgaggacaactttgtgcaaggggagaatgggacttctgtagcaaatgcttcgattgatcctgctcaatctttacatggcagcaatctttcaccaccaacagtactacagtttgggaagacaaggaagctatctgagagatctgaccctagaaatcggcaactcctgcaaaaacgacagttcttccattctcacagggcgcagccaatgcaactggagcaagtgttctcggaccgtgatagtgaagatgaagttgatgatgatattgctgacttcgaggatagaagaatgcttgatgattttgttgatgttacgaaagatgaaaaacttattatgcatatgtggaattcatttgttcgaaaacaaagagtgttagctgatggtcatataccttgggcctgcgaggcattctcccagttgcatggacgacaacttatacaaaatcctgctctgctgtggggttggcgtttcttcatgattaaactttggaaccataacattttagatgcccgcactatgaacacatgcaatacagtccttcaaattttacaagaagaaagcacaggactaaagtaattttgatgcttctgatgaaaattcaagggaagaagatttctttaccatttccaagaagaaagcatagaattggagtaactttttattgataatttcattcatatctattgtcaattgtattaatggtttttaaaagagacaaatcatgtctaactctcacgctgtaatattctaagtcgtacgtgaatttgatgaatattcattgttgttttacttaagagttatcgtattgagatccttaacatattattttatttttcatctaggttcttaaattataaaataatggattgagattagaaaatatttca

SEQ ID NO: 7456 - DNA, 1577 bp, Zea Mays
gtgacttagcccttcacggctaaacttctcaacttcctgttaaatgctgatcatggccaagatttagaatcactgaagatttctcttgtccattttgctatgtacgatgtggaagcttcaagggtctaggatgccatttaaactcatcacatgatctattccactatgagttttggatatctgaagagtaccaggttgttaatgttagtctgaaggctgatgcttggagaacagagtgttcttccaaaggttcgtttaaatggaggctccacttagttgggcaaaccgaaggcattgcatgttccttagtccaggacgactccctgctttgtgatttccttcctttcttgagtgcagaagccaaggatgaaagagcattggctattctatatctccaatcaaattccttacatagtgtattgtgtacctcaatgattttttggtggataatgttttacatgcttaacaatgcatggttactatttctttaaatggaagcactcttaactgtatttggtaactaatgatcctaactggcagctttttgcggagggcgttgatccaaggcatcaaacattttcttatcgctcaaggtttaagaagcgtagacgatcaaagaacacaatggagaaaatcaggcatgtacactcacatattatggaatcaggttcacctgaagatgaggcaggatctgaggacaactttgtgcaaggggagaatgggacttctgtagcaaatgcttcgattgatcctgctcaatctttacatggcagcaatctttcaccaccaacagtactacagtttgggaagacaaggaagctatctgagagatctgaccctagaaatcggcaactcctgcaaaaacgacagttcttccattctcacagggcgcagccaatgcaactggagcaagtgttctcggaccgtgatagtgaagatgaagttgatgatgatattgctgacttcgaggatagaagaatgcttgatgattttgttgatgttacgaaagatgaaaaacttattatgcatatgtggaattcatttgttcgaaaacaaagagtgttagctgatggtcatataccttgggcctgcgaggcattctcccagttgcatggacgacaacttatacaaaatcctgctctgctgtggggttggcgtttcttcatgattaaactttggaaccataacattttagatgcccgcactatgaacacatgcaatacagtccttcaaattttacaagaagaaagcacaggactaaagtaattttgatgcttctgatgaaaattcaagggaagaagatttctttaccatttccaagaagaaagcatagaattggagtaactttttattgataatttcattcatatctattgtcaattgtattaatggtttttaaaagagacaaatcatgtctaactctcacgctgtaatattctaagtcgtacgtgaatttgatgaatattcattgttgttttacttaagagttatcgtattgagatccttaacatattattttatttttcatctaggttcttaaattataaaataatggattgagattagaaaatatttca

SEQ ID NO: 7457 - DNA, 2643 bp, Zea Mays
tagtaaagtgcatagcgatgcgtcttagttcgtgtctgttcagtcaggaatattggatgtgaatatgcctatcctgggtctacaggccaggccttccgtcagcagctaagaactgcattgtctccagatgagaaacttaccgctgaaaaagatttggctctgtattgcaagccagtcgagctctacaatattattcaacggcgagccatgaaaaatcccctttttattcaaagatgccttctttataatatacatgcgaggaggaaaaagaggattcagataaccatatcactttctggaagtacaaatactgagttgcaaacacattatgtctttcctctttatgttctgttagctagacccactagtaacctttcacttgaagggcattctccaatttatcgattcagtcgggtttgcttgcttacttcctttagtgaacatggaaataaggacaacagtgaagctacattcatcattcctgacgtgaagagtttgtcaacctcccgtgcttgcaaccatgatattatctttattagctgtgggcaagttggacaaagtaatggtgaagataactgctctgggaaccatgtggaagattcttctctccaaatgcttgaagggaaatgctcctggggtaaaataccaactaatttacttgcttcatctttggagagttgtgtcaatttaagtttgggacatattgtggagttggcatctaaagttacaatgagaccaagcttcttagagccaaaatttctggagcaagacagttgcttgacattttgctctcataaggttgatgctgtgggttcatataaactacaactatgcatgtccgcacaagaggctggtgcaagagatatgtctttgtctccatatagtagttactcatataatgatgtcccaccttcgtcattatcagatatcataaggttaagatctggcaatgtactttttaattacaagtactacaataatacaatgcaagagactgaagtcactgaagatttctcttgtccattttgctatgtacgatgtggaagcttcaagggtctaggatgccatttaaactcatcacatgatctattccactatgagttttggatatctgaagagtaccaggttgttaatgttagtctgaaggctgatgcttggagaacagaggtaaatttatgacagacataaagtttaagctgttttttttttcagattcaatttctgtttggtatatggagctgtagttgatgagtttcgtactttatatatgtgtttaacactttaacttaatatgtccctcagtgttcttccaaaggttcgtttaaatggaggctccacttagttgggcaaaccgaaggcattgcatgttccttagtccaggacgactccctgctttgtgatttccttcctttcttgagtgcagaagccaaggatgaaagagcattggctattctatatctccaatcaaattccttacatagtgtattgtgtacctcaatgattttttggtggataatgttttacatgcttaacaatgcatggttactatttctttaaatggaagcactcttaactgtatttggtaactaatgatcctaactggcagctttttgcggagggcgttgatccaaggcatcaaacattttcttatcgctcaaggtttaagaagcgtagacgatcaaagaacacaatggagaaaatcaggcatgtacactcacatattatggaatcaggttcacctgaagatgaggcaggatctgaggacaactttgtgcaaggggagaatgggacttctgtagcaaatgcttcgattgatcctgctcaatctttacatggcagcaatctttcaccaccaacagtactacagtttgggaagacaaggaagctatctgagagatctgaccctagaaatcggcaactcctgcaaaaacgacagttcttccattctcacagggcgcagccaatgcaactggagcaagtgttctcggaccgtgatagtgaagatgaagttgatgatgatattgctgacttcgaggatagaagaatgcttgatgattttgttgatgttacgaaagatgaaaaacttattatgcatatgtggaattcatttgttcgaaaacaaagagtgttagctgatggtcatataccttgggcctgcgaggcattctcccagttgcatggacgacaacttatacaaaatcctgctctgctgtggggttggcgtttcttcatgattaaactttggaaccataacattttagatgcccgcactatgaacacatgcaatacagtccttcaaattttacaagaagaaagcacaggactaaagtaattttgatgcttctgatgaaaattcaagggaagaagatttctttaccatttccaagaagaaagcatagaattggagtaactttttattgataatttcattcatatctattgtcaattgtattaatggtttttaaaagagacaaatcatgtctaactctcacgctgtaatattctaagtcgtacgtgaatttgatgaatattcattgttgttttacttaagagttatcgtattgagatccttaacatattattttatttttcatctaggttcttaaattataaaataatggattgagattagaaaatatttca

SEQ ID NO: 7458 - DNA, 1629 bp, Zea Mays
ccgagcccctacgttccaagtccaaccaacccattccccaattcagtatcaggcctttgcgaattgcgacagcgagagcgggaagaggaaactcgaaactcggcgagcgggatggcaaccggcccggagcacgtggcggcggcggtcgaggagacgccggagaagaaggcggccagcacaaccgagctccccgcaccctcaggctggacgaagaaggttgctccaactcgaggtggacgatttgaggttatttttgtttccccaactggtgaggaagttaagagcaagagacagctaacccagtacctgaaagctcatcctggaggccctgcatcctcagagttcgattggggaaccacttgtaagcaggtgatactcccagacgctcagcacgcttgagcgagaaggtcaaggcaactgagagcccagagggtgagaagacccctaaacggggaagatcaagttctaagagaggcaaaaaggaggaaaaagaagacacagaggctgcaaatgaggctggagaagatggtgcttcggaggaaggtaaaggtacagatgtggagatgaaagatgctgaaaacgctgaagacgagaagaaagaggtcccaaatgcagatgctgcagagaagactgaggaaggtgaagataagaaagaggaggcccctgctgtagatgcagcagagaagactgaggaaggtgaagataagagagaggaggaggcccctgctgtagatgcagcagagaagactggtgagaaagaggtggcccctgctgtagatgcaacagaggagacagaaaaaagcaccgaaggccaagcacagcctaattatgttgctgccccagaatctgagtataaaggagacggaaagccaggtgaatccgaagcagctccccttgcatttgttgatgaaacagctccccatgtaattattggtgaagagaagaaagaggaaaatactgagaatgagaacagtcaggcagccgaatctgccgtgccttccctggcatctttagagggagagaagaaagagaatggtggtgcccctgaacaaccagccctgcctgtagctgagacgaaggcagatgctcctccggcagaggcagaaaagggggctgaaaattcaggccagccgaataccggctctcaagaaccgaaggcagcaaactgcgacgaggggcagattcaacctggtgcctctgctgtgaggtgcacataagggagcttgatctcagatgggactctgttgcgttatgtctttaggacgatacctcgcatttgctttgagaattgtaatcgtggttaacctgacagcgctgtgtagcactaggctgcccagcacgtagttatcctttcgtttcttttataacggtggtgttgcagcatgggtaatgggccggcctgtgctgcctcagccaccactgcatacccagtgtaagtgtaactcgttattagcgtggtcgacattgatctgtggagaggactgcaggacagtactgtcctcgacagctgtaacgttacgttttgtgtgttcccttgtgttattgaacttatattatgatccataaataaagccataagcgtggcagggtcattccctgaccaccttcaggcatcaccatttgttggcc

SEQ ID NO: 7459 - DNA, 853 bp, Zea Mays
cgcacgacatccccagtgccggccgtctccgtccgcggcacgggcacggcaccaccccctgcttctctcccagcaggcccaggccgccagccgcctctcctgttctctttctctaaatagcagcgcccgcccgcgcgggacaccgcccgccctcccgcgcctttttccgctagccaacgcacggctgacggcaccacaaggagtaccagagagacaacaccgtgcagcctgattaggaacccagagatgataagcaccccaggatccacaactaaaagcaaaaccagcagcaactcgacgacttcccgccgcagaacggaggaaaccccgagctgccggttcataccgagctcgctcgagatggaggagttcttctcggcggccgagcaacaggagcagcatagcttcagggagaagtacaacttctgtcccgtgaacgactgtcctctccctggccggtacgaatgggcgaggctagactgctagattccccacccagcacaagagcaccattgatctgattgatatgtgtctaccacaccacaatgtgactagctccgccgccgccgccgtggaccgtggaggaggcgcaaccaactgtggatctcgatcgcattagctttgttgtctgttgtaaaaattagagtagttagctttgtagccggatgaatgatcttgtgtaaccaacaggcgtggttcacccctggtcacacaacctcactgtaacctgttaactgctcaagctgctgtaaccgaaccaatctcatgtagcgtaggcctagcgcagtcttctcatctgttcgtagctctcgaaattgattgaatggaattagagttaaaatttgcatggcaa

SEQ ID NO: 7460 - DNA, 3950 bp, Zea Mays
atggctgcgtccccgccaaccgccgcgtatatatatacggttgttgccgccttgcaggctccgttctgccgaccaggaaatccccttactctcctttcgcggcgtggttgcgacattggcgaagcttcttccttccttccttccttcccgctgtttacgttgcgttcgcgtgcaagttcctgccaaagcgaagaggctgctactggtcgaggagccattttcctctgcggcctgcacagtgagagagaaaggttggcagtgagtgagtgagagagagagagagacgcagcggcagcttttgcacgcccgcggcgcatcttttatccccgcgagctagttcgtctcatgtgtggcctttttcccgggagggcggcgggcgaaatgtgatgatgagttctcgtggcgtccgtcgatctgttcgccattctcccatcatcatagttccctgtcgtcctttgcgcatttgttcttgtcctcgggggagcgaggcgtcggggttcgcgcttcacgtgttgattcctcatcggatttcgtgatgcggaggccgctttttggacgcagctgaacagttgtgtctttttttgttccgttcttgcgcgcctgcgttgtccggttcttctctctcttactcgttcactatgtgtcttcaaaaaatttgaagctttcaaatctctgttactgctaccataatggcgacgtgattgcggagtctgatgagttatgggcttatggctctggttttgcaggacggtgtgaatgaaaggggctcaggatacaaggcacaggaagaagctggacctccaggttctcgcgcccttcccaggatgcctggggaggatgatcgacatgttcgacctcagcaatggcgtggttgccaccaagatgctaactgagaaggcacatagagatgtttctccggccggaaaagaccgaagtaacactttcaagatggcaattatccccccagctcagacagaagataaacaagtctgaaaaaaaatgtttattcttgcatcgaaaccaaacttgacacaactggaagttacacaaccttgatcttctctaatttacctgcagatagatagccagacgagaaggaattcccctactaaaagatcaaactcgcctactaaaaggagcggtgcagcgcctgttaagatgatcatggagcagggcatgtggaaagaagggatgcctgatgaggagccactgaatgttgttgcaagattaatgggactacatgatgctccagttcagcaatctaatttccatttagcgagacaattggataaggaatatcaacgtggtggttttgaagagaactaccggaatctcaagccaaataaggaaagcaaatgccatcaaaaccaaaaggcagggcacacttggaatggttctggtgaccaaccttcaagaatcaatagcagccggagcaagcatcaaggaaatgagccttgctgtgagaagaggatgtcgcttgtccgcgagaagtttgctgaagcgaagcgtctagccacggacgagaagcttcttcattcgaaggagttccaagatgcactacagtttttaagctcaaatagggacctattcttggagttccttgatgagccaaatcctctgttatcaagcaaccgttatgagttccaacctgtcgcgccaccttctcaagcgaagcagataaccatactgaagccatcagaactagcaaagagaaaaggcagcattcttgtggggagacaactgttttcagatggagatgaaaggggacttaacagatacaggcgccatcagagtttagatgtttgcccggcaaattcaaatttgtccgagccaacaaaaattgtgttactgaagccaggacgactgtcaaaacctcatgattccaggattgcaaggtcttcattatcatcagcagaaaacagtgaagatgaaagtatgacgacggttgatgaaaccgtgtgctcaagaaggttggcaaaggaggtcacttggcagacgaggatgcggctaaaagacaagcaagacgaaaagagcacgctctcatgtgaataccttgacttctatatcggagatgactccttcagtaaatcagaagttgagatttcaaaagagatgcctggtgaaacaagtgaggagttggagtttggcactccgacttctggccgttcctgggattttctgagcagaagtggaagtccttactctgcgtcatgctctagccaggcatcccatagaagggaaccgtcggtagttagggaaggcaagaagaagattttggagagatggtctatggtatcgtcaacagtcagtagcgaggaggaaatggaaggtcgcagaagtacaggcacgcttggtgacatactcacaataccgaaagtcaaggaccaggaaggaattggggcggaaacactggggagcccagcacctgagctggaacctgaggagcctttctcatgcttgccaagatctcggtctcttccactttctctgtcctgtggagtcgccgagtctaatggaggagtagcctctggtagtactcaggaagctgaaagggagaggatcaggaagtcatcatcgtttagggaaaaggtttcaagcctgttctctaaaaacaagaaaccagttagggagaaggcagatctatccgtgagcaatagactcgaggtctatggaggggctgaaactactgctgatgtgaagaagggcttgaaccgtcttgcgttagacaatcttcagaaacaaagtactagtcgtgtaaacacagacgggaagaagaacgctgcgcaaggactcgtcactagttcttgtggtactaatgatacagctaataccacccctgccaagcttcgctgtatcaggacaacattgcctccattccaagtcttggcgccccaggaatccttggtgaccctcaggaccagcctagtcctgtatctgtgctagatggaccgtttattatacgtgataacagcaggaatgtactgtactcatctccatccccacaggctttgtcgaggtctcccttgatcggatcgtttccacggtccctgccagtgtcgtgggaggaccccccgccggaagccacgtcgccgaattccctgagactctcgaggcttttctccaaggccgacgaggatctagactcgctgacgttcatccagaagctggtccgctcctgtggcatggaccgagcaagctgcgtgttggctggccctctggacccggacctgctcgagaaggtttcagagcacgaagacgacggaaccaggttcgggagaaggcggcttcttttcgacgccgtaaacgaagcgctcgccgagctcgcctggacggcggaactggccgcgtacccctggggcggcggcagatcacgcctggactgcaactgcaagaacggttccggtggtgactcggcggccgaggagatctggcgcgttatcaggaactggtcgacacttgacaagtaccctccctgcgaaactatcgaaggaaacgtcttgctggagatgatactcaggcgggaggcggacagcggcgagacggctcggttggaggtgtttggtctcggcgcctcggtctgcgccgtggtgttggaggagctggttgaagagacggttgtggatctcctgactgactgctagtgagtgatacttgctgctgctgttaacactgctccgttaatccacccctcaagatggaatgggtctctttgccttgttcacatctttgttttgaccggcatttgctctagccgttgactggtaatggatcatgccatttgtttcgccgtttaattacacacacgagaccaaaaaaaaaaactgtaagtagttgcatctcggagcctgtccctaccctgtccacaagatgatcttgttttaatccaagcttagagcctagtcccatgcatgccacaagtatgaaacataatacatttttttattattctg

SEQ ID NO: 7461 - DNA, 2787 bp, Zea Mays
ctgcttcgcaacacccaccgctatgaatgcgtgatctactaccagcacacagtagtgccccccacccaaccacggattgaaacagctgcagccgagcctccctccctccctcctctcacactagctcgttcatcacagagacggacagatagaaagaggaggagatgcatgaagcccaatctacgctcccacagtagggatccctcctccattaatagggggggatgcgtgtcgcggctagccaagcgacgacgcgagctgcctcgctcctctggccagccactccaggtccagggcgaggcgccagagctgcatcgcgctggctagctagctaactagcctgggcgcctagcgctagaagaaacagagctgagtggcggggtacaagcgagcgcggtggacaaaaggctagccagagagacgatggacggcggcagcggaggaggggaggcgtggcgcggcgcggtgtcgccggcagcgcggtacgcggagtccggcggcgccagcctcacgtgggagaacctcacggcggtgctgccgggcggcggcggccgggccaccaagaagctggtgcaggggctgtacggctacgccgtgcccggccgcgtcgtcgccatcatggggccttccggctccggcaagtccacactcctcgactccctctccgggaggctggcaaggaacgtggtcctcaccgggaaggtgctgctcaacggcaagaagaggcggctggattacggcatcgtggcatacgtgacccaagagaacgtgctgctgggcacgctgacggtgcgcgagacggtgacctactcggccctcctccggctgccgtcgagcacgcgcaaggcggaggtgcggcgcatagtggacgagacgctggacgagatgggcctccgggagtgcgccgaccgccacatcgggacgtggcacctccgcggcatcagcggcggcgagaagaagcgactgagcatcgcgctggagatcctcacccgcccgcgcctcctcttcctggacgagcccaccagcggcctcgacagcgccgccgccttctccgtcgtccagacgctgcggcagctcgccgtcgacggcggccgcaccgtcgtctcctccgtgcaccagcccagcagcgaggtgttcgcgctcttcgacgacctctgcctcctctccagcggggagtgcgtctacttcggtgacgccaagctagcgacacagttcttcgcggaaacggggttcccctgtcccagccggaggaacccgtccgaccatttcctccggtgtgtcaactcggacttcgatgatgtcgccgccaccatgaaaggctccatgaagctgcgagcaagctcgatcccctgttgaagtactctacctcagagatcagggaacggctagtggacaagtacaggatctcagattacgccatgatggttaggagcacgatacacgagataaccaagattgagggtgtgatggaggatgtgatccgtggcagccaggcgagctggttgaagcagctccgcacgctgacaagccggtccttcaccaacatgtcccgcgatctgaactactactggctgcgcatcatcatctacatcgtgatggccatctgcctgggaaccatctactacgacgtgggcaccagctacacggccatccaggcgcgcgcctcgtgcggcggcttcgtgtcgggcttcatgaccttcatgtccatcggcggcttcccgtccttcatcgaggagatgaaggtgttcaccctcgagcgccagaacggacactacggcgtcgccgcctacatcatctccaacttcctctcctccatgccgttcctgctcgccgtgtcctgggccagcgcgtccatcacgtactggatggtcaagttccggccgggcttcagctacttcgccttcttcgccctcaacctctacggcggcgtctccgtcatcgagagcctcatgatgatcatctccgccctcgtgccaaacttcctcatgggcctcatccttggcgccggtgtcatagggatcatgatgttgacctctgggttcttccgactgcttccggagctcccaaagatcttctggcggtatccagtgtcctacattgtctatgggtcatgggggttgaagggcgggtacaagaacgacttgatcgggctggagttcgagccgatgatgccagggcagccgaagctgaccggcgagtacatcatcaccgagatgatggggctgagcctgaaccactccaagtggctggacctcgccatgatcttcgtcctcctcttcgcctaccgcctcaccttcttcgtcgtgctcaaggtgaaggaggccgctgcgccatacatccgcgtcgcctacacacgattcaccgtcaagcgtctcgagcggcgcgcctccttcaggaagacgctggccatggcgtccatgtccaagcggcacaacccgccgcaccccatggccatccaggaaggactcagctcgcctatgccgtactgagctgagccgaggcgaaggagagagcggagggagacggaagtggtggtcgatatcacagttacttgtggatgtgcttacagatttgtccgttccattgtttagtttgtcagagagcgttgtcaaagataccccacgcgatagtcggtcttcagagcattcgtttcactgtaataactctgaacaccatacacatacaagatagtgctgctgtgcgtacttgtttttttttgtaaacatgaaaccaggcaatgatccttatattaagaaagtcacgcagtcaaaacttacttattattaa

SEQ ID NO: 7462 - DNA, 783 bp, Zea Mays
agcgagagcacaagaaccatcgccgccgggaccgtgacgctggacggcctgaagcggctgcggggaggggtgttaaacgggcctttcctgggctacggtggacagcccagttactaagttaaccctcgctcttcctttcccctcggttctcgttgtctgacaggcaaagcggctatgacgacaacggccgccgggtacggctgctgctgggcggggattccgcccttcgcgttgttgccgcggattctctcgacccgccgggagactcctcctcctcctcctcctcgcgcttcccttgtcgcctcctcctcgaagctcagggcgctggcaccacggctgagagtttcgaaccgtccaaggaggctcattgtctccgcttcctcctccggcgaggccaattcggacgcggcgccgtcgccaacggaagccgctattgatataaagcttcctagaagaagcttgcttgttcaatttacatgcaacgcatgtggcgaaaggaccaagcgcttgataaacagagtagcctatgaaagaggcacagtttttcttcagtgtgcagggtgccaggtgtaccataagtttgttgataatcttgggctagttgttgagtatgatctacgagaagaaaacgagctacaaggagaaaatgcggtggacaccagttctgaagattgatctgctgtgagaagcggtgttggttatactggcgctactgatatggtgctgatatttgatatccacgctactctggcatcattgagattttgatcgacgaccgggaca

SEQ ID NO: 7463 - DNA, 1752 bp, Zea Mays
cagggacctccatggatgcgtgtgcttgtcaccatgaccatttgcgtttttatcgacaactctaaacttccaagacgtgatgaaaggtggttgatacaaactactcaagtctgccaatggcttaaaacacactttcacaacctgtgtacctgactaaccccgtgacgtcggagggtggaggctttgcctaaaccctcgttgctggccccttaacctcaccctaacccggccatggtgagctcggatccggacgggaacggaggcgcgccggacgtctccgagcttttctgccactacaactccctctacttccgcgattccctcggttcgtgcgctgtctcatggaccgaggacccactacctgattgtgatgtaagcacatgtgactattatccgggaggtggtggctgtataatactgctttccaaatcattatgcgggtctcataatggatctgatctgaagaatgctttgcttcatgagatgattcatgcctatatttgcatcaaagacaataacagtaaccatagtgatcatggtgcaaaatttcagaaactgatgaatacaatcaatttgagttctgtagctgatccccatcgaccagttgatggctacagcataactctgctccatgagatccataagaaatattatcactacaaaattttatcaagtcaaccaatatgagaggaccttctggtgatgactgcattgagagaaaaggtgtagatgacccatgtcataattctaactgtcactggcatagacacaagcagcagtgttcgggtaattattgtagagttcaagaatcatcaccaggaggtccagaactaaaatgtttggaagctgtagaagcattcaatgagggcaaggttgaagaacctgcctgtacaagttggcacaccacacatacatcaaataagagcagaagaagcaataaaaacgagcgggaagatgcctctgtggagttccttcatgttgcacataatgcagttgtctgttcaggactggattcctcttcaaaagacaggtccaataagaaaatcaaaatttcaaaggatgttaactctgaccttggaaggacagaaactgttcaggaagcaccaaaacgcagaagaacagctgtactagataaccaagagtgcagcagacggaagaaaaggaaacaaagcaatcggtgtggttcctattcggtaataattgaatggttgaattactattgtcttagtgagtcggatgaagatgaggtgccgttgatcaataagcgaacagaaagaaggcgccgacaaagattacatgaaatgtatctagccagggaatccaatgatgttgagtttggcagctcaacttctcataaggttggttcttgctcactagctcccaaggacaataacaaaggtgaaagtgtgccagcttctcaacctgaagaaagatcctgctcaagtcatcctgtgagtagcaacggagttgctggaaatcaagctggtcatgaacatatgtcttctccaacggattcaccaattagaggtgaaattgtagacatttcagatggttgagtgcaagagttccgcgttagttccttgtagctggatcctggatgaaataatatacagtgtaatggctataaagaccctgggttttcctatgcaccttccaactgctagacatgcgcacactgccaagcagcctttgtactgttttccccccttcatctagcctttgtatataagcttatttgttcctttctgcatt

SEQ ID NO: 7464 - DNA, 1551 bp, Zea Mays
aaggcaaaaagttgcatttgtgatgatcatctgaagattcagtctggaaccttggctctcagctctgctacctgatgttcagataaagctacacttcctagccctgttttcttggggaacattcaaacgctcactgctagtgacttagacaaatacaaggcacatgcatggcttctttctcctccatgccagccatacacacgacaaggacttcagaagcattcagctgatgctcgtgcattttcgttcatcaagattcttaacctcatgcaagacatgagctatcctccacaaatgttatttgtggaaaacgtagttggatttgaggtgtctgatacacatgaccagttgctggaggtcctttcaagtctcaattttaacacgcaagaattcatcctaagccccttacagtttggtgtcccatattctagacctcgctacttctgtttggcgaaacgtgaacctgtgcggtttcgacatgcattcgtcaacaataagttgctccagacacctatgtgcctgagcctgacactgagcagtacatcacagggtagcgaccaccagactgaagaagagctagagccagtttgtaagccaataaaagatttccttgtcaaggaggctgatggaggcactccagatgagacagttttgcaggattatatggtcccagtaaacttgattgagcggtggggcaatgctatggatattgtataccctgaatttaagcggtgctgctgtttcactaaaagctactatcgttatgtgaaggggacaggctctttgttggctacatctaaaaacctcaatgttcctgaagagaagctccaaatttcttccctgaaggagttgggcctacgatttttcacccctcgtgaggttgccaatttccattccttcccttcaaatttctgcttcccggatcacataagccttaggcaacagtatgctatgctgggtaacagtctgagtatagcagttgtgggtcctttgctgcattatctctttgctgaggcctgagtcatagagaagtccagtcagccctggtgacattagcatggcacaaacactgtggctgcgatctgccaaaatttcttcatacgtgatttaagcaaggttttggggactacagtttggccatttgatgagcacaccgtgtaggcacaacctcacaatgtatcaacaaaagtgtaccatacagtagagaagctgtttctgcgcatacttcctccccctcatgcctatgctgtcatggtgaatgaattttggaattgtgatccgttgatgtgtgcatggatgaggctgtcgtaacgattgttgatctgagctttaagtaacttggaacctacttactccgagcaattccaattctattcttagctaacccatttaaagtttgacaatatttatgatgtaaaatatgtatagcaagtataaaatatactcaatgaagaatctatatcataaatattgacactttttttatataaacatcgtgaaactcaagattctttgacttggtattatgtttgaattgtattttgttttcgg

SEQ ID NO: 7465 - DNA, 1833 bp, Zea Mays
gaactctccgactcacagagtcacagtcacaggctcagccaacataagggaaccggggttccaaacagttgctgcagcctagcacgggccgcgcgactgccggaggcgatggaggcgccggcaccttggagagtgctcgagttctacagcggcatcggaggcctgaggtactcgctgatggcgtcgggcgtgcgggcggaggtggtggaagccttcgacatcaacgacgtcgccaatgacgtctatgagcacaacttcggccaccgcccctgccaggggaacattcaaacgctcactgctagtgacttagacaaatacaaggcacatgcatggcttctttctcctccatgccagccatacacacgacaaggacttcagaagcattcagctgatgctcgtgcattttcgttcatcaagattcttaacctcatgcaagacatgagctatcctccacaaatgttatttgtggaaaacgtagttggatttgaggtgtctgatacacatgaccagttgctggaggtcctttcaagtctcaattttaacacgcaagaattcatcctaagccccttacagtttggtgtcccatattctagacctcgctacttctgtttggcgaaacgtgaacctgtgcggtttcgacatgcattcgtcaacaataagttgctccagacacctatgtgcctgagcctgacactgagcagtacatcacagggtagcgaccaccagactgaagaagagctagagccagtttgtaagccaataaaagatttccttgtcaaggaggctgatggaggcactccagatgagacagttttgcaggattatatggtcccagtaaacttgattgagcggtggggcaatgctatggatattgtataccctgaatttaagcggtgctgctgtttcactaaaagctactatcgttatgtgaaggggacaggctctttgttggctacatctaaaaacctcaatgttcctgaagagaagctccaaatttcttccctgaaggagttgggcctacgatttttcacccctcgtgaggttgccaatttccattccttcccttcaaatttctgcttcccggatcacataagccttaggcaacagtgagtttaagttccattatacacttctggttatctttagtaagcgacaagggcatttgaattgcagtacatataagaaacatgagagatgaggctatgctgggtatgctatgctgggtaacagtctgagtatagcagttgtgggtcctttgctgcattatctctttgctgaggcctgagtcatagagaagtccagtcagccctggtgacattagcatggcacaaacactgtggctgcgatctgccaaaatttcttcatacgtgatttaagcaaggttggtatttaagtatggttttggggactacagtttggccatttgatgagcacaccgtgtaggcacaacctcacaatgtatcaacaaaagtgtaccatacagtagagaagctgtttctgcgcatacttcctccccctcatgcctatgctgtcatggtgaatgaattttggaattgtgatccgttgatgtgtgcatggatgaggctgtcgtaacgattgttgatctgagctttaagtaacttggaacctacttactccgagcaattccaattctattcttagctaacccatttaaagtttgacaatatttatgatgtaaaatatgtatagcaagtataaaatatactcaatgaagaatctatatcataaatattgacactttttttatataaacatcgtgaaactcaagattctttgacttggtattatgtttgaattgtattttgttttcgg

SEQ ID NO: 7466 - DNA, 1033 bp, Zea Mays
aaaatttgttaaattcatatttaaggacctttacataactgctctaagttccattgatacgtttcatcgattttcggaggaatttattcgaggaatctagtgtttgaccggctccgctcgattctgcttcgttaccacgcgggtgctatcgaatcttggcggagatggggctcacgttcacgaagctgttcaggcggctattcgccaagaaggagatgaggattctcatggtcggtctcgatgcagctggtaagaccaccatcctctacaagctcaagctcggcgagatcgtcaccaccatccccaccattggatttaacgttgaaactgtcgagtacaagaacattagtttcactgtttgggatgtcggtggtcaggacaagatccggcccctgtggaggcactacttccagaacacccagggcctcatttttgttgtagacagcaacgacagagagcgtgttgttgaggccagagatgagctccaccggatgctgaatgagggtttgtatgaggggcttgactggctttcgaacaacatcgctaacaaggtataccatgtctgactgtgtgctcgccactgtctgagtcgttgtactatcccgggccggcctgtccggctgtctcttggcatagcaaaatgatcgcctaatttgttagcacatgctcggtaatatcacgagggcttcggtggtcttattgctcacgctgaattctcaactttgctcttcttttctgcggttgaggttgcatcttgtattgttggctgatttcgagcaatcagaggattgtgctacgtcgtcggaggcatcatgggatagcagctagctttcgtctttgaactgggcttcggttctaaattcgacttcacttttatccttcattaaactttttaactttgatatcgctatataaactggttgtacctttaacactatattttatctttgtaattgatggttagtgattcaagagagcattgtttttttttttgttgatcacacatgttgcgtgtgcgacgtcagctatgaac

SEQ ID NO: 7467 - DNA, 1186 bp, Zea Mays
aaaatttgttaaattcatatttaaggacctttacataactgctctaagttccattgatacgtttcatcgattttcggaggaatttattcgaggaatctagtgtttgaccggctccgctcgattctgcttcgttaccacgcgggtgctatcgaatcttggcggagatggggctcacgttcacgaagctgttcaggcggctattcgccaagaaggagatgaggattctcatggtcggtctcgatgcagctggtaagaccaccatcctctacaagctcaagctcggcgagatcgtcaccaccatccccaccattggatttaacgttgaaactgtcgagtacaagaacattagtttcactgtttgggatgtcggtggtcaggacaagatccggcccctgtggaggcactacttccagaacacccagggcctcatttttgttgtagacagcaacgacagagagcgtgttgttgaggccagagatgagctccaccggatgctgaatgaggacgagctccgtgatgctgtgcttttggtgtttgcaaacaagcaagatctgcctaatgccatgaacgctgctgaaattaccgataagcttggcctgcactccctgcgccagcggcactggtacatccagagcacatgtgctacctctggtgagggtttgtatgaggggcttgactggctttcgaacaacatcgctaacaaggtataccatgtctgactgtgtgctcgccactgtctgagtcgttgtactatcccgggccggcctgtccggctgtctcttggcatagcaaaatgatcgcctaatttgttagcacatgctcggtaatatcacgagggcttcggtggtcttattgctcacgctgaattctcaactttgctcttcttttctgcggttgaggttgcatcttgtattgttggctgatttcgagcaatcagaggattgtgctacgtcgtcggaggcatcatgggatagcagctagctttcgtctttgaactgggcttcggttctaaattcgacttcacttttatccttcattaaactttttaactttgatatcgctatataaactggttgtacctttaacactatattttatctttgtaattgatggttagtgattcaagagagcattgtttttttttttgttgatcacacatgttgcgtgtgcgacgtcagctatgaac

SEQ ID NO: 7468 - DNA, 1302 bp, Zea Mays
aaaatttgttaaattcatatttaaggacctttacataactgctctaagttccattgatacgtttcatcgattttcggaggaatttattcgaggaatctagtgtttgaccggctccgctcgattctgcttcgttaccacgcgggtgctatcgaatcttggcggagatggggctcacgttcacgaagctgttcaggcggctattcgccaagaaggagatgaggattctcatggtcggtctcgatgcagctggtaagaccaccatcctctacaagctcaagctcggcgagatcgtcaccaccatccccaccattggatttaacgttgaaactgtcgagtacaagaacattagtttcactgtttgggatgtcggtggtcaggacaagatccggcccctgtggaggcactacttccagaacacccagggcctcatttttgttgtagacagcaacgacagagagcgtgttgttgaggccagagatgagctccaccggatgctgaatgaggacgagctccgtgatgctgtgcttttggtgtttgcaaacaagcaagatctgcctaatgccatgaacgctgggtttgtatgaggggcttgactggctttcgaacaacatcgctaacaaggctcgaagcatctaggcaaggcttcaatcagtggaagcaaactgcctctaccattacagctatgaagtatatagtcgtgattgtgtcagacgtggtgtgtttttgggagataaaaggctcttttggtcgaggagctaggtatcagatgttttttatggtacctgtaattttccgtgcttctgttttggttttgtgcaaggtataccatgtctgactgtgtgctcgccactgtctgagtcgttgtactatcccgggccggcctgtccggctgtctcttggcatagcaaaatgatcgcctaatttgttagcacatgctcggtaatatcacgagggcttcggtggtcttattgctcacgctgaattctcaactttgctcttcttttctgcggttgaggttgcatcttgtattgttggctgatttcgagcaatcagaggattgtgctacgtcgtcggaggcatcatgggatagcagctagctttcgtctttgaactgggcttcggttctaaattcgacttcacttttatccttcattaaactttttaactttgatatcgctatataaactggttgtacctttaacactatattttatctttgtaattgatggttagtgattcaagagagcattgtttttttttttgttgatcacacatgttgcgtgtgcgacgtcagctatgaac

SEQ ID NO: 7469 - DNA, 3665 bp, Zea Mays
ctaaaggaggcctggtttccctgctcccgtaagccgcgtgcgctctctcgctctcccagagtcccagcgcgacgactggcgaccgccgcccccaccctgcgccacgtgccgagggcttcgccgggcccttcgccgctcgccggcgacgagcacacaccagatccaccaatctcgggcctgttccctttcaatacacgtgggttgttgtcgaaaatgaaccaatgcccccctcaatctctcccaacataaatggattgtggaaatttatattgtttctgagcgaggactacaatatacatgtattacatccactaccttcgttcgttatccggtatcctatactgatcgccccctgcctcaagtggatccacaatggttctgcctcgtcgaaccccagaactgctggaggccgatgaagcccaaagctttgtgcataagcttcagctcagtgtctcggggggccttcctcatgctgtgccagtgccaggcttgagaacagaagaacatgagctggttaaagctgttttccaggtgctgcaaggcttcgagacgtcctggttctattgggacagtgatgtgccttggtaccgtgagaaagcggggatatatgtggctcacttgtcactgacgggtcttaggtctttgttgagtccattcctgttcacggcaacatgcttaaagcaagtagagctttttgttgggaaggttaggatgcaacatcacaagattccgacgttggatgcgttcgctagctcggttgattcttggcttaagaggctccgcaaagcagctctgaaggaggaagaacagcaatttgtttcagtcaacaagactataactctgctgggattaactgattcattgtcaagtttacgttctggagcagaacatttgtctcaagttttgcatggagctgtgccagatggcttttgggattctggtgcacatatggcatctagtgaagttgcagttcatattcttgaccatctcttcaagaagttaaatgaagtatgtcttctggaagatggcgagggtgaaccatttcatatgctgctagtgatatttactggaagtttattaccttatcttcaatgtcttgattcctggctatatgatggtatccttgatgacccttatgaagagatgttcttttatgcaaataatgcggttacaatagatcagccgtcattctgggaaatgagctatatgcttagagtaagaggttcaagagttgacagttcaacaactttaactgagagcgaatctatcaagaaaaaaggatcaagcaataaggaatctactactgcaggagcttgcttgaaagtgaacaatcaaggttgtgtgtatatattatgcccaacatttttgaaggatgttgcgagggccattgtatctgcgggaaaatcctttcaacttgtcgaacatgttcaagacgtacatcagattcaaactcacaaaagtacacatcggtccaatttgtatcaagatactaattgcagtggtcaacagaaattttggccagatatgtcaaatttaagaatccatgatggtcctccaagaaataaagatgctcttgaagtatccacaagtcagtttgggaatgattctcgtgaaatgggactcctaaccttgtctgagatcttcttgatatgcatatctggtctgttagaaaatggtgaccatgtatatgagtacttaagaacactgcatgctgataatgttccaaataacaatgcttttatggaaaatgagagcaacttgaaagaaacagagggtacatgcacagggaacatcattgagaagacttgggtaaagctcctaaaggatgctacatcaggaaggaaatgtaatggcatggaggagaccatacatgctgttatagataaggcaggatttgcctctggttgccccaaagatgcatcttccaatgtcgtagaaggggttttcactttatcttgttacgaaaacccagctatcactgcttgcagagaagtgctaatgaggaacccagcttcttggagtgaactgaatatatctgaaagttttcatctccctccactgaatgatgggaacatgcgaagagctatatttgctgatgggcattctgcaggaactagcactgattataagtttggtttccagtttgatgatctggaacatgtccgccaagaagatgacagaaggaccttggaggacctttacgcatttccaacccttcttccttgcgcaaaagaaaatgcgctgctgtcagaaattttacctatgcagaaagatagtacactagcatcgagagttttgaagtttattcagaatatgagcatgaaagatccccttcagccagtgggtatcatccaagaatgcctttccaaatgtcgatctcataggcaatcaaatcctgtgcaagctaatgggtgaatggagattaatggatgaactgtttgtgttacgtgctatttatttgctaggatcaggtgacatgttgcagcagtttctgataacaatttttgataagcttgatagagggaattcctgggatgacgactttgagttgaataatttattgcaggaatccataagaaactcagctgacaaaatgctcctgacagcaccagattctttggttgtttcattagcaaaatatgacacacacaatggtgaggaaggtatatcaacttccaaaaaaggtcgtgcacttggttttggcattgatgcccttgacatgctgaattttacatataaggtgtcttggcctcttgatctaattattaatacagaggcactgaagaagtataatcaggtaatgggattcttactgaaggtcaaacgagcaaagttcgttttggatgaaacacgaaagtggatgtggaaggccagaggcaggaccgcgcacaatttcaaacaacacctaatagtggcacagaagctcctccattttgtcgatgcatttcatcagtatgtcatggaccgagtttatcatagtgcatggactgagctttgtgatggcatgacggctgctaccacactggatgaagtcatggaagttcacgaggcatatctctcttctattcaacgacaatgctttgtggcctctgataagctgtgggccctcattgccagtcgagttaagactattcttggattggcactggacttccacaatgtagaacaaactctcagtaccggtgggacggcttcagctgtgaggacacgatgcgagatggaaatcgaccggattgagaagcaatttgatgagtgtgtcatatttctcctgaggatcctatctttcaagctcaatgtgggtcatttcccccatcttgccgatctagttacaaggatcaattacaatcactatttcatgtctgatagtgggagcttctctgctattcctgggtcccggccacggtagtagactagtagagcaagcagtggacagaattgttggtgttgcacctgggtgatttttcctacccttttttgagaagaaccagaggcgtggtttgtttactttcgaaatagaaagctccagaacagtgctaatgcttctctctccaaattggaacaaaaaatcatgcctcgggcttgttacaatatctatatgtagattgttttcaaaaggatgacactaaaaaaggtggcataaaatgcggctgaacctgttacatttt

SEQ ID NO: 7470 - DNA, 2186 bp, Zea Mays
ccagttgttcaacacgcgcgcgctccgtctctgttttctttttccgaataacctgcgcgctccctccgacttccagcggtgcgcagtggcctttctttgtggcttccagcggctgtgactgggcgagcgccgacgctgctctactacagctgcccaggtcttcgtcgggcactttgccagcgacgtgcaccaaccagaaattgaaggacccgagggaacagtttatgccaagggagttttcattttgaagatacaaattcctgaaaggtacccttttcaaccaccgaatgtgacttttgttactcccatttatcatcccaatattgacaatggaggacgcatttgccttgatattctcaatttgcccccaaagggagcctggcaaccatcactcaacattgctactgtgttgacaagcattggcttgctgctaagtgagccaaacccggatgatgggttgatggctgaaataagccgagaatacaaatacaatagacaagtatttgacacaactgctcagttatggacagataagtatgctagttctgctgctgttggtgctagcggttggtgttctgtagatgctgatgtcctggcacagaatacacagatggaggacacaaataacctgggatcactgccaaatgtttctaaaaaagtttgtgaagggaatcaaaggaagatgcggttactgggacaaaagttatcactaaagtatgaaagatctgaagagagtatgaaaactgtcaagcaagacccagttgctagctacctaccatccatggcaggatccacttatcctactgcttgtttttcagatgtttcaggcagaaagaatgatacttcagagaacatgtctatcagtactgatagtggagtggtttcaaagcaagatcaccaaggccataaaaaggaattgcagttacctggccagagtctttttgttacctcagaagccccttgcaaaagcagcgatgccagtgatatgctatctaatcatcttccaatagatgcatctgatgctaaagatcatgtcatgcaatcttctgatggcattttagagaataattcggcaaggagaattggcggatcatcagctagcgcatataaagcaccggaaggaaaccgaaggaatatcagggcactgaagttgtcactgaaatcagtaaagcctgaaaagaaaaacaacgatcaaaatgaaaatatggctccaaaccatctgccttcacagtcaagctttagctatttgcagaaaaggcccttagatgctgtttcaaggaaaaaattcgacggaggtcctgcactggttcaacagaatcctaacactgagcagaaaccatcgaacactaacatggtatcaaatgaagagcgcaaccaaggtctaaagatgctgtgttcacaacgcaggaggctgtcactgaaatcggagccgcggctgcctagagtagaaaatgcctgtgaaaaggagactaagcgacccaataattttcctctaagcgatgagaaactcaatgaactgccatcatctgaaccaatccccaaaggtgaacccgtggcacccagtgaactcccattttcggcgccagcagtcctcaaaagtcaaaccagggcccttggctctgctggtggacagaaagactccagctcaggcaattcctgtgtcaatgaaaacacgcttgccatcgagaatgctgttgtttcagacagtgaagatagcgcagacgagcgtgaaaggcccccaagatcaaggctatcattgatgcggagacgactgggtggaaagctgaggacttagtgtcaccgcagaactatttctatgctgcgttgtaaattcttggaaggcgagtattccaatttgctcaaacaaattgtgcctgcgtttgtggtagatcaggccctataggttagtatatgtgttagagaactctgtcgtcctacaacgtcgtggagggtgctctgttggtggtactccttttgttggtaacgaaatttgaagaactagatttttcttatgcaattcagttttagcagctgcgtattgagcaagtattggtggttctacttttttttaaccagatgtttccggagggcatgtacagtgtaggaatgctaagagaacagtggaagtcttgtacatgatggcaagatcctttgatatttggttctactaaagttctttgttctcc

SEQ ID NO: 7471 - DNA, 2249 bp, Zea Mays
ccagttgttcaacacgcgcgcgctccgtctctgttttctttttccgaataacctgcgcgctccctccgacttccagcggtgcgcagtggcctttctttgtggcttccagcggctgtgactgggcgagcgccgacgctgctctactacagctgcccaggtcttcgtcgggcactttgccagcgacgtgcaccaaccagggtagaattttctgcaaaaccacaaaatggctcaggccgcaaggctgaatctgagaatgcagaaagagattaagcttctattggatgatccaccccatggggtttctcttaatctttctgaagacaaaaatgtcttgtcatcgttatcaagtatcgaagccaaaattgaaggacccgagggaacagtttatgccaagggagttttcattttgaagatacaaattcctgaaaggtacccttttcaaccaccgaatgtgacttttgttactcccatttatcatcccaatattgacaatggaggacgcatttgccttgatattctcaatttgcccccaaagagccgagaatacaaatacaatagacaagtatttgacacaactgctcagttatggacagataagtatgctagttctgctgctgttggtgctagcggttggtgttctgtagatgctgatgtcctggcacagaatacacagatggaggacacaaataacctgggatcactgccaaatgtttctaaaaaagtttgtgaagggaatcaaaggaagatgcggttactgggacaaaagttatcactaaagtatgaaagatctgaagagagtatgaaaactgtcaagcaagacccagttgctagctacctaccatccatggcaggatccacttatcctactgcttgtttttcagatgtttcaggcagaaagaatgatacttcagagaacatgtctatcagtactgatagtggagtggtttcaaagcaagatcaccaaggccataaaaaggaattgcagttacctggccagagtctttttgttacctcagaagccccttgcaaaagcagcgatgccagtgatatgctatctaatcatcttccaatagatgcatctgatgctaaagatcatgtcatgcaatcttctgatggcattttagagaataattcggcaaggagaattggcggatcatcagctagcgcatataaagcaccggaaggaaaccgaaggaatatcagggcactgaagttgtcactgaaatcagtaaagcctgaaaagaaaaacaacgatcaaaatgaaaatatggctccaaaccatctgccttcacagtcaagctttagctatttgcagaaaaggcccttagatgctgtttcaaggaaaaaattcgacggaggtcctgcactggttcaacagaatcctaacactgagcagaaaccatcgaacactaacatggtatcaaatgaagagcgcaaccaaggtctaaagatgctgtgttcacaacgcaggaggctgtcactgaaatcggagccgcggctgcctagagtagaaaatgcctgtgaaaaggagactaagcgacccaataattttcctctaagcgatgagaaactcaatgaactgccatcatctgaaccaatccccaaaggtgaacccgtggcacccagtgaactcccattttcggcgccagcagtcctcaaaagtcaaaccagggcccttggctctgctggtggacagaaagactccagctcaggcaattcctgtgtcaatgaaaacacgcttgccatcgagaatgctgttgtttcagacagtgaagatagcgcagacgagcgtgaaaggcccccaagatcaaggctatcattgatgcggagacgactgggtggaaagctgaggacttagtgtcaccgcagaactatttctatgctgcgttgtaaattcttggaaggcgagtattccaatttgctcaaacaaattgtgcctgcgtttgtggtagatcaggccctataggttagtatatgtgttagagaactctgtcgtcctacaacgtcgtggagggtgctctgttggtggtactccttttgttggtaacgaaatttgaagaactagatttttcttatgcaattcagttttagcagctgcgtattgagcaagtattggtggttctacttttttttaaccagatgtttccggagggcatgtacagtgtaggaatgctaagagaacagtggaagtcttgtacatgatggcaagatcctttgatatttggttctactaaagttctttgttctcc

SEQ ID NO: 7472 - DNA, 2001 bp, Zea Mays
cacggacggtccccccaccacgtccaccccgctccgctcgccaccaccgcgttcgccgctgccgcacatcaacgcgtcgatgccacccgggcacccggccgagatagcctccttcctcccccgaaccgccacgtccgcttccaaagccgtcgccgtctccgcctcctccctggtgcccgcgcccgcaagatcccgccgttgtcgtctccgtctcctccccctgcccacaactcgcaggatcccaccgtcaccgtctttctgggattcaattctgctctcaatttcttaatatgttcgggcatgttttgtttcacctgatgcctgtgcctagttgagcgagtgcatggacctagacatcacagtggaattctggtcccttcaggcgctgcgcagtttcttctcctcctaccagacatctagcactggacctaaactagacgagcacttcgtcatgagcaacaaccacgccgcgcgcgcacaatattttttccagcaaatggaagctgcaaatgaagaacgattacgtgaagagtttgtgagggaaagcagaaagcttcctccaaagcagcaatcacaaacatgtgattcaaatgttattactccaaggactgaatttatggctgttttatcagttgctttggagtgttacatccatcttagattgaattatgatcatgaatggaaacaaaacaaagttattttatccgatgccaatgttcctggtgaacgggatctgtctggttttaacccaaatccattgcctgtatggcctggacgtatatctgatcatgctagctttgcagacacatgaagtacgcttctcaatactgagagaggtattttatacacctggacaacaggataaatgtttcttatgtatttaggtgggacatctagcagcaaaatgtgaaggaaaggtgaaaatgaaagctggggagttttgatgagaaggctgatgctattgttcccaagaagccatatcaggttatttgtctattgtacaacatgtggtagtgtgtgtgtgtgttgggggggttcgcgccctcactcacgatcaatgacccgactctttccctctcttcccctcctctgccacgagccctaacccacttgaagcacaacatgatccatgtgagttgtgctttggcctgcattagggatcagcaacttcgcacgcgacgaaatgaaccgccacgactgcgttgggatcaacttcgcacgcggcgatattatttcagtgtcgtgttttttacttcacatgaaaatcttattttgtagtatataaaatgttaggttgtagtataaaaaattatacagcaacaaacaatcacatatctagtaatttagttgtcatgtatagtaaattgtaattttcagcagattacagttttaaatcaataatagatactaggaatgtttagtagcagagattattattcaggcagtttgctgtcatagttccatgtagctcaatctcaaattgtagaggtgaaacatacagcagggttgccttgtatctatagaaatgaacttgcagcaattatgtaagcaacgtatcccaatgtacccgcacgcatatcagaatgaaagcccaatgtaccgtggaatggcagcaaagaaaaaaaatccagcaatggaccttgttgaggaacagaaatgtcctacaaattttgtcttcatttctttaaatgttgccagctactctccaatacatattacatggttacctcattacatataacatggttacctcatggtctatataaggaaccttaaacctaaatgcgcacagcttcagttgctctacttgtttttagaggattcacctttagatgagttgaatattatcataatacttgtctatatgtaagtaatatagaaatctgccacaacatatttccttacaacataaaagaaaagagggtcatatttgtgatctaaaagaattttgatagtcataactcaccgtccccttttcgatagacttaggatcttttttat

SEQ ID NO: 7473 - DNA, 3346 bp, Zea Mays
tcaccctcctccgcagccccgcttcacctctctccctccccctcttctccccccacccctccctcccccaccaaatcctcgttcatttttttccaagcgacttcgcgtgtgagggcgggagagcgcgcggggctagggtttccacgggtgatggaagcagaggctgccgcggcggtagtggcgtcgtccgcatctgcctcggcttccgcgggccggtctcgcccatctagcagcgccgcccaggtcaccagtaattcggctgtgcgagctggagaagaaaatgctgcctccctctatgttttatctgttattgactcgttaaaaaagaggattaccgcagatcgtttgacttacattaagaataggataggggagaacaagactaatatcagcagctatacacagaggacttacaatttatcaaaaaataggcaaattagtacatcaaagggtactgattcagcatcaaatttgctcacaaaaaggcaagatgatgcgctatgcaccctgcatagtcttgatattattccggttgacaaagatggtggtacttttcaagacgaaagtcctttctcttcatctaatgttatgtttggtggaaatcttggtcccaagaatgctattattagaccaattaaactaccagaagtgccaaagcttccaccttatacaacatggatatttttggacaggaaccaaaggatgacagaagaccaatctgtacttggtcgacggaggatttactatgataccagttgtggtgaagctctaatttgcagtgatagtgaagatgaagccattgaagatgaggaggaaaaaaaggaatttaaacattctgaagatcacattattcggatgacagttcaagaatgtggcatgtctgatgctgtactgcaaacgctagctcgacacatggagcgggctgctgatgacataaaggccaggtatgaaattctgcatggtgagaaaactaaggattcttgcaagaaagggactgagcataatgtcaaagtggaagatttgtactgtgacaaagatttggatgcagcattggattcttttgacaatctcttctgtcgacgatgtctagtgtttgattgcaagctacatgggtgttctcaagatttagtatttcctaaaaacaaccagcttggagtggcgttgatgacagtgtaccctgtggtattcattgccataaactggcatctgaaccagatgctgctgctggtgctgatcacatgctttttgatgttgaggagccaactcactcatcagacaatgtgatgaaccagccaggttcaaataggaaaaagaacggctccagtggaaggaagactaaatctcaacaaagtgaaagctcttcaactgcaagagttatctcagaaagcagtgattcggaagtacatccaataagcaataaatctccacaacactcccctagtccctcaaaagttaaaattgggccgaaaggtggaatcagaaagattaccaatagacgaatcgctgagagaattcttatgagtgtgaagaaaggacaaagggaaatggcatcatctgattctaattttgttagtggatatcttttggcaagggacatgaagcttaggtctgatacacgaaatggaaataaggaattaattgtatcctcacaacagagttctccaagcacaagaagttccaaaaagaagagtacacctcaaattgggaacagctcagcttttgctgaggctcataatgattcaacagaggaagcaaataaccgtcattcagcaacagatggttacgatagttcaaggaaagaagaattcgtcaatgagaatttatgcaagcaggaggtgtacttgagatcatggaaggcaattgagcagggacttcttgtgaaaggattagagatttttggaaggaacagttgtttaattgctcggaaccttcttggtggaatgaagacgtgcaaagatgtttttcaatatatgaattatattgaaaacaacagtgcctctggagctcttagtggtgttgattctcttgttaaaggatatattaagggtactgagttgcgcacaagatcaagatattttagaaggcgaggtaaagtccgtcgtttgaagtacacctggaaatctgcaggttacaatttcaaaaggattaccgaaaggaaggatcagccttgtcgacaatataatccttgtggttgtcaatctacatgcggaaagcagtgtccatgtctttcaaatgggacatgttgtgagaaatactgtgggtgtccaaaaatttgcaagaatcgttttcgaggatgtcactgtgcaaagagccagtgtcgcagccgccaatgtccatgttttgcagctgacagggaatgcgatccggatgtttgcagaaactgttgggttgggtgtggtgatggtacattgggagttccaaaccagagaggagataattatgaatgccggaacatgaaactgcttcttaaacaacaacaaagggtcttacttggaagatcagatgtctctggctggggagcattcctcaagaatagtgttagcaaacatgaataccttggtgagtacactggggaactaatctcacacaaagaagcagataagcgtggaaagatatatgatcgtgagaactcatcgttccttttcaacctgaacaatgagtatgttcttgacgcatacagaatgggtgacaagctgaaatttgccaaccatgcccctgacccgaattgctatgccaaggttatcatggtaactggtgatcatagagtgggcatattcgccaaagaaagaatcctcgctggtgaagagttattctacgattaccgctatgagcctgacagagctcctgcttgggcccgtaagcctgaggcgtcgggagcaaaggatgatgggcaaccgttcaatgggcgtgcaaagaagctcgcccaaaacaaccgaggctgaatctgatttgattctttcattgttaggacaaatttggcagccattcaactaatacaaggaacctgtcattcataggccccaatttatttgaactcgtcattgtaactcgtatgtgcttgaattctccatggcatctggtcctgccatccgtagagttaggtcccgtttgttttgtttgttttgaggaactaaaaattaatccctctattttagtcacattgagtctctagattgtcaaacggcgggactaaaacaaagactaaactatttgtctctagttcctcaagccatgacttaaagggaataaatcacataaattttatttttatccttcctttatttcagttacactaatgatgtaataattgtatgaggtattttggtcctcttagagcatctccaag

SEQ ID NO: 7474 - DNA, 3356 bp, Zea Mays
caaaaacgcctctctcaccctcctccgcagccccgcttcacctctctccctccccctcttctccccccacccctccctcccccaccaaatcctcgttcatttttttccaagcgacttcgcgtgtgagggcgggagagcgcgcggggctagggtttccacgggtgatggaagcagaggctgccgcggcggtagtggcgtcgtccgcatctgcctcggcttccgcgggccggtctcgcccatctagcagcgccgcccagtaattcggctgtgcgagctggagaagaaaatgctgcctccctctatgttttatctgttattgactcgttaaaaaagaggattaccgcagatcgtttgacttacattaagaataggataggggagaacaagactaatatcagcagctatacacagaggacttacaatttatcaaaaaataggcaaattagtacatcaaagggtactgattcagcatcaaatttgctcacaaaaaggcaagatgatgcgctatgcaccctgcatagtcttgatattattccggttgacaaagatggtggtacttttcaagacgaaagtcctttctcttcatctaatgttatgtttggtggaaatcttggtcccaagaatgctattattagaccaattaaactaccagaagtgccaaagcttccaccttatacaacatggatatttttggacaggaaccaaaggatgacagaagaccaatctgtacttggtcgacggaggatttactatgataccagttgtggtgaagctctaatttgcagtgatagtgaagatgaagccattgaagatgaggaggaaaaaaaggaatttaaacattctgaagatcacattattcggatgacagttcaagaatgtggcatgtctgatgctgtactgcaaacgctagctcgacacatggagcgggctgctgatgacataaaggccaggtatgaaattctgcatggtgagaaaactaaggattcttgcaagaaagggactgagcataatgtcaaagtggaagatttgtactgtgacaaagatttggatgcagcattggattcttttgacaatctcttctgtcgacgatgtctagtgtttgattgcaagctacatgggtgttctcaagatttagtatttcctacagaaaaacaaccagcttggagtggcgttgatgacagtgtaccctgtggtattcattgccataaactggcatctgaaccagatgctgctgctggtgctgatcacatgctttttgatgttgaggagccaactcactcatcagacaatgtgatgaaccagccaggttcaaataggaaaaagaacggctccagtggaaggaagactaaatctcaacaaagtgaaagctcttcaactgcaagagttatctcagaaagcagtgattcggaagtacatccaataagcaataaatctccacaacactcccctagtccctcaaaagttaaaattgggccgaaaggtggaatcagaaagattaccaatagacgaatcgctgagagaattcttatgagtgtgaagaaaggacaaagggaaatggcatcatctgattctaattttgttagtggatatcttttggcaagggacatgaagcttaggtctgatacacgaaatggaaataaggaattaattgtatcctcacaacagagttctccaagcacaagaagttccaaaaagaagagtacacctcaaattgggaacagctcagcttttgctgaggctcataatgattcaacagaggaagcaaataaccgtcattcagcaacagatggttacgatagttcaaggaaagaagaattcgtcaatgagaatttatgcaagcaggaggtgtacttgagatcatggaaggcaattgagcagggacttcttgtgaaaggattagagatttttggaaggaacagttgtttaattgctcggaaccttcttggtggaatgaagacgtgcaaagatgtttttcaatatatgaattatattgaaaacaacagtgcctctggagctcttagtggtgttgattctcttgttaaaggatatattaagggtactgagttgcgcacaagatcaagatattttagaaggcgaggtaaagtccgtcgtttgaagtacacctggaaatctgcaggttacaatttcaaaaggattaccgaaaggaaggatcagccttgtcgacaatataatccttgtggttgtcaatctacatgcggaaagcagtgtccatgtctttcaaatgggacatgttgtgagaaatactgtgggtgtccaaaaatttgcaagaatcgttttcgaggatgtcactgtgcaaagagccagtgtcgcagccgccaatgtccatgttttgcagctgacagggaatgcgatccggatgtttgcagaaactgttgggttgggtgtggtgatggtacattgggagttccaaaccagagaggagataattatgaatgccggaacatgaaactgcttcttaaacaacaacaaagggtcttacttggaagatcagatgtctctggctggggagcattcctcaagaatagtgttagcaaacatgaataccttggtgagtacactggggaactaatctcacacaaagaagcagataagcgtggaaagatatatgatcgtgagaactcatcgttccttttcaacctgaacaatgagtatgttcttgacgcatacagaatgggtgacaagctgaaatttgccaaccatgcccctgacccgaattgctatgccaaggttatcatggtaactggtgatcatagagtgggcatattcgccaaagaaagaatcctcgctggtgaagagttattctacgattaccgctatgagcctgacagagctcctgcttgggcccgtaagcctgaggcgtcgggagcaaaggatgatgggcaaccgttcaatgggcgtgcaaagaagctcgcccaaaacaaccgaggctgaatctgatttgattctttcattgttaggacaaatttggcagccattcaactaatacaaggaacctgtcattcataggccccaatttatttgaactcgtcattgtaactcgtatgtgcttgaattctccatggcatctggtcctgccatccgtagagttaggtcccgtttgttttgtttgttttgaggaactaaaaattaatccctctattttagtcacattgagtctctagattgtcaaacggcgggactaaaacaaagactaaactatttgtctctagttcctcaagccatgacttaaagggaataaatcacataaattttatttttatccttcctttatttcagttacactaatgatgtaataattgtatgaggtattttggtcctcttagagcatctccaag

SEQ ID NO: 7475 - DNA, 1408 bp, Zea Mays
gaaccaaaagcgccggcatctcaaacccgacggcgctctcttctctatcctctgtcccctccaccaaaaccgacggcgacgtcgctctcctccaccggtgcttggagctctccctccaccagcggcggtccacggacgctcggcgagctccaccggcgggcgctggtcagatccgcttggcagtcatccacctggcacatcgggtagctcacgcctccgttggcagtcccaccgccgcctggccctcccccagtgcccccggtgatccggaccgcacccgcttgctcggcctaacgaccggctcctgccccgccgcagccgaagctcccagcgtcctcctgcaggccgagctgaaggttcagcgcgccggtggagttcgacgacgaaactccgtcacgtcatacctctccgcctcccgtcttccagacgtctccaatcggggctcccagcgtctcggagaagaggagcagcacggcacggcggctgtggcgaggaaggctcctgtcccatcccaacccagttagcagccgcccaaggaggaggagatccaatcggcgtgcgggcgtccgcggtccatccatcgatccaattccaatctgcagaagaagggatcaaggaacagcgaccagagaaaggctgcgtctgctgctgctcctacggctgctgatgctacgaacaagaggcccagggttagtgccttcttccgcttggatggcagtaaggtttttgctaatcaactgtgagccaatctggcactgattggtactagatccaattagtcttagcttagtagcccccctcttagatcaatcctggatccgccactgggcggcaggagggaggccatagagcgggagctgaagaagcttcgggcagagcgggaggagctcgacggccggatacggctgctggaatcgcagctcgaggcagggcctgcgggattcaacggtgcggcagcggggaaaggagtaggggatgatgcgtgcggcgggagtggagcgtgccagagccgcgtgggtaacgggtttgctccggacggtagcctcccggcggatatgatctaccggtacagccgccacctccttctcccggacttcggggtcgaaggccagcggaagctgtcacagtcgtcgattttagttgttggagctggaggtttgggctctcccctggcattgtatctagcagcttgtggtgtcggttgcttgggcattgtggatggtgatgatgttgaattgaataatcttcatcgacagataattcataaagaagcatatgttggacaatctaaagtgaagtcagcagctgatgcttgcctcaggattaattcctctatcaaggtagtagagcatcaccatactctgaagccatgcaatgctttggagattgcacggaacattaactaaaa

SEQ ID NO: 7476 - DNA, 2067 bp, Zea Mays
gaaccaaaagcgccggcatctcaaacccgacggcgctctcttctctatcctctgtcccctccaccaaaaccgacggcgacgtcgctctcctccaccggtgcttggagctctccctccaccagcggcggtccacggacgctcggcgagctccaccggcgggcgctggtcagatccgcttggcagtcatccacctggcacatcggccgaagctcccagcgtcctcctgcaggccgagctgaaggttcagcgcgccggtggagttcgacgacgaaactccgtcacgtcatacctctccgcctcccgtcttccagacgtctccaatcggggctcccagcgtctcggagaagaggagcagcacggcacggcggctgtggcgaggaaggctcctgtcccatcccaacccagttagcagccgcccaaggaggaggagatccaatcggcgtgcgggcgtccgcggtccatccatcgatccaattccaatctgcagaagaagggatcaaggaacagcgaccagagaaaggctgcgtctgctgctgctcctacggctgctgatgctacgaacaagaggcccagggccagcggaagctgtcacagtcgtcgattttagttgttggagctggaggtttgggctctcccctggcattgtatctagcagcttgtggtgtcggttgcttgggcattgtggatggtgatgatgttgaattgaataatcttcatcgacagataattcataaagaagcatatgttggacaatctaaagtgaagtcagcagctgatgcttgccgtgatcaggattaattcctctatcaaggtagtagagcatcaccatactctgaagccatgcaatgctttggagattgcacggaaatatgatatagttgttgatgcaactgacaaccttcctactaggtatatgatcagcgattgctgtgttttgctgaacaagccacttgtatctggtgcggcattaggcttagaagggcagttgactgtttatcatcataatggaagcccatgctatcggtgcctctttccaactccaccacctgtggcagcctgccagagatgctcagacagtggtgtccttggggttgttccgggagtgattggttgcttacaagctctggaggctataaaggttgcaactggtgttggtgagcccctatgtggaagaatgctactatttgatgcactctctgctcgtattagagttgttaaacttcgtggaagctctccagattgcacccattgtggcgaaaactccgttttcacagaagaagactttcagaagtttgactatgagagcttcacacagtcaccaatgtctgataaggcagcagcaagcgtgaacgtactcccagagagcgcgcgtatcacttgcagagagtacaagaaactggccgacgatggtgaacctcatctactgctggacgtacgacctgcgcatcacttccagatagcttcgatctctccgtcccacaacatcccgctctccatgctggaagagaagctgcccgcgctcgaagcctcgctgaaggaagcaggggaggggtcagccttggttgtcctgtgtaggagaggcaatgactctcagagagccgtccagcttctccgcgagaagggattcgccaacgcgaaggatatcatcggtgggctgcaggcgtggggacaagacgtcgatcctgatttccctgtgtactagcgagatggaaatggatgcactaccttgtaacagtttggatgccgctagaacgagaactctgatactatgatttgagtactaattttgccataccgtgtacttgcaaaaacaaatatacaactggtatggacacggtattgtgatgaataatgccatggacaaaataaaatttgagtgatatttttttgcaggtttaaatttttagctttgtgtactacatttacgattttgtaatgattgttaaaacattgcgacatgttgagttaactatattttggctaaaggggatgcccgaaccccaggacaccaatgaattattgttgtttcaatccagagggcacactgctctgttccagttaacaggc

SEQ ID NO: 7477 - DNA, 2303 bp, Zea Mays
gaagccacggcggcaacaccgtcttcgagggctgtcgggataggacgggaggcgaaccagcagaagcgcgagcgagcgtgtgggtaacggctcacggcttctctgcaccaccgccgacccgaggagcacacttaggtggatcggcgagctcatgaagatatgctagtcctcttgctgatcctagagcaatcctgagcctcttcttccaatccagttcatcaaaagaaaagaaccttgctcctttcagctgtggagcacctccactatcttttttagcgattccccatgaagctaaaaattgaatatgcatgagaatagtgcacgaagactggccaaaatcatgaatatcagcagaagaatggacagtgccttcattttgagagctacaaacactctgaacctcagggttccacaaagctgttgtgaatgtgaatacttcaaggagtggagctttctaaggtttacaactgatcaccaaagccttggtcttttattgaatgttcccttgagtaggaacaggtaataggtctttggtgccttggtggctcggtgcaagtcacaaactcacaatgctgtcaacacattcctttaaacttttgaacgtggacgtattcgtgacaactggtgtctgttttgttatttaaatttgtgtagcctgctcatccttacagtgtatgctgaggtggactgaaataacgatgtcaatgctttggaagctctgctaatgacatagttactttcattgtttctgcaggtcaacaggcactctggataattctaccctaaacagatggcagcatgcatcctatatcctcgtcaaatgcaatatatcaaggcttaccatcttgggggttcgtctgaccgaaacttggccggaggtataccaagagcaagaacaggagtagcaactgctgcatcgccgccatgccgagctaggcctccaaacaagttgcagcagaccactgctaacttcgatgggacgatggttatccttggagaagtctatgcaatgaggtagctaatggacgagtcagctgctaccaaatggcgccgctcttcttcctgaggttggaaccaggcaaagcaaatagcgtttcaagcaaaacaaccttgcatcaccagattcagaagaatctctcgtcaattattgcctggtctgcttaccgggtccaagcaatggatatgctcataggaacgcacgtatgcaagggtatgggaggccttaaacaaggctacagagagctcagttgaactgatcaaaacacggaaatggttgaagaaaaaatgtttctgtattcctcgttgatagtggggcagttgcttcttgtcatcttgtggctggggcctcatcggagtatcccttctaagctttgacccggtcatggctattaattaattagattagtacggccacaggtcggacttttgtgccataggcccacagttcagaaacgtgttatgctgcgctactgctgctagcagttatgatgtggatttggcatcatgacaaggatattacgtaaatatacttcggtccccttgaacgcaccacccatcgtgttaccatgaatcggtttgttcttaggagacctgatggttcatgttcagtaaatttgatttgatgatgaggcagggtttctctcacctgcacagacacaaagcttcaaatcgcaagtcagaaagcatgtgcagacgattatactgctctccttgatccttggaagttcgcagatggttcggaaaggcctggccgttctttttttttcccccttttcgcagatgctattcgttcaccaacacgaatgggtccggaaggccaggttttggatgcacctgctcaactggttcctttgtcgggaagcttgccgtgcagataaattttttatgcatgatgttccagaaaatgcagataaaggacggcttccacacagaaggttcgttctgcacggagacaaagtgtggccggcaggctgatgtttgcattggccgatgaaatgaactgttcgcttcaacttaaagtcagttgttgtatctacaatctatagagacaaaacactataagaatagtagaagccggtacgaattaaagcagactgaaagatttctatatagtaattgtccgtcttttctctcccgctctttcagtgcgtggttgcaattttctattatttcttgactgccactgatcccgtcgtatatgttgcctaagtaaatgttggtgaacatagtttggcagtaccttcctttttttcttgtgtggatgatgaaatgcgggtcttggcctcttgtgtggtgcagtcaaa

SEQ ID NO: 7478 - DNA, 1785 bp, Zea Mays
cagctctcaccgccacatgccacccgcattgctctcaacctcggtcaacgatcgtgcctcgtgaatttgctctccgatctgaagcagtagtacactactaacctggcctgtccctgcccgtgtggtgttgttgatcgtgttccatccatccagcactttggcaccatggcgcccgcatggctctccgttcccagcgccgccctctccctcctcgacggccagcgtccccgcgagtgggagtggcttccgctccgaaccgcctgcccgagcggtggccgtcgtgtgcgtgtgccgtgccgccggcccaggacgaccgggttttctgtcgcggcgcagaggaggctggtcgtggcggcggcggcgatggagatgacccctgccgcgggagaaaaggaggcggacgccccgttcaccgaggagatgcgggcggcggccatgcggctgcactccagggaccaggccagggacggcaagaaggaggcgcccctggagccgcccgtcgccaagtggcagaccaccgtcgaggggtacctccgcttcctcgtcgacagcaagctcgtcttccagacgctcgaggccatcgtcgaccgcgccgtcgttccctggtatgccgagttcagggatactggtttagtggtttggagagatcggagccgctcggcagggatctggaatggttcaggcagcaaggtcacgcagttccggaaccatctgctcctggcattgcgtacgcttcctttctggtagagctgtctgagaagaaccccccggcgtttgtttgccatttctacaacgtgtacttcgctcatgctgccggaggccgaatcatcggcaaaaaggttgctgagaagctcagtctgcagaaagagctagagttctacgaatgggagggcgatctgtcgcagctgcagcggaatgtccggtcgaggcttaaccgagtcgcttccggttggtctcgagtagagaaggaccgctgcctgggcgagatggagaaggcgtttacctgttcagttgacctccgccgccatatgtttccctgctgatctaaagttcgttcgttgcctgatgcgatgcgaccataaacgttgtctgtcagtttctgtttacgtgtccactagatccactggatccatgtttagttactattgtccaagatatttactccctccgtttcgttttagttgtcgctggatagtgcaaaattgcactgtccagcgacaactaaaacgaaacggagggaatagtattcagccacccaaatcaccaccattcggcttatttagagctagtttggaaatcacattttttgtgagagattttcatttcccaagggaaaataaactaattttctttcgaaaaatggaaatctcttagaaaaatggattttccaaactagtcttaagtagtagtacaaaaatttacaacgtcttcttttatctaggtcaaggaacggattgacatgattacatgtacggttaaaagtgcagactgcagaggactcactacagtaaaataacaaacatccgacggtcaatttatctccgacggctgcctaagaggccgtcggacgtaagcttatgtccgacggccacctctggctctcggaaatagtgccttatgtccgacggctgtcagcgtagccgtcggatataagcttacgtctgacggccgagtcaatatccgtcggagataaggtgttttaacgcggacccggtcccgcgcgccgtttcattttcacgcgcgctccattttctctctgcccgtcgccgccgtcgccgccccgcc

SEQ ID NO: 7479 - DNA, 1868 bp, Zea Mays
cttgattcgtatagcacctcacatccaaatatgcaacacatagataaggagaaggtgggaggcacaagaacgaggagatcaagttgcctctgtgcttgatgttggagaagttggtccccgagcagcatgtcgttgccaggtcgttagaagtgttggcccatggtcagcaggaacagctcaaatcgaaggaagcatccataatgcctatttttctcttattgaaaaggcagaacattttgtttacatcgagaatcagtttttcatttcaggtctttcaggggatgacacaattaagaatcgtgtattagaagcactatataggcgcatacttagagcagaaaaagagaaaaggcgcttccgggttattattgtcataccacttttacctggttttcagggtggcattgatgatggtggagctgcgtctgtgagggcaattatgcattggcaataccgaactatttgtagaggacctaattcaattcttaaaaatctgtatgatgtggttggctcgaaggcggatgattatatctcattttatgggcttagagcacatggaagatcagatgatgggggtcctctggtcaccaatcagatatatgtgcacagtaaattgatgattattgatgatcgcatggcattgattggctcagccaacataaatgatagaagcttgcttggatctagggattctgagattggtataattattgaagataaagaggttgtcagttctataatggatggaagaccttgggaagctggaaagttctccctcagcctacgactttctctatgggcagaacaccttggtcttcttccaggagaggttagttgcattatggatcctgtggatgattcagcgtacaaaaacatctggatggccactgctaagattgatacatctgagtaccaaaacttatttggtcccccgggtcctctcaactgaacaaactgatatatgacaggagaataccgtgatctaccatcaagtattctcatgtgttcccaacgatcacatccattctaggtatcaatttcgccaaagttttgctcatcgtaaggagaaaattggccacacaaccatagacttgggtgttgccttagaaaacctggaaacgcaacaggagggagacctggcatgtgccaaaccaatggaacggttgcaggacgttcggggtcatattgtttgcttccctttggagttcatgtgccaagaggacttgagacctttcttcagtgagagcgagtattatacatctccacaagttttccattagggcttgttcggttatttcaatttcatgtggattggtgtgtattggagtgaattaggatgaattttgacttgctatggatttaaactgactcaataccatctaatccacatggattaatgttgaaacgaacaagcccttagtgtttattttcccgcttttggcgaaagtccgcccataggtacatgttatagggttattatacttgtatatgcctagatcgtgtctcgtgcctggatgaataggaaaaacaaaaacaaaggaacaaccatatccttgctagtttcgggtatataggatatgacggccaagatttgtacagatcgtttatcagagttagttcgggcagcagatgttgccctattagatgaattcttttatgcaaaataaaatgcacttaaagctgaatttgatgccttgtagtcttgtacattgagcattggcagattctgttgaaatttgttatctgatcattattgtggatgtggtactttggaagtttctgtgaggcagtgagggcacatttggtatattgttttatctaatgtaatcattgttttataggcaattaaatgtacatgctgagacgaa

SEQ ID NO: 7480 - DNA, 1072 bp, Zea Mays
cttcttatccccaatggcggacgcacgtcgacacatcactgctcactctgcactctcgcgggatggagcttggcctagcgctccggctcgtcgcgccgccaccgctgctgccgtgtctctcccgtagagctctttccctaccaccggattttgtttcctcgcgtgtgcttcgaggaagacgcatccatgcctcgagactgaagcatggagctggggttgtgtgcaatgcgattatgacctattcaggagtggaagaggaggagatggtggaagaagaaatggaagaggaggctgaaccggcggtgagcacaaggccgcgcctggagctcatcgagaagccggaccggagcctggcgctgctggatgagtacgagtcggaggaactgggcacctctctttgcgccaatcatcgtagcggttatgttgctgtattggggaagccaaatgttggcaagagcacacttattaaccaaatggttggtcagaaactttcaattgtaacagataaaccgcaaacgacaagacatcgcattcttggtatatgttctgaaccagagtaccagattatactttatgacactcctggtgttattaaaaaggagatgcataagctggacagtatgatgatgaagaatgttaggagcgctatcggcagtgcggactgtgtgcttgttgttgctgatgcttgcaaaactcctgaaaagattgatgaaatgcttgaagaaggtgttggaaacaaagatattggacttcctgtactgctggtattgaacaagaaagatctcataaaacccggagaaatcgcaaagaaacttgagtggtaccaaaaatttactaatgttgatgatgttataccaataagtgctaaatttggtcatggagtggatgatatcaaggagtggatattgtcaaagctccctctgggtcctgcttactaccccaaggatatagctagcgaacaccctgagagatttttagtacagtgttatcaccctctttgttgctctgtggttgagcgtatgctctgtaatatgattcctcagttgaacggacccgtctatttcttgttaga

SEQ ID NO: 7481 - DNA, 1889 bp, Zea Mays
cttcttatccccaatggcggacgcacgtcgacacatcactgctcactctgcactctcgcgggatggagcttggcctagcgctccggctcgtcgcgccgccaccgctgctgccgtgtctctcccgagtggaagaggaggagatggtggaagaagaaatggaagaggaggctgaaccggcggtgagcacaaggccgcgcctggagctcatcgagaagccggaccggagcctggcgctgctggatgagtacgagtcggaggaactgggcacctctctttgcgccaatcatcgtagcggttatgttgctgtattggggaagccaaatgttggcaagagcacacttattaaccaaatggttggtcagaaactttcaattgtaacagataaaccgcaaacgacaagacatcgcattcttggtatatgttctgaaccagagtaccagattatactttatgacactcctggtgttattaaaaaggagatgcataagctggacagtatgatgatgaagaatgttaggagcgctatcggcagtgcggactgtgtgcttgttgttgctgatgcttgcaaaactcctgaaaagattgatgaaatgcttgaagaaggtgttggaaacaaagatattggacttcctgtactgctggtattgaacaagaaagatctcataaaacccggagaaatcgcaaagaaacttgagtggtaccaaaaatttactaatgttgatgatgttataccaataagtgctaaatttggtcatggagtggatgatatcaaggagtggatattgtcaaagctccctctgggtcctgcttactaccccaaggatatagctagcgaacaccctgagagattttttgttggtgaaatagtgagggaaaagatttttgttcagtacaggcaggaaattccttattcatgccaggttaatgttgtcagttacaaaagtcggcctgctgccaaggacttcattcaagttgagatacttgtggagaaagaatcacaaagaggcattatactagggaaggatggcaaaagcataaagatgctggcaaccgcatcgaggcttgacatcgaggactttctacagaagaaagtctaccttgaggtggaggtcaaagtgaaggaaaactggcggcaggacgagcgactcctgaagcggtatggctacggcggcgagatccaagcgctgtgactgtgactgtgactatgaccggtgcgctctagctcactgtcagctgccgcgagcgtggaatgacctggttttttttcaattcctctcgtgtgttgttgttgtcgatgcgaatgagtagcagttatttaacctggtgtcgaactcaactagcagctcagttgtgttaattagtcagcaagttatgtgctctgatcctgctgttgttgtcagcggaactggttttgccgcagacaagtcagcatggttgcgctctctgtagcagtctgtgtgaatagaatcacgggggagttcagacatcagagggactgaacagccgagccaagccacaagtgcatgtacaagtcgtgtccttcgggcggcggcgggtccaggtggaggcgcgccgtgtgccggtgccctgcgccggccgtcgtggatacggtgtggcatagcgagcacgaccggttggggctgactgaccgtgggaggcggtggagtatgctgatacacgtcgggtctgccgcagcattgacttggctaccttgagcagctcctctgttgtccaaacaaaaaaactcaacttctccacagaccacatgacagctgggatggttaaccgagtgactgacgtatttataagccggaccggccctaccgaatagccgccatatgtgtgcactgcagattttttttatttacgtacattttgtcttgtctgat

SEQ ID NO: 7482 - DNA, 3404 bp, Zea Mays
taaagattcaactctttctgcatgttttaccagacaaatgtaaatctcttgcagtattgctcaagaatcaagatggtataaccctgtggtttggggcgttccaaaaggaagctatgcaagtaacccagatggtccaagtcgtatcattgagtaccggctgatggtgcaggccttgaatcgcttaggtcttcgagttgtcatggatgttgtatacaatcatctatactcaagtggcccttttgccatcacttccgtgcttgacaagattgtacctggatactacctcagaagggactctaatggtcagactgagaacagcgcggctgtgaacaatacagcaagtgagcatttcatggttgatagattaatcgtggatgaccttctgaattgggcagtaaattacaaagttgacgggttcagatttgatctaatgggacatatcatgaaaaagacaatgattagagcaaaatcggctcttcaaagccttacaattgatgaacatggagtagatggttcaaagatatacttgtatggtgaaggatggaacttcggtgaagttgcggaaaatcaacgtgggataaatggatcccagctaaatatgagtggcactgggattggtagtttcaacgatagaatccgtgatgctataaatggtggcagtccgtttgggaatccactgcaacaaggtttctctactggattgttcttagagccaaatggattttatcagggcaatgaaacagagacaaggctcacgcttgctacatacgctgaccatatacagattggattagctggcaatttgaaggactatgtagttatatctcatactggagaagctagaaaaggatctgaaattcgcaccttcgatggctcaccagttggctatgcttcatcccctatagaaacaataaactacgcctctgctcatgacaatgaaacactatttgatattattagtctaaagactccgatggacctctcaattgacgagcgatgcaggataaatcatttgtccacaagcatgattgcattatcccagggaataccattttttcatgctggtgatgagatactacgatctaagtcgcttgatcgagattcatatgactctggtgattggtttaacaagattgattttacctatgaaacaaacaattggggtgttgggcttccaccaagagaaaagaacgaagggagctggcctttgatgaagccaagattggagaacccgtcgttcaaacctgcaaaacatgacattattgctgccttagacaaatttattgatatcctcaagatcagatactcatcacctctctttcgcctaactacagcaagtgatattgtgcaaagggttcactttcacaacacagggccctccttggttccaggagttattgtcatgagcatcgaagatgcacgaaatgataggcatgatatggcccagatagatgaaacattctcttgtgtcgttacagtcttcaatgtatgtccgtacgaagtgtctatagaaatccctgatcttgcatcactgcggcttcagttgcatccagtgcaggtgaattcatcggatgcgttagccaggcagtctgcgtacgacaccgccacaggtcgattcaccgtgccgaaaaggacagcagcagtgttcgtggaacccaggtgctgatggatgcctttcgctagcgagcaagtgcattcggcatccaagtcgaagcaaacgaatgaaataagagaaggccatcgaataaaacgaagtatataaatagattgaataagacgttgcccaagttgccaaggcacgctttgccatatgtatgcgttgaaaaataaataaataaataaataaatgatgttatagaggtacaaaagcattggaacatttctttatagaggtgaaccaccctattttccagtttccatgtgtgaattgtgattagcatatgtatggaataataatataaattaattttatgcatttgtgtgttgtgtcgtggatgacaacatcaacatattgcttctacttgatctctctataattttttttgaagaaatacctagtctagatgtaatatcgtaattccctagctactatatgatatcagggcgttcattagttcgcagggcagaaggtgacgtcatagctggaaggtccggagcaggtgaaggtgctggtggcgtcgtcgtaggcgtagctgtaggccgacgggcatgcgctcttgaacacctgcgagtagttggtcgggccgcacatcgccggcgtgccgtactgcccggtgcagcagtagcgcgcgctgccgtaggcgatgcacgcgctcttgcacgctacgacgccgccgccggacgatgcgacgacgcggaggtccccggggcacacggcgtttacgtcgcccgcgcaagccgcggggcggcagtcgccgccgccgcccgagggcgccacgcgcaccggcacgttgaagccgtcgacgaggctgacgtcgtagaagtccggcctgccgctgcccggcgcggcgagcgtgacctcgacgagcgagaccggaggcgccggcccgcggccctggcacgcgacgtcgcccgtgccgcagtcggccgtggcgcaggagaagcgcccggtggcggggtcggccacgcagcccgtgcgcgcccacaacgtgccggaccatgtccccgacgacggcgcgtccatgctggacgtggcggacggcgccaggtagaagcccgaccgcgcgagcggcggcgagctggcgccgtggagcgcgcccacccacaccgcgtgcttgcaggcgttggtgaagatgaacgacgccgctccatccacgcctagcgctgaatcagttatggaacaaagaacttgatgtgtatccaatttgccacacagaccacaagtccagaaccgatgatgaattaatcagatttctcagcagagacgctgaaccagtttaagattaaaaaaatagcaccaaacagagaaacacacaaacaacgtgggaatgaaaaagaatgccaccgcacccgtcaagagaaaaagctgaagaatcaagagaatggccattctgttcctgctagctccattgccttcggcggagagctgaggaagaaggtgagctactgccatggccatggcggcacgcacaagaaacctcggtggatcgatgtcgatctcagatcgacgctggtatctgtctgtacgtgtatttatagcaagtaaaatcaagaagctagctaggcccagcatgtacggtggttgtagctttagtagatatttagatagaccttcacccggatagaatagaaggaagatgcgtggatgagagaaaaaggcaggcaggcagaggcagcacatgaagaaaacgtttaaaccttttcggcgaatttatgtcgttccctcacgcttggcgtgagctatc

SEQ ID NO: 7483 - DNA, 1202 bp, Zea Mays
tctctctctctctctgcaattctgcattatttgtgcttagatttctcatgccacgccaaagtttgttttgttttcccttttctgaggattcatcggggttcttaatcacagttagcagaccagcaatttggtggaacccctacagatttacagagggcacaagcagtggttggctgaagtccagttcctgggtgttcttgagcacccgaacctcgtaaagctgataggctactgcgccgtggattcagaagccagcaagcacaggctgctggtctacgagttcatgcccaacaagagcttggacgaccacctgttcaaccgagctcaccctccgctttcatggagactgaggctgcagatcatgctgggcgctgcgcggggcctggattacctccatgaaggagtgccagaagttcaggtgatctacagggatttcaaggcatccaacgtccttctggacgctgaattcaagccgaagctgtcggatttcggcctcgcaagagagggtccaacagaagggaagacacatgtctccaccgcggtggtggggacgcacgggtacgcggcgccggactacatcgagacggggcacctgacggtgaagagcgacgtgtggagcttcggcgtggtgctgtacgagatcctgacgggccgacgctcgctggagcgcagccgccccgcggaggagcagaagctgctggggtgggtgcggcagcacccgccggacggcgccgggttccgggccatcatggacccgcggctgggcgggcggtacccgctggccgccgcgcgcgaggtggccaggctcgccgaccgttgcctcggcaagaaccccaaggagcggccggcgatgagggacgtcgtcgaggtgctcgagcgggttgtgcagatggagccgacgactacgaccgcagacaagagaggaggtgacggcaggctgccggcgaagaggtgacggacggcggcggcggcggcgttgccgggatacgccgctccgtcgtcccgttctggccctccgggtgtgttctaacttccgaagtttgtatgtatcggaaagtatacgtcaggagaaacgaacaatttcctgaacaggctatatactacatgtgagattcgatggtgaatttgtgatttgaacacgcaaatgaagattcagtaaaaattcacataactaactaacacgtgttgcagaaatgcatgag

SEQ ID NO: 7484 - DNA, 1747 bp, Zea Mays
atggccctgccgggttgcagctgccgggtgcccggctctgccttcgtcaagcacgcggggcctctttcttgtttcttcccgtctggtccaaccctcctccttcccctgcccctcccggcgcttccgaggaggagagggctcttcaattccccaaccgattccaaccccacccggacccgggtacactacagcgacgcgcctgccacttctccttccaccaagtcctcgctcgccagcccgcgctgcagcgctcgtcgtccgatggggtgcttcgcgttcaggagcggcggcaagagcggcagcagcagcagcacgtcctccaggccgcagcagcacccgcgcccgggcgcccggacgccgccggccaagtcggccccggcgtccacgtcgtcgtcctcctcctcctccggcgccggcgccggcgcgcagagcaacaccaaggcggcggcggcctcggcgcccgcggcggcgtcgtcggccacgcccacgcgcaccatccaggagctgtcggaggagcggggcgcccagcgcctccgcgtgttcgacctcgacgagctcggcagcgccaccaacggcttcagccgcgcgctcaagctcggcgagggcggcttcggctccgtctaccgcgccttcttccgctccgccgccggcgcccgcgtcgtgctcgccgtcaagcgcctcaaccagcgcagcctccaggggcacaagcagtggttggctgaagtccagttcctgggtgttcttgagcacccgaacctcgtaaagctgataggctactgcgccgtggattcagaagccagcaagcacaggctgctggtctacgagttcatgcccaacaagagcttggacgaccacctgttcaaccgagctcaccctccgctttcatggagactgaggctgcagatcatgctgggcgctgcgcggggcctggattacctccatgaaggagtgccagaagttcaggtgatctacagggatttcaaggcatccaacgtccttctggacgctgaattcaagccgaagctgtcggatttcggcctcgcaagagagggtccaacagaagggaagacacatgtctccaccgcggtggtggggacgcacgggtacgcggcgccggactacatcgagacggggcacctgacggtgaagagcgacgtgtggagcttcggcgtggtgctgtacgagatcctgacgggccgacgctcgctggagcgcagccgccccgcggaggagcagaagctgctggggtgggtgcggcagcacccgccggacggcgccgggttccgggccatcatggacccgcggctgggcgggcggtacccgctggccgccgcgcgcgaggtggccaggctcgccgaccgttgcctcggcaagaaccccaaggagcggccggcgatgagggacgtcgtcgaggtgctcgagcgggttgtgcagatggagccgacgactacgaccgcagacaagagaggaggtgacggcaggctgccggcgaagaggtgacggacggcggcggcggcggcgttgccgggatacgccgctccgtcgtcccgttctggccctccgggtgtgttctaacttccgaagtttgtatgtatcggaaagtatacgtcaggagaaacgaacaatttcctgaacaggctatatactacatgtgagattcgatggtgaatttgtgatttgaacacgcaaatgaagattcagtaaaaattcacataactaactaacacgtgttgcagaaatgcatgag

SEQ ID NO: 7485 - DNA, 1996 bp, Zea Mays
ggaaggggcttatccaccacagttctcagcgatgggaactgggggagagagatgggaaggagaaggcgatgatggtttcatggtgttatctcaaaattgtgacataatgctagttttggatagcaatcatgcaggaataaaggtgacttatttcaaatgtggaggcgtctcccttggtgttggcatgcaacaccatgcagcggatggcatgtctggcttgcacttcattaactcatggtctgacctctgccgtggagctcaaatttctgtcatgcccttcattgaccgcacccttcttcgtgctcgtgatccaccaactccatcttttcaacatatcgagtaccagtctgccccagctatgttgtcctccacaacccagttccttgcttccaagtcaaagccacctgccactgctgtggacattttcaagctcactcgctcagaccttggccggctgcgctcacagcttcctgcaggggaaggtgcaccccggttcagcacatatgcagtgctagcggcacatgtctggaaatgtgtctcccttgcacgcagcctacctcctgaacaacccaccaagttgtattgcgccactgatggccgacaacggctacagcctccactaccagatgggtactttggcaatgtcatcttcaccgcgacaccacttgctgaggcgggcaaggtgaccagtgagctggcagaaggagcagcagtcatccagggagcactggataggatggacaacgactactgccgctcagcgttagactacctggagcttcaaccggatctgtcagcacttgtgcgtggagcgcataccttccgctgcccgaacctagggctcaccagctgggtgcgccttcctatccatgatgctgacttcggatggggccggcctgtgttcatggggccaggtggcattgcgtatgaaggtctggcgtttgtcctcccaagtgcaaatggcgacggcagcctgtccattgctatctcgttgcaggctgagcacatggagaagttccggaagctaatcggcgaagcttaaacggtgccaactgttgaaggaggatgttattgggcgagaaggattatgctctgcccaaattctcagataaaatactgaagtttcaagtgaacccagtggctgcactttcactttgaagacttgcagaggaaattcatggtcacttcattttgtgagattaattatagagaaagggtagaaattatatgaagaaacatagtaaaaaatcattgttaggaacaaactccaatagcaggctctacttgtacgtcgcagacataagctgagactgagctgcgattgcaacagattatactcttctatcaggttgactgaagttccctcagtggccaatcttggatctttctgcaggtgttgtgcagatcttagccctttttctgaggcttgaaaaagaaccccaaactgagattctcaattgctgcaggctgatgagatgcaactgagcacacagcctgaggttgtggcggtgtggcctgatctggcttgccattgtcggacatcgtcatcggcgccggggacaccgagcagttcgtcgaggcactagtttttcaacactgctgggtggtgagcagttctattacgccatgacgccaccttgcacaaactttacgttgcgattacctctgcatagcggcggtcctaacattctaagggcccgggacaaggtttcaaatagaggcctttcaaattatttttaatgtataaatgttactaattaaacactcaaaatacatctaaaaatatttatatcaaataataagtaaataaaagaatatatattatagtattactttaaaattttcttctaacatgtttagatattcattattttgttgatgggctatcggatcacgtgactagaattcggggtttatcgaccaatgtaccgctttgatcaagtccttgttgcaaacctgagctatagcctatgcctatcaagtacttagcttgtat

SEQ ID NO: 7486 - DNA, 1963 bp, Zea Mays
aggggctcctctccctgcgtgcgggctttcgtttcgtgcagttgtgtggtttgcgagcgcagagcagttcgtggacgtggagccaggtggtctgctgcccgaagaagccacactacgctccacgcatcgcgtagacggcgtagttggctcgcgggaccccggagtcagcatcgcgccgctctctcccgaagctcgcgcgtctcctcggcgcccggagcgagcctgaggcgcgcggacaaacgatgtcctcgccggcggcggcgacgctgcacccttcccccaccttccttgcctccggccctcgctaccgccgccgcggacatccatcttcgaaggtcagcttccgaaggttggcgccacgattaaaggtcaatgcactttttggatggcctaggggggacacgacagcacgtgaactgatccctcctgctgaatcctatacgctctcagggtaggtgcaaaaccacgtgaggtgtctatatctgttgcttcttcaatcatggacattcctgctgcggattgggatgcctgtgcgtgtgatttagatgatcctggaaattttaaccctttccttacttatgcattcctctcaagcttagaagaatcaggttctgcggtcaaggaaactggctggttaccttttcatattgttgcacgggatgagaatggacatattataggtgttgttccactttaccttaaaagccattctaggggagagtttgtgtttgatcaatcatgggcagaagcttactacaactatggccttgaatactatccaaagctccagtcttgtgtgccttttactccagtaactggtcaaagaatattacttcgaaatacatcataccgtgatcaagtttttgacgcactagtcaaaggtttgatgagcctcactaccaagatgaatgtgtcatcattacatattacgtttccgtccgaaggtgaattcagtaaactgaaggatagtgggttgttacaaagaatcgggttgcaatatcactggagaaatcggaattacaagagttttgatgagtttctgatggatttgaagcagcctaaacggaagaatatcagacaagaacgtaaaaagattcctgcccaaaatttgcaaatgaagcgacttcgtggagacgaaataaagagcagacactgggacaccttctataaattctaccttggggcagaccatacttgacaagggatttctttcacctcttgggagaaaagatgggggataatgtgatgcttatagttgctgaaaaagatgataaactagttgctggcgctcttaaccttattggaggtgatacactatttggccggttatggggatgcctgccagatgcttactttcccaatttgcattttgaagcttgctattatcaggcaattgaagcagccatagagttaaacctgagtaaggtggaggcaggtgctcagggagagcacaagatccagcgtggttacctcccagtgacaacttacagctgccactacttttcaaatcctggttttgcggcagctattggaaattatcttactcatgagacggctcaggttaagcatgctattaaggtccttcgtgattccggaccatacaaggaagacatactgaaagagttcgctgctcaacaagacgacgacctgtagaatacagaagggacttaaactatttgcatactgttttatagaactaacatcttctatgtagcaacagggatacaggtcgtccaaagtgttaccaaactacgaatcccacatttggacactgctaggactgtaaatatttaacattgtaacatcagtcttacggcgttgagttgggagctatagctatactcagttgtctcgctcttacttttccccaacagaaggacttgatgcttcctgtatattgcgctttgactttgattagatttataggaaaaaaattacataaatatctgcagctgtcattcag

SEQ ID NO: 7487 - DNA, 2997 bp, Zea Mays
gccagttgttggttcacggccctcgagctgcaatcgacaattccgttggcatatgaacagttcgtgttttgtgatatatttcaccaaaaggaatcaggatggagagactgctcattttgtggcaagcgcctccattgtggatgtgttgcttcaaagaactcttatgatctacttgacagtggaggaattcaatgtgtcacttgcatgaaaaattcagcagctcagtctgcttctggacaagtggttccaaagctctttccatgtccaaacaatctgctgttttttggtaaaagcgacgagttattgtcaagcagaaaatttgaacaaccaccctctcttatgttggattccagaaatgatgatattgctattgtaaataagagtagtcacctgttcatggtaagcggcatagaggctggacagagcagtaacatcttgagacaaaaagagatagagaatggtccaaggcagattaaatgggaacaaccaacccttaatattggggacatgggaagacctttactaactaggtctcaaagtgcattagagtcacctcagtgtactcgaagagatgacaataaggatccaactacagatagcacaacaagtgaatcgtttccagaggcatgtctgagcatgaacctaggtattgcaaacaatggaaacaggatggaggctacttcaacagcggaaagacctatgctatcgccaacgacagccattgctgaaggaagagaacttaccactgcactgtccccctttcagcacgcacaaagggctcggcatttcctgaccagaccaccaagggttggtgagggtgcagcttttgatccaactagagacatgtttccgcatcttcgtgttgctaggccacctgctgaaggaaggggccgcaatcaattacttcctcggtattggccaagaataacagaccaagagctgcaacaaatatctggagattcaaattccacaatcgttccattgttcgagaaggtcctgagtgcgagtgatgcaggccgcatagggcgccttgttcttccaaaagcttgtgccgaggcatattttcccccaatttctcaaccagaaggacgccccttgacaattcaagatgcaagaggaaaagaatggcattttcagtttaggttttggccaaataataacagcagaatgtatgtcttggagggtgttacaccatgcatacaatcattgcaattacaagctggcgatacagtgacctttagtcgtatagatcctggagggaaacttgttatgggctttcggaaggccacaaatactgtcagtctgccagactcacagatttcagctattgcgaatggttcccttctcagtgagacactcttttctactgcaaatgaaagcataggagtattggaataaggcagataaatttggcagcaggccagatgaggggtctttgcaatttctacaaaaacgaagtcgcaatattggttccaaaagcaggaggttcttaatcgacgctgaagatgccatggaactaaagcttacctgggaagaagctcaagagttgttgcgccctgctcccactgcaaaaccaactgttgtgatgattgaggactatgaatttgaagaatatgatgaaccccctgtctttgcaaagagatcaatttttaccatccgtgcaacaggggaacaagaccagtggattcaatgtgacgagtgctcaaaatggcgccggttgcctcttaatgttattgttgcatccaaatggacatgcaccgacaactcatgggacccaaaatgctgctcctgctctgcgcctgaagagttgaccccaaaagagttgcaaagtgttatgcagcagtatgaagaaatgaggaggcgaaagggcagctatggtctgaagctgaatgtcgctgaaatggatgcatccagctttgacgccttggccacgggtgcagtattcggtgaagtcgggaaccaaggtacggcttcagtcgcgacgaccacaaggcaccccaggcatcgccccggctgcacatgcatcgtgtgcatccagccacccagtggcaagggcccgaagcacaaccctgcgtgcacctgcaacgtgtgcatgacggtgaggcgccggttcaagacactgatgatgaggaagaagcagcggcagtcggagcgagaggaggcggaggcaagcaagaagatcgcgtgggtgaacagagacgagcccgaggggagcagcctgtcgagatccccgcagacgctggacacgacccgagacagcagcgatgtcaccatgttcgacaaggtggccgccgacgtgaacaaggggcacatcgacctcaacttccaccctgcagcccctgccgtccgtggcgctggcgaccagggacagaatggcgcgcagcagccccgggcggtgagcatgatgggcctcctggaagtggcgagccggccccttgataactacatgaagcagaacggcctgacgagcctggcgggggagcaaggaggtggcagctccagcacggccacggtcccgccggctccagtggagagtgaggaccggacgtccgatgagggccgtgtcgcgtcagcagagcgggaagcagacgccatggccatcgacgaggccggcgagaaccagcaggacaagcctgccgactctgccgctgccgctgctacttgacggcgtgcgtctgttgtgaaagtgactgatgggtgttgtcagcgtgctttgatggtttcaaggtgttgctcctggaggctggagttacttacgtgtacgtatgaggctgtgcaaccaacccccaggttgtatgttgtagaagttctgtaaaccacgatgctcttgtgttggttgctgctgtaatctaaaaacgcttagacctttggattcaataactcaccacatacttgatctgtactgtacatctcatctaagacatcttttggaaaacaggaatttcacaggagtcacggacggactcagtgcttaagtttaaatatacatgcctttta

SEQ ID NO: 7488 - DNA, 3549 bp, Zea Mays
tcgttttccattccttgtcttccccgcaccgcacccgcatccgcatgcaccaatcgccaccagcgaccgccccgcggctgtgcctgtgggtgcgcgcgttcgttgtcccctccacgtccaccggaaagctacgcctcccccaccgcctcctctagcgtctcggcccgtctccctctcactctctctcgctctcgctctctctctccgtgggtgatgcgctcagccgacctcttctgaccggcggagtggctgcgctcgccggtcacccatggctatggcgggcgccggcgcggcggcggcggcggccaagaggtgcatgaacccggcctgcggcgcgctgccggcgtcatctgtggtggtcggggcgggaggggactggaggaagggctggccgctgcgatccggaggcttcgccctgctctgcgacaagtgtgggttggcatatgaacagttcgtgttttgtgatatatttcaccaaaaggaatcaggatggagagactgctcattttgtggcaagcgcctccattgtggatgtgttgcttcaaagaactcttatgatctacttgacagtggaggaattcaatgtgtcacttgcatgaaaaattcagcagctcagtctgcttctggacaagtggttccaaagctctttccatgtccaaacaatctgctgttttttggtaaaagcgacgagttattgtcaagcagaaaatttgaacaaccaccctctcttatgttggattccagaaatgatgatattgctattgtaaataagagtagtcacctgttcatggtaagcggcatagaggctggacagagcagtaacatcttgagacaaaaagagatagagaatggtccaaggcagattaaatgggaacaaccaacccttaatattggggacatgggaagacctttactaactaggtctcaaagtgcattagagtcacctcagtgtactcgaagagatgacaataaggatccaactacagatagcacaacaagtgaatcgtttccagaggcatgtctgagcatgaacctaggtattgcaaacaatggaaacaggatggaggctacttcaacagcggaaagacctatgctatcgccaacgacagccattgctgaaggaagagaacttaccactgcactgtccccctttcagcacgcacaaagggctcggcatttcctgaccagaccaccaagggttggtgagggtgcagcttttgatccaactagagacatgtttccgcatcttcgtgttgctaggccacctgctgaaggaaggggccgcaatcaattacttcctcggtattggccaagaataacagaccaagagctgcaacaaatatctggagattcaaattccacaatcgttccattgttcgagaaggtcctgagtgcgagtgatgcaggccgcatagggcgccttgttcttccaaaagcttgtgccgagaaggacgccccttgacaattcaagatgcaagaggaaaagaatggcattttcagtttaggttttggccaaataataacagcagaatgtatgtcttggagggtgttacaccatgcatacaatcattgcaattacaagctggcgatacagtgacctttagtcgtatagatcctggagggaaacttgttatgggctttcggaaggccacaaatactgactcacagatttcagctattgcgaatggttcccttctcagtgagacactcttttctactgcaaatgaaagcataggagtagtaagtggttatcctggatttcttcactcaataaagggagctgcagatttccatccaagctctctatatgatcatcatattaactcagctgacggggatgtcagttggaataaggcagataaatttggcagcaggccagatgaggggtctttgcaatttctacaaaaacgaagtcgcaatattggttccaaaagcaggaggttcttaatcgacgctgaagatgccatggaactaaagcttacctgggaagaagctcaagagttgttgcgccctgctcccactgcaaaaccaactgttgtgatgattgaggactatgaatttgaagaatatgatgaaccccctgtctttgcaaagagatcaatttttaccatccgtgcaacaggggaacaagaccagtggattcaatgtgacgagtgctcaaaatggcgccggttgcctcttaatgttattgttgcatccaaatggacatgcaccgacaactcatgggacccaaaatgctgctcctgctctgcgcctgaagagttgaccccaaaagagttgcaaagtgttatgcagcagtatgaagaaatgaggaggcgaaagggcagctatggtctgaagctgaatgtcgctgaaatggatgcatccagctttgacgccttggccacgggtgcagtattcggtgaagtcgggaaccaaggtacggcttcagtcgcgacgaccacaaggcaccccaggcatcgccccggctgcacatgcatcgtgtgcatccagccacccagtggcaagggcccgaagcacaaccctgcgtgcacctgcaacgtgtgcatgacggtgaggcgccggttcaagacactgatgatgaggaagaagcagcggcagtcggagcgagaggaggcggaggcaagcaagaagatcgcgtgggtgaacagagacgagcccgaggggagcagcctgtcgagatccccgcagacgctggacacgacccgagacagcagcgatgtcaccatgttcgacaaggtggccgccgacgtgaacaaggggcacatcgacctcaacttccaccctgcagcccctgccgtccgtggcgctggcgaccagggacagaatggcgcgcagcagccccgggcggtgagcatgatgggcctcctggaagtggcgagccggccccttgataactacatgaagcagaacggcctgacgagcctggcgggggagcaaggaggtggcagctccagcacggccacggtcccgccggctccagtggagagtgaggaccggacgtccgatgagggccgtgtcgcgtcagcagagcgggaagcagacgccatggccatcgacgaggccggcgagaaccagcaggacaagcctgccgactctgccgctgccgctgctacttgacggcgtgcgtctgttgtgaaagtgactgatgggtgttgtcagcgtgctttgatgtgcgtatcttatcggctcctcttggtttttttttcttttctttcaggaatagctggtgagtttttgatgtgaaagttctaaactaaatttctgtagggtttcaaggtgttgctcctggaggctggagttacttacgtgtacgtatgaggctgtgcaaccaacccccaggttgtatgttgtagaagttctgtaaaccacgatgctcttgtgttggttgctgctgtaatctaaaaacgcttagacctttggattcaataactcaccacatacttgatctgtactgtacatctcatctaagacatcttttggaaaacaggaatttcacaggagtcacggacggactcagtgcttaagtttaaatatacatgcctttta

SEQ ID NO: 7489 - DNA, 1615 bp, Zea Mays
gattggcaactaagtggaaggatgttggtacggggcatcatgttgaatatgatcagagacctgatatttttaggggaactgttcgctatgctagtgtgcatgctcacttgggaagaactgggagtaggagagatgatcttgaatcccttgcatacacgcttatttttcttctacgtggccgcctcccttggcaaggataccagggagagaacaagggttttcttgtctgcaagaaaaagatggcgacatctccggagtctttgtgtggaatctgtccacaacctttccgggattttgttgagtatgtggtgaacttgaaatttggtgaagaaccaaattatgcgaagtgcatctctctttttgatggcattgttggcccaaatccagacataagaccgataaacacagatggtgcccaaaagctaatatatcaggttggccagaagagaggccggttaatagtggatgaaaatgatgatgagcaacctaagaaaaagatcagaatggggatgccggcaactcagtggattagtgtctacaatgcccgtcgacccatgaaacagaggtaccactacaatgtagccgataatagattgctgcagcatattcaaaagggaaacgaagatggcttgtttattagttcagttgcctctagctcaaatctgtgggctttaattatggatgctggcactggctttacatctcaagtatacgaactttctaattactttcttcacaaggaatggataatggaacagtgggagagaaatttctatatcactgcactggctggggcgaataatggaagctctttggtgattatgtcaagaggaacacaatatgcccagcagtcctacaaagtaagcgatacatttcccttcaaatggataaacaaaaagtggaaggagggcttctatgtcactgctatggcaacagctggaagccgatgggcagttgtcatgtcccgcaatgctggtttcacttctcaggtagtggagcttgatttcttatatccgagtgagggcatccacatgcgttgggacaatggctatcgcatcacggcaacggctgccacatgggaccaggcagcctttatcttgagcattccaaggagaaagcctagtgatgaaacacaggagacccttagaacatctgcgtttcctagccagcatgtgaaggacaaatggtccaagaacctgtacctagcttccatctgctatggaagatcggtgtcctgaaacccattttctcgatttggtttggttgccgagaggtatattgatatcaaagacaggtggttttatgatatcagatggagtgttttgaagctcaaaactctgctaacctactgcaactaacaaaagatttcattggaatgtcatcgggactggaggagacatgctgacacaaatgaacgacgacagggtcggcagaatcgatatcagctggtgtttcgaaattacaaagatggaatttttagttttttcttcatcagttctaagttacagatcattagctatgtcgtaattcattttgatacatcattcagaaggatacaaaattgcttctatgtatatcgttgtgcagttgtgctccaacaagcggccattccccc

SEQ ID NO: 7490 - DNA, 1533 bp, Zea Mays
ctatacatcgcacgggccagacgtggagcaggccagggtcgaggcccaactggagctccaggaaggcacacaggccgaaagccgccaccgtttcttcatctcccatctgccggcgctccatcttcgactccctccccgactcgcgctcggcacgcaggcgacgacggcggcgctcaggctcgggctcgggctctcagcgacggcggggcagtcccaatttcggcggcggcgtcagcggctccccctcccgcctcttgccaatcgcctcgcgccctcgcctccggtcctccgcacaccggccggtgaccctgcgtgcgcgcctcccgctcccctcccgcctccggtggaccgttgacagcgcccggccccggcggctgcactgcgcgccgcgtacggccggcgggcagcgggagccagcagccgctgctctaccaaggcggccgcaccgctttggtagcgcttatgccccaacgaagcgttacccgtccgcttagcgctgaagcgtgcgcttagtgccgcctgttggaaccctgatctatagttggtcttcttataacttctcatagtacactttcagcaacacattggactacaatggagaatatgcgttatgctgaggagctcgtgagggagtttctagttttcaggggtttcacaagtacgctgcaagcgtatgagacagagttgtctactgagattggcaggaactttcaaggagacaagatcgtggatttagtgttctcagagtatgtaccgaaataccaactggacaagttgctcggtctgtttgcctttttcaagcagtgtttcatgtcacctgcggacacagagttgttctcaacccttgttaagttggagctgtcagtattaaggtactatgttattaatgctttgaaatctggaagacaagacaaagtaattgaattctttggtgagagtggcaattatctgatgcaaaagcgtggagattggctggcatggtttgctattccatatattaagaacccaagcttggatccacaattccgtctatatttctccaaagagtggctggacactttggttctttcatttaggaattttttgagtgggatattcaatgatactcctcttatgagaattagtagtgaaaagaataccatcaaatccctcaagaatgacataaaacaactgaataataaattggcagagctacaagcatccttagaggagaaggaagatgaaatctctctgttgaggaggaactataatagtggtggttatggaaacaagaatgtagttggtactagtacagctggttcccctcatgaagagatgtcagaaaactatgaagaatcctcggcctcgagtagcatgatacagggttttgattctcggtcctcaagttcagtgaaatcttatacaagaggtggaaaattccatgaatcttctgagatcaaccatacagaggatcagcaggttttggtgactgaggaagagtttcctgaggtgaaagtagatttccaggttctggagtttgactcgttgacatta

SEQ ID NO: 7491 - DNA, 1557 bp, Zea Mays
ctatacatcgcacgggccagacgtggagcaggccagggtcgaggcccaactggagctccaggaaggcacacaggccgaaagccgccaccgtttcttcatctcccatctgccggcgctccatcttcgactccctccccgactcgcgctcggcacgcaggcgacgacggcggcgctcaggctcgggctcgggctctcagcgacggcggggcagtcccaatttcggcggcggcgtcagcggctccccctcccgcctcttgccaatcgcctcgcgccctcgcctccggtcctccgcacaccggccggtgaccctgcgtgcgcgcctcccgctcccctcccgcctccggtggaccgttgacagcgcccggccccggcggctgcactgcgcgccgcgtacggccggcgggcagcgggagccagcagccgctgctctaccaaggcggccgcaccgctttggtagcgcttatgccccaacgaagcgttacccgtccgcttagcgctgaagcgtgcgcttagtgccgcctgttggaaccctgatctatagttggtcttcttataacttctcatagtacactttcagcaacacattggactacaatggagaatatgcgttatgctgaggagctcgtgagggagtttctagttttcaggggtttcacaagtacgctgcaagcgtatgagacagagttgtctactgagattggcaggaactttcaaggagacaagatcgtggatttagtgttctcagagtatgtaccgaaataccaactggacaagttgctcggtctgtttgcctttttcaagcagtgtttcatgtcacctgcggacacagagttgttctcaacccttgttaagttggagctgtcagtattaaggtactatgttattaatgctttgaaatctggaagacaagacaaagtaattgaattctttggtgagagtggcaattatctgatgcaaaagcgtggagattggctggcatggtttgctattccatatattaagaacccaagcttggatccacaattccgtctatatttctccaaagagtggctggacactttggttctttcatttaggaattttttgagtgggatattcaatgatactcggaccccagctcttatgagaattagtagtgaaaagaataccatcaaatccctcaagaatgacataaaacaactgaataataaattggcagagctacaagcatccttagaggagaaggaagatgaaatctctctgttgaggaggtttctttctgctattaatgttaagcttggttagattgaactataatagtggtggttatggaaacaagaatgtagttggtactagtacagctggttcccctcatgaagagatgtcagaaaactatgaagaatcctcggcctcgagtagcatgatacagggttttgattctcggtcctcaagttcagtgaaatcttatacaagaggtggaaaattccatgaatcttctgagatcaaccatacaggtatcgaagagtcgacattctcgttggagcacccgtacaagggtgccactccccttggtccgtg

SEQ ID NO: 7492 - DNA, 1700 bp, Zea Mays
cctaacttaccttgtttctgtaacacacacgttagtcacaataatattatgttgtcattaatcaccgaaaccaaattggggcctatatgctttcagtgttagttcaattttacatcatctgaaatgaaaagtcggttttctgggcacctggagatggtctaatgcttccgtagtttagattgttttaatgtgtgcaccaatatatttttcctatttcatattcttcaatttattcttctgttgtgctttatgtatagtacatgttttccatatctttggtaccctttcttttgctgcagaggatcagcaggttttggtgactgaggaagagtttcctgaggtgaaagtagatttccaggaaacatttttaggccataacagtccaattagccgatgtcgattttctgcatctgggtcaaatattgctagttcatcaattgatggcacagttaggatttggacatatgattcgtcaactgcatcatccagaaatgctactatatactgtgggtctgaagtcagtgcactttcatgggaatgcagatctgacagattggcacagctaatggaggaattaaagcttggaatgctgatgcaaagagagttgtttgcgacctgagtacatctagaaactttccaagcatcttagatttgaaatgcagccctgttgaacctgtgtttgtctctgcagctgcatcaagacggcatggatcaactacatttgagagaacaggatttgccaacttgacagtgtggcatatgaaaacatggaagccattgactgtcctccctcttggtgaggatccacctgccattacttctctttgcttcaatcacaatgggaagattttggcagcttctgctacagatggaatgattcacatgtttgacatgtctgctggtcttcaaattacaggatggcctgcccatgattcacctgtgagctctgttctttttgggccagcagaaactagcatcttcagcttaggctcggacggaaagatacttgaatggagtttgcacaatcaaggtcagattctttggtcaagagattgcagcagattctgcaatccggagagctttaaaacacgaatgcatgaaatagcattggattcaaatggcaagaggctgctggtcacctccggtttggttcgggccccaatataccaggtacaaggccatgaaagcgaactgaggacactgccgcacagttcatctatcacaagtgtggattggcatccaacactgccaatgtacatcactggatccgcagaccactctgtccgggtcacgtctatcttatgatgatctataaaacaaggtgctggcaacaacctttcccagctagctagcatgcatcaacccttattgacagtcttatccatgcgtgaggctcggtgtcacgctatttcctcgcatggaagatgagctgtgttcttgttttgtggctttggtgtgcgtctaattctgtaccctttggtgggttgctccaacatttttttttcttgttgtaaacaggcatagagttctgtggtcatttgctttaaaatgagtgatagatcaaaataagtaaactttgtagcccgtctctcgaaatctcacgtctgcatacgcagatatgctatatactgtatgtacttgtaaatgaatttgtagcccgtctcagatagtacttcgcattacaatctatcatccttcac

SEQ ID NO: 7493 - DNA, 2840 bp, Zea Mays
ctatacatcgcacgggccagacgtggagcaggccagggtcgaggcccaactggagctccaggaaggcacacaggccgaaagccgccaccgtttcttcatctcccatctgccggcgctccatcttcgactccctccccgactcgcgctcggcacgcaggcgacgacggcggcgctcaggctcgggctcgggctctcagcgacggcggggcagtcccaatttcggcggcggcgtcagcggctccccctcccgcctcttgccaatcgcctcgcgccctcgcctccggtcctccgcacaccggccggtgaccctgcgtgcgcgcctcccgctcccctcccgcctccggtggaccgttgacagcgcccggccccggcggctgcactgcgcgccgcgtacggccggcgggcagcgggagccagcagccgctgctctaccaaggcggccgcaccgctttggtagcgcttatgccccaacgaagcgttacccgtccgcttagcgctgaagcgtgcgcttagtgccgcctgttggaaccctgatctatagttggtcttcttataacttctcatagtacactttcagcaacacattggactacaatggagaatatgcgttatgctgaggagctcgtgagggagtttctagttttcaggggtttcacaagtacgctgcaagcgtatgagacagagttgtctactgagattggcaggaactttcaaggagacaagatcgtggatttagtgttctcagagtatgtaccgaaataccaactggacaagttgctcggtctgtttgcctttttcaagcagtgtttcatgtcacctgcggacacagagttgttctcaacccttgttaagttggagctgtcagtattaaggtactatgttattaatgctttgaaatctggaagacaagacaaagtaattgaattctttggtgagagtggcaattatctgatgcaaaagcgtggagattggctggcatggtttgctattccatatattaagaacccaagcttggatccacaattccgtctatatttctccaaagagtggctggacactttggttctttcatttaggaattttttgagtgggatattcaatgatactcggaccccagctcttatgagaattagtagtgaaaagaataccatcaaatccctcaagaatgacataaaacaactgaataataaattggcagagctacaagcatccttagaggagaaggaagatgaaatctctctgttgaggaggaactataatagtggtggttatggaaacaagaatgtagttggtactagtacagctggttcccctcatgaagagatgtcagaaaactatgaagaatcctcggcctcgagtagcatgatacagggttttgattctcggtcctcaagttcagtgaaatcttatacaagaggtggaaaattccatgaatcttctgagatcaaccatacagaggatcagcaggttttggtgactgaggaagagtttcctgaggtgaaagtagatttccaggaaacatttttaggccataacagtccaattagccgatgtcgattttctgcatctgggtcaaatattgctagttcatcaattgatggcacagttaggatttggacatatgattcgtcaactgcatcatccagaaatgctactatatactgtgggtctgaagtcagtgcactttcatgggaatgcagatctgacagattgctgctcataggcacagctaatggaggaattaaagcttggaatgctgatgcaaagagagttgtttgcgacctgagtacatctagaaactttccaagcatcttagatttgaaatgcagccctgttgaacctgtgtttgtctctgcagctgcatcaagacggcatggatcaactacatttgagagaacaggatttgccaacttgacagtgtggcatatgaaaacatggaagccattgactgtcctccctcttggtgaggatccacctgccattacttctctttgcttcaatcacaatgggaagattttggcagcttctgctacagatggaatgattcacatgtttggatggcctgcccatgattcacctgtgagctctgttctttttgggccagcagaaactagcatcttcagcttaggctcggacggaaagatacttgaatggagtttgcacaatcaaggtcagattctttggtcaagagattgcagcagattctgcaatccggagagctttaaaacacgaatgcatgaaatagcattggattcaaatggcaagaggctgctggtcacctccggtttggttcgggccccaatataccaggtacaaggccatgaaagcgaactgaggacactgccgcacagttcatctatcacaagtgtggattggcatccaacactgccaatgtacatcactggatccgcagaccactctgtccgggtcacgtctatcttatgatgatctataaaacaaggtgctggcaacaacctttcccagctagctagcatgcatcaacccttattgacagtcttatccatgcgtgaggctcggtgtcacgctatttcctcgcatggaagatgagctgtgttcttgttttgtggctttggtgtgcgtctaattctgtaccctttggtgggttgctccaacatttttttttcttgttgtaaacaggcatagagttctgtggtcatttgctttaaaatgagtgatagatcaaaataagtaaactttgtagcccgtctctcgaaatctcacgtctgcatacgcagatatgctatatactgtatgtacttgtaaatgaatttgtagcccgtctcagatagtacttcgcattacaatctatcatccttcac

SEQ ID NO: 7494 - DNA, 2316 bp, Zea Mays
ccatcgaagaaaaggggaaaaggggaaaatgatttcttaaaaaagaggagtgacccggtctaccggagcgtacggtgccgatcccgtcgccgccgctacccctcaatcgcgagcaacttcttccggattcgcaccaagctctccacaattctatcgctatgctgcggaaggccgtcgtcgccttcatcgcctgcaccgccttcttcctcgccttctctgcctactcccgtcgccagggcgttgcagaggttcaattaccagcagttactcacagggtctacctagatgtagaaattgatggccaacacataggtagaattgttattggtctctatggggaggtcgttccaaaaacagttggtattcttattatacttctctttttccagcatgttcttttattgattttgattttcgaagtttgtgtactcctttgcacgcctggtgcttcctgcgcttctgttctagactcttgacatgtggcatagtcatgaactcacacatttgtgagtttccccattgttttggttaaaagttaccctgtccctgttccaagtagaagtttagttgatacatattaatttctaacatctgtctgttcctatcagtgtgctgttttgtgtggttaacaaagatctagttgctagcactcttcctattttcatgattccacttatatatgcctatagaagggcagactggtacagtggtgagagctatctcattgattcaccaggtctagggtttgaagcagcctttccgcatttgcggagtaaggcttacctttgtttatcctttccctaaatccaactcatgtgggagccttcagcatggggcctgcccaattatacatgcgtatggctgagaccaacctcaccgcttcaaacttacaattatcatgtcaaagtttttttttgtaacatatatgaaataaaattggcttcacagattatagttcatctactaaatttttttgttctacactctgcagaaaactttagggctctttgtacaggtgaaaaaggtgtcgggtccaatggcaaacctcttcactataagggaacaccattccatcgtattatccctggcttcatgattcagggcggtgacatagttagaggcgacggtaaagggagtgagtctatatatggaggcatcttcccagatgagaatttcactgtaaaacatacacatccaggtgtgattgttcagccagtgaactttatcatccagtttgcattttgcctttgttgaagttcatgtgtactcagttacacatttattttcaaggaaaccaccactattttatttgacactaatgatgctatctattaaagaatatgcaacttttagttgatggcatcttttttagattacaacgcggtcttttttagattacaacgggtctggtttctgatttgattcactatgtagctacacctgatttcaagaaagctttgtaccgagacctactaagttgtttgtcagcaacaagtccaaatattctggtgtttttttccttttgttttactttgtttatatttctttcatcctgacttggttagcaaccggtcaatgtggccaaatcatgaatgggtgtttgatcttctgacaggtatctatctgaatttttttaaattaggatggtcatttccaactctacccctgctttgctgtcttgcaggggttgttgctatggcgaattctggacttgattctaatggatctcagttttacataactactatcaagacaagctggttggatggggagcatgttgtcttcggcagggtgatccaaggaatggataccgtgtacgccatagaagggggcgctgggacttacaatggcaagccaaggaagaaggcggtgatcaccgacgctggtgagatacccaaggagaaatggggtgatcaggaagcgtagggtgttttctacttcttgtcaccttcaaatcaggtagccatgtacttcttttttccttgacctccatggtgtgccacggttcagcaagacttccggaatgttgtatatcgtagctagcttatggccagtcgaattgactctgatcccttgagttgtgatgtggagacgcatacatctgaaaaatctttaggccatgttcggttagggtggagtgaaggggattaagtttccttccattcaaatttgaatttaaatttcaataggaggaggttgttcgcttcgaattaaagctaactgtttagactgttatagctgtaatctgtacagacaaaaacattgtataagcagaagctaatatggattaaagctaagcgaacaggctattaatct

SEQ ID NO: 7495 - DNA, 1480 bp, Zea Mays
cgccatcatcactttccatcaaaaacaatccggacatggtccttgttgatacagaagcttggggtaaaggttcaggtttggcattctatcatcgttttgtagattgtcaactaaagggcgcacacaagttttctcagcccatgccaaagactattcttttgggaagctcaataagccctgttgaatctgattatttaagattgacaggatttggtgattgcataaggaaacccctccgtcttagtactattgttgcctgtcttcgcaaaaccttaggggttggggttacaaggcagcagagtagagaccaatctttggttcttcaaagtgtactaactggaaaacagattctggttgtggatgataatgcagtcaaccgtaaagttgcagctggttctttgaagaaatatggatctaaagttacatgtgttgatagtgggagtgatgcaattgatatgctcaagccacctcacacatttgatgcttgcttcatggatgttcagatgcccgagatggacgggtttgaagctacaagattaatccggtccatagagaaaaaaataaacgatatgatcatgatgggtgaaatatccgctaataattatggaaataaggcccattggcatgtaccaatattagctatgacggcagatgtaatccaagcgacttttgaaaaatgtatgcagtgtggaatggatggatatgtgtcaaagccatttgaagaacagcagctctactttgctgttgctcatttcttagagactgatgaaacagaataacaaatccaacttcgtaggagattgatttgccgcaacactgtttcaacatctgccaaaagaccatctgttcaacaggttctgaaaaacagcgatcggcagcatatttggaaacaaaatacattggactcccactgaccagaagaaagaagataagatagtagggggtacaaaatgtttggtctggtttccgcagcaattttttttctggccgtgttttctggaaccaatacaacatgaccttgcaacagtggtgtcagttgcttctgtaatgccttatgacaccacgatatttccaaatgctgtgttgtaagtgctttacagacaaaccgaggtccagctttctaaaacattgagttcaatgacatcacttcatccattatttaagaaagcgagggtcttcaaatcaggaggatacaattgtatcaccaagtcaggcacacagtttcaaggtgactttgttctgatctgattgttaatgcaatctgtaaagaggcaactatgagttagggattgtttgatgccttgaatgtcgtatattcatattccatcatttttgtgggcacttgtatatacattgatgattaattgtattgttagataattgtgcattttaagattaaatgaattcctaaagcaaatcgttacataaacaatgtataaagcacacataacaaataaaggcatgtcttagtagattaaac

SEQ ID NO: 7496 - DNA, 4513 bp, Zea Mays
aaacaacaccattgctcttctctcttctcgtttctctcctgtatccagttgtggctcaccactgctattctctctaccagcaagcagctcctgccttttgtttttcagctcctgctgcagcctttcccctcccaccacccaccacacccccaaacccgtgcaagaaaccaggagcagcaaagcaaccggcgctgcaacttgctccggtggcttaaagttggacagagtgggctcttggatcaccgttcaccggtccccgacccaccggcgtgccactgttcttggacagagggggcaatcattcgcgccgcggcagtagccaacctcctccgttcttggattggctcacagcgtgcgaccgtgcgggcccctcgaaccgagcaacaagccaagcaagaacacccactcccctctctccggactccgcatgcgattgctggctcggtgacgcgctgctggcctatctcaaatcctcaacttacttgcctcctcggttctttcttgtgcttcatgtggctcctgcaactcgctgcagcaccacttgcgctgtgtcgccacgcgctgtttcttgagcctctttggtagctttagtggttgaagcgaggtctgctcacccgatggttccgaacggagcaggggaatgcggcggcggctgccggcgagggaaagcagcgcacgccggtgtcggcgctgtggctggtttcttcttatgtctcttgatggtctgggcagttggtgggtctgaaagatcaggttgtggccgggtggctgagcaccacggggtggtacgggtggggcagttcaacctcagcaggagccagctgcaggcgttggtgttcctcctctcatcgacacataaagaatgtatggtaaattctggaatggtccatgatgggaatcaagtcaatggtgcgtcttttatcccagatattcgttgcattcgagataggatatatgatggaaaacagaattggttgaaggatgcaattcttcaagaatcttgcacagcacaagataaatatggcctaaatagtcatgcacctgcagtattggaagataagttattgcaaaatgttatacaagaagacattaattctaccacgcagtgcaataaaacatttgaggacttcacagcaaggacaacatttgaaaggccattgatgagtggtgtcgcctatgcattgaaggtattacacaatgaaagacaacagtttgaggaacaacatggatggaagattaagaagatggaagatggagatcagtcccttgttcatgactacaaccttgaaaagcttgaaccatcaccagttcaagatgagtatgcgcctgttattttctctcaggaaactgtgaagcacattatatctgtagatatgatgtctgggaaggaagatcatgacaatatattacgttcctggtcaacaggtaaaggggccctaacatccccttttaagcttctgaagtccaaccatctcggtgtggtgcttacattcactgtatataaatatgatctgcctccaaatgcaacaccacaggagcgtattcatgctacattgggctatcttggtgcctcatttgatgtcccttctctggttgataaactcctagaacaactcgctagcaaacgaaagatagtagttaatttatatgacaccacaaatcatacctctcctattgaaatgtatggttctgattttactccatctggtgatctgcatattagtagcattgattttggagacccaacacgcaaacatgagatgcattgcagatttaaacatgaaccttcactgccatggtctgcaataataatatcaacagctgtagctataattgttttgcttgttggacatattatttatgcaactctgaactcccttgaaaaggctgaacatgattatagagtaatgagagaacttaaaggacaagctgaagctgcagatatagcaaaatctcagtttctagcaactgtttcccatgagattcggactccaatgaatggtgttttaggtatgctgcagatgctaatggacactgaacttgatacaactcagcaggattttgtagtcaccgctcaagaaagtggaaaggtattaataaacttaataaatgaagtccttgatctggctaagatagagtcaggaaggattgagctggaagcagtgccttttgatgtccgtgatattcttgacaatgtgatatctcttttctacgataaatcacaagctaaaggcatagagttggccgtgcttgtatctgaccaagttcctgatgtcctaattggggatccatggcggttccggcagatcattacgaaccttgtggggaattctatgaagtttactgaacagggccacatctttgttcaagtccatttggtcaaggaactaaacaggaaaggaaacaatttttgtgatgtttctgctcataacagagaaattctgtatgattctgacaactcgatgctatggaacacactaagcggacttgaagtagcagatagctggaggtccttggagaattttacgatgttcaagaattcaaatggtgaaacagatacaattaggttagctgtcagagttgaagacaccggcataggaataacaaaagatgctcaaatgcgtatttttacacctttcatgcaagctgacagttccacctcacgaacatatggtggaactggaattggcttgagtattacaaaacgtttagttgaattgatgggtggagaaatagggtttactagtaaatcaggagttggtagtacattttcttttactgccattttcaaggagaacagaggatgtcctggagatatgaaaagatactattctgaacctactccgttggattttcaaggaatgagggctcttattattgatggaaggagtgcacgtgcagaggttactatgtaccatcttcgtagacttggaatacagtgcagtcttgttgccacatctgaatctgaatctgcatcttcagctttgatgaaagcctgcacctcaagcaaaaacaatccggacatggtccttgttgatacagaagcttggggtaaaggttcaggtttggcattctatcatcgttttgtagattgtcaactaaagggcgcacacaagttttctcagcccatgccaaagactattcttttgggaagctcaataagccctgttgaatctgattatttaagattgacaggatttggtgattgcataaggaaacccctccgtcttagtactattgttgcctgtcttcgcaaaaccttaggggttggggttacaaggcagcagagtagagaccaatctttggttcttcaaagtgtactaactggaaaacagattctggttgtggatgataatgcagtcaaccgtaaagttgcagctggttctttgaagaaatatggatctaaagttacatgtgttgatagtgggagtgatgcaattgatatgctcaagccacctcacacatttgatgcttgcttcatggatgttcagatgcccgagatggacgggtttgaagctacaagattaatccggtccatagagaaaaaaataaacgatatgatcatgatgggtgaaatatccgctaataattatggaaataaggcccattggcatgtaccaatattagctatgacggcagatgtaatccaagcgacttttgaaaaatgtatgcagtgtggaatggatggatatgtgtcaaagccatttgaagaacagcagctctactttgctgttgctcatttcttagagactgatgaaacagaataacaaatccaacttcgtaggagattgatttgccgcaacactgtttcaacatctgccaaaagaccatctgttcaacaggttctgaaaaacagcgatcggcagcatatttgcaatggaattgaggtcccagttcttatatatagaacttgctccaggaaacaaaatacattggactcccactgaccagaagaaagaagataagatagtagggggtacaaaatgtttggtctggtttccgcagcaattttttttctggccgtgttttctggaaccaatacaacatgaccttgcaacagtggtgtcagttgcttctgtaatgccttatgacaccacgatatttccaaatgctgtgttgtaagtgctttacagacaaaccgaggtccagctttctaaaacattgagttcaatgacatcacttcatccattatttaagaaagcgagggtcttcaaatcaggaggatacaattgtatcaccaagtcaggcacacagtttcaaggtgactttgttctgatctgattgttaatgcaatctgtaaagaggcaactatgagttagggattgtttgatgccttgaatgtcgtatattcatattccatcatttttgtgggcacttgtatatacattgatgattaattgtattgttagataattgtgcattttaagattaaatgaattcctaaagcaaatcgttacataaacaatgtataaagcacacataacaaataaaggcatgtcttagtagattaaac

SEQ ID NO: 7497 - DNA, 4969 bp, Zea Mays
aaacaacaccattgctcttctctcttctcgtttctctcctgtatccagttgtggctcaccactgctattctctctaccagcaagcagctcctgccttttgtttttcagctcctgctgcagcctttcccctcccaccacccaccacacccccaaacccgtgcaagaaaccaggagcagcaaagcaaccggcgctgcaacttgctccggtggcttaaagttggacagagtgggctcttggatcaccgttcaccggtccccgacccaccggcgtgccactgttcttggacagagggggcaatcattcgcgccgcggcagtagccaacctcctccgttcttggattggctcacagcgtgcgaccgtgcgggcccctcgaaccgagcaacaagccaagcaagaacacccactcccctctctccggactccgcatgcgattgctggctcggtgacgcgctgctggcctatctcaaatcctcaacttacttgcctcctcggttctttcttgtgcttcatgtggctcctgcaactcgctgcagcaccacttgcgctgtgtcgccacgcgctgtttcttgagcctctttggtagctttagtggttgaagcgaggtctgctcacccgatggttccgaacggagcaggggaatgcggcggcggctgccggcgagggaaagcagcgcacgccggtgtcggcgctgtggctggtttcttcttatgtctcttgatggtctgggcagttggtgggtctgaaagatcaggttgtggccgggtggctgagcaccacggggtggtacgggtggggcagttcaacctcagcaggagccagctgcaggcgttggtgttcctcctctcatcgacacataaagaatgtatggtaaattctggaatggtccatgatgggaatcaagtcaatggtgcgtcttttatcccagatattcgttgcattcgagataggatatatgatggaaaacagaattggttgaaggatgcaattcttcaagaatcttgcacagcacaagataaatatggcctaaatagtcatgcacctgcagtattggaagataagttattgcaaaatgttatacaagaagacattaattctaccacgcagtgcaatccggacgaatgtgacttatgtgctggaatcagtggcgtgaatgtggtccagaatattgggtcaagttctaatcgcacaataatattatgtctatctgcttttttggggagcattgtgatatcaatagttaaaactacgcacaaaagagggattcaaacccacaagctttatgcagatgagaaagttctccaggcaccaagtactaaaataagtcgaaagtggtcaaagagagccctgcttattggtgtcttatttgggctctgtagctctgtatgcatattttcatgcatgtatgccgatgttgttgctcggagaattgagaatcttgctaatatgtgtgatgagagagcaaggatgttacaggatcagtttaatgtaagcatgaaccatgtgcatgcgttggctatactggtctcatcatttcaccatgggaaggatccttctgctattgatcagaaaacatttgaggacttcacagcaaggacaacatttgaaaggccattgatgagtggtgtcgcctatgcattgaaggtattacacaatgaaagacaacagtttgaggaacaacatggatggaagattaagaagatggaagatggagatcagtcccttgttcatgactacaaccttgaaaagcttgaaccatcaccagttcaagatgagtatgcgcctgttattttctctcaggaaactgtgaagcacattatatctgtagatatgatgtctgggaaggaagatcatgacaatatattacgttcctggtcaacaggtaaaggggccctaacatccccttttaagcttctgaagtccaaccatctcggtgtggtgcttacattcactgtatataaatatgatctgcctccaaatgcaacaccacaggagcgtattcatgctacattgggctatcttggtgcctcatttgatgtcccttctctggttgataaactcctagaacaactcgctagcaaacgaaagatagtagttaatttatatgacaccacaaatcatacctctcctattgaaatgtatggttctgattttactccatctggtgatctgcatattagtagcattgattttggagacccaacacgcaaacatgagatgcattgcagatttaaacatgaaccttcactgccatggtctgcaataataatatcaacagctgtagctataattgttttgcttgttggacatattatttatgcaactctgaactcccttgaaaaggctgaacatgattatagagtaatgagagaacttaaaggacaagctgaagctgcagatatagcaaaatctcagtttctagcaactgtttcccatgagattcggactccaatgaatggtgttttaggtatgctgcagatgctaatggacactgaacttgatacaactcagcaggattttgtagtcaccgctcaagaaagtggaaaggtattaataaacttaataaatgaagtccttgatctggctaagatagagtcaggaaggattgagctggaagcagtgccttttgatgtccgtgatattcttgacaatgtgatatctcttttctacgataaatcacaagctaaaggcatagagttggccgtgcttgtatctgaccaagttcctgatgtcctaattggggatccatggcggttccggcagatcattacgaaccttgtggggaattctatgaagtttactgaacagggccacatctttgttcaagtccatttggtcaaggaactaaacaggaaaggaaacaatttttgtgatgtttctgctcataacagagaaattctgtatgattctgacaactcgatgctatggaacacactaagcggacttgaagtagcagatagctggaggtccttggagaattttacgatgttcaagaattcaaatggtgaaacagatacaattaggttagctgtcagagttgaagacaccggcataggaataacaaaagatgctcaaatgcgtatttttacacctttcatgcaagctgacagttccacctcacgaacatatggtggaactggaattggcttgagtattacaaaacgtttagttgaattgatgggtggagaaatagggtttactagtaaatcaggagttggtagtacattttcttttactgccattttcaaggagaacagaggatgtcctggagatatgaaaagatactattctgaacctactccgttggattttcaaggaatgagggctcttattattgatggaaggagtgcacgtgcagaggttactatgtaccatcttcgtagacttggaatacagtgcagtcttgttgccacatctgaatctgaatctgcatcttcagctttgatgaaagcctgcacctcaagcaaaaacaatccggacatggtccttgttgatacagaagcttggggtaaaggttcaggtttggcattctatcatcgttttgtagattgtcaactaaagggcgcacacaagttttctcagcccatgccaaagactattcttttgggaagctcaataagccctgttgaatctgattatttaagattgacaggatttggtgattgcataaggaaacccctccgtcttagtactattgttgcctgtcttcgcaaaaccttaggggttggggttacaaggcagcagagtagagaccaatctttggttcttcaaagtgtactaactggaaaacagattctggttgtggatgataatgcagtcaaccgtaaagttgcagctggttctttgaagaaatatggatctaaagttacatgtgttgatagtgggagtgatgcaattgatatgctcaagccacctcacacatttgatgcttgcttcatggatgttcagatgcccgagatggacgggtttgaagctacaagattaatccggtccatagagaaaaaaataaacgatatgatcatgatgggtgaaatatccgctaataattatggaaataaggcccattggcatgtaccaatattagctatgacggcagatgtaatccaagcgacttttgaaaaatgtatgcagtgtggaatggatggatatgtgtcaaagccatttgaagaacagcagctctactttgctgttgctcatttcttagagactgatgaaacagaataacaaatccaacttcgtaggagattgatttgccgcaacactgtttcaacatctgccaaaagaccatctgttcaacaggttctgaaaaacagcgatcggcagcatatttgcaatggaattgaggtcccagttcttatatatagaacttgctccaggaaacaaaatacattggactcccactgaccagaagaaagaagataagatagtagggggtacaaaatgtttggtctggtttccgcagcaattttttttctggccgtgttttctggaaccaatacaacatgaccttgcaacagtggtgtcagttgcttctgtaatgccttatgacaccacgatatttccaaatgctgtgttgtaagtgctttacagacaaaccgaggtccagctttctaaaacattgagttcaatgacatcacttcatccattatttaagaaagcgagggtcttcaaatcaggaggatacaattgtatcaccaagtcaggcacacagtttcaaggtgactttgttctgatctgattgttaatgcaatctgtaaagaggcaactatgagttagggattgtttgatgccttgaatgtcgtatattcatattccatcatttttgtgggcacttgtatatacattgatgattaattgtattgttagataattgtgcattttaagattaaatgaattcctaaagcaaatcgttacataaacaatgtataaagcacacataacaaataaaggcatgtcttagtagattaaac

SEQ ID NO: 7498 - DNA, 3430 bp, Zea Mays
cagaagcgggctggcggttgcagtttcccgcccgctcgcacataggtgcgaaatttgcccagctacttcgcgcgctcccttcccgcatccgtctctcttctccagcaattatactatccacagtaggcagtagccgaagttcctaccctccccttcgcctccatctctcttctcctcacgattcacgaacgccagagctccttccccactccggcgttgccaagaagccagcttcctggccccgtctccctccgctcgccagcagcctttcgctgtcatccaaggaaatatttttcgatctgtaccattgctttccaaagccacaatgcctgcttctgcttgcacacatcttgattctggttgtactaggaaatatacaaggttcaagaatattcacgcagtttatgatgaagattatgacagggatcctaagaggatcaaaactgaaatcattgattcggaactaagtgttggttctgtcagtgacaaggatagtgaacaagattgtgatgatgtatttctcaaggatctcaggactcagtgtaaagcaaagaattggaagacttcaaaaatcacatcggaaggatgtggcattaagaatcaggctaaaacagaagatgacattgatcttgataagcctcttattgcattgaaacaaaagagtccaaaaacatctcttgctaaggataatgtaaagatgaatgcactaagatcttctccatgtgctacgaaagaggaagatacaacatcacatagagacaagattcttagttcttccctgatcaaagcaacaatgcaagacccagtattagagaagcttggaaggaaatttgcagaactggagcagtctaaagttgttattgattgtactgaaatcgttggtgatcaaatttgttgtgttgaagtgaacaatacagctggagctctagcgagctgtgcaaaacctgatgtactttgtgaaataaaagctgaagatacaaattattctgaatttggaacttctatctgttccataaagaatcctgagcattcatcctttaagctgcaacagaagctggtagcgggtgatgactgtgtgcctcaatattgtttcatgactcgaccagctcaattagccgatgtttctgatcatccctgcgaacaaacctgcagtatcaacaattttgatgacattacagctgcaaaagcaattgaggtttcttcgttaggtctcactgatgaaacgagcaatcatcagaaaacatctgaaaatctaactgactcagatgtgtgtaagtcctctaccgcaaatgggtttatagcttgttctttcaatcagtcctgccatgatcttgtggatagcgatgaacattggaatttatttgttcatcggaatgagcctgtgaagcttttggaagagttgtcttctgttgatgaatcatgcgcagatactcaatctgatttatgtggaagcacaaaaatgaattgcacttcccttgagggggttgtgcagatgcaggctgagggccaattggattcaatagtctgctgtggtgtaaggccaaagcatatgttactagatatggaaattagacatacagaaactggtgtattcacctttgataagactattgacttggctcatcctgccaattttgttgcacaagatggaaggctagaaagtatagtatacgatgttttgaataatcatgcacaaaggacagcctctaaaaacgaatcttctgttggactcccagaaactgctgtgagtcagagctcacttattgacttcactgacaattgtgttgaagacaaaagggcttcagttgataaaattttacctcccaataatctagactggccattgaaggataagttaaattctacaacagactatgacatttgtaggcctattaatgatgatgaaggatcagaagaagaattagtgcctcaacatcagttataccagtcgtgtagtgataaattcaaccttagcagtgccatgccagagatttctaatgctgaagattcacaaaaaatatctgccggagctcaaaattcttctgctacctttttggaaactgatgggcgaattaaaaagccaaatttttttgtggatgaagaaccaattgaagaaaacactccaaaagtattactgtccaagagaaagattatgtcaccgatgtctcaggagaagctttgcagtgctctgactggcattgatttgtgtgatggagttcaaagatttaagagcaaaatcattattgaagatcatgataaaactacaatatcattgcctcaaccagcacacatgcaagacagatcaatgttgtccacagacaggagacttaagagcaggacttttgtctcccctacaagcaaaggagttctgaagtcaacaggatccccaccccatcaacatacaacttgctcttgcacgagaagttcaccagtggtcttagacaccgagaaagctgttgaattttcacaaagacagatgcatgatatagaaaatatagctgctaagcttatcaggagcttgaagcacatgaaaagtatagtggatgaaagtttgtcaacagaagcatattcattacttcctaattttaacattgctgagatcagagcagcctctgaggatgcattagaagtggagaggactacgaggaaatggctgtcgataatgaacaaagactgcagtcgcttttgtaaaatattgagcctagcaaagaagaacgatgtttctcatcctgaagcaccaaggaaacaaagaaaaataacgtttgcagatgaagctggaggaatgctctgccatgttaaggttttcaaggatggacaagcctctcttctttctgaatgccagagtgatttatagacatactaaactggttatcatcatgagatttgatcagaaaagcaacattcttgagtgttggcaatatcaaaaaagctgctcacttgaaccaaaataatgagaatgcttccattcaccttagaaacagatggagaagctagtgcatcttgaatgcacagtatgtgttttactgtaaattgattgatgacaatcttgtggcaactcagttattatccttgttttttaaacatatttagtgtaaaaacaattagagtgcttacatgctaacaacaatttttgtacattggatgcaatttatttttagactattttctaaagaacccctatgtttttatagaataggatgtgttgtctttaggtgcgatctaataaacaagatttgatataccatgttagtaccctagtcatttttatactaggtatgttgcatgtatattaagttcaatagtatgtaaagcggcaattttacaatgtttgctgaggccacacgtaatctgtaacctagaatttgccaatgtaaaacaattattggtaccctgttgaaccaaagtgctttattctattgaactacttaag

SEQ ID NO: 7499 - DNA, 1812 bp, Zea Mays
atccggttcggttccgtcgtccactctcgttccccagttcgctggaccatctcaaaatcctatcctcctctccttccctccgtatctcatccggccgattcgaatctccggtcccatcctctacggcttcaccccgcgcccaatccagtctgtacgtgaatcttgacaggggagagaagaatcggataaggagacctgcaccttcctccgagcaaagcaggagaggaaacaagaatagaggaggagatggccatgcccaccttacgccttgctcctgacctgccgcccgtatcccgcctctgcttcgggacaatgacgatgggagagcagagcggggcggcgtgctcgctccgcctcctcgacgccgcctacgacgccggcgtcaacttcttcgactccgcagagatgtacccagtcccacagcgcagtgagacgcgcgggcgtagcgaggagctcctcggccgctggttgcgggcccgccgggccccacgggacagcgtcgtcgtcgcaaccaaagtcgcggggccttcagggcagatgacgtggattcgcggcgggccgacatctctcgattcacagaacatcgcagaggcaatcgatggctgtttgcgcaggctgggtgtggactacatcgacctctaccagatacactggccggatcggtatgttccaatgtttggggagacagagtatgatccgaactgccagtacacgtctgttccaatggaagagcaactggaggctctcggaagagcaatagatgctggcaaggtacattggccttagcaatgagacaccatatggtttgatgaaatttcttcagttgagtaaggattctcagttgcttccaaagctactgacactgcagaactcgtataatttgttgtgccgaaattttgattctggattggcagaatgctgccatcatgagaggtatgcttgacacggtcagaagccctaactgttgtcttcagtgtctctaatcttctcatgtatggtcctggcatgagttggtagtgcatattggttttttccctctctatgactatgatacaacgatacatagctctcctgcatgttcgaaaaaatattgacatctgtttagtttaaagaagaatggcattgtcatatcgtatttgctcttggttaagaattagcttgctggcttatagcccaatggcaatgggtatactttcaggaaagtatcacttatctgataattgtggtccgccagacgcaagaatgaatcttttcaaagggagatactctgaaggtgaatcccggtacaaactgcagagccccaaagtgaaagcagctgtgaaggaatacacacagatttctgcaaagtatggcatttctccagtgaccttagcgattgcatttgtcttgagacatccacttgtggcatcggctgttttcggtgcgactaaattgtggcagcttgatgaagttcttcaggcaactacagtccatctttgtgaggaaattgttgctgagatcaatgatgtacatgcaagataccctaacccttgcccataaaattttgcaaaaaaaaaactttatttagcatcacatggatccttatttatcatcgagagatatttttttccaatatagcactgggtatgttttttcccaatatagcaccgccattagatgtgacacttagggcctgtttgtttaccccatggattatataatctggattatttttggaggattatatagggcctgtttgtttaccccccaaattatataatctggattaaataatcctaagaggcaaacaaacagtccagcttatttgcctag

SEQ ID NO: 7500 - DNA, 3066 bp, Zea Mays
ctctatccaacttcacaagcactgggttatcttgttgattggtccaggtcaagcaaattacgaataagcccacaaagtgagaaaggatcagaagttattattgatttagaagcactgtctggcttcactgaattttttcttgagatccaagataatatatttccccatcgtattgctgcttttggagtgtctttacaacctgtttcttataacttgcctgtgccatcacaagtagtactaatagctccaagatatgttctttcaaatgagtctgatgctgcaattgctgttcgtcaatgttttgttgagcacggcattgatggattgacagttgaagctaaacagcgggctgctttacagacatggaaacctgggaaaaaacgagaagtaaattactttgatttatttgttaagaagcacagaaatgtttttgaggattctcacatttttatccagttctgtccaaaagaacctggatacagttggtctggaccaatctgtgtttcatcaattggtcgttttttcttgaaatttagaagattagaaggaatgctggaagatggtattaaaagagaccctttgaatgctgggaagctgaaactatttgcttctgtcgatgttgctcaagagacaacttcttttgtgctacacttcactaaaccaccgaaggttacactcccatatcgaatagaaaattacttgagcgaatcatctatcctgtatttccagaagttgattcagatgtattacaccctcaagagtcagaacagtatgcttgggatgatttaagttcaccgcgcaaactggttgtccgaattgttgatacacctgcattgcgtgaaattaaaatagataaaatcagcccatggaagccatttttgaagatgcgccaaaatagcaggcttaatctggatttctcattcagtggtggactcaattcgagaaaacagagatttgatgaatcatttggcttgagagtgttcaaaattggctacgaagtgtatgccgatggtttaacaagagttttacgaatttgtgaacatgcagataatcccaaaattgagaaaattcaatggccaatagcaaatatacagttcagaatttcttatgtgtgtattcatcttcttgacaaggaccagaatggggaaaatgtccaattgccatctacaattttagcagcaagacttcagcatgtttcttctgattcagttgtcacaaatagattcaagcaagtatctgttgcaattcattcattgaatgtggatgaaaaatgggaaggggcttcaattgggacaattcttaggaggaacaagcttcaggatgctactctcgatgaaaatattcttcgtatgatctttgtactgaattcaactgactccagtgtcaaacaaatacagtattgtgccatcatcctacagcctgttgatcttaagattgatgaggaaacgttaatgaagctagtaccattttggagagcatctcttgcaccttcaggcacgacaagcacacaattttatttcagacgttttgaagtacatccaattaagatcatagcaagctttcggcctggtggccgacgcacaacatatagttctgctcaagaggctctgagggcactacttcatagtgttataaaggtgcctgaaattagcaactcagctgtggagctcaatggggttctcctaaatcatgctttagttacatttcgtgagctacttctaaaatgcgctcagcactactcatggcatgtttaaatttataagcaagaacatgaagtcgggtggtttttctggaacaaaacggtaccttggtgatctcgggaaaactgttaaaactgcaagttcgaacgctctctttgctgctgtcacagaaatttcagatagtgttgttagaggagcggaaacaaatggtttgaatggcatggttactggtttccaccagggcatgttgaggttggcgatggagccatctgtcttagggcaggctataatggagggaggtcctgacagaaagatcaaacttgatcatagccctggacttgatgagctatacattgaagggtacctgcaggctatgttggatgtcatgtataagcaagaatacctccgtgtcagggtgattgatgaccaggttatactgaagaatctaccaccaaatagcgccctgataaacgaaatcgtggacaacgtcaaaagctttcttgtgagcaaggcactgttgaaaggcgattcttccacagttcgaccgatgcgccatctgcgaaatgaacctgaatggaggattgccccaacggtgctcaccctctgcgagcacctttttgtgagcttcgctgtgcgtgtgctgcaccgggaagccagcaaggccatcgctggagtcatgtcgagagtgaagaaaccgaccggagaggaggtcgaaggcgactcgcccgcatctggtggcgtcctgtgtaagcggaataggctgtggactgtcgggaggtttgccgtctcgggcatggtcgcctatgtagatggccggctgtgccggcacatacccaaccccatagcccggaggatcgtcagcgggtttctactgagcttcatcgaaaacaggggcaacgaataagcgggcagccggacaggtgataaaagggctcgccttctgccacctgctaataaggcgtaccatggaccatggtaaataggcgtgcacgttgtacaaagaaccgaggtgtggtagtgctcttgagccgtaaccgatctctgcatagagctgtgcatcaattttgaccgccttcaggcccacgtttggtgtacagaaacactgggacagtaattccgcagatgctacttcctgcctacatttcgttgacatggactcgtgcttagagtaagtttaatagtccacaacgagccttttcacataacaaactcggttagaggccctttcacatagtctatctatatcatcttattatacttgttctacatgcaaagtgataaatagcatggctatgataaacgtatggagccgttggtgtgttgatcatgagtcactccactgggtatatctctaattttattgttt

SEQ ID NO: 7501 - DNA, 3021 bp, Zea Mays
ttttttttttgtagtcgatctatccaacaagcccggccggaggtttaaacttatcaaatcacgtgaaaagatagctcgccgacgctgacgcagtccggaaacgcgtcgcccagacgcccacacatccatccacaacggtaaagccgccgcggcgatgtcttccgcacccccgcctccgccgtctctgaaccccgaagtgcccccgcgcatcgtccgcgcccccccgcgccggcctcctccgcgcgcgcccggtccgccgccttgggcggagcgtcggcctgccgtgtccgtcgacctcgaccgcggccgtcgctcggtccgcaccgaggtggacggcgtccgcgccgcgtcgctccctgcgcgacaccgcctccgcgtggagggcaaccggtggcagcgggactggaaggtgtccgaggtcgtcgcgcgcttgctcgcgctgcctcatgccgacgcggacgccgtcgacgccgtgctcaactgctgggccggtcgcttcgcacgccgcaacttcccgctgctcatcagagaaattgcaatttctggatccttgaaacatgctgtgcatgtgttccgctggatgaaaaatcaggagaactactgtgctcgcaatgacatttatggcatgatgattaggttacatgctagacacaacaaggttgatcaagcacgtggcctgttctttgagatgcaagaatggcggtgcaagcctaatactgatacatacaactctttgatccatgctcatgctcgagctggccagtggtgttgggccatcaacattatggatgatatgcaacgtgccgctatacctcctagccgaactacgtataataatgttataaatgcatgtggagctgctggtaactggaagaaagctttagaactttgtaagaagatgactgaaaatggtgtagggccagatttgatcacacacaacattgttttgtctgcttttaagaatggagctcagtactcaaaagccatagcttactttgaaattatgaaatcctctaaagttgcccctgatacatgcactatgaatattgtgatccattgccttgtaaagattgggctgtatggggaagctattgagttgtttaactcaatgagggaaagaagaacaacatgtcatccagatgtcgttacatatactagcataatgtattcttattctgtttgtgggcaagctgaaaattgcaaggcggtctttgatataatggttgctgaaggtgtcagacctaatattgtatcctacaatgcacttttgggtgcttacgcctcacatggtatgcacacagaggccttggagacttttaaattactgaagcaaaatgggttgagacctgatatagtttcctatacctccttacttaatgcttatggtagatctgcacagcctgagaaagctagggaggtctttaatgaaatgaggaagaatgcatgcaagccaaataaagtcagttacaatgcacttattgatgcttatggatctgctggaatgttgaaggaagcgattagtctgttgcatgaaatggagcaagatggcattcaaccggatgttatttcaataagtactctgttaacagcatgtggccgctgcaagcagctaactaaaattgacataattcttgcagcagctaagtctcgagggatccaactaaatacagttgcttacaactcaggcatcggaagttatttaagtttgggagattataagaaagctttggtgttatacacgtcaatgagggcaggcaatgtgaagccagatgctgtgacttacaatatactcattagtggatcttgtaaattgggaaggtatgtagagtctctgaaattttttgaagacatgctggacctgaatattcatttgaccaaggaagtctactcatccgtgatttgctcatatgtcaaacagggcaaattaactgaagcagcatctacttttaattctatgaaagaaactggttgcttccccgatgttttgacatatacgacattaattaaagcatatagtgatgatgggagctggaggagagcatgggacctattcaaagagatggaaaataatggcacacagccagatgctattgtctgttcatccctcatggaagcattgaataagggaggtcaacctgaaagggtccttcagttgatagaattcatgaagcaaaaaaagattcaattgaaccaaaaggcttattttgagataatatcttcatgcaccatgttacgagactggaaaacagcaagtcaaataattgaacatttggattcctctctctcatctatttcttttggcacactcaaccatattttaaattttcttggaaaatgtggcaggacagagagcatgatgaagctgttctataagatggtgacttcatgctctactgtgggcctttctacttatacgattctgctgagaaatctcttaattgtggggaaatggagaaagtatgttgaggttttgcagtggatggaagatgctggagtctgcccaacactctatatgtatcaaagcgtgcttccatatatctggagagacaacagtatggactatgttactctcatgcaagaaaaaataaatgcattgagagagaaggtaacatgagcttcagatatgcatttgctcgcttggtatgaactatgaagtactagaagtccataaccgaatactgaaggtagctttagaatgacactagcaggattcaggtaggacataattgtgagtctgcctgccctagtcgggattgaagcaacgaatccctcttcagaaaaaaaaatggatatggcacttcaagaacttaagaaacgacatgattctatagttgataaaaggctggtcagatacgcgcacgaggagtgtagctggtggagcaggccgcgtgcatacaaccttggtctggcatgtattcctagaacactttttattttgtttttccatcgtatattttaattgaaatgtatattttaattaaaatgttcaatcactaaaccaattttagatctgtgttcttg

SEQ ID NO: 7502 - DNA, 1407 bp, Zea Mays
ccttgtcccttgtctcattttatttgtttgtcctttgcttatattctatcaagtccatggcttaccataccatctttccaaactataggttattcaaactgatatttgatgagttcacagtacgcattattccaagagatgctcctctactagaatctgttggaccacaaaagtgtcttgctttcagcacagatggtgcaaaatttgcaattggtggagaggatggacatctcagaatattccattggccaagcataaaagtgcttttggatgagcccaaagctcataaatccttccgagacatggatatcagcttagactcagagttcttagtttcaacatccattgatggatctgcgagaatatggaagatagatgagggcgcaccactggtcaatttgactcgatcctcggatgagaagatcgagtgctgccgcttttctagggatggcatgaaaccgttcctgttttgcactgttgcaaaagaggaagccacgatggtgacttctgtgctgttgatgtgaagaaaatggaagtttcccactggagcaagaaggtccatcttggctccccagtcacctccattgaattttgtcctagtgaaagggttgtaatctccacatcacatcagtggggagcagagctcacgaaactgaacgtgcctgccgactggaaagaatggcaggtctggctcgtactcctggcgctcttcctagcctccgccgtcctgttctacgtgttcttcgagcgatcagacacgttctggaactttcccatggggcggcaccagccggcgaagccatggaacgtgctcaaggagtctcctccggtccccgaggaccagactccatggtgatggtattgcttccatcgcgtcatctgtgaagagaagagcgatactgtcccagacccaacaaagccaccgcgtgctgtttatcttgttacaattataaatcgtccatgcttgttctaccactctcagccagtgaccacgcaagtttgtaaccctggactgccataaaccaggtgatagtaattgaacattctgtcttcgtgcgagtgtctgagtgtgtatccaggtattaccatgccgaccactgtcctgcttcctgatgacgaggtggctgatttcctcgtctttatttatacgttttgggatcaagagaaataaaggagctaaaacctctttgctattcaattttgaatagcaagatgattttgtcccctagctcccaaagaagcccggtttggaaacactaatcgagattggagggcatggaattgaattgagttcaataccaaatcagccatggtatttaaatgcgatgtaattccaattctattgtttggatgtcacttaattagagtttggaatagtttgttacaattccaaacaatacagaggag

SEQ ID NO: 7503 - DNA, 2231 bp, Zea Mays
gtcgccgtccaagcagaagcggagcactaaccacacgagcgcgagagtggaggcgcagagagccgtcgccatcgtccatcgcaaattcgctagcggacacaaatccacccagccagccgttcatcgcaaccaccacaaccaccaaccaacgggcgtgcccaccacgcggcgccgttggggttggcgggcgccatgggggcgccgagcagccgcgcgctggcgctgggcgcggccttcctgctgctcctcgtcgcgctgccctccgccttcctctacctcacctcctccgcggccacccgcgccaccctcctcgacctcaagcccttctccgccaggtgcgcgcccgcagtcgcgccgctccgcgtcttcatgtacgacctgcctgcgcgcttccacgtcgccatgatgggggccgccgccggcgcggggttccccgcgtggccgccgtccgcgggcgggatcaggcgccagcacagcgtggagtactggatgatggcgtcgctccaggatgggggcgcgggaccggagcggggaagggaggccgtcagggtgcgggatcctgacgccgccgacgccttcttcgtgcccttcttctcctcgctcagcttcaacgtgcacggtcgcaacatgaccgaccctgacaccgaggccgaccgcctcctgcaggttgaacttgtggatattctctggaagtctaaatattggcaacgttctgcgggccgtgaccatgtcattcctatgcatcaccctaatgctttcagattcctgcgagcaatggtgaatgcatctattcttatagtttcagactttgggagatacacaaaggaactggcttccctgaggaaagatgttgtggcaccatatgtgcatgttgtgggttccttccttgatgacgatccacctgatccatttgaggctcgccatacactgcttttctttcgaggccgtactgtcaggaaagatgtatggaactgatttatgattgaagggaaaatccggtcaaaacttgagaagatattaaaaggcaaggaaggggtgcgctttgaggatagcattgccacgggcgacggcattaacatagtaagtcatttttcccatttatactctttttcttagtgatattaacatttttctgttaagttttttttatagaagggtagacccgatgcagtggtgagaattatctcatggagtcattaggccatggtttgaagcagccagacctcactcatgtgggagcctccggcattgggtctgcccttttattaaggcttctttacaatagagcatgaaatttacaaatctggttgatcctaacagtctacagaaggtatgcggtcatcaaagttttgtctccaccctgctggggacactccttcctcatgccgcctgtttgatgccatagtcagtcattgtgttcctgtgatagtcagcagtcgaatcgagctcccttttgaagatgagattgattacagtgagttctcccttttcttctccgttgaagaggctctaagacctgattacttgctgaacgagctcagacaggtccccaaaaggaagtgggttgatatgtggttgaagcttaagaatgtctcccatcattatgaattccagtatccccccaggaagggcgacgcggtgaacatgatatggaggcaggtgaggcacaagatccccgcagttaaccttgctattcacaggaacagaagactgaaaattccagactggtggggataatgattggtggtgaatcgtgtacatattaccatatccactgttagtcctggttattttcggtgcgttatgatggaaacattgctcaccgtcctttgtgaaccaaagtgttcatcttaagatccaaggaccgagtccacaactatttgctgacaggaactgagattatcacctcttttttggtcgatttttgtgacggcttcctatttccccccctgatgctacaaaatagaggggacaaataaacttacagtaacattatagaggagtcatgcctgacaaataggatctgtagcttctttgtgctcccacactggaagtttaaatatataattcatatatgtctggtgctggactgccggtagatacggtttttctctgtgtttgctactttgaaatctgttgactcgattaacgtaggtttcaatatgtttggtgtgtactaaaccatatcggtatgtgctgtcagctgtcttgtagcgtgatggcgctactga

SEQ ID NO: 7504 - DNA, 1475 bp, Zea Mays
ttttttttaactcaatgctggttaccggctgggaggacgatgataaagaaagcatctctcactgcattccgggcccactactcaaacgttcggcacgccaggttggcaggtagccgttacatcgataggcactcggccactcgcacgcagacaccacaccagtgtgctcagtgctcactgctcaccataataacgctgcacctcttttcatttcaccatctcctgcccccttaaaaaaaagactcaccgtcgacacgccctcccgtcccgagagttctgaatcgaaaccgtcggccacgagagcagtgcgaggcgcccaccgcgatggctcgaaccaagcaccaggccgtgaggaagacggcggagaagcccaagaagaagctccagttcgagcgctcaggtggtgcgagtacctcggcgacgccggaaagggctgctgggaccgggggaagagcggcgtctggaggtgactcagttaagaagacgaaaccacgccaccgctggcggccagggactgtagcgctgcgggagatcaggaagtaccagaagtccactgaaccgctcatcccctttgcgcctttcgtccgtgtggtgagggagttaaccaatttcgtaacaaacgggaaagtagagcgctataccgcagaagccctccttgcgctgcaagaggcagcagaattccacttgatagaactgtttgaaatggcgaatctgtgtgccatccatgccaagcgtgtcacaatcatgcaaaaggacatacaacttgcaaggcgtatcggaggaaggcgttgggcatgatatataatatccattctgattgcatcattcttgtgaatttgtttgtaggagctagacattagtgttgttgaatgctgcatggttcctaatccttttcgcagtctaacatctgtggagttagtatgttacatggcaacagctgaacatctgtggactatatggcaacagccgaagattgtgtctgtgggataactggttgttttggttgctcttcagtagtttgtttgcttcagtatggactatggagtaaactgcatgctgaaacccgaaccactgctgaaactgcatgctgaaacccgaaccactgctacggcagttgccaggatagcaggagggcctttatgcacagtggaattgagtagagaactgagtaaaccatggttctttctccttttgaactggaacacacacagttggatcttgtttctcttcttaggccattcatcgtgtttattaggggtgtaaatggtacaaatattatctgtccgtattcgaatttgatctatctaagaaggttgaaatccgatccgtattcgagtccacgtattcagtacccgatccgtatctgaattatattcgtacccatatattcaaagttggatatttaagatgtcgataccaattctaatcttatctgtcataactcgataatatctgtatccgattcgaatccgaag

SEQ ID NO: 7505 - DNA, 1261 bp, Zea Mays
aaatccactcgtcctctccacccacctgccccccgcttccttccccggcgcggagaaccaaccagccttttgacgctgtcgcccgccgatagagcactagacgcgctagcccccggatctcctccgcggcctcgccgcacgcgtggggatggatttcgacggcgccattggcgatcagggctccatgtagcagtttgtgggccgaagcaagcaacaatgtgggtggtgattggagcatatttgaggagcaaacaccaattaaacactgtacagacttcgaatttcagttctgtgatgtaggaggtgaagtcttgttctcatgtaaaaatgcaatctagatatcatcgtcaaggagtttgaagaaaggaaggaaactttacaggcaaaacgcacacgcatgctgcagttctgtccagaaaatcttgagatgacatgttcagtgactgaagatgggctcttggaaagtcttcaggagatgatttttcaggtactgactgtttactgaactctgacgggactgatgaactgccagaagaatggctagttagttgatcacaagatatcgagcccggttttccggcagaagaaattaggaataaccctgctgctgcaacggaagaaactgccgatgtcttggcttgagctcttcgcctgtcgtagtccacgacaatcctgcatgctctagacctacttctctgaaaggtgcagctggcaaaatttattatcggagcaaagaaggcgagaccatccgtgtccctcccttttgtgctgatcaaaccatacagcatccatggcgacatcaccctgaacgacatcaacgagaagatccacgccccttcgccgcataagatcaggcacaggagcgacgaggagcccgacccgctccaggcctcagcagcgatctcagggaaacctgtggcccacaagacgaagatccacacggagggggggaagggggaaggggagcatcacgatcaccagaaccaaaggctaggctgatgaccatttgtgtgacgctggcgaagtggctaacagttgattcgcctttgcatttttggcgctctgggctcgttcccaattggttttgtggcccaggtgatgcatggccttagcagcgtgcttgtagcgttttctgttcttgctgtttactagtatcttacgcacgcgccttagcgcacgtcataggcagcgctgaatcgtgtcaatgagttaatataaaaatttaataaaataatccaaagaaaataagaatggttcatat

SEQ ID NO: 7506 - DNA, 1469 bp, Zea Mays
tcagcttccgccacctcctcaacacatcaaatccactcgtcctctccacccacctgccccccgcttccttccccggcgcggagaaccaaccagccttttgacgctgtcgcccgccgatagagcactagacgcgctagcccccggatctcctccgcggcctcgccgcacgcgtggggatggatttcgacggcgccattggcgatcagggtgagttgtgggaatggcaaagtcaggagtattgtatgcagaaagattcgttagctgctccatgtagcagtttgtgggccgaagcaagcaacaatgtgggtggtgattggagcatatttgaggagcaaacaccaattaaacactgtacagacttcgaatttcagttctgtgatgtaggaggtgaagtcttgttctcatgttgcatttccggactagtaaaaatgcaatctagatatcatcgtcaaggagtttgaagaaaggaaggaaactttacaggcaaaacgcacacgcatgctgcagttctgtccagaaaatcttgagatgacatgttcagtgactgaagatgggctcttggaaagtcttcaggagatgatttttcaggtactgactgtttactgaactctgacgggactgatgaactgccagaagaatggctagttagttgatcacaagatatcgagcccggttttccggcagaagaaatgtacttgtttcattccattgttcataagagtttggattcctgagttgttgagttcactgtctttgaagatgagatattgctacttatggtgtcgaaaatcttcttagtaggaataaccctgctgctgcaacggaagaaactgccgatgtcttggcttgagctcttcgcctgtcgtagtccacgacaatcctgcatgctctagacctacttctctgaaaggtgcagctggcaaaatttattatcggagcaaagaaggcgagaccatccgtgtccctcccttttgtgctgatcaaaccatacagcatccatggcgacatcaccctgaacgacatcaacgagaagatccacgccccttcgccgcataagatcaggcacaggagcgacgaggagcccgacccgctccaggcctcagcagcgatctcagggaaacctgtggcccacaagacgaagatccacacggagggggggaagggggaaggggagcatcacgatcaccagaaccaaaggctaggctgatgaccatttgtgtgacgctggcgaagtggctaacagttgattcgcctttgcatttttggcgctctgggctcgttcccaattggttttgtggcccaggtgatgcatggccttagcagcgtgcttgtagcgttttctgttcttgctgtttactagtatcttacgcacgcgccttagcgcacgtcataggcagcgctgaatcgtgtcaatgagttaatataaaaatttaataaaataatccaaagaaaataagaatggttcatat

SEQ ID NO: 7507 - DNA, 2505 bp, Zea Mays
cttccgccacctcctcaacacatcaaatccactcgtcctctccacccacctgccccccgcttccttccccggcgcggagaaccaaccagccttttgacgctgtcgcccgccgatagagcactagacgcgctagcccccggatctcctccgcggcctcgccgcacgcgtggggatggatttcgacggcgccattggcgatcaggggtgagttgaacgcactgcgcgtggttctgggtcgcgtgccgcggagaaaaggcggcaccttttgtctgttttctcgcttccgttccatctccgtcgatccccaattttgttgcgctcttggtgcgatacgggtggtgggtgtggtagcacaacggtactagagtggaagttgctaatacaagctgcgcctctttttggtcaatgtgctctttatgcggcctatgatgatgttaagggagcaggatgcaaggactactaattctggggggcaaaggatcgtgtttcccctccttctgtatgaagctttgctgtggctttcgcgccttttccgcatgctgcgtccaatttcagctaccacttttgatgcatttgcttactaatcgaactatcgaagggattcttgtttttgttttttctgttacattcctttacatagattgctatcacgagcttttgacctctgctagtatgctgtctgatgtttctgaactctgaacattctggtattccatgcgcacgcacgcgcacacaggcacgcgcacgcgcacgcgcacacgcacgcacacacgcacataactgacacattttctgtagccaagatgcaaaatttaccttgtctctttatggcggttacttgcctttcatgccggctagtatttcgcacagatgcattattcatgacctacattcctccaaatttaaatttcagttcagtataattctctgttaagattttactctttcttcaacattggctggagagacttatatacttcacttttttactccttgacctgagctgcctgctcctaaaatttcttgcaagagtaatcacttctgattgagctcgtcgttgtggaacttcttacagtgagttgtgggaatggcaaagtcaggagtattgtatgcagaaagattcgttagctggtttgctccacgtcattgcatcactatttctgctcgaaatatatatccacgtagagacgtaagaatcatgtatttctgatttggcagctccatgtagcagtttgtgggccgaagcaagcaacaatgtgggtggtgattggagcatatttgaggagcaaacaccaattaaacactgtacagacttcgaatttcagttctgtgatgtaggaggtagatgatttgacctaaatatcacaatggattaaactggatatttcctaactctatcccatctgacctttttggcaaacacttaataaggtgctaatacatatcagttgcatttccggactagtaaaaatgcaatctagatatcatcgtcaaggagtttgaagaaaggaaggaaactttacaggcaaaacgcacacgcatgctgcagttctgtccagaaaatcttgagatgacatgttcagtgactgaagatgggctcttggaaagtcttcaggagatgatttttcaggtactgactgtttactgaactctgacgggactgatgaactgccagaagaatggctagttagttgatcacaagatatcgagcccggttttccggcagaagaaatgtacttgtttcattccattgttcataagagtttggattcctgagttgttgagttcactgtctttgaagatgagatattgctacttatggtgtcgaaaatcttcttagtaggaataaccctgctgctgcaacggaagaaactgccgatgtcttggcttgagctcttcgcctgtcgtagtccacgacaatcctgcatgctctagacctacttctctgaaagctggcaaaatttattatcggagcaaagaaggcgagaccatccgtgtccctcccttttgtgctgatcaaaccatacagcatccatggcgacatcaccctgaacgacatcaacgagaagatccacgccccttcgccgcataagatcaggcacaggagcgacgaggagcccgacccgctccaggcctcagcagcgatctcagggaaacctgtggcccacaagacgaagatccacacggagggggggaagggggaaggggagcatcacgatcaccagaaccaaaggctaggctgatgaccatttgtgtgacgctggcgaagtggctaacagttgattcgcctttgcatttttggcgctctgggctcgttcccaattggttttgtggcccaggtgatgcatggccttagcagcgtgcttgtagcgttttctgttcttgctgtttactagtatcttacgcacgcgccttagcgcacgtcataggcagcgctgaatcgtgtcaatgagttaatataaaaatttaataaaataatccaaagaaaataagaatggttcatat

SEQ ID NO: 7508 - DNA, 2760 bp, Zea Mays
ttcagcttccgccacctcctcaacacatcaaatccactcgtcctctccacccacctgccccccgcttccttccccggcgcggagaaccaaccagccttttgacgctgtcgcccgccgatagagcactagacgcgctagcccccggatctcctccgcggcctcgccgcacgcgtggggatggatttcgacggcgccattggcgatcaggggtgagttgaacgcactgcgcgtggttctgggtcgcgtgccgcggagaaaaggcggcaccttttgtctgttttctcgcttccgttccatctccgtcgatccccaattttgttgcgctcttggtgcgatacgggtggtgggtgtggtagcacaacggtactagagtggaagttgctaatacaagctgcgcctctttttggtcaatgtgctctttatgcggcctatgatgatgttaagggagcaggatgcaaggactactaattctggggggcaaaggatcgtgtttcccctccttctgtatgaagctttgctgtggctttcgcgccttttccgcatgctgcgtccaatttcagctaccacttttgatgcatttgcttactaatcgaactatcgaagggattcttgtttttgttttttctgttacattcctttacatagattgctatcacgagcttttgacctctgctagtatgctgtctgatgtttctgaactctgaacattctggtattccatgcgcacgcacgcgcacacaggcacgcgcacgcgcacgcgcacacgcacgcacacacgcacataactgacacattttctgtagccaagatgcaaaatttaccttgtctctttatggcggttacttgcctttcatgccggctagtatttcgcacagatgcattattcatgacctacattcctccaaatttaaatttcagttcagtataattctctgttaagattttactctttcttcaacattggctggagagacttatatacttcacttttttactccttgacctgagctgcctgctcctaaaatttcttgcaagagtaatcacttctgattgagctcgtcgttgtggaacttcttacagtgagttgtgggaatggcaaagtcaggagtattgtatgcagaaagattcgttagctggtttgctccacgtcattgcatcactatttctgctcgaaatatatatccacgtagagacgtaagaatcatgtatttctgatttggcagctccatgtagcagtttgtgggccgaagcaagcaacaatgtgggtggtgattggagcatatttgaggagcaaacaccaattaaacactgtacagacttcgaatttcagttctgtgatgtaggaggtgaagtcttgttctcatggtaatgaaatctacagacatgagcttaaatctagattctaaactattccagttcacaccaagctatctacttaaattggtttttcactgccaatatcctgtacagagaccagtagcaccttcttttagatgctaatatatgttatctatttctctctgcttcttgaaattgcattaatgacatggtaacttgtgatatgtaaatccaaaacatatataaagcagaatgactagtataataacaaaatcagtcgattattgcaattagaacaagtacgtttcgaggctactatttccctattgtgtatgtctgatctgagctataaaatgcaacaggtagatgatttgacctaaatatcacaatggattaaactggatatttcctaactctatcccatctgacctttttggcaaacacttaataaggtgctaatacatatcagttgcatttccggactagtaaaaatgcaatctagatatcatcgtcaaggagtttgaagaaaggaaggaaactttacaggcaaaacgcacacgcatgctgcagttctgtccagaaaatcttgagatgacatgttcagtgactgaagatgggctcttggaaagtcttcaggagatgatttttcaggtactgactgtttactgaactctgacgggactgatgaactgccagaagaatggctagttagttgatcacaagatatcgagcccggttttccggcagaagaaatgaataaccctgctgctgcaacggaagaaactgccgatgtcttggcttgagctcttcgcctgtcgtagtccacgacaatcctgcatgctctagacctacttctctgaaaggtgcagctggcaaaatttattatcggagcaaagaaggcgagaccatccgtgtccctcccttttgtgctgatcaaaccatacagcatccatggcgacatcaccctgaacgacatcaacgagaagatccacgccccttcgccgcataagatcaggcacaggagcgacgaggagcccgacccgctccaggcctcagcagcgatctcagggaaacctgtggcccacaagacgaagatccacacggagggggggaagggggaaggggagcatcacgatcaccagaaccaaaggctaggctgatgaccatttgtgtgacgctggcgaagtggctaacagttgattcgcctttgcatttttggcgctctgggctcgttcccaattggttttgtggcccaggtgatgcatggccttagcagcgtgcttgtagcgttttctgttcttgctgtttactagtatcttacgcacgcgccttagcgcacgtcataggcagcgctgaatcgtgtcaatgagttaatataaaaatttaataaaataatccaaagaaaataagaatggttcatat

SEQ ID NO: 7509 - DNA, 1839 bp, Zea Mays
caccacaacaccgaagcagccgagaaccggaccccgcaaggccgcaacagcaagggcagcactgccgaaaccgcaggccgcagcactcgagagcgcagccaggcggcggcgctccgcctccgactccacaccaggccgctgcgtccatggacccctccccgcagtcgacgccgcccaccggagacgacccggcagcggcggcggatcccgacctaccgaggctcacggtgacgtaggtggagcagatgaaggtggaggccagggttggcgacatctaccgctccctcttcggggccgcgcccaacacgaaatccatcatgctagagctgtggcgtgatcagcatatcgagtatctgacgcctgggctgaggcatatgggaccagcctttcatgttctagatgccaatcgcccttggctatgctactggatggttcatccacttgctttgctggatgaagcacttgatgatgatcttgagaatgatatcatagacttcttagctcgatgtcaggataaagatggtggatatagtggtggacctggacagttgcctcacctagctacgacttatgctgctgtaaatacacttgtgacaatagggagcgaaagagcattgtcatcaatcaataggggcaacctgtacaattttatgctgcagatgaaagatgtatcaggtgctttcagaatgcatgatggtggcgaaattgatgtccgtgcttcctacaccgctatatcgccttgtgaatattcttgattttaaactggcaaaaggtgtaggcgactacatagcaagatgtcaaacttatgaaggtggtattgctggggagccttatgctgaagcacatggtgggtatacattctgtggattggctgctttgatcctgcttaatgaggcagagaaagttgacttgcctagtttgattggctgggtggcttttcgtcaaggagtggaatgcggatttcaaggacgaactaataaattggttgatggttgctactccttttggcagggagctgccattgctttcacacaaaagttaattacgattgttgataagcaattgaagtcctcgtattcctgcaaaaggccatcaggagaggatgcctgcagcaccagttcatatgggtgcaccgcgaaaaagtcttcctctgctgtggactatgcgaagtttggatttgattttatacaacagagcaaccaaattggcccactcttccataacattgccctgcaacaatacatcctactttgttctcaggtactagagggaggcttgagggataagcctggaaagaacagagatcactatcattcatgctactgcctcagtggcctcgcagttagccagtacagtgccatgactgatactggttcgtgcccattacctcagcatgtgcttggaccgtactctaatttgctggagccaatccatccactctacaatgttgtcctagataagtaccatacagcctatgagttcttctcagaagagtgatctaatgttagaacctaagaacaattggctaaggttgtgtacgattgtgttatttgcacgaatgatggtaacttagtcgtgttataccagggtatttgtatgtttggtcaggtggattgcctggataaatctctctgttgtaatggtcgtgtcccgaattatgtttgtaatggtcgtgtcccgaattatgttactggtgttcattattagttaaaatgcaacagaagtgtaggtctagatgctgcatagtgatctgtggatgctagaaccaagtgtttgtacgtaatactgttatgatggtactaaattgattagttaaatgcacgattatggtacctgaac

SEQ ID NO: 7510 - DNA, 1648 bp, Zea Mays
catcccaccattgtccattgagcccaggcgtcaagcgccagcccattgcccactaaggcatcattccgccaaagacccaaagtggcaaacgcccaaatcgacaaaccctaatgacctaatccccaacccccagccggcagccgccgagcaaaccagctcatccggtcggtcatccactcatcctcatcccctgcccatctgatccgatcggtcatctcatcctcatcccctacccgatcggatcccctgctcatccgccgagcaccaccaggcagcaggctccagtcatcgagcaccagcaggagcacggcgcgctgcccagtaggagcacggccaagaggatgacgcccgcatcctgcctcttctcctctgctactggagcctctactgctaggagcacggctaggaggacaacacccgcatccagcaggagcaccagcaggaggaggacgcccatgctgctgccgttgagcgatgatctgatgcgcccccatcatggctcttctcctccctcacggcctcgcctcgatctgctgctgccggtgatctgctgctgccggatccgagcgccgtgcccacgggtcacggccagcgatatgcagggatcaagaatccaactttgagaaaaattgctcgagatgtaaatggcgccgccggagtaccagcagtacctcgtgcaggtgaccaagtaccaggccgcacagaactgcaaggctcgagaggtggactcaaacatgacatccaagttttgcaagttttgatgttggatgttaaatttctatgctcacccctcgtttggttattgatttgataatagttttgcatgaactattggtgttggctatctaaaggacagaaaggcagacatgagcaacagatcccgctccatgggctgaaactgggattcgtgatggcagaaagtgctactgtcgctctcaattgtagcggtgtggtactgggatccttgccaataagtgtgtttttagggtgagcccgtccaagatgcccatgcgtccccgcgcccctcgccagctgatgtcgtactaggctaggggattgaagaagcacttgaagaggctcaatgcgcccaagcattggatgctcgacaagcttggcggagcttttttcatgctctgcaaggtgaggtctgttcagtttggccagaaaggtatcccctacctgaacacctacgatgatcgcaccatccgctaccccgacccgctcatcaaggccaacgacaccatcaagatcgatctagagaccaacaagatcatggacttcatcaagtttgacgtcggcaacgtggtcatggtgaccggcgggaggaacaccgggcgtgtaggagtgatcaagaacagggagaagcacaagggcagcttcgagaccatccacgtgctgcttggagctttttgctatgtctagttttttcctatttgttgtacaagaaaacataaaatggaattcaactttggtggccgcaaaagtttagagacttgatttcatataaagttaggctgaacattactgcaaacagttgtattttagtttagatttagagtacacttatgtatgtgttgtttgacaatgcttatttatgatatattgaatggtacttatttatattatattaattataatgttgttcaat

SEQ ID NO: 7511 - DNA, 1122 bp, Zea Mays
atgtctatgtactcttatttttgtccagaacccttatgtaaggggaagtggaaagaaatggattggcacactgctggatggatcttcctcaatacgtttatcgatcgccgccgccgacgacggaggagcagcacctctcgtctgtccaccgctgaccgctcgtttgtcagcctagcaccggggtgcatgaacgcccagtatatgctacagcaccgccgcccctggccctgccgcctgcgccgctcgttgccctgtgcactccgcgggcctcgggaatggccaaccaggacatttatcgtcttattccttgccgaggggagtcctgctccagtagtggtctcagaaggggcaaataccatggatgttggtaggcctgtgcttgtgcagaatgcaccaaggacaagactggatgcagggacatgggggacgatggggattggattggggtactgtattgcagctgcagtagctgaacctgaatgactcgtggttgctgtggagggcgattctggatttggcttcagtgcaatggaggttgaggtgaacaggggcttcaacagtgatgctgttttagcaatggagacgatccattccctgtcagcttcaaaatcaagttacccaatggctgatctcacccaactcttcatgacagctacccaagaagggaaaagatcagaatcgcaaggccagattcttagggtgattacttgcctacatcgctttgaagatactggatattctttcagtgtagaaacagcagctagagtgaaagtaattgattttggatcagcacttccatggagggttcttgatgttaatgggctgaagcgcgaggcggcgtcccgcggcggtgccacggggcacggcaaaccgcggctgctcatcatctcccggcgtggctcacgacggttcctgaacgagcgggagatggagcgtgccgcgggcgacgccgggtttgagatgtgtggtaatggagtccgttgcttcggtcggtttatagccgagattgaaaatctgtaagggacagctaggtaatgcattgcggcttcacagtaaaacattgtatttctacagacacttccagtaactgaactctattttttagttgttcccataatagtc

SEQ ID NO: 7512 - DNA, 2157 bp, Zea Mays
agcagcacggacggggcatgggattgacccacacacccgccctccgccccgcaagccaaatacgccgtggcacgcgtcgccatgccgccccagttccccaccgcccgcctcctcctccctagtcacaggctgctcccgctcctctcccctctcccctccgcgtccctgtcccctgctcctcgcaccctccgcctcccgccgccgcagcttcttcaccgagtcgcccgccgccgcccgctgctgcgcggcatggcctccgccgccgcccccgggtcacacgccgccgcggaagcgccccccgtcgacgtggggggagggggcgctggcgccccgcggcggctcgtcctggaggagctaccctgggaccattccttcgtccgcgagctgcctggcgacccgcgatcggacactatcccgcgggaggtcctgcacgcctgttactccagggtgtctccctctgccaaagtggacaaccccaagctggttgcgtggtctgattccgtggccgatctactcgatctggatcacaaagagtttgaaagacctgatttccctcagtttttctcaggagcaactccactagtggggagtgctatggaggacatcagtttggtgtatgggctggtcagttgggggatggaagagcgatagctcttggagaggttgtcaactctcgagcagcatccgtgaattcttatgcagcgaagccatgcacggcctaggcattcctacaactcgtgctctttgtctagttgaaactggaaaatcagttgtccgagatatgttctatgatggcaatgcaaaggaagaacctggtgcaatagtttgtcgtgtagcaccgtcttttttacgttttggttcgtatcagatacacgcttcaaggggcaaagaggacattgagattgttcgtcgtttggcagactacacgatacatcatcactttccacatcttgaaaatatgaaaaagagtgaaggtttgtcattcgagacagctataggagattccccaacaatagatctcacatcaaacaaatatgcagcttgggcagttgaggtggcggagaggactgcttacttgatagctagatggcaaggtgttggcttcacccatggtgtacttaacactgacaacatgagtgtgctgggcctaactattgattatggaccatttggatttctcgatgcatttgatcctagctatactccaaatactactgatcttcctgggaagaggtactgttttgcaaatcaacctgatgttggcttgtggaatattgctcagttcactggaccactgtcctctgctgaacttatcagccaagatgaggcaaattatgtgatggagaggtatgggacaaagttcatggatgagtaccaatctatcatgaccaaaaaactgggcttaactaagtataataagcagctaattagtaagctgcttagcaacatggcagttgacaaggttgactataccaacttcttccgtcttctttcgaatgtcaatgcggatcctggtattccggagaatgagctgcttgtcccactgaaggctgctctcctagatattgggaaagaaaggaaggaagcatggattagttgggtacagacttatattgaagagctggtggagagcggcgttcctgatgaagaaaggaaagccgcgatgaactctgttaatccaaagtatattctccgcaactatctctgccagtctgctatcgacgtagctgagcaaggcgattacgaggaggttcgccgggtgcttagggtaatgcataatccgtatgacgagcagccgggaatggagaaatatgcacggttgccaccagcttgggcatacagacctggagtgtgcatgctgtcctgctcctcgtgaaccccatgatgcaagacgtggagtcgtcgtggacattacaaaaatgcttgggtgcttatagtcttcctcctgtataggggtccatctttgtgctgtaatgtgtcaagcatcgcatgctattttttttccggtgatgcaagtgtgtaagaaccatgtcgttgcaggaatagtgaagcagtgggacctgttattgtgactacctagtatcccgtacggagatggaaatttggcggtttactagtctatatagtgaagctctggcacttgcagactggtcaact

SEQ ID NO: 7513 - DNA, 2189 bp, Zea Mays
agcagcacggacggggcatgggattgacccacacacccgccctccgccccgcaagccaaatacgccgtggcacgcgtcgccatgccgccccagttccccaccgcccgcctcctcctccctagtcacaggctgctcccgctcctctcccctctcccctccgcgtccctgtcccctgctcctcgcaccctccgcctcccgccgccgcagcttcttcaccgagtcgcccgccgccgcccgctgctgcgcggcatggcctccgccgccgcccccgggtcacacgccgccgcggaagcgccccccgtcgacgtggggggagggggcgctggcgccccgcggcggctcgtcctggaggagctaccctgggaccattccttcgtccgcgagctgcctggcgacccgcgatcggacactatcccgcgggaggtcctgcacgcctgttactccagggtgtctccctctgccaaagtggacaaccccaagctggttgcgtggtctgattccgtggccgatctactcgatctggatcacaaagagtttgaaagacctgatttccctcagtttttctcaggagcaactccactagtggggagtttgccctacgcacagtgctatggaggacatcagtttggtgtatgggctggtcagttgggggatggaagagcgatagctcttggagaggttgtcaactctcgaggtgagagatgggagttgcagctcaaaggttgtggaaagactccatacagcagatttgctgatggtcttgctgtcctacgcagcagcatccgtgaattcttatgcagcgaagccatgcacggcctaggcattcctacaactcgtgctctttgtctagttgaaactggaaaatcagttgtccgagatatgttctatgatggcaatgcaaaggaagaacctggtgcaatagtttgtcgtgtagcaccgtcttttttacgttttggttcgtatcagatacacgcttcaaggggcaaagaggacattgagattgttcgtcgtttggcagactacacgatacatcatcactttccacatcttgaaaatatgaaaaagagtgaagcttgggcagttgaggtggcggagaggactgcttacttgatagctagatggcaaggtgttggcttcacccatggtgtacttaacactgacaacatgagtgtgctgggcctaactattgattatggaccatttggatttctcgatgcatttgatcctagctatactccaaatactactgatcttcctgggaagaggtactgttttgcaaatcaacctgatgttggcttgtggaatattgctcagttcactggaccactgtcctctgctgaacttatcagccaagatgaggcaaattatgtgatggagaggtatgggacaaagttcatggatgagtaccaatctatcatgaccaaaaaactgggcttaactaagtataataagcagctaattagtaagctgcttagcaacatggcagttgacaaggttgactataccaacttcttccgtcttctttcgaatgtcaatgcggatcctggtattccggagaatgagctgcttgtcccactgaaggctgctctcctagatattgggaaagaaaggaaggaagcatggattagttgggtacagacttatattgaagagctggtggagagcggcgttcctgatgaagaaaggaaagccgcgatgaactctgttaatccaaagtatattctccgcaactatctctgccagtctgctatcgacgtagctgagcaaggcgattacgaggaggttcgccgggtgcttagggtaatgcataatccgtatgacgagcagccgggaatggagaaatatgcacggttgccaccagcttgggcatacagacctggagtgtgcatgctgtcctgctcctcgtgaaccccatgatgcaagacgtggagtcgtcgtggacattacaaaaatgcttgggtgcttatagtcttcctcctgtataggggtccatctttgtgctgtaatgtgtcaagcatcgcatgctattttttttccggtgatgcaagtgtgtaagaaccatgtcgttgcaggaatagtgaagcagtgggacctgttattgtgactacctagtatcccgtacggagatggaaatttggcggtttactagtctatatagtgaagctctggcacttgcagactggtcaact

SEQ ID NO: 7514 - DNA, 3179 bp, Zea Mays
caacaagtatatttggccaactgttcacggttcttcaccagttgcgttcgtcgttcccgttctcctcctcgtatcccctggtccgtacgtcgtggccaccggcgccgcctagctcgcaccgccgacagcgtctcagactagatcgcgcctccccctcccaaatcgggttccagtcgggctcccgcaaccgccgccgtctacaccaggtgccgaggccgatcttttcgtcggcaaagatcgccgagcagatctgcccctggccgtcgccctacaccaggtgccgatatcttcgccagcgaagagcgcccagcaggtacagtgatttgggattctatactacctagctttatgattgcaagacctggttattttcacctgaggttgtgttcaacatgttagtggcatgaaaattgcctcaattgggggcaatggcatctagtacaaaatcagatttagtgtctggtagccctgatgggcatggatacttcaatgcacaacgtgggtcctatgcagctgcttcattggaaaggtcaggaagcttccgtgaaggcggtgatggctatgcgatgttttcagcatcaaactcatcaaggtcagcggcagtgaactctatcaatctagttcagtcacttgcactggacttgagaccggcaactgtggatcacaaaacatctcggttagatctaaagaaatcaataagttccatttttggaacctctgcagaagattcaacatcacttccatctctagggagaaatttaccaaatgctatcgaagagatcagacgtatgaggagtaatcttaacgacaattcaaataaggccagggaaagatctagagcttttggtggtgctatggcgaagattgataaactttgtcccaatattgtgcgaaaacgttctcgaggagacagttcatctaatgaacgatctagtgtgttatcatctggaggagttacccctaaaaatgttcctcagagccatttaaatgcagatgatatggaagctgggcttcagagagaagagaggacaaagaatgcaggacaaaataggagaatacgtacatccatggtggagatggatgcaagaacagctggtccatcaagaggccccggacctactgataggatctcagatcctggtaaagccaccaatggcagttctgcagttccagaagaaaaaatcagaggtttggcaactactatcgatggttgggaaaagccaaaaatgaagaaaaagcgttctaccattaaggcagacatgtcactggctggtgttttgaggactgttgatgtagaccgagagtcaaaacaaggcatgcagcacaagtttactaatgacggtagggcgagaatgacaagttctagtttcaggtctggaactgttgcatctggcacaaccaaagcagatttgctttctacacaaaatggtcttgttatgcgacccttaaataggagtgatcaagacaatggtttccatcctactaacaaaagggaacgtcaagctgcattagataaagaaacgcccaacccgagaaccattaacaagcctaatgaagacgacagtggatgtaacattgcatcattaccgaaggcgaatggatctgcgcggggaccccgatcaaattcagggtcaatattgaagtcatatccaaacattcatcgatcacaagctagttctgatgattgggaacatccgtctggtacaaataagttaatttctgctggtggatctggcattcataaacgtacaaaatcaacacattcattatctcctccgatccaatggggtgggcagaggcctcagaagatatcccgttcagcaaggaagtcaaatttagtccctataatcactactgatagtgcactggtaccaggttcgctggacagtcctgtcaatgaagattgtgcaggtttaccgaggcgtgcatctgtaaatagccttcaacaaacaaaacgaggagatcatgggctctcaactggacctgaaggcaatgagcctgtagttgctgagaaaaagctaagggacaagggcaaaagggctggtgaactggatgatgggcatggctctggttttcagaagattgctatgcttgggcatccttccaaaaggaataagttgcctgctgatgaggatattggagatgctttaaggagacaagcaagagttgtcccgggttttactctgaccaggcctgggactcctgtatccattgacaagcttgaaaatgctccgattacaaaacaaagaagtgtgaggacagtctcagagagaactgagagtaaatctgggagaccactgatgaagaaaatatctgagcgcaaaagtaatgcacggcctaggcatacaagtagcagtgtgcagtcagactctcctgtgcaatctgaagatgatcatgaggaacttcttgcttcagcaaatgctgccctaagatctgcttgtgcaagcacgttctggcggcaggttgaacctttcttcgcatttttgactgcagaagacatcacatatcttagtcaacagatacatttaccagatgattcctcttcaagtaggtcaatggaagggggtgaatgccaaaaatataagggtggtcttgaatacatttcacacccctcaactccagccgctagcaacaaagatgatcacgctgctcttccaaatggttttggcttgaatcagttggataatgacataggggttggctgggaggcaagctgcattgaacctatcctcgatcaacttgtccatgggattggggtaccaggatggtcttcagttggccaaagacttattcaagcattgattgatgaagataggatcgatagtattaccaacaacacttacataagcgagggctatgcatttgatacacatgaaattcattttgatggaggaggatggaagcctcactcaaataattataagttagaacctttagcgaattttgaagcttcaaggaggggcccaaatggtctgacaatggattctgactggaaatataatgatgtgtcaaatagaagtggcaatgtcatggataaaaccaaggtgtggcctgagtttcagtacagtgagatgtgcttcaatgataggattatcattgagctgagtgaagttggtgtatctattgaacctgtgatgtgaataattttctacagtacgcttgttcattgtctgaaccag

SEQ ID NO: 7515 - DNA, 2621 bp, Zea Mays
taagaagctacgtcacggatccgtcttgtccaccactgcggccgcactagtctacaactatcagcggtgcctgcaggccaccgccggcgcccgcgcgcggaggaagtgcatgcagccaggagagagctagcatagcagctaggagaaactaaccatggccgcctctcgccgctcttccgttgagctcccagtcgccgacccggcggcggatccagaccaagtccggctgcaccagctgggatacaagcaggagctcaagcgaggcctctccgtcctttccaacttcgccttgtctttctccatcatctccgtgctgatgggcgtgacgatcacctacaacaccggcctgcgctacggcgggccggtgtccatgacgctgggctggttcctcgtctccgccctcaacgcatgcgtggcgctgtccatggcggagatctgctcggcgtacccgacctccggcggcctctactactggagcgctaagctcgccggcaaggactgggctcccctcgcttcctggctcaccggatggttcaacatcgtgggacaggtacgtacgtcgtacgccggcctgatcaatcttgcttcacagattcatgcgtgcatagctgactagctagctgcaacacatatagtatacactgcgtattttcatccatgctgaaattaaaatattcttcataatctagtcaagtacttccataatacgcaatacattacacataggttctttgaaatcgagagccaaatttagaaatttctgtcttatattacaaacataagagcaagtataacgagaggtggtaagcaggctaaatgccgatgcagaagagagagagaggagtggagaggagacatagggaaaacggactgcagctgggttagacacaagaaccaaaaaaaactttacaagagatggtaagtgctggttttgcaaaaaatattgaagagctaactataattatacggatgaactgagagagactgcaaatagactcagtcggctatattattaaacttttttccaattaatgcggtgtaaaaaaaatgagagtactagctagctagccagccagagtactccacagtccacactacatacctggttttgcgtgctttgggcacagtcagctctggcggcgaagggcagagtctgcacccgatgatagtcttgttgattaaactatgtcacacacacagtgggcaggtacgacgagcgtcgacttctcgctggcgcagcttgtgcaggtgatcgtcctgcttgccaccggaggcctcaacggcggcggctacatggcatccaagtacgtcgtgctggccatctacggcgccatcctggtcatacacgggctaatgaacacctggcatggttcggccatctcggagcgttctggaacaccgcaggtacatttgctcttgtgatcatcatcccagccgttgcgacggagagggcgagcacggagttcatcttcacgcatttgaacacagacaatggcatgggcgtccacggcaaggcctacatccttgccttggggctgctgatgagccagtactcgctcatcggctatgacgcatctgcacacatgacggaggagacgaagaacgcggactggagtgggccgatggggatcgtcacctccgtcgctctgtccagcgtcttgggatgggtctacctggtggccctggcgtcgctgatgacggacatcccgtacctcctggaccccggcaacgacgccggcgggtacgccgtcgcgcaggccctctacgacgctttccgcaggaggttcggcagcggcgtcggaggcgtcgtttgcttggggatcgtcgccgtcaccaccttcctctgcggctccgcgtgcgtcaccagcaactcaaggatggggtatgccttctccagggacggagcggtgccattctcgcacgtatggtacaaggtgaacaagcaggaggtgcccttgaacgtcgtctggctctccgtgtccgtggcgttcgccatggctctcacgtcgctggggagccaggtggcattccaggcgatgctgtccgtggcgaccgtcgggccgtacatcgcctacggactgcccatcgtcttccgcgtcaccacggcccggagatccttcgtcccggggccgttccacctcgggagatacggcctcctcgtcggctgggtcgccgtcgcgtgggtggccgccgtcaccgtgctcttctccctgcccgtagcgtaccccgtcgccgaggacaccttcaactacgcgccggtcgtcgtcgtcggcgtgctgctgctcagcgtcggctcgtgggtgctccacgcccgcttctggttccaagggccaatcaccaacgttgatgtcgcctaagctagagtgtgtatgtgttgatcaaggcaagctactttgtagtcagaaatatcacacaaatgcaaatatctctaattatactctacatgaggctaattgaacaattgacatgcaacaagtaattgaaagtgattgcaagagtaagtatagtagcaaatcactagggaggataagggatgacacaagatgtatccataaggttcgattgtatgttggtaacctacgtccttgttatatggtgagtccaaacaatatggttcatgc

SEQ ID NO: 7516 - DNA, 2458 bp, Zea Mays
gccgatattcgagtagcaatcattaccattaccatttatgttacatttcgtgaaacaaatgacacccaagctcaagccatgccttgaacaaagatagagaagatcactagtgctggaatgctggattcacacctgcgcgaaagcgaagagcgagctgagactgagacacctgcacagaaaagctggatgacacaggcacatacgcacatcctacagaaatacaacgcgcccacggtacatgatcagtagtagtaccacaagtggcagtgttgagcacgaacatcaccgccgcgctaatccaccattcaaacgagattagtaaaaaaacaaacggggagctcagagaaaaaggaataaacaaatagaggaagcagcgcagtcggaggcagtgagctcgctctcctgctcctacaggctgcagttgcgctgtgcctgtgcgtccagttccatcgctttccctcctccccagtccccactcccagatgcgatttccctctccaccgccacagcgcctagcttagccagccagccggcggccatcgccgccgcaatggcgaccgcgtcggaggacgaggccgcctcggaccgctgcagcggcagctacagccccagcgccgacgtcagcgagtccgaaacctccagtgactgctccgcgcccaccacgcgccgcttcgcctcctcctcctcggcctccgccaccgtctcccgcctcgcgtcctcctcctcgtcgctccccaccccggcatcggccgccgccttctacctctccaagccaacccccgacctctccgagatcgacatgatgaaggagcgcttcgcgaagctcctgctcggcgaggacatgtcgggcagcgggaagggcgtctgcaccgcgctcgccatctccaatgccatcaccaacctctccgccaccgtgttcggcgagctgtggaggctggagccgctcgcgacggcgaggaaggcgatgtggacgcgggagatggagtggctgctctccgtcgctgactccatcgtcgagctcaccccctccatccaggagctccccgaaggcggcggccagttcgaggtcatggtcccgcgcccgcgcagcgacctctacatgaacctccccgcgctcaagaaactcgacgccatgctcctcgcgatgattgacgggttcaaggatacggagttctgtgcggcaggaggacaagtggtggttgccctgcccaagagtgccgcccaaggggctgtctgaggacgcgaggaggaagttgcagcaaagcagggattgtgcaaaccagatactcaaggcggccatggcgattaacagcgatgtgctcgccgagatggaaatccccgaagtgtacctggagacactgcccaagaacggtaaatcttgcttgggtgagataatttatcgatacataacagctgagcagttctcaccagaatgtctcctagattgcttggatctatcatccgagcaccacacacttgaagtggcaaacagaatagaaggtgccatccatgtttggaaactgaaaggccaaaaaaagtcgacacctcaagccaaatcaaagatatcttggggtggaaaagtgaagggtcttgttggagataaggagaagagccacactttgtctgaaagagctgatggtctattgcagagcttaagattgagatatccaggcctgccacaaacttcccttgacatgaacaagatacagtataacaaggatgtcgggcagtccatacttgaatgctactcaagggttctggagagcttggcatttaacataattgcaagaattgatgatgtgatctatgttgatgatgctacaaacagatcagctgctgctgagtctgtttcgatcttcaatcgtggcacagttacaggcagccctggaagggtacagcccccattaaacaaaaacattctaggaactcaagaaatcaaggtcgaaaagctcttttctggtgatctagagaaggtctggacatatgcaggaaacttgagcgctaggaaagacgctggagatgctcctgagagagactgaagggcgatggaggaaggtagacatgtaccgacagccgacagatcctgtaattgctagtagctagatcttcctgtacagaagcagcatgagtatttttttttgttctttttgtagcgagccgatcattgtgtgctctgcttacaatgaatggatgtcacctgatctgaacagagaaacttgtagtttcagctgtagtttttttttgttgttgtctggattggctgtttagcagtgtactttttcgtgtttatactgcaaggctgggttcagcagcaaatgactgaattcctgctacttctgtagcaagccgatcattgtgtactgctgctgctttttttttgtcgctgaagtgaaggtgttggtcaacagctaacttcagtcgcagtggaatgtaagctggtgatggattccgatgcctg

SEQ ID NO: 7517 - DNA, 3903 bp, Zea Mays
ttcatagatgaaccccagactgatagcagcacacaattaacagttgttaaattaataagggccatcattgccttggaatagtattctacaacaaggctggaagctagcagcagcgcaacatatccggagttgttcgtaattgaagctgaaactaagatgcagtacaacatctcgaccaaaataaaacccacaaccagcagctcagcgcagccgattgcaaaagggactaaaactgagttgcagtacatcatctaaaaccaaaatacacccggacaggctggcaaggaaccagacagccaccagacgtgctgcagcattgctccttgcttccgcttgcagattatccatctcatcatgtatttcttctatagcttcacctgcaattcccatcagtgccttgtcaacgtgttcggtgtccggcatatgaatgttgaacagggcttccaaagtcgcccctacctccttagataatggtttctggaaccaagcctgaaagtcctggaaagcattatcaaaattaggagttccgtcattggccaagaggccaagtttgtgacagaggttgcattgtgcccgctgcatgatctgcatatgagggccattagcgagtctagcactacgaggtaccgcagagttgtgacatgcacttctcctgatctattcgaatttaagaaaatagcagcagcatccgcgtacagattcactctccttgcagaatgagagagaggataggggtaagggcactctctcgagatgccatggcgaacaatttctgcatggggtcgatggaaagaatgaaaagcaaatgagagagagagaggttctccttgtctcaaaccccagccatggttgaaaaaactgcctaaggactgcgaagctggctgttctgaggagaattgaaacccaggctttccatctagcaccgaaacccaactgatgcaacacctcaagcagataatctcatctagcactatcaaaggctttggcaatattcagcttcagtcgtcaggacgatgtgtgggagaagatgagacaggggaagaggggaaaaaagaaaataaataaattgtattttgatcgataggtcatacatactgagggagagtactgatgatctgctagagcatgtctttcaaatagtaacaaaatcagtattggtgcatggccactaatatcgtcacataaacttggtcagtagagaaaaaccgcctcacaatattatattaagaaaaggcttaatcgtaacctgaaccgagaaagatcacaaaagataacctcacattgaagatgaattattggtgagttgttgaagatgctcttaacagtagtatagtagacaatggtacgccaacgctcctggcttgcaagctagccacacagcttcctcacatccatgggtgaaaccaatggcgcggggagccgtcgaaggcaatggccgtgagcttccgcgacgtggcctccgtcggatggacgaggtcccagaacacgtggttcgtccccgcgctcacccgcccgcacacgcacagatggagaattttttatggatggaaaaaactagagatatcacctgttcgcttgttgcttcgattctggtgtcgacgtctcccgtctccgtgcgtagtgtcgccgagccatcaaggatgctcttccatttgtctctcatcacggggcgacggcgtcgtccgctgtcctgcacggcggaacacgcagctgactcgttctcctctcggacgccggccggcctcgctctggatcgctagcggccggccggccgttgctacgccaaacggccagagtgccgatgcccacgtccaacgcgagagcatcatatatgtcgttgcttatccaaagcacacctggcgtgccgagctctacctggcctgaccatcgcgctggtgccatcatgtcgtcgtcgaagcggtggacgtccgcctccggcacggcggagctgcctgggcggtcgcccctacccgcctccgcgctctcgccagtccgccagagcgcccggcgctcagtctcccgaccggaacccggcgccacaacatcccccgtggccgtctcgatcgctcgcacgctctggccttcctcgtccaccggcaacaagagcggcaagagcaaggccccgcgcccgccgtctcccttgtcctccgcgccacctccgccgccgtcgccgtccgtggccaccctcgcggaccacctcgtcaaagacgactcgccacgttctctctcccggcagcgcagctgcaccgaggtcccgcgcttcgccgacgcggacgcggaggccaggaagatcgggaagcaggcatcagggaagggcgccgggcacgcgttcggccgctccatgcgcttcctcccgtccaccaggcccgcgggcgtgacgctcaccccgggccgcgtcgcgccgtcggacctccgcaggctcggcaacatggccgtttccctggacgccgccgccgacgtcgccagctccgggtcggagtgcagcgacgcctccaggggctccaccaccacgccgaggacggcgtccaagccgcggtctccgttgctcccccgcacgggttccgtccgcttgctcgggtcgagcaacacgcagtgggcgctctcgccgggtcggcgcagcgggtcgccgctcaagcaggcggcgacgacgacgacgctggccacggtgccggagagcaaagggaagaagagcctgatcagcctggggtggggccatatcttccaccggcggaagcacgcggccgaggacgcgtccatcgccgccgctgccacggccaccctgctgtcctcgccggtgccatcgtcatcgcgcagcagcggcggggaggccggccaccacgtgaggatggcgcactgccgcctcctgcagtggcgcttcgcgaacgctaacgcggacgccgtccgcaagaggaagacgggcagcgccgagctggagttgatgggcacgtgggcaagcgtgtcggagatgagagggaaggtggcgcggaagcgagtgcagcttgagaaggagaagcagaagattaaactagacaccgtgctctatttccagataaaagatttggagagctgggggcagcagctgcagaccgcacatgactccgccctggcctcaacagtgggttgcgcccgagcagccgtttgcaggcttcccgtcaccaatggtgccaaggtatccctagcgccattggcgaccattctgcagcaagctcttgagctcacgttgacggccaagacagtgacaagatcatccagtccgatggctgaggacacggcgtcactgatctcaaagctggtgcttgtggcaagggaagagcaagctacgttgcaagagtgcgtcgagctgcttaggttggtctctgcactgcaggtggaggagcacagcttgcgcagccatctggtgcagtcggcatcgcgtagtgctgtggccgtgaaatagtaggccgggcgcttgtgcacaggcgtttcggctgtaggacgaccagctccagatgtgctctagacttttccagtaaaactagctagaatagaatcatatccacagatgcttaattgcttacgtagatgggtaccatcaaacaaaaacaaaaaaaaggaggtgtcatgtgagcacgttactgctgaatggccttcaactcttaggatgcgtttggttgagttaaataaaatagagtagttttatttcagtatttgagaatagagccgttctattatgtgtttagcaagaagaacagaaccgctctattttttttttggttgaacagtagaatagagttgagccgcttctttctttgtttggttggagagccgtatgagtgtagatgggatgagagggaggagagcgctcgcgtccggtcgttttcgtggagcgagagcgttccagctatttatggtaaattttcatat

SEQ ID NO: 7518 - DNA, 1294 bp, Zea Mays
aaaataaaacctcacccctccttggtctgcggccctttgtcctgtctcctcccacccttgcctccgagtcacctcctcccttggtctccgccgtcgctgcctccttgccggaaccctaaatggaccccggcgccggcgcacactactccgtccgtaccgcggaggaggttttccgcgacttccgcggccgccgcgcgggcatgatcaaggccctcaccaacgatgtggagaagttctaccagctgtgtgaccccgaaaaggaaaacttgtgcctttatggctaccccaacgaaacatgggaagtaactttgccagcagaggaagttcctccagagatccctgaaccagctttgggtataaactttgctagggatggcatgaatgagaaggattggttagcgctagttgctgtccacagcgattcctggttactagcagttgcattctactttgcagcccggtttgggtttgacaaagaggccagacggcggctcttcaacatgataaataacttgcccacgatatttgaagtagtgactggggttgcaaataaacaaaacaaggagaagggccccaatagtaccagcaaaagcaacaaaacaagttcaaaaatgacatcaagacccgagtctcattccaaggcgacaaaagtggcagtgccccctaaggatgacgatgatgagagcggtgaagaatatgaagaggaagagcgtgataacaccttatgtggatcatgtggaacaaatgacggcaaggacgaattctggatctgttgtgatagttgtgagcggtggtaccatgggaagtgtgtcaagatcactcctgcacgtgctgagcacatcaagcactacaaatgcccagattgcaacaacaagagggcaagagcctagcgtcaagccctggtgtgaccctggagtgaaacccccttctcaaaggtgtaaagatgttaagcaggggggcctattatccctagtcttgtttaattttgttgatgactggcttgactagaatggttgtcaaggcacaacataatggtttcaaaatcatttttttctctggcatggttgtcaagacccattatccttagtcttgtttcataatggtttcagggctgatagaacatattatactcagaggggtagctatacttcaatatgctgatgacaccattatttgtgtaaagcatgatttggagagagcaagggatatgaagtttctgttgtacttatatgaaatgttggtaggcttaaaaatcaattttaatagaagtgaaattgtggtggtaaatgataga

SEQ ID NO: 7519 - DNA, 2428 bp, Zea Mays
tttggggtcgagagctacgatgagatggttgatgtacttcagcagaatgagaagttagaggatgcacttaagctgttcgatagaatgatgtaggagcacgaccctccacctccactgcgtccgcgcgcgccagcgcaaagaactttcgaacagcagagacgccaaccgagccccaccacggttcttgaagatagactggtcggtctatttcttggctttctagactagaaaagggaatccaactagccaaggtccaagtgaccatcacgtttcagtttcattctctgggtaggggagctgctgcagccgtgtgtatggcgtcctcttcctcctccctgacgcggttatttatcccgcctcaccgagcgcaccatgaggcagccatggccgcttcggccggcgcctctctgcgtaacggcggcgggatgcagatgctgacgaaggatcttgtgatgcagaggtgggccgagatggtgttgtgctgcggcgcggattggaattgcgtgtcgcagctgtggaacagggtggtgctgcgcaagtggctaaacatcggcgcggggtccggggattccgacttcagcgccgacgagcacgatacctcggagggcgagaccgaccgcgaaggcatgtctggtttgaatcatgccctatgtaacgaagaaaggatattaggtggattgggtgcaagcacgactggtgacgaaatgagcgatttaccttactgccttagaatgcacagatcagagatcagtcgtgctcagtatgttgatgttagagaactcaggatttatgtagggacatggaatgttggaggcagatttccacccagtgacttggacattgaagaatggctggctacggaggagccagctgaaatttatgttatcggctttcaagagattgttccactcaatgctgggaatatatttggtgctgaagacaatcgtccagttgcagtatgggagcacatcatccgtgaaactttgaataagaattgttcagataaatcagggtttaagtgccatagtgatcctctttcaccatcaaggtttaatccatcagatgttgttctttccatggaacatggattgcttagtgagtctgacaaggatagtgatggggagcttcatccattgattgaacgagaccataattgtggacttcaagctaaaacaaatgaaaatcttgaagctttcccagaagataatttagcctgtgatgccatcattgataatagaacaaaaaggaaaaggccagagtttgtacgtataataagcaagcaaatggtcgggatatttctttcgatttgggttcggagaagcctgcggaagcacattaagaatttgagagtatcaacagttggtgtaggcgcaataggttatattggtaacaagggatcaatatcggtcagcatgtctgtacatgagactcctttctgctttgtttgttgccacctgactgctggtgaaaaagatggagatgacctaaaaaggaattcaaatgccgaagaaatacttcgaagaacagtgtttaacccagagaatgttgtaggcatgcctatgagaatatatgaccataagcggattatatggttaggagacctcaactatcggatcaacttatcctatgaaagggcacatgaactaatctccaaacaggactgggatggattgttcgagagggatcagctgaaaagagaattgaggaaaggatgcacatttgacggttggttcgaaggagttatcagctttgccccaacatacaaatatgagtttgactcagaaaactatgtaagcgatgagagtgaatctgggagaagaactcctgcatggtgtgaccgcattctctcatacgggaagggaatcaggctactttcgtacaagaggggggagcttacactttctgatcaccgccctgtggctgcagtctacgtggcagagattgaagttttccactgatgcagagagcaggaccatctatcatcagagaaggatggatggactggttgaacaaagaggtcgccgaaccacgagatatgcaatttcctagcacaagttccaagtgaggtggtgccatgccaatgacagtttttagaattcagtcagacattgttgatttgcattattgtatcatccttcacaagcagcatatttgccatggattattttttctgcacgcttgtttgatgaagagcatctcaagcactatgctccatgacatagtatcctttgaaaaaaatgtcaaatttgttcatataatgttcttttcttgttttgaactaggaagggatggttcaacatgcttcgtgtgtcgtgcttgccaaataaccatgtttgcacgataatatgattgtctgctgctcaaaccaagacaccatccaaaattgtcatttctggcctcctgtcaaaagcgccattaccctacacgc

SEQ ID NO: 7520 - DNA, 3688 bp, Zea Mays
cccccttccacgagacaaaatccagaaccaggccggcggcccactcccaccgccgcgcctacgccttcccccgccccccgcgcggaggagggtgccgccggcgatggagacgacggccgcgggcgcgccaagagcgcagacgctgcgggacctcgcggaggagggcaagaagcggggcgtcctgctcctcgtcttcgccttcgggctggccttcctcatgtcccttacgagctcgtcagtttggtttaatctgccatttgccatagctctgattgttttgttccgctacatatcgcttgattatggccttcgtagaaagagcgtaactagaacagatcatgccagtcattcactcgtcaaaacaaaaggtactgaggtaaagaaagtcattcatcagactgaaacggatggaaaaatagattggaggagcaaggttaactcgcctccagttgaagcagcattcgaacagttcacaaggcaccttatctcagaatgggtaacagatctgtggtactcgcgcgtaacacctgacaaggaaggtccagaggaactcatcgatgtagtcaatactgtccttggggagatttcagttcgggcaagaaatgttaaccttatcaatctgctgatcagggatttggtcgatcttatatgcaataatttggaactttatcatttctgtcaagccaagattggaagagagaagtttgtgggccttccttcagagcgtcgtgatgctgaactgaaaatgatccttttagctgaaaacaagttgcatcctgctttattttcagctggcgctgaatacaaggtattgaaaagtcttgctgacgggttgatctcaatcacagtgaagcctcaggatctacaatgtactttcttccggtgtacagcgcgggaacttctcgcttgtgcagttttgagacctgttgtgaacttagcaaatccaaggtttataaatgaaagaatcgaatcctttgctctttcgcatgccaataagttggagaaaggaactgcagaatccttggatgttgtcacaactgttaagcacagggaaccacatatgccctctgttgatgaattttcggcactaatagaccactcaagttcaggtgttgagctcgttcaatttcgtcagggtcaatcgaaaactgcatcagatatacaacctggaaaaagtacaaatccatatagtctaaaattagaatcctctcatgcacctttagtcagtagttcacacccactggagtcaacaagtttagcttcgtcttcccacgttacttctgataatgggttttcgttgcataccaaaagcagcaacagagcaactgcaaatggtcatggtagagagtgtgcacagcccttgggtatcagttctgagcgtgcacatcaagctttagcacttgagcaccttgagaatatgtggacaaagggaaagaactacaaaccagaaaatgtagaacatgtcgcaaaagtgtctgttggatctgcttctctgggctcgacttcagttcagcaatcagttccttgcagcacttcagtttgttacaatcaaagtaattctgaaagaccaacagcgtcatctcagtcaaaggaccagcatttggtaagacactcaactacacctacatatgtaacatatccaaatggcaccccgaaaagcctatctgcagaaatggcagaacatgccggtccagaagactttgcagtagagagtgagagttcatatgccactgaggacgatgaattcaacaatgtgactggacttgattctcctgttaccagagtttgggaaagcaaaagtaaaggaaatgctaccttatcacatatacatcacccactcgaatctcctggtttccatagagcaaagaagaacagaagtcatgtgggaaaactgaagatgtcaagaacttcttcaggaagaaaaaggtcaaggtcaaatgctcagaagcctcctatctggcaagaagtggagagatcctctttctctgttggtgatagtatggacatactaaatacatctgcaaatgatctaaagacgcatgagctagacgaggatcctgaggtggaaagtatggctaggatgtttagtagttcaaatacttcatctttattgttgccatcaagtgactctgcatattcttcaaattattgtggtgccaatgtgctacaagactcttatttgaagttaagatgcgaggtggtaggagctagcattgtcaaaagcgggtctggcatgttttgctgtgtattctatttccgtgaccgacgccaatggtaatagttggtccattaagaggaggtttcgtcattttgaagacctgcatcggcgtctaaaagagtatgctcagtacaatcttcatttacctccaaaacatttcctctcatcaggtttagaggtttctgttgttcgagagagatgcaagctgctcgacatatatctgaagaaccttctgcaaattcctattgtttcaagctgcatagaagtctgggattttctgagtgtggattcacagacatatattttcacggacactctctcagtcatccaaacattgtcagtggatggccccgaatcttagtgttcccttgtttcatcttgttgatgtggtctttcagctccaagatggaggctggataaggcgtcaagcattttgggtagcaaagcaaatactgcaattgggaatgggagacacgtttgatgactggcttgttgacaaaatccaattacttaggaaagggaggataattgcttttgctgttaagcgcattgaacaaattctctggcctgatggaattttcatgacaaaacatccaaagagaaattcgcctccacctcctcctggtgctcagagcaatggcatgggaaactatctaagcgatgaacaacggatagaagctgctcatcgtgcaaattttgtccgtgaactgataatagataaagccccatctccactagtgagtcttgttggtcgaaaggattatgaaagatgtgctcatgatatctatttctttcttcagtccccggtttgtttgaagcagctagcgttcgaactccttgagctgcttgttctttcttcatttccggagttggatggcactgtgaggaagtggcacgaagataaagagcaattctgcgcccagtaatgtttatcaaacgtttgaatttgtcacgggcggtgtttgtttccaacacatatcgtctttccagagtggtgtggcctgtgaattctgcgaaaataaggtggtggcttcagaggagtgcccgtggatatctcagtttgaagtgggtggtggctttgtgcagtgtgaatatggttagatagtgcgaggatatggtccctttttccaccgggccatggcagaacggtttttgtgcccgatagagttcatttttccccctccagatttggtatacgtaatgctgctgcctgaaaggaaagagatggtggcgcattttttttgcacccgttttggtggtacactggtacccgtcttgtgtaaatctgcatagagataaatgaagtttcgaggtggtcaatgaatgataatagctctctggcatcgtgatgattcgttgtggctccgccttgctgtacgtttttttggtgctgcccctgcgaatcatctcggcactattttgtgatgataaaaaaaaagtaatatgcgctggagattcgtttattcaaat

SEQ ID NO: 7521 - DNA, 3946 bp, Zea Mays
agacaaaatccagaaccaggccggcggcccactcccaccgccgcgcctacgccttcccccgccccccgcgcggaggagggtgccgccggcgatggagacgacggccgcgggcgcgccaagagcgcagacgctgcgggacctcgcggaggagggcaagaagcggggcgtcctgctcctcgtcttcgccttcgggctggccttcctcatgtcccaaagagcgtaactagaacagatcatgccagtcattcactcgtcaaaacaaaaggtactgaggtaaagaaagtcattcatcagactgaaacggatggaaaaatagattggaggagcaaggttaactcgcctccagttgaagcagcattcgaacagttcacaaggcaccttatctcagaatgggtaacagatctgtggtactcgcgcgtaacacctgacaaggaaggtccagaggaactcatcgatgtagtcaatactgtccttggggagatttcagttcgggcaagaaatgttaaccttatcaatctgctgatcagggatttggtcgatcttatatgcaataatttggaactttatcatttctgtcaagccaagattggaagagagaagtttgtgggccttccttcagagcgtcgtgatgctgaactgaaaatgatccttttagctgaaaacaagttgcatcctgctttattttcagctggcgctgaatacaaggtattgaaaagtcttgctgacgggttgatctcaatcacagtgaagcctcaggatctacaatgtactttcttccggtgtacagcgcgggaacttctcgcttgtgcagttttgagacctgttgtgaacttagcaaatccaaggtttataaatgaaagaatcgaatcctttgctctttcgcatgccaataagttggagaaaggaactgcagaatccttggatgttgtcacaactgttaagcacagggaaccacatatgccctctgttgatgaattttcggcactaatagaccactcaagttcaggtgttgagctcgttcaatttcgtcagggtcaatcgaaaactgcatcagatatacaacctggaaaaagtacaaatccatatagtctaaaattagaatcctctcatgcacctttagtcagtagttcacacccactggagtcaacaagtttagcttcgtcttcccacgttacttctgataatgggttttcgttgcataccaaaagcagcaacagagcaactgcaaatggtcatggtagagagtgtgcacagcccttgggtatcagttctgagcgtgcacatcaagctttagcacttgagcaccttgagaatatgtggacaaagggaaagaactacaaaccagaaaatgtagaacatgtcgcaaaagtgtctgttggatctgcttctctgggctcgacttcagttcagcaatcagttccttgcagcacttcagtttgttacaatcaaagtaattctgaaagaccaacagcgtcatctcagtcaaaggaccagcatttggtaagacactcaactacacctacatatgtaacatatccaaatggcaccccgaaaagcctatctgcagaaatggcagaacatgccggtccagaagactttgcagtagagagtgagagttcatatgccactgaggacgatgaattcaacaatgtgactggacttgattctcctgttaccagagtttgggaaagcaaaagtaaaggaaatgctaccttatcacatatacatcacccactcgaatctcctggtttccatagagcaaagaagaacagaagtcatgtgggaaaactgaagatgtcaagaacttcttcaggaagaaaaaggtcaaggtcaaatgctcagaagcctcctatctggcaagaagtggagagatcctctttctctgttggtgatagtatggacatactaaatacatctgcaaatgatctaaagacgcatgagctagacgaggatcctgaggtggaaagtatggctaggatgtttagtagttcaaatacttcatctttattgttgccatcaagtgactctgcatattcttcaaattattgtggtgccaatgtgctacaagactcttatttgaagttaagatgcgaggtggtaggagctagcattgtcaaaagcgggtctggcatgttttgctgtgtattctatttccgtgaccgacgccaatggtttcgtcattttgaagacctgcatcggcgtctaaaagagtatgctcagtacaatcttcatttacctccaaaacatttcctctcatcaggtttagaggtttctgttgttcgagagagatgcaagctgctcgacatatatctgaagaaccttctgcaaattcctattgtttcaagctgcatagaagtctgggattttctgagtgtggattcacagacatatattttcacggacactctctcagtcatccaaacattgtcagtcagtttagatgaaagatcaaatgggaaaaatataaaagcattgaactcttctggagctttgaatggaaattctatctctggaggtcaatctttgcatggacatatagacgacaccgtacataaggattcagacatcgcttgtgatggtttgagatttaggaaagggaatgtgaacaagaacttgggaaacggtgttagccacacaacagatagtgttagcaacacaactgccaatcattatcaggacaattctggaagtgatccagagcagaatgatcattccttttcaatagattcattaaatcctaagaagttgcgttcaactgaaaccaatgacacatctcaaattccagagtctggaggattttcagtatctcctaatgattggatggccccgaatcttagtgttcccttgtttcatcttgttgatgtggtctttcagctccaagatggaggctggataaggcgtcaagcattttgggtagcaaagcaaatactgcaattgggaatgggagacacgtttgatgactggcttgttgacaaaatccaattacttaggaaagggaggataattgcttttgctgttaagcgcattgaacaaattctctggcctgatggaattttcatgacaaaacatccaaagagaaattcgcctccacctcctcctggtgctcagagcaatggcatgggaaactatctaagcgatgaacaacggatagaagctgctcatcgtgcaaattttgtccgtgaactgataatagataaagccccatctccactagtgagtcttgttggtcgaaaggattatgaaagatgtgctcatgatatctatttctttcttcagtccccggtttgtttgaagcagctagcgttcgaactccttgagctgcttgttctttcttcatttccggagttggatggcactgtgaggaagtggcacgaagataaagagcaattctgcgcccagtaatgtttatcaaacgtttgaatttgtcacgggcggtgtttgtttccaacacatatcgtctttccagagtggtgtggcctgtgaattctgcgaaaataaggtggtggcttcagaggagtgcccgtggatatctcagtttgaagtgggtggtggctttgtgcagtgtgaatatggttagatagtgcgaggatatggtccctttttccaccgggccatggcagaacggtttttgtgcccgatagagttcatttttccccctccagatttggtatacgtaatgctgctgcctgaaaggaaagagatggtggcgcattttttttgcacccgttttggtggtacactggtacccgtcttgtgtaaatctgcatagagataaatgaagtttcgaggtggtcaatgaatgataatagctctctggcatcgtgatgattcgttgtggctccgccttgctgtacgtttttttggtgctgcccctgcgaatcatctcggcactattttgtgatgataaaaaaaaagtaatatgcgctggagattcgtttattcaaat

SEQ ID NO: 7522 - DNA, 4127 bp, Zea Mays
cccccttccacgagacaaaatccagaaccaggccggcggcccactcccaccgccgcgcctacgccttcccccgccccccgcgcggaggagggtgccgccggcgatggagacgacggccgcgggcgcgccaagagcgcagacgctgcgggacctcgcggaggagggcaagaagcggggcgtcctgctcctcgtcttcgccttcgggctggccttcctcatgtcccttacgagctcgtcagtttggtttaatctgccatttgccatagctctgattgttttgttccgctacatatcgcttgattatggccttcgtagaaagagcgtaactagaacagatcatgccagtcattcactcgtcaaaacaaaaggtactgaggtaaagaaagtcattcatcagactgaaacggatggaaaaatagattggaggagcaaggttaactcgcctccagttgaagcagcattcgaacagttcacaaggcaccttatctcagaatgggtaacagatctgtggtactcgcgcgtaacacctgacaaggaaggtccagaggaactcatcgatgtagtcaatactgtccttggggagatttcagttcgggcaagaaatgttaaccttatcaatctgctgatcagggatttggtcgatcttatatgcaataatttggaactttatcatttctgtcaagccaagattggaagagagaagtttgtgggccttccttcagagcgtcgtgatgctgaactgaaaatgatccttttagctgaaaacaagttgcatcctgctttattttcagctggcgctgaatacaaggtattgaaaagtcttgctgacgggttgatctcaatcacagtgaagcctcaggatctacaatgtactttcttccggtgtacagcgcgggaacttctcgcttgtgcagttttgagacctgttgtgaacttagcaaatccaaggtttataaatgaaagaatcgaatcctttgctctttcgcatgccaataagttggagaaaggaactgcagaatccttggatgttgtcacaactgttaagcacagggaaccacatatgccctctgttgatgaattttcggcactaatagaccactcaagttcaggtgttgagctcgttcaatttcgtcagggtcaatcgaaaactgcatcagatatacaacctggaaaaagtacaaatccatatagtctaaaattagaatcctctcatgcacctttagtcagtagttcacacccactggagtcaacaagtttagcttcgtcttcccacgttacttctgataatgggttttcgttgcataccaaaagcagcaacagagcaactgcaaatggtcatggtagagagtgtgcacagcccttgggtatcagttctgagcgtgcacatcaagctttagcacttgagcaccttgagaatatgtggacaaagggaaagaactacaaaccagaaaatgtagaacatgtcgcaaaagtgtctgttggatctgcttctctgggctcgacttcagttcagcaatcagttccttgcagcacttcagtttgttacaatcaaagtaattctgaaagaccaacagcgtcatctcagtcaaaggaccagcatttggtaagacactcaactacacctacatatgtaacatatccaaatggcaccccgaaaagcctatctgcagaaatggcagaacatgccggtccagaagactttgcagtagagagtgagagttcatatgccactgaggacgatgaattcaacaatgtgactggacttgattctcctgttaccagagtttgggaaagcaaaagtaaaggaaatgctaccttatcacatatacatcacccactcgaatctcctggtttccatagagcaaagaagaacagaagtcatgtgggaaaactgaagatgtcaagaacttcttcaggaagaaaaaggtcaaggtcaaatgctcagaagcctcctatctggcaagaagtggagagatcctctttctctgttggtgatagtatggacatactaaatacatctgcaaatgatctaaagacgcatgagctagacgaggatcctgaggtggaaagtatggctaggatgtttagtagttcaaatacttcatctttattgttgccatcaagtgactctgcatattcttcaaattattgtggtgccaatgtgctacaagactcttatttgaagttaagatgcgaggtggtaggagctagcattgtcaaaagcgggtctggcatgttttgctgtgtattctatttccgtgaccgacgccaatggtaatagttggtccattaagaggaggtttcgtcattttgaagacctgcatcggcgtctaaaagagtatgctcagtacaatcttcatttacctccaaaacatttcctctcatcaggtttagaggtttctgttgttcgagagagatgcaagctgctcgacatatatctgaagaaccttctgcaaattcctattgtttcaagctgcatagaagtctgggattttctgagtgtggattcacagacatatattttcacggacactctctcagtcatccaaacattgtcagccgaacaagctcgtttttgcattgtttaatgctgaattcctattatcttgcagtcagtttagatgaaagatcaaatgggaaaaatataaaagcattgaactcttctggagctttgaatggaaattctatctctggaggtcaatctttgcatggacatatagacgacaccgtacataaggattcagacatcgcttgtgatggtttgagatttaggaaagggaatgtgaacaagaacttgggaaacggtgttagccacacaacagatagtgttagcaacacaactgccaatcattatcaggacaattctggaagtgatccagagcagaatgatcattccttttcaatagattcattaaatcctaagaagttgcgttcaactgaaaccaatgacacatctcaaattccagagtctggaggattttcagtatctcctaatgattggatggccccgaatcttagtgttcccttgtttcatcttgttgatgtggtctttcagctccaagatggaggctggataaggcgtcaagcattttgggtagcaaagcaaatactgcaattgggaatgggagacacgtttgatgactggcttgttgacaaaatccaattacttaggaaagggaggataattgcttttgctgttaagcgcattgaacaaattctctggcctgatggaattttcatgacaaaacatccaaagagaaattcgcctccacctcctcctggtgctcagagcaatggcatgggaaactatctaagcgatgaacaacggatagaagctgctcatcgtgcaaattttgtccgtgaactgataatagataaagccccatctccactagtgagtcttgttggtcgaaaggattatgaaagatgtgctcatgatatctatttctttcttcagtccccggtttgtttgaagcagctagcgttcgaactccttgagctgcttgttctttcttcatttccggagttggatggcactgtgaggaagtggcacgaagataaagagcaattctgcgcccagtaatgtttatcaaacgtttgaatttgtcacgggcggtgtttgtttccaacacatatcgtctttccagagtggtgtggcctgtgaattctgcgaaaataaggtggtggcttcagaggagtgcccgtggatatctcagtttgaagtgggtggtggctttgtgcagtgtgaatatggttagatagtgcgaggatatggtccctttttccaccgggccatggcagaacggtttttgtgcccgatagagttcatttttccccctccagatttggtatacgtaatgctgctgcctgaaaggaaagagatggtggcgcattttttttgcacccgttttggtggtacactggtacccgtcttgtgtaaatctgcatagagataaatgaagtttcgaggtggtcaatgaatgataatagctctctggcatcgtgatgattcgttgtggctccgccttgctgtacgtttttttggtgctgcccctgcgaatcatctcggcactattttgtgatgataaaaaaaaagtaatatgcgctggagattcgtttattcaaat

SEQ ID NO: 7523 - DNA, 1775 bp, Zea Mays
aattccttatggaagctgaagaagtagcgtggatttgtcatctcgcgctgccacgtttgactttggacttgctgccacgtttggtagttgctacttgctacaccggaggaagaagaacaagtagtgcttttcttctcttgtcacgttcacggggcggccgatcgaccgttcacctcgcccgacggcccaagcagcccatgtcttcgtcgggcccctccccggcgacgggaatccacgcgtcgccgccgttgggccttttgccggcgacgggaacccatcacaccaggtcatggggcaaaacaacctccacaagttttactggttctaccaccaaacatgagcagagcttgcatggaaatgttaagccgttgcaattggcggcaaatgaatcctctcgtttggcttacagaagtccagcacttaaaaaccagtggaatcttcctgctagttcttcctccactaatgtggttaccacctttgatgataacgaacacgtgtcttccagtgttattgaagaaaaagttggagtactgttattaaaccttggtggtccagagacacttgacgatgttcaaccatttttattcaacctatttgctgatccagcgaatgctttgaagattgccctggaaaagaaaaaattgaacgcaaacatatatgttgggatgcggtattggtaccctttcacagaagaggccattgatcaaattaaaaaggataagattaccaagctcgttgttcttcccctttaccctcagtactccatatcaacaagtgggtcaagcattcgtgttctccaagacattgtcaaggaagattcatatttttctggtttgccaatttccattattgaatcatggtaccaacgagatggctatgtgaaatcaatgtctgacctaattgaaaaggagctctccgccttctccaatcctgaagaggttatgatattcttcagtgcacatggtgtgccacttacctatgttgaggatgctggagatccttacagagatcagatggaggattgtattgctttgatcatgggggagttaagatcaagaggaatcttaaatagtcacactttggcgtaccagagtcgggtggggccagttcaatggctgaagccatatactgatgaagttttagtagaacttggtcaaaagggtgtgaagagcctcctggctgttccagtaagctttgtgagtgagcacatcgagacattggaagaaattgacatggagtacaaggagttggctctggaatcaggcatcaagaactggggtcgggttcctgctcttggatgcacttcaacattcatctccgaccttgcagatgctgtcgtcgaagccctgccctctgcttcagcgctcgcgaccagaaagcctgacgacatcgattccagcatggacctgacgcattacctcaccaagatgctgtttggctcaatcttggcatttgtcctgctgctatcaccaaggctagtttccgccttccggagcaccatgctttaagtttttctccaaagcactaaatttgagattgagaatgagatatttcattttggacctttttttcctccttaatagaatgatgtgcagttcttctgctcgttccagagaaaaaaataactgctaggaactcacaaggtagtaggggattgcaaaagggatgtgaacagctgttttgatcgaagttgtctataaataccgtgctcacggactctgtattttaatggtttcttgtgctcgactaattttgttgttcttgtccaaggtttt

SEQ ID NO: 7524 - DNA, 1727 bp, Zea Mays
ctcggacgctacacagtcacgggtcagatccgattcagatctcgcgcacagcacgcgagccgagggggacaaatagtaggatttccagagagacagaaacaaacggagacgcagagaaaccctttccacccagattcgttcggttcggttcggttccgaccacgcgggcgcgggagagagtggggagatgagcgcggctgcggaggacgcggctgcggccgaagggggatccggaggcgggagcagcggcgcggggtcgtcggaagggggcgcgcggcgccggttcgacgacaagggcctcgtcgcccgcacctcgctcatcctgtggcacacgcaccagaacgacgtcggcgccgtgcggaagctgctggaggaggacgccgcgctcgtcaacgcccgggactacgacagccgcacgccgctccacgtcgccgcgctccacggctggcacgacgtcgccgagtgcctcgtcgccaacggcgccgacgtcaacgcccaggaccgctggcagaacacgccactagctgatgcggagggcgcaaagaggcagcccatgattgagctgctcaaggagcacggtggattgacatatgtatgtggtcgataacttgatttaacaggtattccaattccacctgtcactgtatggtatggatttagtgggggaaaactggaagccattttgaaccaaagacgattccaccacctctaacaaataaggctgactgggagattaacccacttgaattggacttcacaaaagcaactgttatcggaaagggctctttcggtgaaattctgaaagcaaattggcgaggaacacctattgctgtcaagcgcattcttccatccttatctgatgacaggctggtgatccaagattttaagcatgaagtcaacttgctaataaagctgagacatccaaatgttgtccagttccttggagcagttacagaaaccaagcctctaatgctaattactgagtttctacgaggaggtgatcttcatcaatatctgaaggacaaaggtgcactcaacccacttaccgctgttaattttgcactggatattgcaagaggaatggcatatcttcataatgagcctaatgttgtgattcaccgagatttaaaaccaagaaacattcttctggtgaattctgctgccaaccacttgaaggttggagacttcggccttagcaagatcatcaaagcgcagcatgcgaatgatgtatacaagatgactggagagacaggaagctatcggtacatggcccctgaagttttcaagcaccggaaatatgacaagaaagttgatatcttctcttttgccatgattctatatgagatgctggaaggtgattcacccttctccaactacgaaccttatgaggctgctaagtacgtggcagatgggcatcgtccggttttccgtaaaaatcataccactgagttgaaggatttggttgagctatgttggtctggggacatcagtctgaggccatctttcttggagatcctcaagaggcttgagaagctcaaggagcattattcacacgagaaccactggcatttgttccagtagcagtgcgtatatttttttactatgactgttgtcatgattggggatttctcgggagatctgacattgatgaatgtacaaaattgggtgcctctagaaaggatctttatatgcttagactcattggctatgggaagtgtttttaccgt

SEQ ID NO: 7525 - DNA, 1433 bp, Zea Mays
gccatttctgcaccagagctctctttatcgtggagttggcctgtcttcaaaaggtcgaagaccaggagcagatgatattgatgcttcttctcgtcttccacttctcaacaatgtttactacagagatattcttggtgaatttggagctttctttgctcttgccaacagaattgaccgaatacacaaaaattcttggatagggtttcagtcctggagaggtacagcaagaaaggcaaacttatcaaacaatgccgaatttgcaatcttagaagctgttcaatctcaaaagcatggagattccttctatttttgggttcggatggatcaagatccaagaaaccacacatataaagatttttggtccttctgtgatgcgatcaatgctgggaactgcaggttagctgttttggaggccttccaaaggatgtatggtgtacaccttgatcatgacctggattctctgttacatatgcctaatgatggagacacatggtctgtgatgcaaagttgggttttgcctacacggtcattcctagaatttgttatgttttcaagaatgtttgttgatgcactggatgcacaaatgtacgacaaacaccatcaaactgggcattgcatcttgagtcttcacaaggaccggcactgctactctcgtgtcctggagttgattgtgaatgtttgggcattccacagtgcacgacggatggtctatgttaatcctcagactggtgcaatgcaggagcagcaccatctcagtggcaggagaggtcaaatgtcagtgcagtttttctcctacaccactctgaagagcatggacgaggagcttgcagaagagtttgacttggatcatccggacaggaggtggctctggccacaaactggagaggtcttctggcagggtctctatcagagggagcggatcatgcggcagcaggagaaggagcggcggaagcagcagagcagagagaagatccagagaatcaagaatagagctcggcaaaagacgctgggaaagtatataaagccaccgcctgatgatacaggtggctcgaacgatacaacatcagtagatttgtagcattttgaccatgatgattcttaccgtggggaatttggttcattatttgtaacggctgtccttggtcctcactgagaacccccggacggttgtgaatattttgtcagttttgtcgtgccctctggtgtctgggtgctttacaggcgattttgtaacatatctaggccattgagttgtgaagctgccatcttaggtgtaaatttgggtttccgtagggttgtttttgtccatttcgcttatgagcttctctataacagacagttaacacttaacagctgctccgcatttgcagtctccttggtacaaaatgagtcgactgatggtatcaatctgtcaagatatatttgggtgaacc

SEQ ID NO: 7526 - DNA, 1587 bp, Zea Mays
atgacggccaccgccagctgcttctccagccccgtcgcgtgggcgcggcctcgcgccggccccgcaggcgcgagtgcggccttgcgcgtgggccggtgtcccgcggccgcggtagcggcgcacgacgtggcgttccacccggacgtgtcccgcgcggcggattcgctgcaggcggagttccgcgccgtggaccgcgccatcgctctcaactcctcccgcgtggccgccgccttccgtcgcgcgcgcgtcgccccgcaccatttcggtgggtccacggggtacggccacgacgacggtggcggccgggaagcgttggactccgtcttcgccgacattgttggtgcggaggctgccattgtgcgcccgcagttcttctcaggtacccacgccattgcctgtgcgttgtttgcgcttctgaggcctgggcatgagctcctggcagtcgctgggcccccgtacgacaccttggaggaggtgattgggatcagggggtcggccaatgtagggtcactcaaggatttcggagtgacgtaccgagaagttccggccggaaactgggtgtgccttcatacagagatcgtgtggatattcgtggcgcaagagcttaagtgtagcagatattcacaaagctataggtttgatcaagatgcaaaatccaaactgcatggtgatggttgataattgctatggtgaatttgttgagatatcggaacctgcaatggtgggagcagacttgattgctggaagtttgataaagaatccaggtggaactattgcgccttgtggtggttatgttgctgggaaggagcatttagtcgaagcagctgcagcccgtctatctgcacctggccttggggtggaatttgggtcaacacctggccatgttatgcgtgcgctgtttcaaggcctgtttcttggtccgcaaatggttggagaagcagtaaaaggaggtttgctcattgcggaagtcatgtcagccaagggatacaaagttgaaccacttccgagggttcctcgtcatgatattgtgcaggcagtggagcttggcagcagggaaagactcatagcattctgtgaagtagtgcaacaaacttgtccagtaggatctttcatcaaaccaactgctggggaaacgcctggctatgcttcagaggtcattttcgccgacgggacattcatagatggaagcacaagcgaactgtcatgtgatgggcccttgagagatccatatgccgtcttttgccagggaggaacacattggacgcagtgggcacttgtccttggtaatgttctgaaggtcatataaacgtgcggtgtgataatgttgtcacatttcttgtatgggcatgctcttttcctatcctaactctgtactcgtttactaggaatggtggatactcactccgtctcagtttataaggctttataaggcgtaactactttttattcttgtcccataatataaggcgtgctctctctaggcgtacgtacatcaatgcagtagtatagagaaaattaaatgtatttcttgatttttgaactagaggtggttacaccttatatattgagacgcagcgggtattgtgc

SEQ ID NO: 7527 - DNA, 1623 bp, Zea Mays
cagccggcggttgcttcactcgctcgctgcagccgcgcggcgatgacggccaccgccagctgcttctccagccccgtcgcgtgggcgcggcctcgcgccggccccgcaggcgcgagtgcggccttgcgcgtgggccggtgtcccgcggccgcggtagcggcgcacgacgtggcgttccacccggacgtgtcccgcgcggcggattcgctgcaggcggagttccgcgccgtggaccgcgccatcgctctcaactcctcccgcgtggccgccgccttccgtcgcgcgcgcgtcgccccgcaccatttcggtgggtccacggggtacggccacgacgacggtggcggccgggaagcgttggactccgtcttcgccgacattgttggtgcggaggctgccattgtgcgcccgcagctcctggcagtcgctgggcccccgtacgacaccttggaggaggtgattgggatcagggggtcggccaatgtagggtcactcaaggatttcggagtgacgtaccgagaagttccgcttgtagcagatggtggccttgattgggatgctcttgcttgctccatcaggccggaaactgggtgtgccttcatacagagatcgtgtggatattcgtggcgcaagagcttaagtgtagcagatattcacaaagctataggtttgatcaagatgcaaaatccaaactgcatggtgatggttgataattgctatggtgaatttgttgagatatcggaacctgcaatggtgggagcagacttgattgctggaagtttgataaagaatccaggtggaactattgcgccttgtggtggttatgttgctgggaaggagcatttagtcgaagcagctgcagcccgtctatctgcacctggccttggggtggaatttgggtcaacacctggccatgttatgcgtgcgctgtttcaaggcctgtttcttggtccgcaaatggttggagaagcagtaaaaggaggtttgctcattgcggaagtcatgtcagccaagggatacaaagttgaaccacttccgagggttcctcgtcatgatattgtgcaggcagtggagcttggcagcagggaaagactcatagcattctgtgaagtagtgcaacaaacttgtccagtaggatctttcatcaaaccaactgctggggaaacgcctggctatgcttcagaggtcattttcgccgacgggacattcatagatggaagcacaagcgaactgtcatgtgatgggcccttgagagatccatatgccgtcttttgccagggaggaacacattggacgcagtgggcacttgtccttggtaatgttctgaaggtcatataaacgtgcggtgtgataatgttgtcacatttctttgaagaggcaggcgtcactaatatgcgagcgcttgcacttcagtggatacggacaacgacaagctgtcgttagtgttacccgactactacctcccctgctgctcatgtggacaaatcaccagcgacctcaccaccagtgaccccacttttaacctccctatttactcaccaccagatattttttagggactcaaacatgatgtatgatttagcatatgatctatgagcacaaagaatatgcaaattgctgtattgt

SEQ ID NO: 7528 - DNA, 1633 bp, Zea Mays
atgacggccaccgccagctgcttctccagccccgtcgcgtgggcgcggcctcgcgccggccccgcaggcgcgagtgcggccttgcgcgtgggccggtgtcccgcggccgcggtagcggcgcacgacgtggcgttccacccggacgtgtcccgcgcggcggattcgctgcaggcggagttccgcgccgtggaccgcgccatcgctctcaactcctcccgcgtggccgccgccttccgtcgcgcgcgcgtcgccccgcaccatttcggtgggtccacggggtacggccacgacgacggtggcggccgggaagcgttggactccgtcttcgccgacattgttggtgcggaggctgccattgtgcgcccgcagttcttctcaggtacccacgccattgcctgtgcgttgtttgcgcttctgaggcctgggcatgagctcctggcagtcgctgggcccccgtacgacaccttggaggaggtgattgggatcagggggtcggccaatgtagggtcactcaaggatttcggagtgacgtaccgagaagttccgcttgtagcagatggtggccttgattgggatgctcttgcttgctccatcaggccggaaactgggtgtgccttcatacagagatcgtgtggatattcgtggcgcaagagcttaagtgtagcagatattcacaaagctataggtttgatcaagatgcaaaatccaaactgcatggtgatggttgataattgctatggtgaatttgttgagatatcggaacctgcaatggtgggagcagacttgattgctggaagtttgataaagaatccaggtggaactattgcgccttgtggtggttatgttgctgggaaggagcatttagtcgaagcagctgcagcccgtctatctgcacctggccttggggtggaatttgggtcaacacctggccatgttatgcgtgcgctgtttcaaggcctgtttcttggtccgcaaatggttggagaagcagtaaaaggaggtttgctcattgcggaagtcatgtcagccaagggatacaaagttgaaccacttccgagggttcctcgtcatgatattgtgcagtggagcttggcagcagggaaagactcatagcattctgtgaagtagtgcaacaaacttgtccagtaggatctttcatcaaaccaactgctggggaaacgcctggctatgcttcagaggtcattttcgccgacgggacattcatagatggaagcacaagcgaactgtcatgtgatgggcccttgagagatccatatgccgtcttttgccagggaggaacacattggacgcagtgggcacttgtccttggtaatgttctgaaggtcatataaacgtgcggtgtgataatgttgtcacatttcttgtatgggcatgctcttttcctatcctaactctgtactcgtttactaggaatggtggatactcactccgtctcagtttataaggctttataaggcgtaactactttttattcttgtcccataatataaggcgtgctctctctaggcgtacgtacatcaatgcagtagtatagagaaaattaaatgtatttcttgatttttgaactagaggtggttacaccttatatattgagacgcagcgggtattgtgc

SEQ ID NO: 7529 - DNA, 2542 bp, Zea Mays
ccgcagtctgtaactaaaaagcggcgtcccgttcggccgttccgcccagcgtgcgtttcgtaagccgagtagccgaccacgcgaagcatccagcagtgctcaactctgttcgccaccgccagtctgccacactccatgccccaccaccacctcgccgcctcgaaggcagaaccctaggcagcccccaatgccgccccaccgcctccttccccttctcctcctactcctgcctctcggcgtctccggcgccgccgctgccggggggaacgccacgtcggcgccgctcccctgctccgagctctcgcgcgtctgcacggccttcatcgccttcccgactgccggcgcggggcccgccaatgccacggtgctcgagtccatgttcgacgccgcgccgggcgacctcacggccgacgccgcggccagcccgaggtacgccttcgtgcgtaagaactgctcctgcctcccgtcccgcacctacctcgccaacaccacctacaccatcccctcctccgcgacgacctccttccccaataccaccgccgccgatgtcgcggctgcggcgtactcgggcctcgccgtgccgccgcctggcggggcggcgcagcgaccgccgcgaccgggagcggttgtggcgctccacctgctctgcggctgctcgtccgggccctggaactaccttctcacctatgtcggcgtcgaaggggacacagtggaatcactatcgagtaggttcggggcgagcatggatgccatcgagactgccaatgccatggccggccccgaccccatcaccgcgggaaaggtgtactacatcccactcaactcagttcctggacaggcatatgttaaaaccaactcctcctgccccagccccagcgccaacagactatacattgtcagggacaccagattaccattcaagcaaatttccttatggatgggttattggtagcatgggagttgcgcttgctttaattgttattgctgttcttgcacttgtcctatggaaattctttggatataaaccccaagatcgtaacggccagagaaagagcccagaccgacataagtttcaactccttaagagtggtagtttctgttatggttctggaagatatttgtgttgccaatttggaaatgcaaagccaacaagagcggatggtggtgagcatcatatcaatgtccccaaaggtgtagcagcagacgtatttgatagggagaagcctattgtgtttacgcacgaagaaatactcatatcaactgactcattttcggatgcaaatcttcttggtcatggtacatatggttctgtctattacggtgttctccgagagcaggaggttgcgataaagagaatgatggccactaaaacaaaagaattcatagtggaaatgaaagttctttgcaaggttcatcatgctagtctgaattgattggctatgcagcaggcaaggatgagcttttcctggtttatgagtactctcaaaatggttcactcaaaaatcatctacatgatcctgaaagaaaggggtgttcatcactttcatggatctttcgggtccaaattgcacttgatgctgccagaggactagaatacattcatgagcacaccaaagatcattatgttcatagagacattaaatcaagtaatatcttgcttgatggttccttcagagcgaagatttcagattttggccttgcaaaacttgtagtgaaatccaatgacgcagaggcttctgtcactaaggttgttggaacttttggttatttagcccctgaatacctgcgggatggcctggcaactacgaagagtgatgtctatgcttttggtgtggtactttttgagctaatatctggaaaggaggcgattacaagagctgaaggaatgggtgcaagctcaaactccgagcgatgctcactggcatcagttatgttagctgccgtaaggaaatgtcctaattcaacgtatatggggaacctgaaagactgcattgaccataatctaagggatctgtatccttatgactgtgcgtacaagatggccatgctagcaaaacagtgcgtggacgaagaccctgttctacggccggacatgaagcaggtggtaatcacgctctctcaaatactgctgtcttctatcgagtgggaggcaacacaggctgggaacagccaagtgtttagtggtcttgtggcggggaggtgatctggtcaacacaggctgctgtacatgctcttgagtgatctactcacctgatccaccggagacatattcgcctatggccctcctctttatatcttactggtcctttgtccagttgagcgattttcaggtttcttctgagctctgagagaatacctaccagagtgcaatatattttttggtgggtggtacagtatgtagcaacgtatgtatacaagaatctaccttgtgatgcaatgtcctgatgagtcatttcgtttgttccgctgctgctatgccctgacttgtgtttgtagaccaaattcagcagcagcgactgcaacgtgtacttgtgtattgtgg

SEQ ID NO: 7530 - DNA, 1856 bp, Zea Mays
  misc_feature (1855)..(1856): n is a, c, g, or t
ccgctctctctccctctcgaagcgacgcagaaccgctcgccagtgtcgcagtcgcctcctgtccctctcctctctctttgccgctgccctcctctaagcatctccctctcctactccctcctctcaaagcacttgttggccccccaccgccgcatctgcatcccataatcgcctacgccatcgccgccgccttcgggtccttctcgctcagcctcgactgctcgctcatcttcaccgaggcgctcctcacccccgccatcccctccgtgtcggcgtgcgccggcggcatcttgcccagtctcagccgatttatccttcggtctgttagggccttatcaaaccgccgccacggcgaactcgcgccgctgccatgttcgcctcgcgcacccaccatctcctcaacaacgttcaaaccgccaaccacgacatcctcctccacaacccgacctctcacgcatcccaacttggtgcggcgtaaacgcgcagcagcacttcgcctcggtcgaccacggcctgcccccaggcgttgacatccagatccatctcgctccgatctacattcgagaagtttgtctctggcatcgattccccaatccgaatcattgccgacgtcttctttgggtggacggtcgaagtcacgcgcacgcacatcccacacttgttcctccccggcggtgcattcagcaacaccgtcttcttctccgtgtcggagcacctcgggccataggggcagacccgtgaacgacattcttttggcgtgtcacgacctcctgtcgcaagctcgatgctctccccatcgacactattggacaatgctaatggagttacaactccaaggacaggaaggtatagtgcagatggagcaggtggtgatgcttctgtagagcttacacggccgtgcaggcacgcagctgccgcgcttggtgatttgatatttgtgtatgacggtttacgtggaggtgccgatccatagatttagcttgaagagaaaatagcagcagaagaaaaagttggcgctcgacaattttttcgaaatcatcttaaaaggctgaccatcaaataaaaaccaggctaaaaacacaaaatgtaatatatatgtcaaggaattccatccttgtgtttgcatggacctagaaaatgcagatttaagaatgatgcgagtgatggaggcctatcaggtcaaggaatttcatcctgatgtttgcaaggacccagaaattgcagatttaagaatgagcgagcgatggaggtctatcagggagtgttcttcgttgctatccattgtgaaacatgtcctacaagactacagtgttgtgttgtgttggttcactgtaccacaaacaatattgaagaggactgatgaagagcgcaaagtttatagcatagtcgaagattttgaattgcaattcaaggagaaagaggattgctaaaggatgaccttcaaaacaaaaaaaagctcattaaagaacatgggcattatgaaagcacaataggatccaaagaggtaggtccctttttgtcacttatttaatattcctgaataacctgtgttcggtctgaaagagcacataattgcactcctatttttaatccttacatgattactgcataactgtttatcagtttgtggtctacaggtatcaggctcgctcgcaccacagatatctttgagttattttttactgcattgcgactaattttaggcctccaatttgacaaacagaattaagtagcttatgtatcccttgtttcttgtttcctcagtatatatacacactttccaatatgacgcaggtagcattgttgtagaattgcggttcacggaaacacaaggctagcgcttttgtgcaacaann

SEQ ID NO: 7531 - DNA, 2436 bp, Zea Mays
  misc_feature (2435)..(2436): n is a, c, g, or t
cgctctctctccctctcgaagcgacgcagaaccgctcgccagtgtcgcagtcgcctcctgtccctctcctctctctttgccgctgccctcctctaagcatctccctctcctactccctcctctcaaagcacttgttggccccccaccgccgcatctgcatcccataatcgcctacgccatcgccgccgccttcgggtccttctcgctcagcctcgactgctcgctcatcttcaccgaggcgctcctcacccccgccatcccctccgtgtcggcgtgcgccggcggcatcttgcccagtctcagccgatttatccttcggtctgttagggccttatcaaaccgccgccacggcgaactcgcgccgctgccatgttcgcctcgcgcacccaccatctcctcaacaacgttcaaaccgccaaccacgacatcctcctccacaacccgacctctcacgcatcccaacttggtgcggcgtaaacgcgcagcagcacttcgcctcggtcgaccacggcctgcccccaggcgttgacatccagatccatctcgctccgatctacattcgagaagtttgtctctggcatcgattccccaatccgaatcattgccgacgtcttctttgggtggacggtcgaagtcacgcgcacgcacatcccacacttgttcctccccggcggtgcattcagcaacaccgtcttcttctccgtgtcggagcacctcgggccataggggcagacccgtgaacgacattcttttggcgtgtcacgacctcctgtcgcaagctcgatgctctccccatcgacacgtgagccccttggagggagccccgacctagattttactgagagtttctcctcatcaacctagatctcagtttctctggactttactgagcactcaacattgtgttttttggttgctgcgcgtatatggtttgtaaaataccagaacaagtattggacaatgctaatggagttacaactccaaggacaggaaggtatagtgcagatggagcaggtggtgatgcttctgtagagcttacacggccgtgcaggcacgcagctgccgcgcttggtgatttgatatttgtgtatgacggtttacgtggaggtgccgatccatagatttagcttgaagagaaaatagcagcagaagaaaaagttggcgctcgacaattttttcgaaatcatcttaaaaggctgaccatcaaataaaaaccaggctaaaaacacaaaatgtaatatatatgtcaaggaattccatccttgtgtttgcatggacctagaaaatgcagatttaagaatgatgcgagtgatggaggcctatcaggtcaaggaatttcatcctgatgtttgcaaggacccagaaattgcagatttaagaatgagcgagcgatggaggtctatcagggagtgttcttcgttgctatccattgtgaaacatgtcctacagtatcccttgccaaccagctcctgtatctgttgcctgctcgattcgttgaagcacagagtatggagaaaacacaacatatatcgcatggattatgatttgttagtgcatgtgttacatattgacttatcgttttgagttgtcaataggtccaaggtactaaattgttgatgcacggatttctaattttatcaatttgttttgtgggctgcgatttattttaagtcgctctaagatctcaattattcctcttttttgttattttttatgccttagctgtaatgtttgttttgaatatttattattggaaaatttgatattttataggtgagacattaattaagccattttcataaaagaacactcctgtggtgacaattagacaagaatactaataatcagattaacatacttaaccttgactgcacatatagagactacagtgttgtgttgtgttggttcactgtaccacaaacaatattgaagaggactgatgaagagcgcaaagtttatagcatagtcgaagattttgaattgcaattcaaggagaaagaggattgctaaaggatgaccttcaaaacaaaaaaaagctcattaaagaacatgggcattatgaaagcacaataggatccaaagaggtaggtccctttttgtcacttatttaatattcctgaataacctgtgttcggtctgaaagagcacataattgcactcctatttttaatccttacatgattactgcataactgtttatcagtttgtggtctacaggtatcaggctcgctcgcaccacagatatctttgagttattttttactgcattgcgactaattttaggcctccaatttgacaaacagaattaagtagcttatgtatcccttgtttcttgtttcctcagtatatatacacactttccaatatgacgcaggtagcattgttgtagaattgcggttcacggaaacacaaggctagcgcttttgtgcaacaann

SEQ ID NO: 7532 - DNA, 2897 bp, Zea Mays
aacaaatcgcggagcactcgccgtcgtccgtcaccgggctgtccaacctacgtcgactccggacgcatcgctcgccatacgatcagccctccgttcgctgtacgggctcgcgggttgcgaccctaatagctgactgattctaggcgccatgtcactgcccgtcgacgccgccatcatccagttcacccagatcctattctcccatgcgccagccggccccgtgggccgtgagtccgtgatccagcgtcccaggacccaggctcccagtaccagcctcttctatccggcatccagcgagcagcaaatccagagacctcgactcctcctaaccctagccgccaggctccagtgctccaccgctccagcagatcccggacccggaagcagcgaggaaacacagggcgaccaaggcccgtctggactctggatccgccggtccgccactccgcccctcatctccgacctgagcgcgccgccctgccccgccccgcctctccctcgagcgctgtccgcgcctccgcgcctccgcggtccgcgtccggccgtccgcccagggcccaggcagttgctgcctgctggcttgctgccgtccgccaggccgcctaggcacacagcacactacttctacagttctacggccagcgcccagcggtccagtccagcttccaaatggctagtgaggactcgaaagatatgctgaagaacgtggactggaagaccgtgggcggtgctgtgactactgaatctagccagccagttgtcaagaaacgccttccgaagaagatcagacaagtccctgagtgctattttctgcctcggcgatctttgccttctgcactggcaatctatggtgccgtgtgtgctgctggagttggtgcaggaatgctgatcgaggtgtggataaacaaaaagatcaaagaggatagtgctattatctgggagatggataaatgatgtgcagttctgcaccacactttgatatggtggaagcagtttcggcactgcgatatttgctagctctcaagttaagaattttgtttataggattccttcgtccgtttgttttattttgattgaggtattgccaagatggattcaagaacgttcatccgcagttcatttaccagaacacgagtaaaaactctggctgctgaaaatatagctccaccacaactctaaaataacttataatttgaaatcgaggaagtatttctgttatcatgctaaataaaatgttgtatattctagttttttttcacatgactccctcggttccttggaagtgcaacacagcacttgcttgtttcaggtttttctctctcttttgcctctattctccacaaatgagaaccgatgctaagggcatgtacaatccacactgtatcttaagggatatatgagggtgtaaatgaaaaaaagaatgatatatgaggttttaaatgaaaaaaaaagaaacatatcttggttaaggaatgtctatgtcacagttttctaagtctaaggtacggttctacacttctacttatacaattcaaataaatgagttatcttttaagtgattctagtgaataagataaaaaaatttagatacattaggttgtatgaagagtttcttagatgtatctagtgcttggagaactataacatagtaattaagttgtacatgctctaggaacatgtttggctgagctataggataggttgtgctcggtagatcgtttatatggtcattgcactgtatattactctgtttaaaaaaatgaagtttgaaataggtggtgtggtggtaggtgggataggaagtctgctagagatagcctttatgaaaatgttggtgtgcattatggacttttaaaaattgttttgaagtctaagctatgagagaaagttaaaaatgtgtttaattaaacatttgatttttgataaacctgttgtaagtctctcttacgagcggaatccacatctcatccatagtcctcccaacttggggcaggattgagtgctgcagcagggcccattggcaggaccagtgaaaagggatctgggatatgctacacttacagctgcagcaaaggtgccttcgttggtgtttcactggaagggaatgtggtgacaactagaatggaaaccaatctccgcttctacggtgatgcataccagacggcaacccatatcctgtttgggagggtggagcggccccgagctgctcagcccttgtttgctagccgatttagggcttcttaagggtggattgaagatgattagagaggattaaatcgattgatagtcaaattaaatagaaagagagttaatccccctcaatccttttctatccgcatgcaaccgatccatgctttagatcattggatggtttcactactgacaccagtccacacattaaatattagcagagtatttagtgttagattattgtagaaattacgatttagacttgtttctaaatgaataattttatatataattagaagatcatgatcggttgagagatccaacgcacacaattgatcctttcttttttatatatctaatgctttcttttatcgtaatctcttttaacgttcctgctgtccttaatttgacaactagaatgacactctactagtcttcctggccgacctaggacaaccaggcgccgttctcgttctcacatgctacttgcggtcgattggttttgtggatgattgtttatcttctagagattagcatcagccagcatgacatttctctgctctgttctgtaatctgttccgctgacccgctccgctagcaggcaagccactgccgccgcaaactactagtacgatacaatagacgccaagcccagtgaagaagcagcgtcgatctgggcggatcgatcaagattgctcggaacaatt

SEQ ID NO: 7533 - DNA, 2157 bp, Zea Mays
gaagaaaagggaagcatccagccaacattctccctaggaagaaaggaacccaccaaagcttcaaaaaaagaaaaagagctgcacactggtcactggaaaacgaaggcaaaccctaatcgctactccaccgcagcgcccactacaccgatcgggctccgatggacttcgcggagctggaggccgtggagggcctccggtggccatggcactcgtggccgccgactacccccgccgccgcgtccctcgtcgtgcccacctccgtcctctgctcgccgctgcagcaccccacggcgccggacctcctcccgctgctaccctacgcgccgctccgctgcgcctccccgggttgtggcgccgcgctcaacccgttctcgcgcgtgcaccacggctccgcgcgctggtcctgcgccttctgtggcgccgccgccaacccgttcccccgcctactggcccccgacgcgctccccgccgaactcttccccacccactccagcgtcgagtacttgctgcccccggaccccgctgagcccgggggaccggggccacctgcgctcgtgttcgtgatcgatgcggccacggcggccgaggagctcaccgtgctcaaggacgaggtgcgcaggctcatgcaggggctgcctgaggggatcagggtggcgctcgtcactttcgctgcgtctgtgtgggtgcacgatcttggatttgagggttgcgctcgggtggttgtgcttaatggcgagcgtgagctcgagtctgacaaggttggggctgcagagctgaggaatccaattgaagtgacagggggtttaatggtgcatacagagtcatttgagtatgagcagttcaaaagctgttttaggcatatgttccgtcgtgaaggcaccaattaccttaatatgaactttaatgcgacgattgaaatagtgacatcaaaggaggtgaagatttgtggtgcccttggtccctgcatttccctccgcaggaaaaataactcagttagtgataaggaaattggtgaagtttatgacaaggtaccgacatggtgatggtagttatcgcctgagggtgacgactgttgcaagaaggtgggctgctcctcgatctcctgaaattgctgcagggtttgatcaggaagctgctgcagctgtaatggccaggcttgctgtttacagggcagagacataccatgttagagatgttatacggtggcttgacaagatgcttattcgctttactgctaagttcggaaactatgttcctgaagatccatctacatttcggctgtcaacaaacttctccttgtatccgcagttcatgtactacttgcggagatcacagttcattgatgttttcaacagctctcctgatgaaactgctttcttcaggttgatgctgaatagggaaggggttgtggggtctctaatcatgatccagcctactctattccagtactcatttgatgggccacctattcctgtactgttagatgtcagctccatctctcctgatgtcattttactatttgattcatacttctatattgtgattcattatggctcaaagattgctcaatggaggaagcttggctatcataaggacccaaaccatgaaaatttacggaagctccttgaagcaccagaagtagatgcagaggcactattggtagaccgtttccctgtgccaaaactcataaagtgtgatcatcatggtagtcaggccaggttcctgctcgctcgattgaatccatctgtgacacagaaaacacagttttcaaagggatctgaagtcattttcaccgacgatgttagtctgcaagtgtttattgaacacttgcaggagttggctgttcagggctagaaagtcatgaagcttgaccttgtctgctattccactttggtccattagatactgaagatatggctttgagagggaccagacttcatattcacagatgaagcttgcaagttttttattgaacacttgcagtaattggtgtgcaggattaactagttcatgtggaattatttaaatgcaattttctgctcacttgcaaatactggggagctctactgcctggagtgagatctccctgagttgtacattgctcaagctccagtttgatggacaacaatcaacaaggcagcatataagaagctgaag

SEQ ID NO: 7534 - DNA, 2771 bp, Zea Mays
aggaagaaaggaacccaccaaagcttcaaaaaaagaaaaagagctgcacactggtcactggaaaacgaaggcaaaccctaatcgctactccaccgcagcgcccactacaccgatcgggctccgatggacttcgcggagctggaggccgtggagggcctccggtggccatggcactcgtggccgccgactacccccgccgccgcgtccctcgtcgtgcccacctccgtcctctgctcgccgctgcagcaccccacggcgccggacctcctcccgctgctaccctacgcgccgctccgctgcgcctccccgggttgtggcgccgcgctcaacccgttctcgcgcgtgcaccacggctccgcgcgctggtcctgcgccttctgtggcgccgccgccaacccgttcccccgcctactggcccccgacgcgctccccgccgaactcttccccacccactccagcgtcgagtacttgctgcccccggaccccgctgagcccgggggaccggggccacctgcgctcgtgttcgtgatcgatgcggccacggcggccgaggagctcaccgtgctcaaggacgaggtgcgcaggctcatgcaggggctgcctgaggggatcagggtggcgctcgtcactttcgctgcgtctgtgtgggtgcacgatcttggatttgagggttgcgctcgggtggttgtgcttaatggcgagcgtgagctcgagtctgacaaggtttgtgaatttgtaatataatccttaggacaccgaatttgtaatttggttctgcgccaatctatgtgacatgatcagcattctagtttcacgagtatccacaatctgttcctgccgcagtcagccttgaaatttgaatatacagaaacttttaggtattcaccgttcacagtacaagaacttggctatgccaaggtccactgaagtgcagcggtttttgctgcctgtttctgaatgtgaatttaacatcacatctgcaatagaggacctgagctccatgcctgcgtgtccacgtgggcatcgccctttaagagcaactggcgcagcgatttctactgctattgctcttctagagggttgctgctcacccagtaccggtggtcggattatgatctttacatctggtcctgcaacagttggtccagggtgtgtggtggaaactgatcttgggaaaacaattcgttctcatcgtgacatattcaatagcaacgcaccgctgactgacaaagcacgtgatttctataagaaagttgcaaagaggttgacagaccatgcattagttcttgatctattcgcctgctctcttgatcaggttggggctgcagagctgaggaatccaattgaagtgacagggggtttaatggtgcatacagagtcatttgagtatgagcagttcaaaagctgttttaggcatatgttccgtcgtgaaggcaccaattaccttaatatgaactttaatgcgacgattgaaatagtgacatcaaaggaggtgaagatttgtggtgcccttggtccctgcatttccctccgcaggaaaaataactcagttagtgataaggaaattggtgaagtttatgacaaggtaccgacatggtgatggtagttatcgcctgagggtgacgactgttgcaagaaggtgggctgctcctcgatctcctgaaattgctgcagggtttgatcaggaagctgctgcagctgtaatggccaggcttgctgtttacagggcagagacataccatgttagagatgttatacggtggcttgacaagatgcttattcgctttactgctaagttcggaaactatgttcctgaagatccatctacatttcggctgtcaacaaacttctccttgtatccgcagttcatgtactacttgcggagatcacagttcattgatgttttcaacagctctcctgatgaaactgctttcttcaggttgatgctgaatagggaaggggttgtggggtctctaatcatgatccagcctactctattccagtactcatttgatgggccacctattcctgtactgttagatgtcagctccatctctcctgatgtcattttactatttgattcatacttctatattgtgattcattatggctcaaagattgctcaatggaggaagcttggctatcataaggacccaaaccatgaaaatttacggaagctccttgaagcaccagaagtagatgcagaggcactattggtagaccgtttccctgtgccaaaactcataaagtgtgatcatcatggtagtcaggccaggttcctgctcgctcgattgaatccatctgtgacacagaaaacacagttttcaaagggatctgaagtcattttcaccgacgatgttagtctgcaagtgtttattgaacacttgcaggagttggctgttcagggctagaaagtcatgaagcttgaccttgtctgctattccactttggtccattagatactgaagatatggctttgagagggaccagacttcatattcacagatgaagcttgcaagttttttattgaacacttgcagtaattggtgtgcaggattaactagttcatgtggaattatttaaatgcaattttctgctcacttgcaaatactggggagctctactgcctggagtgagatctccctgagttgtacattgctcaagctccagtttgatgtaagacaattacattttacccgttttgtatagcatgtggtattatccactggggacgcttgatttcttcagaaatgatttttgtcattccacca

SEQ ID NO: 7535 - DNA, 3502 bp, Zea Mays
ctgctaccccaaatacgttttttcccttcaaaatttaccctttccagttttcttaagtacttttgctgttttctttttttccctctgacctcaaattaccaaattacccttcatgacctgaacgaagtctcagcattatttttccgtcttctcttaagttctcgtgttctgtctctatccatttgtttactcccgatccccatcagccatggcgataaagtgagggttccaggcggccgccgcttcagggagggctcgcggcggagacaggctcggcgctcgcgcggtcggcaggagctcgcagcgggcaagggctggctctcgggcaggaggtgctcgcagcacggtgctggcaggggtggctcgtggcgcaggcaaggagaagctcacgacaggggcggctaagacttcggtgcgggcacagttgcaggttgcagcagccactcgttgaagatgtttccctctgacgtcgacgatgctcactagcaagcttgcaaaaggactttgctgccagggtgaactggggcagcaaccaagaggtgtgttgataggaggttgtacttgtttgctgatgtggtagataaatcggctcaggtgattagtaattctggtctcacagttgttagtcacagtggtgtggaaagtgcagcatatgcatgttcaaatagtcaactagaaagcgcatctaatgtgatatctccaaatgttgatgtaccttttgttgattgggatgctcttgagattgttcctattacagaagagctggttggttctatagttcccgttgttgatgaagacaatttttatgaacacattggtcttcgagccgaggatgagagagtagagaaaggcaaagatagactaccagatgaagttgcatgtgaaggtgcacttgatgttgaaggtgcagccataccttgtactgatacaataccgggtgaggatgctatcttttatgataaggaggaccctccaatgactgttggcagcacatatgcaagcatgaatgagttcagatcagcagtaagacaacatgctataaagggtcagtttgaggtgtggacaaggaaatctgatacatgtaggtttaggggttattgcatagcaacataccgttggatagcagagaagtcaatcccatttttgaagaaggatccaaatatgggcgcaaaaaagttacaagaggagctagaggataaatataatgtgaagctaggatactcaacagtgtgggctggtagacagaaggcggtggaacaaatatttggaacatgggaagaaagttttgcagatttgtataggttcaaggcagagattgacgcaaaaatgcctggaagtgttgtcgatttagaggtgcaggaggaagaggatggtgtgtattttcgcagattcttttgttgtttcaaaccaagcattgatggttttctgaacggttgcagaccgtttttgagcgtagactccacagcgctcaatggcagatggaatgggcagttttctgaaaaggaagagtcacgccaaacaagggcgaccattaggatcagcaagtacttgcacgcccaaaaggcaaaaagttgtgcaaaacgagtcaactaatattagtccggggcctgttacaagaagccaatcggcgttatcaacgattggtgaaggctcaagccaggaaatggccacacccaaaaggcaacaagttgtgacaaatcaatcaactaatattagtcctgtccctgtcacaaggaggcaattggcattatcaatgctcgatgaaagcacaagtcaggaattggccacaccttcgagggcaaccaaatccccttccaagcctacatcaaggattgcaaggaagatcactccaagaaaattcaaaaagtgaatgtttttgtgtctacaaaactatgatattggatgcttttgtaatcttaattaattagaacggaggcatttggatgatattttggcatatgtatggattgttgacattaaacttgttattgtgcttgctgttatgcttctgtatgggattattgacatttggatgacatttgggcttaatatttaaatcaaacttgctattatgcttgaacgtggtgcacatgtgtgcacgttgctacaattttttaatgcatgagtttgtattttctaccatacctattcttctttttttacattttttattcgtaatgtcttttatactttgggcaaactctgattatactttgggcaaactctgatgtggatgaggaggaccaaacggcgcagctctaatgtgcacaagcagaagggtactttggtcatttgaggtcagagggaaaaaagaaaacagcaaaagtacttaagaaagctgaaaagggtaaattttgaagggaaaaacgtatttggggtagcagccgaatggctaacgtactaagggataaagtctgaaaggctaacgtattgaggggcagcagctgaaaattctctatattaggccccgattctgatgaggcccatatgtcccggcacgtaattacgagcacctcccagtccgacctgttcggatacggagcccacgaggccacgaacgaagccctaatcatccgctccaaactccccgcaccggcagagatcagccgtccacgagagcatcacggctagggtttccgatttcaactaggacccctggatctatgattctatgaaccagaggcgagacgagtggccgcagcatcaggaccgtctccaactcgccagtactcagccgccgcaatcagggacagggagctcgagcgcgcgccccacctgcgccgacgcgatgcgggccaaggtatagggacattctgttggctgtcatcgtttcatgctacttcaagttgtttcttttcacaatgatggtttgggagtttccatcatctgttatattcatcgttgaaatgtttgttttctagtcagtgggatgcatatatacattagtaacagtcttgttgttccgcagtttccaaaagcccattgtttcgtggtctgcttactagcgcatgcagcaaaatacttgacccagcgatggatccttggaacgacatgagcctactcgtccacatcatcctcgagcttcaagcacggccctaatcttcggatggactgttctggtgcttctagagacgtttaggtatattgtgccctgattgatgagccttgccatttcctacccagaaaaaaaaccaaattagagttgcttaatgattcaaacaaagctgcttaatcacgcaactgatttaatagtagggctttatataacgagaggggagaccatatgtctctaccaagatacttttcgtgtactcatgttacagtggtttggacttcatgctctaacaatattataaagtaagaccactgcttcacctgttttacatctcccctctcgggacaaaagaaattggattcttgtgtttttgcagataggaattaatttaggctccctttggaacaaaggaaagaatatagaaaacctactgcccctttggaaagt

SEQ ID NO: 7536 - DNA, 3646 bp, Zea Mays
ctgctaccccaaatacgttttttcccttcaaaatttaccctttccagttttcttaagtacttttgctgttttctttttttccctctgacctcaaattaccaaattacccttcatgacctgaacgaagtctcagcattatttttccgtcttctcttaagttctcgtgttctgtctctatccatttgtttactcccgatccccatcagccatggcgataaagtgagggttccaggcggccgccgcttcagggagggctcgcggcggagacaggctcggcgctcgcgcggtcggcaggagctcgcagcgggcaagggctggctctcgggcaggaggtgctcgcagcacggtgctggcaggggtggctcgtggcgcaggcaaggagaagctcacgacaggggcggctaagacttcggtgcgggcacagttgcaggttgcagcagccactcgttgaagatgtttccctctgacgtcgagttactatgaacaattttgatcacttatgtgcttctaccggtagagtgaagaccagaatgacaacataccgttggatagcagagaagtcaatcccatttttgaagaaggatccaaatatgggcgcaaaaaagttacaagaggagctagaggataaatataatgtgaagctaggatactcaacagtgtgggctggtagacagaaggcggtggaacaaatatttggaacatgggaagaaagttttgcagatttgtataggttcaaggcagagattgacgcaaaaatgcctggaagtgttgtcgatttagagaccgtttttgagcgtagactccacagcgctcaatggcagatggaatgggcagttttctgaaaaggaagagtcacgccaaacaagggcgaccattaggatcagcaagtacttgcacgcccaaaaggcaaaaagttgtgcaaaacgagtcaactaatattagtccggggcctgttacaagaagccaatcggcgttatcaacgattggtgaaggctcaagccaggaaatggccacacccaaaaggcaacaagttgtgacaaatcaatcaactaatattagtcctgtccctgtcacaaggaggcaattggcattatcaatgctcgatgaaagcacaagtcaggaattggccacaccttcgagggcaaccaaatccccttccaagcctacatcaaggattgcaaggaagatcactccaagaaaattcaaaaagtgaatgtttttgtgtctacaaaactatgatattggatgcttttgtaatcttaattaattagaacggaggcatttggatgatattttggcatatgtatggattgttgacattaaacttgttattgtgcttgctgttatgcttctgtatgggattattgacatttggatgacatttgggcttaatatttaaatcaaacttgctattatgcttgaacgtggtgcacatgtgtgcacgttgctacaattttttaatgcatgagtttgtattttctaccatacctattcttctttttttacattttttattcgtaatgtcttttatactttgggcaaactctgattatactttgggcaaactctgatgtggatgaggaggaccaaacggcgcagctctaatgtgcacaagcagaagggtactttggtcatttgaggtcagagggaaaaaagaaaacagcaaaagtacttaagaaagctgaaaagggtaaattttgaagggaaaaacgtatttggggtagcagccgaatggctaacgtactaagggataaagtctgaaaggctaacgtattgaggggcagcagctgaaaattctctatattaggccccgattctgatgaggcccatatgtcccggcacgtaattacgagcacctcccagtccgacctgttcggatacggagcccacgaggccacgaacgaagccctaatcatccgctccaaactccccgcaccggcagagatcagccgtccacgagagcatcacggctagggtttccgatttcaactaggacccctggatctatgattctatgaaccagaggcgagacgagtggccgcagcatcaggaccgtctccaactcgccagtactcagccgccgcaatcagggacagggagctcgagcgcgcgccccacctgcgccgacgcgatgcgggccaaggttttcgccgtgggctgtgggtggccagaggcgacaatcccagcgaggtggtggcgttgggcgccgcatccgccttggccgtcttgctggccgccgctgcccctgccgcagggggaaggacgacacggaggagtccaggtacaaggccccgactgcaggtccctggttcaagcccaaacgaaacaaaatactcaaaccaactctcgccgccgccgccgatgacatcggaggagcatccctcgtctacgtcctcggacggcagcacgaccatcggctccgacgaacatcttgattccccgccatcaccttcgacgttcttcgactctcctcctgaatccgatgactccgccgcctcctcgctgctctcggacggctcttcagagtccgagcccatcattttcaagaaaccccgcccacccgtgcgctcgtggccggcctccgacgagatcgcgatcctcgagaccgtcgcgtcgcaccggcagaagcacgggcgacttcccctggcagacgacctcgccgccgcggtgcggggccgcctcagcgcgggggaccgcctcagcgccgcgcagatcaccaggcggctgtgcgcgctccgcaaccgggggaggatagagaagaagacccgtgtgcccgacgcgcgcaatgacccaagagggttcgacgatctggccgagctgtacccttgcctctccgcggaggtggaggcgattggtgcgaggtgcggctacggggcgctgaagagggcattcgggcgcatcggtgacgacacggcggcgcggctggaggcgaagctgaagaggcagcggatggcggagaccagggcgagcggaaagcttgaccggctgaggtcgagagtcgccaaggcgcttcagggatttaacaagtgaaatggtatagggacattctgttggctgtcatcgtttcatgctacttcaagttgtttcttttcacaatgatgttgttccgcagtttccaaaagcccattgtttcgtggtctgcttactagcgcatgcagcaaaatacttgacccagcgatggatccttggaacgacatgagcctactcgtccacatcatcctcgagcttcaagcacggccctaatcttcggatggactgttctggtgcttctagagacgtttaggtatattgtgccctgattgatgagccttgccatttcctacccagaaaaaaaaccaaattagagttgcttaatgattcaaacaaagctgcttaatcacgcaactgatttaatagtagggctttatataacgagaggggagaccatatgtctctaccaagatacttttcgtgtactcatgttacagtggtttggacttcatgctctaacaatattataaagtaagaccactgcttcacctgttttacatctcccctctcgggacaaaagaaattggattcttgtgtttttgcagataggaattaatttaggctccctttggaacaaaggaaagaatatagaaaacctactgcccctttggaaagt

SEQ ID NO: 7537 - DNA, 4308 bp, Zea Mays
ctgctaccccaaatacgttttttcccttcaaaatttaccctttccagttttcttaagtacttttgctgttttctttttttccctctgacctcaaattaccaaattacccttcatgacctgaacgaagtctcagcattatttttccgtcttctcttaagttctcgtgttctgtctctatccatttgtttactcccgatccccatcagccatggcgataaagtgagggttccaggcggccgccgcttcagggagggctcgcggcggagacaggctcggcgctcgcgcggtcggcaggagctcgcagcgggcaagggctggctctcgggcaggaggtgctcgcagcacggtgctggcaggggtggctcgtggcgcaggcaaggagaagctcacgacaggggcggctaagacttcggtgcgggcacagttgcaggttgcagcagccactcgttgaagatgtttccctctgacgtcgaaagagctggttggttctatagttcccgttgttgatgaagacaatttttatgaacacattggtcttcgagccgaggatgagagagtagagaaaggcaaagatagactaccagatgaagttgcatgtgaaggtgcacttgatgttgaaggtgcagccataccttgtactgatacaataccgggtgaggatgctatcttttatgataaggaggaccctccaatgactgttggcagcacatatgcaagcatgaatgagttcagatcagcagtaagacaacatgctataaagggtcagtttgaggtgtggacaaggaaatctgatacatgtaggtttaggggttattgcatagcaacataccgttggatagcagagaagtcaatcccatttttgaagaaggatccaaatatgggcgcaaaaaagttacaagaggagctagaggataaatataatgtgaagctaggatactcaacagtgtgggctggtagacagaaggcggtggaacaaatatttggaacatgggaagaaagttttgcagatttgtataggttcaaggcagagattgacgcaaaaatgcctggaagtgttgtcgatttagaggtgcaggaggaagaggatggtgtgtattttcgcagattcttttgttgtttcaaaccaagcattgatggttttctgaacggttgcagaccgtttttgagcgtagactccacagcgctcaatggcagatggaatgggcagttttctgaaaaggaagagtcacgccaaacaagggcgaccattaggatcagcaagtacttgcacgcccaaaaggcaaaaagttgtgcaaaacgagtcaactaatattagtccggggcctgttacaagaagccaatcggcgttatcaacgattggtgaaggctcaagccaggaaatggccacacccaaaaggcaacaagttgtgacaaatcaatcaactaatattagtcctgtccctgtcacaaggaggcaattggcattatcaatgctcgatgaaagcacaagtcaggaattggccacaccttcgagggcaaccaaatccccttccaagcctacatcaaggattgcaaggaagatcactccaagaaaattcaaaaagtgaatgtttttgtgtctacaaaactatgatattggatgcttttgtaatcttaattaattagaacggaggcatttggatgatattttggcatatgtatggattgttgacattaaacttgttattgtgcttgctgttatgcttctgtatgggattattgacatttggatgacatttgggcttaatatttaaatcaaacttgctattatgcttgaacgtggtgcacatgtgtgcacgttgctacaattttttaatgcatgagtttgtattttctaccatacctattcttctttttttacattttttattcgtaatgtcttttatactttgggcaaactctgattatactttgggcaaactctgatgtggatgaggaggaccaaacggcgcagctctaatgtgcacaagcagaagggtactttggtcatttgaggtcagagggaaaaaagaaaacagcaaaagtacttaagaaagctgaaaagggtaaattttgaagggaaaaacgtatttggggtagcagccgaatggctaacgtactaagggataaagtctgaaaggctaacgtattgaggggcagcagctgaaaattctctatattaggccccgattctgatgaggcccatatgtcccggcacgtaattacgagcacctcccagtccgacctgttcggatacggagcccacgaggccacgaacgaagccctaatcatccgctccaaactccccgcaccggcagagatcagccgtccacgagagcatcacggctagggtttccgatttcaactaggacccctggatctatgattctatgaaccagaggcgagacgagtggccgcagcatcaggaccgtctccaactcgccagtactcagccgccgcaatcagggacagggagctcgagcgcgcgccccacctgcgccgacgcgatgcgggccaaggttcctcttccctcgcctccgctgcgttcttctttccatgatgatgcgatgaaaccgtgtcctaggtagctttgcggagctagtcattttctaggttttcgccgtgggctgtgggtggccagaggcgacaatcccagcgaggtggtggcgttgggcgccgcatccgccttggccgtcttgctggccgccgctgcccctgccgcagggggaaggacgacacggaggagtccaggtacaaggccccgactgcaggtccctggttcaagcccaaacgaaacaaaatactcaaaccaactctcgccgccgccgccgatgacatcggaggagcatccctcgtctacgtcctcggacggcagcacgaccatcggctccgacgaacatcttgattccccgccatcaccttcgacgttcttcgactctcctcctgaatccgatgactccgccgcctcctcgctgctctcggacggctcttcagagtccgagcccatcattttcaagaaaccccgcccacccgtgcgctcgtggccggcctccgacgagatcgcgatcctcgagaccgtcgcgtcgcaccggcagaagcacgggcgacttcccctggcagacgacctcgccgccgcggtgcggggccgcctcagcgcgggggaccgcctcagcgccgcgcagatcaccaggcggctgtgcgcgctccgcaaccggtacgacaacactgttatccgcctcaaacgcggcacgatcccggcgaaggacagcgacgtcaccatctacaggctctccaagctcatctgggagggaacgcgcagggggaggatagagaagaagacccgtgtgcccgacgcgcgcaatgacccaagagggttcgacgatctggccgagctgtacccttgcctctccgcggaggtggaggcgattggtgcgaggtgcggctacggggcgctgaagagggcattcgggcgcatcggtgacgacacggcggcgcggctggaggcgaagctgaagaggcagcggatggcggagaccagggcgagcggaaagcttgaccggctgaggtcgagagtcgccaaggcgcttcagggatttaacaagtgaaatggtatagggacattctgttggctgtcatcgtttcatgctacttcaagttgtttcttttcacaatgatggtttgggagtttccatcatctgttatattcatcgttgaaatgtttgttttctagtcagtgggatgcatatatacattagtaacagtcttgttgttccgcagtttccaaaagcccattgtttcgtggtctgcttactagcgcatgcagcaaaatacttgacccagcgatggatccttggaacgacatgagcctactcgtccacatcatcctcgagcttcaagcacggccctaatcttcggatggactgttctggtgcttctagagacgtttaggtatattgtgccctgattgatgagccttgccatttcctacccagaaaaaaaaccaaattagagttgcttaatgattcaaacaaagctgcttaatcacgcaactgatttaatagtagggctttatataacgagaggggagaccatatgtctctaccaagatacttttcgtgtactcatgttacagtggtttggacttcatgctctaacaatattataaagtaagaccactgcttcacctgttttacatctcccctctcgggacaaaagaaattggattcttgtgtttttgcagataggaattaatttaggctccctttggaacaaaggaaagaatatagaaaacctactgcccctttggaaagt

SEQ ID NO: 7538 - DNA, 1455 bp, Zea Mays
aataccacaggtcgcactccaatggatgtaagtacaactgctcaggagatatctaacactgatgttactgttttggaaggacacagttcagaggtttttgcttgtgcatggagcccatctggttctcttctagcttctgggggactcaactgctagaatctggacaattccagatggtccatgtggttccaacatgcaatcatctcctcctggtgttcatgttttgaaacattttaaaggtcggaccaatgaaaagagtaaggatgtcaccacacttgactggaatggtgaaggtacactgctggctacaggctcctatgatggacaggcaagaatatggagtagagatggagacctgaagcagacattgttcaaacacaagggacccatattttcattgaaatggaataagaaaggagattttctcctaagtggaagtgttgataaaactgctattgtttgggatacaaagacatgggaatgcaaacagcagtttgaatttcattcagctccaacactagatgttgattggagaaataataactcttttgcaacatgttcaaccgataacatgatctatgtttgcaagattggggaacagcgtccggttaaagcattcagtggccatcagagtgaagttaatgctatcaagtgggatccgactggttctcttttggcttcatgttctgatgattggacagcaaagatatggagtatgaagcaagacaaatgtgtatttgatttcaaggagcataccaaggaaatatacactattcggtggagcccaacaggcccaggaacaaacaatcctaatcagcagttgcttttggccagcgcgtcttttgattcaactatcaagctttgggaagtcgagcaaggatgccttctgtacagcttgtctggtcataggcaaccagtgtattctgttgcatttagccccgacggcgaatacttagcgagcgggtccctggatcagtgcctacacatctggtctgtgaaagaaggcaggatcctgaagacgtacagaggtactgggggcatattcgaagtgtgctggaacaaagaaggcagcaagattgctgcctgtttctccaacaacacagtctgcgtgatggatttccggatgtagtccaaccagtagggtggtgcatatcaatcctaacacaaggctagatcataaatccgtcccatgcaaatttgtgaagagcggagttgttagcaaaatgtagatcctaggtggcttcaacttttgtccatgcacatttcgtttttcttggtcatacttaccttagagtagcaatgtagtagtggaaatgccttaacagggtttagtagcatggaaatgttttggtggtaaattaatgaattaatctgagatgtactagtttgtagtttgcacataccgtcgtgtcaatgtcttttatattgaactgctatagcgagcttggctgacca

SEQ ID NO: 7539 - DNA, 5052 bp, Zea Mays
gacaagatcagggaggcagcaagttccagagcaacaaaagcagcctgtgcgatcttatgatgcggagatattttcttggcatgatcaaaaactcttaaaggcttcagcatttttacctaatatggaatccccatttgttccaaattcgtttactgggaagagaaaatcaccagttggtaattcagccatagttcaacctcatgttggatcacgggctgttcatgagtatcagttccttcctgagcaaccaagtgatacatatgagagggcaacccgatctcactactatgacactccagtggaagtttcaaatgctaggataccttctatcacatcaggatcacaacttctccatggatctgaggaggctgcgcctagttatgcttttcaaggtcacacatctggttctagcctgttgcctccgtccagcaggccccaagtgtttccagcagcaccaacagattatgagatgactcagtctaatagcaaccttagttctgttcctgttgaaggacagtttgatatttctcaggttgctgcatttgaaaacccacctgtatcatctgaaataatagcttatcatgatgaagatacttctcgcgtggaaagaaaacgaaaacatagtgaagaagcaaagattgcaaaggaagttgaagctcacgaaagacgaattaggaaggagcttgagaaacaagatatgttgaataaaaagagagaggagcaaaggcgcaaggaaatggagagacttgatcgtgagagaagaaaagaggaggagagattactgcgtgagaggcagcgagaagaagagaggttccaaagagagcaaaggcgcgaacatgagcgcagagaaacaaaggcaaaaggaggaactccgaaaagaaaaagaagcagcaaggcaaaaggctgccaatgaaagggctactgcacgtaggattgcacgggagtatatggaactggtggaagatgagcgtttggaatcaatggaattagctgctcaaaacaaagggttgccctcaatgctgtatcttgacagcgacacattgcagcagcttgattcctttcgaggcatgctaagtcaatttcctcctacaacggtgagaatgaagttgccattttctataaagccttggactggatccgaggataacgttggaaaccttttgatggtgtggaaattcttaattactttcactgatgttctgggtctttgtccagttacacttgatgagtttgttcagtctcttcatgattatgattcaaggttgttgggggaactgcatattgctctgctgagatccattataaaggatattgaggatgttgctagaactccatcaattgcactgggggtgaatccaggaggtggccatccacaaattgttgaaggggcatatgcctggggattcaatatacgtagctggcaacgccatcttaatcttcttacatggcctgagatattaagacagtttgctttatctgctggttttggacctcaattaaagaaaaggaccgtagaagattcttactatcgtaatgataatgagggtcatgatggtgagaatgttatattgacgattcgaaatggtacagcagcagtgaatgctgctgctaagatgaaagaaagaggttacaccaatcgccgtagatcccgccaccgtctcactcctggaactgtaaaatttgccgctttccacgtgctttcgcttgaagggagcaatggtctcacaatattggaagtagcagaaaaaattcagaaatctggattgagagacctcacaacaagcaagacacctgaggcatccatagctgctgccttgtctagggatacaaagctttttgagagaactgctccttcaacatattgtgtgaagtcgccttatagaaaagatccggctgattctgaggctgtgttgtcagcagcgcgtgaaagaattagggcttttcagaatgtgctttctgactctgaagctgaaaaggaggtagatgaagctgagagggatgatgattctgactgcgatgatggtgatgatgaccctgatggtgatgatgtgaatactgaggtggaagacgacaaggatcctcttcttgctgtcaagtcacaagatgaagtaccgagtacaactacagttattggcataaaggccaatttagatggtgtgggtaatgcattgaactcatcaagtagttttactaaatcagcaaaaggcgctcctctcccttctttaggcaggtccaatgcagcagatacttctaatgatttgcctcttggagtctcatcagctaatcatgaagtagtacctgatgattctgaaaatacacaaattgatgaaagcaatcaagccgagccttgggtacgtgcactagcagaaggtgactactgtgaccttagtgttgaagaacgccttaacgcactggttgctcttgttggtgttgccactgaagggaactctattcgtgctgtacttgaggagcgtttggagttagcaaatgccttaaagaagcaaatgtgggcagaagcgcaacttgacaagaggcgtttcaaggaagaatttactagcagagtacaatataactctgacatgggtttgaagcctgatatatatcaagaaaacaacgtgacagagattacttcaactccagcgtgtgatgcttatagagagaatgatgaacatgtcgggacaatcaacaattgtgagatgcttgatcagcataatcagggtaatgctggtagtctaccttatgagagaaatggcgtatgccaggaaatcctcgcaaccccagatacttcgtatgttcagcagtatgcttatgctgataaaaggcgatctcagttgaaatcgtacattggtcaccgggcagagcagctttatgtttacagatccttgcccctaggtcaggatcggcggcgaaacaggtattggcagtttacaacttcagcatcaccaaatgaccctggctcaggaagaatcttttttgaatccaaagatggatattggagagttatcgactcagaggaggcctttgattctttattggctgccctcgatacacgtggcacccgggaggcacagctgcattcaatgttgcaagtgatcgagccaaccttcaaggaagctattaaaagaaatgtgagtatagaattatctgctggaaggtatccaaagaatggagctactgacatgataagggcaaattatcacagtgaggttggaagctcaagcagtactcctagtgctacatctgacagtataacagcatattctgattcttttaaagtagagcttgggcgtaatgattttgagaagacagctatctcaaaaagggcagatatatttttaaaatggatgtggagggaattctacaatcaggaattgacatgtgccatgaaatacggcaagaaaagatgctctgaattgttgcattcgtgtaattgctgctatcagatttacctagcagaagaaaggcactgttcttcttgccataagactttcaaatccatttacaatttttctgatcatacaacacaatgcgaagagaaacagagaacagaacctttctggaacatgcaaaacactgattattctgtcccaataggaatggcatatataccatcagaagcacttcaaccattttggactgatgtgtatcgaaaatcttggagtgtgaagctgtacactaccaaatctattgctgaaatattccagcttttgactgttctggaaggtgcaataagaccagattgcctctcttctgattttgaaacaagtgagtgtctaaactcacaggttggatctgcttctgtccttccatgggttcccgacactacttcagctgttatgctccgaatgttagaccttgactcagctattttgtatgttcaaaatcaaaagatggatagagatgatggaggtttcatgaaatttccgtcaaggtatacagttgctaagagcaaacaagaaacaacacctgaaacagctggtttggatctgtatgatggaaggtggcttcctggtagtggccgtaggggtcgtggacgtggaagtagaggaggtagcaggggaggcagaggtcgaagtcgaggtggaaggatcccaagaggtgttagcagctcatcaaggatcgagttcaagggtggtattgttgcttctgataaagcgccaaggaagaatgtacgccgagggcgtggtcgtggtcgtggtcgtagacgtggacgtcgaactgtgaggcctcggcagccatctgttggcagagccagatcaattccaaaggaaaatttgttgggaagctttagcatgcttagcagctcaaaggctgctaccattgaggagtctccacgaagctctggcgcagacgagtggggcttggagaccagaacgacatacactgaatgtgatgagaacagctctggatcacagtcagaagataacgaggaaaatggccagcccatggatgatgattatgaagatcaagttccagattactcaataggctattctaccggctcgaggcaccatgtaatgatgtccatgatggaccatgatagtgacgaggaggatgaagatgctgaaggtgatgagaatgtggaagaagatgcagaccttgcagttgacgatgccgatgttgagatggacgaagatgatgaaattggtgatgatggagaggatggtggcgttggaggggagatgaatgcggatgaggatccggatgctacttcatattcatccgattacagcgactaagaaagcagaaataagggaaccttatcccagattcctccctcggcatggaatgcatgtagtaccgagtaggcattcccccccgttgtgagccaaaagggagcttagatgcttaggttcgaaggagcgaggaactgttttttaggcaccgcaggttttaatagaatttctgacgcattcgacgaagtgtttggttgtaccgtggtagttgtgttactggggaattccccgagttattatacaatgtgttaagacaaaatactgtcatatcgcatctggttgccatgcgtctaactggttcacggttttaccgtta

SEQ ID NO: 7540 - DNA, 5212 bp, Zea Mays
gtttgttcttactgagggcgagggagggtacttactgggaggtgaaagggatgatattatggcaacgttccagagcaacaaaagcagcctgtgcgatcttatgatgcggagatattttcttggcatgatcaaaaactcttaaaggcttcagcatttttacctaatatggaatccccatttgttccaaattcgtttactgggaagagaaaatcaccagttggtaattcagccatagttcaacctcatgttggatcacgggctgttcatgagtatcagttccttcctgagcaaccaagtgatacatatgagagggcaacccgatctcactactatgacactccagtggaagtttcaaatgctaggataccttctatcacatcaggatcacaacttctccatggatctgaggaggctgcgcctagttatgcttttcaaggtcacacatctggttctagcctgttgcctccgtccagcaggccccaagtgtttccagcagcaccaacagattatgagatgactcagtctaatagcaaccttagttctgttcctgttgaaggacagtttgatatttctcaggttgctgcatttgaaaacccacctgtatcatctgaaataatagcttatcatgatgaagatacttctcgcgtggaaagaaaacgaaaacatagtgaagaagcaaagattgcaaaggaagttgaagctcacgaaagacgaattaggaaggagcttgagaaacaagatatgttgaataaaaagagagaggagcaaaggcgcaaggaaatggagagacttgatcgtgagagaagaaaagaggaggagagattactgcgtgagaggcagcgagaagaagagaggttccaaagagagcaaaggcgcgaacatgagcgtatggagaagtttttgcagaagcaatctagacgagcagagaaacaaaggcaaaaggaggaactccgaaaagaaaaagaagcagcaaggcaaaaggctgccaatgaaagggctactgcacgtaggattgcacgggagtatatggaactggtggaagatgagcgtttggaatcaatggaattagctgctcaaaacaaagggttgccctcaatgctgtatcttgacagcgacacattgcagcagcttgattcctttcgaggcatgctaagtcaatttcctcctacaacggtgagaatgaagttgccattttctataaagccttggactggatccgaggataacgttggaaaccttttgatgtattcatataatttcatctcaggagacattttgctaactggattgcaggtgtggaaattcttaattactttcactgatgttctgggtctttgtccagttacacttgatgagtttgttcagtctcttcatgattatgattcaaggttgttgggggaactgcatattgctctgctgagatccattataaaggatattgaggatgttgctagaactccatcaattgcactgggggtgaatccaggaggtggccatccacaaattgttgaaggggcatatgcctggggattcaatatacgtagctggcaacgccatcttaatcttcttacatggcctgagatattaagacagtttgctttatctgctggttttggacctcaattaaagaaaaggaccgtagaagattcttactatcgtaatgataatgagggtcatgatggtgagaatgttatattgacgattcgaaatggtacagcagcagtgaatgctgctgctaagatgaaagaaagaggttacaccaatcgccgtagatcccgccaccgtctcactcctggaactgtaaaatttgccgctttccacgtgctttcgcttgaagggagcaatggtctcacaatattggaagtagcagaaaaaattcagaaatctggattgagagacctcacaacaagcaagacacctgaggcatccatagctgctgccttgtctagggatacaaagctttttgagagaactgctccttcaacatattgtgtgaagtcgccttatagaaaagatccggctgattctgaggctgtgttgtcagcagcgcgtgaaagaattagggcttttcagaatgtgctttctgactctgaagctgaaaaggaggtagatgaagctgagagggatgatgattctgactgcgatgatggtgatgatgaccctgatggtgatgatgtgaatactgaggtggaagacgacaaggatcctcttcttgctgtcaagtcacaagatgaagtaccgagtacaactacagttattggcataaaggccaatttagatggtgtgggtaatgcattgaactcatcaagtagttttactaaatcagcaaaaggcgctcctctcccttctttaggcaggtccaatgcagcagatacttctaatgatttgcctcttggagtctcatcagctaatcatgaagtagtacctgatgattctgaaaatacacaaattgatgaaagcaatcaagccgagccttgggtacgtgcactagcagaaggtgactactgtgaccttagtgttgaagaacgccttaacgcactggttgctcttgttggtgttgccactgaagggaactctattcgtgctgtacttgaggagcgtttggagttagcaaatgccttaaagaagcaaatgtgggcagaagcgcaacttgacaagaggcgtttcaaggaagaatttactagcagagtacaatataactctgacatgggtttgaagcctgatatatatcaagaaaacaacgtgacagagattacttcaactccagcgtgtgatgcttatagagagaatgatgaacatgtcgggacaatcaacaattgtgagatgcttgatcagcataatcagggtaatgctggtagtctaccttatgagagaaatggcgtatgccaggaaatcctcgcaaccccagatacttcgtatgttcagcagtatgcttatgctgataaaaggcgatctcagttgaaatcgtacattggtcaccgggcagagcagctttatgtttacagatccttgcccctaggtcaggatcggcggcgaaacaggtattggcagtttacaacttcagcatcaccaaatgaccctggctcaggaagaatcttttttgaatccaaagatggatattggagagttatcgactcagaggaggcctttgattctttattggctgccctcgatacacgtggcacccgggaggcacagctgcattcaatgttgcaagtgatcgagccaaccttcaaggaagctattaaaagaaatgtgagtatagaattatctgctggaaggtatccaaagaatggagctactgacatgataagggcaaattatcacagtgaggttggaagctcaagcagtactcctagtgctacatctgacagtataacagcatattctgattcttttaaagtagagcttgggcgtaatgattttgagaagacagctatctcaaaaagggcagatatatttttaaaatggatgtggagggaattctacaatcaggaattgacatgtgccatgaaatacggcaagaaaagatgctctgaattgttgcattcgtgtaattgctgctatcagatttacctagcagaagaaaggcactgttcttcttgccataagactttcaaatccatttacaatttttctgatcatacaacacaatgcgaagagaaacagagaacagaacctttctggaacatgcaaaacactgattattctgtcccaataggaatggtattactcaagcttcagttagtttcgattgaggcatatataccatcagaagcacttcaaccattttggactgatgtgtatcgaaaatcttggagtgtgaagctgtacactaccaaatctattgctgaaatattccagcttttgactgttctggaaggtgcaataagaccagattgcctctcttctgattttgaaacaagtgagtgtctaaactcacaggttggatctgcttctgtccttccatgggttcccgacactacttcagctgttatgctccgaatgttagaccttgactcagctattttgtatgttcaaaatcaaaagatggatagagatgatggaggtttcatgaaatttccgtcaaggtatacagttgctaagagcaaacaagaaacaacacctgaaacagctggtttggatctgtatgatggaaggtggcttcctggtagtggccgtaggggtcgtggacgtggaagtagaggaggtagcaggggaggcagaggtcgaagtcgaggtggaaggatcccaagaggtgttagcagctcatcaaggatcgagttcaagggtggtattgttgcttctgataaagcgccaaggaagaatgtacgccgagggcgtggtcgtggtcgtggtcgtagacgtggacgtcgaactgtgaggcctcggcagccatctgttggcagagccagatcaattccaaaggaaaatttgttgggaagctttagcatgcttagcagctcaaaggctgctaccattgaggagtctccacgaagctctggcgcagacgagtggggcttggagaccagaacgacatacactgaatgtgatgagaacagctctggatcacagtcagaagataacgaggaaaatggccagcccatggatgatgattatgaagatcaagttccagattactcaataggctattctaccggctcgaggcaccatgtaatgatgtccatgatggaccatgatagtgacgaggaggatgaagatgctgaaggtgatgagaatgtggaagaagatgcagaccttgcagttgacgatgccgatgttgagatggacgaagatgatgaaattggtgatgatggagaggatggtggcgttggaggggagatgaatgcggatgaggatccggatgctacttcatattcatccgattacagcgactaagaaagcagaaataagggaaccttatcccagattcctccctcggcatggaatgcatgtagtaccgagtaggcattcccccccgttgtgagccaaaagggagcttagatgcttaggttcgaaggagcgaggaactgttttttaggcaccgcaggttttaatagaatttctgacgcattcgacgaagtgtttggttgtaccgtggtagttgtgttactggggaattccccgagttattatacaatgtgttaagacaaaatactgtcatatcgcatctggttgccatgcgtctaactggttcacggttttaccgtta

SEQ ID NO: 7541 - DNA, 1388 bp, Zea Mays
aagccgccgccgccaccaccgcctcacccaagctttcatttgtcatgctggttgcccccgccttatcgtgtaatgccatgttgcccccgcatcatcatctaagatttcgtttgtcgtccgcgctgcagtctgcttcccgtttcactcttatatttttttgttggacggagttgttttgcatcgtttcgatctgtaccgtactgtttcccctcttgttcataacggcggcgacacaaattcttgcgtgctgcgccgctcacgcaaggagggataaatcgactcgtcaagaaatcgtttcagttgccatgactccagtaggcaatatgattgttgcttgactacagttttgtcttccactacttagcttatttgtttgttttattcttacctcgcccgtattttctttgttttattcttacctcgctcccgattttaagatctaatttggtatctgcacggtgcttaccccgggcttgtcggatgtacttgaagaaggaagccccaatgtctgtgctagatccactatgccattcagtgttgcaggccctgatgaattttgtgattggtctgtgtcaaagcaatggatacaaattttcgtaatagaccatttctttattatgtttggtttgatgattcgtttgattgattgatggcagtgatttgacattacccgcgcttctgatctaacccgtgaagcaaagggaaaattaatggttgaatttcttaatatgagccatctagtgatctttcagctgtctccttttattttgtgcgtgagctcatttcattcatgtggttgatttggcggtgatgatacaaccattcagcttacaacgccagttctgcttctgataagtcatgacagataaagctgattcatatctgagccttgatttgtgtcatgttctgacaaactcataattaggatcatgcattttttcttgctccaaaccttacatcccgttggccactgaagtcaacccaatgtttcgaggctacaatcggctccaactacatgcttgtcaggcggtatcataaactgattttttgtggttcagttagacgagagcgatgaagagcaacttttgtgaactagagtttcagatgctaccatggtgacttttttctgggatggagctcatatttgcagatatggcacatatgataatgatcagagtggtttctgaacatacgaagtagccgcccaagagctttcaacctgccaagtttcagagctagtgctgttacatcgttggcaatgccacaacattttttcacatacatttatttcccaatgcgttgtccttaatgccatgtccttatgtagcagttcatgaacaagattggaaggatataagcactcaacgaccttcgtcgacagagctgaa

SEQ ID NO: 7542 - DNA, 2225 bp, Zea Mays
cagttctgtctgagtcctgatcctgactcccgaggctctcctccaaaaccccctccttaaaccctagcttccgtacgcctccgcgctcccccatggcctcctcgtcgcaatcgggcggcgccggaggcggcgggacggttgcttccaatccccgcgtctggattgtcgcgagcatcgccgtcgcgggcgtcctcgtcctcgcggaggtcgcgcgccgccgccgccggtggctgcggggcatgtccggcacggcacccgacgctggatccttctgcgaccgctttgagcttcaccctccggcgcagccgcctcctcccgcggctcgccacattctctcgggtctgaccttcgccgctagtgacaacttcgagatcgagggctacgtagccgggtttgggaacccagactggaagaaaactcatgagacggcgaggcacactgctgtggctgtcacaatgctgcggaaacagggggccacctgcgttggaaggacaatcatggatgaactaggctttggtgtcactggagaaaatttgcaccatggaacaccagccaaccctgtttcttcttcactcgtccctggtggatcatgcagtggctctgctgtggcagttgctgcacaacttattgactttgcaattggcactgatacaattggtgatgtaagaatcccagcttctttctgtggtttactttgttttaggccttcctatggtgttatatctactcttgggaccatagcaaattcacaaagtctcgacacaatcggatggtttgcacgagatccatgtattcttcatcgtgttggtgaagttcttttaccagccgctgtaggtggacttaagcaaacaaggcaatttgtttttgccgatgactgctttcagctgctaaaggtctctaatcagaaaactgtgcatgccataaaaaatgctgtccaggcattacgtggatatcagccacctaaacacatcaatattggccaatatatttattccaatgtacctagcctgaaggagttttgcgaaccagctacaaagttagaagaaggaacatcagccctgaaagcaatctccacagtgatgttgttattacagagatatgagtttaaagcaaaccacgaggagtgggttaacactgttaaacctaagcttggccttgatatctctactcgtgtgctacaagccgtgaattttgcacgggaaaacatcaaatctttgtacgcaataagaaatgaattgcgggttgcactcaagaatcttctaaaggatactggaattttagttctaccaaccacagctggatatcctctgaagagaaactctaaagaaagactatcatctggatttgaggatagaatgtacaaatttgtaggcgttgctgcactttctggatgttgtgaggtcactattcccatggaaaatctggatcatcatgtatctctttcatttgtagcagcacatggatcagacaagtttctactccgtaatatcttggatacatattctctcatccaggaccaagtagttttggcatccaagttggaaactgcaccagtaaccaatgttgatgttgatgtcaatgcatcagagcttctaaaagaaaagggaaatagcgctttcaaaagaagacagtggatcaaggcaattgagttttactcagaggccatcagtttgagtgacacaaatgcaacatattactgcaacagagcagcagcttatctggaactgggccgttttaagcaggccgaagcagattgtgaccgggccttactgttggatagaaagatttcaggcatgctttggcattggagccacagaataaaacagctcttgcagcggaaaggaggctgcagaaactcctgaagtgatgtggggagcagcagcacatccgacttgtaaattattttgaagacttgcctggttgaaggcaattttgatcggcagcatgtgaaaggaagatgcgatctgctggataagagtcattaaactattttttgtttgccatcattcgaaaatttgtatctcacgacgattgtcagcaagttttgatatagcttcttgctatgaccgtctattaagggaaaatcttgtatatgcattgtatactacttcgatctgaaggccgagaacgcgagaacccatgcgagcgcttggctctgctggagtgtatgattgtgtagtgcaggatctaatttgggaggcgttgagacgccccttattctccta

SEQ ID NO: 7543 - DNA, 2489 bp, Zea Mays
aaaatccagagaaccaaaagttgaagcggaactgcagttctgtctgagtcctgatcctgactcccgaggctctcctccaaaaccccctccttaaaccctagcttccgtacgcctccgcgctcccccatggcctcctcgtcgcaatcgggcggcgccggaggcggcgggacggttgcttccaatccccgcgtctggattgtcgcgagcatcgccgtcgcgggcgtcctcgtcctcgcggaggtcgcgcgccgccgccgccggtggctgcggggcatgtccggcacggcacccgacgctggatccttctgcgaccgctttgagcttcaccctccggcgcagccgcctcctcccgcggctcgccacattctctcggcttcgagatcgagggctacgtagccgggtttgggaacccagactggaagaaaactcatgagacggcgaggcacactgctgtggctgtcacaatgctgcggaaacagggggccacctgcgttggaaggacaatcatggatgaactaggctttggtgtcactggagaaaatttgcaccatggaacaccagccaaccctgtttcttcttcactcgtccctggtggatcatgcagtggctctgctgtggcagttgctgcacaacttattgactttgcaattggcactgatacaattggtgatgtaagaatcccagcttctttctgtggtttactttgttttaggccttcctatggtgttatatctactcttgggaccatagcaaattcacaaagtctcgacacaatcggatggtttgcacgagatccatgtattcttcatcgtgttggtgaagttcttttaccagccgctgtaggtggacttaagcaaacaaggcaatttgtttttgccgatgactgctttcagctgctaaaggtctctaatcagaaaactgtgcatgccataaaaaatgctgtccaggcattacgtggatatcagccacctaaacacatcaatattggccaatatatttattccaatgtacctagcctgaaggagttttgcgaaccagctacaaagttagaagaaggaacatcagccctgaaagcaatctccacagtgatgttgttattacagagatatgagtttaaagcaaaccacgaggagtgggttaacactgttaaacctaagcttggccttgatatctctactcgtgtgctacaagccgtgaattttgcacgggaaaacatcaaatctttgtacgcaataagaaatgaattgcgggttgcactcaagaatcttctaaaggatactggaattttagttctaccaaccacagctggatatcctctgaagagaaactctaaagaaagactatcatctggatttgaggatagaatgtacaaatttgtaggcgttgctgcactttctggatgttgtgaggtcactattcccatggaaaatctggatcatcatgtatctctttcatttgtagcagcacatggatcagacaagtttctactccgtaatatcttggatacatattctctcatccaggaccaagtagttttggcatccaagttggaaactgcaccagtaaccaatgttgatgttgatgtcaatgcatcagagcttctaaaagaaaagggaaatagcgctttcaaaagaagacagtggatcaaggcaattgagttttactcagaggccatcagtttgagtgacacaaatgcaacatattactgcaacagagcagcagcttatctggaactgggccgttttaagcaggccgaagcagattgtgaccgggccttactgttggatagaaaggtaatagatttttgtagatgcaatattcctgtgctgctacgggtgacatgtctgaagcattgtctaccctaagagaggagttccaaaggtttattggatagtcctggatggttctgacatcattaccatcttgtgctgttatggcaacatcaaatccttactgtgaataccgtttgttgcttcagaatgttaaagcatatctacggcgtggttttgcaagggaagtaactttgaattacaaagaagcacttcaagatttcaggcatgctttggcattggagccacagaataaaacagctcttgcagcggaaaggaggctgcagaaactcctgaagtgatgtggggagcagcagcacatccgacttgtaaattattttgaagacttgcctggttgaaggcaattttgatcggcagcatgtgaaaggaagatgcgatctgctggataagagtcattaaactattttttgtttgccatcattcgaaaatttgtatctcacgacgattgtcagcaagttttgatatagcttcttgctatgaccgtctattaagggaaaatcttgtatatgcattgtatactacttcgatctgaaggccgagaacgcgagaacccatgcgagcgcttggctctgctggagtgtatgattgtgtagtgcaggatctaatttgggaggcgttgagacgccccttattctccta

SEQ ID NO: 7544 - DNA, 3063 bp, Zea Mays
gacagcctacaacccagcaggcgccacgagccttacccccttgctctctccacccacccctccccatcaaacggtgctgggcgtcctaggttgcctcgcccttcacccgtcgtgagtttgacactctccctcccggacctctcgtccctgccgttgcccctgctggcccaccttgccctggggcacgaccaccgactcactttgccgccgatccatacgccggttcatgtccgaccaacgaccgctaccctcctcggatcccgtccaccgccctccccgcatcctggccggccgctgctctcccgccgcaggctcccgttcggcggcccgcgctccccgcgaacggcggctggcagcaagccgctggcggcgcacgacatctccacgtccatgtggcacgacacacgtctctgggacgtgctgctccgatgcggtatcaagggtgccgcggacagcgtcaccaacgtgtgatttgtggcgccgaggacctccccggtggggtcgacgacaactgcaagtacgacaccagcctgcaacgcatctcggatctcggattttttgccaccaatcagcaagagcggcaggagggagcagagctggagatggggcggtgctggtgctgctgccggtgcctaaagctgctctgcttggttctcctcccaccgatcagcttgtgcctcggccgcagctgctgctccaatctgtccccattctcatcgtcgaagatctgctctgtcttctatggtgcctagagtcagccttcagggagagaccgctcccgcaggccaagaagtcgtggggctccgagattgccagtagcggtggccggagctcctccgatgtttccacaccatatgctacaacgttttgtgcttccacgccggatgccacaatagacaagctgaggaagaaaggttaaaattgttgagacaaaggatatatgtaccatatcactgctcctctatcaagcatcgggttctcattctgtatatagttttaccattattacatccattttccttatcaaatgaatatccattttatccctaggaagaatgggataaatgttattaattaggtacgtgatattcgtgaaaggcactgtgactttactatatgaatatgctcaaatcactttaacataaaactctttatataacagatggtaacagaactgttacttatatttcctccaaccattctagacgatttaccctacaatctttcagttccttcattaatacttttcttttcaattcatgcctgatttcctatacaacacacaaatgactatatgtactaaggatagaaataaaactgctacttatgttttatagctccacctagtttagaatcatagattttcctccctgtgcaagcattatattattgtttttttggattggttaactaacagttctcgatgagtatttgctgcaaccactgttgttctttttcctttttaatctattcaaggattgctagtggccgaagggcactgccaccttcttttgcttttacgtgatgcaaggccattgttatgtattccatgtttattattacttcgaacatggctagaatacaatggttcagcatcagcttaatccatggaaggtatggggttggattgtcctcagctgtttattaatcctgtagcacgtcatttactgactattgtgtttaaatggggaaggatgatggagatacaataagcacgaaagtcattattaattttagccttggcgctatatgtttgttagccgaggttacattgttcttcttttggaatagacaaaaaaatgagagccttcactgttgtttatttagtagaggttgagatcgtatttcaaattattaagaacactactgttttagattctttcaaatattcatacgtttgaaaaaactcgcattctccatgattttttggtcatagagaatgtaataaaattttggtaaatagcattgatactcacatactatattattttcctttgtgttgaggattaatgcaaccacagtgttgtggtttgaacactaatcgagaaggcctctttactgttgtctagatctgttataattttcatttacatgcttccatacactttaatattagtaatacaattgtagttagcagattaaaaacttagttaaacatatgtgtactcacgtatttattgtttttctgtacatcaaggattcccatggacatgtggttgtccattgcacatatattgataggaatgttcagctcctttttaggtaagttctaagcactacctctttcagtgacaacatgtacactcatgtatttatattgcgatgttgcttgctttcgaccattgtgacacggacacaccgccaccaatatttttatctaacacgattaagaagtaggaatgcaatgttcttttagcatttttcctttggtttggaggggacccaagaaatgctacatgctttatttgcttctaatgaaaatgattgatctgtcatcggttccaagtgatagatctgtcggctaatcgtctcaaggagaaggatccatccctgattctgtacctgcacttaaaagcgcacaatgtcgaaagagaacttgacatcagatgcaatttctctgtcttagaaaatatgcctcaaactttctgacataaaatattccttaacatatttaacatatagtctaattggtaggtcctcctaatggatacaagagagtcacggtaagctcagaaacatattttgaattaacgtagattggctttgagaggtaaaaaaatatggacctcatgtagataaaatagatacatttattctattatggctatgaaatgacctaagtgatgagtaaaatatgcaggtccaccacatatatatcaatggaaatgcaatgtagatatttaagtagtgagtacataaagcgcttaaaggtgccgttgctcaagttgcagccggaggttgcagctacacaggacacaaattcagcacaatgaggttgaatcggtttccatcacctgcaaactctgtggacatcgcgaagggcacgtctgcactagaatcgga

SEQ ID NO: 7545 - DNA, 1517 bp, Zea Mays
attcatatcctccccgcggcgcgcggccgcgccagcaccacccagcaaccagatgcgcagccgacccgccagtatggcagcggggcccaccccatccgccgcggcggcgtcgttgcggccgccgccgccgtgtttcgactaccgggcggccgtgctcgccgacacgcgcgccgccgccgcagggaaccctgcgctggcggggctgatcgagtccggtgcgctcgtgcgcgtcccgcggcggcggttcggcccggtcccggcgtggcgcccgccagacttcgtggagcctgaggatgtgtggatcctcggcacctcgcacctctcccgggactccgtcgccgacgtggagcgcgtcctccgcgccgtccaacccgacaatgtcgtcgtcgagctctgccggagcagagccctcacttcagagctggaatcatgtacgcgtccagtgattcttccgacgagccgcttttgaagtccaacatgttctctctcggtggctccaagttcttcggcgcagtcagtagaagcatcaacctgggtgggcagagcgctcttgctctgcgtctgctcctcgctgttttttcgtctaaaattgcttccagtgcgaaccggccgtttggagaagagttccgggcagctaggagggtgtctgaagatattggagctcagcttgttcttggggatcgccccattgaaataactcttgaacgagcatggaaatcccttacatgggatcaaaaggcaaagctactaatctcactgttccgcggaattacttctaagactcacacgccgcaggatgagaaagccgccgtcagcccatacgagttgtacgagaaactgagcacatcttaccctgcactgttgcagcctctcatacatgagcgcgacatgttcctcgcatggtcgctgaagaggagcaaggctgtgaacaagagcagaactgtcgtcggagttgtagggaaggggcacatcaatggcatcgtgtacgcgctgatctctgaccagggggatctgaggttccgagaccttgttggtagagcatcatctgatacatgggtcagctcactcgtcaagggcctggtaagggacactgtaattggtctggtcctttgggctctgtatgaacagctgcaggctgtgctgtagagtagatggttcagacttccacaaggcacacaaactcggtactgttctcaacttcttacaagctgaaacagtggaactgaaatccgataccagcggaaatctaaaacttgttcgaagtgcctgtacatgaacttgatactgtccctgttcttcacaaggttgattacttgattaaagtacctgtacatgaactgtcaactgctgttttatcttctgaatacatctacattggacaacaaaacactacctgtatttttctacttttttgccatttcatatttgggtaaagcaaaaaaaaaagatgcattatgtgtagcacactttatatttgtatatatatgccgggcgaaaagcaatagattttgagaaaa

SEQ ID NO: 7546 - DNA, 2698 bp, Zea Mays
gcagcgaagcaggcctccttcttcacaagcgcttctgctaacaggcatcgtcgcatctctgtatttctgaaaccagccgtcgtacgtccatcccaccgggagcaccggcgacgatgccgccgcgaacggtgtccgatgggggagacgacaacggcaccgacgttgctagccgaacgtcgtcgcaccgccgcacggagcacgggcatgggtacaaagtcggcgtcccaccggagaagaacctcctcgccgagatctctgacgcggtgaaggagacgttcttcgccgacgacccgctgcggcagtacaaggaccagcccaggtccaagaagatctggctcggcctgcagcacatcttcccggtgctcgactggagcaggcattactccctcggcaagttcaagggtgacttcatcgctgggctcaccattgccagcctctgcataccccaggacatcgggtattctaagcttgctaacttgccagcagaggtgggactatacagtagcttcgtgccgcctctgatatacgcagtgatgggcagctccagggacatagccatcggcccagtggccgtggtgtcgctgctgctcggtactctccttcagaatgagatcgaccccaagacacacccgctcgagtacaggcgcctagccttcacagcaacctttttcgcaggggtcactcaggcagcgctcggattcttcaggctagggtttatcatagagttcttgtctcatgctgccattgtcggattcatggccggcgctgccatcaccattgcgcttcagcagctgaaaggattccttggaattgcaaacttcaccaagaaatccgatattgtatctgttatgaaatcagtttggggaaatgttcaccatgggtggaattggcagacaatactgataggagcgaccttcctggcattccttctggttgccaagtacattgggaaaaggaataaaaagctcttctgggtgtccgcaatcgcacctctcacttcggtgatcatatccacattttttgtgtacatcactcgtgcagataagcatggcgttgcaattgtcaagaacataaggaaaggcatcaacccaccttcagctagtctaatatacttcaccggcccatacttggcgacaggattcaaaattgggatagtagctggaatgataggcctaacggaagcgattgcaattggaagaacatttgcagccctcaaggattaccagatagatgggaacaaagaaatgatggctctagggaccatgaacattgttggttcactgacttcttgctacgtagccacaggttctttctcgcggtcagcagttaattacatggctggctgcaaaacagcagtgtcaaacgttgttatgtcaattgtcgtaatgcttactttgctactgatcaccccattgttcaagtacactccaaatgccatcctttcctcgatcatcatatcagcagtgcttggtttaattgactatgaatcggcttaccttatctggaaagttgacaaactggactttctagcatgcatgggagcattttttggagtcatattttcatcggtggagtatggcttgctcattgcggttgcaatatctcttgctaaaattcttctccaagtaacacggccaagaacagttttacttggaaaccttccacgaacaactatatacaggaatgtagaacagtatcctgatgctaccaaggttccaggggtgctgattgttagagtggactcagctatatacttcacaaactctaactatgttaaagagagaatcctgaggtggctaagagatgaggaggagcaacaacaggaccagaagttaacaaaaactgagtttctaattgttgacctgtctcctgtaattgatatcgacacaagtggaatccatgctttggaggagttggcgaaagctcttgaaaaacgcaaaattcagctggttcttaccaatcccgggccggcggtgatccagaagctccgctcagcgaaattcacggacatgattggtgaagacaagatattcctcacggtcggcgacgctgtgaagaaatttgctcctaagatggtcgataatgtctgatggagtttctgggtcatgtacagtacgagcaagaagtctatctattatgtggcaaagttcagtggcaattatggatttatagagcagaaacagaacagaacgggagtaaataacatggttcgcggaatggtaaataaagaagatgctccggagttggagtgcatcacgtttgcgaggtgtggttggatagaaaacagttggtggcctagttgggcgtctatgtcagtccttgtggttgtggagtctgttccgcgttggcaagcactcagtgatggagatcaaatgcttcatggatcagcagatatgggtgcctgatgattaacatatcatcattgatcgtgaaagaagagttacctcgttggggtttcaggctttgtgtatatcttacagtacttagctcctttccttgtagtttaagttgttatgatgagcttttacatttggcttatatatgtatattctgtaacgttgatgcattgttaagtgttcctgaccccaaaaaaagggggtgcaaaaacgtgattgtgaagtgtgaggaatttgcttttatcgttcctactggcatgcatgtgcaagatgtattgggcactcatatctgctgatccatc

SEQ ID NO: 7547 - DNA, 2759 bp, Zea Mays
gtttgaccttcatctctggctggagagccttcttgcatatgcataaatgggcagtccctggccagcttcatcacgacgcagcgaagcaggcctccttcttcacaagcgcttctgctaacaggtatttctgaaaccagccgtcgtacgtccatcccaccgggagcaccggcgacgatgccgccgcgaacggtgtccgatgggggagacgacaacggcaccgacgttgctagccgaacgtcgtcgcaccgccgcacggagcacgggcatgggtacaaagtcggcgtcccaccggagaagaacctcctcgccgagatctctgacgcggtgaaggagacgttcttcgccgacgacccgctgcggcagtacaaggaccagcccaggtccaagaagatctggctcggcctgcagcacatcttcccggtgctcgactggagcaggcattactccctcggcaagttcaagggtgacttcatcgctgggctcaccattgccagcctctgcataccccaggacatcgggtattctaagcttgctaacttgccagcagaggtgggactatacagtagcttcgtgccgcctctgatatacgcagtgatgggcagctccagggacatagccatcggcccagtggccgtggtgtcgctgctgctcggtactctccttcagaatgagatcgaccccaagacacacccgctcgagtacaggcgcctagccttcacagcaacctttttcgcaggggtcactcaggcagcgctcggattcttcaggctagggtttatcatagagttcttgtctcatgctgccattgtcggattcatggccggcgctgccatcaccattgcgcttcagcagctgaaaggattccttggaattgcaaacttcaccaagaaatccgatattgtatctgttatgaaatcagtttggggaaatgttcaccatgggtggaattggcagacaatactgataggagcgaccttcctggcattccttctggttgccaagtacattgggaaaaggaataaaaagctcttctgggtgtccgcaatcgcacctctcacttcggtgatcatatccacattttttgtgtacatcactcgtgcagataagcatggcgttgcaattgtcaagaacataaggaaaggcatcaacccaccttcagctagtctaatatacttcaccggcccatacttggcgacaggattcaaaattgggatagtagctggaatgataggcctaacggaagcgattgcaattggaagaacatttgcagccctcaaggattaccagatagatgggaacaaagaaatgatggctctagggaccatgaacattgttggttcactgacttcttgctacgtagccacaggttctttctcgcggtcagcagttaattacatggctggctgcaaaacagcagtgtcaaacgttgttatgtcaattgtcgtaatgcttactttgctactgatcaccccattgttcaagtacactccaaatgccatcctttcctcgatcatcatatcagcagtgcttggtttaattgactatgaatcggcttaccttatctggaaagttgacaaactggactttctagcatgcatgggagcattttttggagtcatattttcatcggtggagtatggcttgctcattgcggttgcaatatctcttgctaaaattcttctccaagtaacacggccaagaacagttttacttggaaaccttccacgaacaactatatacaggaatgtagaacagtatcctgatgctaccaaggttccaggggtgctgattgttagagtggactcagctatatacttcacaaactctaactatgttaaagagagaatcctgaggtggctaagagatgaggaggagcaacaacaggaccagaagttaacaaaaactgagtttctaattgttgacctgtctcctgtaattgatatcgacacaagtggaatccatgctttggaggagttggcgaaagctcttgaaaaacgcaaaattcagctggttcttaccaatcccgggccggcggtgatccagaagctccgctcagcgaaattcacggacatgattggtgaagacaagatattcctcacggtcggcgacgctgtgaagaaatttgctcctaagatggtcgataatgtctgatggagtttctgggtcatgtacagtacgagcaagaagtctatctattatgtggcaaagttcagtggcaattatggatttatagagcagaaacagaacagaacgggagtaaataacatggttcgcggaatggtaaataaagaagatgctccggagttggagtgcatcacgtttgcgaggtgtggttggatagaaaacagttggtggcctagttgggcgtctatgtcagtccttgtggttgtggagtctgttccgcgttggcaagcactcagtgatggagatcaaatgcttcatggatcagcagatatgggtgcctgatgattaacatatcatcattgatcgtgaaagaagagttacctcgttggggtttcaggctttgtgtatatcttacagtacttagctcctttccttgtagtttaagttgttatgatgagcttttacatttggcttatatatgtatattctgtaacgttgatgcattgttaagtgttcctgaccccaaaaaaagggggtgcaaaaacgtgattgtgaagtgtgaggaatttgcttttatcgttcctactggcatgcatgtgcaagatgtattgggcactcatatctgctgatccatc

SEQ ID NO: 7548 - DNA, 691 bp, Zea Mays
acacacttgttcgtgccgaagcagcatgttaatcaggttgcacttgcatctgggaataaaaggaacattgaaaaagtcagaaatgctcaatttagtgttaatttgcccaatgttgtaactgtggatccgatgggtatggcactgaatgaagacaagttgcatcttaccaccgagtcacaagtaaaacttggcaaaatgctggcagaagcgtacattttgaacttctctacatcaacttgttaggtgaatacaagtgtctcaagatcttcaatccacaacaagtatatttgataaggtcgcctagtgacaagattactatgtgctcaagcacttaatcaatcgaagacattgtatctatcttatgtccgagaatacgctaaagtgcctcaattcttgtatagcatttcaaactcgcttcataacatttctttcatattgtaataatggttgcagcctatgttttctggtcgctcgactagctagtcgaacttagggaacgaccagatgactaatctcgattagtcgccgactaggtcgactaatcgacctctggttgacctggttgtcgtcctgttcattcaggtcattcaggacgtatatactatatagtatatgattatataactatatatgaatgatagggtaaacatgacatgaattctgcaatattgaatattgatttaagaaactg

SEQ ID NO: 7549 - DNA, 2744 bp, Zea Mays
atctgctgccgactcttacgactagcgtcctgcgcgctgcggcggatctgcaggcgtcactattgcatccgcgaaaatttctcttcttgggaaaaaaatgcttgactgattccaaagaccgacaaatcaaccaatcggctgcttctgggtttggagagcaccggctggtgaagctcgatcgaggggaggaaataaagctgctccgtgctcgccttggctggagaaagccagtccttgtggccgtttgccggcgttgaggaggttaagcctgacaccgaggtgtgcacggtgctcagcagtgatacccttccacagaccccgcatagtgcgggaagcctacggcactgggtacgccctacaggtgctcagcagtgtggtaaatgtgctttggtatatacaccagaacttgcagtgaataagattatgattggaaatctcatacactgccatgataaggtaaaacatgaagctggcatcaatggcaatattaagatttttacagaagatgagattaaaagaattaccaacaactttaacactcttatcggaaaaggtggctttggagaagtttataggggaacccttgatgatgacaatgagcctgtagctgtgaagaaatatatcaatgaagatttgagagaagtgtttatggaagaagtacgcatccatagtaaaattagccacaagaatgtggtgaagctaataggctattgcattgggaaaagtactctcatgatcgtaatggagtatatgtccacaggaaatctcaatgacatactccactgcactgaaatttcgatccctttggatgtaagattgggtattgctatagggtgtgcagaggcattgagctacatgcattcaatgcatttatcatctggcaaccttatctgtcatggtgatgttaagcctgccaacatacttctaaatgacaatttgacagcaaaaataaccgattttggggtttcaaggcttctggttggtggcatcactcagtacacgacaagtgtaaaaggaagtatagattacatggatcctatatatattcaagaaggccgtcttactccaaggagtgatgtttatagctttggattagttctctgtgaactaatatctagaaaaaggataagaaaaggtgacattaacctcattttatatgtcaataaaggctccgcaagtggtaaagggtttagagaaatgtctgatgctgcaattgcaaatgaggacaatatgaagattctcaaagaaatgaagaaattggcaactgaatgtgtatcactgagcatttataggcgtcctcagatgactgatgtggtcagacgccttcggatgctgagaaaagaattaaaggagagacatgaatattattcagagtcaattttggcatcacaccattcatggcgcaaaaacaacaagcaagagataatcatgcccacctataattctaagatgcagatcaagaagagtctgggctttttcaagaggagccttagtaactctaagatccaatcggaacccagcgatgtgaggattttcacacaggaggagctaaaagaagtcacgaataactactcttatctaatcagtggaggtacttcaggtaaagtttacagaggaacactcgaggacaatacggtggtagcggtgagaatattttctgaagtactcgagggctttgaagaagcgttcgtcaatggtgggatgatcctgtctcagatatcccataggaacatcatcaaactggtgggatattgcttggacgctgactgcccagctttcttgtatgagtacgctgctaagggcagcctatctgatgttctggacgggcatgaagacttcccactggatctacgtgcgaagatcgtggtgaagatcgcagaagcattagaatacctccattcaccagcaactggtattatcagacacggctatgttgtgccatccaagatactcgtagacaataatttcatgccaaagctcaccggcttttcatgggcaaggaggcttatccaggagagtaacactactgccagcgacgacgtaatttctagtcatcagcatccatcgagcgggttcaacaacgacccgatccacgaccactatgtgtcgctaaaactgaagaccgatgtgtaccagttcggtgtcctcctcctgacactgattagcaggaagagctttgtgttttacgccgatcacgacggcctcgtctcgcagttcctcacagcttgccaggaagatggcagtggaagggcgttctttgatgatgatgttgcagtccatggtggagatgttgttctgcttgaggagatggggaggctgtcgctgaagtgtgtttgtgaggaaatcgagcagagaccaacgatgcgagaagtggcagagcaccttcggatgatcacgagatcttggaaggacttcagcgggagctacgcaggagctgaaggcaatactcctgagaggccacctagttcagacattggagattgaccatgagcaatcctgtacatacgacagtgaatgatagatgtgttgtttgtattgtttcgtggtcagtgttagactgctgtttacgtgtagctgctgctattgttgtatgtgtagctgctaggggtgtaaatggtacggatattatctgtctgtattataattcgatctgtctaaaagggctgagatctgatccatatctgagtctgggtattgattatccgaccagatccgatttttatgtgtctttattctcaaagttg

SEQ ID NO: 7550 - DNA, 2916 bp, Zea Mays
cgattgtgccaaaacccacgggtatctactcctgtctgcctcgatccagcccggcatgcagtagcaatctgctgccgactcttacgactagcgtcctgcgcgctgcggcggatctgcaggcgtcactattgcatccgcgaaaatttctcttcttgggaaaaaaatgcttgactgattccaaagaccgacaaatcaaccaatcggctgcttctgggtacattctcggagcgaatggactggttataccacgtgggttcgctccccgtcgcactcgcacggtcgcaccaaagccacagactcgatctggccaaaaagtcacggtttggagagcaccggctggtgaagctcgatcgaggggaggaaataaagctgctccgtgctcgccttggctggagaaagccagtccttgtggccgtttgccggcgttgaggaggttaagcctgacaccgaggtgtgcacggtgctcagcagtgatacccttccacagaccccgcatagtgcgggaagcctacggcactgggtacgccctacaggtgctcagcagtgtggtaaatgtgctttggtatatacaccagaacttgcagtgaataagattatgattggaaatctcatacactgccatgataaggtaaaacatgaagctggcatcaatggcaatattaagatttttacagaagatgagattaaaagaattaccaacaactttaacactcttatcggaaaaggtggctttggagaagtttataggggaacccttgatgatgacaatgagcctgtagctgtgaagaaatatatcaatgaagatttgagagaagtgtttatggaagaagtacgcatccatagtaaaattagccacaagaatgtggtgaagctaataggctattgcattgggaaaagtactctcatgatcgtaatggagtatatgtccacaggaaatctcaatgacatactccactgcactgaaatttcgatccctttggatgtaagattgggtattgctatagggtgtgcagaggcattgagctacatgcattcaatgcatttatcatctggcaaccttatctgtcatggtgatgttaagcctgccaacatacttctaaatgacaatttgacagcaaaaataaccgattttggggtttcaaggcttctggttggtggcatcactcagtacacgacaagtgtaaaaggaagtatagattacatggatcctatatatattcaagaaggccgtcttactccaaggagtgatgtttatagctttggattagttctctgtgaactaatatctagaaaaaggataagaaaaggtgacattaacctcattttatatgtcaataaaggctccgcaagtggtaaagggtttagagaaatgtctgatgctgcaattgcaaatgaggacaatatgaagattctcaaagaaatgaagaaattggcaactgaatgtgtatcactgagcatttataggcgtcctcagatgactgatgtggtcagacgccttcggatgctgagaaaagaattaaaggagagacatgaatattattcagagtcaattttggcatcacaccattcatggcgcaaaaacaacaagcaagagataatcatgcccacctataattctaagatgcagatcaagaagagtctgggctttttcaagaggagccttagtaactctaagatccaatcggaacccagcgatgtgaggattttcacacaggaggagctaaaagaagtcacgaataactactcttatctaatcagtggaggtacttcaggtaaagtttacagaggaacactcgaggacaatacggtggtagcggtgagaatattttctgaagtactcgagggctttgaagaagcgttcgtcaatggtgggatgatcctgtctcagatatcccataggaacatcatcaaactggtgggatattgcttggacgctgactgcccagctttcttgtatgagtacgctgctaagggcagcctatctgatgttctggacgggcatgaagacttcccactggatctacgtgcgaagatcgtggtgaagatcgcagaagcattagaatacctccattcaccagcaactggtattatcagacacggctatgttgtgccatccaagatactcgtagacaataatttcatgccaaagctcaccggcttttcatgggcaaggaggcttatccaggagagtaacactactgccagcgacgacgtaatttctagtcatcagcatccatcgagcgggttcaacaacgacccgatccacgaccactatgtgtcgctaaaactgaagaccgatgtgtaccagttcggtgtcctcctcctgacactgattagcaggaagagctttgtgttttacgccgatcacgacggcctcgtctcgcagttcctcacagcttgccaggaagatggcagtggaagggcgttctttgatgatgatgttgcagtccatggtggagatgttgttctgcttgaggagatggggaggctgtcgctgaagtgtgtttgtgaggaaatcgagcagagaccaacgatgcgagaagtggcagagcaccttcggatgatcacgagatcttggaaggacttcagcgggagctacgcaggagctgaaggcaatactcctgagaggccacctagttcagacattggagattgaccatgagcaatcctgtacatacgacagtgaatgatagatgtgttgtttgtattgtttcgtggtcagtgttagactgctgtttacgtgtagctgctgctattgttgtatgtgtagctgctaggggtgtaaatggtacggatattatctgtctgtattataattcgatctgtctaaaagggctgagatctgatccatatctgagtctgggtattgattatccgaccagatccgatttttatgtgtctttattctcaaagttg

SEQ ID NO: 7551 - DNA, 3155 bp, Zea Mays
cgtcggtcctccgacagtccgacgtttacgcgggccatccgtttccgccggagcagtgaggcgaaggcacccggcagccgcggccgccgcggcgccgccgcatccatggctggccgaccgcccgcagcgccgctagttggcaccgccttggcctccggtaccaggcgtaccacccctcgattgtgccaaaacccacgggtatctactcctgtctgcctcgatccagcccggcatgcagtagcaatctgctgccgactcttacgactagcgtcctgcgcgctgcggcggatctgcaggcgtcactattgcatccgcgaaaatttctcttcttgggaaaaaaatgcttgactgattccaaagaccgacaaatcaaccaatcggctgcttctgggtacattctcggagcgaatggactggttataccacgtgggttcgctccccgtcgcactcgcacggtcgcaccaaagccacagactcgatctggccaaaaagtcacggtcagctcccgcggttcaagcctgtataagtaatgtgccttacttacgtatgaaggctcctttcgctgcaggtttggagagcaccggctggtgaagctcgatcgaggggaggaaataaagctgctccgtgctcgccttggctggagaaagccagtccttgtggccgtttgccggcgttgaggaggttaagcctgacaccgaggtgctcagcagtgatacccttccacagaccccgcatagtgcgggaagcctacggcactgggtacgccctacaggtgctcagcagtgtggtaaatgtgctttggtatatacaccagaacttgcagtgaataagattatgattggaaatctcatacactgccatgataaggtaaaacatgaagctggcatcaatggcaatattaagatttttacagaagatgagattaaaagaattaccaacaactttaacactcttatcggaaaaggtggctttggagaagtttataggggaacccttgatgatgacaatgagcctgtagctgtgaagaaatatatcaatgaagatttgagagaagtgtttatggaagaagtacgcatccatagtaaaattagccacaagaatgtggtgaagctaataggctattgcattgggaaaagtactctcatgatcgtaatggagtatatgtccacaggaaatctcaatgacatactccactgcactgaaatttcgatccctttggatgtaagattgggtattgctatagggtgtgcagaggcattgagctacatgcattcaatgcatttatcatctggcaaccttatctgtcatggtgatgttaagcctgccaacatacttctaaatgacaatttgacagcaaaaataaccgattttggggtttcaaggcttctggttggtggcatcactcagtacacgacaagtgtaaaaggaagtatagattacatggatcctatatatattcaagaaggccgtcttactccaaggagtgatgtttatagctttggattagttctctgtgaactaatatctagaaaaaggataagaaaaggtgacattaacctcattttatatgtcaataaaggctccgcaagtggtaaagggtttagagaaatgtctgatgctgcaattgcaaatgaggacaatatgaagattctcaaagaaatgaagaaattggcaactgaatgtgtatcactgagcatttataggcgtcctcagatgactgatgtggtcagacgccttcggatgctgagaaaagaattaaaggagagacatgaatattattcagagtcaattttggcatcacaccattcatggcgcaaaaacaacaagcaagagataatcatgcccacctataattctaagatgcagatcaagaagagtctgggctttttcaagaggagccttagtaactctaagatccaatcggaacccagcgatgtgaggattttcacacaggaggagctaaaagaagtcacgaataactactcttatctaatcagtggaggtacttcaggtaaagtttacagaggaacactcgaggacaatacggtggtagcggtgagaatattttctgaagtactcgagggctttgaagaagcgttcgtcaatggtgggatgatcctgtctcagatatcccataggaacatcatcaaactggtgggatattgcttggacgctgactgcccagctttcttgtatgagtacgctgctaagggcagcctatctgatgttctggacgggcatgaagacttcccactggatctacgtgcgaagatcgtggtgaagatcgcagaagcattagaatacctccattcaccagcaactggtattatcagacacggctatgttgtgccatccaagatactcgtagacaataatttcatgccaaagctcaccggcttttcatgggcaaggaggcttatccaggagagtaacactactgccagcgacgacgtaatttctagtcatcagcatccatcgagcgggttcaacaacgacccgatccacgaccactatgtgtcgctaaaactgaagaccgatgtgtaccagttcggtgtcctcctcctgacactgattagcaggaagagctttgtgttttacgccgatcacgacggcctcgtctcgcagttcctcacagcttgccaggaagatggcagtggaagggcgttctttgatgatgatgttgcagtccatggtggagatgttgttctgcttgaggagatggggaggctgtcgctgaagtgtgtttgtgaggaaatcgagcagagaccaacgatgcgagaagtggcagagcaccttcggatgatcacgagatcttggaaggacttcagcgggagctacgcaggagctgaaggcaatactcctgagaggccacctagttcagacattggagattgaccatgagcaatcctgtacatacgacagtgaatgatagatgtgttgtttgtattgtttcgtggtcagtgttagactgctgtttacgtgtagctgctgctattgttgtatgtgtagctgctaggggtgtaaatggtacggatattatctgtctgtattataattcgatctgtctaaaagggctgagatctgatccatatctgagtctgggtattgattatccgaccagatccgatttttatgtgtctttattctcaaagttg

SEQ ID NO: 7552 - DNA, 1605 bp, Zea Mays
cttcttctccggtatccaccaccgcttcatctcggtaccgcgactcgtcgacatttcgaaatccagtttgtcaagtgagtggacgaccccaagcctctttgctagccagtgaaatccaccaataaacaaactctggaaaaaaaatccaggagagcattccacttatggcggatgaatcatggaggattcctatgttagtgcaagaactggcggccaaggtgcagcaaccaccaagcaggtacatgcagccggagcagtatcatcctgtcagcctagacgttggtgccgagacactggagcccatccctgtgatcgacctcagccggctgtcgactgctggtggtgccgacgacgacgagagcggcaagctccggttggccctgcagacctggggggctcttcctggttgctaaccatggcatagaaaccgatttgatggacgatttaatggaagcgtcaagagagtttttccatctgccgctcgatcgaagagaagcacaagtgcagcaacttgatagacggcaggcatttccaggtggaaggatatggaaatgagacccagtgagatccgaggatcagagccttgactggatggatggatcgactgcatctcagtcagggtagaaccggaagacgagaggaatctcgtccattggcctcagcatcccaaaactttcaggggtcttttacatgagtacacattgaactgcaagagaatcaaggactgtatccttgggacaacagccaagactttagggcttggcgaagactgtttcgccagatttaactactacccgccgtgtccaaggccggatctcgtctttggcgtgaagcctcactcggacagtagtggtgtccttaccattcttctcatcgacaaagacgtcagtggactgcaagttctcagggatggcgtgtggcacaataatgtcccagctagtcctttcatgttgctgattaacgtaggagacttcatggagataattagcaacggggtcttgaggagcccggtgcacagggcggtgagcaacgcggagaaggagaggatctcgttggccatgttccacggcctggatcccgacgaagagattgagccggcgcccgctgctcttttaagcgagaaccagccggcgcggtacaggacactgaaggccaaggagtacctgctggccgggttctatgaacattttttttgtagattcatcgagtctgtgaagatccatctaaacgaggtttgatgtctcagttccccggctgcgtgacgaaagcattgttttgtttgtctcttagttcgaatctacgtcgtttagaggcgtcttagatggtctgtcgatcccaaaacaaatcctaagacctctcctccccgacgggtccctcttaggaccgagatcctagtgctgttggtgaactccgtcgtctatacgcacgcgcggaccatctaactcgtcgggcagaaaccctaacctctgcgcaggtcgtggaccgtccgcgcttccgtagagagcgccgctaccggtactcattgcactgattggcgccagactggcgccaacacatactaatggcttattcgttttcgtggattggagtgaatgagacggattt

SEQ ID NO: 7553 - DNA, 399 bp, Zea Mays
gtcatccgcgcgcccccgctctcctccatctgccgcgtgaagctctcccgaaaacctcctccacatcagcgccccccgccatgcccctgtatctcgcctagcacacgccgcgcccacgcaggcagccgtggatctcgcccccaccgtcgagcttccatggtaggcatcctcttccatactaggcggccatggcatgaacccatcccctatccgcgcccccatcgcacgggccctaatcctagaatggtgccttcctccttctctgtcgcctctgccctactcagaccttcgagacttccactggcgatacacacccactaggtgtacgtgcaccccttctcctctgctcctactatgcgaaaccaaccactcaaactctagctacgttttcagatctga

SEQ ID NO: 7554 - DNA, 730 bp, Zea Mays
gtcatccgcgcgcccccgctctcctccatctgccgcgtgaagctctcccgaaaacctcctccacatcagcgccccccgccatgcccctgtatctcgcctagcacacgccgcgcccacgcaggcagccgtggatctcgcccccaccgtcgagcttccatggtaggcatcctcttccatactaggcggccatggcatgaacccatcccctatccgcgcccccatcgcacgggccctaatcctagaatggtgccttcctccttctctgtcgcctctgccctactcagaccttcgagacttccactggcgatacacacccactagggaattcttagaccaacatgaggaggaagaaatgcctcatgttattagtgttacaccagacgtacaagaggccattggacggcttgagtccatggggtttgactgagcatgtgttattgaagcattctttgcctgcgataggaatgaggagctatctgcaaactatcttcttgagcaagctggtgaggaagattaagccagagtagttttcgtatgctgcattgaaacaggcagatcctattaacaactccgcattggctctctgccccagccatggacccatgacatcggtggtttcgcgcacctcaaagacatgggtggggaggcatcgcggctgctgcacgccctctagagaatgcttatcgatcatcaggacatcgttatgttcgatagatgcacaaagcactac

SEQ ID NO: 7555 - DNA, 1293 bp, Zea Mays
tgggaccgtcagagactcggctacctctcctgcaaaatggctatggcagtggcttccttcgtcgccgcttcgcaccaccacggcagtcacctggccgccggcgtccccttctccgcgcgagtaggcaggagcttaggccgcagtggcgtcaccatctacatgagagcccagaagaagcgcaatagtgaatctgggagcagtagcggaggtggggacgtgcgggccagcagcgggcggcgagtgtggcgtcgtcggaaactgaccaaagaggatgacatgttgcgttacaagttggatcgtatcccttttctagaggagaaggtgagaaaagtaagggagaatgggaagatcatatgcctggacattaatcagctgatgttatctcaagagaatagatttgcattcaccatggaggtggctgaagaagctaatgtctatcttgagaagaacaggcatgaatatgggctgaagaagcctatactgcatgttctcagtgaccgcatgaatgaagctgggttttctcggcctgagggttacctttatccttatcctattaagcctggtccttatttcattaaagaggaaggaaattgagtaaaatcacgtgctacttgtaacaggattatcattttcaacaactatagtttggcctgcatccagacaaaagaacatattcaggttttgcgacgatgaaaaatgcaagcaacaggaaaccgatttcggagtcgcggcttcactgtagactggccactagttgttcacagcccgagcgtggttggattctagaaattggaaaccccactaccttgttgtcatgctgtgtgacacacgtagtacaaaggtcgtctcgaacaacatgactgcacatgcagcagagatgatatttcgtgacctgaaaatgtcagcatctgttgttctgtactgtgcctcattggcgttaacagtgcatgggtatttgacatgcaaagagaatgcataagtgaccgtgcaagtatttgacttagactgacgaagacttgtatacccgacggcatttaatttaggaaaataagaaactccaaacagagttgaagggatgtgtcgcacgagctaatgattgcacattcttcttgactccaggcaaaagcatggtgataatcgtgtttgcttatagtgcttagttgtccaaagttgtttcatacaggaggtgtccgattgttcttaatcacactaatgcattaataagattggaacagtcaaaagcactatcagtggttacttattcattcttacttaaatagaagcctccttttg

SEQ ID NO: 7556 - DNA, 1754 bp, Zea Mays
atattccttccatctctcctcgtttcttccccgccgttacacagctcttacccgcttcgccggttgtccgatttgctgtgaagcaggagagcggccgccttcagtcaaggaaaatcgctgaagacagccgcagattgccagattcgtagttccgcttctgcttcggcgcacctgttcggtgtggaatgatggaggtgagcccgtctccggagcaaggagtgatggcgggaagggagccgttcgggctgccgaagaccccggcaacgccgccgtcctccgggggcacgcagggcctgcgcatggcgtacacgacggacggcaccgccatcttcaccccggtgagctccgtgccgcccgcgacggcgacataccagcccgtgggcggcagcgccgcgtctgcttcaagcttggctggcgtaggaggcaatggtggcgcgcccgtgcactcgggtggcgcgggtgagccggggaccaagaaaaagcgtggccggccaagaaagtacggccccgacggctccatgtcgctggcattggtgcccgcatccatggctggggagccggcgccggcggctcttggagcttccggtcctttctcgcctaacggcccgaaggcgccgaacactgcgccgtcagcgtcgccggacggcgcgaagaagcggggccggccgaagggctccaccaacaagaagcacgtggctgcgctcgggccagcgggggcaggttttacgcctcatcttatttttgtaaaagccggagaggacgtatcggcaaagatcatgtcgttctcgcagcacgggacacgcgcggtctgcatcctttcagcaaacggcgccatatcaaatgtgacgcttcggcaatctgccacttcgggtggaacggtgacatacgagggtcgtttcgagatactgtctctgtccgggtcgtttcttctgtcagagaacggtggccagcgcagtcgaactggtgggctcagcgtttcgctagcaggccccgacggccgtgtcctgggtggctgtgttgccggactcctgacggctgcttcaccggtacagatcgtagtggggagcttcgacgccggtggaaagaagcagccgaagcagcagcagcagcagcagcttgctccgtcaccggcgccactaaatctcgcgccgacgggcgtggcggcagggccgagcagcccgccgtccagaggcacattgagcctaagcgagtcgtccagtggcgccccgccgagcccgccgcacgcaggggccagcggtggccatgggcagcagcagcagcagccacagccaggtggcttctccggtctgttctggaaatgacgagacccccggacaccgtctgaccgtggtagaactggcagaaaggactaaaggcgcgtgaggcactcgtcgaggccgaagctcactcggtgagaagcagcggtagcttgtaggtggtgtcaagactgtgtagctcttgctgttgctgtaggtgtaaatcgtgcgttgtgattgtgaggtggttgcttattgtctgtcgtctggaatggatgccgtgtactgaacctgtgcccccaatgcagcatgtcggaagttcttggtttcttctgcttgggtgcatcggcttgccgcacgatatgcatccatgcccataataatacgtgtatagatccaccttgttgtgaaggtcacacacaactcacaatgcaaacttgtctgaaaagattgatacaaaatggcaaattttcgcgctgctgctggagctgcgcggcg

SEQ ID NO: 7557 - DNA, 1762 bp, Zea Mays
aaatagattatagagtccagtttcaccacgttttcattcttcctattgtcagcatcgctctccaaatcccaaaaccctaacctatccatcgtcgccaccgtttaccgtcgctgccgccaatatgggagcaagaggaggaggaggaggcggccgcaaggcccgcaactttgcgaccttccgcctcttcccgcgcgccggcgccgccgaccccaacgaccgcgtgttcgtacgcgtcgacaacaacgactacactgtccccgggttcgccgacgaggactccttcgacccatcccggtccgacccttccgccggcaatggaaacttcggctccgcatccggccccctcccggagcacgtccgccgcgagatcctcgagctcggcctccctgacgacggttacaactacctctcccacctccgcgagctccgtcccgccgccgccgcagcctcatccttcgtccccagctccaccggtcgcccggagcccctcccgctcgatgtcaaggcttatgatgcaagcagggtacgcattggtctcagcgagggtgaactggacgaggggaagacgatgtgtaaggtggctgccaagactgcgccagtgaggcgaattgagaaggctgtcgacccagatatcgccaggttgctcgatgagagcgatgtgtctcatgttgggtccgaggatgaggggctggaggaggattttgtcatcatagctaaccaagctgaggaggaggaggaggatgaggatggagacatggaagaaaagcaagagtggaatggtgtcttcagtgatgttgaagaggaggagttcgattttgaggaggatgagccaaagccaagagtgagacgattgctggatgaacaatttgatttgcttgctttagaggaatatggagacagtgatgatgatgacatgggtgttaaagaagaggaggtggttgtgcttgtttcggaaagcagtgatgaatctgaagtttgggactgtgagaccattgtttccacattctctaaccttgataatcatcctgggacaattgaaactccaggaatctccagagcgcggttccctagggttttccctggagaaacaactacaacaaatggcatcatcaagcttcatgggaaagagaaactgccagtagaatacctgccacagaggagaagaaatggtgaaaaggagaagaaagtaaagcctgtagaagcttctgtcactgataaatttaaaaaaggagctgagaaggaaacaaaagaggagaagaaggcaagaaaggcagcagtgaaagaagaaaagagagaagcccggaaagcaaagaaagagctcaaaggcctgtataaatcagaaacgcagaaggctcagaaagttgccgctgttactggaccttcttccattcgactaatgtgatggttgatctgtggcacgtttactgatgagcgacgactatgacagtcttgaatccaaaagatcgcctggacaaatgcatcaaagctacgaacgatgtatgataccagttcatatttgtgctatactcatggattttgtcgacaggatacccaatgcttgcttactatatattagttagttgaaggagaagataattatacacacttatcgaaagcatgaaagatccttaaaagaaactttacgtcagaaacaggtcatgatggtaaatccttgaggcttacttttcatccaaaacacgtttgaccttcttactctcactagaaactatgcaatcctacaaaatataacgcggtttctgat

SEQ ID NO: 7558 - DNA, 2742 bp, Zea Mays
tctcgaacacatgtgggataccttatatccctaatttccgtgcgcaccgcttctccccacggcgcacacgcgcaacttctctgcgcgacgccagccccgcttctccccacggcgcgccgccatccccgcgcaccttcctgcgcgccgccagccccgcgcttccctgcgcgccgccagccgtcagcccgcacctgcgcgccgccagcccgtcaccgcttggagacgcgcgcagccgcgcttccctgcgcaccgccactccagccgacagccgcgcttccgtggccgcgtccaccgccgccagctctgtggtcgcgccgtcagccaacccatctgccgtcgtgaggtactgaggttgcctatattttcttccccttcttgaaaatggatcatagttctgacgaagatacagaaatcagtgattctgagattgatgattatgaaggaaaaatttatgcaagactgatgtcaggagatttaaaattaaataagaatggagaaaattacatttgtcccttctgtagcagcaagaagaagaattacagtaaaagtagcctggttcaacatgcctcaggagtcagtgcagcacctaatcgggaggcaaaagaaaaagcagtccatcgcgccctcttcaaatatttgaagaatggtcttgctaaatcacctgaaccagggtcacatgcaactcctgtggagccacaacctcttcagaaccgagacgagaagtttgtgtggccctggatgggtgtcctagttaatgtgcctactgaatggaaggatgggcgccaaattggagaaagtggaaatcgtctgaaggagcaactatcacacttttgcccactgagggtcatcccgttatggacttttagaggtcatacaggaaatgctattgttgagtttggaaaggactggaatggtttcagaaatgcgcgtacctttgaaagtcactttgcggcaggaggattcggtaagaaggactggattggaaaaaagaatcaaggatccgagctctatggatggcttgcgcgggctgaagattacaattctccaggaataatagcggaccacttgagaaaaaatggcgacttgaaatctgtcaatgatcttgcaaaggaaggagcgcgtaaaaatgacaggcttgttgctaatttagctaaccaaattgaggtgaaaaataggtatttacaggaactagaatgcaaatacagtgagacaactgcatcacttgagaagatgatggggcaaagggaacaacttctccagtcatacaatgaagaaattagcaagatgcagcagctagctcgcaggcattctcagaagatcattgatgagaatcaaaagttgcgttctgaccttgaggcaaaaatgaatgatcttgatgtgagatccaagcaactcgatgagattgcagcaaaaagcgattatgacagaaggagccttgagcaggagaagcaaaagaatgctatcaaatcgagtcatcttaaattggcaacattagagcagcagaaagctgatgagaatgtgctgaagcttgtggaagaacaaaaaagggagaaacatgctgcgttaaagaagattctgatgttggaacaacaattggatgcaaaacaaaagcttgaattagaaatacagcagttgaagggcaaactaaaagtgatggagcatatgccaggtgatgaagattcagcgtcaaagaataaaattaatgagctgagtgaggcattgcaagaaaagatagatgaactggatggaatggagtcacttaaccaaactctggttatcaaagaaagcaaaagcaacattgaactgcaagaagctcgcaaagagctagaaaatgtgggcagacacatataggaatcaagagaatgggagagcttgatctaaaagcattttcaaaggcatgccaaaaggagcgtacagaaaatgcagaagttactgctgcctttctttgttcaaagtgggaggctgaaataaaaaatcctgactggcacccttttagggtcgtcacaattgatggaaaggagatggcaataatcgaggatgatgcaaagcttcgagcactcaaagaagaacatggagaagaaatctatgcaatggtgacaaaggcgctgcttgaaaccaacgagtacaaatcaaaaggcagctaccctgtgggggagctatggaacttcaaagaaaaccggaaggtgactctgaaggaagctgtccagtttgtcctgagacagtggcgaacaaacaggaggaagcgataagctctcggctactcaatgctcttggctttttttccccaccacctgatccgaaagccatgagttcgagagctagtaacctggaaacagtagtattaattcgtgataaaatcaacagggcgatacagccctgtggatctgttccttgttggatataagctggcactcctattgcagtgtcagcatcagtggactcgaacgccattatggcgttatccttgtgccacctttgtaacaagtagttcgttcttgttcttgaaccgtgtgttgtagttggcccttggccgcatgctaccggctctgtacggctgtgcctacaaagttgtggtggaacatgcagactcataataaagcatgcttgggctcttgtgatactctgcacttttatgatgttgtgagaatgtttgttcatggttggtactgcagctcctcctgaccgcttcggattaaagccagctgtttggaccctgcagctgtaatctatagaaataaaata

SEQ ID NO: 7559 - DNA, 1011 bp, Zea Mays
taaaaaggcagtattccccccatagtccattcaactccaccgcgaccatttaagcaacacagcagcggcatctcagctctgttcccagctagttagccgcggcgccatggctcctctgctgttcagggacatgaaggggctctcgtgctcgtcccaggcgtccacggcgacatgcccgagcctggagcggcacccggcgccccgcccacacaaggccagcgccggcgccagccccctggctcccgttcctgctgccgagcccaggaccaggacgcaccggcttgacggcaagaaaggacagcagccgcagcacaaggctgccgtcgtccccgcgaacgccggtggtggcctcgtcagccccgccggctcgtccaggtacctgctgctgagcggccgcttcgccgccgtcgccgaggagatccaggaggtgctggagcctgccccggccgtcgacgccatcgccaagcgggaggaagctagtgacgctgctgatgccaagaccgcgcaggcgcaggagcaggcgtgacgtcgttcaacatcgatttcgcggcgaagaaggtgacggtggtcggcgacgtgacgccgctgggcgtgctcagcagcgtgtccaaggtgaagaacgcccagctctgggcggcgccaccggcgatagccgccgcctgaatgaagggagccgtatcccggttggccgtgggccgtggctgctgctagggatagggagtcgtcgaccagcatgcgtccaccgtgtcccggctggcagctggcacttgaatgcagcagctttggttctttcctgtgcggtcgtctcgtgagttgttgtggccctctctcctctcttgtttcgctgtggttggcgccatgcgaggtgaatgcgatctcttgcctggtgctgctccagtgcttccatctgcttctgctgtggatgggtcactctgctttctcctctgtgatgtaagactgtaattaacataagaatgggatttcattgctaaagaaaaaaaagcaaataaa

SEQ ID NO: 7560 - DNA, 1797 bp, Zea Mays
ttaaattcccttcgatcttgatcttggttggggaaaaaaaccccggcctgccaccctacttcatcctcgagtcgacttgtgcgccgccattctccgtcgccgcggtctcgcgggcccgccgccgtcctagccgccctgtccccgccctctccgtctcgcgccccacgcggcccttgtccatcttttccgtcgccggctcgtgcggtccgacgcctgccaccggttcctcctctcgagaaaggcggcggcgcccgagagagcttctttgagggaggataaggcggcgcggagcgtctctgagcggctcaggcccctccggcgctgagctttcctccggcgttgtgtgtgcctgagttgttgactcccaattgaagcgtggtcaaattacctcggctccggtatgggttggagctctttatgggttgctaaagcgtttagagtgtggctctaggcgtggattttcaccaatggcaatcgagtgcctcgtgctaggggcggggcaggaggtgggtaagagctgcgtggtggtgaccatcggcgggaagcgcgtcatgttcgactgcggcatgcacatgggctaccacgacgaccgccactacccggactttgcgcgcgcgctcgctgcctggggggcgcccgacttcaccaccgctatctcctgcgtggtcatcacgcatttccacatggatcatatcggggcactgccctacttcaccgaggtttgcggctaccacggccccatctacatgacgtatccaacaaaggctttagctccatttatgctcgaggattatcggaaagtaacgatgggtcagagaggtgaggaaaagcaatatagctacgaagatattcttaggtgtatgaagaaagtcacaccaatggacttgaagcagactgttcaagtagataaagaccttgtgatccgtgcctattatgctggacatgttataggggctgccatgatttatgcaaaagttggggatgctgctatggtatacactggggattacaatatgacaccagatagacatcttggggccgcacagattgatcgtctgaagttggatgtattgataacagagtccacatatgctaaatctatacgtgactcaaagcctgcccgagagagggagtttttaaaagcggtacataaatgtgtttctggtggaggtaaagttctaattccaacgtttgctctgggaagagctcaggaactatgtatgttactggatgactattgggagaggatgggcttgaaagttcctatttatttttcagctggtttaaccattcaagctaatgtgtactacaaaatgttgattgggtggactagtcaaaagatcaaggacagccatacagtgcataatccatttgacttcaagcatgtttgccactttgaacgttccttcattaacaaccctggtccctgtgtactttttgcaacacctggtatgattactgggggattttcccttgaggcgtttaaaaaatgggcaccatcagagaagaatctggttacacttccaggatattgtgtttctggaaccattggtcataagttgatgtgtgggaaacctacaagggttgattacgaggacactcatattgatgtcagatgtcaggggtgtgtttgattgcgggacaacttggacagccatgtctcccggcatcccctctctctgtctagttctgacaggcagctgaggacgacggcattgggatggttctatttcaaccctgaccttgaatcaaacaaccttatataagggatcgtcctatcccatcattgcaacaaaa

SEQ ID NO: 7561 - DNA, 1046 bp, Zea Mays
aaaagacaaaaaaaggttctagaccgttgtaggtcgccttactctcgtaaaaaccatgatcaatgcacccaaatcctaccacggcggggcatctgagaccaagatttgtccgtcgacttggactgtagtgagcgggagaccaaccagccaggacaaacaaggtgacatccatggtcaatacagtgatcttctaaggctttttgaatatggaggctttcctcctgaagccaattatctattcttaggtgattatgttgatcgaggcaaacaaagtttggagactatatgccttcttcttgcttacaaaatcaagtaccctgagaacttttttcttctgaggggcaatcatgaatgcgcctcaataaacagaatatatggattctatgatgaatgcaagcgtcgatttaatgtgcggctatggaaggtcttcacagaatgttttaacactctacctgtggctgctcttatcgatgataaaatattatgtatgcacggtggactctctcctgatctagcacacttggatgagataaagaacttgcagcgtccaactgatgtaccagatcaaggtctactgtgtgacttgctttggtcagatccaggaaaagatgctcaagggtggggcatgaatgatagaggggtctcatatacctttggtgctgacaaggtttcagaattcttgcaaaagcatgatcttgatcttatctgtcgtgctcaccaggttgtcgaggatgggtatgaattttttgctgacagacagcttgtcaccatattctcggcccccaattattgtggtgaatttgataatgctggtgcaatgatgagtgtcgatgaaactttgatgtgctcattccaaattctgaaacctgctgagagaaaaaacaaatttatggggtccaacaaaatgtgatagtgaaagccattttgcttccagcagctctagcctgttaagtacggaccgacattattgaaagcaactattacgaatcaagactactagaaactagcactccaacattaccagaagttcacaattccgcaaaaac

SEQ ID NO: 7562 - DNA, 1292 bp, Zea Mays
aaaactagcgcttactgttttgcacggccatagtctcgatccccaccgagtccagcaaacagcaccaccccaccctcttcgcggctccggcagccgcgccaccatggcttctcctgcgggggctaacagcggggatgaacctggtaccatccccagagatgtgagagtggagaatgggcatggagttgttggaagaagagacgggggtcctgcatccagctattgggacctgttgagagcacacctctctgatcctttaacaggtgttctcatggatgatgcattgattttatcatgtggccattcatatggaagtagtggaatgcaacatgtctacagaatgaaagcttgtggtaagtgtggcatgccaattactgaggccgccattcgaccaaacttggctcttcgccttgcagttcaggcattcaaacgtgaagaagactcagcaaagtcattgaaaagaagaagagagcgccttgaactggataaatgtggtgacgatgatccaaatcgaactgaacttgctactagagggaaacaagaggaccccggaacggtttgtgggacgtcaagcagttgtgacagcgcagtgcttaaatggatggtatgttgtgaagacttcagacaacgcagagagtgtgaagctgcaataccgttccttggcaaaggttgctgatggcaatgggccttctggtcttgtcccaagcaatgtccaaagtacaagctggctataggctacaacagtaccggtagtaggccccaagcccctcttcaacttcacgcatttgctgaggttctgcgatgacgtgagcatgccaaattcagattaggcttgctttgcctttgtcccctctttttgtatcctggggacgcggatcttgtgagtatggccaaagaaatgtttactactttagcagtgttggaaacgcgtgacatcactggttacgagtagttttagccgtcttctgtctagcggtgtggccggtagtggcagcatgcgtctgcagagaacatatctggtacacataaaagtttagtgcacatgatttatatattaaattatcactatctattttagatctaacgtctctgttgaccattgtaatctataaataacaccttctaccattacactccaccatgtcagggtgtctttagcaaaatataccaaataattagagacgttagatataagatgagtgatgataatttaatatatgtaatatgtgcattaaacttatacgtgcaccagatatcttctcttacacgaatggaggcaatccttcctttcc

SEQ ID NO: 7563 - DNA, 1295 bp, Zea Mays
aaaactagcgcttactgttttgcacggccatagtctcgatccccaccgagtccagcaaacagcaccaccccaccctcttcgcggctccggcagccgcgccaccatggcttctcctgcgggggctaacagcggggatgaacctggtaccatccccagagatgtgagagtggagaatgggcatggagttgttggaagaagagacgggggtcctgcatccagctattgggacctgttgagagcacacctctctgatcctttaacaggtgttctcatggatgatgcattgattttatcatgtggccattcatatggaagtagtggaatgcaacatgtctacagaatgaaagcttgtggtaagtgtggcatgccaattactgaggccgccattcgaccaaacttggctcttcgccttgcagttcaggcattcaaacgtgaagaagactcagcaaagtcattgaaaagaagaagagagcgccttgaactgaggtaaaggtgtgcagtttcctttttctgtcttcgacagggtcataatcaagggaaacaagaggaccccggaacggtttgtgggacgtcaagcagttgtgacagcgcagtgcttaaatggatggtatgttgtgaagacttcagacaacgcagagagtgtgaagctgcaataccgttccttggcaaaggttgctgatggcaatgggccttctggtcttgtcccaagcaatgtccaaagtacaagctggctataggctacaacagtaccggtagtaggccccaagcccctcttcaacttcacgcatttgctgaggttctgcgatgacgtgagcatgccaaattcagattaggcttgctttgcctttgtcccctctttttgtatcctggggacgcggatcttgtgagtatggccaaagaaatgtttactactttagcagtgttggaaacgcgtgacatcactggttacgagtagttttagccgtcttctgtctagcggtgtggccggtagtggcagcatgcgtctgcagagaacatatctggtacacataaaagtttagtgcacatgatttatatattaaattatcactatctattttagatctaacgtctctgttgaccattgtaatctataaataacaccttctaccattacactccaccatgtcagggtgtctttagcaaaatataccaaataattagagacgttagatataagatgagtgatgataatttaatatatgtaatatgtgcattaaacttatacgtgcaccagatatcttctcttacacgaatggaggcaatccttcctttcc

SEQ ID NO: 7564 - DNA, 1620 bp, Zea Mays
aaaactagcgcttactgttttgcacggccatagtctcgatccccaccgagtccagcaaacagcaccaccccaccctcttcgcggctccggcagccgcgccaccatggcttctcctgcgggggctaacagcggggcctcctcctcgagagggacacccttgcctttgcccttccccttccccgctgcggcgcacttcccctcccgcggcgccggtcccttcctgtcgcagcactatcacccgccctccacctccgacggcgacgatgaggtcgaagaagacgagggaagcatggacgacggcagcgccgaagaggatgatgccgagctgtccgacggaggggctctcggctcgccgcggcgacgcgccttctccgctccaggtattggacgtatggagataaatgggggaaatggagtgaggtcaatccaagaggggcagcaatggcatttatgtaaccatggaatcgagattgggcgtccatcaccaggaggggatgaacctggtaccatccccagagatgtgagagtggagaatgggcatggagttgttggaagaagagacgggggtcctgcatccagctattgggacctgttgagagcacacctctctgatcctttaacaaagcttgtggtaagtgtggcatgccaattactgaggccgccattcgaccaaacttggctcttcgccttgcagttcaggcattcaaacgtgaagaagactcagcaaagtcattgaaaagaagaagagagcgccttgaactggataaatgtggtgacgatgatccaaatcgaactgaacttgctactagaggtaaaggtgtgcagtttcctttttctgtcttcgacagggtcataatcaagggaaacaagaggaccccggaacggtttgtgggacgtcaagcagttgtgacagcgcagtgcttaaatggatggtatgttgtgaagacttcagacaacgcagagagtgtgaagctgcaataccgttccttggcaaaggttgctgatggcaatgggccttctggtcttgtcccaagcaatgtccaaagtacaagctggctataggctacaacagtaccggtagtaggccccaagcccctcttcaacttcacgcatttgctgaggttctgcgatgacgtgagcatgccaaattcagattaggcttgctttgcctttgtcccctctttttgtatcctggggacgcggatcttgtgagtatggccaaagaaatgtttactactttagcagtgttggaaacgcgtgacatcactggttacgagtagttttagccgtcttctgtctagcggtgtggccggtagtggcagcatgcgtctgcagagaacatatctggtacacataaaagtttagtgcacatgatttatatattaaattatcactatctattttagatctaacgtctctgttgaccattgtaatctataaataacaccttctaccattacactccaccatgtcagggtgtctttagcaaaatataccaaataattagagacgttagatataagatgagtgatgataatttaatatatgtaatatgtgcattaaacttatacgtgcaccagatatcttctcttacacgaatggaggcaatccttcctttcc

SEQ ID NO: 7565 - DNA, 1006 bp, Zea Mays
aacgaccaggtgtactacctcgctgatgagcccgggtgcacttcatttggcagtccagccaagagtgatcggtactcaccatatcgcgcgcgttcgacgactattatatcaaggattgtggcgtcatctcgacaccggagaatgagatgaatgaacgtgagttatctgcgctgaaatctgtcattaagtgcattgaagagcacaaacttgagcagcagtaccctgtggatccacttcagaaaagggttttgcagctagagaaagcaaaggcagacaagaggatggctgttgaagcagcaaagccgcagtccaagaggcctcgtgccaatggatcggcctttgcaacccgtgctacaggctttgctgacaagagcttctactcagcaaccccagagaggcatccattcaatccttgcgagaggcagtttgtgtatggcgctgaggttcatcttcctcccatgatgacctcagcgtcttacacgatgcaacctgcccatggaccttattacggtaatggctacccagttcagtaccaggtctcgtatatccactaatggagacagccaggtgcaggtgctctttcctaacaatctagcttaacctgctgctctttgctgtagtcgtatcagttactctgcaagtttccctagctggaaatatttggaccactcaatgtgtgtgctctgagtggctgttgtggtaattttatgccctaatgacatgacataaattactcctaatatttagctatcgatgaatctcccaatgtacttcattcggcttgtgaaatgcctgtcactgaagaagcgcccaggggcatgaaaatatcatgtcgtcatggacgcctgccaaactgtcagttgcatcctgactggttgttgtttttagtttggtgtatcttttatgcccaagtatatttgctgagttatcatcttcagtttgccgattctaattggtttgtactccctcttttttctaaattataagatactttgatttttttgat

SEQ ID NO: 7566 - DNA, 2122 bp, Zea Mays
gctcttaccggcgtggttcgacttctacaacaaacatggcatctgtctcaccctgccctctttcatcatttcccgaagcttcgcatccgtccttcggtccttcctcacccgttcgtctgtctcgcctcacccacccacccacagcatcagaacggagggaattagggagcttcggccggatccgcaacatcggggaacggcgggaaccagggagctcccgccgcctagaaccggagctcccaatcgatccactggccgttgagccgacacttcaatggaagcccacgcctcgcggggccgccgcaccctggaggagattcggcagaagagagccgcggagaggatgcaacacgccgtcccgatcgcggcgtctcacgtcgactctcacgggaaccaaagagctggagctgagcatcttgctcgagttcaagaacttgaaaatggcaacacggaattggagagggaaaacaaaatgctcttgtccaagatcgctgagaaggaagttgagaaggacgcccttgtaaaccgtttgaatgatctcgagcggaatgtagtgccctctttgaaaaaaagcttgaatgacatttatttggagaaagatgctgctgtagttgctaaggaggatgctctagctcaactcaggagcatgaagaaacgactcaaggaagcagaggaagaacagtatagggcagaagaagactcggcctccttgagagcacagctaaataccctgcagcagcaaatgggccacacttacagtggatatacaatgggaacatcaagtgaggaatctgttgccatggaaaaggagatacaagatttacaggcacagctaaagcaagagtcactgctaaggcaacaggagcaacaacaattagctgaacaatcccagctgaggcaacaagagcaagaaaaactagccaaagagcaaacccgtattgcttctctggaggctgaaaagcaacagttggaagaccaaattactatgttgacaaagaaagctacagaggacgcttctgagtttgctgcacgcaaggcattttcaatgatagggaaaaacttgaacagcagttgcatgacatggctttgatgattgagaggctagaggggagtcgtcaaaaactgctaatggagattgattctcaatcgtcagaaatagagaaactgtttgaggagaactcagccttatctgcttcttatcaagaagccattgatgttactgtacaatgggaaaaccaggtgtgccattggccttcttgatcacttagtgcatctatgttatgcaaccctttgcataagaaatctgcctcgacttaacagaaaatttcaggttagagactgtctgaagcaaaatgaagagctccgttctcacttggagaaactaagacttgaacaagttagcctgttgaaagtaagcaatatcgctacccaatcagatgggcaaactgaaaacagtatctcaaacccaccacaaatggtcatcgagaatatttctctaaaggatcagcttataaaagaacagagcagatctgaggggttgtcggcagagataatgaaactttcagctgagcttaggaaagcagtccatgcacagaataaccttgcacgcttatacagacctgtattaagagacattgagagcaatctgatgaaaatgaaacaagaaacttatgcgacgatccagtgatacatgttgacatgttgtgaaactcagtcctctggcatggccgcatgggctccacgttactgattttcgtcgtggatgtatttatctcatgccatcttcaagatgctggtgcaaagcagttcttttcgtggccaccatttataagtagagttcagtcgagatcgttgtacttgtatcatactcatgtatacccgattcccagactggttcatctcgtaaattggaagcgatgtttggatgcctatgtatcaagtggatcataaacatccaaacaacgccttaaaatagatcgtttcgacattattattttcctgcttgcaatccaggctctaacaacttctcggtcttgtttaatcctttcatttggcgagtccgcatgttcgagtttgagttctagaccagtccgcatatatggattgtttggatgaagtcgtc

SEQ ID NO: 7567 - DNA, 1777 bp, Zea Mays
gtcccctcccctctcggaagttagctgaataccgctaacgacgttaaagtcaggctcacagacggcctgtatgacccttgcctctgcctttcccttttctcctcctatccctaacgcagccgccgccgccgctcggctctcccttgccaatgcacacatgcactcgccgccgccgctcgactctcccctcccaatggcaccccgtcgctcaccatcaaatgtttcctcccctacaagtgcaagatcgccaatgaggtggtatagccatccgccacacctgccactgtccctttgccatttctggtcctagatctgtgttacctgcatttttctttgccacgggatcgggatggtggaggagcagctggtggggattagcatcttgcttcagatatctattctcgtgctctcgttcatgctcagatattgatggcgctgttggtggacccacctgacatcaagagggagatgtagatggagatgcagcccgcaccaccaccatctgctgcggcgtcggcatcgcagacggcgtggccactggattggccggtggacgggcgctcgctcaatcctccatcgccgcccactatatcagtccagtatgtgagtcatattgattttataattgattttatgcgccagttcttgcctcgactaatgggtcctcttccattttgtaatcacctctgcatgtttactgtatcactttggtaaattactattgttccatgttgtcttccacaacatactgcactagttcagtggttagtttcctattcaaccatttcgtaatgaaggaggtattggtatttaggtaaatatttatttatgattgtgctggtattatctcaataggctggaaaattttaaataacctaatatgacataaacctcaactgcccatgcactcttagttgttgttttgaaccggtctttcgttgtttttcttttcaccaaaaaataaaatcttgatgatgtgtgacacacctgtttggttatatcatgttatctatgtagttcggccaattaaactatgttatcaggtataactagatgaggcaaattatatatatatatatatatatatatatatcgaaataaattgttttatgaatatccaaataaaccatatagtgtcgaagctgggtactttccattgccatcattaatggacaacaatatgctactatctcacatatattatgaaatgtttctacacgcatggagcatttcttgcagtagagcgctaggtatgctctctatgcctacgatgatttatatgaggatgacttagataaggaggtggatcacatgtcagtttcgagcaagtaggattggccaccagggtcgtggagtatatgttgcccaattttaatgaggtgtttggactggaatgcgcacagtctgttactttgatgcaaaacgtatgaattggttggacagagccgccaacgaagtaccatgggtaaggatgtgctggacaatgaaagcttctgtcttgaaataataggatacaagaagcttgcaagtggttttgtgaaggcttttgtgaatcacttgaatcattagttcttttaagaatggttttgtaaagcgttagcaaatatgtgtaaaacacaataagatgtgtggcaaattcagtgatctagttgtacaattttttgtgtttatgggatatgtggatatttcattgtggaatgttaatgaagtgtgtatgtctatgtgattatgtgtataaaatatatgttttgtggtgcttttgtgataatatctattc

SEQ ID NO: 7568 - DNA, 1809 bp, Zea Mays
tgtaaaaaaaccaagaaagaaagaaaaccgtttcgcgcaccataaaatcgctttgggtttccaacgcaaaaccgccccgcacttctccgcaccgttaccaaattgatccttcccgcaaagctgcaatggagttcgcctcccgcagtcgacccaccaccacagcagccgacgacgaagaaaacgactgtcttcgccgcttccccgaccatccgccgtcgcagccgcagggacacggcgagcccaatacatccggggtagacgctgcactactggcgaggaggcagaaactgctgttggagctgctcaagggatccatccaacagggcttgatcttgcgtgagctcgtggagactgagcacgccatgggctttattgccggcagccacaatcctgtgccagcactcccacaggatttcttgcgttgctggacgccgtcgatgtctactttggaagcgcatctccgccagccatgcccttgtggctgtggaaactccatggcggtcagggcacctccagtgaacccacacttggagcggtcatcgcatgcacccgagcaaacaaggccaggcaatgatgctgagcagcatcaagaggacaggtcatctggggtgaggacacatccatttaacggccattttaaactgtgtcattcaccgagcaagcagactccagtgccaggcaaagctggtgtcaatcagatgcggccatcgtccggacaccaacaggccattgtttgggaaaagattggtgtggaggttgttcataacatgcagccgttgaacgaaatcaagaaccacagcagtgaggggcagaaggccgtagactctgccattgaggtttgtgtaaagaaacccatacaacagcgtcttcagtacaaaccagtggatcaggagaatgcagcaaacaatgagccaacagctgagggaacttccgctggggtgaaaaggaagctgaccaccccaagctcacctgtcaagaagcagaagccactcgggcaatggagctgcactatctgccaggctaacccagctagccagcgccaacttgagcaacaccttgccggcaagcggcaccagtcaaatgtcgcagcactgcaaccatctcagagcaacagcagcagccctgagcctgacacaaaagcgacgcccgcgaggagcaggatcatcgcgacgaacgcgcagcaagacggcaagcaggatgtgccggagaacagatggacgtgtacactctgccgggccaagtgctacactgaattgaactactacagccatctcgggggcttgtggcaccgggagaaggcacaggccaggcgcgaggagcacttgaggttctactgctcggtgtgcgacctgcaatgcaacagcgagaaaatgctggagtcacacctcggcggtaggaggcatcgggagactctggaggcgcgcgactaggatgccgaggcacggctgcaggctgacccgtccttgttcacggggaagctgttgtggctgggttccggcgggtcgatctgccattttgaggggcactacggtggtgcacgaagctgctatcgctggtctgctgctggactctgcctagttcgttgatttctctcgtttcgagcttttagtttcacgttggtaggttttaatgttatgcgacttttgatcttcgggcccaagacaaaacagacttgaaatgcgtatgtttcgatgtagtagttggttggtgttgcttattttgcgacgttttttttattttttttaaaacgtactagttgaatcctccacgctttgcatcgggaatgcgttgaaataattccacgagaac

SEQ ID NO: 7569 - DNA, 1998 bp, Zea Mays
tgcatgtctacatttgttgccctaactttggcgagcccaatacatccggggtagacgctgcactactggcgaggaggcagaaactgctgttggagctgctcaagggatccatccaacagggcttgatcttgcgtgagctcgtggagactgagcacgccatgggctttattgccggcagccacaatcctgtgccagcactcccacaggatttcttgcgttgctggacgccgtcgatgtctactttggaagcgcatctccgccagccatgcccttgtggctgtggaaactccatggcggtcagggcacctccagtgaacccacacttggagcggtcatcgcatgcacccgagcaaacaaggccaggcaatgatgctgagcagcatcaagaggacaggtcatctggggtgaggacacatccatttaacggccattttaaactgtgtcattcaccgagcaagcagactccagtgccaggcaaagctggtgtcaatcagatgcggccatcgtccggacaccaacaggccattgtttgggaaaagattggtgtggaggttgttcataacatgcagccgttgaacgaaatcaagaaccacagcagtgaggggcagaaggccgtagactctgccattgaggtttgtgtaaagaaacccatacaacagcgtcttcagtacaaaccagtggatcaggagaatgcagcaaacaatgagcatgcacctgagcagacaaggcaaggcaatgatgctgagcatcatcaagagggcaggtcatctggagtgaggacacatccatttaacggctactttgaactgtgtcgttcaccgagcaagcagattccactggcaggcaaagctggtatcaatcaggtgcgtccattgtcaggacaccaacagggtgttgtttgggaaaagattggtgtggaggtagttcataacatgcagccattgcacgaaatcaagaatccgagcagtgaggggcggaaggccatagactctggcattgaggattgtgtaaagaaacccatgcatcatcgtcttcagtacaaaccagtggatcaggagaatgcagcaagtaatgaccagaagagtacagagttcaacgagccaacagctgagggaacttccgctggggtgaaaaggaagctgaccaccccaagctcacctgtcaagaagcagaagccactcgggcaatggagctgcactatctgccaggctaacccagctagccagcgccaacttgagcaacaccttgccggcaagcggcaccagtcaaatgtcgcagcactgcaaccatctcagagcaacagcagcagccctgagcctgacacaaaagcgacgcccgcgaggagcaggatcatcgcgacgaacgcgcagcaagacggcaagcaggatgtgccggagaacagatggacgtgtacactctgccgggccaagtgctacactgaattgaactactacagccatctcgggggcttgtggcaccgggagaaggcacaggccaggcgcgaggagcacttgaggttctactgctcggtgtgcgacctgcaatgcaacagcgagaaaatgctggagtcacacctcggcggtaggaggcatcgggagactctggaggcgcgcgactaggatgccgaggcacggctgcaggctgacccgtccttgttcacggggaagctgttgtggctgggttccggcgggtcgatctgccattttgaggggcactacggtggtgcacgaagctgctatcgctggtctgctgctggactctgcctagttcgttgatttctctcgtttcgagcttttagtttcacgttggtaggttttaatgttatgcgacttttgatcttcgggcccaagacaaaacagacttgaaatgcgtatgtttcgatgtagtagttggttggtgttgcttattttgcgacgttttttttattttttttaaaacgtactagttgaatcctccacgctttgcatcgggaatgcgttgaaataattccacgagaac

SEQ ID NO: 7570 - DNA, 817 bp, Zea Mays
tctgtcgttcgcatttcgtccgaacactggattttagatgtggaatctgtaagttttttgcccaactactttgttcaggcttatgtcactgccttctccttcggtatgggttccattccatggatcataatgtctgagatccttccggttagcatcaagtgtgtggcaggaagcttcgcgacccttgccaactggttgacgtcctttggaataacaatgacagcaaatttgcttctgaactggagcgctgcaggtacatttgcctcctacatgatggtgagtgctttcactctcgtcttcgtcatcctttgggtaccagagacgaagggaagaacccttgaagagatacagtggtccttccagtgagctccggcattcatatgtacatgcaaatagcgtggcaaatcctccaggatcccaataaaagatatagtgaaatatagcagaagctatttcatttagcattttttatagtttaaatggaatttcgctgccgattctgcatgagaacatgtaaataaggagatttcacgaacatgaacactcaaatacatgtacaggcctgtaaaagaagatgtctctagatccattactttaatattcgtggaatcatagccagaagtataagctagtgaggggaattgtagatcaacgggaagatggtgatattctgatacaatgatttttatgctgagttttggtggtttgtcaaccactttattctcgttgaggcaagcaggacagtgaagttagaaatcctttaagtccctcttgaatttaagtaaactccggccctcaaaagtaaaaaaaaattaaa

SEQ ID NO: 7571 - DNA, 961 bp, Zea Mays
ggcggggttctgcgctcaacattcgcctcgtgctctcggccttttggattcgggattcctcctcctccttctcctcctgatcacctcccactcccactcggccagccccacccaccgccggccccccacgcaacggggagcacaggagcagatcgatccagcctcgcggccgcgccacgcgaccgaccgagctgcttgcctgcctgcgtgcctgcgtggtgatcacgtcgcgcctggcggtggtgtgggtccggcgggcaacaaaggcgccagcatggcgagcaacaacggcggcgcgatgcaggagccgctgctgccgaaggcgcccaagagcggggggtggctctggaaggggacgcgcccgtccgcgtccggcgacctcccgtcgtccaaggccgtgctgcggccgccccgccacgtgcccgcgctgctctgcacgctcatcgtcgcgctcggccccgtccagttcggcttcaccagcgggtactcgtccccgacgcaggacgccgtcatccgggacctcaacctctccatctcagagttctcggcgttcggctcgctgtccaacgtgggcgctatggtcggggcgatcgccagcgggcagatggccaagtacgttgggcgcagagggtcgctgatgattgccgcggtcccgaacatcatgggctggcttgcaatctctttcgcaaaggacactacgtttctgtacgtggggagattactggaaggatttggtgttggcgtcatttcctatgtggtgccagtatacattgcagagatatctcctcataacatgagaggagcccttggcgctgtgaacccgttgtctgcaacctttggtgtcctgctttcctatgtgcttggcttgtttttcccttggaggcttcttgcattaatagtaggaatgtagtaggtacatatttcggtgtttaggcgcccctactgttctattgtaaagtgt

SEQ ID NO: 7572 - DNA, 2200 bp, Zea Mays
cggggttctgcgctcaacattcgcctcgtgctctcggccttttggattcgggattcctcctcctccttctcctcctgatcacctcccactcccactcggccagccccacccaccgccggccccccacgcaacggggagcacaggagcagatcgatccagcctcgcggccgcgccacgcgaccgaccgagctgcttgcctgcctgcgtgcctgcgtggtgatcacgtcgcgcctggcggtggtgtgggtccggcgggcaacaaaggcgccagcatggcgagcaacaacggcggcgcgatgcaggagccgctgctgccgaaggcgcccaagagcggggggtggctctggaaggggacgcgcccgtccgcgtccggcgacctcccgtcgtccaaggccgtgctgcggccgccccgccacgtgcccgcgctgctctgcacgctcatcgtcgcgctcggccccgtccagttcggcttcaccagcgggtactcgtccccgacgcaggacgccgtcatccgggacctcaacctctccatctcagagttctcggcgttcggctcgctgtccaacgtgggcgctatggtcggggcgatcgccagcgggcagatggccaagtacgttgggcgcagagggtcgctgatgattgccgcggtcccgaacatcatgggctggcttgcaatctctttcgcaaaggacactacgtttctgtacgtggggagattactggaaggatttggtgttggcgtcatttcctatgtggtgccagtatacattgcagagatatctcctcataacatgagaggagcccttggcgctgtgaacccggtttttgtctgcaacctttggtgtcctgctttcctatgtgcttggcttgtttttcccttggaggcttcttgcattaataggaaccctgccctgcttactgttggtggctggtctattcttcattccggaatctccaagatggctggcgaggatgaatatgatggatgattgcgagacttctctacaagttctgaggggatttgatgctgacatcactgaagaagtgaatgatataaagatagctgtagcatcagcaaacaaaagtggtacaataagctttcgagagttgaaccaaaagaaataccgcacgcctctaattctaggaattggcctacttgtgttgcaacagctaagtggaataaattgtataatcttttattcaggtagcatcttcaaagctgcagggctcaacaacagtaacctggacacgtgtctcattggagctatctcggttcttgccactggtgtcacaaccacgatcttggacagagctggccggagaatcctcctcattatttcttcttctgggatgaccctaagccttctggcagttgctgttgtattttgcatcaaggataacattgcacaagactctgacttgtacaacatcttaagaatagtgtccttggttggtgtcgtggcttatgtcactgccttctccttcggtatgggttccattccatggatcataatgtctgagatccttccggttagcatcaagtgtgtggcaggaagcttcgcgacccttgccaactggttgacgtcctttggaataacaatgacagcaaatttgcttctgaactggagcgctgcaggtacatttgcctcctacatgatggtgagtgctttcactctcgtcttcgtcatcctttgggtaccagagacgaagggaagaacccttgaagagatacagtggtccttccagtgagctccggcattcatatgtacatgcaaatagcgtggcaaatcctccaggatcccaataaaagatatagtgaaatatagcagaagctatttcatttagcattttttatagtttaaatggaatttcgctgccgattctgcatgagaacatgtaaataaggagatttcacgaacatgaacactcaaatacatgtacaggcctgtaaaagaagatgtctctagatccattactttaatattcgtggaatcatagccagaagtataagctagtgaggggaattgtagatcaacgggaagatggtgatattctgatacaatgatttttatgctgagttttggtggtttgtcaaccactttattctcgttgaggcaagcaggacagtgaagttagaaatcctttaagtccctcttgaatttaagtaaactccggccctcaaaagtaaaaaaaaattaaa

SEQ ID NO: 7573 - DNA, 1100 bp, Zea Mays
cgccggtgttgtcgccgttggaccatgaaccagctgtcgaccgggagctcatatgagctcggtgagaaccagttcaccgacctcaccgaggaggagttcaaggacacatatcttatgaagctcgacgagcagccccctgcagctgaggccatgccaccgaccgtcggcaccatgagcacagcaggcatgtccaacggcaacaacaccggcgaggctcccaacagtgtggactggaggaccaagggagcagtgacgcgggtcaaggaccagcaacaatgtggctcttgctgggcgtttgcaacggtggcgtccatcgaaggtgtgcaccagataaagacaggtcgtctggtgtcgctgtcggagcaagagatcgtggactgcgaccgtgggggcaacgacaacggctgccgtggcggttcccctagatccgccatggagtgggtcacccgcaacggcggcctgaccaccgagtcggactacccgtacgtgggcagccagagacaatgcatgagcggcaagcttggtcaccacgcggccaggatccgtggctaccaggcggtgcagcgcaataacgaggccgagctggagcgcgccgtggcgggacagccggtcgccgtgttcgtcgacgcgagcagggccttccagttctacaagagcggggtcttctcgggcccctgcgacaccaccaccgtcaaccacgtcgtcacggtggtcgggtacggatcaaccggcagcgacagcggcggacgcaagtactggatcgtcaagaactcgtggggtcagggatggggagagaatggctacgtgcggatggcgaggcgtgtcagggctcgggagggcatgtgcgccatcgccatagagccctactacccagtgatgtgatatctccgtactagttaccggctgcctcctgatcctaaacaagctagtatgcttggagaaggatgcatggaattaaataaactacaactcaacgaaacagtgtgtgtattgccctatgtcgttcgatgttatcgtttgtatagatgatctacaacttttattttggtggttttatcatacgaggtcgtttgaaaaactcgaaaaattaaggataaaaa

SEQ ID NO: 7574 - DNA, 1828 bp, Zea Mays
atccggggccactaaacgcagatttcctcggttccttgtacgttcagggccggacgacggggacagacagcggtgtcgcggggccacctgcttcccaacgccgaccgcacctgctgccctgtcgtccgccctccttcccttctcctcccctccaactgtttcctcaacctcccgacccaaccacggccgtgcccgccaaggcgccaaccgcacagcagctggggtgctgacgtgctgtgggtggttctgttgtccatggcgcggaagcatcagcatgttgccatatttaccacagcgtgcctgccgtggatgactgggactgcggtaaacccactgtttcgggctgcataccttgccaaggctggagattgggaggtcacgctggtggtgccttggctgtccaagggggatcaggagctcgtttatccaaacaagatgaggttcagtttgccggcagagcaggaaaactatgtgcggcggtggcttgaggaacggactgggctgttgccgaagtttgacataaagttctatcctgggaaggttataagattgtctgcagcaactcaggatgttccaaggtctgtgatttgtaatgttcatggagttaaccccaaatttattgagattggcaaattgaaacatcagcagctatgccaaagagagcaagcattcttcaagggtgcatattatatcggaaagatggtatggagtaaaggttacacagagcttcttcagcttcttcataagcaccaaatggaattgtctggccttaaaatggagttgtatggcagtggggaagatgctgatgaagtaaaggcatcagctgagcgactgagcttagatattagagtctatccaggccgtgatcatggagattcaatatttcacgactacaaggtcttcataaacccaagtacaactgatgtggtatgcacaacaactgcagaagctttggcaatggggaagattgtgatctgtgcaaaccatccttcaaatgtttttttcaaaagatttcctaattgtcacatgtacaatactgatgaagagtttgtgagactaacaatgaaagctttggcagaagaacctatcccactgtcagatgatttgcggcatgaactttcctgggaggcagcaacagaaagatttattagggttgctgatattgcaccaactgtgcctgtgggacaaccaccaccctcctcacagcatttcatgcgcatctccccagatgaactgcagaagaacatggaagaggcatcggcatttttccataatacaatctctgggtttgaagctgtgcgttgtgtgttcggtgcaataccaaacacactgcagccggatgaacagcaatgcaaggaacttgggtggaatttgcagggatagcattagcttttcttgcgatgctgttgccatggaccatagaatgaaccagtctaactcaacggcaaaaagatgtgtcgctcggagaggttctcagattgatcaaacatacattctatgtggtgttctggtgtggcggcactgcattttttcttcatatatcaaaggcgttctgaagttcctggatgcatcgtatcttctgattgttaatcttaagcagtctgaagtgcacactagtattacagtctcatatatgtggactgtttttcatcgtgttgtttcccaggattgacgcgtgtgttgaaaatcttattgtataataatatgccccttgttttcgcagccatccatgctgaaacttttactacaccgcctaaaatctgtgtgctagttgatactacctgtgttctcgataaataaaaaagaacagaaaaagtaaaaaaaaaaa

SEQ ID NO: 7575 - DNA, 2318 bp, Zea Mays
atttcaacgggacgacagttcgtctccgcccgcatcgattgttgtccgctgttctccttcctcctcgtcctccttcaggccagcgggcaagaagaagaagaagaaaaatcaaggcttgcggcgagaggctgtgcccggccgaccggcgagcgagcttcgtacgcgcgtcatgggtggcggcagcaacagaggcggcgccggcgccggcgaggagagcggcagcgaccacgacggtgtgctgcggaggccgctgctcaacacggggagctggtaccggatgagctcgcggcagtccagctttgccccggggacctcctccatggccgtcctgcgcgagtcccacgtctccgccttcctctgcacgctcatcgtcgcgctcggccccatccagttcggcttcaccagcggcttctcctccccgacccaggacgccatggttcgggacctcaacctctctatctccgagttctcggcgttcggatcgctgtccaacgtcggcggcatggtcggggcgatcgccagcgggcagatggccgagtacattggccgtaaagggttttagtctgtccgagtccgagagatggtgtggattgtgtatttggtacataagttcagtctggtgatcagttcgttgatgattgctgcaatcccaaatatcatcggttggcttgcgatctcctttgcaaaagatgcctcatttctatatatgggacgattgcttgaagggtttggtgtcggcatcatatcctacacggtaccggtatacatagcagagatatctcctcagaacatgaggggagctcttggttctgtgaaccagttgtctgtgacctttggcatattcttggcctatttgctcggcatgtttattccttggagacttcttgctgtgattggagccttgccctgcacaatgttgattcctggactattcttcattccagaatctcccagatggctggcaaagatgaatttgacggaagattgtgagacgtccctacaagtgctgagggggtttgagactgacatcacaacagaagtgaatgatataaagagggcagtggcatcatcaagtaagaggaccacaatcagttttcaagaattaaaccaaaagaaataccgcacgccactacttctagggattggcctacttgtactgcaaaatcttagtggaatcaacggtgtactgttttatgcaagtagcatcttcaaagctgcaggggttacaaacagcgacttggccacctgttcacttggtgctattcaggtccttgctactggagttacaacatggctgttagaccgagctggacgacgcatccttctcattatttctacctctggcatgactctatgccttcttgccgtttctgttgtattttttctcaaggataacatttcacaggattctaactcatactacatcttaacaatgatctcccttgttggtattgtgtcttttgtcattaccttctcgtttggtatgggtgccattccatggctcatgatgtctgagatcctcccggttagcatcaagagccttggcggaagcatcgcaacactggccaactggctgacatccttcgccataacaatgacgacgaacttgatgctcacgtggagtgttggaggcacttttctctcgtacatggttgtgagcgccttcaccatcgtttttgttgtcctttgggtgccggagacgaaggggagaactctagaggagatacaattttcgtttcgctgagcattcagcgtcagctgcaatggttgcccgagtgtttatcttagggcctgtttcgatcccatgagctaaagcaaaaagaagctaaaatttagtcactttataaactaaagttccaatcaggaggagctaaaagtgaataaaatagcaaaagaatatcttttagtcacttttagcttctaaagaggagctagaatttagtcccttgttttagcttatactccttccatcctaaaaaaatataggtctttctaacttttcttttttctgttcatattcattcgaataatgataaatatagacatacgtataaactattcattaataaatgtatcaaataaattataggcctgtttggtttgctgtctaatttatcatattttaccacacttttgtgactaatattatggcccgtttggcacagctccagctcctgattctaagcgaggatctggaggagccgtgccaaacggatattttttaaactgattctcgtgtggagccgaaagatcgggagtcgtttttgtgaagaaaggtgggatctaaaaaaacctgctccaccctccattaaaacagc

SEQ ID NO: 7576 - DNA, 2799 bp, Zea Mays
agcccgccctcccccgcaccgttctcctcaggacgaagagcctacctttccccagctcttcgtctacagcactgccacattagtagttagttaccagcagtactactcttgtgtagtagcttttaatttcccccagctagctagctagtttctacttccgtccgcgcgcgctcatctgcgcacgcacgtgtccccgtccgcaatggagtccgaggccggcctgcttgtccgctcctccctgaacggcgagggcctgtgcatgccggcgccgcgcgccgacccgctgaactggggcaaggccgcggagggcctgtccgggagccacctggacgaggtgaagcggatggtggcggagttccgcgacccgctggtgaagatccagggcgccagcctgagcgtcgcgcaggtggccgccgtggccgtgggcgccgggggcggcgaggcccgcgtggagctggacgagtccgctcgcgagcgcgtcagggccagcagcgactgggtcatgggcagcatgatgaacggcaccgacagctacggcgtcaccaccggcttcggcgctacctcccaccgccgcaccaaggaaggcggcgcgctccagagggagctcatcagattcctcaatgccggcgcgttcggcacgggcgccgacggccacgtgctgccggcggaggccacccgcgcggcgatgctcgtgcgcgtcaacaccctcctccagggctactccggcatccgcttcgagatcctcgaggccatcaccaagctgctcaacaccggggtcagcccgtgcctaccgcttcggggcaccatcaccgcgtcgggcgatctggtcccgctctcctacatcgctggcctcatcacgggccgccccaacgcgcaggccgtcaccgtcgacggcaggaaggtggacgccgccgaggcgttcaagatcgccggcatcgagggcggcttcttcaagctcaaccccaaggagggcctcgccatcgtcaacggcacctccgtgggctccgcgctcgcggccaccgtcatgtacgacgccaacgtcctggccgtcctctccgaggtcctgtccgccgtcttctgcgaggtcatgaacggcaagcccgagtacaccgaccacctcacccacaagctcaagcaccacccggggtccatcgaggccgcggccatcatggagcacatccttgagggcagctccttcatgaagcacgccaagaaggtcaacgagctggacccgctgctcaagcccaagcaggacaggtacgcgctccgcacgtcgccgcagtggctcggcccccagatcgaggtcatccgcgccgccaccaagtccatcgagcgcgaggtcaactccgtcaacgacaacccggtcatcgacgtccaccgcggcaaggcgctgcacggcggcaacttccagggcacccccatcggcgtgtccatggacaacgcccgcctcgccatcgccaacatcggcaagcttatgttcgcgcagttctccgagctcgtcaacgagttctacaacaacggcctcacctccaacctggccggcagccgcaaccccagcctggactacggattcaagggcaccgagatcgccatggcctcctactgctccgagctccagtacctgggcaaccccatcaccaaccacgtgcagagcgcggagcagcacaaccaggacgtcaactccctgggcctcgtctcggccaggaagaccgccgaggccatcgatatcctcaagctcatgtcgtccaccgaggacatattctggtgcacatagaagactggtgtacatggtgcacatattaaatcattaacactcattttagatctaacgtctctagttgattattcaatttacaaataacaccttccaccactacacaacaccacgttggagggtgtccttaataaaatataccaaacaactagagacattagatctaaaatgagtagtgatgatttaatatgtgcaccatgtgcaccaatgttccatgtgcaccggatatgttgtcgtcgtccacctacatcgtcgcgctgtgccaggccgtcgacctgcgccacctggaggagaacatcaagacctccgtcaagaacacggtgacccaggtggccaagaaggtgctgaccatgaacccctcgggggacctctccagcgcgcgcttcagcgagaaggagctcatctccgccatcgaccgcgaggccgtgttcacgtacgcggaggacgcggccagcgccagcctgccgctgatgcagaagctgcgcgccgtgctggtggaccacgccctcagcagcggcgacgcggagcgcgagccctccgtcttctccaggatcaccaagttcgaggaggagctccgcgcggtgctgccccaggaggtggaggccgcccgcgtcgccgtcgccgagggcaccgcccccgtggccaaccggatcgcggacagccgctcgttcccgctgtaccgcttcgtgcgcgaggagctcggctgcgtgttcctcaccggcgagaagctcaagtcccccggcgaggagtgcaacaaggtgttcctcggcatcagccagggcaagctcgtcgaccccatgctcgagtgcctcaaggagtgggacggcaagccgctgcccatcaacatcaactaaaagacgccaggcgccgccatccatgctgccgcccgcgcatggccggaggagaagaggaaaatacatgaaaaaataaaacttgtacacgtgtatgtctccagattgtgccaccgtcgttctcgtcgttgacttttggttgtattggtcgatccatatcaaaataaaaataaa

SEQ ID NO: 7577 - DNA, 1448 bp, Zea Mays
aacaccgattcgtttccccttggcacctggcgccctgtcgccttcgaaaaacagccgccgccgtcgcccgtcccggatccgacggcccccgctccttcgtctagtatttatactagtgccttgccggcgctgctcctgttgcctctcgcatttgcccacgcccgcagcgcctcgcctcggctgctctacctctatcccgcgacccgcgagatcggaatcgcggcgccccgccgccctcctccaaaatggcaccgtctctgctcggggggttcaccaagtcgttggccatgacggtgctctccgagatcggggacaagaccttcttcgccgccgcgattctggctatgcgccatcccaggaaactcgtattggcaggctgtttaactgcactaatagtcatgacagctctatcggcttctctaggttgggttgcaccaaatctgatttcacgtaaatggactcatcatttgaccactctattgttctttctatttggcatttggtcattgtgggaaggcttcaaggaagatgggtaccgagattcggaagaattggctgaagttgaagcagagctggatgctgcctttaagagtaataaaggtgaatctaaaaataaatttaaggcgaatgatgatatgaagaaacagcaaagaccatttctcatgcagttcttctcaccaatttttctgaaggcattttctattacattctttggtgagtggggtgacaagagccagattgctacaattggcttggctgctgatgaaaacccgttcggtgttgtcctgggtggaatcatcactctgcactactgctgccgttcttggtggaaagagcctagcgtcccagatatctgagaagatggttgaactgtcaagcggagtgctcttcctgctcttcggtatcatgtccttactctctggaccagaaggagaattgtaatccctgcttgagcctttttcagctagctgattaacatggctttctcttcttagacctatcttatttcagtacatgaatgatggcaacgaaagccatccatccatggcgaacaggatggtgatttaacagtttagccgacacgctgtaaacatttcagtcgcccttcaaaaattactacatgttacagaagtctgtagcgattgtatatttgtattctgtcgtgcccagcacgtgaaattttgttatcgcaattacatgcgttaacaaagctttgttcgtgaaccaagtattcaggcaattaatatggggcttatagcaggcctttgtcttttttcgttgtgttattcctttaatattaaatgtcggctagttttctatggaacttcaagtcttcaattgtggcgaaggtaacgaaacaaggccaatcttattgaatgttttatcaaaattttctggacattaaataaattgatatgacaatataaatggagagataataaaagttt

SEQ ID NO: 7578 - DNA, 1770 bp, Zea Mays
cttgtcttcagttcatctagcctggtgttggattctgtactacgcacagcacgcattcctgggctcagctggtccaaggaacagcggagccttgccattcagggaagcgaggcagagtaccgaaggtgcagcgcgtcgtcgacggcctccctgcttctctgagacggcgagaggatggccggcgggtttattggcggaggcggggcggccgccgggagggccgagttgtacgagggcaagatcaccggctacttcatcctcgcctgcatcgtcggctccttcggcggctccctcttcggctatgacctcggagtctccagcggcgtgacttccatggacgacttcctcagaaagttcttcccggacgtgtaccggcggaagcaggcgcacccacacgagacggactactgcaggtacgacagccagctactgacgctcttcacctcctctctctacttcgcgggcctggtctctacgttcggcgcgtcctacgtgacgaagcgccgcggccggcgcgccagcatcatggtgggcgccaccagcttcttcctgggcggcgccatcaacgcggccgccgtgaacatcgccatgctcatcgtcggccgcgtgctcctgggcgtcggcatcggcttcggcaaccaggccgtgccgctctacctgtcggagatcgcgccgtaccgcatccggggcgccgtgaaccagctcttccagctcaccacctgcctcggcatcctcgtcgccgacatcatcaactacttcacggaccggctgcacccgtgggggtggcgcctctcgctggggctcgccatgggccccgccaccgccatcttcgtcggcgcgctgttcctgcccgagacccccaacagcctcgtggagcgcggccacctggaggaggcccgccgcgtgctggagaaggtgcgcggcacgcgcaaggtggacgccgagttcgaggacctcaaggaggccagcgaggccgcgcgcgccgtcccgggcacgttcaggaacctgctcgccctgcgcaaccgcccgcagctcgtcatcggcgcgctcggcatcccggcgttccagcagctgtcggggatgaactccatcctcttctactcgcccgtcatcttccggagccttgggttcggctcctccgccgcgctttactcctccatcatcaccggctccatgctcgtggttggcgcgctcctctccatggtcgccgtggaccgtctcggccgccgcttcctcttcatcgaggctggcatccagatgatctcatccatggtggtcatcgctgtgatccttgcgctcaagttcgggaaaggcgaggagctgagcaagggcgtgagcacggtgctggtggtggccatctgcctcttcgtggtggcctacggctggtcctgggggcccctgggatggctggtgccgagcgagctgttcccgttggagatgcggtcggcggggcagagcgtggtggtgtgcgtcaacctcttctggacggcggccgtagcgcagtgcttcctcgccgcgctgtgccacctccggtggggcgtcttcatgctcttcgcctcgctcatcttcgtcatgtccatcttcgtcatcctcctgctgccggagaccaagcaggtgcccatcgaggagatctggatgctcttcgacaggcactggtactggaagcgcatcgtccgccgggaccccaagtaccagcagggcaacctccatcaccagcagcaggagatgtcctccagagcatgaacatgacaaacagtaattttctatata

SEQ ID NO: 7579 - DNA, 1226 bp, Zea Mays
tcgagatcgctctcgtttgtactttctccctttgaggaaagagtttccccttttctgtgcttcaagttcttctggtatcgccagcatgggtaggggaaggattgagatcaagaggatcgagaacaacacgagccggcaggtcaccttctgcaagcgccgcaatgggctcctcaagaaggcgtatgagctctccgtcctctgcgacgctgaggtggccctcatcgtcttctctagccgtggtcgcctctacgagtatgccaacaacagctgctgcagtgtcaaggctactattgagaggtacaagaaggcacacaccgttggctcttcctctgggccaccgctcctagagcacaatgcccagcaattctaccagcaagaatcagcaaaactgcgcaaccagatccagatgctgcaaaacactaacaggcacttggttggtgattccgtgggaaacctgtcactcaaggagctgaagcagctggagagccgccttgagaaaggcatctctaagatcagggccaggaagagtgagctgctggctgcggagatcagttacatggccaaaagggagactgagcttcagaatgaccacatgaccctcaggaccaagattgaggagggagagcaacagctgcagcaggtgaccgtggcacggtcagttgcagcagcagcagcagctgccaccaacttggagctgaacccattcttagagatggataccaaatgcttcttcactggcggccccttcgcaacgctggacatgaagtgctttctccccggcagcttgcagcagatgctggaggcacagcagcgccagatgctcgccaccgagctgaacctcggctaccaactggcgccgcctggttctgacgctgccgacaataaccctcatcatcagttctaaactggatgcatgcacgagaagcttttcaagcgaactgtgaacgatggaagctggctgttgcctctagatgttcttggcttccatgacctagcttattatggtgtgtattgttgttgccttttgtgtgtgattctccttgctactctactgatggagaactaaacctaatcgattggacataatgatcaaatgctacagatcctgtgatgctgtgatcaggttaaggcaaaacatgtatactgattgcttaaatgggtttacgagtgacgacaatgctatttgttgcttctattactgctcaactctctcttgcttccggttt

SEQ ID NO: 7580 - DNA, 1450 bp, Zea Mays
atacaaactaaaaaaacgaacacccccgttcaccgaatcaccgcctcgtcacactccagcccttccccccgcgccggcgcggcgaggccaccgaccggctggcgggtgttgcttcttcttctcccggcccacccggcctgcccgcaccaccgacccctccgctgagcgcgctcccacgcccattgaatcatagcgcgccgctcagtcgagcgaggatttctctaggatagcagccgccatcacctcctcgcctcgccgcgctccgctggtgctgctgggtcgctgctgagcggagcgggaatcggaccggactcggttcgaattcgtcctcaccttttcgtcgttcggatgccagaagccgagtggaatgatgaacacactaggattgtctgcgaactctttgaagaacaagttcgggctgggaacaggccaaacacgcatctgaacaacattggttaccgccaagttgcggctaagtttcagcagaggacagagcttctctatacaaaattgcagcttaagaacaaatgggacaagtttaagaatgattacatcacctggaggaagttgcttgtagtagggaagggtttaccctgggacacagcaaaggggacatttgttgctgacgaagaatggtggaagaagatcaataaggagctgccgggtgcaaggaaatttcgacatggcggtctacatcatgaggataagttgaatgtaatgtttgactacatcaccagtaatggtgtggatccttcaccgcctgcgccggaaagcccgaagaatggggtgaatcattcgccaccggctgcaactggtttgccatctgctccagactgcgcgctcaatggagtggatcattcgcctgtgactgcacatggtttgccatctggtccatacagccccatgaatgggatggatcagttgccactacccgcacatgatttgcgaagtgttcaagaaatccccatgaatggtgtgaacctcgatggattggacaacaacactgaagataatgatgacatttatcaagagcctgtgtttcagtatacttcaaacaggaagaagagaccgattagtttcagtgctacaaagaagaacaagaaaaacaaggctgaaactgctctgctcatgcaagctcatttgtatcgcataactgagctggctcagaaagcacaggatactttcaaaaagttcagctcccaagctgacttggtgccatggcctagcatccaggatgttatgacacttgtctgggaatgcggagcacggtgtggaagcaatgagcatttcatcgcaactgaactgtttgtcagtagagaacagagggagatgttcctgaccatggaaacggctgaggaacggttccagtggcttcgaagaaagtacattgtcaagtatttgtcagcaattatatctttcggacgcaaggcgggtcaaataatcgtgtagg

SEQ ID NO: 7581 - DNA, 3125 bp, Zea Mays
atggagaaaagcaagttgaaaaaggttagagaatacagacttggaaaatgctatcataacaaaacgggagaggagtttgtggcgcactcgtccaatgttaactgcctcaagattgggaggaagacctcgcgggttcttgtcacaggaggagaggaccataaggagcagccagtggaacaataaagctatgggatttggaggaggcaaagattgtccgcactcttactggacatagatcaaactgcatgtcagttgattttcatccgtttggggaattctttgcctctgggtcactggacactaatctgaagatatgggatataagaaggaagaattgcatccatacatacaaaggtcacacacgaggggtgaacactattagatttacacccgatgggcggtgggttgtgtctggtggcgaagataatatagtaaagctctgggatctgacagctggaaagttattacatgaattcaagtgtcatgagggtcagatccagtgcatagatttccacccccacgagttccttctggcaacaggttcagctgataaaactgtcaaattctgggatttggagacatttgaattgattggatctacaggacctgagacaacaggtgtccgatccatgacattcaatcctgatggaagatctttgttatgtgggctgcacgaaagcttaaaggttttctcttgggagccaataagatgccatgatactgtggacgtgggatggtctagacttgccgatttgaatgtccatgagggaaaacttcttggttgttctttcaatcaaagttgtgttggaatatgggttgttgatctgacgcgtcttgagccatatacaatgggtacttcaacaaaagtaaatggtcattctgaattgaagactgtttctagcggcactttgcctttacaaaatgatagtggttcaagggctaacatagggcgatcatcagtcttgcaaaatacagagaacaaccttaaaactacttcaggaagactgtcggcttcacagaactcagattctgcacccaaagaaactaactcggcaccttcaagcgggttgatcccaagcacaccacatagggctggagttggctcccataatagatctgttggaaattcagcttttcaatctggtggtaccaccttgaagagaagttcgttgaggaataacagtgcctctaatgttcacaatttcagtaaagctgatgtagtgcctgtcattgttcccagaactagctcaggaggggagttggctactgattctagaagcgatgctgctgatgtggcacccgttcttccgaaggtaaccagaagggttgaacctgctaccgattctagaaaagaaagtaatgatgtggaacttgttgttcctagagcaagctcaagaatggaaatagccgatttagcacccatttctagttccaagtcaggcagaaggttggagtctgcccctgattcgaaagaagaaagtgctgatacagcacctgttgttgtttccaatcccagggctaatgtaagaatggaaatagtctctgattctgcgcccgctctttcaaagtcaaacagaaagctagattctggcactaactcaaagaaagaaagtgctgatgcagtcattgtacccagaacaaattctagaatggaaatgatttctgattctaggagagaaccctctgctggaagaatatcaccattcagaatccagtcaagatatgctgagccacggaagctagcccatgccagaactgattcaaacaaagttgatagcagaagtaaaattactgaaacagaagacttcaattgccaaatatttcttccccgtagaaacagtgtttttcaaacaataagttctgaagaacctcgtgaagatgtaaagtgtggtccagttgacaggatgttcctagaatgcgcaaaccaggagacaactgctatatcgaagtttcaagagcagagaggaagcaatcaagcttctgaagctccaatcatagctagtgatgaagatgttctatctcttatcatggagcgacatgatctatttttaagctcaactaagtctcggctgatgaaattgcagattattcatcaaatgtgggaaagaaatgacatcaggggtgtgctctctgcgatggacaggatgggtgatcatgctgtctgtgctgatatggctagcgttctcatggagaaaagtgaaacaatcacactagatttatgtacctctatcctgcctgtcgtcaccgatcttctggagagcaaaattgacagacacttagtcgtcgcattggaattgttggtgaagcttgtaaggacttttggtccaatgatacattcaacagtatcgtcaggtccttgtgttggtgtagaccttgaggcagagcaaaggagggagcgctgcaacttatgcttcatcgaattggagaaggccaaaaataagcttccatctctaacaagaagaaaaggggcggttgcaaatgctgcacaagaacttgctcttgtcttccaggaaatcatgagttgactgacgacacactagatatacacaattagatgggacatgcttcggcctctgatggcaacaagattggatatcagctgccatggagggtgctagctattcagtcttagcgacgtcatcaagctccaaggccacagcaccaacaaatgcattttgttgctgctgttcgtgccttttgtacacatgctaacacataatccatgtcatttgtgaagagaagctgccatggacagtgacttcatccacaatattatgtggatggcggcagctggagatgttaggccccgatcgaatggtgatcagcagatgagacttgcttgggcttttctggcactcgtagttctttgctgtctgtaacatctttctcatgtaccgttatcatgtgcatgtgcaacagtcaagtggttgcatttggtagtttatggttgtgctgtgtgttggtcgatttagtggtcgttgatgagtgaagcgagccatgtacatcatttttttttaagatttgatatcttctttttccttgatgactcctctcgttatacttgagtgaaaatgatatcttgtgtacttgccttgacagcttttcggaaattcccttttgtctgg

SEQ ID NO: 7582 - DNA, 3347 bp, Zea Mays
atggagaaaagcaagttgaaaaaggttagagaatacagacttggaaaatgctatcataacaaaacgggagaggagtttgtggcgcactcgtccaatgttaactgcctcaagattgggaggaagacctcgcgggttcttgtcacaggaggagaggaccataaggtcaatctttgggctattgggaagcccaattcaatactgagcttatcaggtcacacaagtgctgtggagtcggttggttttgattccacggaagtgtttgtggctgcaggagcagccagtggaacaataaagctatgggatttggaggaggcaaagattgtccgcactcttactggacatagatcaaactgcatgtcagttgattttcatccgtttggggaattctttgcctctgggtcactggacactaatctgaagatatgggatataagaaggaagaattgcatccatacatacaaaggtcacacacgaggggtgaacactattagatttacacccgatgggcggtgggttgtgtctggtggcgaagataatatagtaaagctctgggatctgacagctggaaagttattacatgaattcaagtgtcatgagggtcagatccagtgcatagatttccacccccacgagttccttctggcaacaggttcagctgataaaactgtcaaattctgggatttggagacatttgaattgattggatctacaggacctgagacaacaggtgtccgatccatgacattcaatcctgatggaagatctttgttatgtgggctgcacgaaagcttaaaggttttctcttgggagccaataagatgccatgatactgtggacgtgggatggtctagacttgccgatttgaatgtccatgagggaaaacttcttggttgttctttcaatcaaagttgtgttggaatatgggttgttgatctgacgcgtcttgagccatatacaatgggtacttcaacaaaagtaaatggtcattctgaattgaagactgtttctagcggcactttgcctttacaaaatgatagtggttcaagggctaacatagggcgatcatcagtcttgcaaaatacagagaacaaccttaaaactacttcaggaagactgtcggcttcacagaactcagattctgcacccaaagaaactaactcggcaccttcaagcgggttgatcccaagcacaccacatagggctggagttggctcccataatagatctgttggaaattcagcttttcaatctggtggtaccaccttgaagagaagttcgttgaggaataacagtgcctctaatgttcacaatttcagtaaagctgatgtagtgcctgtcattgttcccagaactagctcaggaggggagttggctactgattctagaagcgatgctgctgatgtggcacccgttcttccgaaggtaaccagaagggttgaacctgctaccgattctagaaaagaaagtaatgatgtggaacttgttgttcctagagcaagctcaagaatggaaatagccgatttagcacccatttctagttccaagtcaggcagaaggttggagtctgcccctgattcgaaagaagaaagtgctgatacagcacctgttgttgtttccaatcccagggctaatgtaagaatggaaatagtctctgattctgcgcccgctctttcaaagtcaaacagaaagctagattctggcactaactcaaagaaagaaagtgctgatgcagtcattgtacccagaacaaattctagaatggaaatgatttctgattctaggagagaaccctctgctggaagaatatcaccattcagaatccagtcaagatatgctgagccacggaagctagcccatgccagaactgattcaaacaaagttgatagcagaagtaaaattactgaaacagaagacttcaattgccaaatatttcttccccgtagaaacagtgtttttcaaacaataagttctgaagaacctcgtgaagatgtaaagtgtggtccagttgacaggatgttcctagaatgcgcaaaccaggagacaactgctatatcgaagtttcaagagcaggaagagcaaggtcaagtgtctctaattgggaagggagggatcagccccctagtcatgaagaaccaacaacaagcagttctacactggctcctaccggccatccatattcatctagaggaagcaatcaagcttctgaagctccaatcatagctagtgatgaagatgttctatctcttatcatggagcgacatgatctatttttaagctcaactaagtctcggctgatgaaattgcagattattcatcaaatgtgggaaagaaatgacatcaggggtgtgctctctgcgatggacaggatgggtgatcatgctgtctgtgctgatatggctagcgttctcatggagaaaagtgaaacaatcacactagatttatgtacctctatcctgcctgtcgtcaccgatcttctggagagcaaaattgacagacacttagtcgtcgcattggaattgttggtgaagcttgtaaggacttttggtccaatgatacattcaacagtatcgtcaggtccttgtgttggtgtagaccttgaggcagagcaaaggagggagcgctgcaacttatgcttcatcgaattggagaaggccaaaaataagcttccatctctaacaagaagaaaaggggcggttgcaaatgctgcacaagaacttgctcttgtcttccaggaaatcatgagttgactgacgacacactagatatacacaattagatgggacatgcttcggcctctgatggcaacaagattggatatcagctgccatggagggtgctagctattcagtcttagcgacgtcatcaagctccaaggccacagcaccaacaaatgcattttgttgctgctgttcgtgccttttgtacacatgctaacacataatccatgtcatttgtgaagagaagctgccatggacagtgacttcatccacaatattatgtggatggcggcagctggagatgttaggccccgatcgaatggtgatcagcagatgagacttgcttgggcttttctggcactcgtagttctttgctgtctgtaacatctttctcatgtaccgttatcatgtgcatgtgcaacagtcaagtggttgcatttggtagtttatggttgtgctgtgtgttggtcgatttagtggtcgttgatgagtgaagcgagccatgtacatcatttttttttaagatttgatatcttctttttccttgatgactcctctcgttatacttgagtgaaaatgatatcttgtgtacttgccttgacagcttttcggaaattcccttttgtctgg

SEQ ID NO: 7583 - DNA, 2982 bp, Zea Mays
atggccgatttggggagaagggcggcttgcgcggacaatgtagctcatatagtccatagcctattcgaatgccttctaagccggcccgttggcccaactgaaacattagtccgccttctcccccgagacccccgagagtcccctcgctgccgacgccacacaaacgcctccaccctcatgttcaccggcgctgcgggcggcattggcaacctgccacggccgcgcaggccgcggctcggcggaataggacacgggggcgtcatggtgtctccacagggacaggtggctctgggggcacatccgcacctagccgccccgccgtgcaccgactacgacgtggcctacttcaaggcctactcacacatcggcgtccacgaggagatgctcaaggatcatgtgagaactagtacttacagaaatgccataatgcatcacaaagatcttatttcaggcaaggtagttttggatgtgggttgcggcactggtgttctttcgatattctgtgcttttgctggtgccactcgtgtttatgcagttgatgcaagtgatattgcatttcaggctatggagattgtaagagagaatgagctgtctgacaaagttgtggttttgcatggccgaattgaggatgtcgatattgaagaaaaagttgatgtcatcatatctgaatggatgggctacatgcttttgtatgagagtatgctgggaagtgtaatttttgctagggacaaatggcttaagccaggaggtcttattcttccatcgcatgcatcgctttacatggcacctgttacgaattctcaaagataccatgatagtatttacttctggcgagatgtatatggcataaaaatgtcctctatgatgcctcttgcgaaactatgtgcgtttatggagccatcagttgagacaattagtggagagaatgtcttgacatggccagcagtggttgcacaggtggattgttataccatacaagctcagaagctcgaaaccatcactgctgcatttaaatttacgtcaatgttacaagggcagacctggtgcagtagtgagagctgtttcaccaagtcaccaagtcatgggttcgaagtaacctctccacattttcgtgggaaaagcttgccttggtttatccctttccgagaccccactcatgtgggagcctccgacattgtgtctaccctttttataagcctacactcgtttcaaagcatgcatatactgctttcttcctgttttgcactcggttgttagctgtaattgggattagacatgcactgtgatgagagacttttttcagtgctttcagttaaagggatgagccttagttgtaagttgtatttcccaacgctgagaatgaggatggcatgctactttttccatgtatatcaatccaggatgtttctaatttcttgtaactactacaaatttcctaaaacattatataaggatacaatgttctaatgctttgggaagttaggatatgatgttctaatgcttgagctggaatgcaatcaacaagagcatttgagagaatctttcatacatgtgacttattttgaggtggtgctaataaatccacctcttctgtgtagctaattatggagatatattaatctggcttatcttataattttgtgactgcttgcccagttacaggcctgatcagagtttagtttttacccatgattggtggaatataatgtgctacatgtggtgtttgatctgatacaggtatagttaaattaatttagcaccacagtctgagcaaccgcacacttttgatgccactatcatgatctaaacctctactttgtttggccagctttcttctgctgccatgtcttggttaactgctttatcgtagtgaactctcttgcttagtcacattgccataaaacttttacgatggtaattgctcaatggaaattatattgatttagcgtgcttgatctttgtcgtgattgtgtttatatcatgtaggtgttacttagtgtagatgggataatagtgccaatcatgctctcgttatcttgtgttatttttttagctccattgcatggttttgcattttggttcgatgttgagttcaatggaccagtacgccagaaatcgaagaagcaacctagtcaatcattggatgagaacacccaaaatgccagcccaagcaataggaagagaaaaccagatgtctctattgttctttcaactgcaccagaggatgcccctactcactggcagcagttgttttttgtcagacccttttgtacttgtttgaacctatagaactaaacaaagatcagatcatagaaggctctgttactatctcccagagccagcaacatgctcgcttccttaacatctgcctgaaatactttactggcgaccaatggtatgtcaaagaatctgtgatgcgataatctgggggaaactgaaacatagtaaccttctttctgaataggctcaaatctgttttgtatgaaggacaaccttgctgctggtcattgcggtttaggagcattctgactgtactgggttgtcgtggtagcaaattgataaaaaatggagtgccatttcgagtgcagcttgatcaaaatggtagtgggcctcgacaagtaatatgtgaatctttggctccaaactcaaattgacgaacaaaacatagaacatgttgacaagagtagtaccgttttctttttttttttgttcttttgaataggtacaagctgctggtactttattccccataatagactgctcattcattgtaacgcttctgcagcgtgtagtgcagcatagacggtatgattttacaaatggtagcattgaatttttacgagtggagtttttgaagagtaaaatgcatgaataaaatgtgcatggtgtctggacaagtagaatgcatggtgaatgtcagtttgtttcaatttggccattagctccttaataatcatacgtatttgatttactaggttccgt

SEQ ID NO: 7584 - DNA, 2908 bp, Zea Mays
cggcttccctgccttccactacactcgcagagtcgcaggcagtcactttgcggcgagacgcttgtgtcgctcctttccaccctcagtctcagtcctctcatgatctcattccccaatcggcgacatttccagcaatttggtagtttcccacgcaggctgcgcgcaagcaaccatcccacccctcttccgcggcagtccactgcctcccggaaaatcccacctcgctccgatccaacccgtccccgcaaccagcgcagccgccgcgacggggtccgactcccggccgatctcccgcctccaccagcgccacgtgttctacctggaagggcatgattctggagtttccttgagaaagggagtaagtgctcaaggatggcctcaagggctatcatcaggaggaggaatgacattctacggcacactcatgtgcctattttgtccccttcattcactagcacaattgggcaaggacaatttgattgtgaggttgatcatcaaagatctgtatgttacttttcaaaggaaagtttagcagattctaatcatgctatggcacattgtactttaaataagcgaaagctttgtcatctcagtagcggtttcgcatggcatccagcttgtgaggtttctcttcctacttatggttctagagcacagaactttgtattcccattgggagtcaggtgtttcctgcagtcagtccgcaccacatcaaacacaactgcacagggtcaagttcatattatggacaagaagagtgaggatgagaagcagaagcaacaaaaaaaggaggcatcccctgaagaatgtgatcaggcagtggaaggattaagcactgcaaaagcgaaagcaaaagctaagctggaggaagtgcaaaagactgaccaatcagtggtacagaaattatgggcaaagcttcttgagctgattgggctgcaaagttgaagcattggaaggatgaatttatttctacactgcagcattattggttgggcactaagctactctgggcagatgttagaatctcatcaaggctgttagttaaacttgctagtggaaagagcctcacaagacgagagaggcagcagctcacacgcacaacagcagatctattcaggctagtaccttttgcagtttttattatcgttccattcatggagctcttgctgccagtgttcctcaagttgttcccaaacatgttgccatccactttccaggacaaaatgaaagaagaggaggccctaaaaaggaaactgaaagcaaggatggaatatgcaaagtttttacaagacactgctaaagaaatggcgaaggaagttcaaacatcacgcagtggagaaatgaaacagactgctgaagatctggatgagttcttgaataaggttaggaaaggtgggcatgcctccaatgacgaaattttgagctttgcaaagctatttaatgacgagctgactttggataacatgagcagaccacggcttgttaatatgtgtaaatacatggggatccaaccttttggcacagaccactacttgcgattcatgcttcggaagaaactacaagacattaagaatgatgataagatgattcaagctgagggtgtggagtctctttctgaatatgagcttcgacaagcatgtcgtgagcgtgggcaccttggtttgttgtcaacagaggagatgcgtcaacaggaagaggagaaaaggcaagagaaagatgacaaggcaaaactggaggagccaaaggctactgaagaagatttggctttgaaggaaatgactgagcctactgttagggagaaagaggaactaaagaaagcaaaaacccacgataagaaagagcagctttgtaatatcagtcaagcattggctgtgcttgcatctgtttcttctgttaccaaggagcgacaagagtttttaagccttgtcaacaaggagatagaactatataataacatgctcgcaaaggagggtacagatggtgaagaagaagccaggagagcgtacaaggctgctagggaggaatcagaccatgctgcagaggcagctgtgggagaaaaggtctcttcagctttgattgatagggttgatgctatgcttcaaaagttagaaaaggagattgatgatgttgatgctcgaattggcaatcgctggcagctgctggatagggactgcgatggcaaggtgactcctgaagaggtagctgcagctgcaaattatctcaaagacaccataggagcagaaggcgtccaggagcttatcagcaatctttctaaagacaacgaagggaatatccttgtggaagacattgtgaagctggcgtcacaaacagaggaaaacaacgaagctgaagaaactgcacgatgatttggaatagcagccacattcttggctcttaaaactcgacggtccattccttttttaaaaggaaccgcacataataaagctagttcctggcagtctcatgcaaaaatcaccaagcaggatggtcattctttttgttctgactggcggctgcagagaaaattgtatcctgctgttgaaagatattcatttatacagttaagtcccagcacaaccgatcgttaggttaggaattctgtccgaaatggcaacttgcatttcaaacgtctgccatgaaaatgagaataaattcggcgggctctacagatttttcatctattgtctgaacaaaagtataggcatcaaataagtatctgggtaagtttatactatttgaataagaatcagctggatttgtttaaattcttaacaagaccgttttagcagtttgactatatggtcaatcaaaacactattttgtattgtatattgtactatgtgcacttttgcagtgagatttaaatatgggtatagagatagataagctactagagatagcctaaatg

SEQ ID NO: 7585 - DNA, 3092 bp, Zea Mays
cggcttccctgccttccactacactcgcagagtcgcaggcagtcactttgcggcgagacgcttgtgtcgctcctttccaccctcagtctcagtcctctcatgatctcattccccaatcggcgacatttccagcaatttggtagtttcccacgcaggctgcgcgcaagcaaccatcccacccctcttccgcggcagtccactgcctcccggaaaatcccacctcgctccgatccaacccgtccccgcaaccagcgcagccgccgcgacggggtccgactcccggccgatctcccgcctccaccagcgccacgtgttctacctggaagggcatgattctggagtttccttgagaaagggagtaagtgctcaaggatggcctcaagggctatcatcaggaggaggaatgacattctacggcacactcatgtgcctattttgtccccttcattcactagcacaattgggcaaggacaatttgattgtgaggttgatcatcaaagatctgtatgttacttttcaaaggaaagtttagcagattctaatcatgctatggcacattgtactttaaataagcgaaagctttgtcatctcagtagcggtttcgcatggcatccagcttgtgaggtttctcttcctacttatggttctagagcacagaactttgtattcccattgggagtcaggtgtttcctgcagtcagtccgcaccacatcaaacacaactgcacagggtcaagttcatattatggacaagaagagtgaggatgagaagcagaagcaacaaaaaaaggaggcatcccctgaagaatgtgatcaggcagtggaaggattaagcactgcaaaagcgaaagcaaaagctaagctggaggaagtgcaaaagactgaccaatcagtggtacagaaattatgggcaaagcttcttggtattggccctgctttacgaattattgcttcaatgagcagagctgattgggctgcaaagttgaagcattggaaggatgaatttatttctacactgcagcattattggttgggcactaagctactctgggcagatgttagaatctcatcaaggctgttagttaaacttgctagtggaaagagcctcacaagacgagagaggcagcagctcacacgcacaacagcagatctattcaggctagtaccttttgcagtttttattatcgttccattcatggagctcttgctgccagtgttcctcaagttgttcccaaacatgttgccatccactttccaggacaaaatgaaagaagaggaggccctaaaaaggaaactgaaagcaaggatggaatatgcaaagtttttacaagacactgctaaagaaatggcgaaggaagttcaaacatcacgcagtggagaaatgaaacagactgctgaagatctggatgagttcttgaataaggttaggaaaggtgggcatgcctccaatgacgaaattttgagctttgcaaagctatttaatgacgagctgactttggataacatgagcagcattaagaatgatgataagatgattcaagctgagggtgtggagtctctttctgaatatgagcttcgacaagcatgtcgtgagcgtgggcaccttggtttgttgtcaacagaggagatgcgtcaacagctcagagactggctggatctatcactcaatcattctgtgccatcgtctcttctaatactctcaagagcttttactgtatctggtaaaatgaaacctgaggaggccgttgtagcaaccttatcttccctgccagatgaagttgtcgatacagttgggactgtactgccttctgaagattctgtttcagagaggaagagaaaattggaatttctggagatgcaggaagagcttatcaaggaagaggagaaaaggcaagagaaagatgacaaggcaaaactggaggagccaaaggctactgaagaagatttggctttgaaggaaatgactgagcctactgttagggagaaagaggaactaaagaaagcaaaaacccacgataagaaagagcagctttgtaatatcagtcaagcattggctgtgcttgcatctgtttcttctgttaccaaggagcgacaagagtttttaagccttgtcaacaaggagatagaactatataataacatgctcgcaaaggagggtacagatggtgaagaagaagccaggagagcgtacaaggctgctagggaggaatcagaccatgctgcagaggcagctgtgggagaaaaggtctcttcagctttgattgatagggttgatgctatgcttcaaaagttagaaaaggagattgatgatgttgatgctcgaattggcaatcgctggcagctgctggatagggactgcgatggcaaggtgactcctgaagaggtagctgcagctgcaaattatctcaaagacaccataggagcagaaggcgtccaggagcttatcagcaatctttctaaagacaacgaagggaatatccttgtggaagacattgtgaagctggcgtcacaaacagaggaaaacaacgaagctgaagaaactgcacgatgatttggaatagcagccacattcttggctcttaaaactcgacggtccattccttttttaaaaggaaccgcacataataaagctagttcctggcagtctcatgcaaaaatcaccaagcaggatggtcattctttttgttctgactggcggctgcagagaaaattgtatcctgctgttgaaagatattcatttatacagttaagtcccagcacaaccgatcgttaggttaggaattctgtccgaaatggcaacttgcatttcaaacgtctgccatgaaaatgagaataaattcggcgggctctacagatttttcatctattgtctgaacaaaagtataggcatcaaataagtatctgggtaagtttatactatttgaataagaatcagctggatttgtttaaattcttaacaagaccgttttagcagtttgactatatggtcaatcaaaacactattttgtattgtatattgtactatgtgcacttttgcagtgagatttaaatatgggtatagagatagataagctactagagatagcctaaatg

SEQ ID NO: 7586 - DNA, 644 bp, Zea Mays
ctcaccatctcctccctggttcccatggcgccctccccttcttggtggccaacgcccctccctccatggagctcgcctcttccatggccgccctctgccccctcccttgcgtgctctctctctcctcttggcgacgactgggtgcttcttgtcccaccggccgttctggcactccgcgagaccagtaccttcaggatctcgtgacccagttccagaacgccacaaatgaaggttgttcttgagttattcttggactgcattacagagccaaatgaaaagcttgtcgagttcggcattggtggaatatgtaactcctgtgaagatcctgcaaattctttaatcattactcagtgtggtggaatcccgttggttgtacaatgcttatggagcctagtgcggaatactataagcatttctgaagatatagtgatcagctcttgagcagctagagtgatgtagttgtgggcttttgaacaatagctagagtgatatgaaacattagtgatgtagttgtggtgcttttgtgactgatcatctctggagcttttgtgaatgatctagctagctatccgtaaatgatctagttgtgaatgatattataattgtgatgcttttgtgaatatataattgtggtgcttttgtgt

SEQ ID NO: 7587 - DNA, 487 bp, Zea Mays
gcggctgtggcgagaccatttcggcggttgaggcgacacggcagaagtgagcaaagcgttcaggtgcggagccgcggagggatgggcggcaggagggaggccatagagcgggagctgaagaagcttcgggcagagcgggaggagctcgacggccggatacggctgctggaatcgcagctcgaggcagggcctgcgggattcaacggtgcggcggcggggaaaggagtaggggacgatgcgtgcggcgggagtggagcgtgccagagccgcgtgggtaacgagtttgctccggacggtagcctcccggcggatatgatctaccggtacagccgccacctccttctcccggacttcggggtcgaaggccagcggaagctgtcacagtcgtcgattttagttgttggggctggaggtttgggctctcccctggcattgtatctagcagcttgtggtgtcggttccaacaggcagaagcaaatggacagag

SEQ ID NO: 7588 - DNA, 1725 bp, Zea Mays
ctcttattgggccgcactttaaagcacatctactactgcgtgggtcagactgtgctccaggctttacgtaagcgtttacgtgggcctaggtttacgtatttgtttacgtgggccgagcccgcgtggaaaagacgtggttagttaattttggcggctgtggcgagaccatttcggcggttgaggcgacacggcagaagtgagcaaagcgttcaggtgcggagccgcggagggatgggcggcaggagggaggccatagagcgggagctgaagaagcttcgggcagagcgggaggagctcgacggccggatacggctgctggaatcgcagctcgaggcagggcctgcgggattcaacggtgcggcggcggggaaaggagtaggggacgatgcgtgcggcgggagtggagcgtgccagagccgcgtgggtaacgagtttgctccggacggtagcctcccggcggatatgatctaccggtacagccgccacctccttctcccggacttcggggtcgaaggccagcggaagctgtcacagtcgtcgattttagttgttggggctggaggtttgggctctcccctggcattgtatctagcagcttgtggtgtcggtcgcttgggcattgtggatggtgatgatgttgaattgaataatcttcatcgacagataattcataaagaagcatatgttggacaatctaaagtgaagtcagcagctgatgcttgccgggagattaattcctctatcaaagtagtagagtatcaccatactctgaagccatgcaatgctttggaggttgcacggaaatatgatatagttgttgatgcaactgacaaccttcctactaggtatatgatcagcgattgctgtgttttgctgaacaagccacttgtatctggtgcggcattaggcttagaagggcagttgactgtttatcatcataatggaagcccatgctatcggtgcctctttccaactccaccacctgtggcagcctgccagagatgctcagacagtggtgtccttggggttgttccgggagtgattggttgcttacaagctctggaggctataaaggttgcaactggtgttggttaaacttcgtggaagctctccagattgcacccattgtggcgaaaactccgttttcacagaagaagactttcagaagtttgactatgagagcttcacacagtcaccaatgtctgataaggcagcaccaagcgtgaacgtactcccagagagcgcgcggatcacttgcagagagtacaagaaactggccgacgatggtgaacctcatctactgttggacgtacggcctgcgcatcacttccagatagcttcgatctctccgtcccacaacatcccgctctccatgctggaagagaagctgcccgcgctcgaagcctcgctgaaggaagcaggagaggggtcagccttggttgtcctgtgtaggagaggtaatgactctcagagagccgtccagcttctccgcgagaagggattcgcctccgcgaaggatatcatcggtgggctgcaggcatggggacgagacgtcgatcctgatttccctgtgtactagcgagatggaaatagatgcactacaccttgtaacagtttgaatgccgccagagattctggtggtgttgcaagaacgagaactctggtactatgatttgggtactaattttgccataccgtgtacttgcaaatatatatatatatata

SEQ ID NO: 7589 - DNA, 3513 bp, Zea Mays
ggcgagcagcttcccgtctccccgtctcatcccatgtcatgactcagcaccacctcccccatcctcctctgtcctcgtataaagcgccgcagtccacgacggcgacgccgcccatgggagctggagcaccagcacacgccgctgccccggctctgcgccgcgaaccctagccgaccgcctcatggccgccgagtcctgcggcagccgcggcgcctcgcccccgccgcctccctccgctggcggcgcggccgggaggcgccgcaaggcggaggcctacgccgaggtgctccgccgcatccgcgctggcgccggcggctacggtgctgcccgccccgggttggaggacgagctctgggcccacttccaaggcctacccgccagatatgctttggatgtcaatgtagaacgggttgaagatgtcttactgcacaagaaattgctggagcaagcccataaacccatgaatggtctggtctttgatgttcgtcctgcacagttttagggttttactctggaggaaagcactggatttgagtccacaacttcctttaagcaagaagaacaagatccccagtcctcagtattcacatcaagagatcaaaggcctttgcatgaagttatatttgcatgtgacgataagccaaagcttcttagtcagttaacctctctcctcggggagcttggtcttaatatccaagaagcacatgcatattcgacgagtgatggctattccttggacatctttgttgttgatggctgggagtatgaggtaattcagcatttctggtggataaaaaactgaccaatcattgttcgatagaaccacattaaacctactgcaaatcctttaagatgaggtcatgtgtactggagctgcaatgctaccagtgtaccttttttgcgtaggtataaaaaagttttagggtctgaatctgttccttgtgtaatgatacaaacttttggtactgtatttggtattccagatacaattgggctcagaaacagatagcatacatgtttaattgtttattcctattgtttcaccaatctttgcacattctaaaactattctactataatttgacaagggtctatcaacacatgatcgaactgtgacactaaaatttacaaaattgcaagtgatgatgattccaactcattaaaaaaatcttttcttggcttattctaacacctatttaagtcttacacaatgttttttttgaggggaaagtcttacacaatgtgccacaaccagtatctgtcatagtttgtgacagactggcagcatgcctaaaggcacaatgcaagcgatacaaaacttgcctattcagttaaacttaatgcttcagggccttcagtttattttgacaaactaacatttccttttttagctgtcatattttttcatggttatcactggctactaggtaccttggattagggtgggtttgactaagaggatcctgtctcttttaacgagtgacatcttcattggctttcctttttctttttaaccaaagaaaagaaatgtacccttttagttagcaaagagatgaagagtaaaagaaaaaaacaacacacgagtgctggtagattcaacataggcggtcaatgaggaaaacagattttgtagctgaagcatacatcttgttcaggatctgttcgatcatgaacatatttttagttgggggcagttagagttttgaccttttgtatgtgcagttgtgcatgagcttaggctcaaaggaacatttttagttgctgttagtaattagttattttgttatcctctgcacaatatagatgaaaatagatggtggtaggtagatcctggtttgttgccaaaacaaaatcatctttccacttcagcaggactcactcttctgccaaacactcatcttgacggtcctccattcctatttcattgaaaccattcagtgttgtttcttgatgaactaatctcagaattctttgcagaaattgaatgttttacaaattttagggtggtgatcatttccaaaatattgatttgaagatggatgattttagacagctgtttccagatccatccaactaccagaaatcactggaccccacacaaaagtggggaccagtatggatggtagatgctggaaacgagtatgctggtcatctaaagcccacatagtcatcctaatgctgagctcaagttttgtcactgtaagaaagtttcagagttgtagcaaactttgtaactgcagtggcggcttgaatttgaaaatgtatatatgtttgtaattttttatgtttgttcacttctatttcatcctcctttttcaacaatgtccaggctgacattctccaaagtgcattgagggaaggcgttgataaaataaagtacagagcatggccgttggtaccgtcgatgtctgctaggatggatcaccaaccattggagataccatgggacgtactgtagtcaagatgtagctatcaaagtactcaagcctgagcgggttagcgttgatatgctacgtgagtttgcacaggaagtttatataatgaaaaaggttcgtcacaaaaatgttgtgcaatttattggtgcatgcacgagacctcctgttttgtgtattattacagaattcatgcatggaggcagtatttttgacttcctttacaatagacgaggaaattttcaactcccggatgtgattagaattgcatctgatgtgtccaagggaatgaattacttgcatcagattaatattgttcatagggatttgaagactgcaaatcttcttatggatgatcaggttgtcaaggttgcagactttggggttgcaagggttaaagaccagtcaggagttatgactgcagaaacaggaacctacagatggatggcccctgaggtcattgagcatttgccgtatgatcatagagcagatgttttcagttttgggatagttctttgggagctgctgaccggaaagcttccatatgaagacatgacacctcttcaggcagcagttgctgttgttcaaaaggatctgaggcctactattgctgttgatactcatcctatgctcgctgagctactccagagatgctggcagaaagatcctgctctaagaccaacatttgcagagattgtggatatattgaactctataaaggaggcggttcggagttctgtgcatcacaaaaggcattcatgtcgatctcactccgggagaagacgaggctgttgatgtgccagttttatgtggtgccgcacgcccttttcattttatttttgtagtcgagcgataacttcagaatacggccagaagagcttactgtgttcattccgagaggttttggtaactttattttttttaatttggacttatgcttcaaggattttcatcgttaaaaagcttagaggtgcatatccacgtttacatttggcatgtatctgtatctcgtactcgttttcttaagtttggcaggcaaccaagattttaatgaaaatctttaaccattactcactccgtc

SEQ ID NO: 7590 - DNA, 4848 bp, Zea Mays
attccgaaaaaaatcactaacagaaggacggttcaggaagcattgacagatagaagatggattgctgatatcacaggatcactctcggtgggagtattattggattatcttcatctttggaatttaatttcagattttgagctgctgccagatatagaagataaacatacttttagtattgctgcaaatgggacttattctgctaaggctgcatatgatgggttgttcatcggggctgtgcatttcggtcactatgaaagagtttggaaaacttgggccccctctaaatgccacttcttcctctggttatcggtgctaaataaatgctggacaacagataggttggcaaagagaggacttgatcatccggagaagtgtccgctttgtgaccaagagtctgaatctttggatcatattttggtttcttgtgtttttgcgagagaattctggttccggctgaaggttgatgtgcattttcagactacaaaatctggctcctacacctagtacggtgtcttttacgggttggtgggagatgatagacaatggctccggagatatgattatgaagggtgtcaactcccttattgccttgggagcctggattatttggaatcatcggaatcaaattgtctttgatggaatctcccctagtgtttctgcagctctttgtcaggcaagggaggaacaacagttgtgggaaatggcaggagctaagggtctctcctttcttgccgcaaccatcaggggcacctagctgcctggtttatcgctgatgggctggttttgtttttcaggatctgtttgttctttttttgtttttttctcttcttttttctttggtttttttatcccctccggggaggtcttttgtactttggtctattttggaccctcttttccttctacttaatataatgatgtgcagttctcctgcgctttcgagaaaaaaaaacgtcatccgcggcctcaacgaatgctttgccaacattggtcttcacctttgacgtgggcgcctttccccacctttttcgatgcttgctctgagctccttcttgaagtgctcaggccatcagggcacctccattgacccctactgcccttgcggcctctatcattccgcctgctcccgctagtgcgcccttggtcttcggggcctgacctctggcttcctctcgtagtcttgtgtgctttgtggagcgtcggggggctcaggcctagggcctttaggtcccgtaggtcatgagtgggactcaggcctaggactcgactcgtcggtcgtgggtgggaggcggactggctccttcctacaccgcggctcggtgctgggcgcagttaatgtggcgtgcgtagtattgatggtgagagcagccctagggccagatgtggaatccactcgagtggctctctggcggttcgtctgatctccttgccaggcttcgcctcgtccgacctctggcgcggtgcataggggtcatctgggtgcagattcacataggcgagcttctccctatcttatctctcactcgtggtctcgtgggggcccggggatccgatccccgacactcgggatatggatcgccgacgtggggaaaggaggcgctggggtggcagctacacccgcgggaggctagggaggcgtaggccgagcgccgatggccgggtgtagggggatgccgccgaccgcaaccgagaaggggaggtctgtcaccggaggaggaggtgcggcagcggccgtaatcgcaatcgtccgcgcgatggctgcagcggtggttggtgcagtggacgttcgtgccgcttgcgtggggagggaggcgagcacatgaaaaggagaaagggagggaggcagtcgtggacgccgagaaggtgcgggcggacgcggtgacgatcgctctgggagatgcaggggaaggagagggaggggttgccggaggactgctccatgacggtggcgatggccgggggtgcgccgacggctagagtgcctggtggttagggaatgtagaggcttgataccatgttggaatagaaaaccctaaccagagttgatagtgcattaatataatagagttaggtgggtctgaggcccattacaatagaggcattacaatagagcatacagttacgctaacagtatcaaatgcctttgaaatctctagcttcaaaaggatgtatggttctttacttttatgtagggtctgagcaagctgctgcacaagtaagaaattgttgtgaatattcctcctaacaaaggcgctctggttgttagaccagcttaggcagcagggtgccaagcgataagcaaaaatcttggttaccaactttgcaaagcttgagttttaggacttgagctttacaagatgagtttacagcttggacttgatcagatcccatctgaggaaaaggatctccagttttggcacttgaattatcaccattgtcgaatagccaccctaaaatcaaagtatttaatttcttctgtgactgctaaaaggttgaaataacttttctaaaagaaaattgcttgtccatgggagacccctgggcattttttagtttataagttagcaaattacatcctgattggtgattggctaggaaaactagctaaatcagtttccagggaggtaaccacaaattgctgagtcctggatttgagcacaggtggccttcctctcaactgggaagtactttctaatttccttttcagatgtagatgtaatatttccaagaagtacaacccttttccttttttccttgcaccaaaccttttgtaactttgttcccagataccgggttctcggtcttgttagaagtatattactaaacaatctatctgcctacactgcattgttcagcagatgctggattagataaaatgtgattttaacaagtactccctatgttccagtttattaggtggtagtgcatttttgagaaagggcagattgttaggcggcatacatagcaaggcattgcattataaattcctgtggaagaaacacagccgttttatccgacccgatccaacaagtgaatgcaatgcaccagatcagtgtggcacctggcgtgaattaaatcttgctcacactctggtgtgtgtactcttagcgcctttaaattgggtgtggagggagtgtatatgggtgcaaaaataacatagctttgtacaagtaaacaaacatggttggacatcacttttacctaagatttttattgaggactaactgtctctgcttcttacatcctagactgaaaattttccattagatgtccacattgccttggaatgtattgattgtgctatctctttcagcatcaacatgggaaataaggactttgtatacatcaggatcatcgagtccaaaatgtgttgttactcttatgttggagattgctccaagtttttggggcagatggaagagaaggcactcaaattttgacaaaagcatcccttttgctttgctcagccaagtagcaggtataagagagtacttcgcagccaatccagccttgacatctgagctgccttcaacagtagtgaagtcaaaagcatctgaaactttgatcatccagagtgaacatgaagattctgaacttggtgatgaattttatgatgcacttactagaggtgaatccttcgaagatggggatagtgatgatgatgatgatgccacaactccaaaggctagaaaagtaaagttgaagaatgtgtcatgggctattgcaggcttggctttaaagacaactaaagctttggttgagacaagtgaattggttacaaattctagtccagttactgttgaccccagccacttccatggcacccttcatagagcgaaaactcaaaatgatcaaaattcttggagtgcacctggtggggagaagtttatgatcagagggaagacttacttaacagattatcacaaggttgttggcggtgatccacttctagagctacttgcggtcgattggttcaaagttaatgaacgctttgattcagttgccttacatcccaaaagccttgttcagaagctgcaaagaaacttcctttcatattggttataaatttgcaggtgccagcgaaaccaaattataacttggttatgtactacgctgcagagagaccagtgaacaaagattctttgttgggtagattcattgatggaactgatgcataccgagatgccagatttaaacttataccaagcattgttgagggttattggatggttaagcgtgctgtaggaacaaaagcttgccttctgggcaaagcagtaacgtgcaattatcttcgccaggataactttctggagatagatgttgacatcggttcatcatccgttgcccggagcattattggtctagtattgggatatgtcacaagcatagttgttgatcttgctattcttattgaggccaaggaagagaaagagctccccgagtacattctgggcactgttcgtctgaaccgtgtgaatcccgacagtgctgtatcaatctaattacgtttctagccgatctatgcaaatttactcttatcctcttttattctgagagaaacagcgtggcattttgaaaatgtgaaatagcattactatttgctgatccccaatcgagggtaacatatgtaaattggcatgaggcatgactacgtgacgcctttcgtaaatagaataaatcaatggttatgtaatattaatatcccatatacgcgtgtcataatctatgtggcttaaaagtggcatcaagtcatctagtttcctgtgttaacttcttattccttaggtagtcagacattaacagtgtgtttggtttgaggaatgaagtgatccatctttttctcac

SEQ ID NO: 7591 - DNA, 1296 bp, Zea Mays
tcagatccatggaaaaatattacggagaataaatgtcacacgtgcaaaaaaaagaatttaagttgaaaacattattcaaacaaaagaaattgcatgcaaggctcttctttaaatactactccctcaatccaaaaatataatttaataatctcgatgatacttatctactactacacattgtgcaagggtagcaggtgggcttcgggagagatatagtatatgtttttattataatagatgtagacataaacacacatgtcgtgtagtggtagctacgagcacatttacttgaggggtcgcgggttcgaatccccttggggcctgtttttttaatataattttagctaggcgtgagatgtacgtgggaatgggaatgagttttgtggggaggggagaatgagaaaggaaacagggaatgatgaccgaacgtgagagaatggattgtgcggggaggggggaatgagaatggcagaatacggaatgacaacctaccccttattgccgtaataagtagtagagatttgtaatttgtatgctttacgaatgacccttgccatgtatattagccaccattttgagtctatcctgtcacttatgaagcttcatgaacaggcacctactgattgcatttggtggacttgctggtttggaagaaagcattgaagaagatacaaacttgaagggtaaacgtgcagatgatgtattcacatcttatttcaatacatgccccaaccaagggagcagaacaataagaacagaggcacttctcatttcccttcaatacttccaagatcccattaggcgagcggaacagaaattgtagaagggaatacagaaaactgcaaatctagccatggccaacaagttccagttgtaatagtggagttttctcactgagtatcttgacccttcatgtatgcgttggtgtcattggagccaagaggttgtgagccatcgaggacattttgacacaaccatttcagtttagaaaatttgatgcggagctgacttcagtggaagagtgttagcttgccatttcagtgtatccaattgttgtccactgtagtctatatcggtgtttcatacctttgaccctgtactagaacgacacggaggatcactgttaacaccagagcgtcatgcatgctttgataaagtttttcttgtgccttcaataatttgatataggaattggtagtcaatgacgcaatgccattgatttggagtcaatattgcacattttgtctgtttggttatccgccgtcttgtcttaggccattgtgtgttgactctgtc

SEQ ID NO: 7592 - DNA, 2387 bp, Zea Mays
gccaggtctcctttcagcttgtaaactcgaagctggccatctcgggaagcccagcccaccagaagataacaaaaaaaactgccatgacagcccagtccatccaacgcaacgcagctgtggcctgtgtctgtctgcgccgtctgtctgcgccgcgcctcgccttcctctcccgccgccgtcgtggtcgtggacgccatgggccgaggccgcaaccgcaagccccgcaacttcgccacgttccgcctctgcccgcgccccggggctgccgatgcctccgaacgcgtcttcgtacgcgtcgacgacaacccctactccgtccccgggttcgcagacgatgatggtctctcgtcctccaccgccgtcaggggagacggcggcgagcccgacccgtcctcctccacctcgaccgacgagggcgggtcccccctgcccgagcacgtccgccgagagatcatggagctcggcctccccgacgacggctacgactacctcgcccacctccgcgagctccgcccctccctctcctccaccggcggcgggggttcttcggccgtattcctccccagccgccgcctcgcacgctccggccttcccgtggacgtgaaggcgtacgacttcactagtaccccgcttggttccggggaggttgcggtggtcgcggctagtcgggctgaggaggctattgacctggatgtcaccaggctgcttgacgggagcgattcgacggccgttgagtcgggggatgaggatttggaggaggactttgttatccttgcgaatgagccagatgagaagcaggagagcgaggaagagaatgttgctggaagcaaggagaaagctctgcagctgcctggcgatcagtttgtttcgcttgctttcgaagaatatgcggacagtggagttggttgttgtgttcaagatgcaaagcatgaactgtcccaggaggttacagataaactgaaaccgcctcacagcgaaaccttcgatgctgataaaagatgcagggcacccacaccacaatatgttgctcaccggatactagagtcaaacgagcaaattgatgcgtcttctaatgccatctccgaacatgttcagtacgctgaaacatatgaagtcagcgaagaagaacaagcgattcttgctccagaaagtagcaaggggtctgcggttatgtactctactgccacggtttctggatcatatctcgatgttaaattgaagtttccaaaacattcccctggagaaacaagtatgaaaaaatccatcatcagaaaaggaatagagaagcttcctgcagggtattcacctcagaggaacactccgactggtgaaactaaacagggaccctacaaaggaacgagacaggaagggacagaaagctagatccaggaccagacctactgcgttttaaaaaaaatgttttaaagaagcagatcatcgagggtgtgttgttcggcttcgttatcaactgaccatgggcttccaccggatgcttaatacaatgatatttactggcgtggcttcccttttttttctaaaggaacttcttttcttgggatctcccttttatgctttccatgccatcattggtaccgataattttgtctcctaggctacaatggaagatcatgccatcattgttactcataattttgtctcctaggctacattgaaagatcaaacttgaagagaactgtagaagcgaaaagatggacgccatattgtacagagctgttaatagtttgacgtgaggttttatctcaaggattgtaggctgacattagattgcacgttttaggggtggctatatttgtagggctgctggtcatctgattggaatcggaatcaggcactagactatcacttgtcatcccaatgcagaccagatgtattgtcacccaaatgtctgctgaggaggaaacagtgaaaagaaacaaagatgtactgggtagctgaagggactacagtggcgagcttggttgaaaccaaaagatggttctgctaactggagatttgacggcagtgtaccatggaaggtactatcaactgctggaaaccatccagatcactgtcagacgtgccagtagtacaaggttcagatccgctacgttttgtttcatgagatgagatgggactggaactggtgtgcgtgctgtgcatcagtgcatgagatatatagaacgtagaggtggtgcagtgatgcatctgcacgactgcaccgtacctatagggatgatcggtgctttgtaactttaaaatacgggaattcttctctttttttttgaaaataaactgattccgttaaaatttctgcattccaaaagggccctagagcctattctagtcgcctttcatggtttctgttaggctccaatcattcggtgcag

SEQ ID NO: 7593 - DNA, 2615 bp, Zea Mays
atcactctgcgaaaccgaattggccaaagcccgctacgccctcgtcatcgtccaatgagaccgcccccccacagtttcgtcttcctcttctccgaccccgaccatggagccggacgccgatgaggactacatgggagacctctcacgcttcctcccgccgagtccgtcctcctccccaccgaagaacctcgggcgccggaagcagccatccacgcaggcgcaggcgcagccgagggcgaagcgcgggaagggtgtgccgtggcaggagcggcggaggcaggagcgcgagcggaagcagcgggaggaggacgcacgcacgatggccgggctcgcggaagctatccctgagagcaacgtagggttcaggatgttgaggcagatggggtacgatcccgactcccgcgccggcgccggcgccgaaccggtcggcatcgagatccgccgctcgcgggcggggctcggggcggaggagcctgtgttggctccggcgccggcgccggcgccggtggagaagccccgggaggtgtcggagcgggagcgtaggcagcaggaggagatggcggtagagctaagggcgcggaagagcacgcagtggaagggccggagggtggtgtgggactaccgcaaggccgagagggcactcgcgcagctggagaaccgggaggtggagccacaggcaccggagggggaggacaaggagaaaggggcagaggaggaagaggatgtgatcactgaagaggatttgcagcaaatactgtctaagttgcgtgatcagtaccagtattgcctttattgtggatgcaaatatgaatcactagaagtgctgtcaaaggaatgccctggtcctgatgaggatgaccattgatttgttgtgtgaaggtgacaaataattgtctttgatacaaacaggtgatggttctatactcaccatcatcacaatgatgttcagtcatgattggtgtacttcattggattcccaatacattggagcacaaactttgtggtttgtgctcttgtcgtcatcatacggacacactaagctctagaatagcttgttttgttggctgtattggctacttttatacttctagttaaatagtttctaactattattttatatcagggtgatgagaccttaagttgacacaaaacagaattgttgccctgtaagtgctggaaggtatatcttctagagtgatgccatgcaaccataacaacaacaaagcattttagtctctggtaaattaaagtaggttagagttgaaacttaagagaaaccacaggtcaaaattcagacacgtggtccgtgcacctttattcaaggctaatttttttggtatattcaagtctccattctactgcctcatctcatatcaactcgatgtaactatcctggagtgtttgaagatcattatcctggagtgtttgaagatcgtttattatctactcgatgcaacgatcttgaaattataaatcttcccttattgaaaaaaagaaaccatcatccaccaccagaataccaattaagagtcaggcatgagcgacctaaggaggagttcatggagtgtggaagcaccagccaagcaccacaaactgcaccccttgactaggtttactaggtttatgatctgaataattatgtcgctctctcaaacacgcaggtgcttcgatgcttctagacttcccaagtcactaggatgattagggtattggtacccttcacattcttgagaagcttattgcagtgataaatatatcgatatgaaaattgaatagtatttgttcttcgtcggcctggaaaggtgggagtggatggaaagccacaaggagcgtctgcatatgacatgctatgcagcaaaactgaagtggagctacatcttcagaaatgcctcatcgaggcaccaatgcacttcagagccagaagtgaaatgttgccggtggtgaacaagcaaactttgattttgatctgtgataatcagataacaattttgtatctgctttccaactgagcgagagagggggctatacttgtggacatctgctcaattttgttgtcagaagagaagtaagtctattttatgaaacttccactgtacgatgttggaatggaatatctgtacattactgtcagtcctgtgtgtcgtctaaggatccatgattgctgaataaatgcctggaaagggccacgatcactgttgaacatcacagaaggttcctcatctgtatgctctttgaatcagacggttctccaacagcaatattttcagcttctacagcacaatcaaaccagtctttggaaataaaaagggaaggaatggcatgaaatagtgattggacataaaaggagatagaagcatcaaactttccaagacattctgtttcgtgcaattccaagtcttgatgctttatgtagaaaataaaacaatcatactaatagctggatttcagtcctcatggatgtttgcagttatttgcttgcttgtgttcttacttgttattctttgttttgcttgtttgatttggctaattgtaaaataatctctatctgagttggttaggtggcttgagtaatacttaagtcttgagtttgactctgatcgggaggtctgccttgt

SEQ ID NO: 7594 - DNA, 2577 bp, Zea Mays
tgcagtctactccagcctcaccgcctcaggtcggtcctacacggtcccgttctgcctggtgcctgcaacctgccttttcttcttccgtcgccacccagcgtgctctctctccctctttctctctctctcgtggcggcgcctgggcagccgtcgctgccgcctgcgctaggtgccaggtcttcttcgggcccttcgccggcgacgagtaccaccaggttgtacatgtatacacccatgtgctttactgggtcggaccctactcatcctccacactaaggccatctccatagactgcactgtttagactccactgtttagagagtggagatagggagtgagatagagagtggaatagggaggatgctggagatagcctaaggttgccactgagtgtgtgcatgattcagaggcaatgtcatcacaaactggaggtggcaaagagagtgacgccggccctgggcaacacaggcagatgcaaagtttggcaagacaagggtctttatacaaccttaccctcgatgaggtgcagaaccatttgggggagccattgcttagcatgaattttgatgagctcctgaagagcgtgtttcctgatggtgtagattcagatggtgctgtcacaggcaagcctgatcggacctcgagcctgcagcgacaggggagcatcctgatgcctccgcagttgagcaagaagactgttgacgaggtgtggaagggcatccagggtggaccagagaccagtactgtggtggatggtctgcagaggcgagagaggcatccaacacttggggagatgacacttgaggacttcttggtcaaagctggggttgttactgaaggacttgtgaaggattcagctgattttccaagcaatatggatacagctggcagcagtgttgttgtggctgctgcttctagtttgaaccctggagcacagtggttgcaacagtaccagcagcaagttttggggtcccagcaattgagtttggcaggttcatacatggctagtcagttgcgccctcagccattgtctattgctacaggtgctactttggattcaatttactctgatgaccagattacttcgccatcatttggtgcactttcggaccctcagacacctgggcgcaagcgtggtgccttaggggaggtagtggataaggtggttgaaagaaggcagaagaggatgataaagaatagggaatcagctgcgcgatcaagagcgagaaagcaggcttatactaatgaacttgaaaacaaggtattccgtctagaagaggagaataagaggctaaagaaacagcagtcctagaagaatgaacttgaattatgtcagccagccttttactgtcgttttggacctgaatttaccaccatcctggaaggaccacgtttgttgtgttcagattgcttggtcttgaatttgaagcagcaaccaaagggaatgtagagcagggaaaggaagttattttccctcttattgagatttgtaaggggtacaactcatcgattcagagaacttactggatattggaaaatgtctgtgttttgcttcataagttactagttcagcgccattagatttgctttgactgaaatacagagctattgttgagcatcggatacataggtttatcatgtgaaactttgtaccagtggtgtttacactatttagctgatttcagcatggtgggatcaaggtttgttatttcgcaatgctacgaccttacagtccgtttctttttagcccattgcaatgggagtatgttgctcccttctgttgtggtgatgcacaaaattttggcagcatgaagtaattgagctacatgctgctcttcctgttgacagtgggtaaacagtagcatggtgctaaaatgcaatgggttacgggtctaataaacattttatgacgttattatgttcaggttgacagccttgctaacattgcctttttgttggggtccttcacttcaccttactttcaggagttggatgagatactgagctctgctcctcccccagaacccaaatatcaactcaggagaacgggttcggctgccttttgagtttcggcgctgacaatgctcatagtgatttttgtacattatacaaggattctactttatatggtttccttccttttgtattagaaacatttgatagattgagggtatagctttttcccggcccggtaggtcagtgtatgtaggtcgctagcaagctgtagcatgtcctggcggatcatttccttggtgtctgtcagtgtgtacatcttctagacacatgtctaagtctgagagcttccttatacgagaaggtattcaggtatgtgttgcgcaggtgtctcctgctgttctgtttcaacggtgcaggctattttttgtgaggtcatcattttgatcacacatttgtgaggtcagaatattgcaagcgctcctcttaacgtctgtgtcaaatcgttcacaggatctatgtatcttaacttcttaacacaagattataatcttgtgactaacgtatattttgtagagctaatttaagttaggtcataataatgattattgtttgggagatcaa

SEQ ID NO: 7595 - DNA, 358 bp, Zea Mays
atggcgcggctcggccgcctccctacgcccgcggaacaaccgcgccagcaacccgccgctactgggcaaccaaggaggcatctacttatgacagactggagtgtttttgttagctcaaaaagactggtttctggtgacacatttattttcttgagtgtgacaacattgcatgttaaagttgtcttattcatccatgtttgcatactaaatattacttctaaagaaacatgttacatgcataattttttagcagaaacaaaatacaatagagctgtgaagaaggtatttttgacaactatgcatcgtacctatcttggtggcgaaatcaacttcactgatggatctattaacttctaca

SEQ ID NO: 7596 - DNA, 1705 bp, Zea Mays
gccatccctactccaccccaacctaagcagtaggcagtaggcatcaagcgtcttgcgtggctgcgtccaagtccaagcgccatccggccaccagcgcaggtaccgagccaccgaggtaggagccggccaccgggcagatcccaggctgccagccaccggcgtccagcactccggctgctagctaccggccacccgcagcgcaggccacaccaacgggcagcaaccgcatggtgccatagctgtcgacgaacaccagcaaccagacggccagatcccagtaattcgatttattatatcttcgtcgaggatagtgacacgtcacgtcagtgtccggccatcgcttgagaggcacgaatgtcttcgctgcgccgtcacgatccagactcgcatccccttctgacgcgcacccattgcgggcagacgtttgggctttgtgtggatggatcatggacgtacataccacatttgttttttaactaaatcttcacttctttgaatcgcagagtccaacccaaggatggttcaggctacggaagggcaatgcactgcttcttagactattgaagaatttataggatgatgtgcaggagcaggcagctactatgcaattttctatttattgtactcttgccacgaactgctcgtaattctctttcagtttgttgcagagcgtgggcagtaaatgcaaagaaaaaaacacagttgcagaaattgctagcaatagactatacaagatagagccaaattgagcaaaaaaaaagaccattcccatttggatcaccattccctaaccacagcaaaatgaagttggaaaattgagtagttgagtgccgtgtatgcacatgagcagggctaatactttataagaaatgtgctggttcttgatactcctccaaccagttgtagaagaattctggtttggctgaagtagttttacatccgaaagatggactttgtacagatatattctctgtcaacaatatgtatatccaggcggagatgaacttggagggaagcagatttacacaatttctgcaagtcggcccatcgcgttgaactaaaccatctctaatttcctacaacttcaactccaacaacagaggtaccacaatggacttcttaagaagaataggaaccgtgtacataagcttttttgctctaacaaaataagagtggttgttgcaacaatggcattcagaatgggtcttgataagagtgacgttgaacgggtggttgattgtatcttgccagaaagcgtagaagaatacatacatgtatattccatgcagattccccccaccctcccattttcttctcttttctagacatcttactatgctctttctaggaaactggccgtgctgattcaacaacattctataaaagtcgaagtcttttgcacaaatgaatcttatcttcttgtcctttttttcttgtaatttacatttccaacctgctctaagtttcctacataatgacttcaataaaccctttttacagtgaagttcacgaatatgctatgagaaaattctttgccagatattttcttgtgaaaattcagttggatgcatttgctccttggttaaagagtcgacttcagacaagttagatataaaagaggaggtttgcctctgccttaatgcacctaatttatttttccacatattcatgttgcatgttgcgcagttgtattgccatattgtac

SEQ ID NO: 7597 - DNA, 3782 bp, Zea Mays
gccatccctactccaccccaacctaagcagtaggcagtaggcatcaagcgtcttgcgtggctgcgtccaagtccaagcgccatccggccaccagcgcaggtaccgagccaccgaggtaggagccggccaccgggcagatcccaggctgccagccaccggcgtccagcactccggctgctagctaccggccacccgcagcgcaggccacaccaacgggcagcaaccgcatggtgccatagctgtcgacgaacaccagcaaccagacggccagatcccagtaattcgatttattatatcttcgtcgaggatagtgacacgtcacgtcagtgtccggccatcgcttgagagagtccaacccaaggatggttcaggctacggaagggcaatgcactgcttcttagactattgaagaatttataggatgatgtgcaggagcagagcgtgggcagtaaatgcaaagaaaaaaacacagttgcagaaattgctagcaatagactatacaagatagagccaaattgagcaaaaaaaaagaccattcccatttggatcaccattccctaaccacagcaaaatgaagttggaaaattgagtagttgagtgccgtgtatgcacatgagcagggctaatactttataagaaatgtgctggttcttgatactcctccaaccagttgtagaagaattctggtttggctgaagtagttttacatccgaaagatggactttgtacagatatattctctgtcaacaatatgtatatccaggcggagatgaacttggagggaagcagatttacagtttggtgatattatatattatcaattgcagtttattaatgttgcgcttcttctctattatcaaactattcacacaagacttcatgtgtgcgtgtgtgaaagattttattagtgtaaggtctttagggacagttcacattgaagttctggtgcctacataaattgtaaaccatacatgttgacatgggtacacatctcatggctatatacaactttgacatgaggtttatcttaagattgtgtgttccaataaaagctattactatttcttgcatgtgcatgtctttaggatatccatttttctttatagatttatttatttacatcgcttactgcttactagcctattttttctagcaatttctgcaagtcggcccatcgcgttgaactaaaccatctctaatttcctacaacttcaactccaacaacagaatggccccacacacttaatgaaaacatctctaatttctagcaaattcgactccgaggacaataaaggtaccacaatggacttcttaagaagaataggaaccgtgtacataagcttttttgctctaacaaaataagagtggttgttgcaacaatggcattcagaatgggtcttgataagagtgacgttgaacgggtggttgattgtatcttgccagaaagcgtagaagaatacatacattgaagttcacgaatatgctatgagaaaattctttgccagatattttcttgtgaaaattcagttggatgcatttgctccttggttaaagagtcgacttcagacaagttagatataaaagaggaggcggagctgcgatgccaccaggtggagccgtgcctgctcgctcaggcgtcatgacggagccgaacgcgaggagccgagtgttttatccccgccgaagcccatccccatttgataccagcgagcgcagacatcgccggggacgccatcatcctcggctgcctccaagaccggcccaccgttctgcctgcactcccactcccaaaccccatgatgaacctccctttccggctccgccatctccgacgccttctcgctgccccgcccttaccaaccctcgccgccacacactcccatagcccaccctccttccgaccgctgcaccccacccgaatccagccgctgcggttccatctacccaaccccccagtgcggcggctctcctccgagcacgcaatcctccccacccacctccaggacgagcgcttcgccacgctctcggataggatctatgatgccgtgattaagacggggacggaatccaacgagggcaccgaggccgcgctcgacgcgttgggcgctgagctgactacccctctcgtcgccgacgtgctgcaccgcctccgctacgaggagaagctggcgttccggttcttcgcctgggcgtcccaacaggacggatacagccacgaaccgacgacttacaacgacatcatcgacattctctccggcacgcggtacaagagccgccagttcggtgtcctctgcaacgtgctcgatcacatgaagcgccatggctcgaggtcggtgccggttgagggccttctggagatcctgcgcgcctacacggagaagcatctcacgcacatgagaaagctggccaagaagcggcgggttcggatgcgtacgccgccagagactgacgcgctcaacgttctgctggacgcgttctgcaagtgtgggatggtcaaggaagcagaggcagtgtttggccgcgtgaagaggaagttgctgggtaatgcagagacgtacagtaccctgttcttcgggtggtgccgggcgagggaccccaagaaggccatgaaggtgctcgaggaaatgattcagatgaagcacaccccagagagtttcacctacgttgcagccatcgaatcattttgcagcgctggattggtgtcagaggcaagggaactgtttgagttcatgaggactgaggggttgacggtgtcatcgcccacagccaaaacatattcgattatgattgttgcattagcaaaggctgaccggatggaggagtgttttgaactgctttcagacatgagaacttgtggttgtatgcctgacgtgacgacttataaagatttgattgaagggatgtgcttggtgggtagactggatgctgcttatcgtgtgttggacgagatggggagggctggatttcctcctgacattgtcacgtataattgctttcttaatgtgctttgtagtcttcgaaatgctgatgatgcacttgaactctgtgagaggatgatagaggcacactgtgagcccagtgttcatacctataatatgctgatgatgatgttcttcgagatgggagaggcacatagagcattagatatatggcttgagatggacaaaagaggatgtcaacgtgctatcgatacctacgagataatgatctatggtctctttgattgtggagaaacagaatatgcaactgctcttctagatgaggttataaaccgtgacatgaaactttcatacaagaagtttgatgctataatgctgaggttatcagctgtaggcaaccttggtgcgatacatcggttgtcagagcatatgaggaaattttacaatgttgcgatgtcgagacgatttgcaatcactcagaagaagaagagcataggcctgagaaggaaatgagtgccgtggctattgctgctgttgtttcttgttagttgttactgaggatattcaggagcttattcaaaggtagttaatgtatgccagcacgtattgttggaacagattacagtggaagaagcactgcattttttttaatgtaaaaaataggagtgttgcataaccccattcatttgttgaattgaaccggtgctgtgaatatcattgcatttgcattgtagaagaaacatgtacaaggtgacggctactggttttcaacaaacacatatcggggcatcgggtgaagccgccaaacgcatatgagcagcgttggctttgtctctctcgtct

SEQ ID NO: 7598 - DNA, 3848 bp, Zea Mays
gccatccctactccaccccaacctaagcagtaggcagtaggcatcaagcgtcttgcgtggctgcgtccaagtccaagcgccatccggccaccagcgcaggtaccgagccaccgaggtaggagccggccaccgggcagatcccaggctgccagccaccggcgtccagcactccggctgctagctaccggccacccgcagcgcaggccacaccaacgggcagcaaccgcatggtgccatagctgtcgacgaacaccagcaaccagacggccagatcccagtaattcgatttattatatcttcgtcgaggatagtgacacgtcacgtcagtgtccggccatcgcttgagagagtccaacccaaggatggttcaggctacggaagggcaatgcactgcttcttagactattgaagaatttataggatgatgtgcaggagcagagcgtgggcagtaaatgcaaagaaaaaaacacagttgcagaaattgctagcaatagactatacaagatagagccaaattgagcaaaaaaaaagaccattcccatttggatcaccattccctaaccacagcaaaatgaagttggaaaattgagtagttgagtgccgtgtatgcacatgagcagggctaatactttataagaaatgtgctggttcttgatactcctccaaccagttgtagaagaattctggtttggctgaagtagttttacatccgaaagatggactttgtacagatatattctctgtcaacaatatgtatatccaggcggagatgaacttggagggaagcagatttacagtttggtgatattatatattatcaattgcagtttattaatgttgcgcttcttctctattatcaaactattcacacaagacttcatgtgtgcgtgtgtgaaagattttattagtgtaaggtctttagggacagttcacattgaagttctggtgcctacataaattgtaaaccatacatgttgacatgggtacacatctcatggctatatacaactttgacatgaggtttatcttaagattgtgtgttccaataaaagctattactatttcttgcatgtgcatgtctttaggatatccatttttctttatagatttatttatttacatcgcttactgcttactagcctattttttctagcaatttctgcaagtcggcccatcgcgttgaactaaaccatctctaatttcctacaacttcaactccaacaacagaggtaccacaatggacttcttaagaagaataggaaccgtgtacataagcttttttgctctaacaaaataagagtggttgttgcaacaatggcattcagaatgggtcttgataagagtgacgttgaacgggtggttgattgtatcttgccagaaagcgtagaagaatacatacatgaaactggccgtgctgattcaacaacattctataaaagtcgaagtcttttgcacaaatgaatcttatcttcttgtcctttttttcttgtaatttacatttccaacctgctctaagtttcctacataatgacttcaataaaccctttttacagtgaagttcacgaatatgctatgagaaaattctttgccagatattttcttgtgaaaattcagttggatgcatttgctccttggttaaagagtcgacttcagacaagttagatataaaagaggaggtggagccgtgcctgctcgctcaggcgtcatgacggagccgaacgcgaggagccgagtgttttatccccgccgaagcccatccccatttgataccagcgagcgcagacatcgccggggacgccatcatcctcggctgcctccaagaccggcccaccgttctgcctgcactcccactcccaaaccccatgatgaacctccctttccggctccgccatctccgacgccttctcgctgccccgcccttaccaaccctcgccgccacacactcccatagcccaccctccttccgaccgctgcaccccacccgaatccagccgctgcggttccatctacccaaccccccagtgcggcggctctcctccgagcacgcaatcctccccacccacctccaggacgagcgcttcgccacgctctcggataggatctatgatgccgtgattaagacggggacggaatccaacgagggcaccgaggccgcgctcgacgcgttgggcgctgagctgactacccctctcgtcgccgacgtgctgcaccgcctccgctacgaggagaagctggcgttccggttcttcgcctgggcgtcccaacaggacggatacagccacgaaccgacgacttacaacgacatcatcgacattctctccggcacgcggtacaagagccgccagttcggtgtcctctgcaacgtgctcgatcacatgaagcgccatggctcgaggtcggtgccggttgagggccttctggagatcctgcgcgcctacacggagaagcatctcacgcacatgagaaagctggccaagaagcggcgggttcggatgcgtacgccgccagagactgacgcgctcaacgttctgctggacgcgttctgcaagtgtgggatggtcaaggaagcagaggcagtgtttggccgcgtgaagaggaagttgctgggtaatgcagagacgtacagtaccctgttcttcgggtggtgccgggcgagggaccccaagaaggccatgaaggtgctcgaggaaatgattcagatgaagcacaccccagagagtttcacctacgttgcagccatcgaatcattttgcagcgctggattggtgtcagaggcaagggaactgtttgagttcatgaggactgaggggttgacggtgtcatcgcccacagccaaaacatattcgattatgattgttgcattagcaaaggctgaccggatggaggagtgttttgaactgctttcagacatgagaacttgtggttgtatgcctgacgtgacgacttataaagatttgattgaagggatgtgcttggtgggtagactggatgctgcttatcgtgtgttggacgagatggggagggctggatttcctcctgacattgtcacgtataattgctttcttaatgtgctttgtagtcttcgaaatgctgatgatgcacttgaactctgtgagaggatgatagaggcacactgtgagcccagtgttcatacctataatatgctgatgatgatgttcttcgagatgggagaggcacatagagcattagatatatggcttgagatggacaaaagaggatgtcaacgtgctatcgatacctacgagataatgatctatggtctctttgattgtggagaaacagaatatgcaactgctcttctagatgaggttataaaccgtgacatgaaactttcatacaagaagtttgatgctataatgctgaggttatcagctgtaggcaaccttggtgcgatacatcggttgtcagagcatatgaggaaattttacaatgttgcgatgtcgagacgatttgcaatcactcagaagaagaagagcataggcctgagaaggaaatgagtgccgtggctattgctgctgttgtttcttgttagttgttactgaggatattcaggagcttattcaaaggtagttaatgtatgccagcacgtattgttggaacagattacagtggaagaagcactgcattttttttaatgtaaaaaataggagtgttgcataaccccattcatttgttgaattgaaccggtgctgtgaatatcattgcatttgcattgtagaagaaacatgtacaaggtgacggctactggttttcaacaaacacatatcggggcatcgggtgaagccgccaaacgcatatgagcagcgttggctttgtctctctcgtct

SEQ ID NO: 7599 - DNA, 2072 bp, Zea Mays
tagattttgctttcgctccaccaccgggcggagaacggacgaacactgtgcggatctgtaaccgtggaggggagacctgaaacgaatccagtccaggctggtggctgccggcgctggacctgaacgctggtgcatactgcgtaggcaagagcaggcaatggcggaggcgaatgcggggaaggagaagaaggaagtggtgcggctggagcgcgagtccgtgatccccatcatgaagcccaagctcaccatgaagctcgcctacctcatcgaacatcagtctgacagagaagaattcttgaagctctgcaggagggttgagtacaccataagggcttggtaccatctccagtttgatgatatgatggaactgttcgctctcttcgatcctgtgcatggtgctaaaaaactcgagcagcagaacttcctacctgaggaaatcgacacgcttgagcagaacttcctgtcctatttctttcgggtgatggaaaagagcaattttaacatagtaaatgacgatgaggttgaacttgctcattctggacaatatctgttgaatcttcccattaaagttgatgaatcaaagttagatgacaaacttctgtcgaagtattttaaggagcaccgtcatgaaaacctgcccgacttctcagacaagtatgttatatttcgtaggggcattggattggaccgcactagcaactttttcttcatggagaaagtggacatgatcatagctcgtgcatggcgaaggttccttgagaagacgagactgcaaaagctgttctcaagaaagaaaaatagtaagccaaagatagattccaagaagaatgatgatttagctagtgaaatagaagacaaggagctttatgttgaacgcatacgtcttgaaacaatggatttaagctttgggaatttatttggcaaggtcacaattcaagagcctacatttgaagaggtgattgtcttgtataggagaaaaagtccaaagggccaggatgatagggcaattcatgtaaagcacttcaaaaatatcccaatggcagacatggagttggttctgcctgagaagaaaaacccgagcctcacacctatggactgggttcaatttattgtttctgttgtcattggacttgttacactcatcagttcactggaaatgcctaaagctgatttctgggttgtaattgcaatcctctctgcactggcaggatattgcgcgaagatctatttctcgtttcaacagaatatggcaacctaccaaaacttaatcactcaatcaatgtatgacaaacaactagatagtgggaaaggcacactcctccacctctgtgatgatgtgattcaacaggaggtcaaggaggtcataattgcctactacattttgatggagaatggaaaggctaccagtgatgatcttgacttgcaatgcgaggagttaatccaggaagagtttggcttgcaatgcaattttgaggtgatggatgcagttcagaagctggagaggcttggtgtcattacaagagactctattggaaggatttgctgtgtccctctaaagcgtgccaatgagatcatcggcgcgaccacggaagaactggttatgaaagccaggcaaagctagcaatctattattttgaacaatgtagccgcattgtagattcttgcctgatggcgctgtaacgtttatggttactccagaaagtccaaacactgaactcttgcacaccaggagataagtacattctggtcatctccacagtagttctgggagagctacaagaaaatgtggttgtatttatttttttttatttttttggtggggggtactatggtttgtggaacgtcgtcgagggtgttgtaagcatgtagcattcttttgataacaagcgtggtaggaaggatgtttgaagaacacatacaagggctattatgttgctggattgatgctgtgaaccatgtattcttttcgtcagaacagtaaacttccgtaatgctgacggttcactgcggtgtgtacactgggccactggcattggcaacttgacccgtttctggcttctgctcgtgttcct

SEQ ID NO: 7600 - DNA, 2251 bp, Zea Mays
gaacactgtgcggatctgtaaccgtggaggggagacctgaaacgaatccagtccaggctggtggctgccggcgctggacctgaacgctggtgcatactgcgtaggcaagagcaggcaatggcggaggcgaatgcggggaaggagaagaaggaagtggtgcggctggagcgcgagtccgtgatccccatcatgaagcccaagctcaccatgaagctcgcctacctcatcgaacatcagtctgacagagaagaattcttgaagctctgcaggagggttgagtacaccataagggcttggtaccatctccagtttgatgatatgatggaactgttcgctctcttcgatcctgtgcatggtgctaaaaaactcgagcagcagaacttcctacctgaggaaatcgacacgcttgagcagaacttcctgtcctatttctttcgggtgatggaaaagagcaattttaacatagtaaatgacgatgaggttgaacttgctcattctggacaatatctgttgaatcttcccattaaagttgatgaatcaaagttagatgacaaacttctgtcgaagtattttaaggagcaccgtcatgaaaacctgcccgacttctcagacaagtatgttatatttcgtaggggcattggattggaccgcactagcaactttttcttcatggagaaagtggacatgatcatagctcgtgcatggcgaaggttccttgagaagacgagactgcaaaagctgttctcaagaaagaaaaatagtaagccaaagatagattccaagaagaatgatgatttagctagtgaaatagaagacaaggagctttatgttgaacgcatacgtcttgaaacaatggatttaagctttgggaatttatttggcaaggtcacaattcaagagcctacatttgaagaggtgattgtcttgtataggagaaaaagtccaaagggccaggatgatagggcaattcatgtaaagcacttcaaaaatatcccaatggcagacatggagttggttctgcctgagaagaaaaacccgagcctcacacctatggactgggttcaatttattgtttctgttgtcattggacttgttacactcatcagttcactggaaatgcctaaagctgatttctgggttgtaattgcaatcctctctgcactggcaggatattgcgcgaagatctatttctcgtttcaacagaatatggcaacctaccaaaacttaatcactcaatcaatgtatgacaaacaactagatagtgggaaaggcacactcctccacctctgtgatgatgtgattcaacaggaggtcaaggaggtcataattgcctactacattttgatggagaatggaaaggctaccagtgatgatcttgacttgcaatgcgaggagttaatccaggaagagtttggcttgcaatgcaattttgaggtgatggatgcagttcagaagctggagaggcttggtgtcattacaagagtgagttctcacttgtttctttttcttctcatggtgccacctgatcagagcatagggacgttttcttacagatacagtgcacagaataacgatttttgcagacacgtttacagggccagaagtttttgcatctactgaccatcatgttgtcacgtattgttctctgcttctttttttctttttctttctgcccaatactgaaggccgttttgcatccaggactctattggaaggatttgctgtgtccctctaaagcgtgccaatgagatcatcggcgcgaccacggaagaactggttatgaaagccaggcaaagctagcaatctattattttgaacaatgtagccgcattgtagattcttgcctgatggcgctgtaacgtttatggttactccagaaagtccaaacactgaactcttgcacaccaggagataagtacattctggtcatctccacagtagttctgggagagctacaagaaaatgtggttgtatttatttttttttatttttttggtggggggtactatggtttgtggaacgtcgtcgagggtgttgtaagcatgtagcattcttttgataacaagcgtggtaggaaggatgtttgaagaacacatacaagggctattatgttgctggattgatgctgtgaaccatgtattcttttcgtcagaacagtaaacttccgtaatgctgacggttcactgcggtgtgtacactgggccactggcattggcaacttgacccgtttctggcttctgctcgtgttcct

SEQ ID NO: 7601 - DNA, 1907 bp, Zea Mays
ctcgctcaggcgtcatgacggagccgaacgcgaggagccgagtgttttatccccgccgaagcccatccccatttgataccagcgagcgcagacatcgccggggacgccatcatcctcggctgcctccaagaccggcccaccgttctgcctgcactcccactcccaaaccccatgatgaacctccctttccggctccgccatctccgacgccttctcgctgccccgcccttaccaaccctcgccgccacacactcccatagcccaccctccttccgaccgctgcaccccacccgaatccagccgctgcggttccatctacccaaccccccagtgcggcggctctcctccgagcacgcaatcctccccacccacctccaggacgagcgcttcgccacgctctcggataggatctatgatgccgtgattaagacggggacggaatccaacgagggcaccgaggccgcgctcgacgcgttgggcgctgagctgactacccctctcgtcgccgacgtgctgcaccgcctccgctacgaggagaagctggcgttccggttcttcgcctgggcgtcccaacaggacggatacagccacgaaccgacgacttacaacgacatcatcgacattctctccggcacgcggtacaagagccgccagttcggtgtcctctgcaacgtgctcgatcacatgaagcgccatggctcgaggtcggtgccggttgagggccttctggagatcctgcgcgcctacacggagaagcatctcacgcacatgagaaagctggccaagaagcggcgggttcggatgcgtacgccgccagagactgacgcgctcaacgttctgctggacgcgttctgcaagtgtgggatggtcaaggaagcagaggcagtgtttggccgcgtgaagaggaagttgctgggtaatgcagagacgtacagtaccctgttcttcgggtggtgccgggcgagggaccccaagaaggccatgaaggtgctcgaggaaatgattcagatgaagcacaccccagagagtttcacctacgttgcagccatcgaatcattttgcagcgctggattggtgtcagaggcaagggaactgtttgagttcatgaggactgaggggttgacggtgtcatcgcccacagccaaaacatattcgattatgattgttgcattagcaaaggctgaccggatggaggagtgttttgaactgctttcagacatgagaacttgtggttgtatgcctgacgtgacgacttataaagatttgattgaagggatgtgcttggtgggtagactggatgctgcttatcgtgtgttggacgagatggggagggctggatttcctcctgacattgtcacgtataattgctttcttaatgtgctttgtagtcttcgaaatgctgatgatgcacttgaactctgtgagaggatgatagaggcacactgtgagcccagtgttcatacctataatatgctgatgatgatgttcttcgagatgggagaggcacatagagcattagatatatggcttgagatggacaaaagaggatgtcaacgtgctatcgatacctacgagataatgatctatggtctctttgattgtggagaaacagaatatgcaactgctcttctagatgaggttataaaccgtgacatgaaactttcatacaagaagtttgatgctataatgctgaggttatcagctgtaggcaaccttggtgcgatacatcggttgtcagagcatatgaggaaattttacaatgttgcgatgtcgagacgatttgcaatcactcagaagaagaagagcataggcctgagaaggaaatgagtgccgtggctattgctgctgttgtttcttgttagttgttactgaggatattcaggagcttattcaaaggttggtacatg

SEQ ID NO: 7602 - DNA, 1204 bp, Zea Mays
agtgcaaaaatccacttttatacctgtgtcttatggcattttgagcaacagaaatttagttggtactgtttccaattgctgtccatgtgctgctgctgtgcaaattacatgacacttggcagtggtcatggtagagcctagggatcttagggcgcgatcatgtgtgatggtgggtcggcgcttccacgagtgacgtcgggcaggtgccgtcggaacgggaaagagggagagcatgaactcagggggcaacggctgatgttgtcctgtttaactgttccctggttgctgaacgcgctttgttcttgtggaacaatgatcacattgtaagcttgatagcgcaaaatcgtggtgttatatttccaattatatttgaagcgctcgagaggaatatacatagccactggaatcaagcagttcatggtctcactgcaaatgtgcgcaagatgtttctggacatggacagtgaactatttgaagagtgccagcagcagtatatggataaacaagcaaaagccaaagagatgcaggagcaacgagaatcagcatggagacaattggaagctgttgttgctgccaaggctgctggggatgacatggttttggtcaactagatgattgctgctcacttatttcttgagcgcggtgctagttgcggtcctcttatatcaactttgttgacttgggactatcagatccatgttccttgcatcagtgaaaaacatgtgggccgagtttgaacacattggtggccgcgacagccaatccacgcagaatttctgtgtctagtgaggtcctgctatggttctgagccgttcctttattcagcccctcctcttctgttgcgttaatttatgaacaattggactcttgtattaatccttcattgtttgccctagtttcgtacccacaattgggaaaattcaagtagtgaaaatgactcagctagattgtaaggtttcttttatttgtatttacttcttttctccttgggagttatttcagttcatgttgttgtatggaggtaacagtacaaatggcagataaaagcctttttaacctagtgtccggcatggtagcaatacaatgtcagatcttctgtaggaactgtttcgacgttgctgtgattgtttagcaatataacggctcactctgtggtacgctggattaagttctggttacatgttaattcgtgggtaaatggcag

SEQ ID NO: 7603 - DNA, 1218 bp, Zea Mays
gatcttagggcgcgatcatgtgtgatggtgggtcggcgcttccacgagtgacgtcgggcaggtgccgtcggaacgggaaagagggagagcatgaactcagggggcaacggctgatgttgtcctgtttaactgttccctggtacgagagtttgtgttttatcaatctaaacaattgaacttttaatccaggtggtttatctaatgtcggtcagttgccgcggatgtgcacacggcccatgtcccacgacgccgtgcatcacatgtccacagtccttcgtctataccgcatcataatgttgctgaacgcgctttgttcttgtggaacaatgatcacattgtaagcttgatagcgcaaaatcgtggtgttatatttccaattatatttgaagcgctcgagaggaatatacatagccactggaatcaagcagttcatggtctcactgcaaatgtgcgcaagatgtttctggacatggacagtgaactatttgaagagtgccagcagcagtatatggataaacaagcaaaagccaaagagatgcaggagcaacgagaatcagcatggagacaattggaagctgttgttgctgccaaggctgctggggatgacatggttttggtcaactagatgattgctgctcacttatttcttgagcgcggtgctagttgcggtcctcttatatcaactttgttgacttgggactatcagatccatgttccttgcatcagtgaaaaacatgtgggccgagtttgaacacattggtggccgcgacagccaatccacgcagaatttctgtgtctagtgaggtcctgctatggttctgagccgttcctttattcagcccctcctcttctgttgcgttaatttatgaacaattggactcttgtattaatccttcattgtttgccctagtttcgtacccacaattgggaaaattcaagtagtgaaaatgactcagctagattgtaaggtttcttttatttgtatttacttcttttctccttgggagttatttcagttcatgttgttgtatggaggtaacagtacaaatggcagataaaagcctttttaacctagtgtccggcatggtagcaatacaatgtcagatcttctgtaggaactgtttcgacgttgctgtgattgtttagcaatataacggctcactctgtggtacgctggattaagttctggttacatgttaattcgtgggtaaatggcag

SEQ ID NO: 7604 - DNA, 1689 bp, Zea Mays
gctttgcttccgtacaaaaaaaagttagaatcactctctcgagagacagagagagtataaactaacgcctaccataaatacaaaataaagaaagacaaaaaaagaaaatccctattcctcctcagcataccccttcttccttcgtccccattgatccccttcccccctccactcgtctcccaaatcgccagcgagcgccatgccgccgcctcccctgccctcgccgcccctgaccggctgacccgacctccccactgtctttcccttccacctgggcgccacagcgtttcccttcccgtcaccacgaaatcccggagggacgaggagggagttcgtcgcctgatcgatcggccgatccacgccgccggcctcccaatccttcgctgccgccatgttcaacaagataatcaagaggggaaaccgcaagggcgcgcgcggggacagtgcggaggtcgccgcgcgccccgcagcgccctcgtcatcctccgggagcggcggcggcggcgcggggggagccgcgcccgtcaccgtcaaccacgcctcccgggccacagcgccttctccgtcgtcgcccacttctccgcacgtcacgccgtccgcgtttgcgaccaacccggcggtgggggcggcgtcaccgccactcctcgagcctctcccgctcctccgcgacgtcgccgccgcagaccgtccgggcctcatcctccgcaagctccgcctcgtcgcggcgctcttcgacctctcggactcgctcaagcacccgcgagagaaggaggccaaacgccaggcgctcctcgagctcgtagattacgtgcaggctccagctcaggccgcgggcgccaacgcgcccacgcgcctcccggaccacgtccaggaggcgctagtccttgccatctctgccaacatcttccgcccgctgccacccgcgctgcacgagtccgccgccgcgatcgaccccggcgccgcgcccgacgacgacgaggagccatacctggacccctcctggccacacctccagctcgtctatgagctccttctccgatacgttgtttcgcctgacacggacaccaaggtcgccaagcggtatgtggaccatgctttcgtcctccgcatcctcgacctctttgactccgaggatccgcgtgagcgggaatacctcaagaccgtgctccaccgcatctatggcaagttcatggtacaccgaccattcatccgtaaggccatcaacaatgtgttctaccggttcatctttgagactcagcgctacaatggcataggggagctccttgagatccttggaagcatcattaatggatttgccttgccaatgaaggaggagcacaagctattccttgcccgtgctctcatccccctgcacaagcccaaatctgttgtgatctaccatcagcagctatcctattgtattgttgagttcgttgagaaggactacaaattagcagatactgtgattaggggtctgctcaagtactggccagtcacaaattgccagaaggaggtgttgtttctgggggagcttgaagaagtgctcgaggcaacacagcctgcagagttccaacggtgcatggtgccactgtttaagcagattgcccgatgccttaacagttctcacttccagaacttggatgctatgggatggaagaatctaagctgggtgtagatggaaaggactgg

SEQ ID NO: 7605 - DNA, 1866 bp, Zea Mays
gtgaattattctggttggtaagtgaacttatctagatgatcgagtaccaggaccttcgtatcaaataatgaaacaccatctcaccatgcatctctgtgccctgtgtacattctacaatgacgactctttcactcactgcattcggttactgacatttgcttgagtacaaatcttttcctatcctttttaccattttttatggatatatggcctgctatgttatttctgcaaataaataatatctcatgtttgacttcttttagttcattataaatccataaaactaaagattcatgttggacttgttttaattcgtttttcataaatcccaggaagcttctctatcattaaccagtttattttagtttttaggattgtcacactgcatttaaatcacatattcggtactggtagtatgttaattaatcttggcttgaatctcttgacagttatataatatattcctggttcgtgtcttcaattgaagcgaaaccttccttgagcatacacaaccatccaggtacccactcatggatgagtgggtaatatgacctattccctctgttgcttaacttttcttatctagtgctgcatttgtcaataacctgctttaggattggagtcagcttgtacaaatatatgatacactcacgacccttacgcatcccaccacacagacaccctctcccacaaaaatgggtggcacatatataatagtgcacaaccagtgtaacatataaagaagtgcaaaaatccacttttatacctgtgtcttatggcattttgagcaacagaaatttagttggtactgtttccaattgctgtccatgtgctgctgctgtgcaaattacatgacacttggcagtggtcatggtagagcctagggatcttagggcgcgatcatgtgtgatggtgggtcggcgcttccacgagtgacgtcgggcaggtgccgtcggaacgggaaagagggagagcatgaactcagggggcaacggctgatgttgtcctgtttaactgttccctggttgctgaacgcgctttgttcttgtggaacaatgatcacattgtaagcttgatagcgcaaaatcgtggtgttatatttccaattatatttgaagcgctcgagaggaatatacatagccactggaatcaagcagttcatggtctcactgcaaatgtgcgcaagatgtttctggacatggacagtgaactatttgaagagtgccagcagcagtatatggataaacaagcaaaagccaaagagatgcaggagcaacgagaatcagcatggagacaattggaagctgttgttgctgccaaggctgctggggatgacatggttttggtcaactagatccatgttccttgcatcagtgaaaaacatgtgggccgagtttgaacacattggtggccgcgacagccaatccacgcagaatttctgtgtctagtgaggtcctgctatggttctgagccgttcctttattcagcccctcctcttctgttgcgttaatttatgaacaattggactcttgtattaatccttcattgtttgccctagtttcgtacccacaattgggaaaattcaagtagtgaaaatgactcagctagattgtaaggtttcttttatttgtatttacttcttttctccttgggagttatttcagttcatgttgttgtatggaggtaacagtacaaatggcagataaaagcctttttaacctagtgtccggcatggtagcaatacaatgtcagatcttctgtaggaactgtttcgacgttgctgtgattgtttagcaatataacggctcactctgtggtacgctggattaagttctggttacatgttaattcgtgggtaaatggcag

SEQ ID NO: 7606 - DNA, 650 bp, Zea Mays
tactcaaaactacctaaaccaagcacaagcaccaaacactcaaacagacaggaagcccgccgaacatcacaaggctgcgaacctcctagaagctcgaggagatgctctcccaagctgtcggcgtggttcgtgaacccgcggaggaatccgctcgcgcgtctccaccggaacgccgtcgcctcccgcctccgcaaatacggtatgacgacctctacgacccgtaccacgacctagacatcaaggaggcgctggcgcggctgccgcgggaggtggtggacgcccgtaaccagcgcctcaagcgggccatggacctctccatgaagcaccagtacctacccgacgacgtccaggctatacagacgccattcaggagctacctttttgacatgcttgctcttgtgaaaaaggagagcgcagagcgtgaagcattgggagcgcttccactctaccagagaaccatcccataaagtgcctctttgcatgatccaatcaatagtgcacgcgatgatcagcagaggctgatactgtaatgtgtattgtgttttttcgaggaaatctctactacttattaagacgataagggtagcctgccgttctgacgttatacaaacttagtcatatgttcttgtgcgatctaagctatccgatct

SEQ ID NO: 7607 - DNA, 2898 bp, Zea Mays
ccctaacccacctcctcgtcctcccgccgccggcgctttccgattttgtgcactccaaccttcacgtgtctccgccgcccgtccaaagcaggaaggagctccgccccggaccgatcgagaagcgagcgacaaataagggttcctcgggccgccgactgaccacctgacgcctccagctctatcatcgtccctccaacgacccgcgcagcaaagcagccggtcctcccgccgccgccgccgacatgggcgggggccgcgcgcaggtgaacaaggcccacaagagccgcttcgcgtccaaggcttcccgccacacgcacaagatcgacaaggtcaggagcgggaagtcagaaaccagccaccgcgccgctgtaaagggggcccgcgccgcccgcatccagcagagcaaggcgatccgtgataaaaaacgtgctgctttgctgaaggagaagcgctcgtcaactggaccttcaagcgcaccgcgcgtcattgttctcgttggcctttcttcatcagcaaatgtcggatcacttgccaaggatcttttggcatttgcagaaggagatgatcggaaactgaaattatctaccattgcttctcctacttataagcttcgaaccacagtactgcaagcaccatatggtgatcttaccacatgcatggaactggcgaaggttgctgatttgttagcgttcgtactgccagccaattcattctacagtggtgatttgaatagcccaattgatgagtttggatctcaatgcctgtctgtatttagggccatgggcttacctagtacagctgtttttattcgtagctgcctgaggactgcaagttttacttggcagacacaaaggatgatttgcataagttcatgtggcttttcaaggagcagcatctttcctcgccacattggagaaaccagagatcttatgttatgtctgagcaggtctgcataaatcctgatgaaaatacgggattgtgcacattgctcgtgtctggatatttgcgggcccacaatctttcagtgaatcagcttgtccatgtttcaggtgctggtgattttcagttaggccaaattgatgtcctcaaggatccatgtcctcttagtgagcggaaaagctctgatgtaatggaaacagaagataatggaattcagattgttaacacttttgttccagacccttcaagtcaggaacccttacttgttgaaaatgtgccagatcctcttgccggggagcagacttggccaacggaagaagacatggaggaggtcgacataaacaacaaacagagaaaattggaaaagaggaagcttccccaaggcacttcagagtaccaggctgcttggattgttgaggacacagatgatgaagataacgactctgatgatgacaaccagactgaatctggaatggtcattgatgagcaaggtcactcagaccaaggaagtgatggttcagatatagatgcagtgtctcactttacggagaagtttgatggagaaactattggggatactgagatggcagatgaagaaaatttgacgaaagaccagatagaggcagagattaagaaaatcaaagaagctaatgctgatgatgaagaatttcctgatgaggtggagacaccattagatgtcccagcaaagaagcggtttgcaaaatacagaggactaaagtcatttaggacatcatcctgggatcctaaggaatcgttgccactggactatgcaagaatatttgcatttgataactttacaagaactcaaaagcatgtctttgctaaaattgctgagttagatggaggcatgaagaattgtgctcaagtgggatcatatgtaaggctttatgtgaaaaatgttcccactgatatagcctccaaactctgtcatccatcaagaagaatacctgtggttgtttctggtcttcttcaacatgagtccaaaatgtcagttcttcacttcagcataaagaaacacgactcttacgaagctcctatcaaatctaaggagcctttgattttcaatgttggattccgacaatttactgcaaggccactgttttcatccgacaacatcaactgcaataaacacaagatggagagatttctgcaccatggccgattttcggttgcatctgtatatgctccaatttccttccctccacttcctctaatagttttgaagaacagagatggcgagcaacctgccattgctgctgtaggttcgctaaaaagtgtggatccagaccggatcattctgaagaaaattgttctgaccgggtatccacagagagtctcgaaactgaaatcgatcgtgcggtatatgttccacaatcccgacgacgtaaaatggttcaagcctgttgagttgtggacaaaacatggtcgtcgtggccgcatcaaggagactgttggtactcatggtgccatgaaatgcttattcaatagcagcattcagcagcatgatactgtgtgcatgagcttgtacaagcgcgcgtatccaaaatggcctgaacagctctaccacgtataagattgcttgacgtttggctggatatgtaccagcaggcagaagcagaacgacgggaatgaaacagccttggagcttgcgtgccgtttagcttaaactaaatattttaggattaggaaaatgttttgttggtcgcctgagctaggaggccgaattttgtattggtccttcatatacttttgaacattctccttggacgtcctttattttagtatcaaatttaaattcaagtttaattgcacgttgagataggatattgccaacttaagctttaacatgttggcatatgtgctacacgcaatcatcggagggtcttctttatcataagaaatagtaggaggtggaatagggtcctcgctgacgaacca

SEQ ID NO: 7608 - DNA, 2205 bp, Zea Mays
gtttttagtgctggtttgacaattgtcattgatcctcgaactttgaacaccaaagaagaattgctgccttgctggtctgggaagcactttctttcactccttccctccccatttcctactgacggccgagggggggcacattctttggcttttgtcccggttttgccctccggctcctgccgagctcagcagggggaggcgctgcgcttcgcttcacgccagatccaacctcaccggccaccagcttgcctccatggccggtcgcttcctcctcgtcgttgccgtcgccctcctcctccgccctggggatgcgtccgtgcacgagtaccgcgggctcagcttcgccaacaagggcaacgccttcatcctccacgccggcagcgagggcctctacgcggcctcccacgccaacaccaccgccgaggacgccgccgcagtggccgaagccttaatccggtttgacaagattacttttaggcgatcagaggatactaataattctgtaaaggagactagttcagctaaggttcaggtactcatttttgagatagaagatcgtgaaatgattggtggatcagcatatggaggtcagaaagctatttgttgtacttcagatcttgcgaagttaggagcttgcacagaaggttctgtcatctaccgcccatcccaggtaaatcctggttggccaaagttgtttgtagcatcttttgatggaagtgacctgatcgcgacactaccgtcaaggaccattccaattaccaaaactgggatatacaatatgtactttatacactgtgatccatcacttgctagtttggaaatcgaggggaaaaccatatggaaaaatcctactggataccttccgggtcggatggcacctcttaagaacttttttggactgatgtcttttgcatttgtcgtacttgggatctattggttttatcagtatatgaagtcctggagagaggttcttccacttcagaactgtattactcttgtgattacactgggcatgtttgagatggcattgtggtattttgagtatgctgaatttaatgagactggagtacggccaaaaggcatcacattttgggctgtcacgtttgggactgtcaagaggacggctgctgaagttattgttctcattgtctcaatgggatatggtgttgtcacgcctactttgggtggcttgacatcaaaagtggtcatgcttggaggaacattctttctagcaacagaaattcttgaattggtagaaaatcttggtgctgttaatgatctatctggaaaagctcgtctgttcttggtctatccagtggccattttagatgctgcatttgttatttggatatttatttctctagctaagaccattggtaaacttcaggaaatttgcaactgcattgatcatatctgttctggtgtctgttgggtggattggctatgagatttactccaaatcaacagatgtatttaatgaacgatggcagcatgcctggattattcctgccttctggcatgtcttgtctttcttacttctttgtgtcatttgctacctgtgggcaccttcacaaaactcaatgagattttcttatgatgcaagtgaattctttgatcgaaaggataatatctcattaattaggccagcacccagtgcatccaagaatggatggaatttatcttctacaccagagcccaaagctacaaaggatgtgaataccgtagcagattttgaaggtgatgatgaggaaaacaaaagggagtagaatgtactgtcgatttgattacggagggtatatttgagatcctttgaagtgtgtgctagagcaattttggtatttaggagaggattggccatgctagttattattaatggagcactccgctcgatgttatttcttcgattcgttaccactacagtagttcttcacatggcgagttatgctgttatcttcatagtcttaatgatggtatatgatagaaacaattagtctggtgtataatatttataataatggcaccatattgcttctggttcctgtgaactcgacatatgttatgaatgtcagagaataaattacgatagaaacaattagtctgatgtataatatttgtattactggcaccatattgcttctggttcctgtgaactctacatatgctatgaatgtcagagaataaattgttttgctggatctttgttag

SEQ ID NO: 7609 - DNA, 2265 bp, Zea Mays
tgtccgtctgtctccaccagctaccgagccagccagcaaacaagcaagcaaccgactgcccccttgcccgtacgcagtacacctcgcgccggtgagcgagcgaatgccgcgggagctctagccctcggctcctcgcccgggccggcgtgtcgttccgatccatgaggaagctgccgccagcgcaccgcctccggtggatgcgcgcgctgctcctcgcgctcccgctcgtctcgctccccatcctctacgcggcgctcggcgcggcgcgctcgtcggcctcggcggcgcggccgccgccgccgccgccgcagcagcagcagcagcggaggccgccgccgaggctggcgtacctcataacgggcgcaggccccggggacggcccgcggatccggaggctgatgcgggcgctctaccacccctggaactactacctcgtcggagtggcgggggaggacgagcggacggatctcgaagccttcgtgcgcgcccaggaggcgccgcgccggtacggcaatgtccgggtgtcggccgcgggggagtggggctccgtctcgcggaggggccccaccgaattggcctccacgctccacgccgccgcggtgctgctccgggagttcgacggctggagctggttcatcaatcttagcgcctccgattacccgctcatgccccaagatgacatccttcatatcttctcatacatgccaagagacctcaatttcattgagcacacaagcaatattggttggaaagagtatcaaagagcccgaccaatcattgtagacccagcattgcaggtcccaaataaaactgaggttgtaacaacaaaggagaaaaggagtatgccctcagctttcaaaatatttgtaggttcgtcttgggtgatgcttagtagatcattcctggagttttgcttactgggatgggataaccttcctcgcacactactcatgtatttcaccaacttcctctcgtcctcagaaggctacttccacacagtgatctgcaactcagagtactaccagaacaccactgtgaacagtgatctgcgcttcatggcatgggataacccacctcggacgcaccctgctaacctcacaacagagcattttgatgcaatggcagacagcggggcgccgtttgcacactcatttgccaatgataactcagtcctggatatgatcgacgccaagttgttggggcgagcacctgaccgcttcacgccgggtggatggtgcctgggtagctcagtaggcgggaaagatccgtgtaccttcttgggaaggtcctttattctcaggccgaccaaaggctcggccaagctagagaagttgctgttgaaacttttggaacctgataacttcaggcctaaacagtgtaaataacactcattttacatggtagccagttctttttttttttgtggtagtgttcagaagccgaagtttgatgacatgtttcttgttgttgcggcagtaggcattacatacagatgttttatacttgcaaccggaaagctcaactcacaagtgatttgagatcatacacgatacatgtactcttgctgtttcatcacttctacggctgtacaacaaccgatgataatgagaggttcgctggaagtcagtctgatatgagaggttgccctaggtttcggccccaccctgttccatccgggaattaaccggttcggttcgtgtgggagtttatcatacattttgttttggcaacattggtaaagtaaaattcctgagcgctgcagcagtttttgaacacgaaagtgaagacgctttggtcgttaaagatcgcaaatcccactcacctcaagtcacttcccaacttggacatggcggtccactcccaccttcccgaaactgctcgtacgatctcaagcacggctcctccctagttgtcggctctcggccgcatcaccatccccgtcgccccgagcagtctcgttctccagaaggggaggccaaagaacgcagcgaagaccatcaattaccatctccagcgacttgggcacatcaagttcctctaggtgcatgattttgatatcatttccgcattaggctttactgccctgtgtagaagttcaggaagagaattttttttccaaaatagatttgctgaaacgaggaattaatgtgtttgcttagattgggcaatgctcagcaaataactctgtcaaacaataatatatcagcagtatattgatactgtttttttctcctttttcctaaaataaggatcgggtttaggatt

SEQ ID NO: 7610 - DNA, 2518 bp, Zea Mays
gccgctgcttcgggcttgcgctgcggtgcgggtaaggcgctcacctcaccttcacctacatctcgcactctgtccgtctgtctccaccagctaccgagccagccagcaaacaagcaagcaaccgactgcccccttgcccgtacgcagtacacctcgcgccggtgagcgagcgaatgccgcgggagctctagccctcggctcctcgcccgggccggcgtgtcgttccgatccatgaggaagctgccgccagcgcaccgcctccggtggatgcgcgcgctgctcctcgcgctcccgctcgtctcgctccccatcctctacgcggcgctcggcgcggcgcgctcgtcggcctcggcggcgcggccgccgccgccgccgccgcagcagcagcagcagcggaggccgccgccgaggctggcgtacctcataacgggcgcaggccccggggacggcccgcggatccggaggctgatgcgggcgctctaccacccctggaactactacctcgtcggagtggcgggggaggacgagcggacggatctcgaagccttcgtgcgcgcccaggaggcgccgcgccggtacggcaatgtccgggtgtcggccgcgggggagtggggctccgtctcgcggaggggccccaccgaattggcctccacgctccacgccgccgcggtgctgctccgggagttcgacggctggagctggttcatcaatcttagcgcctccgattacccgctcatgccccaagatgacatccttcatatcttctcatacatgccaagagacctcaatttcattgagcacacaagcaatattggttggaaagagtatcaaagagcccgaccaatcattgtagacccagcattgcaggtcccaaataaaactgaggttgtaacaacaaaggagaaaaggagtatgccctcagctttcaaaatatttgtaggttcgtcttgggtgatgcttagtagatcattcctggagttttgcttactgggatgggataaccttcctcgcacactactcatgtatttcaccaacttcctctcgtcctcagaaggctacttccacacagtgatctgcaactcagagtactaccagaacaccactgtgaacagtgatctgcgcttcatggcatgggataacccacctcggacgcaccctgctaacctcacaacagagcattttgatgcaatggcagacagcggggcgccgtttgcacactcatttgccaatgataactcagtcctggatatgatcgacgccaagttgttggggcgagcacctgaccgcttcacgccgggtggatggtgcctgggtagctcagtaggcgggaaagatccgtgtaccttcttgggaaggtcctttattctcaggccgaccaaaggctcggccaagctagagaagttgctgttgaaacttttggaacctgataacttcaggcctaaacagtgtaaataacactcattttacatggtagccagttctttttttttttgtggtagtgttcagaagccgaagtttgatgacatgtttcttgttgttgcggcagtaggcattacatacagatgttttatacttgcaaccggaaagctcaactcacaagtgatttgagatcatacacgatacatgtactcttgctgtttcatcacttctacggctgtacaacaaccgatgataatgagaggttcgctggaagtcagtctgatatgagaggttgccctaggtttcggccccaccctgttccatccgggaattaaccggttcggttcgtgtgggagtttatcatacattttgttttggcaacattggtaaagtaaaattcctgagcgctgcagcagtttttgaacacgaaagtgaagacgctttggtcgttaaagatcgcaaatcccactcacctcaagtcacttcccaacttggacatggcggtccactcccaccttcccgaaactgctcgtacgatctcaagcacggctcctccctagttgtcggctctcggccgcatcaccatccccgtcgccccgagcagtctcgttctccaggtgaaggtgagggtgaagcagcagaatgggtcggtaggctggtgctttgcacataaacccaaagaagtttggtgctgttgcgaagccttgcatgccagaaatggtggcctggccttaaacaaacagaatgatgacaagtgcatcaggcagaagtatcttttggttgcatgcacccaaactcagaaggggaggccaaagaacgcagcgaagaccatcaattaccatctccagcgacttgggcacatcaagttcctctaggtgcatgattttgatatcatttccgcattaggctttactgccctgtgtagaagttcaggaagagaattttttttccaaaatagatttgctgaaacgaggaattaatgtgtttgcttagattgggcaatgctcagcaaataactctgtcaaacaataatatatcagcagtatattgatactgtttttttctcctttttcctaaaataaggatcgggtttaggatt

SEQ ID NO: 7611 - DNA, 1172 bp, Zea Mays
atgccacagcacgacagctctgctactccacccgttgagtaccacgacagctctgctacgttcgaaacgaaaaaagggacaggaaaagacagcggaaaaatcctggacggtaggtgtccaactccagcgcaccattatccgcttgcttttttgtctcttggccgcaacgtgaagtgcagcagcagccagcagcgggggctggagcactcaccagtcaccactcagcagcgatcgcagcaccgcggcgagataatgagcagcctgtcctccggcatctctgcctcgccatctgcagcgcccagcaccgctcggcgccgccatgacgcagcgccgcagcagctgagggtgaaggcggcggcgcggccacagctgctgcacgccggccgccggcgttcgagtgtcgggaggaggccgggcggcggcgcggtggtggtgagggccgggcctgggccgctgtcggagatcgagccggacctggaggaggacgccatcgacgtgtaccgcaccaacggcatcagcccggaggacttcgagtacgggaagtatgacggacaccacacctatttcgaaggccaagacaagaagggcttctgggaggatgtctccgagtggtaccaagaagctgagcctcctcagggctttcaagcactcatctcctgggcatttcctcctgcgatcatcctcggcatggctttcaatgtgccgggggagtacctgtacatcggggcggccgtcttcatcgtggtgttctgcgtcatcgagatgggcaagcccgacaagccgcacaacttcgagccggagatctacatgatggagaggtcggcccgcgacaagctcatcgccgactacaactccatggacatctgggacttcaacgagaagtacggcgagctctgggacttcaccgtcaacaccagggacgacatcgtcaagtcgacctagatgcattgcgtacaccgctcgctgcccttcagattgttgcctcacagcaaaaaaaaccctgtgaaaggaagctgtagctgctaggaaaatctcttgaataaaaaggaaagccatccttcctgtaagactggagagcctgaaaatctgttctatcctcgtgccatataatacacgacatgttctgcagactgttgcttcaactttctgcatgaattgcctttaaaaaaaaa

SEQ ID NO: 7612 - DNA, 978 bp, Zea Mays
gtgggccccgcgctgcctgattggcctgattcccttccgccttcaattcctacgcgcggtctcccttctcttccacctcaattcgtgtcgcctacgcctctcgctctcctcccgccgcgcgcgcgagaggagggaaagggaggggaggaagccggcggggggcgcgcggcatggacgcgcgggccagggaggctgcagagaccagcggccccgggttgccgctcgccgtgcgggagctcctcgccggaggggtcgccgggggagtcgccaagaccgctgtcgcgccgctcgagcgcgtcaagatcctgttccagacaagaagagcggagttccatggttctggattgattggatccttccgaacaatctatcggacagaaggtcttttagggttttacaggggaaatggagctagtgttgctcgaattgtcccgtatgcagctttgcattatatggcctatgaagaataccgccggtggatcattcttggctttcctaatgttgagcaagggcctgttcttgatctcgtggctggctctatagctggagggacagctgtcatatgcacataccctcttgatctagtccgcacaaagttggcttatcaggtgaaaggtgcagtcagtgtgggtttcagagaatctaagccctctgaacaggtttacaaaggaatcatggattgtgtgaaaacaatatacagacaaaatggattgaaaggcatataccgtggcatggctccttcactatatggaatcttcccttactctggtcttaaattctacttctacgagaagatgaagagccacgttcctgaagagcacagaaaaggttcaagccctttcgtcatccagccttgtgggtaggggaacatttgaaagcctggttatgatagcgaaacagcaaggctggcgacaacttttctcaggattatctatcaactatttaaagcagctcctggcataaaaggcataaaagaaa

SEQ ID NO: 7613 - DNA, 1420 bp, Zea Mays
gacacacgaaattctcaggtcccggtcccgggtccaggcacccttctcgctcggttgctcgggagctttccccttcctgttcctgaagcttccgacatccgaccgcctcctcctcctcgttctactcgccgccccttctagaatcatccagaggcgtgccggtgaagcgcgagagcggtgaggcatggcgatgcagacgggggtcgcgacctccaaggtcctcatcctcgtcggtgcagggatgacgggctcgatcctgctgcggaatggccgcttatctgatgtgttgggagaactccaggagattatgaagggtgtaaatcaaggaacttcttcgggtccctatgacattgcacttattcaagctcagattcggaatttagcgcaagaagtcagagatttgacattgtcaaagcccattaccatactgaatggcaaatctgactcgggaggcagtttatcatcctacatactgccagcagcagcagttggagcaatgggttattgctacatgtggtggaaggggttgtctctctcagatgtcatgtttgtcacaaaacacaacatggcaaatgctgttcagagcatgtcaaagcagttggagcaagtttcatcagcactagctacatctaactcaacggcttgagaatttggatggcaaaatggatgaacaagtagaggtctccaaagctattagaaatgaggtcaatgatgttaaagatgacctgtctcaaattggatttgatgtcgaatcaattcagaaaatggttgctggattggagggaaagatcgagttacttgagaacaaacaggacgtggctaatactggtatctggtatctctgccaagtagcaggcggtttaaaagatggaataaacaccaggtttttccaggaaaccagtgagaagctgaagctctcacattcagctcaacctgaaaacaagccagtgaaggggcttgaatttttttcggaaagcaccatggaacagaaagtagctgactccaaaccaattgcggtgacagtcgacgctgagaagcctgagaaaaccgctgctgtaatgggcaccacagtgcacaggtctatcaggttctcatatcggaaggcaggccttgctttgtgatcaaatcctctccgcttgagatgcacgtggccttcctggttgctttttcttttttggcaacaaccttcctggttgctttgtgtgatggtcagaaaacatagaagaataacctgcaactggagtgacagaatttcttttccccgcagtagacaggtgtgcgttatttggttggaattatctccagtccactatcaattttttttccttggattttgattcattttatgtttcgatttgttgccttatatactgtaaagtcattggaaagaataaataaaacacgaatgttttttgtcaaa

SEQ ID NO: 7614 - DNA, 2944 bp, Zea Mays
atgccctcaccccgcaacgcgcgccctgcccccgcaacgcgcgcccgcgcaagccatcccgcaacgcccgcgcccccgcccgcgttcctcacccgcgcgcgtcgccctcaccgccgattattcctcgcctcgattgcatcccgcggcatccatctccacctcaccgcggcagatccccatttctcgcgccccctccctcgcgcctgcgacatccatgccaccctcgccctcccgctaatctcgccgcgatgaaggtggaatctccgcggacctcgccctcccgcgcagatccctcgcctcgattgcatcccagcgacatccatctccacctcatcgcgacatccatggcatgccgtgcgtggccccgtctacgtcccgcgcatctgcgagggtggcctccacgaatccccttcttccccccatacgaggatcacgctgacgccgacgccgggcgaagaaaggagtccacccgcccccgcgacgccgtgatgcctgtgcccctccgcgacgccgcgacaccgcgatgcccgtgcccctctccgcgacgccgcgatgcccgcacagcaagggcgtgcccccaccccgacgcccccccgcctcaccatgcccccagctcgccgtgtgatccatgcccccagcccagcttcccctactacctcaagcaagatctatgggaggaatacattgatctgatcatgtagtgcatgtgcaatgatacctgtgaaatagaagtcgttttctggggggagctccatcgtcgggaagaggggtcatggctcaccacggacaaaagcacttcttttgacccgaatacatgaagccatgaaagtaatggttgaggggagggggaagcaagtacctgatgatcttttgggtcaatacgggtagtttatgatcaagctggtgtgggaggctcaccacggacaaaaggttcgtgatttccatcaccacgctcccacaggattttgacagctgttgtcaacgaaggcgagaatggtgtactctaagctcagcaatttccagaaaaaatcgttaacttgcaagtcgaaaagcaaggtcctgtcatcacaaactcctagcaaatttagcgatatgtcatgagaacaagacaggacaacattacagcctcagaggtaataaccttcgttttctatttgcttcagccaacttgatttaccagcttatcttcttccactttctgcccatttcctattgattcagtccttctactcagctttggaggttgtctgtttacaaatacggaattgtccccaatactgtttttatgatgttaacaccatgaaccgagtagcagtttatgcccatgagaatgcttcaatgccccatttgggtcttgtgggcaaatgatcggatggtgcataacttcgatgtagcttatttgatcagcttataatggaacgatgggaagactttgatccaccacagcgcttgggatgttgagctgcaatttgaattgacaattatttgacaacaactaaaatacattttttcttgcttctgctcttgcagtctttgtaaattcaggtgtcagtgttggattcaaattacttttaaaaaaatagaggttagcattccactagaatatatggtcacatgtggctacttatttcctgcattcaaaatgtagtcacatgagtagtggtgaactgatgatgccatatgtggctacttatttcttgcattgaaaatgtggagctaaagtgtgtatgttttgttacacaaacgttggtgttgttgtgctccttttgctgaagcactgccttttacggttagcgacactcaatgttcgatcacttgtacaaaacaagatatgtattttcttttgagcaattcttttaaaatatatggggcaatgaagagcttcatattgtgttgaacctcagtctataatatttagttgcaagtgagagttttatacttacgacatgctacattttgttatccttatagttggttagcctattgtagaaggtggttgaacttgtactttgagaccaaatatatattgcatacttgatattatactattatttgagcttgtcttattgtactcttatctgttcttatgaaggttagaggaatgtgtttggggtgagtaatttttttgtgttgtttcctctatccatggccatggaggagcaaaggaggccacctagctcgaagatagcgccagtgtccatgaaggcgtcctctgcaaatgcgacgcttcaaggcatgaagaacagaagccattttcgaagggacaggaaaactgcgctgcaacaagacgtgtggacaagctgaggaagaagttgtggcacgagaagaacgtccactaagctctaaagcaggcgttctcgaggccgctctgcctcgcctccctattgtctcaagtcaatgtccttctttgcttttcgatcaatttcacaagcaagaagcaacctaaccaataatctattgcccttccgaaggactcgatacactttctgatttctgcctcttctgaattgttcctagacattggagcttctggccccgttgtaagtggaaaatccttgtacttaaaggttgcaatgtagtggccccgttgtaacgcacgggcactcacctagtgtcaataagaagtacaagctcttgtctgctggtaaaagaaaaacatcttgactggacagtgacattaatataataaaaacggtgtttggctgctatggaaaaatgccagccgactttcttttaaaaaaaatatgctagccgatgtatttttgttggactctatggaaagatgtttttcttttaccagcagacaagagcttgttcgctcggcttgttcgctgcggctttaatccgactgcggctgcggcttctacagtattttctctctagggattgcagctgcaacagtattttgcagctgcaacagtggtttttgtagtgcagccgaacg

SEQ ID NO: 7615 - DNA, 2960 bp, Zea Mays
cttccgcatggacaacattcgcgacgagatgctacaactacactcatgacagcttcaatagcatatctgcattttttcctcgtcctcagaatcttctctctcgcaagatctatgggaggaatacattgatctgatcatgtagtgcatgtgcaatgatacctgtgaaatagaagtcgttttctggggggagctccatcgtcgggaagaggggtcatggctcaccacggacaaaaggattttgacagctgttgtcaacgaaggcgagaatggtgtactctaagctcagcaatttccagaaaaaatcgttaacttgcaagttagtttcaatatttctagcatattccaatcacagcatcgtccagcgcacacccatccaatttaggggcttcttgttgtgctctcaggccccagtaagaactccaatccctagatctcttttcgtgtgttaagttgtgcttaagaactgctgatgcagacattaggttagggcaaggattttggttaattggaataaggcagcgctttaaccttagttcctcagtttcagctttaacatgtgttgtctccatagtatatgctctgattaacatggcggagaggatttgtgaggtgaattacttgtaagatgttatctaagtggggggacagggaaagggaactgtggctccattgaggatgatagtgttatgaatttcttctcctactttagagctctgttctatattgttcttcggtaaatcggttgttgcattacttataaggtatgcctaatttactgttcttggttaggcaccatagatcctgtcattgtttgagtgcagtaaaccatgtaaattctctcttataagttgtccttttaattatactaataatcgattgtccaaatttgtttagacaccatattattttgtcattatttgagtacagaaagaagtaaactctcttacttataaatgtgctaataattctctatctaaatttaggcacttgaaatataccaactcgcatataagatataaattatattaacgatgccacgccaaatgtgtacttccctaggtcgaaaagcaaggtcctgtcatcacaaactcctagcaaatttagcgatatgtcatgagaacaagacaggacaacattacagcctcagaggtaataaccttcgttttctatttgcttcagccaacttgatttaccagcttatcttcttccactttctgcccatttcctattgattcagtccttctactcagctttggaggttgtctgtttacaaatacggaattgtccccaatactgtttttatgatgttaacaccatgaaccgagtagcagtttatgcccatgagaatgcttcaatgccccatttgggtcttgtgggcaaatgatcggatggtgcataacttcgatgtagcttatttgatcagcttataatggaacgatgggaagactttgatccaccacagcgcttgggatgttgagctgcaatttgaattgacaattatttgacaacaactaaaatacattttttcttgcttctgctcttgcagtctttgtaaattcaggtgtcagtgttggattcaaattacttttaaaaaaatagaggttagcattccactagaatatatggtcacatgtggctacttatttcctgcattcaaaatgtagtcacatgagtagtggtgaactgatgatgccatatgtggctacttatttcttgcattgaaaatgtggagctaaagtgtgtatgttttgttacacaaacgttggtgttgttgtgctccttttgctgaagcactgccttttacggttagcgacactcaatgttcgatcacttgtacaaaacaagatatgtattttcttttgagcaattcttttaaaatatatggggcaatgaagagcttcatattgtgttgaacctcagtctataatatttagttgcaagtgagagttttatacttacgacatgctacattttgttatccttatagttggttagcctattgtagaaggtggttgaacttgtactttgagaccaaatatatattgcatacttgatattatactattatttgagcttgtcttattgtactcttatctgttcttatgaaggttagaggaatgtgtttggggtgagtaatttttttgtgttgtttcctctatccatggccatggaggagcaaaggaggccacctagctcgaagatagcgccagtgtccatgaaggcgtcctctgcaaatgcgacgcttcaaggcatgaagaacagaagccattttcgaagggacaggaaaactgcgctgcaacaagacgtgtggacaagctgaggaagaagttgtggcacgagaagaacgtccactaagctctaaagcaggcgttctcgaggccgctctgcctcgcctccctattgtctcaagtcaatgtccttctttgcttttcgatcaatttcacaagcaagaagcaacctaaccaataatctattgcccttccgaaggactcgatacactttctgatttctgcctcttctgaattgttcctagacattggagcttctggccccgttgtaagtggaaaatccttgtacttaaaggttgcaatgtagtggccccgttgtaacgcacgggcactcacctagtgtcaataagaagtacaagctcttgtctgctggtaaaagaaaaacatcttgactggacagtgacattaatataataaaaacggtgtttggctgctatggaaaaatgccagccgactttcttttaaaaaaaatatgctagccgatgtatttttgttggactctatggaaagatgtttttcttttaccagcagacaagagcttgttcgctcggcttgttcgctgcggctttaatccgactgcggctgcggcttctacagtattttctctctagggattgcagctgcaacagtattttgcagctgcaacagtggtttttgtagtgcagccgaacg

SEQ ID NO: 7616 - DNA, 3019 bp, Zea Mays
ccacggaggtcgccttccgcatggacaacattcgcgacgagatgctacaactacactcatgacagcttcaatagcatatctgcattttttcctcgtcctcagaatcttctctctcgcaagatctatgggaggaatacattgatctgatcatgtagtgcatgtgcaatgatacctgtgaaatagaagtcgttttctggggggagctccatcgtcgggaagaggggtcatggctcaccacggacaaaaggtagtttatgatcaagctggtgtgggaggctcaccacggacaaaaggattttgacagctgttgtcaacgaaggcgagaatggtgtactctaagctcagcaatttccagaaaaaatcgttaacttgcaagttagtttcaatatttctagcatattccaatcacagcatcgtccagcgcacacccatccaatttaggggcttcttgttgtgctctcaggccccagtaagaactccaatccctagatctcttttcgtgtgttaagttgtgcttaagaactgctgatgcagacattaggttagggcaaggattttggttaattggaataaggcagcgctttaaccttagttcctcagtttcagctttaacatgtgttgtctccatagtatatgctctgattaacatggcggagaggatttgtgaggtgaattacttgtaagatgttatctaagtggggggacagggaaagggaactgtggctccattgaggatgatagtgttatgaatttcttctcctactttagagctctgttctatattgttcttcggtaaatcggttgttgcattacttataaggtatgcctaatttactgttcttggttaggcaccatagatcctgtcattgtttgagtgcagtaaaccatgtaaattctctcttataagttgtccttttaattatactaataatcgattgtccaaatttgtttagacaccatattattttgtcattatttgagtacagaaagaagtaaactctcttacttataaatgtgctaataattctctatctaaatttaggcacttgaaatataccaactcgcatataagatataaattatattaacgatgccacgccaaatgtgtacttccctaggtcgaaaagcaaggtcctgtcatcacaaactcctagcaaatttagcgatatgtcatgagaacaagacaggacaacattacagcctcagaggtaataaccttcgttttctatttgcttcagccaacttgatttaccagcttatcttcttccactttctgcccatttcctattgattcagtccttctactcagctttggaggttgtctgtttacaaatacggaattgtccccaatactgtttttatgatgttaacaccatgaaccgagtagcagtttatgcccatgagaatgcttcaatgccccatttgggtcttgtgggcaaatgatcggatggtgcataacttcgatgtagcttatttgatcagcttataatggaacgatgggaagactttgatccaccacagcgcttgggatgttgagctgcaatttgaattgacaattatttgacaacaactaaaatacattttttcttgcttctgctcttgcagtctttgtaaattcaggtgtcagtgttggattcaaattacttttaaaaaaatagaggttagcattccactagaatatatggtcacatgtggctacttatttcctgcattcaaaatgtagtcacatgagtagtggtgaactgatgatgccatatgtggctacttatttcttgcattgaaaatgtggagctaaagtgtgtatgttttgttacacaaacgttggtgttgttgtgctccttttgctgaagcactgccttttacggttagcgacactcaatgttcgatcacttgtacaaaacaagatatgtattttcttttgagcaattcttttaaaatatatggggcaatgaagagcttcatattgtgttgaacctcagtctataatatttagttgcaagtgagagttttatacttacgacatgctacattttgttatccttatagttggttagcctattgtagaaggtggttgaacttgtactttgagaccaaatatatattgcatacttgatattatactattatttgagcttgtcttattgtactcttatctgttcttatgaaggttagaggaatgtgtttggggtgagtaatttttttgtgttgtttcctctatccatggccatggaggagcaaaggaggccacctagctcgaagatagcgccagtgtccatgaaggcgtcctctgcaaatgcgacgcttcaaggcatgaagaacagaagccattttcgaagggacaggaaaactgcgctgcaacaagacgtgtggacaagctgaggaagaagttgtggcacgagaagaacgtccactaagctctaaagcaggcgttctcgaggccgctctgcctcgcctccctattgtctcaagtcaatgtccttctttgcttttcgatcaatttcacaagcaagaagcaacctaaccaataatctattgcccttccgaaggactcgatacactttctgatttctgcctcttctgaattgttcctagacattggagcttctggccccgttgtaagtggaaaatccttgtacttaaaggttgcaatgtagtggccccgttgtaacgcacgggcactcacctagtgtcaataagaagtacaagctcttgtctgctggtaaaagaaaaacatcttgactggacagtgacattaatataataaaaacggtgtttggctgctatggaaaaatgccagccgactttcttttaaaaaaaatatgctagccgatgtatttttgttggactctatggaaagatgtttttcttttaccagcagacaagagcttgttcgctcggcttgttcgctgcggctttaatccgactgcggctgcggcttctacagtattttctctctagggattgcagctgcaacagtattttgcagctgcaacagtggtttttgtagtgcagccgaacg

SEQ ID NO: 7617 - DNA, 1962 bp, Zea Mays
ccgatacacaacccaactcccgcacgcatctacccccaccaccagacgacctcccccctcccccgcattctctcacgccgcctgcgctctccccctcgcgagatagacaaccctagctcccgtctccttgcttaccctcctctccaacccctctccgatctctataaaagacccgaatttcgaattccccctcgaacccgcgatccgcgctttccttcccgcccatttcggtctctgattcggcgcggattcgctgcgcgggagcccccgaggttgcgtgcgtgattcggatggcggagccggggctcgagggcagccagccggtggatctgtccaagcacccctctggcatcgtccccacgctccatggcatattcctgaaatgtgtgggcagctcggtcccgttgaaccgggggatgaagccattccttgcggccatctctgtgtcaccaggtgcgagcgcattcaaacggaggggcacatggggaagcttcgagctcaaggaaagcggaggaaatgagatggatggagaatatgcaaggcactggatgagcgcggacgtgaagagtagggtgagctccagcgtgggaaggagcgggtccgatgatctcttccggccatatgagatctctggttgggcaggttacgcatctctggtggcagcaattctgaaattgcacgagactgtgcgaatggattggccaaactcttgggcggctgtagttcccagctcttctgtgatgttgcgcgactgcggtacaatgttgaaaatcaggctttgctcacacgaagaaggcaacaaggataggaatatcgtatcaacagttaatttggattgtaaacttgacctcaaagcaatagctttgcaagcacgaaatgcggagtataacccaaagcgttttgctgcagtcatcatgagaataagagaacccaaaaccacagcactgatatttgcatcgggtaaaatggtatgtactggagcgaagagtgaacagcaatccaagcttgcagcaaggaagtatgcccgcattattcagaaacttggttttccagctaagtttaaggattttaagattcagaatattgttggctcttgtgatgtcaagtttccaattaggcttgagggccttgcatattctcatggtgccttctcaagttacgaaccagaactctttcctggccttatctatcggatgaaacaaccaaagattgttcttttaatttttgtttcaggcaagattgttttgactggagcaaaggtgagagaggagacctacactgccttcgaaaacatctatcctgtactgtcagagtttagaaaaattcagcaatgatgacatgtgatgtgaaggtcacgttcttcaaattacaagcttcctcgaggattctcgtgtgaccatgaattctaaatgtacataaaagtctggcggaacttatagcatcctgtaatctctgtgagccgcggtctgtcagtattgggtgggcttgctgtggtaactggtggacatgtcgagttcatccatttgggtaggccttggtgaacacggacgccccacatcatgtctcagtttgagtagtttgtgtgaactgaagggtacgtgcttctcccatgtggttgcagcgttaacttgagtcaagtgctaacaagagtagataaaattttgccccagttcgtctttgtgacagtcttttaaagtcttttttctgagtatctttcaaagtgttttcagagtatcttccagtgtgctactgctgtgcgatgatgagaaggctggcactgtatgtaacgggggcaacgtgaccggttgtaagttatgtattgtagttgagatgctgtagcgcctagggcactgggattgaacttgtggaggaaccagtcagtcgaccgttctatttgtgtggccctctgctactgactaatgtggcctgttccaaatgtcgctgcgattttcgtttctttta

SEQ ID NO: 7618 - DNA, 2093 bp, Zea Mays
cgacgcaaagatccaccaccaccaccacgcgccgtcgcctataaaatcgagctgctgagaaagacaagtgcgcgcgagatggcctccgtcctgccggatactgcgtcggatggcaaggccttgacggacgcctgggactacaagggccgccccgctagccgcgccaccaccggcggctgggcgtgcgccgccatgatactaggcgcggagctgttcgagcggatgacgacgctgggcatcgcggtgaacctggtgccgtacatgaccggcaccatgcacctcggcaatgcctccgccgccaacaccgtcaccaacttcatcggggcttccttcatgctctgcctcctcggcgggttcgtcgccgacacctacctcggccgctacctcaccatcgccatcttcaccgccgtccaggccacgggggtgatgatcctgacgatctcaacggccgctcccgggctgcgtccgccggcgtgtgcggacgccaagggggcgagccccgactgcgtgccggcgaacgggacgcagctcggggtgctatacctgggtctgtacctgacggcgctgggcacgggcgggctcaagtccagcgtgtcgggcttcggctccgaccagttcgacgaggcgcacggcggcgagcgcaagaggatgctgcgcttcttcaactggttctacttcttcgtcagcatcggcgcgctgctggccgtcacggtgctggtgtacgtgcaggacaacgtgggccgccgctggggctacggcatctgcgccgtcggcatcctgtgcgggctgggcgtcttcctgctgggcacccggaggtaccggttcaggaagctggtggggagcccgctcacccaggtggccgccgtgacggccgccgcctggagcaagcgcgcgctgccgctgccgtccgacccggacatgctctacgacgtggacgacgcggccgccgccggcgccgacgtcaaggggaaggagaaactgccccacagcaaggaatgcaggttcctggaccacgcggccatcgtcgtcgtcgacggcggcggcgagtcgtcaccggcggcgagcaagtgggcgctgtgcacgcggacggacgtggaggaggtgaagcaggccgaggtcatggaccgggccctcggcggcggctcgggcttcctcatccccgcgggctccctcaccgtcttcctcatcggctccatcctgctcaccgtgcccgtctacgaccgcctcctggcgcccctcgcccgccgcctcacgggcaacccgcacggcctcaccccgctgcagcgcgtcttcgtcggcctcctcctctccgtcgccggcatggccgtggccgcgctcgtcgagcgccaccgccaggtggcctccggccacggggccacgctcacggtgttcctgctcatgccgcagttcgtgctcgtcggcgcgggcgaggcattcacgtacatgggccagctcgccttcttcctgcgcgagtgccccaagggcatgaagaccatgagcacgggcctgttcctcagcacctgcgcgctcgggttcttcttcagcaccctgctcgtcaccatcgtgcacaaggtcacggcccacgccggccgtgacggttggctcgccgacaacctcgacgacgggaggctcgactacttctactggctgctcgccgtcatcagcgccatcaacctcgtcctcttcacgttcgccgccaggggctacgtctataaggagaagcgcctggccgacgccggcatcgagctcgcagacgaggagtctattgccgtcggccactgatgctgctgccagtgccacaaccctgcatgcatgcgtctttccttctctttttttttttatatatgttttgaacttttgatgacttgttttggcctgaaatcggtggggccgccaaggggggccatgcgtgatgtattttggcacacggtgtgaccccgtcgtacagacgcaggtcgagctaattaacgtgtacctaaggggtgaaacaaatgtagatacaaatatacggcctaataagtacgtacctaatagtggtatacgtacgttgtattctgcttcttgaaatgaatgacagctagcgttgctgcgct

SEQ ID NO: 7619 - DNA, 1767 bp, Zea Mays
cccctcccaacggcgcccttcctccccgcacgctacgacggccgagacgaacgcgcggcttcctccccaccaacggcgccctttccaaaagcctcgacccgctgctctcgccgagatcccgcgcgtagcacgcgcggcttccttcccaggctggcgagatgcctccttctacgctcgcgcatgcactatgcccctgtcgttgtccacctcccacgcccacgcatgcacccatcccctcgtcacgcaaaccatagtctcctccgcccccgtgctcgccaccgcgtcgacttcggtggagtccagcgatagggcgagtgggagacgatgccgccctcggttcgcgatgccgcccactcccacacgtcgtcgcgcgaagccggcgctcacttcgggccagatctacctgcccgtgtggtgttgtgcgtacgaccacctcgtgaagatgctgcaacaggcgtacgcgcaggtcgaggagctctccgtcgagcgcgagcacctcgtcaatgagctctagcttctacagagccgcttccacaagcgcaagatctgccaggcctgcctccagaagatggatggatttgatcaaacagtgaatgtgaaggttgtaatggcaactaatagggcacatactctagattctactttgttgcggccaggtagacttgacaggaaagttgagttctctcttcctgattggcggtagaagaggcctgtgttccaagtatgtactactaagatgaatttgagtgacgaggctgatttggaagattatgtttgcagactggataagatcagtgatgctgatgttgagttggtttcatggcacagaccaaaaattttatgcatttgttgttttctaacaattgtattgctagggacttttgtcctgcgctggccaaagctgtcaaaactatgaaaaaggcagagaagctgctccttatatatagtaaagccattaccaacagttggagaggaaggtgttctgatgagcatcatcttgttctgcatcatcactaatcaacttgttatgcacagtgtccgatgtgcctgtctcaactcgattgctaaggcatataattgacctaaaaaggcacttcaagcgggtaggaaaattcaaggtcgttctcaagtacttccaagtcggtacggtcgttgagcctgcatctgagttctactcaagtaggctgaaaaatagggaacgcaaggcaacattggttgacgagctgttatcagatcaatctctgaagagctacagagtcattcatgttggtgggcgtcttggatgaactacattttcttcaacaaagatggagctcatgcagattgatttagtccctttttgcaatgcagctacgtgcccacgtttggcgaggcgccatttccggccaccggccacgtcgccgcgcgcaggagagaagctaggcactacatgatgtcagccgaccaagatttttaaaaaaagatacgaaagcttgctacaaaataaaccggtccagtcacaagctagctagctagccagattaagtcgatgccgcactgcttgtatatgcattggattccatattgttctcttcagatggacatcaaatgttctgttcattaattaaggttaatcagtggcatcctatgtggaatcgtccctgcttacatgcatatatagtgcgtgcgtgcattatatgtatccattccacatgcatgcatctgtttcaccatctttaatttggatgcttatgcatgcatgcttctttactttgattattgtttttt

SEQ ID NO: 7620 - DNA, 1730 bp, Zea Mays
atttaaagaaaggaaaccgttttcgatttccttcctacgcgtctcgcgttggcagcgcgatccttcggagccgacgaatcccaccactgcccgcgccgcctccgcagacgacgcaactgacagtcaccgacgcgacgcggctcgcctcctccgcccttctgttcagcctcctcgcccgcgatggctccgggcaccgacgccggctacggccagtgggcggcggcgtgccccccgctgcggcggaacctgcagctgctttcgcccgacgaggttgagctagcaaaaatgctgttgaatgaaggccagattcacctgttcgaacactggcctgaaccaggtgtcgatgatgacaataaaagaggcttctttgatcaggttcgccgacttaattcaagctatcctggaggtctggtatcttacatccagaatgccaaaaaacttcttgcggattcaaaggaaggcaaaaacccatatgatggtttcaccccttctgtgccttcaggggaggttttgacttttggcaatgacaattttgtttcactggaaacagctgggataaaagaagcctgcaatgctgcatttgttcttgtagccggagggcttggcgaaaggcttggctacaaaggaattaaggtagcacttccccgggaaacaactactggaaaatgtttccttcaacactatatagagtctatcctggcttttcaagaggccagctgcaaaatggttgatgaggggtgccaaacaaagattccatttgttattatgacttctgatgatacaaatgcgctaactatcaagcttttagagtcaaactcctacttcggaatggaaccatctcaagtgaaaatactaaagcaggaaaaagtagcgtgtctagctgacaatgatgcaaggcttgcattagacccaagtgacaagtacaaaattcagacaaagccacatgggcatggagatgttcattctcttctttattcaagtggcttgcttgaacaatggaagactgaaggacggaagtgggttctctttttccaggatacaaatggattgcttttcaatgcaataccatcagcattaggtgtcagtgccaccaagggttacaatgtaaattctctcgctgttcctaggaaagccaaggaagcaattggaggaattaccaaacttactcatgtcgatggtagaacaatggtcatcaacgtagagtacaatcagcttgatccactccttcgtgcaactggacatcctgatggagattcaaattgcgagacaggctattctccatatcctggaaatataaaccaggtaaactatttgttccaaagggataatttaccatgagttcagacatggcaagtgatctgtggctcttggttcaccaaatactgaaaacatgtcttattgatattccccttcggatgagggtgaaccatgaaccgtctattaatgattgtcctgctcttatgttttggagatttaacgctaacaccaatatgagttttgcggatgctgttaccttcaatgtcacattatgtgtgttataacctttcatgctcattttgtccattgcttttaaaactggacagaactctgtcaacattgttatatgatgttacgttcaaggtgcatattttgttgtactaagaaatacactgagcttttgtagttgatactggagcttggaccatatattgaggagctcaagaaaacacatggcgccatttctgaatttg

SEQ ID NO: 7621 - DNA, 1585 bp, Zea Mays
tggtcaaaattatcgtttggtagctggaacattttattacagaatgctctatttatatcgatctcagattcattgtccaatgcaagtattgtccttttactacagacaatttctgggacctcttgacacttgagggctagaagatgtaaattcatgagagcttagatgtaagtactcctttggatattttttctctgatttctgaataggtttttgtaacagtgaaaatttattgttgcctatagcgtggagtgtatgtgtcctgtttgagcttcgccagcttgtagaaggcacatttctgtccctacattttatttttcaccaatggcgaaacttgtgtagtcgtttgccactatttacttgtttgttttttcagcgaacatgcattttggagagaccaacttgaatgtgcggagcagtcgatcacacggtattttcataatggtatagaattctgaattcctaagcaattttgtaattgcagctgttctaagaccatttttgtagttgaatggaagcgataactgaatcaagaatgttctatttatatcggtctcacgtaattgtgagcagcaatagagactaagtagttctgtaattgcatttgttctaagaccattttctgtagttgcatggaagcgataactgaatcaagaatgctctatttatatcgatctcagctattctaagaccactgctattttgtaatagatgtcagtgcttattactggtcaatcctcctcagctgcactcaaatctgaacagagatgtttataatagatgttagtgctcactcgccctcaatggaggaaagggagtttcagaaacatatggaatcgacaagactagctactcaagtatctattgcaagcccaagtagctcacaggggcttcccacatctgcaagggcaaatcaggaggaaactgatatggcaggtacggatgagggatatccgtggtcaagtttgatgcttcaggaccaatatcgttgtgtgtcgttgctggtggtatctgaatgggggtaaagatatagagagggatttttttcttcaaatgatgatttatcgttgcgtgtcgatgctggtgttatttgaatgggggtatgcggtcggtgctcgtgcgacacagacccacgattctccttggacgccggccgcatgtccgtcagtgacatgggcttctcttgggatgagccctgtgcgtcgtgggacggctgaaacgtgtaacagagagtctcaagttctatagatcttcacttcccctgcttgttctacatttcacgatcctgactgatatttctttttatcatattagggccgagatgtatatatactggcaatacaactttggagaatgcgagttgtgtttctgcctctgagccagtgtagctatatctgatttaaaccatactctgttacagggttccacaaatgttggaaaatctgcatatatgttgttcgtttccatgtaattgttgtgcactaacatttatcgaatagtttgtacaccgttgtaacgcacgtgcactcacctagttgtagtatatatgacaaataatttgcagtcttcaacatcggaaaatccg

SEQ ID NO: 7622 - DNA, 4128 bp, Zea Mays
cttgagtagctgcagtggtgaccacacaagtgaacgagatgcaaagaaggcaggtaagctactgcaaatttatacaataatttattgtcaagaaacgaacgctagattactgtgccggatagatcttagcaggtaaacagtaggagaactgatgtaaatgagaagacaaagttcttcacgtgaggtaaaatgttgtccagttttttttcttaaaatgaaatatctatgtctttgctgatttatttgtccagttttttgttcttcaggtgagaagacaaagttcttcagataaacagtaggagtataaccagggagtgtggattttctgaatataaatggaaaagaggggatatggtgtatggtctggatataaacccaagagttgttctggtagggcgcccgaacgggcgcctcctgttctagtgtggtataaaggggaatctcgatgcccaacgccgcatcgccgtcaagcgcttcaaccgctctgcctggcccgacccgcgctagttcctggtattccatccaccttctcttttaccttttctaattatgtgcatcttgtgggtgtaattgatagttgggaacctgggtgtaattgatagtttgcttataatgaagaagcaagcgtatgttgtgttgttttgtatgcgataggccagtgcatgcatggtggaagcatgacgactgaaaaaaacaatttttacctttcatcctaagcatcacatcttaactatatggcgttatgaaaaaagcatatcagatttcatctcatgctgtgttttggcggtagcttgattatggtataccgttgatgactggttcttttttcttctgatagccatattacagttgccattgtgctttgttgatttatagcttccatatatgcaaggaagaatatgttgatcaatgtcttgcgtgccattcctacatgtttgtgcaaggaggagtgtcctgtcgtgctcccacatgcacttgttgcagcgttcgtcaagaccgataaagatttctaggctatggctgacatttgtgataatagatgagtgggttgtgactagcatctgtcggtgattcacattgcatacgagaatctacttaggatcaaaggtactttttatcagctgatcatcgctttgactccaactcaaatgagccatggaaaggaagctcactgggtcagaactctattcgagaaattgaaagctccaatgaagtaattcctcgtcagtcatcttcaaagatgatgccatgattcccagaaagagaaccttgttgagggctcagaaaataaggctgattcagattcagaagggtcacttgctactaatgatggcgtggcagataaactgaattattcagaaaataaggctaatcattagtcactcttaacaattcttttgctttttagattgtgtgcttgggtcgtgattcgatggatgatgagacagtggaccaaactgaaaaggattctcaaggaggtaataaaggagcccattgtacagtggaccaaaaaaattatagaggcagagctgaaccgactaatagaggcagagctggacaagtcgaagttgtgatggtcaaaattatcgtttggtagctggaacattttattacagaatgctctatttatatcgatctcaggtaattctgaattcctaagcagttctataattacagttgttcttagaccattttatgtagttgaatggaagcgatatctgaatcaagaatgttctaagaccattttctgtaattgtagctactctaagaccactgctattttgtagtaaagtaaacaggcaacactatagtcttgtggcagttgctgcctgtttgggactaggagttgtcgggttatgcaagtcattgtattgtggtttgtccataccatgggtttctccaaggaatttgttttcggggtttgggagagtatactatgtaggagatctgcgaaatttttggcaacaattgctttcttaatgtcatcctccaggtaaatattgactttgtaattctactgacatccagctagatgaatgctaaataagacagccttttctcggcacacacttgccagttgtgatggttttatttcctttatagaaaatttgtttgcaaccgatggcttgctacctaaagaaaagcctgtaaaaatgcctcttcttcttgctctaagccctctcttggaatgtaatatttttactatggactattgaacttcttatcattttcgagatccccactatgaacttcttatgacaactgtagattcattgtccaatgcaagtattgtccttttactacagacaatttctgggacctcttgacacttgagggctagaagatgtaaattcatgagagcttagatgtaagtactcctttggatattttttctctgatttctgaataggtttttgtaacagtgaaaatttattgttgcctatagcgtggagtgtatgtgtcctgtttgagcttcgccagcttgtagaaggcacatttctgtccctacattttatttttcaccaatggcgaaacttgtgtagtcgtttgccactatttacttgtttgttttttcagcgaacatgcattttggagagaccaacttgaatgtgcggagcagtcgatcacacggtattttcataatggtatagaattctgaattcctaagcaattttgtaattgcagctgttctaagaccatttttgtagttgaatggaagcgataactgaatcaagaatgttctatttatatcggtctcacgtaattgtgagcagcaatagagactaagtagttctgtaattgcatttgttctaagaccattttctgtagttgcatggaagcgataactgaatcaagaatgctctatttatatcgatctcaggtaattctgaattcctaagcagttctgtaattgcagttgttcttagaccattttatgtagttgaatggaagcgatatctgaatcaagaatgttctaagaccattttctgtaattgcagctattctaagaccactgctattttgtaatagatgtcagtgcttattactggtcaatcctcctcagctgcactcaaatctgaagttcgttcagctctttagaagagaaacaaagctaatttcagaagtcgaatactacctgactaacctcatttcagcagagatgtttataatagatgttagtgctcactcgccctcaatggaggaaagggagtttcagaaacatatggaatcgacaagactagctactcaagtatctattgcaagcccaagtagctcacaggggcttcccacatctgcaagggcaaatcaggaggaaactgatatggcaggtacggatgagggatatccgtggtcaagtttgatgcttcaggaccaatatcgttgtgtgtcgttgctggtggtatctgaatgggggtaaagatatagagagggatttttttcttcaaatgatgatttatcgttgcgtgtcgatgctggtgttatttgaatgggggtatgcggtcggtgctcgtgcgacacagacccacgattctccttggacgccggccgcatgtccgtcagtgacatgggcttctcttgggatgagccctgtgcgtcgtgggacggctgaaacgtgtaacagagagtctcaagttctatagatcttcacttcccctgcttgttctacatttcacgatcctgactgatatttctttttatcatattagggccgagatgtatatatactggtaagcactcatcacttccattattgtgtttttctttagatgttaggggaaaaatgaagagggcaatttctattcaaagatatgtgcattatattgtatatgcaattgctattgctataaatataaatttaacaaacttcattaattcaggcaatacaactttggagaatgcgagttgtgtttctgcctctgagccagtgtagctatatctgatttaaaccatactctgttacagggttccacaaatgttggaaaatctgcatatatgttgttcgtttccatgtaattgttgtgcactaacatttatcgaatagtttgtacaccgttgtaacgcacgtgcactcacctagttgtagtatatatgacaaataatttgcagtcttcaacatcggaaaatccg

SEQ ID NO: 7623 - DNA, 740 bp, Zea Mays
tacagattacgcttagtattcaaaaaaactacataaaagaggaaacaatagagaggatgaggttagatgaagagaagcttatggatttctttagggaacacgtcaacgtgacaaaagttgaaagtagagtgcggattctggcagatatgagagatctagcttcagctgggagtttggatagctttactctcattttcacaaatatactggaacatcaacctgattgcccgcctgaggttgttgagaagcttgtggcaatgcgggaagacattccaagaaaggaagccaaggagattgtacaagaatgcaaagagatatacgagaactcgctcgtggatggcaaccctcgcaagtcaggttttgtgttcggcaaattgaagtgcttgacagcaaagaaaggcatatggaggaagcgtgggcagtaagtggcgacttgcagcagagtggacgaacttatcaccaaggcaaagattgtacatttcacttctctatgatcattcttttttcgatgctactgttgggtttcacgtttatactatcagtatgtactcagcttgaggagcaaacatgtaatttattcaataaaatggttgttatttgcaataatataaaattattgcaagataggttcttcggctttctggactgcacaacagagtttagagaatggtatgctttatgattcagagtattctatatgccatttggaaactatacttatctgaggtggtcaattcaat

SEQ ID NO: 7624 - DNA, 2412 bp, Zea Mays
agtctgtatgagcgccgagaatcgagtttgcgctctcctttccggctttccgcccaaacagccgtcgggcgtcccacggccgccgcccctgccggagatacgcgtagccgggagttaagggatgagtcctcaaatgctgttattggaaacatcttaagttagagtaagttgctgaaactatggaagaggttcaaaactgtgtgatgaagctgcggagcaatccaaggcggcacagggataaagtgtatgttggctgtggggctggatttggtggagacaggctaatggctgcttataagttgctgcagagagtcaaggagcttaattacctagttctcgagtgtttggcagagcgaactctggcggatcgataccgaattatggtgtcaggaggcaaaggctacgatcctcgggtcaaagagtggatgtctttgcttctacccttggcttttgaacggaaagtttgcatcataactaacatgggggcaatggatcctcttggagcacagaaagaagtactgaacctggcatctgtcttgggactggagataacagttgccgtagcttatgaatcatcctttgaaactcaaggaagccctgtattgtccgatgaatcaacaggagggagagggggatgtagcacatatcttggggcagcttcaattgtacattgcttggaaaactataaaccacatgttgtcattacttcacgggttgctgatgcttcactcttcttagcacctatgatctatgaattaggttggaattggaatgacacacagttggcacaaggaacattagcaagccatcttctagagtgtggctgccaactcactggaggatatttcatgcaccctggagatgcatacagggattttccttttgaacaacttctggatttgtctctcccatttgccgaagttagttgcagaggagaagtcattgtcagtaaggtagatggcagtggaggccttttgagcccccatacatgtgctgaacagcttctttatgaagttggagatcctgcaaactacataactcctgatatggttgtagatttctgtaatgtacagttccatcaaatatcaaaagacaaggaaagtggatggaaaggctggggagagatctcatatggggggcatcaatgtttaaagcgtgcccaggcagcagaataccttgtaaggtcgtggataggtgaaaggtacccaggcattaatgaaaaaattgtctcatatgtcatgggctatgatagtttgaaagctattggaggtgatgaggatagttacttggccaagcaagtattggatgtaaggcttcggatggatggtctcttcgagcttgaagagcatgctgttcagtttgtcgaagaatttattgctctatatacaaatggtccagctggtggcggtggaatcagcactggacacaggaaggaaattattctgcaaaagatgctggttgatcgggaaaacatcttttggcgatcgcatgcaaagaaggcgagcattccctgcctgcataatcaagctacatattctgaaacaggtcaggcacgtatttcacaagcgcaacgaaacccaacatgtcgtacaatggccattcaacactttgaagcaagcacggagaccccagcatcccctgctccagctttacctgggaaaagggtcgctctctaccatgtggctcacagcagggccggtgacaaggggaatgatatgaacttctctgtcattcctcactcccctgctgacatcggccggctcaggtccgtaataactccggattgggtgaagaacgctgtgtcacctctgcttggttcgtcttcgtttcctgacgagcgagatgttcagcatcgaaacaagctgcttgagcttgtcaccgtggaaatttactacgtcccgggcataagctccctgaatgttgtggtgaggaatatcctggatggtggcgtcaactgctcgaggaggatagatcggcatggaaagaccttgtcagatgtcatattgtgccaacaagttatcctaccgccatgattgtcaatattcttatccgtattcgaattaaaatatggtaaatagtatctgtattcgaaccaaaatatggtaaatagtgacatccgaatttgtatccgtgcgtatttgatccgaatacatctctattaattgactacagtacccactataaacttatgtgtattaatattattaaggtttgttttttagagcctgtgtgaactctgggagacttgatgctaataccagagccgtgtacaggtgaagacggagcaattctgtcacccgttttacgcttacccatattatattatattatattatattatattaaatattatctcaggaattactttttttcgtttttactgtagcaaaattttggtttgacaaaaaaata

SEQ ID NO: 7625 - DNA, 2535 bp, Zea Mays
agtctgtatgagcgccgagaatcgagtttgcgctctcctttccggctttccgcccaaacagccgtcgggcgtcccacggccgccgcccctgccggagatacgcgtagccgggagttaagggatgagtcctcaaatgctgttattggaaacatcttaagttagagtaagttgctgaaactatggaagaggttcaaaactgtgtgatgaagctgcggagcaatccaaggcggcacagggataaagtgtatgttggctgtggggctggatttggtggagacaggctaatggctgcttataagttgctgcagagagtcaaggagcttaattacctagttctcgagtgtttggcagagcgaactctggcggatcgataccgaattatggtgtcaggaggcaaaggctacgatcctcgggtcaaagagtggatgtctttgcttctacccttggcttttgaacggaaagtttgcatcataactaacatgggggcaatggatcctcttggagcacagaaagaagtactgaacctggcatctgtcttgggactggagataacagttgccgtagcttatgaatcatcctttgaaactcaaggaagccctgtattgtccgatgaatcaacaggagggagagggggatgtagcacatatcttggggcagcttcaattgtacattgcttggaaaactataaaccacatgttgtcattacttcacgggttgctgatgcttcactcttcttagcacctatgatctatgaattaggttggaattggaatgacacacagttggcacaaggaacattagcaagccatcttctagagtgtggctgccaactcactggaggatatttcatgcaccctggagatgcatacagggattttccttttgaacaacttctggatttgtctctcccatttgccgaagttagttgcagaggagaagtcattgtcagtaaggtagatggcagtggaggccttttgagcccccatacatgtgctgaacagcttctttatgaagttggagatcctgcaaactacataactcctgatatggttgtagatttctgtaatgtacagttccatcaaatatcaaaagacaaggtcagctgtgatggagcaaaaccttctaatgcttgttgccctgagaaactcctgcaattatctcctactgttggtctagttaggtgctgatcaatttgcatagtacctatttctattctttaggaaagtggatggaaaggctggggagagatctcatatggggggcatcaatgtttaaagcgtgcccaggcagcagaataccttgtaaggtcgtggataggtgaaaggtacccaggcattaatgaaaaaattgtctcatatgtcatgggctatgatagtttgaaagctattggaggtgatgaggatagttacttggccaagcaagtattggatgtaaggcttcggatggatggtctcttcgagcttgaagagcatgctgttcagtttgtcgaagaatttattgctctatatacaaatggtccagctggtggcggtggaatcagcactggacacaggaaggaaattattctgcaaaagatgctggttgatcgggaaaacatcttttggcgatcgcatgcaaagaaggcgagcattccctgcctgcataatcaagctacatattctgaaacaggtcaggcacgtatttcacaagcgcaacgaaacccaacatgtcgtacaatggccattcaacactttgaagcaagcacggagaccccagcatcccctgctccagctttacctgggaaaagggtcgctctctaccatgtggctcacagcagggccggtgacaaggggaatgatatgaacttctctgtcattcctcactcccctgctgacatcggccggctcaggtccgtaataactccggattgggtgaagaacgctgtgtcacctctgcttggttcgtcttcgtttcctgacgagcgagatgttcagcatcgaaacaagctgcttgagcttgtcaccgtggaaatttactacgtcccgggcataagctccctgaatgttgtggtgaggaatatcctggatggtggcgtcaactgctcgaggaggatagatcggcatggaaagaccttgtcagatgtcatattgtgccaacaagttatcctaccgccatgattgtcaatattcttatccgtattcgaattaaaatatggtaaatagtatctgtattcgaaccaaaatatggtaaatagtgacatccgaatttgtatccgtgcgtatttgatccgaatacatctctattaattgactacagtacccactataaacttatgtgtattaatattattaaggtttgttttttagagcctgtgtgaactctgggagacttgatgctaataccagagccgtgtacaggtgaagacggagcaattctgtcacccgttttacgcttacccatattatattatattatattatattatattaaatattatctcaggaattactttttttcgtttttactgtagcaaaattttggtttgacaaaaaaata

SEQ ID NO: 7626 - DNA, 2734 bp, Zea Mays
accattcgaacattattagcgcgcgcggctgacctgacgtgcgtggtggtgaccgctggcgacgacgactctcagacaaggacattaaccagcagcacccctgctaacctggatttaataggcaagggacagcgatatatgatttattttacacgtatgtatctgccccctactccaataccaaacgagccacccatggtttcgtatcaggaaaagctttctttatatatattcggggcattgcgttatcgtgtagctttgcagaacagagaaggagaagggggagctgtaatcctacctaagaagcggcgatggggcggtcaggaggcggcgacggggacggcgacggcgaccggctcctcctcggcaagcccttggagtcgtcgtcgtcgtgcagctcgtccgacgagagcctggtcaagagaaccggcacggtatggacggcgatggcgcacatcatcacggcggtgatcgggtccggcgtgctgtccctggcgtggagcgtggcgcagctggggtgggtgggcgggcctgcggcgatggtgttcttcgccggcgtcaccgcggtgcagtccaccctcatcgccgactgctacatctgccaccacccggagcgaggaggcgtcgtcaggaaccgctcctacgtcgacgccgtgcgcatctacctgggcgacaagagccatttgttttgcggcttcttcctcaacctgagcttgtttggcaccggtgtggtgtacacgctcacttccgccactagcatgaggtacgtacagtacaattcgctatgcacgtcaacttcagctcgcgctgctgcttgcttgcaacctgcctgcagtgcagccagccacgagtacgtctatcagtgtgactaagctaatggcgaagaataaggtttaatagcatggcttgattgggaaaaaaagaagaactagtaactagtgtggtgtgtgtgggcacaaactaaagcggtgaagctagctactagtacaagactgggaagaaagaccaataatgcaaaaagttcaatgaggtcactctccagtctccacccttgcgtgtgcatatatacaaacagcttcgtgaggaaatattatttgttttctttgccttgcttctcttttacgttctccctggtaacgaaaatatatttcttttctgctatgtatatcaactgtgtctttttcgattcacgtcagcaaatttcatgtggtagccgagctagggaggaggagacggtcagattaggagatatacgtagtactagagtatctccagagcttgctcccacgcccatcaccaaccgcttgtgctcaaaattgttggcgccgccagctttgcattggtgaaggataccggtgttttcggcagatttcagacaccgcattgtgctggcctcgataaaagtctcaggtgatcatgtcttggtctgttccgttccgtccttctctctgcagggcgatccggaaggccaattgctaccacagggaaggccacgacgcgccgtgctcggtgggaggagacggctactacatgctgctcttcggcctcgcgcaggtgctgctgtcgcagatacccaacttccacgagatggcggggctctccatcttcgccgccgtcatgtcctgcttctacgccttcgtcggcgtcggcctcggcgtcgccaaagtcatcgcaaacggggtgatcatgggcggcatcggaggcatcccgctggtgtccacgacgcagaaggtgtggcgagtctcgcaggccctcggggacatcttgttcgcctaccctttctcgttggtgctgctggaaatagaggacacgctgaggtcgccgccgccggagagcgagacgatgaaaaaggcgacgagagcgagcatcgctatcaccaccctcttctacctctgctgcgggtgctttggctacgcgtcgttcggcgacggcaccccgggcaacctcctcaccggcttcggcttctacgagccctactggctcatcgacctcgccaacctcgccatcgttctccacctcctcggcggctaccaggtgtacacgcagccggtgttcgcgttcgcggaccgcaagttcggcggcggggccacggtcgtcgaggcgccgctgctgccggtgccgggcgcgcgccgcgtgaacgcgaacgtgttcaggctgtgcttccgcacggcgtacgtggcggcgaccacggcgctggccgtctggttcccctacttcaaccagatcatcgggctgctcggctccttcaccttctggccgctcgccgtctacttccccgtcgagatgtacctcacgaggaacaaggtggcgccgtggaccaaccagtggctcgccatccatgcgttcagcctcgtctgcctgctcatcagcgcgttcgcctccgtcggctctgcggttggcgtgttcgggtcggagacgagctgattcaaactctgcaaatgcaattgccggccacttttcggacatgcatgttctgtgcatatactgcgcttgtacatttagcgttatacctagtactggaacggtcaggccgggccccgagcctcgtgcttaggctcaaacgggtctgggcccagaaggtccaaattttttttggatcataccgtgtcagcctaaagagtagaaatagtggtttagccaggctctaaaacactttctatctttgttgggccatgccgacccatatatttaaaccatataaaattcaaatattacaacgacataaactacataa

SEQ ID NO: 7627 - DNA, 1589 bp, Zea Mays
cgaggaaatcgagcagcggcaccagggcccaggccaatcccaggaaaccggaagctcgaaagctgccaagccctcgccgtcctgccgcccacggcttaccgctgccgcctgccggccaccccacccaatgaaaatccgcatatactgtagtactccgtttcgcccgcgccgcccatccgttcggctgcctcgcacgccccaaaatcccctgctgcgcctccaaagccagcagccggcaggtcccgctacaaaagcaggcggcatgcgcgtgcgcgacaggtagcagctgcctgagccagtgcgcttcggtgagcagacaggacggcataggatagagatggcggccgcggtggagggggtgcggcaccgaacgctggaggcgaacggagtgcgcctgcacgtggcggaggctgggcccgaggagggcagcgccccagtggtgctgctccttcacggcttcccggacctctggtacggctggcgccaccagatgtccgccctggcggcgcgcggctaccgcgccgtggccccggacctccgcggctacggcgactccgactccccgcctgatgcgtccagctacaccaccttccatgtcgtcggggacctcgtcgcgctcatctccgacctcggccagcggcaggtgttcgtggtggggcacgactggggagccaccgtggcgtggcagctttgtctgcttcggccggacctggtgcgggcgctcgtgaacctaagcgtcgtgtaccacccgcggcggccggagatgagcccgctccaggccatcagagctgcctgcggcgaagaccactacatgtgccgcttccagctgaatttgctctatatgacatcaagtgggtgtttaagaagacatttggcatgcgcaagccagctcctcttattctgcccaaggacaagagcttctttgactctcttgattcagatggaacttgtcctccatggctatcagaggaagatatttcttactatgcagaaaaatttgcgaaaacaggctttactggaggacttaactactacaggtgcatagacaggagttgggagctttctgcggcatggactggagctccgataaaagttccgtcgaaattcattgttggggaccttgacattacatacaacgctccgggggtaccggactacattcacaagggtggcttcaaggcaagcgtgccaaatctagaggacgtggttgtaatggagggagtgagccacttcatcaaccaggagaaacccaacgaggtctctgatcacatctgcgagttctttagcaagttctgatacgtattggaaaaatctcaaggagccgttatatgattctgagctactcgtgtttttatgtcaaaaaaatgcggttgcgagtgtcaccatacaaatatacgatctaaataaaattcgtctgtctcacctttttacacagctctaccaagaaacttgttttgcctttgtggtagacaccatatggggtgatccaagaagcaacttccagcggccacggcagcttggagttgcatgataaatttccttttgatgtatgacacacgtgagggtgaggctctcatattattgattta

SEQ ID NO: 7628 - DNA, 3922 bp, Zea Mays
cactcggccactccctccagtctccacacacacgcgcgccattgccgctgctgctcatcgtactcccaaatggagcagcctgcattcccctcttgctccgtggagcgcattcgctccagcacagggaagctgtgacgcatcgccgccgccaaatcctccacccgacggctaacgcttttctctcgggtctagtcggggtggagatccgtcaaggccatctcgtcgcgttgttggtcagtaatcctagctcgcttggacgaagcaaccagcactatggttcttggatgacaaaattggagcaggccactgctcacactgcggcggtgtccatttcttcgtgtctcggttcttggccccgtccttcctgatttctctgcttttcatactgaaaaaatcctcaaacctttcatccttaatcccctttctcggttccaagggagcttaaaccctaccctactgcctttttcatcttaagctccgtatctcgaaaaatccatcccatttgcatgagcattgcttcaattgcctggctgcacagcaggatcttgcgatgcggctcatcttgttgtggctctcgatctgggccgtgtgctccgctgcctcggcgggggctggttcagacatggaggcactgctggagttctcccgaggcatccggcaagacccgtcccgccgccaggccattccctggaaccccaccagcgcgctggactccgacgactgccccgttgattggcacggcgtgcagtgcatcggcgggcagattctttccattgcgttcgacggcattggtctcgttggaaatgctagcttgtcggtgctagcgaggatgccggtgctccggaacttgtccctgtcagacaacaagctagaagggttcttgccgggtgagctggggtcgatggcgtcgttgcagttgctggatctgtccaacaacaggttctccggttcaattccgtctgagttgactaagctggcaggtttgggctatctcaatctctcttccaatggttttcgtggcgcattgccgttgggtttccggaacttgaggaaattgaagtacttggaccttcatgacaatggcttcactggcaaattggacgacgtattcgcgcagctgcagagcccagtccatgttgatttaagctgcaaccagttctcggggtccttggcatcgatctctgacaactcatctgtggttagcacgcttcagtacttgaatgttagccacaatgtgctgtcagggacattgtttgacagtgttccgatgcctttgttcgacagccttgagatttttgatgcgagttttaatatgctcagtggcaacatcccgcagtttaattttgtcatctccctcaaggtgctgcgcctgcagaacaataatttttctggctccatcccagaagcattctttagggagacgtctatggtgctgactgaacttgaccttagttgcaaccaacttacaggtccaattagacgtgtgacatcaacaaacttgaagtacttgaacctgtcacacaataatcttcagggaactttaccgatcacatttggaagctgttcagtagttgatttgagtggaaacatgctgtatgggaacttatcagttgcccgaacatggggaaattatctccagatggttgatttgagctcaaacagattaacaggaagttggccaaatgagacaacccagtttttaaggctgacatctttgaggatttccaacaacttgctatcaggagaactgccaattgtccttggaacctatccagagctgattttcattgacctcagtattaatcagctgcatggacctttgcctggaaatctgtttacagcggttaagctgacttttcttaatctttcaggcaacagttttacagggactctcccccttcgaaattccgataccaagaactcgacttctatagacttgtccattcttcctgtgcaaacttcaaacctctcctatgttgatctttcaagcaattttttgcacggctcactgcctatgggcattggtgatttgagcgcgttgacattgctgaaccttcgtcagaacaactttactggcgaaatcccaagaacaatcaccaaacttaagaatctcttatacattgacttatcaagcaacaatttcaatggtagcatacctgatggcctccctgatgatctggtcgaatttaatgtttcctacaactacctgtctggctctgttccaagtaatttactgaaattcccagattcatctttccatccagggaacgaattgctcgttcttcctcgctctgaatcattaaatggttctgacaaatcagatgaggcaagacacggcttgaagcgtgggattctatatgcattgattatctgtgttgttgtatttgttactgggattattgcgcttttgcttgttcattggaagatcagtagctggaaaagtagggaaaaaggtactggccaaggtaaacatgtgggtcaagtccagagtgctcagagaagtgcagaaatttcaacaactgaaatgcatgatgtagcattagaatcgtcaccttctgcagagtatggagctgtttcattgcctggcaaggaaagacgacatgaagcccaagatgcgccaattgatgctgcttatttcaacgaaccagcaggtagtagctcagcccgtaaagacagcacaaagtcttcgatgccttctttatcatcgtcgcctcctgatgcacgctcccagcatcatcactctatccttagagtgcactctcctgataaactggttggggatttacatcttttcgacaattcagttgtgttcacggctgaagagctctcttgtgcccctgctgagataattggcaggagctgccatgggacatcctacaaggctacacttgataacgggtacatgctgacagtgaagtggctgaaggagggctttgctaagagtaagaaagaattttcccgtgaaataaagaagcttggcagtgtaaggcaccccaatcttgtccccttgcgtggctactactggggccccaaagagcatgagaggatcatgatatcagactatgcagatgccacatctctgtctacctacttgtctgaatttgatgagcggaatctcccacccctatcagctggacagcggctgaacattgcgattgatattgcccgctgtctagattacctgcacaacgagcgggctgatgactccaatcggcatggcggagcaggtcctaaacgccggcgcgctaggatattcccctcctgagttttcaagcaccagcaagccatgcccatctctgaagagcgacgtgtatgccttcggtgtcatcctgctggagttgctgacagggaagattgccggtgagatcatctgcatgaacgatggcgtggtcgacctgaccgactgggtgaggatgctggatctggaggagcgtgtctcggagtgctacgacaggcacatcacgggtgttgagagctcggaaggcgccccacaggcactggatggcatgctgcgcatcgccctccggtgtatccggtcagcatcggagaggccggaggtccggacggtgtttgaggatctcttgtccttatcgtcgtgaccgtagttattggtagtgtacatctcgtacttgcatcagcttgtggaaacttggagggtatactaacaattgctaggatttcggggtgatcaggtgatgtgtgtgtagtctccttgagcattcattgtttgggtcgctctttctgggaatagttgattcgtttttagttagtccacaattttagcagtagatgattgtgagaataatgtttgtgcattgtgatttcagacactagaaaggaaaataaagatagtcttattgatttgttgctctgatgccctccaacagtatgtattcctatgtaccactaatcaaatgcgcaa

SEQ ID NO: 7629 - DNA, 2131 bp, Zea Mays
ccttatcccctcgttaacacctccccacatctcgttccttgtcctctccatttcgagctcaagctcaatcacttcggattggcggcgggcacgcgccggacgaaatggaagcggcaccatccgcccgcgccttctccccgtcctcgtctccctccgcgggggctagacccagccttcccctcgcgggcctggcctcgcggcgcgcccgggtgctcgcggcgccgcccccgccccgcgccgtcgcctcctcccgcgcgccgctggtggtctccagcccgccaccgccggaggactccggcacgcacaaccccgcgcacgccaaggtcgaccgctccggccgcttctgcagcccccgcgccgcacgggaactcgcgctgatgatttcctacgccgcgtgtctggagggaaccgatgttgtccggctcttcgatcgcaggatcagcgcaaggcgagaacccgggtttgttttcaacaaggcatgcctattgaattacaaccatatgagctttggcgggggaccgctcgaggttggaacggagcaggaggctgagaagctggccagtcagaacgataaggattcagccaacgatgtactttcagctcctccaaaacttgtttacaacaactatgtattacggttgtccagggaacttttagtggctgttgccagtggatgggataagcatgtggttatcatcgacaaaataattccccaggcttggaaggttagataccttttcctaatcttctatgttgattcatcaatcccttctacatgcatcacagcatcaaactatttatatgttcagcagtctggttcaaacatgtacttattctgtatattacaccactgtttttcacactacactgtactagtgaacaatcactctgatgcataccagaagctgtttacagtttggtttgaacatatccttattctgtatattacaccactgtttttcattgcactgaaatagtgaacaagcactatgatgcataacagaagtgtatgaccatcaaggatgattttctgccttgtgtttcagcatgcagtgaaatattgagatctcacattgttatttaattattttagactaatgccttaccttattacgaattaattttctagcatagttaattagttatttctgtttgccaccccaaggatgaggaagtgatacataatctgaagaatgtaccttccttaatctgaatcactttgtttctatatttgtttctactaccagagctcagatgtttttatagtaaaaaaaatatatgaaacacaatatactttgctttcagtttataatctaccggttttttaactgttgtcctaatatgtgtttgtatatattttaatatttagttttttgcgtcctgttttatggcataacctgctgttggtacatggaaaatttcatggtcaggatgaacctgtggcaaggattcttgagctctgcattctacatattgctatggctgagatggcatcaaaaggaacaccccacaaagttgtcattaatgaggcagtagatctggcaaagcgattttgtgatggtggtgcccctcgggtaatcaacggatgccttcgaacatttgtgaaggatcatgttgatgttgcaggcacgagccaggaagctaaatcaaaatcatgattttttgcaaatactcatacaacaaaatggtggctgaagtaaagaagtacggagagaaccttgctgtcttgagttcaggcgaataccttctgtctccaaggtttagccttcaacctaagggaatctaaaaggtaaacatgatggactcatcaaggagccacaacacgttcattcttttagaatgttcggttattaggtgaagtatacagagctgtaaaccggtgatgcacattcatgcttcatctaaaacaaccgaaggttatggcttctgatagcctactcgacgcagatcgttaaatgatcagatattaagatgaccaggagttgtgtaaaagcttgatgcatatgtaaaatgttatatatacttggcattggctcattgcaatgggagaaggatattctagtttcataagttgatgtaagacatgtacgctcattttaggattattaatcgcatattgtgtttgcttcta

SEQ ID NO: 7630 - DNA, 1249 bp, Zea Mays
gcacgctttcgctccgaggagaatttaagaaccgagtaggcagacagggaaggctaggaggggactaggggagagagagagggggaaggccaagaagaggcttcctctccccccattctccaatccgtgccctagtcgagccagccgcgaggaaggaggcgtctcgcctagcgcccgcccgtcggccgaccttctgctgcaccttcgaactctggaaagatcatagatttttgggcaatagcaagtggacatggaaccatcctctcagcctcagcctgcgatgggtgtcgccgccggtgggtcacaagtgtatcctgcgtctgcctacccgcctgcagcaacagtagctcctcctgctgttgcatctgctggtttacagtcagtgcaaccattcccagccaaccctgcccatatgagtgctcagcaccagattgtctaccaacaagctcaacagttccaccaacagctccagcagcagcaacagcagcagcttcagcagttctgggtcgaacgcatgactgaaatcgaggcaacagctgatttcaggaaccacaacttgccacttgcgaggataaagaagatcatgaaggccgacgaagatgtccgcatgatctcagccgaagctcccgtggtcttcgcaaaagcttgcgagatattcatactggagctgacgctgaggtcgtggatgcacaccgaggagaacaagcgccgcaccttgcagaagaacgacattgccgcagccatcaccaggaccgacatttacgacttcttggtcgacattgttcccagggatgagatgaaggacgacggaatcgggcttcctaggcccgggctgccacccatgggagccccagctgacgcatatccatactactacatgccacagcagcaggtgcctggtcctgggatggtttatggcgcccagcaaggccacccggtgacgtatctgtggcaggatcctcaggaacagcaggagcaagctcctgaagagcagcagtctctgcatgaaagggactgaggatgtcgctcaagctatcacctgatttttcagagctctcattttaggttctctaaactgcaggttttcgttggctaatatcgttgggtatcaaactgaaacagttcatgcttctctcttttctccattgctcttgattcgtagcgtggaaggtgttctgttaattcatggaaattctgttccagacttgtgtctagttgaattctgggacccagtagagctgggccatgg

SEQ ID NO: 7631 - DNA, 1279 bp, Zea Mays
gatacttgtggaagttgaaaagataagttctccagtggagttggttttgcatagctctggaaagatcatagatttttgggcaatagcaagtggacatggaaccatcctctcagcctcagcctgcgatgggtgtcgccgccggtgggtcacaagtgtatcctgcgtctgcctacccgcctgcagcaacagtagctcctcctgctgttgcatctgctggtttacagtcagtgcaaccattcccagccaaccctgcccatatgagtgctcagcaccagattgtctaccaacaagctcaacagttccaccaacagctccagcagcagcaacagcagcagcttcagcagttctgggtcgaacgcatgactgaaatcgaggcaacagctgatttcaggaaccacaacttgccacttgcgaggataaagaagatcatgaaggccgacgaagatgtccgcatgatctcagccgaagctcccgtggtcttcgcaaaagcttgcgagatattcatactggagctgacgctgaggtcgtggatgcacaccgaggagaacaagcgccgcaccttgcagaagaacgacattgccgcagccatcaccaggaccgacatttacgacttcttggtcgacattgttcccagggatgagatgaaggacgacggaatcgggcttcctaggcccgggctgccacccatgggagccccagctgacgcatatccatactactacatgccacagcagcaggtgcctggtcctgggatggtttatggcgcccagcaaggccacccggtgacgtatctgtggcaggatcctcaggaacagcaggagcaagctcctgaagagcagcagtctctgcatgaaagggactgaggatgtcgctcaagctatcacctgatttttcagagctctcattttaggttctctaaactgcaggttttcgttggctaatatcgttgggtatcaaactgaaacaggtagggtgtagcatcatggtagtttgatttctgctgtggtgttagttggagggataatgattagcggctagtggattaaagttacccataccgtttcctttcgttccaaaagttcgccttcatgaggcctctgatatgaaaaatgctgggtgttaatgcttctatgctctgcttgtgttgtgcagttcatgcttctctcttttctccattgctcttgattcgtagcgtggaaggtgttctgttaattcatggaaattctgttccagacttgtgtctagttgaattctgggacccagtagagctgggccatgg

SEQ ID NO: 7632 - DNA, 2071 bp, Zea Mays
taacggcgtgcatcagggcacaataagccacttcaggcttcagtctgttctgtgatcagcagaacattatgggctctaaaacaggaggacttttgagatttacagagcttcaactaagtcaacttgttgagtcgcttgttacatatcttttgcatatgggaaaaaataatagataagaggtagtgtgagacacatattggcaactgaccaaatgacttcagatatttggggtctcatcgatgttcaaacagagaatgcacaaagtagtcagaaatgatgcttgtcaattgtcaaacttattttggttggcttattttcaagattaaatgatctctggtaactgaggagaatgttgtagatgttgattttccttttaggaaggtgaagctctccgatgtggtagggggaatggaaaatgtgcatatatgcttctgattgcagtgagattagcctcgtccaagttatgggatctgccatgaactagacaagattataagtttacagaggccttacatcaagagagtacaagattgccataaggaagtaaagtctttgagaaaagtgaccttatgagaagcttgagaaaatcaacttgtgtgtgagaagttttgtctacttgtgctaattagtcatatgatatttttagtcatgaactagacaagatcagaagtttaaagaggttttacatcgagtacaagatcgccataaggaagtacaagtctttgaggaaagtgaccttatgaaaagtttgagcaaatcaacttgtgtgcgagaagttttgtctacttgtgctgatcagtcataccttggaatattgctgaattgttgcctttgttgctcattggcttcaatacttcatacaccatcaaatgagtcatgtgcaaaattcttcgaagcatcagttcttgctctagaagaacttcatcagaggcggggtcgaatcagcaacgacggctgacatgacgctacccatccagttgctcactgctcaggttatagcgaagaacattgtcttagctggatacaaggagatgcagaagctctgagttttgaggatggatctatggatggttacactatcgcatttgggatcagaaatgtgacacacattgagaaagctctatcagaagcttacaggtcggctaatttagaaccctaacaattattattgctcatgtttaaattattactgtttgaacttcagtatatgtgtatattcttcgtgattaagttttttttgtcttcgtgtgcagtatcatggattaagcttttttatattttaccatgtttgtttagttgatggttctgaaatgtcattactgtcatatcaattggcatatttcaaaattttttttgcttagttgatggttctaaagcaagggtggaggttcctatgcttggagttgagtcatgtggatgtccctatttttaaatagatgtaagtttcgtcaatcatgtttactcgtcaatctttaactgctctttcagattttctgcccttcttttttcagttatgatgcttactcgttttctatgattccggctattggagagctggttgatggtgatcggcagatagaagacaggcaacatgctaaccaggcctgtgaaccttaaaccttggcaggaaaagtttgctcagatgattcaggaagccggattccagagggtggaatatgaaaacctcctgagcggtgtagttgccattcattctggactgaaactgtagagctgaatacagatggttgttttttcatgggtgcaccgattctacaattagtagtatttgttgttttttaatgaattctataataggttcggtggcttgtaaaagcagctggtgctggctgtcagcatcatcacaatatgtagaataagtagtatttgctagaagtatgtgctggagcagtagcgtcagtggctattttggcttttaagccagctgacctcttccatttgtaaagctttttcttggaaacgtgaaaccatccagaacatcaaattagtcttatcacatacctcctgcaatacatttttttgttctgaaaacaatgtcagagttaaaataaga

SEQ ID NO: 7633 - DNA, 2302 bp, Zea Mays
acggctcgccccacatctaccgcgtgccagccgccctcgctcccgttcagtccgtctcccccctctctccatccaaagcctacgcgccgccgccccgccaccgggcgcgccctcgttctcctacctagccgtgttctccaactgcccgctcgtcgccgcggtgctcaccttcgccatcgcgcaatccatcaaggtcctcaccacctggtataaggagaaccggtgggatgcgaagcagctggtgggctccggtgggatgccgtcctcgcactcggccaccgtcacagcgctcgccgtcgccgtcggcctgtaagaggggctcgccagctcgctgttcgccaccgccgtcgtctttgtctccgtggcacaataagccacttcaggcttcagtctgttctgtgatcagcagaacattatgggctctaaaacaggaggacttttgaggtattttgatgccaaaatttttagacataccatcattgaagttgctctgatctgtacaacatttacaagatttacagagcttcaactaagtcaacttgttgagtcgcttgttacatatcttttgcatatgggaaaaaataatagataaggtacttggagttggcaaacaattgtttgatatacccttttcatatgcacttgttttttggttaccaacctgctagctaataacaagttttcactcatctctaccattttttggaatggcggcgtctcttcgctatatgtcaatcaaagaggtagtgtgagacacatattggcaactgaccaaatgacttcagatatttggggtctcatcgatgttcaaacagagaatgcacaaagtagtcagaaatggtaattatattgtcattgttgttgctggtagtgatgttacttgttctactatcacgaaggagaaatttgatccaattggtgggcctttgcctaaactttcacaagctaattccaagcaatgtgtctgaaatctttttcttgtgttggtaaccaccagatgcttgtcaattgtcaaacttattttggttggcttattttcaagattaaatgatctctggtaactgaggagaatgttgtagatgttgattttccttttaggaaggtgaagctctccgatgtggtagggggaatggaaaatgtgcatatatgcttctgattgcagtgagattagcctcgtccaagttatgggatctgccatgaactagacaagattataagtttacagaggccttacatcaagagagtacaagattgccataaggaagtaaagtctttgagaaaagtgaccttatgagaagcttgagaaaatcaacttgtgtgtgagaagttttgtctacttgtgctaattagtcatatgatatttttagtcatgaactagacaagatcagaagtttaaagaggttttacatcgagtacaagatcgccataaggaagtacaagtctttgaggaaagtgaccttatgaaaagtttgagcaaatcaacttgtgtgcgagaagttttgtctacttgtgctgatcagtcataccttggaatattgctgaattgttgcctttgttgctcattggcttcaatacttcatacaccatcaaatgagtcatgtgcaaaattcttcgaagcatcagttcttgctctagaagaacttcatcagaggcggggtcgaatcagcaacgacggctgacatgacgctacccatccagttgctcactgctcaggttatagcgaagaacattgtcttagctggatacaaggagatgcagaagctctgagttttgaggatggatctatggatggttacactatcgcatttgggatcagaaatgtgacacacattgagaaagctctatcagaagcttacaggaaaagtttgctcagatgattcaggaagccggattccagagggtggaatatgaaaacctcctgagcggtgtagttgccattcattctggactgaaactgtagagctgaatacagatggttgttttttcatgggtgcaccgattctacaattagtagtatttgttgttttttaatgaattctataataggttcggtggcttgtaaaagcagctggtgctggctgtcagcatcatcacaatatgtagaataagtagtatttgctagaagtatgtgctggagcagtagcgtcagtggctattttggcttttaagccagctgacctcttccatttgtaaagctttttcttggaaacgtgaaaccatccagaacatcaaattagtcttatcacatacctcctgcaatacatttttttgttctgaaaacaatgtcagagttaaaataaga

SEQ ID NO: 7634 - DNA, 3078 bp, Zea Mays
acggctcgccccacatctaccgcgtgccagccgccctcgctcccgttcagtccgtctcccccctctctccatccaaagcctacgcgccgccgccccgccaccgggcgcgccctcgttctcctacctagccgtgttctccaactgcccgctcgtcgccgcggtgctcaccttcgccatcgcgcaatccatcaaggtcctcaccacctggtataaggagaaccggtgggatgcgaagcagctggtgggctccggtgggatgccgtcctcgcactcggccaccgtcacagcgctcgccgtcgccgtcggcctgtaagaggggctcgccagctcgctgttcgccaccgccgtcgtctttgtctccgtgctctattccatcgctcccgtactccctgttgcggcggttgagaacagtggcgacaagatctcatggagagaagctatgcggaccccaggaaaggtgaagtcgtcgtgcgatggtggagatggccgatgggaggctccaccaaccctagggtgcggccaacaagacgctactcgccactgcgtgggtcggcagtgagatctcagggagagaagccatgcaaccccatgaaaggcgaaactgtcgcacgatggtggagacgaccggcggtaggatgcaagtatgagcatttggcaaagagagtattcctccccatgctcccgctccctcctgcaccccacgctcgccgacgagccgctcgacctcgtcgcagcttgccgagccatcatgcgcctcggtgcggtggtcaacatcatccacgccgtcaatcgcttgttggtcctacgctcagtgcatgagtccttcaactggcggtggtggagcaaccgtactaccacagcgcatacacaggacgtagagaacaactccagaaggtgagccccagatctccgctgccgtcttctcgcctgaaaaaagaggggcatctctatcgccaccaaccactagcaggcggcggacgctgctcgcaggaggtaacggcgtgcatcagggtaatatattgcaaacagtttagggtttcagtttcattcacgagtttagtacatgattactgtattttctcgttggattctgagctcccagcctgatgattagcgttgtttgcacaaagaaccgagatatgtcgtcgaagaccacctaattgtttctcatggcagacttgcttgcttgctctggcttggttcattgacaatttaccacttccttagttcctctgatcctctgttctatcagttatggtgtagttttcctctgtgagaagaaacctgtaaccacacatacacgcacatgcatgccactcattgtttggttcatttagttatcatttacttttggcataacaggcacaataagccacttcaggcttcagtctgttctgtgatcagcagaacattatgggctctaaaacaggaggacttttgaggtattttgatgccaaaatttttagacataccatcattgaagttgctctgatctgtacaacatttacaagatttacagagcttcaactaagtcaacttgttgagtcgcttgttacatatcttttgcatatgggaaaaaataatagataagaggtagtgtgagacacatattggcaactgaccaaatgacttcagatatttggggtctcatcgatgttcaaacagagaatgcacaaagtagtcagaaatggtaattatattgtcattgttgttgctggtagtgatgttacttgttctactatcacgaaggagaaatttgatccaattggtgggcctttgcctaaactttcacaagctaattccaagcaatgtgtctgaaatctttttcttgtgttggtaaccaccagatgcttgtcaattgtcaaacttattttggttggcttattttcaagattaaatgatctctggtaactgaggagaatgttgtagatgttgattttccttttaggaaggaatggaaaatgtgcatatatgcttctgattgcagtgagattagcctcgtccaagttatgggatctgccatgaactagacaagattataagtttacagaggccttacatcaagagagtacaagattgccataaggaagtaaagtctttgagaaaagtgaccttatgagaagcttgagaaaatcaacttgtgtgtgagaagttttgtctacttgtgctaattagtcatatgatatttttagtcatgaactagacaagatcagaagtttaaagaggttttacatcgagtacaagatcgccataaggaagtacaagtctttgaggaaagtgaccttatgaaaagtttgagcaaatcaacttgtgtgcgagaagttttgtctacttgtgctgatcagtcataccttggaatattgctgaattgttgcctttgttgctcattggcttcaatacttcatacaccatcaaatgagtcatgtgcaaaattcttcgaagcatcagttcttgctctagaagaacttcatcagttgctcactgctcaggttatagcgaagaacattgtcttagctggatacaaggagatgcagaagctctgagttttgaggatggatctatggatggttacactatcgcatttgggatcagaaatgtgacacacattgagaaagctctatcagaagcttacaggaaaagtttgctcagatgattcaggaagccggattccagagggtggaatatgaaaacctcctgagcggtgtagttgccattcattctggactgaaactgtagagctgaatacagatggttgttttttcatgggtgcaccgattctacaattagtagtatttgttgttttttaatgaattctataataggttcggtggcttgtaaaagcagctggtgctggctgtcagcatcatcacaatatgtagaataagtagtatttgctagaagtatgtgctggagcagtagcgtcagtggctattttggcttttaagccagctgacctcttccatttgtaaagctttttcttggaaacgtgaaaccatccagaacatcaaattagtcttatcacatacctcctgcaatacatttttttgttctgaaaacaatgtcagagttaaaataaga

SEQ ID NO: 7635 - DNA, 3701 bp, Zea Mays
acggctcgccccacatctaccgcgtgccagccgccctcgctcccgttcagtccgtctcccccctctctccatccaaagcctacgcgccgccgccccgccaccgggcgcgccctcgttctcctacctagccgtgttctccaactgcccgctcgtcgccgcggtgctcaccttcgccatcgcgcaatccatcaaggtcctcaccacctggtataaggagaaccggtgggatgcgaagcagctggtgggctccggtgggatgccgtcctcgcactcggccaccgtcacagcgctcgccgtcgccgtcggcctgtaagaggggctcgccagctcgctgttcgccaccgccgtcgtctttgtctccgtgctctattccatcgctcccgtactccctgttgcggcggttgagaacagtggcgacaagatctcatggagagaagctatgcggaccccaggaaaggtgaagtcgtcgtgcgatggtggagatggccgatgggaggctccaccaaccctagggtgcggccaacaagacgctactcgccactgcgtgggtcggcagtgagatctcagggagagaagccatgcaaccccatgaaaggcgaaactgtcgcacgatggtggagacgaccggcggtaggatgcaagtatgagcatttggcaaagagagtattcctccccatgctcccgctccctcctgcaccccacgctcgccgacgagccgctcgacctcgtcgcagcttgccgagccatcatgcgcctcggtgcggtggtcaacatcatccacgccgtcaatcgcttgttggtcctacgctcagtgcatgagtccttcaactggcggtggtggagcaaccgtactaccacagcgcatacacaggacgtagagaacaactccagaaggtgagccccagatctccgctgccgtcttctcgcctgaaaaaagaggggcatctctatcgccaccaaccactagcaggcggcggacgctgctcgcaggaggtaacggcgtgcatcagggtaatatattgcaaacagtttagggtttcagtttcattcacgagtttagtacatgattactgtattttctcgttggattctgagctcccagcctgatgattagcgttgtttgcacaaagaaccgagatatgtcgtcgaagaccacctaattgtttctcatggcagacttgcttgcttgctctggcttggttcattgacaatttaccacttccttagttcctctgatcctctgttctatcagttatggtgtagttttcctctgtgagaagaaacctgtaaccacacatacacgcacatgcatgccactcattgtttggttcatttagttatcatttacttttggcataacaggcacaataagccacttcaggcttcagtctgttctgtgatcagcagaacattatgggctctaaaacaggaggacttttgaggtattttgatgccaaaatttttagacataccatcattgaagttgctctgatctgtacaacatttacaagatttacagagcttcaactaagtcaacttgttgagtcgcttgttacatatcttttgcatatgggaaaaaataatagataaggtacttggagttggcaaacaattgtttgatatacccttttcatatgcacttgttttttggttaccaacctgctagctaataacaagttttcactcatctctaccattttttggaatggcggcgtctcttcgctatatgtcaatcaaagaggtagtgtgagacacatattggcaactgaccaaatgacttcagatatttggggtctcatcgatgttcaaacagagaatgcacaaagtagtcagaaatggtaattatattgtcattgttgttgctggtagtgatgttacttgttctactatcacgaaggagaaatttgatccaattggtgggcctttgcctaaactttcacaagctaattccaagcaatgtgtctgaaatctttttcttgtgttggtaaccaccagatgcttgtcaattgtcaaacttattttggttggcttattttcaagattaaatgatctctggtaactgaggagaatgttgtagatgttgattttccttttaggaaggaatggaaaatgtgcatatatgcttctgattgcagtgagattagcctcgtccaagttatgggatctgccatgaactagacaagattataagtttacagaggccttacatcaagagagtacaagattgccataaggaagtaaagtctttgagaaaagtgaccttatgagaagcttgagaaaatcaacttgtgtgtgagaagttttgtctacttgtgctaattagtcatatgatatttttagtcatgaactagacaagatcagaagtttaaagaggttttacatcgagtacaagatcgccataaggaagtacaagtctttgaggaaagtgaccttatgaaaagtttgagcaaatcaacttgtgtgcgagaagttttgtctacttgtgctgatcagtcataccttggaatattgctgaattgttgcctttgttgctcattggcttcaatacttcatacaccatcaaatgagtcatgtgcaaaattcttcgaagcatcagttcttgctctagaagaacttcatcaggttatagcgaagaacattgtcttagctggatacaaggagatgcagaagctctgagttttgaggatggatctatggatggttacactatcgcatttgggatcagaaatgtgacacacattgagaaagctctatcagaagcttacaggtcggctaatttagaaccctaacaattattattgctcatgtttaaattattactgtttgaacttcagtatatgtgtatattcttcgtgattaagttttttttgtcttcgtgtgcagtatcatggattaagcttttttatattttaccatgtttgtttagttgatggttctgaaatgtcattactgtcatatcaattggcatatttcaaaattttttttgcttagttgatggttctaaagcaagggtggaggttcctatgcttggagttgagtcatgtggatgtccctatttttaaatagatgtaagtttcgtcaatcatgtttactcgtcaatctttaactgctctttcagattttctgcccttcttttttcagttatgatgcttactcgttttctatgattccggctattggagagctggttgatggtgatcggcagatagaagacaggcaacatgctaaccaggcctgtgaaccttaaaccttggcaggaaaagtttgctcagatgattcaggaagccggattccagagggtggaatatgaaaacctcctgagcggtgtagttgccattcattctggactgaaactgtagagctgaatacagatggttgttttttcatgggtgcaccgattctacaattagtagtatttgttgttttttaatgaattctataataggttcggtggcttgtaaaagcagctggtgctggctgtcagcatcatcacaatatgtagaataagtagtatttgctagaagtatgtgctggagcagtagcgtcagtggctattttggcttttaagccagctgacctcttccatttgtaaagctttttcttggaaacgtgaaaccatccagaacatcaaattagtcttatcacatacctcctgcaatacatttttttgttctgaaaacaatgtcagagttaaaataaga

SEQ ID NO: 7636 - DNA, 1932 bp, Zea Mays
ttttgtctctatggattgcagctgctacttttgcagccgctacagtgcccaaataagggcagccgaacaacaccgaataaatctctggttgcttgaataaatcggagaatctagtcacgggcttcttcgtcaccgagccttctcgtcctcgcggacttgtgacttgtgactccagtcccttccaatcaacaagttgctatagtagtcccttccaaaatccacactggaaccggaacctccatctccaatccaatccaactccagatccgcctccctgctgcatccccatcccgcacgagcaccaccccttgtcctctccgcctctacatctcatcggctggtgcacctcctccctcctctgctcggcccctccctcccttctcgtgctacggcagcgtggatgcacgagactacagctgtggcaaagcggagatccggcgggagtgcagcggccggcgtgcctctacgtggtatggtgacatgaagatgcgaggcgaggcgagcaaggccagctccggctccggctctggctccagcgaggatggtgagcgaaccggccccgtgccttcccccgctcgtcgcgcgccgcccatccgcatcgacgtcgccatgggctccttctccgcatgtcgccgccacgagatctgcccgcgcgtctccttcggcagccgatgcccgacggccgtccgacctccgacgcatcgtcgccggtccggtcctcttcgccccctctccgctgcgtggcgccacccgtcgtcacctccgcccccttcaccgacctctcctgggtcctccacacactgctcgtcaccatcgtcatgcgcgaggcgctcaaggtagttgaatttgatggcaaaatcgactgcttgctaggactggtgattgcggtgtgttggttgaggatgccagagatgagctgaagcttctagcattatgtacaaaaggtatttgtcgaattacctggatgggattttgctatacttcacttgatttatcatatttcctttgctcatcagttctgaacaagtgaccacgtctaactcacaactctcccatttctggttgcgcgaatttcttcaattctttcagaaatcagaattgcatgacttttatcttaacataagttagagtagctgtgcataaatgtggagaatattgatcagagtttatgatttgttcaaactgaaactcactaaattcttgcaattaaggactatcggatggtcagcatccaatttatctatgttcagcataatggcatcaagtttttgctaatatgactgtagagtcttaagacttcaattaatttttgcaggggattgacatgctatcatttgtatcaattaaaactagagctgttctcttgatataagggttttctccatatttgagatggattgaacactgtatcctttacctgcagcattttttctgtatctcgtgataatttttcagtcactctaatctctctctccatgcagctgataggttttctccatatgttgcttgggaatgcttgattttttttctagctgcataaagctttgtatcatcaaacaattcataaaagaggctgacctgttctagttattggtgtcagatttgactgcagtcccatgattttttgcttcagatgggactggactttggttcagagtttgagataatcaatctgtagtctaaaaattgtatgtgtttgtagttgatgggagcacctctcaggagttaccttagtgctttagatgtaataattgttctgtaactgaataaacatttgcatttgtgatgcattttgactatatatgtgagatgtttataaaaacacgtgcaatatatataatattggctttcctccatgtttttttccagtttttcatttagtgacgcgtctcggcgagacacgccactgatttggggcgctagtgacgcgtc

SEQ ID NO: 7637 - DNA, 2815 bp, Zea Mays
tagggcaccacctaggtgattggaggggatggtggtggctcgccacatctcgccttaacgccttaagaaccttgccttgattcttctctctgagcatatgatcatcataaggacttggtcaaattcagttaaaatttggagacttcaaaagttcattaggtagctttgagaaagttttggaggtgcaccctgaaaattgtgaaagtttgaaggctattggtcacatacatgcaaaatctggggaaactgaaaaagctatagaaaccttcaagaaagttacccgtattgacccaaaagatcatcaggcatttgtggagcttggtgaattgttggtagaatctgactgggctgctgctatggaatacttgaagacagctcgaaatctcctcaagaaggctggggaggctgtccctgttgagttgctcaatggaattggacttcttcattttgagaagggagagtttgagatggcagaacagagttttaaggaagcactaggtgatggtctttgggtttcaattatggacgggaaagtaggcagttctatgatcaactggagtgtccagaacaaggatcagagcttctttcaccaacttgaaggtgtacctcttgaattacattcaaataaagtaaccacactgtttaattatgcaagattactggaagaactccatgattctgtcagagcaagcatcttttaccgttttataattttcaagtaccctgactacatagatgcctatctgaggttagcggctattgcaaaacaaagaaacaatgttcaactgagcattgaactgataggtgatgctttaaagatagacgagaagaacccaaatgcactgtctatgcttgggagtcttgaactccagagcgatgaagcctggcttaccgcaaaggagcatttccgtaatgcaaaagaggccaccaagggagatacctactctttgcttcaattggggaactggaattactttgctgccaatcgtcctgagaaaaaagccccgaagattgaggctactcatagggagaaagccatggaactctatcagactcaagtactaaagcagcaccgcagtaatatgtttgctgcaaatggtattggaatcttatacgctgagaaggccaaatgggatgtcgctaaggagttgttcacacaggtgcatgaagctgcatcaggaagtatatttgtacacatgcctgatgtatggataaatctggctcatacatattttgctcaaggtcattttcaacaagcagttaaattgtatcaaaattgtttgcggaagttcttccacaatacagatgcaaccatcctattataccttgctcggacacactatgaggctgagcgatggcaagactgcaggaaaactttgcttagagctatacatttggctccatcaaattacttgttacggtttaatgtaggagtgtcaatgcagaaattctcagcttcaaccctgcaaaagacaaaacaaacagttgatgaggttcgcgccacagtcactgaacttcagaatgccattagagttttcagtctgttatctgttgcatcaacgtaccactcccatggttttgatgagaggaaaatagaaactcatgttgagtactgtaaacatttacttgatgctgctaaggttcatcgtgatgcagctgagcaagctgaacagcagaataagcaaaaaatggaagttgctcgtcagattgctttggcagaggaagctcgccgaagggcagaagagcagagaaaatttcagttagaaaggaggagggaagaggatgaactcaagcaagtaaaacaacaggaggaacacttccagcgtgtgaaggaacaatggaaaacatccagcaacacccctggcaagagaaaagatagatctaagactgaagatgaagaggtgggaaataaaaagcggaggaggaagggaattaggaggaaggatcaaaaaacaaagatgcagtatggggaagaggaagatgagtacaaagatgaaccagaagcagatgatgactatgcagacctggcgaggtataatggcgctgacaattcagagagagccccagatcaccttcttgcggctgctggccttgacgattctgatgccgaagatgacatgggtcatcctcaatctgcaatagaacggaagagacgagcttggtcagaatctgaagacgatgagccagtgaagaagccagcagcacaacctagcccgggcgctgatggtttgagtgaatgaaagaaaccgagatgatgttcttgcagtgaagattaacatgcatgggtctttgctttaggttagcatggtgttgaattggggagattcagaacttcactatacatagctgatagtcaaggactatgtatataccttgttgccaatcttgtttatcgcattagattatggagttgtttaatctgctggtttctgcaatataacatggaatccagtcctattagatggtgacttgtaggtgttttagttgggatgcaaagttttgcacgtcaagtttcagcagttagatttcccaatggacgtatcatgaattaatgatatcacattggccgatatatgtagagaaatgttgaacatgctagtcatctcagcaagaggacataaaactaagccaaaacaacaaacttaagagaaatgttgaacgggctagttatctcagcaagaggacataaaactaagcaaaaagaacgagcttaggacttgtttgaatgtacttgtatctatcgtaatccattatatctaccttaagactgtttccattatatctatcttttaagactgtttttatgagttcaacc

SEQ ID NO: 7638 - DNA, 4371 bp, Zea Mays
agcccattcgtgacgctaaaaaggcctagcccacccggctatcagccgcgtattcgcatctccccgtatcgctcgttcctctccggcaggactcgtgtttcagccaccggcggcggcggcaccctccacacctccggttatcatcaatctctgcgccgactaaggcactggcagcctgcggcttgcgtggcggcacctccagcatcccagggttgatgcaaatccagcatcatccttcaagatcgccccccactttgtccggtctttagatccgccattgagtcaagctgcggcgatcgcgtgcgagactgggacggcgatgctcctctgcatctccacctgccctgtcgaccgctagccgccgcctgtttcctccaattgctaagggcttaaaaagtcgaacacccaattgccaagggcttctgccccccagcggtgaaggggagtgagaagcaccgggaagatgacgagcgtgtacatcccggtgcaggggacagaggaggaggtgcaggtggcgctggaccagcttccgcacgacgcatccgatatcctcgacatcctcaaagccgaacaggcccctcttcacctctggctcatcatcgccagagaatacttcaagcaaggaaagatagagcagttccgtcagattctggaggaaggatctggccctgaaattgacgagtattatgctgatgtgaagtatgaacggatagcaatccttactgctttgggtgctttccatactttcttgggaaaggttgatagagcaccacagaaggaatcacattttaaagatgcaactcaatactataatagggcatcaaggatagatgaaactgaaccttctacatggattggaagaggtcaactctgtattgccaagggtgagttgcaaatggcgtctgactcgttcaagattgtgttggatgaagatgagaacaattttccagctctacttggtcaggcctctgtttactttttgatgggcgaagcagagcagcaacacaaaaaatcattggagcattacaggaactcattagatctctacaagaaagctcttcgggtctattgcaattgtcctgctgctgtaaggcttggtatagccttttgccgatacaaacttggacaagtggaaaaagctcgtcaagcttttcagcgagttttagagttggaccctcagaatgttgatgctctagtagcactggcaatcatggacttgcaaacaaatgaagctggtgggattcggcggggaatggagaaaatgaaaaaagcatttgaaatctatccttattatacattggcactcaaccaccttgcgaatcattatttctttaccggccaacattttgttgttgaacaattgactgagacggctctttcttcaagcaaccatggactactgaaatcacatgcttactacaacttagccagatcataccacagtaagggggacattgagactgctggacgatattacatggcatctgttaatgaaatcagtaaaccacaagactttgtgttaccatatattggacttggtcaaattcagttaaaatttggagacttcaaaagttcattaggtagctttgagaaagttttggaggtgcaccctgaaaattgtgaaagtttgaaggctattggtcacatacatgcaaaatctggggaaactgaaaaagctatagaaaccttcaagaaagttacccgtattgacccaaaagatcatcaggcatttgtggagcttggtgaattgttggtagaatctgactgggctgctgctatggaatacttgaagacagctcgaaatctcctcaagaaggctggggaggctgtccctgttgagttgctcaatggaattggacttcttcattttgagaagggagagtttgaggtttgcttacaattactgcacaatattacgaactatcatttataccggtcactacccttaaattacactttcagatggcagaacagagttttaaggaagcactaggtgatggtctttgggtttcaattatggacgggaaagtaggcagttctatgatcaactggagtgtccagaacaaggatcagagcttctttcaccaacttgaaggtgtacctcttgaattacattcaaataaagtaaccacactgtttaattatgcaagattactggaagaactccatgattctgtcagagcaagcatcttttaccgttttataattttcaagcaatgaaaagtacctcctgtgacttttccgttgtgctctaaatcagttttgtcaataacagtaccctgactacatagatgcctatctgaggttagcggctattgcaaaacaaagaaacaatgttcaactgagcattgaactgataggtgatgctttaaagatagacgagaagaacccaaatgcactgtctatgcttgggagtcttgaactccagagcgatgaagcctggcttaccgcaaaggagcatttccgtaatgcaaaagaggccaccaagggagatacctactctttgcttcaattggggaactggaattactttgctgccaatcgtcctgagaaaaaagccccgaagattgaggctactcatagggagaaagccatggaactctatcagactcaagtactaaagcagcaccgcagtaatatgtttgctgcaaatggtattggaatcttatacgctgagaaggccaaatgggatgtcgctaaggagttgttcacacaggtgcatgaagctgcatcaggaagtatatttgtacacatgcctgatgtatggataaatctggctcatacatattttgctcaaggtcattttcaacaagcagttaaattgtatcaaaattgtttgcggaagttcttccacaatacagatgcaaccatcctattataccttgctcggacacactatgaggctgagcgatggcaagactgcaggaaaactttgcttagagctatacatttggctccatcaaattacttgttacggtttaatgtaggagtgtcaatgcagaaattctcagcttcaaccctgcaaaagacaaaacaaacagttgatgaggttcgcgccacagtcactgaacttcagaatgccattagagttttcagtctgttatctgttgcatcaacgtaccactcccatggttttgatgagaggaaaatagaaactcatgttgagtactgtaaacatttacttgatgctgctaaggttcatcgtgatgcagctgagcaagctgaacagcagaataagcaaaaaatggaagttgctcgtcagattgctttggcagaggaagctcgccgaagggcagaagagcagagaaaatttcagttagaaaggaggagggaagaggatgaactcaagcaagtaaaacaacaggaggaacacttccagcgtgtgaaggaacaatggaaaacatccagcaacacccctggcaagagaaaagatagatctaagactgaagatgaagaggtgggaaataaaaagcggaggaggaagggaattaggaggaaggatcaaaaaacaaagatgcagtatggggaagaggaagatgagtacaaagatgaaccagaagcagatgatgactatgcagacctggcgaggtataatggcgctgacaattcagagagagccccagatcaccttcttgcggctgctggccttgacgattctgatgccgaagatgacatgggtcatcctcaatctgcaatagaacggaagagacgagcttggtcagaatctgaagacgatgagccagtgaagaagccagcagcacaacctagcccgggcgctgatggtttgagtgaatgaaagaaaccgagatgatgttcttgcagtgaagattaacatgcatgggtctttgctttaggttagcatggtgttgaattggggagattcagaacttcactatacatagctgatagtcaaggactatgtatataccttgttgccaatcttgtttatcgcattagattatggagttgtttaatctgctggtttctgcaatataacatggaatccagtcctattagatggtgacttgtaggtgttttagttgggatgcaaagttttgcacgtcaagtttcagcagttagatttcccaatggacgtatcatgaattaatgatatcacattggccgatatatgtagagaaatgttgaacatgctagtcatctcagcaagaggacataaaactaagccaaaacaacaaacttaagagaaatgttgaacgggctagttatctcagcaagaggacataaaactaagcaaaaagaacgagcttaggacttgtttgaatgtacttgtatctatcgtaatccattatatctaccttaagactgtttccattatatctatcttttaagactgtttttatgagttcaacc

SEQ ID NO: 7639 - DNA, 2104 bp, Zea Mays
gccagtgtcctccgcatctcccgtctctcctgttccgcctcccctccgatctccgccgcatcacctccctcgaaccctagacccacccgcgcgcccattgcctccggtcgccatgtccgccactcagcttctccgtcgctcccgcaagctgcagagtttgcacaatgctgtaggttgtgagaaatttttcctttttcggcatttctccagtggttccggatcctttatcgccaaggaaaatggtgttggaaaaagaaccagaggtcccagattttcccagcattaccagctacaaaagagcttgacccattctcactaggagtaaatggaaactgcagttggagaagagcatccaacagccttaccccaagtgctgctagttggctcaatggttcattctcatgtggacaggtagtttcagcacggacattctcaaatagtgcagacctgcctccacatcaagaaattggaatgccttcactttcacctaccatgactgagggaaacattgccaagtggcttaagaaggaaggagataaggtctcccctggcgaggttctctgtgaggtggaaactgataaagcaactgtggagatggagtgcatggaagagggctatcttgctaagattattcatggagatggtgcaaaggagattaaagttgctgaacctgtagctcctgctgaatcaaaggctcaaccagaaccttcacaaccaaaggtggaggaaaagaagcttacccaggctcctgaggttaaggccccaaagattgaagaagcttctcaatctggagatcgcatatttgccagccctcttgcccgtaaactggctgaagataacaatgtcccactatcaagtgtgaaaggtactggtcctgatgggcgtattttgaaggcagacattgaagattacttggccaagggtgggctgagggaggcttttgcagctccagggttaggttacgttgatattccaaatgcacagataagaaaggttaccgcaaaccgcttgctagcatctaaacagaccattcctcattactacttgacagtagatgcacgtgttgacaaacttgtcaagttgcgaggtgaactgaatccactgcaggatgcttctggtggaaagaaaatatctatcaatgatcttgtcatcaaggctgcagctttggctcttagaaaggtccctcagtgtaacagctcatggatgaatgattttattcgccaatatcacaatgtgaacatcaacgtggctgtgcagactgaacacggattgtttgttccagtaattagggatgcagacaagaagggacttggtacaattgctgaggaggtgaagcagttggctcaaaaagcaagagacaatagcttaaaaccagcagattatgagggtggcaccttcacgatatcaaacttgggaggtcccttcggaatcaaacaattctgtgccatcataaatcctcctcagtcagcaattttggctattggttctgccgagaagaggtgatacctggttccgccgatggtctgtatgagtttggttcgttcatgtcagccacactgagctgtgaccacagggttatagatggtgcaatcggtgcggaatttctgaaagcattcaagggctacatcgagaacccgacttcgatgctgctgtgaagttaggatcgatgacctaacacaattcttgtcaagttgtttaaataaccaggccacccaaaggtggcgtctccaaagttccaaaccaatagcacagagccgttatgatattcccagtgttaattaggatcaacgtatagaggcctgaagtcatttttgggattgttctcacgggcaattgatgggaataaatatgaaagcagccaacatgggaaataacttttgattttttttctttggaacatcgctatgcgatttaaaaaaattgtgtaaatctgttgagcttctccacagtaagcgtgatttgatgcgttgatgatatcttgataagagtggtaatcatggattgggttaatatgttatgatgcatggtctaataccatcaaagggcctgcctaatgacagcgcctgggctgacagattcataggaaaaatttattaagtttgct

SEQ ID NO: 7640 - DNA, 749 bp, Zea Mays
aagatggtgagcgagtcggcgggaggaagcagcacttggagcgtcgggatcaagggcaccatcggagtacggaatggacggcgatgtctccatccaaggcgacctgtacagctatggcgtcctcctgctcgagatgttcacggggaagcggccgacggatgcctcgttccagggaggccggactctgcagagctacgtcgcgtcctgctacccggacaaggtactggaggtagccgaccctggcctacggcatcagctgggcaacgggtgtttgagcggaggggacgtttgttgcgacgagatcgacgccgaaaagctgcgcaggtgcatggcgtcggtatttcgagtcggcttgcaatgctcccaggaaccacccagagcgagaatgcatgtcgggactgccatcaaagaactcgaggcggtcaaggatgccctgctaaacgactgagtctggatagaatctctcggcaacagaaacacaataaaacctgacagaaaaaaattgacggttagtgaataagttttagggacaacatcttcatttcttctaaagcggtagcaaacatattgttttcagattatctgctttgacttcggcaacgtgcttcgtctgagcgcttgaactgaatcttcttccactttcctatttacctgtattgatacatataaattagttgctcctgaaatagattgtgaaatggctaataccagttagttttgaggaccttcgataaagacattccttcaac

SEQ ID NO: 7641 - DNA, 779 bp, Zea Mays
ccgtgaggggatttttgagtgggttgtgaaggtgggagggcaaaactgagtagagaatttgggcggggatagatctgagcaagatgtcgagactaagtacggaatggacggcgatgtctccatccaaggcgacctgtacagctatggcgtcctcctgctcgagatgttcacggggaagcggccgacggatgcctcgttccagggaggccggactctgcagagctacgtcgcgtcctgctacccggacaaggtactggaggtagccgaccctggcctacggcatcagctgggcaacgggtgtttgagcggaggggacgtttgttgcgacgagatcgacgccgaaaagctgcgcaggtgcatggcgtcggtatttcgagtcggcttgcaatgctcccaggaaccacccagagcgagaatgcatgtcgggactgccatcaaagaactcgaggcggtcaaggatgccctgctaaacgactgagtctggatagaatctctcggcaacagaaacacaataaaacctgacagaaaaaaattgacggttagtgaataagttttagggacaacatcttcatttcttctaaagcggtagcaaacatattgttttcagattatctgctttgacttcggcaacgtgcttcgtctgagcgcttgaactgaatcttcttccactttcctatttacctgtattgatacatataaattagttgctcctgaaatagattgtgaaatggctaataccagttagttttgaggaccttcgataaagacattccttcaac

SEQ ID NO: 7642 - DNA, 1182 bp, Zea Mays
gctagccctgcccacctttgcctggaattagcttctcctccctccccttccctatcctacatcgatacctccacctttatcgccacaactccataagtagtaacaacaccatcaagtccaccgtcaccactaaaaactatggatcggaaccccgcctcatcagaattaacctcctctcccacactctacatatttcttgatcgacgcccccgccttcatctccgcttcttcgtccacgattctaaaagtgatgcggattccaaaaataggggtgctccgacttcatgcttaaatcaggaggcctctccaggttattcgacatcatcactgccttcgacttcgtggaatgcaaagaaaccaaaggatgtgattagaaaaaaaagatacagccgccttcaaaagccactctaaaccacaacggggaggtaacttgaatggttgtgaagatgcctgattttaggattcggcaaagaaaatcaaattacgaccatggtttagaactttagatatagtagaatggactttctccttgtactcttgttcgtttttctcttggcttttcatcttcgtgggctccaatcgggcttagcccaatagagagacaggccaccctgtgaggcccatgtgggctgtggcacaaagaaaaagaaaaatgtcagctcggcggccgtatgaaggagccgagccaaggaattggacaggacaggactacaggagcaggactcatgattcatgaaccgcacccttgtctctccatccacgacggcgcggctacttgggttggttgggtgcatgcctgataatcatggactgatgatggtagactataattgcctgaatggcaatgcaatcgtacccagatctatgctataggatgaaaaagaggctgaaacttcacaacccctgcgctaaatagatagtaaaaaatgtgcatatcagagcccaaactttagtcaaaatgtgcatatcagaattctagaacccgaattggcggccagggttcagccagttcataatcccctgacttccctgtcagtcgcatggtgcttgattttgatgcaaccctgccaattgcaaacgatttggctacagaaactctttattttttctctctatttgattatgtatttatcttttttataaaaaaagttgtatttccatctcacttcaacagactatcta

SEQ ID NO: 7643 - DNA, 1799 bp, Zea Mays
caacagcccaacttctcgtcgtgctgttcccatctttcctttcctcttcccttccccgtcgatctcgtcggcgacgccactacctcgccgtccggtcccaccacccgcctccgactcctgcgacccagccacggatcccgaggatacgggccgagtccggcgatgggggtggtggtagagcgggaggagtgggcactcagccccttcgcctacccgctcctctccgccgccgccctcgccgcggtgctcctcctcccttacctttccccgaggactgcggcgcacgccaccggaccctcgtcccccttcgacgtgggagccgcacccttcctccggttccgccgcgccttcctcgtcctcttctccctcgcgtccgtggttgaaggtatccattccgtgtttggggaggatgagttcgtgcggtgtgggcttggcagagagcagacgaccgcgcgccttgcctctaccactgcagctgcgctgttccccggtgccatttctggcgtcatctccgacaaaataggaccacgaagggcttgcatattgtattgggtacttcagcttgcatgttctctttctgttttgagacgtggcttgtgctggagcatgagaagcaagaccagaagcaagatctgctgtttgataccttctggctgatgacattctttgaatcggtgtcccttgtcggaagtcaagaaatcacaaatgtattggttagtgatgatgacagtagattcttgcttccctatgcatttgcagccacactatcggtagtgggcattctgtatatcagaaatgcatcaagtacatgtcagcatgcatctgccattgggagctaccaaaaatcatttcttgctcatgtcctcagagacaaaagagtactgatcctggtcttagctcaagcaagcatccattttgctgtctcagccttttggtttctctgggcaccaaccatagtggctgacggaaggtatgctcaactgtcagtaatctacccctgtttcttggcatcaaggatgcttggaagtgctggttttccatggttttacggagccatagcccccttccggaacgaggacagcttgacaatagcttacgttggtgctggactcgctttgtcgattgtggcttatgattaccaggagattgcaccactggtgatagtgttctgcatcttccatgcctgtgtgggcttcattttgccgtcactggccagattgcgaacaatgtacctgccaaatgagctgcgagggggcatgatgagcttttcaatgtcactggcaaatgccgccaccttcgttttcttgatacagggcagcgcccaccatcgacacgttgcaaactcaaccatcctgagccttgcgtcctatggcctgttaggagctgggggctgcgtccatatgttgaggaggtggaggaagcacactcggctgaatgcccgtagtctgtaggagctggaggcacccaatgaatgctatacacactgcagggtgagcttgagagcggtttctgtagcatgctagtatctcacgttttgtttatctgactttttctggaaatatcaggaggtaggtgtaggatactacttttgttgttgttcaaagaaattgttgaaattgaaggttgacaaaaaatctgtgtacatgcgtcggggccatcaaactaacgtctgactttgatttttagcaattaaactcgaaagccaggaatctgtgtatgtatgtttggtttgtagtttttttttcaagtgttcgtttcatacattgtcttgatagtataaaaatcgctcgtaccataca

SEQ ID NO: 7644 - DNA, 1866 bp, Zea Mays
caacagcccaacttctcgtcgtgctgttcccatctttcctttcctcttcccttccccgtcgatctcgtcggcgacgccactacctcgccgtccggtcccaccacccgcctccgactcctgcgacccagccacggatcccgaggatacgggccgagtccggcgatgggggtggtggtagagcgggaggagtgggcactcagccccttcgcctacccgctcctctccgccgccgccctcgccgcggtgctcctcctcccttacctttccccgaggactgcggcgcacgccaccggaccctcgtcccccttcgacgtgggagccgcacccttcctccggttccgccgcgccttcctcgtcctcttctccctcgcgtccggtatccattccgtgtttggggaggatgagttcgtgcggtgtgggcttggcagagagcagacgaccgcgcgccttgcctctaccactgcagctgcgctgttccccggtgccatttctggcgtcatctccgacaaaataggaccacgaagggcttgcatattgtattgggtacttcagcttgcagtaggtgttgtgaagagtttcagtgcgcttcgctgttcatggatcaacaatttcattctggcttttgcctcttcagtgttctctttctgttttgagacgtggcttgtgctggagcatgagaagcaagaccagaagcaagatctgctgtttgataccttctggctgatgacattctttgaatcggtgtcccttgtcggaagtcaagaaatcacaaatgtattggttagtgatgatgacagtagattcttgcttccctatgcatttgcagccacactatcggtagtgggcattctgtatatcagaaatgcatcaagtacatgtcagcatgcatctgccattgggagctaccaaaaatcatttcttgctcatgtcctcagagacaaaagagtactgatcctggtcttagctcaagcaagcatccattttgctgtctcagccttttggtttctctgggcaccaaccatagtggctgacggaaggtatgctcaactgtcagtaatctacccctgtttcttggcatcaaggatgcttggaagtgctggttttccatggttttacggagccatagcccccttccggaacgaggacagcttgacaatagcttacgttggtgctggactcgctttgtcgattgtggcttatgattaccaggagattgcaccactggtgatagtgttctgcatcttccatgcctgtgtgggcttcattttgccgtcactggccagattgcgaacaatgtacctgccaaatgagctgcgagggggcatgatgagcttttcaatgtcactggcaaatgccgccaccttcgttttcttgatacagggcagcgcccaccatcgacacgttgcaaactcaaccatcctgagccttgcgtcctatggcctgttaggagctgggggctgcgtccatatgttgaggaggtggaggaagcacactcggctgaatgcccgtagtctgtaggagctggaggcacccaatgaatgctatacacactgcagggtgagcttgagagcggtttctgtagcatgctagtatctcacgttttgtttatctgactttttctggaaatatcaggaggtaggtgtaggatactacttttgttgttgttcaaagaaattgttgaaattgaaggttgacaaaaaatctgtgtacatgcgtcggggccatcaaactaacgtctgactttgatttttagcaattaaactcgaaagccaggaatctgtgtatgtatgtttggtttgtagtttttttttcaagtgttcgtttcatacattgtcttgatagtataaaaatcgctcgtaccataca

SEQ ID NO: 7645 - DNA, 1273 bp, Zea Mays
cctttcctcctctcgtcgtccagggaaggatgcaggatgctctccgtccctcccccaccacctgaggaggaaagcaagaaatttttaaccaaccaaacgcaccaccgcgtgcctccgtgattcccagcccaattaacccggaacagaagagaagagctcgccacgccaccggtgggatcgccggacacctacgcgggcctggccttgggatccccggaacgcggggcgtgggaaaccgaggaggagcatgtcgcgggtggcgtcgctgtcgccgtccttgtcgggcgacgaggtggaggtggaggaggaagaggaggacgagggcgtcgacggctaccgcaagggcggctaccacgccgtccgccccggggaccagttcgccgccggccgctacgtcgcccagcggaagctcggctggggcaacttctccaccgtctggctcgccttcgacgtccagtcacagagatacgtggccctgaagatccaaaagagtgcgcctgagtttgcgcaagctgctcttcatgaaatcgagttcctgtcagagatcaccaagaaggacccattgaactgcaaatgcattattcagctgatagatcacttcaagcacacggggcctaacggacagcatatctgcctcgtctttgagttactgggagatagcttgcttaagctggtacagtacaaccggtacaaaggcatcgggcttgatagggtgaggcaaatatgcaagtcgatcttggtaggtcttgactacttgcacaatgagcttggcatcatccactcagatttgaagctcgagaaccttctccttctctcgaccattgatccctccaaggaccccattcgctctggcctcaaaccttgccttgagaggcctgagggaaaccctaacggtgaagctgggattaatgcgattgagaataagctaaagatgagagcaaggagggtgcttgcaaagcttgctgagaaaagaaaatcagctgtggaatcttcacgctcagaaaggagcttgggtggaattgatcttacatgcaagattgtagactttgggaatgcttgctgggccgacaaacaatttacagattttattcagacaaggcagtaccgggcaccagaggtcattctaggtgcaggatactcgttttctgttgacatgtggtcatttgcgtgtatcgcttttgagctcgcaaccggagaaatgctatttacacccaaggaaggccatggatacagtgaagatgagtcctttagttacttgattgaggaccgaagg

SEQ ID NO: 7646 - DNA, 3222 bp, Zea Mays
aaaagagagagaagtcccaaagaacaggttgattggcgatgagcagtgggatggatacggtgggggtcgggatggaagctggcgtcgtgggtgaccgtgcaatacatccaaaataggaggagtgacgtgggaaagctccccgcgtcctcctcttcctttcctcctctcgtcgtccagggaaggatgcaggatgctctccgtccctcccccaccacctgaggaggaaagcaagaaatttttaaccaaccaaacgcaccaccgcgtgcctccgtgattcccagcccaattaacccggaacagaagagaagagctcgccacgccaccggtgggatcgccggacacctacgcgggcctggccttgggatccccggaacgcggggcgtgggaaaccgaggaggagcatgtcgcgggtggcgtcgctgtcgccgtccttgtcgggcgacgaggtggaggtggaggaggaagaggaggacgagggcgtcgacggctaccgcaagggcggctaccacgccgtccgccccggggaccagttcgccgccggccgctacgtcgcccagcggaagctcggctggggcaacttctccaccgtctggctcgccttcgacgtccagtcacagagatacgtggccctgaagatccaaaagagtgcgcctgagtttgcgcaagctgctcttcatgaaatcgagttcctgtcagagatcaccaagaaggacccattgaactgcaaatgcattattcagctgatagatcacttcaagcacacggggcctaacggacagcatatctgcctcgtctttgagttactgggagatagcttgcttaagctggtacagtacaaccggtacaaaggcatcgggcttgatagggtgaggcaaatatgcaagtcgatcttggtaggtcttgactacttgcacaatgagcttggcatcatccactcagatttgaagctcgagaaccttctccttctctcgaccattgatccctccaaggaccccattcgctctggcctcaaaccttgccttgagaggcctgagggaaaccctaacggtgaagctgggattaatgcgattgagaataagctaaagatgagagcaaggagggtgcttgcaaagcttgctgagaaaagaaaatcagctgtggaatcttcacgctcagaaaggagcttgggtggaattgatcttacatgcaagattgtagactttgggaatgcttgctgggccgacaaacaatttacagattttattcagacaaggcagtaccgggcaccagaggtcattctaggtgcaggatactcgttttctgttgacatgtggtcatttgcgtgtatcgcttttgagctcgcaaccggagaaatgctatttacacccaaggaaggccatggatacagtgaagatgaggatcacttggctttaatgatggaactacttggcaaggtgccgaagaagattgcaaccacgggaacacgatcaaaggaatattttgaccgccatggagatctgaagcggataagaaggctgaaattatcatccattgaacgtgtccttgttgacaaatacaaaatttctgaatctgatgcccgggaatttgccaattttctttgcccattacttgactttgcaccagagaagaggccaacagctttaggttgcctaaagcatccatggcttcattataacgaggataaaacttgtcagtctcttaacaataatgatgccaagaacattgacctggcccaaagcccagggagcatcaccagcggatattgtacaaatattgatttgacgagcaaaaaaggcggacccactggaacttgtgataagactgctgatgcaaaatataacaccagaagcattaccagcaatgctaccatgaacactgatgtacagcccaatattggaagcattgctaacggacttgccaaaaatgttgatgtaaatccgaacattggatccatcactaatagagatgccaagagttctgatatgaagccccacattggaagcatcaccatcagtaacgccaaaagctctaatgtaaagctggatacaggtaacatcactgatagaaatgccaaaactgtcgatataaagcccaactctgacatctctagcagagatgacaagagcagtaatgtggacaccaccacttccagtgttatcaacaaagatgcgaagcgcagcattagaagtgtcgttaattcttatatcaagaatttcgatgcaaagtgcaacactggaagcactgctaacagtgatgctagggacccatcagatacgaaatccagcactaaaattgttagtagtgctgataatgctaagtgtgtggacataaaaccgatcagtggaagtgataagagcaatgacaccagtgataagagcaatgacaccgtcgatgctaatgtgaaatccaactctggaattgttgcaaacagtgatgctagcaacaccgatgtacagactaacactggaagtgtcgacagcagcgatgattacagcattgactcaaaaccaaacattggccgggttgctgcaagcatacagaggttggagagcagtatggggaaatacagggccgacctttctcaagattgaggatctggcaggtaccagctggcgttattgtatatctctattcctgctgactgtacaaagttttgtatttgcctacagaacttacacggagtgggtaaacgtggaatctctttgggaatatacttgtacatgcagtagtaacagaagattgctgttcctagtatggtggatgcactggaaggggaagaattatactctgaccagtcacacgtcatctctcttgattatgttcatattctgccctcagtgaaaaaaaagagatttctttatgtcatttaacaaggatcaccatttatctgagcaagggtgacatttttgtttggtttatggtgtgaggtttgcttgtaaaaagcgggacatgtgttgtataaaactattctttgttcattttgtagtgaaacaatcatatagatgaaatgtttttttttcactttaggctggttcagttaggagtggatcggaggggattaagggctactttggtgactagtgaaataaaggggatccctaggggaggaatcccttgctattccctaggatccctttcatttctttaatcaccaaagcagccttgaaaaaaattaaatcccttcctattcaaaattgaataggaatagttttaattctgttc

SEQ ID NO: 7647 - DNA, 2576 bp, Zea Mays
gcagaaattgcttacagaagagaaatgacccgtttcgagccaaggcatcctcgcgtctcgctctcacccctcctcggcgcctccccgaccacagtgtaaagcccctgtcccttcctccccgactcgcccctcatggcgaggaggcgctgctgatgcctcgcggcgtcggatcggacgcggcggccacgacacctagccgcttgcggtggcgctcgcctacgcgcccaatccgccgacgctgctcctcggatcccccgagagattcaggccccgtctcgcctcgtcctgcctagtgcctagcggtccagtcgacttccccaagtgctcgacccctacaaggcagcgcgcgtgcgtcacctcaaccccttgcatgcgctggcgctaaccctatctaggagacggagcggcgggccagcggctacgcgggcaaagagaggacgagagcgtgcaagaagagaaggcccgtgtcaggcggcggctataggtgcaaggataggcaacaagtgttcaaaaacacgtctgtggatcaattgacttgtatttcagcctttcagttgaggattaaagtggaggtttaagaagcttgagaattggcatcatctcaagaatacattgaagtgcaagatgccaaaaataaagagtctatctaatgcatgccgagtatcattttctccagaaggtcccatatctgaagaggcgcttgagagagtccgtgcactgttagatatgataagacctctagatgtcggcctagataatgaagcccaaattgcacgcaattggagtagttctacgcgtccatcaaatgggagacgaggacgcaatggggctaaccagttcgcggctccaatcaaatatttgcacattcatgaatgtgaaagcttctctatgggtatattttgtatgccaccttcttcagttatcccacttcataatcatcctggaatgactgtacttagcaagcttctttatggacgtctgcatgctgaatcttatgactgggttgacatacctgatcatccaattgatcaattacaaacaaggccagccaagcttgttaaagattgtgaaatgactgctccagagacaactattctttaccctaatgcaggtggtaacatccacactttcagagccattacaccttgtgctctctttgacgttctttctccaccatactccgctgaggatgggcgacactgttcatacttccgaaagtctcagatgaatcagccacctgttgttttgcctgctgagatagatagctctcaggtagtttggttggaggagttggaggaccatcagcccccagaaggctttgttgttgcaagaggtctgtataaaggccctgtaattaggagataatttgctttggagcgcagaatcaaccaagctgcaaatcagctgaaagacgatgcaggcttgtagtgcctagtgcaagcatcgtcaggtcatgtgcagcctacggtttatttgtacatctcaaagtgatctttgataatttaacagcagttttacagaacaggaacggatgttttttgtttggctgccattttaactttgtcccactgctggagtatctctgacctagttatggagctcttatcagatcaagaccatggtacttttgatgtaccagcatagctattgtcatgatgtaccagggaagatcaagacaagtgtttccatttggtgatttcagaaagaatttggtgtggggctaccattttgtctgtgtaatagcagcattactattttggagcaagactgtaaattacgggagaggaactataataatatcattaggtttatcatgaaatatattttcatggtgtatctatttaggccttgtttggaaggagatctttttctgcattattgtcactgtgttccaaataggccgttaaagtttggtggtgacctagattgctgttagtctggtggggacctagaaatgaaagcgagtacagaagtccctcgctgccttagcgaatcctggtgttgtgataagtcgcgcggtaaagtcctttttcatctcagaaaccatataggcacgttttcatctcagaaaacataagggtacttaggtttttttattcaactaatcttgaggaacgaaatgtgaggactacattaagtgtccaaaccaaaccatgcatcatctgatctagctaagataaaactatcctgatctagctaagataaaactctccttgatctagctaagataaaactctccttgatctagcctgggtcgctatgagcaggtggcctgaacggtgagcgcgccggattggcaccctgcgccggcaaacgcggccgtgtacttgaccgtgcacgactccctgccgacgcacgcgtccgtgaacgccttgagcgcggccttggactcgcagcctcccttgtaggcgccgcagctgcccctggcgacgccgaagctggccacgtcgacgctggcgacgacgcggccgtggccgccgcatgacagcgtgacgtcgtcgccgagctcgacggccgccacgcacacggggcccacggcgacggtgtggaacgcggcgcgtgtcgggtcgccgccg

SEQ ID NO: 7648 - DNA, 2498 bp, Zea Mays
gaggattcaacccccctctaaccaaataagctttaggccttgttcgtttgtaccggattggtgggtcggaacgattcctaaccgaattgtttttctagtttatataaactttgattagctggaacgattccaggtgcaatccgatagaaacgaacaaggccttactgagctcttgttgtcatgcatcaatgattagcgagtcagtgagtcaggtagcacgaagcacaaaatgagccagtgaaccagcgggcatcagttaggtagcacagagcacaacacttgtagtaaatataaaatagataattgcttatactgcaatccatgattgatacacgcaaaactggttgtaccctattagcaagtagctttctcaggagtttgactcatgagtttagaagggaaataggtcggaactctgatgtgtgtgatttgggtgatgtatgacttgttggtgcttctcagaccaattgtgccttattgaaactctttgcacagtttatagaaatcatacttgatggttgaccagcatttcttgagaaattcattgctgaacccatcaggacctggtgactaatcattggtcaggctttcaatcacaccatcaatttcagtttcagtgaagccttattcaatttcacccaggaaatctgctatgttgatgaagtcttctggttgtacagagaaaacagtgaactctgggtttcccaacctgtctttaaaggcttgccacaggagggattctttgtctctgtgatatgtagttgtctatttctcgatcctgtatcttcgatatcgagcgggcattgtcaccgatgagatgctgtctctaccacagaaaccttttctagctgtaggactcttagaggcctttggagcagcagcagggatggcagctggagctgttctttctggagcttcaataccaatactgtcacagacctatcttgtctggcagcttcttctatctgctatattcttgaagaggcgttatagaattaatgagatagcaggatgttttctagtggcaattggtgtcataataactgtagcaagtggatctggtactagcgcttcatttaaaagtagtggaattttatggccgctgctaatgataatatcgttctttttccaagctgccgatacaatattgaaggaaataatatttatagatgcttctaagaaattgaagtgtggctcggttgatctttttgttgtcaattcatatggctctgcttatcaagccctttttatgtgtatcttgctgcctttcctgtcaaagttatggggagttccattccatgtgttaccaacctacataaaagatggtgcagcctgctttttaaatatgggatcaatatctggttgtgaaggggcaccacttctaccactactatttgtgttggttaacatgggattcaatatatcattactaaacctactaaagatctcctcagcagtcatatcttccttggcttctacattctcagttccgctgtccatctacgctttcactctgccactgccgtatatcggtgcggcgtcatctctgccacctggctttgttgcgggtgcagcggtactcaccaccggcttactactatacagcctaccacaggcacaacattatgggaattctttccacaacaagaatgatgactagtcagcattcatttcttcattggtttataatcacccttcactccaagatggtgcgccatctgggttcgaaaggttggagcagaagttctcctgagggccaccagactgttgtatgttgtatgaaacatatcatatatatatacccaccaataaaggtcggagaagagcatggacagtggttagacgggaagaaaaccagggagaagagcaggagcatcatcaccacagggacgaagagaagaaacagcggtggtggcggaaggggtggcagcaccaacggcaggcacaggaggatcactgtcgccgccagcaacatcatcagtactctcttgctcatcgccgccgccctgcgctcgctgtgatggaacttgcttgtgccaacccccaatggctgcccggctccagtctttttctaggctttcatgtgaggaagttgtactatgtgtgagagaaagaaaatgttagttgcccccgatgaaggaactggcaaggtatatgtacatggccagcttgaatcagcaggccagatggggtgttttggcatgtgtgactgctggactgggcatgttcgatccttttctgctttccagttccagtacagagactgcactgactggtcgggggtccgtttctttctgggacgtccgaggaatcccttgtctccctgggatgcggcgggggagggccatggttggcctgagtttgtcggcgtaacatcctgtcctgtccatcaaaaaccacttcccgctagcttttataggagtacgagcttagagatctgcggcagcattccctgcgtctcgaatcagtatgcctctcctatatcaataatttatttg

SEQ ID NO: 7649 - DNA, 2861 bp, Zea Mays
ccgggcgccgccccaccgcactagtgaagtggagctggagccgcggaggcggctggctgggctcgcgggagagtctattatttccatcggcaccatcacggcagggcggcgcgcggcgcgcggccagcgggtttacagacccttctgtctctctcgctcgcttccaacgctcgcgaccggctctccctgcgcccgttcccggcggccgaagcgagtcgcgaacccctttccgtggctcccgagcgagtcctacgggcgatgcgggcggatcgcgcgatgggggaggggagcggcaaccagcggatcgacctgggcgcgccgctccgctcggcgcgcctcgccgacgcgccgacgcagtacaaggccggcctcaactccgggcccctgcgccacccgggcaccgtgcccttcgcgtgggagcagcgcccgggccagcccaagagcgtccgcacacgccgcgcggcgccgccgacgcccccgcgggaaacttcccgggcgcggccgggcgagacaggcggcagcccctactacgacgccgttgcggagctcgatctccaggcgcttcgtggcgtcgccgaccaaggttcccggactgccgccgcatcgcgcaaggtggtggtgggggagaacgagcttgcggtggcggtggaatcgaccaaggatgtgaagaagcacgaggcgctcccggcggctgcggtcctacagaagcaggacggcatagtagaagaggaagaggagaggttctccgacgcgctcgacacgctctcccgcaccgagtcctttgccatgaactgcagcgtcagcggcctcagcggcgctctggaccccggacatggcgccgagccaggctcccggggcttcatgatggaccggttccttccggccgcgcaggctgtcgccgtgggctccccgcagtacaccttccggaaggccggcgccgccggtggcaccggcaattctggcagcgggcacgcgcgcgcggctgcggtgaaggcaggcgtgggcaatggcgaggatcgaatgaggagagcgcctgtccagctcccataccagcacctgccgcccaattacttgtcctgcgcctatccaagacacgaagagcatgaagaggaggatgaaggggatgacgatgacgatgactatgatgtgcatagtacccgggggttttcagccaaggggtgtggtttgctccctagcctatgtgcgaaaacttccttgttgctcttaaatccaatgcctgcaatgaagcgcggcaaggtgcgagggcgagttagaggctggcagttaccgtgcaaaggccaaggccaaggccaaatggcgcagagtccgcttgcgcggagctcgcagaacaagcacctgggatgtgattccaacgggcaatcatgggaggatgtgtataagcataagttggagcagaagtatcttggtcaaggagaggatgataggaggagcaagctgacaagtgagtcgaatcagcttactttctggagtgattcaccgactggggatggatcttcaccatattaccattccatagctggtggcatgtctccatatcgcagttatgctgtgatgtcaccatcaagtaaaccaaatgggtcgtctggaacaggagataaggatgataaagcaagtaggagcaatggttctggttcgtttgggaaagaccatgatcgaacctcgttggttggatcagatgatagtagcttcaagcgatcaagttccatgagctcaggaccagatggaacagtgcatgaagattcaatggatcaccacagagatactgattcagacacatgtcacttgggtgtgcttgtgcatacaaaagcagcattggatgcaaacatatatgacactcaacctggagggcgaaagacagttggaaataatttgattgtgaaagatcaagtcaatgatccattgactgaaaagatcgctgaacttagagaacccacatttccattggatgatggaaaagatttgcagcgtaatgctagtcatgagttaccacaacatctcgaagacaatgatgttgccaaaaaggaaatcataccattacaatctctgctccctttaccagtacccaaatcaccttcagagtcgtggctttctcgcactttgccatccgtgacaaataggtcacctctgccatcttttcttggaattcaagtacactcaaagaaacaggctccctgggtcataacgcaaccaaaggagaatgatcataaaccttccaggccacgacagataagatttgcagatgtagtagaaaaaccaacttcgttggattcggagatatgatatcttctcgcaaaaccagtatctatccattcatggtgttgccttgaaggctatcaaggtcatatacctcactggcacttacgagttcctaggatgtgcctctgctttttacagatgtggtcacttgatacagctgctggttaccacttaccatgttggtaattggagttcacatgccatgtttgctggactgtggtcagtatgtttctcatgatggaagattatatagcagaagcagcaacgttccaactgtaaaagctttagagattctccaaaaagtgttgccatgtgatgagctcatgagcagaaccttatgaattgacgcatgacctcaacaattgactatcggatgtgggtcaactgccgaatgggttgtagtgctgttcaactagaacactcgtggggcttttcatttgtcgcctcacagatattttcttgtgctctgtaaacatcatatgaattctgtgggcaacttataaaaaaaagtagtcaaatgttacactgctggagttggcagatcgagtggttctggggctggaggtggtctttgtttgggtctt

SEQ ID NO: 7650 - DNA, 3105 bp, Zea Mays
gcccgcccgagtcaccatctccgctccgcacgcgcagcattaaccctgcgggctacggcactcgcaccgcaccgggcgccgccccaccgcactagtgaagtggagctggagccgcggaggcggctggctgggctcgcgggagagtctattatttccatcggcaccatcacggcagggcggcgcgcggcgcgcggccagcgggtttacagacccttctgtctctctcgctcgcttccaacgctcgcgaccggctctccctgcgcccgttcccggcggccgaagcgagtcgcgaacccctttccgtggctcccgagcgagtcctacgggcgatgcgggcggatcgcgcgatgggggaggggagcggcaaccagcggatcgacctgggcgcgccgctccgctcggcgcgcctcgccgacgcgccgacgcagtacaaggccggcctcaactccgggcccctgcgccacccgggcaccgtgcccttcgcgtgggagcagcgcccgggccagcccaagagcgtccgcacacgccgcgcggcgccgccgacgcccccgcgggaaacttcccgggcgcggccgggcgagacaggcggcagcccctactacgacgccgttgcggagctcgatctccaggcgcttcgtggcgtcgccgaccaaggttcccggactgccgccgcatcgcgcaaggtggtggtgggggagaacgagcttgcggtggcggtggaatcgaccaaggatgtgaagaagcacgaggcgctcccggcggctgcggtcctacagaagcaggacggcatagtagaagaggaagaggagaggttctccgacgcgctcgacacgctctcccgcaccgagtcctttgccatgaactgcagcgtcagcggcctcagcggcgctctggaccccggacatggcgccgagccaggctcccggggcttcatgatggaccggttccttccggccgcgcaggctgtcgccgtgggctccccgcagtacaccttccggaaggccggcgccgccggtggcaccggcaattctggcagcgggcacgcgcgcgcggctgcggtgaaggcaggcgtgggcaatggcgaggatcgaatgaggagagcgcctgtccagctcccataccagcacctgccgcccaattacttgtcctgcgcctatccaagacacgaagagcatgaagaggaggatgaaggggatgacgatgacgatgactatgatgtgcatagtacccgggggttttcagccaagggcaatcatgggaggatgtgtataagcataagttggagcagaagtatcttggtcaaggagaggatgataggaggagcaagctgacaagtgagtcgaatcagcttactttctggagtgattcaccgactggggatggatcttcaccatattaccattccatagctggtggcatgtctccatatcgcagttatgctgtgatgtcaccatcaagtaaaccaaatgggtcgtctggaacaggagataaggatgataaagcaagtaggagcaatggttctggttcgtttgggaaagaccatgatcgaacctcgttggttggatcagatgatagtagcttcaagcgatcaagttccatgagctcaggaccagatggaacagtgcatgaagattcaatggatcaccacagagatactgattcagacacatgtcacttgggtgtgcttgtgcatacaaaagcagcattggatgcaaacatatatgacactcaacctggagggcgaaagacagttggaaataatttgattgtgaaagatcaagtcaatgatccattgactgaaaagatcgctgaacttagagaacccacatttccattggatgatggaaaagatttgcagcgtaatgctagtcatgagttaccacaacatctcgaagacaatgatgttgccaaaaaggaaatcataccattacaatctctgctccctttaccagtacccaaatcaccttcagagtcgtggctttctcgcactttgccatccgtgacaaataggtcacctctgccatcttttcttggaattcaagtacactcaaagaaacaggctccctgggtcataacgcaaccaaaggagaatgatcataaaccttccaggccacgacagataagatttgcagatgtagtagaaaaaccaacttcgttggattcggagatatgatatcttctcgcaaaaccagtatctatccattcatggtgttgccttgaaggctatcaaggtcatatacctcactggcacttacgagttcctaggatgtgcctctgctttttacagatgtggtcacttgatacagctgctggttaccacttaccatgttggtaattggagttcacatgccatgtttgctggactgtggtcagtatgtttctcatggtaagctggtaggtggtggtttaggtttggagtaaatcttatattcgtacaggatgacttcagctttcttccttactgtcgatagtgaaataaagcaatagtacccaaaaccaaaaaaggccgagttgttgcaaaatgtaatgcatcccaaagaataagaagatgtcaaaacagattaggcttccattcctggtacattttctattcgtaattgtatcagctggatatgtcagtacttgtgcttgatagaatcatagaactgtatctagtgccatatgttgtgtcagttgtgtctgacagtaagtatattcagcatatttcatatctatagtaaatttatttgctacattgttgtcattgattgacatcaagatggaagattatatagcagaagcagcaacgttccaactgtaaaagctttagagattctccaaaaagtgttgccatgtgatgagctcatgagcagaaccttatgaattgacgcatgacctcaacaattgactatcggatgtgggtcaactgccgaatgggttgtagtgctgttcaactagaacactcgtggggcttttcatttgtcgcctcacagatattttcttgtgctctgtaaacatcatatgaattctgtgggcaacttataaaaaaaagtagtcaaatgttacactgctggagttggcagatcgagtggttctggggctggaggtggtctttgtttgggtctt

SEQ ID NO: 7651 - DNA, 1531 bp, Zea Mays
  misc_feature (1530)..(1531): n is a, c, g, or t
cggccgtggagctggagccagcagcggcagaaccacgctaaaatctcgcccaaatcatccccgccccagcaatggcgacctccttcggtttcggcagctccgcgaccgcgggctccacggcctcctcccccttctcctccaccccatcagccttctccttctcccagccggcgtctgcctcctcccctgcccccgcctttggctcctccctcttctcctcatcctccgccgccgcttcttctgctccaacttttgggtcctccctgttcagggcctcgtccgccgccgccgcacccgcctcctctcccgctttcggattcggatccaccttctcgttcggtcagtccatggcggcggcctcatcggccgcgtccgcgccatcccttttcggtgcaacgcccgcatcctccgctggaacaacccttagcttattcggcgctgctacctccgccgcaagcagccctgggttcttcggcgccacctccactgccgcaagcagccccggcctcttcggtgcgtccgccactggctctgcggcaacctccccgagtctgttcggtggcacctcgggcctattcggcgggacttcctccgcagcgaccaccccgagcccattcggggccacctcttccacggcggcgacagttagtccgttcggcgccgcctcttctgctgcgtccactccaagcctcttctctggaggggccacgggatttagctttggctcgtcggcgtccggttccaccactaccacggccgccgccccggcaccatcatttggcttctcgttcaactcggggccggccgcgtcaagcactgcatccacgccgacatcagcaccggctttagggtttggcggcgccactggctcgtcgctgttcgggtccaccacctctgcgcccctcttcagtaccaccaccgcttcttctccagcgtctgctgcgaccaccacgccatcctttgggttctcttcttcgccagcaacaaccgcttccgccccatcgtttggctttacaccatcatcaggaagcgcgacgaccgcgaacacggctccttctttgttttcatcatccgccaccacactaaccacaccggcgtcctcgtcctccactggcttctccttggccacttcgcaggctgcacctgctccctcattgttctctaccagtgcaataggcatgacaaccacggctcctttgactggaacaacggggtttccaaattttaatcttcaaacaactaccccagcttctacctcatctcccacactggcatttggtgtttctactactgctgctagctcatcagccaccagcaccacaactcaagcaacttcctcagctgttcaagtcagcagcacaggtccgactactactacatctatcactccagcagcatcccaagcacctaagctaccatcagaaattgttggcaaaaatgttgaggagattattagggactggaacaatgagcttcaagaccgtactgcaaaattcaggaaacatgccaccgcaatagctgaatgggatnn

SEQ ID NO: 7652 - DNA, 1710 bp, Zea Mays
  misc_feature (1709)..(1710): n is a, c, g, or t
gacatatgtagtccaaacaacgtttttcataagccgttcggccgtggagctggagccagcagcggcagaaccacgctaaaatctcgcccaaatcatccccgccccagcaatggcgacctccttcggtttcggcagctccgcgaccgcgggctccacggcctcctcccccttctcctccaccccatcagccttctccttctcccagccggcgtctgcctcctcccctgcccccgcctttggctcctccctcttctcctcatcctccgccgccgcttcttctgctccaacttttgggtcctccctgttcagggcctcgtccgccgccgccgcacccgcctcctctcccgctttcggattcggatccaccttctcgttcggtcagtccatggcggcggcctcatcggccgcgtccgcgccatcccttttcggtgcaacgcccgcatcctccgctggaacaacccttagcttattcggcgctgctacctccgccgcaagcagccctgggttcttcggcgccacctccactgccgcaagcagccccggcctcttcggtgcgtccgccactggctctgcggcaacctccccgagtctgttcggtggcacctcgggcctattcggcgggacttcctccgcagcgaccaccccgagcccattcggggccacctcttccacggcggcgacagttagtccgttcggcgccgcctcttctgctgcgtccactccaagcctcttctctggaggggccacgggatttagctttggctcgtcggcgtccggttccaccactaccacggccgccgccccggcaccatcatttggcttctcgttcaactcggggccggccgcgtcaagcactgcatccacgccgacatcagcaccggctttagggtttggcggcgccactggctcgtcgctgttcgggtccaccacctctgcgcccctcttcagtaccaccaccgcttcttctccagcgtctgctgcgaccaccacgccatcctttgggttctcttcttcgccagcaacaaccgcttccgccccatcgtttggctttacaccatcatcaggaagcgcgacgaccgcgaacacggctccttctttgttttcatcatccgccaccacactaaccacaccggcgtcctcgtcctccactggcttctccttggccacttcgcaggctgcacctgctccctcattgttctctaccagtgcaatagcggctgcagcttctgcagcatctgggtcgtcgttcccagctgtttctaccagtggttttagttttgcagttgcgccatcatcatcagcagctgcagctactgccactaccaccactgtcacaagtgcttctacatctgcaggcatgacaaccacggctcctttgactggaacaacggggtttccaaattttaatcttcaaacaactaccccagcttctacctcatctcccacactggcatttggtgtttctactactgctgctagctcatcagccaccagcaccacaactcaagcaacttcctcagctgttcaagtcagcagcacaggtccgactactactacatctatcactccagcagcatcccaagcacctaagctaccatcagaaattgttggcaaaaatgttgaggagattattagggactggaacaatgagcttcaagaccgtactgcaaaattcaggaaacatgccaccgcaatagctgaatgggatnn

SEQ ID NO: 7653 - DNA, 2235 bp, Zea Mays
ggctggccggttgctaggttgcatttggagcgttcccgcctctctctcgactccattatttccgttggttcttgacctcagctcgctcctctcactcacctctatatatgccccgccctcttgcccgtgttggtggtaccccgcgtcgccctccgtcgtctcagcgtatgttgtgcatgtgaagagagagaggaagagggtgacgagcgagaaaaaagctagtagagtgatagcttgacaagacgcattgaagcgaaggccacgcataccaaagcaacctcaccatcgctcgcaagctactcgatcaaggacattattgtcgcaacgagctagcaagaataatccgcgttagtttcgcgaagcggtggtacatatggctcgcatcctcgtgctggctctgctcaccatcgcgagcctcctcctgccgccggtcgtcgcgagccagcaggcggcggccaagtgcgagtacagaaagcactccggccaccggtacaggcacccggtgggcgtgcggaagatcgtggtggacgcgggcggcgccggcgacttcgtctccatccagcgcgccgtcgactccgtgccggagggcaacaccgtgcgcgtcatcgtgcagatcaacgccggcacgtacatagagaaggtggtagtgccggcgtcgaagccgtacgtcacgttccagggcgccgggcgcgacgtgacggtggtggagtggcacgaccgggccagcgaccgcggccccgacgggcagccgctccgcacctacaacaccgcctcagtaaccatcctagctaactatttcaacgctaagaacatcagcttcaaggtgagcagccgtttgcccagcagaccacccagtacgtggccgagagacgatggtgcagcaggggcaggcaaagtgacaaaacctctcagagagtcacaagtctctggacttttgcttctaaacgccgctgtctctgtgtatctcgttccttttcgaaaattttgaatccgatcgatccgcgtgttttcacacactaagctagcaagatcgacgctatcacgctactgcgtgccctgtatctgttgaagttgtgcctgtaggctgcaggttggctgggtgtgtgtggcttcaaaattcggcggcgacaggcatcctggacgagcaaaacgcgcattcgatctggctgattttttcggttggccgtcttggtccaatgcagcaggggcaggctcctaactgacgcaccttttccctttccaatgtctcgtcttgacacgcagaacacagctccggcgccgatgcccggcacgcaaggagggcaggcggtggcgttccgcatctccggcgacaaggccttcttcttcggctgcgggttctacggcgcgcaggacacgctgtgcgacgacgccggccggcactacttccgcgactgctacatcgagggctccatcgacttcgtcttcggcaacgcccgctccctctacaaggactgcgagctgcactcgacggcgcagcggttcggctcggtggcggcgcacgggcggcgcgacccgtgcgagcgcaccggcttcgccttcgtcaactgccgggtgaccggcacggggcggctctacgtggggcgggccatggggcagtactcgcgcatcgtctacgcctacacctacttcgacagcgtcatcgcgccaggcggctgggatgactgggaccacaccagcaacaagagcaggaactggggccccggcgtcgacgccgtgcacggcgtctcctgggcgcgagagctcgactacttcgccgcccgccctttcctcggcaagagcttcgtcaacggataccactggctcacacctgatgtctgaaaaacacacaaacacacgcgcgagagtcaggagacacatcgattacagcaaaccagattaatttattcgtacagcataaagacagaataagacaccatttacaagccactgaatatgtatagtgatccactggcgcagaagtcagattcaagattcatttcgtctataaaaaatagtttccaaaacttcgtcatgtgcagtgtaaactagacagtgagcagtgagtctgttatgtctctgcataggagaccttggatgtgcaattcaagttgttccattatgtttgaatctgcaaaggagcatggacacaaagtttgtgaagcacagtataatttcaatattttctagaaaataaccaaacatccatatgacataatagtaagttcataatccaac

SEQ ID NO: 7654 - DNA, 1934 bp, Zea Mays
agtctggtcacacccttcggatccttgttcgcttccggcttccctcgttctctgcgtccgcccctgccgggccttgtcttctcccccaaatcaatccctcgcccacggacccaaccaaatcctcctccacctcctccatctccagccccgtccctacccagctcgtgtaacctcccgatgtccgggggcggaggcggcgcaggcgcgggctcgtcgtccggcggcggcggcggaggtggagggggcggcagggagggcgactgggactgcggcagctgcggcaaccggaactacgccttccgctcgctctgcaaccgttgcaagcagccgcgcctcctcgtcgaccctaacaccccgcgcgactccaagtggctaccccgtgccggggactggatctgcaccggttgcagtaacaataattatgcatccagaaagaactgcaaaaagtgtggcctatccaaggaggaagcagcaatgccagcattgcaaatggcagggatggctatgccagcttatgcaacttatatcgcaagactacagagccttgctgcttctgcttctgcatataagatgaactttgggatggctgccaactcacctttgcagcagcaactacttgcaaatgcaaactggtcctatgggatggctggtagatatgggatgcagtcttctggttggccacttggcaacagcagcccaaatcagtttccaggtgttccaaaggattggcgtaatggagactggctctgcagctgtggatttcataattattcatctcgtactcagtgcaaagagtgtggtgcacctataccatcaggcattccctccacaacaatgaaagctacgacatctgatgcctcttccacattaggaactaagcggttagcctcagaggagctggcaaacgactgtgataataaaaggctaaatccaggaaatgacaattatccactttcaacagcaggtgcaaataatttgtttttgggtattgagcaaggagctggaagcagcaatggccaggctgctttttcgaaatttgactatgggagctcaatgtcattaccatctgggcagggaatgtctggtcttatcgtaaaaggggcaaaatggcgcgacggggactggttgtgcaacaactgcaacaaccacaactacgcatctcgtgcgttttgcaacaggtgcaaaactcagaaagaatctgcagttcaccctggtgtgctatagcttgcttttgctggttcatattgttggactcgtttgttgcagggtatgttgctgcctgttctagctgcttcctcaagactgcagtttgagttttttcggttctgctgggtttttgctgctctcaaatgtttgtctcgatattccattagtgcttgttgaagttcccgatttatttatggtataagcgcttgaataaaatatctctggaaagtactggcctaccgcctaccatctgtttttttccaaatatttttattagttgttgtacaatgaggcaaatggtgatatacttatgttgtactttatgaactctgtaggattagtgcaccaaattaaggttttgtggccatgtttcagtcgtcgggttgaaaaagggaactataccatgtcgtgcgtatggttgtggaaaacactattttgcagctgcaatggttagagatttgaaatatgagggaaaatatgagatgagcctcatgctgttgtgcatcatcgatcagaccactataagtaggactggaaatggatgtctggagatccgaattattcgtatttgctgaaaccgttaatatggatatccgtatctttattcgatttcaatatggatgtcaaatgtatacattcgaatttgatttataatacttttctctatccgattctatatttgtattcgaaaaaaccatgaaacatcttatactatccgtattcgtgaa

SEQ ID NO: 7655 - DNA, 2428 bp, Zea Mays
cgcggcaccgcccgccgtgctgctgttccgttccgttccgttccgttcatctcctccttataatcctcctcctccgcccgtcgcctgccgcaccgcacccgccccggcctcctccgcagtcccatgagccaggccgcgcccgtggcgaaccctgctcgcgccgcgcctgcccattccccctctgccgccggtgcccggagtgcagatccgtctgaccgcgccgccgccgctctcggatatcgctttatccttcgtataattgtattgtcaaactggcacccaccggaatcatatagcctggataaccagcaagctgctctccgtctcctctcatcagtgataaatccaagattctgccagtaaagatgccgatctgtagctgtgaagaaactatccatgagttcgagatgttaacacgcgatgctgggcgtgtacagaaggatacactgaaaaagatcctcgagttgaatgctgatgctgaatatctgaacaagttcggcctcaatggcaggactgatgtagagagctacaaatcctgcatcccgctgtgtgtgcacagtgatcttgagccatacatccataagattgctgatggtgatagctccccactcctcactgggaagcccgtcacctccctttccctcagttctggtacaacgcagggaaggcctaagttcttgccgtttactgatgaattgcttgagaccacacttcaaatattccagacttcatatgcatttaggaaccgtgagtatccaattggaagaggaaaagccttgcagtttatctatggtagcaagcaagtggtaacaaaaggcggcatccttgccacaactgcaacaacaaacttgtaccggagggcacgatacaaggaggggatgaaggatatccagtctcaatgctgcagccctgatgaagttgtttttggctctgacttccaccagtccttgtattgtcacttgctctgtggtctaatatactctgatgaggtccatcaggtgttctcgacattcgctcacagcttagtccatgcatttcaaacatttgaggaggtttgggaagatctctgtgctgacataagagatggtgtcctctcagagaaagttacagtgccatcggttcgtgaagccgtgacaaaaatcctcaagcccaatcctgagctcgctgactcgatctataagaagtgtacgggcctgagcaactggtgacatacgctgttctccctcagaccggttattttgagttcattcctttggaggtggagaatagtgcctcctccattcactacttagaatcagaaccagttggcctgactgaagttgaggttggcaaaacctacgaagtcgtgataactaccttcggaggtctataccgctaccggctaggagatatcgtgaaggtaacgggcttccacaacgcaacaccggagctccggttcatctgccgcagaagcctagtcctgagcatcaacatcgacaagaacaccgagcaagacctccagctggccgtcgaggaggcagcgaagctcctggacgcggagaagctggagatcgtcgatttcaccagcttcgtggagaagtcaagcgaccccggtcgctacgtcatcttctgggagctgagctccgacgcgagcgaggacgtcctgcgaggctgcgcgaactgcctggacctagccttcgtcgatgctgggtatgtgggctcgaggaagatcagagccatcggcccgctggagctgcggattctgaagaggggaaccttcaaggagatcctggatcacttcctgagcctcggtggcgccgtgagccagttcaagacgcctcggttcgtcaacccgttgaacgtcaaggttctgcagatactcagtaggaacaccaccagaagctacttcagtaccgcctatgggctctgataaataagaaacgctgctagtagttccatccatgtaattatatttatataaaaaaatattgcttcactgttctgttctagtctccaggtaaaagaaaacaatctactcatcctagtcctgctggcgccctgctagaatgtctgtaaatccatatgcaagcaaatgcattcagtctctgcctgtgttctgatctttgtgcatagcaagcaaatgcattcacagtctccactccagactccagagtagtagtacgtacacaaatactgtcactgggtattagtgctaatcttttttacttgtcctgacatcagattcagttctacacacatagaaacggacagaagatacatgaaactgaatacgtaaataatcaagcacatatagaacgtcgtggctgcaagagaagatcacaggctgtagttgacgtcgatgaagctgaggatctggtgcacggcgccggcgatgtcctccgccgagtaccttgcctcgccgacgatctatcacacacacatattcaat

SEQ ID NO: 7656 - DNA, 3712 bp, Zea Mays
ctccgctctcgcaatcctgtcattatcactagtccccgccccacctcctctccctgtaaagatttcgttcgttcctcttccgggttcctgatctcggtctcggtccccgattcgacctgtggagtctttcctgcaatctgtagcagtagcacgttgcctcgggaggagtttgtgcgttcctccagaggagccgagtccgtcagtggtcgcttgccactagcgcgaatcacgtccgggttgcgtcctccactccgtgccaatctaattccgggcgcccggggaaggattcgggacggaaggcactggtttctgtgcttccttggattccacggtgaaaccagcctgcgtggtccgcgccggctcccaccgcattccggcgagtcccgagtaacctcgctgtgggggggatggtgtcgcaggctcccatggcaggggcgggcgcgggcgcgggcgccaacctcaccgcggcgctgtgcaggaagagcaaccgcgtcgcgcgggtgctcgcgtacgcgctgctcgagtgggtcctcatcgcgctgcttctcgccgacggcgtcttctcctacctcatatcccggttcgccgccttcttcgggctcgcgccgccgtgcgcgctctgctcccgcctcggcgtcgacagcctcttcgagacccacccccgccaccgaggcgtcggcgccgagcccctgcgccgcttgctgtgcgacgtgcacgccgccgagctgtcgcgcgtcgggtactgcagcgcgcaccgccggctcgcggacgccggggacatgtgcgaggattgcgccgccgcggcggcggcggcgcccgggaaggcgttgctgtcatggatgggccagagcgagctcggcgagcgggacctcgcctgcgcctgctgcggcgtcgcgctcgagagtggcttctactcgccaccgttcttgctcaccgcgtcggcgccccgtggctcagattgtgggcacaaggaagaggaagaggcagccaggccaaatggagacgtggtcttcgtctccgaggaaggtcctgtgatcgagcttttcgacgagaagccatttgtggagggtgactcaatcggcgtcttggcttgtggtgccgaagttgttgccaatgttgagcggctggtgcctcttgaatcaattgactcgttgcccgtcgccatggccaccatgttatctcaatccggtgttgaaggaaaggaagcagttgatcatgatgatgtaaggcagaataacgtggatatggagcacacagttagtaccgatgaggagacaattgtcatgacatctgatgatgacaaggttgatgatgtggttgatcggctgattgatgaacatattgcagccgtagtctttgtgccagcttgtatagaatctacgcctaacgatgggataaatgcaggcaaaacggtggaggcctttgcctttgctgatcatcagtctgctgaggatgacagtggattgaaagataaggatcagaaaatatctgatatatctgaggatgagcaagccgaacaggctactccacaacaggaattgtgtgctatgccgacaaatcctagtgaccatgaaattgttgagaggttagacagaagtattgacttggagcattttccacaggctaagtcaaagcataaaatgaactctatgccagtggaagcttctgagcatgtcactgtaactcagattgaggagaagcaggttcagcaagctgaggtaactcaggagttggattcactaccaatatgttctagggagcaagctgaggtaactcaggctgggttggaacaagattgtggctctgtgccaattgattctggggaacatggttgcctgacttcatatgctcatactgatgttgagcaagctgaggtgaagcagaaagtcacttctgtaacaagagatgttctcgattatgcagcgggcacttttaatgttaacacaaacacatggaaagaagatattgaagaggatccaactgaagctgctctaacggccatatatcaaatttcttacgaacctttgacaaacttagacaagttctctccggatcatagtgtctccgaagaagacagacagcttaatgcgctgactcatatcgaagatatatgtgattcacaggaaccgctggattctaaagcagctgtttctgatgctaaatctgtagattcaggtgttgctactttgtctactgatcttgaaagcacggaattggtgaatgccgatcaactaaaatctgctttggcttccacacgcaagtcattgaacaccctatattttgaacttgaaaatgagaggaacgctgctgctatagctgctgatgaaaccatggcgatgataaaccgcttgcaagaacagaaagctgcaatgcagatggaggcgatccaataccagcggcttatggaggaacagtcagagtatgaccaagaagcactggagaggctgaacgaactagttgtgaagagagagaaggagaagcaagatctggagagagagctcgagctgtaccgccacaaggttcatctctacgaaataaaggtgaggaaaatgtccaggcacaaggctgatgaccagaacggatcgtcgtcaacttcatcgagcgccgaggatagtgacgacctttcacaaagcttctatgaaggtgatgaatcttcccacggtcttaatggaagcaacgggagtattcccacagatgtcgtgctacaagaaactgccagacatctcgttatcatcgatggctctttagctgattttgaggaagagaggctctccatactggaacagcttaaagtgctagaggataagctttttgatctcgatgatgacgatgaatccgatagcaggaagcatttcccagaagaaaaccacttcagcggtgcctcgaacggtttctctgacgacgatagctgctctaaactccgtgacaaaagaagagttgtaacctacagaggaaaggaactccttccgttgttcgacgatgctacgactgtggaagctggaaatgtccccaatggtgacgaggcacatcatccagcagaggctacactggacctcgctagagagcgacataagcttgtgatcgccaacgaaatcgatcaagtgaatgagaggctacaggcccttgaggcagacagggagtacataaaacagtgcgtgagggccttgaaaaggggaggcgaagggttcgatcttctccaggagatattgcagcatcttcgggacctaagaaggatcgagcagcgcggaaggaactctggggagctttcgcctcattacctacatctttacacggactgaagctgcaaagtctcgtgcccaatattgcttgaagatggaaaccataggacaatgataaggggaaaaaaggattgtcgactaataactagcattgtcattggagaggtttcgttgttggttcccggagaggagaaaggagctcctcctggaacagtcacagtctgttcggaaacgccatccggaaggcagatcgcggagcaagtctgtctgcattccaaggtccagggttagtgagctgcccgggtccatgggggtgtgcttgtgggttgtggcggcaatcatggccctgtgcaagcttttaaaagaattcatttatcctgaaaacatgccgatgccagctttgctgccggatacggatagagtgggcttcactagtttttttatatatttcttttttccctcctaaattcttt

SEQ ID NO: 7657 - DNA, 1726 bp, Zea Mays
gccgaattcatcagcctggctcgtccgtcctacgcacgcctccaccatcaagatcgagctgagcctcccttagcttctctctctctccgccatgctcaaacacgaggaaagctagcttaccagcttaattagctatcttcgtcttcctccagtccccggccggcccgccctccttgttcgctacttctctcgtgaccctgtgcaaaccatatactatactatataagtgcagaacatgcatggtgatcagtgactgatcgctgctgagttctggagagctttacagtgcttcttgtttatttagctgctgcgcgctgcctgctccggccggccggccatgcacacgcaccgcctgtgagcctgcctagctgccgacctgcatgtgtccgtcgtgattcatcaaagcaccaccaaatacgctgctgctccacccgcctgatcatggacaaagagcagcaggagagtcacctcgacagcttcgcgccgctggacggcgccgcggcgccggaggaccagcagcaccagcccgcctgcggcggggggcccgagatggtcgactacatgcttggccgccaccacgtgaacgcgcacgcgccgccgtcgccgacgcagagccaagcggtgtcgttcgacaagctcagcttctccgacgtgctgcagtttgccgacttcggccccaagctcgcgctcaaccatccggtggccgcgtccgtcggcggcggcgaggacgcggacgcggacgacgacgacgacgggtacttcttcaggttccagtcgctgccccagcgccatgcggaccgtgaggcggcgggaagcaagacgacggccgaggacggtggaggaaccggcgtcgtcgtctccgagggcaccacgctggtgcagcagcaggccgatcacggccgggcggacaaagccggggaccaggggaagagcggccgccggaagcgcccgcggaccgtgaagaccagcgaggaggtggagagccagcggatgacgcacatcgccgtcgagcgcaaccgccggcgccagatgaacgagtacctcaggatcctcaggtcactcatgccaggatcctacgtccagaggggagaccaggcatccatcataggaggcgccatcgagttcataagagagctagagcagctgatccagtgcctggagtcgcagaagcggcggcgcctgtacggcgggtccggggacgcgccacggccgccggtggtggacgcggcagcgggctccggcggcgcgctaataacgtcctccactcagccgctggcgctgcagccgccgcacctgttccctccgaccccgagccaccctttcccggtggcgggcgccgacgccaagatcacgctggacctggaggcggcggggggcgccgtggtcgacgacgccggcggcgggctccgggaggaggtggcggagaacaagtcgtgcctggcggacatcgaggtgcgcgcgctgggcgccgatgccatgatcaagatcctatcccggcgccggccaggccagctgatcaagaccatcgccgccctggaggacatgcagatgtccatcctgcacaccaacatcaccaccatcgagcagaccgtcctctactccttcaacgtaaaaatcgtcggcgaggcaaggtactcggcggaggacatcgccggcgccgtgcaccagatcctcagcttcatcgacgtcaactacagcctaaccttgacgttcaacgggttgacga

SEQ ID NO: 7658 - DNA, 985 bp, Zea Mays
gtggttggataggaaaaccctaggcgccaataggctggaccaggcctagtacatataaaccctaatacacatatatgcagcaattaatattctaacagaaaggtcttttgttgtcttgttttgagaggtggggaccaaagataaacgtgttatagttgatggaccattcttacacagatcaaagagttgtggcctggacattttcatcgaggcttgtcacactcgatactgttgagatatttactactcatgaatggtttgccaagccaacagtggctttccggtgcaatggagcaaacaaaacatatctgccagatgtaacggaggcgcacacgccatatacctttaagggtgaagaatcatggcagagcttccagaaaagaaatgcaagcgatgtggtttgtatgaggagggcacatttaagcctgatgctgtctttgatgaatgggagatgtgttcgagtgatttcaagggcggaaaatacacccgctttaaggaaggccagttcaatgcaacattcctatgcccaaactgcactgcctctactggacatggaaaccctagaccaagcgaagatttggaaactaagaagacatctattgctgtcatcataatagctagtgttctcgcttcagtccttgtcgtcactgccttgttcgggggcttcaagtattggcagaagaagaagagggagcgagaccaggtgcggttcctcaagctctttgaagagggagatgaccttgaagatgagctgggccttagtaatgaattctaaaatagtgcgtacagtcttacttccgatgttttcagatgtagtttccacgtatgatgtatagaatgtgtgtttttggtgacctcctagtagcttttgcagagggagtgaatcttgcaacagtttgcacaagccccgtaacgtacatatataaaagtgcaaaaatgaatggattcacgtatagccttcaattcttcatcgaatgcttcacgt

SEQ ID NO: 7659 - DNA, 939 bp, Zea Mays
gatttggaggtaccagcacagatgaagacaacagagtattgacagatattttcaaggctaacaaatcacaaggattagcctatggaaggttttacagtgtcattggtggaggcagtcgtcttgagaagaacatattgaaaactgatattatccatcaccttgacagatgtggattgtcattggatgatgtgaagattgaatacaacaagggatatgctccattggccgctttgctgaggttttcttcgaaggcaatgtttaccaccgcaattaggcaagcaaatcagaatcgtctgcacaggattgatgagataagtcgtgaaacatgggatctcaaaaagtccttcgatgggaaagcggtattactgcaaggagtcccacgaaatgccctcgcagatgacatagagcgttttttgtgtggcacgaactttgaacctccaccgtttgaaacctttctaagagctggtgtcccagagcccataagaatgatgctggttaagttccacacaaagaccgatgcgatgaatgccttcatcaccaaaaacaggagtttctgtctgaacagtcaagttagcatgcgtgttcttcagtaactgagtagccagttgaatctcgtgatgtttgccccggctttgtcaaacaaaaagccttttaagtccgatctgaggtctatccattatccacaaatgttgccgcattgtgtgtttctgcaggttatattggactggcagcctgctttaggttttcattcctactagtttgtggtttcagctgtactgcaccgcttttatttcatgagtactctgaaaaatgtaccaccattccgctttacaatgaaataattaacggcacaaacgctaggggttcgaatctgctactgctaccgtgcccattgttaaaagagtgttaaaacagaagcaagcgccaccgatggatccc

SEQ ID NO: 7660 - DNA, 1374 bp, Zea Mays
tcacctgcaccgcgttcgcgtccaagtccaagtgaggccggccgccgttgggcgggcccaggacggctgtagacctgtacatgtcatccaatcaatccgtcacacgattcagactgcattcactcacctccggcggcctcccacgaagaattcgctcgctttccccggttgcccgtcaccactgacgcccgcctcccccgcggcccttcccatcgccgcgtataaaggttcgctgccggcaacgagaagatgcagctcaccgccacctccacgctcgaagctcctcccgaaccggccgcatcgccgccatggcagccgccgctcctgcaagctccgtgaaggaagtgctgccgtctcccctgacctccgcctccgagccccctccccttttcgatggcaccaccaggttgtacgtggcctatctttgcccgttcgcgcagcgcgcttggattgctagaaactacaaggacaagattaagatagttgccatcgatctcgctgacaggccagcgtggtacaaggagaaggtttatccagaaaacaaggtgccttctctagagcacgacaaccaggtgaaaggagagagcttggatttggttaagtacattgacagcaacttcgaaggtccatcgttgctccccgaggatcatgcaaagcagcagttcgctgaggagctgctcggatacactgacgcattcaacaaagcattttactcatgtttagtcgacagggaagatgtgtctgaggaagccgttgctgccttggacaaaatagaagacgccctggggaaattcaacgatggcccgttcttccttggtcagttcagtctggtggacgttgcgtatgtaccgttcatcgagaggtttcagatactctattccaatataaagaactatgacgtcacaaagggcagacccaaccttcagaaattcatcgaggaagtgaacaagatcgatgcgtacacacagactaaactggacccgcagtttttgcttgagcaaacaaagaagcggcttgggattgcttaaagcctgtgaccaaggacgagactttcgccagaagcaccagcgtagtagatcggagctcgttttagtcggttgtgtgcttggatattacatctggtcttcaataaggcatggccttctgtaatggctgtgcttctgaaaataaataaactagttgtccaggtattatatttgctttggtgacgtgtcgatgtcactgtatatatatgaatgggtcggaaagaatgatgatgtgcagtgtgttctgtgcaaatgttgccgagatgaaggatcagtgtccatgtagacattcatgtattgctcatatcgtgacacggcgcatgaaaggtttcggcccctaccacgctca

SEQ ID NO: 7661 - DNA, 2632 bp, Zea Mays
cgccggccggccgtcctctccacctctccattctctcctctcttctccccgctgcattgatacatacatccgtccggaacccatacgctgcacccacacacactgcggccagcagcacagcagagaggggagaggggttgggtggggggataagctttgccgacaccacactgcatccctcggctgcctgaagcaagcaagcgaccgcttcgtcctaggcagcgcgtatctgagctgtcgctgatggatgatagataaagcggtggagcagggtgagagggaggtgctcctcgtggttaccatcgccaccatggccgtgtagtgtacaggagcactgcagcccgaagcccggaagaggtttttcagatacagagagaaagaaagagaagggggtgggcacagcgcaggcaggatgaagtcgagaactgcgacattggcggtcggcatcctcctcctcgtcgcgcttgtggtggtggcggaagccgacaccgacgccggcgatgtcgcggccttggggaatctctacagctcctggaacagcccggcgcagctcaccggctggtccgccagcggcggcgacccctgcggcgctgcgtgggcgggtgtctcctgctcgggctccgccgtcacctcaatcaagctttctggtatggagctgaatggtactctgggttatcaattgtcaagtctacaggctctgaaaacaatcgaatacaggaatctggcaaaaaataacttctccggtaatcttccatactctatatccaacttggtttcacttgagtacctagacgtatctttcaacaacctcacggggaatcttcctttctcaatgggcgctctgtcgaaactttctagcctttatatgcaaaacaatcaactatcaggcacagttgatgtcctcagcaacataagccttgcgacactaaatattgcagacaacaattttagtggcatgatacctcaagaattcagctcaattccaaatttaatagttggaggaaactcatttgtcaatatgcctgcctccccgccatcaactctgaagccacctctggaggaacctcaaggacccgttagcgctccaactagccctgatacccctattgatcaagacgacaggaagatacagacaggtcctcttatagggatagctgttggctcaatagctgctgcctcatgtgttcttttcgtcttggtgttctgcctccacaatgcacgcagaagaaatgacgatgagatcagcgaaccaaaagatcttgtgggttctcttgcagtaagcatagaaacagcatccagtagggaagtcctgaacaacaaccatgaaaatagtgctgtagcaacttcagatctccaacatgctgggaagatgatgatgactccggacagagtactgcatgatacgacgaacggttcttctactgccaaaaggccaaaggttcctgtgacggtgacttcatatacagttgctgatctccaagtcgctacgaatagcttctgtgaagactctctcctaggcgagggttcgcttggtcgtgtttacaaggctggttttcctaatgggaaggtacttgccgtgaagaaggtagacgacagtgccttgctgtctctgtatggaggaggagaagacgccttccttgagctggtctcgaacgtttctcggctgaggcatccgaacatcgtgcccctcacaggctactgcgtcgagcacggacaaaggcttctcgtgtacgagtacgttgggaacggaacgctgcgtgatgtgctgcagcactgcttgtctgacgacgagggggcgagcaagaagctcacgtggaacacccgcgtaaggatagcgctaggcaccgctcgcgccttagagtacctgcatgaggtgtgcatacccccagtggtgcatagtaggaccttcaaggcatctaacatcctgcttgatgaagagtacagcccgcatctatctgactgtgggcttgctgctctcactactgtggtctccccggaagcggttggctcctttggatatagtgctcctgagctcgccatgtcaggaacatacactgcaaagagcgacgtgtacagtttcggagtagtgatgctggagctgctgacaggccgcaagccactagacagctccagagagaggtcagaacagtctctcgtgagatgggcagccccgcagctccacgacatcgatctcctcgccaggatggtcgatccggcgctggacgggctgtacccttccaagtccctctcccgtttcgccgacatcatcgccatctgcgtccagccggagccggagttccgcccgccgatgtccgaggtcgtgcagcagctggtgcgcctgatgcagagggcggccatcataaggcggcaatcggacgatctgggctactcgtacagggtccccgaccgcgacggcggcgcagcagcaggcgacgtcctctgactctgagaggctaggaggagacccaagttggttcacgttttgtttccgtccgtcacctgtaaatgacatttgacatgtactatagggttcggagtgtacctggacttttcgtcagctgcgagtgtcatgtattgtgtgcgctcttgcaagtggtagatatatagatatatttgtactacttattatgaa

SEQ ID NO: 7662 - DNA, 924 bp, Zea Mays
cgtgtaacgaaaactgctgcaaagatgctttaggaaattcttcagcacaatatattctttattatggtttcactgagattcagatgtcaaaacttaagaaaagcgaagcattcactagagaaagggagagagaaattgagcaggttgttgaatcagtcaacgaacttgcacagattatgaaggatctttcagttcttgtgattgatcagggaaccatcatcgatcggatagactacaacatacagaacgttgcagcttcagttgaggaaggttacaaacaattgcaaaaggctgagaggacccagaagaaagggggcatggtgatgtgtgccactgtccttgtcattctgatcttcatcatgatagtccttctgattttgaagaccattttctgacatacttagctatctcattttaatggttgatgaatggtggccaagcacacaccacgctcatctattcatgtgagtgaggattgcaccatgcctgcatatcaagaacgccacaaattcatttgaatagcggcgatacgactcactgatctgaagatggaaccatcttgagtcttggccacaatttttgcatcgttgcagatgtagacatgccctattcatacaggactcttaattttagagagagaaaaatctgaagaggattgtttgacacgtttcaccttccagtttgccttggagcaaccgggttaggctggctgtgtatgcctctgtatagagtgagttgtatcatacatcagggtatcggaaatcagaaagtaggttcagttcctgtgtcatctcttttctgctttatgttgtctgcccttctattttgagctagctttgaagtggcatttcattgtaccatatcctaacaattgttctgacaactttcgcccgggtagtcggatatgcaatgagattttgtgct

SEQ ID NO: 7663 - DNA, 2082 bp, Zea Mays
ccacgtcgcagtccgccacagcgacctctattaaacggcaacaactcatgctgcccccgctgccacacccgccgcttatcatgcgctggcgaaggcgattgagcgagttcagcggctaatagattttcagttttatttccgggagaatgcggggtggcggcggggcttcctggctttcgtttcgcggcgtggtggtggaggaagaagaggcggtggtttcggcgccggaaaagccaatgcggcgggggcggcggaggtggggagcggaggtggacgacggctactcgccgagctccacgggcggcggcgggagcagctgctgcgattccttcggctgcgactcgcctttggccgggttcgtgcgcccagatggtgacccagacacagatctggagacagatgggttggccacttccacctccagtgcttctgcagcctttaccgagcggcaggacgacgaagcggaagaggcgctgtacggggtgaaggaagaggagtgggctcagatacaagaaccagccaagaatccggcattccgtgccaccccagaatgccacaaacagcggtaccggacggatgctgctgttcttttgcatggtaggaaggggtcgaaacagcggccggcctcacttgacctcggtagccctgggttccatggagccacgttttctccaagtttcgtgattggtggtgtggggttgatgaacaaaggacttggagcatcagtcatcaggtcagacgtgtttcatagtcctgggacgccgaactatccgcgccaccgtgcatcagtgttagggtgccataaagggtggagctctgagagagttccacatccttctaaaggaaataggcggtacccaggcagcagcatggcatttccttacagcaatgggaggacattgccctcgaaatgggaggatgcagagaggtggatcttcagtcccaattccagcgacgcgcttggaagaactacggttgctcatgctcggcgaccgaagtctaaaagtggccccctggggcctccaggaagacttggtggacagtattcatctgtttcttcagtgtcattgcttgataatgggagagctggacctattacagcaaattcaccttttgcggctggagtactaatgccggaacatgtttgtgaaggaaaaagtacaaatggaacctattcaagtagaccaattggtaacgaaatcaacattggaagaggagtcaaaatttgtccactgaatggtgggtctcatcctgttcgaacttccagagttcgccagcgattagattatgcagtcgaatcatctgtttcattgcctagcacgcaagaatctgtccaagacgagcaggttgaaatcacagaagattcagcttctactattgcttctataatttctagaaaagatgctgcaacccagaccagtccagagctaagtaggtcctcttcacccaacactagaccaacatttaatggttccttgtcaacagaacaagtgaaagagaaggggagctgtttgtcagatcttgatatcagggatgttcagatggatgatcgagtgactttgactaggtggtcaaagaaaaatgtaacacggtcgtctaacaagaattcaacaaacataatagagtggagcgaaaagacagtggaatcaaaatcttcgtcctggggctttgccaaagcgaagtgcatttctaagattgatagagaggacacagaaattactgcatgggagaatattgaaaaagcaaaagctgatgcagcaattcagaagttagtgattaagttagagaagaaaaggtcatcttcgcttgataagattttgaacaccctcaaatctgctcaaaggaaatcccaggtgatgcatgagcatgagcgtgatgcagtaacagcaaaccaagatggaaaaggctctaggaaggcaaaaaagagagcacaactcagcaagaatggccaaatcagttcactgagtggctgcttcacttgccatgctttctgatacatgtaattccaaaattgacatctataccacactctttatattacatcaggcaatacagcgccatgttgacagcaacgaaattgtg

SEQ ID NO: 7664 - DNA, 2500 bp, Zea Mays
ctcagttcacctcacctcaccggctcaccgcaccttgtgtcagtcaccctcctcgagatgccgttcctgcctccacgtcgcagtccgccacagcgacctctattaaacggcaacaactcatgctgcccccgctgccacacccgccgcttatcatgcgctggcgaaggcgattgagcgagttcagcggctaatagattttcagttttatttccgggagaatgcggggtggcggcggggcttcctggctttcgtttcgcggcgtggtggtggaggaagaagaggcggtggtttcggcgccggaaaagccaatgcggcgggggcggcggaggtggggagcggaggtggacgacggctactcgccgagctccacgggcggcggcgggagcagctgctgcgattccttcggctgcgactcgcctttggccgggttcgtgcgcccagatggtgacccagacacagatctggagacagatgggttggccacttccacctccagtgcctttaccgagcggcaggacgacgaagcggaagaggcgctgtacggggtgaaggaagaggagtgggctcagatacaagaaccagccaagaatccggcattccgtgccaccccagaatgccacaaacagcggtaccggacggatgctgctgttcttttgcatggtaggaaggggtcgaaacagcggccggcctcacttgacctcggtagccctgggttccatggagccacgttttctccaagtttcgtgattggtggtgtggggttgatgaacaaaggacttggagcatcagtcatcaggtcagacgtgtttcatagtcctgggacgccgaactatccgcgccaccgtgcatcagtgttagggtgccataaagggtggagctctgagagagttccacatccttctaaaggaaataggcggtacccaggcagcagcatggcatttccttacagcaatgggaggacattgccctcgaaatgggaggatgcagagaggtggatcttcagtcccaattccagcgacgcgcttggaagaactacggttgctcatgctcggcgaccgaagtctaaaagtggccccctggggcctccaggaagacttggtggacagtattcatctgtttcttcagtgtcattgcttgataatgggagagctggacctattacagcaaattcaccttttgcggctggagtactaatgccggaacatgtttgtgaaggaaaaagtacaaatggaacctattcaagtagaccaattggtaacgaaatcaacattggaagaggagtcaaaatttgtccactgaatggtgggtctcatcctgttcgaacttccagagttcgccagcgattagattatgcagtcgaatcatctgtttcattgcctagcacgcaagaatctgtccaagacgagcaggttgaaatcacagaagattcagcttctactattgcttctataatttctagaaaagatgctgcaacccagaccagtccagagctaagtaggtcctcttcacccaacactagaccaacatttaatggttccttgtcaacagaacaagtgaaagagaaggggagctgtttgtcagatcttgatatcagggatgttcagatggatgatcgagtgactttgactaggtggtcaaagaaaaatgtaacacggtcgtctaacaagaattcaacaaacataatagagtggagcgaaaagacagtggaatcaaaatcttcgtcctggggctttgccaaagcgaagtgcatttctaagattgatagagaggacacagaaattactgcatgggagaatattgaaaaagcaaaagctgatgcagcaattcagaagttagtgattaagttagagaagaaaaggtcatcttcgcttgataagattttgaacaccctcaaatctgctcaaaggaaatcccaggtgatgcatgagcatgagcgtgatgcagtaacagcaaaccaagatggaaaaggctctaggaaggcaaaaaagagagcacaactcagcaagaatggccaaatcagttcactgagtggctgcttcacttgccatgctttctgatacatgtaattccaaaattgagaatcaggatccgacaaattccttcgcattccatgcaccaccttcatgttccccacatcaaaatctgggtgaagttcggagatccatcacatatcagtacataatatgatgatcccacagctggagattagacagagatctttcgaagatgctagctgcaggctccagctgctatgatagggacaatgccaaggggacaaataaaatgcagcacgaaggaaaggaggaacagtactgcgtacaccccatgtgcccgggtcgatgcctcctttatcattgtgctctgccttgtagctaggcactgtgaggctctgattgcaatcttgttgccaaagctgtatggatcatactaagagcaattccattgcacccaagggacagcaaaatcttgaggtcgggacggtgaggaggacgtgatgggg

SEQ ID NO: 7665 - DNA, 1971 bp, Zea Mays
gtactgttcctttgccagcttgcctgctgccaccagtggcacctgcaagcgaacctccacgcgagctgcccggccccggctgcccctgcgccctgcgcccctgcccctgtccctgccggccccttccaaaataaagcgggagggagatgcgctgagccggatggcggcccactcgctctcgctctacctccccgtcgtcacgcgctcgcttgtgcccctagcgtttcgccacctcctgctcccgcaccgcctccggctccggctccggctccgcctcgtctccgccgtctccccatcccgggcgcggcccctcggcctcggcgcccgcccgccccgcccccacgccgcacccctcggctacggaggccgagtggtggactggaccacagagccatgtcaagttccacaaattcaacagtggccacggagttgtcggtgtctgagaatagcagggaaattgagccgctaccttttgtgaatgacaaacatggaggcgtcatcattgagatgaagactccaatggatcctggagtgttttcagcttacttgaaagcagcgctggcaaaatggagggagcaggtgacccccccccccttctctcagcatcaatgttaccatttatcctatcatgccaagtaaatatcccaatatttaagttttgaactgtggacgacatacctcaaagatccatcaatccatgcaagcatctttatatggtaggtttggtaggtgaaaaaaatggtgctgtgcatgacaactattttaaaggtttaaatacactgtatatcttctatgagccttgaagagccaaccatattgcaaggcatgtgacaatagacatgtggagattactgtacatgtacatcattattttcaatctcagttattcatgagtacctcaaggagagatgtggttacaaatgcatagcctgcacttgtcattgaaaagagctttacatctattactgtactttcctcattgtagggaataagaggtgtctggatcaaattacccatcaccctttccaaccttattccaacagttgtagaggaaggtttctggtaccatcatgcagaggaaacttacttgatgcttgcgtactggcttccaaatacaacacatacactaccagtaaacgcaacccaccgtgttggtgttggagcttttataatgaatgacaaaagagaggtcttggttgtacaagaaaagagtggtgtacttcgaggcctaggtgtgtggaaatttccaactggcgtagttgaaccgggggaagatattaacgttggagccataagagaagtaaaagaagagaccgggattgatgcagaatttgttgaagtgctggccttcaggcagagccacaaagctttttttgataaatcagatctatttttcgtgtgcctgctacgaccgctgtcatatgacattacgaagcaagactcggaaatagaagcatgccagtggatgccagtagaggaatttgcagcacaaccatttgtccagaaacatgagcttgtgaagtacatcctcgaagtaggcctggctaaagttgacaagaaatatgcagggttttcgccaatctccataaaatcggcgtttacagacaaattgtccttattttacatgaaccggagggacctggacaaagcctcaggatagagtaatatgtaattaaacacagggaattcaagatagttgaaatttcagttctggtatgtaaaagcaggccaagtcatattcatacttgattattttgttaacaaattggaagtttcgggcatccgacacttgtgatttttcgaccatatgtcgtctgctacacatctgtgtttcaaaggagtgttgcaatccaaaagtagagatgaaactgttgcaatctaattgtaggtctacagacaataaaatactgttttcctttattatatactccccttttgtcgtgaaatatatctaaatgatttattaataaa

SEQ ID NO: 7666 - DNA, 1974 bp, Zea Mays
gtactgttcctttgccagcttgcctgctgccaccagtggcacctgcaagcgaacctccacgcgagctgcccggccccggctgcccctgcgccctgcgcccctgcccctgtccctgccggccccttccaaaataaagcgggagggagatgcgctgagccggatggcggcccactcgctctcgctctacctccccgtcgtcacgcgctcgcttgtgcccctagcgtttcgccacctcctgctcccgcaccgcctccggctccggctccggctccgcctcgtctccgccgtctccccatcccgggcgcggcccctcggcctcggcgcccgcccgccccgcccccacgccgcacccctcggctacggagggagaaggccgagtggtggactggaccacagagccatgtcaagttccacaaattcaacagtggccacggagttgtcggtgtctgagaatagcagggaaattgagccgctaccttttgtgaatgacaaacatggaggcgtcatcattgagatgaagactccaatggatcctggagtgttttcagcttacttgaaagcagcgctggcaaaatggagggagcaggtgacccccccccccttctctcagcatcaatgttaccatttatcctatcatgccaagtaaatatcccaatatttaagttttgaactgtggacgacatacctcaaagatccatcaatccatgcaagcatctttatatggtaggtttggtaggtgaaaaaaatggtgctgtgcatgacaactattttaaaggtttaaatacactgtatatcttctatgagccttgaagagccaaccatattgcaaggcatgtgacaatagacatgtggagattactgtacatgtacatcattattttcaatctcagttattcatgagtacctcaaggagagatgtggttacaaatgcatagcctgcacttgtcattgaaaagagctttacatctattactgtactttcctcattgtagggaataagaggtgtctggatcaaattacccatcaccctttccaaccttattccaacagttgtagaggtttctggtaccatcatgcagaggaaacttacttgatgcttgcgtactggcttccaaatacaacacatacactaccagtaaacgcaacccaccgtgttggtgttggagcttttataatgaatgacaaaagagaggtcttggttgtacaagaaaagagtggtgtacttcgaggcctaggtgtgtggaaatttccaactggcgtagttgaaccgggggaagatattaacgttggagccataagagaagtaaaagaagagaccgggattgatgcagaatttgttgaagtgctggccttcaggcagagccacaaagctttttttgataaatcagatctatttttcgtgtgcctgctacgaccgctgtcatatgacattacgaagcaagactcggaaatagaagcatgccagtggatgccagtagaggaatttgcagcacaaccatttgtccagaaacatgagcttgtgaagtacatcctcgaagtaggcctggctaaagttgacaagaaatatgcagggttttcgccaatctccataaaatcggcgtttacagacaaattgtccttattttacatgaaccggagggacctggacaaagcctcaggatagagtaatatgtaattaaacacagggaattcaagatagttgaaatttcagttctggtatgtaaaagcaggccaagtcatattcatacttgattattttgttaacaaattggaagtttcgggcatccgacacttgtgatttttcgaccatatgtcgtctgctacacatctgtgtttcaaaggagtgttgcaatccaaaagtagagatgaaactgttgcaatctaattgtaggtctacagacaataaaatactgttttcctttattatatactccccttttgtcgtgaaatatatctaaatgatttattaataaa

SEQ ID NO: 7667 - DNA, 1093 bp, Zea Mays
catggtacttgaaattcgacgtggaatcgtatgtgggtttagcatgacttggatggagctggatattggtgccttggctaaagtcgtaggagataatgcgacttcagaattttttttaaatgcttcgaaagcacgtcatattgcaattgactctattttgtggaactctgagatggaacagtggcttgactattggcttcctggtgatgcagactgtcaggaagtacacgaatggaagcctaactcacagaaccgcaacatatttgcttccaacttcgttccgctgtggctaaatgcataccattccgagtcatggcgagcctcaaggcatctggattacttcatgccgcagggatagcaacttccctgacaaacacgagccaacaatgggatttcccgaatggatgggccccactgcagcatcttatagctgaggggctgctgcattctggatcagaggccaaaaaactagctgaggacattgctacgaggtgggtgagaacgaactacgccgcttacaaagcaacgggtgcgatgcatgagaagtacgatgttgaggcttgtggagaatctggaggcggtggagaatacaagccccagactggttttggctggtccaatggcgtggtgttgtcattcttggaagaattcgggtggccagagggcaaggaaatagcttgttgagcggcgaagcgctcacgacagggtggatctggtcttgccggagagcaatctggttaggcatcgttcatgtcacacatgtctagctacgagagtggcgcattgccttctgcagttcgtcaagtgcgtttgtgtgttcttgtttgcttttagttgcgactaggctgtagatccttcttgtatcacaacaatatatgtactgctactgtaccggccccggcctcttgtttaatctgaaatgctcattgtatatcctcttacgaaacgcaaacacgtgctttggcacgttcgtcgtcgaaaagagaagagaatataccattttgctctcttgaatacaaaatcagtgcatcgttctagatctcgcccacagggcgtggactggcagactgttggccccttttctgttcaaata

SEQ ID NO: 7668 - DNA, 1869 bp, Zea Mays
ctccttactactatatttaagttttggacgaaatggtagttctagatcacccaccggatcacgtacaataatccgtggttttttttccattggggtttgggaggggcaaattgatgaatccaggtcctgtcgtcctgacatggagttcgatagtacgtgttcttctcccgttagttgtcgctgctgcggtcccacataggattgctggtgagcaaaatgtacgacacggcaaagactattgtgcttaaccttgtatacctgttggaaaaatatggtttcgttccaaatggtgcaagatcctactacactaaccgaagccaaccaccacttttgagctccatggttttagaaatatacagggcaactggtgatgtggagtttgttaggacagtattccactctctgcttaaagagcatagcttctggatgtcagagattcataatgttgctatagcagacaatcatggtcgggtccataatttatctcggtatcaggccaggtggaacaaacctaggcctgaaagtgcgacaattgatgaggaactggcttcgaagttgaattctatggcagctaaggaaaaactgtactgcgaaattgcttcaacggcagaatcgggatgggatttcagctctcgatggatgaggtttggatgtttgttatccttaaaaaggaactgacgagctaacagttctgctgctttcgcactggttaaaacaagaattctactgacatgacaacattggcaaccacttacataatacctgtggacttgaacacatttctttttaagatggagctggatattggtgccttggctaaagtcgtaggagataatgcgacttcagaattttttttaaatgcttcgaaagcacgtcatattgcaattgactctattttgtggaactctgagatggaacagtggcttgactattggcttcctggtgatgcagactgtcaggaagtacacgaatggaagcctaactcacagaaccgcaacatatttgcttccaacttcgttccgctgtggctaaatgcataccattccgaattcgtacgctttgctgatgaggcaaaatcaaacagagtcatggcgagcctcaaggcatctggattacttcatgccgcagggatagcaacttccctgacaaacacgagccaacaatgggatttcccgaatggatgggccccactgcagcatcttatagctgaggggctgctgcattctggatcagaggccaaaaaactagctgaggacattgctacgaggtgggtgagaacgaactacgccgcttacaaagcaacgggtgcgatgcatgagaagtacgatgttgaggcttgtggagaatctggaggcggtggagaatacaagccccagactggttttggctggtccaatggcgtggtgttgtcattcttggaagaattcgggtggccagagggcaaggaaatagcttgttgagcggcgaagcgctcacgacagggtggatctggtcttgccggagagcaatctggttaggcatcgttcatgtcacacatgtctagctacgagagtggcgcattgccttctgcagttcgtcaagtgcgtttgtgtgttcttgtttgcttttagttgcgactaggctgtagatccttcttgtatcacaacaatatatgtactgctactgtaccggccccggcctcttgtttaatctgaaatgctcattgtatatcctcttacgaaacgcaaacacgtgctttggcacgttcgtcgtcgaaaagagaagagaatataccattttgctctcttgaatacaaaatcagtgcatcgttctagatctcgcccacagggcgtggactggcagactgttggccccttttctgttcaaata

SEQ ID NO: 7669 - DNA, 2590 bp, Zea Mays
atccaaacagctttcaaggagaagcgtacagtccctgctatacagctctcgtcggggtcttctcccccttcggcccttcccccctccctgcgcgccatggaggcccaggagatcgccgctgcagcgcgccacttctgcgccatggaccccaaggccgtgaagatgcgccgccacgcctttcattttcaccattcggggtcgaccacgctctcggcgtcggctctgctcctgccgcggggcgctttagcggagccgccgctacttctcgaccatatctgctcggcccacgggcacgcggcaggagacgtcgcgctcacggctgcttccctcgtcgagccgttcctggtcgcggagcagcgcaataactccggcgaggagcttcagccgaggttggttccggagacgcgtcttgatgtgtttgttgagtatgagttggggaatgctcaagatgggaagtctggacctccgcggtggcttccagctcgactgcttgccatggttgatgtcccaacagctgctgtttctgctttatccttattgagacatgacgattcattcatcagaaggccaacttgggatgtaggctggtcattggctgatgctaatcagaaacaggttgaaaatgacagcagatcttccctcgagtctaacaggaataattcatctttggagtcagtagactcattgatgttggccaagtctgccacaagaattgctattctaggaatttcaacctccaatttaaatgatgcaagacgtatcaatgtttcagtgatgcaacaacgaggggaccctttgcttatagtaggatctccatttggcctcatgtcacccttccatttcttcaacagtgtatcagttggtgctgttgcaaattgccttcctccatgcactgcaaggagctcattactgatggctgacatgcactgtctccctggcatggaaggcgctccagtgtttgaccaaaattcttgcctcgtggggctgctgatgaacccattaacacagaaaggcagcaatatagaagtccagctcgtgattacatgggatgcaatatgcacggaatggaacagcaaaaaactggaggaaattgaacgacccccaagaaaactacctaatgacaaaaatacagatagtaaatctatggaattacggcatgtatataactatgtgagggttttctcttctacggacaacaaaactaatcagcattgcatatcaccccgttcgctcagagaggctatatctgcagttgttcttgtcacggttggtgatacgtcttgggcttcaggtattgttctgaacaaaaggggtttagttctgacaaatgctcatctcttggaaccttggagatttggaagaacttcaccttcagatttacaagcctcgttcgctggagaacatctcaatgctggagaaaacaaatcattgcaaccacaacaaggcaaaatttccaatgaagatgctgtcaagcataaggtttcgtcatttaacttgggtttcaaaagagggaagagaatatctgttcgtttggaccatgaagagagacagatatggtgcaatgctagtgtggttttcatctcaaagggtccacttgatgttgcattgcttcaaatagaaaaggttccagttgaattaaatacaatcagaccagaatttgtttgtccaacagcagggtcgcctgtttatgttgttgggcatggcctttttggaccccgatcaggcctacactcttctctatactcgggggttgtgtcaaaggttgtccaaatcccagcaaatcaactttctcatctggcccgtgctgaggctgacaatatggacataccagtaatgcttcagacaacagcagcagttcatccaggagccagtggcggcgttcttgttaatacacatgggctaatggttgggataataacaagtaatgctaagcatggtggtggaagcacaatacctcatctgaatttcagcatcccctgcaaattactggttgcagtcttcgagtattcagcaaatggaaacctcgtggttttggagcagttggacaaaccaaatgaagtgctctcatcagtttgggcattggcaccatcatcatccccatttgtcaggagctccccagaaaaaggcaaagaggaaaaggtcttggagttctctaagtttcttagtgacaagcaacaagctctgaaatctaacgtagatctgaaggaactatttaggttcttcgtttggttattcactggctccgttcctaggttgtgctacagaagcctatctttcaggagttggttttggctacctgacaacgtttggagcaaatggtcaggttgttttttacctaggctcgcgggtggcaatctagtcttaggattgatttctactagagttattaggttgttagtcttctttagactgtgtgcatctagcgcgatgtagaagttttgttgtcaagaaagttgtgacttatggttatcttgatgcaataaattttctcttctcgaaaaaaatgatgatgccgctgggaatgtaataaacttatataggaacagtttttacaattgaaaatgtcaattaccaattcttgtactagttg

SEQ ID NO: 7670 - DNA, 510 bp, Zea Mays
agaatgacattgaagacatccaaaagcttcaagctggccctcccttggatgaaatgtctattccatacattccgaggaacttgttacacgcaattgagtatctacattctgagggactagtttggaatcgagggccacaagttaaagcatcaggtcaatggtcccgccaacaattaaaccagatggcggattggagcttgatgttgggatgatgcatgcacctttcaagtttcagaatgttgtcctcaaatgcagcttgtggttgttgaacctattctacttgtttttggatttaagttatagtttattaaacatgtttgatgtttaatacttgtgtcggatgatttatgcttcaattatgtggatgctagaaaaaaattgtatatactcatgttgtttcatgaaattgtatgcacgatttggtttgaattcagttgaatgcagtttttttggtttgaattcagatgaatgcagtttttataattaatgatgaactaaaaacataacaaa

SEQ ID NO: 7671 - DNA, 1834 bp, Zea Mays
ctatatataaataccgcccaccaacgtctggtggtatcaaagaatctcctctatctctggcagccgcatcgtctcaatctcagtcactcccggacacgcgcacgagccaccccgcagccaaccaaccaacccatggacgcgggcggaacgccgccgctgccgctgctcctcctggccgcggcggccgccctgctgggcgcggcgctcgggtggctgctcctggcctggcggtcggcggcgaggccggggcggctgccgccggcagcacggggctgccgctcatcggggagacgctgcgcctcatcgcggcgtacaagacgccgaacccggagccgttcatcgacgagcgcgtggcggcacggcagcggggtgttcacgacgcacgtgttcggcgagcgcaccgtgttctccgcggacccggccttcaaccgcctgctcctggccgccgagggccgcgccgtcagctgcagctacccgtcgtccatcgccacgctgctgggcccgcgctcgctgctcctcaccgccggccccgcgcacaagcgcctccactcgctcacgctcgcccgcctcggccgcccggcctcgccgccgctgctggcgcacatcgaccgcctcgtcctcgccaccgtgcgggactggggccggccaggcgccggcgccggccccgccgccgtcgtccgcctcctcgacgaggccaagaagatcaccttcaacctcaccgtctggcagctcgtcagcatcgagcccgggccctggaccgagagcctccgccgcgagtacgtcaagctcgtcgacggcttcttctccatccccttcccattcgcctacctcctccctttcaccgcctacggccaggccctcaaggcgaggaagaatgtggctggagctcttcgggaggtgataaggaagaggatgggcgaggaggccggaactggccctggcgccggtagaaatggggagaagaaggacatggtggaggagcttctggaagcagagggtgggagcttctcggtagaggagatggtggatttctgcctgtctctgctggtggctggctacgagaccacctccgtgctcatgacgctcgccgtcaagttcctcaccgagacgcccactgcactggcgcagctcaaggaagagcacgacagcatcagacacaggaaaggcaaggacgagcagcctctgcaatggagcgattacaagtcgatgccgtttacacaatgcgtgatcagtgagacgctgcgcgtggctaacttgatcagcggggtgttcaggcgggcgaacgccgacatccatttcaaaggtgtttctatcgtcgtcttcaagctttggtaccagctgggacattgaatcttcgcgtcgttccgagccgtgcacctgagccccgagcactacgagaacgctcgcgccttcgacccctggagatggcagcagagcaagaaggagggagtacgagtagtaggccaggacgcgcagcaggggggcagcgtgttcactcccttcggcggggggcctcgcctgtgcccgggccacgagcttgcccgcgtggtggtctccgttttcctccaccgtctggtgacgcgcttcagctgggaagaggctgaggaggacagggtcgtcttcttccccaccacccgcaccctcaaagggtaccccatcatcctgcggcggcgaccgggttgggatgtctgacctcatcatgttacaatagagtcgatccatctatagttgttaccctcatctctctctctctctgtctgtctgtaataacactactatctaatataaacaagcatctccgctctcttctgttcaatgcatgcgcgctgtgctt

SEQ ID NO: 7672 - DNA, 3779 bp, Zea Mays
cccgtttccaaaaatttggccccctctctctctatctctctctctcgcacatctcacattctcaccaccaccacctcctcctctctctcccatctccaatggcggccgccacccacacctccccttccggctgctccgcctccggcaagccctagccctaggcaggctgctccactcccccacgcacacaccacacttctatggccgcgctactcgcgttcctcctcctcctgctgctgctgctctccgggggcgccgccggcgacgacgtggcggcgctgctcgagttcaagaagggcatcgcggggcgagaccgggacagggtgctggggtcctggtcgcggcccgcgacgaccgaggccggcagcggcggcgggtgccccgcgtcgtggcgcggcgtggcgtgcgacggcggcgcggtggtcggcgtggcgctcgacggcctcggcctggggggcgagctcaagctcgcgaccctcgccggcatgcgcgcgctccagaacctctccctcgccgggaacgccttctccggccgcctgccgcccggcatcggctccctctcctcgctgcgccacctcgacctctcccggaaccgcttctacgggcccgtcccggcccgcctcgccaacctctcgggcctcgtccacctcgacctctcccgcaacaacttcacctccgccttccccaccgacgggatccagcagctgcagaacctgcgccgcgtcgacgtccgcggcaacagcttctggggcaacgccaccgacctgctcgccaagctccgcaacgccgagcacgtcgacctcagcgacaacctcttcacggggaccatcgatttggacctccgcagcctctccagcatcgggaacacggtcaggtatctcaacctcagccacaacaacctggacgggggcttcttccggaacgagacggtgggcgcgttcaagaacttggcggtccttgatttgagcaacaacgggcttgctggcacagtgccgaggctcgatgcgtggttctcgctcgagtttttcagcgttgccgggaatgggctattcgggatgatgcctgagacactcctccagaattccatgcggcttgtcgaggttgatctcagcaggaacggcttctcaggatttctgcagtcaagaaattgacatgctatttcaatgctatggcatgggatcgactattgtgaatgcatatctcgatgtttgaacatttaatgttttagtaatatgacaacttgccatggtcattgccgattgtgaattctacgactttgaaggtgttgaatctctcttcaaatgtcttatcaggatcattaccagccaccatgggcaaatgtacctcagttgatcttagtgggaacctgttttcaggggaattagctatattacgttcctgggatgggattgttgaggtcattgacttgagctcaaacaaattggtgggaagctacccaaatgatgcctcccagtttcagaacttagtgtcactgaaattacgaaacaattcattgtcagggtctctcccttcggtgttgggtacctatcagaagttatctgtccttgatctgagtcagaacaccctcgagggatctgtgttgcctactttcttcatgtcaccaactttgactgtgttaaatctttctggaaataaattttctggaactattccatttgagagcacccattcaacggaatcaatacttctttcatctcaaccaggtctcaggattgttgatctgtccagcaattctttgactgggccattgccaccagatatctcgaacctgcaaaaacttgagttcctcattcttatgatgaatgaattatctggggagattcccagtgagataagcaagcttcaagcactggagtatattgacttatcacacaaccacctgacaggcagaattccggatatgcctcaaaatggcctgaaggtgttcaatgtatcttacaacaatctacaaggaactgttcccaaaagtatcgaaaagtttcctttatcttgcttccgacctggaaatgacatgttagttttcccagatggcctccctgctggaaatgatgattacaccggagtttctcagggccaaacatctcatgtacataaggctggtgttcgagttgctcttattattggttgcattggagctgttttgctagttatcttcatagccctagcattctatgtggtcaggtctcaagagctttgcggaagaaatggatttagaagtcagatcactatcagggatctgaaggggagaataagccctccaaatctgttcaagcccccgaaagataatgtgataccaagtaaaacaagtttctcaaatgatcatctcttaagagccgcagctagatcgatgtctgcccagaaagagttattggctgaagcctctgttgaatatggctacactgatccaaaggaagttgccgagtccacaagtttaggtgtgaccgagacttcttctgcaatccaggctcaggagtcttctccacggtctgcattgccaacatcgccacattttgctgattctagattccttgaggaacctgttgcttttgaagtatactctccagaccggctggctggagaattgatcttcatggacagcactttggttttcacagctgaggatctgtcacgtgcaccggcggaagttcttggaaggagcagccatggaacaacgtataaagctgttctacaaagcgggcatgtcctaacagtgaaatggctgcgtgtcggtcttgtgaagcataaaaaggagttcacaaaggagataaagaggattggcactatcaggaatccaaatataatttcatggagagccttctattggggccctaaggagcaagagagattaattatttctgactatgtcaatggtgatagcttggcactttacctttatgagtcgactccaagaagatactcccgcctatcggttcctcagcgtctcagaatcgccatcgacctagcccgctgcctccagttcctacaccaggagaagggcttgccgcacggcaacttgaagccaactaacatattcttggctggtcctgacctctctccaaagctggtggactacggcctgcacaggttcatgactccaagcggcaccgccgagcagatactgaatctaggagcgctagggtaccgagccccggagctggcgaacgcggccaagcccgcgcccacgttcaaggcggacgtgtatgcgttcggggtgatcgtcatggagatgctgacacggaggagcgctggggacatcatctcgggccagtccggcgcggtcgacctgaccgactgggtccagatgtgcagcagggaagggcggggcactgactgcttcgaccgagacatcgccggcctggaagagtccccgagggtcatggacgagctgctggcggtctcgcttaggtgcgtcctccctgtaaatgagaggcctagcatgaagacggtctgcgatgacctgtgctccataacagcgtgagtgagtttccccctcccccaatgtacatgtaaccgatcaattttccgcccgttggtcctgattttttctctatcccgtgggggttccagagccttgtagacagggcttgtttgatttgtaactgctagtgtaaagaggattcgatccacccattgattgattgatatcagccattgccgtctttcttcgtgagttgggggcaccagtgtcttatctgttcactggtcgagctcttcacgctggacatttccccagtgagttatgcagctgatctggtgct

SEQ ID NO: 7673 - DNA, 1752 bp, Zea Mays
aagcaaagcgttatccatcccgtccggacacgccaaccgctcgctcccttgcgcgcgactgcgctaccgccggcgccgccgcgtcggcattagcttgccgcgcgatggacatgtgtgccccacgccgcctgctcctcttctcactccccaccccgaagctctctccggagcatcctttgttcaggcaacggcgcaggggcaggacctggcccggcatcgctcgctgcgccactgaggttggcactggatggggaggcatcgtcgaggacgacctttctgagctcctgcagattctcccgagagatttgcgagataatctacagaatgagcctagaaaggaccaacttctggaggtcattctggatttgggaagacgaccagaggcacgattccttggtgactccggtggccaatatctacgggacagtgagatctcacaaaaagagttggaggatgctcagaaggctgtaggagagtttggaggtgacaaccgtgcaggaattgaaggtactttacataggatatctgctataaggagtaggaaaggaatggttgttggtttgacctgtcgagtcggccgagctgttactgggcatgttgacatggtccgtgatctcctaaattacaaagaaagtatcctatttttgggaaggcctggggtcggcaagactactgttatgcgtgagattgcgcgtgttttagcagatgaatttcagaaaagagtggtaattgtggacacaagtaatgagattggtggggatggggatgttcctcatgctgcgattggtggagcaagaaggatgcaagtacctgaaccatcaatgcagcatagggtgatgattgaagcagttgaaaaccatatgcctgaggtggttattgtagatgagatcggaactgaagcagaagcacaagcttgtcgatcaattgcagaaaggggtgttatgcttattggcactgcccatggagaacgacttgcaaacatcattaagaacccaaccttatctgacttgattggaggtgtagaaactgttacccttggagacgatgaggctcgtgctcgacggagtcagaaaagtattctggagaggaaagctcctccaacattccctttccttatcgagatgagggagcggcattactgggtaacacatcggacagaaaggagcgtagatatgctactgcatggtaagaagccgctggttgaggttaggaaaagggatagcgagtttcaggttgtaattgaaagatgggcaacatatgatggcgatggactctgaacttgaaaccctgtcgtcataattgcttctatcaaagttcttaatttagtacttgatgtttctgtggacaagtgtgatctacactaccaagcctcttgttctgagtggattgcatgggcgaacattcgactgacaagtgacaactatccgaagcctgttcttacactgaaggcagcccacgaagcaattttgacatttcagctactttttagcggtcgaaaattgatgtcaattctaatgtatatatattttcctgtaagagaaggaacctaatgtatgtcagtgcttctaaattgtatgagatgtgtacatatgcatatgcatatccttattgttgttaatatactcattcccccttttctttcttttttattttcccctttgatttttaaacattggtgaactgaggtcctctattttactatgtatgtgagtattcaatgttttctctaagtgttaatggtgcatgcaatat

SEQ ID NO: 7674 - DNA, 1817 bp, Zea Mays
ctcaggtttagttgtgggaagaaaaagggaccgcgcggagtggcgaaagggtaagcaaagcgttatccatcccgtccggacacgccaaccgctcgctcccttgcgcgcgactgcgctaccgccggcgccgccgcgtcggcattagcttgccgcgcgatggacatgtgtgccccacgccgcctgctcctcttctcactccccaccccgaagctctctccggagcatcctttgttcaggcaacggcgcaggggcaggacctggcccggcatcgctcgctgcgccactgaggttggcactggatggggaggcatcgtcgaggacgacctttctgagctcctgcagattctcccgagagatttgcgagataatctacagaatgagcctagaaaggaccaacttctggaggtcattctggatttgggaagacgaccagaggcacgattccttggtgactccggtggccaatatctacgggacagtgagatctcacaaaaagagttggaggatgctcagaaggctgtaggagagtttggaggtgacaaccgtgcaggaattgaaggtactttacataggatatctgctataaggagtaggaaaggaatggttgttggtttgacctgtcgagtcggccgagctgttactgggcatgttgacatggtccgtgatctcctaaattacaaagaaagtatcctatttttgggaaggcctggggtcggcaagactactgttatgcgtgagattgcgcgtgttttagcagatgaatttcagaaaagagtgggcaggtaattgtggacacaagtaatgagattggtggggatggggatgttcctcatgctgcgattggtggagcaagaaggatgcaagtacctgaaccatcaatgcagcatagggtgatgattgaagcagttgaaaaccatatgcctgaggtggttattgtagatgagatcggaactgaagcagaagcacaagcttgtcgatcaattgcagaaaggggtgttatgcttattggcactgcccatggagaacgacttgcaaacatcattaagaacccaaccttatctgacttgattggaggtgtagaaactgttacccttggagacgatgaggctcgtgctcgacggagtcagaaaagtattctggagaggaaagctcctccaacattccctttccttatcgagatgagggagcggcattactgggtaacacatcggacagaaaggagcgtagatatgctactgcatggtaagaagccgctggttgaggttaggaaaagggatagcgagtttcaggttgtaattgaaagatgggcaacatatgatggcgatggactctgaacttgaaaccctgtcgtcataattgcttctatcaaagttcttaatttagtacttgatgtttctgtggacaagtgtgatctacactaccaagcctcttgttctgaggtcgtacgtggattgcatgggcgaacattcgactgacaagtgacaactatccgaagcctgttcttacactgaaggcagcccacgaagcaattttgacatttcagctactttttagcggtcgaaaattgatgtcaattctaatgtatatatattttcctgtaagagaaggaacctaatgtatgtcagtgcttctaaattgtatgagatgtgtacatatgcatatgcatatccttattgttgttaatatactcattcccccttttctttcttttttattttcccctttgatttttaaacattggtgaactgaggtcctctattttactatgtatgtgagtattcaatgttttctctaagtgttaatggtgcatgcaatat

SEQ ID NO: 7675 - DNA, 1525 bp, Zea Mays
  misc_feature (1)..(1): n is a, c, g, or t
ncggcgaggttggaaggagcatgcaggccgtgcacgacgcccacgacgacagcgagaacttcctcgacctgctcaactcgagggcgctggcgccggagctcttcgccgagccgccggcctgcgactacctcaagaagatggagtacggcggcggcagcggcggctggccggaccacaacttcacgacatccgccctggagaagcacctgggctccggctacggcgcgccggagcggctcacggcgaacctgtccgaccttgtcagcaactggtccatcgcgccgccgagcccgtgtctcggcgacgcgcgccaccaccgcgtcgcagtcgcaggggcaggggcatgcgataacaacaacgccgcggtggccgccttggggctcggcggcaaggccgccgccggcctgttcctggactccggcggcgtcggcgtctgcaacagcaagcacgagataggcggccacggcgcgatgctggaggaagcggcggcggcgtccgggggcagcggccaggagttgctccggcccgcggggtacagctccatgctcgggctcagcagcagcagcaggatgtatatggacgtgccgtggggcaacaatgccagcaggagcctttccgacctgatatctttcggcggaacacctctgggaaaaccagagcaaccgacgccggcggccacgtcaacgaaggcgcaggcggcggagtacaagaagcaagggcgggaaatctcttcgccaccgaagacgagtagcgaaggtggcagcaagggaagctcggacgggaagaagaagaagagatcagacgggcggcaaggctcggaggcgaacgccaagaagtccaagaatgaggcgtcctcacccacgtcgtcatctctcaaggcatcgcagctgccaaaagtgaagttaggagacaagattactgcactgcaacagatcgtttcaccatttggaaagaccgataccgcgtcagttctgtatgaggcgataaattacatcaagtggttgcatgaacaagtgcagttgctgagtgatccatacatgaagacaagcagtagcaaggactacaacgcatggggagggttggactggaaggacaagtcggagacggagatggacctgcaaagtagaggcctgtgcttggtacccgtctcatgcacccctcaggtgtacagggataacaacggcccggattactggacgcccccgtatagaagctgcttataccgatgaactgatatatatatcctttaccctgctatatatttattcgattgattaccttaccggccaagtggcaataatttgtacgtacgtgctgaatatatacattgttgttgttaaagaagacaaaacatgatggttggcggtataagtttagagatcaatttgtgtacgaccacgatttcattattttaaatttaaacctggtatgtatctggttattaattagaggcttcgtgacatcatcatcattgacatattgacatcgatgttgtaattgtctgttactcctctacctatatcta

SEQ ID NO: 7676 - DNA, 1272 bp, Zea Mays
aacagcaatgaaggtttgaaacaaactgtcagtattaccttataaaggtctaccaaacggtgaaatatttacgtaagcgaatcagggtcttgaagatagcttccagatatgtggggttttgcatcaaatgcttgggcatccgggctggggaagaggagtcccccaaattgcacctcttcgagtgctgcttgttccgatgacgaagcatcctcgtgcacgagcagggaagaaggcctggaatgcccaatatgttgggagtctttcaatatagtggagaatgtgccttacgtgctatggtgcggccacaccctttgcaagaactgcgtcctaggacttcaatgggccgtcatcaaagttccaactgtgccgatgcagctacccttcttcgtttgctgtccctggtgcaacctcctgtcgcttcgcatactttacaaagggaacctcacgttcccacggaagaattatttcctcctctggatggttgaggggatgaatggtgagcgggccagatcacgcccagctactcacagcgagcaacatactccatggctctcaagcagcagcagagcaaatggaaatgcaggctgttcaaatcccacaagacgccaccttccgctgccaccgccggttgacactacttcgcccaccaatgcaaatcatgccaaccatggggtccctgtccctctgctgaacgcagagagagtacaagcttcgctgcgcaagtccttgtcgttcctggttcacctgaccgccaagtttcccctggtgttcatcttcctcctcatagtgctctatgcgatccctgccagcgcagcagtcttgctactgtacatccttatcacggtgctgttcgcgctcccctcgttcctgatactgtatttcgcgtatccgagcctggactggcttgttagggaaatctttgcctgagatttccttgttcggtaaaatctcaatactgttgttgagtccttgtataactgaaccttccctagatcttgttgcaagcgtggatgctattgcaaagttttggtttttacaccatgagatgtgtttacctcaagtctacatggaagggtcctctgttgcaatgcaaaacaccagcgtgctctgtgctgctggcatatgttctgttgcacagttgaggtgctcggagactgatcagagataaattatacgttccacacgaaattgtaagtatccctcctagagatggcaatgaaaaattttccgtccgattttagctcctcatctccatttccacgacaaaaaaaa

SEQ ID NO: 7677 - DNA, 395 bp, Zea Mays
ccagcacgcggcccgccctcgccaccctaaccgccgccgcagccgccgcccgatgtgccctcatgcacgagacctctcgaaccctctcagaaggcggtgcgatccggtttgggtcgccatgccgagcccgatgtgcccgacgcgtgcgcggctgagtcgaagccgaaactagcgcatggagatgacgacgataggccgccccttgaggagaagcgccgctgcagcggtgagggcggattcgtcttcctctgcgcccttgctggacacaccgaggctatcggtgggatttctctgccgtctggttcgaacaagctctactccggcagcgtcgacggatctgttcgcatctgggactgcaattccagcaagcacaaataagcttggattcacaccag

SEQ ID NO: 7678 - DNA, 3374 bp, Zea Mays
caggaatgtgcactactgtgacaatttggagaaaataaaatcaaggggcgagctctacaaatgtcgacaccttgtctgcaagggtttttcgccgtcttatcccttcgtccacgctccctgcagccgccgcccaaaccctagcaacccgtcctccgccatggccgacgaccactactcctctaagaggaagtacgacgacccctcgccgccgccgcggcgcacggggttctcttcgggcccgccgcctgcctcgccgctcgcgggcggcgccccgtcgtacaacagcgtgccaccgccccccgatgagatccagctcgcgaagcagcgcgcgcaggagatcgcggcgcggatctttaacgccgcagaggccaagcgtcctcgcgtcgacaacggcgacgatgacagcggcggcttcggtgtaggcctgggcagcactggtggcggtggccgcatcggcggcggaggactcggcttctcgtcctctgccggtggtgggcacggggcttctatcccacaattatcttctcagagcagcgcacctcagtactcctcttatggtggatatcagggtacaagcaaaaagattgaaattccaaatggaagggttggtgttatcattggaaaagccggggaaactattaggtatatccaacttcaatcaggagcaaagattcaagtcacaagagaccatgaagctgaacctggtgcactgacaaggcaagttgagctttctggcaaacctgagcagataagcaaagctgaacagttgatcaaagaagttctggcagaggccgatgctgggtcatccggtgctggatctggtggccggaaatacaatgcaacacagccaggtgctgagacgttccagatgaaaattgctaataacaaggtgggactgattattgggaagggtggggagactataaagtccatgcaggccaattctggagctcgtattcaggttattcctttgcatctgcctgctggtgatacttcaactgaaagaactgtgcatattgatggtacccaagaacaaattgaagctgcaaagcaactgatcagtgaggttaccagtgaggtccgccttctttctcgttgtgtatattcctgatctgtaattgctttgccgttttgcgctttatctatcttaggtaggttgcttctggttcattctgtttattgtctcattttatgattttccccgattctttttgaaaattttgtttcttctgcttattgctgccctacattgattacactgcgtcttcgctaatcaatgtctgaaacatattgttcgtgggtacatcctcagcatgcaaggggattgttatatgtgttcttccctgtttatgaacataacttattaatggttttgggcaaggttcacaactggagtatataataaagcgaagaaacatatttgtaaactaacttgttatttatcaattagccactgctaggctcgttaaatggttttgtacagaaactgcatctaaagttttgacaagtattgatttgaaattcatatgatcgtttacatcatatggaatatggatgatactattttgggaaaaaaccagagagtccttgttccacttgttctattcagtggttattgtttttttgtttttccacatagagccaattagtgtcattagcttgccaggaggactgcaaactatcctggagagcagaatcgtgctaggaatccaatgtctggtggctattctcagcagggatatcgccctcctcgtcctcagtcaaactggggcccgccttctgtgccaccccagcagcctggctatggttatatgcagcctggggcttatcctggggcaccgccacagtatggtgcacctcagcaaccttatggtagctaccccccaacatctggtggttatcagactggatgggatcagtctcaaaaccagcaatctcatacaactccccctggtactgggtatgattattatagtcagcagcagcaacctcagcaacaatctgcccctgggacagctgcttctactgatgccactagctacaattatggtcagccttcgacgtatgcttcacagggatatgattctacctacactcagcagagtggtgggcagcaagcatatggacatgatggctacactggttaccagacccaagggcagcagcagggctactctcagcagactggttatgatcagcagggttatggcacatctgcttatggatcagctgcaagctcgacccaggatgggtccaactatggtggtcctggaggggccagtcaggcatctccagggcagcaaacatcaaacccagctgctggaagccaacctggctataccagccaaccgcccactagtgctgcagcaacttacccacctcaaggttcagctccatctggatatggcgctccaccatcccagtctggctatggcacccaaccaccacagcaagccggatatggtcagggcgcttatgggcagccttctccacagggccagaaacctcctgcattgtcaccttatggacaggctccgcctcctggttctgctcaggctggttacgggcagtatggttacagccaacctgcttacggtgcaccaccagcttaccctggtgcacccattgcaagccaccagggctatggccagcagcagtcttatggccagcagcagtcttatggcgatgcttatggtagtgcaagctatgggcagcctccagcctactctactgaagcaacacctcctgctgcatcccaggatcactctgctgcccctgctgcggcccttggaacaacagcttcgacagctcctgaaaacagtgggggcgcccaaacatccgctgaaacttgagcttcagcagctaattgggaacaaacattttccaagaccctgccgtgtggtttcctccgcgctgttgcttaatataattacgcatctaatttagggtctacaactacaagttatttatttttctgcctgttgtttttgacaccatgactttctgtttccttgctatattgagtagtactttgcagttattttattgctggcgtatatgtctggactagtgatatatgtgtttgtgtggttacccttgttggaccgtaatgggtaccttccggcttggtctggacagataaatgcccatctatatgtattctgagccctgttatgattgctctaccgtcggaggtttctatgcccacttcagctggtgatgatggttatgtatgaaatttggtttcaatatttcgtaagacttatgtatcggtccataaaaggtttaagcagcatgaaagtctgcctttttgtttttgctgctggtagttctgagtctctaaagctaatgttctttgtttttttttgaacgga

SEQ ID NO: 7679 - DNA, 3760 bp, Zea Mays
caagggtttttcgccgtcttatcccttcgtccacgctccctgcagccgccgcccaaaccctagcaacccgtcctccgccatggccgacgaccactactcctctaagaggaagtacgacgacccctcgccgccgccgcggcgcacggggttctcttcgggcccgccgcctgcctcgccgctcgcgggcggcgccccgtcgtacaacagcgtgccaccgccccccgatgagatccagctcgcgaagcagcgcgcgcaggagatcgcggcgcggatctttaacgccgcagaggccaagcgtcctcgcgtcgacaacggcgacgatgacagcggcggcttcggtgtaggcctgggcagcactggtggcggtggccgcatcggcggcggaggactcggcttctcgtcctctgccggtggtgggcacggggcttctatcccacaattatcttctcagagcagcgcacctcagtactcctcttatggtggatatcagggtacaagcaaaaagattgaaattccaaatggaagggttggtgttatcattggaaaagccggggaaactattaggtatatccaacttcaatcaggagcaaagattcaagtcacaagagaccatgaagctgaacctggtgcactgacaaggcaagttgagctttctggcaaacctgagcagataagcaaagctgaacagttgatcaaagaagttctggcagaggccgatgctgggtcatccggtgctggatctggtggccggaaatacaatgcaacacagccaggtgctgagacgttccagatgaaaattgctaataacaaggtgggactgattattgggaagggtggggagactataaagtccatgcaggccaattctggagctcgtattcaggttattcctttgcatctgcctgctggtgatacttcaactgaaagaactgtgcatattgatggtacccaagaacaaattgaagctgcaaagcaactgatcagtgaggttaccagtgagcttgccaggaggactgcaaactatcctggagagcaggtgtgttactgtttaatatcaatgtcctactggatataactctgtattttcacttataacatgttttatggattatgtgagctgacgtgctttatctggcatctgtatcatttcaaatttttcatctgatcctcctgtttctctggagcacaatggatacatatacattgctttctcatggcttgtttgtgagaaagaaatgctctaaacagacccaggtccccaggtgtttcggttgtttatggtggtcatgcattccaatttaggtccttctgttctagttgcacatatttagttctgatgtttatgatcactacagaggcaagtttttccttttaattcactattcccacctatacaacttggtggttgattaagagttgtattctcatgtacatagtctctgattcatgatacttattttatagttgggcccaaaaattaaggatctatattctctaaagtgtgcatagaccagacaagaagccagttaatagtgcaactaaagaagggttgtactggggaaagtaggtaaaaaggctaaaatttgggatccaaatacagtctgtgtcatgcataaattttatttggaatattcctgtatcatatatgttgaactctttcgcagcagaaggattccgaaaaccttgcatgaagctattttatgtgatatttgtgtctattatatgtaccttgtggctttgcaggttgctgtccaatcttttttgtgtgcttatatagtatcatttgaatgctgtctttgatgcttcattttatttaatttttttcaacttcagtaaagtagcatatctgatcattatatatcctgtcatttagcaatgaatagaatcttttagatagtagtggaagcacctttgtattatcatatatatctttggacatctattgaaactctattccatggtattgctattcaacatatatatatgtatatattcgtctagctgtccaatcttcattagccccatagttttgcgcgtgggcaacggtagatgggcatcactagcttgacgatcttgatcgaatcgtgctaggaatccaatgtctggtggctattctcagcagggatatcgccctcctcgtcctcagtcaaactggggcccgccttctgtgccaccccagcagcctggctatggttatatgcagcctggggcttatcctggggcaccgccacagtatggtgcacctcagcaaccttatggtagctaccccccaacatctggtggttatcagactggatgggatcagtctcaaaaccagcaatctcatacaactccccctggtactgggtatgattattatagtcagcagcagcaacctcagcaacaatctgcccctgggacagctgcttctactgatgccactagctacaattatggtcagccttcgacgtatgcttcacagggatatgattctacctacactcagcagagtggtgggcagcaagcatatggacatgatggctacactggttaccagacccaagggcagcagcagggctactctcagcagactggttatgatcagcagggttatggcacatctgcttatggatcagctgcaagctcgacccaggatgggtccaactatggtggtcctggaggggccagtcaggcatctccagggcagcaaacatcaaacccagctgctggaagccaacctggctataccagccaaccgcccactagtgctgcagcaacttacccacctcaaggttcagctccatctggatatggcgctccaccatcccagtctggctatggcacccaaccaccacagcaagccggatatggtcagggcgcttatgggcagccttctccacagggccagaaacctcctgcattgtcaccttatggacaggctccgcctcctggttctgctcaggctggttacgggcagtatggttacagccaacctgcttacggtgcaccaccagcttaccctggtgcacccattgcaagccaccagggctatggccagcagcagtcttatggccagcagcagtcttatggcgatgcttatggtagtgcaagctatgggcagcctccagcctactctactgaagcaacacctcctgctgcatcccaggatcactctgctgcccctgctgcggcccttggaacaacagcttcgacagctcctgaaaacagtgggggcgcccaaacatccgctgaaacttgagcttcagcagctaattgggaacaaacattttccaagaccctgccgtgtggtttcctccgcgctgttgcttaatataattacgcatctaatttagggtctacaactacaagttatttatttttctgcctgttgtttttgacaccatgactttctgtttccttgctatattgagtagtactttgcagttattttattgctggcgtatatgtctggactagtgatatatgtgtttgtgtggttacccttgttggaccgtaatgggtaccttccggcttggtctggacagataaatgcccatctatatgtattctgagccctgttatgattgctctaccgtcggaggtttctatgcccacttcagctggtgatgatggttatgtatgaaatttggtttcaatatttcgtaagacttatgtatcggtccataaaaggtttaagcagcatgaaagtctgcctttttgtttttgctgctggtagttctgagtctctaaagctaatgttctttgtttttttttgaacgga

SEQ ID NO: 7680 - DNA, 4391 bp, Zea Mays
ggagaaaataaaatcaaggggcgagctctacaaatgtcgacaccttgtctgcaagggtttttcgccgtcttatcccttcgtccacgctccctgcagccgccgcccaaaccctagcaacccgtcctccgccatggccgacgaccactactcctctaagaggaagtacgacgacccctcgccgccgccgcggcgcacggggttctcttcgggcccgccgcctgcctcgccgctcgcgggcggcgccccgtcgtacaacagcgtgccaccgccccccgatgagatccagctcgcgaagcagcgcgcgcaggagatcgcggcgcggatctttaacgccgcagaggccaagcgtcctcgcgtcgacaacggcgacgatgacagcggcggcttcggtgtaggcctgggcagcactggtggcggtggccgcatcggcggcggaggactcggcttctcgtcctctgccggtggtgggcacggggcttctatcccacaattatcttctcagagcagcgcacctcagtactcctcttatggtggatatcagggtacaagcaaaaagattgaaattccaaatggaagggttggtgttatcattggaaaagccggggaaactattaggtatatccaacttcaatcaggagcaaagattcaagtcacaagagaccatgaagctgaacctggtgcactgacaaggcaagttgagctttctggcaaacctgagcagataagcaaagctgaacagttgatcaaagaagttctggcagaggccgatgctgggtcatccggtgctggatctggtggccggaaatacaatgcaacacagccaggtgctgagacgttccagatgaaaattgctaataacaaggtgggactgattattgggaagggtggggagactataaagtccatgcaggccaattctggagctcgtattcaggttattcctttgcatctgcctgctggtgatacttcaactgaaagaactgtgcatattgatggtacccaagaacaaattgaagctgcaaagcaactgatcagtgaggttaccagtgaggtccgccttctttctcgttgtgtatattcctgatctgtaattgctttgccgttttgcgctttatctatcttaggtaggttgcttctggttcattctgtttattgtctcattttatgattttccccgattctttttgaaaattttgtttcttctgcttattgctgccctacattgattacactgcgtcttcgctaatcaatgtctgaaacatattgttcgtgggtacatcctcagcatgcaaggggattgttatatgtgttcttccctgtttatgaacataacttattaatggttttgggcaaggttcacaactggagtatataataaagcgaagaaacatatttgtaaactaacttgttatttatcaattagccactgctaggctcgttaaatggttttgtacagaaactgcatctaaagttttgacaagtattgatttgaaattcatatgatcgtttacatcatatggaatatggatgatactattttgggaaaaaaccagagagtccttgttccacttgttctattcagtggttattgtttttttgtttttccacatagagccaattagtgtcattagcttgccaggaggactgcaaactatcctggagagcaggtgtgttactgtttaatatcaatgtcctactggatataactctgtattttcacttataacatgttttatggattatgtgagctgacgtgctttatctggcatctgtatcatttcaaatttttcatctgatcctcctgtttctctggagcacaatggatacatatacattgctttctcatggcttgtttgtgagaaagaaatgctctaaacagacccaggtccccaggtgtttcggttgtttatggtggtcatgcattccaatttaggtccttctgttctagttgcacatatttagttctgatgtttatgatcactacagaggcaagtttttccttttaattcactattcccacctatacaacttggtggttgattaagagttgtattctcatgtacatagtctctgattcatgatacttattttatagttgggcccaaaaattaaggatctatattctctaaagtgtgcatagaccagacaagaagccagttaatagtgcaactaaagaagggttgtactggggaaagtaggtaaaaaggctaaaatttgggatccaaatacagtctgtgtcatgcataaattttatttggaatattcctgtatcatatatgttgaactctttcgcagcagaaggattccgaaaaccttgcatgaagctattttatgtgatatttgtgtctattatatgtaccttgtggctttgcaggttgctgtccaatcttttttgtgtgcttatatagtatcatttgaatgctgtctttgatgcttcattttatttaatttttttcaacttcagtaaagtagcatatctgatcattatatatcctgtcatttagcaatgaatagaatcttttagatagtagtggaagcacctttgtattatcatatatatctttggacatctattgaaactctattccatggtattgctattcaacatatatatatgtatatattcgtctagctgtccaatcttcattagccccatagttttgcgcgtgggcaacggtagatgggcatcactagcttgacgatcttgatcgaatcgtgctaggaatccaatgtctggtggctattctcagcagggatatcgccctcctcgtcctcagtcaaactggggcccgccttctgtgccaccccagcagcctggctatggttatatgcagcctggggcttatcctggggcaccgccacagtatggtgcacctcagcaaccttatggtagctaccccccaacatctggtggttatcagactggatgggatcagtctcaaaaccagcaatctcatacaactccccctggtactgggtatgattattatagtcagcagcagcaacctcagcaacaatctgcccctgggacagctgcttctactgatgccactagctacaattatggtcagccttcgacgtatgcttcacagggatatgattctacctacactcagcagagtggtgggcagcaagcatatggacatgatggctacactggttaccagacccaagggcagcagcagggctactctcagcagactggttatgatcagcagggttatggcacatctgcttatggatcagctgcaagctcgacccaggatgggtccaactatggtggtcctggaggggccagtcaggcatctccagggcagcaaacatcaaacccagctgctggaagccaacctggctataccagccaaccgcccactagtgctgcagcaacttacccacctcaaggttcagctccatctggatatggcgctccaccatcccagtctggctatggcacccaaccaccacagcaagccggatatggtcagggcgcttatgggcagccttctccacagggccagaaacctcctgcattgtcaccttatggacaggctccgcctcctggttctgctcaggctggttacgggcagtatggttacagccaacctgcttacggtgcaccaccagcttaccctggtgcacccattgcaagccaccagggctatggccagcagcagtcttatggccagcagcagtcttatggcgatgcttatggtagtgcaagctatgggcagcctccagcctactctactgaagcaacacctcctgctgcatcccaggatcactctgctgcccctgctgcggcccttggaacaacagcttcgacagctcctgaaaacagtgggggcgcccaaacatccgctgaaacttgagcttcagcagctaattgggaacaaacattttccaagaccctgccgtgtggtttcctccgcgctgttgcttaatataattacgcatctaatttagggtctacaactacaagttatttatttttctgcctgttgtttttgacaccatgactttctgtttccttgctatattgagtagtactttgcagttattttattgctggcgtatatgtctggactagtgatatatgtgtttgtgtggttacccttgttggaccgtaatgggtaccttccggcttggtctggacagataaatgcccatctatatgtattctgagccctgttatgattgctctaccgtcggaggtttctatgcccacttcagctggtgatgatggttatgtatgaaatttggtttcaatatttcgtaagacttatgtatcggtccataaaaggtttaagcagcatgaaagtctgcctttttgtttttgctgctggtagttctgagtctctaaagctaatgttctttgtttttttttgaacgga

SEQ ID NO: 7681 - DNA, 2817 bp, Zea Mays
gttggtttggattcctgttctgttcgcaccgcctccgcctccctccctccctctccccttccggactctctgctctcctctgctgctagtccatccattaatctcctctcctcgccatcgccgcactcacgctacgcttccctcctcaagcccgagggcttctccgggaaggaatcgccgcgccgggttcctgcaacgccccgccctttgcgcacccggagcaactgagtcgtggctatcgaggatgatgccgcgtttcagataacagagactgtgagagtgcacgacacacttgacatgcagagatgaagatcagtgcgcttctcacctccgcgggcatcaacattggcctctgtgttctcttcctgtcactctactccgttctcagaaagcagccggccaatgtcagggtctacttcggccgcaggatcgctgaggaacacgatcggctccgaggggcatttatcttggagaggtttgtcccatccactggatggatagtcaaagccctgcagtgtactgaggaagagatcctggctgctgctgggttggatgctgttgttttcaatagaattctagtattcagcatacgcatcttctcccttgccgcagttttgtgtgttttcgggattcttccactcaattattttggacaggatatacaccatgttcgaattccttcagaatcactagatatatttacaattggcaatgtagaagtgaaatcaagatggctctgggtccattgtgtaaccctgtacataatttctgcagtagcttgcattcttctatacattgagtacaagcacattgccaggttgaagctccttcatcttacaagcgcaacaccaaaaccaaaccattttacagttcttgttcgtggaataccaaaggcagataaagaatcatgcagtgatgttgttgataatttcttcacaaagtatcactcatctagttatctcttccatcaagtagtttacaaagtcgggaaagttcagaagataatgactggcgcaaagaaggcatataagaagttcaaacatttcacagatgaaactgtcgatcaaggttgcaggacagttacctaccgctgttgtctgtgtggagcttcttcaaattctttcaagttgttgaacactgagtgtgagcagaacaaggggaaagcggacaataaatccatcttggacttagacgatgaggaatgcacaactgcttttgtatttttcaaaactcggtatgcagcacttattgcgtcagaaatacttcaaacatctaaccctatgaaatgggttgctaatcttgctccagaaccagaagacgtgtattggtccaatctttggctaccctataagcaactttgggctcgccgtattgctacactcctaggctctatctttttcatgttcatatttctgataccggtgacatttatacaaggactatctcagctagagcagttgcagcagaggcttcctttcctaagaggaatattgaagaagaaatactacatgactcagctagtaactgggtaccttcccagtgtcatactgcaaatcttcctgtacattgttgctccaattatgatgctgttttctacattggagggccctacatctcacagtgaaaggaagagaagtgcttgctgtaaagtgctgtactttacagtttggaacatattctttgctaatgtattatctggtactgtcattagtcaattgaatgtgttatcaagcccaaaggacatacctgtccagcttgctaaagctgtacctggacaggccactttcttcatcacctatgtcctgacctcaggatgggctagtttgtcatctgaagttatgcaactctttggtctgatatggaactttataatcaaatacgttctgagaatgagagaagatacagaattcgttccctcgtttccttaccacacagaagtaccaaaagttctgttgtttggactattgggcttcacattttctgtgctggctcctctgatcttaccttttctgctggtgtacttttgtcttggttatgttgtataccgcaatcagttgctcaatgtgtatcgaacaagtactgcagaaaccggcttcttccattattcaagacttttccagcacaggatttaatcgacatggacagggaagatgaacgatcaggaagaatggatgaaattcaccacggacttcattctgcttattgccagttcgctgacactgtagatgtgcccttggataaaattgaaatcgttggtggggatgaggagcaaggctctagctcgggtcagtccagtgttaaagaaacgtgcgaggatcccaagaagcacctggctcaccctacactaaaaggactccctgttaaccgcctccggcatgccgtgaggtcggttactttcctgatcagattgcagagaagaggtttatcagaacagaaaatcggataattagttagccgccaaccccctttgcttgttggctatataaatgtacagaggcatacatgcatatacgatcgttcccttagaagagagaagggctaatgtagaagtctgtgggagaacatcatcatgagtgttgaggtgcaattttgttttgtcgcatggatgagtttgttggttctgcgggttatctggcagattcagctacccaaaccttagccttgcacgttgatgaaattaatgctcatggttttgttgtaagagattaatgtggccaaagtgatctagatgtataatgtcctcctctccattggtttgtgtttgagcctcgcaactttagcaggtctgttagtcttcatgcgccaatcatattgagg

SEQ ID NO: 7682 - DNA, 2822 bp, Zea Mays
ttcctgttctgttcgcaccgcctccgcctccctccctccctctccccttccggactctctgctctcctctgctgctagtccatccattaatctcctctcctcgccatcgccgcactcacgctacgcttccctcctcaagcccgagggcttctccgggaaggaatcgccgcgccgggttcctgcaacgccccgccctttgcgcacccggagcaactgagtcgtggctatcgaggatgatgccgcgtttcagataacagagactgtgagagtgcacgacacacttgacatgcagagatgaagatcagtgcgcttctcacctccgcgggcatcaacattggcctctgtgttctcttcctgtcactctactccgttctcagaaagcagccggccaatgtcagggtctacttcggccgcaggatcgctgaggaacacgatcggctccgaggggcatttatcttggagaggtttgtcccatccactggatggatagtcaaagccctgcagtgtactgaggaagagatcctggctgctgctgggttggatgctgttgttttcaatagaattctagtattcaggctctgggtccattgtgtaaccctgtacataatttctgcagtagcttgcattcttctatacattgagtacaagcacattgccaggttgaagctccttcatcttacaagcgcaacaccaaaaccaaaccattttacagttcttgttcgtggaataccaaaggcagataaagaatcatgcagtgatgttgttgataatttcttcacaaagtatcactcatctagttatctcttccatcaagtagtttacaaagtcgggaaagttcagaagataatgactggcgcaaagaaggcatataagaagttcaaacatttcacagatgaaactgtcgatcaaggttgcaggacagttacctaccgctgttgtctgtgtggagcttcttcaaattctttcaagttgttgaacactgagtgtgagcagaacaaggggaaagcggacaataaatccatcttggacttagacgatgaggaatgcacaactgcttttgtatttttcaaaactcggtatgcagcacttattgcgtcagaaatacttcaaacatctaaccctatgaaatgggttgctaatcttgctccagaaccagaagacgtgtattggtccaatctttggctaccctataagcaactttgggctcgccgtattgctacactcctaggctctatctttttcatgttcatatttctgataccggtgacatttatacaaggactatctcagctagagcagttgcagcagaggcttcctttcctaagaggaatattgaagaagaaatactacatgactcagctagtaactgggtaccttcccagtgtcatactgcaaatcttcctgtacattgttgctccaattatgatgctgttttctacattggagggccctacatctcacagtgaaaggaagagaagtgcttgctgtaaagtgctgtactttacagtttggaacatattctttgctaatgtattatctggtactgtcattagtcaattgaatgtgttatcaagcccaaaggacatacctgtccagcttgctaaagctgtacctggacaggccactttcttcatcacctatgtcctgacctcaggatgggctagtttgtcatctgaagttatgcaactctttggtctgatatggaactttataatcaaatacgttctgagaatgagagaagatacagaattcgttccctcgtttccttaccacacagaagtaccaaaagttctgttgtttggactattgggcttcacattttctgtgctggctcctctgatcttaccttttctgctggtgtacttttgtcttggttatgttgtataccgcaatcagttgctcaatgtgtatcgaacaaggtatgacacaggtggtttgtattggccaattgcatacaacacagtcatattctcacttgtgctcacccagatcatctgccttggtgtatttggccttaaagaatcgccggtagctgcaggcttcactgtacctcttatcatccttactcttttgtttaaccagtactgcagaaaccggcttcttccattattcaagacttttccagcacaggatttaatcgacatggacagggaagatgaacgatcaggaagaatggatgaaattcaccacggacttcattctgcttattgccagttcgctgacactgtagatgtgcccttggataaaattgaaatcgttggtggggatgaggagcaaggctctagctcgggtcagtccagtgttaaagaaacgtgcgaggatcccaagaagcacctggctcaccctacactaaaaggactccctgttaaccgcctccggcatgccgtgaggtcggttactttcctgatcagattgcagagaagaggtttatcagaacagaaaatcggataattagttagccgccaaccccctttgcttgttggctatataaatgtacagaggcatacatgcatatacgatcgttcccttagaagagagaagggctaatgtagaagtctgtgggagaacatcatcatgagtgttgaggtgcaattttgttttgtcgcatggatgagtttgttggttctgcgggttatctggcagattcagctacccaaaccttagccttgcacgttgatgaaattaatgctcatggttttgttgtaagagattaatgtggccaaagtgatctagatgtataatgtcctcctctccattggtttgtgtttgagcctcgcaactttagcaggtctgttagtcttcatgcgccaatcatattgagg

SEQ ID NO: 7683 - DNA, 2858 bp, Zea Mays
caaggattctcgttctcctccagcaactgagtcgtggctatcgaggatgatgccgcgtttcagataacagagactgtgagagtgcacgacacacttgacatgcagagatgaagatcagtgcgcttctcacctccgcgggcatcaacattggcctctgtgttctcttcctgtcactctactccgttctcagaaagcagccggccaatgtcagggtctacttcggccgcaggatcgctgaggaacacgatcggctccgaggggcatttatcttggagaggtttgtcccatccactggatggatagtcaaagccctgcagtgtactgaggaagagatcctggctgctgctgggttggatgctgttgttttcaatagaattctagtattcagcatacgcatcttctcccttgccgcagttttgtgtgttttcgggattcttccactcaattattttggacaggatatacaccatgttcgaattccttcagaatcactagatatatttacaattggcaatgtagaagtgaaatcaagatggctctgggtccattgtgtaaccctgtacataatttctgcagtagcttgcattcttctatacattgagtacaagcacattgccaggttgaagctccttcatcttacaagcgcaacaccaaaaccaaaccattttacagttcttgttcgtggaataccaaaggcagataaagaatcatgcagtgatgttgttgataatttcttcacaaagtatcactcatctagttatctcttccatcaagtagtttacaaagtcgggaaagttcagaagataatgactggcgcaaagaaggcatataagaagttcaaacatttcacagatgaaactgtcgatcaaggttgcaggacagttacctaccgctgttgtctgtgtggagcttcttcaaattctttcaagttgttgaacactgagtgtgagcagaacaaggggaaagcggacaataaatccatcttggacttagacgatgaggaatgcacaactgcttttgtatttttcaaaactcggtatgcagcacttattgcgtcagaaatacttcaaacatctaaccctatgaaatgggttgctaatcttgctccagaaccagaagacgtgtattggtccaatctttggctaccctataagcaactttgggctcgccgtattgctacactcctaggctctatctttttcatgttcatatttctgataccggtgacatttatacaaggactatctcagctagagcagttgcagcagaggcttcctttcctaagaggaatattgaagaagaaatactacatgactcagctagtaactgggtaccttcccagtgtcatactgcaaatcttcctgtacattgttgctccaattatgatgctgttttctacattggagggccctacatctcacagtgaaaggaagagaagtgcttgctgtaaagtgctgtactttacagtttggaacatattctttgctaatgtattatctggtactgtcattagtcaattgaatgtgttatcaagcccaaaggacatacctgtccagcttgctaaagctgtacctggacaggccactttcttcatcacctatgtcctgacctcaggatgggctagtttgtcatctgaagttatgcaactctttggtctgatatggaactttataatcaaatacgttctgagaatgagagaagatacagaattcgttccctcgtttccttaccacacagaagtaccaaaagttctgttgtttggactattgggcttcacattttctgtgctggctcctctgatcttaccttttctgctggtgtacttttgtcttggttatgttgtataccgcaatcaggtgagaagctagaggatgtatccttgttatttaccccaaatttatctgtagcatgctaatatactattcttttcagttgctcaatgtgtatcgaacaaggtatgacacaggtggtttgtattggccaattgcatacaacacagtcatattctcacttgtgctcacccagatcatctgccttggtgtatttggccttaaagaatcgccggtagctgcaggcttcactgtacctcttatcatccttactcttttgtttaaccagtactgcagaaaccggcttcttccattattcaagacttttccagcacaggatttaatcgacatggacagggaagatgaacgatcaggaagaatggatgaaattcaccacggacttcattctgcttattgccagttcgctgacactgtagatgtgcccttggataaaattgaaatcgttggtggggatgaggagcaaggctctagctcgggtcagtccagtgttaaagaaacgtgcgaggatcccaagaagcacctggctcaccctacactaaaaggactccctgttaaccgcctccggcatgccgtgaggtcggttactttcctgatcagattgcagagaagaggtttatcagaacagaaaatcggataattagttagccgccaaccccctttgcttgttggctatataaatgtacagaggcatacatgcatatacgatcgttcccttagaagagagaagggctaatgtagaagtctgtgggagaacatcatcatgagtgttgaggtgcaattttgttttgtcgcatggatgagtttgttggttctgcgggttatctggcagattcagctacccaaaccttagccttgcacgttgatgaaattaatgctcatggttttgttgtaagagattaatgtggccaaagtgatctagatgtataatgtcctcctctccattggtttgtgtttgagcctcgcaactttagcaggtctgttagtcttcatgcgccaatcatattgagg

SEQ ID NO: 7684 - DNA, 2860 bp, Zea Mays
ttcctgttctgttcgcaccgcctccgcctccctccctccctctccccttccggactctctgctctcctctgctgctagtccatccattaatctcctctcctcgccatcgccgcactcacgctacgcttccctcctcaagcccgagggcttctccgggaaggaatcgccgcgccgggttcctgcaacgccccgccctttgcgcacccggagcaactgagtcgtggctatcgaggatgatgccgcgtttcagataacagagactgtgagagtgcacgacacacttgacatgcagagatgaagatcagtgcgcttctcacctccgcgggcatcaacattggcctctgtgttctcttcctgtcactctactccgttctcagaaagcagccggccaatgtcagggtctacttcggccgcaggatcgctgaggaacacgatcggctccgaggggcatttatcttggagaggtttgtcccatccactggatggatagtcaaagccctgcagtgtactgaggaagagatcctggctgctgctgggttggatgctgttgttttcaatagaattctagtattcagcatacgcatcttctcccttgccgcagttttgtgtgttttcgggattcttccactcaattattttggacaggatatacaccatgttcgaattccttcagaatcactagatatatttacaattggcaatgtagaagtgaaatcaagatggctctgggtccattgtgtaaccctgtacataatttctgcagtagcttgcattcttctatacattgagtacaagcacattgccaggttgaagctccttcatcttacaagcgcaacaccaaaaccaaaccattttacagttcttgttcgtggaataccaaaggcagataaagaatcatgcagtgatgttgttgataatttcttcacaaagtatcactcatctagttatctcttccatcaagtagtttacaaagtcgggaaagttcagaagataatgactggcgcaaagaaggcatataagaagttcaaacatttcacagatgaaactgtcgatcaaggttgcaggacagttacctaccgctgttgtctgtgtggagcttcttcaaattctttcaagttgttgaacactgagtgtgagcagaacaaggggaaagcggacaataaatccatcttggacttagacgatgagaaccagaagacgtgtattggtccaatctttggctaccctataagcaactttgggctcgccgtattgctacactcctaggctctatctttttcatgttcatatttctgataccggtgacatttatacaaggactatctcagctagagcagttgcagcagaggcttcctttcctaagaggaatattgaagaagaaatactacatgactcagctagtaactgggtaccttcccagtgtcatactgcaaatcttcctgtacattgttgctccaattatgatgctgttttctacattggagggccctacatctcacagtgaaaggaagagaagtgcttgctgtaaagtgctgtactttacagtttggaacatattctttgctaatgtattatctggtactgtcattagtcaattgaatgtgttatcaagcccaaaggacatacctgtccagcttgctaaagctgtacctggacaggccactttcttcatcacctatgtcctgacctcaggatgggctagtttgtcatctgaagttatgcaactctttggtctgatatggaactttataatcaaatacgttctgagaatgagagaagatacagaattcgttccctcgtttccttaccacacagaagtaccaaaagttctgttgtttggactattgggcttcacattttctgtgctggctcctctgatcttaccttttctgctggtgtacttttgtcttggttatgttgtataccgcaatcagttgctcaatgtgtatcgaacaaggtatgacacaggtggtttgtattggccaattgcatacaacacagtcatattctcacttgtgctcacccagatcatctgccttggtgtatttggccttaaagaatcgccggtagctgcaggcttcactgtacctcttatcatccttactcttttgtttaaccagtactgcagaaaccggcttcttccattattcaagacttttccagcacaggatttaatcgacatggacagggaagatgaacgatcaggaagaatggatgaaattcaccacggacttcattctgcttattgccagttcgctgacactgtagatgtgcccttggataaaattgaaatcgttggtggggatgaggagcaaggctctagctcgggtcagtccagtgttaaagaaacgtgcgaggatcccaagaagcacctggctcaccctacactaaaaggactccctgttaaccgcctccggcatgccgtgaggtcggttactttcctgatcagattgcagagaagaggtttatcagaacagaaaatcggataattagttagccgccaaccccctttgcttgttggctatataaatgtacagaggcatacatgcatatacgatcgttcccttagaagagagaagggctaatgtagaagtctgtgggagaacatcatcatgagtgttgaggtgcaattttgttttgtcgcatggatgagtttgttggttctgcgggttatctggcagattcagctacccaaaccttagccttgcacgttgatgaaattaatgctcatggttttgttgtaagagattaatgtggccaaagtgatctagatgtataatgtcctcctctccattggtttgtgtttgagcctcgcaactttagcaggtctgttagtcttcatgcgccaatcatattgagg

SEQ ID NO: 7685 - DNA, 3253 bp, Zea Mays
gtaatcttcccacctgcctcggcgcctcctccctctctcccaacctcgcccgttctcgcctcgctgttctcctctgtcacctctccctgagaagcgtggctcctgcaaccggcctccccacctgctcctcctctacgcgccgagcaccacacgacgcgacacaaccgagcacggccgctccgccactccactgcttccgcggtggcgccgcttcactcccgtgctgcagcgagcgttacggagatccgtggggacatgaaccagggtttctcctatctgttggtgaacataaagctggatccagaccacagaatgcatgatattatgcaccattgcacacgtccccagagagttcagagttcccagtcatagatgccttttactgcgtgtcttgacaaaatgaacagtacccagtgcccttgaaatgtgctaggaatataaagatatgaactaaatttatcagtggtcctattgaatatggagctactgttatatgtcattgtctcatgcaaatgatggtggctgtaagttgtgattgaggaactccattgtctgagaaatggatgaaacaccaactagttctgggcaatctgaagctagttcatgtgaacctaattggtggcctccagacttcttggagaagatacagtctgcttccataccaaggaaacatgatgttttgggtaatcaaagttcctcatcctggaaggcttctcaattactgtggtcaacaggatcttattcagggttaatccctaatggtttctattcaatcatcccggataaaaagttgaaggagactttcccaactattccatcactagatgacttgcaaactcttgaagcagatgggcttaaggctgacataattattgtagacactgagagggataagaaggttttcatgttgaagcagcttagtgctgcacttgtgaaagggttaagctctagcccagcattagtgataaagaaaattgcaggattggtctttgactgcttcaagcgccaaattcccgatgccagtccaactagaggctcgattgaagatacccatttctttggaaataaaggaccacaacttctggggcagataagacatggatcgtgccgaccccgagctattctatttaaagttcttgcagatgccgttggccttgagagtaaacttgtagttggtctaccagatgacggtgctgttggatttgtggactcttacaaacatatgtctgtggtagtttcactaaactctatggtgcttcttgtggatcttatgcgatttccaggccagctgattccgttttcagctaaggctatatttatatcgcacatatctgctgcgggtgaaagcgactcagctgaaaatgactcttgtgattctcctcttgagcccaacagcccactttatggattgtctgataaagttgaagttgaaggaattgaatcttcatcatatctatctggacgatcactgcgtaatatgatgttgagatcaaggacattctctgaggggaaattaagcacgtcatgtagtgaaccaaatatagcaaatgccttttggaggcgcagccaaaggagagttgccgaggaaccccgtggtgctagttccagccctgagcatccattaatgagagcaaggggaagatctatacttggtagtgagaagcaatcatttcaagaatacacagaatctggagctgcttcaagatcagatggtcttgggggcccttcaacctctaatgctcgaagaataaggcgaagaagcattagcattacacctgagattggagatgacatcgtgagggcagttcgggctatgaacgaaacactaaagcaaaatcgcctccaaagggatcatgtcgaaggttcatgctcatatgttatggaagatcaaagcaacaccaatgactgcccaaataaagatgatgcatcttggagaattggtgctactgacagtgactcaagaaaccgaactggttctactcagaaggccatgtcactaccttcttcgcctcatgaatatagaggtcaagttacccaaaaaagtgatgattttataagtaaagagaagatggcattggcatggaacaaagttttccagagctccccatttcttaataaggctttgctgccttttaaggaatggaacatagatttctccgagataacaattggcacgcgggttggaataggattctttggagaagttttccgtggtatatggaatggaactgatgttgccatcaaagtgtttctagaacaggatttgacaactgaaaacatggaagatttttgcaacgagatatacatcctcagccggttacgacacccgaatgttatattgcttcttggtgcatgcattacacctccacacctgtcaatggttactgaatatatggaaatggggtcactgtactatctcattcatatgagtggtcagaaaaagaaacttagttggcgtaggaagttgaaaattattcgtgatatatgcaggggattgatgtgcatacaccgcatcaagatagttcacagggatctcaaaagtgcaaactgcctggtcaataagcattggactgtcaagatatgtgactttggtctatctcgactgatgattgatagtcctatgaccgataattcctctgctggcaccccggaatggatggcccctgaacttatacgtaatgaacctttcacagagaaatgtgatatattcagccttggtgttatcatgtgggagctgtgcacattgagtcgcccatgggaaggcatctccccagttcaagtggtgtattcagttgctaatgaagggtcacggcttgagattccggaaggacccctcggcaggttaatcgcagattgctggtctgagcctgagaatcgaccgagctgccaggagatcctaacccgtctgctagactgcgaatatactgttagctaaaatggaagctgcatgctcgttcacccaattcctgcacaggtgagaatatttcttgtataaaacctataaaaaaagcctgccgattctgcggacttgaggtcacatattgaagccctgttcttttttttttacaacggcgaccttttctctcaaaaatgtaaaaaaatgcttccccggttatagaagaacatattctggcccagaaatgtgccttatcgcagggcaagctaattctagataattagcatgccctcgaattaaccaagtgtttgttccgaagaatgttgccagtttgccattaccctgtggaatatggta

SEQ ID NO: 7686 - DNA, 2694 bp, Zea Mays
cgcacgcctatacctccgtcgcctttgcctgccttggcgttacggcgtagggagggagggatggtgcttttgcctttccatgccgcctatttatagaggcaatcaggcaacacacagcaagcaactgagcatcacaacagcagcagcgagaaaagaaagaaagaaagaaagaaagaagcggcgtctggccaccgtaccccgccggccggagataacaagcaagcgccgcaacgcacgcgacgggccggccggggaggcgtataagtacgggcgcgtcttcttccgccgctgccccgacatctccctctctcgctggtgcgagagcgcgcgcgcaagcaagcaaggagcgtcgtgtctagctagctgagcacctggttttggagcatggaggacaacggtgccgccgccgccgccgccgctcccgcgacgagcatgcctgccgagaagcgtgtggcggtcatccagggggacgcgccgccggagccggcggcggggctactgccctgcgggccgaggaagacggggctccacctcttcgtcatgaacatcaggagcgtcttcaagctggacgggcttgggtcggaggtgctgcgcatcgcggtgcccgcgtcgcttgcgttggcggcggatccgctcgcctctttggtggacacggcgttcatcggccgtttaggttcggtggagatcgccgccgttggcgtttcgatcgccatatttaaccaagtctccaaggtctgcatctaccctctcgttagcgtcacaacgtcgttcgtcgcggaggaagacgcgatcatcagtaaggccgtccgaggaaacagcagccaggaggaggacgtggagaaagcctcccacgtgggctttgatccggagaccagcaatctgcatgcatctggccctgcaggtatggcagaatgcgtgaactcgtgtatccctacggagtgcgcagcagatccctctggcaggcaagggcggtgcgagaagaggtacgtgccgtcggtcacgtcggcgctaatagtcggttccattctcggcctgcttcaggccgtcttcctggtcctttcggccagattcgtgctcaacatcatgggtgttaagtccggatccccgatgcaagggcctgcggtgcgctacctaacgataaggtcccttggtgcccccgctgtgctgctgtctctggccatgcaaggggttttccgggggttcaaggacaccaagacaccgttatacgctactgtggttggcgacgcggcgaacatcatactggacccgattttgatgtttgtttgccatatgggcgtcactggtgcggctattgctcatgttgtttctcagtacatgataacgttgatactgctgtgccggctcgtccagcgagttcacgttatcccacccagcattaaatctctgaaatttgggaggtttcttggatgtggattcctgctgctcgcaagggttgtcgcggtgacgttctgcgtcacgctggcggcgtccctggccgctcgccatggacccaccgtcatggcaggcttccagatctgctgccagctctggctggccacgtctcttctcgccgatggattggccgtggcaggacaggcggtgcttgcaagcgcgttcgccaagaacgacagtaagaaggtcgctgccgcgacatcccgtgtgttgcagctgagcattgtcctgggcatgggtctcaccgtcgtgctgggacttgctatgaggttcggggctggcattttcacaagcgacgtgcccgtgatccaagtcattcacagaggcatcccgtttgtcgccgggacgcagaccatcaattccctggccttcgtgtttgatggcatcaactttggagcgtcagactacagatactctgcttactccatggttgctgttgcgtctgtgtcgataccatgcctgctgtacctttctgcgcataacggattcatcggtatatggatcgcattgacgatctacatgagtctgaggaccatagctagcacctggaggatgggggcagcgaggggaccatggacgtttctccggaactgatgatggattggcttggaactgatgatctgcggcacactgctgacagataaggctgcgccgcgctgcgcatgcgcctctcatgtagcatcagcgaagtatagtacgtgttctgctggtgtttaaagcttcggatatcggaggtagatgtagctatgggactatcccctcctgatcgtctgacttgtggccttgcgtggagagtttacgttgctccgttgatttatgttgtatcatgccaggatgtcagtttaataccatacatcggtaaagtgtctctctagtaactccattcttttctccttttccccccctttgtgcaagctatttttttagctgtttgatgagaccttgcaagaactgttttactgcgtggaagcagcaaaataacagcgataaaagagacgtgtagtaccagagtccctctgagtgccagtccaggatgctttgataacgttaaccagacaatttgataacaatccatactccactaagcatatagtagtgtatacccgaaaactcccatcagttatttgtccctcactccctctctatcggctttcaaccaataatcaggaacacataatgctgaaagaacacgaaatccttctagtctttgacagcatatagccgatacatcttgcaaaaata

SEQ ID NO: 7687 - DNA, 1835 bp, Zea Mays
ttttttgccatccattctccttattcctcgttgaattcggcccattggattcctccgacgcactgacccgcagtcccgcacaaccaccaccaccaccaccaccatggccgccgcgccaacaagctccggcgactcgccgccgcctgcgcagccggagtacggttccatctcctccatggtagcctcgtctgcctcctccgctgcagccgcggtcgcggacttcacccgctgggccgagaccttcggcaccgagaaggccgacgccgccaaggctgccctaacctccgccaccaccttggccacctcatctgcctccgaggcggcttctgcttcctccaaggccgcgtcctccgcatatgcggccgcctccgacctcaccctcgtcgccaaggaggagctggaatggttcaagacggagtactctgctcacgagcagattgtgttcggcaagatcaaagagggtgtcgtcatggcgataatgcatccaggcattgctgcaggctctgcaacccttgcagggattatccttttcaaaagtaacatgttttccttggaacatcattgctctgtggtgctatattgaatttcagctcttttcattatactttcattggttgcttttgctgatgcacaatgtaatttggtaattgcatgaggaattctatccatacatgcacttaaagaacatagggttcattatgactacatgctaaaccacattgttttatttaactcgattgtacttttcatactctagaattgatcctttattgtgttcttacaaatgattgaaatgttttgaaaccttggtcttcttagaatatgatgcacgtcaggccgtcagcacgtatcttattctggtcggattaaaagaactttgaaaaaatagtcagtgatttgagaattgatgaaatttattaaagctgctacgaagttttgttcaaattatctattctctacttagctgcctagtatttgatggtacatatcccgaggtaataagcttgccgttcattggaaatttgatccaatataatttcaagaaggctgaaaattggtcctgtatattaaatgaaatgcgaatgaatccttgcagggccaaggagctaccttattcaacgagtacggcacatgtttgttagcaaggagaccctactttctggagtacaggctgaagtgaatcacatgcggcagactgtgaatcttgtatccaatgaacgccaaaagctgttggatagagcagcaactgcagagaaaagattccaaaaaggatggaatacactcagggaagaagggcgttccattcaacacgagttgcgtgagattagtgatattgaaaaccaagcagtaggtctgaagggaattcttgatcagcttcccagagcacatgcatctgaatttcggtcgaagatgtctggcctagcttctcaggttaagaaggagaagcgagtgctcaacgccgccctcacgaagattgtgaactacggtgtccccatctgactgccactccagccagttgttctgagggtccattgtattgtatcagatttttgtgaaggaagacatgttcgatgtgtagggtgaacgctatactgcccacttggtttcgagaaaaggaaaagagaataagttgtgacccgtgcagatttctaatgtcgcaaaagcaacatctttgaaacctgagtaacagatgacattttgctatggtttttttttgttggcttattgacatgttcaccgccgtcagctgccgtatgcctgggaatcgtaaaagtggaatgaaatttttggttgaaatcatgcgagatgctgaccttgcattttataactttcac

SEQ ID NO: 7688 - DNA, 992 bp, Zea Mays
ccgccaccgccaccgccgtcccgctccacgcgtccgcaccctctgcgcggcgccggtcgagaactcgtgatgccccgcgaccgcgacgagccagccgccgtgcgcgtctacaccgtctgcgacgagtccaggtacctgatcgtgcgcaacgtgccgtcactcggatgcggtgacgacctcgccagtctcttcgggacgtacggccccgtggaggagtgcacgcccatggatgcagaggactctgagccctacactgacgtcttcttcgtcaagttctcacaggtcaacaacgccaggtgacctatgcccctcaatttgagagccctcaagataccaaggagaaactggaagttaggagaaaagaagtccttggccgaataaaatcatctgctggcagacctgaaggatcatctccagctcagggatcatctagtgggaatcaccaccaaatgaactctaataagagggaatatatgaagacaattcatgcttctcctattgaagatcctcgtttcagtcatgtgtcctcagacaaggattattttccatccgagtcgatgaatgctactgtaaagctagtcagagggaagcttgataagatacaatctggtggtgataattccagtacctcagcagcatccaggaaaccaggggttgataagcgcaggcgaatttgattgcagataatgccgagcacgcgttcaatgttttggtgtaatgttgatattagcataacataccaggattttaatggacttttttctatcaattttctcactcacattctaggccattaagttgtttatgtttcagggtggcggtgctatactatatggttagctagaattgctggaatatcgataaccgagttaagttaaaaatgcctcgcgtttagttttcccagctgtaatgttatgttactcttgcaatcaattgcatcggaattctcatattttatattgacgcgcctccgatgcatgtgtacggtgaga

SEQ ID NO: 7689 - DNA, 5436 bp, Zea Mays
agaccacgggtggcgcgatgcgacgtcggctgtcgtgctcgtgaccgcagccgcgccttcccgcctccacctcctcctgcgattccgatccgccgccctgtccggccggccggtaagccccgcctccgccctgttccctcggcacccatttttcatttcaactgagaggcggaggaaccaacccaggcacccaaccaaccctagatccaccgcttctgccacacgagagggagagatagacctctccgatctaattccgcatggcctcctcctcctccttcgcccccgacgaccagaccgacgccgacttcttcgacaagctcgtcgacgacgacgaccccgccaccagcctccccgacgacccacccatcccagagccgcaggcgcctcccgagggttcaggcaagggcggcgccggcgtccacactgcggtcaagcaggtgcagtgggcttccttcggaggtggcgcggacgacggtcctgacccatttgctcatctctcgggaggcgccggcgacgacgacggcttcctcgtgaccacggccgggacccagacggcctcggatcacgccttctttggcgggacccagagcttggccgccgaggtgacggaccaggacttcttcgccgggagcaactcctccaatcagcataatgtcagtggtcagcacgaccagggcggcggcagcactgcagtggattcagcagatcccatgtctttggaggccatgtaccctgggtggaagtatgatgaggcctcccagcaatggtaccagcttgacgacagtgtaaattcaactgggaatgcagctcaggtgctggacaacagcactcggtatgcacagcagcagcagcagctccacgcctcttatctgcacaattcagtgcattcagggcttgagacaattgctgaggagggcactaccgcaaccggtgctgtctcaagttggggccaaggggctgcctcagagtacccacccaacatgctcttctatgcagagtaccctggttggtacttcgacaccaacacccagcagtggcactccctcgagttataccagcaggccgccatgcaggctggaacagctagcatgggccagactgttattgcaaacgacggtgttgctgcaacttcctctctgacaggctataatgccgcacaaaatgaggaccttgctgcccatgatcaggtcacccaacacaactcattctcgaatagtttcgctcatcagaaccaatggcagattaccgatgcatttggtaacaatgtacgatctgaatgtgctacagagaacagcctggctagtagttcctatggttttcaacaacacaggaatgctgattctaccagttcatctacgaaccaacgggctggttttaatgcagctgaaactgttactgatcactatggtggacgcaagggcgttgaatcgccaagtattcagagcggttatagcacttctgacattcaacaatccagtcacaaggcattcgaaccttacacgggttatcaggaccattacaaagcatttgaacctgccacaggtcaccatgccagtaacaacatgttcaaacagtccacaggtaaccagggaggttacaaggcgtttgaacctgccatggataaccagagtggctacaaggcatatgaaccttctatgggtcaccatagtgcttcctgggaacccgtgccttccacgggtcaccagactgatttcaaggggtccggagcttcaactgttcatcaggccggatacaaagaatttgaaacttctacaggttacaatacaagtttaaaggcatttgaaccttcttcatctcaacatgctggttacatgggttcccaatctaactacatgggatttgacacttctacaaaccaccatggttatggcgatgcaaatgttgttgcgagcactcaaggctttgtcccaatgcaaaccacataccagggacagacacaagcaattgcaaactcacaagtgcacctgtcaaatagctatttgggtattgacaactccatgaactttaatcagcagcaatttctgggtgcaaatgcctcaaacttgcaattcagtcactccccacatgatggtagagctggacgaccaccacatgctctcgtttcttttgggtttggagggaagctcatagttatgaaagaagctagctccatgcccgcaagctttaacaatggaattcagggtaactctagtggcacagtttcagttcttaatctgtcagaggtggtcatggataaaattgattcttcaagcatcactaatggtagtgcacttagttatttccatgctctgtgccgccaaccagttcctggtcctctggttggtggaagtgctgcatcaaaggatgtaaataagtggattgatgaaatgattgcatggtacgattcttctagtgaactccagagaagtgatactcgcaagttgcttatttcattgctgaagatactgtctcagcactatggaaaactccgttcaccttttgcgtctgacccatcacaagaggagacagatggtccagaaatggcagtaactaagctattttcatcgtttaaaagtactgttaatatgggagattatggatccattgtttcttgcatgaaaaatattccttcagaaagtcagatgcaggctgttgcacaggaggtccaaaatcttctagtttctgggagaagaaaagaggcccttcagtgtgcccagggaggtcaactttggggacctgcaatcatactggcattgcagctcggtgatatgttttatgtggatacagtgaagaaaatggctcacttccattttgtatcggggtcccctctgcgaacgctatgccttctgattgctggacaacctgcagatgtttttaatgtagataacaatgtcaacattgactatggtacatcccatcaacctatggagcctggtcctaatggtatgttggatgattgggaggagaatttagctattattactgcaaacagaacgaaaggtgacgatctagtaatcacccatcttggtgactgtctctggaaagaaaaaaatgagattgcagctgctcattcgtgctatttagttgccgaactaaatattgattcatactcggaaagcgcaaggttgtgcctcattggtgcagatcacttgaagtgtcctcgaacatttgccagccctgaagccattcagaggacagaggtttatgaatacgcgaaggtgcttggtaattctcagtatatcctactaccctttcagccatataagctgatatatgcatacatgcttgttgaagtggggaaggtttctgattctttgaggtattgccaagcgtctatgaaggtattgaaagcctctggccgtgcccctgaattggaggtgtggaagcaattaatttcttcactggaggagaggatacgcactcaccagcagggtggatatggcacaaatcttgccccagcaaaactagttgggaagatttttacctcgcttgataaatctatatcccgcatgatgggtacaccatctgcaccacttccaccattgccacatggatctgttagcgatagagagagccactctatgcctgaagcagcaaaatttataaatagccaatcagtaatggccatgtcatcgctaatgccatctgcttcaatgcagtcaatgactgagatagcagagaatagtgatggcactggcaggaaaatggcacacaacagaagtgtttctgagccagacttcggtagaacatcaaaacagggtggtggatcagatggcacacagagcagtgcagcaggatctggcagttctcgatttggttggctagtgcagaagactatgggattagtgtcaaaatctcaccgccaggcaaaattaggggatcagaacaaattttactatgatgaaaagttgaagcggtgggtggaagaaggtgctgtggttcctgccgaggagcctcctcttcctccccctccaacaaaatcatctttccagaatggtatgccagaccataagttgaatggccacatgagcgtaggccatgctcccagtggagtcacagaatggaaatcctcaaattattcagagcaaggtctgggtatgccgccaattccacctagccaaaaccagttttcttctcgtgggcggatgggtgtccgatccagatatgttgacacattcaataaatcaggtgcatctggagcggtgccatcatataacaaaccagctgctccatccgtgacaccaccagctggtgccaagttcttcataccgactgcagcacctgttgctgcagatcagatgatgccacaccaagcagcagagatacacagtgaaaccatgcaacaggatgagagggcagcctcaccgcctgctggaacatcattctcttcaaccccaccacccacacaattttcatcgcccccaccacacacgcaattctcgtcaccaatgcaatcaacaatccatcggcaatctagtatggcgaacatctccaccccttaccagagttccggggtatcatcattaagcagcgacacctcattctcaaaatcacgagctgcatcctggagtggaacatactctgagcagttcagtgcttttgcgggcacaagatcacccgatggacagacggtgcgctcaccactcatgcctggcaaaccatcacacagtcgttccaacagcaactcatcagtgcagctcaatggattgacagaggatcttcatgaggtcgagctctaattggcggctgctcagcatgactgtcgtcttttatccaccacaaaaggcagccataacaacccctgataaaccccttcccaagcgggtgacagaaaaaaaaggtgcccacgaaatgctgatcacgggggacgctgcagttggaatgggcatgtgggacttttgcacgagattctggggtgcgctctaaaccaccaagggaaagagttgggctggcctcgtttacaggtgagaaaaatggagcaggagccgcatgcagatgcccttgtacagataatctgcgcctacccagttttttttttttttaaaaaaaaaacgcgaacaagttcacacccgcactccattttgatgttcgtttctgggcgaaggatagaagagaaggtgcgttctagtgtgacaagtatggctctgtagagtactgttgttttggtgtactgcactagccgcagtatattgtctctgttttattctttgggtacgaatcgattctttcatcttgaaacaattgtgttacgccttgttgtgtattcttgtgccctggccgatgtggcggatgcaattgtacgtgttcttcaggtcttggttgtgctgtcgctatatccttgagcacacgtgtgtgctgagctgttttgttgacaatgcgcatcgtaatactggatctttttttaataaactacacgatttgcagttagttgtt

SEQ ID NO: 7690 - DNA, 1486 bp, Zea Mays
atcatctaaaaaggctaatataataaaaaaaaactgcgcgcactgctgtcaccgcggcggagggaaaaatcgggcgtaccccggtgcccgttcaccgccgttcacgccgcgtgtgcgctctggctctgccgctctctctctctcctgcgcgtggcgcaactgccgtcctataccaggcgcccaggtctagcctcgtcggtgccttcgccaggtctttctcgggcccttcgccaacgacgagcgcccgctagaaggtatgcattcgtgttcataatattgtatttgactaaaaagactgggcctacgcatgggggctccaaaacagaggtggacttctgaggaagaggctgctcttagagctggagtagccagacatggagttggaaattggcgcatgatattgaatgatccagaacttagctccacattgcgctaccgctcgaatgttgacctaaaggttaaatctattcactcgtttttacgtaagattgatttagtgaagggactgccatatttgggtattccttgaaatcatgtgtcttttggttttcaaatttctagattcatcttcaatcttaatgctcatatgttccttttttattaatcactacttaggacaaatggcgcaacatgaatgtaattgtcacttcatcgagtactcgtgacagggggagaacttccacgaggagaacccgagctgctcctaagaataatgaccaattgttggcaatgagcacaatcacttctgaggttgatgatgagattgttgatgtaaagcccatagtatcaatgtctgttgaaggatggaatacttcaaattcaaagaaatctcactcaaggctagacaatattataatggaggctataaagaacttgaatgagcctacagggtcccacagaactactattgctaattacatagaggagcaatattggccacctagtgattttgatcacttattgtctgcaaaactgaagtatttagctaccagtgggaaattgttgaaggtgaatcggaagtacaggatagcacctagtttgctggaagacgtgcaaagagaacccttgaaattagggagtgatgctagtagaacccttacaagatcccaagtcgatgctgaattggtccgtatggcaactatgactgttgaggcggcggcggcagctgctgctcatgcagttgcagaggcagaggctatcatggcagaagctgaagcagctgctagggaagcagaagctgcggaagcagaggcccgagctgcacaggcctttgctgaagcagcagttttgacactgaagaacagaaatgctgcgaaattggtatagctcgagtccatgaatcttagatatgccctcttgtccttccacacgtagaatccagttccgtagctctgtatgcaactaattggttactaaaagaacctgaaatcagaagttttcacaaacacaccgacttattcaccgaagattatgatttccaaagtaa

SEQ ID NO: 7691 - DNA, 982 bp, Zea Mays
ccggattttggtagttccatctacgtacatgaactcggaggactacgagggcgggttcgacgagctcgacatcaaggcgatgctgtcgaggatctcgtcggacttccgcggctgggccgagggcttcgtgccgctcgccatcggcggcagcgcggacgaccaaccctcggcggcggagctgctggcgcggagcttcttcgccatggacccgcgcgtggcgcacggcctggcgcgcatgatcttcctgggcgaccagcgcgagctgctgggtgacgtggccgtgccgtgcacgctggtgcacgtctccggcgacttcgcggcgcccccctgcgtcgggcgctacatgcaggcccgcatgcgcaccgcctccatgtataccatcgactcggtgggacacttcccgcagctcgtcacgcccgacgagatgctcaggatactcgaccgcattctcgtcggctccgctgcttcccaagaggaggagactaccgcggcggcggcggctgccgccaagaccgagacgacgagtagcgaggtcgtatcctctggtggtgttgccgatgcgctggagtccaagggccgtatcgacgtggcgacatagtgctcctgctgctctggtgcaacatccctctcgaagtctcgatctatcagccttggctggctcttgtgctggtctcagttgatttgcttcggtccacactccacacgtttaacttacattattgcgcttttggattttctaatgcgtagaaacattaccatggttcgttcggaatttttagccatcacgtcacccaaactgcgtgtattattggtttgatcatggattgaattaaatgaaacactgagtgttaaagcattgtaaatgacatgcatggtttgcagccttgcaggattctagcttcctagaattatttatttttttggaaaatatttcatggattgaattaaatgaaacacttgagtgttaaagcattgtaaatga

SEQ ID NO: 7692 - DNA, 2511 bp, Zea Mays
ctatatgcacaggttgaagatgatggcaacgacatcttgtgtcttccaattgatttccagcagcttcaggagttacgcatgtttattgaagataaactcaatgagtccccaaaagaagccttgctttgcatgggagttgcagctcatctggctctgtgctcggacaaggacaacaaaaggaacaagataaatatcaggctttacaacacgggagcagctattgcattaaagaaactaaaagcagcctttattaggatgcaagagcagaagctttatcccagatagatctagtgcacagctgatggattttcaaaaaataagaatacaggagcttgcaagcgctgacaaccatgaagaaggccgagtgccacgcacagtggagtgtgagcttacagaagatctcgttgattgttgcatccctggagaaattgtaacggtaactgcaattgtgaaagtgctcaacaaccatatggatgttggtggagggaagtccagaatcagcagtcaaggtttatactacctgtatctggaggcagtttcagtgagaaagttgaagtcccatgctgtttctgacaaagaaattcaagctagtggaatttgtcattctcagtcttctactgtaaatgatgattttgctgtcaaatataaagaaaaatatggcaccgatgtttttcgcagaatacttcaatccttttgtccctctatctatgggcatgaacttgtaaaagctggtatcacacttgctctttttggcggtgtgcagaagaactcaatggatcaaaacatggtccctgttcgaggagatattcatgttattgtagttggtgatccagggctaggcaaaagccaactcctccaagctgcagcagctgtttccccacgaggaatatatgtatgtgggaatacgacaacaaaggctggcctaactgttgctgtggttaaagattctatgacaaatgattatgcatttgaggctggtgccatggtccttgctgatcgtggaatatgctgtattgatgagtttgataaaatgtttacagagcatcaggctttacttgaagccatggagcagcaatgtgtttctattgcaaaggctggtcttgtagcaagtttgtcagctcgaacttcagtgttggcagctgcaaatcctattggtggccattatgaccgagcaaaaacagtgaacgagaatctaaaaatgagtgctgccctcctttctcgatttgacttggtgtttattctacttgacaagccagatgagtcactagataaaagagtgtcagaccatataatagctctccataccaatgatgttgataatttcagacccaacaagaggaccagaacagggtcacattttgatggtgatccggggcttggagttggtggaaattcagtagcttcaaggctgaggctacacccagagaaagacaaggacttcactccattatctgggcaacttcttcgcaaatatatatcttattcaagagaacatgtcttccccagaatgtcaaaggcagcagctgcaattttgaaagaattttatttgaagctgagaaaccgcagtgcttctgctgatggtacacccatcacagccaggcagttagaaagcctagtcagattagccgaagctcgtgctcgcgtggatctaagagatgaagtgactgaagaagatgctcaggatgttgtcgatatcatgaaagaatctctgtatgacaaatatgttgatgaacatggttttgttgattttactcggagcggtggaatgagccaaccgaagcaggcaaagaagtttctgaatgcattaaacaaggaatctgagttgcagcaaaaggactgcttctcgagaactgaactttacaccatagctgataagatcagcttgcaagttccagacttggacactcttgtagaaaagatgaacattgccggttaccttattcaaaaaagatcagggatgtatcagctggtgactgcgccatattaacaatgcagccaacgaggtcaagatggagagttttcttgaatgaaactagaatttgcacctgctttgtctgtactagtgcctgctctagatctccagacactctggaaggccttaatccatttcaacataattgacatgtacctttcagctcatttccccccgtcccgtgagagatgtatggtttggaagctatgcgtatcgtcatggctgcgcacatacgtgctgcagtgtacaggcgactgaagtgcacgcgtcgcaggatgagcactaactttggtagcttggtgtatgccatggttgcgatatgatatattattgtgaaacaggaacctctagcggttattagtttatagatattcaagtttgccaatgaaacatccagaatagcatatgatgcattttacaccccttacacccgatcactcggaaaacatctagcacgctgtaaattactccctcagcaatagtaattattgctgttactgcgctgcactgcttgggaacactccttttcaaagccacat

SEQ ID NO: 7693 - DNA, 2759 bp, Zea Mays
tccggtaaggcgacgaaatgtacggcgacacaatgaagggtcaccaacccaaaggggacaagggcaatagggacgactacaccttcaattcagaaggctcgcggatgtctggccgacatactttcccgaggaggccgaggtcgggctgtcagaatccgaccagaaggtccgcctcaccaccgccctggctgatttcttctccacgcccgagatggcggaagtccttcgctcacgggttgaagatgatggcaacgacatcttgtgtcttccaattgatttccagcagcttcaggagttacgcatgtttattgaagataaactcaatgagtccccaaaagaagccttgctttgcatgggagttgcagctcatctggctctgtgctcggacaaggacaacaaaaggaacaagataaatatcaggctttacaacacgggagcagctattgcattaaagaaactaaaagcagcctttattaagaaacttgtcacagtgcgtggtactgtgctcaaagtcagcactgtaaaacctcttgttttgtggttgaaattccgatgcatgaagtgccgtaaagaaataccccgtgtgttttgtgatggaaaattttctcctccaatgtcctgtaccatccagggatgcaagagcagaagctttatcccagatagatctagtgcacagctgatggattttcaaaaaataagaatacaggagcttgcaagcgctgacaaccatgaagaaggccgagtgccacgcacagtggagtgtgagcttacagaagatctcgttgattgttgcatccctggagaaattgtaacggtaactgcaattgtgaaagtgctcaacaaccatatggatgttggtggagggaagtccagaatcagcagtcaaggtttatactacctgtatctggaggcagtttcagtgagaaagttgaagtcccatgctgtttctgacaaagaaattcaagctagtggaatttgtcattctcagtcttctactgtaaatgatgattttgctgtcaaatataaagaaaaatatggcaccgatgtttttcgcagaatacttcaatccttttgtccctctatctatgggcatgaacttgtaaaagctggtatcacacttgctctttttggcggtgtgcagaagaactcaatggatcaaaacatggtccctgttcgaggagatattcatgttattgtagttggtgatccagggctaggcaaaagccaactcctccaagctgcagcagctgtttccccacgaggaatatatgtatgtgggaatacgacaacaaaggctggcctaactgttgctgtggttaaagattctatgacaaatgattatgcatttgaggctggtgccatggtccttgctgatcgtggaatatgctgtattgatgagtttgataaaatgtttacagagcatcaggctttacttgaagccatggagcagcaatgtgtttctattgcaaaggctggtcttgtagcaagtttgtcagctcgaacttcagtgttggcagctgcaaatcctattggtggccattatgactccataccaatgatgttgataatttcagacccaacaagaggaccagaacagggtcacattttgatggtgatccggggcttggagttggtggaaattcagtagcttcaaggctgaggctacacccagagaaagacaaggacttcactccattatctgggcaacttcttcgcaaatatatatcttattcaagagaacatgtcttccccagaatgtcaaaggcagcagctgcaattttgaaagaattttatttgaagctgagaaaccgcagtgcttctgctgatggtacacccatcacagccaggcagttagaaagcctagtcagattagccgaagctcgtgctcgcgtggatctaagagatgaagtgactgaagaagatgctcaggatgttgtcgatatcatgaaagaatctctgtatgacaaatatgttgatgaacatggttttgttgattttactcggagcggtggaatgagccaaccgaagcaggcaaagaagtttctgaatgcattaaacaaggaatctgagttgcagcaaaaggactgcttctcgagaactgaactttacaccatagctgataagatcagcttgcaagttccagacttggacactcttgtagaaaagatgaacattgccggttaccttattcaaaaaagatcagggatgtatcagctggtgactgcgccatattaacaatgcagccaacgaggtcaagatggagagttttcttgaatgaaactagaatttgcacctgctttgtctgtactagtgcctgctctagatctccagacactctggaaggccttaatccatttcaacataattgacatgtacctttcagctcatttccccccgtcccgtgagagatgtatggtttggaagctatgcgtatcgtcatggctgcgcacatacgtgctgcagtgtacaggcgactgaagtgcacgcgtcgcaggatgagcactaactttggtagcttggtgtatgccatggttgcgatatgatatattattgtgaaacaggaacctctagcggttattagtttatagatattcaagtttgccaatgaaacatccagaatagcatatgatgcattttacaccccttacacccgatcactcggaaaacatctagcacgctgtaaattactccctcagcaatagtaattattgctgttactgcgctgcactgcttgggaacactccttttcaaagccacat

SEQ ID NO: 7694 - DNA, 2879 bp, Zea Mays
tccggtaaggcgacgaaatgtacggcgacacaatgaagggtcaccaacccaaaggggacaagggcaatagggacgactacaccttcaattcagaaggctcgcggatgtctggccgacatactttcccgaggaggccgaggtcgggctgtcagaatccgaccagaaggtccgcctcaccaccgccctggctgatttcttctccacgcccgagatggcggaagtccttcgctcacgggttgaagatgatggcaacgacatcttgtgtcttccaattgatttccagcagcttcaggagttacgcatgtttattgaagataaactcaatgagtccccaaaagaagccttgctttgcatgggagttgcagctcatctggctctgtgctcggacaaggacaacaaaaggaacaagataaatatcaggctttacaacacgggagcagctattgcattaaagaaactaaaagcagcctttattaagaaacttgtcacagtgcgtggtactgtgctcaaagtcagcactgtaaaacctcttgttttgtggttgaaattccgatgcatgaagtgccgtaaagaaataccccgtgtgttttgtgatggaaaattttctcctccaatgtcctgtaccatccagggatgcaagagcagaagctttatcccagatagatctagtgcacagctgatggattttcaaaaaataagaatacaggagcttgcaagcgctgacaaccatgaagaaggccgagtgccacgcacagtggagtgtgagcttacagaagatctcgttgattgttgcatccctggagaaattgtaacggtaactgcaattgtgaaagtgctcaacaaccatatggatgttggtggagggaagtccagaatcagcagtcaaggtttatactacctgtatctggaggcagtttcagtgagaaagttgaagtcccatgctgtttctgacaaagaaattcaagctagtggaatttgtcattctcagtcttctactgtaaatgatgattttgctgtcaaatataaagaaaaatatggcaccgatgtttttcgcagaatacttcaatccttttgtccctctatctatgggcatgaacttgtaaaagctggtatcacacttgctctttttggcggtgtgcagaagaactcaatggatcaaaacatggtccctgttcgaggagatattcatgttattgtagttggtgatccagggctaggcaaaagccaactcctccaagctgcagcagctgtttccccacgaggaatatatgtatgtgggaatacgacaacaaaggctggcctaactgttgctgtggttaaagattctatgacaaatgattatgcatttgaggctggtgccatggtccttgctgatcgtggaatatgctgtattgatgagtttgataaaatgtttacagagcatcaggctttacttgaagccatggagcagcaatgtgtttctattgcaaaggctggtcttgtagcaagtttgtcagctcgaacttcagtgttggcagctgcaaatcctattggtggccattatgaccgagcaaaaacagtgaacgagaatctaaaaatgagtgctgccctcctttctcgatttgacttggtgtttattctacttgacaagccagatgagtcactagataaaagagtgtcagaccatataatagctctccataccaatgatgttgataatttcagacccaacaagaggaccagaacagggtcacattttgatggtgatccggggcttggagttggtggaaattcagtagcttcaaggctgaggctacacccagagaaagacaaggacttcactccattatctgggcaacttcttcgcaaatatatatcttattcaagagaacatgtcttccccaggcagcagctgcaattttgaaagaattttatttgaagctgagaaaccgcagtgcttctgctgatggtacacccatcacagccaggcagttagaaagcctagtcagattagccgaagctcgtgctcgcgtggatctaagagatgaagtgactgaagaagatgctcaggatgttgtcgatatcatgaaagaatctctgtatgacaaatatgttgatgaacatggttttgttgattttactcggagcggtggaatgagccaaccgaagcaggcaaagaagtttctgaatgcattaaacaaggaatctgagttgcagcaaaaggactgcttctcgagaactgaactttacaccatagctgataagatcagcttgcaagttccagacttggacactcttgtagaaaagatgaacattgccggttaccttattcaaaaaagatcagggatgtatcagctggtgactgcgccatattaacaatgcagccaacgaggtcaagatggagagttttcttgaatgaaactagaatttgcacctgctttgtctgtactagtgcctgctctagatctccagacactctggaaggccttaatccatttcaacataattgacatgtacctttcagctcatttccccccgtcccgtgagagatgtatggtttggaagctatgcgtatcgtcatggctgcgcacatacgtgctgcagtgtacaggcgactgaagtgcacgcgtcgcaggatgagcactaactttggtagcttggtgtatgccatggttgcgatatgatatattattgtgaaacaggaacctctagcggttattagtttatagatattcaagtttgccaatgaaacatccagaatagcatatgatgcattttacaccccttacacccgatcactcggaaaacatctagcacgctgtaaattactccctcagcaatagtaattattgctgttactgcgctgcactgcttgggaacactccttttcaaagccacat

SEQ ID NO: 7695 - DNA, 1424 bp, Zea Mays
tgactccaatgttcagttggtggtcaacagatgagttgaacggtgttaggggcctgatgctcgacacgtacgacttcgacaacgatgtctggttgtgccactcgttccaaggaaaatgctacaacttcactgccttccaacctgccatcaatgtgttcaaagagatccagacattcctcgacgcgaacccgtcgcaagtggtcacgatcttcctagaagactacaccgcggtagggtccttgccgagagtgttcaacgcctccggcctcacgaagtactggttcccggtggcaaagatgccgaagagcggcggcgactggcctctgctcaaggacatgatcagccagaaccagcgcctgctagtcttcacctcaaagagagccaaggaggcgagcgaggggatcgcgtatgagtggaactacgtcgtggagaaccaatacggagatgagggcatggtagcaggcaaatgcccccaaccgcgcagagtctccggccatggattccaaaggccagtcgcttgtcctgatgaacttcttcacgactaacccgagccagaccggtgcctgcgggaacaattcggcgccactcgacagcatgctgaagacgtgccatgacgcttcaggcaaccggtggccgaactacatcgctgttgatttttacatgagaagtgacggtggaggagctcccttggctacggacattgcgaacggtcatatggtgtgcggatgcgacaacatcgcgtattgcaaggcgaattcgacattcgggacctgcgtgatacccccaccgccgccgccgtcaccgcccaaggcatccacccccggcagcagaggctcaacagcaggcggcgatgctagcgctggaacgatggccctgtcctcgcaatggagcttcttgctgggactggcttctctgcttcttttgtcgcgctcgtgagagccgagcggcattggtgactggttttgctgctcttgctacatgctctgcgagctgataggagcatcgtcccatgagatgagctgaggctgagctgaactgagctgtatatttgggtttactgcgcaacgtagttagttggatacgggaatcagttaaattcatcattcatttttattgattggcgtcgttatcgtgaatgttctaataagttccttaaaaaaatgtctcatggccctactgtcagtgacgtagccatgtgaaccgggagagagaaattacagcgtgtttatcttgttcgaagtgctttcaggtccggactatcgattttttttttctattgtctcctttagctcggcatcgctgcagtgcataggcttatctcagaaccacggcagttttagctcggtatacccaaaagcatgaaattgttactaagtgtttttgaagaactttcagtctaaagataaatttccataaaaacaaaa

SEQ ID NO: 7696 - DNA, 1489 bp, Zea Mays
gcacccggatagatgtggttagttgctctactgtttatgataactttctgccgtttaggatgtctgtgggtaccagttcataaataggcgtgcgtgccgtggaccttggtgttgctacttgctaccaatggtcatggcgaagcagcaccatgacaaggggttgccgaagcaagctcgcaatgagcccgcgccgttccggctcgagcagtgttgccgctgcgacgatgcccaccgtcaggccgacgacgagtccatggatgctgctgggtctgctggcccgctgcacctgactctcggcccgctcggctcggccgccggcccccgttgctcgtggcggtgtcgcgccggcgccggcgccggcggcgcccgcaacggtggccgtcctccgcgggtcccggtacatgaggccggcgcaggagctgctgggcgaggctgtgcgcgtggccgacctggcggctgccgacgacgaagacgaggaccaggcggcggagcggctcgagggcggcggtcaccgggcggcgcgtcgggcggccgggaacgacggcgacggcgtccaggccaagctcctctacctgctcagcgagctggagagcaggcgggagcgctacttcggcgagctggagcgcgtggtgtcgtcgttcgagccggcgctgggcggcggcgcggcggcggcgtacacaaccctgatggcgcgggccatgggccgccacttcggcaacctgcgccgcgccatactgcgcaggctcaggctccaagccgccgctgcggcgaggaggtctctgcggcgcggcggcgaggaccaggacgacgacgacgacgacgacggcgacggcgacggcgaggtgaccgaggagctggtggacaggttggctcggcggacgaagctggccgcggcggcgcgggcggagcaagcgtggcggccgctgcgtggtctgccggatggctccgtggccgtgctccgggcgtggctcttcgaccatttcctccacccgtaccccaacgacggcgagaagctgaggctggcggtgaccaccggcttgagcaggcgccaggtccatatccaactggttcatcaacgcgcgcgtgcggctgtggaagcccatgatcgaggagatgtacaaggacgagttctccgacggttccgccgtctccagctacgacgacgccagcgccagcggcgcctcctcatcctcctgagtcttgaccacctcgccctcgagagcgtttatctagctaattcatcactcggttgattggtcctgttgctttgggattatattaatttatttatatccatgcttaatcatgtgcctctcttgtattttttttagaaaaggacatactccttcaaaatctagcgacttttcgaattcatgtgcaatgctataagcccataactaagcgttcgtttttgtgttctcaactgaggcattctatatcacgatgttcatgttcgccatgtgacgtcgcataaaaaaatgaataagag

SEQ ID NO: 7697 - DNA, 1784 bp, Zea Mays
aaaatttctcgtggattctatggccagcgtaggtacacaaagcccctttctcctccgcatgctcatatttaaatcccacagtgcgtgctgcccgaaagatttgggtatccctgcctccgtggtagaagtcctggcagctccagctccaagcgcattagctcgacctaattccttcttcaactgttgtgtacttgtgtgggtgtctctctccctctgcccgagatgttgtctctgagctgcagctgcccaggggtgtcgtccatgagcaagacggcgctcgattgggggcacctggtggcctcctgccgcagccgctggcacggcgcgcgggcgccgcccagacggcggcgcacgccatgtgtttgcttggttgccttaccgaccactacccagcctggccctgctgctgttgatgtgccctcacggacggttcctgctgtcacaacatcaagcgcccctgaacgcatttctgtttctgcgctgctcgaggttgtctcagacgacttgctcaacctcaacaacaatctcaaatcgttttagtttctgcagcagaacaaattttcagtgctggtggaaagaggttaagaccagcattagtttttctggtatcgagagcaactgctgaattagctgctttgccggagctaactacagaacatcggcgcttggctgagatcatagagatgattcatactgcaagtctaatacatgatgatgtcatagacgatagcgggatgcgaagagttaccttgtcgcattcgtacgtgatgcaggaagcttcatggaaagaaacaatccaccagctgtacggcacacgggtggctgtgctcgctggcgattttatgttcgcgcagtcttcttggttcctagcaaacctagaaaacattgaagtcatcaagctcatcagccaggtaattaaggatttcgcgagcggcgagataaagcaagcgtcgacgcttttcgactgcgacgtgaccctggacgactatctgctgaagagctactacaagacggcctccctgatcgcggcgagcacgaggtccgcggccatcttcagcggcgtgggcagcggcgtgtgcgagcagatgtacgagtacgggcggaacctgggtctggcgttccaggtggtggacgacatcctggacctgacgcagtcggcggagcagctcgggaagccggcggcggggagcgaccttgccaagggcaacctgacggcgcccgtgatcctggcgctgcgggaggagccccggctgcggggcatcatcgagtccgagttctgcgagcccgggtccctggcggccgcggtggagctcgtgcacaggggcggcgggatccggagcgcgcgggagctcgcggaggagaaaggcggcctggcgttgcgcagcctgcagtgcctcccgaggagcgagttccggagcgccctcgagcgggtggtgcactacaatctccagcgggttcggtagaggaaggtgctgtgcttccatgtggcagtggcatggcagtgcgtgttgtttagtgtaaccgacactgccgcgtgcccaccaacctcgtggagcatgcatctgtaaggttctccatttctttggggggtgagtgagggcactagtagcatggtgtgcagtggttgtgaggttctattgttgttgtaactacaagcaggtaaactgttctggacgacaccacgatgtatatgtacatatgaaatgcactgctgctgtgggatgtatgcaatgagccaatgagtaggtttatctcacaatcatcagctgatgctagctgatggc

SEQ ID NO: 7698 - DNA, 1862 bp, Zea Mays
aaaatttctcgtggattctatggccagcgtaggtacacaaagcccctttctcctccgcatgctcatatttaaatcccacagtgcgtgctgcccgaaagatttgggtatccctgcctccgtggtagaagtcctggcagctccagctccaagcgcattagctcgacctaattccttcttcaactgttgtgtacttgtgtgggtgtctctctccctctgcccgagatgttgtctctgagctgcagctgcccaggggtgtcgtccatgagcaagacggcgctcgattgggggcacctggtggcctcctgccgcagccgctggcacggcgcgcgggcgccgcccagacggcggcgcacgccatgtgtttgcttggttgccttaccgaccactacccagcctggccctgctgctgttgatgtgccctcacggacggttcctgctgtcacaacatcaagcgcccctgaacgcatttctgtttctgcgctgctcgaggttgtctcagacgacttgctcaacctcaacaacaatctcaaatcggtacacatgactgttgaaggttattttatcagttcgtgcttaatgagctctgatagtattatctcccacagtgatcactgatataacttcaacagcttgttggtgcagaaaatccagttttagtttctgcagcagaacaaattttcagtgctggtggaaagaggttaagaccagcattagtttttctggtatcgagagcaactgctgaattagctgctttgccggagctaactacagaacatcggcgcttggctgagatcatagagatgattcatactgcaagtctaatacatgatgatgtcatagacgatagcgggatgcgaagagggaaagaaacaatccaccagctgtacggcacacgggtggctgtgctcgctggcgattttatgttcgcgcagtcttcttggttcctagcaaacctagaaaacattgaagtcatcaagctcatcagccaggtaattaaggatttcgcgagcggcgagataaagcaagcgtcgacgcttttcgactgcgacgtgaccctggacgactatctgctgaagagctactacaagacggcctccctgatcgcggcgagcacgaggtccgcggccatcttcagcggcgtgggcagcggcgtgtgcgagcagatgtacgagtacgggcggaacctgggtctggcgttccaggtggtggacgacatcctggacctgacgcagtcggcggagcagctcgggaagccggcggcggggagcgaccttgccaagggcaacctgacggcgcccgtgatcctggcgctgcgggaggagccccggctgcggggcatcatcgagtccgagttctgcgagcccgggtccctggcggccgcggtggagctcgtgcacaggggcggcgggatccggagcgcgcgggagctcgcggaggagaaaggcggcctggcgttgcgcagcctgcagtgcctcccgaggagcgagttccggagcgccctcgagcgggtggtgcactacaatctccagcgggttcggtagaggaaggtgctgtgcttccatgtggcagtggcatggcagtgcgtgttgtttagtgtaaccgacactgccgcgtgcccaccaacctcgtggagcatgcatctgtaaggttctccatttctttggggggtgagtgagggcactagtagcatggtgtgcagtggttgtgaggttctattgttgttgtaactacaagcaggtaaactgttctggacgacaccacgatgtatatgtacatatgaaatgcactgctgctgtgggatgtatgcaatgagccaatgagtaggtttatctcacaatcatcagctgatgctagctgatggc

SEQ ID NO: 7699 - DNA, 5603 bp, Zea Mays
atgcagcccagcgggggggcctccggcagctcccggggctcgccggcgtcgtcgccgcacccggaccaccagcagccgccgaccccggcgtccgcgcagcagcaagcgcagcaactagggtttaggggccagggaatgatgcatcaccatgaacagcagcaagccttccactctggtgcgccgcatggcatgatgggaccaggcggcgtgaacttccctcagtcctccggtccagtgtcgtccttccagggtcagaggaatctgccgctgtccagtggtggaccgcagggcatggttggaggtcagatgcacaaccaggttgcgatgcagcaacagttcctgaagcttgcgatgcagcagcagcagcagcagcagaaggcggcccaggggatgctcctccagcagcaggccaagatgaatatggcgggttcatcatcaagagaccaggacatgcttaacaaccctgccaagatgcaggagcttatggctcttcatcaggcccagatgtataagcggcagtgtgagcagaaagagcaggggcagtcaagtggtagtgagcaaagaagcggtgatatgaggccacctatgcctcctcaaggagtccctggacagcagttgccatcaatgggtatgatcaggcccatgcagccaatacaaggccaggtaggaatgggcagcgctggtgggaacccgataacaccaacacagtttcaagccatccaagcctgggcaaaagagcacaactttgatctgtccaatcctgcaaacataagtgcaatttctcaactcctgcccatctggcagtccaacaggatggcagccatgcagaagcagaacgaggcaaacatggctgcgcagcagcagcaagcattgccctctcaggtgaacagtgataccccagggcatgtcaatgctcccagccagggtgccctactgaagccccggcaaccccttgcccccagctcaatttctggcggggaagaggctaaggtagtgaattcgagcaacttgcagttgcaacaacagttccctgtgcataacagggatggttcaaatgaaagggctgtgaggtcacttatgacagggggcaatggtgcgcaaacgacgcatatcccccaaagttctggacatgtaaataagattcccgagcaacccaatccaaaaaatgtgcttgcaaattccgaagcaatgcagatgcagcatgtgagacagatgcaacagcttaaccaggctgctgcccccacatctaccccaattgaagcaggaggatcacaggtcccaactagtgctcagccacaaacagggcaaacgggtttcaccaaaaatcaacttcatgtactcaaagctcagatattagctttccggcgtttaaagcgtggtgaccgactcccgcctgaagttcttgaattaattgtatctggtcggccacctgattcacaaggacagcagcaagtttcgggaccccagggcctgtctgaggaagaagtgaaggctgctgcacaatgtgctggtcaggaggttatgataaggaacacattctctgagatgaatgcaccaagggataatacatctgttaacaagtactatactttagcccatgctgtgagtgagagagttactaagcagccatcactgttgcgagcaggaactttaagggactaccaattggtgggcctacagtggatgctttctttgtacaataataagttgaatggcattttggctgatgagatgggtcttggcaagactgtacaggtcatggcattggttgcgtacctgatggaatttaaagggaattatggccctcatctcataatagtgccaaatgctgtcttagtcaattggaagagcgaactgttaaattggttaccatctgcatcttgtatcttttatgttggtgcaaaggaccaaaggcagaagttgttctctcaagaggttatggccatgaaatttaatgttcttgtaacaacatatgaatttgttatgtttgatcgttccaagctttcaagggttgattggaagtacattataattgatgaggcacagaggatgaaggacagagactccgtcttggcgcgtgatcttgatcgctatcgctgccagcggcgcctccttctcaccggtactcctctacagaatgatctcaaggagctttggtccctcttgaatttgttgcttccagaagtatttgacagtagcaaggcattttcagattggttctctaagccttttcagagggatggtcctacacataatgaagaagaagacgattggcttgagacagagaagaaagtaataataattcacaggctgcatcagattttggaacctttcatgctacgtaggcgtgtggaagatgttgaaggatcacttccacggaaggattccattgttttgagatgcagaatgtctgccgttcaaggagctatatatgattggatcaagtctactggtaccattagagttgatcctgaagatgagaaaaggcgtgcacaacggaatcccatgtaccaggtcaagacatacaagaatctcaataacaagtgcatggagctgaggaaagtttgtaatcatcctctgctgtcatatccattcttaaatcatgggaaagattttatgatcagatcttgtgggaagttgtggaatcttgatagaattttaattaagcttcacaagtcaggccatcgtgtacttctttttagcaccatgacaaagcttcttgacatcatggaggactatttgcagtggagacgacttgtttataggcgaattgatggaacaacaagcctggaagatcgagagtcagcaattgttgacttcaacaggcctggttctgattgttttatattcttgcttagtattcgtgctgctgggaggggtctgaatcttcagagtgcagacactgtcgtaatatatgaccctgatccaaatccacaaaatgaggagcaagcagttgctagggcccatcgtatagggcagacaagggaggtaaaggttatttacatggaggctgttgttgataacatatcaagttatcagaaagaggatgaattgagaaatggagggagtggagatttggaggatgatcttgctggaaaagatagatacatgggatcaattgaaagtctcatccgcaacaatatccaacaatacaaaattgatatggcagatgaggtcattaatgctggtcgttttgatcaaagaacaacccatgaggaaagacgaatgactctggagacactcctgcatgatgaagagagatatcaagactctgttcatgatgttccttcattgcaggaagtgaaccgtatgattgctaggactgaaagtgaagtcgagctttttgatcagatggatgaagactttgattggacaggtgatatgacgaagcatcatcaggttccaaagtggcttcgtgttaactccaatgaagtagatgctgtggtggctagtctgtccaaaaagccgtcaagaaatatgtcatctgggggcattgctttagacactaacgaaacacttgagaaaagaagggggcggccaaggggtacgggcaagtactccatctacagggagatcgatgatgaagatcttgaagaatctgatgaagattctgaggagaggaatactgcatccctacctgaagaaggggaagtaggggaattcgaagatgaagaagacaatgatgactcagtacctgataacaaggatgaatcagaggaagaagagcctatgaatgatgatgtatatgaatttactgaaggattaagaggcagaaaagctaataggatggaagaagctggttcaacaggctcttcttctggaagcaggagattaccaccacctgtaccttcctcatcttcaaaaaaattgcggtctctatctgcattagatgcccgcccaggcactttgtcaaagagaactccggatgacctagaggaaggtgagattgcaatgtctggggactcacatatggacctccagcagtcagggagctggaaccatgaacgtgatgacggtgaggatgaacaagtactacaaccgaaaataaaacgcaaacgaagtattcgtcttcgtccaaaacctaatgcagaaaagcaggaagatagatctggagaaggggccttccctcagcgtgctgccaggcagcaagacgcggttcatcctatagtgaaacagaagcgcaacatgtcatctaggaaggtttcaccggcttctaggtctgggaaattgagtcacttgtctgggtctggtgaggggtctgctgaactctccaaggaaaattggagcagtaaggccattgattccactgcccctgagttcggtggcacaaagatgtctgacagtatgcaaagaaagtgcaaaaatgtgataagcaagctttggaggaggattgacaaagaaggtcatcaaatgatacctaacatatcttcttggtggcggaggaatgagaattcgtcgttcagaggtccggctggtagcacacttgacctacaaaaaatcgagcagcgagtcgatgggttggagtacggcgctgtaaccgagttcatagcggacatgcagcagatgttgaaaagcgtggtccagcacttcagctataggcatgaggtccggatagaggccgagaccctccacaacttgtttttcaacataatgaagatcgccttcccagactcggacttcatggaagctaagaacgccatgtcgttttcgaatcctggaagcggtgcgcattcggatcatcaagcgggggcaagctcgtcagcacccggcatcggagacatccagtgggcgaagcctgccaagaggctgaggacctgctcgcccgggccgcctccgcgcaggcagcgcactgcaggctccgccgatcaaccgccgccaccaccgccaggaaatggaagagggcggtaggccgaatccagaagaggggggcctgcaacggcgaggacggccatgcgcgggaagaggaagaccacggcgcgctactggcctcggcgtcgtcgtcgtccatctccagctgcaacggcagcggcttcagctgcagggacgccaccgctgccgccgatgcggaggcatgctgctcgtccactgcggtcagctgtccgtggccggcgacgctgcggctgtcttcatgtggcagcggctcgtggtcgtcggacgagaacgacgacgacgacgtcaggatggctcactgggtcaccaccgattctgactgtaagtatatacaatcctgttccctggtcacaaattcaaaaccaaaattttcagttgtggtgttggagctctagctagccacgaagatgcagcatgcacatgctgacatgacatgaatgatatatggatatgacctgcgaataaacttcattaacgtgttcgtgcttcttcattactgttattgggatgaacttcattgtttattgcaaaacccaatattgtaccgcgattcaaaattgaagatgaacaaaccatctcttatttttctctctggtcatgatgaggaagttcagcttcattgtgacaacaacgtgttagagacaaaatgttttgtgggtgttggactccagttggttttctttaattttaacaaccaagttgatagatcatag

SEQ ID NO: 7700 - DNA, 3519 bp, Zea Mays
ggatcatagtcgtctccctgtcctcccacctctgcccacggtccacgggacgacatccagtccagccatggtcggccccgagatgctcgtcgccgcgacggtgaaccaggtcgttcggaagatcaacgagatcatcggcgtcgcgcagggcgagacgaagctgtgctgcagcttcagcgacgacctcgagggcatcaaggacaccctggtataccttgaaggcctcctcaagaacgcggagagcaactcctttgggagcgatagggcgaacctgcggcactggctgggccagatcaagtctctggcttacgatatcgaagacattgttgatggctactactcctccaaggagcaatatgagggaagcaactatgctcagaagggatctttactctgctctttatccaatcccatgctttcgaaggttagcatggttcataagatgaaatccaagagggagttgttacagacaaggcaaaatttaccgacccagtatcatttcatctcacatattaactcagtggtaaattatgatgagaagcagacaacatcatacagaaattgtgacatcagaattgttgggaggggtccagacttggagcatcttatgtacatgttaatgcagataaatttgaaagagcttaccattatttccatagttgggcctgtgggccttgggaagacaacccttgcacaacttattttcaatgatgcaagagctgagacattcagattcagaatatgggttcatgtctccatgggcaatgtcagcctccaaaaaattgggagagatatagttttgcaaactacagaaaaaattgagggaaacatgcagatgcagtcaatcaagaatgttgttcaagacatacttaataagtatagttgcttaatagtgttagatagcttgtggggaaaagatgaagaagtgaatgagctgaagcagatgttgcttacaggtagaaagactgaaagcaaggtcatagtgaccactcacagcagtaaagtagcagagctgatatccactgtgccaccatacaaactgtctttgttgtcagaagatgattgttcagctatattctgtcaaagggcaattgcaggtcagtctatcagtgacccacttttcagggaatatggagaagaaattgttaggagatgtgaaggcatgcccttggtagccaattttcttggatctgtggtgaatgctcaaagacagaggcgtgagatatggaaagctgcaagggataaagacatgtggaagatagaggaagactaccctgaaaacaaaattgtgccaatgtttccatctttcaagatagtatactacagtatgccccatgagctaaggttatgctttgtctactgttcaatctttcctaaaggatatgtcatagataagaaaaaacttattcagcaatggattgcacttgacatgattgaatccaaacatggaaccttgccgcttgatgttactgctgagaaatacattgatgaacttaaagatatttatctccttcaagttttagagaggcatcagattgatgcagaaatatccaatacttctgaagaaaagctctacatgaataatttggcacatgatcttgctaggtcagttgctggtgaagatatccttgtgatcttagatgctgagaatgtacgctgcaatagaaattatgattaccgttatgcacaagtgtcaacttctagcttacaatcaatagatagcaaggcttggccttccaaggcaaggtcactagttttcaagtcaagtgcagaattgcagcatgtcagcgaagttctttcagtgaacaaatatttgcgtgttttggatatcagtgggtgttctgtgaaggagatgcccgctccaatttttcagatgaaacaactgagatatcttgatgcttcaacattgtccattgcagatctgcctccccaaattagtggctttcctaagctacagacactggatctgtctgatactgaagtaactgagctaccagccttcattgccaacttaaagagactgaattatttgaatctccaaggttgcaagaaacttaagcagttgaataacctagatttgctgcatgagttacattacctaaacttgtcacgttgcctggaagttagaagttttcccgcatctctgaaaaatcttaggaaacttcgttttctgaacctttcgcaatgttctaagcttccaacattacctgatgaattattgcaatcattctctagtttttcttccattgtggatttaaacttaagtggatttgagttccaaatgctacctgacttttttggcaacatttgttcacttcagtttttgagtctgtcaaaatgctcaaaacttgagctactcccccaatcatttggtcagcttgcatatttgaaaggtctggacctttcattttgttctgatcttaaactcccagagtcctttaagtacctttcttctcttcagtttctaaatctatcacactgccataatgtagaatatctgccatcttttgacaaacttagtaatttggagtatcttaatttatcacaatgtgctggactcaaagcattacctaagtcactttcaaaccaaaaaaatctccaaattgaggtttttgggtgccaggattgcatagtgcagtcatgttatttaagcccacagtcccatacatgctcacaagaagtcaaggaagttggatcaagtagtgatatctcagataccattctaaaggagtctgcaaacagagatgtggcattaggaataagttttccagaaattgatgaagttggttatccacataataatctgaaacaaaaattgacattatcttatcatatggatggacataaaagtgaagagcctaatttcattaccaagaactcaactacagagacggtacaactaacccccaggcaccagttcccatcatctacatgtcgtatttcttcgattgcatcaagttctagtgcactatttgcatctggctcctcttcagatgtctcgataacttacaatccagtgtccaatgacaaagcaggcaatcaaacaggacctcagacagagtcaacgcatacggtggtctaagacgagacgatgcgggtaaccaaacatatggtttgtgattcagtccagactcaccgctgaatagagggagtggtaacccaatgggtgacggatctagaatttgactatagggtgatactatctaccatggctagtgcatcacttcttcagtcccgtagtgaatagtgattgagtagaggctggtggactcagttaaatccctcttatgcttttggtgaactgagatggttatcaaactagctatatttggacttatcttgttgtaagactttttaaatatgttgtttatctatcggatttggaacatgtaatatactagctacttatgaacctgaacttataaaataaatgtaatatactagctgtacatgtgaatctgaacttataaaataaattgtgttggatgtatgttgacgtttaattatgtatgatcttgg

SEQ ID NO: 7701 - DNA, 1109 bp, Zea Mays
gaccaggcagcctgcctgcctgcctgcccggccaagtttcctgttattccccggcggccagacttgtgattccgtttgttcgtgtcactgaagaaagcattcgctttacacgcactcgttcctgaatcagcacagccccagcctaccggtgccggctgctgcttcgctgggagccagaggcccacccagagctcgcaagcttgtcatggctctgcctctgcggccagtccatggcttggcgtcccttcttcttctgctcctcgtcctcctgtcctgcaactgccactgccacgggggaggaagcgagcggggagcaggcgcgacaaagaggctggagcgcgacgtcacgtcgcccctggccacggtcccggtggtgaacccgacggcgacgatgccgttgcccaccgcgacgccggcggcgccttcgctgccgctggccaccggcgccggcggcgggagctggtgcgtggcgagccccagcgcgggcgcggcggtgctgcaggtggcgctgaactacgcgtgcggccagggcggcgcggactgctccgccgtccagcggggcgggagctgcttcagcccggacaccgtccccgaccacgcgtcctacgccttcaacacctactaccagaagaaccccgtgcagaccagctgcgacttcggcggcgccgcagtcctcaccaccaccaacccgagtacttcgacgtgccagtatccagcaacgagcaccggagcttcggtcctgaacacgtcgactccgctgacgccaggatacggatctgcccccggcgggtacgggagctctccaccggctggagacggcaggtcccctccgctgtacgggaacatgtcgccgccggactacggcgacaacaccagcgccgccgtgaccgtgagggcactgcccggccgcaagacggcggcggccgtcgtggcgctggccacgacgtcgacgtggctcctcatcgcactgacggtgagcggctgaacctgcacgccaggcccgcgcgccgcgttgcctccgcgcacgtgcagttcgttcagttgcagactcgcagctcaggtggcgcccgaagcacgagtctctacactgagcgaagaaggccagaaaa

SEQ ID NO: 7702 - DNA, 3122 bp, Zea Mays
ggcattcccccgttcccgtttattagctgagctcgtacacggccggccctctctcggtgcgtgcgtttgcgtggctgtggcaatatacggtgcgtgtggggcggcggcgacgagggttttgctgctccgtacaccgcgtgcagcggcgacgcgaccgcagctggtcgccgccccggatcgaggagggggaggagccggcggaggcccctgtggtggctgcgggggcgggagcgggagcgccatgaggggcggtggccgtggcggcggcgggaggcagccttcctacgcggcgccggacggggcggatgcggcggcgatcccggtcgcctcaaggaagatggtgcagagcctcaaggggatcctggccgaccgctcggagggcgagatctacgccacgctctgcgactgcggaatggaccccgacatagccgtcgagaggctcatctcccaggatacttttcatgaagtcagaagaaagcgggataggaaaaaggagactaaagttaatcacgaaacaaggcctcgacctttccagaaatatacataccgaggatataaggctgtttcagatcgaagtgggcgaggcggtttcaaaggccctgtaaaaaaggaaccagagatgcaagctccactaaactcatcagccttggatgtcaagacaagtgacactacagaaatattttctgctactatcaatgttgcccagactgatgctaagaacaccacttctcagcctttatctaaagtgcagcatggttggggtggtattccaggtcgcccttccatggctgaaatagtgaagatgggcaggcctcaagctaaagttgggagcagatctgttgcaagtagcactgcgttgccaaccgttggtgattcagtcatttccaatacaccaaatcttgtgcctgaggaatataacagaactgtttttgcatcagaagcaggccatgtcgcagcagataaattgccaaacggtgctgttgaggtgcactctctacctaaagatgcttccgcatttgatatgttaccttcagctgagggaacagatgttgaagccccttccatgagtgctaatgcacaagggtcatcaacgccagatgccaatgaagatgacattgaaaaatatgcaaatttggaagagggcaatacagaaagcttgatatctcctggacaagtttctgcttctggtaaagatatacaatcagaatatactgaagttgtcagccatgtggatgaaggctcgatagagaaaacaaatgactttcagctcaatggccttccatttgagcacaaccaaaatctgaatggagacgtgtctacagcgacaacacaatttgatcatttgactctgcatgagggaccaaaattgtccgatgataatccggctgtaataattcctgatcatcttcaggtttcgaatgctgattgtgcgcatttgacgtttggtagttttgtgtctggaacacttgattcatccttgacaacaaaacctcttgaaagtcatggggatgctgcggcagttcctgatgatgattcaattgaccaatcagatggcaggatccatgacgatgaaggcaaggtgactttagctactgatgttaatgaatatgttacttctgcggcaaacagcaacgaggagaatcttgatattacatcagtacagcaatctgaagtcactagagctgatttcttggatgtcacaagcaatactgaatacaacctaacatcaactccagattatgcaacttcaagtgcaccgttgcaagattctgcttcacagagtttacaggaaaaccgacaattccagaacatctctcctttctcaagcttcatgcaaatgcaaaatggtctcctgccaccagcaattccaccattgcgtgaatttgatccagcattttcactattgctcacccatcctcctatgatgcatggtacaatgtcatcatccatgagcaatacaactgtttctacgcagccccaagagaatgccaatccagttggtttacccaaccctcaattgactcaatctcagcaaagcaccagcattgcttcagggcctccactccctcagcatcttcttcatccctatgctcaaccaacccttcctcttggctacgcaagcatgattggctatccatctcttccaccaagctatgcatatctcccgcctgccgcttttcagcaaccatacatgaacagtggcttgttccaccaggcagcagcggcagttcccacctcaagtgtgaaataccctctaccgcagtacaaaagcaacattgcccttgctagcttaccacagccaggctctttgctctcaagctacgttgggggctttggaactgcaagcaacatgcctggaaatttccctctgaatcaaagcacagcagcagcaacaacaactcttgggtttgatgggacggtcccttcacatttcaaagatggaaatcaatttatttctcttcagcagaatgagaaccctgcaatgtggatgcatggtgctagttcacgagggatgcccccacttgcagccagtaccatgtatggctatcaagggcagagtcatcaggccggccttcggcagggccaactaccttcacaatttggctctgcgcttgggcagtcacagccaggcctgggccctgaacaccgaaaccctagcgatagtaacctaagtggcgctgctcaggctaaccaaatgtggccaaatacctactgatccatcccccttgtcgacttctgtggaaggcggtcctgttgtgtgtgcaacgccggtgaggccatgcagtgcttgtgttctgatccaggcacgcggataccagctgtgcctgtgcgcatgagtcgctgtcgtgacattttgaggcacaagagacatatgttcgagcatgctctacctgtagggtttctaggatatggcaaaagaaaatgtagctcgatctatttattcaaattctgatagagaaaggacttcctcttttctattttattctcttttgtcattcacatatcatgtgacaaataaaaccgaaatatctaacagcagcgccattagttcccgaggaagtgaaactttacatcacaggtattgcgtgcctcttggcttcaattttatgattgaggtgatt

SEQ ID NO: 7703 - DNA, 1868 bp, Zea Mays
aaaatagcaaatttctccacacggacacagcagcgagagaagagagtccactgtccaccccaccagaaaaacgcattccgcagacgcgcggcgagggagtaggaggggacggcgggtgccgaggcccgcaggcacggggaagctacctgcttgcgtagccgggcgggctcgcgctgtgctgtcgctccatgtcggtcgccggcgagagcggcggggatccggcggcggcacgccgccggtgggatctctccaacaagggccccgacagcacatgaagaatcggatggcgttgttatatgccatccgaatggtaacactgatggatgtgacgaagccattagtggcagtcatgatgatgatagcccagaaggccaggaaactagttccatcaaggaccctgatgtagaaggtgacacacaggaagacaagtgtgtaaatcaagattcactgaagttgattgatcaagagacgtctgctccccccaagtccccagcgaagtccgcgactgcgagttctggaccagagaagcctaaacgtgttgtcacccaaccattgtctctttctactcaacgaaggtcatctggagtaaatggtggtgtgaccaatccatcacccaataaggataaatctggtgataaaagtagcatctctccagcaagcatgacaaagaagtgtacgccgttggcacctaggaagactttgcagcctgagcaagcatttcaccctctggaagaggactcttgttctgtgacttcctcattcttcgatgtttcacagtaaataatgatgaacgctcatactcatgcacttctcttctgtgaacatgaaaaagttttcaaaacgatgcttttctgtatctactgaacttacaatgttttgtggtgctcaatattttttcaagatgatgaccatttcatagttaaatgtttaaattcagaaacacatgaattttacaagtgttctgagttgcatgtggcccttttcctaagctgtgtaaaggactacaacatcatcaagagctggcagaactaagacaactgttcctgttgccccatcatttgtgtgtgctaaccgtgctgacaagaggaaggagttctacacaaaattagaggagaaacataaagctttggaagcagagaaggacgaggctgaggccaggaaaaaggaagagcaagacgttgctataaagcaactaaggaagtcattggtgattagagcgaaacccatgccaagcttctatcaagaaggccccccaccaaaggctgaacttaagaaggtgcctcctactcgtgccaaatcaccaaagtttacaagctcaaggagaaagagctgcaatgacacaccacagacacccgagggaaaaaacaccaacgcaacatctaccacccggccacatcgtcacagcatcggggcttctaaagatgccagcagagtacagtgctcgccgaagagcggcgtggcgaccaaaactagatctgtcaagcctgagctgaaggccctctgaagcgcatgcgtagcattcaagtgctgcgattgtctctgtacaaacagaatcgcctgactcttagccgtttccatttgcatgcattttttttgttttgttttgttctatacccagcatctccaccaaaaagaaggctgtagggccaatgacgttgttcgcgctgctggaccttgtctccattttcgtcttgtactcgttaagaactctgttgctgctgggaccatgtgacattcattccatgtaaattacctggggatcccggtagggagctcgactggtgttttggtcttgtgaagtcctcaatgccttaactaatctgtgagctgaaaaactatcgatttggcattgttacgtttgatgcatc

SEQ ID NO: 7704 - DNA, 646 bp, Zea Mays
ccacgtcagcgatccgtggcactagcccttccaccaatcagcccaagttgcccctttcctttaaattcgccgcacccattgctcttctcacggccatagaaatcgaccgagcgaatccctcgcatcgcattcgcagcctttgctgcatcacaccaccgcgaaaccccagcagccgcatcgatggcgcccaaggccgagaagcgcctcccggcggccaagtcgtccggcaaagaaggcggcgacaagaagggtaagaagaaggcgaagaagtcggtggagacctacaagatctacatcttcaaggtgctgaagcaggtccaccccgacatcggcatctcttccaaggccatgtccatcatgaactccttcatcaacgacatcttcgagaagctcgccggcgaggctgccaagcttgcgcgctacaacaagaagcccaccatcacctctcgggagattcaaacctctgtccgccttgtccttcccggcgagctcgccaagcacgcggtctccgagggcaccaaggccgtcactaagttcacatcatcttagatttgaggtagtagctattggtgggtggtcgtgccttttgaactgtgtattctctattttactttgttcctgattgcattgtggcttcactgccttg

SEQ ID NO: 7705 - DNA, 1352 bp, Zea Mays
tcgatcgcaaatcgggaggagaagcacactctgagccccagcatcgcgaccccggcggccggctgcgcctgcggggcaggaatccgcggcaccgcgtgggcgcgatctggcggccgttggatgtggatggaacggacgggccaggttcaacgtgggggcgttgatgggagcgatccgaggcgaggccgtgtggaccaatcagcgcgctgcgtgggactctgctcgtcttcgtgccgtcgccactatttaagcaccgcttcgtctactccggcctactcacccagcaccgcagagctctcatcctctctctctctctctttctcgcgctcgctttgcttcctcgtcgaggtccaagttcctgcattgatggcgaccgaggtggctgagactcccgcgccgttggcggaggcggtccccgagacccccgcggaggcaccggcggcgcccgccgccgaggcgaagcctaccaaggccaagaaggcctctgcgcccaagaagcgtgccaacccgacccacccgccgtacgccgagatgatctcggaggctgtcacgtcgctcaaggagcggacggggtccagccagtacgcgatcgccaagttcgtcgaggacaagcacaaggacaagctcccgcccaacttccgcaagctcctgctcggccagctcaagaagctcgtcgccggcggcaagctcaccaaggtgaagaactcctacaagctgcccgcacgcgccccggccgccgccaagccgaagcccaagtccaagaccgctgtgaagaagcccaaggccggtgccaagaagcccaaggccgccaccaagcccaagccgaagcccaaggccaagtcccccgccaaggcgaagcccgccgcaaagcccaaggcagccgcgaagcccgccgctaagccgaaacccgcagcggccaagcccaaggcggccgccaagacgtcagccaaggacacgcccgggaagaaagcggcgcccgccaagaagcccgccgctgcggccaagaaggcccctgccaagaaggccgccccagccaagaaggctgcgaccccgtcgcggaaggcgccggcgacgatgacgaaccagtgtgtgttattattattagaagacaacgttgtatttctgtagctgaattgttgagttgcggatatcattgtgctgctaaggttaatgtgacgataaagttaatgtcaagagttaccttccttcgcgtgtatgtactctgattattcaggctgtttttggctgggattaatctggtcttatctgaattccctatctgaaatagagaattgttcggtgtgcattttgtgaccaacctgctcatgcaaacatgttgctttcgttgtacg

SEQ ID NO: 7706 - DNA, 3020 bp, Zea Mays
aaggctcaaaaccctaacaagctgtgagccgactctctcgagcgccttgcactaacactctgcgccgcctgcggcctgcccccaggccctaactcacgcaccatcgcgaagtcctcgacctcaagctcactaccttctagaatacgaggatcaccagcgccgccgcatcgggccgctggcccatggacaagctccgcgtccaccgctgtaccggcgacgcggtcgagtggtccccctcccctatcgtcgcgctcgccgcctctccttgcgcctctcaggtcgccgccgcgcgtgaagacggctcactcgagctctggctcgtctccccgggctccgtcggctggcacaaccagctcactatacaggggaacgacgagtcgagggtcacatcactggtgtgggggcggagaggaggtgaagcgaccggccggctgctctcgtccagcgttgatgggtcggtttgtgaatgggatctattctacctgcagcaaaagattgttctagatactgttggaattccaatctggcaaatggcaattgagccttcagttgatgctaaaaatactgaaaataatagctcagagtttgctgtcaatggccatccaaaccaaaatgactccagcgattctgacttaagtaacattgatgatggtgataactctgaggatgaagatggttctaccaacacaatatcttcatatcatgtgaatgatttccagcgactggctcttgcgtgtgatgatggttctgtacgattgtataatgtgcctgaatcaggtgcattgacttactataggtctcttccaagagtgagcgggcggactctaagtgtggcgtggagtagtaacgccaaatttgtattttctggcagcagcgatggtttaatcagatgctgggattcaacatctttccatgaaatgtatcgtatcactgttggattgggaggggctagtaactcacctgaactttgtgtctggtcactattgtttctgaggtgtggaactattgttagtggagatagtaccgggagtgtacagttttgggatagccgccatggaacacttctgcaagctcactcttatcataaaggcgatgtgaatgcactaacaactgtgcctagtgggaacagggtattttccgcagggtctgatgggcaggtaattttgtacaaaatatcaaaagatgaattcggtgctagtaaaaatgtgatcaaagagcaagttcagaaatgggtctatgtgggatatctcagagctcacactcatgatataagggcattaaccatggctgtgcctatctgtagagaagatgcattacctgaggaaaaggtggtgaagattcgccggcgtgaaaaacatgaattcagctaccacagatgggctcatcttggggttccgatgcttatatctggtggtgatgacgccaagctgtttgcatattcagcaagagagtttactcagttctcacctcataacttctgccctgcacctcaacaccctttgataaagctggctaggaatagcacagtcaatggagattatgtaatgcttgtccagtcttcgaacttcttggatgttttacttgtgacagttcagaacaagctgacgactccaagtacatcatcatctagaggagatgctacagtccgacaacttgttcgtttgaaaagcaaggggtccagaaaaataatttctagtgctgcctgtgccaatggaacacttttggcctattcagatggtgtgagaccctgcctctttgcactaagacataagggtggaaagaagtacacccttgacaaattagagctgccaaaaggattgccctgttctcagagtatgctgtttactgtggactcgtccaatttgatacttgctgggcgtaatggaaaaatatacatcattgacattgcaacaagagaaatttcaaatgtatttcaccctacaagaagggcagatggagcaaaaatctcaagagaaccacctgtaacgaagatgttcctaagtgcagacgggcaatggctagctgcggttaactgctatggggatatttatgtatttaaccttgagacaacactggttcatatcccgaatgaatggtggttctgttacatctggtggtttttgccctaagaacaacacacttatcataactacatctaaaaacgaggtgtatgtatttgatgtggaaacaaaacaactaggtgaatggtccaagcgatatacgcaccagttgcccagaagtttccaggaatttcctggagaggtcattggcctatcattttctccgcaaagctcgtcatcggttattgtatacagtaccagggctatgtgctacattgattttggattgccagtagttgaggatgttgacttgccaaatggatcagctggagctgcagagaagtcggacacaaaaaaaattaaaaaagcaaggcagaaacgtaaggcccatgatgaagagtctaaacaagagaaaaggaataacttaagtttttttgcgtttaaagaaccagtgctctttgttgggcacctactggacagttcaattttaatagtagagaagcgatggatggatgtagttgaaggttttggcgcaccggttcacagacatatatatggcacatgattctttctaacatcaaactttggcgcccgtgacaagcagaccattatttttgtttttgcattcggcctcgagtatgttaccggttgaaagggctccaagttttgcagtacaaagtggcagctgcatctaatctttagaattggggactctggcaattgtgtagtgttattttgttctcgagtaatgcagtttttcataccttgtcactgcgcaaaattgtcagatgtaaaaactgtataactatgttattgttagtttatatctgctgttcgtctcaagtagcatgttgtctgtataaaggccccattgacggccgaactgttgtgtcgcactatgtgataaattagttatttatagcgtgtttggtttgagaaatgagataatccatcttctca

SEQ ID NO: 7707 - DNA, 3108 bp, Zea Mays
tcaaaaccctaacaagctgtgagccgactctctcgagcgccttgcactaacactctgcgccgcctgcggcctgcccccaggccctaactcacgcaccatcgcgaagtcctcgacctcaagctcactaccttctagaatacgaggatcaccagcgccgccgcatcgggccgctggcccatggacaagctccgcgtccaccgctgtaccggcgacgcggtcgagtggtccccctcccctatcgtcgcgctcgccgcctctccttgcgcctctcaggtcgccgccgcgcgtgaagacggctcactcgagctctggctcgtctccccgggctccgtcggctggcacaaccagctcactatacaggggaacgacgagtcgagggtcacatcactggtgtgggggcggagaggaggtgaagcgaccggccggctgctctcgtccagcgttgatgggtcggtttgtgaatgggatctattctacctgcagcaaaaggtgtctctcttcgcatgcttacactcgattttctcgtggaatcgtcaattccgaactgtcagatgctgggatatgcataaaactgattgttctagatactgttggaattccaatctggcaaatggcaattgagccttcagttgatgctaaaaatactgaaaataatagctcagagtttgctgtcaatggccatccaaaccaaaatgactccagcgattctgacttaagtaacattgatgatggtgataactctgaggatgaagatggttctaccaacacaatatcttcatatcatgtgaatgatttccagcgactggctcttgcgtgtgatgatggttctgtacgattgtataatgtgcctgaatcaggtgcattgacttactataggtctcttccaagagtgagcgggcggactctaagtgtggcgtggagtagtaacgccaaatttgtattttctggcagcagcgatggtttaatcagatgctgggattcaacatctttccatgaaatgtatcgtatcactgttggattgggaggggctagtaactcacctgaactttgtgtctggtcactattgtttctgaggtgtggaactattgttagtggagatagtaccgggagtgtacagttttgggatagccgccatggaacacttctgcaagctcactcttatcataaaggcgatgtgaatgcactaacaactgtgcctagtgggaacagggtattttccgcagggtctgatgggcaggtaattttgtacaaaatatcaaaagatgaattcggtgctagtaaaaatgtgatcaaagagcaagttcagaaatgggtctatgtgggatatctcagagctcacactcatgatataagggcattaaccatggctgtgcctatctgtagagaagatgcattacctgaggaaaaggtggtgaagattcgccggcgtgaaaaacatgaattcagctaccacagatgggctcatcttggggttccgatgcttatatctggtggtgatgacgccaagctgtttgcatattcagcaagagagtttactcagttctcacctcataacttctgccctgcacctcaacaccctttgataaagctggctaggaatagcacagtcaatggagattatgtaatgcttgtccagtcttcgaacttcttggatgttttacttgtgacagttcagaacaagctgacgactccaagtacatcatcatctagaggagatgctacagtccgacaacttgttcgtttgaaaagcaaggggtccagaaaaataatttctagtgctgcctgtgccaatggaacacttttggcctattcagatggtgtgagaccctgcctctttgcactaagacataagggtggaaagaagtacacccttgacaaattagagctgccaaaaggattgccctgttctcagagtatgctgtttactgtggactcgtccaatttgatacttgctgggcgtaatggaaaaatatacatcattgacattgcaacaagagaaatttcaaatgtatttcaccctacaagaagggcagatggagcaaaaatctcaagagaaccacctgtaacgaagatgttcctaagtgcagacgggcaatggctagctgcggttaactgctatggggatatttatgtatttaaccttgaggtgcaaagacaacactggttcatatcccgaatgaatggtggttctgttacatctggtggtttttgccctaagaacaacacacttatcataactacatctaaaaacgaggtgtatgtatttgatgtggaaacaaaacaactaggtgaatggtccaagcgatatacgcaccagttgcccagaagtttccaggaatttcctggagaggtcattggcctatcattttctccgcaaagctcgtcatcggttattgtatacagtaccagggctatgtgctacattgattttggattgccagtagttgaggatgttgacttgccaaatggatcagctggagctgcagagaagtcggacacaaaaaaaattaaaaaagcaaggcagaaacgtaaggcccatgatgaagagtctaaacaagagaaaaggaataacttaagtttttttgcgtttaaagaaccagtgctctttgttgggcacctactggacagttcaattttaatagtagagaagcgatggatggatgtagttgaaggttttggcgcaccggttcacagacatatatatggcacatgattctttctaacatcaaactttggcgcccgtgacaagcagaccattatttttgtttttgcattcggcctcgagtatgttaccggttgaaagggctccaagttttgcagtacaaagtggcagctgcatctaatctttagaattggggactctggcaattgtgtagtgttattttgttctcgagtaatgcagtttttcataccttgtcactgcgcaaaattgtcagatgtaaaaactgtataactatgttattgttagtttatatctgctgttcgtctcaagtagcatgttgtctgtataaaggccccattgacggccgaactgttgtgtcgcactatgtgataaattagttatttatagcgtgtttggtttgagaaatgagataatccatcttctca

SEQ ID NO: 7708 - DNA, 2186 bp, Zea Mays
acgctagctctgtatgcaaacatgcctgactcgcccgttcgcctatctcgcccccccccccccccccccccagcatcggagaacggagggaaccagggagctccggccgcctagaaccggagctcccaaatagatcgatccatcggtcgttgagcggacacggcaatggaagcccacgcctcgcggggccgccgcaccctggaggagatccggcagaagagagccgccgagaggatgcagcacgccctcccgatcgcggcgtctcacgtcgactctcacgggaaccaaagagccggagctgagcttcttgctcgagttcaagaacttgaaaatgggaacacggaattggtgagggaaaacaaaatgctcttgtccaagattgatgagaagggagttgagaaggatgcccttgtaaaccgtttgaatgatctcgagcggaatgtagttccctctttgcaaaaaaacttgaatgacatttctttggagaaagatgctgctgtagttgctaaggaggatgctctagctcaactcaggagcatgaagaaacggctcaaggaagcagaagaagaacagtataagaagaagactcagcctccttgagagcacagctaaacaccctgcagcagcaagtaatgggacactcttacagtggatatacaatgggaatatcgactgaggaatctgttgccatggaaaaggagatacaagatttacaggcacagctaaagcaagagtcactgctaagacaacaggagcaacaaaaattagctgaagagtcgcagctgaggcaacaagagcaagaaaaactagccaaagaacaaatccatattgcttctctggaggctgaaaagcaacagctggaagaccaaattactatgttgacaaagaaagctacagaggacgcttctgagtttgctgcacacaaggcattttcaatgcaagatagggaaaaacttgaaaaccagttgcatgacatggctttgatgattgagaggctagaggggagtcgtcaaaaactgctaatggagattgattctcaatcgtcagaaatagagaaactgtttgaggagaattcggccttatctacttcttatcaagaagccatagctattacagtacaatgggaaaaccaggttagagattgtctgaagcaaaatgaagagctccgttctcacttggagaaactaagacttgaacaagctagcctgttggaagtaagcaatatcactaccaaatcagatggacaaattgaaaacagtatctcaaacctaccagaaatggtcaccgagaatatttctctgaagggtcagcttataaaagaacagagcagatctgagagtttgttggcagagataatgaaactttcagctgagcttaggaaagcagtccaagcacagaataaccttgtacgcttgtacaggcctgtattaagagacattgagagcaatctgatgaaaatgaaacaagaaacttatgcgacgatccaatgatacatggtgtcaaactcaatccacgatactgtggaatggccgcatagtcacaagctccaccgtaggcctggttcggttgcatctgaattggaggtgattgaatccccttctattcaattttaactagggagagatttaatcccatccaatcttctctgatccagacgcaaccaacaagcccttgctcaagatgctggtgaatgtattggtctcatgccattttcaagatgctggtggaaagcagttctttcggtggctaccattcataagtagagttctgtcgagatcgttcaacctgtatcatactcttgtatacccgattcccaccggttcatcttataaactgggggcaaatggagaaaaagattggttagggcttgtttggtgaaaaagattggttagggcttgtttggttacaacttacaagggaggtggaggggactggagggaaataaactaatttttcccttaatccccacatttcccttctaaccaaaacaaattattatccctgctctcagtccacaaattgggcgcaacaactttttaaatcatgtcatttgcgtccgcatgttcgtttggccgttggatgggtccgcatgtagggtgtatttggtttggtgaatgaggtggtctatttctctcttctcacttttttatttggtttgtgaaatataatagttaatctatcattat

SEQ ID NO: 7709 - DNA, 1927 bp, Zea Mays
tcaactcagactattccttaacattaagaaattctctagcggatatttaacctgttttagataaaagtgtttttagaataccacttttttcaaggcatactttcttctgcaaaagtatgtttaggaaataagaacatcaaaggtgtgttgtttttgtttttgcatttgatcatagcactagtgcctaaactgataatgtacagctgtagcataacctcatatctagtatttaacagaggctaaaatgtaatgttctactattgctgttatcacatacagttatcggctaacattaatggtgctgtgctaatctgtgtaattgatccagtggagcggcttacagttgaagaatttgtgcaccacccatttctttctgaacatgctccagagaagactttgagccttacacaatctgacataagagatggctttccaagaaataatagcagtccaacaaggcattcaaaccatagttcacaagaagattgtatgccttttcctttagatgatgagtcaagtggacaggacgagggtccagttcctgacagtatgtcttgggcaataatcatgcacctagtagccaacaccatggccattctggtaaagtgaccaaggaaagcaagattcatgaagtacaaggtcaaaaggttgtttatccagaagattcccctatcattgattcattagagtttgtagatcaggaatacgtcttcgtgtctggaccacacctggagggatcatcatcttcaacaaatgcctctcagcagcttaatgtaccagcaaaatatgataattcgtctgtttcaccaccaaagttaactttcatgagtgcaccaatgccgataaatggtttgccgattaatagacaacaacttgctgggactggtagctttgacagccactgttctcctgcatctggcacttcacagggatctgcagatataagtgatgccatggatcagcccccatctgattatctgacgaggattagattgttggagcaatatgcatcagccatagcagggttggtcagagatgagatcaaaggtggcagacacttggaagcgttctctattcagctaattgttcttgcaacctggaagcaagcaattcatataggaaatacctttgtagcttcacctgcaagggagagtccctcacaggatatccctatgaaggggcatattgctggtgcttcccatttgcctgcgaactcaaagctagctgatgatgcctgcatgcagatagagaaacagtttctctctgaagttgaatatgctgaagaactagccagcattgtgggacagatagctgatggtacagagatgccagatgcaattgaaatgatatttcagtcggctttactcataggaaggcgaggcggtgttgatgaaatgtttgggaaagccgcggatgccatgactgggtatatgagggcggtatccatgctgcggtttctcctggtcgaggcaccatcactcgccctcaacccccctttgactctaacgagatccgatcggaatcgactgcgcacatacattgacgctctcaacaccaggctctgtcagatgcagagccagaggcattgactgctgccatgcgccctcaaatcttgtccaggtgttgtacaatattctttcatttgtaaatatatttgttggcccaaactagggcatatgtaacatgtcagaactgtggaactaggcagagcagcgaaaatctattgtaaatatatttgtagtgtggaattaggcagagtgtacgtggtaggttcattctgtgtcgattcaggcagaagcttgaaaaccgaataaccaataatagtcacgtgtggaaatgtaaacagctcggcctctacttcgtagattctttattatatattagtaaattagctcgataaaaaaaattatgcacctaatatcatctc

SEQ ID NO: 7710 - DNA, 1994 bp, Zea Mays
tcaactcagactattccttaacattaagaaattctctagcggatatttaacctgttttagataaaagtgtttttagaataccacttttttcaaggcatactttcttctgcaaaagtatgtttaggaaataagaacatcaaaggtgtgttgtttttgtttttgcatttgatcatagcactagtgcctaaactgataatgtacagctgtagcataacctcatatctagtatttaacagaggctaaaatgtaatgttctactattgctgttatcacatacagttatcggctaacattaatggtgctgtgctaatctgtgtaattgatccagtggagcggcttacagttgaagaatttgtgcaccacccatttctttctgaacatgctccagagaagactttgagccttacacaatctgacataagagatggctttccaagaaataatagcagtccaacaaggcattcaaaccatagttcacaagaagattgtatgccttttcctttagatgatgagtcaagtggacaggacgagggtccagttcctgacagtaagagtctgatgaaatcttatggatttcccatgggtaaaagattggataaaacttcaggccagaagagtccaccgaaacataacagtttgttctccaggtatgtcttgggcaataatcatgcacctagtagccaacaccatggccattctggtaaagtgaccaaggaaagcaagattcatgaagtacaaggtcaaaaggttgtttatccagaagatcaggaatacgtcttcgtgtctggaccacacctggagggatcatcatcttcaacaaatgcctctcagcagcttaatgtaccagcaaaatatgataattcgtctgtttcaccaccaaagttaactttcatgagtgcaccaatgccgataaatggtttgccgattaatagacaacaacttgctgggactggtagctttgacagccactgttctcctgcatctggcacttcacagggatctgcagatataagtgatgccatggatcagcccccatctgattatctgacgaggattagattgttggagcaatatgcatcagccatagcagggttggtcagagatgagatcaaaggtggcagacacttggaagcgttctctattcagctaattgttcttgcaacctggaagcaagcaattcatataggaaatacctttgtagcttcacctgcaagggagagtccctcacaggatatccctatgaaggggcatattgctggtgcttcccatttgcctgcgaactcaaagctagctgatgatgcctgcatgcagatagagaaacagtttctctctgaagttgaatatgctgaagaactagccagcattgtgggacagatagctgatggtacagagatgccagatgcaattgaaatgatatttcagtcggctttactcataggaaggcgaggcggtgttgatgaaatgtttgggaaagccgcggatgccatgactgggtatatgagggcggtatccatgctgcggtttctcctggtcgaggcaccatcactcgccctcaacccccctttgactctaacgagatccgatcggaatcgactgcgcacatacattgacgctctcaacaccaggctctgtcagatgcagagccagaggcattgactgctgccatgcgccctcaaatcttgtccaggtgttgtacaatattctttcatttgtaaatatatttgttggcccaaactagggcatatgtaacatgtcagaactgtggaactaggcagagcagcgaaaatctattgtaaatatatttgtagtgtggaattaggcagagtgtacgtggtaggttcattctgtgtcgattcaggcagaagcttgaaaaccgaataaccaataatagtcacgtgtggaaatgtaaacagctcggcctctacttcgtagattctttattatatattagtaaattagctcgataaaaaaaattatgcacctaatatcatctc

SEQ ID NO: 7711 - DNA, 2034 bp, Zea Mays
ctgcaaatagcgatctttctgaagtctggcatttctagacataagtgaacaaatatttttgcaaccttttgccctagctgaaactctttgtggttcgccactttacatggctccagaagtcatgcaagctcagaagtatgatgcaaaggcagatctgtggagtgtcggtgtcattctatatcaacttgttactggaagaccaccttttaatgggggcaatcagatccagttgcttaaaaatatactcaggacatgtgaaatacgcttcccatctgattgtgacttgagccatggctgcattgacttgtgcagaaagttgctgcggctcaattcagtggagcggcttacagttgaagaatttgtgcaccacccatttctttctgaacatgctccagagaagactttgagccttacacaatctgacataagagatggctttccaagaaataatagcagtccaacaaggcattcaaaccatagttcacaagaagattgtatgccttttcctttagatgatgagtcaagtggacaggacgagggtccagttcctgacagtaagagtctgatgaaatcttatggatttcccatgggtaaaagattggataaaacttcaggccagaagagtccaccgaaacataacagtttgttctccaggtatgtcttgggcaataatcatgcacctagtagccaacaccatggccattctggtaaagtgaccaaggaaagcaagattcatgaagtacaaggtcaaaaggttgtttatccagaagattcccctatcattgattcattagagtttgtagatcaggaatacgtcttcgtgtctggaccacacctggagggatcatcatcttcaacaaatgcctctcagcagcttaatgtaccagcaaaatatgataattcgtctgtttcaccaccaaagttaactttcatgagtgcaccaatgccgataaatggtttgccgattaatagacaacaacttgctgggactggtagctttgacagccactgttctcctgcatctggcacttcacagggatctgcagatataagtgatgccatggatcagcccccatctgattatctgacgaggattagattgttggagcaatatgcatcagccatagcagggttggtcagagatgagatcaaaggtggcagacacttggaagcgttctctattcagctaattgttcttgcaacctggaagcaagcaattcatataggaaatacctttgtagcttcacctgcaagggagagtccctcacaggatatccctatgaaggggcatattgctggtgcttcccatttgcctgcgaactcaaagctagctgatgatgcctgcatgcagatagagaaacagtttctctctgaagttgaatatgctgaagaactagccagcattgtgggacagatagctgatggtacagagatgccagatgcaattgaaatgatatttcagtcggctttactcataggaaggcgaggcggtgttgatgaaatgtttgggaaagccgcggatgccatgactgggtatatgagggcggtatccatgctgcggtttctcctggtcgaggcaccatcactcgccctcaacccccctttgactctaacgagatccgatcggaatcgactgcgcacatacattgacgctctcaacaccaggctctgtcagatgcagagccagaggcattgactgctgccatgcgccctcaaatcttgtccaggtgttgtacaatattctttcatttgtaaatatatttgttggcccaaactagggcatatgtaacatgtcagaactgtggaactaggcagagcagcgaaaatctattgtaaatatatttgtagtgtggaattaggcagagtgtacgtggtaggttcattctgtgtcgattcaggcagaagcttgaaaaccgaataaccaataatagtcacgtgtggaaatgtaaacagctcggcctctacttcgtagattctttattatatattagtaaattagctcgataaaaaaaattatgcacctaatatcatctc

SEQ ID NO: 7712 - DNA, 856 bp, Zea Mays
ttccagtgttcgacttgtcacgcccacgcgcggcgcgccgccttcggcccttcgccagttcaccccccacagaccacaactgtcgcgtcgccggctcgccgctcgccctatcccccaccgccaccggccacgcttccgtactgagccgctgagggggccagtcaggcgcgccgaccgccgaaactgccatgaagctgacctgcttgtccgccgccgccggcggcggcggcggctaccactcgccagcgagccatctcctggagctggagggggtccgcttcctcctcgactgccccatcgacctctccgctctcgcggccttcgcgccggtgcccctcgccggtgacgcaggaggtctcatccgcgcggtgccgcgctactggttgccagcggccgtgaaagaaggcggcgtggacgccgtgctcgtgtcttccgctacggggatgctcggactccccttcctcaccgggctccccggattcaccaacacgaaggtatatgtgacagaggtagcagcaaggatcggaaagccaatgatggaggagctggtggagatgcatcgtgagtttgtgaggtactatgggccagatacggatgcatcacccaagtggatggaaggggaggaactcaatgaactcatgtcaatgtcgcaaaaggcagtgattgaaggcagggaaaatgatttgacttctctggtgcctttatacaggtccgctatggaatcacaatcctgctgggtcctggcttgcacatctgtggcttctcttccagtcttcccgcagggcaatctatatgtctgaaagcttgagataaagagtctaataggagctaataatatccaaccatcaaatcagca

SEQ ID NO: 7713 - DNA, 2269 bp, Zea Mays
acaaattcaaataactcgctgacctccactgctccacacctctacctgcctgcgccaaaacctagccgccgcggcgccgcccgccgacctgccgtgccgactgctgagtgccgaccgacgtgcgcccgctggccgctcgacgttgttggcctccctcgacgccgctggccggtggccgctcgacggagtcgacgcctcacagcctccctcgacgcgacgccgctggccactcgacggagtcggcgcctcagtcacagcgagaattcagactgctgcgcgccttcatccccttcccggcggccgacgtccaactccgcctcacagtgcttctgtggttctgcctagcgcctgctcctgctcgtagtgctcgactacgggctgctcttctctagccttgagacagagagtcggagactccagtgcccctgctagcctgccctctggttttgtgttaagtgtgggggtgatgatgagccaccggaggcgttctcgcgctgccggctcgccgcctagtgacgccagtacgggtacagcccctactcctgagaagtcgggatggatccggccgtgggcagcgacagggtcggaccttaaggtgctggagcttgcgctggcgttccgcgcggccaacgcgttgctcgtgcgcacatacttcaaccccgacgagcactggcagtgcctcgaggtcgcccaccgcgtcgcgttcgggtatggtcatctcacgtgggagtggaagcggggcctgcgcagttatctccacccgttgatctttgctgctttgtacaagaccctggcgctactccatctggacactccgtgggttatggtgatggctccacgtctcgtgcaatctttgtttgcagcttttggagatctatacctatataaactttccaaacttattttcaatggtcaagttgctaagtggacgcttggagactgttttgaccgtggctggactctattactggtttgctgcaatagagtcttccaaggcaacttcaatcgtttcaaagcagcatgcggcctgtgaacaaagtatcccatcaagaaaagtggctcttctgatagcagccttatcatgtgccattcggccaacaagtgctgtaacatggctatatgttagccttttggattttattcagatgaaatcaaaatgttgctttatccttcttgatgtcattccagtaggggcaattgtccttgctgtaacaacactccttgattggtggatgtatggttcctgggtcatagtgccgcttaattttttgaaattcaacttattgtcttccggaggagactactatggaacacatgtctttcattggtactttacacagggttttccatccatgatttggacattcttaccatttgcattgtgcggcattgtaaagtctcaggaatggaggctttcaggtctaattgcttgggtattaggggtttacagcattcttggacataaagaattcaggtttgttcttccagtgctacctttagcattgatgttctcaggttactgcttagcttccatgtcacggtccaagggcaaaaatcagcataggaaagatagtctttcaaggatgcaaccttttgttattcttctcgtcataaccaacgttcccatggctttatatatgtccttattccatcaaaggggaacagaagacgctatgtattatttgtcaaaagaagcccatgatggaagagtgaggagtgttctctttctcatgccttgtcattcaacaccttactactcaaccttacattacaatctacctatgcgttttttggactgcactcctagtgatagcaaagggaccttggatgagtcagatcgtttccttacaagtccatctgagtttgtcggcgaggtttttggaaatttatctgcattcagtcacattgtaatatttgagtcagaagaaagacatgttctccagttgcttctgcacaattcctttcttgagatgaggaggtttttccactcacatttcaaggttgacagagaccttcagtcggctgttgtggtttattcacggaggaatgtgctctgatttagtactgatgtggcagaaaatgcctgttagctcgtgtagcaatccccacacgttcatgttgtttcagcttttcacttgagaaatgagatgtaacactgccggatacttctgatgtattaaacccctttgaacgagatgttacgttacttttactcaagtgctttacaacgacaataacaattctctgcttcttctaagataaaagtctg

SEQ ID NO: 7714 - DNA, 2439 bp, Zea Mays
acaaattcaaataactcgctgacctccactgctccacacctctacctgcctgcgccaaaacctagccgccgcggcgccgcccgccgacctgccgtgccgactgctgagtgccgaccgacgtgcgcccgctggccgctcgacgttgttggcctccctcgacgccgctggccggtggccgctcgacggagtcgacgcctcacagcctccctcgacgcgacgccgctggccactcgacggagtcggcgcctcagtcacagcgagaattcagactgctgcgcgccttcatccccttcccggcggccgacgtccaactccgcctcacagtgcttctgtggttctgcctagcgcctgctcctgctcgtagtgctcgactacgggctgctcttctctagccttgagacagagagtcggagactccagtgcccctgctagcctgccctctggttttgtgttaagtgtgggggtgatgatgagccaccggaggcgttctcgcgctgccggctcgccgcctagtgacgccagtacgggtacagcccctactcctgagaagtcgggatggatccggccgtgggcagcgacagggtcggaccttaaggtgctggagcttgcgctggcgttccgcgcggccaacgcgttgctcgtgcgcacatacttcaaccccgacgagcactggcagtgcctcgaggtcgcccaccgcgtcgcgttcgggtatggtcatctcacgtgggagtggaagcggggcctgcgcagttatctccacccgttgatctttgctgctttgtacaagaccctggcgctactccatctggacactccgtgggttatggtgatggctccacgtctcgtgcaatctttgtttgcagcttttggagatctatacctatataaactttccaaacttattttcaatggtcaagttgctaagtggacggtatccttaaactcatttatgtacctatacaattttcttcgtgagtatatgacttcaacaaccttggacgtcggccttaacaaactgtttgcagttattttctcagttggttaactggttcatgtttttctgtatcacacggactctatcaaacagcttggagactgttttgaccgtggctggactctattactggtttgctgcaatagagtcttccaaggcaacttcaatcgtttcaaagcagcatgcggcctgtgaacaaagtatcccatcaagaaaagtggctcttctgatagcagccttatcatgtgccattcggccaacaagtgctgtaacatggctatatgttagccttttggattttattcagatgaaatcaaaatgttgctttatccttcttgatgtcattccagtaggggcaattgtccttgctgtaacaacactccttgattggtggatgtatggttcctgggtcatagtgccgcttaattttttgaaattcaacttattgtcttccggaggagactactatggaacacatgtctttcattggtactttacacagggttttccatccatgatttggacattcttaccatttgcattgtgcggcattgtaaagtctcaggaatggaggctttcaggtctaattgcttgggtattaggggtttacagcattcttggacataaagaattcagattgaatactgcaggtttgttcttccagtgctacctttagcattgatgttctcaggttactgcttagcttccatgtcacggtccaagggcaaaaatcagcataggaaagatagtctttcaaggatgcaaccttttgttattcttctcgtcataaccaacgttcccatggctttatatatgtccttattccatcaaaggggaacagaagacgctatgtattatttgtcaaaagaagcccatgatggaagagtgaggagtgttctctttctcatgccttgtcattcaacaccttactactcaaccttacattacaatctacctatgcgttttttggactgcactcctagtgatagcaaagggaccttggatgagtcagatcgtttccttacaagtccatctgagtttgtcggcgaggtttttggaaatttatctgcattcagtcacattgtaatatttgagtcagaagaaagacatgttctccagttgcttctgcacaattcctttcttgagatgaggaggtttttccactcacatttcaaggttgacagagaccttcagtcggctgttgtggtttattcacggaggaatgtgctctgatttagtactgatgtggcagaaaatgcctgttagctcgtgtagcaatccccacacgttcatgttgtttcagcttttcacttgagaaatgagatgtaacactgccggatacttctgatgtattaaacccctttgaacgagatgttacgttacttttactcaagtgctttacaacgacaataacaattctctgcttcttctaagataaaagtctg

SEQ ID NO: 7715 - DNA, 2321 bp, Zea Mays
cgcggctgccctgccccaccaccgccccctccccctccccttcccggcctcccccatcttgctccctccctctctccatctctcattggccattccgcccgcatgaagccccaaaccctcttcggcatcgccttcgccgcagcagcgcccgcgtagcccgcccctctcgcccccgcccgctcgcccgctcctcgatcccgcccgctctgcagccgatcccgccgggagcacgaccgattacgatgaacggcgccgcggcaccggagcgctcgccctcaccctcgcccccgcctccggcccaggcccaggcccaggcgccgccgtcgccctctccggctcagccgctcgagtggaggttctcccaggtgttcggtgagcgcagcgccggggaggaagtccaggaagttgacatcatctcagcaatagagttcaataaatcaggacatcatcttgccactggagacagaggtggacgagttgttttatttgaaaggaccgatgtcaaagatgcatcctgaatttcgctacaaaactgagtttcaaagccacgaaccagagtttgattatcttaagagcttggaaattgaagagaagattaaccaaataaaatggtgtcaagcagcaaatggtgcattgtatcttctatccacaaatgacaaaacgataaagttttggaaggtccaagaaaagaaggtaaaaaagctatctgagatgaatttggaccgttcagctgctcctgcaaatggtagtcctggtggcgtgggatatctgagcccatctctctcaaatggcaatgctctaaaacctggcaggcttcctttgcttcgcctgcctgtggttacaagccaagaaacaagtcttgccacaagttgccgaagagtatatgctcatgcacatgactaccatataaattcgatatcaaataacagtgatggtgagacatttatatcagctgatgatttgcggataaatctatggaatttggaaatcagcaatcaaagtttcaatattattgatgttaagcctacaaacatggaagatctcaccgaggtgataacatctgctgaattccatcctacccactgcaatacgttggcatatagtagctctaagggatccattcgacttgttgatctgcgccaatcagccctttgcgacactcattatcaaatctttgagcagcatgaggccccaggctcaagatcatttttcactgagattatagcctcaatttcggacataaagttttcgaaggatgggaggcatcttctcagtcgcgactacatgactctgaagctttgggatgttaagatgaattccggtccagttgcaacattccaggttcatgagtatctaaggcctaagttatgtgatttatatgaaaatgactcaatttttgacaaatttgagtgttgtcaaagtggtgatggattaagagtagcaactggttcctacagcaacattttccgtgtgtttggttgtggtactggtaacagtgaggcgacaacacttgaagcaacccgaaaccctacaaggaggcagctccagaatcccactagagctaccagatccctaagttctctgacaagggcagttagacgaggtggagaaagcactggaatagatgtcaatggaaattcttatgatctgagcacaaagttgcttcatttggcttggcacccatctgaaaatctaattgcatgtgctgcagccaatagcttgtacatgtactatgcataaacaagccaaatgaacagagcgacagtatttttggtggttgctcccggtgagaaagacacttttagctcctggtggatttgaagccaggagttgctggggagatggtgtatcttgtgccagtcagatgcagttcttttcggtgccatatagagctgtccagagtccaagaggaagtgactcgatcattcccgggaagcagctttgattctgatttatttttttgtggggaaaggcttgtctttcccccataggtccatttagatttaaagataaggccctagtttggcaatttgtagtagatgttaagaggatgacgatgatccaccgttgtattcatgttgggcatgggtttgtaacttcagggtggccgttgaagctttcgataattttatcttacatacggatcaaccttttttttttctatcttatgtgaggaaccttattttcgaggaataccaggaccttcgccatgtttaatgcgaaccctagaataggtaatatgctgtgtcattttattgtacgtacattttaaaatagctgcaagtggttctactgtttagttattataagtatattctttt

SEQ ID NO: 7716 - DNA, 2248 bp, Zea Mays
ctataatcacaccgagcaaactgtccatcctagctacaatgggtagcacgcacaaggaagaagtaggtgtcctggaggaaatacttgacgggagaaaagagccgaggaagctatctttatcagttctaaaacacatcacaaatgacttctcgcacgagcgaataatcggttatggtgggtgcggagaggtttacaagggcatcctgcaaaacggaagcgtcgctgtgaagaaaatcttcagcaacctaaatgttgaagataaggaatttgatcgagagattcagagcatgatgcaggtgaagcatccaaacgtagtgcggtttattggctactgttctaacacagagcatgaactgatgagaaaagaaggcaagtatattaaggtcgaggtgcgagaaaggctgctctgtttcgagcatatcagcaacggaagcctccgcagccacattacagatggactaagagggcttgaatggcacgcacggtataaaataattaagggaatttgtgagggcctacatcatcttcacatggaaaaaaacatcattcacatggatcttaaacctgccaacatactagtacatgatcaaatggtaccaaagattgcagactttggtctatcaaggctggctgaagtatcacgtactatgagcaatgaacggcttttatccctaggatactgcgctccagaataccaataccatggcaaaatgtcccttaagtctgacatctatagtttaggtgtcataatgctggagctggtgaccgggagcaaggaggagccggacattactaatgaagtcacttatctggaggacatgctaggaatcgagcctcttgatctgcatttcctagtcgaacctaccaagcagatatcctgctcagtccatctgaccaacgctacgaatgactgtttcgccttcattgttcagacgacgaacccgaagcagtactgcatacagccggacagaggcgtcgttccaccacgatctgagtgtagtgttgccatcgtattatcgcaagaaccgacgcataataagcgatgcagcatggaggacgagctaagcgtgcagagcaccagagtggatgagggtgtgacagctgcggatgtgagtgaagcgttgttcactggaaaggaagatagaacggtcgatcacgtgagcctgatggtcggtttcgacatgtcgccatcgccacctgaggaacaaacggaggacttcacgtttgcaccactggcgtcgttgtacgacgaggagccacagttaagcgcggcgaagagtgcgcgtttacagttggggcgttctggtcgcttctctaagaagaagctagtgtctattctgaaatcctggcgagcaagattaaaggtatcatcccataagaaactcgagactccaaagcatgactgtgagattcctgaagctgtagagcatgaagaagttgccgcgcccaggtgtcccaaaggaccactgccacagcgcgatctttctccactgggcgaagcatgttctaggatgaacatgacggcgatccatgagatcctagtgaacagacattacagagatgatgacctagacccaaacgtgccgtcgctcgaggaatggacacagcagagcagggatatgttggatgataggaaacgtggggacttcacttttcgtgataaagatttccgagcagccatagactggtataccaagtgtatggatgtggggccaaagaaggcgtcaccaacagttctcgttcgacgcagttgctgccacctcatgtgcggcaacctggacgccgccctccgcgatgcaatgcaagcgcagcgtcagtatcccgactgcccaacctcactgtacatgcaagcagtggcactttcaaagctagggatgcatagtcaagccatgggcatgctgattgaggcgtcggagatggaagcgaatcagaaaaagacccgaaaagcagcttaagaagactcaacatgggcgaaacctatataccttcgttttgtttctgtaagctattcttgattgttgtatctgcttgccaaattgtctaggttggagtggaattgggaagctttacctcttggggataatgcatttcttgttgtattcccctctgaggatgaaatgctccgtatggctgatattgagtataagctcaagagtggaatttctattcatatggattaggcctggagatgctaatccggcctattttttttggatgagatttgggtgcatgtttctggtgttccgca

SEQ ID NO: 7717 - DNA, 3031 bp, Zea Mays
gggtagtatcaatccatatccgtctacccaatgggtaggttcttgcccattaacatacccgtggcggctggagatatcatcccgtatccgtctttgtatgggggtaaaaccgtcggttattcgggtttccgttatgtattgccatcgtctatgcactgcatttcccttcctcacctccggcgcaaaaccgcagcagtaggatcccagccggtcggccgcccaggatgccggagcctgcgtccccgccctcagcggcgggagccggccgccacatatccactccacatcaacaagggagtggagaatgctcccggcgcctcttcgatctcgacctccggccggcctcatgtgggagacgagggacgatgggctcccttccctcagcgtcagcgggttgtgaccccatatagccggatgtcagtcaattcatccatggcgatcaatccattcctcgagcaggccaaggttcttctctgggttttgaggaaggacccatctgcgatgctcatctaattaaggttacctggtcatcttgctactcggtcgcctacaggatcggatagcttactctatctataatcacaccgagcaaactgtccatcctagctacaatgggtagcacgcacaaggaagaagtaggtgtcctggaggaaatacttgacgggagaaaagagccgaggaagctatctttatcagttctaaaacacatcacaaatgacttctcgcacgagcgaataatcggttatggtgggtgcggagaggtttacaagggcatcctgcaaaacggaagcgtcgctgtgaagaaaatcttcagcaacctaaatgttgaagataaggaatttgatcgagagattcagagcatgatgcaggtgaagcatccaaacgtagtgcggtttattggctactgttctaacacagagcatgaactgatgagaaaagaaggcaagtatattaaggtcgaggtgcgagaaaggctgctctgtttcgagcatatcagcaacggaagcctccgcagccacattacagatggactaagagggcttgaatggcacgcacggtataaaataattaagggaatttgtgagggcctacatcatcttcacatggaaaaaaacatcattcacatggatcttaaacctgccaacatactagtacatgatcaaatggtaccaaagattgcagactttggtctatcaaggctggctgaagtatcacgtactatgagcaatgaacggcttttatccctaggatactgcgctccagaataccaataccatggcaaaatgtcccttaagtctgacatctatagtttaggtgtcataatgctggagctggtgaccgggagcaaggaggagccggacattactaatgtacttcgacggtggagccataggtggaaaaaatcaggacagcgtacaccatcatttcaacgccatcaagtgagtaaatgcataggtttggctaagagatgcaaagaagtagaaccaacaagaaggccttctatatgtgatatacttgctgccctaggcaaaatggaagatatgaattgcagtgatcaacaagtggacgaggaagtcacttatctggaggacatgctaggaatcgagcctcttgatctgcatttcctagtcgaacctaccaagcagatatcctgctcagtccatctgaccaacgctacgaatgactgtttcgccttcattgttcagacgacgaacccgaagcagtactgcatacagccggacagaggcgtcgttccaccacgatctgagtgtagtgttgccatcgtattatcgcaagaaccgacgcataataagcgatgcagcatggaggacgagctaagcgtgcagagcaccagagtggatgagggtgtgacagctgcggatgtgagtgaagcgttgttcactggaaaggaagatagaacggtcgatcacgtgagcctgatggtcggtttcgacatgtcgccatcgccacctgaggaacaaacggaggacttcacgtttgcaccactggcgtcgttgtacgacgaggagccacagttaagcgcggcgaaggtatcagtatggacatccaatcagttggggcgttctggtcgcttctctaagaagaagctagtgtctattctgaaatcctggcgagcaagattaaaggtatcatcccataagaaactcgagactccaaagcatgactgtgagattcctgaagctgtagagcatgaagaagttgccgcgcccaggtgtcccaaaggaccactgccacagcgcgatctttctccactgggcgaagcatgttctaggatgaacatgacggcgatccatgagatcctagtgaacagacattacagagatgatgacctagacccaaacgtgccgtcgctcgaggaatggacacagcagagcagggatatgttggatgataggaaacgtggggacttcacttttcgtgataaagatttccgagcagccatagactggtataccaagtgtatggatgtggggccaaagaaggcgtcaccaacagttctcgttcgacgcagttgctgccacctcatgtgcggcaacctggacgccgccctccgcgatgcaatgcaagcgcagcgtcagtatcccgactgcccaacctcactgtacatgcaagcagtggcactttcaaagctagggatgcatagtcaagccatgggcatgctgattgaggcgtcggagatggaagcgaatcagaaaaagacccgaaaagcagcttaagaagactcaacatgggcgaaacctatataccttcgttttgtttctgtaagctattcttgattgttgtatctgcttgccaaattgtctaggttggagtggaattgggaagctttacctcttggggataatgcatttcttgttgtattcccctctgaggatgaaatgctccgtatggctgatattgagtataagctcaagagtggaatttctattcatatggattaggcctggagatgctaatccggcctattttttttggatgagatttgggtgcatgtttctggtgttccgca

SEQ ID NO: 7718 - DNA, 3103 bp, Zea Mays
gggtagtatcaatccatatccgtctacccaatgggtaggttcttgcccattaacatacccgtggcggctggagatatcatcccgtatccgtctttgtatgggggtaaaaccgtcggttattcgggtttccgttatgtattgccatcgtctatgcactgcatttcccttcctcacctccggcgcaaaaccgcagcagtaggatcccagccggtcggccgcccaggatgccggagcctgcgtccccgccctcagcggcgggagccggccgccacatatccactccacatcaacaagggagtggagaatgctcccggcgcctcttcgatctcgacctccggccggcctcatgtgggagacgagggacgatgggctcccttccctcagcgtcagcgggttgtgaccccatatagccggatgtcagtcaattcatccatggcgatcaatccattcctcgagcaggccaaggttcttctctgggttttgaggaaggacccatctgcgatgctcatctaattaaggttacctggtcatcttgctactcggtcgcctacaggatcggatagcttactctatctataatcacaccgagcaaactgtccatcctagctacaatgggtagcacgcacaaggaagaagtaggtgtcctggaggaaatacttgacgggagaaaagagccgaggaagctatctttatcagttctaaaacacatcacaaatgacttctcgcacgagcgaataatcggttatggtgggtgcggagaggtttacaagggcatcctgcaaaacggaagcgtcgctgtgaagaaaatcttcagcaacctaaatgttgaagataaggaatttgatcgagagattcagagcatgatgcaggtgaagcatccaaacgtagtgcggtttattggctactgttctaacacagagcatgaactgatgagaaaagaaggcaagtatattaaggtcgaggtgcgagaaaggctgctctgtttcgagcatatcagcaacggaagcctccgcagccacattacagatggactaagagggcttgaatggcacgcacggtataaaataattaagggaatttgtgagggcctacatcatcttcacatggaaaaaaacatcattcacatggatcttaaacctgccaacatactagtacatgatcaaatggtaccaaagattgcagactttggtctatcaaggctggctgaagtatcacgtactatgagcaatgaacggcttttatccctaggatactgcgctccagaataccaataccatggcaaaatgtcccttaagtctgacatctatagtttaggtgtcataatgctggagctggtgaccgggagcaaggaggagccggacattactaatgtacttcgacggtggagccataggtggaaaaaatcaggacagcgtacaccatcatttcaacgccatcaagtgagtaaatgcataggtttggctaagagatgcaaagaagtagaaccaacaagaaggccttctatatgtgatatacttgctgccctaggcaaaatggaagatatgaattgcagtgatcaacaagtggacgaggaagtcacttatctggaggacatgctaggaatcgagcctcttgatctgcatttcctagtcgaacctaccaagcagatatcctgctcagtccatctgaccaacgctacgaatgactgtttcgccttcattgttcagacgacgaacccgaagcagtactgcatacagccggacagaggcgtcgttccaccacgatctgagtgtagtgttgccatcgtattatcgcaagaaccgacgcataataagcgatgcagcatggaggacgagctaagcgtgcagagcaccagagtggatgagggtgtgacagctgcggatgtgagtgaagcgttgttcactggaaaggaagatagaacggtcgatcacgtgagcctgatggtcggtttcgacatgtcgccatcgccacctgaggaacaaacggaggacttcacgtttgcaccactggcgtcgttgtacgacgaggagccacagttaagcgcggcgaaggtatcagtatggacatccaatcaggtgcgtgtgtgtgctttctcgctctggattccttcgcctgattggatcatgcatgactcgctctcagagtgcgcgtttacagttggggcgttctggtcgcttctctaagaagaagctagtgtctattctgaaatcctggcgagcaagattaaaggtatcatcccataagaaactcgagactccaaagcatgactgtgagattcctgaagctgtagagcatgaagaagttgccgcgcccaggtgtcccaaaggaccactgccacagcgcgatctttctccactgggcgaagcatgttctaggatgaacatgacggcgatccatgagatcctagtgaacagacattacagagatgatgacctagacccaaacgtgccgtcgctcgaggaatggacacagcagagcagggatatgttggatgataggaaacgtggggacttcacttttcgtgataaagatttccgagcagccatagactgtgtatggatgtggggccaaagaaggcgtcaccaacagttctcgttcgacgcagttgctgccacctcatgtgcggcaacctggacgccgccctccgcgatgcaatgcaagcgcagcgtcagtatcccgactgcccaacctcactgtacatgcaagcagtggcactttcaaagctagggatgcatagtcaagccatgggcatgctgattgaggcgtcggagatggaagcgaatcagaaaaagacccgaaaagcagcttaagaagactcaacatgggcgaaacctatataccttcgttttgtttctgtaagctattcttgattgttgtatctgcttgccaaattgtctaggttggagtggaattgggaagctttacctcttggggataatgcatttcttgttgtattcccctctgaggatgaaatgctccgtatggctgatattgagtataagctcaagagtggaatttctattcatatggattaggcctggagatgctaatccggcctattttttttggatgagatttgggtgcatgtttctggtgttccgca

SEQ ID NO: 7719 - DNA, 5922 bp, Zea Mays
cgttttgacggttgtcctgcgtcgattttctttagaatcaacccacactcctataatctcttctctactactataatagaagagtttcttgcgtcctgattttagtgtgtcctcctcctccactaaccttcgtaagtcgtcgtgctttcccgcgtctacgaaacacactcccgcacactacgtgtataaaccgtctccgcacgccacacgccttcctccgcccgttatcgcaaccttagagcacgtcgtaaggataagtccccgtaaactccgcgccgagcgatgcaaggataggacctgtgaactccgcgtcgagtgacccgccacgtcgtaacctccgatagcgtgcctgccacagcgtcggtcgctataaatttctggcctctcgctctccgcgtcagcgcaacgaaaatggttaccactaccagcagcagggctcggatctttctaggtggcgggctcttcagagactcatgtcgtcagtctggtgctggcgtccgactgtttgccatgacatgtcgaggtcggacgaggacacagagacatgctggtcggtggctgcgaccacgggctccctcgttgtggcgccgacgaggaggaggctgtagtcgagcggcatggcgagggtgttgttccgcgtagggaggcgctttccgctctacatcacgccccatcattccatggtagttaaggtacccgtaccaccaactctttgactctaacgatcaatcgatctgcttaggctggaaaggtctcaattggtagctataggtggagtgctggcggtactaatgcgaaacagagcttgggagtcagattggtgcatatggggtgagcgatcgggtgcttgcttgctcatttctaaattgatggagcagggaattgagttatccgtgtttatagcggcgacgacggttacaaggatgcatgtcatgcatttgtggaattgcagcagccttcgttgagtcttggagagctacttctacggtcatgatctgaagaagtttctcaaagcgtgaacatctcttagcttgtaagatgattctaatttacagatgtttccatttcgatattaatcttattctgttaacaacatattttcttaaataacatcatgtttagcttcacaaatatgcttagtatttttttacatacatatattttcaatcagtagttataccaaatttgcaaattaaggcatgttagaggaagatacatcatgaaaaatagaataactaaaaattccaaacacaatggcttttgggcgtttaacttctctatacttcacagcccgtcgcagaagtattgttggatcgttgtggtctccatcctcttacaattgttgtcatgtgcaagctttgacgaaggaaactagagcgaaaaaatgggagaaaaccatatccaaccttccaacatatgcaacttgtgcacttggtctagttttatacgtcaatgaaaaagatatagatataccatgagaacaaaaacccatcagtaatagaagaggggaaatggtctcagcctctcagggaaacacatatgggagtaggacaactgcaaaggcacaactagggatgtcaaccggtacatactcatcgggtagtaccattccatacccgtacccataaaaatactatatccgtcaggttacccatatatactcgtgggtataaaatcatacccatacacgtactcacacaagtaattttaatccgtacccgctaggaaagtcttaaagtccaatacactaatcactcaaaatattaaataaacatacaaaaataagtttaacttcacgtacatcaaatcatatgattaccagtgccggtcctggcgggggtcgagcagtgcccccgaccagggcccccaaattaatggggcctcactttagttactaaataacagtatatatacagtcatatagcgtatattgtttatatatgtctgttggctctacaaaacttttaaagacctaattataagtcaacaacacggcaacaacaagcaaggagaattagacgtaacccattaatcttgatttctatattctagtagtagtacttcgtaatctcaggcccatctgactaggctctcagtcgcaaacagacaggcggtcgtgccgtctcctctcggtagccaacacacgacattgggtacgacaacgcttttgtctttccctacatagcgaacacgaaactaacatgacatgatcgattgatctcacaacgtattacatctatttgatcattgttcgaggtaaccttcttttgagtcatttggacacatatataccccatttttctacgagatgttatgttatattttagttactttgtatttaatgtgaacaacgttttcaaatatacataaatatttattaataatatatatatgcactataattatgtgtaataattaatattatcaagggcctccattataagtcttgttccgggcctctaaaatgtcaggaccggcactgatgattacataacttggtagttaaacaaataatagctagagaagagttttattttaattaagataggctctattagatgattataataatattgatgtggttatattttacctatgagtagaccggtatgggtagtatcaatccatatccgtctacccaatgggtaggttcttgcccattaacatacccgtggcggctggagatatcatcccgtatccgtctttgtatgggggtaaaaccgtcggttattcgggtttccgttatgtattgccatcgtctatgcactgcatttcccttcctcacctccggcgcaaaaccgcagcagtaggatcccagccggtcggccgcccaggatgccggagcctgcgtccccgccctcagcggcgggagccggccgccacatatccactccacatcaacaagggagtggagaatgctcccggcgcctcttcgatctcgacctccggccggcctcatgtgggagacgagggacgatgggctcccttccctcagcgtcagcggtgagttctaagcccaaaaggtatttcagagttgggctttggacgatatgcagcagaaagggaacctaggtcgtcccgactctcttcttcctacttcctcaaaacaattagtgcgagaatcctactaagtcaagtcctcgagtattttagtatcgactaacactcaattttttttcacgaatcaacggaagacaaatttttttagaaaagggaagctttattcagaagtctaggatataaaaacaaactctcaaaaacggccacccatgtttgggtggatctccactgctgataccgatgctgatggttctttttctagtttattagcatggtgatagcccaatcgattatcgttcattccttttgtagtttattactattattattgatgacgcctgtttctgaccactcctttcggccggccaaattaactctggaatttattccatgccttcctcggccctgtttgttctgcatgtcttcaaagggttgtgaccccatatagccggatgtcagtcaattcatccatggcgatcaatccattcctcgagcaggccaaggttcttctctgggttttgaggaaggacccatctgcgatgctcatctaattaaggttacctggtcatcttgctactcggtcgcctacaggatcggatagcttactctatctataatcacaccgagcaaactgtccatcctagctacaatgggtagcacgcacaaggaagaagtaggtgtcctggaggaaatacttgacgggagaaaagagccgaggaagctatctttatcagttctaaaacacatcacaaatgacttctcgcacgagcgaataatcggttatggtgggtgcggagaggtttacaagggcatcctgcaaaacggaagcgtcgctgtgaagaaaatcttcagcaacctaaatgttgaagataaggaatttgatcgagagattcagagcatgatgcaggtgaagcatccaaacgtagtgcggtttattggctactgttctaacacagagcatgaactgatgagaaaagaaggcaagtatattaaggtcgaggtgcgagaaaggctgctctgtttcgagcatatcagcaacggaagcctccgcagccacattacaggtgtcataatgctggagctggtgaccgggagcaaggaggagccggacattactaatgtacttcgacggtggagccataggtggaaaaaatcaggacagcgtacaccatcatttcaacgccatcaagtgagtaaatgcataggtttggctaagagatgcaaagaagtagaaccaacaagaaggccttctatatgtgatatacttgctgccctaggcaaaatggaagatatgaattgcagtgatcaacaagtggacgaggaagtcacttatctggaggacatgctaggaatcgagcctcttgatctgcatttcctagtcgaacctaccaagcagatatcctgctcagtccatctgaccaacgctacgaatgactgtttcgccttcattgttcagacgacgaacccgaagcagtactgcatacagccggacagaggcgtcgttccaccacgatctgagtgtagtgttgccatcgtattatcgcaagaaccgacgcataataagcgatgcagcatggaggacgagctaagcgtgcagagcaccagagtggatgagggtgtgacagctgcggatgtgagtgaagcgttgttcactggaaaggaagatagaacggtcgatcacgtgagcctgatggtcggtttcgacatgtcgccatcgccacctgaggaacaaacggaggacttcacgtttgcaccactggcgtcgttgtacgacgaggagccacagttaagcgcggcgaaggtatcagtatggacatccaatcaggtgcgtgtgtgtgctttctcgctctggattccttcgcctgattggatcatgcatgactcgctctcagagtgcgcgtttacagttggggcgttctggtcgcttctctaagaagaagctagtgtctattctgaaatcctggcgagcaagattaaaggtatcatcccataagaaactcgagactccaaagcatgactgtgagattcctgaagctgtagagcatgaagaagttgccgcgcccaggtgtcccaaaggaccactgccacagcgcgatctttctccactgggcgaagcatgttctaggatgaacatgacggcgatccatgagatcctagtgaacagacattacagagatgatgacctagacccaaacgtgccgtcgctcgaggaatggacacagcagagcagggatatgttggatgataggaaacgtggggacttcacttttcgtgataaagatttccgagcagccatagactggtataccaatgtatggatgtggggccaaagaaggcgtcaccaacagttctcgttcgacgcagttgctgccacctcatgtgcggcaacctggacgccgccctccgcgatgcaatgcaagcgcagcgtcagtatcccgactgcccaacctcactgtacatgcaagcagtggcactttcaaagctagggatgcatagtcaagccatgggcatgctgattgaggcgtcggagatggaagcgaatcagaaaaagacccgaaaagcagcttaagaagactcaacatgggcgaaacctatataccttcgttttgtttctgtaagctattcttgattgttgtatctgcttgccaaattgtctaggttggagtggaattgggaagctttacctcttggggataatgcatttcttgttgtattcccctctgaggatgaaatgctccgtatggctgatattgagtataagctcaagagtggaatttctattcatatggattaggcctggagatgctaatccggcctattttttttggatgagatttgggtgcatgtttctggtgttccgca

SEQ ID NO: 7720 - DNA, 2773 bp, Zea Mays
tccaaatccaaaaggaaaacaatcgcgagcacgagacggggacgagcagctccacaacaattcgtgcctgcctgccctgcctctcggacacctccctcgtcctccccctcctacgccgcccccgtcctcggcccccacgcgctcgcgcggcgcacgaggcgacgaacccgacctcctcctccgcgcccgtccctgccaccggtcgccgatattggaaggagctcggagggctggggcgctgacctgagttttatggagagaggatgccagagctgcgaagcagtactcgccaagcatgcctaaggtcgaagaagcttgaagatctgcagctaggagagccgcctgcgaaaccggtctcacctgctccgccgagggcaggaaagcgtgctcctacacgtgctgctaggggcagaaagggtgccactgggaaaggagtgccccctgcacctacgactagaagaaagcggggtaatattgtcgacttggaagctgatccagcttgtgaagacccccctaaagctgtcaagggactggaagttgctgctgctgctgcacccaagaaccttcctttgaaggaggtagccgaggttggtgttctgaaaatgaatggtgtgagtgcagagaagattattggggctgaagatgaatcaacagcgacacctgtgccagagagggttcaagtaggtaattctccagagtacataactgacaggaagttaggtaaaggtggttttggtcaggtctatgttggtcgaagggtttctggtggagctgcccgcactggtcctgatgcatatgaggtcgcattgaaattagagcatcgaaacagtaaaggatgcaattatggccctccatatgagtggcaggtttataacactctcaatggttgctatggcataccatcggtccactacaagggtcgtcagggcgactactatatacttgtaatggatatgcttggtcccagcctttgggacgtgtggaattcaatggggcaggcgatgactccaaatatggctgcttgcattgctgtagagagcatatcgattcttgagaagctccattctaaagggtttgtgcatggtgatgtgaaaccagagaattttctgcttggtcagcctggatcgcctgacgataagaaactttaccttatagatctcggtttagcatccaagtggaaagagaataatggtcatcatgttgattatgatcaacggcctgatatctttaggggaacaattagatatgcgagtgtccatgctcatttggggcgcactggtagtaggagggatgatttagagtcactggcatacacccttattttcctgattagaggaagattgccttggcaaggctaccagggagataccaagagtttccttgtttgcaagaagaaaatggctacttctccagagatgctttgttgtttctgtccagctccattcaaacagtttcttgagattgtcacaaatatgaaatttgatgaagagccaaattatgccaagcttatctctatttttgatggtttgattgaagcacctgcgtcgagaccagtcagaattgatggggccctcaagattgcatgcaaatctagaagatgaacaacctaaaaagaaggttagattagggagcccagcggctcaatggatttcagtttataatgctaggcgacccatgaagcagaggtaccattacaatgtggctgactcaaggctaagtcaacatatagaaaagggtaatgatgacgggctttacgttagttgtgtggcttcctcggcaaacctttgggcactcatcatggacgctggaactggtttctgttctcaagtttacgagctctcaccagtttttctccacaaggactggataatggagcagtgggagaaaagttactacataacagcaattgctggatcaaccaatgggagttcattggttgtcatgtccaaaggaactccttacacacagcaatcatacaaggttagcgaatcgttcccttacaagtggatcaataaaaagtggaaagaagggttccatgtaacatctatggccactgctggaaatcgctggggcgtagttatgtcaaggaactcagggttttctactcaggttgtagagttggacttcctgtaccctagcgaaggcattcatcggcgatgggagagtggttacaggataacttccacagcggccaccaatgaccaagctgctttcatcttgagcatgccaaagcggaagccgatggacgagacgcaagaaaccctccggacctctgcctttcccagttcacatgtcaaggagaaatgggcgaagaatctctacatagcctcgatctgctacggacgaacagtgtgctgatagtcgaagagaggggcggccgcgctgactcaatacggtggcttgcgtcaagagattagagatgtgagatgaacattaaatcaaaaccagttctaatgatgataggatcagtagatctgatgatacggtatggtatcctaccgtagctgtaaagaaatgttgtacccagtgccggccgcgagaccgttactgccatgaagtgaagctaatgcattttggagtctcttcccgggaaaatggaacacaatataatgctcatgtgcaaatcatataggtttaatttcttgcgcactagagtttgcacgtcaaaaaaaatcataatctgaaaaataggccttcatatatatatatacatatatatctatctatatatatatattatatagctaaaataacacaccagtttgaagcaaag

SEQ ID NO: 7721 - DNA, 1915 bp, Zea Mays
tgcacacaagagagagagacgattaaattgctcccacagcaaatccaaaagttgagccctgagtagctcgccgcagcgggcagggcatcttgtcccgttgctctttccttgatcgtccatccatgcatccatggaccacggtgcttttgcagctgcagcaaggctctcccctccggctactatagcggttactagtgcgtgaatgctccttctgcacctcgcttgccatataccttgcatcagcagcagctacccagcagctcgatcgcgctcccgcgagtacactagaagatgaacagtgcagtggaagtgtagtggagttgcagccattatcgatcgccaccacactgctcctactcatcacctgcagcacctagatcaagagcgatatgatctcgagcgagagcgcatggagcggcggcgtgggtgccggcgacggcgcgggaagcggcatgacggtgctggagaggctggtgctcgacgaggcgctggcagcggcgatcctggagctgcagggcatccagcaggcgcccgcctgcgcgggcaaggaggtagtaatggtagcggagccgacggccggtggtggcgtggttggggaggccgctgttgccttcccctcgatggggatggcgacgccaacgcccgcctacgcggacgttgacgcggatgtcctgcagcgacagcagcatcaccatcgccatcacggcgcgatggggatgcctcccgactacgacctcacaccagcaacacccgctgtcacggtaactgctgtgccgcccgcgttcacatccgccgcagcatacagcggaggcaacttcgtcgtcggacaatcgccggcggtcttctccaccagcaacgagacgacagcaacggcggcggccgtgacctcgacgacgagcctgaattgtgaacaaggcggcggaggcggtggtggccgaaggcaacgccgggccaacaggaagaggaaggccgccgccgagcggtcaccggtggcggcggcacaggagagcaccctgtgcagcctcctggcgtccaccaccaccgcgggcgaaggcggcatccagatcgcattcagcaacgccgccgccgccgccaagagatcagccaagccgtcgtcgctgagtagcagcggctcgtcgagcatcagcttcgacgggcggaaccccgagacgaactgcggcggcgtcgacgaccccatgtacgagccggacacggaggcgctggcgcaggtgaaggagatgatctaccgcgcggccgcgatgcgccccgtctccctcggctccgaggaggacgcaggcgagcgcccgcgccggcgcaacgtgcgcatctcgtccgacccgcagacggtggcggcgcggcagcggcgggagcgcatcagcgagcgcctccgcgtgctgcagaagctcgtcccgggcggcgccaagatggacaccgcctccatgctggacgaggccgccagctacctccgcttcctccagtcccaggtccgggagctgcaaaccctagaccgccggaactacggtctaacgactgcggataataatgccagcagagccaccgccaccatggctgcttctgggccactgatgagctacaacaatggccacggtgccttgccggccttcacgttcccggcagcagctggcgaaaccctatactagcaggaggaggaggaggcgttttgatcgaccagctgaactaatcatctaatttagttggatggtgatagatttgtaacacgcgcgcatgccatgttgttgttaactttcttttaacgtttttttgtccaatatgtgcatgcatgagagaccatccatcttatgaaatggagtatttcatcatcattagcagctcaaggactaggtagacgatgatgatggaaccaatcaaatgaaaggatgatgcaaaagttggc

SEQ ID NO: 7722 - DNA, 2176 bp, Zea Mays
ggtcccacctcgcacgccctcaggcctcgacatccactgccttccgttcgtctcaatcccccgtcgcattccgcaacacctgctcctcgcccccttctctcagaggcgacgcctcgggcgctcctaccctgccccgtctccggtccccccgcgccgtcggcgaggcagccggccgtcacagaagcccgatccggaccccgcgagaaatccttgttatacctgatggctatgattgatgagcctctttatccaattgctgtactgattgacgagctcaagaatgaagacatccagttgcgtctaaactccattagaagactttcaacaattgcacgggctcttggagaagaaagaaccaggaaggagctgattccttttcttagtgaaaacaacgatgatgaagacgaggtgcttcttgcaatggctgaggaattgggtgtgttcattccgtatgttggtggtgtagaacatgctcatgttttgctcccacctttggagacattgtgtacagtggaggaaacttgtgtccgtgataaagcagttgaatctctgtgccgtattggtgcacaaatgaaggaaactgacattgtcgactggttcattccagtagtaaaggctagcagctggagagtggtttacagctcgcgtatcgtcctgtggtcttttccacatagcctatccaagtgcgtcggaccaattgaaaacagaattgaggactatctatggtcagctatgtcaggatgacatgcctatggtcagaagagcagcagcatcaaatcttggaaagtttgcagctacagttgaacagaatcatttgaagacagaaataatgtcaatatttgatgatttaacccaagatgatcaagattcagtgcgtctgttggctgttgaaggctgtgctgcccttggtaaattgttggaaccacaagattgcgtagcacacattcttccagtcattgtcaatttctcccaggataaatcatggcgtgttcgttatatggttgccaatcaattatatgagctctgtgaggctgttggccctgagcctacaagagctgatttggtgcctgcctatgttcgcctccttcgtgataatgaggctgaagtgcggatagcagctgctggaaaagtaactaagttttgccgcatattaaatcctcagctctcagtccaacatattcttccatgcgttaaggaattgtcatcagattcatcccagcatgttcgttcagctttagcctcagtgattatgggaatggctcctgtactgggaaaggatgctaccattgaacagcttgttccaattttcctctctttgttgaaagacgaatttcctgatgttcgacttaacataatcagcaaacttgatcaagttaatcaggttattggaattgacttgctatctcaatcactgctaccagcaattgtagaacttgcagaggataggcactggagagtccggcttgcaataattgagtacatcccattgttggcgagtcaattaggtgttgggtttttcgatgacaagctgggggcgctctgcatgcaatggttggaagacaaggtcttttcaatcagagatgctgccgctaacaacttgaagcgccttgcagaagagtttggtccagagtgggcaatgcagcatataatccctcaggtgctggagaagatcaacaacccacactatttataccgcatgacgattctgcaggcaatctccttgctagctcctgtcatgggtgcagaaatcacctgtcaaaagctgcttccagtcgtcattaattcttcgaaggacagggttcccaacatcaagttcaatgttgcgaaagtactacagtcacttgtaccgatcctcgaccaatctaccgtgaaaccgtgcctcgttgagctcagcgaggaccctgacgtcgacgtaaggtactatgcaaaccaggcactgcaggcgtgcgaccagatgatggtgtcaagctaactagcctttgtgtcaagtatttagagagttcgatcgatgctccatagtccaattttggattacctgtaatttggcctttagatttgaagagttgtttgtgtctagcctcggtaacagataaaaacggacggtcctgatccccttgttcgtttgtgttaattaatgttgtaattgagcaggacacaacgcgttgctggaaaaaaa

SEQ ID NO: 7723 - DNA, 1893 bp, Zea Mays
gtcccgcgccctcccgggcccggccactagtggaagcatctcgctgaaagcaagggggcgcgcgcccccgggctcgggacacgagggggcatcccatcgatgccttgctgggacggcctgccgctgccgtgtggacccacgcgagggggacagcgactgtgtagcaccgtgggcggggtgggccccagcggagtcaagcgggtgtaaattgcagcctctgctctggcggcccccgtgctttcatcattccgctccccacacccctgttcgtggcggcctccgcccctccctctcaggctctcaccaccgtctgctggtggttgccgcggcgccgctcctccctcgtggtggcggtggaggactacggtcggggatcgacggcttcttcgtccgttgggtaagtaatctgtgccatccgggctgtggattaccgtgttccgagccgcagctttggtccccactcggatccaaacatttcttcccccgttcattcagtttgttgtggcctgtggggtttcgcttgccacgtggtgccccacgaatccaacccgagccgtgattgcgtctgcggttagtttaggtttttcgtagcgctgttcttcagtgcgcgagatcgatctaagatgttggtaggcgcacccgcgcggtattaacctgttggtgcccaattaaggtggaggactagaaggctatcctcttggcaggcgaggcgatacatcaaccaaccaaaagaaatgtcagctggcaggcaagcatactggtgttaccagtgccgacagagggtgaggccacggggccgggagatggtttgtccctactgcgattctgggtttgtggctgaaatggatgatgtagatgctctcatgagccacttcgttgggacggatcctgatttccatcgcgacccacggttcgggatcatggaggcgatctccgccgtgatgcggcatggtatggcagggatgaaccgggaggttgatgtcagagggaggccgaacttcttttcagacctggagatggagttcggttcagggccatggctgctcttccgtggccagctccccggccacctcaccgaggacaacggtttcgatgttttcgtcaatggacgacgtggcggcggcggcggcggcggcggcatgaggagggccaacatcgcggactacttcgttggccctggactggatgatcttatcgagcagttgacccagaatgatcgccgaggaccaccacctgctgcacagtcctcgatcgacgctatgcccacagtgaagatcacccagaggcatctcagtggggactcgcactgccctatctgcaaggagaagttcgagatgggatccgaagaagcaagagagatgccatgcaagcacctgtaccactccgactgcatagttccttggttagagcagcacaattcctgccccgtttgccgttacgagctcccgccacagggctctgccaccggtgctagctgctcgcgcgcgagatcaaccgaccagagccagagctcaagtagttcaagcagcagcgggagaaccagtgggcgtcaaaggagaaggaacccgttctcgttcctgtggcctttccgctcatcaagtagttctcgctagattagcctctggtaatctttgctcaggttcgaaatactgtttgtttttttgggtcaaatacgctggtctaatgggctttaatgtggtgggatctcaatctgtactgtatggtttgttaatgatcgccacacgatgcttctccttgcaagtatattattattaccacggtatcatcacaggcacttggttttgtttacttgtttgtgagcttgcaaacaattagtataagcctgattaatggatgttcggcttctttttaaaagaggctaaagttatgatc

SEQ ID NO: 7724 - DNA, 977 bp, Zea Mays
aactgaagcagccgtcgatcgtcgtcggcagactaacgtgggataccggatagcgatagacagaccgccaggcaccaccgcaccacacaccactcgtccggtcgtccctgactcaggccactgacaacgaccaccggaatccgcatgctggcgctgatgaccacctcttccgcgttctccgcccctctcctttcgttccggccgccgcctcgcctccccattaaccgcctgcgcctccacccccgccgtcacgctctgttccgctgcgacgcggtgtccgagattgccccggccgcctcagccgcctacggcgtcctcctcctgggcggcggcgccttcgcatgcctattatctgatgcagtcgcctgagacgatggcagcaggtgatgctgttggatttggatctgcctttctatttgcctgcgtgtttggtatcaggttgtataacagccggaagctggtgccatctggccttcttctagccctttctcttggtgccttgggcgtcttttactctgcttacctgcaagacaaggtgtaagccaatttgattcagtagctgaagagtgcgtatcatctgaagcttccttgaaggcttgctctgttgggttgtagtcgtagatgtagaactttggatactgtcggtgcaccttcctttcgttgcagttgtaacagagagcatctagtgttattggtttgccaatgataatgatgttcaagcttttcagtggccagtgtgctgattgcatcgttttacgtgggccgagtgttggcggatgaatgaatagggccggcctgttgttgcctaggacgatcgtcggtgcagagtacaagaacgttttgttggcttgctatttccacgggcagctcgacagggtacatgtacatatattttgttggcgttggactgttggaggatggacatgaatcccgcaacgactatcatgtgcactggtctatatatttggcagtcagaa

SEQ ID NO: 7725 - DNA, 2545 bp, Zea Mays
ccaccataccttaaagaaaagatgcctctacaaatacacatttatgatctgtcggaacctatggttaatggttctgatgggaaaagggatgagttagcattaacattgggtggctcaagttctagcaatggtggtagtatgaacatggatctggattcatcaagtggaagctctaagcaagttggatccggtttaacaggattagacaatttgggaaacacatgtttcatgaacagtgcagtccagtgcttggctcatacttcaaagctggttgactatttccttggtgatttccacaaagaagtaaacccacataacccactggggatgaagggggaacttgcatatgcatttggcgacttgttgagaaagctatgggctattgataggacccctgttgcacctcgccaattcaaggccagacttggacggtttgctccccaattcagtggctttaaccaacatgattcacagtcaaaggaagcaggtacatggacatggctctttagcaataacttgtgtattacttacctgaagtgtttttgcaatgccaatgaagtgtttctcagataagtttttatgtgttatacgtaggagcttcttgctttcctattggatggactccatgaagacttgaaccgtgttaaatgtaaaccatattctgaagctaaggattcagatggccgtccggatgaagaggttgcagatgagtattggggcaaccatttagctcgaaatgactctatcatagttgatatctgccagggtcagtacaagtcaacattagtttgccccatctgcaagaaagtttctgtaacatttgacccgtttatgtatttgtctttgcccctgccttcaacaacaatgagaacaatgaccataacagtcttcagtactgatgggaccagtgggccatctccttacactattagtgtaccaaaatcgggagatacgaggacccttattaatgcgttaagcagtgcttgttcgttgagagatgatgagcgccttctagttgctgaggtctacaacaattcccttattcggtacttggatgaaccttctgaagttatctccttaatcagagatggagatcgtttggttgcatatcggcttcctaaagacaatgaagatgccccaattgtggtgttcagaaaccagcgtatggagtcatccctttccagttttgggcgtaagtcatggaagacttttggcactccactggtgtcaagccttcctgatacagtaactggaagtaatatttacaatcttttcctaaaggttatgactccattcagagtatcaagaggtgatgctgctgttgctgatcaaacacttggtgaaagcagtctggttgatgaaactgaagatatcaatatgagctctgatgcctcagagcacaccagcataaacaacaattctgtcgaggatgaaacagggactgaagatgtgatgcaatttttcctgactaatgagagaatcccagaccaacgcatgaagatagaaatggatctatccattacggtgaatgatccgcataagcgtctgcatgtggctgtgtgttgggaggacagtggactggaccaatacaactttagttctttgaattctcttccagaagtttacaaagcggtgctgttttctaggaggccacaggacacatgttctctatatgcatgtctggaagcttttattaaggaagaaccattaggcccagaagacatgtggtactgcccaggttgtaaagagcatcggcaagctagtaagaagttagacctctggagattacctgaaatccttattatacacctgaaaagattttcatacagtcggtataccaaaaacaagctggagacatttgtggacttcccgattcatgatcttgacctgtcgaagtatattggtcacagatgccaagacgttcctcacaattatcgactgtatgctactagcaaccactatggaagcttgggaggtggtcactatacggcttatgtttatcatgaagggaaaaagggttggtatgatttcgatgaccgtcatgtgggccccataaccgaggacagtataaagacatcggcagcttatgttcttttttaccggcggatacaggaggatagcttagatacagttacagacatagattctgatattccaacctgaggaggcggtggaggcaatttttgagcccaagtcccggacagtgtatagtttcattggtttagggggacagttgtgcggcaatgccgcaacggaagtgagaaatagaacaggtggggaagagtttgtgcggcaatgtggttcagaggggggagataatttgtcgcggttccttccgttgcaaattcctttgttttttttccgttcccttttagcacctgtaactgatagcggtaaaattttggctaatggcatgtggggaagatatttcgtcccagattctcaacacagttagggttagttttggaaccctatttttaaggaatttctatttttctaagagaaactagtttattttttcttggaaaaataggaaacctttcag

SEQ ID NO: 7726 - DNA, 2916 bp, Zea Mays
atcgcaaacgcctacgcggccgcatgcatgcccccgacgcggccgattgggcatttggggcgaacggttgtttcggcaaggaagccgcgcctacgcccgcccgcgctcgcgcctctccaccgccgccggcgtgaacctcaaccaagcaccgcgcccgcgccggcgactgtccataaggccgtgtcctgccgtcgcgcacccctgcgtcgtacgatcgtccacgataccaaggtatcagcacagactgcagcatcagacttatttggctggagaaatcagggatcatcagagtcaaaggcaacaagattctgctaccatatcagtgcaagcgaatggctgactgtttaaagacatgcctggatcttctattgtgaattcgcagttctttcatgggtggattgtcaggatcccaaactggtagaggtgggggatggaattctctgctcttctgacttcagcggggataaacatcgctgtctgcgtgctcttcttgtccctctattcgatcctcaggaagcagcctcacaacttcagcgtctactttgggaggcggcttgctgaagagaggttccagaggcaggacgattacttctcgtttgagaggctactgcctactgctggttggattgtaaaggcgtactggtgcaccgaagaagagattcgacaagttgctggcttggactctgttgtgttccttcgcctcttcattttcagcatccgtatcttctcaattacttctcttgtttgtgtatttgttgtgcttcctgttaattatcatgggaaagagatgaatcacaatcatattccggaagagtcactgaatgtttttactatagccaatatcgtcgaagaatctcgaaagctttgggtgcactgctctgctttatatgtcataacaatctcagcctgcattcttcttttccacgaatacaagtatatttcgaggaagagactagcacatgttactggatatcctccaaatcctgggctttttaccgtgcttgtccgttcgattccgaggtttgacaatgagctgcttgatgacacaatcagaaatttctttgttaactatcacggatcaagttatctgtcgcatcaaatgatctttcgcaagggacattttcagaagtttgtgagcagagagggcttacaggagatttgtaagggtaagactctccgtatctgagcggaatgggagatctagcatgtccaggtgtggtgtctgtggtgtaagagcttcctcatttcagctttaccgcaacaagttcatcgaggccaagaagtcagacctcactaatccggaagtagtggaagctcaaaagaactgtcccggtgccttagtgttcttcaagactcgctacgcagccgtcgtcgcctcacgggtattccagtcatcaaaccctatgctatgggtgacagatctggctcctgagccacgcgatgtgtattggtcaaacctctggatcccctacagacagatctggctccggaagctagcgacactcgcagctagtatcgttttcatgttcgtgttcatcgtccccgtcgcgtttgtccagagcatgatgcagctggagcagctcaaaaggatgttcccgagcttgacaggtctcctaaataagtccttcttcgccagagtgataacgggataccttcctagcgtcaccttgctgctgtccctgtacaccgttcccccgctgatgatgctcttctcctctatagaagggtccatctctcgcagcgggaggaagaggagcgggtgcttgaaaatcctcttcttcaacatctggaacgtcttctttgtgaacgtcctgtcgggatccgtgctcaaccagctcaacgtcttctccagacccaaggacatgccgacgatgctagctgaactagtgccgaagcaggcaacctttttcatcacgtacgtgctcacctcaggctgggcgagtctgtgctcggagatactgcaggttttcaacttggtctacaacttcttcagcaggttcgtctgctgctgccatcgccagaataaggaatacgtttactctttcccgtaccacaccgaagtgcccaaagtcctcctgttcaacctgctcggcttcacgttctcgatcatggcgcccctcatactcccctttctgctcgtgtacttctgcctcggctacttggtgtatcggaaccagattctgaacgtgtactacccaaagtacgaaatggggggcaagctgtggccggtcatgcacaacgccatcgtgttctcgctggtcctgacgcaggtgatcgcgctcggcgtcttcaccatcaagcgctcccccgtgacggcgggcttcaccatcctgctgctcgtcggcacggtcctcttcaacgagtactgccggcaccgcttctcccgcatcttcgaggcctactccgcccaggacgtgatcgagctggacagggacgacgagcagtccgggaggatgcaggagatccaccagcatctgctggacgcctacagccagaccccgccgggggagggatcctccaggggcggcagccaggtgcccatcgagctcatcatggaggaccccgcgcaggaggcgtcggagtccagccaggagctctgcgacaccgtgcaggaggtgtccggggccatccacgaccacgaccacgtcgtcgaggacaaggcgcattccgtgtagactagatggtctggactctctgcgggtgcgtacgcatgtagatgctgtacagcgcgcatagcagactcgaaacccggaagcaaatacttacatttataaatctacgtgtatagaaacaacagtctaatctattggcaatcgggtactttggcccggcccaacacttcactctctgtccattggattggcacatcggaccgcccatcttaattctgatcttttatatttagttatgaaaacg

SEQ ID NO: 7727 - DNA, 1742 bp, Zea Mays
cggagctcgtgtactactactacccgtgcgtagtaggtgctgccgtgctggttttgcagcccgggcggctggaccggaccggaggccccgacggggcaaccaaaccttctccgatggccgcgcccgtgtcgcagccgccggtgtccgccagggcgtccacacggtttctcccccgcgggataggcgcgctcccggagtccgctcccacgtccctccggttatccgtcggccgccgtcgccgggccgccagcctagaggtgaaggcatcgggaaatgtgttcgggaactacttccaggttgcaacctatggcgaatcccatggagggggtgttggttgcgttatcagtggctgcccacccagaattcctctcactgaggcagacatgcaagtagaactcgatagaagacgtccgggtcaaagtagaattacaaccccaagaaaggagactgatacatgcaaaattctatcagggacacatgatgggatgactactggtacaccaattcacgtctttgtcccaaacacagatcaaaggggtggtgattacagtgaaatgtctaaggcgtacagaccatcccatgcagatgcaacctatgacttcaagtatggagttagagctgtgcagggaggtggaaggtcatcagccagagaaaccattggcagggtggctgcaggagctcttgcaaagaaaattctaaagctcaaatcaggagtggagatcttggcatttgtttctaaagtgcaccaagtcgtacttccagaagatgcagttgattatgagactgtaaccttggaacatatagagagcaacatcgttagatgtcctgatccagaatatgcagagaagatgattgctgccattgatacggtacgagttagaggagattcaattggtggggtcgtcacatgcattgcaagaaatgttcctcgtggtcttggctctcctgtttttgacaaacttgaagctgaactggcaaaagccatgctttctcttcctgcaagcaaggggtttgagattggcagtgggttcgctggtacggactttactggaagtgagcataatgatgagttctatatggatgaggctggaaatgtgaggacacgaactaatcgctcaggcggtgttcagggagggatatcaaatggtgaaattatttacttcaaagtggcttttaagccaacagcaactatcggaaagaagcaaaatactgtgtcaagggagcatgaggatgttgaacttttggcaagggggcgccatgacccctgtgttgtccctcgagctgttcctatggtggaatccatggctgcgctggtcctgatggaccagctcatggcgcatattgcccagtgtgagatgtttccgctgaaccttgccctacaagagcccattggctctgctagcagtgcatctgaactgtcaccaaacctatcataatgtttgtcgtggaacatgtcccagctttccttctatcgaaattctggtctttgctaagcagtttgcaattcggaacccccataaaccctcgactattgtacctagagataaagtgaacggatatcaagatagaaatgcattaatgtttttgtgatgtgtagtataactgatatttaccccttttctttttttgagagaggacgcatgatgtcgtttgagcaataaagtttaatttgggagagataacagtgtcttcatatgatcagcacttgaacggtctatataaaggaattctgttaagaccac

SEQ ID NO: 7728 - DNA, 785 bp, Zea Mays
cttagtagttgttgattgagggagataggtcaatatagatattagatacaagcatgcctgatatctgatgtttagcctaacaatatatttgataaagagaaaaaaggagtcaaccagtgaaccaaattttgtacatgtagttatgtacaaaatccgccatacctcaaattttgtgtgtaggtgcttttactcctgtgcataggcgcttttactcctgtgcgtaggaattgcttcgagtcaacatcagctggtacaaggagagttcttttttttgctcttggcagatggttttgtcatgccatcgtggtttgttgtccacgagcttcccatgagcgctgagtttgccgcaagatgagactggggttctcaaggctatgcaagatgtgcacgccatgatacagggaagtagccgatggtatctatccaccctgataacatatttgtttgtggattcagtcaaagaggtgctctgacattagctagtgttttgctttatccgaagaagttaggtggaggagcagtgttcagcaggtgggtgcctttcggttcatcagtgagaggatttcacctgaagcgaggaagacccatttctttggtcgcatcgatggaatggctgacaaagtagtcttgtttgaagccggtcaagctggtccaccatttttttttgcagagtacgggtgttaactgtgattcaaggcatatttcccttttatcttgagtcatggatcaagagtcgtctaaatgcctctcaagagaaggccgttctccctcgcacaatctcctcg

SEQ ID NO: 7729 - DNA, 2323 bp, Zea Mays
taacaacgcagcttgacgagggtgaacccagctccacacctcgtctaccacgtcttctcctcgccatggctgctcacctaccacgcctccccgtcctcctcctcgtcctcctcgctgcccatgtcgtctccacctccacccgtgccgagcctcttcttcccagcacttacaacgtctccatgtgctcggaatcgttctggtgcggcggcgtcgagatccgctacccgttctatcttgccaacgcaaccgccgactacagcgggagctactactcctgcggctacaccgacttgagcgtttcctgcgaactcgaggtcgaggggccgccgacgacctggacccctaccatccgtctcggcggcgacaactacaccgtcaagaacatcttgtacgactatcataccatctcactggcggacagcgatgtgctcggaggcggcgagtgccccgtcgtccgccacaacgtcagcttcgacgagacgtggctgcacaacgccagcgccttcaacaacctcaccttcttcttcggatgccactgggggccacgcgatacactgcctgaatttgccggctataacatcagctgcgacgggttcagtactccaactatcagcggtggaggctccttcgtgttcaagactgaagatcttgacgaacaagaggagcaggatttcgcttcacactgcgacgaggttttctccgtgccagtgggaagcgaggctctgcgggcgaccgacaccttcagcctctcaaggtacgggtacggcgagctgcttaggcaggggttcgagttggaatggaatcggacatcggaggatcagtgtggccagtgcgagggatcgagctccggcggacggtgcgcctacaaccagaagagagaattcctgggctgcttgtgcagcggagggaaggcgggcaacccgttctgcaaaccctcaagatcaaaaaggaatgaaggacctattgttggtgctgttgttgccgttgcattcctgtgtctagtcattctcacatgcttcttggcttgtagacatggttcgctgcccttcaaatcgaagaacaaaccagggacaaggattgagtccttcctacagaagaacgagagtagtatacatccgaaaagatacacctacgcggacgtgaaaagaatgacaaaatccttcgctgtgaagctaggccaaggtgggtttggtgctgtatacaaaggcagcctccacggccgacaggtagcagtcaagatgctgaaggacacccaaggtgacggcgaggaattcatgaacgaggtggctagcatcagcaggacttctcatgtcaacgtcgtgacacttctagggttttgcttgcaagggtcgaaaagagcactgatctacgagtacatgcccaatggttcgctcgaaaggtatgccttcaccggtgacatgaacagtgagaatttgctaagctgggaaagactatttgacatagcgattggcacggccagagggctcgaatacctacaccggggatgcaacactcggatcgtgcattttgacatcaagccacacaacatcctgttagaccaggatttctgccctaagatctctgactttggactggccaagctatgtctgaacaaagagagcgctatctccattgttggcgcaagagggacgatagggtatatcgccccggaggtctactcaaagcaatttggaacgataagcagcaagtctgatgtctatagctatgggatgatggtccttgagatggttggagcaagggacaggaatacaagcgcagatagtgaccatagcagccaatatttccctcagtggctttatgaacatttggacgactattgtgttggtgcttccgagattaatggtgagaccacagagctcgtgaggaagatgatagttgtaggtctgtggtgcatacaagtgattccgactgatcggccaacaatgacgagagtcgtcgagatgttggaagggagcacaagtaatctagagttgccacccagagttctcttgagctgacaaagcgtagatatttttcctatcaaatgctgcttccaggtcacacaaatgcaaatatttgtggagacgagtgcccagtaacctcatacactgtatctgtatgacaaaagtcccacgactcactggacacggaaatgtcgcttgactacgccaattttctaaaaagattggcacaattaatggggcttatagcggtaactttggttcgcattagtctaggattagggttgaatattgatcaaactcgacgcagcttggtcgagctcaagctagctccgctcagcttattaaagaatccagctaga

SEQ ID NO: 7730 - DNA, 1938 bp, Zea Mays
aaatttccacggaatgaaatatcttctccgtcgccgggcctcccgtccgaatcggatattttttgcgcaccagttctgtcttctgtgggctatccgcctatcccccaaggccccaacccatcactttccacgccgccggccgctgcgctcccagtccggagagacatggactcggaacccgatgtcgagcttcggggccttgacatcgacgtagaacttgacccggaggaccttcagccgtcggtgcccctcaaaaaggtccccggcggcgacctcttcgaggcggcgcgggccggggattgcgaccgcctcgccctcctcctcgacgccggcgccaacgtcaacgcgcgtgaccgttgggactccgtcgcgctctattacgcctgcctggcgggacacgccgaggccgcgcggatgttgctcgaggccggcgccgtctgcgccgagcgcaccttcgacggcgaccgttgccactacgcggccctcaacctgcgcttacgctggctgctcaagtcgttcgaggccaggccgccaccgctcgcgccgctccccaccgcgctgcgggcgacgttccttgcctgccctgccaaccgcaccgctttcctcgagatgctccaggggagcgccggcgccgaatccgccgccctcgccgcggccgccggatttggcccaaaggatgatccatcaagtgcttgccttttccctccagatatcacattctatgtggacagaaagcctgttgaagctcatcgggtcatcctttgtgcccgatctcctttcttcgaaaagaagttcaagacagactggaaagacaggaaggaaactcgaggtagctgttgacgacatggaaaatttggcgcgtgcatgcaaagtttgcaagtgcgaggagttgcaaaaagttttggataaagaagttgtgcatcagaagtatgcggagtacaagtcagcaagagaactggatatggacagctcacagaaacgattcatcttacaagcgcaatccttgcctgaggaagatcgccttccatcagccttgcagcgtattctgcagacttgtctagcaaactcaagagaaggttactgtagtgaggaatcaaatgagatgataaggaactcagaggatgatgatcttgcagatctttatattaaactgctcagaatgttccgcttcttgaggagcatgacataagtgcagaagcatttgaaaagatgctcgaatacatgtatactgataagctagagcatttggaccctggccaggctgaagaactatttgatgttgcatcaaggtacctgctgtttccccttaagcgggttgtagctgatatgctgctgccatatctcgaacatgtttcgcctgcagaactgtgccactggttgatgatgtcagacatatacggtgtcatgaaaataagggagtatatcttggatatcattgcttgcaactttgagatgtttgcagccacccgggagttccgggccttgctcttgactcttccaccaccatccggagatgactcactacggacaacacgtcccagtgcacctgggactggaggcaacaccgaccaaggcaacattcttgatgatttgcgtgagaagtggctagaagcagagggtgccgagctcgacgagagggatgagagtgcagctctgttcgacaagcgactggagatgcttatgctagttgcagagaaagaagccgatgatgaagacgcttgagtttcggagagtacgtgtgctagggtagcattgtttttgcattcttcactgcgcagttgtttaggtttgtgagttacaagttcatcttttgttgtatgaacttcaaacagatcagttttgacccatcaagtatccagtgagcaagtatttatgaacgaattaaacgatgtaagtttcttgcatataatatgcgattttgatgtagggtctagatga

SEQ ID NO: 7731 - DNA, 2058 bp, Zea Mays
aaatttccacggaatgaaatatcttctccgtcgccgggcctcccgtccgaatcggatattttttgcgcaccagttctgtcttctgtgggctatccgcctatcccccaaggccccaacccatcactttccacgccgccggccgctgcgctcccagtccggagagacatggactcggaacccgatgtcgagcttcggggccttgacatcgacgtagaacttgacccggaggaccttcagccgtcggtgcccctcaaaaaggtccccggcggcgacctcttcgaggcggcgcgggccggggattgcgaccgcctcgccctcctcctcgacgccggcgccaacgtcaacgcgcgtgaccgttgggactccgtcgcgctctattacgcctgcctggcgggacacgccgaggccgcgcggatgttgctcgaggccggcgccgtctgcgccgagcgcaccttcgacggcgaccgttgccactacgcggccctcaacctgcgcttacgctggctgctcaagtcgttcgaggccaggccgccaccgctcgcgccgctccccaccgcgctgcgggcgacgttccttgcctgccctgccaaccgcaccgctttcctcgagatgctccaggggagcgccggcgccgaatccgccgccctcgccgcggccgccggatttggcccaaaggatgatccatcaagtgcttgccttttccctccagatatcacattctatgtggacagaaagcctgttgaagctcatcgggtcatcctttgtgcccgatctcctttcttcgaaaagaagttcaagacagactggaaagacaggaaggaagtgagattttctaaccaaaagttgtattttggcgccttatacagcctcatccatttcttctattctgatagactcgaggtagctgttgacgacatggaaaatttggcgcgtgcatgcaaagtttgcaagtgcgaggagttgcaaaaagttttggataaagaagttgtgcatcagaagtatgcggagtacaagtcagcaagagaactggatatggacagctcacagaaacgattcatcttacaagcgcaatccttgcctgaggaagatcgccttccatcagccttgcagcgtattctgcagacttgtctagcaaactcaagagaaggttactgtagtgaggaatcaaatgagatgataaggaactcagaggatgatgatcttgcagatctttatattaaagtaggtgataaggttttccattgtcatcaggtgattttggcctcaaggtcagagtactttagagccaggctatctcgaactgttgattttcttgaaggtaactgtggctttgaagctgctcagaatgttccgcttcttgaggagcatgacataagtgcagaagcatttgaaaagatgctcgaatacatgtacctgctgtttccccttaagcgggttgtagctgatatgctgctgccatatctcgaacatgtttcgcctgcagaactgtgccactggttgatgatgtcagacatatacggtgtcatgaaaataagggagtatatcttggatatcattgcttgcaactttgagatgtttgcagccacccgggagttccgggccttgctcttgactcttccaccaccatccggagatgactcactacggacaacacgtcccagtgcacctgggactggaggcaacaccgaccaaggcaacattcttgatgatttgcgtgagaagtggctagaagcagagggtgccgagctcgacgagagggatgagagtgcagctctgttcgacaagcgactggagatgcttatgctagttgcagagaaagaagccgatgatgaagacgcttgagtttcggagagtacgtgtgctagggtagcattgtttttgcattcttcactgcgcagttgtttaggtttgtgagttacaagttcatcttttgttgtatgaacttcaaacagatcagttttgacccatcaagtatccagtgagcaagtatttatgaacgaattaaacgatgtaagtttcttgcatataatatgcgattttgatgtagggtctagatga

SEQ ID NO: 7732 - DNA, 2560 bp, Zea Mays
tctctgctcatacttttagctatgcaagactataaattcactacttctgctcctaccattctgaagtgtgcctttgagattattctttatggttaagtaaatgggccaagctcaataaattccaacaatcccccaccagatcttgaaggaacaacataaccaactctccgcatttcctcaaatattgtttatatactagttttatggtagagattgttaagttaaacatccatctagactcaagagttatacaactgatgggggcgccttgggtaatttaaagaatggatcaattcctcaagatgacgtttttgctgctgttgattttgaaactggatccaatccatggcccatattcaaattacagaagaaatacaacttgccaggaaaatcagtccctttaagttcggaattttatactggatggctaacacactggggtgaaagaatcgcaacaacagatgctactagtacagctaaagcccttaaaaccattttgtgccacaatggttctgctgtactttatgtctgtcactggagcccattcatcagtgcattgcatttgcagtctaggtctattaattctatttcttcatgaggttgtccagatggctcatggcgggaccaattttggattttataatggtgcaaacactggtcaagatgaatctgattacaaggcagacctcacttcttatgactatgatgcaccgattaaggagcatggagatgtgcataatgcaaaatacaaagcgctaagaagagtaatacatgagtgtactgggactcctctccatccacttcctgctaacattaaaaaagcaagttacgggattatgaaattacaaaaggttgtttctctgtttgacatcattgataatatcaatgatcctctgaaagtttctgtttcggagcatccactttatatggaacagataggccagatgtttggatttctcctgtacatgtcagaataccaagggaaactcccatcaagcatcctgtcaattccaaaggtacatgacagagctcaggtgtttgtgtcttgctcagctggtgttagaaccctaagatattgtggtgtaattgaaagatggtctaataaaacactagagataccgaacttaagatgttcatctaagaccagcctatatatcctggtagaaaatatgggtcgtgtaaattatgggccatatatttttgaccggaagggaatactatctcctattcaaatagatggcattactctccgtcactggaaaatgtatccactggcactcaattcactggacatccttccaaaacttcaactaatcactcaaataccttatgctggagccagtaaaatgtccattcatggagactcagaaaagattttacaggactcgtcatgctgttcaaatgaaagcacttctgcggagcctgcgttttatgaaggccatttccgtattgacaacgagactgagataaaggatacattcatatcgtttcgtggttggaacaaaggtgttgcttttgtgaacaacttcaacattggaagattttggccggcatgcggaccacagtgtaccctttatgttccagcgcctatcctcagacctggggataacattgttgtaatctttgaactgcatgctccaaatcatgagctcactatcgattttaccacggatccggatttcacgtgcggtccagaacagtgaaaaagggttgcacgtggacgtggtgtacatactgttacatagcagtacagtgcagtgttctgtccttcctcttgcttttctacgtcggtgctggtatagaatgggtaaatctgctctaggacactactctataaacgtggtattggctactggacactgctcaattgtgtacctttgatagctggatttgctgttgggtaccaaagaaaaaataaaatatcagggacagatcgtgaattctccactttgctccctgtccaaatgggggcccagcagtcacttctccattttggcaagccacaccgagctccgctacgccctgcgggggtgcagcacgatgtggattcctatgcacggggaacggctgtccgttacgacgacggacacggccgtggcggcgatgcccgggcacgacgcacgcgagatgctcgacgttagattgcctccaacaagacaatgtaaatgacactgaacgctaaatttagaggagaaagacatccgttatctctctaacaacagactgcaaacgaatcggtaaaatatagcgcacgtacggtgtactctaaatctagagtacttcatttcatccgctatccatccacaagcacgtggaagcctgccagatgtcagcgctatggagaaaagcaaggaaggggagagaagcgtgtacgtcgccggcgaccaataaacaaaagaaataaacaggaggagagagaaggatcttatgtagagacaaataaagaagaacgacagttctatttgtttgttatttctggttttcattttttcagcatgtattttacaacaaattgtaatctgtaaatgagtcatttttttttaaaaaaaatacagctgcg

SEQ ID NO: 7733 - DNA, 1981 bp, Zea Mays
acgcctcacgccatgcgactcgtcacggcctcggcgtgccgcctgcgtgcccggtgcccgtgcggccgtgacgaacgacactgacgagcaaagcaaagccaacggagccgagcgagacgacgagaccgcgattgctagctagctagttcgggcagcgagcggggtgagacggctatggcgtgctgctccgccgtcctgcaccatccgctgggcttctcactcaccccgtgctccgcctcccgagccccaccgcgcatccagcgcgtgggcgtggcaactccctcggccgcctccgcccgccctctttctcgcgccaggatctcaccgcgctgcacctactccggtggcgccagcgctgcccctggtcctggggagctacccgcggcggcgctccgacgggtccttgagatgccgggtgcgcaccaggcgcccgcctgctacgacgcgctgagcgcacgcctcgtcgagcgcgccgagttcagggcctgcttcacgagcggtttctcaatctctgccgcacggcttggattaccagatgttggtctcatctcgtacggggaaatgatcgatcaggggcgtctgatgactgaagcagtttcaatccctgtgatcggtgatgcggataatggttacggaaactgtatgaatgttaagaggacagtgaaaggatttattaatgctggttttgctggaattattcttgaagatcaggcatgtggacacacacaaggaaggaaggttgtctcaagggaggaagcaattatgcacataaaagctgctgttgatgccaggaatgagagtggctctgatattgttattgtggcaaggacagattctcgtcaagctgtgtctcttaatgaagcattatggagagtacgggcctttgctgatgctggagcagatgttctattcattgatgccctcgcctcaagggaagaaatgaaggcattttgcgctatcgcgcctggagttccaaaaatggccaacatgttagaaggtggtggtaaaactcctatactgagccctgttgaactggaagaaataggttataaaatcatagcctatccattatctctaattggtgtatcgatgcgtgcaatggaggatgctcttattgctataaggggtggtcgcatacctcctccaagcagcttgccaacatttgaggagatcaagaatactcttggcttcaaccactattacgaagaagacaaacgatatgcggtgacaccagcccaaccattgctatgataattatacaagtgaaccgaacagtccgggagattccaggtccagggctaaaaaaacacaagaacctgttattgacatattgcctcagctctatgatattggttccagtgacagcagaggaccttcaactggaatgtggtctcgaactcttcgactaaagattacaggaagagatgggatccagaaaatcgatgccaggatacctgctgggttcttagaagggatgacaagaattattccaggcttggctggagctaatattatggaaaggcttcggaatgctcctgttgatacagacaacccccagaatggtcaaatactgcttgattttgaggacgccatgggagataggatccaggtgtttattgcatgagctgacggtgtctttgctagaatgctcgtgcacagcaaactctggaagcatggtcgtttcaagtagcatcagggtacatgcatcttgctattggcgcaaccctatctagtagttgaattagataatttggacatcgattatatcttggcgaactagtatttacaaataacagacttgttcctattcatcgaggctgggtgtacatcgttgggattccattaaaacacagctggggactgcgggataagtttttctccgtagcgttgtttctgtgttgaaaaaaaaccctgaagttgaatagaaataaagaagtaaactcttgttgagttatgaaatactgttgaatatatatccaga

SEQ ID NO: 7734 - DNA, 1043 bp, Zea Mays
cacggccgcgaaccgcacgacggcacgagaggagagacagacagagagagcgagcgactgagaccgacagggttcggttcgacccgatgcttccggcgctgcggcctcgccgccggctcccggtggcatccctcctccgccgcctcctctccgactccaccccctcctcctctggcactggagagagtgatctgatggccgcggccgcagcgaaggcccgggcggaggcggcagcgcgggctcgggtggaggcgtacaagcaagtccaaaacttcgactggagcagcggcgccgactggaagaccgccgccaacatcctcttcacggtgccccctaagcgcaaggagttcgggcttgatttccaccttgtgcagctcttctttgtctgcatgccatcgctagctgtctatttagtggcccaatatgcacggagggagatcaaaaggatggaagggaagagaaaaggaaaaaagacgaggaacttgagaaacaaaaacaggtcgaggaagaatctgccaaggaggatgctgattcaaagctttcgaaggtattagacaggctagatacactagagggtgtcgttaaggagattgtggatgacaaaaggaaactttcttcccctgatttaccgaccaaagaggaggttgcaaagaaaaatgaagcatctccggctaaggcttctgattcgagaagctatggtcagccagtggtggctgccaatagtaaggacaccaactatgcttcaaatgctccagcaaatactgcaaaaccaaacaataaggggattggtgataaggcatttccagttgagtccgaaagttgataaatcatttgagtttttttcttctgaaaacacaaaattggtgtttagctatgtagtcgtgtcctcgatgctaagcgaatgaaaagatgtaatttccacaccttaggatatgatgcgtcttaggaaaaaaaatacagtgagctaacgttttgtactacatagccccttcgatagttgaggctgtgatcttggataatgattaccacaaaatctttctgct

SEQ ID NO: 7735 - DNA, 1856 bp, Zea Mays
agctgcagtgccgccgcaccgcacccctataaaaaccaaggcatgcagcctgcatacagaagacacacagcagcacacaccaagctagtttgatctatacgacgacgctttagaagcagcagtagcaccttgatcacttactctcttcgagctagcaagctcttgctgcattattgcaagaggaacaacgaaggagaagagctagggggaccaagctactgcgggagggagaagggtgtgtgccggcccgccgccaagcactgctacccggccggcggccatggaggtgagctccgtggagttcggtcatcacgcggcggccgcctcaaagtgctttgacgacgacggtcgcctcaagcgcacagggcgatccagagggcgaactgcttccacgtggaggggcacggggacccctgcaacatctccagcacgccctacatgatcatcttcggcgtcgtgcagattttcttctcgcagatcccggacttcgaccagatatcgtggctctccatcctcgccgccgtcatgtcgttcacctactccaccatcggcctgggcctgggcatcgcgcaggtggtgtccaacaagggcgtgcagggcagcctgacggggatcagcgtcggcttggtcaccccggtcgacaagatgtggcgcagcctgcaggcgttcggcgacatcgccttcgcctactcctactcgctcatcctcatcgagatccaggacaccatccgcgcgccgccgccgtccgagtccaaggtcatgcggcgcgccaccgtcgtcagcgtggccgtcaccacgttcttctacatgctgtgcgggtgcatggggtacgccgcgttcggggacaacgcccccgggaacctcctcacgggcttcggcttctacgagcccttctggctcctcgacgtcgccaacgccgccatcgccgtgcacctcgtcggcgcctaccaggtctactgccagcccctgttcgccttcgtcgagaagtgggcgcgccagaggtggcccaagtcccgctacatcacgggcgaggtcgacgtcccgctcccgctcgggaccgccggcggccggtgctacaagctcagcctgttccggctgacgtggcggacggcgttcgtggtggccacgacggtggtgtccatgctgctgcccttcttcaacgacgtggtcgggctcctgggcgcgctggggttctggccgctcaccgtctacttccccgtggagatgtacatcgtgcagaagaaggtgcccaggtggagcacgcggtgggtgtgcctgcagctgctcagcgtcgcctgcctcgtcatcaccgtcgcctccgccgcaggctccgttgccgggatcgtctctgacctcaaagtgtacaaaccgttcgtcaccacctcctgatcgaccgtacgtcctagcttccgtgcagttcaaaacacatacgcacgaacagatcattaattggcgcctagtatatatgtgcagtctttaattaaattaactaggcattaatcgatcgattaccactacgtcgttctagtgatgcgcgtagcttgcatcatcgctcgctgatttaatttccattgtttttctttgatgatctggttagccgaaatggctagtgaattaagagaaaacaaatagtagcagtactgtgtgagtaatcccaagtcaaatacgttattgaagttgtcggcggtacaaaacgcttgtaaaatgtttgtgtttcaattaatcaagaagaattgtacgtgtttcatatatgaggaaaagaaaaaaggacatatgtttgtttctacaacttctaaataaacaacttgatcgagatgttttcttcatggtacgtctttaatggcaaaaattcagcg

SEQ ID NO: 7736 - DNA, 2258 bp, Zea Mays
gaaagaaaagaaaaaaaatccatggcgttaattagggcttttggttaaatggttaccaggccagcctgcactgcagctgcagtgccgccgcaccgcacccctataaaaaccaaggcatgcagcctgcatacagaagacacacagcagcacacaccaagctagtttgatctatacgacgacgctttagaagcagcagtagcaccttgatcacttactctcttcgagctagcaagctcttgctgcattattgcaagaggaacaacgaaggagaagagctagggggaccaagctactgcgggagggagaagggtgtgtgccggcccgccgccaagcactgctacccggccggcggccatggaggtgagctccgtggagttcggtcatcacgcggcggccgcctcaaagtgctttgacgacgacggtcgcctcaagcgcacagggacgatgtggacggcgagcgcgcacattatcacggccgtgatagggtccggggtgctgtcgctcgcgtgggccatcgcgcagctcggctgggtggcaggccccaccgtcatgctgctcttctccttcgtcacctactacacatcggccctactcgccgactgctaccgctccggcgacgcctgcaccggcaagcgcaactacacgtacatggacgcggttaacgccaatctcagtggcgtcaaggtctggttctgcgggttcctgcagtacgccaacatcgtcggagtcgccataggctacaccattgccgcctctattagcatgctggcgatccagagggcgaactgcttccacgtggaggggcacggggacccctgcaacatctccagcacgccctacatgatcatcttcggcgtcgtgcagattttcttctcgcagatcccggacttcgaccagatatcgtggctctccatcctcgccgccgtcatgtcgttcacctactccaccatcggcctgggcctgggcatcgcgcaggtggtgtccaacaagggcgtgcagggcagcctgacggggatcagcgtcggcttggtcaccccggtcgacaagatgtggcgcagcctgcaggcgttcggcgacatcgccttcgcctactcctactcgctcatcctcatcgagatccaggacaccatccgcgcgccgccgccgtccgagtccaaggtcatgcggcgcgccaccgtcgtcagcgtggccgtcaccacgttcttctacatgctgtgcgggtgcatggggtacgccgcgttcggggacaacgcccccgggaacctcctcacgggcttcggcttctacgagcccttctggctcctcgacgtcgccaacgccgccatcgccgtgcacctcgtcggcgcctaccaggtctactgccagcccctgttcgccttcgtcgagaagtgggcgcgccagaggtggcccaagtcccgctacatcacgggcgaggtcgacgtcccgctcccgctcgggaccgccggcggccggtgctacaagctcagcctgttccggctgacgtggcggacggcgttcgtggtggccacgacggtggtgtccatgctgctgcccttcttcaacgacgtggtcgggctcctgggcgcgctggggttctggccgctcaccgtctacttccccgtggagatgtacatcgtgcagaagaaggtgcccaggtggagcacgcggtgggtgtgcctgcagctgctcagcgtcgcctgcctcgtcatcaccgtcgcctccgccgcaggctccgttgccgggatcgtctctgacctcaaagtgtacaaaccgttcgtcaccacctcctgatcgaccgtacgtcctagcttccgtgcagttcaaaacacatacgcacgaacagatcattaattggcgcctagtatatatgtgcagtctttaattaaattaactaggcattaatcgatcgattaccactacgtcgttctagtgatgcgcgtagcttgcatcatcgctcgctgatttaatttccattgtttttctttgatgatctggttagccgaaatggctagtgaattaagagaaaacaaatagtagcagtactgtgtgagtaatcccaagtcaaatacgttattgaagttgtcggcggtacaaaacgcttgtaaaatgtttgtgtttcaattaatcaagaagaattgtacgtgtttcatatatgaggaaaagaaaaaaggacatatgtttgtttctacaacttctaaataaacaacttgatcgagatgttttcttcatggtacgtctttaatggcaaaaattcagcg

SEQ ID NO: 7737 - DNA, 2880 bp, Zea Mays
cccccttcctacccaatctatcttcccccgccccgcctctccctttcttctttaccaagccccccacacccaaacccctcctcccctgctctgcctgccccatgtccccgcgcctctgaccaaccaggctgccggaaccctacccggtgccccgtgatgcccccgcggccgtcgctccactctctgctcctcatggccgcctccgccgccgcggccagcggggactcgggcccgctcctcgctgcgcgccgccgtctagctgcgacggccgccgcaggggggcaccgcatccggctgctccactccttctcgccgggacgcgtccccaggcggcctgaggtggtctgctgcgtgcgcagcgcccccgactcgcggcggtcggcccccgcccccccgtgctccaggaacgttctttcggcaaaaaactactcaactgcttctgaggagaggcttgggaagatcattcagaagttgaaaaacgaaggtattaatcccaagcagtggagacttggaaattttcagcgcatgttgtgtccacagtgcaatggtggatctagtgaggaattgagtctcagtgtctacatccgaaaggatggcataaatgcaacatggaactgttttaggtctaagtgtggctggagaggttttgtccaggctgatggagttaccaacatatcccaaggaaagagtggcatagaaagtgaaactgaccaagaggttgaagctaagaaggcagcaaataaggtttatagaaaaatcagtgacgaggacctcaatcttgagccactctgtgatgagcttgtagagtactttgctacgagaatgatttcggcggaaacacttcggaggaataaagtcatgcaacgtaactggaataataagatatccattgcttttacctatagacgtgatggagctcttgttggctgcaaatacagggcagtcgataagacattttcacaggaggcaaacacggagaaaattttttatggtctggacgatataaagcgtgcacatgatgttatcattgtggagggtgaaattgataagctgtccatggatgaagctggttatcgtaattgtgtcagtgtgccagatggtgcaccacccaaagtgtccagtaagattccagaccaagaacagctaggataagaagtatagctatctttggaactgcaaagactatcttgactcggcatctaggataatattagcaaccgataatgatcgtccaggtcaggctctggctgaggaacttgctcgtcggcttggtaaagaaagatgttggagagtcaattggccgaagaagaatgatacagatacttgcaaagatgcaaatgaggttctaatgtttttaggtccacaagcattgagaaaggttatagaagatgcagaactgtatcctataagaggccttttttcattcgaacagttcttcccagagattgacaattactttcttggaatacatggtgatgagcttggtattcatactggatggaaatctatggatgatctttacaaggttgttcctggtgaattgactgttgttactggagtaccaaattctggtaaaagcgagtggatagatgctttattgtgcaatataaacaaacaatctgggtggaaatttgttctgtgctcaatggaaaacaaggtaaaggagcatgctaggaaactcttagagaagcacattcagaagccattctttaatgctaggtatggtgggtctgcacagcggatgactcctgatgaatttgaagcaggaaaacaatggttaaataaaactttccatcttatccggtgtgaagatgatagccttccatctattaattgggttcttgaccttgcgaaagctgcagttctaagacatggagtgcgtggtctggtgatagatccttataatgaacttgaccatcagcgcccctcaaaccagacggaaacagaatatgtcagccagattctgaccaagattaagcgctttgctcagcaccattcatgtcatcttcaaaactggaatggaggcccaccaaatatatacgacataagtggaagcgcacattttataaacaaatgtgataatggaattgtcatccacagaaacagggacccaaatgctggcccccttgataccgtgcaggtttgtgtgaggaaggtgcggaataaagtggttgggcaaataggagatgctttcctgacatatgaccgggttactggtgaattcaaggatgctggtaaggccactacagcacccagtgcaaaagcggcaaaacagtcacgcaaagaggcatataagatgccatttcaacatgctgctgaagacggtgagaatagtggtctgtgactgcataagaaagacatgttcctgctgatttgatgtatctgtatcattcaacgaaagtgagatttcacgattgtttctggggatggcctgctggagctcaggcagtacctcattgaactggatttgaaaccccaggatttcaccgattcctgctgcaaatgaagttgaaagctaaacttgctcagatgcgcacaagacattggcggggtggtgtatagtagtaagattaatgtaaatcaattgccacaccaggtgctaatctatgaacatttgggtgggttatatcagtagctaaactttagcagctaaggtagtacgattaatcatgcaggctttcccaaaaaattgtagcagttggaagggtttttatgttcacccttctcaacgcctgaccaggaaccaatgcctttaatgtggccgtattttttaaaaaagatgcctttaatgtgacccaactgcgaattcaggtgctcgtttgacccatgcaaagcaataccgaccatgtgccgaacattttaaattggggaccgtctccg

SEQ ID NO: 7738 - DNA, 2395 bp, Zea Mays
aagaaggaagatgtagttaaacttgttacagacaaggaaacgaatgacaacataattttgcaactcaggcaagaacttgaggcaacaaaaaagttgcatgaggcagagactcagcaattagagaccaaagctgccaaagtaaataaggagtttgaacagaggataaaagaaatagaactcatgttagaagattctacaaagaggagaagagaacttgaggaatctactgaatctagaatccaattttggaagcagaaggaaatagtggtaaacaaatttgtgggtttgcaagtaaagaatgctcaggaattgaggctctcttctgtttcagttagacttgaaatacaaaattgtcaaaaaagatggtttgaagaattggctggccttggacaaaatcttaagatggtaacaagtgctgcagaaaaatatcatgcaactcttgcagataatagaaaactattcaacgagatccaggaactgaaaggaaatattagagtttattgccggataagaccttttcgaccctgggaggatgagaagtccacttcagtggaatatattggtgagaatggtgaactggttttatcaaaccctacaaagaagggaaaggaagccggcaagaatttcacttttaacaaggtttttggccctacagctacacaagatatggttttcaacgatattcggccactaattagatcagttcttgatggctacaatgtttgcatttttgcatatggtcaaactggatcaggaaaaacacatacaatgatgggtccggaaaacgcaactgagaaagaatggggtgtcaactatcgagcactaaatgaccttttcaacatctcacatgatcgtcgggacacaattaaatatgaacttggtgttcaaatggttgagatctacaacgagcaaatccgtgatctacttggtaccggtggctcgcagaagaaactagggatccagaataccacccagcccaatggacttgcagttcctgatgcaacaatgtgtcctgttgattcgacttctcatgttattgaactaatgcaaacagggcacaacaatagatccatgagtgcaacagccttgaacgagaggagcagcagatctcacaggaagtgaaagggtggaccgatctgcagttacaggagacaggctcaaagaagcacagcatatcaacaagtctttggctgcacttggggatgttatattttctttatcacaaaagaatgctcatgtaccatacaggaatagcaagcttacacaagtcttacaaacttctttgggtgggcatgcaaagactctaatgtttgtgcaagtcaacccagatgtttcatcatacactgagactttaagtacactgaaatttgctgaacgtgtatctggtgtagaactaggtgctgcaaggaccaacaaggagggcaaagatgtcaaagaattaatggaccagctttcactgctcaaagataccattgcaaagaaggatgatgaaattgatcagctccaactagccaacagtagcaattccctactgaagtccacgaaacatggtgactccttgttgaagcattcggcctcttctccaggaatgacatccttaggaaaagtggcaagctttggtagcggggcagcttctgatcttgacaactgctctgacaccagtgataggcattccgaagctgggtccatgctctctactgacgaggcccgacagctgagccagaactcggctgatcctggtggtgattcagatggaaggctaagtgatatatcagatggcggtatacccgcgggtgcagaaactgacagttcagcgaacaacgttgtggaccaagaacaagacaaaacatccgctactggaaaagagcggttagccaaagcagtaagtcgagtccagaagctaacagtacccaaagtcggccaagcatcaagcttgaggcctaaaccaagagatccttctgctcctaaatcttcagtcacaccaggtgtgcgaaaaggtaccaccactcaagcaactccaccagcaaaagcaagcggcacttcaaaaagagtaccatagatcaagataatcatttggcgaagccgcttcccagccatttttctttttgcatagctttttcagatcttattgccatgtgtaacaccgatgccaattactgacttgtgcatctcaggtggataggttcttttcttttcattgtttgcaatgagggtgttaactgcatcagtatgtgatgttagcatgccatgagatatcattgctcaatgtgttagtacaaacagtgaaggaattcggattgatccattcatgttgatattgtggcgttcagcagtccctgtaatttcatgcaacaacgcagagtcgttcatcgtaaccaaaacctcaatattcaaa

SEQ ID NO: 7739 - DNA, 3311 bp, Zea Mays
gaggagagcagcaagttgttagaatctaagaaggaagatgtagttaaacttgttacagacaaggaaacgaatgacaacataattttgcaactcaggcaagaacttgaggcaacaaaaaagttgcatgaggcagagactcagcaattagagaccaaagctgccaaagtaaataaggagtttgaacagaggataaaagaaatagaactcatgttagaagattctacaaagaggagaagagaacttgaggaatctactgaatctagaatccaattttggaagcagaaggaaatagtggtaaacaaatttgtgggtttgcaagtaaagaatgctcaggaattgaggctctcttctgtttcagttagacttgaaatacaaaattgtcaaaaaagatggtttgaagaattggctggccttggacaaaatcttaagatggtaacaagtgctgcagaaaaatatcatgcaactcttgcagataatagaaaactattcaacgagatccaggaactgaaaggaaatattagagtttattgccggataagaccttttcgaccctgggaggatgagaagtccacttcagtggaatatattggtgagaatggtgaactggttttatcaaaccctacaaagaagggaaaggaagccggcaagaatttcacttttaacaaggtttttggccctacagctacacaagatatggttttcaacgatattcggccactaattagatcagttcttgatggctacaatgtttgcatttttgcatatggtcaaactggatcaggaaaaacacatacaatgatgggtccggaaaacgcaactgagaaagaatggggtgtcaactatcgagcactaaatgaccttttcaacatctcacatgatcgtcgggacacaattaaatatgaacttggtgttcaaatggttgagatctacaacgagcaaatccgtgatctacttggtaccggtggctcgcagaagaaatatccttcttattcaaggcttgtttcagtatagcttccacttaatgagaaaattgttatgcgagtccgtggaataagagaattactatacacccccaacttatacgacaattacatttgcctccgttaaaaggaggaagaccgcgacccaacctacaaacttaactacctgtggtagaggtggtaaggaaggagcgccccttagctcatgctgtaactaaaaactgtgaatcccatggagagatatgaccttagataggcttggagtagcaccattaaacacagtcgtttctgcttttccacaaactccatgcacctgatttgagcgagttcaggtgctgttgtatgggaccaccccagtgatgaaggcggcagggtctctttcaccaggtcacgggttcaatccttggccctgcacaaaaaagtcatctcgctgtttctcatccgctttcgggttacgactcggctgtgcgccacccttaggcccgggtgggactttgcagagtgggcagcttgacccggcacgttagtgatgggaggacatggtttgggggtttctcggtcgggaccgttgccatagccttctattaatataataccgtgaggtggtcttaccctctctggctgagttttttgtaggaccactcacatcagaacaagctctacaccacccagtcatcaagactcaaaagagttctccaagggttgaggggagaggacagcaagcctgaatctttgcaagaggaaatactagaattgctgggaaacacacatgagacctattgggtgttggatagtctctgactgttgttcacaaaattggcaggtctcaggatgtggaagacctctctgtgccaagcggttggctgtccagaagcaagtattgagccaccagccagaggaagaaacgggcacaacaatagatccatgagtgcaacagccttgaacgagaggagcagcagatctcacagtgttgtgaccatccatgtccagggccaggatttaaaaactggtaacactttgcgtggtgctctgcatcttgtggaccttgcaggaagtgaaagggtggaccgatctgcagttacaggagacaggctcaaagaagcacagcatatcaacaagtctttggctgcacttggggatgttatattttctttatcacaaaagaatgctcatgtaccatacaggaatagcaagcttacacaagtcttacaaacttctttgggtgggcatgcaaagactctaatgtttgtgcaagtcaacccagatgtttcatcatacactgagactttaagtacactgaaatttgctgaacgtgtatctggtgtagaactaggtgctgcaaggaccaacaaggagggcaaagatgtcaaagaattaatggaccagctttcactgctcaaagataccattgcaaagaaggatgatgaaattgatcagctccaactagccaacagtagcaattccctactgaagtccacgaaacatggtgactccttgttgaagcattcggcctcttctccaggaatgacatccttaggaaaagtggcaagctttggtagcggggcagcttctgatcttgacaactgctctgacaccagtgataggcattccgaagctgggtccatgctctctactgacgaggcccgacagctgagccagaactcggctgatcctggtggtgattcagatggaaggctaagtgatatatcagatggcggtatacccgcgggtgcagaaactgacagttcagcgaacaacgttgtggaccaagaacaagacaaaacatccgctactggaaaagagcggttagccaaagcagtaagtcgagtccagaagctaacagtacccaaagtcggccaagcatcaagcttgaggcctaaaccaagagatccttctgctcctaaatcttcagtcacaccaggtgtgcgaaaaggtaccaccactcaagcaactccaccagcaaaagcaagcggcacttcaaaaagagtaccatagatcaagataatcatttggcgaagccgcttcccagccatttttctttttgcatagctttttcagatcttattgccatgtgtaacaccgatgccaattactgacttgtgcatctcaggtggataggttcttttcttttcattgtttgcaatgagggtgttaactgcatcagtatgtgatgttagcatgccatgagatatcattgctcaatgtgttagtacaaacagtgaaggaattcggattgatccattcatgttgatattgtggcgttcagcagtccctgtaatttcatgcaacaacgcagagtcgttcatcgtaaccaaaacctcaatattcaaa

SEQ ID NO: 7740 - DNA, 3160 bp, Zea Mays
gtcgcgctgtctacctctctctctctctcatcacagcacagctccagctctaggctgtagagggtggaagaagcgaggtcgagtcacagaggcctgcagcaaccgtctgcgctgagcatcgaggccgcgctctgcagtctgctgtctgctctccctcgataagccgggttccaagctagctctgcagagtgtgagctctgactgaacacgaagtgattggcggcttctcatcgatcgatggttgtgttgtgctggccatctgagcgatgaaccagttcgtccctgattggagcaacatgggagacacctccaggccgctcggcgaagaagacgacctcatcgagctgctatggtgcaacggccatgtcgtcatgcagagccagagccaccggaaggtgccgccgaggccggagaaggcggcggcagtggcggctccaccagcccccgcgtccgtgccgcaggaagacgagggcggcctgtggttccccttcgcgctggccgactcgctggacaaggacatcttctcggagttcttctgcgaggcaccgacgccggcaccggcggcggcggatgcggcgccggcggcctctggtggtggaaccggcaccgaagccggcggcaagtcgtgcggcggggacgtcccagtcccagcagaggacgacaggcgcggcggcggcggggcgtgcgcggtgtcggcgggggacccgtgcgacctgatgccgcctcccaagtcgacgcccgcgtcctgctccaggcagcagacgacgatgagcctggccaacggcggcgacaatgccggaggggacctgccgggcctcgtccgtgcgggggcggaggccggcgcgtcgtcgatgctgagcgcgatcgggtccagcatctgcgggagcaaccaggtcctggtgcagcgcgcggcgtgcgcgccggggcgcgcgtccgcgtccggctccggaaccgcccgcggcgacgggtccgggtccgccgcgctgccgtcggcggtgggcagcgcgaacgcgaacgccgtgggcggcggcaggggccacgaggcgtcctcgtcggggcggtccaactactgctgcttcggcgccgccaccaccacaaccacaaccaccaccacggagcccgcgagcaccagcaaccggagcagcaagcgcaagcggctcgacaccgaggactcggagagtcccagcgaggacgcggagtcggggtccgccgcgatgttggcgcgcaagccgccgcagaagatgacgacggcgcggaggagccgcgccgccgaagtgcacaacctgtcggagcggaggagacgagacaggataaacgagaagatgagagccctgcaagagctcatacctcactgcaacaagacggacaaggcgtcaatgcttgacgaggcgatcgagtacctcaagtcgctgcagctgcaagtgcagatgatgtggatgggcagcgccggcatcgcggcgccgccggcggtgatgttccccggcgtacaccagtacctgcctcggatgggcgtcgggatgggcgcggcagcggcggcggcgctgccgtccatgccgcggctgccgttcatggccccgcaaccggtggtgcccagcgcgccggtgagcgtgggcccggtgccggcctaccggggccacatgcccgcggtgggcatcacggagccgtacgggcactacatcggcgtcaaccacctgcagccggcgccgccgccaccgcaggtccagcactacgcgcagggcgtgagctactacccgccgccgctgggggcgacggcgaaggccgtgcagcaggctgcagagcttcaccacgtgccggggcccggcggcagcatcatgcccgccggcgccgcacccggagtgctgctcccggagagcgcgcaaggcagagggccaggtacggtgccatgcgctccgcccttctcatcctccgcttcagtttttgggctacaaatgggagcactacgatgagatgacaactgcggccctgtacaagaatctactgttcgcttcagtttctacgggtttgcatctcgatcgacgagttcggttcttgccgaataaagttgggtagcgtgtaaagcgaggggacaagtacgatacggtttgactgtttcaagccttccatcacttaccatcggcatctctgctgtcaacgaaatcggaggagttagagctggattacgtgcctcaaggtttgccacatgggccacatttagtgctagatcgttttgggggacccatgcgctagtaaagaatccttttatttttgtgcctcctcacggtctaaacgatcttataaaccaggggaaatattcaaaacttataaatttttatcaataattagtgaaattgttagagcatagaacttatatcaataggtttgtgttaaaaataactctaaaatggtattgattttttatcctctggctttatattataaaataaaataatgattaaaaaatagtttacatgacttttctttctctagtttaatatcattactatttttagatggagggtagatgggagtggctttttgtttgtagctcaagctccttagctctatgatacactaacttttgtgaggaacacatggaaattgataagagtgattatgactggaattgaatagaaagcagtgagaaacatatttttagctcctatatcttccagtttatatggtgaagtacttcttgactaatccacactaacatatatgtgcaattgctgtttggctagccggaaatgatttttaatcgataatccgctccatggagcgctaccaagtggcctctaattcttagctcctgctccttaatctctgatggagtgattctagttagagagagattaataaggtgggacagtacgtgtggaaagcgatttaggtgacatttgtaactggagtagtgaaaaggagttatttctcctaggttctagtgtaaataaagaagtattttattttgtcaattccttgaaaaaatatgtgaatttgttcctctttatttttattgagcagcggtaatttgcataaataaacctcttccacacaccacgtcaaattccaatgccgatttcttattaatctgacaaacaataaaaacatagacacactcactcataaatgcatggatataatatccccatgtgcgcctctaaaa

SEQ ID NO: 7741 - DNA, 4550 bp, Zea Mays
cccccccccccccccccgttgatccaatcggcctgcttgttgtttattagtacctatgtgggattgcaaattgcatgattaggggacgtttccttttttgcaaattgcatgattaggggacgtttcctttttttcttctggtaagccatcatgagctaccataattcgtttccggatagggtacaattaataggcaaagtttgcttcttttacagcccaacctgtgctttccgtttagtggatgcactccctttttatttgggatttttgaatctgaactaggggcacagatttaaaaatacacccccttttttttgccccccccataagcaatactgtcgtacctatacgaatcgtcgtaattgttcatcgaaggttaccatttatatgtcttctgcatcttctacttacctcagttcgtaagagtaactccaatagttatgtaaattttagctctctaaatcacatatttaagaagttgctaaatggcttttggagtaaaaagatgtgagttctgcaatagttctctaaatataggttgtaattttgttttgtatttatccacctaaaaactaagtcacaaaaactatataatgcagtcaacatttttgtttagggagttgttaaatagttgctaaatgtagagagaaaatgaggttagatgacaagttgttaaatttagaaagttaatttagagaactgttggagaatagttttgtgtgtgtcgactgtcgaatcaaattttatttttattttttaaaaatggcaaaaaaactttatttatattggaatgcctgtccaggatggtcctactgtttcaatccaagctaccccttgggtacgtcgtatctgcttttgacatcttaggttccatcgacggagaatgtgctataaaactccagatagatgggtctgatgggtgttcgcatttgccttacttgattaactactcaaataggatgcggagatgctaagtaggaattcttctcggacctccaccaagcacctgttatctgtgtatgcggagaagttaggtaggaattcttctctgacctccaccaagcacctgttatctgtgtactccatgcatcattggtgttatcctctcgctgtatttggatttgctggttgtgttttcgctacttgaggcatctgatttttttaatgatgttcactggaagcattgtttgtttgtcatttattcggttggttctgtgatgtgttgattaacccttcccctttaggatttagatttatattattatatttgctgccttatcaccttggttctaatccaggtttctgtttaattatagtgtaaacatgaattcgacattgtcatttgtacgatgatgttagactgcagcgaatattggtaaaccgtagtgcttatttagtgtatctttaacattttttttggttatgtgactgatcatgcatagggaaggtgttttctaacctctcagctatgtaaatttggaaagcaagaactgatacacgagaaaaactacttcagcttgtcctcagctttgcatgcttgctctgattaatatttgcaagacgaaccttatccgaaagaaatccaagctagttatctgttgaacttggtgtagggtggatttaccaatgaccagatgaagggcagaagctcacccgccagtaattttaggaatgtcatagtttggtccctctgggcatgtaccgtttgaagcctttcttctctcatttgcatctgccttttctttttatagtttgcttgtttgtgctatgtaaagcaaaactaattttgtttgatttcttactaagaatgtatacaaagtttggaaggaataatgtgatatacattgtgtttgtaaatctatttgatagagtgcctgtttataaaaaaatgttaattttctagtttttggggcctttatgctatatttgaaattctacttgacattatcatggatcattttcgctgtaaggttccatgtagctgagtttagataatttcctttgtcagtttgtatcttgtactatcattgtgggtgataaggacactttcaagtgctaaggtctgtattctgttgtctatttaccagctgtttacctgtcaagggatgtgaatgattcagcgtaaaaccttatagtgcatttgcttgtcaattacggaagaatgatttggactgcatatatttcacaatgcacatgtctcataaagggtgtttcttccatgtttttggtgtgatctttcagttgtatgaattgattgaaattctgaattcttgtgttgtatatccatgtactggaaatcaaacattgaagattgaacatggaatgaacttgaacgattttggtacttgttttgtgatatcttacacacaatatatgtagtgccatattttggaatgaactagtttgtgataaacttcgtggcaacacatgctttcatttgagtctggttacgtgataccaaattattgatatccattttgtttttcatctccagattattaagtgcagttgggcctgacttgttttatggctcgaaataatgagggccatctcgagctgccagagatggatcaaattcaacccaagaacatcccacacaatgaatcactgcctctaggccagaagcttctcctgcatcatggaagtgatgcgccccttagaattggtcattcaagtcatggaaatatgggacttagaataaatgatcttccatcttcaagtcgcactgtgcagactctaggttatagagttgggaacccaggaacctcgcatgctccctttgttcattttcatgctggaagttctggtagccatttaccagaccctgctgtgaattatccacataggtctgaggaaggcttcgctccagtgggttcccatatggacaacagaagggctgcaatgaagcgaaaaggtcccagtgtacaccctgcagggatcagtgctactggttattatgttggaagttcttccagtactcagccatctaactctgtgcagccaaatgcagctccacttgctgagccctttctccgtcaaatacctttaagcattgaccaaagtggttgggatatccaacacttgattcaccaagaagggtttcagaggaatgtgagagcacgccacagtagtattccattagtacccagatcagcttcaacatacccattaaacataaacagtgttcatgtgccgtcattcggttcaaccgcaagtgcttcctcaagtgcaccagtggaaatgaaccaagtgcctgtttctttgccaacaagaactctaccatcaggtgcaccaggtatgactagcagggtcccaacagggagggcttactatcctgtggttggaagcagcagcagcagctcaagtgttggtgctgtcccaactatccacggatcatctggcgctgcaatgtttgctaacggtggctatgttcctagtagtgttcatgctggaactgttccgatcttccctaacccagcgcctgctacttcatctggctccagagccatgccccaccagatggtcattcagagtcatccagctgctacttccgcagcaacatctacatccatgcggaccgcccaaccatcattacctgccagaaccgcagcggcttccagacatgcaaggcatgtgtcagcagggcttgccaacaacggaaggtacagaagggccaggagctcttactacaggcttcatccattgatggtagaggcagaggtagatagcctttttcttccctactgtttcaatgaagttgagtttaagtctttgtcgaacctgaaactgatgttgctgctggtcgtgaagcggttcatgatggaccacttggtcttctacgaatcgagagcagcagctgctgacccccacagggacatgagactggacattgacaacatgagctacgaggacctgttggctctgggagaagctatgggcaatgtcaacacaggcctggccgatgaaaaagtttccgagtgcgtgaaagaagtggtctgctgcagttctgaccacacgcagatggaccaagacgacggaagctgcgccatttgcctggaggactacagagacaaggaggcgctgggaatactcaagtgcaggcacgacttccacgccggctgcatcaagaagtggctgcagacgaagaactcgtgcccggtgtgcaaagcggccgcggcctagtagggagggacacgccagatgaggaggaggaggagcaagcgactgttgcgctcgatccgattcatttttaggctcaggtcaagatgtatgccgtctcattcttttttttcccatcctcctagccagggcagccgtgtaaatagatgctcttatgggattaactattttctcttgggttacattggcccagattcttttgttgtatttaacaataacaacccagttgtggaagactggaaggtattgatcgtcaagtggttatacattagtctcatgtcggggttttcggatccgccgacacttgaaattagttgcgaggtatacctcttttggacggtgaagtttggtacacggaatcttagttgtgg

SEQ ID NO: 7742 - DNA, 2158 bp, Zea Mays
gttggtctgcatcctactgctgtggtgtatagtatgctaatggatgggtactgtcttgttggcaagatggagaaagcattaagagtatttgatgctatggtgtcagctggcattgaaccagacgatgtagtgtatggtacacttgttaatggctattgtaaaattggaaggattgatgaaggattgagtcttttcagagaaatgctgcaaaagggaataaagccttcaactattttgtacaacatcataattgatgggttatttcaggatgggagaacagttcctgcaaaggtgaaattccatgaaatgacagaaagtggtatcgctatggacaaatatacatacaacatagttcttcgtggactttttaaaaatagatgctttgatgaagcaatctttcttttcaaagaattacgtgcaatgaatgtaaagatcaatatcataactctcaataccatgatagctggaatgtttcaaaccaggagagttgaagaagctaaggatctgtttgcttctatctcgagaagtgggctggtgccttgtgttgtgacttacagtataatgatcacaaatcttataaaagaaggattggtggaagaggcagaagatatgttttcatccatgcagaatgctggctgtgagcccaattctcgattgctgaatcatgtagtcagggaattactaaagaaaaatgaaatagtcagggctggagcttacctgtccaagattgacgagaggaatttctcacttgaacatttaaccgcaatgttgctggtcgatctcttctcaagcaaaggaacttgtagggaacaaataagatttctccctgcaaagtatcattttcttgcagaggccagtccgtgattgatatgttgattttttttggaatcagtccttgcacgcacctgtcacagttaaactagtatatgatcttaactaaaaccattggtttacttcatgttcatgtttctcggaagattttcttctcatttgacctgcttgatatgcagatgttcatttacttttgatccaatatatgcagagcgttttatgtttttcgaagcatattcgttccggtgctgatgtagctatgtgctctccgtacacaactgatgtgtgattctctcttgtagcatgttttatcatgtctgttaacacagccgatgttgcatttatgaggaatgacgttataactgctgggagaataatgtagcatgctgaatcctgttttgggccctggctgagccgcccagttcgtcatgaccagcaagtctggcctaatgctgtggcttgtaagggcaaagtggataccctgctgctgggtagtactagtatattgctgttcaaacctgcaaatatctgggatcagctgatggatgaagaacaatcagtagtctctgggtaaaatagcatgcctgcgcaagcgagcggacatgagtgacaagaagcgcagattgacaacgcaacaagagcgaagccacaagaggtttcagggtagggtaccatctaatgtgtatcagcagcagcaggtttttctcaggtgttaagaaccaccgacatgaaaaagcaccgagtttgctcgttcattccttggcagccttgtcgatgagctcctgtggatgtgggggatgacgccgccgccgctggcggcgatggtagccttgatcagggtttccagctcgtcgttcccgtggatcgccagctgaaggaacagaaggcaaaaacagagagggaaattgaacaaggaataaacaagagattgtataggaagcttgatacgaaatggaagcagagcattgtggtcagaccagcaccatctctaagggagaacaaagagaaggcaagcagagcctgtgcacgtattggttggttcagttgtgcggttgctctttttggctcttatcttcgtcgccattcttgtatttgtaggattgtggaaatgtaaaccgttcaagttgctgcattagtagcagctagtagtatctgtgattcagaaatctaaaagttgtgacttgttcatgtagaatgaaccttgtgtagatgagttgcaaggtgtgagtgttccatatattattgtaggatgagttagaatcctgaatgtcaagtgcttattacgtggatgcaaaatgcaaataaataaagtgatgcagaccacggc

SEQ ID NO: 7743 - DNA, 1396 bp, Zea Mays
tgcacctactttttttccctctcgtctctgttgcccggttgcccctcgctgtgacgactgacgagcaaccaatccacccaaatcccagaccgagctccaatcctcagcgccgccagtcgcgccgcctccgatggccgcgcggcgcgggccccacgtcatcaagctccacgatcccaacccgcccctcctcggccgggcgccggggaccgcaccggccgccatccccgcgccgtcgcgcgatgagggcatcctcgcgcagcaccctcgcgccgccccctcgagcgcatccgcctcgcacccggccttcgcccttatcgaggagcgcctcgtagcccgggaccaggacatccaggagctcctcgtcgacaaccagcggttcgccgccacgcacgtcgcgcttcagcagcagcttatcgcggcgcagcacgagctccgggcggtctccgtcgctgccaccagggcgcgcgccgagcgggaggtcgaggtgcgagcgctggccgaccaggcggcccacatagaggccgaggcgcgggccgtcgccgctgcgcgcgcggaggtcgaccaggttcacgccgacgtccaggtgctcgtcgcggcgcgcactgaccttgtcaaccggctccagggcctacgggagaagctcgcgcacaagaaggctgaggcgagtaagaccgattccgtccgtgcccagattgaaaccatgcgccgggagatccagaagggcagagctgcggttgattttgaaaagaaggcacactctgataaccttgaacaaagtaaagcaatggagaaaaatatgattgctgtggctagtgagattgagaggcttcgaggagagcttgcaaatgctgaaaaaggggccaccgctgtcaacccagcagcagctgttggctcacatgcacgctggtgccagttcctattacacgagtcaaccattttcctatggacaatacgagagccagcacaccaatatccaaagatgactgccggcacaagatagctttgactcgtctgccatctcattctcgctgtaaaaggatagtcgcagaatccaccggattaagcatgctagaaaaatctgttgcatcggagcgctggaactcctcgtggtcatgtttgcttttcttttctggctaatttgttccagaatggatgggtcgaattttggagcaaaaatctttctggcttctccatgtactaccataacgatttgtcagttaattctgcagattggtgtggtgttattcagggccgactatgatgcctctagccatttgtgtacatacgtataaatgaactaggtgagtgcccgtgcgttgcaacggaaccgtataataacacgataacttatgtacatatgtgtgttatattgttatgagaaaatgtttcagaatcc

SEQ ID NO: 7744 - DNA, 1660 bp, Zea Mays
gaaccgtctacgctgttattcctcggatttccgtttcatgattcgaaaaatggataagtagttgaatagtgtatcgacccagtgggtattgctaaaaatccagacgcaaaaatatctgcgcatttctaataaaagaaaagaaattaaaaaaactgctggcatccctatccctgccgcttcctccaaccttttgttcctatccacgcgcgggggtgaaaaaaaaatcttctccggccgtcgctgggactcctacaaatctcatcgccgagcggctcctgtgggcgagcgctctaccgcccagtcctctgctccttgcttcttccttctctctcgcacttgccgtggaggcctcatcctatttttttcgttcttcagaagtttagagcgtccctatctccttccctctgctctgatttttccagcagctggtttccccggatattcttccacgctgcgccgattagcacctggatatgttctccagcgcacagccttatcctgcagccgccctcgcctgattctttcccagccgccgctctgggcgattaaaaatcctgctcgccggcccggatctccggcgtcgtctgcccctgcttcccttggcgttcttcccccagtcgtctccttcctctgctcgtcgctaaaattcgctggccgcgaatgcccatggcgcacccccagtccctgctttctctttgtctctctcttatccatggacgcgcgttgccggagctccctgctcgtcgcgcgccctgctcgctcatggcgctggctgctgctctgcggccccagccgagctcgtccctgtgcgccggggtcgcgtgcagctcgcccagctcggagtttcccctgtccatctcgccacgctcagtctctagctccctgtgcgcgcgtcgagttcccgtaccgaattcagcgtaccgaattcagccccatgttgacgtgtccctgttccagcttgccgtgccgcgtcgtcatcgcttcctgtcgcgagctcgattcccgttgtcatcgagtttcacgcttgctcgcgtttgtcgtcgagctgttgaaccccctcccttgctcgtgactccatcgtcgcgtcgtgtgtgcagctctatatatgccaccctcctatatcgtcgtcgaagctgtcatcccctgctcgacccctacctcactagctcactccaaacacgatctcgtcatcgttccgtgagtcatcaagaaatctcgaaaattgggtgaagacgaagctagcagcattgtatctcccaagtgctcgacacaagagctgaaccagaatccttgccgtgttcggatagcgcgtcagatttagaatggtacgttaattaatcacgtgatacggaagacgatccaagtcgaccccaagtgcggccggactactccgcctgaagatactgatggacgaacctgcctgatcaagtgctaggataaggatgatcgtcaagtggtcgcctaacaacactaacctagtgttacccaggcaagccccggtgcatgcaacccctttccttgtgtttttaaatacttttcgcacactttaagtctagtgaaatgtgcattaagtttataggaattgcttgaaaccctttgatgcattgttttccttgatatccatacctttatagatacttctgtgaagtatcaaaattat

SEQ ID NO: 7745 - DNA, 1362 bp, Zea Mays
ccgattttacccttactttaagataagatgtttagaggttctcctaagatagtagctttacctaaagctgctcaaaagaaggcttctcctaaagctgcaaaatcaaagaaatgtggcggtggtgttgagagagctgcatggaatgttgaattagagaagagtcttgttgacttgttgtttgaacacaatatgcctccacatagggctcaaaatggatggagtccagatgcttggaataaaatagtttctaaattccacaagaagcatgaatatgttacattcaacaagatccaaattcaagaaaaggagagagaattaaaaagggaatacaagatattgaaggaggcaagaaaacaaagtggagtttcttggaatgaaaaaagatgcatgatcattgctgaaccaacgatatgggacaacattatcactgtaagaagcatatgctttacccagacatttcctagagctaagaagttccgcaataagtcttttccaatctttgatgccttgggtgaattatatgatggtcacattgcacaagggacttggaacattacatctactcaaccactacaaaattctgatgatggagagaaatttaaaaccatagaagtggaatatgaagatactaatgaaccacaagtagatgcgagaatagaacaagatgaagatatagtaattgttgaaagggttgaacataggttacctaaaaggtcaggtgcaccaactgtcaatcaagagaaggagacaaagagagtaaggaaagatgcactagaagggctgatagggaggtaccttgatgtgaaaacaaagcaagttgcagatgaggctacacaatcaacaaaagagaaggaagttgctcaagataatgatttttctatcaagaggtgtatttctgttcttaagactatggatatcacaagagatgagaagatcaaagcagcggaggtgtttaacacaccaaattacagagaaacatttatttgttttaatgatgatgagccagaagtcgctctcctttggccaagggggaagatggataaactctaaagggtccaaggataaagatattatcaacatctctagaggaagagaaagtcaagtcacatcttcagtctgtgcaggctgtttattcagtttcagtcaataaggcttagcttgtagtgtgtggtctaaatcttgcatgtgcatgtagagactgtttcttcggtctgtgcaggctgtgcagttttcagcttgtttcttcagtcgtttcagacagttttttcagttttctgtgcagacatgtgctcgtctctactttgtcaaaaaaaagatagaattattcagactgcagttttcagcttgtttgttgattgggtt

SEQ ID NO: 7746 - DNA, 1495 bp, Zea Mays
ctggaacaaatccacgtgccgcctcacgcggctgagcacgccgcccccgccgcctcgtccctgtctcgccgtcgccgcctcgttcccgtcctgccatcatcgtctcgtccctgcttctcgatcgtacgccgtgagcaataggagttccgtccggcgctggagctgagcctggagattgtccctactcttgtgagagtcgcgaggacaagctttccccctcttgagatccggtgtctaatccatttttcaaggtggtgttgagagagctgcatggaatgttgaattagagaagagtcttgttgacttgttgtttgaacacaatatgcctccacatagggctcaaaatggatggagtccagatgcttggaataaaatagtttctaaattccacaagaagcatgaatatgttacattcaacaagatccaaattcaagaaaaggagagagaattaaaaagggaatacaagatattgaaggaggcaagaaaacaaagtggagtttcttggaatgaaaaaagatgcatgatcattgctgaaccaacgatatgggacaacattatcactgtaagaagcatatgctttacccagacatttcctagagctaagaagttccgcaataagtcttttccaatctttgatgccttgggtgaattatatgatggtcacattgcacaagggacttggaacattacatctactcaaccactacaaaattctgatgatggagagaaatttaaaaccatagaagtggaatatgaagatactaatgaaccacaagtagatgcgagaatagaacaagatgaagatatagtaattgttgaaagggttgaacataggttacctaaaaggtcaggtgcaccaactgtcaatcaagagaaggagacaaagagagtaaggaaagatgcactagaagggctgatagggaggtaccttgatgtgaaaacaaagcaagttgcagatgaggctacacaatcaacaaaagagaaggaagttgctcaagataatgatttttctatcaagaggtgtatttctgttcttaagactatggatatcacaagagatgagaagatcaaagcagcggaggtgtttaacacaccaaattacagagaaacatttatttgttttaatgatgatgagccagaagtcgctctcctttggccaagggggaagatggataaactctaaagggtccaaggataaagatattatcaacatctctagaggaagagaaagtcaagtcacatcttcagtctgtgcaggctgtttattcagtttcagtcaataaggcttagcttgtagtgtgtggtctaaatcttgcatgtgcatgtagagactgtttcttcggtctgtgcaggctgtgcagttttcagcttgtttcttcagtcgtttcagacagttttttcagttttctgtgcagacatgtgctcgtctctactttgtcaaaaaaaagatagaattattcagactgcagttttcagcttgtttgttgattgggtt

SEQ ID NO: 7747 - DNA, 1892 bp, Zea Mays
aaacgcatgcaatctatcaccgcctcagctcgtgctctctgctctgcactatctactaccaaagaaagatgaaggacttggcggggctggggcacctgttcgtggtgtccttcctgttccacttcgcctccttcatggtgatcccggcggtcaccgacgtcaccatggaggccgcctgccccggccgcgacgagtgctccgtcgccatctacctcagcggcttccagaacgcagtcaccgggatgggggcgctcgtcgtcacccccatcgtcgggaacctgtcggacaggtacggccggaaggcgctcatgacgctgccggtcaccgtagccatcgcgccgctgtttatactggcatgcggccgctcggaggtgtacttctacgtgtactacgtggccaagatcatcgccggggtcttctgcgagggcaccatgcattgtctctgccttgcctacgtggctgaccacgtgggccccaggcgtcgcgcggcggcgttcggcctcctctccggcgtgtcggcagccgggttcgtgtcggggaccttgaccgcgcgcttcctcccgaccgcatccaccttccaggtcgccgccgccgtggccgtggcggcagcgctctacctcagggccttcctccccgacgctggcggcagcgtctcctgcgccgacgaagcctgcgaccctctcctccaggattcgtcctgcgcctcttccacatcatcctccgatgaagagctctcgcctcggctgccgccgcataagggaggcctgccgtctctgtccgacatggtcgcgcttctcactggcagtctggccttgtcgggggcagcaaccatcactttcttctacagtctaggtgaacatgggcttcagactgcattgctgtactacttgaaggcacaatttggttacaacaaagatgagtttgctaatctacttctaattgtcggtgctgccgggatgctatcacagctcactgtaatgcctatcttggctccgattctgggtgaagagatgctgcttattgttgggcttctaggtggatgtactcatgttttcttgtatggcattgcatggtcatattgggtaccttattttgctgcggcatttgtaattttgagtgcttttgttcacccatctataagaaccaatgtatcaaaaaatgtcggatcaaatgagcagggaattgctcaaggatgtatatctgggattagttcttttgcaagcatattaggtcccctcatctttactcccttaaccgagcccttcaacttcaaaggtttcagtattttgtgtgctggcttctgcacccttattgcgtttgttatcagtttgaggatgcctggtgctcgatctagtacgtgcaagaagaccgcagttcagcatgagcaagcatgacagaatatagtatagtgccacctactcttttttattctgcccaagtgcatagacagaaaaggacaggatgggaaaaaagtgacttcgagcaaaaggaaaaggtatagtgacaggaagtgctggagaaacatgctcgatttcgtatgttcaaagagaaggggttatcctatgcaactagacatttttatccttcactggaatgttgagcattgcagaattgacaattgctatgccatcgagcaagttcagtcgtttgtaaatatgctcctagtaggaagtaactgaattattcgcaaaaaaaggaagtggctgaactattgtgccttttgcacgatgcttcgtttcaaggattagccatgaattaacgtttatgtactctaagaggaggtgatttgcatctcaactaaacatttgagtatgcagttaagttgatttgtccagttaaatatgtagaacatgttcctccttcataggtcatccttttgagttctactttgc

SEQ ID NO: 7748 - DNA, 3971 bp, Zea Mays
tttttttctccctgtgaagggagggaacagcgtcgtcgtgagggagaaaattcgtcgggttgatgtcagaaaaggggaagaggagacagacgacgggtggagagcgagagaagtggggaaggcgagcagagcaacaaatcaagtctgtttcatttcagcaatcagcaccaacccccgtccaatcgctgcggctggatgattgggcagtgtcagcctcgcgttcgttcatttaatgtttctggtagcggtcaatgcgggatggttgggtggcggattggtattttgggactccatgtactacttcctgtcttcctccaccttcccggagaagcagcagaggaagggagggtgaaagaagaaatggtcgcaaagaggtggagggaaggaaagggtcaatgctgctcggtgtccctcaacctcaacacgggcgcccctactttacttgcttgttcccggtgtccctatcactctcagaggtggacgatggatcgtccctttcacatttcacacaccctccgttgccatttcaatattatcctagtcgccagcgtaagctcgccgtagctacctgctctgctactcgaccgctggcactggcgcgtttctttattgcttcgtccccttcatccggcaactccactgtcagcgccctattcggctcaatccatccctctgcttggcgtcctctctgctgcttgatttgctacctgtacctggtgctgggaatggattctgctatcagagggatcctgcaagtgtgaaatctatatattctggacaaatggggcaaaatatgttacagccacaagtgctctgcctgtgctccattatcctcacgttattttttacccttttgcaaccgaccgctgcacagatcactgcaccatgggaagttgatgccctcaaggctattaggggcagcttgatagatccacacggaaatcttagcagctggaaccgaggagatccatgcatgggaaattggtcccatgttatctgttacaatgcaacaggcagtgatggatacttccatgtaaaagaattacagctcctaagtttgaatctatctggaattttggctcctgagcttggtcagctttctcaaatgaaaattatggattttatgtggaattcgattggcgggaccatacctaaggaggtcggaaatatcacttctctggagttaatgctcctgaatggaaaccaattgaatggctctttaccagaggagattggcttccttcctaatctgaatcggattcagattgatcagaaccatatatctggacttatacctaaatcatttgctaacctgaataaaaccaagcactttcacatgaacaacaactcattgagcggtcaaatcccacctgagttatccagattaccttcacttgttcacctattattggataacaataacttgtcaggctacattcctccagaactatcaaagttgccaaatgtgctcatcatgtatacaactggacaataataatttctctggaagtacaattccttcatcttatggcaacatctcaacacttctaaaattgagtttaaggaactgcagcttggaaggacctgttcctgatgtcagtgggataccccaacttggctacttggatgttagctggaatcaattgaggggtccaataccatccattcaattttcgagcaacataactacaattgatctttcccacaataatcttaatggttccattccaggaattttctctggccttccttatctccaaagactgtcacttgacgacaacaatttgactggttctgttccatctaatatctggcaagatattgatctaagaggaaataaaagtcttgtactggatttccagaacaatgctctcaacaatctgtcaactcctctttcgccccctcccaatgttaccatcctattacatggaaacccagtatgcattgggcaaaaccaactgaatatttctcagtattgtcagtcaggaacatatgttgcacgtggaggttcagcagataacagtacagtttgtccaccatgctctagcgactttccttttgaaagaataccgatgtcaccaataccatgctcatgtgtcgttccagtttatgtgggttaccggcttaagagtcctgggttctcaaatttcattccatacgaatcccagttccagcagtacttaacatctgggctttcactgtcatcgtaccaattagaagtttctacttttatgtgggaagaaggcccaaggctgaagatggacctgaaaatatttccaaataacactccctttttcactgtaagtgaggtgttcaggcttaatggtatgttcacagcttggcagattgcagactctgatatatttggcccatatgaacttatcagcttcaaccaagggtggtacaacacaataataccacagggtacaaagtctggtctgagtacaggtgccattgttggggtggtcatggcggcatttgttgcagctgccattctttcatccctcgttactatcatcatattgcggagacgctcaagacagtcttcttcaaataaacgcaccgcgaaaagaatttcaatgaaaattgctggtgtaaaagacttcacttttgatgaattgtcacattgtacacatgactttaatgattcaacactaattggccaaggagggtatggcaaggtatacagaggtgtgttggctgatggaatagtagtagcaataaagcgagcacagcaagggtctcttcaaggttctaaggaattcttcacagagatagagttgctatcgaggctgcatcaccgtaatctagtctctttgctcggttattgtgatgaagatgatgaacagatgctggtttacgagtatatgcccaatggaaatctgcgtgatcatctttcagctagagctaaggtgcctctagatttccccatgaggctacggatcgcgctgggatcgtcacgtggtatcctgtatttgcacacggaagcagatcctccaatataccatcgtgacatcaaagccagcaatattctactggactcgaagtttgtcgcaaaggttgctgatttcggtctctcacgccttgctccgctgccagaaacagaggggagtgcccctggtcatgtctccacagtcgtaaaaggcaccccgggttatcttgacccagagtattttctcacccataagctcacggacaagagcgacgtgtacagcctgggcgttgtgttcttggagctgctgactgggatgcagccaatctctcatggaaggaatattgtcagagaggttttggcagccaatcagtcagggatgatattctcggtggtggataaccggatgggctcgtaccctgctgagtgcgtggagaagtttgctgcgctggcgctgcggtgttgccaggacgagacggactcgaggccatccatggtggaggtggttcgggagctggacatgatatggcgcatgacgccggggacggagaacattgcatcgtcagagtctggcgtcatggggatgggctccaacagcaccagcacacccacagcatcggggtctcggatggatgatcactacatttcgtccatggaggtctccggtagcaacctgctcagtggcgttatgcccagcatcaatccgcgctgacctgctagtatatgttgctgttctagcggtgtgtattatagtttggactcaccacgacgaggatgtaggctacttgtgagcaaccaaacatgtattcattctcttatcgggttcaattttattgttgtcacacttagactgtgaaagtttcattccttagacggtctctagcaacgttctctaaatttcatccattaaaaaatatatataattgcactctaaaagattacgtcatttatatcttcatcatccccggtagtctcttttaaatttcatcatctatatcctatcttccatattatcacaaatcctgttattagaaatttt

SEQ ID NO: 7749 - DNA, 988 bp, Zea Mays
aggaaacgcgagcttgttggttccctgaccggcctggcccgacttcagtcgccacaacgacgctagggtttcactcgcagccgccgacgccaaaagcccgctcttctgccccaagccgcgacgccccgcgacgccgctgcggtgccaccagagcggtggcttctccgacgccgggcgacgagagcggcctgtcgtcggcgtccccgcagccgccgctgttctacggctcgccgccgcggcgagcgtcaaatccggtggtccacgacagcaggttcggcgcggactgcccgcccgtgcccgtgccggggctgtccgtgcaccggcctagcccgcggccgtcgtcggcggcgccgtccatgtcgccgcgcgggtgcgcccgcgcgcggttcgcgttccagcccgcgaatagttaggtggtatgtcctagttcgtcaattaatgatgctttcttttttggtttttgatggggaattgtttttttctttgttgtccgtccgtccatgcaaccaagaaatttcatggagaatctgtacaaaagagtggctagctactacacgagagtccgttctgagagaagcaacacgaggtcagtcagtggatgagcttagagagagacattcacacgctgagagggttgataatttgtgatattttcctcctttttttcttcttcctgattttgtatattgtatatcctgctggattaacaaatactagcaaccacttatagtcagtcaacataggccatctactgctagtacctcttttcttctcatgagttgtagcagtttctgtttaattcatatgattgtaattacaatcatattttaagttactactataatttctgtttaattacaatcatagtttctatttaattaaaattcatatgattgtaattacaatcatagtttctgtttttgttatccatattttaagttgctactatagttcatatgattgtaattcaaatgattgtaattagttc

SEQ ID NO: 7750 - DNA, 2657 bp, Zea Mays
actcgaggtgtactccagtcctacatcgaaatggtgtgctggttgctgaatgcaggcaggcaggcacggcatcggcatcactggaaattgaagcccaagaggggggaggtaggtggccattcaactccaaccctctaccggccgggctggcctccgatttgtttttcccagcctctgatgcgaattaggagcgcagcactggtctcattactcgccacaatgaccttcctttaagcatagattatatccgaacagttgttgctgccaagcctttactttaaccatcggcaagagtaagatccctgtgcgcacgcatacgcatgtccaggcccagcggcgcctgctataaaaatctccacgtccaccgcccggctccgtgtccctccctcgtcacatctgccgtccgtcaccatggggtgttcgtgtcctccgctcgccgacgccgcgtgcctggccctgcttcttctggccttgtcgttggcgtgtcgccaccaccacgggtgcgcggcggccacgctgtcgacggcgtcgcggtgggtgctggacgagagcgggagccgggtgaagctggcgtgcgtgaactggccgtcgcacctggagccggtgctggcggaggggctgggcaagcggcccgtcggcgccatcgccgcggacgtggccgccatggggttcaactgcgtcaggttcacgtggcccacgttcctggtcaccgacgcctcctactccgacctcaccgtcgcgcagtccttccagcggctcaacctcaccgagtcgctcgccggcatcagggtcaacaaccccggggtcgtcgacctcaagctcatcgacgccttcaaggccgtggtgagcagcctgggcgagcacaacctgatggtcatcctggacaaccacctgagcaagcccgggtggtgctgcagcaacaccgacggcagcggcttcttcggcgacacctacttcgacccggacgtctgggtcgacggcctcaccaagatggccaccatgttcgccggcgtccccaatgtcgtcggcatgagccttcggaacgagctcaggggccccaggcagaacgtgaacgactggtacatgcagcgcggcgcggaggcggtgcacgcggcgaacccgcgcgtgctggtcatcctctcgggcctcagcttcgacaacgacctggccttcctcaactcgcggccggtgaacctcagcttcaccgggaaggtggcgttcgaggtgcactggtacagcttctccaacggtcccgagtggagctcgggcaacgccaaccaggcgtgcgcgcgcatcacggccggcatcacccgccgcgcgttctacctgctcgacaggggctggcccgtcatcctcagcgagttcggggtcgacaaccgcggcgtcaacaccaacgacaaccgctactacggctgcgccgccgccgccgcggccgacctggacctggactgggcgctctgggcgctgcaggggagctactacctccgcgagggcgtcctggggctcgacgaggtctacggcgtcctcgactgggcctggtgcaggccgcgcaacgacaccgcgctgcgcagggtccaggccctccagcgcccgctcagggggcccggcctcgcggaggcggcgccgtacaccgtgctgttccacccggtgtccgggatgtgcgtggtgcgccggtcgccgacgccgtcgctgacgcagccctttcagctgagcctgggcccctgcaacgagacggaggcgtgggagtacagcgcgcagcagcagcgactggcgctgcgggacgctgcgctgctgtgcctccgcgccgagggcgccggcaggcccgcgagcctcgccgtgagctgcggcgacgccatggcaaggtggggcttcgtgtctgactccaagctgcacgtcgccgtcaacgccacgtcgtcggccgggagcgtcggcgacggcttgctctgcctggacgtgggcgcggacggccggagcgtcgtgaccaacccgtgccgctgcctgagcgcggacaacagctgcgacccgcagggacagtggttcaagctcgtgagcagcacgaggagcgtggtcaccaagcagaccatgctcgcgcagctgccgctcaagctcaaagactggaagatcaggtcgttttgagcgtttccccggtagaatatagtgcgtcagctaggctcaacacgtacgtaagctgtagcacgtgacgtcgtgtggaacggcgggaatagaggagcactgacctagaacttgaacaatgttctcgaggagactgatcagcattcagcagcatgtccatacctttctctgcgagactttctaaaagaatataattcttaaatacatgtataagatatgctgtaaaatttggggaaatgataataaaaaatatattatgtagaattataaaagaatgtgatatcataatgcgaatgtcttgtggtggataaactaaaaataataattacatttagtgagagataatgtggcaccagaggataatgtgacaccgggtttgacttgtggtccgtagagtggaaatgaatatggtttgtttttttgttataagagatgtagattacttccttcatctccgaataaatcaatttatggagagatatattacttccttcgtatccaaataaactaatttatagagttgt

SEQ ID NO: 7751 - DNA, 1705 bp, Zea Mays
aaggtttttttttgcaagatgttcaccagcagctgagcgagcgttggcaggccacgggggctgtgctgtgctgaaggtcgtccgtagcgtggaaaaaaaactactggtgctactggtgtcagatctgctagcgctcgcaattctcctctccaccacgccggcgacggcagccggtgaccagtacctacatgtccagcctgaggtcgctagccagcgcactgatcggggacgccgcgaggcttcactcggccactggctctgccggggaggagcctgacagggtctacggcgccgtgctctgccgggcggactccgctggtgctaactacaggcgccgccggggtgcccttggcgccatcgacggcgacggccactcaccttgcgcgctccacagcgacgtgaccgtctactccgagctgtaccatctccgtttctctgacaggaacttcctcgccaacttcaagaacgcgccgaaatgggccgacgtcaaattatggtttctctcagactgctaatggtacatagcagatttacaagggagtatttactgatggacaagaggtagcaataaaaagactgtctgctcacaacaagacgggtgtttgttatggcttaaaattagattctaaccgtcagaatccgattcttgtagccaaaggcttcacttcttagcttgtttctatgagaatcgtttccatgaaaatcactcaaataatccgcaaataatccgtcaagttttgtcacgatgagaaaaattcgttgctttctagatcctaaactctataaactattctagcttcctctatagtctgcaagtaatcccgcgatatttagattatcttgacaactagactatacaagaatccagattctcagaaaagctctttagaaaaaagctataccaaacatacccctttagatatcgcgatattcaggttttagcaaaacttaagcacaaaatccttgttagactccttggtcgttgcatccatgaagagaagatgctgatatacgaataactgacgaaccaaagcttggaccacttcatttttgatccaatcatgcatgcatcacttaaatagaagagaggagtcaaaatagctgatggtatagcccagggactcctgtaccttcacaacctctcctgaatacgcatcgtccatagggtcttgaaagcaagtaaaatcctgttagatttctgatctaaaccctaagatttctgatgttgggatggcaaggatatttccatcggatgccactcaagcaacagccagcagacttgtgggcacatatggatacatggctaatgaattgcatctgatggccttctctcgatcaagtcagatgttttcaacctgggaactgtggaaagacaggagatggaataagttcaatgatcaatcatttggtgatgactacgaactggaagagctgatgaaataccttgctgagttgctgtggtattgttgtgtgttatgagaaaaaaaacaatagatcatcctacaatgcctgatgttgttgcaactcttagcagtgatggcatcacattgccagaaccaaagcagccagcttactcctatgcgaaattaaatgtgtcagtcactgtattgagtagcagaaatgatgtcaccatcactactacaaatggcatataacagaatgtgaatatactgttaatcaagtgtgagctacaggtcttggtcat

SEQ ID NO: 7752 - DNA, 1759 bp, Zea Mays
aaggtttttttttgcaagatgttcaccagcagctgagcgagcgttggcaggccacgggggctgtgctgtgctgaaggtcgtccgtagcgtggaaaaaaaactactggtgctactggtgtcagatctgctagcgctcgcaattctcctctccaccacgccggcgacggcagccggtgaccagtacctacatgtccagcctgaggtcgctagccagcgcactgatcggggacgccgcgaggcttcactcggccactggctctgccggggaggagcctgacagggtctacggcgccgtgctctgccgggcggactccgctggtgctaactacaggcgccgccggggtgcccttggcgccatcgacggcgacggccactcaccttgcgcgctccacagcgacgtgaccgtctactccgagctgtaccatctccgtttctctgacaggaacttcctcgccaacttcaagaacgcgccgaaatgggccgacgtcaaattatggtttctctcagactgctaatggtacatagcagatttacaagggagtatttactgatggacaagaggtagcaataaaaagactgtctgctcacaacaagacgggtgtttgttatggcttaaaattagattctaaccgtcagaatccgattcttgtagccaaaggcttcacttcttagcttgtttctatgagaatcgtttccatgaaaatcactcaaataatccgcaaataatccgtcaagttttgtcacgatgagaaaaattcgttgctttctagatcctaaactctataaactattctagcttcctctatagtctgcaagtaatcccgcgatatttagattatcttgacaactagactatacaagaatccagattctcagaaaagctctttagaaaaaagctataccaaacatacccctttagatatcgcgatattcaggttttagcaaaacttaagcacaaaatccttgttagactccttggtcgttgcatccatgaagagaagatgctgatatacgaataactgacgaaccaaagcttggaccacttcatttttgatccaatcatgcatgcatcacttaaatagaagagaggagtcaaaatagctgatggtatagcccagggactcctgtaccttcacaacctctcctgaatacgcatcgtccatagggtcttgaaagcaagtaaaatcctgttagatttctgatctaaaccctaagatttctgatgttgggatggcaaggatatttccatcggatgccactcaagcaacagccagcagacttgtgggcacatatggatacatggctaatgaattgcatctgatggccttctctcgatcaagtcagatgttttcagtttagtattaatggtgtatctgtatggtgttctacattatttccttccataaaacctgggaactgtggaaagacaggagatggaataagttcaatgatcaatcatttggtgatgactacgaactggaagagctgatgaaataccttgctgagttgctgtggtattgttgtgtgttatgagaaaaaaaacaatagatcatcctacaatgcctgatgttgttgcaactcttagcagtgatggcatcacattgccagaaccaaagcagccagcttactcctatgcgaaattaaatgtgtcagtcactgtattgagtagcagaaatgatgtcaccatcactactacaaatggcatataacagaatgtgaatatactgttaatcaagtgtgagctacaggtcttggtcat

SEQ ID NO: 7753 - DNA, 1579 bp, Zea Mays
ctcacacccggccgcacggcactcagcaccaattcgctggaggagaggaggaaccgtacgcgcctcattacgcccatccacgtgctcgcctctccccatcggcccatcgcataattttcctcggcggcgtcgccatctcaccggcggcgggcctgcggccggcaaccggaggcgatggcgagctcgtctgtggcggcggacatggagctggaccgccccaacctggaggactacctcccgcccgactcgctcccgcaggaggcgcccaggaatctccatctgcgcgatctgcttgacatctcgccggtgctaaccgaggcagcgggtgccatagtcgatgattcattcacgcgctgctttaagtcgaattctccagaaccatggaactggaacatatatttgttccctttatggtgcttcggtgtagtaattcgatatggattactcttcccactgaggtccttaacgcttgcaataggatggttagcattttttgctgcctttttccccgtgcatttcctattgaaaggtcaagacaagttgagaaataaaattgagaggaagttggttgaaatgatgtgcagtgtttttgttgcttcatggactggagtgatcaagtaccatggaccacgcccaagcacacgacctcatcaggtatttgttgcaaaccatacatcaatgatagatttcattattctggagcaaatgacagcatttgctgtcatcatgcagaagcatcctggatgggttggatttattcagaagactatcttggaaagtgtgggttgcatctggtttaaccgtaatgatctccgggatcgtgaagttacggcacggaaggtgcctttgagcttgggtgtgctgtctgtccaatagctatcaaatacaataaaatatttgttgatgccttttggaacagtaagaagcaatcttttacgatgcacttggtccggttgatgacatcatgggctgttgtgtgtgatgtttggtacttggagcctcaatatctgagggagggagagactgcaattgcgtttgctgagagagtaagggacatgatagcagctagagctggtcttaagaaggtcccgtgggatggctatctgaaacacaaccgccctagtcccaaacacaccgaagagaagcaacgcatattcgccgaatctgtcttgaggagactagaggagaaatgaagagacatcaaacactacaagcgcatttggttagtggtttaccgttcagctaccttgtaattcggttggctccccgaaaaaaaaaagtccgggacacgtcaagtgcccagctcagttttgttgtaaatttattagaaatttgacagaattggtagtgtgaacttaccaagaaaggaagaatagccgcatgtgttgtggctgttcattctatgattggttaggaattgacacttgaaacacggtactctattcagaggctgtgtccgtatttatgaatcgacgatgtaatggttttaattcatgtgattattgattcaataatatgagtagattacatcctctgtaccttcttgagatttaaaacattggatttgaagaggttgcca

SEQ ID NO: 7754 - DNA, 1640 bp, Zea Mays
gccgcacggcactcagcaccaattcgctggaggagaggaggaaccgtacgcgcctcattacgcccatccacgtgctcgcctctccccatcggcccatcgcataattttcctcggcggcgtcgccatctcaccggcggcgggcctgcggccggcaaccggaggcgatggcgagctcgtctgtggcggcggacatggagctggaccgccccaacctggaggactacctcccgcccgactcgctcccgcaggaggcgcccaggaatctccatctgcgcgatctgcttgacatctcgccggtgctaaccgaggcagcgggtgccatagtcgatgattcattcacgcgctgctttaagtcgaattctccagaaccatggaactggaacatatatttgttccctttatggtgcttcggtgtagtaattcgatatggattactcttcccactgaggtccttaacgcttgcaataggatggttagcattttttgctgcctttttccccgtgcatttcctattgaaaggtcaagacaagttgagaaataaaattgagaggaagttggttgaaatgatgtgcagtgtttttgttgcttcatggactggagtgatcaagtaccatggaccacgcccaagcacacgacctcatcaggtatttgttgcaaaccatacatcaatgatagatttcattattctggagcaaatgacagcatttgctgtcatcatgcagaagcatcctggatgggttggatttattcagaagactatcttggaaagtgtgggttgcatctggtttaaccgtaatgatctccgggatcgtgaagttacggcacggaaacaaaaaccctctcttgattttcccagaaggaacttgtgttaacaaccagtatacggtcatgttcaagaagggtgcctttgagcttgggtgtgctgtctgtccaatagctatcaaatacaataaaatatttgttgatgccttttggaacagtaagaagcaatcttttacgatgcacttggtccggttgatgacatcatgggctgttgtgtgtgatgtttggtacttggagcctcaatatctgagggagggagagactgcaattgcgtttgctgagagagtaagggacatgatagcagctagagctggtcttaagaaggtcccgtgggatggctatctgaaacacaaccgccctagtcccaaacacaccgaagagaagcaacgcatattcgccgaatctgtcttgaggagactagaggagaaatgaagagacatcaaacactacaagcgcatttggttagtggtttaccgttcagctaccttgtaattcggttggctccccgaaaaaaaaaagtccgggacacgtcaagtgcccagctcagttttgttgtaaatttattagaaatttgacagaattggtagtgtgaacttaccaagaaaggaagaatagccgcatgtgttgtggctgttcattctatgattggttaggaattgacacttgaaacacggtactctattcagaggctgtgtccgtatttatgaatcgacgatgtaatggttttaattcatgtgattattgattcaataatatgagtagattacatcctctgtaccttcttgagatttaaaacattggatttgaagaggttgcca

SEQ ID NO: 7755 - DNA, 2076 bp, Zea Mays
gtagatttttttttatatatatagcgggtctaaaatgtattttttcttatagcgggcctagaacgtgttgacccacaatagagaaaggcaccactgccgtttccgtcccgtttgcttacgtcaccaagccgccgagaaccagagacagacagagaagaaaaactgcagccgccgagctcagcctcagccgccgcgacggggacagggaaagatggccgacggcagtgcctccgcctcgccgccttccgtttctccgcaccagtaccaccgcgacgccatcaagtcctcagtgcgtaatacagctgctaataggaggagggaacatgccattgcaatagggaaagaaagaagggaagccttgatgcgtgcaaagcgtgtatgccgagctcctctttctggcagtgatgaggctgcaggagaagagggtgacatggttgttgatgaggagaaagcagatcttgagactagaacgactcaggctgttgaggagctgaaatctgctttgtcaagccagggaaaaggtgcacagaataggaagacagaagtgcttcgtgctttaaggcgtttgttgtcccagtctgaagtacctccagttgatgcagcaattaaagctggagcagtccctctattagtgcagtctctgtcatttggatcgccagatgaacaattgctagaggcagcttggtgccttacaaacatagcggcagggaaacctgaggaaactaaatccttacttcctgctctaccattgctcattgctcaccttggtgagaacagctctacacttgtcgcggaacaatgtgcatgggccattggtaatgttgctggtgaaggagcagagctgagaaacacattacttgctcaaggtgctttgtggcctcttgcccgtttaatgctgtcaaataagggttccacaacaaggactgctgcttgggcattgtcaaatctcatcaaggggcctgattccaaggctgcgaatgaacttattggtatcgacggcatactgaatgcaatcattcggaacttggaaaaggcggatgaagaacttgtaactgaggtggcatgggtggttgtctatctttcagcactttcagaaaaagctaccagcctaatagtaagaagttcgatgccacagttgctgatcgggcgccttctagcatctgaaaacttgcagttgctcattccgatcaagccttatcaagtcttatcaagtgtttgaagagcgaccatagggttctcaagaaggaggcatcatgggccatgtcaaatatagcagcgggcagttttgagcataagaaactgatatttggtagtgaggcgactcctttgctgatgcacctcctcaggactgcacagtttgacatccgcagggaagcagcatacacgctgggcaacctgtgtgttgtcccagcaggcagtggtaaccccccaactataatcgttgagcatttagttgccatcgtagatggtggagcccttccaggatttataaatttggtgaggtcggccgatatagagagtgcgagacttgggcttcagttcctggaactggtgatgagaggataccctgacagccagggcccaaagctcgtggagacagaggacggcattgaggccatggagaggttccagttccatgagaacgagatgatgaggaatatggcgaatggtttggttgataaatactttggcgaagactatggcctgtgagttgtgccgccgatacatctgggtaaacgtggagctatttgtgggtttgaaatgtaacgatcctggaacagaaggatgcgccgttcatcatggtttccatgtaatttagcccctaatatatagctggaaatgtgaatgtgttgaaactgaccgtgagctggagatgttaagtgtggataccttagatagacatagactgacatcttgcacagtgcttcctctatctcaaaatattttttcgtctcgtattttaagtgtggaaatgttggagatgctcttagagtacaaatatatgactgattaatctgatgatgtttataatgtaccataaaaactagtgttttttggtatatatttggtctaaat

SEQ ID NO: 7756 - DNA, 431 bp, Zea Mays
gtcagtttccagcaaggattggccaccaaggtcgtggagtatatgttgcccaattttaatgaggtgtttggactggaatgcgcacagtctgttactttgatggcaaaacgcaacgaagtaccatgggtaaggatgtgctggagaatgaaagcttctgtcttaaaacaataggatacaagaagcttgcaagtggttttgtgaaggcttttgtgaatcacttgaatcattagttcttttaagaatggttttgtaaagcgttagcaaatatgtgtaaaacacaataagatgtgtggcaaagtcagtgatctagttgtacagttttttatgtttatgtgatatgtggatatttcattgtgcaatgttaatgaactgtgtatgtctatgtgattatgtgtataaaatatatgttttgtggtgcttttgtgataata

SEQ ID NO: 7757 - DNA, 440 bp, Zea Mays
gtggatcacatgtcagtttccagcaagtaggattggccaccaaggtcgtggagtatatgttgcccaattttaatgaggtgtttggactggaatgcgcacagtctgttactttgatggcaaaacgcaacgaagtaccatgggatgtgctggagaatgaaagcttctgtcttaaaacaataggatacaagaagcttgcaagtggttttgtgaaggcttttgtgaatcacttgaatcattagttcttttaagaatggttttgtaaagcgttagcaaatatgtgtaaaacacaataagatgtgtggcaaagtcagtgatctagttgtacagttttttatgtttatgtgatatgtggatatttcattgtgcaatgttaatgaactgtgtatgtctatgtgattatgtgtataaaatatatgttttgtggtgcttttgtgataata

SEQ ID NO: 7758 - DNA, 531 bp, Zea Mays
ctacgatgatttatatgaggatgacaaagataaggaggtggatcacatgtcagtttccagcaagtaggattggccaccaaggtcgtggagtatatgttgcccaattttaatgaggtctggtgggatatcattaccttagatatcttgatatgcaaatagtttggtgtttggactggaatgcgcacagtctgttactttgatggcaaaacgcaacgaagtaccatgggtaaggatgtgctggagaatgaaagcttctgtcttaaaacaataggatacaagaagcttgcaagtggttttgtgaaggcttttgtgaatcacttgaatcattagttcttttaagaatggttttgtaaagcgttagcaaatatgtgtaaaacacaataagatgtgtggcaaagtcagtgatctagttgtacagttttttatgtttatgtgatatgtggatatttcattgtgcaatgttaatgaactgtgtatgtctatgtgattatgtgtataaaatatatgttttgtggtgcttttgtgataata

SEQ ID NO: 7759 - DNA, 623 bp, Zea Mays
gccatgttctgcatagtattctgtgcagttatttgattgattcacattttcaaatgatcggttgaaactctgttatgcttgactagactgaatctagattgtttactaaaattgggcatgggttttaattgtagtggtttgtagctatctgtcattgtacactgattcaagtgacaacgatttcttttctgtggatgcattttagtaggattggccaccaaggtcgtggagtatatgttgcccaattttaatgaggtgtttggactggaatgcgcacagtctgttactttgatggcaaaacgcaacgaagtaccatgggtaaggatgtgctggagaatgaaagcttctgtcttaaaacaataggatacaagaagcttgcaagtggttttgtgaaggcttttgtgaatcacttgaatcattagttcttttaagaatggttttgtaaagcgttagcaaatatgtgtaaaacacaataagatgtgtggcaaagtcagtgatctagttgtacagttttttatgtttatgtgatatgtggatatttcattgtgcaatgttaatgaactgtgtatgtctatgtgattatgtgtataaaatatatgttttgtggtgcttttgtgataata

SEQ ID NO: 7760 - DNA, 832 bp, Zea Mays
gtcagtttccagcaaggattggccaccaaggtcgtggagtatatgttgcccaattttaatgaggtctggtgggatatcattaccttagatatcttgatatgcaaatagtttggtgagacatttgaagataattaatgttcatgtcacaaacattcagttaccttgtttatattaatgtgatgtgcaataagttagaattaagcagccgacatgccctccgcttgcttgattttatacaatttctttacatcagatatatatctattagtcagaaaggaaataaaaactaatacatatttgacatacttctgacatcacattttgtttgactatactatttaatgttatgccacttgtcaaatatgcatggtcttgggaatccaagaagaattgttggcatttgtaataacattatttggtaatgatagttctaggttttctacttaaacaacaattatttttgatgcaggtgtttggactggaatgcgcacagtctgttactttgatggcaaaacgcaacgaagtaccatgggatgtgctggagaatgaaagcttctgtcttaaaacaataggatacaagaagcttgcaagtggttttgtgaaggcttttgtgaatcacttgaatcattagttcttttaagaatggttttgtaaagcgttagcaaatatgtgtaaaacacaataagatgtgtggcaaagtcagtgatctagttgtacagttttttatgtttatgtgatatgtggatatttcattgtgcaatgttaatgaactgtgtatgtctatgtgattatgtgtataaaatatatgttttgtggtgcttttgtgataata

SEQ ID NO: 7761 - DNA, 1619 bp, Zea Mays
ggaagtgaaaacgttcaagtcacccgcctcctcccaaaatcgcctccatctcccctcaaaatcctctgctcctccctccattccaaatcctccgggaaccatttgcgcggctaccatcccgatccggtggcgccccggccttgctcgattcctacagctgctatccttttctacctgcggcgccctgctccactctagtggctgctcccctcccaatctgggttctttatcaggagggtggcctcgccgggagccctagcggtgaggggtgtcaggaagccgttggcgcggcgttatatttcaccctcgaggaacaaggagaacctgctgccggtttgggcgttgagggtcacaccgacaaagaggagcccgcttcctggatggtaccccaggacgccgctccgtgatattacggccattgcaaaggctattcagagaagtcgttcaaggattgctgcagctcagcagcgaagccaaaggatcgagcagtcttcacaatctgtgaacgtgactactccagcacaagcagagcaggatgctcacattgctgaagcctcccatgctgttgcatctggctccggctcaactgaaagagaagctgtagcaaaccctgctactgttttggctgatgacaatttgaatgtgtcttctttggcagcagaaggctcattgaatactccatccaaaccaatggatcctgcccttgctgacaagaaactttccggttcaatagagaaggtagagaagttggtgaggaaaaacctgaagcgaacatcgagggctgcccaggcctccaggagggccacccaaaggcgcaatcttatgtccatgcgatgaatttattgctgtactttgctgggggaagagaaagtccacctcaggcttgtcctccttcctcttgtctgtgctgctcttcttccaatacttgccgtggcgtgatgctcacggtcattccttgttcccttctcgaggacaagaatatggaagccattggctctctgcttgaggttctaggactgcagctactagtgtgagtgcattctaggctggtagcccttgtacaacagaagctcaatggcaccaacgaggactgagaatcctgaccaattcaccttcctgtcgtgcacatgatagctcagaagatcgacgggacatcaggaagcacagcaaatgatgggccgtgctgttatgacttaaaagggaagaccagagcaagcaatcgcttgcagaacaaaacattcagttttgcaatttgaaacatagcccggttgtttttctcatgtccccgtcaggactcaggaggtaacagaagcccatttaaattagaggaaaaacatccgaataccgttaatatgatctatcactaaactaccgcactgtagagtctgtagtgcagagagaacgtgtgctctgattcacatggtacaccctaagctggtcgttgttaaacgccaaaagtggtggacagtccgtgcctcccttatcagattgacttgggcgattattcttattttgtgtgtggttatctatctaattatgtaagtctatcgtatagaaatgggtctagaccttccctacatatatgaatgagtatgattgattgagaatctctgaacata

SEQ ID NO: 7762 - DNA, 1724 bp, Zea Mays
aattagatcccccgccaccacagcctgaagcacccaaatccatgagatttgccctaggtctattactggatagcaagtgctagttccatcaggggtcccaggtgcctaggttggatatccagacgacctaatcgtgaggaagttttaggattcagccccttcccctcccatttcttggtgttctgatgcgattcagggtgctgcttcccgtgaacctagtggcaggagcagtagtagtatttggaccagagccccgagatgcctgagtccagggacggcaggagtgaggacctagctgacctttctggtggtgttggtggtggagggttctttatcaggagggtggcctcgccgggagccctagcggtgaggggtgtcaggaagccgttggcgcggcgttatatttcaccctcgaggaacaaggagaacctgctgccggtttgggcgttgagggtcacaccgacaaagaggagcccgcttcctggatggtaccccaggacgccgctccgtgatattacggccattgcaaaggctattcagagaagtcgttcaaggattgctgcagctcagcagcgaagccaaaggatcgagcagtcttcacaatctgtgaacgtgactactccagcacaagcagagcaggatgctcacattgctgaagcctcccatgctgttgcatctggctccggctcaactgaaagagaagctgtagcaaaccctgctactgttttggctgatgacaatttgaatgtgtcttctttggcagcagaaggctcattgaatactccatccaaaccaatggatcctgcccttgctgacaagaaactttccggttcaatagagaaggtagagaagttggtgaggaaaaacctgaagcgaacatcgagggctgcccaggcctccaggagggccacccaaaggcgcaatcttatgtccatgcgatgaatttattgctgtactttgctgggggaagagaaagtccacctcaggcttgtcctccttcctcttgtctgtgctgctcttcttccaatacttgccgtggcgtgatgctcacggtcattccttgttcccttctcgaggacaagaatatggaagccattggctctctgcttgaggttctaggactgcagctactagtgtgagtgcattctaggctggtagcccttgtacaacagaagctcaatggcaccaacgaggactgagaatcctgaccaattcaccttcctgtcgtgcacatgatagctcagaagatcgacgggacatcaggaagcacagcaaatgatgggccgtgctgttatgacttaaaagggaagaccagagcaagcaatcgcttgcagaacaaaacattcagttttgcaatttgaaacatagcccggttgtttttctcatgtccccgtcaggactcaggaggtaacagaagcccatttaaattagaggaaaaacatccgaataccgttaatatgatctatcactaaactaccgcactgtagagtctgtagtgcagagagaacgtgtgctctgattcacatggtacaccctaagctggtcgttgttaaacgccaaaagtggtggacagtccgtgcctcccttatcagattgacttgggcgattattcttattttgtgtgtggttatctatctaattatgtaagtctatcgtatagaaatgggtctagaccttccctacatatatgaatgagtatgattgattgagaatctctgaacata

SEQ ID NO: 7763 - DNA, 2175 bp, Zea Mays
caccgtcgtcgggccgtggagctcgccgttgtcgaggagtgcgccaccgtcgtcgggccgaagattctgctctgccattgctatagcagtgcacaagttccaggagaaaatatgagaaatgcaagaagaaacattaatgatgcccctgtaaatgcgtacgagcagcaacgaatagcaatcattgcagaaaacaaaaggaagctagcatctcttaatatccctactttgaagaccgcgggtccatccgagaaaagaacaaagaggactcatgacacaagtgttgtagcaactgaaggtcataatttacgtgcaaggccacaaagaaactataatgggaatgaaaatatacagatcgatgaagatcttgtgataaatcaatcagatggagactttctatgtgataatgaagattttgaagacattccaaaaaaacgagcagggaaaggaaggggtattactaggctagatgacatattcgcaaggaaatctgacatgcctaaaataaaaataacactaaatgaacatggtcagcctgttggaaaagattgtaggaagttttctagtgccattgggtgtctagtgaggaagaaactatcagttgcatgtgctgattggaggctggttcctgctgaaaagaagtatgaagtttggacaagcattaaggaaatctatgacatcgatgatgctgccttcaattggttccttgctagtgccgggagaaaatggaaggaattcaaggcaaccctaaaggagcaatactttaatgagaaactaacaaatgaggagctgaagacaaaagttggtgacagagttgatgatgatgcttggaattttctcacagaatattggatgtctcctaactttgataacaaacttaaagcaatagttgaagcacgtccagagttgaaggaaagatcaattcaacaaggtgatgcctttgctgccgtttgtggagaaaaggaaccaagaggacgggttcgtgttttgggtctaggtccaactcctcaagaagttggtacccctgggttgaagtgctacacaccaacaagacttcaaatggaagtttttgctcgcaaaaagcttgaaagtgagaaagcagccttagaaaaacgtatagcggatatgcaagaggaaatgatggaacgagaaaagcaaaatgttgaaatgggatcacacaatgattcaaattcaagactccattcgcagagcccaagagaggagcatattcaccaggcgcatgatgctcagttccaagaagatgatgcttctctagataaccattgtgaagaggatgagtacgtgtttctccccaggggtggtaatattcgccctacaagcgtgaccacaactaggccaagaattgtttctgcgactcgcttttcacatgatgcacttgttggggaagatggtgcacaaacatctgtaccacccaatgaatgcaacccgattcaacctaaaagagcaaccacatcagtctggcctagaaatgatgctgccactcgcttttcacatgatgttcgaccaagaaatgatgctgccactcgcttttcacatgatgttcagttggggaagatgtgatactctatgcaatgttgagatctgatcctgtggcaaagggaacaattacttcaactaatccaaacactgtgctaggaggtgaaaatcttggaacacaattttgtgaagtagttgtgaatgttgtgctaaaaagggacgcagatctacctcgcccttatgaccatatggagaccatgggtgatgcttatatgatgcctgttgcatggccatacaagagaatgaaggtcagcaaggcttccaaatcatcccatgttgctactggtaattctgggatatgctaggtagcacatttgatggaccagctgacagcaacttgttcaaacagcaagcatatggtgtaatggagaagggttgtcttcttagtttgcagcttttgggtttcttacattaagactgtagttgtagcttttgggttgcaagcatatggtgtaatggagaatggttatagcttttgggttgttgtgttgacaactgtaatagtactgactgtgtgctgtttggaagcgacaatgcacttttgctgcttgtgcttggtacctttgtttcaaagattgttgaacaatttcttgtgtgtcctgagaaatcaaaatgtttcta

SEQ ID NO: 7764 - DNA, 3618 bp, Zea Mays
ggcttgttcactttggtttcgtcgccggtgctagctagttggtaggcagcaaacatgcatgcatggccagtcttcgtcttcatgctcctccgcagctgcagctgctgctgcagaagtgatggagagctgctagctaggagaaagaggggcctgggagacatcgatgaacgataagcgaccgtttcttttgttttgttggtaataactgactgcagtgacgccttctgctctaggttttgccgtcaattcgatccgctgggtgtatgtgcgaccaccagccaagagctagcggagcaaggctggtggatggactctggagcaagctgctctagtctgtgcttgcttgctgctccctcggtccttcctcccacaacagaggcgatgcaagcaggcgtaatcgtccaatccaccagcttgcattgctcttttattatatattcgtatataagtagtataggtgtagacgcaagcacgcaccagacctttcccacttcttctgcagcagcagatcaggtgaggacgtgaggtgatggcgtcctccgccgccaccaccaccaccaccctcctccgtctgctttgcctctgcaccgtcctgctagtcgccatgcaggcggcggcggctcgcccgcccaacgtcaccatcggctccctcttcgcctttgactccgtcatcggaaggtccgccaggtccgccatccagctcgccgtcgacgacgtcaaccgcgaccccaccgtgctcaacggcaccaccctcaccgtcgtcttccaggacacaaagtgcagcggattcgcaggcacaatccaagcaggcctggagctgatggagaaggaggtggtggccgtggtgggcccgcagtcctcggtcatcgcgcacgtcgtctcccacgtcgccaaccagctgcgcgtgccgctgctgtccttcgccgccaccgacccggcgctcgcctccacgcagtacccctacttcgtgcgcaccgtgcacgacgaccgcttccagatggccgccatcgctgacgtcgtctcgcacttcggatggagggaggtcaccgccgtctacgtcgacgacgactacggccgcggcggcgtcatcgcgctcgccgacgcgctggaggccacgcgtgccagggtgtcctacagggccgccttcccgctgggcgccgaccgcgccacgctcgccgacatcctccagcgcgccaacttcatggagtcgcgcgtcttcatcgtccacgctagcccggactcgggcctcaacgtcttcgccgccgcgcgggggctcggcatgatggtctcggggtacacctggatcgcgaccgactggctcgccaccgccgccatcgatgctgctggcgccgcctccaactccagcaacatacagggcgtcctcacgctgcgacagtacaccccggactctgacgccaaggcgtcgctcctctccaggctcgccgccgctgatccaaccagcaacaatgccaccgccagcgtcaacacgtacggcctcttcgcctacgactccgtatggatggcggcgtacgccatcgatcagttcctcggcgacgccggtggcggcaacgtctccttctccgccgaccccaccatccgcgatgccaacggcagcgcgctgggtctcagcgcgctcagggtgttcgaccagggcgagcagctactcgggaaggtcatgctctccaacttcaccggcgtcacgggccacgtggagttccagttcgacgccggtgtgaatagcagcggaaccctcgtcaaccctgcctatgagatcctcaacgtcggtggcacgggcgtccgccgtgtcgcctactggtccaactacacgcgcctgtcggtggacgcacccaagcagctcggcgacggcgtgcctccgcccaacagcaccagcacgacggcccaacagcagatgtccaacgtcatctggcccggtggcacgacggccacgccgcgcgggtgggtgttcgccgacaacggcaagccgctgacgatcggcgtgccctaccggacgtcgtacaaggagtttgtgtccaaggacgagacaagccccgacggcgtgagcggctactgcgtggacgtgttcaaggcggcggtggccctgctcccgtacccggtgccggtgtcgttcgtcctgttcggcgacggcgtcgagaaccccagctacaacgagctggtgcagaaggtggcggacggctacttcgacgcggcggtgggcgacatctcgatcgtcacgaaccgaacgcgggtggtggacttcacgcagccgtacatcgactccgggctcatgatcgtgtccacggtgaagtccagcagctccgacgagtgggccttcctcaagcccttcacaccggagctttgggccactgttgtcgccttctgcatcttcgtcggcgccgtggtgtggatcctggagcaccggcacaacgacgagtttcgcgggccgctgaagaagcagatggtcaccatcttctggttcagcttttcctccatgttcttcacgcagagagaggacaccgtcagtgttcctggtcgcttcgtcgtcatcatgtggctcttcgtggtgctcatcatcacccagagctacacagccagcctgacgtccatcctgacagtgcagcagctgtcgacgggaatccagggcctgagcgacctcctcgcctccaacgaccccatcggttaccaggtcggctccttcgctgggagctacatgaacaaggagctgggcgtcgcggcgacacgcctccgggagctggaccccgacgactacgccgacagcctgcagcgcgggcccagaggcggcggcgtggcggccatcgtcgacgagctgccctacatggagctcttcctctccagcaactgccagttccagacggtgggccaggagttcaccaagagcggatggggattcgcgttcccgcttgactccccgctggcggtggacctgtccacggccatcctgacgctgtcggagaacggcgacctgcagcggatccacgacaattggctcaacacggggacgtgcgactcgcagaacaacggcgtgggcggcgccgaaaggctcagcctgcgcaactttggggggctcttccttatctgcggcgtcgcctgcgtcatcgccctgctcatccacttcgtcaggatacttttccagttctgccagtaccgcagacacggggccgccgacggcgcccaagaagaggacgagaacgacggcgacgacgacagggacggcgacagcgacaaggagaagagccagcgccggcccgccaggcagaccagcatccgggacctcatgtccttcgtggacatggaggaggccgaggtcaagagggccatccggagcaggtctggcaagtccatgggccggtcccggagcgacacgtctgatgcaccgtcctcgtcgccggtgtaacgtacaagagcttttatatcggttttccaacaccggaccggagagcagctcgatggaagagagagaccgagtcttgagtggagagctagggtcagctggtccagactaccctgagcgattgagttagggcactcgtagaccatcttgaccttctctctgttaacaatttaaacattcctgtgtttaatttagttcatgaatataat

SEQ ID NO: 7765 - DNA, 3585 bp, Zea Mays
agctgcgcccaaggcttgattatggtccatgagtagaagataccgcgtcaagtaagctctgatactctgcaagcaatggatcggcgcagctggccttggaagaagaaatcatctgatagatcatcaaatgcagatgcgttgcagaattctaatcatgctgaacaggaagataaagctccaaagtttgtgcaaatttcacctcaaacatattcacatcttactgagtcagaggaaaaagtaaaagttttagaagaaaatgtgaaggtcttgaatgaaaaactgtctgctgcacaatctgagatcacaactaaagatgctcttgtgaagcagcatgcaaaggttgctgaagaagcagtatcaggttgggagaaagctgaagcagaggcctccgcactgaaggttcagctagaaactgttacattgtctaagctagcagctgaagaaagaggtgctcatctggatggtgcattgaaagaatgcatgaagcaagtaaggactgttaaagaagaaggtgagcagaagctacatgatgtagtatttgcaaaaaccaaacagtgggagaagataaaggccgagttcgaagcaaaattacttgaatttgaacaggaactcataagggctggtgctgagaatgatgcactcacaagatcacttcaagaacgggcagaactattgatgaaaattgatgaggaaaaaggtcaagctgaagctgagatcgaaattttaaaaagcacaattcaatcaggtgaaagggagataaattcgctaaaatatgaattgcatgttgtctccaaagagcttgaaatccgcaatgaagaaaagaatatgagtgtgcgctcagctgatgtagcaactaaacagcaccaggaagatgtcaagaaaatatcaaaactcgaagctgaatgccaaagattacgcggccttgttcgaaagaagttacctggccctgctgcactagctcaaatgaaaatggaggtggagagcttgggtagagaatatggagaccacagagtacgaagatcccctgcaaagaattctagttttcatcggcctatgtctcctgttcctgattatgcaatggagaacatacatcacatgcagagagacaatgagtttctgactgctcgtttattaacaatggaagaagaaaccaagatgcttaaagaggcattggcaaagagaaacagtgagctgcaatcttcaagaagcatgtatgctaagacaacaggaaagctccgaagcttggaagttcaaatgttgactggaaacaaacataagagtccatcaactccaaacatggatattcactttgatggtgcatttagccaaaatggaagcaacccacctagcatgacttccatgtctgaagatggggtagatgatgaaggaagttgtacagaatcttggaccaatgctctggtatctgagccctgtcaattcaaaaaagagaaggcagccaagagcagcacgacagaaagctccaataggttggagctcatggatgacttcttagagatggagagattagcatgtctgtcttctgaagttaatggcaatggcagtactgttgacaagatgaaggtagacaatgttggggctacttttgctggctttactgaaagagatggtgttaaagatttgcagtcagcttcaccaatgtcagaaactccatctaataaacagtgtctgtctgagaaatctccgcttttgaatttccagtcaagaatatcttccttactggattctgaatcaccagagaataatgctggaaaggtacttgatagcatcagaaacattctaaaggatattgaagatgaggcagattcggtgaatgtaaatgggactcatccttcagatgggaccttaagttcagagagcaaatttgccatggatcaagatcttaagaatgccatattgaaaattctagactttgtgaagttacttgatcaagaaatctccaagtttcaaggccagtcacctgattatgatggactatgtgagaaaacacaacagttctctgcattagtcgataaagttctgtcaaacgttgatgttctaaatgatattgtcatagcactgtctgttatcttgtcagaaactagccagattaagttcacattgttgagagacaatagcaatgaagcagaaagtaataacttagattgtgttgataaagtgactctacttgaaaataaggtgcagcttgagccagtaaaagacaatgttcctggtatctgcccactgttgcctcattcatcttctgatcctgagtttgaggggcctgctgatgctagattcgatgttaagactgcagtgaaggtgtactcgccggaggaatatgaacaacttaaatctgagaaggcaaatttggagggagaactagcaaagtgcaacaaaataatagaagaaacaatggctaggttaagtgatatggagaaaaaactggaagacctgacatctaagttggctgacagtgagaaatcaaatagcttgaatgagacacagttgaagtgtatggctgaatcctacaagtcacttgaatcaaggaaaattgaattagaaaatgagatagaagcgttacggtccagaatagatgctctaacagctgaactctttgatgaaagacagagtcatcaggaggacttagttaaatacagagatctcgaggagaagatggaaaggtatgagatggagaggagttcaattcttgtggatgaggacccagacaacaagtcaaagcaggagagagagatagcggctgcagcagaaaagctggcagagtgccaggagaccatattgattcttggccgtcagctgcaagctatgcgtcctccagccgagtcgctaggctcttcacctaatcggcaacgcatggaggagtttctgaaggatgcggcaggaacaaccgcaggagaatatttccagaaaccttcaggccaacctgatacagaccaggatatgcttgggacaggaaatgtgtctccgatcagtgggtacaagacacacatgatcccttctgatgcggacgttagccctttcccttctccaaacacctccaagcgcccgaagcatcgatcgagatcctcttcgtcttcctcattcaccaaccaccagttgccagacaaacagaaccgaggattcagtcggttcttcgcgaagagcaaagagtgaaactattccggatcgcggtgttaggtttgttgatttttggcgccaattgggtgggatggtggtcatgaatttctgtagagctagtgagggatgcttgcttgtgcgttctctcaggtcaggtgattcctttgggttgctggaataatactcagcttgcagtcgagcgggttgtggcgagagtgtgtgggggaatatttaagttgtcagtctcttctgctagagcttttctgggtttctgtgtgctcgaaacctcactaaaacctcactgtacatgtgcttacttgcttgaaggagcttggctgttggtttgtgtttaatcctcttgtgaattagcccgtgtattgtgcttgtactggtttggtgtacaattaacctgcgcccatttcaagggtattgatgtcttccctcggttct

SEQ ID NO: 7766 - DNA, 2949 bp, Zea Mays
gttcttgtcaagagcagccgtcagccccgtcaccagcaagactcgccccccactactcttcctcctccaacctcccctcctgtctctccctccctccctggcagcgactactccccaacccgcacgcacgccgtgagcataaagccgtcgcgcgcccacacgcccgttttcatttccatcggttccctttccaaactcaacggccgcggcagggagcaggcacagtcacctccctgacccgttgagccgtcaattttatcccgccccgcgatttcctacagctgccgatcgaggaggaggcgcattgcccgcattcttctccgcttccaccgagagggcctcgcctgatcggcgccgccttggcccccatgacgtgtgtgcgcgccgaggacgccgtctcgcccgccgccgccgacgacgtggcggctgccctggtttccaggggcggcttgatccagaaggtggctgccggcggcgggcggagaccggcaggctcggcgcgctcgctgcagcgctcagcacatctggccaccggggacggcaacgctccggcgccggcggtggaggccagttgctcctggtccggggatgggataggtaagagcaacggtggtgggaagagagatgatagacacaggatgcggcagtacaggtcgcagctcgaacaggaggtcaagaaattgcagaggcagcttgaagaagaggttgatctgcacgtggcgttggcggatgctgttacacaaaatgttgcgcctatactgaagtcttctatgaagcttccacacaaggcacaggagctactgattaacatcgcctccttggagattaccgtttcaaaccttgaaaagaagctaaatgatctgtactaccagctttgtcacgaaaggaacgaaaggttacttgctgaaaataatcagggatgcttgccatctacatcctccgatgagcaccagtcattgtcaacttgcacgtgtacgtgggaagagcacatatcatcgttgagagatttgaagtttgggggatctgaatcaatgagatcaatgagacaggacttattccccgagcttgaagatgaccaggatatgggagaagatcctgagggtcaacagatagtttctttaaacaggctgctagaaaagcaccgagattcttctttgaatagacttcttgaaaagcatcgagatgaagagatgcaagaatctggctccatggaaaatgaaggcaatgaaaatgagcagcctgacacgttatcctttgaacagtctattctaaagataactagcataaaaggagggaatctttggagcaacccaaatgagctctctgaggagatggttcgctgcatgagaaacattttcctacgcttgtctgaatccttgaagatatcgccgaagacatcttctgattgttcatcttcctccgtggagcgtctatcaggctccacgttagcatctttctcagattcatccataatgccctcaatgctacggagtccttcagttgattctaatcacaatgacgagacgatgaaggaagtcaggaactttgatccgtataaagttaatggaaaggaaacccgaagagatatcggaaactatcgttcagcagctgaagtatcttggatgtctgttggaaaggatcaactagaatatgcatctgaagctttaaagaagttcagatttctagtggaacaattgtcaaaggttaatcctagctgtatggatcgcgatcagcggctagccttttggattaacttatacaatgctttgataatgcatgagctcacttcaattcatcgcatctgccctcaatttctttcatcaagtgtcatgcgctcaccaattgtttaccgttgcatttttttatcggaatctatcaggcgtatttggcatacggagtacctcgaaatgacatcaagcttttttctctgatgcaaaaggcttgttacacagttggcggccagtccttcagcgcagcagaaatagagtttgtgattctaaagatgaagactccagttcatcggccccaactttctttgatgttgactctgaataagttcaagattactgaggatcacaagaagtactcaatcgatgaattcgaaccccttcttttgttcggacttagctgtggaatgttctcttctcctgctgtacgcatattctccgctgcaaatgttaggcaggagctccaggaatctctgagagactatattcaggcgactgtcggtacaaatggcaaagggaagctgctgatcccgaagctagtgcagagctacgccaagggagctgtcgaggactctctgctcgcagactggatctgccaccaccttgcacctgatcaagccacggtcatccgggactcttcctcgcagtggaagcagcggctactcggagctcgaagcttcaccgttctcgccttcgactccaagttccggtacctcttcttgccagacagctgtggctcccagagccagaagccagaggcaaagcaatcttacaaacttcctgagccgtgttcagaatcagaatagataataagagctcagtttggtatatttggaccatcatacattcttttgcatagcgggccatgtgattggcagttgtatatgatgtaaattttgaggaagcttgaattgctgtgtttgcaaaaccggatcctctccacggagttggtggcaatttgggggtcgtattggttttcttttgtattcacttgtcttccatactgaagataacattcttttgttgtttttgttttatctgcataccttttcctttttttcccctctccttttctgtaaacctgtatggtcaatttgatctgtaacttctgcacaaataaaggtggtgagcagtctttacttaggtttttctgcacaactgattagggacgaagccagtcggtggggcgagcggggctcgacccccctacctcctatactaa

SEQ ID NO: 7767 - DNA, 845 bp, Zea Mays
gccgtgtggcacggccgggatccagctcgtcgtctcaccctcttctcctcttccaccgacggcgaccgcccccaattttctcctacccctccgccttcactgaggtccccgagatccgagtttccttgccctggtaaaccataatatcatcacgcctcgtgcccaaatcggacgcacgcactcccggtcgaattccctcgagcggagcagatttggatccggctcggccagatggatcccgaggacaccaccccaccggcgccgagccaaggtgatgcggagacaactccgccgccggtgttggaagtggcggcgggggaggacagcctagctagcgggggcgaggcggccgagcgggcccacgaggaggaggagctcgcgcgggaggtcatggagctcggcctccagaacgagtaccttaggtcccagattgctggcgtccgcccggcgggtgacgcggacgaggtccccgggcttgtgaggggctggaaggagcaggtggagaggatgagcagggaggtgcaggaacagcggctgacgcgggaggccacggagaaggccctggagcacgtcaacgtggcctatgctgaggctgacggcaaggtgcaggagcttacggccaagctggcacaagctgaacaaaaaatggaaaaggaactaaaagaacgcgatgacaaatatcttgagctggaaaccaagcttcagaggcttctcaagcgtgcaaaacaacgtatacaagatatacaaaagcaggaactggaacgtgctcgtcagcaggctagtgagggcttaagatcaatggatgctgaaagacagcagttgcggacagtgaacagcaagtgagt

SEQ ID NO: 7768 - DNA, 2183 bp, Zea Mays
cagccactttcccgcgcagcaggagaagagagacgacacagcagcttttttggtttccccttccctttccccgcgcggtgatcgctgggttctccgcgagcgaggcagagcactgcgcgtcctccgtgaccgcctggtgatcgctgggggttctggacgttggcgtttcatttggttggttggtggttggcagcagccgtggcgagatggacctgatgctgccggtgacggtgaaggaggagtggccgccggaagaggaggaggaggaggacgtggacgcggacgcggacgctccgcggccgatggaggggctgcacgaggtcgggccaccgccgttcctgaccaagacgttcgacctggtggccgacccggccaccgacgaggtcatctcctggggccgcgccggcaacagtttcgtggtctgggatccccacgtgttcgccgccgtgctgctccccaggttctttaagcacaacaacttctccagctttgtccgccagctgaacacctatgtgagtgccccaagtactctgcttgctcagttgctgtcgtgtgattttttgtttctggttggctttgtgctcgcgcgctctggttttgcagttcatctcgcctcttgcattgtggagtacagtagcatgagctatcagtcgacaagtctgtctctattattattacttaccgaaagaacaagtctgtatatatatataagcattttgtgtgattcacaatgacttggagctgatacaatcgttgaacgcgtattgcttttctttggcggcctagcaaatacaatggcaaaatgggcaaatgttttgaatggttcagaagcagaacgacaatgggggagattgcagaaccagcatctccatgacaagatgttaaattcctctgacatgctctttgttcgccttgttactgtgtagctagatggaccaggacaagggatgaacgaagctactacagcctacgagaaagaaacaaactgcttgtttgtcctaaagataaagaagactcactcctttgatcaccactcaccaccaagcaatatactgctagtggcttcagaaagatcgacccggacagctgggagttcgcgaacgaaggattcctgaggggccagaggcatcttctccggctgatcaagcgtcgaaggccggcgccaccgccgccgtacctccaggcgtcgcagtcgcaggggtcgtgcctggaggtgggccggttcggagggctggacggagagatggagcggctgaggcgtgacaagagcatcctgctggcggaggtggtgaagctgcggcaggagcagcagagcacgcgggcgggcatgcgggccatggaggagcggctgcggcacgcggagcacaagcaggtgcagatgatggggttcctggcgcgggcggtgcagagcccagacttgttccagctgctggcacagcagcaagcccggcggagggagctggagggcgcggcgctgctctccgccgcctcccggaagcggaggcggcccatcggcgccgcgccggccaacggcggcttgcagcagcaggaggaggagcagcagcagggcgacgacgacgaccccaccgccacgcgggcgctgttcgcggagctggacgagcgagggaccacgtcggagctggagaacctggcgctcaacatccaggggctcggcaagcgcaggcaggacgggagcgagaagcagggtggccgcgcgcggagccagcagcagggcgggttcgagacggcggagctcaccgacgacttttgggaggagctgctgaacgaagggatgaagggcggtgcggaggctgagacgctgccgccggagaggagacgaccggcttggtacgtcgacgcgctggcgcagaagttgagctccatgagcaataacaccacggcgaagtagagatgatcgcgttaattaatcctatacgactagtaacagtagcttaattatccctccgacaggggtcagtgaatactcttagcgatagctccattgttgtagattatagtatataggagtgggatcgtggtggttacactatgtcattttgtgcagagtgcagacgtgtagtgtatatagtattcttggtacctaccctgtgttgtacccagcgcaagtatattccacagtcgccgggccgtgtcattattgatgttctttctactttaccatc

SEQ ID NO: 7769 - DNA, 1424 bp, Zea Mays
ctcgcgtccaaccgctcaaccatctctatcttattttctacacgcgtgctcagctcttagcaaattctgggcgttcttctctctgtacgcggctgccagcacacaccgccgagtccgcgtggctgctcagccagtactgctcacgccagcacaacagtgatcagccaacacttatcctcaactccaactcgttcagccggttcttcatccgtcgtccacaggcttcagacgtagctcgccagcttcgacctccgccctgcccttgaccccactcgcccgttcttgttcccgacgctcgagctcacctcagcttcgctgtgcccctgcgttcggcctcttccctccaccagcggacgtcctcggtctcgctttcctcgccgtggcaaggccccggccacgacgtcatccccctctaagctagctgttgaagtcgtgcctcgcatacgcctattcgatgaaatgcccaaacgtcacgtccgctccttgtcccaacaccctgtcacaattccgtgcgttgccgtgtgtgtttcggaagagaggaatcccatatatgtgaggacaggcaatccgtgcaatagttgtttgatgtttggtgttatgcgcaaatcagaaatcgtcatcattatcccaaatatcgatttggtttgtgatatggtacactagctgaaaaatcgtgcgaagcgaagggtgtggatcaaaacaacccacaagacgatgtcggccgatgagcccgaagatggatggactaagcagatgtcagaacaaaagttgatcgtcaactggccttcatttaacaacactaacgtagtgttatcccaggtaagccccggtgcatttgccacctccttgttgtttttaaaacttttatcacttatgtgacagaatctcccaagtaattaggcccacctacagttgtccttgtccaacagacatcagacaaccctgtagatgttcctgaatcactcgacaagttcggtatcttctttcttacctttccaggaacgttttacccgtcttgcagacattacagaacatcggagatatagaaatgcggaagcgattacataaacttacatttatttagaaagtaagatcaagttacttattacagatatgaaacgagtgctgaatagtattattacaataccaagggaggcaaaaactcctcccgatagtttttataaagtcctaatggaggatcctttcctcccgcacttcattccttgcgttcttcctttggttatgactcaacctgataattctctgatcagtgttgagagttgctttgtgtctggctaaccaattcatgcccaaaataacatctatatcttggcctttcagaacgatcatattagtaggaaagtcccgtccggccaaagttacgggcacttgataggccacttctctagtaaatatttgtcccc

SEQ ID NO: 7770 - DNA, 4236 bp, Zea Mays
ccggaatttaacggaaacaccctctcctcgcatctgttctccctccctgcgtggatccaccgtttctttccattcccgtttccgttcctcggtcctcaccaacaaaccccttccggaactcccaagcctccgatcctcgcctcagaaacctgccggatttgcgggcctctcaggcgtcgtatggaaccagccaggtcagttcgctgcgtgtttcgcgaccgcttctcggcggcggcggcggcgctgctttgcgttgcgcgtttaatctgttcgtgggaaggcgtcacccgttcgtgctggtttcatggaccaatacgagccgcggaaccgcgatcgctgatagctctggagtcgacttgtttgtttccattcgtgttcttcggaacgcgttttcacatgtgcttaatttggtttcgtactttggttttttttttctgttccgcgctgattttgttgggaaggaaacaagatgccctcgtttttttgttcggatcggtaagagatgccaccgttcgatgccatcttttgtatgcacttcaggatttagtgtttcattctgtctatgcttttttttcctttcgagttctgtgcccgacggggacattaagcagttacagtaagcactaaccaataaatctgtcacggaacctgttagagacgtggggctaaaaagtgatttgatttttttttacctttttcatggttccagtgacatgtggagtcatgcaattgctccgtcagcgtgttctcccacctgtgaagctttgagcaatcgtactggcgtctttcactccctcactcttcttggctttgtttgattggagatagccagataggttgatgcgcatcatgatcttatttatgttcatttcttatttatgctggcacttgtgtttgctgttcttgctcatgttcatttcttatttatgctggcaataaatactggacacgagcttagcagtatatgttgcttagcacgtggctaatatttcccaaagtttgcctctccccattagaagcttcctcgctctccttatgtttgtactgagtttttttatttatttagaaacgcggcaagacaattgccgactgaaatgcactggagatgtttggccatggaacaagtacttaagtaaaaaacggcctgaaaatcacaatcttttttttcttcatctgggtggcgtatgactcactcctctataaccatcttatcgttgattagcattagaggcaataatctgattattgattagcaatggatactcgaactaacacggatagggaaatatatcttgtaatcagtctgtcttaataaatgcttacattgcagttggggtttgctgtcttcatgtttcccgaaagcagagtgttgtgtccgcatctttggttgattagtctagaaaaggtgggggggaggggggaagctttgttaagctggcttttattcgcacattagtcgattatggtaaaaattatattctatctttactttatgcgttttctcaggattagctcctcctttagcttactgaatttgtggacactttgtttggagaccatcttttcctgtattaagtttgttaggcgcagacactttttttttaacgcaatgcacatacacttttcgtgtatggtctggtggcaatgatttaaatggagcgggatagacattaggtttgttaatcagtggacagtctgttgctgttcatgacaggtgggaaagttgagcgaagctgaaaccgtgtcccttattttgcaagggtggtgctcataaggaaccacccccctcttctttgctggtgggagaacaccaaatggcccagctgttgcaccatcaggattctgcattctacagcaaggaattgcacgggtgccggtggggtattcttcaattctttgggtttcgccgtcgcctacggtccacaaagatgctctctgacaagagacatggtcaggagaaaaacagccgtggaagtagacgccgaagcagctcctatgctccattgaagaacgaagacagtgcaattctggatgatgaggaaaacactgaggtatatcaggttacaaaaaaacagaaggcctcaaaaaggaattctggcaagtctagtttgaggtccttgattctaacgaagttatatggaaaggaaggccagaaagagaagatgcttccggttgcaccaaagctactccgcactatttcgatacactatctggaaagcaatgaatacgttcttgacggcgaatccacttcgagcggcgatggttcttcaaacagtactaagccgccgatgcaaaatgctggcgatatgatgaatctgcaccatgctacatctagcgtcccagatggctgtggtgtcgattcaagctcctcacttctcctaaagatagacgacgtccgtacgaagcgaaagaagagccaccgtagcatttcgatggacgggattcttcacaaggtcccctatgggaagaaggtgtccggagatgtgatcagtgaaggtctcccccgatcagcctctgccacgtacgatagggacggcgcgaaaccttactttggtggtgctgctgcaaagaggcatgcaaaccaagggtttcggcgttcacgttccctcagtgaatcctgggaaaactactcgcgcctacttgattccatctcgagtggtgagtccaaaagaacactggccagctctaagtctaccagggatcattccctagatggccctgtcgcgagtacttcattgcaaagaacttctgaagccttgaggtctcaaggtctgggtaaacgtgatgagaacctcgtgactgcagaagatgcgttggcgccacatgttcaagagaaaactggtgaagttgctaagggtcagagctccagcgatacgatggtcgctggtggctctgaaaatcctgctttacctgacgagcacgttgacgacaaagctgaagaaaacacatgcgctgctccttcaccttcagaagctgtcggtatctcagaagaacaggcagtgagtcgtgacggtaacagtcagactccctcacctgaagttggcataccagaagaacattctgcagaagcttatgatgatggtgatggtcagatccactcgtcaacacaggctgctgatgcatatgctgctctgtcttcagaggagaccaccgtttcagaagaacgtactccagtttctcatggcaaccaaacgcacccgttccatacttcagagccaacagaaggtacgttgttggacttggacccaagagttgtccattcaaatgacgctgacgcttcaaccggcatcgctgccgtagaacaagaaagcggcttcgacggcctccaagtagacccaaggcacgagaccgagttccgctacgtgaaggagatattcagaaagtcgagcttcagcaccgagacgctgttcgacgaatggtgctcacagaacatcagtgtcctccaggaagcggattgccagcactacgaggccgccgcggcgtcgtacgacctgtcggcggacatgtcggccgagcagctgctcctgttcgacctgacgaacgaaggcctgctggacatctacaggaggcactccgtctccaggtctaggctctcctggttctcgtctttcgaccggccgagacctgtggggagccgtgcgctcggggagctgtggtctgggctgagcctccgtctggacggacggcggccacgggccagcgtccacgtcgacgcggttctgtcgagcgacctagcgaagagcgacccctggacggatttcccgcggggcgctgagcgtctggggagcaggctggcggactctgtgtttgacgagcttctgagtgagctcgttcagcagctcgcggagctttgagtgcgggcaacaaggcgtctgtttttttgtgcctatttttcgtgtttaggggggttctatattgtaggtactagttcatttcttttttaggacaagataatctggggattattgttgttgttattaggtcttaggaattcaattcgtgtgctggaaaagttttgcctgatgcactgatgggtgctagtgtaagtgctgactgaaagagcaacatttgtacgtacaccttcgagagagagagagaaaaaaaatgtatgtatatatagtcttggaaatgaaggttacgaaatagaaatttgtggagcaggcaaaggtgaaagtgaaacgcgaaaagaaacgattgaaagtgaaacgcgaaaagaaatttctggtcccaagtcac

SEQ ID NO: 7771 - DNA, 2854 bp, Zea Mays
ggtgcggaggaaccagtctaagccaccacccaggcccagctcacctctttcctctcttctcatgcccacgcgctcgcctatctcatagtccttccccattccgcctctctagctggcctgtcgaggaccctcgccatcctccccaggcgcaccaccaaacggtccaaacccccagcggcggcgctaggatttgagtctcagcgcgccggcaccgccaccgccaccggcggtgatggcagggcaggagcgtaggacaatcgatctggaggagggatgggcgtttatgcagaagggtatcaccaagctgaagaacatcctcgagggcaagcccgagcctcagttcagctccgaggactacatgatgctctacacgacgatatacaacatgtgcacgcagaagccgccgcacgactactcgcagcagctctacgacaagtatcgggagtcgttcgaggagtatatcacctccatggtactaccttcgctaagggagaaacatgatgagtttatgctgagggagctagtgcaaaggtggtcaaaccataaagtcatgatatatcaagagattaaagggcaagttaaagatgcggtgatagctctgatagacaaagaacgcgagggtgaacagattgaccggggtctgttgaagaatgtattggatatttttgttgaaattgggctgggtcaaatggagtgttatgagaatgactttgaagatttcttgctcaaggatactacagagtactactctgtcaaggctcaaagctggattcttgaggactcatgcccagattacatgattaaggctgaggagtgtttgaagcgggagaaggagcgggttggtcactatttgcatattagcagtgaacaaaagttgttggagaaagtgcaaaatgaattgcttgctcagtatgcaaccccgctgttggagaaggagcattctggatgttctgctttgcttcgtgatgataaggttgaggacctttctaggatgtacaggctcttctccaaaatcagccgcggtctggagcctatttctaacatgtttaaaacgcatgttacaaatgagggcacagccttggtcaagcaagcagaagattctgctagcaataagaagccagaaaagaaggatatagttggcatgcaggagcaggtctttgtgtggaaaatcatcgagctgcatgacaaatatgtagcttatgtgacagaatgtttccagggacatacactcttccataaggcacttaaagaagcctttgaggtcttctgtaacaaaggtgtctctggcagttcgagtgccgagttgttggctaccttctgcgacaatattctgaagaaaggttgcagtgaaaagctcagtgatgaagccatcgaagatgcccttgagaaggtggtgagaatgcttgcatacatcagtgataaagacctgtttgccgagttctataggaagaagcttgcaagaagattactttttgacaaaagtgctaatgatgagcatgagagaagtattctgacaaagctcaaacaacagtgtgggggacagtttacttcaaaaatggagggcatggttactgaccttactgtcgctagagatcatcaaactaagtttgaggagtttgtagctggacatccagagttgaatcctgggatagacttagctgttactgttttgacaacgggattctggccaagctacaaaacttttgacataaaccttcctgccgagatggtgaaatgtgtagaggttttcaaggagttctatcaaacaagaacaaagcacaggaagctgacatggatttattccttgggaacctgcaacatcaatgctaagtttgatgctaaacctattgaacttattgttacaacatatcaggctgcattgctactactgtttaatggatctgacaggcttagttattctgagattgtaacacaattaaacctgtcagatgatgatgtagtgcgtttgctccattctctttcttgtgcgaagtacaagatccttaacaaggaaccggctagtagatccatctctcccaatgatgtttttgagttcaattcaaagtttactgacagaatgagaagaatcaaggttccactccctcctgttgatgagaagaaaaaggttgttgaagatgttgacaaagacaggaggtatgcaattgatgcatcaattgtgcgcattatgaagagccgcaaagttatgggtcatcaacagctggttgctgaatgtgttgagcagctgagccgcatgttcaagcctgacttcaaagccataaagaagaggattgaggatctcattacaagggactacttggagcgcgacaaggacaacgctaatacgtacaaataccttgcctgattggtggtcagtggcaaaagtccaaaacagctcccagactagtgcaataccacgggggtggcgatctcctgcaaggtggtggtgcgtcaacttttaccatgatttgaggtgcgttatggtgatttgcgtgcttatgggtcctgccacagcaagggctgctcgcatttgtaaattggccgttaaaatagacaatcttgacctgcattagatgatatgatgatgatatgaggaataggagaggcactcaagtacttgtttgccatctatgccaatgttttacctatatgtctgtatcaatgtttcagttaactgagatgagattatgcttgggggttgctttgctatatgaaatgagtggatactatgcgaatttgcagtatcggtttgtatctgaatgtaccttccatatcatgccttgcatgccatggacacagtcaatcttcttcagacatcattaattactaaaaagaagcatatataaatataaaagaa

SEQ ID NO: 7772 - DNA, 896 bp, Zea Mays
gagaaatatgacaaggcagattggtcatccatgaatactagaactttttgtgaaatatgtgttgaagaggttgaagctggtaacagaccaaatggaacactaactactgcagcgtataaaaatatttgtgttaagtatcgacaaagaactggtttgcttcacagcaaaactcaattgaagaataagtgggatttactgaaagggctttacagtttttggcttggtctaaacaaagatacaggacttggatgggattctaagctagggactgtgattgcaagtgatgaatactggaagaaaaatacaaagtggatggatctacatcatgcgctccaggtgaattttatgatgtggaaaatcatgagactgaggttgatggtattgatggagttgattttggcacatttgaggcagactgtgatgctcaatatgatgaatttgcgtctccttttgctagtgccagcaagtcaactcagtcgaagagaggcggctcaactcagtcaaagaaaagagctagtcctactgttgttaatagcccactgaagcgctcaaagaatcccatggttaaggtcatgaataagattcataatactttggagatcaattgcaatatttcaaacaaagtaatgcttggagagtataggtatgaatcaatcaagcaatgcatggaatgggctgttgagtgtggagcaactgaaggatcacttgagcatttcatggctactcagctttttgttaaggcggagcacagggatgtatttaagtcattcaaaacaaatgaaggaagacttctatggttgaagaggcactgcgctaaggatggcttatgttaggaacatctatttattttcgtgtgttaggagcatctatttactttcatgtctggaacatgtatt

SEQ ID NO: 7773 - DNA, 1673 bp, Zea Mays
atgcctccgccctcgccctcccgccaatctcgtagcagcgcccgccccatccccgcagccgtcaccagcgcgtacatagaagctgaacaccggcaacgtgttcgcggcgctcgagtccctcaagaagaagaagaagggcggcaaaggcaaggcagccgggaggaggacggcgagggggccgcgcagcggcaagagccaccgcagaagaagcagttctgggctcccgcaccacttaccaccaagtcatgggcggacgtcgaggacgacaacgactacttcgccaccaccgcgtcgccacgcctcgtctggggcactgccggtgagcccgccaaggaagaggacgacatcgatgatgttgtgcgcgccgcccttcaggaggtagcaaccttgggcaacaaagttgagaaagagatggaggacatggccttcttctttgctgaattggcgctgatgcaatacggatacggcttggtgacacgtctgccttctctggttgctgcttctgctgtctacgcggtcaggctcactgtcaagagagctccctctggaccgacgccctcaagcaccacactgttgtgtaccaggtgctcggaggagcgacccgcgaagggcagcggcagctggtcttcacctgttggttcagtgccggctggagggcaaccaagagcagacaatggatccactacaattgaaattgctctgaagattgcatttcgtaaattttctcttgatcatggaattatggccagtagtgaaaatagtacaagaaatgaaagaaacattaagttgaaggtacttgttctaaatggttcctatcatggtgatactctgggtgttatggaagctcaagctccatcgtcttatacatctttttcttcagtagccatggtccacgttcagaggcggatctgcgcggcccagttactacagcgaataggcggcccatcaggtcacgttccgtcccgacgtagagtcgccagtcctcccacaatctccagccgccactacgcctccctctagctccagccgccactacgccggtcgcagagtcgccagctgcctagacgcccggaggcccgcgggcgctccctcctgggctgctggcctccttcacattattggagccagaggagcgggcggcggcttgcactccatcccatcgcttgggtgcgtcgccccgaatccaatcgcctggtcaagtctgttgctgccggaggtagacggacgccttatcgtgctcgtggccgcagctagcgcgccggagccacagctggagcgctcgccggcgacgagtcgccgccccgcaaggagcctacgcaggcacgcaccgccacgtctaggcgccaggcggagacgttattaccacaacattaaaggagatgccttcactccagaaagcattgcctccagaacttgctgataatgtgctcaggttatatcgtgaatgcttacggagggcgaagtatattggccatcagaaacacaatacagaacttttagtcgccatggtgagacaacaattcaagaaaaacatgcatgaaactgatccagagaagatacagaaaatgaaggacgatgctgcaaggggccttatcaatcatattctatatgagtccgagaagattacaggacgcaagttttcaggatagatgatgtatttctgagcttaccgc

SEQ ID NO: 7774 - DNA, 1342 bp, Zea Mays
ctgggccgtggttgtgaccacctatacccgacagagcgaggtgtgcactgcgtttggcggggcctgcccgacgcacgccggcacgccgagccggtagcagaggatccccgttcgcctccctacaacctgacccccccacggccccacccccctccgtcggcgacagggcgagcgccgccgcccttgtcttcgccggcgacgagcatcgccagtgcctggaatttgcatctttgcttctgcttctgccggaacctcaatgctctatctgatgggcagaatgggtgtgcaggggactaccgattgcagggcggttgcggagatgggggctgatcagaaaccacgacaagccttgccattcggaactggggcttctacgacaccgtcaaaggcagcctaggcctgcagctcatgtcgtccatgccgcctgaccgggacacaaagccgctgctcccgagaggtgccttgctgcagcagcatggacatcacaatgccgcacaccagctccacgcgcagcaatcacaacatcatcgtgactatgctggcggcacatcctgacccggacacaaagccgcctgtaaagaagaggtggcaggttcggcagcctaagtcactgaagcctaggaagcctaagaaggctgctgttccaccagagaatggggcacttaatgagcatgcgccccgaaggaggggacctaagaagactgtggggatggtgattaatggtattgagttggaccttgctaacataccgacaccagtgtgctcatgcaccggagctccccagcaatgctaccgatggggcgcaggtggctggcagtctgcatgctgcacaacttctatttcaacgtatccactgccaatgagcacaaagcgccggggcgctcgaattgctggaaggaagatgagccaaggtgcattcaaaaaggtgcttgagaagcttgctggcgaagggtacaaccttgctaatccaattgacttgaagacgttttgggctaagcatggcacaaataagtttgtaacgatcaggtaaaatgacatagtatgtttctagctttgtaggttgtagagctgcagttaggcccgatttattgcttttatgtctatgtaagaatctgcagaaatttgtagtagtagtagtagcagcagcatgtagcaatgtttagttttaaatgacttagttgtaatgtctatcttgagcttcagatattgacccgactgaagcctgtttgtatccttcactttgcaaattgtagtttaccctgtacccataattgtctctaatttagggcatggaatttaatgcattaattaaatctgtgtggaagtaagcactacgtggagg

SEQ ID NO: 7775 - DNA, 1008 bp, Zea Mays
ggagaactagcaatacttgaagatgaacaaccatatttccattctagtgattctcatcgtcgatgtgtctgttgtcctcctgctcaattcccatgtagggttatgcagctgctacaaccgcatctttagttttggtgacgataccatggacactggaaatttcattcacttgattgggaaggccccatctaagtacaaggaagccccctatggcaagacattttttagacatgcaactggccgcatttctgatggtcgtgtcctcattgatttctatgctgccaagaagcaatttctaagtgattctcttgtcattatgggtggaattggtcaaaatgactactactcatatttcatcaaaggtaaacctcccaaggatggaaatatcatttcagatgtcatcgcagacataagccatttcatcgaggagcttattgtcgttaatggggcgaaagcattcgtggtcgccaataactttcccgttgggtgtttggcatcatacctaagtaggttccacagtgacgaccatgaggactacgatgagcatgggtgccttaagtcgttcaatgagttctcccaaaagcataatgagcaactttattctgccatcggacaaatcagatactcttacccaaatgtgaaggtaatctatgctgactactacaacgccaccatggaattcatcaagaagcctagtagatttggtattggtgatcctctagtagcatgttgtggcggcaatggaccataccacaccagcatggagtgcaatggcacagcaaagctttggggtgacccacaccacttcgccaattgggatggcatgcacatgacagagaaggcatacaacatcattatggaaggggtgttaaatgggccatttgctgatcctccatttccacttagttgctaggattagttacgctaggaattccttacaacatgtagccaatattttttataataatggaagtattttggatttatactacttcaaggaagaagtaa

SEQ ID NO: 7776 - DNA, 1119 bp, Zea Mays
ggagaactagcaatacttgaagatgaacaaccatatttccattctagtgattctcatcgtcgatgtgtctgttgtcctcctgctcaattcccatgtagggttatgcagctgctacaaccgcatctttagttttggtgacgataccatggacactggaaatttcattcacttgattgggaaggccccatctaagtacaaggaagccccctatggcaagacattttttagacatgcaactggccgcatttctgatggtcgtgtcctcattgatttctatgcggaagcactaaaactgccaatgataccacccattttacctgagaagaactttgggtgtttcccacatggcgccaacttcgctgtgtttggtgccacggcacgtggcaaagtcttcttttcagggagcccctggtgtataggcacacaaatgtactggtttgatcaattggtagatcgtatagctcccggagatggtaaacctcccaaggatggaaatatcatttcagatgtcatcgcagacataagccatttcatcgaggagcttattgtcgttaatggggcgaaagcattcgtggtcgccaataactttcccgttgggtgtttggcatcatacctaagtaggttccacagtgacgaccatgaggactacgatgagcatgggtgccttaagtcgttcaatgagttctcccaaaagcataatgagcaactttattctgccatcggacaaatcagatactcttacccaaatgtgaaggtaatctatgctgactactacaacgccaccatggaattcatcaagaagcctagtagatttggtattggtgatcctctagtagcatgttgtggcggcaatggaccataccacaccagcatggagtgcaatggcacagcaaagctttggggtgacccacaccacttcgccaattgggatggcatgcacatgacagagaaggcatacaacatcattatggaaggggtgttaaatgggccatttgctgatcctccatttccacttagttgctaggattagttacgctaggaattccttacaacatgtagccaatattttttataataatggaagtattttggatttatactacttcaaggaagaagtaa

SEQ ID NO: 7777 - DNA, 773 bp, Zea Mays
aatagaaaagcgacggggaaagggtaggaagaaaaaaagagaaaaaaaaacgccggaggccggagggatcacggaatctgagcccaccactcccccgcccccacttgtataaagcgaccccgataccagcccgtcatgggaagaaaaggaaggaagaagggcctcctgtatcctctcacttccctcagtcctcgtccgtctgctccctcctctctctacctagctctagctagccttcctgtagcgcggcagagatggctgcccctgcctccaccacggcggcggcggcggcagcgctgctgctgctgctcctcctgtcgctcgccgcggcggcggacatgtcgatcgtgtcctacggggagcgcagcgacgaggaggcgcggcggatgtacgcggagtggatggcggcgcacggccggacctacaacgccgtcggcgaggaggagcggcggtaccaggtgttccgggacaacctccgctacatcgacgcgcacaacgccgccgccgacgcgggcgtccactccttccgcctcggcctcaaccgcttcgccgacctcaccaacgacgagtaccgcgccacctacctcggcgccaggaccaggccgcagagggagaggaagctcggcgccaggtaccacgccgccgacaacgaggacctgccggagtccgtcgactggagggccaagggcgccgtcgccgaggtcaaggaccagggcagctgcggtcaacgctcagcggcaagcttcacgttctgcaattccgttagtcgtgcg

SEQ ID NO: 7778 - DNA, 1438 bp, Zea Mays
ctagcttctagagactttgggatttgaacaactaggcatggcaagcgctctagacacactgtgcggccaagcgttcggcgcgaggcagtactatctcctgggcatctacaagcagcgcgccatgttcctcctgaccctgtgccacgtccggttcctccagacgcagaacatcgtggtgcccgtgatggcgagcgccggcgccgccgcggcctgccacgtcgtcgtctgctgggcgctggtgtacgcgctcgggatgggcagcaagggcgcggcgctcagcaactccatctcctactgggtcaacgtggccgtgctggccgtgtacgtgagggtgtccagcgcctgcaaggagacgtggacgggcttctccacggaggccttccgcgacgcgctcggcttcttcaggcttgcggtcccgtccgctctcatggtctgcttggagatgtggtcgtttgaactcattgtgctcctctcgggccttcttcccaacccaaaactggagacctccgtgctgtcgatcagccttaacactgctgcgttcgtgtggatgatcccctttgggcttagctcagctatcagcactcgcgtgtcgaatgagctgggtgccgggcgtcctcgagccgcccgccttgcggtgcgtgtcgttgtgttgctgtctgtcgccgaagggctaggcgtgggcctcatcctggtgtgcgtgcgctacgtctggggccatgcctacagcaacgtcgaggaggtggtgacgtacgtggccaacatgatgctggtcattgcagtgtccaacttcttcgatggtatccagtgcgtgctttcaggtgtggctagaggctgtggatggcagaagatcggtgcctgcatcaaccttggcgcctactacatcgtcggcatcccctctgcttacctcatagcgttcgtcctgcgtgtcggtgggacgggactctggttgggcatcatatgtgggctcatcgtacagctccttctgctcgcgatcatcactctctgcaccaactgggatagcgaggcaacgaaggcaaagaacagagtgttcaattcttcctctccagcatccggaacgtgaacggattggcggtgaagtaaacggcgagcaaacacggaaactataggagttatgcctgtagttttggaaacttcagcacctctgatcctctccgattttctggctcccacattaactctaatggttagcattgacacttgcagtctggattttgaaacataaatgcgttccttgaacagagtaggaagggaccaatggaaaacttatacaatagtgttagatcgcatgcaacattgtcctccaaagtgacctcatcacacaacaaaacgtgggtaattccaagaccactttttcggtacaataaaactgtggtccgaatcctcacatcgggccaaatgggccagccgccagcacaag

SEQ ID NO: 7779 - DNA, 2865 bp, Zea Mays
agtttcacgatccctcctcatcaaccacacttccattctcttctcagttctcaccgtgcaggcgtagtgcgtagtgtgcagaggccaggacagaaaagagaggcagcgcagtatccatccaaccacgccgtcttccttccgccgcgagggcttccgctgcagcgcgatcgccgcattccaccctcttccttcctgggacagcagggctttggcactcgactcctccgccacagctccaaccaaagcaaagcggttttcaagcttgccagtgtcagtgcaatggtgactagcaaatcctcgtggagccaggttgtaaaaaataccaggccgacaaacctgtccgttgctgcaagaaacctccaaccacaggaccttggagccgtgatatttggttgcacaaacagtaccattcaagagtgtcactcacggcaactttttggcttgccaaaaacacatatttcatatgtacgaaacattaaggaaggactacctctcttcctcttcaattatgatgatcgaagattgtatggtatttacgaagcttcagggaatggaaaattctgtcctgaatcaaatgcatggtcacaagatagcaagggcaaaacaagctatcctgcccaggttgcaatgcgggtaaaggtgtggtgttttccgctagcagagaatcagttcagaaatgcaattatagccaattactaccagaaaattcccggtgtccctggccagaagcttcattttttcaagtttgaattggatcatgctcaaacacgtgttttgatggatatgtttactccttctccttctcccaacagtttctggacgccccctgctgcagcaccagctgacgagcatgcgaaagaattagtgttgtcacctggatgggcaccagagtgtgaagggaacaataacctcaaatcagaaaaggttgtcaagtcatatgcagacatagtgaagaagaacacatttgtggaagttgggacaagagatgtggatgtggaacatgcaggctcaggtgatgaatcttctggtggtttcgatgaactggattgtcagtacacaccaacagagagggaggactacgctctatcagatagggtggttcaagtgcaacaacagtaccctgataagcaggcagaagtgcttagctttgatcgggttttacaagggcgcatcacttttcctggtcagcagtggcattctgatttttatgccaatactacccaaactgaggataacgatgcatatagctgcgagtatgcccaagaggtcaaatatgcaattctggatggcagctctaatttgccagaaaccttagattctgaagttgataaactgtccctggggcattctgatttgctggtgcagttgttggactctgaatcatgcacagaagctaagctgattgatgcagtgaaacagttatctggacgaatagaggcttggtccaacaaagaagtcaaacatctacaagggatgaatgagaggttactgaaaagaattgttgaactaaagggaaccgttatgacattgaattctaaaatagatcctttaaccctagatgattcacttaaccagtttgtagaacaatgtttgggttcagaagatgtcatttatttagttggtggttttgatggcttctcatctttgccatcactagactctttttccccttcattggacatactaacaccccttaaaccaatggctgttggcaagtcatattcctcaactgttgcactagagggcaagatatttgttcttggtggtggtgatggtgcttgctggtttgatacagttgactgttatgaccgaagccgtgatgattggtccacatgcccatcgttgacttgtgacaaggggagccttgctggggttagtgtcaacgggagaatctatgcatttggtggtggagatggaaccaagtgtttctctgatgttgaaatgtttgatcctgtgcatggaaagtggataaagaatcaacctatgctggaaaagcgctttgctctagctggtgtagcactaaatggtgcgatttatgctgttggtggcttcaatggtgttcaatatttgagctgtgctgaaagacttgatcctcgggagcctaactggaaaatgctaccaaagatgagtgcaggaaggggctgtcatacacttacagttcttaatgagaagatattctcgattggtggatatgacactagggctaaagcaatggtgtctactgttgaggtgtatgagccaaggatgccatcgtgggtgatggttgaacccatgaactacaccagaggatatcattcttcagctgtgctcggtggctcaatattcacctttggtggggtgaaaggtgaagcagacacaatcttggatgtggtggaacactacaaggaagggtgtggctggatgacaacgggattgaagtcgattggcagaagatgctactgctcagcgattgttctctgactgtaactgccttaaaaccaagtgagaatgaggagactgataataggtaaaactaatatattaatattaggtaaaaactaagaaggctcttgcttagcctgaactgacaacactagacacgatggacctcgtagtttctgaatcggcgaactgtaaaacaaacattgagctgtttgtgttgtccgacactggatggtgggtggatgcatgcatgagtgaatcggtactgaactgatgtagagatgacacttccatggatgaatatccaagtatttgactctgtatgttgagctttttctctttccggttccagctttttactaaagcagcttgcctaaacaaaaaaaggcactgtaaatggacctgtgacatttacctgaatttgtttgtcagggcgcttaagca

SEQ ID NO: 7780 - DNA, 2841 bp, Zea Mays
tgggtgtgggtgcatcagcgtcagaatctgttggtacacaggcacaaaagctgtccgcttcgaacccgggaaggcgatcggcgtaagaatccattggagcggcagcggtttatatagaggcaaaaacccgccggccgtcaacgtccgctcgaccaccacgagggagtgggctgtgactcggacagcaccaaaacctcgcccgccatggcgtcgccgtcgtcgtctccgccgccgaagctgccgatccccggccgccgcaacatactcatcaccagcgccttaccctatgtgaataacgtcccgcacctcgggaacatcatcggatgcgttctgagcgccgacgtgttcgcgcgctactgcaggctacgcgggtacaacgcgctctacatatgcgggacggacgagtacgggacggccacggagaccaaggccatggaggaggagtgctcgcccaaggagatctgtgacaagtaccatgctatccacagtgaggtttacaagtggtttgacatagaatttgacaaatttgggcgtacatcctctcctcaacagacaacaatctgccaagcaattttccataaattgatggaaaacaattggctatcagaaaacaccatgcagcagatagacttgtagaaggagcatgcccaacagaagggtgtactaataaagctgcgcgaggtgatcaatgtgacaattgcagccacatgttgaatccaactgaactaattgatccaaagtgtaaggtctgtaagaatactcctcatattcgtgaaacggatcacttgttcttggatctccctcgaatagaagacaagttggtaaactacattaatgatacttcagtagctggtatgtggagtcaaaatgccattcaagctacaaatgcatggttaaaggaaggactaaaatcacgctgtatcacaagagatcttaaatggggagttcctgttccaattgagaagtataaagataaggttttctatgtctggttcgatgcaccgattggctacgtgtccatcacatcatcttatacacctgagtgggagaggtggtggaagaatcctgataatgtggaattatttcagttcatgggcaaagataatgtgccatttcatacgatcatgtttccttcaacactactaggaactggtgaaaattggacaatgatgaagaccatttgtgtcaccgaatatctaaattacgaaggaggaaaattctccaagagtaagggtatcggagttttcggtaatgatgccaaggataccaatattcctcctgaagtatggcgatactacctgcttatgaatcgacctgaggcatcagatacactctttacctggactgatttgcaagccaaattgaacagcgaattgttaaacaacttgggaaatttcatcaatcgtgtgctaagctttattgcaaaaccagctggggctggatatgattcaattatacccgatgctcctggtgctgagtcacatccatcgacaagtgtcattgcagaaaaagttagtaaatcggttgaacaatatcttgatgcaatggaaaaggtaaagctgaaacaaggactgaagagtgcaatgggcatctctactgatggaaatcgttatttgcaggacagcgaattttggaaactttataaggacaatccagcaagctgtgcgattgtgatgaaaacttcagttggtcttgtatatctccttgcctgtctcctggaacctttcatgccttccttttcaaaagaagtgctacgtcaattaaacctgtccccagaagaaaatatttctttcagtgaagaaaatggcgaaagtgtgaaggcaaaacccccttgggatcttgtaccagcagggcacaaaatagggaggcctgtacctctgtttgaggaattgaaagatgaaaaggtgagtgagtatagggaaaaatatgcgggcagtcaagctgagaggaactcgaaagcagtggctgacgctgaagccacaaaaattgctaaccaaacccaaagcatagcattatctggaggctcaaaaaaggaacaaaagaaacagtctggtaactcaaaatcaaaggtggctgaggcagaattatccgttgcaaagttggagattcgagtggggcttatcagaaaagcggagaagcatccagacgccgattcgctgtatgtagaggaaatcgatgttggagaggaggctccaagaacggtggttagtggccttgtcaaatacattcctcttgaagaaatacagaaccggaaagtctgtgttctctgcaatctgaaaccggtggtgatgcgtggtataaaatcggatgccatggttttggctgcttctaatgaggaccatactagggttgagctggtcgagccaccagcggatgctgccgtgggggagagggtgacctttgccgggcactccggtgagaccgaggcttctctcagtggcaagagcaaggtgtgggagaagctagcggctgacctgcgtagcaatggcgaccttgtggcctgctaccaagatgtccccttcatgacttcggctggagtctgcaaggtacagacaatagcgaatggggaaatccgctagatgacgcgatgcctgaaggcagcgtgacgccgtggcctaactgccgtctgatgttactgaagtactagctgattggttttttgttgtaaattttctccttggatctgaattttcttgtattgaaaattggcaatagagaaaacgacggtgtttaattaattctgtggtggagatgggttgccatggaatgtatgacaccgttgtcgtggagccatgcaaaccgataagctaggccttgcagattggctatggtaggaggctg

SEQ ID NO: 7781 - DNA, 2039 bp, Zea Mays
ctgcctgcctgcctcgattttttttatatgtgccccctctctccctcactgctctcgctctctcctttgcactgctcctccgacttgctcttcgcaagacggagaaacaagaaccatccctccccctaccgctgctactcatgcacgcgcgcactgcctcctggtgccgccgcgtatgatccagacatgaatagggcgcacagcagcagctccaagctcatcaacgagaagctcgtggaacaccggatctccactgcgaagcactgcccccactgcggcgagaaaatcgacagcaaaccggattgggtggggctgccggcaggcgtcaagttcgatccaactgaccaggagctgatcgagcacctcgaggcgaaagtgaaggatgaaggctcgagatctcaccctctcatcgacgagttcatacccacaatagatggggaggacggcatatgttacacccaccccgagaaacttccaggtgtgacgagggatggcctaagcaagcacttcttccaccggccgtccaaggcctacacgacgggcacgaggaagaggaggaagatacagacggagtgcgacgtccacaagggggagacgaggtggcacaagaccggcaagacgcggccggtgatggtgaacggccggcagaaggggtgcaagaagatattggtgctgtacaccaacttcggcaagcaccgcaagccggagaagacgaactgggtcatgcaccagtaccacctcggcgacctagaagaggagaaggagggggagctggtggtgtgcaagatcttctaccagacgcaacccaggcagtgcagctggtcctccgaccggggcgccgccgccactgccttggcagcaacggcggcagcggcggcggcgcaggagcagcataggagggatagtggcagtggcagctgctcgtctagggaccacgaggtgtcagccacatcgttcccagccggatacacagtcaccacggccgtcgagatgcagcagcatatgaagcagcctgcggaccatttcagcttcgcgcctttcaggaaaaccttcgaccaggaggttggtataggtggtgatcaggtgccatctaatcagcttggacgttcagagccgcatcatgccggcctggggcagcagccacacggcccggtgctcgcgacgaagacggctgtgcctgctacagctttcctgatcagtaggccatcgaaccctgtctcgactatagtgccacctgcaatgcagcacgcatcagttgttctcgatcatgatcagttccatgtgccagcaatccttctccatcaccatgacaaatttcagccacaacaaaagcttgaccgcagatctgccggcttggaagaactgataatgggctgcacgtcgtccacaagcacaaaaggagatgcttccattgctcacccccaagagacagaatggccttacacgtactggccacctgacaaccaagatcatcatgggtagtagcaacagggacctggtaaatagtggcgatgtgaatgctgaaggaacactaaccgcaaccactttcactggaatggtttttgtctgcttgaatatgcagcgttgctttcttggagaatgtacacctacaatagtggggaaagaacagagaaaaaaaacgtatctctgtagatctccctcaataaagaaatgaggataaaactagttaacagtgtgagctctccaagacagaagagacaaaatggccaacgaaaagagaagggggaaagaccgatgggaggaaaggtactgtgtgtgctgacattgaagggatcatgtgtggacagtttagatgtattagaacaccttaatcaagtataactataatcagtttacggtttatcacagttttttattcgtgctacctgttagtggcattgtttgcatgtacattaacccttttaatttcttttagtttctaaattgatgctgattttcctttggttagttcatgctaatatgcatcacgaagaaataaagttagtaagaagctcataattccttcctttttttagcac

SEQ ID NO: 7782 - DNA, 2048 bp, Zea Mays
gcagctgcctgcctgcctcgattttttttatatgtgccccctctctccctcactgctctcgctctctcctttgcactgctcctccgacttgctcttcgcgcagcaagacggagaaacaagaaccatccctccccctaccgctgctactcatgcacgcgcgcactgcctcctggtgccgccgcgtatgatccagacatgaatagggcgcacagcagcagctccaagctcatcaacgagaagctcgtggaacaccggatctccactgcgaagcactgcccccactgcggcgagaaaatcgacagcaaaccggattgggtggggctgccggcaggcgtcaagttcgatccaactgaccaggagctgatcgagcacctcgaggcgaaagtgaaggatgaaggctcgagatctcaccctctcatcgacgagttcatacccacaatagatggggaggacggcatatgttacacccaccccgagaaacttccaggtgtgacgagggatggcctaagcaagcacttcttccaccggccgtccaaggcctacacgacgggcacgaggaagaggaggaagatacagacggagtgcgacgtccacaagggggagacgaggtggcacaagaccggcaagacgcggccggtgatggtgaacggccggcagaaggggtgcaagaagatattggtgctgtacaccaacttcggcaagcaccgcaagccggagaagacgaactgggtcatgcaccagtaccacctcggcgacctagaagaggagaaggagggggagctggtggtgtgcaagatcttctaccagacgcaacccaggcagtgcagctggtcctccgaccggggcgccgccgccactgccttggcagcaacggcggcagcggcggcggcgcaggagcagcataggagggatagtggcagtggcagctgctcgtctagggaccacgaggtgtcagccacatcgttcccagccggatacacagtcaccacggccgtcgagatgcagcagcatatgaagcagcctgcggaccatttcagcttcgcgcctttcaggaaaaccttcgaccaggaggttggtataggtggtgatcaggtgccatctaatcagcttggacgttcagagccgcatcatgccggcctggggcagcagccacacggcccggtgctcgcgacgaagacggctgtgcctgctacagctttcctgatcagtaggccatcgaaccctgtctcgactatagtgccacctgcaatgcagcacgcatcagttgttctcgatcatgatcagttccatgtgccagcaatccttctccatcaccatgacaaatttcagccacaacaaaagcttgaccgcagatctgccggcttggaagaactgataatgggctgcacgtcgtccacaagcacaaaaggagatgcttccattgctcacccccaagagacagaatggccttacacgtactggccacctgacaaccaagatcatcatgggtagtagcaacagggacctggtaaatagtggcgatgtgaatgctgaaggaacactaaccgcaaccactttcactggaatggtttttgtctgcttgaatatgcagcgttgctttcttggagaatgtacacctacaatagtggggaaagaacagagaaaaaaaacgtatctctgtagatctccctcaataaagaaatgaggataaaactagttaacagtgtgagctctccaagacagaagagacaaaatggccaacgaaaagagaagggggaaagaccgatgggaggaaaggtactgtgtgtgctgacattgaagggatcatgtgtggacagtttagatgtattagaacaccttaatcaagtataactataatcagtttacggtttatcacagttttttattcgtgctacctgttagtggcattgtttgcatgtacattaacccttttaatttcttttagtttctaaattgatgctgattttcctttggttagttcatgctaatatgcatcacgaagaaataaagttagtaagaagctcataattccttcctttttttagcac

SEQ ID NO: 7783 - DNA, 2114 bp, Zea Mays
gaccgttgaacggaggcgcgtctgctctgccgcatgtattatattgattcaggtggacggtcgggtttcagagagactgctgctcaagtctttttacgtgggactgtgggagtgcagctgctgcatccatcgatcgcagcgctaggttctccagcaagacggagaaacaagaaccatccctccccctaccgctgctactcatgcacgcgcgcactgcctcctggtgccgccgcgtatgatccagacatgaatagggcgcacagcagcagctccaagctcatcaacgagaagctcgtggaacaccggatctccactgcgaagcactgcccccactgcggcgagaaaatcgacagcaaaccggattgggtggggctgccggcaggcgtcaagttcgatccaactgaccaggagctgatcgagcacctcgaggcgaaagtgaaggatgaaggctcgagatctcaccctctcatcgacgagttcatacccacaatagatggggaggacggcatatgttacacccaccccgagaaacttccaggtgtgacgagggatggcctaagcaagcacttcttccaccggccgtccaaggcctacacgacgggcacgaggaagaggaggaagatacagacggagtgcgacgtccacaagggggagacgaggtggcacaagaccggcaagacgcggccggtgatggtgaacggccggcagaaggggtgcaagaagatattggtgctgtacaccaacttcggcaagcaccgcaagccggagaagacgaactgggtcatgcaccagtaccacctcggcgacctagaagaggagaaggagggggagctggtggtgtgcaagatcttctaccagacgcaacccaggcagtgcagctggtcctccgaccggggcgccgccgccactgccttggcagcaacggcggcagcggcggcggcgcaggagcagcataggagggatagtggcagtggcagctgctcgtctagggaccacgaggtgtcagccacatcgttcccagccggatacacagtcaccacggccgtcgagatgcagcagcatatgaagcagcctgcggaccatttcagcttcgcgcctttcaggaaaaccttcgaccaggaggttggtataggtggtgatcaggtgccatctaatcagcttggacgttcagagccgcatcatgccggcctggggcagcagccacacggcccggtgctcgcgacgaagacggctgtgcctgctacagctttcctgatcagtaggccatcgaaccctgtctcgactatagtgccacctgcaatgcagcacgcatcagttgttctcgatcatgatcagttccatgtgccagcaatccttctccatcaccatgacaaatttcagaacatgcaccaacagccacaacaaaagcttgaccgcagatctgccggcttggaagaactgataatgggctgcacgtcgtccacaagcacaaaaggagatgcttccattgctcacccccaagagacagaatggccttacacgtactggccacctgacaaccaagatcatcatgggtagtagcaacagggacctggtaaatagtggcgatgtgaatgctgaaggaacactaaccgcaaccactttcactggaatggtttttgtctgcttgaatatgcagcgttgctttcttggagaatgtacacctacaatagtggggaaagaacagagaaaaaaaacgtatctctgtagatctccctcaataaagaaatgaggataaaactagttaacagtgtgagctctccaagacagaagagacaaaatggccaacgaaaagagaagggggaaagaccgatgggaggaaaggtactgtgtgtgctgacattgaagggatcatgtgtggacagtttagatgtattagaacaccttaatcaagtataactataatcagtttacggtttatcacagttttttattcgtgctacctgttagtggcattgtttgcatgtacattaacccttttaatttcttttagtttctaaattgatgctgattttcctttggttagttcatgctaatatgcatcacgaagaaataaagttagtaagaagctcataattccttcctttttttagcac

SEQ ID NO: 7784 - DNA, 598 bp, Zea Mays
atgctggctaggacctaggagcgtgcggggccaccaaccgatgcgtccgtcccgtccacaccagtacaccaccatcccccaccggccaccacttctgctccgcgtccgcttttcagctctccaccgctatctcgcacgtcgctccccaaatcatcccatcctacgcccgcggccgtggcaccgaatcccagaagcgtctagaagggggaggtggtcgcccatgaccgtctgaccggccgtcgccatgggatgcgctggatccactccaaagactgacgttcatttgtacattagttggcgtcaaataaaaaaggatggaggtagtacaatatactacaattgaaactaatatcttgaaaatcagataatggtaagaatttgaagaaaccaaagccttggaagcacacccaagcaataacgccggcacaactcagacagatgcgtgatgaattttgggacactgctcctcactatggtggacagaaagagatttgggacgcacttagagccgctgcagactctgacctagcgcttgcgcaaaccatagtggatagtgctggcatcatcgtatcgaatctgacagacgaatctctagaat

SEQ ID NO: 7785 - DNA, 1387 bp, Zea Mays
cggaggccacaggacaaggtcgagcgcgcaaacgagaggcagtggcgcaccgcggccttatccgcagcgtccaatccccgcgcgtcttcacgccgcgccacgccgtccgggccatgggccaccaatggcgacccccaccgccaccgcactcacctgctcctgccgcccttcgtcgccctcctcatcatccgccgccttccgccggctgaacatcttcgcccccgtctcgggcgcccattctcctcctcgacgccgcctccgtctcgcgccattgcacgtcgtcgacgactccaagaacccccccgaggagaggtctgagacggataagatggtggacggcatggacttcggggagctctgcagcgacttcgagtgcataagcagcccctacgtggagtcgacggcgaggcaggtcgcgcgggacatcctggagctccgcgaggacaaccgcgcattcaactgctacgccgtctccgtcaagtacaaggacccactcaggacatttgttgggcgtgagaagtacaggaggccgttgtggatcaccaaggcgttggaaaaccctgtagtggaaatgtcaatgcagtcgacgagcaacctgaccatcagatgggcgttgagagggaagcctaagaacccgttgttcgcgagcgtcggaggagacgtcatcgtccgcgtcgagtcacggttcgtcctgaaccagataagcgggcaggtgctggagcaggccgagtcctgggacctctccgcctcgtccctccctgcccaggcctacttctggctgtcccgaagggtctactccgccgtggagtccgggaaggacgcgatcgaagccgccaagagcgcggcgtcgtctgggctgacgaccaagggagaccagaatctcgaggcctatccggatccttctgctgatcctacaaagttctttcagaggccggatgatgggttcagccaagacgtgtaccagatcggccttctcctggccgtgatctacttcattgtacagtttctgaaggcgaccctgtgaccggctgcagcctgtcgaagaatgtagcctgtgtgcagtatacatgtatgtaactatgcctagcaacattataaaatacgggcatatatcatcctgccatctgacctgcgacagatttgtgacctttcaccactgctgtcggtgatattagtttggcacgcaagttgccaatttacaggtgttaaacttgacatcggccgccggtcgtgcttatctttgcgtagcaagctcgagcacttggcgtctgcatccgccgcgctttatgttgaactccaggtagatgggcaggcaggctcatgctttatgttgaactccccgaaaacgaccattcgcaaccgaacttccgggctgggctgcccttga

SEQ ID NO: 7786 - DNA, 1744 bp, Zea Mays
aaaaacatttctcgaaccatataaatccaggaaccacccccgtgatttcgaaaatccaatctcgagctccctttccctctccactgcgactgcagcgtgctcctgttctcgattctcgaagcctgtatccgtctgtcgagccatggcgaagggaagggcacacccgtcgaagcgacccacccaccaacttctcgcggctgtcctatccgttttcgttctcctcccgctgctcgtgccggcggcggcaactgtggctgtggcggtggcggtggcggaggggggcgggaagcagttggcggtcgggaaggacgagggaaaactggtctcggagggggatgctggtggaggcgggttagtggaggagaatgaattcgcgggtggctttggctccctcgacagcatgctgcagtgggcgatcggaaattctgatccggagaagctgaaagagggggctgctgatgtgcagaagttatctgcagatgaactgctcgagcggcgtcaggagatcaaggagttgatggagaagttaaagatgccatcagacgctgacttaatgaaaatcgcaattgatgacttaaataattcttccatttcactggaggatcgccaacgcgcactgcaggaacttttagttcttgttgagcccattgacaatgctaatgatcttgaaaaacttgggggcctccttcctgtgattcaagagcttaataatgcaaatgaagaaatacggaccacctctgcatgggtccttggtacagccagtcagaataatgaacttgtacaaaaccagatccttggttatggagctttggtgaggttggtgaagatgggttattccacatctacagaagaagctgcaaaagcattgtatgctatatcatctttgatcagaaataatgtaaatggtcaagaagcattccattcagaaaacgggagtgcaatgttgcagcacatattggtcagcaacaatattgatgttaggctacagaagaaggcagtgtttttagtaacagatttggcagactttcagctaaattccggaatcgcgcaacttcctttcttgagtgaccgtctttttctgaagtcaatagtcgatatgttatcaaggtattattggccatcaagagtctgctgaaactttcctcaactgatgtggaggattttgagttctatgatctcgatagtgtactgctcagactaggggtacagttggaggacttgacaccagaggatcaaaaggagttcgctgtggaggttgatgccctccggagagaagttcaaacactcttccaacagaagctcaagcagggtaaagcgacctcgacatgatgttcggatgaccaccagaagatttgcccgtctagatggaagtagaatggatcagcttttgtgggatgctacagctagatggcggacttgggttttcttcttgcactttggcaaggtacatgagggcatgataggttaggaagtaaggcacgtgcttatgactccattttggcaaaactatatgattctcgcaacgttctgtgatatgggcactgcaacgaaggaattttttttccttgttccgttgcagctgtagcttcattttgagaatgattgaacttgatgttgatcagatcatttgcgagggagctaaattgagaatcgctgtctgactatctacctactgtttgctgtttcacacgtgtgtcgtactgtagccacaagtcctggaacaaaacagcagggtgaatccttt

SEQ ID NO: 7787 - DNA, 1698 bp, Zea Mays
gtcgctgctcgcttcgcatcaaccgtatccgcttcttgggaaggctccatgcctcgccccgccgcaacaaactcctccgctccacacctctcaccaagaccgccccttccctgcccgcacacggcggcgccccaatctctccaccacgtgtgacggcgacggcgccccatccctctccagcgcgcgtagaggcggcgtccctccctctcccgtgcgtggcggtggccggatgcggtggaggcggagggtatcgccatcggcggtagcggcggcggcggaggaggcggcgccatgaggggggcgcgggcgggagtgggcgctggctgcggcggcaggaggtgggacagcgagcctgtgagctctcaagataatttccaggcttcagaactttgacaggagcagtgttgcatctgttgtcacagctgcagataagggaggtgcaacccatgttgacatagcatgtgacaaggacttagtaaagcttgccatggatgttaccaaccttccggtaagctatccattcatagggtgattggaacctgtggttgtaattgccgttatggtttcgcctagcatcagagttggttgtgctaagtgcatttctggggaaaactgcatattgcagatctatgtctcatttgtagatccttcagcgttccattctgcagtacaagcaggagctaaaatggccaggcactaaacttccgatgctaaccatgcaaaaatttcaaaagaaagtcatttttctataacatatgtttgcacccttaaaccatctttctttatggtctgttttatttggtaatttatctatctgatcagttttcaattttgtatcgcatttcaaaattttcagaacatagggagcatcagcatgcttggtagttggcacttcttagtcttaatttgaatgtgttcacagctatactgatatacaattctccaaattgttaatgaatatgttctcaacaagtatgatattgcatcaattggatttaggaattatgaataagtatattattgccctagcattctgaactctgtacctaaatttagctttatttctctaagcctgtttcattcagttaccttggccgcaacagttgtaaagtaaaactgaatgctactaaaaacattagttctatttttatgtattttgattgttccaagcagcataattaattacatagtgattttgaagtgttcttttcagttagtcagtactttgatgtatatcaggattaatctctggtgtttaatacagtgttttgtagcgattaatggtgttgtctcaatgaactcatacatgcgttttcttcgatcgtaccaggaatcgaatgttgctggttagattcatttatgttctgttcgtgctcatggtgtcttgtagaatagatagagtgtatgcctgtgttctctttggaaagtgtattttggtgcaacaacctctattttttgaactcaggttgatgcttctgtttttgaatgtttctccacatataatgaatatgggttgggtttagaaggtgctagacagagaccgattttttaaggttgacagcctaattatgaggcatacaattttttggctctcctgtatgacatttcatggaaacaataattttctctgtatcgatgtttgaaagaccgtaactatttgttgataagctctagatggtgttggttgacctcttactg

SEQ ID NO: 7788 - DNA, 1818 bp, Zea Mays
gtcgctgctcgcttcgcatcaaccgtatccgcttcttgggaaggctccatgcctcgccccgccgcaacaaactcctccgctccacacctctcaccaagaccgccccttccctgcccgcacacggcggcgccccaatctctccaccacgtgtgacggcgacggcgccccatccctctccagcgcgcgtagaggcggcgtccctccctctcccgtgcgtggcggtggccggatgcggtggaggcggagggtatcgccatcggcggtagcggcggcggcggaggaggcggcgccatgaggggggcgcgggcgggagtgggcgctggctgcggcggcaggaggtgggacagcgagcctgtgagctctcaagataatttccaggcttcagaactttgacaggagcagtgttgcatctgttgtcacagctgcagataaggtgtttaaccaaaatttgtctaaatcggtggaaataaagctgttattggtctactcaaccttattcatgatcatgttacaagtccattacttgtaagccaccataacaaacttgctgcagggaggtgcaacccatgttgacatagcatgtgacaaggacttagtaaagcttgccatggatgttaccaaccttccggtaagctatccattcatagggtgattggaacctgtggttgtaattgccgttatggtttcgcctagcatcagagttggttgtgctaagtgcatttctggggaaaactgcatattgcagatctatgtctcatttgtagatccttcagcgttccattctgcagtacaagcaggagctaaaatggccaggcactaaacttccgatgctaaccatgcaaaaatttcaaaagaaagtcatttttctataacatatgtttgcacccttaaaccatctttctttatggtctgttttatttggtaatttatctatctgatcagttttcaattttgtatcgcatttcaaaattttcagaacatagggagcatcagcatgcttggtagttggcacttcttagtcttaatttgaatgtgttcacagctatactgatatacaattctccaaattgttaatgaatatgttctcaacaagtatgatattgcatcaattggatttaggaattatgaataagtatattattgccctagcattctgaactctgtacctaaatttagctttatttctctaagcctgtttcattcagttaccttggccgcaacagttgtaaagtaaaactgaatgctactaaaaacattagttctatttttatgtattttgattgttccaagcagcataattaattacatagtgattttgaagtgttcttttcagttagtcagtactttgatgtatatcaggattaatctctggtgtttaatacagtgttttgtagcgattaatggtgttgtctcaatgaactcatacatgcgttttcttcgatcgtaccaggaatcgaatgttgctggttagattcatttatgttctgttcgtgctcatggtgtcttgtagaatagatagagtgtatgcctgtgttctctttggaaagtgtattttggtgcaacaacctctattttttgaactcaggttgatgcttctgtttttgaatgtttctccacatataatgaatatgggttgggtttagaaggtgctagacagagaccgattttttaaggttgacagcctaattatgaggcatacaattttttggctctcctgtatgacatttcatggaaacaataattttctctgtatcgatgtttgaaagaccgtaactatttgttgataagctctagatggtgttggttgacctcttactg

SEQ ID NO: 7789 - DNA, 1633 bp, Zea Mays
ggcgggtggtgcaggtacgtggagtgatgggaagctgatgaccaggataggaaaaaacactgatggtgttcaggctgttatgaaaacatttgttcactttggagcccctccaaacattttagttgatgggaaaccacacttgggtactgataaacttgttccactgctgcgaaaattcaggcatcacttaagagagttgggtgttaccataagatttaatgctagagtagatgaccttatagtagaagatgggcaggtaaaaggaattgtggtctctgatgtggaactacagccaggtcctgccagccagaaactagcatttgacgcagttgtaatggcagttggtcattcagctcgtgacacatacagtatgctttggcagcataatgtagacatgagcccaaaaagttttgctgttggcttaagaattgagcatccccaagaattgataaacagtatccaatactctgaactggcagctgaagtacaaagaggacgtggacggattcctgtggcagattacaaaatagtgaagtctgttggtgaaagagacgcagagaatgaacttgacatagctgagccaactcgcagttgctactcgttttgtatgtgccctggtggacaggttgttctaaccagcacaaacccatcagaattgtgcatcaatggcatgtcgttctcacggcgtgcatcaaagtgggcaaactcagctcttgtagtcactgtatcatcccatgatttcaagccatttcaatcccatggtcctcttgctggcgttgaattccagagacaatttgaaagaagagcagctatgatgggtggagggaatttcgttgttcctgcacagtgtgtcaccgattttatcagcaacagactgtcagttacaacactgccaccatcaagctatagattaggagttcgtccatctaatcttcatgagctattccctccttacataactgaagctttacaagagtcactaataatgattgatagagagatgccaggctttgtttctagcaaggccctacttcatggtgtggagaccaggacaagttctcccttacaaatttcacgacatggagaaacatacgaaagtacatcactgcgaggattatatccaactggggaaggtgctggctatgctgggggcatcttaagtgctgctgtggatggtatgtattgtggttttgctttagctaaacaactttctttattccatggcgatatagagccatttctaggcaaaacacaaaaacaaacaggttttataaagtattgaatggactagtgcttggtattttgttgttccaattttttgggggaaaagatcgatgtcattatagctttaaccataggatatttttgtcatgtttagagcagctgtgattgccttactaaattcatcagctaatttgtgcacggttgatgtagaagggtagagcaaggcattgatgttgtaggagaggttctggtataggtatagctatgtaacaaataatttataacttcctatgtgatgccaccttaattttgtcaagataattcaccaagcataataccatatattctcttgtgtgatggattgatgaacattaatgtgaagaagattacaagctcaagtattaactga

SEQ ID NO: 7790 - DNA, 2445 bp, Zea Mays
cgccactcttatccacagggccgcgcaagcgctctggcttcttccagtccagtccaccatccgcgccatggcgatggcgttcgcggctgcctccgcctggagcctcagtcttacagccttctccctcccgctgccccagtctctgcgcccgaaacctagccaactcctccatggcgcgaccagctcgttcccgcggccacgccgatgcgggtggggcgccgtggtgcgctgcgcgaagcgcacggggaagcagcggtacccgtcggagaagaagcggttgaacaggcgaaaacaggagttgctacgccaggccgccccggaggaggggagcaaggggcgggagtccgggtactggcggctctcgaagctcgctgttcccgcccgcgacgacccaggcaaggacttcaccggcatctccctgccgctactccaggccatcgccaaagccatcaagttcccggttccttctatgctccctgacgaggctttcactgtcatccgcaagtcatttgacgcacgaaaggttttgaaagaacctcaattcacttatattgttgatatggatgttaagaagattcttaatattgagccaagggcatgggattttattgctcggttggagcccaaacttggagttgtggaatacatgaccgaagagaagttagcagttgatctggtcagcatgctaaatgtgaacttggtgcagaagttaccttattggagcgtggtcagcctgttgaacagagaggtcgtgacattggtgcactagcagttagacgaattctacaaccagagagcaacttttgctttggcgagggtggtgcaggtacgtggagtgatgggaagctgatgaccaggataggaaaaaacactgatggtgttcaggctgttatgaaaacatttgttcactttggagcccctccaaacattttagttgatgggaaaccacacttgggtactgataaacttgttccactgctgcgaaaattcaggcatcacttaagagagttgggtgttaccataagatttaatgctagagtagatgaccttatagtagaagatgggcaggtaaaaggaattgtggtctctgatgtggaactacagccaggtcctgccagccagaaactagcatttgacgcagttgtaatggcagttggtcattcagctcgtgacacatacagtatgctttggcagcataatgtagacatgagcccaaaaagttttgctgttggcttaagaattgagcatccccaagaattgataaacagtatccaatactctgaactggcagctgaagtacaaagaggacgtggacggattcctgtggcagattacaaaatagtgaagtctgttggtgaaagagacgcagagaatgaacttgacatagctgagccaactcgcagttgctactcgttttgtatgtgccctggtggacaggttgttctaaccagcacaaacccatcagaattgtgcatcaatggcatgtcgttctcacggcgtgcatcaaagtgggcaaactcagctcttgtagtcactgtatcatcccatgatttcaagccatttcaatcccatggtcctcttgctggcgttgaattccagagacaatttgaaagaagagcagctatgatgggtggagggaatttcgttgttcctgcacagtgtgtcaccgattttatcagcaacagactgtcagttacaacactgccaccatcaagctatagattaggagttcgtccatctaatcttcatgagctattccctccttacataactgaagctttacaagagtcactaataatgattgatagagagatgccaggctttgtttctagcaaggccctacttcatggtgtggagaccaggacaagttctcccttacaaatttcacgacatggagaaacatacgaaagtacatcactgcgaggattatatccaactggggaaggtgctggctatgctgggggcatcttaagtgctgctgtggatggtatgtattgtggttttgctttagctaaacaactttctttattccatggcgatatagagccatttctaggcaaaacacaaaaacaaacaggttttataaagtattgaatggactagtgcttggtattttgttgttccaattttttgggggaaaagatcgatgtcattatagctttaaccataggatatttttgtcatgtttagagcagctgtgattgccttactaaattcatcagctaatttgtgcacggttgatgtagaagggtagagcaaggcattgatgttgtaggagaggttctggtataggtatagctatgtaacaaataatttataacttcctatgtgatgccaccttaattttgtcaagataattcaccaagcataataccatatattctcttgtgtgatggattgatgaacattaatgtgaagaagattacaagctcaagtattaactga

SEQ ID NO: 7791 - DNA, 2462 bp, Zea Mays
cgccactcttatccacagggccgcgcaagcgctctggcttcttccagtccagtccaccatccgcgccatggcgatggcgttcgcggctgcctccgcctggagcctcagtcttacagccttctccctcccgctgccccagtctctgcgcccgaaacctagccaactcctccatggcgcgaccagctcgttcccgcggccacgccgatgcgggtggggcgccgtggtgcgctgcgcgaagcgcacggggaagcagcggtacccgtcggagaagaagcggttgaacaggcgaaaacaggagttgctacgccaggccgccccggaggaggggagcaaggggcgggagtccgggtactggcggctctcgaagctcgctgttcccgcccgcgacgacccaggcaaggacttcaccggcatctccctgccgctactccaggccatcgccaaagccatcaagttcccggttccttctatgctccctgacgaggctttcactgtcatccgcaagtcatttgacgcacgaaaggttttgaaagaacctcaattcacttatattgttgatatggatgttaagaagattcttaatattgagccaagggcatgggattttattgctcggttggagcccaaacttggagttgtggaatacatgaccgaagagaagttagcagttgatctggtcagcatgctaaatgttagtagcaaaggttccaataatgtactaggaattagagacactcatagtggcatgatttatcgtcaacaaaagaagcccagagtggcagttataggaagtggaccatctggcttgtttgcttcccttgtgctaggtgaacttggtgcagaagttaccttattggagcgtggtcagcctgttgaacagagaggtcgtgacattggtgcactagcagttagacgaattctacaaccagagagcaacttttgctttggcgagggtggtgcaggtacgtggagtgatgggaagctgatgaccaggataggaaaaaacactgatggtgttcaggctgttatgaaaacatttgttcactttggagcccctccaaacattttagttgatgggaaaccacacttgggtactgataaacttgttccactgctgcgaaaattcaggcatcacttaagagagttgggtgttaccataagatttaatgctagagtagatgaccttatagtagaagatgggcaggtaaaaggaattgtggtctctgatgtggaactacagccaggtcctgccagccagaaactagcatttgacgcagttgtaatggcagttggtcattcagctcgtgacacatacagtatgctttggcagcataatgtagacatgagcccaaaaagttttgctgttggcttaagaattgagcatccccaagaattgataaacagtatccaatactctgaactggcagctgaagtacaaagaggacgtggacggattcctgtggcagattacaaaatagtgaagtctgttggtgaaagagacgcagagaatgaacttgacatagctgagccaactcgcagttgctactcgttttgtatgtgccctggtggacaggttgttctaaccagcacaaacccatcagaattgtgcatcaatggcatgtcgttctcacggcgtgcatcaaagtgggcaaactcagctcttgtagtcactgtatcatcccatgatttcaagccatttcaatcccatggtcctcttgctggcgttgaattccagagacaatttgaaagaagagcagctatgatgggtggagggaatttcgttgttcctgcacagtgtgtcaccgattttatcagcaacagactgtcagatgccaggctttgtttctagcaaggccctacttcatggtgtggagaccaggacaagttctcccttacaaatttcacgacatggagaaacatacgaaagtacatcactgcgaggattatatccaactggggaaggtgctggctatgctgggggcatcttaagtgctgctgtggatggtatgtattgtggttttgctttagctaaacaactttctttattccatggcgatatagagccatttctaggcaaaacacaaaaacaaacaggttttataaagtattgaatggactagtgcttggtattttgttgttccaattttttgggggaaaagatcgatgtcattatagctttaaccataggatatttttgtcatgtttagagcagctgtgattgccttactaaattcatcagctaatttgtgcacggttgatgtagaagggtagagcaaggcattgatgttgtaggagaggttctggtataggtatagctatgtaacaaataatttataacttcctatgtgatgccaccttaattttgtcaagataattcaccaagcataataccatatattctcttgtgtgatggattgatgaacattaatgtgaagaagattacaagctcaagtattaactga

SEQ ID NO: 7792 - DNA, 4037 bp, Zea Mays
cgcgaagcaaaacagcgagaaagctccgtccatagaagtgctagaacgccagaacccgccgccggcgaacccgaagactgcgcccagctatggacgcgccgggagagctgcagtgcgtgggcaggctcgaggtcgccgcgccgccgccggcgcgctaccttcgcgttggctccctccccgtccccaccgactcctctgcctctctcccagtcctcctgccttctccgtccccgattggtgctccaaggtatcaaatgctgccattagagactgatctgaacacactccctatgattccaaacatcccagagaaggttttttcaagtgatgctaagagtactgaaggattacggtatgacagtggtcatatcaaccagaacttatcaaggaagtgtgaagcattagctgtgtcaggtttggcagaatatggtgatgaaatagatgtgattgccccagctgatatcatgaagcagattttcaaaattccatactccaaggcacaagtatctattgctgtaaaccgtataggagatacactcattctaaacacagggcctgatgttgatgaaggtgaaaagatattcagaagacaaggtaaccagcctaaaggatctgatccatcaatatttctgaacttcgcaatgcactctgtgcgagcagaagcttgtgattgtcccccaagtcatcaaccttcacagaagaagcaaacagcatctgcagtattgcgtggatcttttggctgtgacgagggttcttttgattcatccccatcatctagttttagcacatcaccttatctggatcagaatgacagtaaaagtagaaaagcttctcatagtactcatgaaagcctgtacctgggagcaatggaaaacaatcgaaaagtcaaagggtctgatcctattaaaaaaacgactcgtgttggtgaaaaaaacagctgtgaggtgcaagaatctgagaagagcaagagagtgggaaataatggatttcggaaggtttgcttttggcaattccacaatttccatgtgcttttgggtagtgacttgcttatatttagcaacgagaaatatattgcagtcagtttgcacctatgggatgtttctagacaggttactccattgaactggctcgaagcttggcttgacaatgtaatggcaagtgttccagaattggccatatgttaccatcagaatggtgttgttcaaggttatgagcttttaaagaatgatgatatatttctccttaagggtgtctcggatgatggcacacctgcatttcatccacaggttgtccagcaaaatggccttgctgtcctgaggttcattcaggataactgtaagcaagaccctggtgcatattggctgtacaaaggcgctgaagaagatgtcatacagttatatgatctgtctatcttacctgaaaaacatacagctggtgatcatagatctccatgcggtcctatgtcatcttttatagacaagggaagaaaggagtcattgttctctttgggtacactcctttatcgtgttgctcacaggatgtccttgtcaaaggtgcctagtaatagagcaaaatgtgcaaaattcttcagaaaatgttttgattttcttagtgagcaggatcacctggttgtccgggcatgtgctcatgaacaatttgcaagactcatccttaaatgttatgaggatctggaactgacttctgaatcatttatgattgaatctgaagtcacccttactgatttggatgacgattctccagaattgagacttgagaatttaccagcaaaacaaaatgtactgccagaacttggcaagaatgagccagcagtgttagatgaagtgttggaatgcacaacatcagtgtcttctggtatgacaagcagcttagtggaaccaagccaagttgatggtggttcttcatcttcagttacaaaagaagatgtttctctggacagcttggtgatgtgtcaggctggtatatcaaaaacaattgctgatgcaatctcctctaagttggctgccatacaccacgtatctcaagctatcaaatcccttagatggaatcgacagctgcagaataatactcagcatggttgcggggacagtgcagataccatttgggagaggtcagtcgacttctctttatgccgatgtggtgatgttgattgtattgaggtctgtgatatcagggagtggctgccaaaatcaaaaatggaccataagctgtggaagcttgttcttttgctaggagaatcttatttggcacttggagaggcatacaagaatgatgggcagcttcagcgcacccttaaagttgttgaattagcttgtttggtatatgggtctatgcctggacatattgatggcgacgagttcatctcatccatgtccaacagttcattgagtcgagaagatcttgccctaaaaactaaacttgtactggacgaggcagactattgcaataacaaaagatgcttcagttatgaagtttcttcccaccaattgccaccaaattatttgttctgggcaaaggcatggatgcttgttggtgatgtctatgcagaatatcacagattgaatagtcatcaagcaaagttggcaccagaacagaagtctcatggcgaagttagaatgtcaaatgaagttgcattggaggtcaaacgccttaagagaaaactgggaaaggataagcagaattgtgacacatgctctttgataaactgtagctgccaaagtgacagggcaagtagtggcagcagtgctagcagcagtagttctgaggcctctaaactttacagccgaaagaaaaacaaaaaatcacttggtaagaaccttcaacttcaatcacaatatagagaagccagcaagaaccccaatgcacaagaagctacacaaggttctgaaagtaaacagcatgatgtgaatgatacttgtattgagaacaactcagtattaaatgatgatattggtcactacagtcaggccagggaaaatcagtcaagaaatgttgatggtgttcctgataaatctcaagcaagtgttcctactgtgagggatggtggtatcttcaagttccttggtggtccaaaaccaggagatgttgagtacaacttgtcttctgctattcactgctatggtgcagccaagggagcattgttcgcatttcctgtgcattcagtagaaacttccatggttcttaagaaaagaggctggggatttaatgaactgggccgttgtagacttgagaatagaaatctggttagcgccgagattgcttttgcggatgctattaaagcatttgaagaggtgtttgaccacacaaatgttatactgatcaactgtaacttaggtcatggtaggagagctttagcagaggaatgtgtatccaggattgatgaatttcagaaacataatcttcctgaaggcacatatatgcaatcctttaagtcggccaagtcagaatattttcaagcaataaactactattccgcagctaagaggcaactgaagtatgtcaatactgaggccgataaagtactataccatgaggtttacacacagtatgcccatacctacctgaggcttggaatgcttttggcaagggaaagcttcttaactgacagttatgaaggtggacttgtcaatgagtcatctaacagaacagctgtagagattttagcgagtgatgcttttcgggaggctttgtctacgtatgaatcccttggtgaacatcgcaaacaggaagctgcttttggtcattttcagcttgcttgttatcagagggatctgtgcttaaggtttctggatttagttgacaaggaggttaaacagaaaaacgaggataaatatcgtcagaaaagtaagtggtatggttcactagctgagaagaactggcagaaggctttagaattttatgggccgaagacacatcctactatgtttcttaacatccttatggcgcagtctgccctttctattaatatttctaattccttccactcaaccgcgtatacagacctcaatggtcagtgaaaa

SEQ ID NO: 7793 - DNA, 4554 bp, Zea Mays
cgtccatagaagtgctagaacgccagaacccgccgccggcgaacccgaagactgcgcccagctatggacgcgccgggagagctgcagtgcgtgggcaggctcgaggtcgccgcgccgccgccggcgcgctaccttcgcgttggctccctccccgtccccaccgactcctctgcctctctcccagtcctcctgccttctccgtccccgattggtgctccaaggtatcaaatgctgccattagagactgatctgaacacactccctatgattccaaacatcccagagaaggttttttcaagtgatgctaagagtactgaaggattacggtatgacagtggtcatatcaaccagaacttatcaaggaagtgtgaagcattagctgtgtcaggtttggcagaatatggtgatgaaatagatgtgattgccccagctgatatcatgaagcagattttcaaaattccatactccaaggcacaagtatctattgctgtaaaccgtataggagatacactcattctaaacacagggcctgatgttgatgaaggtgaaaagatattcagaagacaaggtaaccagcctaaaggatctgatccatcaatatttctgaacttcgcaatgcactctgtgcgagcagaagcttgtgattgtcccccaagtcatcaaccttcacagaagaagcaaacagcatctgcagtattgcgtggatcttttggctgtgacgagggttcttttgattcatccccatcatctagttttagcacatcaccttatctggatcagaatgacagtaaaagtagaaaagcttctcatagtactcatgaaagcctgtacctgggagcaatggaaaacaatcgaaaagtcaaagggtctgatcctattaaaaaaacgactcgtgttggtgaaaaaaacagctgtgaggtgcaagaatctgagaagagcaagagagtgggaaataatggatttcggaaggtttgcttttggcaattccacaatttccatgtgcttttgggtagtgacttgcttatatttagcaacgagaaatatattgcagtcagtttgcacctatgggatgtttctagacaggttactccattgaactggctcgaagcttggcttgacaatgtaatggcaagtgttccagaattggccatatgttaccatcagaatggtgttgttcaaggttatgagcttttaaagaatgatgatatatttctccttaagggtgtctcggatgatggcacacctgcatttcatccacaggttgtccagcaaaatggccttgctgtcctgaggttcattcaggataactgtaagcaagaccctggtgcatattggctgtacaaaggcgctgaagaagatgtcatacagttatatgatctgtctatcttacctgaaaaacatacagctggtgatcatagatctccatgcggtcctatgtcatcttttatagacaagggaagaaaggagtcattgttctctttgggtacactcctttatcgtgttgctcacaggatgtccttgtcaaaggtgcctagtaatagagcaaaatgtgcaaaattcttcagaaaatgttttgattttcttagtgagcaggatcacctggttgtccgggcatgtgctcatgaacaatttgcaagactcatccttaaatgttatgaggatctggaactgacttctgaatcatttatgattgaatctgaagtcacccttactgatttggatgacgattctccagaattgagacttgagaatttaccagcaaaacaaaatgtactgccagaacttggcaagaatgagccagcagtgttagatgaagtgttggaatgcacaacatcagtgtcttctggtatgacaagcagcttagtggaaccaagccaagttgatggtggttcttcatcttcagttacaaaagaagatgtttctctggacagcttggtgatgtgtcaggctggtatatcaaaaacaattgctgatgcaatctcctctaagttggctgccatacaccacgtatctcaagctatcaaatcccttagatggaatcgacagctgcagaataatactcagcatggttgcggggacagtgcagataccatttgggagaggtcagtcgacttctctttatgccgatgtggtgatgttgattgtattgaggtctgtgatatcagggagtggctgccaaaatcaaaaatggaccataagctgtggaagcttgttcttttgctaggagaatcttatttggcacttggagaggcatacaagaatgatgggcagcttcagcgcacccttaaagttgttgaattagcttgtttggtatatgggtctatgcctggacatattgatggcgacgagttcatctcatccatgtccaacagttcattgagtcgagaagatcttgccctaaaaactaaacttgtactggacgaggcagactattgcaataacaaaagatgcttcagttatgaagtttcttcccaccaattgccaccaaattatttgttctgggcaaaggcatggatgcttgttggtgatgtctatgcagaatatcacagattgaatagtcatcaagcaaagttggcaccagaacagaagtctcatggcgaagttagaatgtcaaatgaagttgcattggaggtcaaacgccttaagagaaaactgggaaaggataagcagaattgtgacacatgctctttgataaactgtagctgccaaagtgacagggcaagtagtggcagcagtgctagcagcagtagttctgaggcctctaaactttacagccgaaagaaaaacaaaaaatcacttggtaagaaccttcaacttcaatcacaatatagagaagccagcaagaaccccaatgcacaagaagctacacaaggttctgaaagtaaacagcatgatgtgaatgatacttgtattgagaacaactcagtattaaatgatgatattggtcactacagtcaggccagggaaaatcagtcaagaaatgttgatggtgttcctgataaatctcaagcaagtgttcctactgtgagggatggtggtatcttcaagttccttggtggtccaaaaccaggagatgttgagtacaacttgtcttctgctattcactgctatggtgcagccaagggagcattgttcgcatttcctgtgcattcagtagaaacttccatggttcttaagaaaagaggctggggatttaatgaactgggccgttgtagacttgagaatagaaatctggttagcgccgagattgcttttgcggatgctattaaagcatttgaagaggtgtttgaccacacaaatgttatactgatcaactgtaacttaggtcatggtaggagagctttagcagaggaatgtgtatccaggattgatgaatttcagaaacataatcttcctgaaggcacatatatgcaatcctttaagtcggccaagtcagaatattttcaagcaataaactactattccgcagctaagaggcaactgaagtatgtcaatactgaggccgataaagtactataccatgaggtttacacacagtatgcccatacctacctgaggcttggaatgcttttggcaagggaaagcttcttaactgacagttatgaaggtggacttgtcaatgagtcatctaacagaacagctgtagagattttagcgagtgatgcttttcgggaggctttgtctacgtatgaatcccttggtgaacatcgcaaacaggaagctgcttttggtcattttcagcttgcttgttatcagagggatctgtgcttaaggtttctggatttagttgacaaggaggttaaacagaaaaacgaggataaatatcgtcagaaaagtaagtggtatggttcactagctgagaagaactggcagaaggctttagaattttatgggccgaagacacatcctactatgtttcttaacatccttatggcgcagtctgccctttctattaatatttctaattccttccactcaaccgcggccggcatgtggttgaagcaaatgaagacaactccaacgatatggatctggacataaaaccgaagttctggtgccagctgcagagcctgctgaagaggatgctggcgggatccctgcctagcagcacgggcagagcagcctctgtcagccaagccagcactagcagcagaacagaaacttctaagctgaaagagatgtatcgtttgtcgctcaaatcttctaccctgggccagctgcatgcgttgtacaagctttgggtatcttaacacctttattttacaaatggttgctgctcatgttttatatcgtcggcatctatctcttgaattacagagtttttatttggtgttcacggcacgttttttttgttttgatttccagccaacttttaaaactaaatattaagtgtaaccatggaatgtcatggacgggacacactagctactacagtctacaactgttttgtagacttatataaacagcaaataatggcatcctatgtgaagacagtgtattatatgtattgtatcatagagagccaatgccaaaatatctgaatgtatgtgccct

SEQ ID NO: 7794 - DNA, 3402 bp, Zea Mays
cttgctccactggtcgcctgctccctccctcccagctcgctcttatatctaccggccttcctcgccgcccccatggccttgtcttgtctccagcagaggttagcgaccagagaccagccagagccagcagcctggaccaaggtaacggtgctaagagtgtgatggtgtattttaaaatgcatttctggttagtccttgtgctctgcagtttccgagcatcaaaatccctacctctggatagagatatacttttgggcatcagaggctatctgaaagatccacagaattacctacacaactgggatgaatcccactcaccgtgccaattctacggtgttacatgtgaccacaattctggcgatgtcatcgggatatcactctcaaatatctcgctgtcaggcactatatcatcttcattttctcttcttggacaattacgcactctggagcttggggcaaactccatctcaggaactgttcctgctgcgctagccgactgcacaaatctgcaggtacttaatctgtcaatgaacagtttaactggtgaattgcctgatctttcagcattggtcaacctacgagttctggacttgtcgaccaatagtttcaatggggcattcccaacatgggtcagcaaattaccaggtctaactgaactaggccttggagagaacagcttcgacgaaggtgatgttccggaaagcattggagacctgaagaacttaacgtggctgttcttgggacaatgcaatcttaggggagagataccagcttcagtcttcgatttggtatcactcgggacactggacttctcacgcaaccaaattactggtgtattcccgaaggcaatatctaaactgaggaacttatggaagattgagctctaccagaacaacttgactggtgaaattcctcaagagcttgcaactctaaccttgttatctgagtttgatgtttctcggaatcagctgactggcatgctgcctaaggagattggcagcctgaagaagctgaggatattccatatataccacaacaacttctttggtgaacttcctgaagagttggggaacctgcagtttcttgagtcattctcaacctatgaaaatcagttctcaggaaagttccctgccaacctgggtcgattctcaccactcaacacaatcgacatatccgagaattacttttctggcgaatttccaagattcttgtgccaaaacaacaagctccagttcttattggctttgaccaacaacttttcaggtgaattccccgcttcttactcttcttgcaagacacttcagaggttcagaataagtcaaaatcaattcagtgggagtattcctgctggcttgtggggattgcctaatgctgtgataattgatgttgctgataatgcatttagtgggggcatattttctgatataggcttttcagttactctgaaccagctgtatgttcagaacaactacttcatcggggagcttccagtagagctagggaggctcaccctgcttcagaagttggttgcttcgaacaacagactctctggccaaatacctagacagattggaagactcaagcagcttacttacctacatttggaacataacgcattggaagggccaataccacgtatgtgcagtagcatggttgacctgaatcttgcagagaattccttgactggggacattccagacacactggtctcccttgtctctctgaattcactcaatatatcccataacatgatctctggtggcattcctgaaggtctgcagtcactgaagctgagtgatatcgatttctcccagaatgagttgtctggcccagtccctccccaactcttgatgatagctggagattatgcattctctgaaaatgctggcctttgtgttgcagacacttcagaaggctggaaacaaagtatcactaatctaaaaccttgtcagtggtccgataaccgtgacaacttgtcaaggagacgactccttgttctggtaactgtggtatctttagttgtcctcctgtttgggttggcgtgtctaagctatgaaaattataggctagaagagctcaacagaaaaggggatactgagagtggcagtgacactgatttgaagtgggctctcgagacattccatcccccagaacttgaccccgaggagatatccaacttggatggagagagtttgattggctgtggaggcactggcaaagtttacaggctagaattgagcaagggaaggggaactgtggctgtgaaggagttgtggaagcgtgatgacgcaaaggtcttgaacgctgagataaatacccttgggaagatacgccatcggaacattttgaaactcaatgcatttttgaccggagcatcaaattttctggtttatgagtatgtggtgaacggcaatctgtatgacgctattcgccgtgagttcaaagctggacacccggaacttgactgggacaagaggtgccggattgcggttggggttgcaaaggccatcatgtaccttcaccacgactgctccccggccataattcatcgggacataaagtcaaccaacattctgctggacgagaagtatgaagctaagcttgcagatttcggtatcgccaaaatggtggaaggttcgacgcttagctgcttcgctggtacgcatgactacatggctcctgagcttgcgtattctctaaacgcgactgagaagagcgatgtttacaacttcggtgtcgtactgctagagttgcttacaggacatagcccaactgatcaacaatttggcggtgaaaaagacattgtgtcctgggtttcattccatttggcagagaaagaccctgctgctgttcttgacccgaaagtaagcaatgatgcatcggatcacaatcacatgatgaaggcgttgcatattgctattctttgtaccactcagcttccatctgaacgaccgacgatgagagagatcgtgaaaatgctcaccgacattgatcctagctccacagctaggagggcaaagaacaagactgataagtaacagcgacaggctttgtcttagtaaaatatactagtaataaccataatgtcagggcctcttggcaccctgtagcaatcatgggggaagcttattaggccgtcagaatggctgattagttaatagaaactagagggctggtaaaataatatggaggtatagcctatgcaatgcttgtccatgtgtaaaagctttagatcatgtacaaattagtattgtgcaccgaaagtttaggtattgttgaatatacgccgaaaaaacaatcataatccatgataacgctaatgggtctttaggataaaagtctattagtaatgatccatatatacaaagacgttgacgtgcttgagagatcatctgagccgcc

SEQ ID NO: 7795 - DNA, 1253 bp, Zea Mays
ggcccacgctcggaaatcgccgcgacgaggtgctggattttgacttgctaccagaaaccggagctaaccaaatctgccgcaaaacccctcgcctgcggcttcgcgttggccggcaaccgccgctgttgccgacacttcaacgcgtacctcgcgcccccgcgctgctgatgcgatcagcgacgcacgccagatccgagcttctgtaggaccttcagccgtccccgtcccatgggggactgcgtcgtcgaggacggccacgtgcaccatccctcggatgaggtggagggcgcggttccattgacggtagccgtggagctcgatgagcgggcgggagagtcacgggaggagggtggtgggcagcggaagaaagtgggcgggatccgaagggagccgtcgttctcgcggtggtgcagggacacctctgtcgccgccgcctccaatactgccgttgctgcggcgatcagcgacagcgacagcgacgactcagaggagttcgacctaccgctcctgccatcctcctcgggcggcgggagctcacctatggacattgaggcgggggcgacggtgagatctgatgatctgccgatctcaccgaggttgcttgcgaaggtcattgggttgatagcgtgttggtacacgctgagcacatgcttgactctgtacaacaaggagatgctggggaagcacatgtggaagttcccggcgccattcctgatgaacacggtgcatttcacgatgcaggctgtggcgtccagggccatagtgtggttccagcaacgtggcctggagggagggccaaacaaaatgtcgtggaaggattactgtttacgagttgtcccaacagctttggctactgctcttgatataaatctgagcaacatttcacttgttttcattactgtgacatttgctacaatgtgtaaatctgcttctccaattttcattcttctctttgcttttatgttcaggcttgagaaaccaagctttagccttcttggaatcatgctggttgtttcgtttggagttctactaacagttgctaaagagacagaatttaatctgtggggatttatatttattatgcttgctgctgttatgtctggtttccgctggtccatgactcagattcttctccagaaagaggaatacgttattatgtaggattgtagtatcattggttgtggactcctttgtgggacaccagcaccgttgtcaacctaagcaacagcccagctcaagctgtggctatgcga

SEQ ID NO: 7796 - DNA, 1576 bp, Zea Mays
ggcccacgctcggaaatcgccgcgacgaggtgctggattttgacttgctaccagaaaccggagctaaccaaatctgccgcaaaacccctcgcctgcggcttcgcgttggccggcaaccgccgctgttgccgacacttcaacgcgtacctcgcgcccccgcgctgctgatgcgatcagcgacgcacgccagatccgagcttctgtaggaccttcagccgtccccgtcccatgggggactgcgtcgtcgaggacggccacgtgcaccatccctcggatgaggtggagggcgcggttccattgacggtagccgtggagctcgatgagcgggcgggagagtcacgggaggagggtggtgggcagcggaagaaagtgggcgggatccgaagggagccgtcgttctcgcggtggtgcagggacacctctgtcgccgccgcctccaatactgccgttgctgcggcgatcagcgacagcgacagcgacgactcagaggagttcgacctaccgctcctgccatcctcctcgggcggcgggagctcacctatggacattgaggcgggggcgacggtgagatctgatgatctgccgatctcaccgaggttgcttgcgaaggtcattgggttgatagcgtgttggtacacgctgagcacatgcttgactctgtacaacaaggagatgctggggaagcacatgtggaagttcccggcgccattcctgatgaacacggtgcatttcacgatgcaggctgtggcgtccagggccatagtgtggttccagcaacgtggcctggagggagggccaaacaaaatgtcgtggaaggattactgtttacgagttgtcccaacagctttggctactgctcttgatataaatctgagcaacatttcacttgttttcattactgtgacatttgctacaatgtgtaaatctgcttctccaattttcattcttctctttgcttttatgttcaggcttgagaaaccaagctttagccttcttggaatcatgctggttgtttcgtttggagttctactaacagttgctaaagagacagaatttaatctgtggggatttatatttattatgcttgctgctgttatgtctggtttccgctggtccatgactcagattcttctccagaaagaggaatacggattaaagaatccttttaccttgatgagccatgttaccccggtgatggcaatagtaacagcaattatttccattgtgatggatccatggcacgacttcagagcaagtcacttttttgatagttctgctcacataataagaagcagcttgttgctgcttttaggtggcgctttggcctttttcatggttttgacagaatatgtccttgtttctgtgactagtgctgtaacagtgactgtagcaggaattgtgaaggaagctgtcactattctggttgctgtgctattcttcaacgatccatttacatggttgaaggcgcttgggctagcaataataatatttggtgtcagtctattcaatatttacaagaagcatgtgtttatttgtaatgcatggagaacattgagtaacgattgtttgtgctaca

SEQ ID NO: 7797 - DNA, 2184 bp, Zea Mays
ggcccacgctcggaaatcgccgcgacgaggtgctggattttgacttgctaccagaaaccggagctaaccaaatctgccgcaaaacccctcgcctgcggcttcgcgttggccggcaaccgccgctgttgccgacacttcaacgcgtacctcgcgcccccgcgctgctgatgcgatcagcgacgcacgccagatccgagcttctgtaggaccttcagccgtccccgtcccatgggggactgcgtcgtcgaggacggccacgtgcaccatccctcggatgaggtggagggcgcggttccattgacggtagccgtggagctcgatgagcgggcgggagagtcacgggaggagggtggtgggcagcggaagaaagtgggcgggatccgaagggagccgtcgttctcgcggtggtgcagggacacctctgtcgccgccgcctccaatactgccgttgctgcggcgatcagcgacagcgacagcgacgactcagaggagttcgacctaccgctcctgccatcctcctcgggcggcgggagctcacctatggacattgaggcgggggcgacggtgagatctgatgatctgccgatctcaccgaggttgcttgcgaaggtcattgggttgatagcgtgttggtacacgctgagcacatgcttgactctgtacaacaaggagatgctggggaagcacatgtggaagttcccggcgccattcctgatgaacacggtgcatttcacgatgcaggctgtggcgtccagggccatagtgtggttccagcaacgtggcctggagggagggccaaacaaaatgtcgtggaaggattactgtttacgaggcttgagaaaccaagctttagccttcttggaatcatgctggttgtttcgtttggagttctactaacagttgctaaagagacagaatttaatctgtggggatttatatttattatgcttgctgctgttatgtctggtttccgctggtccatgactcagattcttctccagaaagaggaatacggattaaagaatccttttaccttgatgagccatgttaccccggtgatggcaatagtaacagcaattatttccattgtgatggatccatggcacgacttcagagcaagtcacttttttgatagttctgctcacataataagaagcagcttgttgctgcttttaggtggcgctttggcctttttcatggttttgacagaatatgtccttgtttctgtgactagtgctgtaacagtgactgtagcaggaattgtgaaggaagctgtcactattctggttgctgtgctattcttcaacgatccatttacatggttgaaggcgcttgggctagcaataataatatttggtgtcagtctattcaatatttacaagtataaaaggttcaaaaaagggcattacaatgaaaatgctgggacaaatacccaatcttccaattggacttcaaaatacgtcatccttgatgaagatactgaagctcaagatgatacaggctgatctgaatgtgatagaatgcagactatatatggcgcttccagagaagcaagatcatctgtgcctgcatagtcttactttcacaggctaactgacttcatattctttgagttcatcaattactctggtcagccatgcacgaacatgacgcttgcagccgtgtggcaagttgggaagattacacatacatggaacatacaagatacaacctggtatcagtacatatgttttgtcctttcattcaaaacaaagaacagtgcatatatctgaacgaggcattctgcattatgtccactaagaaaatgctccatcaaatacaattagaactacagctgacacacttaactttctggaagaggataggactcaattttatagtccattctgattgttgaagagagattcggcatcggaacgtagctttcttttctttatttatttttagatgaaaataaacactcgtatatgtaatgttgtatgtatgggactgtatactgttttacacacgagcaccacaagttgaagttcttcccaccgtattggtattactcgtcttgagagcacagtgccaagtcggcccggtccatctcaactttgtttcccgtattttgagcagcttcaaaattgaactattagacgataaatattcgagaacgcatgtggctatcagcacatctttggc

SEQ ID NO: 7798 - DNA, 2637 bp, Zea Mays
ggcccacgctcggaaatcgccgcgacgaggtgctggattttgacttgctaccagaaaccggagctaaccaaatctgccgcaaaacccctcgcctgcggcttcgcgttggccggcaaccgccgctgttgccgacacttcaacgcgtacctcgcgcccccgcgctgctgatgcgatcagcgacgcacgccagatccgagcttctgtaggaccttcagccgtccccgtcccatgggggactgcgtcgtcgaggacggccacgtgcaccatccctcggatgaggtggagggcgcggttccattgacggtagccgtggagctcgatgagcgggcgggagagtcacgggaggagggtggtgggcagcggaagaaagtgggcgggatccgaagggagccgtcgttctcgcggtggtgcagggacacctctgtcgccgccgcctccaatactgccgttgctgcggcgatcagcgacagcgacagcgacgactcagaggagttcgacctaccgctcctgccatcctcctcgggcggcgggagctcacctatggacattgaggcgggggcgacggtgagatctgatgatctgccgatctcaccgaggttgcttgcgaaggtcattgggttgatagcgtgttggtacacgctgagcacatgcttgactctgtacaacaaggagatgctggggaagcacatgtggaagttcccggcgccattcctgatgaacacggtgcatttcacgatgcaggctgtggcgtccagggccatagtgtggttccagcaacgtggcctggagggagggccaaacaaaatgtcgtggaaggattactgtttacgagttgtcccaacagctttggctactgctcttgatataaatctgagcaacatttcacttgttttcattactgtgacatttgctacaatgtgtaaatctgcttctccaattttcattcttctctttgcttttatgttcaggcttgagaaaccaagctttagccttcttggaatcatgctggttgtttcgtttggagttctactaacagttgctaaagagacagaatttaatctgtggggatttatatttattatgcttgctgctgttatgtctggtttccgctggtccatgactcagattcttctccagaaagaggaatacggattaaagaatccttttaccttgatgagccatgttaccccggtgatggcaatagtaacagcaattatttccattgtgatggatccatggcacgacttcagagcaagtcacttttttgatagttctgctcacataataagaagcagcttgttgctgcttttaggtggcgctttggcctttttcatggtatgtatcgtgtactcctattcagggaataaatatttatgctttcttctcacttagaattaaacatgacaactacctcattgccaaagtaccagtccattgtttcagaattgttgtccattatttagaccgtgtctcgtgcgcgcatggcaccctgagctagttggacaactattgagggagtttgttttttcaattccaccgcaatacttgttacaagtcttccctttctggagtctattatggatttattattaaggcatgactgtgcctatcccagattactcttttaagtggttttatgacagatctcttcacttgcaggttttgacagaatatgtccttgtttctgtgactagtgctgtaacagtgactgtagcaggaattgtgaaggaagctgtcactattctggttgctgtgctattcttcaacgatccatttacatggttgaaggcgcttgggctagcaataataatatttggtgtcagtctattcaatatttacaagtataaaaggttcaaaaaagggcattacaatgaaaatgctgggacaaatacccaatcttccaattggacttcaaaatacgtcatccttgatgaagatactgaagctcaagatgatacaggctgatctgaatgtgatagactatatatggcgcttccagagaagcaagatcatctgtgcctgcatagtcttactttcacaggctaactgacttcatattctttgagttcatcaattactctggtcagccatgcacgaacatgacgcttgcagccgtgtggcaagttgggaagattacacatacatggaacatacaagatacaacctggtatcagtacatatgttttgtcctttcattcaaaacaaagaacagtgcatatatctgaacgaggcattctgcattatgtccactaagaaaatgctccatcaaatacaattagaactacagctgacacacttaactttctggaagaggataggactcaattttatagtccattctgattgttgaagagagattcggcatcggaacgtagctttcttttctttatttatttttagatgaaaataaacactcgtatatgtaatgttgtatgtatgggactgtatactgttttacacacgagcaccacaagttgaagttcttcccaccgtattggtattactcgtcttgagagcacagtgccaagtcggcccggtccatctcaactttgtttcccgtattttgagcagcttcaaaattgaactattagacgataaatattcgagaacgcatgtggctatcagcacatctttggc

SEQ ID NO: 7799 - DNA, 3307 bp, Zea Mays
gccgctccaaaaccccgctcaatccccattcctcctcgggagtcgggttcgccgcttcggctttcatttcccctcccgcccacctctccctctctccgccggacgatcgcctttcacgatggctcgccgacgccgccgtgtcttccgcggcagggtgcccccggacctccaccgggcctacggcgcacttgcacgcactctcggccacgccgtcctctcactcatcccgccgccgacgcaggcgggcacaccctgctctgcctgccgcggacgcggaggcgccggttgcctcgcgtgccgccgctgggagtacctcctccgcgatggtgacccggtcgcgtaccgcagcctcatcacccgcgctgtctgcgccgtcgcgccgtccgggtctgcaaccccgccgccgctgtacacgccggggaatggcgggcactcacaggccaagctcgttggggtggcgatcaagttgatgatgatggatcgggcgtgtacaacaacgaacgtcctctccagcggttgccgtgcgattggggatttactcatgtgctatattctaaggcattcatcaatatttttgcctgttaagaagaatgttttttttcaagtaactggcctcccgctcaatgatttcctgcaaaagcctatgtttgcgagtgcggcaaagaatcaacaaccccaatccacgaaaggaaaatacttgtgctatctgtgccagaacccagagaggtcacaaatcatttatggaggctatgccaataattccaaagttgcatgttcagaacttcctttgactaatggaccaataaagtgttccaatttagacaatcaaaattctaggaaaagaaaaaggctgtacaaatggcaacgcctcaaaaaacagaagcagatttttcctagttccgaggacaaatcattaactagtcagagtgaaataagcaccaatgggtttggtgtccatgatgttttattggaggacttatgtgctacagtgaaggataaatcacagtttttggaaccgacagtagataatgattccttagcaatgaatattagaacttcccagtgtaacagtacatcaagaattcaatctacatccccgcaagttggacttcccaatttcatgcatctcaataatggtctcatctgcttcaattgcttaatgttgaattcctccaaacgtgtctcagtagatttgcttatatcaagacatactatcttctacaatagaaagacttcctataacgtcttccatggcaaccacatattaaacaaaaggaaaataccagatgcattatcacttataatacatatatttggattcaagggatgctgcgcaaagttattgaaatgcaactgccatgtgtctactacaacaaattctaattgcatgtgtctttcgctgcctaaactaatgaataagctcatcagaaattctaagcgctgccagtataggaaactatttctgaagcattgtcctgtcaattccaagacaaaacttcaggattttgcgtggtacatccaggaaagaagcaatccagtcatgctatttttcaacagtgaggttcattccaaaagcaaaagatatgagaccattagtaaatctcagagctcaatcaaaaaatgccctcctcaataattgtcacctgattataaacaaagtaaaggatgagaatccagacaagtttggttcttctgtttttgattacaataatgtgcatcaaaatatctggcattttatttcttcagtaagaagtcacctgaaggaaaaaataaagatatatatagttgttgccgatgtatcgaaggcattcgattgcattactcatgatatgttactgaaagttgtggatgatgcattgaaatgtgatgactatgttctgaggaaatgcaaaaaagtagtttgcaactggtctaagaatgccatctaccgtttcgattcaaatgtttctatcagcaacggtgataatgtatgtgattttttgattcagttatcatcaaggggtggcattttagtcgaccagggaaaaagttgcaagatacggaagaaagagattcaatgtttcctttccaagcaagtgaagtgcaacattttgaagattgggcaaaacttctactcacaacgagtaggcatcattcaaggaaacaagttatctcccaacctttgttccctgtactttggtcaccttgaaaattctgagctattgaaatctcttcatgataacaagattgattcagaaaaggatgttttaacacctagaagtttattaatgaggttcattgacgatttcatattcatatctttctccaaggagcaagctctaaatttcttcaataggatgagaagagggtttgtcaactacaactgctacatgaatgacagcaaatatggtttcaacttcgaggttgcaaacagtgaacattgtagtaataggatctacaagggtgatgatggattctctttcataccatggagtggcttgcttataaattgtgaaactttggaaattcaagctgattatacaaggtatctggacatccatatttcctccaccatcactgctaagatgcattcttcagcgaagtaccttgagagcaagctgtgtcattacatgcgtccgaagtgtcatcccattttctttgattctgtgatcaactcaccaggcacagtaagactgaacatatatcaaaatttcctcttatgcgcaatgaagtttcactgttatttccggagcatgcctgatcccggtatcatgaaaccggagctactgcatataattaagagaacgttcagatatatgcatagcctcgtcgccaaacggatgcacgaagcggaactgcaatacgacgtgcgcccagttctgaagcttaggcgaaaggaaaccatgtggcttggcctgtcagcgtaccttcgagtgcttcagaaaaagcaatcacgttacagtgaattgttggcgtcgctgagagaagaaattgggagatgtggtcatctggaccgtcacaacgatgctttgcgctacgctgtagatgactctcactcgtcagtgttctggaagtttaagttctagaaggaaactgggagagtagaagattgctggagctagtgtcttttgtgaacaggaacctttggtgtccaagtgacagacgagtggggtcaaacatggtcgagacttttgttttgatatatactcccgccatttcgtaatgggcattcatggccttggatctatccgtttcacaatgctagcttctacatacagatgggcacactaatatgcgtcctgctgtacctcacacgatatagcttcta

SEQ ID NO: 7800 - DNA, 3605 bp, Zea Mays
cgccgctccaaaaccccgctcaatccccattcctcctcgggagtcgggttcgccgcttcggctttcatttcccctcccgcccacctctccctctctccgccggacgatcgcctttcacgatggctcgccgacgccgccgtgtcttccgcggcagggtgcccccggacctccaccgggcctacggcgcacttgcacgcactctcggccacgccgtcctctcactcatcccgccgccgacgcaggcgggcacaccctgctctgcctgccgcggacgcggaggcgccggttgcctcgcgtgccgccgctgggagtacctcctccgcgatggtgacccggtcgcgtaccgcagcctcatcacccgcgctgtctgcgccgtcgcgccgtccgggtctgcaaccccgccgccgctgtacacgccggggaatggcgggcactcacaggccaagctcgttggggtggcgatcaagttgatgatgatggatcgggcgtgtacaacaacgaacgtcctctccagcggttgccgtgcgattggggatttactcatgtgctatattctaaggcattcatcaatatttttgcctgttaagaagaatgttttttttcaagtaactggcctcccgctcaatgatttcctgcaaaagcctatgtttgcgagtgcggcaaagaatcaacaaccccaatccacgaaaggaaaatacttgtgctatctgtgccagaacccagagaggtcacaaatcatttatggaggctatgccaataattccaaagttgcatgttcagaacttcctttgactaatggaccaataaagtgttccaatttagacaatcaaaattctaggaaaagaaaaaggctgtacaaatggcaacgcctcaaaaaacagaagcagatttttcctagttccgaggacaaatcattaactagtcagagtgaaataagcaccaatgggtttggtgtccatgatgttttattggaggacttatgtgctacagtgaaggataaatcacagtttttggaaccgacagtagataatgattccttagcaatgaatattagaacttcccagtgtaacagtacatcaagaattcaatctacatccccgcaagttggacttcccaatttcatgcatctcaatgtgtctttcgctgcctaaactaatgaataagctcatcagaaattctaagcgctgccagtataggaaactatttctgaagcattgtcctgtcaattccaagtgtgcagctgatgttgccaagaaccataataacaaggcacactttttaattggaggaaaatcggcatactatgatcagtcttatgttcaattggaggcttacagtacacatcaacaagtagtttcattcatctgggcagtgttgacacgaattatacctgagccgttgcttggaaactctagcagcaagagatctttaaggataaacatttggaaatttataaagttgcgtaggtttgaatcattttgcttgagcgattgtattggtgagctgaaagtatcacattattcttggttatcaaatattggattttctgattgcttttgctctgctctaatggagaaagaaatttggtcatcaaatggttccgaggaggagaaacttcaaaatcttctgcgttgttggattagttggatgttttctgatatagtgataccattagtccagtcatatttttatgttacagaaagggaatctaggcgatatgatgttttatattatccaaagacagtttggagaaacttgactagtacagctattgcttccctaaacagacaaaacttcaggattttgcgtggtacatccaggaaagaagcaatccagtcatgctatttttcaacagtgaggttcattccaaaagcaaaagatatgagaccattagtaaatctcagagctcaatcaaaaaatgccctcctcaataattgtcacctgattataaacaaagtaaaggatgagaatccagacaagtttggttcttctgtttttgattacaataatgtgcatcaaaatatctggcattttatttcttcagtaagaagtcacctgaaggaaaaaataaagatatatatagttgttgccgatgtatcgaaggcattcgattgcattactcatgatatgttactgaaagttgtggatgatgcattgaaatgtgatgactatgttctgaggaaatgcaaaaaagtagtttgcaactggtctaagaatgccatctaccgtttcgattcaaatgtttctatcagcaacggtgataatgtatgtgattttttgattcagttatcatcaaggggtggcattttagtcgaccagggaaaaagttgcaagatacggaagaaagagattcaatgtttcctttccaagcaagtgaagtgcaacattttgaagattgggcaaaacttctactcacaacgagtaggcatcattcaaggaaacaagttatctcccaacctttgttccctgtactttggtcaccttgaaaattctgagctattgaaatctcttcatgataacaagattgattcagaaaaggatgttttaacacctagaagtttattaatgaggttcattgacgatttcatattcatatctttctccaaggagcaagctctaaatttcttcaataggatgagaagagggtttgtcaactacaactgctacatgaatgacagcaaatatggtttcaacttcgaggttgcaaacagtgaacattgtagtaataggatctacaagggtgatgatggattctctttcataccatggagtggcttgcttataaattgtgaaactttggaaattcaagctgattatacaaggtatctggacatccatatttcctccaccatcactgctaagatgcattcttcagcgaagtaccttgagagcaagctgtgtcattacatgcgtccgaagtgtcatcccattttctttgattctgtgatcaactcaccaggcacagtaagactgaacatatatcaaaatttcctcttatgcgcaatgaagtttcactgttatttccggagcatgcctgatcccggtatcatgaaaccggagctactgcatataattaagagaacgttcagatatatgcatagcctcgtcgccaaacggatgcacgaagcggaactgcaatacgacgtgcgcccagttctgaagcttaggcgaaaggaaaccatgtggcttggcctgtcagcgtaccttcgagtgcttcagaaaaagcaatcacgttacagtgaattgttggcgtcgctgagagaagaaattgggagatgtggtcatctggaccgtcacaacgatgctttgcgctacgctgtagatgactctcactcgtcagtgttctggaagtttaagttctagaaggaaactgggagagtagaagattgctggagctagtgtcttttgtgaacaggaacctttggtgtccaagtgacagacgagtggggtcaaacatggtcgagacttttgttttgatatatactcccgccatttcgtaatgggcattcatggccttggatctatccgtttcacaatgctagcttctacatacagatgggcacactaatatgcgtcctgctgtacctcacacgatatagcttcta

SEQ ID NO: 7801 - DNA, 3888 bp, Zea Mays
cccattcctcctcgggagtcgggttcgccgcttcggctttcatttcccctcccgcccacctctccctctctccgccggacgatcgcctttcacgatggctcgccgacgccgccgtgtcttccgcggcagggtgcccccggacctccaccgggcctacggcgcacttgcacgcactctcggccacgccgtcctctcactcatcccgccgccgacgcaggcgggcacaccctgctctgcctgccgcggacgcggaggcgccggttgcctcgcgtgccgccgctgggagtacctcctccgcgatggtgacccggtcgcgtaccgcagcctcatcacccgcgctgtctgcgccgtcgcgccgtccgggtctgcaaccccgccgccgctgtacacgccggggaatggcgggcactcacaggccaagctcgttggggtggcgatcaagttgatgatgatggatcgggcgtgtacaacaacgaacgtcctctccagcggttgccgtgcgggtggccaaactacttgtgttattgagcttgtttcttcttcatcttgggacattctcttgcataggattggggatttactcatgtgctatattctaaggcattcatcaatatttttgcctgttaagaagaatgttttttttcaagtaactggcctcccgctcaatgatttcctgcaaaagcctatgtttgcgagtgcggcaaagaatcaacaaccccaatccacgaaaggaaaatacttgaacccagagaggtcacaaatcatttatggaggctatgccaataattccaaagttgcatgttcagaacttcctttgactaatggaccaataaagtgttccaatttagacaatcaaaattctaggaaaagaaaaaggctgtacaaatggcaacgcctcaaaaaacagaagcagatttttcctagttccgaggacaaatcattaactagtcagagtgaaataagcaccaatgggtttggtgtccatgatgttttattggaggacttatgtgctacagtgaaggataaatcacagtttttggaaccgacagtagataatgattccttagcaatgaatattagaacttcccagtgtaacagtacatcaagaattcaatctacatccccgcaagttggacttcccaatttcatgcatctcaataatggtctcatctgcttcaattgcttaatgttgaattcctccaaacgtgtctcagtagatttgcttatatcaagacatactatcttctacaatagaaagacttcctataacgtcttccatggcaaccacatattaaacaaaaggaaaataccagatgcattatcacttataatacatatatttggattcaagggatgctgcgcaaagttattgaaatgcaactgccatgtgtctactacaacaaattctaattgcatgtgtctttcgctgcctaaactaatgaataagctcatcagaaattctaagcgctgccagtataggaaactatttctgaagcattgtcctgtcaattccaagtgtgcagctgatgttgccaagaaccataataacaaggcacactttttaattggaggaaaatcggcatactatgatcagtcttatgttcaattggaggcttacagtacacatcaacaagtagtttcattcatctgggcagtgttgacacgaattatacctgagccgttgcttggaaactctagcagcaagagatctttaaggataaacatttggaaatttataaagttgcgtaggtttgaatcattttgcttgagcgattgtattggtgagctgaaagtatcacattattcttggttatcaaatattggattttctgattgcttttgctctgctctaatggagaaagaaatttggtcatcaaatggttccgaggaggagaaacttcaaaatcttctgcgttgttggattagttggatgttttctgatatagtgataccattagtccagtcatatttttatgttacagaaagggaatctaggcgatatgatgttttatattatccaaagacagtttggagaaacttgactagtacagctattgcttccctaaacagacaaaacttcaggattttgcgtggtacatccaggaaagaagcaatccagtcatgctatttttcaacagtgaggttcattccaaaagcaaaagatatgagaccattagtaaatctcagagctcaatcaaaaaatgccctcctcaataattgtcacctgattataaacaaagtaaaggatgagaatccagacaagtttggttcttctgtttttgattacaataatgtgcatcaaaatatctggcattttatttcttcagtaagaagtcacctgaaggaaaaaataaagatatatatagttgttgccgatgtatcgaaggcattcgattgcattactcatgatatgttactgaaagttgtggatgatgcattgaaatgtgatgactatgttctgaggaaatgcaaaaaagtagtttgcaactggtctaagaatgccatctaccgtttcgattcaaatgtttctatcagcaacggtgataatgtatgtgattttttgattcagttatcatcaaggggtggcattttagtcgaccagggaaaaagttgcaagatacggaagaaagagattcaatgtttcctttccaagcaagtgaagtgcaacattttgaagattgggcaaaacttctactcacaacgagtaggcatcattcaaggaaacaagttatctcccaacctttgttccctgtactttggtcaccttgaaaattctgagctattgaaatctcttcatgataacaagattgattcagaaaaggatgttttaacacctagaagtttattaatgaggttcattgacgatttcatattcatatctttctccaaggagcaagctctaaatttcttcaataggatgagaagagggtttgtcaactacaactgctacatgaatgacagcaaatatggtttcaacttcgaggttgcaaacagtgaacattgtagtaataggatctacaagggtgatgatggattctctttcataccatggagtggcttgcttataaattgtgaaactttggaaattcaagctgattatacaaggtatctggacatccatatttcctccaccatcactgctaagatgcattcttcagcgaagtaccttgagagcaagctgtgtcattacatgcgtccgaagtgtcatcccattttctttgattctgtgatcaactcaccaggcacagtaagactgaacatatatcaaaatttcctcttatgcgcaatgaagtttcactgttatttccggagcatgcctgatcccggtatcatgaaaccggagctactgcatataattaagagaacgttcagatatatgcatagcctcgtcgccaaacggatgcacgaagcggaactgcaatacgacgtgcgcccagttctgaagcttaggcgaaaggaaaccatgtggcttggcctgtcagcgtaccttcgagtgcttcagaaaaagcaatcacgttacagtgaattgttggcgtcgctgagagaagaaattgggagatgtggtcatctggaccgtcacaacgatgctttgcgctacgctgtagatgactctcactcgtcagtgttctggaagtttaagttctagaaggaaactgggagagtagaagattgctggagctagtgtcttttgtgaacaggaacctttggtgtccaagtgacagacgagtggggtcaaacatggtcgagacttttgttttgatatatactcccgccatttcgtaatgggcattcatggccttggatctatccgtttcacaatgctagcttctacatacagatgggcacactaatatgcgtcctgctgtacctcacacgatatagcttcta

SEQ ID NO: 7802 - DNA, 1761 bp, Zea Mays
cgcacacggctcatataaaatgccggagccgtctgcgcattggactcaaagcgaacctcgccgccgcctcttccgtctctctcatctccgtcctcctgcaatctcacccctccctctaaacccgcaggccgcagtagcgccgctacggtttgctcaggattcgaaccccaccttctgattgctccgaatccgaggcggcggttgcgcagaagtttgcggcatggcggggtacccggaggacaaccagcacgcgttgaacgggaagatttttgtcggaggcgttgcttgggagacaactgaagaatcattctccaagcattttgagaagtatggggcaataactgattctgtaattatgaaggacaagcatactaagatgcctcgtggatttggattcgttacattttctgatccatctgttatagacaaggttttggaggatgaacacgttatagatggcagaacggtggaagtcaagaggacagttccgagggaagagatgaataccaaagatggccctaagacaagaaagatcttcatcggtgggctacctgcatctcttactgaagatgagttgaaggatcacttttcattgtatggtaaggtgcttgaacatcagataatgcttgatcatagcactgggcgttctagagggtttggttttgtcacttttgaaagtgaagattctgttgaaagagtcatatcagaggggagaatgcgtgatcttggtgggaagcaggttgaaataaagaaggctgaaccaaagaaacatggatctgataacatcggtaatgggagatcaagccaagggggtggaggttaccgcagtacttaccgtggtggtggtggagctggtagtggcagcagcggcagcggtgggggtggttatgggtttggtgatgcttatcgatctgctgcagcgagttatggatatgatggtggcgcaggagcaggatatggctatggtagagggtatggctatggaggcaatgctggctttgcgtctggttttggtggtgggtatggtggatccatgtatggaggcgcatatggtgcatatggggcatacggtggtggtgcttatggaggtggtgcctatggaggtggtgcatatggaggcagcgcctatggtggcgccccaggtggtggttatggcactggtggatacggcagttatggtggagcaggtggtactggtggtgggagtacaggtgctcggggttcaagtaggtaccatccatatggaaaataagctacaagttcaatcaagttttctcggtgtcgggagtttctctggtcctcctagttcagttttcatgccatgtccacctaaacaggggcattggagcatagttgggttgaacacgtcaccaccggaacaattgtgtaactgcagctgttgagcctgcccgcctgccttcgcttgctgtacaagctacacatgaaacctgtgttgtattctttagttcggtatgcagagtttagaaccctgagaaacaagcattttatggtagggacagtatttggtccggtagaactatattctgtgctgtaacttgctgttgcaagttttaactgctgtccttgtccgtccggttgcacagaaatcgaaagggattaaaggagatcaaatccctttctatttaattttaactaggaagggatttaaggcctgtttggttcgctgcctaatttatcacattttactacacttgtgtctaagtttagtttttcaattcgaataattaatcttagacaaag

SEQ ID NO: 7803 - DNA, 2174 bp, Zea Mays
ccccaacctctgaaccccgctctaataaatcttcctcccatctctctcgctcccaaccctcaagtccccaccaacccaaccctggtggcaccggccgcacacacgaaagcaagctagctagtcactattagagctatttggttgggagcggtttagctgagcaagatcgaactggcattgtcacacacatctcagcactcagctccttgggttcccctccatgagcagcagctgagcagccacacattgccgtcttccttgctgcacttgtagttacagctagatccattgatttttttggcaacaacaagagcaggagctactgagcaagaagtgcgtacgtgcttgcggcgtcggtgctacctgctggactacgtgtgctacaaggcgacggacgaccggaagctgccgacggacctgtgcggcgagatcatccagcggaacaagctgctggggctggaggagtacaagttcctgctgaaggtgatcgtgaactcgggcatcggcgaggagacgtacggcccgcgcaacatgatcgagggcggggaggcccggccggaccgcctccgcgagggcatggaggagatggacgagaccttccacgccgtcctcgacgagctcttcgcccggtcggcggcgcccggcggcgtcggcatccgccccgccgacgtcgacgtgctcgtcgtcaacgtgtccatgttctcgccggcgccgtccctgtcggcgcgcgtcgtgcggcgctacggcctccgcgaggacgccaaggtgtacaacctcacgggcatgggctgcagcgccacgctcatcgcgctcgacctcgtcaacggctacttcaggacgcacgccgggcaggtggctctggtgatgacgtcggagtcgatcgcgcccaactggtacgcgggcaacaagcgcaccttcatgctgggcaactgcctgttccgctccggcggctgcgcctacttcctgaccaacgacccgcggctccggccgcacgccaagctccgtctccgccacgtggtgcgcacccacacgggcgcctccgacgaggcctacaactgcgcgctccagatggaggacgaggccggccgcccggggttccacctgggcaaggagctgccgcgcgccgcggtgcacgccttcgtgcacaacctccgcgtgctggcgccccgcgtgctgccgctcccggagctgctccgcctcgcctgcgccaccctctcggcgcgcctggcgcgcaagaagcggcagcgcggcgcgggccatggccacggccacctcaccatccgcatgaaggccggcgtcgaccacttctgcgtgcacacgggcggcgccgccgtcatcgacggcgtcggcaagggactcacgctcacggagcacgacctggagccctcccgcatgacgctgcaccgcttcggcaacacctccgccagcagcgtctggtacgtgctcgcctacatggaggccaagggccgcctgcgccagggcgaccgcgtcctcatgctcaccttcggcgccggattcaagtgcaacagcggcgtctggaaggaccgcatccaccactacccgctcaaggacgtctccaacccattcatggacaagtacggattcgtcaaggacctcatagacttgtgatcgccccctagctgctcaactcaacgtctcaaccccaccaacgcacatactttttatttacaccattattattgtattcattgtcatgttagtactactctgttctagtattgagcaactactagttaattaaggtgagcacaacaatgctagctgaggattcatagtagcttatgattcttttggtgatggcgggaagatcgacttttacgtagcaacggatatggcttcgctctttgttctttcttcagttctgtcatttcgtgtgtgtcaatttagatgccccatgtcgtcagtcaatcagtcagtgtcgtcctgttcctatttactatatcaaatgattatggtgcaatcattttttaaactaagttatttattatttattgtgtaatggtaaatgttgctgtaataaagagcatactctcactccaaagatgcatgttttatgatctgaaagtccactgcggcatagtattcatcagccctcatggcgatgtacatacgtagaagtcggttcttcgatttctaaataaatacaatacaaa

SEQ ID NO: 7804 - DNA, 3357 bp, Zea Mays
cgccgcgagcgaggggagcgacggcgggagcatccccgtcatgccggcgttcttgaggtcgaggttgtcgacgcgaccctcttgccccagctcggatccgcctaggcgcgccacgacaccgtcctcgccggccccgccggcacggtgctcgtcctcaccgagctcgccacgctatcctacaccccctccggatccgccaagtgatgaagcatcccctctctttgccgtccaagccgcggagccccatactggcctctgacgccgtcttcgcactctgcgacgtcggcacgccgtggcgcatccagtggaagctcttctcctgcccgcttgccatgctcacagggggctatgcgcccgtggagtgagcggcgtggggagacatcttcgaggtcctcaagcgtccccggctcctggctggggcggcggccgctgggtcattatgatcggcaggctcaagtcctccttcgccatggacgcatcgtgctccacggtcttaatacttcgcctagatctggccaccatggagtgggaggaagctgggcgcatgccgcccaatatgtaccgctgcttcactggcctttgcgaggctgcctcgcagggaggcgccataccgaccgctgctaccgggggtaacaataaggtcaaagttttcggaagcgatgggaaggtgtggttcgcaggccgccttcaccggtacacaacactcagtgctacagctgactggcgatcaagtccagacaacagtagcgccccctaccccagcgccgagccaggaccggcgaggaacacaagtcaactagtcaagtcgccgtgcggctcaccagctggcagccagcgagccagcagcggcacctggcgatccgatccaacgagccgcagggccacgaacacgacctcactaccgcatcctgccgtccaacccatccagctcactccgcgaccaatggctcgggccccaggagtcaggacgcccgcgttaagcaaacgaccgagccccgccgcgccgtcccgccagcgcgcagttaaaaacgcgggtgcacgcagcgcacccgtcgcttcgcttccttgctggctgtggctgcttcgtccgtcccacccaatcggcctctcccctccgctccccagcaggagcagccagcccagccctgacgcttcctccccacccggcgtgcaatcgctcccagtcctgactcgttcgctggaccgaacaccgcccggtggtgctcttccgccgtgcttctccgggctcctcctcgccgcccgccgcccggcggcgccgtcctggtggttccgtggggcgccggtcgggcgcgatcggccgtgcggccacccggctctcagtctcaggagagatatattgtaaaatggaagtactgcgtgatatgcacctgccaccaggatttggattccatccttcggatactgaacttgtttctcactacctgaagaggaaaatacttggccagaaaattgagtatgatcctataccagaggttgatatatataagcatgaaccatgggatttacctgcaaagtgcaatcttccaatcgaggacaacaagtggcatttctttgcctctcgtgacaggaagtaccctactggctctaggtcaaacagggcaacactcgctggttactggaaatcaactgggaaggaccgagccataaagctgaagaagcgaactctaggaacaaagaagactttagtctttcatgagggtcggcctccctctggcagacgcactgagtggattatgcatgagtattacatagatgagaacgaatgtaaagtcagccctgatatgaaggatgcttttgtcctctgccgtgttactaagagaagtgactgggaactggataatgaggtgggcaacaggtaccctcatctggaacaactagatgctgctgctgcatcagttgccagcactgtaaagccagaagatgcggttgccacagttatctgtccagaagaatctaatcgtgctgctacaccagttggcagtgatgaactatctaatgatgttggtcaggaacctatcactcctgattcatcacctccaaacggtggtaaagaactggaagtatggctggaagaactgttggatccttcaccttcatttaaccttgtagctgatactcgttctgctgatgtgtctctgactgaccaatatgctgaatcgtccaatcctggttctgtgtctcggaatattggaccaggccatgctagccctatccaggatggaacagatgctacagactacctattaactgatgatcttcccgaggatctttacagtatgttgtatcctggtactgaccagttctatgatagtatgttcttggaacaagctggccaggaaggtattgcttttcctaccaaccaagcgtactacatgatgggaatggaatcctatgctcttccaaccaacttgaacggaactctgaatgctgaattgcagtcagaccaggaaaataacacgacgaatctggcaaatggaaatactgacactggagttacaatacaaagccgcagagcaaccacatctcctgctaacatttcactagcagctggcaagattaaaatgcaggttggaattaataggatggtcacaagtagttccgtatccatcaaccagaccatgcggtttacagataacagtggccgacgtcttgatctcaagactgatgatgttgagcaccagaagaaaactacaaacagtgccatttctgccaagcagtctagggcagccaatcctgaaggccacagtagtcaaggctacctcaagggcttcaaaaatacattcagatgttcatcagctggattcaaggcatacatatcttttgccttttttgtggttggagtcgctgctgctgcagtgctgcatcaccaccgctcctgtgccaacctataaatttgaatcaccaaacaccagcatgcttagttgtagttctagtggtcagcggcagcattggcttgagggcaggtatcttcccagattcatccttgcagtagttcgtcggctttacttacttgcattggactggagtagtagttgagttcctcagcttatatcacgggggttactggcctggacaatggagatacatttgtgcgaccactgattcccagttatctccacatgttttttgtggtgctgtacatattaagtttttttctcgttttgatcgtctagttgctaatgggtgcctatttaaaaaaacgaaaaaaagagggaaaattggtgggggcatatgaacaaaagaaaagaaaagaaagaaagatgtactttaggttatccttagatttgtaaagctgaaccatgtttataaatgatagtggatgactacattattaaa

SEQ ID NO: 7805 - DNA, 2408 bp, Zea Mays
ctccgccccgccacgcgttcatccaggtcgggggtccgtacgatgcaaaaaaatcgcgatgagtccaccacgactccaagcagctgcggacgcgccgctctaaccggagatccgttaagagtccgccgcccccatctcagcgcctgagtcagccgttctctccccgtgctcgcagccactggtttccgcgggtctagggttcgtggaggcagcgtggagcttagggtttcggcgggatgagctaccggaaggggttgaaggtttgggtggagaagggggaagggtgggtagaggcggtggtgacggaagcgaaggaccacgccgtcgccgtgctcacgagccagcgggaaaaggcacggcagaggacgatggcaactgtccagcgcacacttcaggcaatggatgaggacaacatcagagatgagtctagaactggaaggctcgtcgtcttggcggcgctggccgccggcgccatcagcatcggcaagcgcatgcccctgctggcgccatctcccccgtcatcttggcggcgctggccgccggtgccatcagcgtcggcaagactgtcatagatgagattttcatgttctgaagactgaattcaagatgatgggatgcttgtgatatcgacagttcctggttctccaccaaagctgtgcatcaaggctgttgcattagaaaacttctgtccaagagcattttcattgctgtcgatcgccggactatctgggttttgctaggccatgcagtgtcctagaaggcctattaattcaatttgcagcagactgaaagctaaagaagtccgtattagagtctgggctcatcaattagctgctcattctccagtacttcattcccttggtcccctacaactccgacctgactggctaattgctgctggagaaaggaacaaaggagaatggagcatgtagtggatgcgccaatgcaggtttcagttcctcaagtatatgttcctatcggacccctttgttcctcaagtgagtgatggcgctggggttgtcttactaagcgagacatttgcactgaacaattgcagttccgctgaactcatagagttcatgtcaatctctctattgaactttaatttttgaaagtttggtacagagattttcataaaaaaaacagatattgcctgattctgttggcacctgatttcctgaatttcatttcgaaaaaagagaagaaacagatatggtctcattctattttatttcaatattatcatgtggtatataagtcttatcacacttgtgtgctgcccatgggagcggtagttcagaagcagttgaacctggagttggtgttccagatcattttctctgaattacatcatattatctgtaccaggtccagatgcaaccagggcagccatcgatgtctgcgggtttattatcaaagatctttggttagggagattgaagcccggttaaaagccaagtgtgacacattagctgatctatttgctatggatgaaagattgttttgagcacatttttagtaaggtctcgttaagcgccgcgtttgagcaccatgtccttccctggatgcacagaagctactgacttcgtggttacaatcgccctttgctttacctcctcccatgatggaaaggttgaggtgagaatggaactattgatggccaaggcattgtgtggtgggatatgtggaagaaaggtacactgccctatacaagacctcaccaattgatctatttatgtggtgggatatgtggaagaaaggtttgtgatggaggtgataaaaactttgtggtgcgaaagggcctctagcgtaatggttaaggcttccaagtagcaactccaggtcccagattattgctcttcgagctatcacgtggtggtggagctatcaattcagttgatgacttgactgaaaattgtctaggctcatctgatcttgtctatgagtatgttctcgtagaagaaaagtacacatttgtggggaatgtgaaaaatccttgctcttgtactatactgattaaaggattcaaggatgatgttctgttaagaacacagttgaggatgaagcagttgtgttgttatcatccgtaaatttctttgtccaggaattaggaagaataaatttgtgttgatactgtgaaggtaccaggccgacacaaatttatttgataaaatacgtgttcccaaatgtgtgtatgtacgatcaggatcgaataatttatgtcctgtcccaatgtacagaggcactaaggaaacctgtcgcggttcacagcgaacgggtcttgaactcttggctcgctcattttaatattattatgtaaatttcctatcaagaaacgttcctgtgacattacatcgagaagacgagaatcatgactgcagaaatacatctttattcactactgtatc

SEQ ID NO: 7806 - DNA, 2439 bp, Zea Mays
cgcgcatccacgcccccgccgtctcactccgccccgccacgcgttcatccaggtcgggggtccgtacgatgcaaaaaaatcgcgatgagtccaccacgactccaagcagctgcggacgcgccgctctaaccggagatccgttaagagtccgccgcccccatctcagcgcctgagtcagccgttctctccccgtgctcgcagccactggtttccgcgggtctagggttcgtggaggcagcgtggagcttagggtttcggcgggatgagctaccggaaggggttgaaggtttgggtggagaagggggaagggtgggtagaggcggtggtgacggaagcgaaggaccacgccgtcgccgtgctcacgagccagcgggaaaaggcacggcagaggacgatggcaactgtccagcgcacacttcaggcaatggatgaggacaacatcagagatgagtctagaactggaaggctcgtcgtcttggcggcgctggccgccggcgccatcagcatcggcaagcgcatgcccctgctggcgccatctcccccgtcatcttggcggcgctggccgccggtgccatcagcgtcggcaagactgtcatagatgagattttcatgttctgaagactgaattcaagatgatgggatgcttgtgatatcgacagttcctggttctccaccaaagctgtgcatcaaggctgttgcattagaaaacttctgtccaagagcattttcattgctgtcgatcgccggactatctgggttttgctaggccatgcagtgtcctagaaggcctattaattcaatttgcagcagactgaaagctaaagaagtccgtattagagtctgggctcatcaattagctgctcattctccagtacttcattcccttggtcccctacaactccgacctgactggctaattgctgctggagaaaggaacaaaggagaatggagcatgtagtggatgcgccaatgcaggtttcagttcctcaagtatatgttcctatcggacccctttgttcctcaagtgagtgatggcgctggggttgtcttactaagcgagacatttgcactgaacaattgcagttccgctgaactcatagagttcatgtcaatctctctattgaactttaatttttgaaagtttggtacagagattttcataaaaaaaacagatattgcctgattctgttggcacctgatttcctgaatttcatttcgaaaaaagagaagaaacagatatggtctcattctattttatttcaatattatcatgtggtatataagtcttatcacacttgtgtgctgcccatgggagcggtagttcagaagcagttgaacctggagttggtgttccagatcattttctctgaattacatcatattatctgtaccaggtccagatgcaaccagggcagccatcgatgtctgcgaacagggtttattatcaaagatctttggttagggagattgaagcccggttaaaagccaagtgtgacacattagctgatctatttgctatggatgaaagattgttttgagcacatttttagtaaggtctcgttaagcgccgcgtttgagcaccatgtccttccctggatgcacagaagctactgacttcgtggttacaatcgccctttgctttacctcctcccatgatggaaaggttgaggtgagaatggaactattgatggccaaggcattgtgtggtgggatatgtggaagaaaggtacactgccctatacaagacctcaccaattgatctatttatgtggtgggatatgtggaagaaaggtttgtgatggaggtgataaaaactttgtggtgcgaaagggcctctagcgtaatggttaaggcttccaagtagcaactccaggtcccagattattgctcttcgagctatcacgtggtggtggagctatcaattcagttgatgacttgactgaaaattgtctaggctcatctgatcttgtctatgagtatgttctcgtagaagaaaagtacacatttgtggggaatgtgaaaaatccttgctcttgtactatactgattaaaggattcaaggatgatgttctgttaagaacacagttgaggatgaagcagttgtgttgttatcatccgtaaatttctttgtccaggaattaggaagaataaatttgtgttgatactgtgaaggtaccaggccgacacaaatttatttgataaaatacgtgttcccaaatgtgtgtatgtacgatcaggatcgaataatttatgtcctgtcccaatgtacagaggcactaaggaaacctgtcgcggttcacagcgaacgggtcttgaactcttggctcgctcattttaatattattatgtaaatttcctatcaagaaacgttcctgtgacattacatcgagaagacgagaatcatgactgcagaaatacatctttattcactactgtatc

SEQ ID NO: 7807 - DNA, 2442 bp, Zea Mays
tctcactccgccccgccacgcgttcatccaggtcgggggtccgtacgatgcaaaaaaatcgcgatgagtccaccacgactccaagcagctgcggacgcgccgctctaaccggagatccgttaagagtccgccgcccccatctcagcgcctgagtcagccgttctctccccgtgctcgcagccactggtttccgcgggtctagggttcgtggaggcagcgtggagcttagggtttcggcgggatgagctaccggaaggggttgaaggtttgggtggagaagggggaagggtgggtagaggcggtggtgacggaagcgaaggaccacgccgtcgccgtgctcacgagccagcgggaaaagacttctgcaatccgcgatgtgcaggcacggcagaggacgatggcaactgtccagcgcacacttcaggcaatggatgaggacaacatcagagatgagtctagaactggaaggctcgtcgtcttggcggcgctggccgccggcgccatcagcatcggcaagcgcatgcccctgctggcgccatctcccccgtcatcttggcggcgctggccgccggtgccatcagcgtcggcaagactgtcatagatgagattttcatgttctgaagactgaattcaagatgatgggatgcttgtgatatcgacagttcctggttctccaccaaagctgtgcatcaaggctgttgcattagaaaacttctgtccaagagcattttcattgctgtcgatcgccggactatctgggttttgctaggccatgcagtgtcctagaaggcctattaattcaatttgcagcagactgaaagctaaagaagtccgtattagagtctgggctcatcaattagctgctcattctccagtacttcattcccttggtcccctacaactccgacctgactggctaattgctgctggagaaaggaacaaaggagaatggagcatgtagtggatgcgccaatgcaggtttcagttcctcaagtatatgttcctatcggacccctttgttcctcaagtgagtgatggcgctggggttgtcttactaagcgagacatttgcactgaacaattgcagttccgctgaactcatagagttcatgtcaatctctctattgaactttaatttttgaaagtttggtacagagattttcataaaaaaaacagatattgcctgattctgttggcacctgatttcctgaatttcatttcgaaaaaagagaagaaacagatatggtctcattctattttatttcaatattatcatgtggtatataagtcttatcacacttgtgtgctgcccatgggagcggtagttcagaagcagttgaacctggagttggtgttccagatcattttctctgaattacatcatattatctgtaccaggtccagatgcaaccagggcagccatcgatgtctgcgaacagggtttattatcaaagatctttggttagggagattgaagcccggttaaaagccaagtgtgacacattagctgatctatttgctatggatgaaagattgttttgagcacatttttagtaaggtctcgttaagcgccgcgtttgagcaccatgtccttccctggatgcacagaagctactgacttcgtggttacaatcgccctttgctttacctcctcccatgatggaaaggttgaggtgagaatggaactattgatggccaaggcattgtgtggtgggatatgtggaagaaaggtacactgccctatacaagacctcaccaattgatctatttatgtggtgggatatgtggaagaaaggtttgtgatggaggtgataaaaactttgtggtgcgaaagggcctctagcgtaatggttaaggcttccaagtagcaactccaggtcccagattattgctcttcgagctatcacgtggtggtggagctatcaattcagttgatgacttgactgaaaattgtctaggctcatctgatcttgtctatgagtatgttctcgtagaagaaaagtacacatttgtggggaatgtgaaaaatccttgctcttgtactatactgattaaaggattcaaggatgatgttctgttaagaacacagttgaggatgaagcagttgtgttgttatcatccgtaaatttctttgtccaggaattaggaagaataaatttgtgttgatactgtgaaggtaccaggccgacacaaatttatttgataaaatacgtgttcccaaatgtgtgtatgtacgatcaggatcgaataatttatgtcctgtcccaatgtacagaggcactaaggaaacctgtcgcggttcacagcgaacgggtcttgaactcttggctcgctcattttaatattattatgtaaatttcctatcaagaaacgttcctgtgacattacatcgagaagacgagaatcatgactgcagaaatacatctttattcactactgtatc

SEQ ID NO: 7808 - DNA, 2830 bp, Zea Mays
cgccatgccgccacgcgcatccacgcccccgccgtctcactccgccccgccacgcgttcatccaggtcgggggtccgtacgatgcaaaaaaatcgcgatgagtccaccacgactccaagcagctgcggacgcgccgctctaaccggagatccgttaagagtccgccgcccccatctcagcgcctgagtcagccgttctctccccgtgctcgcagccactggtttccgcgggtctagggttcgtggaggcagcgtggagcttagggtttcggcgggatgagctaccggaaggggttgaaggtttgggtggagaagggggaagggtgggtagaggcggtggtgacggaagcgaaggaccacgccgtcgccgtgctcacgagccagcgggaaaaggcacggcagaggacgatggcaactgtccagcgcacacttcaggcaatggatgaggacaacatcagagatgagtctagaactggaaggctcgtcgtcttggcggcgctggccgccggcgccatcagcatcggcaagcgcatgcccctgctggcgccatctcccccgtcatcttggcggcgctggccgccggtgccatcagcgtcggcaagactgtcatagatgagattttcatgttctgaagactgaattcaagatgatgggatgcttgtgatatcgacagttcctggttctccaccaaagctgtgcatcaaggctgttgcattagaaaacttctgtccaagagcattttcattgctgtcgatcgccggactatctgggttttgctaggccatgcagtgtcctagaaggcctattaattcaatttgcagcagactgaaagctaaagaagtccgtattagagtctgggctcatcaattagctgctcattctccagtacttcattcccttggtcccctacaactccgacctgactggctaattgctgctggagaaaggaacaaaggagaatggagcatgtagtggatgcgccaatgcaggtttcagttcctcaagtatatgttcctatcggacccctttgttcctcaagtgagtgatggcgctggggttgtcttactaagcgagacatttgcactgaacaattgcagttccgctgaactcatagagttcatgtcaatctctctattgaactttaatttttgaaagtttggtacagagattttcataaaaaaaacagatattgcctgattctgttggcacctgatttcctgaatttcatttcgaaaaaagagaagaaacagatatggtctcattctattttatttcaatattatcatgtggtatataagtcttatcacacttgtgtgctgcccatgggagcggtagttcagaagcagttgaacctggagttggtgttccagatcattttctctgaattacatcatattatctgtaccaggtccagatgcaaccagggcagccatcgatgtctgcgaacagggtttattatcaaagatctttggttagggagattgaagcccggttaaaagccaagtgtgacacattagctgatctatttgctatggatgaaagattgttttgagcacatttttagtaaggtctcgttaagcgccgcgtttgagcaccatgtccttccctggatgcacagaagctactgacttcgtggttacaatcgccctttgctttacctcctcccatgatggaaaggttgaggtgagaatggaactattgatggccaaggcattgtgtggtgggatatgtggaagaaaggtacactgccctatacaagacctcaccaattgatctatttatgtggtgggatatgtggaagaaaggtttgtgatggaggtgataaaaactttgtggtgcgaaagggcctctagcgtaatggttaaggcttccaagtagcaactccaggtcccaggttcgatctctctcgggggcgaattttgggcttggttaaaataatcctctcgttgtgtcccgcccggtctcgggggtcgatatcctgcgcgccaccctccgtctgggctgttgcagagtggcctgttgatcggcccgttaaggctgggggcagagttcggggttttttttttcggtcgggaccatgtttcggtctcttcttaatataatattgagagggcagtcttttcatcccagccggagccgagttgataaaaactttgtggtgatcaatcagaagggcattgaccctccatctttggatctctttgctagagcgggggtaatctctcctctatttggtggttacatgacctaagttcattttgaaccctgaatggatttagattttcatttgagaacgtgaatctcatgaagttaagggttgaagaaggcattgactgattaaaactgctctgaaatgatcatttatgctcagattattgctcttcgagctatcacgtggtggtggagctatcaattcagttgatgacttgactgaaaattgtctaggctcatctgatcttgtctatgagtatgttctcgtagaagaaaagtacacatttgtggggaatgtgaaaaatccttgctcttgtactatactgattaaaggattcaaggatgatgttctgttaagaacacagttgaggatgaagcagttgtgttgttatcatccgtaaatttctttgtccaggaattaggaagaataaatttgtgttgatactgtgaagaggcactaaggaaacctgtcgcggttcacagcgaacgggtcttgaactcttggctcgctcattttaatattattatgtaaatttcctatcaagaaacgttcctgtgacattacatcgagaagacgagaatcatgactgcagaaatacatctttattcactactgtatc

SEQ ID NO: 7809 - DNA, 2024 bp, Zea Mays
ttttttttatcagaatcactctaatgtttttcagagaccatttaaagattaactaatcaacaccctgctgtattgtatgcgataaaatcaaaattattctgatgtttttaaaatgaccataaaagaacgatttccttccattatttgagagttgtgttaatggagttctttattattgcctctattaggtggaacatgttagagccgaaagaaacttgttggcggaagttgctagtcactgcattgtgaagctttactattctttccaagacaccgagtatctttacctaattatggagtacctccctggtggtgatatcatgacccttctcatgagagaggataccttgactgaacatgtagcgcgattctacattgctgagacaattcttgctatccaatccatccataaacataactacatccacagagatattaagcctgataatttgcttctagataaaaatggtcacatgaagctgtcagattttgggctgtgcaagccaattgactgttcaaagctctcaacgttgaatgaaagatgaacccatgggtgatgacaacatgagggaatcaatggatattgatagttctttgtccaatacagcaaatggtagaagatggagaagtcaacacgaacagcttcagcactggcagatgaacagaagaaaactggcattctcaactgtcgggacaccgggattatattgctccagaggttctgctgaagaagggatatggaatggaatgtgattggtggtctctaggcgcgatcatgtatgagatgctagttgggtatccaccattttatgccgatgatccaataactacatgccgaaagattgtgcactggagaaaccatttgaagtttcctgaggatgcaaagttgtcaaatgaagcaagagatctcatttgccggttattatgtgatgttgaccacaggattggcagtgcaggggcagatcaaataaaggcacatccttggttccaaggagttgcatgggataaactttatgaaatggaagcagcatttaagcctcaagtaaatgatgagctggatacacagaatttcatgaaatttgaggaactggaaaatcctccagccaaaacaggctctgggccttcaagaaagatgatgctgaactccaaagatctgagctttgtggggtatacatacaaaaactttgatgcagtgaaagcaataaaaatttcagtatttacgtgctaggtgtcaatggcttctaaatggacattatgttctaatattacttctgaaaaattgaaactacaaatgcatgcagatctgcaaaggaattcatctctaacaaggccttccattggttcgatattcggtccatcaggcatggattctcccatggaaccaaacggaagggacacacacatgcacacagtttcatctggtgacccaatgattccctaaccttcagtgccgtctgtcctcagcaaatttccgaactaaatcagcgtgcaaacgccagggtgatgtggctccagctggacaacatgcttatttttagccaggtctctgctctctttatcgtgggcaagcggtttgtagaaatccaccaaagtttctagttgtaaaatagtatgccacagacttcaacaaaggtcccatgcattattggctcatcagacatgggggcagtttttttttggagaaattgcaccttgcggctggctgcccaggttggcagagcaaattgcggccttctcttgtggcagttcccggtctgcaggaaagggaaatacgacggtgttgttgcagcaggaattctcatggttagtgtcgttgttggtgtttgatatgtatcaggaattttcacatttgaagtagggtttctgttagcagagttgtagctattgacaagcaacatccttttacggagttgctttttttcgttgatgtatggaaaacgagacattgtagaaatcgaagttcgatctagccttgtatgctgcttatctgattcaacgtgtttctcagtatttttgtctaaaaa

SEQ ID NO: 7810 - DNA, 473 bp, Zea Mays
gggggtcttcaggctcggagataaataggtttgatcaaagcactccagtccattattcatattcgttcacacaagattaataggttgaccgttttttttgttaattccttgatgtttattttattttagcagtttacatatttggtttgctgcttagtcatttgaaggttaggaaactggaggcgtacatcatcagttattggtacaagaaagggcacagaccaatagagcatcctttgctcccagatgcaagaagaatagtgaagtttgacctatatgatgactcagtttcaaccagaatataatgtaatgatgtatcttgcacctgctcatcagagagtgagatctgttgtttgtagcttagtagaagattacaagggagaaacatatgatgtgtagagatttgctgtctctctctttcactctcgtagaatgcaatttttcagggaaacttaaatttatatccttttcta

SEQ ID NO: 7811 - DNA, 2341 bp, Zea Mays
ccgcgatgcaaccgccccgcgacgcctgcccacaccctacaccaccgaccaccgtctgcgcttcgcccccaccccacggccgaccatcgccatccgcatccaccactatgtcgcgtgcctcctctcatccaccaccgttgccccctcctcgtcgtcacggctgcccgttgcgtcctagctccacaccgatgatgacgatgaatactgcgcattctgcaagctcagccgctcggccccatagatggaaggtccgccacctcctcccgcgccgtcaatggaaggaaagcctaatctcctcgcccgcagtcctaggaaggtccaccacctcaccacctgccgcgccgcaacgtcaatggaaggcgtggttggtgcaaggagattcttctctgcgacggcaacgccaccagctccttggaggtgttgcggcttctctgcaactacacatattttggttagccttactcaacctttgcatcctgtcttacttgctttctctaactgtagggatttctcgagttaggattgtgtttgcttctgacggtgggcttaactgggtgctatgtgttactgatgtgctattgtagaattagagaactgttgggtgctatgtgttactaatacattgggaattagggaactgttgggtgcttgtgttactgatgtgcttttgtagacggtgccattttttaagtattctcaactatcgagggaggccagattgacatcatcctaactgaggttgatcgatggtgtggtgttcaccgtgaagagcctacaaggagctcaagatcttgtaaaaggtctgttttcctaggattatagttgttctttccattagcgctgctgctacgaacaggatagggtacctgctgctgaaaagcaatcctcttcccaaaaagtctcgagaagctggagcaggttctaatgcttgtcctagaaaagtgacttccaatggtccttaaagctaatgctcgctttttgaaatcacaagaagaattgagaaggtcagatgatgggtcaactacaattggtgatgcaaaggaagaggttgttgcagcaatcattgttgtcaagtcgtctactctatttcagtctatcatacgtggtaatttgcaatatgcttctctaagtgcactaagaaggctttcacttgatcctggtaatcaaacattcctccaccgagatgtgcaaggcaggctatgaagtgctataccatggagaggttggtagatatttacaagatgtactgccagaggggtttggatagctcaacaaattctgatgatttgagtggttatctagaaaaaatattaagatgtctgtatgaaaaatattttaggattttgatcttctcaacatgttaaagaaggaagaagaaatgcttctagctgtaaaggaaaagaacgtcgaaggagctcgttgaatatggcgagcaattgcttgggatattccgtgaggagcttgcaggctatgaagtgctataccatgcagaggttggcagaaactttgagtcaccacaaataatgactgaaatagtagtgaataaaaaggaagcaaatagctgattgatcaagttgtccattacttggaggaaagattgagagaattcgatgaagagaaaagaagaactaaataagtgccaacagctagaaaaacagagaagatcacttgagtatactattttggaccatgagcgcccctgcgtagctccataagttccaccgccaccaccaggccctcaagaaaactgcaattatccatttgttttggctaaatgaggggcatatgatgatgatgagacacccatggatattgatattaaaattaatcttgatgttgatttggaaaaacagataattgcagcaattgatccaaagctacttcaacattggcacatgttgaagatcattgataatggggagttctatgaacaagagaaaccccttacttttatatgatttgaagtccttggttctcattttaaagcaggtggaaattctaggaaaatctaaaaggtttttgatgagatctaggaggagaggacagccatggcgctcacgtggcggcctccctcttctcgtagaagggcaagacaaggtccaatcaggaagtcgtcatactctatcaggcgttggagctgctaggcgacatgtgtgggagtggtgttcagcctaacatagttgtctacaactgcttcatgggtattgcaattcgtgagatattaagatcaatgataatatgtgttatttcgtttttatgtaatcattgtgcataaatttgttatcaaataatttgtatgccatcacaacacacggacataaacatgtattgcttcaccatc

SEQ ID NO: 7812 - DNA, 1736 bp, Zea Mays
cgagagcccgagaccgcccaggtgcccaccactccaccagccaaccctagagcctctccagtctccactgctcggccgccgcctgccgcagcccgccgtccactggtcccgcctcccggcgtccgctccacgcctccactgctcccggcgtccgctccattgctaccatcgtccggcgttctgctcctgcgccctccctttgattcgttgccagttgtagtgtccgggcagatttgagctgtggcagcaagcaaggattgacgaagcgtgcgttcccatcgcaccaccatgggctacacagagatcgacatccacccctctgggagcggcaagatgtgatagatattagtatgaaagataaaaactagaatgctatgcctgtcagaggagctttcttcagtttcagaacacacctctccatctttcggtgcttggtggatcaccgtctaaacgatccaccaccagaaccgcccaaccccaagatagtttttcagttggagaaaacatttaagacaacattttcatcgtttgttctccatatggggcttgtttcacgccacttgaaggaagaagggaatggtggtgttaagttcggacaatacatctacacatcttggagcatcggcatcaatgttctcaatcttctcaaatttcaaattatactggtcattactttgaccattagaataaaatccctataaaacgtggccatgcaatcactggttgtaaactgatgggcagaatgttgtaggatggattggctcaagaactaatatagcttacttatgacaatgtagtaattcatgaagttattgttccttatgttcatggagtttgttctgctaggtttttatgcttttaatttctatttccttaacgaaacctcaggcaccttaaagacagcttggatgattggtttcatgaacagctagagaacttggatgatgattatcttgtgtttgattgccctaatatattctcaaatcatcttttcatgctttagttgtttcttaatagttgcacagtttcatctcactcatattcttgccacttacatgtatgtgacaaaacagacaatccgtcttttttattgcttatggcgttgtgcattatacatgtccaccaattatatacaaataccatttgtgggttacctctggtgtgtttaggtattcctcagattcctgacattttttctgtctttaaatgtcatatcactattaaaaaaattgatttttgttgtctaaaataccacaactacttttctaggtgcgagctgcaatcaaagttaaggcattagtcatcatttgcttcacctcttctggacaggctgcaagggtgttctggacaaagaaagcttgtaccttaaaacaagaggatacaagaagctggagtggttgtctaaaggcttttgaactgcttgaagcattagtgtagctttggtgattttgtgactgatcagctctggagcagctagagtgatgtagttgtgggcttttgaacaatagctggagtgatatgaaacattagtgatgtggttgtgggcttttgaactgcttcaagctggagtgatgtcgctgtgttgcttttgtgactgatcatctctggagcttttgtgaatgatctaactagctatatgtaaatgatctagttgtgaatggtattataattgtgatgattttgtgaatatataattgtggtgcttttgtgtttatgtgatggatctatgactggta

SEQ ID NO: 7813 - DNA, 3360 bp, Zea Mays
gcaatcactgctagtccgcaggcaaccgagagcccgagaccgcccaggtgcccaccactccaccagccaaccctagagcctctccagtctccactgctcggccgccgcctgccgcagcccgccgtccactggtcccgcctcccggcgtccgctccacgcctccactgctcccggcgtccgctccattgctaccatcgtccggcgttctgctcctgcgccctccctttgattcgttgccagttgtagtgtccgggcagatttgagctgtggcagcaagcaaggattgacgaagcgtgcgttcccatcgcaccaccatgggctacacagagatcgacatccacccctctgggagcggcaaggtaccgaccccctgcccttacaactcctagagctctacccctcacgctgaccttagggagacaggatggtttgctcgcctactagaggacatgctctgatggtgttccctctgctaccatttttagttcttgattgtaaagtgtatgttctacattttgaaatagaactggattgtgcatattttgttctacatgtaaagtgtatgttctacatgtaccttttagatcgcttgcaatatgatttattttaacacatatttgaaatagaactggattgtgcatattttgtaaagtgtatgttctacattttgtaattcgtattattcatttttcctttagtttttctctttctacaactcctgtctctttacaatcaaatttcagatgtgatagatattagtatgaaagataaaaactagaatgctatgcctgtcagaggagctttcttcagtttcaggtactgctctgctttattagtcatccagccgatggataatttctatacgtgtatcgcccctgcactttcaaacacatgttcattgtttccaatcacataatttttttcttctcttagatttactatgtggttgtggtctcagtttggtttgtaggttaatttgtatactcatgtgattttagtttttccgtgtattttatgttcatttagtatgtcttaatttagttactttcaattcttgatgctaataatatggatagattgcgacactactttctggcttgagcagaaatgagtttgttgtatatagcagaatatagttgtcgtagctggcaacaatgaccgctctttggatgatctgaaaactattctgtagtcaggtagttaaatatagctgaatatccattattatgttttattaatcttatttgttttttctgtcaaaagaacacacctctccatctttcggtgcttggtggatcaccgtctaaacgatccaccaccagaaccgcccaaccccaagataggtatgtgcaggttcaactactcatttagatattggtacaacctgtaatagactttggtacaataggatttggttctgctattcactttgtttttagttccaaacaatcaaaaaattgcatgtcctttaggaaaaatatcacaggaatattagtaacataacactgataataaaaaatgctttgattctatatatttttcatgttataaggttgaaaacattccgtctcacggatcaaaatgggtacaaggggacgtactgcatttacaaatatatttaaccataataaaacatctttggaaaatgaatatcattttaagtccaaaaatgtttttgttgaatgttcattaagctatagtgaagagtaaacttagcatttcttttctatatctctccctcgtgctcatgtcgctgcagtctcctccatccaacctttcctacgtaggcagctccatctcagtcgttgtacccgttcaatggcgagctggtggcagcgatgtaggagatgatccatgccgaggtgcacaagtacatgttagtggacggcacctgccaaagatacaccgtttctactggtacacattttattttttatggtgagaattaattttgtagcttgcgcaaaaccaaaggttgagtgatttgtcaaggcagaaatcagtataatgataggtgtgcttgagcttttaatagctggtttatttgaacttttatctttttatgatcatgatatattgagacataaatatattacatgtacctttgcagtttttcagttggagaaaacatttaagacaacattttcatcgtttgttctccatatggggcttgtttcacgccacttgaaggaagaagggaatggtggtgttaagttcggacaatacatctacacatcttggagcatcggcatcaatgttctcaatcttctcaaatttcaaattatactggtcattactttgaccattagaataaaatccctataaaacgtggccatgcaatcactggttgtaaactgatgggcagaatgttgtaggatggattggctcaagaactaatatagcttacttatgacaatgtagtaattcatgaagttattgttccttatgttcatggagtttgttctgctaggtttttatgcttttaatttctatttccttaacgaaacctcaggcaccttaaagacagcttggatgattggtttcatgaacagctagagaacttggatgatgattatcttgtgtttgattgccctaatatattctcaaatcatcttttcatgctttagttgtttcttaatagttgcacagtttcatctcactcatattcttgccacttacatgtatgtgacaaaacagacaatccgtcttttttattgcttatggcgttgtgcattatacatgtccaccaattatatacaaataccatttgtgggttacctctggtgtgtttaggtattcctcagattcctgacattttttctgtctttaaatgtcatatcactattaaaaaaattgatttttgttgtctaaaataccacaactacttttctaggtgcgagctgcaatcaaagttaaggcattagtcatcatttgcttcacctcttctggacaggctgcaagggtgttctggacaaagaaagcttgtaccttaaaacaagaggatacaagaagctggagtggttgtctaaaggcttttgaactgcttgaagcattagtgtagctttggtgattttgtgactgatcagctctggagcagctagagtgatgtagttgtgggcttttgaacaatagctggagtgatatgaaacattagtgatgtggttgtgggcttttgaactgcttcaagctggagtgatgtcgctgtgttgcttttgtgactgatcatctctggagcttttgtgaatgatctaactagctatatgtaaatgatctagttgtgaatggtattataattgtgatgattttgtgaatatataattgtggtgcttttgtgtttatgtgatggatctatgactggta

SEQ ID NO: 7814 - DNA, 933 bp, Zea Mays
atgctgtttgtgttatccagttgtttttctcatcattttatgcaagggatgctcactattagattggagcttaaatttgcctcttacctgtggaaataggttctttgtgacggagagattccattcactggcttggtagagaaagtggagcaagagctcttctggaaggctgagcgctcagatctgtcgtctagaccaaatctctataaggttctttattcatttgaagcacataggaacaaatggaggaaagcagctgcatacatgtacaggtactttgttagattgaatagagaaggtaatgcaggcggcagccaccaacttcctcacgtgttgcaagagaggttgcatgctttatctgctgctatcaacgcattgcagcttgttgatccctcatttgcatggctcgattctatttgtgaagccgatgataaaatttctccaagtaaaagaccccggaatcttttgatggagaactcggcttttggcacaaactcagaactttctagattgcaattttgtgttgacattgaaatccttgaaaaagaatacatattaacagaagcacagtatatgctcagcactttgaaatcaagttttgatttttcagaaagccaatctattgagtccctgatggatattcttataaatgagaaattgtatgatatagccttcacaattgtgctaaaattttggaaggagtcagaaataaaaaagcaattggaccgtgtattttcagtcattgcgcagcaatgctgctcgaacagatcagacaacaaatcaagtaaacaagtgccacttctgccttcttctgagaatgatgcatgggagatcaacaataggagtattgctgtgacccaacaattgcaggggagcaaccactgggaaacccttgaactatatttgctttcaagttggaaggcagacttattg

SEQ ID NO: 7815 - DNA, 1760 bp, Zea Mays
atgctgtttgtgttatccagttgtttttctcatcattttatgcaagggatgctcactattagattggagcttaaatttgcctcttacctgtggaaataggttctttgtgacggagagattccattcactggcttggtagagaaagtggagcaagagctcttctggaaggctgagcgctcagatctgtcgtctagaccaaatctctataaggttctttattcatttgaagcacataggaacaaatggaggaaagcagctgcatacatgtacaggtactttgttagattgaatagagaagcttgttgatccctcatttgcatggctcgattctatttgtgaagccgatgataaaatttctccaagtaaaagaccccggaatcttttgatggagaactcggcttttggcacaaactcagaactttctagattgcaattttgtgttgacattgaaatccttgaaaaagaatacatattaacagaagcacagtatatgctcagcactttgaaatcaagttttgatttttcagaaagccaatctattgagtccctgatggatattcttataaatgagaaattgtatgatatagccttcacaattgtgctaaaattttggaaggagtcagaaataaaaaagcaattggaccgtgtattttcagtcattgcgcagcaatgctgctcgaacagatcagacaacaaatcaagtaaacaagtgccacttctgccttcttctgagaatgatgcatgggagatcaacaataggagtattgctgtgacccaacaattgcaggggagcaaccactgggaaacccttgaactatatttggataaatacaaagacctgcatcctaggttgccagtcattgttgctgagacgcttctttatactgatcctgagattgagctaccactttggttggttcagatgttcaaggctaataaggcagggaacaagatctcatggggcatgtctggaaaagaggcagatcctgctgctttattcagattgtacataaactacggacgccacgcagaagccaccaacctgctggtggagtatctagagtcgttcgcatcaggccagtggacgtcctccaccgcaagaagatgtccgccgtttggttcccctacaccgccgtcgagaggctctggtgccagcttggtgagatgcaacgggcagggcacagcgtggatcagtgcgaccggctcaagaagctgctgcacggagccctgatgagccacctgcagcaggtcgtggtcgactcggatgatgtgctgtcgtcagttggagatgggcaggggatggaggaccagagcagctgaagtcctgaagatcgtgttgttggcatgtgtagaaaacgatgtgccaccgctggatactgtatgtgattgtttgtgtggtcagctgaccaagagttacgcctgtgtcttttatatagaattattattagatgaaaacaaagacggagcgatggctccatttgtaacgtgagcatggaactgtcgctgatgacgagctgttcacttcccatgtgtagatgtagaaggtggattgacgcatccattacagcactgctgcactggtattgtatcggttctgccttcggggtgtgtaatggggttgttgcgatcgggttcagattagtgttgagcgtcgtggcattagggcatgtacaataccattcaatatatggtcttttaaggggtttctaaagagttaattaaaaaaatacaagagattacctctttatgaaaagcttgtt

SEQ ID NO: 7816 - DNA, 1921 bp, Zea Mays
atgctgtttgtgttatccagttgtttttctcatcattttatgcaagggatgctcactattagattggagcttaaatttgcctcttacctgtggaaataggttctttgtgacggagagattccattcactggcttggtagagaaagtggagcaagagctcttctggaaggttcactcattttcagcatagtacaatatttgtgtcttgctttccgccacaccgatcttatttttagtttcacaggctgagcgctcagatctgtcgtctagaccaaatctctataaggttctttattcatttgaagcacataggaacaaatggaggaaagcagctgcatacatgtacaggtactttgttagattgaatagagaaggtaatgcaggcggcagccaccaacttcctcacgtgttgcaagagaggttgcatgctttatctgctgctatcaacgcattgcagcttgttgatccctcatttgcatggctcgattctatttgtgaagccgatgataaaatttctccaagtaaaagaccccggaatcttttgatggagaactcggcttttggcacaaactcagaactttctagattgcaattttgtgttgacattgaaatccttgaaaaagaatacatattaacagaagcacagtatatgctcagcactttgaaatcaagttttgatttttcagaagccaatctattgagtccctgatggatattcttataaatgagaaattgtatgatatagccttcacaattgtgctaaaattttggaaggagtcagaaataaaaaagcaattggaccgtgtattttcagtcattgcgcagcaatgctgctcgaacagatcagacaacaaatcaagtaaacaagtgccacttctgccttcttctgagaatgatgcatgggagatcaacaataggagtattgctgtgacccaacaattgcaggggagcaaccactgggaaacccttgaactatatttggataaatacaaagacctgcatcctaggttgccagtcattgttgctgagacgcttctttatactgatcctgagattgagctaccactttggttggttcagatgttcaaggctaataaggcagggaacaagatctcatggggcatgtctggaaaagaggcagatcctgctgctttattcagattgtacataaactacggacgccacgcagaagccaccaacctgctggtggagtatctagagtcgttcgcatcgtcgaggccagtggacgtcctccaccgcaagaagatgtccgccgtttggttcccctacaccgccgtcgagaggctctggtgccagcttggtgagatgcaacgggcagggcacagcgtggatcagtgcgaccggctcaagaagctgctgcacggagccctgatgagccacctgcagcaggtcgtggtcgactcggatgatgtgctgtcgtcagttggagatgggcaggggatggaggaccagagcagctgaagtcctgaagatcgtgttgttggcatgtgtagaaaacgatgtgccaccgctggatactgtatgtgattgtttgtgtggtcagctgaccaagagttacgcctgtgtcttttatatagaattattattagatgaaaacaaagacggagcgatggctccatttgtaacgtgagcatggaactgtcgctgatgacgagctgttcacttcccatgtgtagatgtagaaggtggattgacgcatccattacagcactgctgcactggtattgtatcggttctgccttcggggtgtgtaatggggttgttgcgatcgggttcagattagtgttgagcgtcgtggcattagggcatgtacaataccattcaatatatggtcttttaaggggtttctaaagagttaattaaaaaaatacaagagattacctctttatgaaaagcttgtt

SEQ ID NO: 7817 - DNA, 1046 bp, Zea Mays
gagagaggcacacatctttgtttcgttctcgagctatattcctactgtggtgagcacgggcgtgcagctcagtgcgccgagctctccatagctagcgtacatatacatcatgctatatgtgtgctgccgagcagctagtgaggaacacatctccggagaagaggcagcgcgtgccgtcggcgtacaaccgcttcatcaaggacgaaatccaacgcatcaaggctggcaatcccgacatctcgcacagggaggccttcagcgcggcggccaagaactgggcgcactttccacacatccactttggactcatgccagatcaccaggggcccaagaagacaagcctgctacctcaggatcaccagagaagcgacggcggcgggctactaaaggaagggctgtacgctgcggcagccaacatgggggttgctccatactaatattagagtagcaaagctgctacgtactgttagggctctatggactactacgaagctatggacgtgtttggtaggctgcatatgggccggccaggctggtaagatacagcgtacgcttgtttggttgcttgtctctgtatctggtgggctgaggggcggtgtttggttgcctgtatgtctgtgctcacctgcactgcgggatgcaacatctcgctgtgagccaggctgtggagaaacgagtttcatttctgtatctcgggagccaggccctggctagcctgtttggagcgggcaggctccactgcgaaacgaaccaaacacgccctatatgtatctagctagctagggctgttacgttaagttagacaaggccgggcttagcgtgacctcataaattggcttgttaaacgttgcagtcacgtacgtatccgctatactagctgtgtaaacgacatgcatggtcgatcgatggagcttgttaaaccttgcatgtttgtcgatcggtcccccggccccgtccttctcttttctttaccctctgctcagctgctgctagtgcactgctcctacactgctgcatgctgcttattactgtgctatcagtctagc

SEQ ID NO: 7818 - DNA, 2094 bp, Zea Mays
ccaaaacacccccgcccttcgcacgctgtctcggtatctcctctgcgccttctctctctccatctcctcaccaaccaaggcactctcgcctcccgtcttctccccctcttcttctctctctagttgccaaatcggagcggcagcaacgacagatccaatacatataggttccattgcatcacacatcagtcactccaaaaccatcaaatcacacgcccatcagatcacacaggcaaagaggagagagagagagaggagggtgggtgaggaggaagatgatgagagatatatcctactaaactatccatccatccatcaatcaggtagcccggcagcaatcgcgtgccgcctttccactcacgtacaccaccaccaccaccacctctcagcacagcagtcggctcggttcgttcgttgccgcgtcaaatcggggcaagaagccagcagctagccagccccctgtcgcagtgttgcttcgcgtgccctgctgttgcttgcaccgcgcacgtacgtacctggagcaagctgcggtcgattgatcgaccggtggttcgctgtcgccgcggtcggcatgtcgtcctcgtcctcgtcctcctcggccgccacggtgttcccgccgtccccgcagctgccgccgcctctcctggtggagaacctgccgccgctgcatcagcttacgccgccggtagccgcggcggccgcgccggcctccgagcagctctgctacgtgcactgccacttctgcgacaccgtcctcgtcgtgagcgtgcctacgagcagcctgttcaagacggtgacggtacgatgcggccactgcagcagcttgctcaccgtcaacatgaggggcctcctcttcccgggcacgccggcgaacacagccgcggccgccgcggccgcgccgccaccaccaccagctgctgctgtcaccagtactaccgccaccatgaccacggcgccgccgccgccgccagccacctcggtcaacaacaacgggcagttccacttcatcccccactcgctcgacctcgcgctgcccatccctccccaccaatccctcctgctggacgagatatccagcgccgcgaacccgagcctgcagttgctggagcagcacggcctcggcggcatgattaccagcggcaggaacgcggccgcgccgcacccgcacccgccccagccccaggcgcctgcagcgggtaaaggggccaaagagccgtcgccgcgcgctaactccgccatcaacagacggacgaaatccaacgcatcaaggctggcaatcccgacatctcgcacagggaggccttcagcgcggcggccaagaactgggcgcactttccacacatccactttggactcatgccagatcaccaggggcccaagaagacaagcctgctacctcaggatcaccagagaagcgacggcggcgggctactaaaggaagggctgtacgctgcggcagccaacatgggggttgctccatactaatattagagtagcaaagctgctacgtactgttagggctctatggactactacgaagctatggacgtgtttggtaggctgcatatgggccggccaggctggtaagatacagcgtacgcttgtttggttgcttgtctctgtatctggtgggctgaggggcggtgtttggttgcctgtatgtctgtgctcacctgcactgcgggatgcaacatctcgctgtgagccaggctgtggagaaacgagtttcatttctgtatctcgggagccaggccctggctagcctgtttggagcgggcaggctccactgcgaaacgaaccaaacacgccctatatgtatctagctagctagggctgttacgttaagttagacaaggccgggcttagcgtgacctcataaattggcttgttaaacgttgcagtcacgtacgtatccgctatactagctgtgtaaacgacatgcatggtcgatcgatggagcttgttaaaccttgcatgtttgtcgatcggtcccccggccccgtccttctcttttctttaccctctgctcagctgctgctagtgcactgctcctacactgctgcatgctgcttattactgtgctatcagtctagc

SEQ ID NO: 7819 - DNA, 1242 bp, Zea Mays
caaagcctcgcccccctgccccgcccccaccgtctcgactctcgactcctctttcccctccccgagcgtgcacgtctcgtcatcgccctactcgctcgccccatcccggagtctccccggctcccaaaccctagcgcctcccggacctcgcaggtgagggaggcggcgatgttcttctccggtgacccatcggcgcggcggcgggtcgacctcggcgggcggagcagcaaggagcgggaccgcaaggtgctgctcgagcagacgcgcgaggagcggcgccggcgccagggcctccgcctccagaacacctccgccacgaagatccagaaattcttcagagggaagaaggctttggaattggcccgctcagaggttcggaagaatttttgctcaacttttggggagcattgcgagaggatagagtggaacatctttggcactaattctgactttcttcggcaattactgttcttcttcaatgcaaatgaagacaatgacatagctatactttgtcatgtctgcaatttgctgctgcaatatgttaaacaaggcggagatgttgtaactctcttcactggtgtgaatggctcctcgctgcaacctcttgttgctcaccgagtaaaaaaatttgccctcatctgtgtgcaagcagtctatcaaaagaggcatgattggggcagccaacttttaacaacacctggaaccacatcagtgccttctgtgtcattactggaaactgtaggttgcttgataaatccaaaatttctttggaactgcaaagtagttggttatcttcagcagagaaagatctattgcttatttcgtggcattatcgtatctgtaccgcaaaatgtcagaaattctggtcattttgatagtgcatctgtgctggagcaagtgcttatgcttgttgcttcgcatgttggccatcatccctgttgttgtctgaaagtggatccaagatggagtttctcgtctcagcttctgtccatcccttttctatggcatcgtttaccacaactcaagaaggttttctccgttaacgggctcaacaaatattatatccatcaaatagcttgccttttgcccagtcttgttgatgtccttccaaacgatatatcagctaatcatccaggatatgcgtgcgtccttgcaaatgttcttgaagctgcaacctggattttgtctgatgcaaagttagcttctgattcactgatcaacttcttgggagttagatattgt

SEQ ID NO: 7820 - DNA, 593 bp, Zea Mays
actcgacttcccccacctccctcgtcagctgcagtgtcaatccctcctctccgccgcctacagctgcggggagctcgccagtcgccacttcgccagtcgccacttcgccagaatggttgcccacacgttccatcagtaccaggcagcgggtcgcgcgctgccagtccccgctgatgagcaccccaagatctaccgcatggagcttgcgctaccaacgaggtctgctccaaatccaagctctggtactatctgaggaagctcaagtctcaagaaggtttaagagcaacggtcagattctcgccatagacgaggtacagccattccacctcttactgctaatgctgatctatcattctcttatgggtttagggggtgtttggtttataggtactaatttttagttgtccattttagtccttaaattgctaaacatagggattaaaagagttatatctctattttagttcggcaatttagggactaatgcatttcaaaagcttgttggagctgtgtcattgttcaatgttagaattgtcacatagtagccctgtccaattatattatgccccacgcccaccttgcttgcgatttgt

SEQ ID NO: 7821 - DNA, 2844 bp, Zea Mays
cgctgttccgttgctgtctgcctccagcctcctgccgttacgagcgcgtcagggtttttccttggccagccggcggcggccgttgcacctcctccatccacccctagtcgaaggtcgccagttcattcatccaggctgctgcgcccgagtccctggccaccgtcgctgggcacctgccgtcctcggaagtcgcaaccggaggtgggatttattaaatttctgagatggcagaatgtcggatacaagactggaagcgcgcttcaactccagagtcagtttctagacatgaaacatcaataccaagaacaaagcaaagaaacatttttagtctattagctcagcgggagctctcacctcgaacaaaaaaccaagcaaaaaatctttggaccaaacctccaagacttgatgcttgtcctattgaatcgaaattttggggcacctatgctcagcatgatctcctttcttgggctgaagcagagttcttgcattggtggattcccaaatattgccctctcacgccttcttcgaaggcaactattgcagctgcatttagtacagatgggagagtacttgcatctacacatggtgaccatactgtcaaaataattgattggcaaactgggaaatgcttgaatgtactgcttggacatcaccgcactccatgggtggttagattccatcctcagcgttctgatattcttgctagtggaagtttggattgtgaagttcgtctctgggatgctaaaacatctcgctgcacagcagaactggtcttctataggccagttgcatcaattgcatttcatgcaactggggagcttctggcagttgcatcaggtcacaaattgtttttatgggactgcaataaacgatgggaaactttggaacttccaatcatactagaaacccgccgttcactgagagctgtgcagtttcacccccatggtgccccatatctacttacaggagaggttcacaaccttgattctgaagattcaacgatgacccctgcacttctgagcaattattccttcagagacacacctctccttggtggttctggggtagataacttgattagtgaactacaatacatgcagaattttgagcaggttggtgcctcatcatcagttccagtcactactggcagttttgatgggtcaaggctacatgatacctctggccatcatctgatgacctctttacctagtgttgggaggccccttctgggtactcatgctgctgaagctcctgccatctcattaagtgtcgggtcagaacaaactacgtctctgcttggtggtggcaccgaattaccttgtacggtgaagctaagaatatggcgccacgaaatgaagaatccatttatcacattagggcctgaggcatgcctcttgacaattcctcatgctgtactttgcagcgaaatgggtacccatgtttcaccctgtgggcgatttttggttgcttgtgttgcatgtgtgctgccacacagttatggtggccatggaagtcagttgcatgaacattatgactctactggggctggaacatcaccaactcgccaagcatttccgtctcgccaaattatatatgagcttcgggtttattctcttgaggacgcaacatttggaacagttcttgcaactagagcaataaaggctgctcactgtttaacttccatccagttttcacccacatcagaacacatactattggcatatggtcggcaacatagttcactgttgaggaccattttgatcaatggggagaccagagttcctgtgtacacagtcttggaggtgtatcgagtttcagacatggagcttgtaagagttcttcctagtgtaggagaggaagtcaatgttgcatgttttcatccttcccctggatcaggtcttgtttatgggactaagcaagggaaggttaggtttcttcggcaccatggtgcatcattcacttgctggggagaacgttcatgaggtattactttcctaccattgaaggcttgtatggattaactattccacatgttttttttggggggggggtgtggacggattgaggggataattagttggagtccaatggccattggagttggatttatccaaacgagcctagagaggtatgatttagaggcatgtgctacaaatgcagttctggacataataactgaatttgagcatcgcattcttgtgctgctgaatcttatcttgattatggcttcggcaacatcctggaagaggaatttatggtcaactgagatcatctccaagaccgagagggctaacagaaaacatcagatttcagcatccaattactcttgactaacgttccactctttgcaaaaccattgtgccggcaaggagggctactattttaggtccggttaacgtgtgtaagtagccccgtctatgagaaaatggacaaggaatcgcagcctcattcagcatgaattaccaacgatggttgactactactagtacaaggagacctcaagggatacggtcgcctgtacgaatatggatgcgagccatatactgacggccggcctcccaaagatgcgatgtgttccttagttcgatgattttttttttgaaactgtatagaagcctgcgaagaaatgtagtggttggctgagtgaagtgagggaagggataggcattatttcccttgggtgacattgaccctgtttggatcagattctagccgcgagaatctgattttcgtaataaaaaaatcgaaatcgaagtggtttacggtctatttgttttggccgaataattctttccatttggcattaaatcgccaaaaaccaagaaaaaaagcatggtcctaaat

SEQ ID NO: 7822 - DNA, 3914 bp, Zea Mays
ctcggtacaaatctctactactaattatgttagtagtgtagacgtccaaccaccgcatggcgcacgttctgccgcgcccgcatcccgcgtacgcccgcagccgccccagtcgcgcatcccgcagccgcgccgcgccgcaacccgcagcctccccgcatacgcccacagccgccccacgcgcgcatcccgcagccgcgcgatccgtccgcttcctcctccccgcgcccgcagcccccgccgccgatgccagccgccgcgcccgcgcaagggaagttgcttcccaaatcccgcagacaagatttaatcccgtgattcttcccatccatggcagccgtgcccgcaaaccgcgcctccccacgactcccacttccatggcgtcgcccccttccatccatggcagtcacgctccctctgcgcccttccatccatggctgcggctccctccgcgccgcaattcttcccatcctctccttccgcgcggtttgcggctaccaatcctctccctctgcgtcgtgttcttcccatcctctccctccgcgccggatctcgccccatgtccaccaacgccggtgtccgtgatggcgcgctcggggcagcggtggacgcagcctttgccaggcgtgtgctccaggccgaggccctcctcgggtacctctccgcgctggccaccagcccgcgtgccgagggcgacagggtggaccccgccgtcgccgcggcgcagctcggggcgctcggccggtggaagggctcggcgaggggccttcccgagtacacggtcgtccacggcatcgatggtgccgtcgtcgccgcccctgggagagccaaagccaagcagaggaggccgcagtcgaccggatttgggaatcctgctcctgccaaacgggatgaacggaaggaagcaaaatctttctggggttgatttggcttgaaggaagcgggatctttctggacaatggctgtctagcttcatccattctggtaacaaagaaaaaaacaagaaacatctggtatctgagtccagtagaaagttgtgcaaagagaagagcaaaatatctacaccagacgtctcttttaggtacagagggatggagtcttgtaagaaggtagctgcaagcttgaagtcgtgtgagccatgggggaacagggcatcctggacaaacgccgttgggccaggttggaagttgagctttgctgttgagccatggactaagggctttagcgcgtcgtgtgcggcgccatattctgctggagccacagagcatcaattatcgctcgatgagaaggtggataactccaccgttgcatctggttttgatgggtaaagttatctatcagctagattcatggcaggaaaggttttttctattgtcggtatccagcacctaatggcaattctgtgaagcccaaaggttccaagtcaccatgaaaaaattgaaatgacgagatctcttaatctaattgttgcaccttggaaggtctgaaccatcatagtttaattgtatcacccatttacacaagttcctaccatcagagttcaactgtatcacccatccataagcaattccttttgttgaaatttatgagaagacatatgcctctgttaagtctcaggaacttttttgctgggaagccaattccttactgatctgagggacaacatttttgtttgcctgatataaggtgatgaaggtggctggataacacgattatgggtaaagtgtgaaagggaaacgcgaaaagaaacgtgtcctggtcccaagtcacctgccatactgaacacgattgatcgcagaaagaaacacgttctggtctagactgacagttttggagctggagccggccatgcgctcgatcagagttccgctgcagccacgacctctctcccgaacgcgcacgaggagaccaggtggaacatatgcaagcaggttctagagcaataaccccatgaatccagatcgggggtctgcatctacacgggcgtgtactccgcaccgctcccctccggccccgaccgccgtgtgctcgttgtagccggggtcgacctcaaccacgacgacgatgcggtctcctcgccccaggctcgacctcctcgctgacctcgccctgctccacctcaactcgcgatgaggattgtcggcacgttcacaccgcgccgttgcagaacgttggagcctctcagaactctagaagctgcctaccaccacgcaccctaagataggggcatatctgtgttagtcgcctgcacacatactgaaatatgggcatatccaccatgtattcttctcttagttatgttagataagacttttactctgtcatttactgatctggtctgtttttagctccattagcttgttcacaagcttatgttagagaaggcgttatggcttttctcaagattataacatttctgaataactgttctgcgtaggcatggtaccatcttcatcatgtagctgggatgagctggcaccatgaaagaattcaagtggttaaatcatgcatctgcagaaatattgtactctcaaatggtgggttgctgcgtcatgggagtttgggtgaaggcctgaaggatgtgatgcaaaacgtcgatgcaggtctgggatgtccgcctcattatggatcaaaattcatgacgttctaaaggtgtcggatgagtacctatatactccctcccagaaaacaaggcgcctcattacactattggaagctggacgacatggatgactctggcaagatgcggtgggagcacgacgacatggatgactccgaccatgagttcgacaggaagcctagcaacagtacgcagtagcaaggttgaccagaggggcagtggagactaacccaacaccccctcctccgaccgtcatagcgcttctttcctctggcttcatttcttacctatgtatggatggtcttcaccactggttacatctagcaagtcctcctagggtgacatgaaggagattgtcatgctgccaaagcacatcaaggacaatgcaaacaaggacagaggaagaccggacatgccatttccaggaaatggaggcagcatgctgctgacaagcgattacttagggagcagaagaatgctcttgctgttgcagcattgtgttctctatcacttggcccaccagttcataaaagtacaacggtgtctaagctagcagttgaagaactagatattggccacgcctttaaagaaagacaagcaagaaagcaaaggtcctggtcacggctaaatgtttcggagttgtctggtcccattctaaatgaaaataaccctgatgctagatgcctctgctggatgttgcttgtacttgttccaccgggtatggaatcccagaccaacagttttgtctcaaaatggttacttagaaagctcatgggttatggaaccggatatattggattggttgtttcttcagcaggcctatcaatttggacagagtggatcagttttccaaatgcatgttgtttgtctgttgttagggccagcgatcagcaagttattgataatgatatttggtcgtgttttggtcagtatgacatggcggcagtggtatccacaatgttgctcgtcaccggggtgactacattgctgcacatgtttgttggaacgagactatccacttgtgcagggtccatcctttttatacctggctcctgcccttgcgatcatcaactcacaagaattctttgggatcaatgataatgttgataaatccagtggcgatgagctccacctgctgctgcttataaggtaggtggagatggtcgagaaattgagacacatggttctgctgtcctgggtaacttctgcgacaagcgcattcgatggtacaaaagacataatggaagctcttagcaacaaacatactaatctagccaatgagcttgaggtaaatatcata

SEQ ID NO: 7823 - DNA, 3334 bp, Zea Mays
tcttcctcggctcctccaccccggtcctctcctgccgcgtcgcgttcgcccctcgcagcgggcaactcccaccgccgccgcttcgcatccgcccatctgcttccatcgtctcacggaggtcgctcacttcgccgccgcccgccccgcctctcccggtgccacggggccctcggccgcgccgtggcgcttaaaccctagatctgtgcctccgcgctggccgcggccgcgtcccgacgccggcacgccgccgatcgccgcacgtcgctcgatcccaggttttgccgctcgagtttagataagttccttcaatgcatcgtgttgggagtgctggtaacacagctggctcgactcgaccgagaaaagagaagcgcttcacatatgtactcaatgatgctgatgataaaaagcattgtgcggggatcaattgcttggcttatctagatggttccatatttagtacaagtgatcatctttttagcgggagccgtgatggtaccttgaaaagatgggaattaaataatggggatgcaagcttctcaggaactttcgagtctcatgttgattgggttaatgatgccattatagttggagacaagcttgtttcctgctcctcagacactacaataaaggtgtggaattgcttctctgatggtgcctgtaccaggactctccgccggcattctgattacgtgatttgtcttgctgctgctgagaataatagcaatattgtagcctctggtggtcttggtggtgaggttttcatttgggaccttgatgctgctcttgctcctgtagccaaatctgtggatgcaaaagaggatgaggttcctaatggaaactccgggcctgctttgacaacactgtgcagcataaattctagtagcaatattgcttcctctaatggtcaatcacatgggtacagtccaatagctgccaaaggtcacaaagattcagtttacgcactggcgatgaatgatacaggaacccttcttctctctggtggcactgagaaggttgtccgagtgtgggatccgaggacaggatcgaaaaacatgaaattgagagggcacactgacaatatcagagccttgcttgttgattctacagggaggtattgcctatcgggatcatctgattcaatgataagactatgggatctaggacagcagcgttgtgttcattcttatgctgtgcatactgattctgtttgggcacttgcaagcactcctgcatttggtcatgtctacagtggtggaagagatcaatctgtatacctaacagatttgtccacaagagagagtcttttactctgcacaaatgaataccctgttctacagttgtctctgcaagatgacacaatatgggtggcaacaactgattcttctgtttatggatggccagctgaagggcgcacaccccaaaaagtcttcgaaaagggtgcctcattcttagctgggaatttgtcattctcaagggcaagagcatctttagaaggatcggcacctgtccctgtatacaaagagccatcttttgttatcccaggagttccagcaataattcaacatgaaataatgaataatagaagacatgtactgacaaaggataccactggttcagtcaaattgtgggagatcactcggggtgctgttattgaagattttggcaaggtttctttcgaagacaagaaaaaagagttgtttgagatggtattactgaaatatgtcatgatttctatgttttattaaaaagtttggtacctactactgtgtaatttgttaattgattattaggtaagcatacctgcttggttcaccatggatgctcgattagggtgcttgtctgtccacctggatactccacaatgcttttctgcagaaatatatgcggttgacctaaatgttgctggagcacaagaagatctcaagattaatttggctcaagagacccttcgtggtttgctaattcattggagtaaaagaaagcagaaatctagttcacacagcttgtgtaatggtgatagttcaatagggaaagatgttccgtcgaaagactcgccccggtcaagacctgaggtcgacgatgccactcaaaaccatgcaactcatgtgcttccatcatttgagttttctacagtttcacctccatcaattatcacggaaggttctagtggagggccatggagaaagagaattaccgatttggatgtaactgagggtgatcttccatggtggtgtgtggactgcattactctcaatcgatatccaaaggagaatacaaaaattgcagattggcactagagctttgtgtagctgattggccctagagctttgtgggaataacttgtgttcaagtacatgcatcagcatccaatattgttcttgtttgtgtcctactggaaaggaggaagatttgagatactgaagattaatgatgccccctgctatataaatctgacacagggtgctttgtaaccattgctttcataagttattttttctgatgcttattttctttatataatgcagatgcgggttttatttacaccctgctgaaggctcgcctgcaccaaacataactcaagggaagcttagtgctccacggatattgcgaattcacaaggtagctaactatgtggttgagaaactcgttcttgacaaaccattggatggaggctctgatgcgtttgttatgggattgagttctgctcaatcacagctctcagttctagatagttcttcgcggcttggactaaagccatggcaaaaaacaaagccatgtattgagatattgtgcaataaccaggttctatcaccagagatgagtttggctactgtgcgaacatatatatggaaaaagccagaagatttgattcttcattacagagtggtccaaccgagatgatcacggcttcagatcacatggttctcagcatgcctgcaccataaacggtgtggttgaagacacccttggcttagcgaggaaaccgtcagaaatattttgctcttgggctccggtagcctttctcctagaatcccgacttcgtttgcttctttgtaaagttccttcctgatcttgccctggtagtaagatgtatcatagcacaggtataaggccctctgcttgtacatgtagaagatttgggtgcttaataaaggtcaaatggatttttttcgtttttctttgataaagtttgtaagaaaacgggctggttctcggctcagaccgtgacgttccgacgtcgattattggatttaaccctgtcgcatcctcttggttctgttagcgtaagaggtggacgggatgtcgggagcaataaagctgtttttttatatat

SEQ ID NO: 7824 - DNA, 6631 bp, Zea Mays
gacgccggcggttcccctgcgccgctccgctgagctggtgtgcacttctattacattacatgcatgtggagtaatttacctacggcagattgctgactaaaggcgctgaagtaaaccttccctcagtatacttcctcggatgtcacgtctgcccctctgcgtcatttatggctcagaactcgtcccgtcttcaccgcctcctcacattactagacactggttcgacacaagcaacgaggtttgcggctgcacgccaaattggagaaatcgccaagtcccacccccaggagctgaattcgttgctaaaaaaggtttctcaatatattcgtagtaaaaattgggacacgagggttgcggcagcccatgcgattggtgccatagcagagaatgtcaaacacacatcattgaaggacttgtatgcttccgtgcaagcagaaaaacatgcttccggtttctctgatggaagtgatgatgctggctcagcattgccacggactgatagtgcagcaacatctgatcttgcttttggaagctttgacataggcagggtattggaatttggatctcctctattggcatcaggtggacaggaatacgacattgctgatagtggcaagaatccagcagagcgtctagctcgccaaaagaaaaatctccggcgtcgtttaggactggatttatgtgagcagtttatggatgttaatgacgttatcaaagacgaggatcttcttgcccaaaaaaattattggggttcacatgtacagaataatggattccattcatttaattcaggtcataatattcagcagttggtttctaccatggtccccaggtatcccaagcattctaattttcgctctagacgattaagtgccagggagttaaatatgctgaagcgtaaagcaaagagtaatgcaaaagatcatacaaaggctgtatctgaggatgatgaggttacactgaaaggatctgtgccctccaatggagcttcttctgaacaaggtgtatttgatacagctgtcgaagaagacaatctggagtacaatgagaacggaagatggccttttcaacaatttgtggatcagcttattcatgatatgtttgatcctatttgggaagttcgccatggcaccattatggctttaagggaaattttgacacatcatggtgcttgtgctggagtatattttcctgatctgagcttgccttcctctgacttggatggtaaaaccaactttgactcccttaaaagggaacatggtatcgatctaaacgaagatgtccatttggaacaccttgaaccagcattaaagaagcataagaaagagccaaaatgtgctgaaagtatgatggattgtgataaggagttggttgacagtgattatctaaaaacggaaggagatctgagcaatgtgcctgatgtattaactgccgaaccaaattctactcatgtaaaagttgagcctgagttctgtgttgatgattcagctgacccctctaaaggcgtttcgacatgtaaatcacagaaaaaactcaactccatatcacatctgagttctcatattcttgctccagaaagttcaaaattcatgaaactgatgaaactagccaaatactcatatatgaagaattgggaatttcttcaggattgtgcaatccgcttcctttgtgtgctttcactggaccgctttggtgattatgtatccgatcaagttgtcgccccagttcgtgaaacttgtgctcaagctcttggtgctgtgctgaagtacatgcacccttctttagtatgtcatacattcaaaatcttgctgcagatgcagcacagacaagagtgggaagttcgtcatgggagccttcttggcattaaatacttagttgctgttcgccaggaaatgcttaaagatttgcttgactatatcattcatgcttgtaaagctggtctggaggaccctgatgatgatgtccgagcagtggctgcagaagccctgattccagctgccgactctttagttaggctaaatgaccaaattttgcatccaattgtggtgttgctttgggatatactgcttgaccttgacgatttaagcccatctacaagcagtgtaatgaacttgttagcagaaatatattctcaaccagagatggtcccaaagatgcttggcacagcagcttcaggggaaaagggagaatttgatctaaacgaagcaactcagattgctgagcaagaagacgaactaacatctattgaaaacccttacggtctagctacactgacaccccggctgtggccctttatgagacatagtattacttctgttcggcgttccgccatacgaacactggagaagcttcttgaggttggcaacactaggagttctgctggaacaaccccatctaaactctggccaacatcaatattaggtgatgcactgcaggttgtatttcagaacctacttttggagtcaaatgatgatattcttcagtcttctgaaagggcttggaaacttctacttcagtgccctgagaaggaccttgaatatgctgcaaggttatattttagtaattgggtacaacttgctaccactccatttggctcagcattggattctacaaaaatgtttttaccagttgcccttccacgaggaaatcgttcgagagctgctgcaaagattagatctgctaggctagaacatgagtacacaacaatgatctcgtttggttctacaggggaaagtatttcacatgaaaagcattcggacgttccctctattttttcgaatataattgttggctctgatcctgacaaatctgttactcatacacgggttcttacgtcaatggcccttgggctttttgcctctaagttgcccgtaagctcatggcaagtggttttaagtccactagcaaatcacctcatgtctctctcaggagtccagagacaagtggcttcaatgatcatcgtttcttggttcaaagatctgagaggcagagatcctgtatcagtgggtacattgctagcttttctatcttccttgaaagagtggctggtggacttattgacttgctctgatccagcattacccacaaaaggttctgtgcttccatattctgaactttcaaggacatacacgaagatgcgcaatgaagccaataatttgctccacttaatcgattcatgtgctgctttcaaagattatagtagcagcttaaaccttaacactgacgtgctgactgttgatgatgctatcaactttgcatcaaagcttttgttaccatctgaatctgatattccttcagaaactgagaacattttcttgaataacatagaatcagcaaaacaaggcctattgtctacatcaggttacttgaaatgtgttcagaataatttgcatgtgacagtctgttctttggtggcttctgctgtagtttggatgtcatgtttgcccagcaagttgaaccctgttattttacctttaatggctgccattaaaagagaacaggaggaagtacttcaagataaagctgctgatgcacttgctgagcttatatttagctgcattggccgcaagcctggccccaatgacaagctaaccaagaatctctgcactctaacatgcactgatgctagtgagacacctcaagctgcaataatcaactcaatgcaggttattgaggaccagaatttgctatcgattggaaagcgttttagcagtcatagatccaggggccatacaacgtctggtggcgatgaaaggtcaaaaatggagggttttataagccggcgtggatcagagttggctttcaagcatctctgtgtgaaatttggaccttcattgtttgaaaaccttcccaagttatgggattgccttactgagtttcttagacctgtaaaaacagaagatggtattccggaagatgatgcaagtattgcacagctgggcagatcgtatgaggataaggacccacagtcactcattaataatatccaggtcgttcgttccatttcacctcacttggctgagcccttaaggcctcaactgctaaatctccttccctctattcttgggtgtgttcgtcatcctcatgtggctgttagactagctgctgcaagatgcatcacatctatggcaaagtcattgaccgatgatgtgatggtactggtgatagaaaatgtcatcccaatgttgtccgatttatcttctgtctgtgcaagacaaggagctgggattctgttaagccttcttgttcagggtttggctgtggagttggttccttatgctcctttccttgtcgttcctcttctgaagtgtatgagtgacccagatggttctgttaggcagactgtgactcacagttttgctgctcttgttcctttgctgccattatcaaggggtgcttctttaccatgtggactaagtgaacgcttatctagcagtgctgaagatgtgcaatttctggaacagctccttgacaatacccaaattgatgatttcaagcttaatattgatcttaatgttgaactacgaaggtatcagcaagaagggatcaactggcttgcattcctccgtcggtttaagttacatggaattttatgtgatgacatggggctcggtaagacgctccaagcatctgctattgtagcaagtgacattgcagaagcacgtgcacggaatgatgaaaaaattctgacatctttgattatctgcccttctacattagtggcccactgggaatatgaaatagagaagtacatagacagctctatcttgaaacctcttcagtacgttggttcttctcaggacagagtgacactccgtagtcagtttgataaggttaatgttatcataacatcatatgatattatacggaaggatattgattttcttggaaatatcacttggaactattgtgttctggatgaagggcatataataaaaaactcaaggtctaaaataacgtttgctgtgaaacagctgaaagcgcaacaccgtcttatcttgagtggcacacctattcagaataatgtgttggagttatggtctttatttgacttccttatgcctgggtttcttggaacagaaaaacaattccaagctgcatatggaaaacccttgctagctgccaaagattctaaatgttcagcaaaggatgctgaagctggtattcttgcaatggaggcactgcataagcaggtcatgccgtttctactgagaagaacaaaggatgaagttttatctgatcttccagagaagataatccaggatagatattgtgatctcagtctattgcagctcaaactttatgacaaattttccagctccaatgcaaaagacgagatttcaactatagtaaaagcaaatgaactggaggaatctgcacctcaaccaaaggcaactcggcatgtgtttcaggcattgcagtacctattaaaactatgcagccatcccttgcttgtaactggggagaaccccccaaatcatcttgtggatcttctgaatgaaataggtctgggatctggcagtgagcttcatgagcttcaccactcacctaagcttgttgctcttcaagaaatacttcaagaatgtggtatagggtcagaaatatctagtcctgatgcttctacagctgttgggcaacacagagttttgatttttgctcagcataaggcttttcttgacatcatagagaaggacctgtttcaatctcatatgagaagtgtcacatatttgcggctggatggctctgttgatccagagaagagatttgaaatcgttaaagcattcaattcagacccaaccattgatgtacttctgctaacaacccatgtcggtgggcttggcttgaacttgacatctgccgacacattggtgttcgtggaacatgattggaacccaatgaaggaccttcaggctatggacagagcacatcgattgggtcaaaggaaagtggtgaatgttcaccgtctcatcatgcgtggcacccttgaggagaaggtgatgtctctccagaggttcaaggtgtcagtcgccaatgctgtcatcaatgctgagaactcgagcttgaagaccatgaacactgaccagctgcttgatctgttcacatcaacccctgcttcaagaaaagcaagcgacgagcagagtaagaggaaatctggtggcaaaggcttgaagtccattcttaatggtctggatgagctttgggatcagtcgcagtatgccgatgagtatgatctgaaccagttcctggcgaagctgaacggctgagccaccaccggctggctcgtgtacagtgtataaagcaatttggggcaggttaattttgttgttgctgttgtttgatagaggaaggaaaagattagatgctaacagatataggtggtggttggggttacgatctcaatttttttggtttccatcttcctcaatttttgttttgaggagttgtatatactctgctcacctataatcaaagctgcagctcttatcagaatttcccttgattggtcatggtgactgttccatgtactttgttctgccgcggccgtagctatatggactgctgcagctgcaattcatagaaacaaaatacttcatagaaacaaaatattgtagaagccgcatttggattaaag

SEQ ID NO: 7825 - DNA, 6648 bp, Zea Mays
cgatttcgattccgatgctccgaagacgtgcctcgagcctcgtggcgctagctggtgtgcacttctattacattacatgcatgtggagtaatttacctacggcagattgctgactaaaggcgctgaagtaaaccttccctcagtatacttcctcggatgtcacgtctgcccctctgcgtcatttatggctcagaactcgtcccgtcttcaccgcctcctcacattactagacactggttcgacacaagcaacgaggtttgcggctgcacgccaaattggagaaatcgccaagtcccacccccaggagctgaattcgttgctaaaaaaggtttctcaatatattcgtagtaaaaattgggacacgagggttgcggcagcccatgcgattggtgccatagcagagaatgtcaaacacacatcattgaaggacttgtatgcttccgtgcaagcagaaaaacatgcttccggtttctctgatggaagtgatgatgctggctcagcattgccacggactgatagtgcagcaacatctgatcttgcttttggaagctttgacataggcagggtattggaatttggatctcctctattggcatcaggtggacaggaatacgacattgctgatagtggcaagaatccagcagagcgtctagctcgccaaaagaaaaatctccggcgtcgtttaggactggatttatgtgagcagtttatggatgttaatgacgttatcaaagacgaggatcttcttgcccaaaaaaattattggggttcacatgtacagaataatggattccattcatttaattcaggtcataatattcagcagttggtttctaccatggtccccaggtatcccaagcattctaattttcgctctagacgattaagtgccagggagttaaatatgctgaagcgtaaagcaaagagtaatgcaaaagatcatacaaaggctgtatctgaggatgatgaggttacactgaaaggatctgtgccctccaatggagcttcttctgaacaaggtgtatttgatacagctgtcgaagaagacaatctggagtacaatgagaacggaagatggccttttcaacaatttgtggatcagcttattcatgatatgtttgatcctatttgggaagttcgccatggcaccattatggctttaagggaaattttgacacatcatggtgcttgtgctggagtatattttcctgatctgagcttgccttcctctgacttggatggtaaaaccaactttgactcccttaaaagggaacatggtatcgatctaaacgaagatgtccatttggaacaccttgaaccagcattaaagaagcataagaaagagccaaaatgtgctgaaagtatgatggattgtgataaggagttggttgacagtgattatctaaaaacggaaggagatctgagcaatgtgcctgatgtattaactgccgaaccaaattctactcatgtaaaagttgagcctgagttctgtgttgatgattcagctgacccctctaaaggcgtttcgacatgtaaatcacagaaaaaactcaactccatatcacatctgagttctcatattcttgctccagaaagttcaaaattcatgaaactgatgaaactagccaaatactcatatatgaagaattgggaatttcttcaggattgtgcaatccgcttcctttgtgtgctttcactggaccgctttggtgattatgtatccgatcaagttgtcgccccagttcgtgaaacttgtgctcaagctcttggtgctgtgctgaagtacatgcacccttctttagtatgtcatacattcaaaatcttgctgcagatgcagcacagacaagagtgggaagttcgtcatgggagccttcttggcattaaatacttagttgctgttcgccaggaaatgcttaaagatttgcttgactatatcattcatgcttgtaaagctggtctggaggaccctgatgatgatgtccgagcagtggctgcagaagccctgattccagctgccgactctttagttaggctaaatgaccaaattttgcatccaattgtggtgttgctttgggatatactgcttgaccttgacgatttaagcccatctacaagcagtgtaatgaacttgttagcagaaatatattctcaaccagagatggtcccaaagatgcttggcacagcagcttcaggggaaaagggagaatttgatctaaacgaagcaactcagattgctgagcaagaagacgaactaacatctattgaaaacccttacggtctagctacactgacaccccggctgtggccctttatgagacatagtattacttctgttcggcgttccgccatacgaacactggagaagcttcttgaggttggcaacactaggagttctgctggaacaaccccatctaaactctggccaacatcaatattaggtgatgcactgcaggttgtatttcagaacctacttttggagtcaaatgatgatattcttcagtcttctgaaagggcttggaaacttctacttcagtgccctgagaaggaccttgaatatgctgcaaggttatattttagtaattgggtacaacttgctaccactccatttggctcagcattggattctacaaaaatgtttttaccagttgcccttccacgaggaaatcgttcgagagctgctgcaaagattagatctgctaggctagaacatgagtacacaacaatgatctcgtttggttctacaggggaaagtatttcacatgaaaagcattcggacgttccctctattttttcgaatataattgttggctctgatcctgacaaatctgttactcatacacgggttcttacgtcaatggcccttgggctttttgcctctaagttgcccgtaagctcatggcaagtggttttaagtccactagcaaatcacctcatgtctctctcaggagtccagagacaagtggcttcaatgatcatcgtttcttggttcaaagatctgagaggcagagatcctgtatcagtgggtacattgctagcttttctatcttccttgaaagagtggctggtggacttattgacttgctctgatccagcattacccacaaaaggttctgtgcttccatattctgaactttcaaggacatacacgaagatgcgcaatgaagccaataatttgctccacttaatcgattcatgtgctgctttcaaagattatagtagcagcttaaaccttaacactgacgtgctgactgttgatgatgctatcaactttgcatcaaagcttttgttaccatctgaatctgatattccttcagaaactgagaacattttcttgaataacatagaatcagcaaaacaaggcctattgtctacatcaggttacttgaaatgtgttcagaataatttgcatgtgacagtctgttctttggtggcttctgctgtagtttggatgtcatgtttgcccagcaagttgaaccctgttattttacctttaatggctgccattaaaagagaacaggaggaagtacttcaagataaagctgctgatgcacttgctgagcttatatttagctgcattggccgcaagcctggccccaatgacaagctaaccaagaatctctgcactctaacatgcactgatgctagtgagacacctcaagctgcaataatcaactcaatgcaggttattgaggaccagaatttgctatcgattggaaagcgttttagcagtcatagatccaggggccatacaacgtctggtggcgatgaaaggtcaaaaatggagggttttataagccggcgtggatcagagttggctttcaagcatctctgtgtgaaatttggaccttcattgtttgaaaaccttcccaagttatgggattgccttactgagtttcttagacctgtaaaaacagaagatggtattccggaagatgatgcaagtattgcacagctgggcagatcgtatgaggataaggacccacagtcactcattaataatatccaggtcgttcgttccatttcacctcacttggctgagcccttaaggcctcaactgctaaatctccttccctctattcttgggtgtgttcgtcatcctcatgtggctgttagactagctgctgcaagatgcatcacatctatggcaaagtcattgaccgatgatgtgatggtactggtgatagaaaatgtcatcccaatgttgtccgatttatcttctgtctgtgcaagacaaggagctgggattctgttaagccttcttgttcagggtttggctgtggagttggttccttatgctcctttccttgtcgttcctcttctgaagtgtatgagtgacccagatggttctgttaggcagactgtgactcacagttttgctgctcttgttcctttgctgccattatcaaggggtgcttctttaccatgtggactaagtgaacgcttatctagcagtgctgaagatgtgcaatttctggaacagctccttgacaatacccaaattgatgatttcaagcttaatattgatcttaatgttgaactacgaaggtatcagcaagaagggatcaactggcttgcattcctccgtcggtttaagttacatggaattttatgtgatgacatggggctcggtaagacgctccaagcatctgctattgtagcaagtgacattgcagaagcacgtgcacggaatgatgaaaaaattctgacatctttgattatctgcccttctacattagtggcccactgggaatatgaaatagagaagtacatagacagctctatcttgaaacctcttcagtacgttggttcttctcaggacagagtgacactccgtagtcagtttgataaggttaatgttatcataacatcatatgatattatacggaaggatattgattttcttggaaatatcacttggaactattgtgttctggatgaagggcatataataaaaaactcaaggtctaaaataacgtttgctgtgaaacagctgaaagcgcaacaccgtcttatcttgagtggcacacctattcagaataatgtgttggagttatggtctttatttgacttccttatgcctgggtttcttggaacagaaaaacaattccaagctgcatatggaaaacccttgctagctgccaaagattctaaatgttcagcaaaggatgctgaagctggtattcttgcaatggaggcactgcataagcaggtcatgccgtttctactgagaagaacaaaggatgaagttttatctgatcttccagagaagataatccaggatagatattgtgatctcagtctattgcagctcaaactttatgacaaattttccagctccaatgcaaaagacgagatttcaactatagtaaaagcaaatgaactggaggaatctgcacctcaaccaaaggcaactcggcatgtgtttcaggcattgcagtacctattaaaactatgcagccatcccttgcttgtaactggggagaaccccccaaatcatcttgtggatcttctgaatgaaataggtctgggatctggcagtgagcttcatgagcttcaccactcacctaagcttgttgctcttcaagaaatacttcaagaatgtggtatagggtcagaaatatctagtcctgatgcttctacagctgttgggcaacacagagttttgatttttgctcagcataaggcttttcttgacatcatagagaaggacctgtttcaatctcatatgagaagtgtcacatatttgcggctggatggctctgttgatccagagaagagatttgaaatcgttaaagcattcaattcagacccaaccattgatgtacttctgctaacaacccatgtcggtgggcttggcttgaacttgacatctgccgacacattggtgttcgtggaacatgattggaacccaatgaaggaccttcaggctatggacagagcacatcgattgggtcaaaggaaagtggtgaatgttcaccgtctcatcatgcgtggcacccttgaggagaaggtgatgtctctccagaggttcaaggtgtcagtcgccaatgctgtcatcaatgctgagaactcgagcttgaagaccatgaacactgaccagctgcttgatctgttcacatcaacccctgcttcaagaaaagcaagcgacgagcagagtaagaggaaatctggtggcaaaggcttgaagtccattcttaatggtctggatgagctttgggatcagtcgcagtatgccgatgagtatgatctgaaccagttcctggcgaagctgaacggctgagccaccaccggctggctcgtgtacagtgtataaagcaatttggggcaggttaattttgttgttgctgttgtttgatagaggaaggaaaagattagatgctaacagatataggtggtggttggggttacgatctcaatttttttggtttccatcttcctcaatttttgttttgaggagttgtatatactctgctcacctataatcaaagctgcagctcttatcagaatttcccttgattggtcatggtgactgttccatgtactttgttctgccgcggccgtagctatatggactgctgcagctgcaattcatagaaacaaaatacttcatagaaacaaaatattgtagaagccgcatttggattaaag

SEQ ID NO: 7826 - DNA, 6824 bp, Zea Mays
cacgaccacaccagcagccaggtgcccggtgccgactcgacccgaccaccacccaggccagccagaagcccgtcccgacccggccgggcgcgcgcgtgcgtgcgttcgggcgcgcgcgttcctgcgcggattgggctcggcctccgctcgtcgccttccggccccacgcgcccctccccgcgagggctcgcccctccgcccccagtccgcctcccgcgatccccttctcccgccgctcgtcgcccgcctctttcctccccgctccccgcagagctggtgtgcacttctattacattacatgcatgtggagtaatttacctacggcagattgctgactaaaggcgctgaagtaaaccttccctcagtatacttcctcggatgtcacgtctgcccctctgcgtcatttatggctcagaactcgtcccgtcttcaccgcctcctcacattactagacactggttcgacacaagcaacgaggtttgcggctgcacgccaaattggagaaatcgccaagtcccacccccaggagctgaattcgttgctaaaaaaggtttctcaatatattcgtagtaaaaattgggacacgagggttgcggcagcccatgcgattggtgccatagcagagaatgtcaaacacacatcattgaaggacttgtatgcttccgtgcaagcagaaaaacatgcttccggtttctctgatggaagtgatgatgctggctcagcattgccacggactgatagtgcagcaacatctgatcttgcttttggaagctttgacataggcagggtattggaatttggatctcctctattggcatcaggtggacaggaatacgacattgctgatagtggcaagaatccagcagagcgtctagctcgccaaaagaaaaatctccggcgtcgtttaggactggatttatgtgagcagtttatggatgttaatgacgttatcaaagacgaggatcttcttgcccaaaaaaattattggggttcacatgtacagaataatggattccattcatttaattcaggtcataatattcagcagttggtttctaccatggtccccaggtatcccaagcattctaattttcgctctagacgattaagtgccagggagttaaatatgctgaagcgtaaagcaaagagtaatgcaaaagatcatacaaaggctgtatctgaggatgatgaggttacactgaaaggatctgtgccctccaatggagcttcttctgaacaaggtgtatttgatacagctgtcgaagaagacaatctggagtacaatgagaacggaagatggccttttcaacaatttgtggatcagcttattcatgatatgtttgatcctatttgggaagttcgccatggcaccattatggctttaagggaaattttgacacatcatggtgcttgtgctggagtatattttcctgatctgagcttgccttcctctgacttggatggtaaaaccaactttgactcccttaaaagggaacatggtatcgatctaaacgaagatgtccatttggaacaccttgaaccagcattaaagaagcataagaaagagccaaaatgtgctgaaagtatgatggattgtgataaggagttggttgacagtgattatctaaaaacggaaggagatctgagcaatgtgcctgatgtattaactgccgaaccaaattctactcatgtaaaagttgagcctgagttctgtgttgatgattcagctgacccctctaaaggcgtttcgacatgtaaatcacagaaaaaactcaactccatatcacatctgagttctcatattcttgctccagaaagttcaaaattcatgaaactgatgaaactagccaaatactcatatatgaagaattgggaatttcttcaggattgtgcaatccgcttcctttgtgtgctttcactggaccgctttggtgattatgtatccgatcaagttgtcgccccagttcgtgaaacttgtgctcaagctcttggtgctgtgctgaagtacatgcacccttctttagtatgtcatacattcaaaatcttgctgcagatgcagcacagacaagagtgggaagttcgtcatgggagccttcttggcattaaatacttagttgctgttcgccaggaaatgcttaaagatttgcttgactatatcattcatgcttgtaaagctggtctggaggaccctgatgatgatgtccgagcagtggctgcagaagccctgattccagctgccgactctttagttaggctaaatgaccaaattttgcatccaattgtggtgttgctttgggatatactgcttgaccttgacgatttaagcccatctacaagcagtgtaatgaacttgttagcagaaatatattctcaaccagagatggtcccaaagatgcttggcacagcagcttcaggggaaaagggagaatttgatctaaacgaagcaactcagattgctgagcaagaagacgaactaacatctattgaaaacccttacggtctagctacactgacaccccggctgtggccctttatgagacatagtattacttctgttcggcgttccgccatacgaacactggagaagcttcttgaggttggcaacactaggagttctgctggaacaaccccatctaaactctggccaacatcaatattaggtgatgcactgcaggttgtatttcagaacctacttttggagtcaaatgatgatattcttcagtcttctgaaagggcttggaaacttctacttcagtgccctgagaaggaccttgaatatgctgcaaggttatattttagtaattgggtacaacttgctaccactccatttggctcagcattggattctacaaaaatgtttttaccagttgcccttccacgaggaaatcgttcgagagctgctgcaaagattagatctgctaggctagaacatgagtacacaacaatgatctcgtttggttctacaggggaaagtatttcacatgaaaagcattcggacgttccctctattttttcgaatataattgttggctctgatcctgacaaatctgttactcatacacgggttcttacgtcaatggcccttgggctttttgcctctaagttgcccgtaagctcatggcaagtggttttaagtccactagcaaatcacctcatgtctctctcaggagtccagagacaagtggcttcaatgatcatcgtttcttggttcaaagatctgagaggcagagatcctgtatcagtgggtacattgctagcttttctatcttccttgaaagagtggctggtggacttattgacttgctctgatccagcattacccacaaaaggttctgtgcttccatattctgaactttcaaggacatacacgaagatgcgcaatgaagccaataatttgctccacttaatcgattcatgtgctgctttcaaagattatagtagcagcttaaaccttaacactgacgtgctgactgttgatgatgctatcaactttgcatcaaagcttttgttaccatctgaatctgatattccttcagaaactgagaacattttcttgaataacatagaatcagcaaaacaaggcctattgtctacatcaggttacttgaaatgtgttcagtttggatgtcatgtttgcccagcaagttgaaccctgttattttacctttaatggctgccattaaaagagaacaggaggaagtacttcaagataaagctgctgatgcacttgctgagcttatatttagctgcattggccgcaagcctggccccaatgacaagctaaccaagaatctctgcactctaacatgcactgatgctagtgagacacctcaagctgcaataatcaactcaatgcaggttattgaggaccagaatttgctatcgattggaaagcgttttagcagtcatagatccaggggccatacaacgtctggtggcgatgaaaggtcaaaaatggagggttttataagccggcgtggatcagagttggctttcaagcatctctgtgtgaaatttggaccttcattgtttgaaaaccttcccaagttatgggattgccttactgagtttcttagacctgtaaaaacagaagatggtattccggaagatgatgcaagtattgcacagctgggcagatcgtatgaggataaggacccacagtcactcattaataatatccaggtcgttcgttccatttcacctcacttggctgagcccttaaggcctcaactgctaaatctccttccctctattcttgggtgtgttcgtcatcctcatgtggctgttagactagctgctgcaagatgcatcacatctatggcaaagtcattgaccgatgatgtgatggtactggtgatagaaaatgtcatcccaatgttgtccgatttatcttctgtctgtgcaagacaaggagctgggattctgttaagccttcttgttcagggtttggctgtggagttggttccttatgctcctttccttgtcgttcctcttctgaagtgtatgagtgacccagatggttctgttaggcagactgtgactcacagttttgctgctcttgttcctttgctgccattatcaaggggtgcttctttaccatgtggactaagtgaacgcttatctagcagtgctgaagatgtgcaatttctggaacagctccttgacaatacccaaattgatgatttcaagcttaatattgatcttaatgttgaactacgaaggtatcagcaagaagggatcaactggcttgcattcctccgtcggtttaagttacatggaattttatgtgatgacatggggctcggtaagacgctccaagcatctgctattgtagcaagtgacattgcagaagcacgtgcacggaatgatgaaaaaattctgacatctttgattatctgcccttctacattagtggcccactgggaatatgaaatagagaagtacatagacagctctatcttgaaacctcttcagtacgttggttcttctcaggacagagtgacactccgtagtcagtttgataaggttaatgttatcataacatcatatgatattatacggaaggatattgattttcttggaaatatcacttggaactattgtgttctggatgaagggcatataataaaaaactcaaggtctaaaataacgtttgctgtgaaacagctgaaagcgcaacaccgtcttatcttgagtggcacacctattcagaataatgtgttggagttatggtctttatttgacttccttatgcctgggtttcttggaacagaaaaacaattccaagctgcatatggaaaacccttgctagctgccaaagattctaaatgttcagcaaaggatgctgaagctggtattcttgcaatggaggcactgcataagcaggtcatgccgtttctactgagaagaacaaaggatgaagttttatctgatcttccagagaagataatccaggatagatattgtgatctcagtctattgcagctcaaactttatgacaaattttccagctccaatgcaaaagacgagatttcaactatagtaaaagcaaatgaactggaggaatctgcacctcaaccaaaggcaactcggcatgtgtttcaggcattgcagtacctattaaaactatgcagccatcccttgcttgtaactggggagaaccccccaaatcatcttgtggatcttctgaatgaaataggtctgggatctggcagtgagcttcatgagcttcaccactcacctaagcttgttgctcttcaagaaatacttcaagaatgtggtatagggtcagaaatatctagtcctgatgcttctacagctgttgggcaacacagagttttgatttttgctcagcataaggcttttcttgacatcatagagaaggacctgtttcaatctcatatgagaagtgtcacatatttgcggctggatggctctgttgatccagagaagagatttgaaatcgttaaagcattcaattcagacccaaccattgatgtacttctgctaacaacccatgtcggtgggcttggcttgaacttgacatctgccgacacattggtgttcgtggaacatgattggaacccaatgaaggaccttcaggctatggacagagcacatcgattgggtcaaaggaaagtggtgaatgttcaccgtctcatcatgcgtggcacccttgaggagaaggtgatgtctctccagaggttcaaggtgtcagtcgccaatgctgtcatcaatgctgagaactcgagcttgaagaccatgaacactgaccagctgcttgatctgttcacatcaacccctgcttcaagaaaagcaagcgacgagcagagtaagaggaaatctggtggcaaaggcttgaagtccattcttaatggtctggatgagctttgggatcagtcgcagtatgccgatgagtatgatctgaaccagttcctggcgaagctgaacggctgagccaccaccggctggctcgtgtacagtgtataaagcaatttggggcaggttaattttgttgttgctgttgtttgatagaggaaggaaaagattagatgctaacagatataggtggtggttggggttacgatctcaatttttttggtttccatcttcctcaatttttgttttgaggagttgtatatactctgctcacctataatcaaagctgcagctcttatcagaatttcccttgattggtcatggtgactgttccatgtactttgttctgccgcggccgtagctatatggactgctgcagctgcaattcatagaaacaaaatacttcatagaaacaaaatattgtagaagccgcatttggattaaag

SEQ ID NO: 7827 - DNA, 1594 bp, Zea Mays
ccgccgccgcctgctttatttagcctagcttctgcccgcgagcctcttcttccctccctccactcgcgtccaaattctctcctcaccacaccacctctccctccgacgcacgggtgcatcgcagtgctagatagagtgaccatgcaggcggcggcggtgacggtgaatggcgcgggcgacgtgcagaagccccagcagcagccgatggtggtgggggcgccgccgccggcggccatggtgccgccccattgggttgccataccgatgccgccgcacccgatggcgccgccccagttcgcggcggctcaattcgtgccgttccacgccgtcgtgcagtcgccgcagctggcggcacctgtgccagcggtcgtcctgggatcgccggcgccgcatcaggccgggcaggaggagaacaagaccatctgggttggtgatctccatttctggatggacgagaattatctgcacaactgcttcggctacaccggcgaggttgtggcaattaaagttatccggaataagcagaccggacagtctgaaggatacggatttgttgagttctacagccatgctgcagctgaaagggttcttgaagggttttctggtcatattatgccaaacactgaccagccctttaggttaaactgggcatcgtttagcatgggagataggcgctcggatgttgcttcggatcattccatattcgtaggcgaccttgcttccgatgtcaatgacgccacactgctggaggttttctccagcaggtactcctctgtcaaaggtgccaaagtcgttatcgatgctaacactggtagatccaagggttatggcttcgtgagatttggagatgacagtgagaagacgcatgccatgactgagatgaatggtgtgtattgctcctctaggcccatgaggattggcccggcaactccaagaaaatcatcaggtacctctggatcaaatggctcatctgctcgaccagacggaggagatttgacaaacacaacagtatttgtgggcgggctcgacccagatgtcagtgaagaggaccttaggcaggccttctcccagtacggagaaatttcttccgtaaagattccagttgggaaacagtgcggcttcgtgcagtttgctcagaggaagaacgcggaagacgcgttgcaagggttgaacggcagcactattggcaaacaggccgtgcgtctctcatggggtcgcaacccagcaaacaagcagtttaggggcgacaatggcaacatgcagtggaagaacgggggcgtgtactacgcggcgcccccgttctacaacggcggctacggctaccctgcggcggccccgttccctgatccaggcatgtacgctgctccagcctacggcgcctacccgttctatggcaaccagcagcaagtgagctgacctggactactgcgccggcctcgcttggaaagctggggcctggcctggcctggcctggagcggctgttaggtgtagctcttggtagaagaagatgaagtagacgacgacggtttcttaggagtgtaccaggggcgccacttcgtggtgacggtcaggttgaggtcattgacagagaac

SEQ ID NO: 7828 - DNA, 1144 bp, Zea Mays
atggatgataagcactgctaggctatcctggcctatcaggcctacttggcgcgtctctctctgtctagcggccgagtttaacagttaaaccctagctcaccgtcgtgctcgcctccccgcgcctgctccggtgctcccttcaggcactgacagttcgccgccgcggcggcgctttcgagcccacgcggaagcgcacctagtgccatggcgaagaagcggaagcacaccgacgcccaggcagagacggccggcgcagagaagccagacgactccgcaccggcgcgcccggagcgcacgctcttcggcttcaaggatccggcccccgacgccgtgcctgactccgcggcctccagggccgcggtggcgccgtttaggaacagggagaaggtactcatcacctgctcccgccgcatcacgtacaggtatcgtcatctgatgcaggacgtgttgtcgatgctcccgcacgcgaagaaggacagcaaggtcgagtcgaagcagagcaaggggaacgctctcaacgagatgctcgagctcaggagctgctccagttgtctcttcttcgagtgccgaaaacagaaggatctttacctttggatggtgaagtctcctggaggaccatcagtgaaatttctagttaatgctgttcacaccatggaggagttgaagcttacgggtaaccatctgaaagggtcacggccacttcttacattttctacaaattttgatgagcaacctcattggaagcttgtgaaggaaattataactcatatatttgctactcctaaagatcaccgtaaagcaaaacctttccatgaccatgtatttgtcttctccattgtggatggccatgtttggtttcgaaactaccagatttctgttccccacaatgagattgataaagttgataaaggtggtatggataaaatgacacttattgaggttggccccaggttctgtttgaatccaatcaaaatatttggtggtagttttggtggtcctacatggtatgagaacccatactacatttcccccaatcagaaacggaacacttaagtcacggtgaatcgagtgttggaactatccaagaacaagatttgagctgaacgtggcaccaagtcaccaacatcatctttaaggcattgag

SEQ ID NO: 7829 - DNA, 689 bp, Zea Mays
aaaaatcctcaaccatcctgatcgcccttatccataatacgatcatcactgtaaaatcttccccaccgcccatatctccctcttatcctctcacgttactctttcctgtttccagaatccactcgacacggttcctgggatccctgtgggtgctccatccgtttcctttcgcctacaacaacatcgtcgtgccgcgttgtcgactgtgttcagccccgagccatcgaccaccgaccccaacagcgccgcgcttccctgaccctgaccccaaacatcacaaagacctgcgcacgtgctcctcatcgaagtgctcgacaaaccttgcctcgccaacgtctcgccaagttgtcagacccgtcctcgagtttggtggagtcccaagcttgcacgccgtcgactccctgctcgcctcgcttcgttgtcatcgttcactatcttcgtcctcgtcgtctacctcgccggttctcgcgcccaactggccatcgtgctcgacgtgttttcctccgtgcagattcgcatgtacctttcactccatccgctagtcgcgtggtagagaagatcacgttatcggtggatcaatcgccttgtggagtaatttcttggaggctggtcgtcaccctgaagatttgtggcaaattattttcttagtcattggctcttcactgcaacaaaggaggtgagaatccaag

SEQ ID NO: 7830 - DNA, 2534 bp, Zea Mays
ggggctctcctgccacctaccttccccgtatggccaccgccccatttagattctgttcctcctaaatctcctccccgttggcccctgcgctcttcacaaaatagctctctgcctcacagcaagcctgtgcgtctcatattcaaggagcctgcctctgaggtggttgcaacttgcttgggacgaggatttggattttggagattggaccgcagactgtgagatccatccaatccaacaaccgaatccaatccaatccaatcagagaaaaagaaaaaaggcgaaaggctcgtgtctgtgtggcaccacatcttgccatcagggaaaatggggctgtcaatctcgtacccaccagacgactacctgccagcagtggaggacgacatggggcggctgttcatccggtctctcagcttcgacgacatggaggccgccgccgattcgccttcgtattcgccttcggcattgccccccgcctttggctccgggaagctgatcatggagggctccctgggcttcttcgaaagaagagaagctgacagcgtccagatgcagaacgtgctgtccatcaggaatcctaaacctcctgatagagaagcctgcagcagcgtcagtcccggtgctgcgacagctacttgtggctcatcaagattcgaccgtccaccagattatgattaccccatggtcgggatgaacagccccaggcaccagagcgcggccgtcaggctgcagaaggtgtacaagagcttcaggacgaggcggcagcttgcggattgcgctgttcttgtggaacaacgatggtggaagttgcttgattttgcactgctcaagcggaactcggtgtcattttttgacatagggaagcctgagactgctgtctcaaaatggtcccgggcaaggatgagggccgccaaggttggaaagggtctctccaaggacgagaaggcccagaaacttgcgctgcagcactggctcgaggcgattgaccctcggcatcggttggatgtaggagaagggaaagatgtcaacttagaggagcattgccctagattcaagttacacaagcaatgtatcaagtaccttggccctaaagaaagggaaacctatgaggtggtagtcgaggacaagaggctgatgtacaagctgagccgtcagatagtcgacacgaccagaagcgtcaaggggaccaagtggatattcgtgctcagtacatgcaagacactttacataggccagaagcagaagggcgtgttccagcactcaagcttccttgcagggggagccacatctgctgcaggaagactggttgtggaggatggaattctcaaggctgtgtggcctcatagcgggcattaccggccgacggagcagaacttccaggagttcatgaacttcctcaaggagaggaatgtagatcttaacaacgtggtgttgagcccatcagaaggtgaagaagatggcgacttcagcctggcgagcagctactctcagctggacctgacccaactctgccagcaagaagacagccaagaacaagaggcacaatctgcgcgacgccatggccaagtcgaagccgaagccgaagctaggacctgcagcctggagcccagcctgccatctacagagacctgcagcacgccggcgacgatcaggaagagctcctcagacaaccggctgcaagggaagcggccgcccaggctgctgatcagctcaaacaacatagcgccgctgccgcccaccacgcacagcaacgccgggccatcgcccggcgggaaggacgacctggacccggactcggccatgatgggcgagtgcctcgacttctgcaagcgaaacctgttcgcggaggacgggtacgaggaccgctacctggatgacctcgcggagctgccggaggcgctgatcctgaaccgcatcaactccaagcgggccatgcactcgtaccagctcgggaagcagctgtccttccactggagcaccggcgccgggccccggatcgggtgcgtccgtgactacccgtccgagctccagttccgggcgctggaggatgtcagcctgtcgccccgtggcggcggcaggtcggtgaggttcccgtcgcccaggccgggcgcgctcacgcccaacagcatccctgcggccaagtgtggctctcttacggcggacggcgacggcgtgcacgcgtcgctcaagcccaggcagaggagtgccacttggactgcgttctgagggacataccatgcatgcatgcatgctgcttccttcagcttttttttttcacagcattgtgacgataaaccgagggaaaagtgagatagcatgctccttcacgtagacgaggatagaaggatcagcattgacagacatttggcaaacactgggtaatgccatattgtaatggtacctataggttgatgacaaagctcttgctgttttataagggcacggaaagagcgaatatggagtatcccctcacttcagtgagaccgttctcagattacgcatatccgcgcccccaaaacttaattcagatacaaacg

SEQ ID NO: 7831 - DNA, 2703 bp, Zea Mays
ataactcaccaaatctgtcagtgacagacttttgatcagggacctaggataggacaccgcaagttttggtttgttatttatagagtgcagagtcttcggggctctcctgccacctaccttccccgtatggccaccgccccatttagattctgttcctcctaaatctcctccccgttggcccctgcgctcttcacaaaatagctctctgcctcacagcaagcctgtgcgtctcatattcaaggagcctgcctctgaggtggttgcaacttgcttgggacgaggatttggattttggagattggaccgcagactgtgagatccatccaatccaacaaccgaatccaatccaatccaatcagagaaaaagaaaaaaggcgaaaggctcgtgtctgtgtggcaccacatcttgccatcagggaaaatggggctgtcaatctcgtacccaccagacgactacctgccagcagtggaggacgacatggggcggctgttcatccggtctctcagcttcgacgacatggaggccgccgccgattcgccttcgtattcgccttcggcattgccccccgcctttggctccgggaagctgatcatggagggctccctgggcttcttcgaaagaagagaagctgacagcgtccagatgcagaacgtgctgtccatcaggaatcctaaacctcctgatagagaagcctgcagcagcgtcagtcccggtgctgcgacagctacttgtggctcatcaagattcgaccgtccaccagattatgattaccccatggtcgggatgaacagccccaggcaccagagcgcggccgtcaggctgcagaaggtgtacaagagcttcaggacgaggcggcagcttgcggattgcgctgttcttgtggaacaacgatggtggaagttgcttgattttgcactgctcaagcggaactcggtgtcattttttgacatagggaagcctgagactgctgtctcaaaatggtcccgggcaaggatgagggccgccaaggttggaaagggtctctccaaggacgagaaggcccagaaacttgcgctgcagcactggctcgaggcgattgaccctcggcatcggtatggccacaacctgcacttctactaccaccgctggctccactgccagagcaagcagccattcttctattggttggatgtaggagaagggaaagatgtcaacttagaggagcattgccctagattcaagttacacaagcaatgtatcaagtaccttggccctaaagaaagggaaacctatgaggtggtagtcgaggacaagaggctgatgtacaagctgagccgtcagatagtcgacacgaccagaagcgtcaaggggaccaagtggatattcgtgctcagtacatgcaagacactttacataggccagaagcagaagggcgtgttccagcactcaagcttccttgcagggggagccacatctgctgcaggaagactggttgtggaggatggaattctcaaggctgtgtggcctcatagcgggcattaccggccgacggagcagaacttccaggagttcatgaacttcctcaaggagaggaatgtagatcttaacaacgtggtgttgagcccatcagaaggtgaagaagatggcgacttcagcctggcgagcagctactctcagctggacctgacccaactctgccagcaagaagacagccaagaacaagaggcacaatctgcgcgacgccatggccaagtcgaagccgaagccgaagctaggacctgcagcctggagcccagcctgccatctacagagacctgcagcacgccggcgacgatcaggaagagctcctcagacaaccggctgcaagggaagcggccgcccaggctgctgatcagctcaaacaacatagcgccgctgccgcccaccacgcacagcaacgccgggccatcgcccggcgggaaggacgacctggacccggactcggccatgatgggcgagtgcctcgacttctgcaagcgaaacctgttcgcggaggacgggtacgaggaccgctacctggatgacctcgcggagctgccggaggcgctgatcctgaaccgcatcaactccaagcgggccatgcactcgtaccagctcgggaagcagctgtccttccactggagcaccggcgccgggccccggatcgggtgcgtccgtgactacccgtccgagctccagttccgggcgctggaggatgtcagcctgtcgccccgtggcggcggcaggtcggtgaggttcccgtcgcccaggccgggcgcgctcacgcccaacagcatccctgcggccaagtgtggctctcttacggcggacggcgacggcgtgcacgcgtcgctcaagcccaggcagaggagtgccacttggactgcgttctgagggacataccatgcatgcatgcatgctgcttccttcagcttttttttttcacagcattgtgacgataaaccgagggaaaagtgagatagcatgctccttcacgtagacgaggatagaaggatcagcattgacagacatttggcaaacactgggtaatgccatattgtaatggtacctataggttgatgacaaagctcttgctgttttataagggcacggaaagagcgaatatggagtatcccctcacttcagtgagaccgttctcagattacgcatatccgcgcccccaaaacttaattcagatacaaacg

SEQ ID NO: 7832 - DNA, 2453 bp, Zea Mays
ccagagccagagctgctagctctcaatctatctgtctctctccctctatgcccggccccccttcaatgccttcaacttcaagtcaagtcttctttaattaacaacaaggccaccaccacattcaaacgcacacgtacataggggcagctagctcgctcttggttccttttcctccgtcgttgctcaggtccctcctcctgcacacccagagtgtgcatgcgtgagagtacatatatatagtaggagaatgatgatgatgaacaccagcgccgccatgtcgccaccaagtaccgacgtcgtcgtcgacgacttctccctcggcgccatgcatcagccgtacgtcgtcggcttccacgccgacgccggcatgcgcatcatgcccagcgtcgtcgtcgataggccgctgctccagcagaacaccgacctattagaagagtacgacagtttcgacttcgcggccacggggctactaccgttaccgttccaagaactacctggtctcctgccccccgcgaattacctgccgctgccaacgccaagcatggccatgtcgccgccgtcgctgaggctgctgacgctcccgggcgtgccagtgcctacggcggcggcggatgtcgtgtacggcggattgggcgggggcggcgcgggagggccgtcgttcctgaagcgggagcacggcgtcggcagcggcggcgggaggatcggcggcctgaacctaggacgccgcacctacttcacccccgccgccgtggaccggctgctcggcggcggcctaggcggcgtgggcctcggcatgagcgtgctggggctcggggtcggcgccgctcaccaccaccagcagcagccgccgcggtgccaggccgagggctgcaaggccgacctctccgccgccaagcactaccaccgccgccacaaggtctgcgagttccacaccaaggccagcgccgtcgccgccgccggcaagcagcagcgcttctgccagcaatgcagcaggtttcatgtgcttgcggagtttgacgaggccaagaggagctgccggaagcggctcaccgagcacaaccgacgccgccggaagccgatcagcgcacagggcaataatgaccactcgtcgccgccaccgccggcgccaaagaaagcggatacttgcataaccacctcgtacaacgatgaccccaagagtaagaagcattcgagatcatgcatctagctgtgatgtcatcagcatgcatatataatctctgcactcaaagatattctatagctagctaactccacatgcacctcgatgctacttcaccagtatcagtttcatcgtcacatcgtctgacctgacgtacatgcattgcacatgcaatcatgcgtacgtgcacggcgccaaagtttcgtcgtacgtacgcgtgtgcgtacgggtacgtgtgtgggatcaattcgcagctgcctcagtgcctgtgcctccacactagatcgatatacagattgatatgatgcaacccctgctgcatcatcagatccatttgtgctgcatcaatatgcttcgagcaccatatgcattcgcaaagttatttttgtatgccgcaacgtatgtactgacgtgcccaatatcatcattattgtacgtacaacgagctagtagcaggtgcgagcaacacggctgcagccatctcgccgaatggcggcagcggcggcggcagctgcctcgacgtcctggacaacggccagataacgagcagcgcgacggcggcggcaccgacggcgctatctctggcagcgccgcccccgccgctgcatcacgagctgcatcacgagaaggacgggagcctggactccgtgctgatgcagcggcgggttcattattggtccatggccggcggcgggacgacgacgacgaagagcatcgctgtttcatcacctcgctggtgacgcagacccagcagcaacagcagcacggcggcaacgtcttgtcgtgctcgtcgatcggtgtcagatcagcgcagaacggcggccagcaacggtttctttgaggtggacttcatctagtgcgatgcatgcacgtaaaaggggcagggaaaagcatatagcgtcgctgtattgtttctgagatgggaaggatgcatggcgtgaggaaagcaacaaaggctagggtttggttggttccactctagctaggggtggctagcagccttttctttttactgtgtttagtacttgggctagctagtgctagacttctctgttatattaattactagagggaaaaatataatgctggtgtagtatgtgtattcctttttcctgttgctaacaatgtgtatatactattacgtgcatgcatctgagtttacaactaatggttaattaatgtagctagctagggtgtatggtatggtgcatgtatatatatctatgtttctttgtttttttaggtggagtggaggtcgaaggttattcaaata

SEQ ID NO: 7833 - DNA, 3311 bp, Zea Mays
ttttttctctaaccttttcactgctccagcgccggcttcttcaatcttcatcttccgctccctctcccactcgcgctcggcaggcaggctcggcggcgtcgtcactggctgcccctcctacccgaaaatgctttgtgttggaagaatttgttcaagatattatgcaggacatgctgtatcttcattacttgtgggtatacgatgtttgtttgctcctcaaagcccacaccatgtcggctccaagtatcatgggactcaccaaagtagggacagtagtaccaaaaccttgaaaccagagctaaatattggtagatgtggcgcttgcttttccactgtcacaggaaccattctagtccaagctcatgatccatctcagctagcaatggagatagagaatgcaattgatcagcagagatttgatgatgcatggagggcttatgagaagcatgttcacatggatggacttccaagaaagtctgttttgagcaagctcatcactggcttagcagagagctgtgatcatcactggcttaagcagtcctacaatgtggtcagtcatgcatttgaagagaagcaagaattgttggataaggaacccctaatttacctatccctcattcttgcacactgtgctctgcctaatcttgctttaaatgttgtgaggaagttggtaaagatggaagcatacccacctgttgcagcatggtcggcaattttagctcatatgtgtcaaactaacactggtgcatttctcggtgcagaccttgtaatggagcttggttatcttttccaaaataatagagttgatccacggaagaagagtaaccgtcctttgctatcaatgaaacccaattcatttacattcaacatagttttgaccgcttccctcgtgtttggcactacaagaaaagctgagcagcttctcgaactaatgccgaggataggcgtgaagcctgaagtcaacttgttgattgttatggcccacatatatgaaaggaatggtcgcagagatgagattcggaaattaaagaggcatgttgatgaagcttatggtcttagtgaatcagaggttaggcagttttatgattgcttgctctcctgtcatttgaaatttggggattttgattatgcagttgatatggtactggatatgattaggaaaggtaagaatgcaaagcggtcattggaagcagctaaagcagttcttgaagctgttgaaaatagaaaattttattttccttatgagaaagctgatgctgaaaacccacgctcttgtagtagccaaatgctaagtcacgcttcattcttcaaagacaacagctttgggagacttgaattggacgcaagagaatcagtcaggctattgacagataagctgcaggaacaggttggactggttaaatctgagcatggcattctccatccaactgaaacaatgtatgccaagcttgttaaagcttttctggaagcagataagatcagtgcattggcatcgtttcttgtgaaagcaagcaaagaagattctcctgtatctgttgaaagctcctttgttgttcaagtgataaatgcatgcatttctcttggcttattagagcaagcacatgatcttctggatgaaatgagattttctggaattagggttggttcatccatttattcatcactcctaaaagcctattgcaaagagggacaacatgaagatgacataactgcacttttgaaggatgctcaacaagctggcattcagcttgattcaagctgctatgaggatttgatacaatctagggtgaatcacagtaacaccacaggtgctctccatctttttaaagaattgaagaatttgaatgttctgaaagctggtcacatggaatttcagagaatagtgcaaggctctgatgacaatgaagctgctttgatgaccaagctagtggaggaagtcaggagtgatcatacagttgatcatgctgttcatgaatggaataatgttatccatttcttctgcaagaagagattgatgcatgatgctcacagagcactgaacaagatgcgagcttccggccatgtgccaaatgcacaaacttttcattctttaataactgcttatgctgccattggtggcaaatatgtggaagtgacagatttgtggggtgaaatgaaacttctggctagtctaagttctatgaaatttgatcaggagctcttagactctctgttgtattgttttgtgagaggtggtttcttccttcgagccatggaagttatagagatgatggagaaaagagagatgtttatagacaaatataaatacaagtccttgtggctcaagtaccacagaacattgtacaaaggtaaggctcccaaggtgcaaacagaagcacaactaaaaagaagagaagcagcaatacgtttcaagaaatggattgggttgacatgagagcaagaagttcaactcaagctatatgaactgatcaggaattctttgattatctgctgtatggatggatctttacaaattctgtaaaatcgtagttgcgaagtttgttagaagaaatgcttcagccaacacttacaatataatggtgttgcatggcattaagaaagggggcatggcattaagaaaggggtcttggagcatttgagcgcgtttgggagtcttggacatcttcaaagtgcagtttcttcctttggcttgtcatgcacaacagatgctggaccgcagactgtcttactaaaagaggactaccccaccccagtgcgtgtcccctttgcgaccaagaaggggaaacaatacaacatcttctcatcttttgcgtctttgcaagacagttctggtacttcttgttgcgcaggtctgggttgcctaatctttcaccagacaatgcttcttgcagccttgatgactggtggagcagcgctgtggagaaggttccccgtgatctccaatcaggcttcaattctctagttattcttggcgcttggagcctctggcgtcatcgcaacgactatgtgttcaatgggaggtcgtcgagcctagcgagtactctcaccctcgctggcgatgagctcaggatgtggtgtagtgccggggcgaaagggttgaacctgctttcaactcttgtgtttatgcttgacccaggggatagtcttgtgtcttgttcagagtggttgtgtgtggtggctgtgttgcgtcttgtgtgtcttgttgtgtcatgtgtgttgtgttgtaccttcttatatctattaatggaatgatacgcagatctcctgcgtgttcgagaaaaaaaagaaaaggggcttggtgcattttcaag

SEQ ID NO: 7834 - DNA, 1029 bp, Zea Mays
ccgctctctgctcagtgctgagtctgctccgtccgtctccgtgccgtgtgctggcggtggcggtccaggccccgctcgctcctaccagtggcccgtgcgtgcggccgccggcgccctgatcgatcgacccgcgcctcggccggatggaggcgtcagtagcagcagcaggaggtgggggaggcagcgccgccacgcggagcagcccggcggccgtgcaggccaccaacgacgacgccgcggccagcaagctgtcctgtgttaacaaaggatacatgaaggatgattatgtgcggttttttgttaggcgaccaacaagaagggctccaataatcaatcgtgggtattatgcgcgttggtctgttctcaggacgcttctgcatcaattcctcaatgcggggaagaatagtaacaatgacaagcctaaacaaatattatcccttggtgctggctttgacacaacattcttccagttgcaagatgaaggaatggctccacactgttatgtagaattggatttcaaggaggtaaccagcaaaaaagccgccatcattaaccattatagtgaaatgaaggaaaagttaggctcagaagcttcaatttcaatcgaaaaaggtgaagtgataagcacacattacaagctattttccgctgatattcgtgacataccaaaactggattcagttattcgcatggctgaaatggatcctagcttgccgacctttataattgcagagtgtgtgcttatttacctggacccaactgccactggtgctattattcatcctgatgatgcatttggggagcaaatgattagaaatcttgagagtagaggatgcccccttctcggtataaatgctacaccaaccttgagtcacaaggagaaactttttcttggcaatggatggcagagagccgttgcatgggatatgctgaaaatctataatgacttcattgacagtcaagaaagacgcagcttgtgttatgctgcacctttccatgatgtcactgctgataaggctgcccgcaatg

SEQ ID NO: 7835 - DNA, 1678 bp, Zea Mays
ccgctctctgctcagtgctgagtctgctccgtccgtctccgtgccgtgtgctggcggtggcggtccaggccccgctcgctcctaccagtggcccgtgcgtgcggccgccggcgccctgatcgatcgacccgcgcctcggccggatggaggcgtcagtagcagcagcaggaggtgggggaggcagcgccgccacgcggagcagcccggcggccgtgcaggccaccaacgacgacgccgcggccagcaagctgtcctgtgttaacaaaggatacatgaaggatgattatgtgcggttttttgttaggcgaccaacaagaagggctccaataatcaatcgtgggtattatgcgcgttggtctgttctcaggacgcttctgcatcaattcctcaatgcggggaagaatagtaacaatgacaagcctaaacaaatattatcccttggtgctggctttgacacaacattcttccagttgcaagatgaaggaatggctccacactgttatgtagaattggatttcaaggaggtaaccagcaaaaaagccgccatcattaaccattatagtgaaatgaaggaaaagttaggctcagaagcttcaatttcaatcgaaaaaggtgaagtgataagcacacattacaagctattttccgctgatattcgtgacataccaaaactggattcagttattcgcatggctgaaatggatcctagagtgtgtgcttatttacctggacccaactgccactggtgctattgtgagttgggcatctcaaaagttctccactgctgtctttttcttatatgagcagattcatcctgatgatgcatttggggagcaaatgattagaaatcttgagagtagaggatgcccccttctcggtataaatgctacaccaaccttgagtcacaaggagaaactttttcttggcaatggatggcagagagccgttgcatgggatatgctgaaaatctataatgacttcattgacagtcaagaaagacgcagcttgtgttatgctgcacctttccatgatgtcactgctgataaggctgcccgcaatggatgcaggatcgaacggttagaactgtttgatgagtttgaagagtggtatatgatgcaggaacactactgtgtggcctatggaatcaacgacgccgagggcatatttgacagttttggatttggggagacatagcagcactggtgccttttcttctgtgggtaccagctgcacttgttgtaaaccgacaccattaattcaagtattactcgaagtaaactttgcttgataaaagaaggaacgattgcttgataaaagaaggaacggacaggggtaggatacctaaacatctcctgatgttggagcttgctttgataggctgttcaagttcaacggcgttgtgcttggtttaaggtctttggtgccagtcgcagtggtgtttgatgtcaagcatgccaggctgccagttcgtcacaatatgaacagaacagtggtgctttccattttactgtttgcagatttaggttaaatctggtagcacatgtttgcagaataaatccgatgtagtttccttcagcctcttcagatacgagaggagatgacatatacgtccggttccaatttgcgcttgacgtgcgaggagctttgaagccaaaatagtttcctaacatgttgaaac

SEQ ID NO: 7836 - DNA, 1536 bp, Zea Mays
ggaactttttaaatcgcattggacttatttaaattctacagttcattgagaatcagagttgtaatctgagcaatggtggagcatcactgcttatcagcttaattggattgtctgaacactaaacaagtgaacacccaagctgctgcagatgttgttgattgcagtaatccaaagaattcaaaatactatgtcgttgttgttcagtatatggcacggcttaacgctgaaaacatcaagaacttcctgtatgaactaaatgagaagcaaataccgaaaaagagatttaacatgaggttggcaccagaagaggagtcacacaagcttactgggtttgtgcataacgctgtcacttgcatcgggatggaaacaaacataccggtcatcatagatgaagctatcaccaaattggatgaggatttcttctggttgggtggcggagaagttgacctcaagctcgggatgcgaacctcacaattcttaagtgtctttagtccattcgtggtgaaatgcagctgatgatagccgtgcagcctaagagaagcttctgattcatttatttctaccgagcctccatgcatccatcacatggagatcctctgttctgtgccactccgaacgccattcctgcgcagactgttttttgcgccgccgctaattccaggtggtgttccggcgctcatccagtagaagccgccattcctgcgcagactgttttttgcatcgaccaggattgctgccttcatttcaggatggtgtatggaagtaggagatcaaaaaggcaccaagaagatgatgagattgatgatgaccttcagcacattggtttttatgctaggtgaataccggaagaggaagaatgaagatcaacgtaaaaagcgtcgaggtttggtttttggacatgaggtatatgatcgtagtagaggagagcatgatttaaaattattcaatgactactttgctgagcgtccaacatatcctgggaagtatttccgacgacgctttcggatgagtcatcctcttttcttgcggatagctgaagctgttaaacaacatgatcactattttgctcagaaaaaaaaatgctgtcggtgctcttgggttttcttgtcttcaaaaggtgactgcagcttttagacagcttgcttatggtgttccagcagattacgttgacgagtatttgtggattggagaaagcacgactatcgagagcctacgaaaatttgtcagggcagtgtgtgaggtttttggaccagagtatttgagacctccaaatgaaaatgatatagctaggttgcttactattggtgaacaacgtggatttcctggaatgattggtagtgtcgattgtatgcattggaagtggaaaaattgtcctacaacttatcaaggcatgtattgtggtcatgtgaaagaaccaactattgtactagaggctgtggcgtctaccgatttatggatatggcatgcattctttggtctaccggggtctttcaatgatattaatgtcttgcacagattccatctttttgatagact

SEQ ID NO: 7837 - DNA, 1696 bp, Zea Mays
gaaggttttgaacactcagctatgggtcatcatagatgaagctatcaccaaattggatgaggatttcttctggttgggtggcggagaagttgacctcaagctcgggatgcgaacctcacaattcttaagtgtctttagtccattcgtggtgaaatgcagctgatgatagccgtgcagcctaagagaagcttctgattcatttatttctaccgagcctccatgcatccatcacatggaggtacaccacaatactaggaggttttgcttggatctggggtttggatgtctgtcttttttggagcaggctattcctgttcagttgctcgcctcacattatttacagctgattgttgttacgactgatgtggtggaggggacattcttgggaagattgagatatttgccacaactaggcatatacaataatactctctgtagtttgtgcctaaaattagcactggttacttgtgtaatcaacgagactcttactttcatcgaaaggatgacactatgagttggtgcgattttcttttatttttttcaaacactacacaatgtcatacccttagaagggtcggtgacacatttatagccctaagagcaactccaatcatgagtcccctagttgggccctataatttaagttagctacctgttctatttgtttagggtccaaatacaattgttgattcctaccgtggaccctaaaatagcttacatttgtaatcaacccatattcccctgtacgtagatcctctgttctgtgccactccgaacgccattcctgcgcagactgttttttgcgccgccgctaattccaggtggtgttccggcgctcatccagtagaagccgccattcctgcgcagactgttttttgcatcgaccaggattgctgccttcatttcaggatggtgtatggaagtaggagatcaaaaaggcaccaagaagatgatgagattgatgatgaccttcagcacattggtttttatgctaggtgaataccggaagaggaagaatgaagatcaacgtaaaaagcgtcgaggtttggtttttggacatgaggtatatgatcgtagtagaggagagcatgatttaaaattattcaatgactactttgctgagcgtccaacatatcctgggaagtatttccgacgacgctttcggatgagtcatcctcttttcttgcggatagctgaagctgttaaacaacatgatcactattttgctcagaaaaaaaaatgctgtcggtgctcttgggttttcttgtcttcaaaaggtgactgcagcttttagacagcttgcttatggtgttccagcagattacgttgacgagtatttgtggattggagaaagcacgactatcgagagcctacgaaaatttgtcagggcagtgtgtgaggtttttggaccagagtatttgagacctccaaatgaaaatgatatagctaggttgcttactattggtgaacaacgtggatttcctggaatgattggtagtgtcgattgtatgcattggaagtggaaaaattgtcctacaacttatcaaggcatgtattgtggtcatgtgaaagaaccaactattgtactagaggctgtggcgtctaccgatttatggatatggcatgcattctttggtctaccggggtctttcaatgatattaatgtcttgcacagattccatctttttgatagact

SEQ ID NO: 7838 - DNA, 2009 bp, Zea Mays
ttgcttatgctttgcgtcggatactcggattccagctggatcggcgtgcgccaagcgttccgcgaatcggccattggctcgtcctgcccacgaccccggagcccaaacgttcagagttcagacgcacaaacgccgggagccaccgcaatgcccgccacacgtcggccgccgccgagttggagtactgcgagttgtgccgccatcaccacgaccatggtcggcgccatcgctacatcatgaagcacattaacaatgccatttaccatatggcaagcagtcagcacctgaagggtgtgaataatttcctgcagaagcatgggggaaggatgaggtggacttgcttaggatttcagaggaagtgcttgccaagtgggagaaaggctttggatccttgagcacacgagcgaagacaatgtggcatatgaccctattagtacagcgtgtcatcgagcttccagttctggaagtgccccttattcttctccatatggagcttgtggtctgcccatcacacattggggatcggccgaaacacataagcagcagggtatgctgtctgcaaactggtttcacagcagcggtcctgcaactaaaggtcatcaatctaccgtccttgtaaatgacacaaggcaattgatttcttgtactgatcatgctcaagcaaatgtacatacgggtgctcctcctcggttaaaagctaacggacatgatctaaagaatttgtcactcagaagctgtggtcttccttctcggaaaggaaatttgaggaaactcaatccaaagagggttggtgctgcatgggcagaaaaaagaagagctgagcttgaaatggagaaggaaggtgaaattgttccaataacatctgattctagttggctacctaattttggtagtgtctggcaatcaggcacaaggaaggaatcaaggaaagaattcgagaaaaaccacaagtttcatgacacgaagagcaacatgacttatccttggagataaaaccatatatcagcaaacggatgcgcatagccacctaccacagtaaacagatgtacaacacttcgccagatgttggtatggatcttattacactcgccactcggtaaaagaaaggttcaggtttagcaattaccagccacttttaaggcttgcatattaattaatcgcaagatagagatctatatatgcgaacgtttgtcagtaataggcgaaccacagctacagcaatttctgattacacacttcaatgtccccagcaatgaatatgatacgggtgacgggggttggggcaatagtagtagtactacctgggctagctcgcaggactcctggagtaattgcgccccttggatctgtttatttgttgaatcgccatgcagggcagatgttccaaactttctactcactgtttggcacctgcagatggatgctggcccagggggcggcttgattggcgattggttccctgccaactcgtctaggaggcccggttataggccgcttgtaccgaatttaaagccaatctttgacagctacgcagtcaatatttttttgttctggtcacgaagccgtttgatgttcgtactgagaagcttgtgccggtatcggttgctgctttgtgcgtcgctttaaacaatgtgcatcaactggtagttctgtgttctcatgatctcatcagagcagccgtatgcggtttggtcactggcatgacataaaattgacttcgtctctttctgcttctttgtccctgtttgtttaaccgcgctttgagcgaaagctggtttcttccacaactggcttcgagaacaatctcaggaacacgtttactgtttgccatcctgattataagctgtgttagggtttatctcatccggtttggtcaagggactaagtcggactctggtgctctgatgggtgcaacaaccttacaattgtggtccttttttctcatatcgtgtatataaacaagagagacggcaaccaacgtttatcttagctcctaatagtgagatttg

SEQ ID NO: 7839 - DNA, 1282 bp, Zea Mays
ttccgagcgtgtgcttggtcaactgggccaccgcgcacaaaacccattgcagttgtagcagggactctttccccgtgccacggacgacaatgactgccgacgcggcgctcctcgccatcatcgtcgccttcctcctcccgctacgcctcgtctccctcggcctcagcctggcgtccgggcgtcacggtactagctccagacgcgtccgccgttcctgtgccgctttggccgtcgcagccgcgctcctcgcagtcatcttcgccctcccgcgtgaccacgtccgggagtgcgccgctccgatcgcttctgtctccagtgccggggatgatgacggcggtttccgcgaggagctgcggttggaggtcgagcagcttaagcagcagctggcgcggcttgaatctctttgggatagtaaatcgaaagctgtggatgataaacttgattctttagaggaggataatggccgtgtaatgagagcaatggcactcgatgtccagtctctgatcaatgagcgggaaaatatcaaggttcaaattctaaaagatgggtcaagaaagatgaattctgatatatcatcagtagcaaaggacacggcagaaaaggtcgaagttttgcattcagctatcgagaaggttcaagttatagctgatgaatgggtcaagatgaactatactattaacagaatatggtcattcactaaggagacagagaaaagggtggaaggtctatattcagatttaatgaagggcttcaagcagacgaagagaaaagtgccgttctggagagactgatgatgctgtggacctgatgtttgaccactgtcattgacgacccgcttggaattgacacaccgaagctgctagcaacttaatccgcttccatccagtgtttatattttcgcgtccttagtgcttgtgagacgtcagtgcaaggttgtggttgatgagaccttgtgcgacccgacttgctaactgtttgcatgccgtcatggccccataatgggactatctctatctatagcagcttatctataattatatttaaattacactgtacaaataatacaatacagcccaaaacggtgtaaaacggtgtttttgtgaccatatggtgcaatgctgacattataatgtttgtagactgtaatttgaatatgagtaaagctcgagatagttttatgcgctaccaccactgacgatggatgtccctaggaatatgaattgttattttttcctatatataaaatacacaatagatctccgtattggagaggtaaatgggg

SEQ ID NO: 7840 - DNA, 922 bp, Zea Mays
atccaaccctaacttcagcccctgccgcgcgcccgcgatccaccccgtttcgactgctcgcctgctgcgtgctgcctgctgtctacggcctcatacgactgccctgcgcccctcgtggcttctgcggttctgcacacgcgcacttgtccccaaacagcggcgtcggcgtcggcggcgatgagtatctcaggcgagcttcccggcgaaggatctgacggcgaggaggaggtcttcatcgacgaggaggacatcatccacgagataaccatcgacgaagaagatctccccgaccgcgacgaagaagatgacgacgtcggcgacgggattgttgattcagaagacatcattgatgattctacgtactcatttcttggccacaaagatgaagtcttctctgttgcatgcagtcctacagatgcatcacttgtggcttctggaggcaaagatgataggggatttctgtggaggatcggatcagatgagggtgccttggagctgactggacacaaggatactgtcggcacagtggctttcagttcagatgggaatttgttggcttgtggaagttttgatgggcaaataaatgtgtggaatacagctgcacgagctctcaagggaacccttgagggttctgggtcaggttttgagtggcttaaatggcatcctcggggacatttgataattgcaggatcagaggattgtaatgtatggatgtggaacgctgaccataatgccattataaatacatttgttggacatagtaacacagtgacatgtggtgattttactccagatggtaaacttatatgtactggatcagatgatgcatctttgaggatatgggacccaagaagtgcacaaagcaggcatgttattcgaggccatggctatcatactgtgatggattgacatgcttatcaat

SEQ ID NO: 7841 - DNA, 4172 bp, Zea Mays
ctgccgtcctgctggcaagtggcaactgacgtcctgctggcgagcgcaaactggcacgggttcctgcctaaatctggagggcgggcctgatgcctgcctcgccgccgaggatggcggaagtcgcgcccggcggtcctggagccccggccgggccgcacgcacgagcggacggcgggacgccaccagtccaccaccacctcccctcccctccacccaacccccgctgtcaccgcgccaccgagggcaaagccgcgtcgcgaataaccgtgggggcgtgcgcgcgtgcgtgcctttctccgtccctccccgcccgccccacctccaccgccccattccccacctcgacgcgcgtcgcgtctctccaggtcggaggcggaggagcggaggacgatcaccggcgcggacgcaggcgtcccgcattcccccgatccggccccgcctgacccccgctgccacggcagctcgacccgaccgaccaactcgccggccggcaggcgccacgtagaaatacacggctcttcaattgttaacgtagaagtataggatggctgtatcactatgctatttctgccccgggctcacaacacggtcccggatgcccgtgaagcggtacaagaagatccttgctgaaatcttccccaaaacacaggatgaagagcctaacgagagaaggattgggaagttgtgcgagtgtggaggttctgaccttttgagcgaattgatcttgctgctaaacttagacgacccttcagaatacagtttgctagctttgtagcttctgtagtactgattataaatgcaatcgaggatcgagtgatcacagtttacttggagcagcacatttaccgggacttaagaagtgagcagtacggctttgcaaaagtggtgatgttgatatatcgcagactgtcggtttcctgtaaagaacagatgcctctgtttgcaagtagcctattaagcattgtgcacactcttttagaccaaaagaggcaggacgatttgcgcattgttgggtgtgaaaccttgtttgattttactgtcaatcaggtggatggtacatatcagttcaatttggaagggctggtcccaagactgtgtgaaatagcccaagaagtaggagaagatgaaagggcaagtgccctacgagcggcagccctgcaatctctttcagctatgatctggtttatgggggagctttctcatatctcgtcagagtttgacaatgttgttcaagttgtactggaaaactacaaacctcagaagatgcaaaatgatgatcaaagtaccaatgatgctgacaaccagttggtgcaggaagaccagaaggctgagcacccgccttcccctttcattatcactccggccccctcttgggagaacatagttaatgccaagggaggaatcaacctgccagaggaagatgttagggatcctaaggtttggtccagaatctgtgtgcacaatatggccaagctttctagggaggcaaccacattccgccgcatcttggaatgtttgtttcggtactttggtaacaatagttcatggttatcagaaaatggacttgctttgtgtgtcttgttggacatgcaacttttagtagaaagttcaggacaaaatatgcatttaatgttgtcacttttgataaaacatattgagcacaagacaatgttgaagcagccagacatgcagcttagcatcgtggaggtggcagctacccttgcagaacaatccagtgctatcgcttcaccagcaactgtaggtgccataagtgatcttgtgaggcatttgaaaaggacattccatattactcttggcagcaaagatatggaattagtaaaatggaacgaaaaattccggaagggcatagatgaatgcctagttcagctgtcaaagaaggtgtctgatgctgggccagttcttgacatgatggctgttatgctagaaaacattgcgagcactcctgttgtagctagatcaactgcagctgctgtttatcgcacagctcagataatcgcttctgtgccaaatttgcaatatcagaataaggtgtttcctgaagctctgtttcatcagttgctgttaacaatgatccaccccgaccatgaagctcgtgttgctgcacaccgcatatttgctattgtcttagtcccatcttctgtttcaccttcgattcaagccagtccctcaggccaggtaaagaaacatgacatgcagaggacactctctagggccgtctctgtgttttcttcttcggctgctatctttgacaagatgaaaaaggacaagcactcagaaaattcacaaggagaaagcaaggacaatagtttgcatagcgttggtgaagggaccggacaaccaaagaatcaaaaccttcatgtgtctcaaagccgacgtagtagcatgagaatttctaatttttccatgaaaagaggcccttcaatggccatgagagctccttcagtagctatcagagctccttcaatatctctgagaggtccttcaatgtcttcaagagcatcttctgtgtctgtaaaggaagaccaaatttccccaaagaaatccgacgaggaaacggaatcagtgttggtgaagctgagcgcccgtcagatcacacttttgctatcatccatttgggctcaagcaacatcccctgaaaatactcctgtgaactatgaagccattgctcatacttacagtttgcttctactgttctctggatccaaggcatcaacttttgaggctcttacccagagttttcaggttgcattttctttgaggagctatgcgctcactgaagcagattcattacaaccgtctcggcgtcggtcattgtttactctgtcgacagccatgattattttctcgtcaagagcttacaatgtgttgccactcattccaatctgtaaacaaatgatcaatgatcgcgcggccgatccattccttcgtttggtggatgagagcaaacttacagctgtcaaggattgttcaaatgatccttcaaaaatatatggatcaccagaggacaacgctaatgcactgaagtccctctcagaaatagaactgtcagaaagtcaatctcgagaatgcatagtctccacaatcatgaacaacattgcaaatatgatggatgcggagttgcataatgtgagaagccaactgctaagtgatttcactcccgatgacatgtgtcctacaagcactcagttctttgaaatgcatgttgataatccttcagggtttcatgagactggtcaccatgaagagggtttgctgattgacctggggaatgaccatgatgcttttggggaagcttcggaaggcgcagaagctcgcacatcttctgtacctgcatcagatcttctgagtatcgatcagctccttgaaacggttggtgcagaaccagcacctcaggctggagtagtgtcggcagacattggattcaaggatatgactagccactgcgaagccctgacgatcgggaaacagcagaaaatgtctgccttcatgagcttccagcaaagcgtgcaagctgcaggggtgccaggcagccagcccaaccagacgacggagctggaccttttccaagacctgcagttgcctcaggccggggcgcagagcacaaacccattctctgatgagagcgttcagggatacccacagtacatgaacgggcccaacggcgacaacgcacagccaggccaggacttccaacagcagtctctgaagctaccggcggcgagcccgtacgacaatttcctaagggctgctggctgttaggagtccagttacatggacgacaaccacctcacctcaagatagtcccaacggaagatcctgcaatttttccacattttgcagggaaagaagaggggtatgtccgcgtgtgaggtcttagctagagactcaaaccgggttcgacacccattctttatgtatagctgtacgtggttgggctttgagccctttgctgctgctgctgttgttttcaccaatgcaacgtgtagagagggactgtgggggagcagtgccttctaccagactgtacatgtaacatgttgcagaaatatatgaagaaaaaatgacgtttgaaggatagatctggtgtagctcgtcgagttaccagatgatgggatcaaagaagcctttcatatttgcggtggaagttcgtt

SEQ ID NO: 7842 - DNA, 1298 bp, Zea Mays
gagtgtgtatatatgtggagcacgtacgccaagcagcggcgtgaggcagcctgctagctgagaggatcggatcgcatggaacttgccgggacatggaggaaggtgatgccttacatggccatggtgtttcttcagttcggcttcgccggaatgttcctcatctccgtcgcgtccctgcggcagggaatgagccactatgtccttgttgtctaccggaacgtagtggcagccattgtcatggctccattcgcgctatggtttgagaggaaaacaaggcctaaaatgagcctaccggtgttcatcaagatccttgctttgggattactcgaacccgtgcttgaccaaaacttcatctacatgggagtgaatagcacatcagcaagcttctcctctgcgttaaccaacatattgccagctctaacttttgtaaatgccatcatactcaggatggagaggatagtgattaaggagcgacgaagccaggctaagattgcaggcacagccataacagtctgtggtgccttgcttatgatacttttcaagggccccatcatcaacttcccatggagcaagcacgccagccacgccgtatctgacagcggcgtccacaacagcggacactggctcatgggcacgttcatgatcctgttaagctgcttctgctggtctgccttcttcatactccagtcatatacgttgaggagttacccatctgagctctctttaaccactctgatatgcgcaatgggcgccacggagagtggcgcggtcgccctagtcatggagcgtgacaccaaggcttggtccatcgggtttgacatgagactcttcacggccatatactcgggaataatgtgctctggagtagcttactacgtgcaagggatagtgattaaggacaggggcccagtgttcgtgactgcgtttagcccgctctgcatgattttagtgactgtgctaggctccttcattctttctgaggtcgtcactttaggaagtcattgttgttggactctatgcgctcatctggggcaagaacaaggaccatgtgaagtcgcaaaacagttttgacaagcacgacacatttgagctgccgttctctacttctgccgttaacaatacaaccggtcccgtcctggcaacatctatttaaggctcgtgtccatgtgacttcctgtatcccgcacccatcgatttaaggctagctagcggcctagcatgtaatcgccaaatttccattaaaaaagaattctaggatttgcataacacagtttttctctgacatggttgattctttc

SEQ ID NO: 7843 - DNA, 1116 bp, Zea Mays
caccctctccattcttcgttcggatccacgtattgccggacccgctgtcagagtctgacatcgcttgggcgtctggacggtcaacgttaaccccacgcacgcttcttctcccccagttcaagtgccacaccggccgctcgtcgccttcccatctcgccgcgccatggatttctgcagccacctccgtctcgcggctgtgctcgcgctcctcaccggatgcgcttctgcggcgagccggggcgctggttccttcgacccatcccgcgtggttcaactctcttggcgccccagggcgttcttgcacaagggtttcctgttggatgcggagtgcgaccacctcatcgcgctggccaaggacaagctggagaagtctatggtggcggacaacaagtccggtaagagtgtccagagtgaggtgcgcaccagttccggcatgttcctcgagaagaagcaggatgaagtagtaacgaggatagaggagaggatatctgcttggacatttcttccaccagagaatggtgaagccattcagatattacactaccagaatggtgagaaatatgaaccccactacgactacttccatgacaaaaataatcaggccctgggcggccatcgcattgccactgtgctgatgtacctatcaaatgtcgagaagggtggagagaccatcttccccaatgcagaggggaagctattgcaacccaaggacgacacttggtctgattgtgcaagaaacggatatgcagttaaaccggtaaagggtgatgccctgctgttcttcagtctccaccctgattcaacaacagactctgacagcttgcacggtagctgccccgccatcgaaggccagaagtggtccgcgactaaatggatccatgtgaggtcatttgacctcaccgtcaagcagccgggtccctctgatggatgtgaggacgacaatgtcctctgcccccagtgggcggccgtgggcgagtgcgccaagaaccctaactacatggtggggaccaaggaagcacctggcttctgccggaagagctgcaaagtatgcgcagagtaagcaaccattgggatattcttggctggcgccggcggcctgtgggtggcgacgactcc

SEQ ID NO: 7844 - DNA, 1461 bp, Zea Mays
cgctgctgcacactgccccactctcctctacctccgcgccaatgcgcctccccaacatttaaacggccaaaccagcccaaaccccaaccccaaccccacagcagtaacaggggcacactagctaagctaaacctcgccacggcacagcaatggcgccgctccccgcttccctcatgccctgcctctggctcttcctctgcctcctcgccgcgccgtgccccgcggcgcgggcggcgcggttcgcgtgcaacgccacggcgccgcgagcgtccacgtgccaggcgctcgtctcctacgcgccgcccaacgggacggccacgcccacgctcgccgccgtgcgcgcgctcttccagctccgctcccaccgcgcgctgctggccgccaacggcctcccgctctccacgccgcccacggcgcccgctcccgtgccgctgcgggtccgcctgccctgcctctgctcggggggcgccggggccacgttccagcggcccacgtaccgggtccgcgccggggacacgctcgacgccgtcgcgcggggcgtcttcgcgggcctcgtcacctaccaggacatcgccgccgccaacaacgtctccgaccccaacagggtcgccgtcggccagcagctctggatccccgtgccctgcagctgcgacctcgtgggcggccaacccgtcgtgcacttcacctacgtcgtgccggccgggggctccgtgtccagcatcgcggaggagttcggcaccacggaggagacgattctcacgctgaacaagatgcccgacgccaagtcccttctcgccggccaggttcttgacgtgccactccgagcttgtagttctgccattagcagcacagccattgaccgcaaccttctcgttccaaatggaagctacatcctcaccgccaacaactgcgtcaagtgtggctgcagctctagcacctggcagttggactgccagtcaacacagggactgagctcgtcgttctgccctgccgccaagtgcggagacatgttcctcggcaacacatcctcctccacctcatcctgcgagagcacagcatgctcctacgccgggtacaccaacagcacatcgttcgccatcctcgccaatgtgaccaccaccaacgtgtgtaacggctatctgcggcaaaagactgaacgttgtcgccaagcgtctgtcgttagaatctggccctctgattcctagtttgatgttgtgagtaatatctgcagtgtttgcgcgactttgatctgtaactggttggatttgtaagggcaaactctagggtaacacttctgtgttagacggtagatcaggaaacatttgtacttcgtcaaacttttgcaaagataatttcttctgttatcaccatagcctttttcgtgttctagaatctggagtattgtttggctctagcattccaacgtatggattcaacatcattgcctgtaatttcagctcc

SEQ ID NO: 7845 - DNA, 3151 bp, Zea Mays
cactgctcactgcaccgagccgagcgcaggttaggcgggcgcgcgatcaccgaagccgacgcggcgcccgcacgcgccaacggccgaacgcactctctctctctctctctctctctctctctctcccctctccgttgtgctccccgacccaaccctacgcgctcctgccgcccccccgcaggccgcagctacatctctcctcccacctcgccagtcgccaccgcgcggtgggagctcgctgaagtgcttccccccgctttgcggcagcgtcagctcagaccccttgcccgcgctctcgttgtctggcgggctcagctggtttggtcagcgtggcgaggttgtcctggccagatcctgctcccgcccgcgcacgactgggtgtgggcggtggattggctgcgcgggtcatcagatctatgccggagatctagggcgccaggtgccgaggtggaggccgtgagccggtggcgatcggagggccgaggacagggatggcgtggtggtccgggaaggtgtcgctcggcggcctgcaggacatcgctggagccgtcaacaagatcagcgagagcgtgaagaacatcgaaaagaacttcgacagcgcgctcggcctagaggagaagcgtgacgatgaagatgcatcaggatcacagacatccaactctgatagaataggattcttcaatcctgtcatggctttcatgggacacaatggtgaggaggatggcactgaagtatcagaaaagccacaatctctgaagaatctgtcagcagaggaaggaattaatagcacaccaactaagaaacatatatctgaggtagatccttcggaagtatcaggaacaacatctccaaaactgccttcaaaatcggaagaagttcatagtatttccaatgggtcacctgtttctaaggcagatgtttctgagcaatccataacaccacaaactccaacacatccttcagtagcagaagaaaagcttgatagctctactgaggcacctgcatctaaggtgggtgatgctgaagcatcagaaacatcacaatctgcaggacatccttcaacagtggaagaaaaccagcaccatcaagttagcaaacattctgatcctagtgatgaagcagagccgaatcagcttagagagtctgttcgagacttacctgatggtagtgcatcttcttcgcctactaaaatacatcaatcaggtgacaccgaaacaggggaatctattcacacaggaaaggaagatacgtctgataggaacatcttgcagtcacaaccagcagagtctgcgctagctagttcagatgatataacggaagctgaggacaatattgctcaagaatatgatgccccaaaagaacttagtggcccacaggagagtagtgatatggtagacaaaggtactcatcttgaagttaaattacatgatagcaatattaatactgaaaaaagtgaggaagaaagcaataagatggagtcaggggaatcatctgttgttgtacaggaggataatgcaatggagcaacctcaagacttaacgttgaagtccttaactgcagagcatgactcaaattcgcagaacgagtcagtgatcaattcgactgatatacctgttggactaggtgaaggtcctccaaatgattttacaaaagaagaaaagattctagaatctgttagaggcacagattctcagactctggactctgttgtttctgtcgatgagctagagaaattaagacgtgaattgaagatgatggaagctgcattgcaaggtgctgcaagacagtcacagtccaaagctgatgaaattgcaaggttgataaatgagaatgagcaactaaaatcaacaatcgatgatctcaagagtaagtcatctgaagcagaaatggattcactgaaggatgaatatcaccaaagagtagcaactcttgaaaggaaggtatatgcactaaccaaagagcgtgatacactaaggagagaacagaataaaaaaagtgatgcagctgcccttttgaaagaaaaggatgagatcatcaatcagattcgtgagtttgaagaagaaaaacaacgcctgaactcaaagatccagatagatggaattaagttagtttggcgccctgaacaagatgttatgtctgttttttttcttctctcaaaggttgaggaggctaaggttgagagcatcaagagagacaaagcagcaactgagaagttgcttcaagaaacaatagaaagaaatcagactgaacttgcagctcaaaaggagttctacaccaatgctcttaatgcggctaaagaggctgaggcattggctgaagcaagagtcaacagtgaagccaaaattgaactggagaatcttttaggagaagctggtgaaaaagaaaatatgctgattaagacaatcgaggagttgaggcattttctcacccggcaagaacaggaggctgctttcagggaaaaaagactaaaaggggactatgatgatcttcaaaagcggtatcaagccagtgaacttcgttataatgaactggtaacgcaagttcctgagtctaccagaccgcttctaagacaaattgaagccatgcaggagacaactgctcgaagggaagatgcttgggctggtgtggagagaaccttaaactctcgccttcaggaagcagaagctaaagctgcttcttcagaagaaaaggagcgatctgtaaatgagagattgtcacaaagtttatcccggataactgtccttgagacccagattacaattcttagaacagagcagacacagctgagccgatctcttgaaaaggagaggcagagagcatctgaaagtagacaggagtacctagcaatcaaagaggaggcagcaatacaagaagggcgagctaaacagtttgaagaagagatgaaggagcttagagctaggcacaaggaggagctgcaagaagcagcagaacacagggacctgcttgagaagggttctaggccttgtgttcaaaatgtggtgttagcaagtggtcgaggaagggcgcacttggtgcttggctgggtcttcagccctccaagacctgctgtgtcagctcccctcggggtctccaccgtaattcggtgaagctagtggtcgttctctaccttgtgtgtggcgcgctgttctta

SEQ ID NO: 7846 - DNA, 3197 bp, Zea Mays
ggttcttcttcgttcaggccgagatccactgctcactgcaccgagccgagcgcaggttaggcgggcgcgcgatcaccgaagccgacgcggcgcccgcacgcgccaacggccgaacgcactctctctctctctctctctctctctctctctcccctctccgttgtgctccccgacccaaccctacgcgctcctgccgcccccccgcaggccgcagctacatctctcctcccacctcgccagtcgccaccgcgcggtgggagctcgctgaagtgcttccccccgctttgcggcagcgtcagctcagaccccttgcccgcgctctcgttgtctggcgggctcagctggtttggtcagcgtggcgaggttgtcctggccagatcctgctcccgcccgcgcacgactgggtgtgggcggtggattggctgcgcgggtcatcagatctatgccggagatctagggcgccaggtgccgaggtggaggccgtgagccggtggcgatcggagggccgaggacagggatggcgtggtggtccgggaaggtgtcgctcggcggcctgcaggacatcgctggagccgtcaacaagatcagcgagagcgtgaagaacatcgaaaagaacttcgacagcgcgctcggcctagaggagaagcgtgacgatgaagatgcatcaggatcacagacatccaactctgatagaataggattcttcaatcctgtcatggctttcatgggacacaatggtgaggaggatggcactgaagtatcagaaaagccacaatctctgaagaatctgtcagcagaggaaggaattaatagcacaccaactaagaaacatatatctgaggtagatccttcggaagtatcaggaacaacatctccaaaactgccttcaaaatcggaagaagttcatagtatttccaatgggtcacctgtttctaaggcagatgtttctgagcaatccataacaccacaaactccaacacatccttcagtagcagaagaaaagcttgatagctctactgaggcacctgcatctaaggtgggtgatgctgaagcatcagaaacatcacaatctgcaggacatccttcaacagtggaagaaaaccagcaccatcaagttagcaaacattctgatcctagtgatgaagcagagccgaatcagcttagagagtctgttcgagacttacctgatggtagtgcatcttcttcgcctactaaaatacatcaatcaggtgacaccgaaacaggggaatctattcacacaggaaaggaagatacgtctgataggaacatcttgcagtcacaaccagcagagtctgcgctagctagttcagatgatataacggaagctgaggacaatattgctcaagaatatgatgccccaaaagaacttagtggcccacaggagagtagtgatatggtagacaaaggtactcatcttgaagttaaattacatgatagcaatattaatactgaaaaaagtgaggaagaaagcaataagatggagtcaggggaatcatctgttgttgtacaggaggataatgcaatggagcaacctcaagacttaacgttgaagtccttaactgcagagcatgactcaaattcgcagaacgagtcagtgatcaattcgactgatatacctgttggactaggtgaaggtcctccaaatgattttacaaaagaagaaaagattctagaatctgttagaggcacagattctcagactctggactctgttgtttctgtcgatgagctagagaaattaagacgtgaattgaagatgatggaagctgcattgcaaggtgctgcaagacagtcacagtccaaagctgatgaaattgcaaggttgataaatgagaatgagcaactaaaatcaacaatcgatgatctcaagagtaagtcatctgaagcagaaatggattcactgaaggatgaatatcaccaaagagtagcaactcttgaaaggaagttcagtattttttactctgtgaaaggcaggcctggtgtagtggtatatgcactaaccaaagagcgtgatacactaaggagagaacagaataaaaaaagtgatgcagctgcccttttgaaagaaaaggatgagatcatcaatcagattcgtgagtttgaagaagaaaaacaacgcctgaactcaaagatccagatagatggaattaagttagtttggcgccctgaacaagatgttatgtctgttttttttcttctctcaaaggttgaggaggctaaggttgagagcatcaagagagacaaagcagcaactgagaagttgcttcaagaaacaatagaaagaaatcagactgaacttgcagctcaaaaggagttctacaccaatgctcttaatgcggctaaagaggctgaggcattggctgaagcaagagtcaacagtgaagccaaaattgaactggagaatcttttaggagaagctggtgaaaaagaaaatatgctgattaagacaatcgaggagttgaggcattttctcacccggcaagaacaggaggatagagtccaggttgttgttgtggtgtctggtgtgcatgacgccgatcttcatggtgaaagttttgttatccggatgagcatgtggctcatggctgctttcagggaaaaaagactaaaaggggactatgatgatcttcaaaagcggtatcaagccagtgaacttcgttataatgaactggtaacgcaagttcctgagtctaccagaccgcttctaagacaaattgaagccatgcaggagacaactgctcgaagggaagatgcttgggctggtgtggagagaaccttaaactctcgccttcaggaagcagaagctaaagctgcttcttcagaagaaaaggagcgatctgtaaatgagagattgtcacaaagtttatcccggataactgtccttgagacccagattacaattcttagaacagagcagacacagctgagccgatctcttgaaaaggagaggcagagagcatctgaaagtagacaggagtacctagcaatcaaagaggaggcagcaatacaagaagggcgagctaaacagtttgaagaagagatgaaggagcttagagctaggcacaaggaggagctgcaagaagcagcagaacacagggacctgcttgagaaggaccacatcatcagcatacaaggatattctatgatgtaggggtctagatgaaagaggttgcaac

SEQ ID NO: 7847 - DNA, 2859 bp, Zea Mays
gaaaaggatgaaaaacagaattctttggaactattgttaagacggattgaagggctacaatatgaaatggatgaaaaagtagatcttgttgaagtgttaactcgtcaagttgaaaatctgcagcgagagcgtgatgagctcagaaaagatattgagcaattatgtatgcaacaagctgggcctggttatgtttctgttgcaactcgaatgcttactcagagctttggaacaggatattgagaacctccagaaaaagttaggtggttgcttaagagagaatcaaaatttgcaagaggagcttgctgaagcttatcgaattaagagccagcttgctgagttacatggtgctgcactatcaaagaacaaggatcttgaaaagcaagtaagatttttccagagcagtgtcgctcaagcgtttgctgaacgggacagttcattaatggagtgtgagaaagcaaaagagcgggaagaagcagtgtcaagaaagtttgctgattttgaggaaaggatgagagaatatcaatcagagattgatgaacagaaacacttaaatgatgacttgcagagagaactgacagaactgaaggcacatacagaattgtccttgaaagttattctaaaattctatgaccttcgttgcagagactctggatgttcttcaagccttactattgaagagaagtgttcaatccttcttggtgattctgctgacaattggagttttagctctgatggcggaacctcaactttgaagcatctttagaagaggagaaagagtcacttaaagctaaaatatcgaagctgcaaagcaacctaagaatgggccttgaaattgaacaacatttgcaaagaaatgcacgaatattagagaaaagacaggcactgtatgatggattcctgagaaatggattgtccgaacttcaaaagttctacacatgtcaaaaggctgaaattatgaaaatattggaagaagaatcgttgcggttgatgaaagttgttgcagagattcaggataaactaactgaaatttgtatcaacactgaagttagtgaccaccctgccgatgagattcaatgttgtgacagcagttgtaaagatgtgcatgttactaaagatatcagtcctagcacatgtcgtaagagtgattatcctgctgatcttaactccgtgtcgtttgatgaatctaaagcacttgcacaagccttacaggagaagatggaagcacttatgctcttctcacaggaacaagaaagatacctattagagaaacagagagacctgattgttatcgaggaactccagaagaacttatctcaagtagtacctctagaattcctacttgtcattatttttcaatcacaacgtactatatgacgagtgttctaaatagtacaagtatggtttgtcatgaagttgatacttcataccattactattttgtgcattttgctcctagctgttggaaaggtaaaactgaaccatatgattcttttcgaaagtatggattaaatgactagagttagttttgaagtttgaacttggatttttcttagggaagttcgtcaatatattatggacttgactattcacactgctaacactggtggtttgccagtagtgtcatccttgataagttgatatacagtaattagtcacatttacttctttagtatatgacctatttttaggtgtgagtttctgttgcacatcagcacactttagtgttggatgagtgtgtcgcttgactacttcatcttatgtgtacaggttaaagatgaaaaggtgaaggtcctgatggaattaacaaaactaaaagaacaatatttgctattgaagggctctgctgtcaaggaaggtcatgatactggtgattcatctaaactcattcctgggcatgaccaacaagggatgctgaagactatgctgaagaggacatctttaagacactggatgaggaaagaaagtaatactattggacatgggagctctgatggaaatgatcatacagtttgcaaagaacattcagtggatgttgcaagattaagagttgaaaatgctatgcttcttgaaggtgttggtactgttgagcatctcacttcttcagtgcatagactgcatattgtgcttttgaaggcagggcaggattttttttggttgtattactaggtgataactttcataccaacaaacatgtcaggcttatgatgatatcaagtcagctgatcctttggagagtacctttgaagcgctcaacagtcttataactgaagcaaaccttatgaagacagctcttaatgtggttcttcctgtaagctggtccggggattcatcagatgcaattaaatatgaagctatgtgcgatccatctgattcacctaaatcgaagtctgggaaagtagacccgctctcttctgcaggcatggagatggtggagctactaatattggctgctgagattctcaaggagagctttctggtgaagaaataaggcctccatgtaaggacgagtatggctctccttgtttgtttagaagcatgcaatttaatccttaatttttttgggtgtatatacttaaactgattgctaaaagtgcactactagattatttcggatgtagagaaagagccgaatgtgcactgtaatttacggttcgctgctattgatgtgtcttgtgttggtagactaaaggatttaagagccatgtgtacaaaattcagtttacaagcaaagatcaaagaatagacatgaactagggaaagagaaagaaaaacaaactgaaagttccatacctaaaagcgtcggcactggttgtcgcctaaaggaaggtgaatagacggaatctaaaaattataaactta

SEQ ID NO: 7848 - DNA, 6224 bp, Zea Mays
tgacttgcaggccctaatttgttttcaagaactgtttattgattttttttccagttgatttggtcctaaaccaaagtgctttgcatagttaaggcgagtgtttgacccccgccttaccttcgaagcggtaaagtgtaaggcgagacaacaccttaatcatatataaatataggaaaatatagaaaattagtcttgaatagaagtacgaaagtaccaaacagaagtctataagttcaatataagcaaacataataggctaaaagtccaacataagtaggttctgatactctcatctctcaagttctgatacatcatcaaactcatcaaaaatgggaggattactgtcttcttcgcgttctctcccaccggatatatcatcatcttcactcacattcaagtcatctttcgcatgattggttgccgcgtcctacccgcccagactcgcggcatgcgttggccgggcgcgagcgagtgtttggttgccgcacccacgccctccggactgcatgtgcgcatgcagtttagtgctttttttcgccgttctgcctgcaagcgtggagaagccggaaattaccttcgctgggggaccaggcccgcacgaggcaggcacgtgacagaccggcaaccaatcagcccccttgtggatctggctcaaagtcttcgtccatggcacctccctcttcttcttacggcctcattcttgcatgctttctctatgtaaggccagaactttgtctctgactagcttgccttggaaggttgtgccctcgaagcgactccgatgctctagtagcaacatcaacatgatccatcatgtgaggtcaacaatattatcattgtccctgctggggtgtaccactgatgagtatccactcgttgtcccaatcaaaatcctcaataattaatgggtcatagcttgtgccggctttctccctcatttgaaacctacttcgcatcttttgattgtatgaaacatagaccaagtcattcaaccttttatgcaacaacaagtttctcttctttgtatgtatagtaagtaacaaacccaacctaaataagtagcaagaaatagattgaagctagtaaacataagcgaagtagcaaaaaatggacttacaaattcaaatgtgcttcaattcctctcacaaccggatgaggaagcacaaagtctaaccagtaaccacacgcttggcaaacctttgaaattcatatgctcggccgccatatgaacgttatcaatcaactacgcagatgcaaacagcgacacggtcacacacataggtatacaacagcaggaaagaataaaaaaagatgtgctgaaattagcaatcagccaagcatatagtactttagagggctctttgcttgaatgttttcaagtgccaacttgtttgaaaaatagaccctctatgatcttcataatgcatggcatgctcattaatcttcgaccgtatttcttcattggactccattcttgctagcacataattgaaacaactcctcagctttacaacatatctatcatctccctttggatggcaaagaattttcccaggttcaaataaagtgcagcaccatacgatggatggtccatttgtttcatccaacgaccctcaataatgtccataattttttcagcaatgcttgcttgttttgtgtagggaagctaagccttttctcttttgcaacatccattagtgctgcaatttatgtcatgtatgttttttcatctccatcaactgccctaagcactataagaagtgccaaagctctgaggcaatcttcaactgaagaccaaaaagtcttagctagaataatattacaccccccttccagcctctgtctttgccaacttgttgcagttccatgcatctcacaaaaagtgctctcaaggcatcttgatgtttatgtagacttttcaaagtaaggaatgtggcaaaacgagtggctgctggtcttaaaggatccccctcctatcttctccctcattgcacttagaattcctccatgcctataaataaaagtggtgactcttttggcttgtgcaattagtctttcaaatatccaatatcctccaccatgaggtccaaacaatgtgcagtacaaggaccctagaacaatgttaaaatactatccattagaagcctacccactgccttatatttttttctcgaatacgcaggagagctgcgtatcaattcattaatagtagaggagaaatatatatacaagaaaaaggcccacacacttgcacacacccactaggaacagaactgcaagaacatttgcgcctgttacagcacagaaacgaccctacacaacaactaaaatcggtatgccgtagcctccagaagctgcagatccttggcccctgctgcactccaacacaaaatctcatcaccagccaagcacaaggcagcagccaatcgtggaggtttgcgaccaaagacattcatttctgtgtctccacaaggtccatgcccctaagattatgagagagttaaaacctttctgaatggagcttcgcatagagctggaagaactgctccaccaatccaaaaaggaggtcgcctcaggctgaggggcaagaagtgccaaacccattcggctaagaaaaaagaaccagaactgacacgaaaagagacaggagacaagaaggcgatatagcgtttcacgttcttggtcacacaacacacaagcttcagggtgtggcagattcgtcctttcaagtcgatcagatgtccaacacctattgtgggcagccaaccacatgaagaaggcacatttaggcggcacccacaatttccagatacgctcccatggttcaaagaacaacgagctctgcatgagagcatcatatgccgatcttgctgaatatgccctgacggagagaggctccaaaaatgtctatccggcatttccagcacccctggctgaagctgcaccacgtgtatagcctctcaaataccaagaaactcttgctaactctgccaagaaataactccatggatatcgtggacccatcttgaatctgttagagcatctaggaccatccttcgattagctattctggtgggaatcatactatgtataagtggtgctagttcctttaaccgctgcctcatcaaccatctatcctcccaaaacaaggtggtgctaccatcgcctagttcagtagtcacggccatgttgaaaattccttgcacctgtttatttgcttgtagcttgaaggcagcccatggtctctgtcagcctttggctttgtggaagcagcctccttagtggtttggtatgaacctgaagaccgcctatcatccacaacctattcagggattctctggagcatgcttgcgaccttcccaaccacttttggcatgttttgggcttagttgtagctggttgcctaaactgaaaggcggctctcctccgtttagcagctgtcccggaacttggctgcacaacggagcaatcagattcattctgtcctagcctctgcccctgcacctgcccatgtactggaccaatgttataaggaaaataggcctgttcctcttcttctccaagtaagctgtcatctcttttctaatctcagtggtggtgttgaaacacatgactgtcctcatatcccccggcaaggtgttctttataccttttaattccttctttgttaccatgttgcatcggatgcatgtcaccttatcctgattccctatttctgtccaataaccgtacttccagcctgggtcattgaattttgcctctggatcttgcatggggtgataaggatcaacatcaatgggagcagcagcagcggatgcggatcagacactctccatgacaatggcttactctgtacaggtggatagtaagaaaaaggcaaaggttcagctcactaattaacatcagagagtggggaacagagcagcacggaggcccattatcttgcaccggatttaaagcagagggctgctgctaggatgctggcctgcccgccctgtctggctgcgccagcgccacccctcctgcgtggccacaccccactcctccctgtctgcgcctgcatgccttgcttggcccgtgccgcccacctcgctgtgccgcccgtcctgcctggtcacgccactcctcacccctccttcgaacagaacaggcgcaccgcgcaactcagcctttgaacagagcagcctccgcccacaaccagccgccttttcattcccttattcccataatgcgacaccctagaaccgctttacggacgtctgaggtgccagagcgactagacggtaaggaagatgccttagtgtcaatcttaaggcgggtaaatcacctcattttttctgaccgccttaccgcctaagggacgccttaatagtttgcattagagattttcccttcaatgtatttgacattttttgtaggcatctttagaagaggagaaagagtcacttaaagctaaaatatcgaagctgcaaagcaacctaagaatgggccttgaaattgaacaacatttgcaaagaaatgcacgaatattagagaaaagacaggcactgtatgatggattcctgagaaatggattgtccgaacttcaaaagttctacacatgtcaaaaggctgaaattatgaaaatattggaagaagaatcgttgcggttgatgaaagttgttgcagagattcaggataaactaactgaaatttgtatcaacactgaagttagtgaccaccctgccgatgagattcaatgttgtgacagcagttgtaaagatgtgcatgttactaaagatatcagtcctagcacatgtcgtaagagtgattatcctgctgatcttaactccgtgtcgtttgatgaatctaaagcacttgcacaagccttacaggagaagatggaagcacttatgctcttctcacaggaacaagaaagatacctattagagaaacagagagacctgattgttatcgaggaactccagaagaacttatctcaagtagtacctctagaattcctacttgtcattatttttcaatcacaacgtactatatgacgagtgttctaaatagtacaagtatggtttgtcatgaagttgatacttcataccattactattttgtgcattttgctcctagctgttggaaaggttaaagatgaaaaggtgaaggtcctgatggaattaacaaaactaaaagaacaatatttgctattgaagggctctgctgtcaaggaaggtcatgatactggtgattcatctaaactcattcctgggcatgaccaacaagggatgctgaagactatgctgaagaggacatctttaagacactggatgaggaaagaaagtaatactattggacatgggagctctgatggaaatgatcatacagtttgcaaagaacattcagtggatgttgcaagattaagagttgaaaatgctatgcttcttgaaggtgttggtactgttgagcatctcacttcttcagtgcatagactgcatattgtgcttttgaaggcagggcaggattttttttggttgtattactaggtgataactttcataccaacaaacatgtcaggcttatgatgatatcaagtcagctgatcctttggagagtacctttgaagcgctcaacagtcttataactgaagcaaaccttatgaagacagctcttaatgtggttcttcctgtaagctggtccggggattcatcagatgcaattaaatatgaagctatgtgcgatccatctgattcacctaaatcgaagtctgggaaagtagacccgctctcttctgcaggcatggagatggtggagctactaatattggctgctgagattctcaaggagagctttctggtgaagaaataaggcctccatgtaaggacgagtatggctctccttgtttgtttagaagcatgcaatttaatccttaatttttttgggtgtatatacttaaactgattgctaaaagtgcactactagattatttcggatgtagagaaagagccgaatgtgcactgtaatttacggttcgctgctattgatgtgtcttgtgttggtagactaaaggatttaagagccatgtgtacaaaattcagtttacaagcaaagatcaaagaatagacatgaactagggaaagagaaagaaaaacaaactgaaagttccatacctaaaagcgtcggcactggttgtcgcctaaaggaaggtgaatagacggaatctaaaaattataaactta

SEQ ID NO: 7849 - DNA, 949 bp, Zea Mays
gattgatatgattaatgtctaatcggtttttgctcatgcatatgtcaccactgttttgttatgtgtctgggcggatcttctctctgattctcaaaggattaaatataccattgagaccttcaccaagggcatccctgatgcacggacttacttgaatactcttcaacagctcagaataaagagtggtcttatagatcatcttggaattgagcctttgatgatggaagctcttgagaagattgagaaggacattaagaaaccacttttgaggagcgacaagaagaacatggccaccctcttggcagagtttgacaagattaacaaaaagcttggctttcggaaggaggatcttcccaagatcgaggaagagcttgaattggaaattgccaaaagtgagctgactgaacttaagaaggaatgcgttgaagcaatggagactcaactcaagagggaggagtttcaagatgaggagatgcctgatgtcaggaaattggacatcagaaacttcctgtaggcctgatcgacgataatctttgaggcccaacgcacctctggttttggtttcaagttgatcggtgctccacacctatgaatgctgctccttccctttttgtaataaaagaaactgcacggttgggtatgagttggattaaatcttgcctttctgttgttctggactcttgtggctgcagcaacaatgggatgtccttgtgttatagcatatgaactcgttacgaggcattcaggaaaatggtgatacctggtatttaacctttattttggtactcagtttggagagcaaagatccatttgttttattatgtcatttatttttgcaccttgtaaaggaatttgtttctgttgtatcaaccctccctaaagacccacatcttcgattaatgaagagtaaaatataccggctgtctctaaatttatgacacaacgccat

SEQ ID NO: 7850 - DNA, 2260 bp, Zea Mays
gttcttcctccccgtcccatcgtgctgtagaagttgcccgctgccgtctcctgtcctgactcctccatgtctctcacttccctcacttctcggctttgacctcggctcgcaatgaactctctcctgcgtccgccgctgccgggcccgacgccgagcctgagcgcgagacgcatggtctcgccgccgccagcgccggtgcgggtcagctcggcggcgctggccggcagcgggcgcagatgccggctggggctggcagtggcggcgtcggcggctccgtcgtggatggaggaggccggggtggccgtgctggaggaaggcgggcggaggaacccgtctgtgtcggactcgtaccgccctgctgggctgccgcggcccaacgccacggtgctggaggcgcaggcgcgggtgtgcacgggccccgcacagacgcgcccgctcggggaggagcaggccatgcgcgtcctcgacactatcctccgctccgcaatgggagaactcaaagaggagccagtctctagtgcacagttaggtgcattctttgcaggcatgacaataagatccaactcgtttccagaggccacacagtggagcgagggtgaacggcgtgccatgagcatattttggccacgccttgtacaaattcttcctccggaggtgaagtttatagcagaccctgaagggacgatcatgggtgcaaatggtttaacagggcctcggtatgttggtcaaggaactggagagatgagactagtcggtgctctgagggaagtgcttgctggtggccatttaggctatgaggaggttcaatgtgtgctaaaggatattttaccaattggaccgagttcagatttgacagtgactagtgaagcattgctggcagcatttttgattggacaacggatgaatagagaaactgatcgtgagctcaaagcgtattgcctagcctttgatgatgaactaggtcctcctctggttgctgacgtcaagtccttgacacactatggtgaaccatatgatggcaatacacggttttttagaagtactctatttgttgcagcggttcgagcctgctatagtgaatcatgcctcctccatggtgttcaatggatgccacccaagaaggacaaatgcttaaattcatgggcgcaaacatacacttatctccaacacaagccaagatactgttggaggatgagactgctggttttgcatatttgaatcttcaggaagcatgtccaccattatattcaattattgggctcagggagcatattaagaaacggccaccattggctacctctgagaaagttcaacaatttgtgagggcacgggggagagaatcaatggttgcaggattttatcacgaaggctatgaagatccattgcttatgctgatgagaaggagaactgttcatgctggactagttgtgaagggtgaggaaggtgcgctttccttgacaaccaaggaaagatcagcccatgcatcaaaaggactccctgttaaccactgttcagggtttcggacaccaagcggcataaatttctctgagactgatggtattcctagagaaagcttcagggtcattgtgaatgcccaggaacttggttttgaatccactgaaactccaagaactgatagatcaattctaaggaacttggagcttggtctggcagcactaggtggcgaaaaaggagcagcgtatgaccgaatcgttcttaacgcggctatggctgaccacttactaggctgcagcggagctgaggatatcgacgctgcacttgaccgagcgagggaagccattggtagcggtgaagctctgagaaggctcatgagttacataaagatctcgcacaaagtgtcctagtgttgacccgtgagtctgtgaccatgtactgactgtacaattttggcgtgagtcacgactggatatcttcttcgcgttgtctgagtgccttccccactcaatgttacaaagccaccatgaaaaagtatactcccttgccctcaaggacatgtccaaaaaaaacagttgaaaggaaacaatgccttgttggcaaggaatgtgtttttataagatttttgttttgcaccgagagacacgtacagattctcctcttgagatgtccgaatctggttattgtggctattgtgaatactctgcatagcctcatcgtcaatcgtcatccaggttgagaacttgtaaaccgtatttgattttgtttatgaatgtatgtgctcttctttatgttgtgtatcgtg

SEQ ID NO: 7851 - DNA, 2755 bp, Zea Mays
gtccacagcccctcgtgcccccgcccgtgatgcgcgccgtctcctcccccgcgcgacccctcccgtgatggccgccgccgcctaccccgcgcgacaccagccgccacctaccccgcgcgacaacgcccgtgatgcccgccgccgcctaccccgcgcgacaccaccaatggtgcccttccttccccggcacccgcaacccgccagctccgcgcgagccgccggcgggatacccgcctcccccgcgcccccgccagctccgcgcgaggcgccagctccgcgcgtccgccgcagtgatgccgcgcgatgaaggccgcacgggagagacgctgggaaagccgctccttccggcgttgcagtgggggcgtccacagctgtgccatgcccccgccccgtccgagacgccgaccacgacccaggattctcgcttcccgtccacgtccgtgattttcccagcgaagctgaccacgcctccctgtacgcacctcccgacatcctcgccgacatgctcgcactcctgtccccgtctgagatcctcgcgtcggcgccttcggtggaagtccggaatcgcccggctctcctccaccgcgccgccagcctcactgagaagagttcatctgcctcctcctcaacgcttgaccccaccgccgctggatccaacaccctgccctcgtccttcttctccgacctactcaccagtgacgacgtgggcaccctggccagacgcacgccatggacagcaggtgggcaggaacaccttctacgtggatcctcttctcccgtgctcctcgacgcacgagagcgagctcggactggatcctctcctaccgctccatgcagatactgggtaacaggaatgcatgtttatgattttcgttttgaccttgcattgcatctacaatgaccagaggatgcagtctatggatccagttaatgtgtatggaaatccaatggaaggtgacatgattacaacagggacacctcttgttgtcccaccacttattgacatgattagcaatgacccaatttttgcccattgctgaagatgggatgcaggaggcctctatcaagtaggtcaatttcctcactagaatgtttggttagagtggaatgtaaaggtctggacactctatgaattcgatgatctcgagagcatcattgataggacactaaagcgcgattttgacaccgaggaagcactctggttgcttaagataggtcttgtgtgcatcccggatagccctaagatcaagccctccatgtcaatggttgccaagatgctgcaaggtgagtgtgctgtgagtgacaggatcatgaggcctggcctgatcacagacgtcatggacctgaaagtcaggatggtagagccgatttagttcagcttgacatcatgctcgagcactgccgcaccggaccttgttggggatttcctcgattaaaatataagctccttgatatggttctgtaacatagttctgcaatgctcctttatttagttctttactttttttgttaagatatgaggtgtagcgatacaatatgtctactaacagcgtttgtgttcttgatagttcatttaggattgaatgaagttactggtatgaccttgtcgagactgaagtaaggagggatagagctaaaaactctcttggcacaactataaagttcaagctatatgggcgtgtttggatggcagcctcccatgcaactgcctggcaggcaaatgatcctagccacaccacaggcataggaaatcgaacggtcggcattgtttcctgggccagctgataaaatccattgaagtgcaagaggccgataaacttaggcgtatagtgctggatgctccatccactggacatacacttaagcttctgtcagtttctgattggattgaaatgttccttactttgagcattaaggcaatgcaagtgcagtctggcacaatcctggtggtttggcattgagttatgttttcttttacttgataaaacaatcttgttccatcacttagtcaatagctcaatatgtccaccagttctgatgatccatgtctgcgcagtgtttcttttcacagtttgcgcttgcgaacatccgaaccccgttttcatcttgaattcaacttatgatgtatatcggacagttccaccacattctggcgccgccttcgtctgatcctggaggcaattggagccgctgcaagtcggatcctggtggatgcagcgcaacacagatcgcaaccctccaaggactgagaagtggaatgttgacatctctgagacagtctgaaagcaaaccgaaggcaggggtgttcatcaactcctgcttcgcgcattgctagagtgagctacaggacacatggttcgcaccaaattctccatccatatataacaagaaaattgcagaggtggtaggtgattggtactttgaaagaggagctgacgtggagattgactgcgcctatccctgtgattcacagtcttgtcgcaaccttataccaattgataaggctgaccatcctagattaaacttcaaagaccggtaccctgagccatacagagattctcatccgactgcccccgttgctgtgcatggatgtcaggtgtcattactgtaatgtagtggtgaaataggtagattaaaacaatgaaatttatatgtggctaggatcataaatgaattgcaaaattttttctcagaacagtataacacatatttgtacataagttgttgtgttattatatgtttccgttgcaacgca

SEQ ID NO: 7852 - DNA, 2841 bp, Zea Mays
agcccctcgtgcccccgcccgtgatgcgcgccgtctcctcccccgcgcgacccctcccgtgatggccgccgccgcctaccccgcgcgacaccagccgccacctaccccgcgcgacaacgcccgtgatgcccgccgccgcctaccccgcgcgacaccaccaatggtgcccttccttccccggcacccgcaacccgccagctccgcgcgagccgccggcgggatacccgcctcccccgcgcccccgccagctccgcgcgaggcgccagctccgcgcgtccgccgcagtgatgccgcgcgatgaaggccgcacgggagagacgctgggaaagccgctccttccggcgttgcagtgggggcgtccacagctgtgccatgcccccgccccgtccgagacgccgaccacgacccaggattctcgcttcccgtccacgtccgtgattttcccagcgaagctgaccacgcctccctgtacgcacctcccgacatcctcgccgacatgctcgcactcctgtccccgtctgagatcctcgcgtcggcgccttcggtggaagtccggaatcgcccggctctcctccaccgcgccgccagcctcactgagaagagttcatctgcctcctcctcaacgcttgaccccaccgccgctggatccaacaccctgccctcgtccttcttctccgacctactcaccagtgacgacgtgggcaccctggccagacgcacgccatggacagcaggtgggcaggaacaccttctacgtggatcctcttctcccgtgctcctcgacgcacgagagcgagctcggactggatcctctcctaccgctccatgcagggagagttctataattattctggtttgtagtccgtgaatttatagtggattgcttgagatactgggtaacaggaatgcatgtttatgattttcgttttgaccttgcattgcatctacaatgaccagaggatgcagtctatggatccagttaatgtgtatggaaatccaatggaaggtgacatgattacaacagggacacctcttgttgtcccaccacttattgacatgattagcaatgacccaatttttgcccattgctgaagatgggatgcaggaggcctctatcaactcattgctgaagcatgggatgcaggaggcctctatcaagtaggtcaatttcctcactagaatgtttggttagagtggaatgtaaaggtctggacactctatgaattcgatgatctcgagagcatcattgataggacactaaagcgcgattttgacaccgaggaagcactctggttgcttaagataggtcttgtgtgcatcccggatagccctaagatcaagccctccatgtcaatggttgccaagatgctgcaaggtgagtgtgctgtgagtgacaggatcatgaggcctggcctgatcacagacgtcatggacctgaaagtcaggatggtagagccgatttagttcagcttgacatcatgctcgagcactgccgcaccggaccttgttggggatttcctcgattaaaatataagctccttgatatggttctgtaacatagttctgcaatgctcctttatttagttctttactttttttgttaagatatgaggtgtagcgatacaatatgtctactaacagcgtttgtgttcttgatagttcatttaggattgaatgaagttactggtatgaccttgtcgagactgaagtaaggagggatagagctaaaaactctcttggcacaactataaagttcaagctatatgggcgtgtttggatggcagcctcccatgcaactgcctggcaggcaaatgatcctagccacaccacaggcataggaaatcgaacggtcggcattgtttcctgggccagctgataaaatccattgaagtgcaagaggccgataaacttaggcgtatagtgctggatgctccatccactgtttgtctcttctcaccacaatatttccaatctgactatgttcttcattttgtccactgacagttatttgactacatgcattttgtatagggacatacacttaagcttctgtcagtttctgattggattgaaatgttccttactttgagcattaaggcaatgcaagtgcagtctggcacaatcctggtggtttggcattgatgtttcttttcacagtttgcgcttgcgaacatccgaaccccgttttcatcttgaattcaacttatgatgtatatcggacagttccaccacattctggcgccgccttcgtctgatcctggaggcaattggagccgctgcaagtcggatcctggtggatgcagcgcaacacagatcgcaaccctccaaggactgagaagtggaatgttgacatctctgagacagtctgaaagcaaaccgaaggcaggggtgttcatcaactcctgcttcgcgcattgctagagtgagctacaggacacatggttcgcaccaaattctccatccatatataacaagaaaattgcagaggtggtaggtgattggtactttgaaagaggagctgacgtggagattgactgcgcctatccctgtgattcacagtcttgtcgcaaccttataccaattgataaggctgaccatcctagattaaacttcaaagaccggtaccctgagccatacagagattctcatccgactgcccccgttgctgtgcatggatgtcaggtgtcattactgtaatgtagtggtgaaataggtagattaaaacaatgaaatttatatgtggctaggatcataaatgaattgcaaaattttttctcagaacagtataacacatatttgtacataagttgttgtgttattatatgtttccgttgcaacgca

SEQ ID NO: 7853 - DNA, 2951 bp, Zea Mays
agcccctcgtgcccccgcccgtgatgcgcgccgtctcctcccccgcgcgacccctcccgtgatggccgccgccgcctaccccgcgcgacaccagccgccacctaccccgcgcgacaacgcccgtgatgcccgccgccgcctaccccgcgcgacaccaccaatggtgcccttccttccccggcacccgcaacccgccagctccgcgcgagccgccggcgggatacccgcctcccccgcgcccccgccagctccgcgcgaggcgccagctccgcgcgtccgccgcagtgatgccgcgcgatgaaggccgcacgggagagacgctgggaaagccgctccttccggcgttgcagtgggggcgtccacagctgtgccatgcccccgccccgtccgagacgccgaccacgacccaggattctcgcttcccgtccacgtccgtgattttcccagcgaagctgaccacgcctccctgtacgcacctcccgacatcctcgccgacatgctcgcactcctgtccccgtctgagatcctcgcgtcggcgccttcggtggaagtccggaatcgcccggctctcctccaccgcgccgccagcctcactgagaagagttcatctgcctcctcctcaacgcttgaccccaccgccgctggatccaacaccctgccctcgtccttcttctccgacctactcaccagtgacgacgtgggcaccctggccagacgcacgccatggacagcaggtgggcaggaacaccttctacgtggatcctcttctcccgtgctcctcgacgcacgagagcgagctcggactggatcctctcctaccgctccatgcagggagagttctataattattctggtttgtagtccgtgaatttatagtggattgcttgagatactgggtaacaggaatgcatgtttatgattttcgttttgaccttgcattgcatctacaatgaccagaggatgcagtctatggatccagttaatgtgtatggaaatccaatggaaggtgacatgattacaacagggacacctcttgttgtcccaccacttattgacatgattagcaatgacccaatttttgcccattgctgaagatgggatgcaggaggcctctatcaactcattgctgaagcatgggatgcaggaggcctctatcaagtaggtcaatttcctcactagaatgtttggttagagtggaatgtaaaggtctggacactctatgaattcgatgatctcgagagcatcattgataggacactaaagcgcgattttgacaccgaggaagcactctggttgcttaagataggtcttgtgtgcatcccggatagccctaagatcaagccctccatgtcaatggttgccaagatgctgcaaggtgagtgtgctgtgagtgacaggatcatgaggcctggcctgatcacagacgtcatggacctgaaagtcaggatggtagagccgatttagttcagcttgacatcatgctcgagcactgccgcaccggaccttgttggggatttcctcgattaaaatataagctccttgatatggttctgtaacatagttctgcaatgctcctttatttagttctttactttttttgttaagatatgaggtgtagcgatacaatatgtctactaacagcgtttgtgttcttgatagttcatttaggattgaatgaagttactggtatgaccttgtcgagactgaagtaaggagggatagagctaaaaactctcttggcacaactataaagttcaagctatatgggcgtgtttggatggcagcctcccatgcaactgcctggcaggcaaatgatcctagccacaccacaggcataggaaatcgaacggtcggcattgtttcctgggccagctgataaaatccattgaagtgcaagaggccgataaacttaggcgtatagtgctggatgctccatccactggacatacacttaagcttctgtcagtttctgattggattgaaatgttccttactttgagcattaaggacacatgaggtgtagctattgggcctctaacttggttatcatggttttgggccgtgggtagagcaggcaatgcaagtgcagtctggcacaatcctggtggtttggcattgatgtttcttttcacagtttgcgcttgcgaacatccgaaccccgttttcatcttgaattcaacttatgatgtatatcggacagttccaccacattctggcgccgccttcgtctgatcctggaggcaattggagccgctgcaagtcggatcctggtggatgcagcgcaacacagatcgcaaccctccaaggactgagaagtggaatgttgacatctctgagacagtctgaaagcaaaccgaaggcaggggtgttcatcaactcctgcttcgcgcattgctagagtgagctacaggacacatggttcgcaccaaattctccatccatatataacaagaaaattgcagaggtggtaggtgattggtactttgaaagaggagctgacgtggagattgactgcgcctatccctgtgattcacagtcttgtcgcaaccttataccaattgataaggaactgaggatgtattaggagttcggcagacgattatactcaattatcatcataataaaaaacactcttctaattgttgatgatgttatgttacttgcatcagatagcaaaccaccctattgtacaatctgttggtggaaacatgtttgtgttgtgtgttccaggttgtctgtttcttggtagccttttttggctgaattggtgatatacacaaaatctatttacttgttagactatactttgtattgcacccctgatatccaggccattgcttgtgttttctatgattcgttttaactgaagttttcacgctgtgaaaattttctaccgtacagtggttaaaatttctcaccacgcactggaatgtgtttcattatggtttttg

SEQ ID NO: 7854 - DNA, 3041 bp, Zea Mays
ccgtgatggccgccgccgcctaccccgcgcgacaccagccgccacctaccccgcgcgacaacgcccgtgatgcccgccgccgcctaccccgcgcgacaccaccaatggtgcccttccttccccggcacccgcaacccgccagctccgcgcgagccgccggcgggatacccgcctcccccgcgcccccgccagctccgcgcgaggcgccagctccgcgcgtccgccgcagtgatgccgcgcgatgaaggccgcacgggagagacgctgggaaagccgctccttccggcgttgcagtgggggcgtccacagctgtgccatgcccccgccccgtccgagacgccgaccacgacccaggattctcgcttcccgtccacgtccgtgattttcccagcgaagctgaccacgcctccctgtacgcacctcccgacatcctcgccgacatgctcgcactcctgtccccgtctgagatcctcgcgtcggcgccttcggtggaagtccggaatcgcccggctctcctccaccgcgccgccagcctcactgagaagagttcatctgcctcctcctcaacgcttgaccccaccgccgctggatccaacaccctgccctcgtccttcttctccgacctactcaccagtgacgacgtgggcaccctggccagacgcacgccatggacagcaggtgggcaggaacaccttctacgtggatcctcttctcccgtgctcctcgacgcacgagagcgagctcggactggatcctctcctaccgctccatgcaggtgctcctccgcccgatcccaatgtaaaacctacagttttgttagatgttgctgccactgtttggagaagactcgcgctagaaagcggtactgggtgaaaactgcagagcgatctagagctcgcaagcctgccattgctctctgtagcaatagaaatcccccaacccacccacccacacaagttgcaattgccctcttacatctattttttggtggaacaactaaattgacattgaagaagttttttggagtgtgctcgttctgcaattagaagacttctggagagttctataattattctggtttgtagtccgtgaatttatagtggattgcttgagatactgggtaacaggaatgcatgtttatgattttcgttttgaccttgcattgcatctacaatgaccagaggatgcagtctatggatccagttaatgtgtatggaaatccaatggaaggtgacatgattacaacagggacacctcttgttgtcccaccacttattgacatgattagcaatgacccaatttttgcccattgctgaagatgggatgcaggaggcctctatcaagtaggtcaattacctcattaacagggacacctcttgttgccccaccacttattgatatgattagcaatgacccaattttttggtaatatatgaacatgattggttgttaaatatgcagagcagtttgtataataatcaactgcctcagcatattgtaatttcttggttcttgttctcactacttcattgtatttatagctcattgctgaagcatgggatgcaggaggcctctatcaagtaggtcaatttcctcactagaatgtttggttagagtggaatgtaaaggtctggacactctatgaattcgatgatctcgagagcatcattgataggacactaaagcgcgattttgacaccgaggaagcactctggttgcttaagataggtcttgtgtgcatcccggatagccctaagatcaagccctccatgtcaatggttgccaagatgctgcaaggtgagtgtgctgtgagtgacaggatcatgaggcctggcctgatcacagacgtcatggacctgaaagtcaggatggtagagccgatttagttcagcttgacatcatgctcgagcactgccgcaccggaccttgttggggatttcctcgattaaaatataagctccttgatatggttctgtaacatagttctgcaatgctcctttatttagttctttactttttttgttaagatatgaggtgtagcgatacaatatgtctactaacagcgtttgtgttcttgatagttcatttaggattgaatgaagttactggtatgaccttgtcgagactgaagtaaggagggatagagctaaaaactctcttggcacaactataaagttcaagctatatgggcgtgtttggatggcagcctcccatgcaactgcctggcaggcaaatgatcctagccacaccacaggcataggaaatcgaacggtcggcattgtttcctgggccagctgataaaatccattgaagtgcaagaggccgataaacttaggcgtatagtgctggatgctccatccactggacatacacttaagcttctgtcagtttctgattggattgaaatgttccttactttgagcattaagacagttccaccacattctggcgccgccttcgtctgatcctggaggcaattggagccgctgcaagtcggatcctggtggatgcagcgcaacacagatcgcaaccctccaaggactgagaagtggaatgttgacatctctgagacagtctgaaagcaaaccgaaggcaggggtgttcatcaactcctgcttcgcgcattgctagagtgagctacaggacacatggttcgcaccaaattctccatccatatataacaagaggtggtaggtgattggtactttgaaagaggagctgacgtggagattgactgcgcctatccctgtgattcacagtcttgtcgcaaccttataccaattgataaggctgaccatcctagattaaacttcaaagaccggtaccctgagccatacagagattctcatccgactgcccccgttgctgtgcatggatgtcaggtgtcattactgtaatgtagtggtgaaataggtagattaaaacaatgaaatttatatgtggctaggatcataaatgaattgcaaaattttttctcagaacagtataacacatatttgtacataagttgttgtgttattatatgtttccgttgcaacgca

SEQ ID NO: 7855 - DNA, 3351 bp, Zea Mays
cgccagctccgcgcgtccgccgcagtgatgccgcgcgatgaaggccgcacgggagagacgctgggaaagccgctccttccggcgttgcagtgggggcgtccacagctgtgccatgcccccgccccgtccgagacgccgaccacgacccaggattctcgcttcccgtccacgtccgtgattttcccagcgaagctgaccacgcctccctgtacgcacctcccgacatcctcgccgacatgctcgcactcctgtccccgtctgagatcctcgcgtcggcgccttcggtggaagtccggaatcgcccggctctcctccaccgcgccgccagcctcactgagaagagttcatctgcctcctcctcaacgcttgaccccaccgccgctggatccaacaccctgccctcgtccttcttctccgacctactcaccagtgacgacgtgggcaccctggccagacgcacgccatggacagcaggtgggcaggaacaccttctacgtggatcctcttctcccgtgctcctcgacgcacgagagcgagctcggactggatcctctcctaccgctccatgcaggtgctcctccgcccgatcccaatgtaaaacctacagttttgttagatgttgctgccactgtttggagaagactcgcgctagaaagcggtactgggtgaaaactgcagagcgatctagagctcgcaagcctgccattgctctctgtagcaatagaaatcccccaacccacccacccacacaagttgcaattgccctcttacatctattttttggtggaacaactaaattgacattgaagaagttttttggagtgtgctcgttctgcaattagaagacttctatactgggtaacaggaatgcatgtttatgattttcgttttgaccttgcattgcatctacaatgaccagaggatgcaggtaaaaagttatttttattttctctgtattttgtctttttagacatttcttaaaccaatctttcctttgccagtctatggatccagttaatgtgtatggaaatccaatggaaggtgacatgattacaacagggacacctcttgttgtcccaccacttattgacatgattagcaatgacccaatttttggtaatatatgaacctaattggctgttaaatatgcatagcagtttgtataataatcgatttcctcaacatattgtagtttcatggttcttgttctcactacttcctccattgtatttatagcccattgctgaagatgggatgcaggaggcctctatcaagtaggtcaattacctcattaacagggacacctcttgttgccccaccacttattgatatgattagcaatgacccaattttttggtaatatatgaacatgattggttgttaaatatgcagagcagtttgtataataatcaactgcctcagcatattgtaatttcttggttcttgttctcactacttcattgtatttatagctcattgctgaagcatgggatgcaggaggcctctatcaagtaggtcaatttcctcactagaatgtttggttagagtggaatgtaaaggtctggacactctatgaattcgatgatctcgagagcatcattgataggacactaaagcgcgattttgacaccgaggaagcactctggttgcttaagataggtcttgtgtgcatcccggatagccctaagatcaagccctccatgtcaatggttgccaagatgctgcaaggtgagtgtgctgtgagtgacaggatcatgaggcctggcctgatcacagacgtcatggacctgaaagtcaggatggtagagccgatttagttcagcttgacatcatgctcgagcactgccgcaccggaccttgttggggatttcctcgattaaaatataagctccttgatatggttctgtaacatagttctgcaatgctcctttatttagttctttactttttttgttaagatatgaggtgtagcgatacaatatgtctactaacagcgtttgtgttcttgatagttcatttaggattgaatgaagttactggtatgaccttgtcgagactgaagtaaggagggatagagctaaaaactctcttggcacaactataaagttcaagctatatgggcgtgtttggatggcagcctcccatgcaactgcctggcaggcaaatgatcctagccacaccacaggcataggaaatcgaacggtcggcattgtttcctgggccagctgataaaatccattgaagtgcaagaggccgataaacttaggcgtatagtgctggatgctccatccactggacatacacttaagcttctgtcagtttctgattggattgaaatgttccttactttgagcattaaggacacatgaggtgtagctattgggcctctaacttggttatcatggttttgggccgtgggtagagcaggcaatgcaagtgcagtctggcacaatcctggtggtttggcattgagttatgttttcttttacttgataaaacaatcttgttccatcacttagtcaatagctcaatatgtccaccagttctgatgatccatgtctgcgcagtgtttcttttcacagtttgcgcttgcgaacatccgaaccccgttttcatcttgaattcaacttatgatgtatatcgggtaaaatgcgacttgtgatcgatcaatatagttttcggcacctggaccaggtggcaagtaataattctggtttggaaaatttcagacagttccaccacattctggcgccgccttcgtctgatcctggaggcaattggagccgctgcaagtcggatcctggtggatgcagcgcaacacagatcgcaaccctccaaggactgagaagtggaatgttgacatctctgagacagtctgaaagcaaaccgaaggcaggggtgttcatcaactcctgcttcgcgcattgctagagtgagctacaggacacatggttcgcaccaaattctccatccatatataacaagaaaattgcagaggtggtaggtgattggtactttgaaagaggagctgacgtggagattgactgcgcctatccctgtgattcacagtcttgtcgcaaccttataccaattgataaggctgaccatcctagattaaacttcaaagaccggtaccctgagccatacagagattctcatccgactgcccccgttgctgtgcatggatgtcaggtgtcattactgtaatgtagtggtgaaataggtagattaaaacaatgaaatttatatgtggctaggatcataaatgaattgcaaaattttttctcagaacagtataacacatatttgtacataagttgttgtgttattatatgtttccgttgcaacgca

SEQ ID NO: 7856 - DNA, 3418 bp, Zea Mays
cgccagctccgcgcgtccgccgcagtgatgccgcgcgatgaaggccgcacgggagagacgctgggaaagccgctccttccggcgttgcagtgggggcgtccacagctgtgccatgcccccgccccgtccgagacgccgaccacgacccaggattctcgcttcccgtccacgtccgtgattttcccagcgaagctgaccacgcctccctgtacgcacctcccgacatcctcgccgacatgctcgcactcctgtccccgtctgagatcctcgcgtcggcgccttcggtggaagtccggaatcgcccggctctcctccaccgcgccgccagcctcactgagaagagttcatctgcctcctcctcaacgcttgaccccaccgccgctggatccaacaccctgccctcgtccttcttctccgacctactcaccagtgacgacgtgggcaccctggccagacgcacgccatggacagcaggtgggcaggaacaccttctacgtggatcctcttctcccgtgctcctcgacgcacgagagcgagctcggactggatcctctcctaccgctccatgcagatactgggtaacaggaatgcatgtttatgattttcgttttgaccttgcattgcatctacaatgaccagaggatgcagtctatggatccagttaatgtgtatggaaatccaatggaaggtgacatgattacaacagggacacctcttgttgtcccaccacttattgacatgattagcaatgacccaatttttgcccattgctgaagatgggatgcaggaggcctctatcaagtaggtcaattacctcattaacagggacacctcttgttgccccaccacttattgatatgattagcaatgacccaattttttgctcattgctgaagcatgggatgcaggaggcctctatcaagtaggtcaatttcctcactagaatgtttggttagagtggaatgtaaaggtctggacactctatgaattcgatgatctcgagagcatcattgataggacactaaagcgcgattttgacaccgaggaagcactctggttgcttaagataggtcttgtgtgcatcccggatagccctaagatcaagccctccatgtcaatggttgccaagatgctgcaaggtgagtgtgctgtgagtgacaggatcatgaggcctggcctgatcacagacgtcatggacctgaaagtcaggatggtagagccgatttagttcagcttgacatcatgctcgagcactgccgcaccggaccttgttggggatttcctcgattaaaatataagctccttgatatggttctgtaacatagttctgcaatgctcctttatttagttctttactttttttgttaagatatgaggtgtagcgatacaatatgtctactaacagcgtttgtgttcttgatagttcatttaggattgaatgaagttactggtatgaccttgtcgagactgaagtaaggagggatagagctaaaaactctcttggcacaactataaagttcaagctatatgggcgtgtttggatggcagcctcccatgcaactgcctggcaggcaaatgatcctagccacaccacaggcataggaaatcgaacggtcggcattgtttcctgggccagctgataaaatccattgaagtgcaagaggccgataaacttaggcgtatagtgctggatgctccatccactgtttgtctcttctcaccacaatatttccaatctgactatgttcttcattttgtccactgacagttatttgactacatgcattttgtatagggacatacacttaagcttctgtcagtttctgattggattgaaatgttccttactttgagcattaaggtgagcgctttaatccatatagtgaactaacctgttttttaagtttttaactctgctaccttcatggatttcatttgcatgaatatatgtttaagcttgatacttttttttcgttatgatattagctgatgtggattatgattataaattattgagatatagtggtgaggacaagtggtatcactaacgtgattagggagtttctacaatcatgtgcttgagatactgtcagtgcaaaaattgttgcatggtttcaatttggagttttggacagtgcacctctttgagaccgtagactgtaacaccaaactgtttgtctaggttcccctgttttgagtccttttgacgttgtgttatggagtttatgtgtttaattgtgcttcattgaatccttttatccgcatgcttgagggcagtaaattctatgcagaatgtgctcatggagtcaaaatcacaacgcacttcaatatagcattttgtagtatactacttctaattctaccatttcttgctttgctgtttctaattgctcgcttgcatgcttgactagctgcattccaaattgtgttatgtttcctgggatagtgaattccaaattgtgttatgtttgctgcatatatgatacaagtattgattttttaacaatgctaggacacatgaggtgtagctattgggcctctaacttggttatcatggttttgggccgtgggtagagcaggcaatgcaagtgcagtctggcacaatcctggtggtttggcattgagttatgttttcttttacttgataaaacaatcttgttccatcacttagtcaatagctcaatatgtccaccagttctgatgatccatgtctgcgcagtgtttcttttcacagtttgcgcttgcgaacatccgaaccccgttttcatcttgaattcaacttatgatgtatatcggacagttccaccacattctggcgccgccttcgtctgatcctggaggcaattggagccgctgcaagtcggatcctggtggatgcagcgcaacacagatcgcaaccctccaaggactgagaagtggaatgttgacatctctgagacagtctgaaagcaaaccgaaggcaggggtgttcatcaactcctgcttcgcgcattgctagagtgagctacaggacacatggttcgcaccaaattctccatccatatataacaagaaaattgcagaggtggtaggtgattggtactttgaaagaggagctgacgtggagattgactgcgcctatccctgtgattcacagtcttgtcgcaaccttataccaattgataaggctgaccatcctagattaaacttcaaagaccggtaccctgagccatacagagattctcatccgactgcccccgttgctgtgcatggatgtcaggtgtcattactgtaatgtagtggtgaaataggtagattaaaacaatgaaatttatatgtggctaggatcataaatgaattgcaaaattttttctcagaacagtataacacatatttgtacataagttgttgtgttattatatgtttccgttgcaacgca

SEQ ID NO: 7857 - DNA, 3486 bp, Zea Mays
gcccctcgtgcccccgcccgtgatgcgcgccgtctcctcccccgcgcgacccctcccgtgatggccgccgccgcctaccccgcgcgacaccagccgccacctaccccgcgcgacaacgcccgtgatgcccgccgccgcctaccccgcgcgacaccaccaatggtgcccttccttccccggcacccgcaacccgccagctccgcgcgagccgccggcgggatacccgcctcccccgcgcccccgccagctccgcgcgaggcgccagctccgcgcgtccgccgcagtgatgccgcgcgatgaaggccgcacgggagagacgctgggaaagccgctccttccggcgttgcagtgggggcgtccacagctgtgccatgcccccgccccgtccgagacgccgaccacgacccaggattctcgcttcccgtccacgtccgtgattttcccagcgaagctgaccacgcctccctgtacgcacctcccgacatcctcgccgacatgctcgcactcctgtccccgtctgagatcctcgcgtcggcgccttcggtggaagtccggaatcgcccggctctcctccaccgcgccgccagcctcactgagaagagttcatctgcctcctcctcaacgcttgaccccaccgccgctggatccaacaccctgccctcgtccttcttctccgacctactcaccagtgacgacgtgggcaccctggccagacgcacgccatggacagcaggtgggcaggaacaccttctacgtggatcctcttctcccgtgctcctcgacgcacgagagcgagctcggactggatcctctcctaccgctccatgcaggtgctcctccgcccgatcccaatgtaaaacctacagttttgttagatgttgctgccactgtttggagaagactcgcgctagaaagcggtactgggtgaaaactgcagagcgatctagagctcgcaagcctgccattgctctctgtagcaatagaaatcccccaacccacccacccacacaagttgcaattgccctcttacatctattttttggtggaacaactaaattgacattgaagaagttttttggagtgtgctcgttctgcaattagaagacttctgtaagatcattcttctctttgtttttttcatttagaacctatgttggttttctgattttcatggaccacataaatagttatgtattctgtttcatagattcatgtctatataacaatttatttgaaaggcatttatctgtgcagggagagttctataattattctggtttgtagtccgtgaatttatagtggattgcttgaggtacaaatttgtatataacttctattaagttgctcctaatttccttctatcgcttgtcattctattagatgatgcaattttttgaggtatagatagcaatttttgtattcaaacaaaacaaagaaacaagttatctttaattgacattctatcattgactatcagtgtttaagctatatatttgtgaagataaattgtttatacactaataactgagtttgatgttgtagatactgggtaacaggaatgcatgtttatgattttcgttttgaccttgcattgcatctacaatgaccagaggatgcagtctatggatccagttaatgtgtatggaaatccaatggaaggtgacatgattacaacagggacacctcttgttgtcccaccacttattgacatgattagcaatgacccaatttttgcccattgctgaagatgggatgcaggaggcctctatcaagtaggtcaattacctcattaacagggacacctcttgttgccccaccacttattgatatgattagcaatgacccaattttttgctcattgctgaagcatgggatgcaggaggcctctatcaagtaggtcaatttcctcactagaatgtttggttagagtggaatgtaaaggtctggacactctatgaattcgatgatctcgagagcatcattgataggacactaaagcgcgattttgacaccgaggaagcactctggttgcttaagataggtcttgtgtgcatcccggatagccctaagatcaagccctccatgtcaatggttgccaagatgctgcaaggtgagtgtgctgtgagtgacaggatcatgaggcctggcctgatcacagacgtcatggacctgaaagtcaggatggtagagccgatttagttcagcttgacatcatgctcgagcactgccgcaccggaccttgttggggatttcctcgattaaaatataagctccttgatatggttctgtaacatagttctgcaatgctcctttatttagttctttactttttttgttaagatatgaggtgtagcgatacaatatgtctactaacagcgtttgtgttcttgatagttcatttaggattgaatgaagttactggtatgaccttgtcgagactgaagtaaggagggatagagctaaaaactctcttggcacaactataaagttcaagctatatgggcgtgtttggatggcagcctcccatgcaactgcctggcaggcaaatgatcctagccacaccacaggcataggaaatcgaacggtcggcattgtttcctgggccagctgataaaatccattgaagtgcaagaggccgataaacttaggcgtatagtgctggatgctccatccactggacatacacttaagcttctgtcagtttctgattggattgaaatgttccttactttgagcattaaggcaatgcaagtgcagtctggcacaatcctggtggtttggcattgatgtttcttttcacagtttgcgcttgcgaacatccgaaccccgttttcatcttgaattcaacttatgatgtatatcggacagttccaccacattctggcgccgccttcgtctgatcctggaggcaattggagccgctgcaagtcggatcctggtggatgcagcgcaacacagatcgcaaccctccaaggactgagaagtggaatgttgacatctctgagacagtctgaaagcaaaccgaaggcaggggtgttcatcaactcctgcttcgcgcattgctagagtgagctacaggacacatggttcgcaccaaattctccatccatatataacaagaaaattgcagaggtggtaggtgattggtactttgaaagaggagctgacgtggagattgactgcgcctatccctgtgattcacagtcttgtcgcaaccttataccaattgataaggctgaccatcctagattaaacttcaaagaccggtaccctgagccatacagagattctcatccgactgcccccgttgctgtgcatggatgtcaggtgtcattactgtaatgtagtggtgaaataggtagattaaaacaatgaaatttatatgtggctaggatcataaatgaattgcaaaattttttctcagaacagtataacacatatttgtacataagttgttgtgttattatatgtttccgttgcaacgca

SEQ ID NO: 7858 - DNA, 3541 bp, Zea Mays
cccgcccgtgatgcgcgccgtctcctcccccgcgcgacccctcccgtgatggccgccgccgcctaccccgcgcgacaccagccgccacctaccccgcgcgacaacgcccgtgatgcccgccgccgcctaccccgcgcgacaccaccaatggtgcccttccttccccggcacccgcaacccgccagctccgcgcgagccgccggcgggatacccgcctcccccgcgcccccgccagctccgcgcgaggcgccagctccgcgcgtccgccgcagtgatgccgcgcgatgaaggccgcacgggagagacgctgggaaagccgctccttccggcgttgcagtgggggcgtccacagctgtgccatgcccccgccccgtccgagacgccgaccacgacccaggattctcgcttcccgtccacgtccgtgattttcccagcgaagctgaccacgcctccctgtacgcacctcccgacatcctcgccgacatgctcgcactcctgtccccgtctgagatcctcgcgtcggcgccttcggtggaagtccggaatcgcccggctctcctccaccgcgccgccagcctcactgagaagagttcatctgcctcctcctcaacgcttgaccccaccgccgctggatccaacaccctgccctcgtccttcttctccgacctactcaccagtgacgacgtgggcaccctggccagacgcacgccatggacagcaggtgggcaggaacaccttctacgtggatcctcttctcccgtgctcctcgacgcacgagagcgagctcggactggatcctctcctaccgctccatgcaggtgctcctccgcccgatcccaatgtaaaacctacagttttgttagatgttgctgccactgtttggagaagactcgcgctagaaagcggtactgggtgaaaactgcagagcgatctagagctcgcaagcctgccattgctctctgtagcaatagaaatcccccaacccacccacccacacaagttgcaattgccctcttacatctattttttggtggaacaactaaattgacattgaagaagttttttggagtgtgctcgttctgcaattagaagacttctgtaagatcattcttctctttgtttttttcatttagaacctatgttggttttctgattttcatggaccacataaatagttatgtattctgtttcatagattcatgtctatataacaatttatttgaaaggcatttatctgtgcagggagagttctataattattctggtttgtagtccgtgaatttatagtggattgcttgaggtacaaatttgtatataacttctattaagttgctcctaatttccttctatcgcttgtcattctattagatgatgcaattttttgaggtatagatagcaatttttgtattcaaacaaaacaaagaaacaagttatctttaattgacattctatcattgactatcagtgtttaagctatatatttgtgaagataaattgtttatacactaataactgagtttgatgttgtagatactgggtaacaggaatgcatgtttatgattttcgttttgaccttgcattgcatctacaatgaccagaggatgcagtctatggatccagttaatgtgtatggaaatccaatggaaggtgacatgattacaacagggacacctcttgttgtcccaccacttattgacatgattagcaatgacccaatttttgcccattgctgaagatgggatgcaggaggcctctatcaagtaggtcaattacctcattaacagggacacctcttgttgccccaccacttattgatatgattagcaatgacccaattttttgctcattgctgaagcatgggatgcaggaggcctctatcaagtaggtcaatttcctcactagaatgtttggttagagtggaatgtaaaggtctggacactctatgaattcgatgatctcgagagcatcattgataggacactaaagcgcgattttgacaccgaggaagcactctggttgcttaagataggtcttgtgtgcatcccggatagccctaagatcaagccctccatgtcaatggttgccaagatgctgcaaggtgagtgtgctgtgagtgacaggatcatgaggcctggcctgatcacagacgtcatggacctgaaagtcaggatggtagagccgatttagttcagcttgacatcatgctcgagcactgccgcaccggaccttgttggggatttcctcgattaaaatataagctccttgatatggttctgtaacatagttctgcaatgctcctttatttagttctttactttttttgttaagatatgaggtgtagcgatacaatatgtctactaacagcgtttgtgttcttgatagttcatttaggattgaatgaagttactggtatgaccttgtcgagactgaagtaaggagggatagagctaaaaactctcttggcacaactataaagttcaagctatatgggcgtgtttggatggcagcctcccatgcaactgcctggcaggcaaatgatcctagccacaccacaggcataggaaatcgaacggtcggcattgtttcctgggccagctgataaaatccattgaagtgcaagaggccgataaacttaggcgtatagtgctggatgctccatccactggacatacacttaagcttctgtcagtttctgattggattgaaatgttccttactttgagcattaaggacacatgaggtgtagctattgggcctctaacttggttatcatggttttgggccgtgggtagagcaggcaatgcaagtgcagtctggcacaatcctggtggtttggcattgatgtttcttttcacagtttgcgcttgcgaacatccgaaccccgttttcatcttgaattcaacttatgatgtatatcggacagttccaccacattctggcgccgccttcgtctgatcctggaggcaattggagccgctgcaagtcggatcctggtggatgcagcgcaacacagatcgcaaccctccaaggactgagaagtggaatgttgacatctctgagacagtctgaaagcaaaccgaaggcaggggtgttcatcaactcctgcttcgcgcattgctagagtgagctacaggacacatggttcgcaccaaattctccatccatatataacaagaaaattgcagaggtggtaggtgattggtactttgaaagaggagctgacgtggagattgactgcgcctatccctgtgattcacagtcttgtcgcaaccttataccaattgataaggctgaccatcctagattaaacttcaaagaccggtaccctgagccatacagagattctcatccgactgcccccgttgctgtgcatggatgtcaggtgtcattactgtaatgtagtggtgaaataggtagattaaaacaatgaaatttatatgtggctaggatcataaatgaattgcaaaattttttctcagaacagtataacacatatttgtacataagttgttgtgttattatatgtttccgttgcaacgca

SEQ ID NO: 7859 - DNA, 1024 bp, Zea Mays
gtgtgtcgtgcgtgcttctggtcccgttcgccggtgcccgtggatagaagaccttgttgttcctgcttcagttgatcagttgctatcggattacgcaaaacgatttcaccagataaaaactccacgaaagctattatggaagaaaaatcttggaacagttaagttagaactgcaatttgacggaagaagcgtgcaatttactgtagctcctgtgcatgctgcaatcataatgcggtttcaagagaaatctagttggacttcaaaggcacttgctacagaaattggcatacctatggattctcttaacagaagaataagtttctggacaagcaagggggtcctgactgaatcagcaggaccagatgccgatgatcgcaccttcactgttgtcgatagcatgtctgatgtcaacaaggacagtattgtgaatgaacgcatggcagagtatcagatgactgaggaggaaggtgaaagctctgtggcttcagtggaggaacagcttaagaaagaaatgacagtctacgagaaatacatcgtcggaatgctaacaaattttgggagtatgtcgctggacaggatacataacactctaaagatgttttgtattgccgagccatcgtatgacaagtcgctgcagcagctgcaaagttttctttctggtctagtagcagatgaaaagctagaaacgagggatgggctgtacttgctaaagaggtagcagccgtttctatactaggatagtgggttgttagactagggttgtacacttgtactatttgctaatgagttgtttagactagagatgtcaggtaatcagatataacacacttcattatcaaagctatgttatcgggttcagaggcagcttacatatcctatctcacatcctcctttattttaaacttcattatgtaaacaatgactatgaaggtgttactatggaggtatttgagatggctctaggttctagatccagtatggagctgtagtttatgtcagtttatttaaatagttttaaagtatt

SEQ ID NO: 7860 - DNA, 2204 bp, Zea Mays
cgcaaactggtggtaccgccataacgatctgaaaacatcctccattagtccgcctccggccaccccctttcattccgccgcaacgccaccgcccccaacgcaagtttccggcgatggaccccgcggcggccgcgctaggtgcagtacccgccgctggcgcgccacctccgggcgcagccgcaggggaccagcaggcagctccccgggttgagcggctcagcgcgggggtgcagcagcagttgaacctggaggggatgcgcgcgcgcgcggtggggctgtacaaggccatctcccgcatcctcgaggactttgacgtcatcatacgcaccaatcccagcgcctcccccaagtggcaggacgtgctcgggcagttctcgatggtgagcatggagctcttcaacattgtggaggacattaagaatgtgtccaaggtgtttgtcgtgtacccccggaatgtcaatgccgagaatgcaacaatactacctgtaatgctgtcgtcaaaactgctgcctgagatggaagttgaggaaactactaagagagagcaactattgtctggaataactaatctacctgtgcctacacagattgaaaaattaaaggttagaatagacatgattgggagtgcatgcgaaactgctgagaaagtaattgcagaatgccgtaagagctatgggctgggaagccgtcaggggacaaatcttggtcctacattggacaaagcacaagctgcaaagatacaggagcaggaaggcctacttagagcagcagtaaattatggtgaaggattacgggtacctggagatcagaggcatccacaatctcttcctatccatctgatagaagtgcttcctttaggagacggtgcacaaaattttggtgatagttctggtagttatcccaaaaatatgtcaacatttgcacctaatagtgtcaacagccagggaaatcagattcaggcatccggaggacagttacttggaaggcctgcgccatcacctggaaccacaggaacccctaatttcgagaatgtgtccactcctccaatgccatatgctaactctcctaggtcaggcaccaatatgatgaataccccttccccccagcaacatctaacaccacaacaacagaggcaaaaactgatgcaacattctcaaccgcttcaccagccggtgaggccatcagctgctgggatgctagcacagagcgcacttcctcaactacaagatttacaggggcaggctcaacaaaaactacagcaaatgcaatacaaccaagcattgtcacaacagtttcataacagacagatgcaacctggacgtatgcaaccaggcatggctcagagtcaattgaatcaaggaactcagctacgaagtcatttaggccagtttactggagctgcaaataatgcgatgttcaatgctgcacaggcatcatcaaactcacaaatgatggcaaatatgcatggatcacagtcgcttatgccacaaatgcagtatggtatggctggtgggcatccacataggagccatccccaaatgctgactgaccaaatgttcggtatgggagccacaaatagcagcatgatgggaatgcagcagcagcagcaagggctatacgggaacatgcaggcaggtgcacagaacgtgccacagggtatggcgggccttcagaaccagacccagaatcccaacttcactcagcagaggcaacaaaaccaacaatgatttaacactaacgttcacggaggttgaaagatgagcaatatatccgtcgttttgctgcttgtctgttggtctttactcagcttatctgtgagactgatagtagccccaggttagccttcgttttgctgtaaatcattagcgagatgcaggtcaattataattatatacgttgtaactgtgtttcggatatgtctaatatgttttgttggaatcgtgttacgcgcgttccttttatttataattaagcctcgcagcaaggccggcaatcgaattgcatacggctagacgggtgggtagttcaccaggatgaaaatcggtcatcaggtggaccctagaattatttgaggaactcacagatgtactgtaatatgtattccctgttgtctttctggataaatatcccaagatgttattacgtctttcatgcttgcaatcatgaggccccattgcttgcatgcaactcgaaaacgccgatga

SEQ ID NO: 7861 - DNA, 3221 bp, Zea Mays
atgggttgcccccgtccgctcctcctcctcctcctccacgcggtcgcgctcgccgccgccgacgagttcacctacaacggcttcggaggcagcgacctgttgctcgacggcatggccgcggtggcgccgaacggcctgctggcgctcagcaacggcaccagccagatggccggccacgcgttccacccggcgccgttccgcctgcgtgacggcgccgccgccgccgccaggtccttctcggcggccttcgtcttcgccatcgtgtccaactacaccgtgctcagcgacaacggcatggcgctggtggtcgcgccgagcaccaggctctccgccttcaacgcggggcagtacctgggcgtcctcaacgtcaccgacaacggcagggacggcaaccgcgtcttcttcgtcgagctggacaccatgctcaacccggagttccaggacatgaacagcaaccacgtcggcgtcaacgtcaacagcatgaggtcgctgcggaaccacagcgccggctactacgacgacgccacgggggcgttcaccaacctcagcctcatcagccgccggcccatgcaggtctgggtcgactacgacggcgccgccgcgcggctggacgtggccatggcgcccgccggcgtgcccaggccgcggaagccgctcatctccacgccgctcaacctctcggcggtcggcgcggacgacggcaccgcctacgtcggcttctcggcggccacgggcgtcatctacacgcgccactacgtcctgggctggagcttcgccacgggcgccgcggccccgccgctggacatctccaggcttcccgcgctgccgcggttcgggcccaagccccggtccaaggtgctggagaccgtgctcccggtcgccaccgcggcgctcgtcctcgcgctggtcgtgggcgccttcctgttcgtgcggcggcgggtgaggtacgccgaggtgcgcgaggactgggaggcggagttcggcccccaccgcttctcgtacaaggagctctaccaggcgaccaaggggttcaagaacaagatgctgctcggcaccggcggcttcgggagggtgtacaagggcgtgctctccgggtccaagctcgaggtcgccgtgaagagggtgtcgcacgactcgaagcaggggatgaaggagttcatcgcggaggtggtgagcatcggccacctccgccaccggaacctggtgcagctgctgggctattgccggcggaagggcgagctgctgctggtgtacgactacatgtccaacggcagcctggacaagtacctctacgacgacaggaccgccaggcccgtcctggactgggggcagaggttccagatcgtcaggggcgtcgccgccggcctgctgtacctgcacgaggactgggagaaggtggtgatccaccgggacgtcaaggccagcaatgtgctcctggacggcgacatgaacggcaggctgggcgacttcggcctggcgcggctgtacgaccacggcgtggacccgcagacgacgcacgtggtgggcaccatgggctacctcgccccggagctggtgcgcacggggagggcgaccccggccacggacgtgttcgccttcggcgtgttcgtgctggaggtggcttgcggccgccgcccgctcgggcgcgtcgcgcccggtgtcgaccagaccgtgctgctggactgggtgcaggagcaccagcgcaggggggccgccctcgacacgctggacgcgcggctgtgcggcaagtacgacgccgacgaggcccggctggccgtcaagctggggctcatgtgcgcgcacccctcgcccgaggcgcggccgggcatgcgccaggtcgtgcagtacctggagggcgacgccccgatgcccgatgtggcgccctcgtacgtcagctacagcatgctggcgctgatgcagaacgacgggttcgactccttcgccaacgtgtcgttcccgtccacggtcacgtcgagcgtcagccctgtctccggcggcttctcttcttccgtgtccggcctctccggcggaaggatcgcgctggtgacgggagggaacaagggcatcgggctcgagacgtgccggcagctggcgtccaggggcgtcagggtcgtcctgacggcgaggaacgaggcgaggggtttggaagcggtcgagcgcgtcaggtgcgcccgcggcgacgccgaggtttacttccaccagctcgacgtcaccgacccctgcagcgccgcccggctcgcggatttcgtcagggatcagttcggtaggctggacatcctggtcgatggcatggatgtaaatcagagagtcgaatggatgaaagaaaattcgaaagaaacatacgaggaggctgtacaatgtatgaaaacaaactattatggtgccaaacttgtcacagaggcactacttcctcttcttcagttatcctcctctggaagaattgtcaacgtttcgtcaggctttggactactgagaaatttcaacagcgaagaccttaggaaggagtttgaagacatcgacaatcttactgaaagtagactggaggaactgatggataagtttctagaggattttaaggccaacttagtagaggcgcatgggtggccgacaggtggatcttcagcctacaaagtcgtcaaagcggcgctcaatgcgtacacgaggattcttgccaagaagtatcctacgctgcgtatcaattgtttgacgcctggttatgtcaagaccgacatgtctatgcacatgggggtactgacacttgaggaaggcgctcgcaaccccgtgaaggttgctctcttgcctgacgacggaccgactggtgcttattttgatctgaatggcgaggcgtcctttgtgtgatggtatttctcccttttcagcttcagaataaaagaaagagctatgaagtagttagtgccaatcagtattgtagttcgacttgaatacttaaactagcacgttgagcaaaccgtagagctcaacaccagggatttcctcgtcttctgtataatatctctggtgatgattgtatatttgcaatgaaccatgcagatttggtcgcgccaaggtagtgtttggttggcacaatggtaatggcaacaggaatgaaaatggactgcgaggggaacgatggtggggttcgtttacatgattttatttggttggacaaagcaatggcgcgtaatcatttaacggccgaaggatagcggcaataaggctcg

SEQ ID NO: 7862 - DNA, 1581 bp, Zea Mays
gtttccaactgaggtagtgaggatgtgttagaccatgaaactcaacatgatgagtcatctgcttttgagcttatacgatgtcatctaactttattttatacctactggtcaatgagtgagggcagcgatggtgcgctggaggagaacgacactagacgccgtgagcacgatttcttcgacgtagaggaggtagacggtgtcatcaccgcgccgaaggatgaacaaaatgttttagaggtattactccctgaaggtgtaataattcctacaggttttgaaacaatagggcatatagcacacttgaatttgcgagatgagcatatgccttacaagaaacttattgcttcggtggttcttgataaaaacaagccaaaaatccaaactgttgtcaataagacagatgttattcagaacaactatagaactatgcaacttgaagtcttagctggcaatggttcccttcgtacgatggtcattgagagcggccttcgttttcaagttgatcttggtacagtctattggaattctagattagccacagagaggcagaggctagttaatatctttagaaacttggacgttgtttgtgatatgttctcaggggttggtcctctagcgatttcagctgcaaaaaaggtcaaatatgtctatgcaaatgacataaaccctaatgcagtgggataccttgagagaaacatggttcttaacaaacttgaaaagaaaatagaggtttttaacatggatgctagaaggtttgttagtgcaatatattcaagcaagcacgtgcaaccaatcacacaaatagtgatgaatttgcccaatgacgctgttgaatttttagggattttatgcaatactaaatcagaactgcattgtgtgatgccaatgatccatgtgtacggattttctaaagctgaggatccagagcatgacttccatgagaggataaatttaacgttaggcgagaacatcgacactgttgaaatgcacagagtacggcttgttgcacccggaaaatggatgatatgtgcaacttttactcttccacagtcagtggcgtctgcacagccgaattacattacctgttgattttttgtactctctccgtcttaaaatattggcaacgactgttatgcaagcagtccttctgtgcaagcgtgcaagcaaaccatatgatccattagattacgatccaatcacagatacaaccatgtttgttagaggttttttataaagattattgagctgttggtggaagggtttaagtgttaaatgtgacatacggttggatcacgatctaatggatcaaatggtttgcttgcacgcttgcacagaaggactgcttgtatagcagtcgttgcctaaaatattagtcgttttagctcagctctggatttttatgtctatatccaaagacatgtaaaacatataaatcaaatgttatatgaatttattaattgtcgaaaatgaattttaatttgggatagagggagtactattcttactgcagcccctcgtatcttctgtactgtcgtcgaatacttcctatcagattatatagatgatgcccttgatcatctc

SEQ ID NO: 7863 - DNA, 2573 bp, Zea Mays
aacagcgttcatgaatcatgacgaagacgaacaccatgagaagccacgacctccatggttacagccaccgccacctactcgtacagtcttcaatcctgcttttcctcggaactttttccgccgcacaagctgcatccgacatcctcagcaagggcagtaaccttacctatggcgagaccctggtctccgctaacgggtcgttcacattagggttcttctctcgcggagtgccggcaaggaggtacctgggaatctggttcacggtgtccaactccagcggcgacgctgtatgctgggtagcgaaccgtgaccaccctctcggcgactcttccggcgtgctggcgatcagcgatacgggaagccttgtcctgctcgacggctctggccgggcggcgtggtcttcgaacacgaccgccggcgccggcgccgcttccccaacggtgaagctactcgagtccggcaacctcgtcctgctggacgggaacgacggaggagtcgacgactacggcgtcgtgaagctgtggcagtcgttcgaccacccgacgaacaccttgctccctggcgccaagatcggcatcaacctgtggagcggcggcgggtggtcactcacgtcgtggcgtgatgccgacgacccctcgccgggggaattccggtacacgatggtcaggcgagggttgctgcccgagatcgtgacgctggactcgagcgacgccatcaagtaccgcacgggagtgtggaacgggcggtggttcagcggcatcccggagatgaactcgttctcgaacatgttcgtcttccaggtgacggtaagcccgagcgaggtcagctacagctacgccgccaaggccggcgcgccgccatccctgtcccgcgtcctcctcaactacacggctgacgccgtgcgcgtcgtgtggtggctggacaagcgagggtgggacaacttcttcacggggccgcgagatgactgcgaccactacaacaggtgcgggcattctggcgtgtgcaatcatactgcagcgtcgacgacgtggccgtgcagctgtgtccagggcttcgtccccgtctcgtcgtcggactgggacgggagagactcatctggcgggtgccggcggaacgtgtcgctggactgcggcgacaatggcaccacggacgggtttgtccgtttgccgggagtgaagctgcccgacacgctcaactcgtcgctggacacgagcatcacgctggacgagtgcagggcgaggtgccttgccaactgctcctgcgtggcgtatgccgcggcagatgtgcaaggcggaggcgatgatgttggcactggatgcatcatgtggcctgaaaacctcactgacctacgctacgtggctggaggacagaccctgtacctacggcaggctactcccccatctgggactggaaggttaaagaaagaaacgcgggttctcgtagcagctggatcaacattgggtttcattggccttatcatgctggccatcttcgctgtgcaggcggttcggataaggcgtcggaacttgttaattcaaatgacggaggcagttgaaacagcccaagatccctctgtttcttccattgctctggctactgtcaagagtgcaacaaggaatttctccacaaggaatgtgataggcgaaggcactttcggcatcgtatatgagggcaagttgcccagagggcatccgctcctacacgggctagccgggagaaccattgccgtgaagaggctgaaaccgatcggcgatcttccggacataatcgtcaggtatttcacgagagagatgcagctcatgtccgggctcaagcagcaccggaatgtgctccgcctccttgcctactgcgacgaagccagcgaacggatcctggtgtacgagtacatgcacaggaggagcttggacgcctacatattcggaacacctagagaacgcgcgctgctgaactggtgccggaggctgcagatcattcaggggatcgccgacggcgtgaagcacctccacgagggagaagggtcggccggcaacgtgatccaccgggatctgaagccggccaatgtgctgctggacggcggatggcaggccaaggtggccgacttcgggacagcaaaattgctcgtcgctggagctaccggaactcggacaaggataggcacacctggatacatggctccagagtacgttcagagcgacggtggcgagacgacgctcaagtgcgacgtgtatagcttcggagtcactttaatggagacactgagcggacgaaagaactgtgacacgccaagcctcgtctcagaagtaaagaccatactgaactgcctcggccgttcgagatgctaggcagcccctgctcggagcttgccgagcccatggtgccgacggtcgtcggcaatgcagccttggctacgctcctggaggccgatctctccagaccgacggtgtacgagacaatcgattttagataagagatgacgcgctcgcactgcgttgctgctaagcttataacacttgttttatacttcgtactgttgttttacactgattataattgttattaataacatttttggt

SEQ ID NO: 7864 - DNA, 2349 bp, Zea Mays
ctgctccattccacaatccacactcccccgcgctggactggagtcgagttgagcgcacgctctcgcactcccatattcccaccgaccatatcgctcttgcttcgctaagcatcctagatctccattcgcgcccatggggtgcttccagtccaaggtggcggggcccctgccgcccaacgacgccgccgcgctccccgccgacaagcctgcagatcccgaggcggcgaacggcgccgccgacgggggaggcgacggcgacgacaaggaggccgtgaagcgcgcggtgccggtgttcagggagttcgcgctggccgagctgcgcgccgccaccaagggcttcagcgccgacctcatcgtctcggagagcggcgagaaggcgcccaacgccgtctaccgcggccgcctcgatggcggacggctcatcgccgtcaaacgcttctcgcgcctctcttggcctgacccgcagcagttcctcgcggatgcggtgggcgtggggaaggtgcggcacaagcgcctcgtcaacctcattggctgctgcgccgagggtgacgagaggctgctcgtcgctgagtacatgcccaacgacaccctgtcgaagcatctcttccactgaaggtgatccccgcctgtcaagttttggattaatgaagaacagccgtgatggaaaaagctatagtactaacctggcttacactccaccagagtttctacgaacaggcagagtaattcccgagagtgtgatatatagctatggaactgtcctgttggatcttttgagcggaaaacacattcctcctagtcatgccctagatttaataaggggaaagaatatactgttgctgatggattcctccttagaagggcagtatgctaatgaagatgcttcaaaattggttgaccttgcatcaaagtgtctgcaatttgaatctagggatagaccaaacataaagtatcttttgtcttcagttggtcctcttcaaaatcaaaaggaggttgcatcacatgtgttcatgggtattacaaaagccacatcagtactgccagccatttattctccacttgggaaggcctgcgctggtatggatctttcagcggtgcatgatattttactcaaaacaggttataaagatgacgagggtgcagaaaacgagttatcctttcaagaatggacccagcaagtgcaagagatgctgaacacaaagaagtttggtgacattgcatttagagacaaggattttaagactgcaattgactactattccaagctagtcgcaatgatgtcgacgccttcggctaccgtttttgctaggcgcagtttttcctacttgatgaatgagcaagcagagcttgctctacgggacgcaatgcaggcccaggtctgcatgcccgagtggcctacagccttctacctccaagcccttgctctttcaaagctcggcatggaaaccgacgcgcaggacatgctcaacgacggagcaacatttgaggccaagaagcaaaacggctggcgcagttaggaaataaaagtctcctaactactccgtgtcgttgcccttcgaggaaaaaaaaggcgcaatcgctagtgtcctccaaatcagttcattgggacgtctgttgcacgaccaaggagtgggattgaaatgcactgttttatcgtgcaatctctgccctaatgccggcaacgagcggtggtgttatgatcaggagtggaagaacaggtcagggggctttgagtgcacaggcatagcttgctctcccgtgagttgcgctttgttttgcgagtggtggtggcaggatctgctgattgttgcaactgcagttgtaattaaagggatgctttctaacaatttctccttttggttcacgtcgaatctttgggctgcagaggacaagagtggtgtgcaaaaagccgggttcattgtgattagctacggagaataaactagaggcatcggaattccattcgattctaccatgtttgtatggagtttgtatgcggtcttattttttccccctttctatgaacaattctgtcttttttgatcgatcgaatcgtttcagatagtcagttgcgcatccaccgatttggtttcaaagcagcagatacgtgcttgtatatcatctggttgactggttgtcataaagaacttgcacaactatcggttgggaggcgcgtaattttattttaagtacacgagcaacttatcacttgctgttatttgttttcagattttttaaaattgattttaaatccttaaacttgtccctgtatttataaaattcatgtttaatctttaaacttatcatagagtgtcacccgacttcctgaaattcttaaaatatcatctc

SEQ ID NO: 7865 - DNA, 2397 bp, Zea Mays
ctgctccattccacaatccacactcccccgcgctggactggagtcgagttgagcgcacgctctcgcactcccatattcccaccgaccatatcgctcttgcttcgctaagcatcctagatctccattcgcgcccatggggtgcttccagtccaaggtggcggggcccctgccgcccaacgacgccgccgcgctccccgccgacaagcctgcagatcccgaggcggcgaacggcgccgccgacgggggaggcgacggcgacgacaaggaggccgtgaagcgcgcggtgccggtgttcagggagttcgcgctggccgagctgcgcgccgccaccaagggcttcagcgccgacctcatcgtctcggagagcggcgagaaggcgcccaacgccgtctaccgcggccgcctcgatggcggacggctcatcgccgtcaaacgcttctcgcgcctctcttggcctgacccgcagcagttcctcgcggatgcggtgggcgtggggaaggtgcggcacaagcgcctcgtcaacctcattggctgctgcgccgagggtgacgagaggctgctcgtcgctgagtacatgcccaacgacaccctgtcgaagcatctcttccactgggataaacagcctttaccatgggaaatgaggctgagggttgcatattttattgcacaagctctcgaccattgcaatttggagaacaggaaaatctatcatgatttgaatgcttatagagtactttttgatgaggaaggtgatccccgcctgtcaagttttggattaatgaagaacagccgtgatggaaaaagctatagtactaacctggcttacactccaccagagtttctacgaacaggccctagatttaataaggggaaagaatatactgttgctgatggattcctccttagaagggcagtatgctaatgaagatgcttcaaaattggttgaccttgcatcaaagtgtctgcaatttgaatctagggatagaccaaacataaagtatcttttgtcttcagttggtcctcttcaaaatcaaaaggaggttgcatcacatgtgttcatgggtattacaaaagccacatcagtactgccagccatttattctccacttgggaaggcctgcgctggtatggatctttcagcggtgcatgatattttactcaaaacaggttataaagatgacgagggtgcagaaaacgagttatcctttcaagaatggacccagcaagtgcaagagatgctgaacacaaagaagtttggtgacattgcatttagagacaaggattttaagactgcaattgactactattccaagctagtcgcaatgatgtcgacgccttcggctaccgtttttgctaggcgcagtttttcctacttgatgaatgagcaagcagagcttgctctacgggacgcaatgcaggcccaggtctgcatgcccgagtggcctacagccttctacctccaagcccttgctctttcaaagctcggcatggaaaccgacgcgcaggacatgctcaacgacggagcaacatttgaggccaagaagcaaaacggctggcgcagttaggaaataaaagtctcctaactactccgtgtcgttgcccttcgaggaaaaaaaaggcgcaatcgctagtgtcctccaaatcagttcattgggacgtctgttgcacgaccaaggagtgggattgaaatgcactgttttatcgtgcaatctctgccctaatgccggcaacgagcggtggtgttatgatcaggagtggaagaacaggtcagggggctttgagtgcacaggcatagcttgctctcccgtgagttgcgctttgttttgcgagtggtggtggcaggatctgctgattgttgcaactgcagttgtaattaaagggatgctttctaacaatttctccttttggttcacgtcgaatctttgggctgcagaggacaagagtggtgtgcaaaaagccgggttcattgtgattagctacggagaataaactagaggcatcggaattccattcgattctaccatgtttgtatggagtttgtatgcggtcttattttttccccctttctatgaacaattctgtcttttttgatcgatcgaatcgtttcagatagtcagttgcgcatccaccgatttggtttcaaagcagcagatacgtgcttgtatatcatctggttgactggttgtcataaagaacttgcacaactatcggttgggaggcgcgtaattttattttaagtacacgagcaacttatcacttgctgttatttgttttcagattttttaaaattgattttaaatccttaaacttgtccctgtatttataaaattcatgtttaatctttaaacttatcatagagtgtcacccgacttcctgaaattcttaaaatatcatctc

SEQ ID NO: 7866 - DNA, 1975 bp, Zea Mays
cgcagcccaacacccgcatcaaaacacgcacctcggctcctcccctccccaccaggcaccaaggtcgccaccgccaccgctgccccaaagtatcgcacccccaaagccccgctccctcaccttctggaaccttcctcgcatggccccgcccccctccatgcctgccgcctccgatcgcgccggccctggccgcgacgcgggcgactcgtcctcccttcgcctccgccgcgccccctcagccgacgccggcgaccttgccggcgattcctcggtaggcttgcgggagaacggcgagccgcaaccgccgacgaatccgccgccgcaggagcagcagcagcagcacgagatgctatactaccgcgcgtcggcgcccgcccaccgccgcgtcaaggagagccccctcagctctgacgccatcttccggcagagccatgctggtcttctgaatctatgcattgttgttctgatcgcagtgaacagcagactcattattgagaatttaatgaagtatggcctgttgataagagctggattttggtttagtgcaagatcgctgggtgactggccccttctaatgtgctgcctcactctaccagttttcccactagttgcactcatggctgagaagctgatcacaagaaagctcattggtgaacatgtggttattctactccatatcattattacaacatctgccattgtctatccagttgttgtgactcttaagtgtgactcagcagtactatctggatttgtgctaatgtttcttgcgagcatcatgtggatgaagcttgtctcttatgcacatacaaattatgatataagggtattgtccaaaagtactgagaagggtgctgcatatggaaattatgtcgatcctgagaatatgaaagatccaacctttaaaagtctagtgtacttcatgttggccccaacactttgttaccagccaacttatcctcaaactacatgtattagaaagggttgggtgacccagcaactcataaagtgcgtggtttttacaggcttgatgggcttcataattgagcaatatataaacccaattgtgaagaattccaaacatccactgaaagggaattttttgaatgctatagaaagagtcttaaaactctcagtgccaacattatatgtatggctttgcatgttctattgcttttttcatttatggctgaacattgtagctgaactcctctgtttcggtgaccgtgaattctataaggactggtggaatgccaaaactgttgaagagcctgttcataagtggatcatcagacacatatattttccatgtataaggaaaggcttttccaggggtgtagctattctaatctcgtttctggtttcagctgtattccatgagatatgtattgcggtgccgtgccacattttcaaattctgggcattttctgggatcatgtttcagataccgttggtattcttgacaagatatctccatgctacgttcaagcatgtaatggtgggcaacatgatattttggttcttcagtatagtcggacagccgatgtgtgtccttctatactaccatgacgtcatgaacaggcaggcccaggcaagtagatagttcggcagagacatgtacttcaacatcgaccatcagaagcagactggagcgacgcggcaggaagcagcagtagcccctcacttgccattgtttaccatcagctagcagctggtcagcctgaaaatgcttctattccaggcggccgtgctgggatgcagcgtgtacattaccagcgatgcaacgtcaacggttaccaagcgcggataagcagtgctcgtggcatgtgaactctgtacacattgaagtctatatgtccgcggtgctgtgtgcataatgtcgtggtagatgtaatatgtacaatgtatgccacgacttaagaggtcaaaatgaggctcacgtcttgggatggagggagaacgactttcaaagaac

SEQ ID NO: 7867 - DNA, 2673 bp, Zea Mays
caccggtccaccccccctctggctctctgcttctgcacctgcgtgtgctagcgcgagcgcgtgcgtcccttccccggcacgagcggcgcacaccgtcacatccgcgctccgttcgccttccagaaaatttaaaccccagcggagccggccacggccagtcagccgccacacggtctccgacgcgctgcccgctcgcctgccaaacccccaccccctcggcggcgatgctgacacgtcgccgtagcaaccacccgggctgctccttccccctcccgttcctcgtctgcggcctgctcctcgctgcggccgtcgcattttccccagctgcggccgccgaagcagctgacggcggcgctgggcacgagggccgcgcggggaaaccggaggtagaggccgaggcggaggcgcgcggggatggggttgccgtggcggaagccggcggcgaggtggtggctcagggcaatgccacggaggccaaggagggcagccttgccgacatgatcgaccgcgcgctggagaaggagttcccggagtccgagggcgagcagggcggtggagagaccgaccctggcagcttcaacaacacggtagctgagaagcagggagttcttgaaactgtagctagaagagtaacaaagaagaatgaaaccaaagataacaagtcatttccttttaaggaggttttcttggatcgaactgagcaagaggatgttcccacgttgatagatcggaaggataatgtttttatcatctcaaacccaaagtcaaaataccctgtgctgcagctggaccttaggttgatatcagatcttgttgttgttatcgtatccgctacatgtggtggaattgcctttgcttgccttgggcaaccggtgattacaggttatctacttgcaggatctataattgggcctggaggttttagctttgtcaatgaaatggtgcaagttgaaacggtagcccagtttggtgtgatatttctcctgtttgcattgggacttgagttttctactgcaaaacttcgagttgttcgtgctgttgctgttctcggaggattgctccaaattatgttgttcatgtttctttgtggtattttggctaccctatgtggaggcaaaactaaagaaggtgtttttgttggtgttcttctctccatgtcttcaacagctgtcgttttaaagtttctgatggaaagaaatagtatcaatgctcttcatggccaggttacagtcgggatacttatattgcaggattgtgctgttggcctgctgtttgcgcttcttccaattttgagtggtacatctggccttcttcacggagttgcatcaatgatgaagtcgctggtggtattgataacattcctgaccattctctctatcctctcccgtaccggcgttccttggtttcttaaactgatgataagtctgtcatcacagacaaatgaactatatcagctggcagcagttgcattctgcttgttatttgcttggtgtagtgataagttgggcctgagtctcgagttgggttcttttgcagctggagtaatgatatcaacaacagaccttgcacaacatactcttgaacaagcttgttctttctgcagatcgaacccatccgcaactttttcgctgctcttttccttgccagcattgggatgctaattaatgtccatttcttgtggaaccatgtggatatactccttgcagcagtaattttggtgatcaccgtaaagacctttattgttgctattgttgtaaaagggtttgggtatagcaacaaaacatctcttcttgtcggcatgtcacttgcacaaataggagagtttgcttttgttctcttaagccgtgcttcaagtattcatctaatcgagggcaagctatacctgcttcttcttggaaccactgcacttagtttggtgacaacccctctgctattcaaaatgatccctgcaatggtccacctcggggttcttttgagatggttttctgtcgataccaatcagctgggcctgaaaaatgatgtcctccgcatcgatagcggcaagcgcataaatctgatagtccaaggctcacatgactcatgacacatttgacacactgcaagctactttttgtatggcttaagtttacaagctctgtaaagtgttttcacctgtactgaagagtttctagcagatatacgagggtggaggcaagagaactcaactcagatcttgctcctagtgcaagatcaatcctcccccgtcatgacggctgcaagggcaaagtcgggttttgccgttcttgagagcagtgtgtcttggatgattggtgcagtgagtggctgtcgaccccaaatgagggtctcgtgtaacatatgaatgtatggtgattaattaattggattagcatgataggatgtaggcctgatcctcagtaaaggttatgcccttgtgttctttcaccaaagttgtgtatcctcactacacgaaagtgtgtacgacatccatcagatcacgaattttgttgtgtagccatatatgtcagtttcttaacatgtccaagttcatgagtttttttttcctcacgggaagcttttgagtaacctttgttcagatatcactttgttggatcgagtccaggatctcaatgatgggtgtgtttcaatgaatttgttcactttttattataccat

SEQ ID NO: 7868 - DNA, 2519 bp, Zea Mays
gtttaaaactgcagagaccaaaaatcgccatccacgccagggaaacaaaagcttccacccaaacaaactcccctcgctgaaactcgccgccgtctcctcgccttccgcctcagcacaggccccgtcgcggtctcctaggccacgcttccgcctctcctcgtcggctgcccgcctccgcccggcggccggagcaggctaggttaccagcgccccccacttcgcggtcgagctggaggacacgcgtagcaacgccgggttcttctgcggcgacctgtggtgtggcctcatggagcccaagggcgagtcaggccagaagcctattgaagaagcaatcgacagcttgaagactgatgctagcatgaaggcaaacaatgtcaacttgcctgctaagaaagacgcaagttcttctgatgcagtatcttgcatttcctccggcgatgcagctagtactgtgaaggatagagaaatgaaccaagaaacttcttttggcgaccaagggatgcattactatggatattattatcctggtgcatacggaggatgggatgagaatggctactttgttggatataatggcctagaggtgcacccagcagtggttcaagctgacaatggttcatatctgtgttatcctctggggtatgaaaatggatatgcttcttatattccggttgttcctggaggcattgccagtgtggatgcttcccacagtgcaaaatccacagcagatactgtcaaaggatcatcatcagctctagaaactgtaccaaatgctgccaatagcagcacatcatcaaagggtgcaaataaggcacctggtgcttccataacaaaaggatatcttccatctagcaagtttgtgatgcacagtaataaccaagcaaaaagcagtgtttatcaaagcaaaggcatcaatctgaaagaaagtggtagaagctggcacagcagtgagaagcttaaagcgagaagtaagctaaatggacatggcgattctgaatctaatgagaacaaccacactgataactcgaaatatagtttgagctctcaatctgatgttgttggattgtcaagtgtaggggatgctaacgccagcataccttcacctgtcgtaataagaaaaactgcatacaatctttcagattttgttacaaagtatgagcaagctctattctttgtaattaagtcctacagtgaagatgatattcacaagagtattaagtacaatgtttgggcaagtactcctaatggaaataaaaggcttgacaatgcctataggcttgcacaggaaaggatggcagaaaaaggaaccaaatgtcctgttttccttttcttctcagttaatgcaagtggtcagttctgtggcgtggctgagatggttggcccagtagatttcaacaggaacatgaacttctggcaacaggacaagtggaatggtttcttctctgtaaaatggcacattattaaggatgttcccaatccacaatttcgccatataattttggagaataatgagaataaacctgtgacaaacagcagggacacgcaagaggtcaaattttcacaaggtacagagatgttgaacattttcaagaacttcacgtgtaaagcatcaatactggatgactttgacttctacgaaaatcggcagaaagtaatgcaggatagaagaggcaagccacttacatcgtttggtcacccattgccaaaagctgaaaaaactgcagaagttaaaaggcaaacacaattgataagtgccacggaagttggtagagccgatacaaccaaggaaaatgaggagaagagcagcagtgttccagaaatactcaacgcagcatgtagtaacaaggagaaacccaacaaaatcgcaacagacggatgatgccttggctagttgactgggaaaatgagatagcttctggaacggacttcaacttgaattcctgaaatcataagttcgatgtgcgcaatgtcaagaaaccacaattggtcatgggttctcttgcattttctcatggaagtgaagaaacgaaaaaagtgaagcaacggaactgtcttcccacgagaaatgttcaatgactgggaaaaaggttctaggacgcatttaggttgaggcccctggtgctaaggcattagagcgccctccttgtctgtttttcccccatattggagggtcgtttcttttcttttgtcgtgcccctttttcccctcttcttttgcctattattctgcagctgagattttgggaagcagtttgcacttaggtccaaagaaagggaatgtctgttgctttgtgggttgtcctctaggatgtggtaggtgttgactgttttttagaatctgtgcacgttctagaaactgacagaaaaaaagagaaaaaaggattgtgagggattagaaataaaaaggatcttaaaaagatacatggtatcttatgtttactgcttcttccattatcaagaaaactaacaatgggtctagatgctttcaatagtaagactatatttatataaagttcaatt

SEQ ID NO: 7869 - DNA, 2515 bp, Zea Mays
gctgtcaatcgcctccccactgcggcagatccgcaatccgctcctccaccaccgcgctcctcacccacgccagggacaagactgtctacctccacgcccgcctcaccaactccgcggccaccgccaccgccacgcccctcccccatggtcgtcgagtccgagtggtggaaccagcgacgcatgcgcgtcgagggcgacgtgaaataggtgctccaccgcgggcacaacgggcacagtggaggtggaacgagcaccatcgagttctggttccaccgaatccaccgctcgcacaccggatccatcgctcccacatgcccgcacaccggatccaccgctccctcccccgcgatggcctggttccaccgagacaactgcggggctagggtttggattcgtgggtggagcccaaggctagatccagcagggggagggaggtagaggaggggagggaactgctggtggtcggcagtgggcgaaggcgcgacaatccaggatatggattcctgagcgtcacccacccgcccatccacgtcgcgcggtgtagtcatcccctatccgcagccgcctcgctccctctcccacaacaaatccattctcctcctcccactcgacgaggatcgcgaggatgctggaggacgtcgtcgctgtcacgcttgacgttagggcctccgatgcttgacgttagggcctctcgcttgaagaggaacacaaacagagctcatgttttttattttgctctgcattatctactgcttctctgtgggggcgttatttacagtatgtggcctgtttgttgtgttgttcctgcggaagggcgggcgggccgaaggtgtttaagaaaatgttgttgtcaacatcaacctcctggaagggccagaacgcaggcagcgcctcaactcgtcaccccatcagcacggtgagccccttatctggattgttatcatggtacgcggtgcgctgcaagcctgcaagtgacatcaaattggattggtagtcagcgggtgtcatagtgtcagttcgatggaatggttctgcagtgcatgtgcttctgtaatttccgcaagaagcagtcaacttctccctgatatggcactaggacattgtagtgattcccgcacgtttgtggaactcgacaacctaccagagcgccagatgtttcattgagaagagaactcctccagtctggctttccactggtctagtctctcctttaaaccaaatttgataccactcattgaagtcaatagctgggatgtagacatgtgaaaccacacctgtggaactttcagcgtgtgatgactgggtcactggtggaataccgtgttttttgagctgctcgctttcagttcgcggtcatagtcctgtgttttttgccttcagtttcttgatgtagttattgcctaaaatttctatatcttgttcatcgtactggagatgctacttcatgtggagctggtatgtaggatgattatcacgagtacttcaagcgctcattttaggaagacatcgctgcgcaagtgcctcaaggagtggaatgcaattgatcgaaacatgatatatttgacatattcatgatggatttttgtatttgatgtgtcgctttttcatctatcaatgtaattcttggacataacattgcgcacaggtaccaaattcacacccttgttattgcgagttctgtaaatcatgatgttcacatgtgatggtttgattcagttcaatggttagcaagctatttgaacatgatactatagtagtgcatatttgctgtacaaatggccactgcccagctatttgcataagatattatgtttctcctgtgacattttctatgccacatacatttatatggcatttttgtgcaatttagtaccggtttttggttgatggtgtctggaggtgtgatgagacaaaaccctttgtacgtgatgaatatggactgatcagcaatgaagtgcttgtggaaaacaatgtactacccgttgtgcagccagagccttctatcagaggaactaatatggataaggatgcccctggagccatcatctcagaacccaagcatgcaaatagcagttatccgccatgtggtctctggaatattattacacaataccatatatgacgttgttcccctttctagcaagttttggacactcagcttcctgttaaacaagcatttaaaataatgcatgatgtgggtcttgctctggttcctttttgggatgaccgtcagggaaccataacaggcatgctcactgcatcagattttgttttaatcttgagaaagttgcagagaaacattcaagttattggcaacgaagagcccatttctgcttggaaagaagcaaagctacagttctatggtgggcctgatggtgctgtcatgcagagaacgccattaatccatgtacttctccatatatttgctgattctttcatttgattcaatgtgtaagcagttgcaagatcagcactttcataatataaatatattacttgtatgaaattctagata

SEQ ID NO: 7870 - DNA, 2543 bp, Zea Mays
gctgtcaatcgcctccccactgcggcagatccgcaatccgctcctccaccaccgcgctcctcacccacgccagggacaagactgtctacctccacgcccgcctcaccaactccgcggccaccgccaccgccacgcccctcccccatggtcgtcgagtccgagtggtggaaccagcgacgcatgcgcgtcgagggcgacgtgaaataggtgctccaccgcgggcacaacgggcacagtggaggtggaacgagcaccatcgagttctggttccaccgaatccaccgctcgcacaccggatccatcgctcccacatgcccgcacaccggatccaccgctccctcccccgcgatggcctggttccaccgagacaactgcggggctagggtttggattcgtgggtggagcccaaggctagatccagcagggggagggaggtagaggaggggagggaactgctggtggtcggcagtgggcgaaggcgcgacaatccaggatatggattcctgagtcatcccctatccgcagccgcctcgctccctctcccacaacaaatccattctcctcctcccactcgacgaggatcgcgaggatgctggaggacgtcgtcgctgtcacgcttgacgttagggcctccgatgcttgacgttagggcctctcgcttgaagaggaacacaaacagagctcatgttttttattttgctctgcattatctactgcttctctgtgggggcgttatttacagtatgtggcctgtttgttgtgttgttcctgcggaagggcgggcgggccgaaggtgtttaagaaaatgttgttgtcaacatcaacctcctggaagggccagaacgcaggcagcgcctcaactcgtcaccccatcagcacgatgctacttcatgtggagctggtatgtaggatgattatcacgagtacttcaagcgctcattttaggaagacatcgctgcgcaagtgcctcaaggagtggaatgtaccggtttttggttgatggtgtctggaggtgtgatgagacaaaaccctttgtacgtgatgaatatggactgatcagcaatgaagtgcttgtggaaaacaatgtactacccgttgtgcagccagagccttctatcagaggaactaatatggataagggtaccattttgaaaacaatgcccctggagccatcatctcagaacccaagcatgcaaatagcagttatccgccatgtggtctctggaatattattacacaataccatatatgacgttgttcccctttctagcaagggtcttgctctggttcctttttgggatgaccgtcagggaaccataacaggcatgctcactgcatcagattttgttttaatcttgagaaagttgcagagaaacattcaagttattggcaacgaagagcccatttctgcttggaaagaagcaaagctacagttctatggtgggcctgatggtgctgtcatgcagagaacgccattaatccattttgtacagacaggcaacattgatctcagggccaagaaagaagctcaactcggcatgcttcctgtttgaagcaagggcaacaaacttaccccaccagatctctgtcgccaaagcagggctagtgaataagctgtgtttcctcccggattgtcactgcttttatatttgtgcatttattttgagggaaacattttgcccaaaaaaggcctgcagtgcacgttttaaacaagtcatttgaaccaactcttatgctgaaaactgtatgtgatactgcagaaggcaacacactagcttgataggaaagttggttggcaagcataggtggactctggtgccttcatatatctatatatatattttaagttgacgatcttcgtgatgctgaaactgatgaagacctccgatgaaaaaagagacatgctgcacatgcacgagggtacttgcagatcgatgtcggctctatggacgaacactcgaccaagtcagatgaggagtatgagggcctagccatgcgcgacgtgatggctactggtccgacgatgagcagcaagctgtgagttaaagatgaactcacctgccctggagagtaacatccataggagtgaggcaaaatggctggtaccaccacaacatggacccgttcctgaagatgtccaaggaggtggtagccgacaccataatgtcttgtgtcattgtgtcaccggtcggcaacacactgcgctggtaccggcgggtgttgtgtttcttaggcgtctgcttctgtgctttgagttgtgctatagagtggttgtgccaactactgattttaaaagaaaaaggtgagctgagaatcattgttgaaaacaaacatgtaattgttcgttctcatcagttgtgccaactaccaagcatttcattgatcagaatttatcgttgctcatgagaaccaaaagtaagacacttctcaataacattggatgcaaatttctgctagcttatcttcactatcttttctcgtatcaatataacacacatttatacataatttttgtgttattatatgttttcgttgcaacgcac

SEQ ID NO: 7871 - DNA, 2553 bp, Zea Mays
gctgtcaatcgcctccccactgcggcagatccgcaatccgctcctccaccaccgcgctcctcacccacgccagggacaagactgtctacctccacgcccgcctcaccaactccgcggccaccgccaccgccacgcccctcccccatggtcgtcgagtccgagtggtggaaccagcgacgcatgcgcgtcgagggcgacgtgaaataggtgctccaccgcgggcacaacgggcacagtggaggtggaacgagcaccatcgagttctggttccaccgaatccaccgctcgcacaccggatccatcgctcccacatgcccgcacaccggatccaccgctccctcccccgcgatggcctggttccaccgagacaactgcggggctagggtttggattcgtgggtggagcccaaggctagatccagcagggggagggaggtagaggaggggagggaactgctggtggtcggcagtgggcgaaggcgcgacaatccaggatatggattcctgagcgtcacccacccgcccatccacgtcgcgcggtgtagtcatcccctatccgcagccgcctcgctccctctcccacaacaaatccattctcctcctcccactcgacgaggatcgcgaggatgctggaggacgtcgtcgctgtcacgcttgacgttagggcctccgatgcttgacgttagggcctctcgcttgaagaggaacacaaacagagctcatgttttttattttgctctgcattatctactgcttctctgtgggggcgttatttacagtatgtggcctgtttgttgtgttgttcctgcggaagggcgggcgggccgaaggtgtttaagaaaatgttgttgtcaacatcaacctcctggaagggccagaacgcaggcagcgcctcaactcgtcaccccatcagcacgatgctacttcatgtggagctggtatgtaggatgattatcacgagtacttcaagcgctcattttaggaagacatcgctgcgcaagtgcctcaaggagtggaatgtaccggtttttggttgatggtgtctggaggtgtgatgagacaaaaccctttgtacgtgatgaatatggactgatcagcaatgaagtgcttgtggaaaacaatgtactacccgttgtgcagccagagccttctatcagaggaactaatatggataaggatgcccctggagccatcatctcagaacccaagcatgcaaatagcagttatccgccatgtggtctctggaatattattacacaataccatatatgacgttgttcccctttctagcaagggtcttgctctggttcctttttgggatgaccgtcagggaaccataacaggcatgctcactgcatcagattttgttttaatcttgagaaagttgcagagaaacattcaagttattggcaacgaagagcccatttctgcttggaaagaagcaaagctacagttctatggtgggcctgatggtgctgtcatgcagagaacgccattaatccatacaggcaacattgatctcagggccaagaaagaagctcaactcggcatgcttcctgtttgaagcaagggcaacaaacttaccccaccagatctctgtcgccaaagcagggctagtgaataagctgtgtttcctcccggattgtcactgcttttatatttgtgcatttattttgagggaaacattttgcccaaaaaaggcctgcagtgcacgttttaaacaagtcatttgaaccaactcttatgctgaaaactgtatgtgatactgcagaaggcaacacactagcttgataggaaagttggttggcaagcataggtggactctggtgccttcatatatctatatatatattttaagttgacgatcttcgtgatgctgaaactgatgaagacctccgatgaaaaaagagacatgctgcacatgcacgagggtacttgcagatcgatgtcggctctatggacgaacactcgaccaagtcagatgaggagtatgagggcctagccatgcgcgacgtgatggctactggtccgacgatgagcagcaagctgtgagttaaagatgaactcacctgccctggagagtaacatccataggagtgaggcaaaatggctggtaccaccacaacatggacccgttcctgaagatgtccaaggaggtggtagccgacaccataatgtcttgtgtcattgtgtcaccggtcggcaacacactgcgctggtaccggcgggtgttgtgtttcttaggcgtctgcttctgtgctttgagttgtgctatagagtggttgtgccaactactgattttaaaagaaaaaggtgagctgagaatcattgttgaaaacaaacatgtaattgttcgttctcatcagttgtgccaactaccaagcatttcattgatcagaatttatcgttgctcatgagaaccaaaagtaagacacttctcaataacattggatgcaaatttctgctagcttatcttcactatcttttctcgtatcaatataacacacatttatacataatttttgtgttattatatgttttcgttgcaacgcac

SEQ ID NO: 7872 - DNA, 2579 bp, Zea Mays
gctgtcaatcgcctccccactgcggcagatccgcaatccgctcctccaccaccgcgctcctcacccacgccagggacaagactgtctacctccacgcccgcctcaccaactccgcggccaccgccaccgccacgcccctcccccatggtcgtcgagtccgagtggtggaaccagcgacgcatgcgcgtcgagggcgacgtgaaataggtgctccaccgcgggcacaacgggcacagtggaggtggaacgagcaccatcgagttctggttccaccgaatccaccgctcgcacaccggatccatcgctcccacatgcccgcacaccggatccaccgctccctcccccgcgatggcctggttccaccgagacaactgcggggctagggtttggattcgtgggtggagcccaaggctagatccagcagggggagggaggtagaggaggggagggaactgctggtggtcggcagtgggcgaaggcgcgacaatccaggatatggattcctgagcgtcacccacccgcccatccacgtcgcgcggtgtagtcatcccctatccgcagccgcctcgctccctctcccacaacaaatccattctcctcctcccactcgacgaggatcgcgaggatgctggaggacgtcgtcgctgtcacgcttgacgttagggcctccgatgcttgacgttagggcctctcgcttgaagaggaacacaaacagagctcatgttttttattttgctctgcattatctactgcttctctgtgggggcgttatttacagtatgtggcctgtttgttgtgttgttcctgcggaagggcgggcgggccgaaggtgtttaagaaaatgttgttgtcaacatcaacctcctggaagggccagaacgcaggcagcgcctcaactcgtcaccccatcagcacgatgctacttcatgtggagctggtatgtaggatgattatcacgagtacttcaagcgctcattttaggaagacatcgctgcgcaagtgcctcaaggagtggaatgtaccggtttttggttgatggtgtctggaggtgtgatgagacaaaaccctttgtacgtgatgaatatggactgatcagcaatgaagtgcttgtggaaaacaatgtactacccgttgtgcagccagagccttctatcagaggaactaatatggataagggtaccattttgaaaacaatgcccctggagccatcatctcagaacccaagcatgcaaatagcagttatccgccatgtggtctctggaatattattacacaataccatatatgacgttgttcccctttctagcaagggtcttgctctggttcctttttgggatgaccgtcagggaaccataacaggcatgctcactgcatcagattttgttttaatcttgagaaagttgcagagaaacattcaagttattggcaacgaagagcccatttctgcttggaaagaagcaaagctacagttctatggtgggcctgatggtgctgtcatgcagagaacgccattaatccattttgtacagacaggcaacattgatctcagggccaagaaagaagctcaactcggcatgcttcctgtttgaagcaagggcaacaaacttaccccaccagatctctgtcgccaaagcagggctagtgaataagctgtgtttcctcccggattgtcactgcttttatatttgtgcatttattttgagggaaacattttgcccaaaaaaggcctgcagtgcacgttttaaacaagtcatttgaaccaactcttatgctgaaaactgtatgtgatactgcagaaggcaacacactagcttgataggaaagttggttggcaagcataggtggactctggtgccttcatatatctatatatatattttaagttgacgatcttcgtgatgctgaaactgatgaagacctccgatgaaaaaagagacatgctgcacatgcacgagggtacttgcagatcgatgtcggctctatggacgaacactcgaccaagtcagatgaggagtatgagggcctagccatgcgcgacgtgatggctactggtccgacgatgagcagcaagctgtgagttaaagatgaactcacctgccctggagagtaacatccataggagtgaggcaaaatggctggtaccaccacaacatggacccgttcctgaagatgtccaaggaggtggtagccgacaccataatgtcttgtgtcattgtgtcaccggtcggcaacacactgcgctggtaccggcgggtgttgtgtttcttaggcgtctgcttctgtgctttgagttgtgctatagagtggttgtgccaactactgattttaaaagaaaaaggtgagctgagaatcattgttgaaaacaaacatgtaattgttcgttctcatcagttgtgccaactaccaagcatttcattgatcagaatttatcgttgctcatgagaaccaaaagtaagacacttctcaataacattggatgcaaatttctgctagcttatcttcactatcttttctcgtatcaatataacacacatttatacataatttttgtgttattatatgttttcgttgcaacgcac

SEQ ID NO: 7873 - DNA, 2609 bp, Zea Mays
gctgtcaatcgcctccccactgcggcagatccgcaatccgctcctccaccaccgcgctcctcacccacgccagggacaagactgtctacctccacgcccgcctcaccaactccgcggccaccgccaccgccacgcccctcccccatggtcgtcgagtccgagtggtggaaccagcgacgcatgcgcgtcgagggcgacgtgaaataggtgctccaccgcgggcacaacgggcacagtggaggtggaacgagcaccatcgagttctggttccaccgaatccaccgctcgcacaccggatccatcgctcccacatgcccgcacaccggatccaccgctccctcccccgcgatggcctggttccaccgagacaactgcggggctagggtttggattcgtgggtggagcccaaggctagatccagcagggggagggaggtagaggaggggagggaactgctggtggtcggcagtgggcgaaggcgcgacaatccaggatatggattcctgagcgtcacccacccgcccatccacgtcgcgcggtgtagtcatcccctatccgcagccgcctcgctccctctcccacaacaaatccattctcctcctcccactcgacgaggatcgcgaggatgctggaggacgtcgtcgctgtcacgcttgacgttagggcctccgatgcttgacgttagggcctctcgcttgaagaggaacacaaacagagctcatgttttttattttgctctgcattatctactgcttctctgtgggggcgttatttacagtatgtggcctgtttgttgtgttgttcctgcggaagggcgggcgggccgaaggtgtttaagaaaatgttgttgtcaacatcaacctcctggaagggccagaacgcaggcagcgcctcaactcgtcaccccatcagcacgatgctacttcatgtggagctggtatgtaggatgattatcacgagtacttcaagcgctcattttaggaagacatcgctgcgcaagtgcctcaaggagtggaatgtaccggtttttggttgatggtgtctggaggtgtgatgagacaaaaccctttgtacgtgatgaatatggactgatcagcaatgaagtgcttgtggaaaacaatgtactacccgttgtgcagccagagccttctatcagaggaactaatatggataaggatgcccctggagccatcatctcagaacccaagcatgcaaatagcagttatccgccatgtggtctctggaatattattacacaataccatatatgacgttgttcccctttctagcaaggcatgctcactgcatcagattttgttttaatcttgagaaagttgcagagaaacattcaagttattggcaacgaagagcccatttctgcttggaaagaagcaaagctacagttctatggtgggcctgatggtgctgtcatgcagagaacgccattaatccattttgtacagacaggcaacattgatctcagggccaagaaagaagctcaactcggcatgcttcctgtttgaagcaagggcaacaaacttaccccaccagatctctgtcgccaaagcagggctagtgaataagctgtgtttcctcccggattgtcactgcttttatatttgtgcatttattttgagggaaacattttgcccaaaaaaggcctgcagtgcacgttttaaacaagtcatttgaaccaactcttatgctgaaaactgtatgtgatactgcagaaggcaacacactagcttgataggaaagttggttggcaagcataggtagtgtaaccacttcaccaatgatatcagtactcttcttgcctttaactcgtgcatctttaaatttagcctcttcaagtctggttctcatggcaggtggactctggtgccttcatatatctatatatatattttaagttgacgatcttcgtgatgctgaaactgatgaagacctccgatgaaaaaagagacatgctgcacatgcacgagggtacttgcagatcgatgtcggctctatggacgaacactcgaccaagtcagatgaggagtatgagggcctagccatgcgcgacgtgatggctactggtccgacgatgagcagcaagctgtgagttaaagatgaactcacctgccctggagagtaacatccataggagtgaggcaaaatggctggtaccaccacaacatggacccgttcctgaagatgtccaaggaggtggtagccgacaccataatgtcttgtgtcattgtgtcaccggtcggcaacacactgcgctggtaccggcgggtgttgtgtttcttaggcgtctgcttctgtgctttgagttgtgctatagagtggttgtgccaactactgattttaaaagaaaaaggtgagctgagaatcattgttgaaaacaaacatgtaattgttcgttctcatcagttgtgccaactaccaagcatttcattgatcagaatttatcgttgctcatgagaaccaaaagtaagacacttctcaataacattggatgcaaatttctgctagcttatcttcactatcttttctcgtatcaatataacacacatttatacataatttttgtgttattatatgttttcgttgcaacgcac

SEQ ID NO: 7874 - DNA, 3236 bp, Zea Mays
gctgtcaatcgcctccccactgcggcagatccgcaatccgctcctccaccaccgcgctcctcacccacgccagggacaagactgtctacctccacgcccgcctcaccaactccgcggccaccgccaccgccacgcccctcccccatggtcgtcgagtccgagtggtggaaccagcgacgcatgcgcgtcgagggcgacgtgaaataggtgctccaccgcgggcacaacgggcacagtggaggtggaacgagcaccatcgagttctggttccaccgaatccaccgctcgcacaccggatccatcgctcccacatgcccgcacaccggatccaccgctccctcccccgcgatggcctggttccaccgagacaactgcggggctagggtttggattcgtgggtggagcccaaggctagatccagcagggggagggaggtagaggaggggagggaactgctggtggtcggcagtgggcgaaggcgcgacaatccaggatatggattcctgagcgtcacccacccgcccatccacgtcgcgcggtgtagtcatcccctatccgcagccgcctcgctccctctcccacaacaaatccattctcctcctcccactcgacgaggatcgcgaggatgctggaggacgtcgtcgctgtcacgcttgacgttagggcctccgatgcttgacgttagggcctctcgcttgaagaggaacacaaacagagctcatgttttttattttgctctgcattatctactgcttctctgtgggggcgttatttacagtatgtggcctgtttgttgtgttgttcctgcggaagggcgggcgggccgaaggtgtttaagaaaatgttgttgtcaacatcaacctcctggaagggccagaacgcaggcagcgcctcaactcgtcaccccatcagcacggtgagccccttatctggattgttatcatggtacgcggtgcgctgcaagcctgcaagtgacatcaaattggattggtagtcagcgggtgtcatagtgtcagttcgatggaatggttctgcagtgcatgtgcttctgtaatttccgcaagaagcagtcaacttctccctgatatggcactaggacattgtagtgattcccgcacgtttgtggaactcgacaacctaccagagcgccagatgtttcattgagaagagaactcctccagtctggctttccactggtctagtctctcctttaaaccaaatttgataccactcattgaagtcaatagctgggatgtagacatgtgaaaccacacctgtggaactttcagcgtgtgatgactgggtcactggtggaataccgtgttttttgagctgctcgctttcagttcgcggtcatagtcctgtgttttttgccttcagtttcttgatgtagttattgcctaaaatttctatatcttgttcatcgtactggagatgctacttcatgtggagctggtatgtaggatgattatcacgagtacttcaagcgctcattttaggaagacatcgctgcgcaagtgcctcaaggagtggaatgtaccggtttttggttgatggtgtctggaggtgtgatgagacaaaaccctttgtacgtgatgaatatggactgatcagcaatgaagtgcttgtggaaaacaatgtactacccgttgtgcagccagagccttctatcagaggaactaatatggataaggatgcccctggagccatcatctcagaacccaagcatgcaaatagcagttatccgccatgtggtctctggaatattattacacaataccatatatgacgttgttcccctttctagcaagttaacagttttggacactcagcttcctgttaaacaagcatttaaaataatgcatgatgtgggtcttgctctggttcctttttgggatgaccgtcagggaaccataacaggcatgctcactgcatcagattttgttttaatcttgagaaagttgcagagaaacattcaagttattggcaacgaagagcccatttctgcttggaaagaagcaaagctacagttctatggtgggcctgatggtgctgtcatgcagagaacgccattaatccattttgtacagacaggcaacattgatctcagggccaagaaagaagctcaactcggcatgcttcctgtttgaagcaagggcaacaaacttaccccaccagatctctgtcgccaaagcagggctagtgaataagctgtgtttcctcccggattgtcactgcttttatatttgtgcatttattttgagggaaacattttgcccaaaaaaggcctgcagtgcacgttttaaacaagtcatttgaaccaactcttatgctgaaaactgtatgtgatactgcagaaggcaacacactagcttgataggaaagttggttggcaagcataggtagtgtaaccacttcaccaatgatatcagtactcttcttgcctttaactcgtgcatctttaaatttagcctcttcaagtctggttctcatggcaggtggactctggtgccttcatatatctatatatatattttaagttgacgatcttcgtgatgctgaaactgatgaagacctccgatgaaaaaagagacatgctgcacatgcacgagggtacttgcagatcgatgtcggctctatggacgaacactcgaccaagtcagatgaggagtatgagggcctagccatgcgcgacgtgatggctactggtccgacgatgagcagcaagctgtgagttaaagatgaactcacctgccctggagagtaacatccataggagtgaggcaaaatggctggtaccaccacaacatggacccgttcctgaagatgtccaaggaggtggtagccgacaccataatgtcttgtgtcattgtgtcaccggtcggcaacacactgcgctggtaccggcgggtgttgtgtttcttaggcgtctgcttctgtgctttgagttgtgctatagagtggttgtgccaactactgattttaaaagaaaaaggtgagctgagaatcattgttgaaaacaaacatgtaattgttcgttctcatcagttgtgccaactaccaagcatttcattgatcagaatttatcgttgctcatgagaaccaaaagtaagacacttctcaataacattggatgcaaatttctgctagcttatcttcactatcttttctcgtatcaatataacacacatttatacataatttttgtgttattatatgttttcgttgcaacgcac

SEQ ID NO: 7875 - DNA, 3438 bp, Zea Mays
gctgtcaatcgcctccccactgcggcagatccgcaatccgctcctccaccaccgcgctcctcacccacgccagggacaagactgtctacctccacgcccgcctcaccaactccgcggccaccgccaccgccacgcccctcccccatggtcgtcgagtccgagtggtggaaccagcgacgcatgcgcgtcgagggcgacgtgaaataggtgctccaccgcgggcacaacgggcacagtggaggtggaacgagcaccatcgagttctggttccaccgaatccaccgctcgcacaccggatccatcgctcccacatgcccgcacaccggatccaccgctccctcccccgcgatggcctggttccaccgagacaactgcggggctagggtttggattcgtgggtggagcccaaggctagatccagcagggggagggaggtagaggaggggagggaactgctggtggtcggcagtgggcgaaggcgcgacaatccaggatatggattcctgagcgtcacccacccgcccatccacgtcgcgcggtgtagtcatcccctatccgcagccgcctcgctccctctcccacaacaaatccattctcctcctcccactcgacgaggatcgcgaggatgctggaggacgtcgtcgctgtcacgcttgacgttagggcctccgatgcttgacgttagggcctctcgcttgaagaggaacacaaacagagctcatgttttttattttgctctgcattatctactgcttctctgtgggggcgttatttacagtatgtggcctgtttgttgtgttgttcctgcggaagggcgggcgggccgaaggtgtttaagaaaatgttgttgtcaacatcaacctcctggaagggccagaacgcaggcagcgcctcaactcgtcaccccatcagcacggatgattatcacgagtacttcaagcgctcattttaggaagacatcgctgcgcaagtgcctcaaggagtggaatggtgagcccctgtccatctactgaacagagaaaataccaggagcaaatgactgcatttttagttaatccttttattcctaaattaattgtgtttgttaatgcttttattcctaaaataagtaaccgagctcgggattcttcgcaatttgatttgcgagatcacccccataaaggcatcatgaatctttatgcctgtaaagacatcccactgtctctttcgttttcgataagatgttttggccgttacataatgcctgtaaggtagaatgccattgcagttgttgcatcagaaagcagccatttaacgccattgtaaagtgagtgatgattaaatacaaccacacttctgtctctcaggtttctgtacatggagtttttattgcacctcttcttccccagcaattagtacttgcagttagactaaatgaatcttgaatgccccttaactgttggctttacatggaactacttttgcatataccagacaactattttgaacttcaatatgtttttcaattccagcaattgatcgaaacatgatatatttgacatattcatgatggatttttgtatttgatgtgtcgctttttcatctatcaatgtaattcttggacataacattgcgcacaggtaccaaattcacacccttgttattgcgagttctgtaaatcatgatgttcacatgtgatggtttgattcagttcaatggttagcaagctatttgaacatgatactatagtagtgcatatttgctgtacaaatggccactgcccagctatttgcataagatattatgtttctcctgtgacattttctatgccacatacatttatatggcatttttgtgcaatttagtaccggtttttggttgatggtgtctggaggtgtgatgagacaaaaccctttgtacgtgatgaatatggactgatcagcaatgaagtgcttgtggaaaacaatgtactacccgttgtgcagccagagccttctatcagaggaactaatatggataaggatgcccctggagccatcatctcagaacccaagcatgcaaatagcagttatccgccatgtggtctctggaatattattacacaataccatatatgacgttgttcccctttctagcaagttaacagttttggacactcagcttcctgttaaacaagcatttaaaataatgcatgatgtgggtcttgctctggttcctttttgggatgaccgtcagggaaccataacaggcatgctcactgcatcagattttgttttaatcttgagaaagttgcagagaaacattcaagttattggcaacgaagagcccatttctgcttggaaagaagcaaagctacagttctatggtgggcctgatggtgctgtcatgcagagaacgccattaatccatacaggcaacattgatctcagggccaagaaagaagctcaactcggcatgcttcctgtttgaagcaagggcaacaaacttaccccaccagatctctgtcgccaaagcagggctagtgaataagctgtgtttcctcccggattgtcactgcttttatatttgtgcatttattttgagggaaacattttgcccaaaaaaggcctgcagtgcacgttttaaacaagtcatttgaaccaactcttatgctgaaaactgtatgtgatactgcagaaggcaacacactagcttgataggaaagttggttggcaagcataggtggactctggtgccttcatatatctatatatatattttaagttgacgatcttcgtgatgctgaaactgatgaagacctccgatgaaaaaagagacatgctgcacatgcacgagggtacttgcagatcgatgtcggctctatggacgaacactcgaccaagtcagatgaggagtatgagggcctagccatgcgcgacgtgatggctactggtccgacgatgagcagcaagctgtgagttaaagatgaactcacctgccctggagagtaacatccataggagtgaggcaaaatggctggtaccaccacaacatggacccgttcctgaagatgtccaaggaggtggtagccgacaccataatgtcttgtgtcattgtgtcaccggtcggcaacacactgcgctggtaccggcgggtgttgtgtttcttaggcgtctgcttctgtgctttgagttgtgctatagagtggttgtgccaactactgattttaaaagaaaaaggtgagctgagaatcattgttgaaaacaaacatgtaattgttcgttctcatcagttgtgccaactaccaagcatttcattgatcagaatttatcgttgctcatgagaaccaaaagtaagacacttctcaataacattggatgcaaatttctgctagcttatcttcactatcttttctcgtatcaatataacacacatttatacataatttttgtgttattatatgttttcgttgcaacgcac

SEQ ID NO: 7876 - DNA, 1957 bp, Zea Mays
atgctacactagaaccaaaagtccatacggcccggggcccgggcgtccccaaaaacctcacccctctcttatccgccccaacggccgcccgccggccaccacctcaccggcgagatgctgacctgcggccgctttatctcctcctccgctgctaccagcaccgcatcctttttcccgtttcggactctcactcgctccctcgttcgccgccccgctccccacctcctctcctctgcctccgccgccgccgccaccgccgtggaactcgacaccaatggagacggtagtgcgggaggtggtgccggtgtggtgaggccgcagtggaaggccgcgattgatttcaaatggatccgagacaaccgggatgccgtcgccgacaacatccggacccggaactctaccgccaatctggacctcgtcttcgagctctacgatcagtacctcacactgcagaaggaggttgaaaggctccgagctgaaagaaatgcggttgccaacaagatgaaagggaaactagacccatctgttcgccaagcccttgttgaagaaggtaagaacctgaaagagggacttatagcactcgaggaggatcttgttcagctgacagataagcttcaacttgaagctcaaagtattcctaacactacccatccagatgttcctgttgggggtgaggaaagctctgtcctcaggaaagaggtaggcagtcagaggagcttcaattttgcaatcaaagatcatcttcagctggggaaggaacttgatttgtttgactttgatgcagcagccgaggtcagtggttcgaagttctactacttaaagaatgaagctgttttgttggagatggccctagtaaactgggctatttcagaggtctccaagaagggtttcacaccactcataactccagagatcgtaagatcatctgttgttgagaaatgtggctttcagccaagggccaaaaacactcaggtatactcaattgaggacagtgatcagtgtctcataggcacagcggaaattcctgttggaggcatccacatggactcaatacttgccgaatccgctttgcctttaaaatatgtagcatattcacactgttttcgcacagaagcaggtgcagcaggtgctgccactaggggcctctatcgggtacatcaatttagcaaggttgagatgttcatattctgtcggccagaggagagtggaaaatggcatgaagaacttattacaattgaagaggatctttatgcatcacttggacttcatttcaaaactctggacatggcaactggggatctgggtgcaccagcctaccggaaatttgatatcgaggcgtggatgcccggcctagagcgttatgatctccagtgcatcaaattgtaccgactaccaaagtaggcgactaggcatccgttaccgcccatcaccctcggagcctccatcaacgagcaccaagaaagggaagggagctgcctcaggccctacgcagttcgtccacacgctcaacgctacagcagtggcggtgcctcgtctgatagtttgcattctagagaattttcagcagggcgatgggtcgattgtggttccagagccactaagaccctatatgggtggactagagttgctctccccaaaattcaagtgaccctctacggtcacccgctgttgtgcttgtgtggacttagaactgtctggctgaagtacaagttaaaggaaggtcatttctcactacaaatatacactactgagtttcgtgattggggcttctgtttcataagcagtcgactactctgatctaatctgcatagcattatactggtcggttactctgatctgcatagcactacaaagcttatgtgcatgcattaggccctctatggttcccaagaatcgagtgacatttaaaagtaatctaatgctccttacattctaatgccatgtttgtttcctccct

SEQ ID NO: 7877 - DNA, 2036 bp, Zea Mays
ttgttctctggaaagtaaccgtggagggcactgtcagtcacggtaacgactcgtcgtgaccgaagcaaagacaatgacatgatcgcgacggcgatcgtggtggggatcacgctgcacgcggggaaccacctggcgtgcgacttcccgcgggtgatcgcggcgagcccggaggagtacgcgctcgtcgcgggcgcgttcggcgcggacaagccgacgtacgcggggctcctgtcgggcacggagggcgtgacgggcgtggccatggtggtgctgatgaccgtctccttcacgctggccacgcacccgttccgcaagggggagcccaagggcgcgggcgcggccgccggcacgtcgcggctcccggcgccactgaaccggctcaccggcttcaacgccttctggtactcgcaccacctcctcggcatcgtgtacgcgctcctgctcgcgcacggctacttcctcttcctcgtccggaggtggtacgagaagacgacatggatgtacatttcggtcccgctgctgctctacgtcggtgaaaggatgcttagagccttgaggtcaaatgcttataccgtgaaaattctcaaggtgtgtcttctacctggaaatgtgttgaccataacgatgtcaaagccctatggatttcgttacagaagtggacagtacatatttcttcaatgtccaataatttctccatttgaatggcatcctttctccatcacttcagcacctggagatgactacctcagtgtccacatccggacaaacggtgactggacacaggagctcaagcgcatatttgtggagaactacttctcgccgcatctcaacagaagagcttcgtttagcgagctagcttgccaaaattactcgtagatggtccctatggtgcccctgcgcaggattttagaaactacgacgttctacttctcgtcggcctcggaatcggggcaacaccgttcataagcattctacgggatctgcttaataacattaagatagctgacgagctgatggacttggcaatggagaccagcaggtctgaagacagcgccaacagctttagcgtctcaacggcgagtagcaaccggaagagagcatacagaacaagccgtgcacatttctactgggtcacccgagaagccggatcctttgaatggttcaaaggggtgatgaatgaggttgcagaaatggacaagaagggtatcatagagctgcacaattacctcactagcgtttacgaggaacgcgacgcacggacaactctgctgtccatggtccaggctctgaaccacgccaagcacggcgtcgatatcgtatcggggaccagggtgaggacgcatttcgccagacccaactggaaggaagtcttcaccaggatcgcctccaagcatccgaattcaacagttggtgtgttctactgcggcgcaccgacgcttgccaaggagctgaaggctctggcgcacgagatgagccacaggacgggcactcgcttccatttccacaaggagtacttctgagtttcgacggatagaatgggcagtcgatgctcgttctaacgtgatctggtcttttctgatctgatctcgatagcgttaggtaccggtaaagaagacagaattttgcacagatgcaagacaaaccaagctgacctctcctcctgatctggaactgtacatagcataaaagaagcaccacagggttagcttagtatacgtagcacaattcaaataaatatattgacaaagaaaagagagacagagaaagggcaggatagaggctgttgttgttaactcgaagatattgatgataggcatggcggtatacgtgtatacattatagttaggtgctaggtggtagttatatatatactgtatatgatatgggtcgatgaatatacgaggagccacatgctgctgccattctcaaatgtggacgtgcattcttcaggcgtgttcgtgactgtttggctggtggttgcccatgtgaggggttgctaaaaatgatttcatgccgtagcctgaagccctgaaggc

SEQ ID NO: 7878 - DNA, 3879 bp, Zea Mays
ttcggcactcgttgataaagcggctagccgagcgccgtggcagaaccgcggaacgcaatagccaataggtagcggagcaccgcaccgcgaagcaaacgagaggggaaaaaaaagcacgaggaggccgcgcccgcgaaggaatcacttgcccgggcgtgggccgcccaccggccaccgcccagccgctgccgcagtgccgcccgcctgcctgcctgcctggtgcggtggtgcctgcccacgggaacgggatagctggctgacggacgcattgcggagcggactgggagactacgggtaagataataaaagggccaggcgtggcggggcgcaaccaccgctgtgcctcggagaggaggacagctctcgcgccgcggctgccgccatgtggacgccgtcgcgcgggagcaacgcccggcgcagcggccaccgccgcatcgcggactacctggcggacgaccagaccaccaccacagccaccgacgcctccgacaacgagtcctacactaccgcctatggggaggagttcttcgccgccgccgccgccgggagcggcggcgccggcggcatgctgccggcattcctggcggaccagggggacctggtggaggtcatgctggagctggacgaggagtccatggtggtgcgcagcgtcacgcccaccagcgcggcgctctacggcgccgcctccctcccggcgccgccgtccgcgggggtcctcggggtgtcgccgtcgccgcgccgcgcgccttcggagggcggcggccgcctgagccggtgctcgtcgacgtcgtcgcggatacggaagaagttcgcgtggctccggtcgccgtcgccctccccgtccccgtaccgccccacgcccgccgagcttcagcgggaggccgccatggcggcgcgcgagcggcggcgggagcaggcgcagctcaaccggtcccgcgccggcgccaggcgcgcgctcaagggcctccgcttcatcagccgcaccacgggctccgtcgaggccgccgagctctggcgccgcgtcgaggagcgcttcaacgacctcgcccgcgaagggctgctctcccgcgacgacttcggcgaatgcatcggaatggtggactccaaggagttcgcggtgggcatcttcgacgcgctggcgcggcggcggcggcagaacctggagcggatcaccaaggaggagctctacgacttctggctccagatctccgatcagagcttcgacgcgcggctccagatcttcttcgacatggtggacaccaacgtggacgggaggataacgagggaggaagtacaggagctgatcgtgctcagcgcgtcggccaacaagctggcaaagctcaaggagcaggcggaggagtacgcgtcgctcatcatggaggagctcgacccggagaagcttggctacattgagctgtggcagctcgaagcgctgctgctccagcgcgacacctacatgaactacagccgcccgctgagcacggccagcggggcccagtggagccagaacctcggcgtcggcggcgcgctgacgataacagggggaggaggagacggcggctgcggcgtggacggcgaccacccggggcctccgcgcgagcgtcgccggagctggggcgtgcggaaggcggcggcgcgggtgcgcgtggcggcggaggagaactggcgccgcgcctgggtgctggcgttgtggttcgcggccatggcggcgctgttcgtgtggaagttcgtccagtaccggcgcatggcggcgttccaggtgatggggtactgcctccccacggccaagggcgccgcggagacgctcaagctcaacatggcgctcgtgctgctccccgtctgccgcaacacgctcacgtggctccgctcctcctgggcccgcttcttcgtccccttcgacgacaacatcaccttccacaagatgatcgcgacggcgatcgtggtggggatcacgctgcacgcggggaaccacctggcgtgcgacttcccgcgggtgatcgcggcgagcccggaggagtacgcgctcgtcgcgggcgcgttcggcgcggacaagccgacgtacgcggggctcctgtcgggcacggagggcgtgacgggcgtggccatggtggtgctgatgaccgtctccttcacgctggccacgcacccgttccgcaagggggagcccaagggcgcgggcgcggccgccggcacgtcgcggctcccggcgccactgaaccggctcaccggcttcaacgccttctggtactcgcaccacctcctcggcatcgtgtacgcgctcctgctcgcgcacggctacttcctcttcctcgtccggaggtggtacgagaagacgacatggatgtacatttcggtcccgctgctgctctacgtcggtgaaaggatgcttagagccttgaggtcaaatgcttataccgtgaaaattctcaaggtgtgtcttctacctggaaatgtgttgaccataacgatgtcaaagccctatggatttcgttacagaagtggacagtacatatttcttcaatgtccaataatttctccatttgaatggcatcctttctccatcacttcagcacctggagatgactacctcagtgtccacatccggacaaacggtgactggacacaggagctcaagcgcatatttgtggagaactacttctcgccgcatctcaacagaagagcttcgtttagcgagctagcttgccaaaattactcgtagatggtccctatggtgcccctgcgcaggattttagaaactacgacgttctacttctcgtcggcctcggaatcggggcaacaccgttcataagcattctacgggatctgcttaataacattaagatagctgacgagctgatggacttggcaatggagaccagcaggtctgaagacagcgccaacagctttagcgtctcaacggcgagtagcaaccggaagagagcatacagaacaagccgtgcacatttctactgggtcacccgagaagccggatcctttgaatggttcaaaggggtgatgaatgaggttgcagaaatggacaagaagggtatcatagagctgcacaattacctcactagcgtttacgaggaacgcgacgcacggacaactctgctgtccatggtccaggctctgaaccacgccaagcacggcgtcgatatcgtatcggggaccagggtgaggacgcatttcgccagacccaactggaaggaagtcttcaccaggatcgcctccaagcatccgaattcaacagttggtgtgttctactgcggcgcaccgacgcttgccaaggagctgaaggctctggcgcacgagatgagccacaggacgggcactcgcttccatttccacaaggagtacttctgagtttcgacggatagaatgggcagtcgatgctcgttctaacgtgatctggtcttttctgatctgatctcgatagcgttaggtaccggtaaagaagacagaattttgcacagatgcaagacaaaccaagctgacctctcctcctgatctggaactgtacatagcataaaagaagcaccacagggttagcttagtatacgtagcacaattcaaataaatatattgacaaagaaaagagagacagagaaagggcaggatagaggctgttgttgttaactcgaagatattgatgataggcatggcggtatacgtgtatacattatagttaggtgctaggtggtagttatatatatactgtatatgatatgggtcgatgaatatacgaggagccacatgctgctgccattctcaaatgtggacgtgcattcttcaggcgtgttcgtgactgtttggctggtggttgcccatgtgaggggttgctaaaaatgatttcatgccgtagcctgaagccctgaaggc

SEQ ID NO: 7879 - DNA, 1873 bp, Zea Mays
gacaaccttctcatccccaaccccgtcagcccgtgcggccgtgccctctgcctcctctgccactcctcgcccaaagcgccagaggcgcagcccgagcccacaggttgcctcctctccctctcctcgtggcctcgtccttctcgttcaagacgaaaccgtacgcgagcgagctggtgagggaggaagagcagggaggtgggatcaggccggctccatggacgccacgctcctcctcctccccgccaactgcacggccgccgccagcgggcggatgcggcctcgactgcctgcaggcccacatgtggcttcccctggtccctccgcgcggccaaggacctccatccgggcctcagccgtgtccgcagccctcgccgttcgtggcctcccgcaacacgcttccgtggccgggcaaagcactggaagttatagggttggtgatgttatgaccaaaagggaagagctccatgttgtgaaaccaacaacttcagttgatgacgcccttgagatgctggtgaagcataggatctctggctttcctgttattgatgatgactggaatttggttggcgttgtgtcagattatgatttattggcactggatacaatatcaggagctggaccggctgaagcagacatatttcctgaggtggatagcacttggaaggaatgctggtggggcgggttcttaatgtcactcgcctgctcgccgccgcgcaaaaaaatctttgtggctgttgcagttcagctgctaattgttgcggactgattatgctgagcttgtcaagcccgtaagaagtactaccactgctgctgtcgctgtcatgttcctctcccaaaacctatcgctactgcaactgcccctggcagccctcccagccctacatttcatgagatacagaagcttttgagcaaaaccaacgggaaggttattgctgatgttatgaccccagcgcctctcgtggtgcgtgaaacaactaaccttgaagatgctgcaaggttactccttgtgactaagtaccgcaggcttccagtggtcgatagctcaggcaaactggttgggatcattacaagagggaacgtcgtccaagccgccctcgaaatcaagaaaaaggttgaagggacactctgagatgactacctccaggtatcctttttgctgccacatggggggcttaggacttggacacatctctagttggcaactgatcaatcaaagcgactgtcagagtgagcgatgaaagtcgctatgtttatgaagatttgcccggagaagcacaggtgtatgtgtagtgtttgttatatatgctgatgcagtccttgctggccaaaacacaggttaccgattgttctggtttcctgggcttctttggacaccaaattcttaacctaggtcttgtttgggtgcacacgtatctagttcaacttacttgtattgaggttcattgaagtggaaaatcaactagttttcgcacttcaaaacacatgcactgtagtaaccgagcgcagccaagagattttgaaatttgacacccaatttgcaagcctttcaatatttgacaccactgtcacaatgacatgtaggaccattgtgagttattgacatgtggaccaggatgttaaatcttgaaaggcttgtgaattggatgtcaaatttcaaaatttcatgtcttacatgtgtattatggatagtcgtctggtaggatgcgtactcaaagatgcgccaaaagattatccataatacaaaatttcttgtctcgaggataatcttgaaagactattcaaaatttcttgccaagaggtgttaaatctcgaggcttgtgaattggatgtatagcgctaccccatatgtgatcaacatgaagagaccattgaa

SEQ ID NO: 7880 - DNA, 1877 bp, Zea Mays
gacaaccttctcatccccaaccccgtcagcccgtgcggccgtgccctctgcctcctctgccactcctcgcccaaagcgccagaggcgcagcccgagcccacaggttgcctcctctccctctcctcgtggcctcgtccttctcgttcaagacgaaaccgtacgcgagcgagctggtgagggaggaagagcagggaggtgggatcaggccggctccatggacgccacgctcctcctcctccccgccaactgcacggccgccgccagcgggcggatgcggcctcgactgcctgcaggcccacatgtggcttcccctggtccctccgcgcggccaaggacctccatccgggcctcagccgtgtccgcagccctcgccgttcgtggcctcccgcaacacgcttccgtggccgggcaaagcactggaagttatagggttggtgatgttatgaccaaaagggaagagctccatgttgtgaaaccaacaacttcagttgatgacgcccttgagatgctggtgaagcataggatctctggctttcctgttattgatgatgactggaatttggttggcgttgtgtcagattatgatttattggcactggatacaatatcaggagctggaccggctgaagcagacatatttcctgaggtggatagcacttggaaggaatgctggtggggcgggttcttaatgtcactcgcctgctcgccgccgcgcaaaaaaatctttgtggctgttgcagttcagctgctaattgttgcggactgattatgctgagcttgtcaagcccgtaagaagtactaccactgctgctgtcgctgtcatgttcctctcccaaaacctatcgctactgcaactgcccctggcagccctcccagccctgtagacatttcatgagatacagaagcttttgagcaaaaccaacgggaaggttattgctgatgttatgaccccagcgcctctcgtggtgcgtgaaacaactaaccttgaagatgctgcaaggttactccttgtgactaagtaccgcaggcttccagtggtcgatagctcaggcaaactggttgggatcattacaagagggaacgtcgtccaagccgccctcgaaatcaagaaaaaggttgaagggacactctgagatgactacctccaggtatcctttttgctgccacatggggggcttaggacttggacacatctctagttggcaactgatcaatcaaagcgactgtcagagtgagcgatgaaagtcgctatgtttatgaagatttgcccggagaagcacaggtgtatgtgtagtgtttgttatatatgctgatgcagtccttgctggccaaaacacaggttaccgattgttctggtttcctgggcttctttggacaccaaattcttaacctaggtcttgtttgggtgcacacgtatctagttcaacttacttgtattgaggttcattgaagtggaaaatcaactagttttcgcacttcaaaacacatgcactgtagtaaccgagcgcagccaagagattttgaaatttgacacccaatttgcaagcctttcaatatttgacaccactgtcacaatgacatgtaggaccattgtgagttattgacatgtggaccaggatgttaaatcttgaaaggcttgtgaattggatgtcaaatttcaaaatttcatgtcttacatgtgtattatggatagtcgtctggtaggatgcgtactcaaagatgcgccaaaagattatccataatacaaaatttcttgtctcgaggataatcttgaaagactattcaaaatttcttgccaagaggtgttaaatctcgaggcttgtgaattggatgtatagcgctaccccatatgtgatcaacatgaagagaccattgaa

SEQ ID NO: 7881 - DNA, 3155 bp, Zea Mays
ttttcgagccactccaggactcaacagcagaggagagtgttcactgccggtcgccgtcgctgatggcgatcccccgtcgcctatcttgccttcccacggttgccgcggccaccaagtggtcggccgggaatctcgccatagacatcggcacaatcggcgcgagaccctcaacggcagccctggctgccgccgcgacggcggccgccgccgccggccgcgcctcggagtgccagtccctcctcctccgcatgtcgcgccgccgcggcgcctctcgacgcgagatcgtctcttccctcctcgcctcgtcccccactccgcagccgcaggtgttcgacctcctcatccgcacctacacccagtcgcggaagccccgggaggcctttgaggccttccgcctcctcctcgaccaccgcgtccccgtcccagcctctgcgtccaacgctctccttgccgtgctctcccgcgccgggtggcctcacctcgcccaggaggcctaccgcctcgtcctctcgtctgactcggagattccgtgctggagatgtggatgcagcgatcgcattggttgattccatggccaatagggggttgaagcctgggattgtgacatacaattcggttttgaaggggttgtgtaagcacagaaggtttgataaggcaaaggaggtgttcaggacaatggaccagtgcagtgttgcaccagatgttcggagtttcaatattttgatcggaggattttgtagggttggggaggttaaggaggcagtgaagttttacaaggagatgcaacatcgttatgttacaccagatgtggtcagctttagctgtttgattggattattctcgaggagaggggagatggaccatgcaggggcatacttgagggaaatgaaggggcttggattggtgcctgatggtgtgatttacacaatggtcataggtgggttttgtagggctggatcaatgtcagaggctctaagagttagggatgagatggttggctttggatgtctgccagatgtggtaacatacaataccctgttgaatgggctctgtaagcagcacaggttgcttgacgcggagaaacttttgaatgagatggaggagagaggggttacaccagatttatgcactttcacaactttgattcatgggtactgtaggcaaggtaactttgagaatgcattgcaattgtttgacacactgttgcgccagcgtttgaggccagatgtcgtgacatacaatagtttgattgatgggatgtgcagaaaaggtgatctggccaaagctaatgagctatgggatgatatgcatgctcgagaaatcttacccaatcacattacctacagtatcctaatagacagccactgtgagaagggacaagttgaggatgcattcggttttctggatgaaatggtcaagaagggaaatttgcctaatatcaggacctataattccatcatcaagggttattgccgatcaggtaatgtaaaaaaggggcagcagtttttgcaaaagatgaggcaagataacgtattcccagatctgattactttcaacaccctgatccatggttatataaaagaagaaaacatgcatggagctttcaatgtgtttaatataatggagaaggaaatggtacggccagatgctgtcacgtataatatgatcataaatgggttttctgaacaaggcaatatgcaagatgctggtcgtgttttcaagggaatgggtgacagtggaattgaaccggatagatatacatacatgtcattgataaatggtcatgttacagctggcaactcgaagcaggcgttccaacttcatgacgagatgatccatagagggtttgctcccgatgacaaattttgaggcttgtcagttctgacctattggacataagcaagagaaatgcatgtgttgtgtgtttgacagtgtctttgaaaatcacacctccagaaatttgtgatttcgaagcgtcgaagggacaggtccagaaaaaaaggggagattgttaaaattccattacttgggagtgaccgcacgaactatggtaatgttggcatgttgctccaactatgttctaaagattccatggcgtgatcctgaggtgaaactgtgcctttttgatcgggcactgctgaatttgaaaaaggaaaacaaattgctcttacaatttaaagcctggaggatattatgtgaggagtgagcggatcctaacttctgagcaaaaggcttatgatagcagatatggctaagcaaaactgctgcacaaaaaggaaacagaatttgactggacgtctgaatatcttcccttcagtctgagctccagaccagagtgcaaaaagaaacattgaaccaatggaaaaaatgaataaaagaacaatcagtaactacagtgcatgtctgaagattctcatgggcgtgggcatcttcctccaggattgttgggatcaaatgtgcagccagacgctccaggcatcgaggatgtcagggacaccgagcttcctcgttgtggctgtgatttctctctcaggacacggaatgcagcgatggtagtggcttgtgccgccagggccaggcagattatgagaaccagaggtagaacttggtttctttggaacatcgtggtatcttgtgaacttcagtatcgagtgagatgcgaagctaggatttgaggctattatatattaagtttatggtctgcgtgttggtttccttggcgatcacggtttttacgcgttctcccatgtggacgagtattcacaaggttgaccgcatgtatacagagtcgctcaactcgtcgtgaacaagttcacagaaggatctctattgcacaagcacaatgtatttcagaagtagaaataagaccattggttactgtgtcgcaatgtcttccttaggaaaaaataatccacagcaataccacaaaacttctgcgtcagttctgtcatctttcattggagcatccctgatccgtgcctcgcaaggttctacaaatgtcaacctcatttcgttgcaggttcacaactataattttatagttttacctgaccgaccaggctcacgtgagactgggtgtgcggacacagtaaaccaatcaggcgcaatataaatctaaattatttaaaaatatttctaatttaaataacaaataa

SEQ ID NO: 7882 - DNA, 1791 bp, Zea Mays
gcgagcccacgtacttttacggaaacgcccacaccgccggctcgtcttctcccgaacccgaacccaccctccccgattcaaaccgtcgccgccgtcgccgagagagtcgtgactccccccagcggcggcctgcgaccacccgttacccagccgtcccttctccgcagacagcatttgcgcccaccccgtcccgtcccgtcccctctccctcgcggaggcccgagagctttgagctgcctcggttaagtcgtcgagtggtccacagggccgccgccgcggcggcggttacaaagcggggagggaattccggcgcgggatgccgcgatcccgctgcgatgcgcggatcagaatatgggtgtgacccaaccgggaagtagtggacactgctggtggaggactagggcctggagtgggagggagctgcggccgcgacgatgtacgtcgcgcgggagtctaccaagctgtggaggagggtgtgcgcggagacgacggcggagctgcagctcctgctccagaagtggcaactgctacttgcaggtacatccatggattagctgctcgaggagtgcattacttgcatcagcccggaccactgctccaggacttgggatttatggcccttccagagcttggccaagagaaaggttatcttagtgaaagcgttttcactttcatcttcatttcctttctgttgtggagttttcacccttttatttatcatagcaaacgtttctacactgttctactatggcgaagggtgctggcatttctagtggcttcgcagtttttaaggattatgacattctattccactcaacttcctggtcccaattatcactgccgtgagggctcaaaactggccactctcccaccaccaaataatgcacttgaagtgctcctgattaactttcctcgtggagtgctttttggttgtggtgatctgatattttcatctcacatgatcttcactctggtttttgtgcgcacataccataaatatggctcaaacaggttgattaagctcctttcttggtttatggctgtaattcagagtcttcttataattgcttctcgcaagcactacactgtcgatgttgttgttgcttggtacacggttaatttggttgtattttttgttgataacaagctgccagaaatggcagaccgtacaaatggattgtctctgcttccagtaagcacaaaggataaagacggcaggatgaaggaagaactccataaacttgagaaggacgggaggatgatggatgagttccataaattgttaaatggaaactctatcgatgctacagattggcgacaacgagtgcagatgaatggaaagcacggagaagacacgagccacactgtcgctgatgccacctctgctgggacatgaccagcagcatttctctgtcaatatcgtcttcaatatccacagatggaatctgcgagcaaaaagaaaattgtgtggtgtgctgcctctatcattgtgtgatgaaaggcttctcaggtacccgcgaggttgcgacattcataacagagcgttttgttgtgctttccatggcacgatgacagtctgttgaagtagtaacggaatcaggaccttttcggcttttctatgaggccgcagctacagttttgcatccttcagacgtttcagtgtcgatgatgttagagagggagattgatgtttgatgtaaatattgattagattcagctgtggcaatgggtaatgaacgactaacttatgctgattggtaatttaacgtgagcagctgttatgaccgcttt

SEQ ID NO: 7883 - DNA, 2223 bp, Zea Mays
ttcttccctctctaattatctagaccactcagcaaacattcaatcaagcttgtggagacggaaactcacgacacacatcacaatgagccgagccgcaggacggcgccgccgatcggccggcgaccagattggcatggaaatggacatccgttggtggcgccggccgggagggcctttcccgtcaaaacggcaccaaaagtgctgtgccaccagcccaccactgacaaaccggacccacgacgtgctgatacccatccatccaccaacaactccccgctccggtgtccggtcgccgtcgcgactcacgcaacctcctcggctcgctagccgctacgctactatctacgtcgccacgacatctcccataagatggtagccgcagccgcagccgcagctgcagccacagccacagccacagccacagccacagccgccgcgctcctcgcccccggtctaaagctctgcgcgggccgcgcgcgcgtctcctctccctccggcctcccaccccgccgcgtcactgccatggcctccgcccccaactcctccttccgcccagaggaggcgcgctaccctcccgccctcgagctcccgatcccgcggctctccaagttcaaggtggcgctgtgccagctctcggtgacggcggacaagagtcgcaacatcgcgcacgcgcgagcggccatcgagaaggcagcctccgacggcgccaagctcgtggttctccccgagatatggaatggcccttactcaaatgacagctttccagagtacgccgaggacattgaagctggcggagatgcagccccttcattttcaatgctgtcagaggttgctcgcagtttacaaatcactcttgttggtgggtccatagctgaacgttctggcaacaacttatacaatacatgctgtgtctttggttcagatggccagctgaagggtaaacatagaaagatccatcttttcgacattgacattccaggaaagatcactttcaaggaatcaaagactcttactgctgggcagagccctactgttgtagacacagatgttgggcgcattggtattggtatatgctatgacatccgtttccaggaactagcaatgttatatgctgcaagaggtgctcatttgttgtgctatcctggtgcattcaacatgactactggaccactgcattgggagttgctgcaaagggcgaggtaataaatgagtttgaacctcaagttatgatgattatgcaagggaaatatagcgagttgaaatggtcacactttatttttgttaattagcatatctaaaagtagttcaaaacaagtcagaaccttgatcagaactcataattcttggaggtaatttcatatctgaaatgtttcactgctactttgccctgtgctgatgacatcatttatccaatgccagggctgcagacaatcagctgtttgttgcaacatgcgctccagctcgagataccagtgcaggctatgttgcttggggacactccactcttgttggacctttcggagaggtgattgctacaacggagcatgaggaggcgaccataatagcagatattgactactcactgattgagcagaggagcggcgtggcgatctctatcagctggtagatgtccagagactgggttctcagtagcgagcctggatgcggctgtgtgcccgctctgcaggcttgctcgtactacttcggctctgcaggcttgctcgtactacttcgttcatgagatgcatgtctatgggttctagagatcgaccaacatgatgagtgaaggcggagaggacgcaataaggcgactgtagttgtaccttcagtggtgtctccagttgccaaataaattggttactttaacgtctgaagaaaacctccctccatgggacgaagataaaacggaggactgcgacttccctttgggcccgactagtttgaagtttgtactagcttcgggggtgtctgggagtcaagttttttttcacagttttggtagaatactgtagtattctcgaatactacggtattatatacaaaatgttgtttggcaatctagataaaatctatgtttttaaaactgaagtattgcaaataccttagggcatgtttggaaatgcggttttgaaatactgtagttttgagataccatagtttataattgtacatgacataaatactacggtattgctttaccacagtaaaactacagtattgctc

SEQ ID NO: 7884 - DNA, 1592 bp, Zea Mays
ctcgtcgttcaccatcagcggaggcggccccggaacgaggtgctgactggtgagccgacgagcaagacgacaagagccacccccacccaccacatctcagaccacaaacgccatcatgcaccgactctgatccaatttcacacgcatactagcgccgccggtagcagcaccggcagccgcgttcctctccgccatggatcccgcgaacagcagcgcgggcgccgagctcgacgacgcgtccgagtggcgcacccgggcgctgggcggcacggagtacagctggctccgcgccgtgccgggcggcaccggcaccacgctgctcgcgctccgcctatcccgcggcgacgcggccgaggcggcgctgcgctccctgcgggacgcgcaccccgtcctccgcgcccgcctccggacctcttctccctccggcccgacgctggcgttccccgatccggcaccgccgttcccgctggcgccgctcccggccccgggctccgcgcccgacttccacgcgctcctcgagcacgagctcaaccgcaacccgtgggccgacgaccccgcgtcctccgacgacgccccggtcctcttcgcgacgctctacgagctcccagccgccacgggcgacgcggcgctgttcgtccggatccacacggtcgcgtgcgaccgctcggcggcgagtgcgctggccagggagctcgtcgcgctgctggccggcgccggcggcgaggagcccgacccggaggatgcggcggcggaagcggggctggaggcgaggatcccccagagggacacctggaagccgttctgggcgcgcgggttggatatggtgggctactccatcaacggcctgcggacgtccacgctgccgttcgtggagaccggcacggagaggtccacgcagatgctgcggctcgggctcggcctcgacgagacgacgaggctgctcgacgcgtgcaaggagaacggggtgaggctgtgctccgccgtggccgccgcgacgatgctcgccgcgcggcagtcgaagccgctggagagcggccagcaggagacgtactctgtcgtgacccttatcaattgccgcaagtttcttgagccagtcttggaggaccgcaacgttgggttcttctactccgccatcaccaacacgcacacgatccacggcggggaagggctgtgggagctggccaagagatgccacgactcgtacaccagcgccaagagcaacaagaaacacctcaccgacatcaacgacctcaacttcctcatgtgccgggccatcgagaacccccagctgacgaccgccggcgcgctacggacggcgctcgtctccgtgttcgaggaccccgtggtcgccgacgtggccgaggtgcagagcaaggccggcgtggaggactgcgtctgctgcgccaccgtgcacggcatcggcccgtcgatcggcgtgttcgactcgatcaaggacggcaagctggactgggcgtgcgtctacccttctcctctgcactccaggaagcaggtccaggagatcttcgacaagctgctgattcacagagactgcagtcagttcaatttctgcatgttaggaagttagcaaagtt

SEQ ID NO: 7885 - DNA, 1874 bp, Zea Mays
cgccgagcactatatagcacgtgttcgcgtgcaccggcggcaaccacagcccaggctcgagactacaacgttacagcacaacacactgctgcacgtacatacgcagatagagaccagcagcaagctcgatcgagactcgagaggcatggggagtgtaccggaggagaaggccaagctgggcttcggcggcctggtgggcgacctgagggaggtgtacgagagcggcaggacgcagggcctggagtggcggcagtcgcagctcaggggcctcgtcaggctcctggaggagaaggaggaggagatcttcgacgtgctccacgaggacctggggaagcaccgcggcgaggccttcagagacgaggttggggttctgaagaagtccgtcgtcgacaagctgcaaaacctcaagaactgggcggctccggagaaggctcacacgccgctcgttgccttcccggcgaccgcgctggtggtgccagagccgctcggggtcgtgctcgtcttctcatgctggaacctcccaataggcctagctctggaaccgctctcgggagccctggcggccggcaacgccgtggtggtgaagccgtcggagctcgcgccggccacctcggcgttcctcgcggccaacatacccaagtacctggactccaaggccgtgaaggtggtggagggcgggccggaggtgggggagaagctcatggagcaccgatgggacaaggttctcttcactggcagcagccgcgttgggcgccttatcatggcccaggccgccaagcacctcaccccggtggcgctggagctcggctccaagtgcccctgcatcgtcgactggcttgacagcgacagggacagccaggtagctgtgaatcgcatcatcggagcgaaatggtccacctgttccggccaagcctgcatcgccatcgactacctgctggtggaggaggagtttgctccgattctgatcgagatgctcaagtcgacgctggagaggttcttcaccaagccagagtacatggcgcgcatcctgaacgagaagcagttccagaggctgagcggcttcctggccgaccgcagggtggcgtcttccgtggtccacggcggccacttcaaccccaagacgctgagcatggagcccacgcttctgctcaaccctccgctcgactccgacatcatgacggaggagatattcggcccgctgctcccgatcatcacggtgaagaagatcgaagacagcatcaagttcctcaggtccaagcccaagccgctggcgatctacgccttcaccaggaacgagaagctgaagcaacgcatcatagacgagacgtcgtcggggagcatcacgttcaacgacgccatcgtgcagacattttgttccagtatggcctggacagcatcccgttcggtggcgtggggcacagcgggttcggccagtaccacggcaagtactcgtttgacatgttcagccacaagaaggcggtgctcaagaggagcttcctcgtcgagttcatgttccgctacccgccgtgggacgagaccaagatcggaatgctcaggcgcgtctaccgcttcgactacgtctcgctcttcctcgcgctcatcggcctcaggagatgaagcagacggcggagagtgcgtgaacaatcgagccaacagaatttgcacccacacccaacacacagttgctagtggtcaattgtcgttcatactgatcgatgaatatgtaattgtcccttctgtacaccaaaacgtctgtagtgtcgtttactcgttttatacgtgtctgtctatttatcgcaccaaaagatatttaataataatggattattatctttctagtttgtgctcttcttgaacaatcgccacattccgac

SEQ ID NO: 7886 - DNA, 4289 bp, Zea Mays
cggggatgttccagcgcgtcgtcgtcgtccgattctgtctccctcaggtcgagattcgagagttcccgtgttcgtccatccgcgctgtgaggttctccgatggccgagaagtcacccagctccgcgccgcagggtggttctggtgggaatgaatcattcgataatcttgtaattcaagctccacagcttatgagggaggattacatacagaatgctgtgaagtttctttcacatccgaaagtgaagggttctccagtatttcacaggcgttccttcctggaaaagaaaggccttacaagtgaagaaattgatgaggccttttgtagagttcctgaccctaagccaaatggaacagatgctgtagctgctggtaggcaacaagcaaacaatcccagtcaatctgttgtgctgcaaccttatacagaagttcaaccacaagcagctactgcctctgccactgctggaccaattgttccacatacaaaggcacagttgagctgggtaaacacactccttggtgcaggtctttttcttggtttaggggctagtgctgccataaccctaaagaaattggtcatccctagtctgaaatcttggactcgtagagtcgttgctgaaggagatgaaaatgcaaagagtgaacatacttccaaactttgtgaagaaattagggaagccataaaagtttctgcatcagccttttctgatattgctaaaataaaccaagaagtgcttgcttcaaaagatgaagataggaaggtactcatgaagttaacagaagcattcgagtcacaagaaaatgtgtttaaatcattgagtgagaccttaaatcgtatcagggagaatcagctttcggattgcaatttcagaaattttgggctgctcaattcagccctcattacccttttgccaaagcttgagggtgcagcccttgtgaaggacttccgtccgatcagcctcatacatagcttcgccaagctggtaacaaagatgatggcaaataggctggctggacacttgggtgcaatggtttcacccaatcagacggcttttatcaaaaaaaggttcattcttgacaacttcatattggtgcagcgtacggccagatatctccatcaacaaagacaggctcgtatcctcttcaagttagacatttctaaggcttttgattcggtgtcatggccgtttctcattgaggttttgaggaaaatggggtttgggcagatttggtgtgatgttgtgtgtggactgttggcttcttcctccacaagaattttgctaaatggcgttcctggggagatcatttcacaccagaggggccttaggcaaggagacccactatcccctttgttgttcattttggttatggatgttctgaacttgctcattcaaaaggcttccgatgaagggttacttcagcagctatcttctgggactttacatcacaggctttctctctacgcggatgacgcggtggtttttcttaggccggtggcttcagacatcagcttggtcctggagatccttcggctttttggggaagcctcggggctcaagaccaatgtcctgaaaagtagtgtgttccccattcgttgtaccgaagatgatttgatgcgggtccaagcttctctcccctgccccatttctgattttccgtgtcaatatcttggactgcccctgtccttgggaaagctttcaaaggcccagttacaggcattggtggacaaggcagctagtgttctcccaggttggaaggccgacctgatgacaaaggcgggtcgtgctgtttatgttcagtttgttctcacggcaaaaatgatttatgctgcgatggctttggacctccctatttggaccatcaaagctattgacaagataagaagaggtttcctttggaaaggaagaaaacaagccaatggtggtcactgtttagtggcgtggggcaaggtcactaggcctaaagttctgggcggccttgggatcactgatctttggcttttgagcgtggcgcttcgagctaggtggccttggctccagagaaccgatcactctaagccttggtcggttctccctgttcaggcatgtggtgcggtggaagccttgatcaatgttgcagttgtgtctcaattgggtgatggacaggatatcctcttttggaaggatcggtggctgaatggtagaagaatcagtgaggtggcacctgaggttcttgagcatgtacctaagtgtgttgtttccaaaaggctggtaaaagatgctttaacaaatctgaattgggtggctgatataaggggtgcgctttcagttagggcgcttgcacaggttttggatctctgtgacttgctggagggcttagttcttcaacctgggattcctgataagcattcttggaagttcagcgcgtcgggggattactcctctagttctgcctaccaggttcttctccttggagctgttgaatttaggccggctgaacggatttggaagacctgggcaccaaggaaatgcaaattttttatgtggctggttgtgcatgatagatgttggacagctgacaggttggcaaaaaggggaatggatcatcccgtctgctgtccgctttgtgaccaggcggatgaaactattaatcacttattggtcgagtgcagctttgcgaagcagttttggttccttttccttcggtctggggacttccaggtgctctgtccctctacaggggatggctgctttgactcttggtgggagaagagtgccgaggtggtgggcaagcctttgtcgggtggtttcaactcgctggtcatattgggtgcgtggtcgatctggaaacacaggaataggtgtgtgtttgatggttgtagcccgaatgttgaggtcgccctttcggcagctagggaggagttgatgtgctggcgtttggctggcgctaaaactctctctttcttccatttagaggagctgtcttaggcgttaatggtggtgtgagtttgtaaaactgttgtttctgttttggggttccccccttttttcttcttaatataaaaatacgcagacctcctgcgtattcaagaaaaaaacaacacagcctattggaagagcatgttcagccttcatcatggaacggtcagcatcatacttaataattgacacatcatactgaactgtagagatagtttccttatattagaaacttagggcagtttgggatgtgaattttgatctagcggttattttcatctcgatcgcttgtagttttgaaccatctacatataaaatatttaaagctctaggtttagcattgaggtaataagtaacaactatttgcattagcatggctctcaccacattgctattatttttatttctctgtgtagggccaattgactatcaagggagagcttttcagcaaactaatatgtatgcaacaccaccaaacaacagttttgacacagggaggaactcattcatgccattagctgctgaatcttcttatggaccatttccaggatcctactctgagcgggtgcagaggcctggtggatacggattccagcaacagacaagcagcgaccgattgaatgttgttggcccacggagcagctaccaagggggttcttctaatcaccatgctggtagtaatgccatggatgacccggcagcggttgcagcagaattgcagcgccgctgggttcccccacagccaccaggcgtcatcatgccagaggctgcggccgccatccgacaggccaggtcggttccgaggcagctgccaagcggcgatgggcgcctgggcgctgatgtcccgagacagcctgagcctgccattgccatggcgacaacagagcacgtgaacgttgcccctgaagcacctggcggggagttgccaagcgatggtggtggtgccatgactgctgatgccagcaacggtggtgggagtggagagcagcaggagcaggaagcctcttgagtgaagctttttggacgccctttgatttggttctttgagaggatctagcttgcacctgtacctgtgtgtgtagcatatgcatatgcatctgcataggtttgtgacataatgtgcctcgtgttcgaaactgcagctgtattgtagatatataaactgatcaactttacacgtgtgttacctgtgtgttctgtcataagtgtatcagctatgaggacgtatttgcttcggcccatgctaaaatattcgcaaagtttgggccaagcatgggctgaactgagcattctaatcagcaatggcccaattttgagccatgtgctttcagata

SEQ ID NO: 7887 - DNA, 1799 bp, Zea Mays
gcagaatttgctgaaaatcttttcggtccagtttgaactgctgggaccatagtacctagtaggtaatctgcagcatgagtatgctggaagtgattctgtgctactggatggggctgaggtgaggcaggtactgatttcgctgctcagatatctgaagcagtgcatgtatttctcgaagaagccatacaacgtgtttttggagtatggtggttatggccataatgacgtgcttataagaaagcctaaggcgaggctcttgaagccagctttcacaattgttcgagacagaagtagccaatgctttctccttttcatcaggggggctatcagtgttaaggagcggttgacagcagcaacaggcacagaggttccattccatcacgttgtggtccaggaaggtcgtgtttccaacctagtgttgggctacgcccactgtggaatggttgtagcagctcgatggattgcaaggcaagccattcctggcctgagtaaagcaatcgagcaattcccagaatatgaggttaaggtcattggccattcaatgggagctgggattgcaacaatactaacatacatcctacgcgagaatgagaagctgtcatcatctacttgtattgcatttgggccagctgcttgcatgacatgggacttggctgagtcgggtaaagactttgttaccaccatagttaacagaaacgacctagtgccatctcttggcatagtttctgctgccaagcttcgtatagaggttatgtcatcgtcttgggcacatgaccttggcagacaaattcagcagactaggttcttaggttttgtgaaccgttctgtgagtttcataagatcccatgtgccctttgtctctgatccaagatctaaggttgtggatgtagacatgctgcaatcccagagtcccgaggctgggagtaagccttcagcagatactcatgctgtggtgaagaaacgccctgcactagtttgctggtcatatgtggctacacccaatcccaaacagagtatggaatcgtcaatacaaatgcagggcacggaagtccaaaccgacactgctgtcgaaactgagaaaaattctgaagcggcagctgctgagctagtctcaatccatcttggtgaactgaacattcaagaatcagacaaggacgatgacaagagaggggaaaagggttcagaaacagatgaagaagagaccatggagattctagagtccttggccgacgagaagcacatgccatcatcgtcaagctttgctcaagagccacagcagctgtaccccccagggaaaatactgcacatggttggattggcagcagcggaagtggcaaccacaagtcagcaaggagcccaggaggaggtcgtcgccctgtatgagacaccccggcatttgtacagtaagattcgcctggcgaggtccatgataggagaacattacatgcccaagtacatcaagacaatggagaagctgatacacaagcttgcagaggaccagctggactctttgtagcatcaacagtgtgtataggataattattgtacagatcatgaaaatgaaaatcattctttcagattgcttgtgcgtaatggtggtttggaattggtctgtttatctgctgtcatttcactttggtaggcaccccaccccaggaagagctcaaagagctgaccctggtgatggtctctgtaattttaacagaagcagttttcttacatgtgaatattattatctggtatcattaggtgaggactaacaatgtttatatgttgaacctcgtgacatagtgagggaa

SEQ ID NO: 7888 - DNA, 2303 bp, Zea Mays
ccctcctctctcgctttcgtctccacgcctagggtttctctgcctcgccggggaagcgatgcagccgctgcaccaaccgccgatgaacgggcaacacggcccgcctcctccgcagggatccggggttcccacggcttcgcagcagcaggcgccaccgccgtcgtactaccagcagcagcagcagcagcagcaggggccaccgcctcagtactaccagcagggtcccccacagccgtgggcgcagcagcaacagtacgctccaccgccgccgcagtacccgcctcagatgcagcagtacgctccaccaccgcagcagtacgcccctccgccgcagcagcagtacgccgctccgccgcagcagcagtacgccgctccgccgccgcagtacgcgcctccgccgccgcagtacgcgcctccgccgcagcagtacgcgcagccgccgcagtacgcgcagccaccgcagtatgggacaacgccgggaagcggtgaggtcaggaccctgtggattggagatcttcagtactggatggacgagaactatctccactacaacgccttcgcgcctgtggcccagcagattgcctctgtgaaaattatacggaacaagcagactgggcactcagaaggttatggttttattgagttttactctcaagccgctgcagaacatactctgatgaacttcaatgggcagatgatgccgaatattgagatggcttttaagctgaattgggcttctgctagcactggggataagcgtggagataatggttctgaccatgcaatatttgttggtgatttggcccctgatgttacggactccatgttggaagatgtgttcagagctaactatccttcagttagaggagctaaagttgttgttgataggatcactggacggcctaaaggatatgggttcgtgcattttggagatctgaatgagcaggcacgtgctatgaccgagatgaatggaatgatgttatctacaaggaaaatgaggattggggctgcagctagcaagaagaatacagatgctcagcagacatatgcaactaatgcaggatgccatgccatctgcatttagggcctggaaatgtcttcagatgtctcctgtaacctgtgactcggttaggtgcataccagagttctcaaggcaattgttcagagaatgatcccaacaatacaacagtctttgtgggtgggttagattccaatgtagacgaggagtatctaaggcaaatttttactccgtacggagaaatttcctatgtgaagattcctgtaggcaagcattgtggatttgttcaatttaccagcaggtcatgtgctgaggaagccatccaaatgctgaatgggagtcagattggtggacagaaagctcggctttcatggggccgtagtactcaaaacagacaggcttctcagcatgatgccaacagccagtataatgggaacaactattatcgataccaacagccgggtaatgaaggttatagctatggtgcacccaatgcacaagacccaagcattcaaaactactatggataccctggttatggtaactatgagcagcagtcaacacaggaacagcagcagcagcagcctccaccagcacaggagcagcctccaccggcaccacagtaacaatcatcgtggtgacgattgcttgggcacttctggaatgctatcagattagagggactacagtcagagcagtgccgtgccgaatgagacgtcctgaagatatggagggcatatagtcgcatgggtgttcttgggccggtgttaatctacgatgacactcctgatgtctcttttgtttgtcattgagatcttgacggctgaagtatgcaccgttgaaattgatgtattcgtcgtcgtcggattgtttatttgctcggaaccattttttgcactttacatctgggacgccaaccacgactcattccgcacctaccgttggcccaccagcccgtagtagatgtacgtaggggtggtggcaatggatcaagatctaaatggttcttcataaaatggttggactataaataaattttagttaaaaataaatagaaatatagcttgattttaatttgatcgtatccttaaattttatagtgtaaaatttagagcttattgtcagttatagctgtatctggttcggttcctttgaaactgtggcatggaatagtttctagcaagattttttgaaactgtgacatggaatggtttctagccagattgtttgtgtattttttgtaagccttgatcagttagaactattcctgagtggaattcaggac

SEQ ID NO: 7889 - DNA, 1965 bp, Zea Mays
acagtgccgcagtatcccaagtcccaacaaggtcaagtcgcgtggattcgccactagcgggtattgattaccttgccgccccttgaccaaaccaaataacacaagtccccattgcttgcaccctacagctcctcacacccaaggtatggaggaggcaccaacgagggagccgaagaggctgcgccaggacgccgcggttacttccgccgcggcggcggctgaggagcctcagtacgtgtacctgcctatcgccgacgccatgaaggttcccggcgtccgggtttgcctcttcgccgttgtctccgagatcggcatcaccgaccgcagccgtggcacggatttcactcttaggttgaggattgtggatcaatcatgcatggatggaatctctgtaacagtttttgctgacaaaactactctattgccttgtgtcaagtcaagtggagatgtgatcagtctccataacgtcatgataacgatgcatggggagttctttgtttcatttaacaaagaagtttcttcatttgcgctatttgaaagcaaagtagctgagtgcagcccatatcagacttctgtgaaatatcatggcagcaaacatgacaaagaacttttaacccagatgagaacgtggcttgcatataatcctctaggtctgaaagattttgaattgcagttaagaagtttaaaatctgattctacttttgatctagtatgcaaggttgttcatgtccatgaagataacgacaaattgatattttatgtttgggatggaactgatacccctgctgttgagtttcaggcaactttggatccaaaggcagttgaatcaccccctctatttgaagggccacctctacccagggaggttttgtgcacaatgccaattatcggaactgttttgaggattttttcagatatgcctatcaaggaagtatcccacatgcaaaatagggtttattgggccagattctgtaacattacttgcaaggaagagtttggcatttggaaaggcattttgctggcctctagtaaagttcggcttttatctcatgaagatggtagcgttgttgatcgtcgaaagatgtatgccattcgtaaggccaaccaagttctctgccagccgatggcaagctttccctctaatgttactgttctatcagatgtagaatatgaggaagaatggcactcaacgttaatgcagtctttaactcataaagaggtgacacacaaactcaaaaccttggcccgtgttgtgggagcgtatccatgtcaagctagtggtctccgtttgctgtcaactggtaacattcatctgcggttgactcttgaggatcctacagcgagaattcatgcgtccaattcttcggtggttttctgacagaagaagcgataacaaagaagatgaacaagctacttggtatcccagaaccagaggacagcgaggaaggtgcccccttgactaggaatccaccttggatatggtgctgcttgacatcattctatatggacaaaaacaatccctgggacagcagaaagtaccgaatctttgccacagagatgagggattgaggagggatgctgctcgaatatgcaggaacggccttgcaaatgaaccgaactgattctatgtagtatttctgtgtgctctcgttggcattttgcttggaggggcatcttgctgggatgcagcgagacacgctttagttgtagcctgcgtactgtcagtattattccctagatgcaatgttgttgcagtgctgctgctgaccttctgctccatccagaacactggtagcagtctgtatgcgcgcccacgctacagaactctagattatcttgtgaaatgttagtgcacacagcaccaacttttggcttggaagttggaacgtggcaagaaccccttttcttgttcggcgccttgcagttctctcggtttccacgaaatgggtatatgttccttgtgaa

SEQ ID NO: 7890 - DNA, 946 bp, Zea Mays
gttcgttcgtgtgcttcggctgaggttgtttggtgctgtgaatgacatcttctgcttgttccaagggcatattgagaacattgccaacctgaagcagcattatggcctgagcaagactgcaaatgaggtgactatcctcatagaggcctacaggaccctgagggacaggggccctgtcccagccagccaggttgtgagagaccttagtgggaagttcgcgttcatcctgtatgacaccctgtcgaagtctacctttgttgctgctgacgctgatggtagcatccctttcttctggggcgttgactacgaaaaccaccttgtgttctctgacgatgttgggatcctcaagacaggctgcggcaactcgtacgctccatttcctaaaggttgcttctacaccacctccggtgggctgcagagcttcgagcacccgttgcacgaggtcaaggcggtgccacgcgtggacagccaaggccagatgtgcggctccatcttcaaggtcgacagcgagagcaagaagaagcaggacgctagcatcccccgcgtcggcagtgctgccgactggtccaaccagttctgaccatcttcttgccatccattgtcccggctagtacgaggtgcagagctgtgtatctgatgaatccatgagacgatttctgctacgtttcttgcacgcttgtcgaacactgtgagactcacatcgcgctcatctacgctacgtgtaactgatactaatgatacggagtgttccaggtggtggtagatgtactgcagaatctatctcccatgtttcaataaacctgaataaggtgctcggtttggatctatgcatttatgattctagtacttctgaatcgaattttatcgcatcctttcctttttcttcttgttctcctgttctgcatttcagttctgtctggcggacggttacccgttaccgtggtag

SEQ ID NO: 7891 - DNA, 1814 bp, Zea Mays
attttgccgtatacgtacagcatacaggttccgtcgtcccgcaccgcacagccgctcaaaaaccctagttctcgccgccacctccgccgctcggcgcccgccgccagtccaccacttgcccacctcgtcgcgacgtcgcgcagatatcttcaccgcccgtcgcagcaggttcagctgctggcacgggacatttgaaccggcactacaaagcttgtttagcaaagctaggaaagactcaaggaggaggtacgcaaacccatcttaactttgctgctgatggtacaataagtacatgggtttacaacccacaggtagcacgtgatgaaatagccaaatttattgtttgtgaagatttaccgattatgttgggcgagagccaaaattttaaaaacttgattcaacgtgctttttgcccacaatatcagcctgtcactagaaaaactacaaaatctgatttgattgcaatatacaaaaataaacttgctgctcttaaagagtcttttaaaaaggttcagttctcatttgctttaacatcagacatttggacatcatcacaccaaaaaacatgttatgtttctgttgttgcccactacttggacgattcttatgctttaaacaagcgagtcatcggttttagaatgatggatgagtcacacactggagatgcaattgccaaccatatacttgaggtagttcgtgattttgagatagatggtaagattctctctataacccttgacaatgcttccgcaaacacaactgctattgatattctcacccctcggttgcagtcatatatacaaggttatattatccaccataggtgtgtgtgccacattataaatttggttgttcaagctggtataacagttgcaaataagtacttgaataatatccgtgctgctattcgtttcataacaagcacacctcaaatgatttctagatttgctgagtattgtaaagctcaggatatgagaccaagaaaatttggtcttgatatgaagatcagatggaattcaacctaccatatgcttaagagtttagaaggttatgaacaattaattactgtctttgtgaatgccaatggaggtaaagtttctaaaatactttgaacaaatatcacatgtatactgttttgcaactatttttgatccacgcaagaaactggatggtttgcaaattgcattggagggaataggtgatgcattggacatggatttttcagatgcttttaatcatgcaaaagatgacttgtttcgtgtctttggttactattacaaaaaatatggtgaaagtgagatagactcacctgctgttgagtttggtgcagaaatttcagatacctctcttacagctcacttatggaagagagcgaaggggaaagaaaatgtcgcctcatctcaaaggtggaatcctaatgctgaattaaatcactatctgtccactaactttgtaggtactgatcgcgcactaaggggtgagaagatttggacattgattagacaataatgtttagttgctgctacagattgaatttgctactatgaactttatgtggttgtaatatttagactttatttggacattgccggtctgtactcttttccttatagaggggccctgtaatggggtataaggtttttaatgagacaggccgaggaatatatttttgtttccctcaaaatgtgtgttgattcattagttcacatgtttgtaacatatagtctggtgctactgttttagtttgtaatgaaatactatcatgtatatctctgcaattgtgctaatagtttagcttctatgttcttgaacac

SEQ ID NO: 7892 - DNA, 674 bp, Zea Mays
cttgggccgaccgtctagcccacggtgcaggcatgggctcggctcggttgaagggcatttcaggtcattgtccgcaacaagaagagagtaggatataactatgaactaagcttgagatttagcggtgaatggttaatcaaagaagaaaacaagaagatcaaagggcatctagacattcccgagttttcattcggcgagatcgatgacttggaggtacaagtaaggctcggcgatgacaagggcctcgcctctgatgatagaacacggatctgcaaggatctcaagtcctttttggcgccgatccaggagaaaatgcgcatgtttgaagaagagctcaaaggtagatagcgagtattagcaagagttcgcagtgctaggcaagtgacttggcagttggcaccgccgtgctagctgtgatgtgtgtgtcgcaacgctctcaaagctgagactgtatgtgtactggtgtaatacacttgtcaagatgagcacgtacgaactgttctcttggtatccctcattttcagcatgtgatagtaaaaggaattcaagatgtttttgcatgaatggtatggatataggctctgtttggcacagcttattttcagcttcttcataaatttaagcaaaagttctgtcagcttctgcagcagcttatcagttcagctgcttctcag

SEQ ID NO: 7893 - DNA, 843 bp, Zea Mays
tctatccatcgaatggtcccattccattccaagcaagcggtccaggtcggaaaaacttgctccatctcatcctcatcgcgtctcccagatcacctgaccccgtggtgggagaggaggcgccacacccagacgagaggcttcccgagtccaccgccagcacgagtccaccgccggcactttgactcggagccggagattcttgcgaggaactggcagggatctgctgcccatccgcatatctagttcactcgtcggaggaaggcgcatcacacgaactaggtggaaggaaccggacggagcttggagagggcaagcgggcaaggggagtgagtagtggttctcggtgtcttctttaaccactctgtccgatccgctggtgtgtctgcgcgatcctgttgacgaatcaatcgccgggacggttaattaagcattccaatcctcagccatggccgtggacactactcaaccggagtactggctcaactggagacagagaagaggcgttaccacgtgtcagacctggtgttgtttatcttgaagattgctggaagacatgccttgagggtatccaccctggctggctgctggcatttcgcgttgtggccttcttcgttttggcttcgctgctcgtggtcgacatcattactgatggatggagtatcttcctatactacactcagtggacgttcttgcttgtcaccttgtattttggggtatgtagtttgccaatggaactttggcttgcgttttgttttggttatttgtcacttttgttgttatacttaaccttgagtttcagtaactgacactgacatcacatctcactgcactcctgcaacatgg

SEQ ID NO: 7894 - DNA, 942 bp, Zea Mays
attccattccaagcaagcggtccaggtcggaaaaacttgctccatctcatcctcatcgcgtctcccagatcacctgaccccgtgggagaggaggcgccacacccagacgagaggcttcccgagtccaccgccagcacgagtccaccgccggcactttgactcggagccggagattcttgcgaggaactggcagggatctgctgcccatccgcatatcatgctgcaacagtagttcactcgtcggaggaaggcgcatcacacgaactaggtggaaggaaccggacggagcttggagagggcaagcgggcaaggggagtgagtagtggttctcggtgtcttctttaaccactctgtccgatccgctggtgtgtctgcgcgatcctgttgacgaatcaatcgccgggacggttaattaagcattccaatcctcagccatggccgtggacactactcaaccggagtactggctcaactggaggttcttgctgtgcgcgctctgggtctactcctgcatggccttggcattcttcctgattaagaagtacgagggggccagttcaccggacagcaatggcgatgacggtggagacagagaagaggcgttaccacgtgtcagacctggtgttgtttatcttgaagattgctggaagacatgccttgagggtatccaccctggctggctgctggcatttcgcgttgtggccttcttcgttttggcttcgctgctcgtggtcgacatcattactgatggatggagtatcttcctatactacactcagtggacgttcttgcttgtcaccttgtattttggggtatgtagtttgccaatggaactttggcttgcgttttgttttggttatttgtcacttttgttgttatacttaaccttgagtttcagtaactgacactgacatcacatctcactgcactcctgcaacatgg

SEQ ID NO: 7895 - DNA, 2057 bp, Zea Mays
atcctggacgcccgtccggctctgctccattcccttcgtctccctccagcagcctccggccatcgccctctgcgatgacctccacgacgccggggaccttcggaacgctggctaactccggaccggtcgcgctctcgttcccgacgaccacctccttcgcaagcttcctaggcggcggttcgagtcctagccgaataatggacagcgggggaggagtcgggctgtccaagttcaaggccatgaccccgccttccctcccgctgtcgtcgtcgtgcccgccgccgccgcagtcgtacctccacgcgttctccggcctcctcgactcgcccatcctcttgactcccagcctattcccgtcgccgacgacgggcgcgatcccgtcggagcccttcaactggatggggacggcggagaacgacctaagcggcagcggcgtagaggctgagcagcgccagcagtacaccgactttgcgttccagacggcggcggcggcgacgtccacgattattaccggtgcggcgcacacggcgtccttcccgcagtcgtctgtgctgatgcccccatcgggacgagtaggagactcgtacagcggcgagatgctgcagcagcagccgtggacctaccaggaaccgacggcgcaattcgaggcgccggcggcgcaggctggcaacatgttcggcaccggcggcggctacggcgcggctcccggcttccgcgagcagaggcagagccaccgcccgtcgtcggacgacgggtacaactggcgcaagtacgggcagaagcagatgaaggggagcgagaacccgcgcagctactacaagtgcagcttcccgggctgccccaccaagaagaaggtggagcagtcgccggacggccaggtcacggagatcgtgtacaagggcacgcacaaccacccgaagccgcagagtacgcgccggggcgccagctcggcgccggcgtcgtacgtggtgcagagcgccagcgacgcggtgatgcccgagcattcctggggcgcgctgtccggaacacccgtggtgacgccggagaactcgtccgggtccttcggcggcgacggcgacgaggtcaacggcatgagctcgcggctgggcggtagcttcggcgccgacgatctcgacgacgatgaacccgactccaagagatggaggaaagacggtggcgacgccgacgcagcagggtgctcggtgtcggtggccagcaacaaccggacggtgcgggagccgagggttgtcgtgcagacgatgagcgacatcgacgtcctggacgacggctaccggtggcgcaagtacgggcagaaggtcgtcaagggcaacccgaacccgaggagctactacaagtgcacgggggcagggtgtctggtgaggaagcacgtggagcgcgcgtgccacgacacgtgcgcggtggtcaccacgtacgagggcaagcacaaccacgacgtgcccccggcgcgcggcagcgcctcgctctaccgcgccgcgctggcggcgcagatgccgccacagcaggccgcgagctaccagggcgcgccgatgccggccgcggagagaggcagcttcgccttgtccgggttcggcgacccggtgggcacggcgtactcttattacacgaaccaccaccaggagcaggagcagcagcagcagcagccgaaccaggcgatgcgctacgccaaggacgagccacaagactgcatgtcgtttttcgagcagcaactcctgttctgaccagatgaaacgctgccacatcgattgtggcaagacatgctcgcacttgtgaattgtgattcttttttttttactcgacacactatgtacactatctgtagtgatttgtttggaggctccaactttgcaggcatctgcagagtgggattgccttctgtaagatgtaggacacatcatttccgtagcctcctagggagcaaaggtcagggcaaatgatttttcagcagtttgactgctttttttttgtcaaaaaggaaatcgttgtaagtgcgcagatcttaaaagaaaaggtattcagttcacgtatcttaagtacag

SEQ ID NO: 7896 - DNA, 1707 bp, Zea Mays
ccgcagtcccgcactgcactacactgcaccccgcctccgctgacgtcgacgcgcacgccgcatccgccgccttcctccctcctcatccgatctcttccttgcaagccccaagggcagtctcatctcatctcataaaagctgagctgttagcgccatcgccaccatcacatctttttcctccgcctatttgtactacgccactgttgtgatcctgcgccctggacctgggggacagagagacggagggacgtcggctgcatcctgccgccgcagtgccgcgaacaagctgtcgagacggagtgccagagaccagctcccctggaagtgcatgaactagtcagctacaagtttagtacatggagcagacgcgcacgggtggtgccggggagcagcccaggggggctcccggcgaggaagcggcgaagaggatcatcgttggcggagacgcgccggcgtcggggacgtctggctctggctgcttcgactgcaacatctgcctcgagtgcgccacggagccggtggtcacgctctgcggccacctctactgctggccctgcatctacgagtggctacgccacgacgtcgccgaagccggcgccaggagctcggcgaggcggcagtgccccgtgtgcaaggccgcggtgtccccggacgctctcgtgccgctctacggccgcggcgggagctccagcgccaagaagccgctggccagcatcccgcgcccgcgccggccggccctgcgacagagcacgcatgacagcggcagcggaggccaccaccaccaccatcggcacgcagagaccagcacgccagcccggtcgctgcggcacccagcccacgcccacgccgcgcagttcgacgccctcctctccgcgccgtttggggaccgcgggatgctgcactcgacgacgtcgacgaccggcgggatgctcggagggatggcggtggccgtcctcccgttggtgctccgcgggcaggcgcgggtgccgggcatgtactacccgagcccgtatcatctgatgagccccaggcagagacggtggcatgtggaggtagagagatccctgcatcagatatggttcttcctctgcgtgttcgtggtgctttgcttgctcttgttctgatttccgaagcaggacaccatcctgcgcctgcgggccacgagacgtgctctgtacatagcaaagggtgagatatggatatggtgctggtgcggcagtgacctatatttggtgattgcatgacggggcgttcaagatgttaaattgagaagcagctgagttgtggttctagaaaggagaaatcggtttcgaaactgcaaaggacccttgagaagattatcagaagccatcgtccacatgttcatgcgcagacagtaacacataagctactgctgattaatccggctgaggaatgaggatgttgccggagcgcgtctcaaaatcacgaatctggatgagagcacttcacgacaggacctgctaccaccgacgtgagtgtgatttgccattgatatacagcctgatcagttgcaactccacttagtactatgatgacgagtaacagagcgtctgtgaaagggagcacggccggctacaacagcagctgaagtagcgcataagtcacaagttacactccactgcaactgatcattcgagctttgcttctttttttttttgtaacggcaacagtcgttgatgactaaca

SEQ ID NO: 7897 - DNA, 2070 bp, Zea Mays
gattattatatttattcactggtaaagcccagtggagagcacacgcctcttctccccccccaaaaaatccagcagcagcagcaagccccacgcaacattagcagcaggagaccaccccaatcccccacggacattcgccgcgaacccttatctgcacgccgcgccatggccgccgccgccgccgccgcggtcgcccacctctccatccacggccgcctccgccgctcaccggagcatcggccgtccatcaccaccaccaccacctcctcctcttcctcgtccgctcaccgcccgtccctgctgcggtgccgcgcgttcaagcaggaggccggcgacggcgacccggctgaggccgacgcgcggaagcgcaggaagggcccgctgtacaagctcaaggcggcgatccagggcctcgcgggatcccgctccgccgccgccgaggtgtacgggggagagtaccagtaccagcgcgccgtcgagaaggcggaggagatattcttctcggttactactcagctaggcagatatgttatcactatgatgagcagcggtgttgtacttggggttggattccagctgtcaggtggagacagccaaatgaacgaactaatttggtatagctggcttggtggggtgattatcggcacaatgataggtgcaaacagtgtcctagaggaacactgcaaagctggacctcgcaatgtcgtcataactggaagcacaagagggttaggaaaagcgcttgctcgtgagtttcttctttctggagaccgtgttgtaattacttcacgaagtcctgaatcagtccttcagactataaaagaacttgaagagaacatacaggaagggttatctgttgccaaaaagaagcagaggaatattctatcgcatgccaagataaataacgctggcacaaataaaggttttaggccattggtaaccttttcagatgatgacatcactcagatcgtctcaacaaacctagttggttctctactgtgcaccagagaagccatgaatgtcatgcaataccaagagaagggaggccatatattcaacatggatggagcaggttctggaggatcaagcacaccactaacagctgtctatggttcaactaaatgtggactaaagcagttccaaggatcacttctgaacgaaagcagaagatcaaaagttggagtgcatactgcttcacctggtatggtcctcacagaccttctgttaagtggttcatcgctcagaaataaacagatgttcaatttaatatgtgaacttccagaaacagtagccagaactttggttccaaggatgagagttgtaaaaggaagtggaaaggcaatcaactacttaacaccaccaaggatcttgcttgctctggttactgcatgggttcgacggggtcgatggtttgacgacgagggaagagcggtgtatgcagctgaagctgatagaattcgcaactgggctgaaagtcgagcacgcttctcgttcaccgacgccatggagatgtacacggaaaacacatgggtttccgtattctcgctctcggtggtctgtgcgttcataatcctctctagctccggtggacctcttccaggcacatgatttccagagctgtcaaactactagtagacggccatgcatatgctcattttttaccccaccaaaggcattctactaccagaagccatttgatacagcacttaatgaatggggaagaagagaaccccccacagatgtagatatataggtgcaacggagattagcagctgcctcctcgcaccatttaaagtttggctagctaacctatgtgctcatagaagggtaaatagaatttattgcgtgggcattccactgccgtacgtaagctggactatgatccgtgacttttttaaggacatgtatgcaaagttaggtgagcaggatcagagtcgacattgcctcgtgtacatgcatgtagttgtcattataatcactgtaacttctggtatcgcttgtacccttcaaaattcgaagacattatattgtgaagcgaagtggcacacaccatgtgcatatggtttatct

SEQ ID NO: 7898 - DNA, 2449 bp, Zea Mays
gctaccccgcgcaccagcaccagtagactccactactcccgccgccgccccagccacacactggctggcactggcagcaggtgcagccgtgcgagcgctcctactccaacaatccccttctcctctcgcggcccgggccggcacgggtcgcattccttcccgtccgaccgagcaagcaggcgcaggcgcaggcctcccaattcccctccccacccccaccagccaccaaaaaaagcgagcagcgcaccactagctcgccgagcaccgtacgagtacgatacgagtgcgcagcgaggaagcacgcgcgggaccggccgcgatgtcgacgtcgccgccgccggccacttccccgcccggcgcgccgcccaacggtacggcctcgcccactgccgcgccgccgccgccgctgccgccagcaccgtccaactcctcctccccgacgcccgcgacgccgacaggcgctccccccaccgctcccgcgccgccctccaccgactctccggcgccgccagggacgccgcccgccccagtgtccccgaacgcggccgcgctccccgcgcccggaagggcgacgccggcctcggcctcgccgccgacgccctcctcctctgggtcggggcttaccacgtccgtcgttgtggggatcgcggtcggcggcttcgccgtgctgctcctcggctgcctgttctgcctctgcctcttcaggagcaacaagaggagccggaggcggcaccgccaccacccgccaccgccgccgccgccccacctcttgcactactacggccacccgccgccgccgccgccgcctccgcacaaaggggatcagcaccaaagctggcagcataacgcccctccaccaccccctgatcatgttatcaagatcaattcacatcctacccttccgccgcctccgcataacgtacatagcagtggttccgcttcgaaccactcgggtggtgagagccgccctgcgctgtcgcctggcactgcccttagcttttcaaggagcacattcacttacgagcagctgatgacagcaacgaatgggttttctgacgctaatctgctggggcaaggaggttttgggtttgttcacaaaggagtgctaccagatggcacagaggttgccgttaagcagttaagagatggcagtggccagggagagcgcgagttccaggctgaagttgagattatcagcagagtacatcacaagcatcttgtatccttggttggctattgcatttctggagcccacaggttgctcgtctacgagtttgttccaaacaatacattggaattccacttacatggaagaggcagaccaaccttggattggccaacaagactaaaaattgctttgggttctgcgaagggattggcatatcttcatgaagattgtcatcctaagattattcatcgtgacataaaggcctcaaatattcttctcgatctaagatttgaagctaaggtggcagattttggacttgcaaaattcacttctgatgcaaacacccacgtttcaaccagagtgatgggcacatttgggtatctagcacctgagtatgctgcttctggcaagctcactgagaaatcagatgtcttctcttttggagtaatgcttcttgagctaataactgggcggcgccctgtaaattcaagacaagcggacgacaacctggttgactgggtaagctgtgcatggagaagcaaggcctctgatgataaaagcatttgaggatggtaatcatgatgctctagtggacccccggctgggaagtgagtacaatgataatgagatggcgaggatgatagcctgcgcagctgcatgcgtccggcattcttcacggcggcggccacggatgggtcaggtcgtccgggcgctggaaggcgacgtatctctggacgacctgaacgagggcgtgcggcccgggcacagccggttcgtggggtcgtacggcagttcgacgtccgactacgacaccagccagtacaaggaggacctgaagaagttccggaagatggcgctgggcggcagcgggctccagagcagcagcgcgcagacgccgacgagcgagcacggggagaacccgtcggtgtcggtgtcgagcagcgacggcgacggcggcggaggaaccggcgaggagcgtgaagacagacggcaggcagcgtcgtgaggcgtgaggcgtgcccagcctacggcccccgcgcatgcatctgtagatcctagtcctctcgacatcgctacgtacatgtctaattgatagctgacctgtggccgggaggcgggactactgagagattcatgattgctttcttttcttttgtgtgtgtgattctcttggtgggtacactggtctcatgcatgcgatctctgtataaattcaccgactctttaggaactgattactattggctattcgtatattatgagtatactcagtgttgcacg

SEQ ID NO: 7899 - DNA, 1526 bp, Zea Mays
tgagaccccagagcgaagaagccccggcctcctgtagagctggtctccctctgaccctctctcctctgcgcttccgctgcgtcggccggccctgctcgtagcttggaggcggcggcattctccggcaatggggtgcaaggcgtgcgacaagcccaagcccaactaccgcaagggcctgtggtcgccggaggaggaccagaagctccgcgactacattctcctccacggccacggctgctggagcgcgctccccgcgaaaggctccagcggaacggcaagagctgcaggctgcggtggatcaactaccttcggccggggctgaagcacggcatgttctccccggaggaggaggagacggtgatgagcctccacgccacgctcggcaacaagtggtccaggatcgcacggcacttgcctggcaggaccgacaacgaggtcaagaactactggaactcgtacctcaagaagagggtcgagggcaaggaccaggggcccagcacgcccgcgccggcggcgtccaattcggacgacgactcgcactgcgtcaagcagcgcagggacgacgacggcacggcggactccggcgcgtcggagccgcgcgagtcgtcgtcggccgacgactcgagctgcctgacggacccgcacgcctgcaggccccacgcgcccgtgccgcccaaggtcatgttcgcggactggctggacatggactacgtgggcggtgccctgccggcgacagcaccagcagcacctggtctgctcggcgctgcgggcgtggccacggccagcacgggcgaccgcgatcagcatcaggtgatgagcatgagccaggggtccgttcaggtggatgggccatccggtgccgatgtgtccctgcacggcttcgatgacagcggcgccggctgctgggagttccaggagcacttcgatgccatcgatcacatgcaggcggccggcttctgcgacctgctctccatgagcgactacttcggcctcgactagactccaaccctggttggtcatccatcgttggtgaaaggatttgcgtttttttttatttacactttgttagaagtctcggtgaaaggcttgcttgtgttgtaaattactgtcgtgtacgtatagatagaggaattttaaaaagcagataaaagtcaaggacctacattgtaaaaatgttgtcgtgtttgttgtggttcgctttgtagagtagagcaccgacggaaggaaaaggaacagatgtagtagttatactagcaagtacacatacgttgctacctttacatttatacttgagtgtcaaatataaatataaagacatgtgtgttttattgtctaggtagatatgattgtgggtttagagtcaacaatcatagttcaaatacccgtttacgtatgattttagttgtttatcgttcaaatgtgagcctgataacggtgcaaagtggtgttccatattatagagatatatgaatagaaaaatattgagagttacacgcttgcatctagctattgggttgcgcagattg

SEQ ID NO: 7900 - DNA, 1629 bp, Zea Mays
gggaattggctctgcaaacatcacaagtttgcaaggagcttggtaagcatttgaagatccaggttatggtcaccactggtggaaccagtttgaaggatgatattgttcgtctgtaccaacctgtgcacttactcgttggaacacctgggcgtattttggatcttacaaagaaaggtgtttgcattttgaacgactgttcaatgcttattatggatgagacaagcttctctctcctgagtttcaaccttccatagaacagttgattcgctacctccctgctagtcgacagattttgatgttttcagcgacattccctgtgactgttaaggagtttaaggacaaatatctgcctaaaccttatgtgattaaccttatggacgaacttacactgaagggaattacacagttctatgcttttgtggaagaaagacagaaagttcactgtctcaacactctcttttccaagcttcaaatcaaccagtcaataatattttgtaactctgtaaatcgtgttgaactattggcgaaaaagatcacagagcttggctattcttgcttctatattcatgcaaagatgctacaggaccaccgtaatagagttttccatgatttccgtaatggagcatgcaggaaccttgtttgcactgatctttttacaaggggaatagatattcaagctgtgaatgttgttatcaattttgatttccccaagaactctgaaacatatctccacagggttggtagatctgggagatttggccaccttggtctggccgttaatttgatcacctatgaggaccggtttaacttgtataggattgaacaagagcttgggactgaaataaaatcaattcctcctcagatagaccaggctatatactgccaataatctgaccgttttcatatgctttcatttctccgcgaataatgagaacttttgtaaataccagctcatcaggttttatggtgttgatctcgtttgttgcatcagagacaattctatgttggtggataacattagatgaggcacccaactttttttattacaccttgtcatgctgacactgttatggctatatgagggcaaatgtcctgccacattaggcacaaagtagtgtatattctaggtgcctattcctaggccctgtcctgcttttagtttctttttctcttattttcatcctattgtgtcattagctgtttcacacaggacattttaaccctgttgctggttctgggcgtgtgatctgtcggtgctcacacaagcttgttgcccgagtcgaacttggggatgtgggcctcagatgggttattgggtgacaggtcggccattgaacttgaagtctggagtctgaacggtagtgaactggttaagtttgcaaataatcggtggtgagctgcatcatgttgtgctgtcttacccttgcagtcatgtcacttttgcttggtgccgtggtcaccatttagatttgcttggataaaacgctcgtcacgtttgtgctgactttgtgttcggcacaagcaacctgtccaggttatgtgtaaagaactgtttacttgtttttttcataataacaaacgttgcagctgtttttgcactctgtttctttccttttcgtgatataatta

SEQ ID NO: 7901 - DNA, 1795 bp, Zea Mays
ctcgaaacgagcgtccactccactggatcgctagctagctagctggcgcaggctgtcctcatgttccaaaagtctcgtcccatgtgactgaccctccggttccaattcccatccgtctccatgcccctcgctcgtcctcgccccggcacaagctgcccgcccggctactgcacagcaccactatatataaaaccaaactccagcaggcgccggcgccaaatcgcaagagctagcgagagcacgcactgctggcggcgcggctaagaccgagagccgccgcgcacattgttcgcgcgaggccagccgccggttgcattgcatggcgcagcagctgccgcccaggatcccgaccgaggtgcaccactggcccgaggggggccagcacggcgcggcggcggcgtgggcggacgacttcgccgagttcgcggcggcgcggcggggcgcgcaccgcaggtcgctcagcgactcggtcgccttcgtcgaggtggcgccggccgacggcggggccggcgagttcgaccggctcgacgacgaccagctcctgtccatgttcccacccgacgaggccggcggaggcgggtcgtccgcggccgggtccgagaacggcggcagcagcgacagcgacggcgataagcgtggcgcgcgcggcggcccggcgggaggcgctccctccaccggcagtggcggcggcgagcagaacggagtcgtggatgcgcaagcgccggcggcgactggaggacaagctgccgtcgtcgcctccacggagctcatccgggaccctaagagggtgaagaggcggtaggtaatccatcttgatctgtggactgaaacgcggccggcgggcttgaaattctggcaggatccttgccaaccggcagtcggctcagaggtcgcgggtgaggaagctgcagtacatctccgagctcgagcgcagcgtcacaacactgcagaacgaggtgtcggtgctgtcccctcgcgtggcgtttctggaccagcagcggaccatactgagcgtcggcaacagccacctcaagcagcggatcgcagctcttgcccaggacaagattttcaaggacgctcatcaagaggagctcaagaaggagatccagaggctgcgccgggtctacgaccagcagaacctcaggatgtcagccggcggcgccgccgcttctgaccatgggccgccaccaccggtggtgcgcgctgagaaggagctcatgagctagcgagccagtccatgcgtgcccgatgtgcagtccgacttaccattaacatggagggaacattgcatcatgattttttatttccagattctgtggatgttttcttccttctttttttttggtcttcttattcttccattaacatgtgcgttgattctttgtatgttgatctggatttggtgtattaattgtgcaagttgtggtgaaatcaccaggataatttatctgtcatgtaaattatttttgatgcattacatctcttctctggaaatctggatggctcttgatttttgtagggtctttctttttttttttctttttccttcggtgtgaccagatctcttactattgccaggttcagtgtaatagaattagcaaggtggcccaagtaaatagtgagggcagctaccgtttttgttctttgtaacgtagtaacatttgtatcggagtttttttaattgaaattctttttgcaattttattacctgtttggtaataaacttatactctctctatctccctcggaacgataaacatattttgtacagaaaaaggttctttgcaaattccca

SEQ ID NO: 7902 - DNA, 2479 bp, Zea Mays
gaatgctatacagagagaggctgcgttgcctcgtatccaatctaacggcggataacaccgagtggcgaccgcctgacgcgcccgtgtcggcaagccgccgacgacttgacgtggggcgggggaaacaaaacaacgcgggcagcgctacggcaagcgcgtccctgccacggcgcggacacagagagtggaaaccggaaggggggaagagagatggattcctccacctcggcggcggcggcaggggaggcggccgtgccgccggaggacgacgtctgctccgtctgccacgaccgcttccggatcccgtgtcaggcgaactgctcccattggttctgtggagagtgcatcatccgcgtttggaattatggacctcctgtacaggcttgcaagtgtcccatttgtcgccgccttataaatctactggtgcctgctgcattatcagggcaggaggatggtccacaagctcaacgtattctaggagagattcagcactataactgtatatttggtggagcaccacgcagcctaactcagaggttgcaagacctacccttcttcatccgaagactgttcagagaactaatggacccccagcggaccctcccactcgtgttcagggcgcggatgctgatgatggtcgcactgagtgcaatttatgtgctgagccctgtcgacattcttcccgaaagcatgctgggcctctttggattcgtcgatgacctgctcatcctgctgatcgtgttcctccacctcgccgcggtgtaccggtcgttgctcctgtaccgccacgggggccagtagaagtcgctgtgcataaaccgtttgtttagctggtttccatgtggagttctctgagatcgcagcagcggatttggaagatcgccgactcgccgagtagatggcaacgtcacggacggcttagcctgtccctgctctgtaccattctactacgcctgtttttctgagactctgacacggtgaactgaactttggttggttgatgcaagtgaatttcccttcgttttactcgtcaggaaaagaaagggaaagagtttgcgttcgtttgtctttgtttctgctctttggaagttggaattgaaactgcactgatgtttgcgtttcaggaactgcattgacgtggatcctgctcagttctcttagcatttacttatgggccaagtttgtagaagtttagtgggctgtagacccattggtgtcatgttgggccaccgcgacgagtaaagaagaggtaggggatcgccctggccgggtagttggctcttgcgggagggatgagatgggaatgggatggcgacgggcgggcgtgtgcggctgcaagcggctcggaaggggcacggtggagacgcagcggaccctcgcctcttctcctgctcctgctgctgacctgacgagctgagcccacggacgagaggggagacgaggaggggcacaccacgcaggagaccggaggagagcgcgcgcgcggatccacctcgatgttggcaagaccatcagcaccgcctttggtgactgctcaaactcctgaagtcggcatcttcattacagctcgcaacgtctcgggtgcactggtcgccaagcttcctggtaacaaaaacaagtgtggaggaagatcgaatgtccggcagcggaacatccaacctgggaaaaggggctgtcgtcgggagtggcgggcgctctcagcagctgaccaagcgcaggcttctaccttggacgtagatgaggagtgcaaacgggtgctcactccattgggtttctccagcgaagacgccgagaagatgctgaagaaagcgtttggctggacccactcgccgtactggagcgaggagagggagaaggaggttccgaccgccgaggcggtagctggagtgctggactacatcaggagcctggggctgtcggacgaagaccttggcaggctgctgaagaagttccccgaggttcttgggtgcgacctcgacggcgaggtgaggccgaatgtgggcaagctggacagtgactggggaataaacgggaagaccctgcggagccttctgctgaggaaccccaaggttctgggctacaatgttgactgcagaggggattgcatggcccagtgcacccgctgttgggttaggttctgatgatgattggttttgttcttcgtcgccacatcgttggtcaggaacttgggacttggttttgcttgctggccatttttctgtaagctagcacctgtcgaatgtagcacaatcgctagctgctggatattgggttggccactgttagttcttatgtacgtacaacagattcaagagctaaaccatgctgctgttgtctgtaaaagagttgcaataaatatggccagaattcctgaatggcctgtggtaccgcagtgacttgctattgttcttctgctctggatttccacattgtcttgttgtgatgtgaggtcctgtccttgtgctttgatgcatctccc

SEQ ID NO: 7903 - DNA, 3150 bp, Zea Mays
cgtaaggcagcggatctggttccgtctggctcggcccgtcaagccggctgccggtaggagcggaggagacggcgtctcgccgctcgcttcgtttccgccttccccctcccgcaagtcgccgccggctcgcattcgtggttccgcgtggggggtccgtggaaacgcgacaagagaggcggaagcgatggcgaagtcgtgcaaggggttggccatggagctcgtcaagtgtctcagcgagaccgactgcgtcaaggtgcagaaaaggccgtacaaggagtgcgctggggagaaggtgccaaacattaccagcgagtgcgttggcctgcgggagacctacttcaactgcaagaggggccaggttgacatgcgggcccgaatacgcgggaacaagggatactagtgatgtgcctgcaatatccacaatcagttttggtttctagccatgcttctgtgacattgaggtgtaatgataacatggtttagtttgcccgtgttctgtttttgataggtgaggggaactcacaacacacgtggcttcaattgatgaggggagtgcattcctgtctacattctatacatttgatattccctctgttttaaatgtttgacgttttgttactatgatctgtgcgtgtagcaaaagttaatctatggcccgtttggtttagccgtagattcctgaaaatctaattctagccgtgaaagttgtggcgagatgactgttgtgttgtggaaaaactaaaatatgtttggtcaaaataactaatatgaatgataaaaatctgagatagaaggtgattctgaattgaactagaggactctatagattttcatgaatttattctactcatttggttgaaattccggaattttggcagcgaatttggttcaaaaaactgaaccaaatacaccctatgtctgttcctgaatgtaagaggaactgagagcacaccgatagtttgaattgatgagaggtatatctcaatgttggcctctaacctgacttttggaaaaaggtgtttcctgaacactttctgctactactttgaaaaggcagtttttagaccaattcgaaaacatcttattttttttgctgcttatccaagtttgatatattagtgaagcgatataaatataaattaaaatggaataaaaaattatcaaatgttacaataaaatctttttcgtccgcattttgcttgctttccggagaagttccatcatacgatggcctctaaagttgtctttccagagaagttccatcattccccatctgttcaggtggtgtgacttgtaaatgctgctttgtcttgaactgaacctgtggaccctttcagcaaaatagttcatatctttttctttattaaactaaaatcacatgataacaaagatttcagattagctatgcacattttttacttaagtgtgtaaataattgctgaacctgcgttttggctaagaaaaatcactgcatgttatgcaatgtgttacatttgttatttaaaataaaaaaatatatttacaatgttctgcagatcaatggaaaaaggtgagctatcatccggtattatgttgttatataaataaatcaatagaaaaaatgtaatcaggtgctagggtagctagcatttttttaagatgtttggcagagcttcatcagttccaaatccacacaggtctactatagagcagctctactagtttgttcgtttcatgcaagtgttcaatacactatttagcacattgaaagtgttcaatacactatttagcacatttgtattagtagttagcttttcgctattaatgcaggatcttacttatctctctcacaaagtttcttggttcttgtgtctaaatttggcggtaaatttacagtccgcttctcttctcttctttttcatccatctcagcatttagctagcttctaacctcttaattatacttactcttagagcaagcttaataacgcaacctatagtgagctttataagagcaagtttaacaatagtgcctatggtgggcttaaaacctctatagccatcaataaaacattcatataatggtgttaactataaggttgactcttagattactattttgtctttttgtcttttatctttttattttggagctcgtgtagcagctgactcttgtataagagcccacttctcctaattttttatctctctcttccacgtaagaaaaaatgtcgtgtaagcaggcctgtagctataataactctctcacgataaaaactgcacatttaatacttcgtcaaactctttcttttatagagtctagctactagtgagtaatctgattttctctctctttatttctctttctttcacatcattataatttggtatatcatcccttgcagcccatctacatcatcttattatatttgttcttagactatctctaacagattttctatactttgcaaacaatgtaatctacagtacaaaacagtactttgcacgacctgctggagatgaccttagtgataacatatgctacctattataccacgatagcgcctctttggtatcgctgcaaacaatgcaagggcaactaagcttctcaaaatcttttggatggagccgctagcgggaacgaagccattctatcccaagtggcttcgaaaccaaacgctacgtaagttaacacattggccaatattgattcaccggctgaacaagaagagggtggatttctcgtcaccaatggaagacccaggccgtggagcgaggaaggcagaaagcaatctggacagccttgtcctctgaaggctaggctgggcacgcctcaacccagccctgtggatccactcccacctgagcggctgagcctgagggtccagactccagatcaccgagctcacgtgggcgacgcaccgtccacaatgcaaccccacatttccggccaggtatctcgtcgcctcccgtccatagaaaagcacgacgtcgcttgtcgatggcccatgggcgagagagaagcgtgatggagacgtgtgctggaattgaactgcggagagggtcgccgcaggcaacgtatagctcggccggccaccattttctccttccagcaggatatgtacagcatttttattgttgttgttctaagagcaactccaataaactccct

SEQ ID NO: 7904 - DNA, 2248 bp, Zea Mays
gctaaccgcggaccgaactttgaccttccgcgcaatccgccgcttctattctatcgtcgccgacgagcgacgacttcctccttccacagttccacttcctcttcctcctgcccggcgcgctcccacctcctctcacaatcacaagccacacccatggcgacgacggcccatccggcgctccccttgctcatcgtcctagcatgtgccggcgccgccagcgggttctacctccccggcgtcgcccccgccgacttccgcaagaacgacttgctcgccgtgaaggtgaaccagctgagctccatcaagacgcagctgccatactcctactactccctccccttctgcaggccggacaccatcgtcaacagcgccgagaacctcggccaggtcctccgcggcgaccgaatcgagaactcaccctacgtgttcgagatgatggagcctaaactgtgtcagatcgcgtgcaaggttgttctgaccgagcagggagcaaaggacatcatggagaaaatccacgacgagtaccgtgtaaacatgattcttgacaacctccctatggtcgtcccgattgagagattggatagagacgcgcctccattctatcagcaaggtgtgcacgtgggtgtcaagggccactacgctggggaaagcagtatccagtggtcatcccgctgggacacctacctccgcacgcctgacgatcattggttttccatcgtgaattctctgaccacggtcctcttcctgtctgtgatggttgccatgatcatgctccgaactctgtaccgcgatatttccaagtacaaccagctagaggaccaggaggaggcccaagaggagtctggatggaagcttctccatggcgatgtgttcaggcctcctgccaatgccgacctgctgtgcgtgtacgtgggcacaggtgtacaattctttgggatgctgctggtcaccttgctgattgccatcctggggctcctgtcaccttcaaaccgtggagggttcatgacagccatgatcctgctctgggtcttcatgggcctgcttgcagggtactccattgcacgtcttcacaagatgttcggggggctggaatgggagaaggtcgccatcaagacggtcttggtattccctggagtcgtcttcgtgatattctttgccctgaacaggctcctctggggcgtgaaatcatctggggctgtgccattcaccaccatgttggcactggttttcctgtggctcggaatctcaatgccactcatcttcgtcggcagctaccttgggtttaggaagcctgccatacagggcccagtgaggacaaacaagatcccacgcctgataccgcagcagccatggtatatgaacccagccgtctcggtgttggtcggaggtatcctaccctttggtgcagtgttcatggagctcttcttcatcctgacaacgatctggatgcaccagttctactacatcttcgggttcctgttcctcgtctttgtgatcctgatagtgacctgcgccgagatcaccatcgtgctttgctatttccagctgtgcagtgaggactaccagtggtggtggaggtcctacctgacacccggctcgtcggctctgtacctcttcctgtatgcagcattctatttcttcacgaaactgcagatcacgaaggcggtctccggcgtgctctacttcggctacatgctcatcgcggcttatgccttctttgtactcaccggcaccattggcttttatgcctgcttctggttcaccaggcttatatactcttcggtgaagattgactaggaagctagaatgccatcgtttcatggtcggcaagagaaatcagaggtcaatgttgtgaaagaatacatgaaatgatgaaaatgtagcatggtttatgcacaaaagtaaggtgtccatagggtatctattcgtctgataattcagttacacttttgcgttcagtaaaacttgaggtatgtgcgctcattattatcacgcagtatacagaattgagatggtacttctagcctgaaatgctgagcatttcatgttgacatgttgtactccttctctttcatacaaaagatgagtcgtcatttggggcaggggcatgaccacagtctacaaaagataatactttcactatgttttctatgaggaagtaatatttcaattaaaagactgtacgatattgtaatattttttcatcataagtctagtaaaaatgattgtggtgtcattctatgtatta

SEQ ID NO: 7905 - DNA, 1681 bp, Zea Mays
tccgctgtttcccctgaccagcagaccgctgccgagagcccgagacagtgcccgctgccagccaaccgccgacgcagtccacaagcgatgaagcgcttcttccagccagtgcccaaggacggctccccgtccaagaagcggctagcgggtgctgctgaaccgggcgacggccccacatcagccggtgccgccaccggcgctggcggggatgtagaggggaggcccaccgaggagccgttcaagttcctgacgtggaacgccaacagcctgctcctccggatgaagagcgactggcctgctttctcgcagctcgtcgcccgccttgaccccgacgtcatttgtgtccaggaagtgcggatgccggcagctggttccaaaggggcacctaaaaaccccagtgaactaaaagatgacacaagcttgtcacgggatgaaaagcaggtagttctacgtgctttgtcagcttcacctttcaaagactaccgtgtctggtggtctctttcagattcaaaatatgctgggacagctatgtttataaagaaaaagtttgagcctaagaaggtgtctttcaacttggatagaacatgaggaggaaaatgcatttcaaagaagacgtaagtgggacaagaggatgctggaatttgttcaacacgtggataaacccttaatctggtgtggggacttgaatgtcagtcatgaagaaatcgacgtcagccatcctgatttctttagcagcgctaagctgaatggatacaccccacccaataaagaggactgtggacagccaggattcaccccagcagagagacggcgttttggcaacatattattccaaggaaagctggtagatgcttacaggcacctgcacaaagaaaaggacatagacggtggcttctcttggtccggtcatccaattggcaagtaccgaggaaagagaatgaggatcgactacttccttgtttcggaacagttaaaggacagaatagtttcatgtgaaatgcatggccgtggcattgaattggatggattttatggaagtgaccactgccctgtttcgcttgagctttccgaagctgtagcagaagaagcaccaggacagcccaagccatccatctaaatataccaccatggtggtcattgttgagacatttccggtccttcattaaacctgactgttccatgcattgcctactctaggtagctgaggtttgattgtaggtattattatgatcccagtaggttaccagttcctgtggtcagggctggtatagtttagggatcattgccatttaagcagtgcaatttggacatctcattctgcttgaaatgttgtttgtctaagagcagccatggactacctaatacctcatggggatcgaagagattaatcccttcgtatccaattttaactagcaagggatttaatccacccctaacaagcacaataaaatcttgttcgttttttctaccagaaccaatggaattaaatctcgatggggtcttaattcttttggcctatgatatgatatattaccagagcaatcgtgcccccggtgctagttttaactcgctgcccggatctcgacactgatgaggcaagtaaacggcacaaaaatccacatgcaagcaactgacaaaataagagacaggatactaaaaaaaaatccacatacaacaacaa

SEQ ID NO: 7906 - DNA, 1494 bp, Zea Mays
cagcccagccaaattacatgggaggagagagaaccggcaaattagctggcctagacacgccagccattcttcaaccgtcacgctcacctcgcgagggaaccggcgggcagcggctccacgagatctgcgacggcgcggctccatcgacgaccaggatggacaaccagttcaactccgaagagtggtcgctccctgtagcctcagccatgatggaacttgagaagatcaatgcataacatgggtgtaccaattcagcctgtgaaccttgctattaatgcatcatctcgtcatcatcccactgaggacccagaggttcaagaagtctacaggagtcaagtctcaaacaacaagggaaagaagaaggttgcccaacgaggaaagtcattcaccaaggaggaagatagagcaatttgctcagcgtttttgcatgttagcacagatcctattgtaggaactaaccaatctgcatctgggtattatacaagaatgcatcgacacttcatggagaacattggagtgggtagtaataggactaaggtttccatagaaaatcggtggaccacaattcagaaggccgtcaataaattttgtggtttctttgctgcaattgaaagaagaaatgaaagcggcaagaatgagcaggacaggattaatgatgacattcggatgtatgagggaaccgagccatggcaattccatcactgttgggtgattcttcgaggagagccgaagtggcatgagaagatggcggagagtaacacgagtcaaaaagttaaccaaaagcattcccttaatgactctgaaatagaaataaattctatgcacaccaatagtgcaatccctgaacgacctgaaggaagggacaacgccaaaaagagatgtcgggtaatggctgatacctcgtcgtcaagtacagctgtggaaatgctacaaaaaatgcatgaaagaggagagaagaatgacgagaaggaagaccagttgaggcaagaaatgttccagatggaaagagagaggctcgagttgcaaaagctgaactgggagaagaaatgggcaataatggagtccaatgccaagttgcgacagaatgagtatgagttaaatcagtggaatgcagatcttttagtcatgtcacaggatcttgacaagttggctccaccattgcgtgcgatgtacgagcaaaaacaaatggagatcatgaagagaagaggcatcaacaccccttcagctagttaatcctaagctattatatgagggttgtacgagacttgtgtatgtgaatttgtttccagtgaagttgtttgattgttaagcttgtttgatcagatacacctattcgtgtctcatgtacccagagttaatttgttaagacttgtgtatgtgactgcttctgttgttcagtgaagttgtttgagtgttaaacttgtttgatcagatacacatattcatggctcatgtattagagttaatttgtctaagttacaatgtatttacaat

SEQ ID NO: 7907 - DNA, 1452 bp, Zea Mays
cagaccccaccccagtgcaaatctgcccctacgtgaaacgttcccctcctctcctcgccctccttgcgcaggttgaggcccgaggtgtagtgcaaggtggcgacctctcggcggcttgggtcggattgttttcgggaagtttggtctccagtgacccgagcactggagatgccctgtttggaggcgcggaagccgtacacgatcacgaagcggcgggagaggtggacggaggaggagcacggtcggttcctcgaggccctgcagctgcacggtcgcgcctggcgccgcatacaagagcacatcggcaccaagactgccgtgcaaatccggagccacgcgcagaagttcttcaccaaggtggtccgagaatcgtcgccaggaagcaacgcctccgcgggcgccgcgccggcgatccagatccccccgccgcgccccaagaggaagccggcacacccttacccgcgcaaagcggacggcgcggccaagaagcccgcgccggagctcaagcggctggagaagacgtccctgcgcgaccgggtccgggacgaagggtcgccgacgtcggtgcttgcctcggcgcgcacggcgttacgagcggaggtgtcgggcagcgtggtcgcgaacagctcgagcgccagcaggtcgccagccctgtctgacgccggttccaacgagcgtggcgacggcggcggctcgctggcctcctcggtggaccgggaggacggctgcgcatcgccaaggacgagagcgccatgtaccaaggtgctctgtgatgcacacgaagtgtcgcgtctaggatcgggagctccagtcgtgaagctgttcggaaacaaggtcgtcgtggtgaaagtgaaagacctggaaacggacactccgcctgcgagcgttgccgaggcagccagaaacgggagccctactaacggtgccgcaggagcgagctcgtggaaaccgtggccggagctcacgtgcctcgttccccggcgggacggcttcgcggcgcaacccatcgtgagcccgccgtgcgcggtgttctactacccgcaggcttcggctcaggagcaccagcaagcttcagagccgctggatcacagacgcgcgcagagggaagggtcgtcgccgacaggttcgagcgtggcctccagcgccgccgcggagtcccgccacggtcccgggcaagagaacgccagcgacggctacgcggcgctacgggccgcaatcccgaggccgaccaagcgcgcgagctcggcttccttcggcgggagagggttcgtgccgtacaagcggtgcgcggccgagagcgaggcggcgcggccggtggcactggcactggcacccggagaggaggccgacggcgacctgacgaggctgtgcttgtgacaagagctgaaggctgcaatgcacatgctctctgctgaaacagcttcgcacttcgtggcctcgtccctcactatc

SEQ ID NO: 7908 - DNA, 970 bp, Zea Mays
atgcagccggatccgggatggagcatccatgggcgtcctgaccacgccatcaatcaagcaaaaatggaaccaaagatcttcaaggacaagggtccgttgtggtgtttagaggcggaggcggtgcccggccagcatacactctggtttcacagaatgaggcacactttgctggtgactggttcgaaatttgatttctactggccaggatgtacccaatgaactcatggatctggctatgaagggttctttaaatgatgttggaagtgtagatgtcttctcttggataagctgtttggatcttcgcagtctcgctgtgctgacaaattccaccctgtccagctcaagtgatccacataatatatctttccattacttaatacctgaaggaggcaacgataagttgtcctacttcaagctaaaagtcttgctacctgattcagatctcactgttactagtcaaaagcaaatcaaggacaagctaaatgttgccactccagaaggaaattttctttggttattccacacagaattgtcaccctttcttatcgcaaaatctcagttgtcgaaaaagagattttttatatcgctgcagattccatcataaagggcaaagtcgaagatcttggtcgcatggaactaggcggttacgccattggcgctattgaagattgcagcaagcgtctcagcgattatatcagtatggatgttcttagtgccatacaaagagcgggagctgcattcagttgggtgcctaaagaaccttataacgaggatgcatgcctacttgattttgacgtgctattgatggagcctcgcaagctggagaaaaccctgattacttccatcatgtggtgggctactggatgtttgcagcaatgtaggtactagctcataagtttaagttatttttcgattaaaagaaccacattcttttttctgaaactattgtgttgcaggatgcaagatcccc

SEQ ID NO: 7909 - DNA, 3111 bp, Zea Mays
cgtctctctctcctccaagaccatgcccaaatcaccacgatcctaagccagcccagaccgctctcaaaagccgaatttctcaagcaacagctcgttccaatcgcttcgaaacctaaatccactgctcaaatcatacacacattgaacgacacctcccaccaaacacacacacacacacaaatttcggaaagagaactgccagcgcagatcgccatccgaccacgaggctaccaaaatgcagcgcccagactcgtgccagccagccagccatcactcctgctccatctccatggatgcacacaccaccgcggccggccaccatcagcgaccacagatagaatcgagagggcaaccgcacgagcaccagctctgctctcacggcggagacgacgacgacgacttccatgtcacgacccacccccctatccgatcccaaatcgcacgaggaaacttcgggaggaaaaaaaaaacgcacctccctggccacccgggcgcgttcccttgtctatcccccctgtgcttggaagcccatgagagcacaccaagaacaagcacaggagacgagagagaaagagagagagagagataggaaaaaaaaatccccaaaatccaaggccgatttatcttcgccaacatctggccagctccatccgaggccgttcccgctgcctccgcgaggtctcgggagggggagaggagctccccgactgaccgaattcgcgaggcaggcaggcacgcaggcttagggtttgccaaggtgctccggcgccctgactcgccggggcgatctagcggccggttcctcggttccggatgatcttcaagcggagtcagcggtcggagatccttgcgccgcggcgctgcaatgccgcggacagcggaggcgaggacgaggggggaggcggcccccgcccgaggaagaggcggaggggcgacgagttcttccccgtcgacctgctcggcgacgtcccagcctccagcatcccgtacgctgccttcgggctccggtggagcgaggcgcccgaggcaccgccagaggccgcgcaaccgccgcccgcggcgaggccgccggtggtgcgctcgtcgcggggccgcaccctggtgctgccctctaggttcaatgactcggtacttaccgacccctggaagaaggagaagccggccaggccgccgcctcctgtcaagacagagcacttggcgcgcagaaacgagctgctgcacaagaaaggtgcaaattttgacagcagcgttgcattgtccgaggtagatgacgacgatgaggaggaggccatggtggaacgttaccgagcacgccgcagtttcggtgcctccaggaagcacttagcctcttggagcacgcttacctcggtacatgatgaaccatacagcaatcaccacaggaaggaagtaaagcttaggcattactatgaggaagacgaggaggaggaagaggagaaagaagatatttttcactgtaccgaagaattggtgtatggggacattgtgtgggcaaagcttggcaaacgccagccaatgtggccaggagtggtggtcgacccaactcagcaggccgctgccgatgcaatgccaccacaacctcgcggtgtcgctgtgctttgtgtgatgctatttggctggcgcacagagttcagtggcgagaagaagtacgtgtgggtgaggcaggggttgatatttccattttcagactacatgaaccgatttcaagggcagacagaactaagcagttgcaaacctgctgatttccggagggcagtagaagaggcctttttggctgatcagggattctcagaagtagtggtacattgcagcaccaagggccaatctgtggtgtgtcattctttcccagatgatttacatgaagtgactggttcaaatgaattggagtaccagccacagattaagcagtgcagaagagtgctgcagtgtgagagttgtggaaactgctttcccaacaaggatacaaacaagatggtgtatgtgatggagcaacttgcttgcagactttgtgccaggatcttagcattaaaaaagtactgtgggatttgtttaaaaaatttgcaacataaatatggcggaagaagggtttgctgtcatggctgtgaaagttgggttcatgcagaatgcgatgaaaactgcagcaacctcaaggatctacaagacaagaaatatcactgtccttactgtagagttaaaatgaattcaactctccccgggaagaacacaaaaatttctgatgtgagaaaagatagttctgcacagaaaggaagcaagcctgacaaagttgcactggtctgttttgacatggaaggaacatacgaaccagatctcgaattaatttcttgccattgtggcccttgcaagggacagaaatttttgttcaatgaatgggagcggcatgctggctgtagaagtaaaaattggagatccagtattaagcttaagggctcgttgatgccatttgggaaatggatagatcgacatcagccaggcgtgtgccctactaatcctccaaaacgctcatctcagaaaatgaagaaacagaagttaattgatttactgaatgacccatatgatcctgtaaatgtaaaatggacgacagaaagatgtgcagtctgtagatgggttgaagattgggattacaacaaaattgtgatttgtaatagatgtcagatagcagttcatcaggaatgttatggtgtgaggggtaagcaagactttacttcatgggtttgtcgggcttgtgaaaaacctgagcaaaagagggagtgctgtctttgccctgtaaaaggtggtgctttgaagccaacaaatgttgataacttgtgggttcacgtgacatgtgcatggtttcagtcacaggttgcttttgctagtgatgagctcatggaacctgctattgggatattgaacattcaacctttgttatttatgaagatgtgtgtgatttgtaagcaaatacatggttcatgtactcaatgctacaggtgctctacttactaccatgccatttgtgcatcaagggcaggctatcgaatggagatttgttaagccattcctggatgggtgatcatcacctaaggtgacgattac

SEQ ID NO: 7910 - DNA, 1478 bp, Zea Mays
ctgcttgttcgtagatgtgcatgcttgtccctcttgcactgcttgtctgttacctgcagcaatctttgccaaacggacacagggaacctatgcccccacaggattgcacaacacgtgggataggtaatgcaggtattgcccccgctggctgtggctggccggtgtgcaattcactaggctgccaaatgagccctaaaggccccagcatgggcgaccctctccagagtgattcttatcaatcttgcattggaaaaacacggagcctattattatcagggaagcatttgagccaaagtactatgtacatcaccatgcttttatgtgactatatatataaatataacaaataaagttttattggaccagttctttgaccatgccattggtatcaacgttccaaggtcccgcttcctaccagttaaggcgacatcagatttgaagctagtacagtctgatctatataccttggttgatggcttcgttacacgtaattcagccagaacaaatccatcaaatccctcaattgaacttggtcctgagttcaagaaggttgggagcttccttggtcgcttcaagtccatacctagcattgttgagcttgacatcttgaaggtttccggtgatgtttggttcggttctggaattgtactgaaggggaaagtgaccatcactgcaaaacctggcgtcaagctagaaatcctagacggagcagtgattgggaataaggttcacatgttaatgcatgcaactgaagtgcattaccaatgtcccaagagggtaagggtacagtctgatgtatctgaaaggattgctaatggaactagtgttcatgttaaatatcctatttatgatcaaacagtgtaccttaacgattatcataagaagatgttgaaggatcaatatgagggactgaagacaatcgagcagattacaatggactcagcttcggtcgagaccaatatgttcaagctctgcaaggtgaggtttgttcagtttggccaaaaaggcatcccctacctgaacacctacgatggtcgcgccatccgctacctcgacccgctcatcaaggccaacgacaccatcaaaatcgatctggagaccaacaagatcatggacttcatcaagtttgacgtcgacaacatggtcatggtgactggcgggaggaacaccgagcgtgtaggagtcatcaagaacagggagaagcacaagggcagcttttgctgcttggagctttttgctatgtctagttttctcctatttgttgtacaggaaaacttagaatagaattcaaatttggtggtcacaaaagtgtggagactttaattcatatataaagttaggcttaacattagtgcaaacagttgtattttagtttagatttagagtacacttatgtatgcgttgtttgacaatgcttatttatgatatattgaatggtacttatttatattatattaattataatgttgttcaatata

SEQ ID NO: 7911 - DNA, 1818 bp, Zea Mays
aatccatcctacctaccctgatgctaaacctaatgagtcgccgacagtagcctaaaattgggttggtttctcctacacttccatgttcgacacgagcggcgagccaacttccctctcattcgtcttccacaaaccctataaccctagcaccgccgccaccatgtcctcgtctccatcttcagtgaaccgccgtcccccgggcccgctagcgttggggctggagtccttggcgaagaagaatacacataggaagaagctcaccgtcaaacctcatccagatccagtcgttgccctccaatggtcggatatggaacgtctcgtctcttcctttggattcagcagccggtgctcctcctctggatctggtggtcaactccatcacccgcagcttctatggcacctcccctagtccccctccatcgtcgccttcacccaccgcttctatatcgccacctctctcattgtagaagaagacactgaggatctgttctttgaccatgccattggtatcaacgttccaaggtcccgcttcctaccagttaaggcgacatcagatttgaagctagtacagtctgatctatataccttggttgatggcttcgttacacgtaattcagccagaacaaatccatcaaatccctcaattgaacttggtcctgagttcaagaaggttgggagcttccttggtcgcttcaagtccatacctagcattgttgagcttgacatcttgaaggtttccggtgatgtttggttcggttctggaattgtactgaaggggaaagtgaccatcactgcaaaacctggcgtcaagctagaaatcctagacggagcagtgattgggaataaggttcacatgttaatgcatgcaactgaagtgcattaccaatgtcccaagagggtaagggtacagtctgatgtatctgaaaggattgctaatggaactagtgttcatgtaaatactcatgttcaaaatttgaatctggatattgaagagcaatcacacaaacactcgatttcacacatcgaggagccaaacactaataattcagaaggatccctggctggtgctgctgtctgggatgtatttcgcaggcaggatcttccaaagcttaatgaatatctagctgttcatcgggaagaatgtgcagctagatgtcaagcagtgtcttctgttaaatatcctatttatgatcaaacagtgtaccttaacgattatcataagaagatgttgaaggatcaatatgagggactgaagacaatcgagcagattacaatggactcagcttcggtcgagaccaatatgttcaagctctgcaaggtgaggtttgttcagtttggccaaaaaggcatcccctacctgaacacctacgatggtcgcgccatccgctacctcgacccgctcatcaaggccaacgacaccatcaaaatcgatctggagaccaacaagatcatggacttcatcaagtttgacgtcgacaacatggtcatggtgactggcgggaggaacaccgagcgtgtaggagtcatcaagaacagggagaagcacaagggcagcttttgctgcttggagctttttgctatgtctagttttctcctatttgttgtacaggaaaacttagaatagaattcaaatttggtggtcacaaaagtgtggagactttaattcatatataaagttaggcttaacattagtgcaaacagttgtattttagtttagatttagagtacacttatgtatgcgttgtttgacaatgcttatttatgatatattgaatggtacttatttatattatattaattataatgttgttcaatata

SEQ ID NO: 7912 - DNA, 1926 bp, Zea Mays
gtagctccggcaccgctgggggtcctggactcggccgtggattagtctctgacgaggtacaatcacgacagtcagggcgacaagtgagtgccctgaattttcaggcttctctagctgctaaggatctccaggtttccagtgagtcaaatccaaggctgcattcgtcttcaagtaccataagccatcatctcagattcaatcacctcaattaccatgaaaacaaggaagatggcctggggtctgaaaacgctgaaacaagtggtcttcaaagctcatctaggaaacctgtcatggtaaggggaagtctcattaatgaagctgttaatggtgacatatcaggagaaggaataagttctataggatcagagctggaaaatgttcctagcacagtctccactaatgaaattggtggctcaacttctgaatctggtttgggcccctcatcgatgacatctgaaaggatcatgtctgactcagaagtagagatatctccgcaagggacctcatccacaactgtcatgacaagtgaaagatcagatgcatctcaatctagcttaacatctgtgttttctaactcttcaactgcatcatctgtgatcgtggaaccaatgccagatccaatccctacaacggcagatgtccccatattcagtgggccacatggtgaagctggagggagtatattacatgacgacatgatgagcattttctcaaatgacggtgtaggacgctctatagattcaagcagcagtgaaacaaggaggagtcacagaaggatcctgtgggatgcattttccaggcgtggctcaagaggttatccagaatctgatgctgatgaaatgggattttttagtacatggctagaccttggtgatgatatttttgaagagttgggggaatcaagatattttcatcgcaggcgacatggttcaatcagaattagggagcatcgccgtgctgtttttgatagtggtaatgaacaaaacactgctgcatgtcctttggggattcatcaaattggccgatgcacctgtaattctttctttattgctgaagaatctagcgcccgagcaagtatatcaagaattgtcatgttaactgaggcgctatttgaggtgttggatgaaattcaccgtcaacctgcatcactttcactttccatggtctctgttcaggctcctgaatctgtagttgattcgttgccatgtaagagctacaaaaagcttgagacaccccaatgcagtgatgatatggaacagtgccatatctgcctaaccgaatatgaggacggagaccagataagaacccttccgtgcaagcacgagttccacctgcaatgcgttgacaagtggctgaaagaaatacacagggtgtgccctctgtgccgtggagacgtctgcgaagtcgcctcgtgaagaccttggcgctgccatccttccgatgtggcgccggtggatagggcaccaccgccaggcgccagctgttccgtggttgaagctggttcggtcaggcaatggtgatccaacttggacagttgacaccgcaagagcacgtcaactttgactgtctccctgccgaagagaatggccaaaccaaccctgcgaccgatgagtcgctgttcctgtcatcaacttttaagataccgagactttgtatacagtagcttttgtagcctcccgcctcgtgtatgacagcctgtacatatttgtaaattctggaatcaaatgtcacaatcccctgttctcgtgacctgatgttgtagggaacatattcggtgctgatggagccgggaacagagatgtgctgatggagatggaacttattcggtgctgagccttcgtggcttgagcagcggaactgctggtgaaggtctattacagagcatgggctaactaccgtaaataacaaaaattaaagacagtaaac

SEQ ID NO: 7913 - DNA, 1027 bp, Zea Mays
ggacgacgcttggagatgaattcctcttcagatggttgtgctctgttgctaagtggtgctgttgttgatgaagctcttggtgcaactcagcatctaagagggaagaatatgccaagggctgctgctgctcgtgctgcctctgtgggtgctactgttagacaaacatacactagaagcatgcaaggaatactatagttgcagctctagttattgttgaagaggacaatgaggagatggaggaagatgaaccagcagcacatggaggagactttgattatgatgagatggagaaagaagcacctgttgcagctgggccatctactgtagcagcagctggagatggaaaagaaggcttccattggatgatgatatacaagagctgcaactcagcaagattggagtgggacagccaaaatacaatgaagctgtcacttcacatctaacacactatgttcgtcttcgctgatgcatgcactacaagttgtaagtcaagaacttagtatcttccatgcatatgggttatcgttacttttgtcagtatctcagaccgtgtccagcagctttttcatatgattatccaaaacactgttttacattgttttgcactgtagactgcactattcgctgagtagagtttgaatatgaagatgaggatggataagctgttggagatagtctcagcaaattctaacagatcgcagtgtactgcatgtcggcttgtgtaactcgtaggaccactaccatatcaagaaataaatatttaatactggtaaggtaacggcaagacaaatttgccaagcttattaagggggaaattgacaaacacttttagcacatgttcggctgtggtaaaaggcagctgttgctgctgccgtgctgcgggctccagcagcttcccgctctctcacaaaagtactgttgcagcagctgcggcaacagttttttatcatacccaaacagcgtgttaaattaaacagtaaaaatgaaaacatgcctgctggcagcgccaccttgacttggatctttg

SEQ ID NO: 7914 - DNA, 702 bp, Zea Mays
tctcatcccatccgcatccagccagtcgaaatcgagtattctctctccaacagagcctggtacattcagattccgacttcctggttcctgcagcaggatgcgttcgtgactccctacaccccagcgccgcttccgcgtgggatgatcgagctctcagcgccgccacacgcttcgcggtccccagcgccacgtgggatgaccagacgctcagcgccgccacacggtcgggctccccagcgccgcgtgggagtgggacgaccgtacgctcggcctgacgctcgacgctccctgccagatccgacttggcgctcctcgtctcgggtgactcgggtccggtgccgctcctccctctccgcctgtctcaacactccgcccgctcggctcctactatccttcactgtcgtggcaccgccgtgactagtcaggtagtctcagatggaattttcactgaaggcagggttttgatccttgaataatttatgcattgttcgatgggctcctgatactgccaggagtgacccttccactgctgctaacttcgagcttgatcaaaaggtctttctactcatatgcaaggtgtaagactatcgagttatgtggtatattggtgttgatcattcatgtaatcactttgaggctatgggtgtttgccttgctcatacttatttaatttgcttccatctatgagattagaaaaaaaaa

SEQ ID NO: 7915 - DNA, 1084 bp, Zea Mays
cgagtattctctctccaacagagcctggtacattcagattccgacttcctggttcctgcagcaggatgcgttcgtgactccctacaccccagcgccgcttccgcgtgggatgatcgagctctcagcgccgccacacgcttcgcggtccccagcgccacgtgggatgaccagacgctcagcgccgccacacggtcgggctccccagcgccgcgtgggagtgggacgaccgtacgctcggcctgacgctcgacgctccctgccagatccgacttggcgctcctcgtctcgggtgactcgggtccggtgccgctcctccctctccgcctgtctcaacactccgcccgctcggctcctactatccttcactgtcgtggcaccgccgtgactagtcatctcagatggaattttcactgaaggcagggttttgatccttgaatagtaagttttcagttaatgggccatgttgatttgattatagcagacttttttctgtatgcggggatagtagccttgacagcattaagtggcattagtgctacattcctcagcttgcctgcagggatcaggcagggaaaaattattggtactaagtatttatttagaattacaattcaccttggttttgttatagatcaatatgaaaggatgttcgatttgggcataagctaaaaagaacttgtgagagtatttgattctgcaaagcactttcgaacactaaaatgagcttaattcgaatatcccaattaataatgatttatctgtatatccttttcatctaataatagcattacttgcatatagataacatcaggtgttgttttttgtcacgtgatgcttccccttttccttccaagaagatttatgcattgttcgatgggctcctgatactgccaggagtgacccttccactgctgctaacttcgagcttgatcaaaaggtctttctactcatatgcaaggtgtaagactatcgagttatgtggtatattggtgttgatcattcatgtaatcactttgaggctatgggtgtttgccttgctcatacttatttaatttgcttccatctatgagattagaaaaaaaaa

SEQ ID NO: 7916 - DNA, 5866 bp, Zea Mays
cccgatccctccttgcttgtgctacaaatttcatacacgcatatcagaatgggtgattgtgatgcgattctttagtgatttgtgtgcctgcacacttggtctggaatgtgtcgtctaattgatgtggctcggtaggctttcttaatgcaacctcatcgtccgattcacatctactttgctttggcatcatagttggagagtgttgtcgtatagtatctccttggtggtttatatttcaccaaaatatgtagtatgcttatgtagttctgtaatatgaaaccatggacatggagactgaaggtacaagttgtaaagagagaatcacattgccgtggaagaggaagactaatcgaattggtctaatatcatttaccaagtctcgtgtgtccctccattaacaattcagtgaactgcatctgtgtagatcttgataaactttattgtgtgttttgttatatcggtatttatcttgggtatggtacatatatctgtcatttttaagcttagatatttttcaaaacatttacttaaaatgaggcaatgttactcctgcttggtgtcatttctttgatgaacaacaacatcacgattttgtactatggaagctgtgacagtcacatatttaggaatcatacttatagagtggggacaatgcaatatcatagttaaaaaaagacccaccaatccgcaaaactagcgttgtttatagaatttttttacctttgaaaccaagaatctaaataagcagtctccagtctatagcattaaaatgaactaaccagcaatacaagtgccttattgaagcttccaagaaaatcaatctattagaagtactactgtactatactactatcagtaccactctcatagtgtccacttgggctcactttgtttgcttgcacatcgtattcccttattctttcttcattgcctgtctaaactggggtctgcaaaaagtatgccttcagttatgttgctttaccagaacgatgtttgttggatcgggacaaatggacaatgttttgtaggttgccttgttctgagtagttaggctgcaccagtgtaccactctgatttgatcgttgcccgacctgcatctatctatctcatgttgaaactacaactaccacatctggaaagatctctccttgccgacctgtgaggctgtgagtaggtgttgcgctgttgctacacctagaaactattgcattgatgtttttatttgtttttccaacagagattttttagtgaaacaccatagtccttcctcatctctatcataactgtcatacagaaaaactcaatatttatggaagcttatttcattttgcattcttataccatagagcttatttgatctaaattagaaaacatgtgtttaccgggcgctgtgatttattctacttcaagtccacaactgatctaaaaacaatattggatgattttattttataccacatactactcctatttgggaaaggactattagtttcttgcatttcgttatttgtcacttatttccttgttggttacttgggtatatggaccatatgttcattttgatattacttgggtatatggaccatatgtctatgattagtttggtagttgatatatatggaccatatgtttatattgatattaaatttgttttttacgggtatcaaatatgattgtgtcgttttctaaattgcactatgcaaataggtaacataaaaaaggtaccagttcattaactaggtagttagtttggtctctataactagaactgccatcagagatcaaagttcaaacgaaaacactccatgaaaatgtgaactgaaatatatttcataattcatagaaagatacattttccaatcaccaccattccttgtcctttagattctaagtgggtattatcacaaatccacaactctgatccctatgttgtcattacctccgctctgatgtgttctctgactacacatggtctgagtcccacgactccctctgtatcaacgcctttggggacgacgagctccgggtgtggaagctacaacagggacaagatacgggagcgactgatcaccgatgcaggcatattaatgttttattttatttttttgtcatatttggtacccattttgtttgcattggccgaacgaataagatagcgacaattacgtccgaaagcatgttttcgtgattctatgccattgcaacgcggaggtgtggccgtgtgccccctccacggccatcgcctggacgacgaccgtcggggcctgcctcacctagcagctcaagtggggaatccacccatcgagcgtcttcctgacaagcggcaaacgatggtgtgatgggctctgagagcgaggagcccggatctaggagcgggcggtgaggaggccatggcgggtttggcgatgcaggagggtgcgacgtgggtttgagcgggagggacgatgcttgggtccaagcgggagggacgacggcggaggagctctgttctcgacatcgaagcgcggccccatgccatccctgacccgcgccttcgtggcctctctcccatccggtggatgcgacgatttttggcaacacgccagcctcctctagctcctgttcgagatggtctccgtggcctctctctcgcgtccggtggctgcaatgatttttggcataacaacagcctcttctagctcctgttcgagatggtggtggctccatgcttggaggaatcaggtccaccattgctgaaggtatgacatttggtacgggtagtgccattgcacatagggatgttgacactgtattgggtccgtggaccattcagcatgagactgttgtctcaaaagctgctgttgccaccccttctgctccagcggaccaacgatgaatgttgaagcttgtaacataaattctatgcttttcaaaatacgaaatgacaatgcaagtagggattgttaacctgctaacacgtggagggctcgccttcaaggggatgcaacatggctggagagaagcgaaaagaggcagagatgatagagcttgaaggatcgttgggcaagagtaatgctgttaatcaggaactagttgctttggagaaagagctctcaacacaccgaagaactggctctattgattcatttggactctacttgtatggcattgttctacgtgataaaggatgtgaaggtctagctagaacaatcttagtagaatctgtcaatacttatccttggaactggagtgcttggtcagagttacaatctttatgcaccagcagtgacattttaaacaacttaaatctgaagaatcactggatgaaagatttctttcttgctagtgcatatctggaacttaagatgcatgaagaagctcttaaaagatatgagcgtttgatgggggtcttccgctgcagtggttacattcaggctcaaattgcaacagttcagtacagtatgagggaccttgatgaagctgagatgattttcgaagaactgctcaggactgatccttttcgcgtggattctatggatatttactcaaatctactatatgcaaaagaaagcttgactgctttgagtttccttgcgcacagagtatttttgacagataaataccgcccagaatcttgctgcataattgcaaattactacagtctgaagggtcagcatgagaaatcagttttatactttcaaagggcactaaagcttaatcgaaagtacctctcagcttggaccctgatggggcatgagtatgttgaattgaaaaatagtcctgctgcaattgatgcctacagaagagctgttgatattaatcctagagatttccgtgctttgtatggtcttggtcaaatctatgagatgatggggatgccgttttatgcactttattacttccggaaatcgtcatacttgcaacccaatgatgctcgtctctggattgccatggctcagtgttacgaaagtgatccacttcaaatgattgaagaagccataaagtgctatgagagagctgcaaacagcaatgacactgaaggaatagcacttcaccaactagcaaaactgcatggcatgctggggcaatccgaggaagctgcattctactacaagaaggatttagagagaatggaggttgaggaaaggcaaggccagaattttgttgaagctctgctgtttcttgctaagcattacaagagcataggcaggtttgaggatgcagagcactattgtacaaggctcttagattacactggcccagtaagagaaggagactgctaaaaatatgttgcaagggataaaaaggttacagtcaggatttccatcaatggatattgatcattttgcactgtaaactgttaagtccacccgcaggtaaattatttggctgcgaaaattggacattaagtgtgtcatgtgcggccgcacatacgctaggcgcagacgcgcccgtgacgtacgtcgcacggctgagtgcgccgagcgggcgctgcatgagccatcgcctagtggctggaaggaaacttagagtagtaagctgttttggtaattcctagaattaaggagagctgttttggtaattccttgaattaaggagaatcttctccagtcggttatggtagttcctagaattaaggagatccttctccattcggttaagccattggctatatatatttgtaatcgtttgacagaagggggggggggggagaaatcagttatctccaatcctctctctctctctaattaagcctgcggtagaggggtataacctcggagcgcggctacgaactacgtagccggggttcggctagttaggggttcggtacccttgacaaagtgtcaagataacattgcttccttactatgtccatcttgcattgcatacaaggaggaatttaagctttcaagcaaacatctgtagggtaagactagtcatgaactagggcagttgaggtgtggtactcacccgatacatgactggtggcctgtttgttctagaagctagaagttgaaaacaaacaactcagttgttgagctggcttttgaaaatctggtttccgaggcaataaactaaaaactgaaaagcatgctgagacaagcttttctgtcttttggtgcgctaagaagctaaaattttactacagaagtcaaaataaaaagccaacagccagaaactgaaagccccaaaactgtagttcaaacaaagaggccctgaaggaaatgactctaatgagggctgcccacctgatgaaagttcaaatgcatatctcaactgggaattacttccaatcttccttcacagtgtgatgcttattgtttgtatcctcgctatgcgactccatacttctggatatgatgacctactgcgcatgatgctcgcttctagttcctggaacttgacaacaaggagaaccaggcgcctgcatggtgcaaagatgagcgtcattggaatgatccagacccctaacccaaatatcagcatagctgccttgtggagagctctgaatttctgtgggtttggcttccttcaccggacaactctgcctaaggcatcagaatctgtacttggattgcgttgcgtggtaacattgtatgaaagtgagattgttacaatgagtataagaagtttatgtagaagaaggaaatctgacgggttaggcacaattttgtacatacagataaattggaaagctataacagagactctttagttgttgtccttgtactcgatgttgcaactaatctctctctccatttgttatagacaaatccatacacattctttagaaatattttattttcagacacataggtagtgggctgcatattttaatatgtgtagaacatattctgtcagtatttatttggccaaacctcgtatc

SEQ ID NO: 7917 - DNA, 1842 bp, Zea Mays
gtagctggctttggagtacgagtggcagcctcacgctcactttaccgaccctttgcgacgccaaccggccaaagctcccggctcggcggcgccgcttcgttgatggattggtccacccggttccgcatccgaaacccgtcgccggccgcgtcccactttgccggccacaggcggagtcaagcggatagggtatttctccggaccatggcgtcggcggccccggtggaggagccgacggcggcggccgaggcgaaggggcggctgaccggtgactccttcatccggcgccacctcaggaccctcgccccgtatcagcccatcctgccctttgaggtgttatctgctcgccttgggcgtagaccagaggacataatcaagttggatgcaaatgagaatccatatggtccacccccggaggtcgctgcagcactaggtagtctcaagttcccctatgtgtaccctgatcctgaaagccgccaattgcgtgctgcccttgctgaagattctggacttgaatctgattacatacttgctggatgtggcgcagatgaactaattgatttaattatgagatgtgtgcttgaaccaggcgacaaaattgttgattgccctccaacattcacaatgtatgagttcgacgcttcagtcaatggtgcacttgttatcaaggttccaagactgcccgatttttccctagatgttgatctcattgtcgaagtggttgaacaggaaatgccaaaatgcatatttctgacatccccaaataatccagatggcagtgtaatcaatgatgaggatcttttaaagatacttgatctcccaatacttgtagtgctggatgaagcttatattgagttttcaagccttcagtcaagaatggcatgggttaagaagcatgataatttgattgttctccgaacatttagcaaacgggcaggtttagctggtcttcgtgtgggttatggtgcatttcctctgagcattatcgagtatttgtggcgggccaagcagccctataatgtttctgtggccgcagaagtttcagcatgtgcagctttacagaatccaacttatctggagaaagggagaggttgtttaatcttctcaagggaataccattcctgaagccatttcccagtcattctaacttcattctctgcgaggtcacgtcaggaaaggatgcaaagaaaataaaggaagaccttgcgaagatgggagtgatgatccgccactatgacaagaaggaactgaaaggctatattcgtatctcggttgggaaacccgagcacactgatgcactaatgaagggcctgaatgcacttcgattgtgagagcttttgcacacgatcaagcttttgcacactatcaagcttttgcacaccatcacatcaatgtaaacagtgtattcctttgcggatatatatccgtcaggctggatgcagtctataagaggagattgcatcactccaacgcatgtgaagcccaaacagacaagggtcatgtgggtttcactatccttttgtttagcaagttgaagtctgtttttgttattcagtggcataacagctattcacaagattatcttgttcagaacaagtgtagcagttgaattcctggtaggtggtttctgatgttgggttgagacttgagagaactgaacattgtgtaggtataaataaaggccaacatagcaatgctgttgtcttagtacttgtatcaaaggtcattcagtcgttgcaaatttcgaccaaataaagggatgaaatgaaagcttggaaacggaacagattctcatccataaccgccgtgacgacaatgtgtaaacgtcgcgacttttattta

SEQ ID NO: 7918 - DNA, 1174 bp, Zea Mays
accatcgcaaatttctcctgttcgccacaacggcaaacaccgctccagccgccttcgctgctgctcgtgtgtctcgtggaagctccgcggctggaccatggacccggacctggacctcgacctagacatggatatggagacgctcgccggcgacagcggcggcgaggccgagcgcaacgaagccgccgaggccgaggctgaggtggagcggtacgaggccgccgaagccgaggccgacatcctccgcgaccgattccgcctcgccgtcatcagcatcgccaccgccgaaggaaagaaggccggaatgacggtcgccgaccccgttgtttcctgcatcgccgacttggcgttcaagagcgcagctagcaaaggatgcagagttgtttgcacagcatgccggtcgcaaatccgtcaggatggatgatgtcatactcacagctcacaggaacgagcatcttatgggcctgctgcggaccttctctcaggagctgaagggaaaggagcctgccagtgagaggaagagaaagaaatcgtccaagaaggatgagacggtgatcgaggtctgatttcagatctgtcctctttttttttagagaggaaggcatgcatttttatctcgcgaggtcctcccggcttgtacagcttccttgtgtcgatactatcttccatgtcatttcgcagaacttttcttctacgaaccctttcatcctagtcagtttttctagtcagttattgatggtacttgagttgagcttgctttctcaactgcacatagcattagtactgagtccaggagctgtccctgttcatgtggagttgtggacaggaaagatgagctcgcgggcagcgtgtctcttctctcagtccgtcgataaaagttacattcaacaattggtccttttctaatactcttttcattctaatttataattgggtttactttttttatcccaagtttaatcagctcgtcttatttgaaaagtttcataatttttactgtagtatcgcttaacataacatagtatcgcttaacataacatattttaattgtgtcttagaatttttcatttttttacataaaatataagccggttaaacttgataaaaataggtaaacgaattataaattgagacgaaaaaaagtatatcttgtattactatcgatgggaacatt

SEQ ID NO: 7919 - DNA, 2512 bp, Zea Mays
ggcgctgctctcccgttcataatggtgaggtctgacggaaatcgagatcccaaccaaattcgttttttttagcgtgggagaagcgcggcgccaagacggcattgagctcgtcggcggcgctttcgaaagctggagcacgcgaagagcacattgccagaactagggttcaacaaattactttccatgatgtcagcgtgtccactgcttgaaccgaaatcaagattagaccggtgaagtgcaagcaaaagaaccccttctggaagatggaatcaagaacccaccgagttacatttgctagtttgcagggaatcttgcaaaggccggtgtggcccgggattggagatcggtgaaaggcgaatatgaggggctggaaacagaccgacaatcgcttcgtgaaaactgtgcgcgtgaattggctccagtagagcatcaaaagcattaatggaaagagccccatagtggttggaccttggggagggacaggagggtacccttgggatgacggcgtgtactcaacaatacgccagatcgtgattggccatggtgcagctattgactcaataaggattgaatatgatctgaaaggaaggtcggtttggtcagaaacgcatggaggtactgatggtggctccgaaacagataaggtgaaactagattttccagatgaagtcctcgtgtctgtaagtggacactacggatctgtctgcgggacaccggtcatcataagatcgttgacgtttcagagcaacagctcgacgtacggacccttcggcaccgaggatggcacacctttctcactcccagttagcagtggcaagatcattggattccacgggcggtctgggtcgtatctcaactcaatcggtttctacctgaagcaggtgcattttccaactccagtgaatccttctccagcttcacctctgagcctcccgagtccacaaagtagaaacagcgcctatggcctcaccggtggcgacgctagacctgacatggttctcgccgtgcgagacagaggagacagctatgctgtctacgcgagcaatcaccccaaacagcagtacacaaacccgtcaccggacggagcaatctggaacaagatggtttctgtccccagttactacggagatactacaggagctgcagccgtgggcggcagccctcagacctatggcccctggggtgggagcggcggcaccatatttgacgacggcgtgtacactggcgtgtggcagatcaacttgacgcgcgcagtgggaatctcttctatcaaggttctgtatgatcggaacgggcaggccgtgtggggtaacaagcatggtttcagcagcggtgtcataccagacaagataatattcgacttcccgtcagaggtgctgactcacataaccgggttctacgattcagcaataatcatgggcccgaccgtggtcaggtctctgacgtttcacacgaacaagcggacgtacgggccgtacggcgatgagtacggcacgtacttctccacgagctttaccaatggaaggatagtggggtttcatggccgggaggggtggtacatcgacggcattggagtccatgttcaggaaggcaaggtggcgcagcagcggtttgttagcagaccgaagactccgactagcccattggtgcattacaacatgctcgcccaggcgccgagtgctacttacacggacggcgaggttgcttatggcatggtgaaagaaccggtcccgatgggaccagggccatggggtggggagggaggtcgggcatgggacgacggggtttacactggcgtgaagcagatctacgtcatgagaggagcgttcatcgggtcgatacagatcgagtatgacaggagcggccactccatctggtcttcaaggcacgggaacagcggccacatcacccacagggtgaagctggacttcccgcacgaagtgctgacgtgcgtgtacggctactacaacacgagcaaggaggacgggccccgggtcctgaggtcgctgacgttcctcaccaacaggggcaagtacgggccgttcggcgacgagttcggcgcctacttctcgtcggcgacgacggaggggaaggtggtggggttccacggccgcagcggccagcacctggacgccatcggcgtgcacatgcagcactggctcggggacaggaggcctgcccccaagtacgtgctgtccaagtacctgttctgattcatcacctggctgctcgggttacacgtatctaattttgggcgggtggattctaattacttgtatcatcaccatttattggttcggggcatactcatgcttgatttcgtatcgattaattgaaaagaagtacatcatctctctctctctctctctctgttgaatttcaagacattctttgtcagttatgatgcccaaatattcattgtgcctctgcttgttatggacgcagtacgcagatgcagggtgctccatctttttacgagttcttttttttctgtaagaaaagtaggttccct

SEQ ID NO: 7920 - DNA, 2557 bp, Zea Mays
cttacgccttcgggcgagcggcgctgctctcccgttcataatggtgaggtctgacggaaatcgagatcccaaccaaattcgttttttttagcgtgggagaagcgcggcgccaagacggcattgagctcgtcggcggcgctttcgaaagctggagcacgcgaagagcacattgccagaactagggttcaacaaattactttccatgatgtcagcgtgtccactgcttgaaccgaaatcaagattagaccggtgaagtgcaagcaaaagaaccccttctggaagatggaatcaagaacccaccgagttacatttgctagggaatcttgcaaaggccggtgtggcccgggattggagatcggtgaaaggcgaatatgaggggctggaaacagaccgacaatcgcttcgtgaaaactgtgcgcgtgaattggctccagtaggtcagagaatccagttccctcgttttcttccagagcatcaaaagcattaatggaaagagccccatagtggttggaccttggggagggacaggagggtacccttgggatgacggcgtgtactcaacaatacgccagatcgtgattggccatggtgcagctattgactcaataaggattgaatatgatctgaaaggaaggtcggtttggtcagaaacgcatggaggtactgatggtggctccgaaacagataaggtgaaactagattttccagatgaagtcctcgtgtctgtaagtggacactacggatctgtctgcgggacaccggtcatcataagatcgttgacgtttcagagcaacagctcgacgtacggacccttcggcaccgaggatggcacacctttctcactcccagttagcagtggcaagatcattggattccacgggcggtctgggtcgtatctcaactcaatcggtttctacctgaagcaggtgcattttccaactccagtgaatccttctccagcttcacctctgagcctcccgagtccacaaagtagaaacagcgcctatggcctcaccggtggcgacgctagacctgacatggttctcgccgtgcgagacagaggagacagctatgctgtctacgcgagcaatcaccccaaacagcagtacacaaacccgtcaccggacggagcaatctggaacaagatggtttctgtccccagttactacggagatactacaggagctgcagccgtgggcggcagccctcagacctatggcccctggggtgggagcggcggcaccatatttgacgacggcgtgtacactggcgtgtggcagatcaacttgacgcgcgcagtgggaatctcttctatcaaggttctgtatgatcggaacgggcaggccgtgtggggtaacaagcatggtttcagcagcggtgtcataccagacaagataatattcgacttcccgtcagaggtgctgactcacataaccgggttctacgattcagcaataatcatgggcccgaccgtggtcaggtctctgacgtttcacacgaacaagcggacgtacgggccgtacggcgatgagtacggcacgtacttctccacgagctttaccaatggaaggatagtggggtttcatggccgggaggggtggtacatcgacggcattggagtccatgttcaggaaggcaaggtggcgcagcagcggtttgttagcagaccgaagactccgactagcccattggtgcattacaacatgctcgcccaggcgccgagtgctacttacacggacggcgaggttgcttatggcatggtgaaagaaccggtcccgatgggaccagggccatggggtggggagggaggtcgggcatgggacgacggggtttacactggcgtgaagcagatctacgtcatgagaggagcgttcatcgggtcgatacagatcgagtatgacaggagcggccactccatctggtcttcaaggcacgggaacagcggccacatcacccacagggtgaagctggacttcccgcacgaagtgctgacgtgcgtgtacggctactacaacacgagcaaggaggacgggccccgggtcctgaggtcgctgacgttcctcaccaacaggggcaagtacgggccgttcggcgacgagttcggcgcctacttctcgtcggcgacgacggaggggaaggtggtggggttccacggccgcagcggccagcacctggacgccatcggcgtgcacatgcagcactggctcggggacaggaggcctgcccccaagtacgtgctgtccaagtacctgttctgattcatcacctggctgctcgggttacacgtatctaattttgggcgggtggattctaattacttgtatcatcaccatttattggttcggggcatactcatgcttgatttcgtatcgattaattgaaaagaagtacatcatctctctctctctctctctctgttgaatttcaagacattctttgtcagttatgatgcccaaatattcattgtgcctctgcttgttatggacgcagtacgcagatgcagggtgctccatctttttacgagttcttttttttctgtaagaaaagtaggttccct

SEQ ID NO: 7921 - DNA, 3247 bp, Zea Mays
cttagaccagccccgattcggtcacgtcaggccgtcgcgtccgacgcttcgcttacgccttcgggcgagcggcgctgctctcccgttcataatggtgaggtctgacggaaatcgagatcccaaccaaattcgttttttttagcgtgggagaagcgcggcgccaagacggcattgagctcgtcggcggcgctttcgaaagctggagcacgcgaagagcacattgccagcgtgtccactgcttgaaccgaaatcaagattagaccggtgaagtgcaagcaaaagaaccccttctggaagatggaatcaagaacccaccgagttacatttgctagggaatcttgcaaaggccggtgtggcccgggattggagatcggtgaaaggcgaatatgaggggctggaaacagaccgacaatcgcttcgtgaaaactgtgcgcgtgaattggctccagtaggtcagagaatccagttccctcgttttcttccaggtctcctcaaccgttaacactgcctcctgcttgcgtgttgcgatgactagtggctggtttggcactggcgtcctttactttagtcatcctataaattggcaggggcatgcttcttcttgtcttattaaactcacaacacggtagcagggggtggtagtagaaggcataagctctgttctctgaccctcaagtgtttgagcctatttgcgcaacgaaaaaatggtactttctattgttcgtttgtttgtaagcttgtatgtgtgcgtgcacacacatatttctatgtttgttttccaaaacatatttgtgtccataatgaacttgcaagtatgcatagaaccttaaaaatgccatcgtataattatgcagaatagttgggatcacagcacatgacaaacaatttggagttttcatttgccagtgttggtaattggacgcttttggacctttttttggaaatcttagaacctggaacaggacttgcatccaatgacgcttttttacttccatgaaaaacttgccgactgaatgtgatagcagcacttcgattttgctagatatgaatttaagttgaagttaaaaacacaacggtttttgtgatatatcatatagtttttagaattctagttctattaccatggcctaacaaaaaaaattgtgatttatgtccactagagcatcaaaagcattaatggaaagagccccatagtggttggaccttggggagggacaggagggtacccttgggatgacggcgtgtactcaacaatacgccagatcgtgattggccatggtgcagctattgactcaataaggattgaatatgatctgaaaggaaggtcggtttggtcagaaacgcatggaggtactgatggtggctccgaaacagataaggtgaaactagattttccagatgaagtcctcgtgtctgtaagtggacactacggatctgtctgcgggacaccggtcatcataagatcgttgacgtttcagagcaacagctcgacgtacggacccttcggcaccgaggatggcacacctttctcactcccagttagcagtggcaagatcattggattccacgggcggtctgggtcgtatctcaactcaatcggtttctacctgaagcaggtgcattttccaactccagtgaatccttctccagcttcacctctgagcctcccgagtccacaaagtagaaacagcgcctatggcctcaccggtggcgacgctagacctgacatggttctcgccgtgcgagacagaggagacagctatgctgtctacgcgagcaatcaccccaaacagcagtacacaaacccgtcaccggacggagcaatctggaacaagatggtttctgtccccagttactacggagatactacaggagctgcagccgtgggcggcagccctcagacctatggcccctggggtgggagcggcggcaccatatttgacgacggcgtgtacactggcgtgtggcagatcaacttgacgcgcgcagtgggaatctcttctatcaaggttctgtatgatcggaacgggcaggccgtgtggggtaacaagcatggtttcagcagcggtgtcataccagacaagataatattcgacttcccgtcagaggtgctgactcacataaccgggttctacgattcagcaataatcatgggcccgaccgtggtcaggtctctgacgtttcacacgaacaagcggacgtacgggccgtacggcgatgagtacggcacgtacttctccacgagctttaccaatggaaggatagtggggtttcatggccgggaggggtggtacatcgacggcattggagtccatgttcaggaaggcaaggtggcgcagcagcggtttgttagcagaccgaagactccgactagcccattggtgcattacaacatgctcgcccaggcgccgagtgctacttacacggacggcgaggttgcttatggcatggtgaaagaaccggtcccgatgggaccagggccatggggtggggagggaggtcgggcatgggacgacggggtttacactggcgtgaagcagatctacgtcatgagaggagcgttcatcgggtcgatacagatcgagtatgacaggagcggccactccatctggtcttcaaggcacgggaacagcggccacatcacccacagggtgaagctggacttcccgcacgaagtgctgacgtgcgtgtacggctactacaacacgagcaaggaggacgggccccgggtcctgaggtcgctgacgttcctcaccaacaggggcaagtacgggccgttcggcgacgagttcggcgcctacttctcgtcggcgacgacggaggggaaggtggtggggttccacggccgcagcggccagcacctggacgccatcggcgtgcacatgcagcactggctcggggacaggaggcctgcccccaagtacgtgctgtccaagtacctgttctgattcatcacctggctgctcgggttacacgtatctaattttgggcgggtggattctaattacttgtatcatcaccatttattggttcggggcatactcatgcttgatttcgtatcgattaattgaaaagaagtacatcatctctctctctctctctctctgttgaatttcaagacattctttgtcagttatgatgcccaaatattcattgtgcctctgcttgttatggacgcagtacgcagatgcagggtgctccatctttttacgagttcttttttttctgtaagaaaagtaggttccct

SEQ ID NO: 7922 - DNA, 1454 bp, Zea Mays
agttttggcttcccctccgccactctcgagagggccacacacaaaaaccccaatgcgagcgcccctggcttgtcggcgtcgcctccttcagccaaaaccctagcttgcatacgcgcccgaacaaagcttcgtctgcgaggggcgtcctcctgccgccagaagctttcaggagcatcagcgatggtgtggttccaatgcgaggactgtggcgagaacctcaagaagcccaaacttgccggccacttccgctcctgctccgcgtacaagctgtcatgcatcgattgcggcgagttattcagccacgacaccgtgcaggggcacacccagtgcatctccgaggccgagaagtacggtcctaagggacagaccaaaccatccaatggtgcacagggtaaggcagataagccaaagccaaatgcagatgtcgatatcaatgttgggctgtcgacacggcctccttggttctgtagcctatgcaagaccactaccacaagtaagcaaactctcttactacatgctgatgggaagaagcatagggcaaaggcgaaagccttccatgtgtctcagaaacaaaaagatggtgcagaacaaactccagatgtgaaggaagctggagttgtacccacaaaagaatctgctcaagtaaatggtggcgtgagtggtgatcatgaaagaaatgaagataaagatgctgggaaaaggaaacgaatggatgacatgaccatagagccaggtaacacaaaaagacagttgacacagtctggagatgagaagtcagaaaacaaagcgaagagtaaggccgatgaactagcaagtggtaccgactgcaaaagtgttcaaaagcaaaagatcaaatggaagaagattattactaaaacattgaagaacgcagatggagttatgaagctaaagaagctacaaaagctagtctccaaggagcttcaggaatgtggtgtctccaaagacaaggaggagctccgtgctaccttgatggataaaatagcttcaagttccagattttatgttgatggcaagaatgttagactggtggccaagaatgaagaagaatcttagaaagaggttgtcagtcatttttttggcattgttgctggtttcattctttggtgtcaactttcagatggcttatagccaagtgttggttaaattgagtccatgaaccatcaattatatccatgacgtgtagacggtatgggaatttagcatctgaattttctcgacaaccgttcaaaagtgaaatgtttactctttatgctgtcaagcaatggcaatgatggttgatagtggcggcgtagtcgcaggggagagatgagagatgatacaaataatgttcattggatttgagtaagggagaagatgttatgtagtgctctgaaccatcgattttgatggtgtgataattctgggtgcaattcgtttggtggatttagtagata

SEQ ID NO: 7923 - DNA, 2457 bp, Zea Mays
gcacccgctctcgtactcgtaggcaaggcaacttcgcaaaacggcaaaaaggcagccacgccttgttcatttttatttttttaatctcctcccgtcggcgaaattttacacgccagcaaaaccgccctgaggatgaaatagaaaaaaccccaaacaagccctaacgcgtcccccggaaccagaacaagtccagtctgtccagaaatacattagaaaaaagagccaaagaggagaacaccggccggcgaggtggacgaagcggcccgccgaggaaatggcgtcgatgcagagctggcgcaaggcctacggcgccatcaaggacaccaccaccgttagcatcgccaatctcaactccgacttcaaggatctggatgtggcgatcgtgaaggcgactaaccacgtggagtgcccgcctaaggagcgacacctgcgcagggttgttgcagcgacgtccatcaccaggcctcgggcagatgtcgcctactgcatccacgcgcttgcccgccgtcttgccaagacccgcaactggatcgttgctctaaaagcacttgtagtgatccatagacttcttcgcgagggtgatcctacatttcgagaagagcttctcaactttacacagaggggacggatcctgcaactttcaaactttaaggatgactccagtccaattgcttgggattgttctgcctgggtgcgcacatatggtttgtatttggaggaaaggttggaatgcttcagagttctgaaatatgatgtcgaagctgagcgcttgtccaaacaaggtcaaggtcctgaaaagggtcacagtagaacgagagagttggattcacaggatctgttagagcagctgccagcattgcagcagttactgtaccgacttgttggatgtcggcctgaaggagctgcaaataataactacttggtgcaatatgctcttgctttggtgctaaaagaaagctttaaaatttattgtgcaataaatgatggaatcataaacctcgttgataagttttttgagatgccaagacatgatgcacttaaagctcttgaaatctacagaagggctggccaacaggctgggaatctatctgatttctacgagaattgccggggattagaacttgctaggaattttcagtttcccactctgagggaggtgagggcttgtactctgtctagtcttcgctatgtgcactggattatgttatgacatcttttacatgagaaaattctcagccaccacaaacatttcttgctactatggaggactatgtgaaggaggctccacgcatggtcccagttcgagaacccctggaacttcctgagaggctgcttcttacatacaaacctgaagaatcagaggaaattcttgagcctgctcctgttgaagaggaaaaagtaccagttgaagaacctgttcttgtaccacctgttactgaagttgtttcacctcctcccaaggctgaggtgcccgatactggtgacttactgggcttagatgatacaaatcctgctgtatcagctatagaggaaagcaatgctcttgccttggctattgttccaacagatggcgcttcaacaactggtaacactgcatttcaagataaggggtttgatcctacaggatgggaacttgcccttgttactgcaccaagcaatacaacttcatctacttctggtggtggactcgacaagctcattttggagagcctttatgatgatggggcctacaggcagaggcaacaacaacagctgtatggttcagcagctcctaatccattcatggcaaatgatcctttcgcgatgtcgaaccaagttgctcctccaccatcagttcaaatggctgccatgtctcagcagcatcagcaaatcccaacgatgatgcaaccaaatccctttggaccacctatgcatccacaggtgagcatggcccctgcaacaaacaatccctttctggatgctggcttcggggcattcccagcggcgaacaacggccatcagcaacacaacccatttggcagtgcccaacttctgtaggtcacttagtcacaagagcaaatttgtgccccagcagatgcgatttttgtgtgattatatcatgcattgtgctggacctttcttgcatgtgacgcgtgtattatgttatggcttcaccacacggagagctgtgcctatgtcgtgacccaactcttgttgtaaagaaattagtcacctgtgtaacatccaatatatgtcaataaacagtaggcagtgttattacatctataaacaaaagaacagtggtatgtaggaaattcttaatattgtttattccattgctttttatcttcttggaaagctgttccgttgttgtttgattgccactcttttgcatgcattgtgattgatcatcatgtgctcattcgaatattctaagccaataatggagcgttgctgtagctactacctttatatttt

SEQ ID NO: 7924 - DNA, 1737 bp, Zea Mays
acccgcactggccccaccgggcggcagacgcctggctgggctgcggccaagtggccacctcctcgcgtccggcctggcgtccccatgcacgcccggcctcgccttcccttccccgatatctcttcgtctcgccgccgccgcgcgcgcactctcgtgtgacgtgtcccagcagtccgtccagtccctggcttctctcccccttgttgttcttggctccgcgatggcggtgggttgcttcaaccccgtgctctcgccgcttgttccttcgccgccgggtaggcgcgtccgagcggcgctgcggtgccggtggcatcgtcacccgctgaccgcggtctccctccggcggctcccgtgcggcgcggcagctggtcgtggcacgcggcggctcgcggcggcggcagagtcgcaggccgtgcaggagcagccggcgcgggcggaagaggccggcggggcgggtgccgctgaggcgtcctccaagctggttctggtcgttggcggaaccggcggcgtggggcagttggttgtagcatcattgctgagcaggaacatcaagtcaaggttgctcctaagagatccagaaaaggcgtcgtccctgtttggcaagcaggatgagagtgtactacaggtttacaaagcggacacaagaaaccctaatgatttggatccacagatgtttgagggggtctcttttatagggagttacgcatgtgatatgttgtactggaactacagcatttccgtctaagcgctgggatggagataacactccagaacgtgtaggtatgtactgcctgatattctgcagttgaagttaaactttcacccaagatgatgcagttaatgttcaaaaagaacatgcacttcaatttgtacttgaataattcagacaaaaggattttctgcaaggataatcttgatggagcttaggaccttccaattccaaactgaagcaaataaaagattgggatggcatcagaaatcttgtcagtgccttgccacagacagtcaagagactggttcttgtgtcatccattggtgttacaaaatacaatgagataccatggagcatcatgaatctctttggtgtgcttaagtacaagaagatgggagaagactttgtctgcaattcagggataccattcacgattattagggctggaagattgacagacgggccctacacttcgtatgatcttaatacacttcttaaagctacagctggagagcgacgagcagtagtcataggcaaaggtgacaagcttgtgggggaagttagcagacttgtggtagcagaagcttgtatccaagctttagatattgaatccactgaaggacaaatatatgagattaactcagttaagggtgaagggcccggaactgacccagagaaatgggaggagctattcagatctgctcggtcagactagtggcattctgcaaagcgtagtaacgtaatgtaggaatatgcatcgtaatacaatgtaatccatagagtgcagccctaattcaatagtcactgaacagtagcgatcatgtagagaatatttggtttgtgtacatagtatgagcattcatatatgacgattatacctcctaaaagtgatagtttttgttggaaagtaaaatgttcagtgttatccttatccactttcagacttgattttattttctttttctcggaatgcaatcataatttgattgttcatttcaatatatatccttatttttcaaatatgt

SEQ ID NO: 7925 - DNA, 2940 bp, Zea Mays
caccttcatccacgcgagggcccccttgacccaccaatccaccattgctcgctataagactccgtggtgccgcacggctccgccgccggcgaggcctcatctcggtttactataagagtataagtacgtctccgcaacaagctaatcttttttttgccccctccttccacgtccccaccctgccgtcgtcgctactcgcatagagattcgcgcggccgtgtcttgctcgcgcctgcccccttccttccttgtcgtgccagcgcccagatctctcgctcgccggcgctcgggccagatctgggtgggggctcggaggcggagccgggcgcaggtttggtttgacccaaggggcgaggaggagagggaagaagaccccggacgccatggagctggcggttggcggcgggatgcggcggtcggcgtcgcacacctcgctgtcggagtcggatgactttgagctcacgcggctgctcagtaagccgcggatcaacgtcgagcgccagcgctccttcgacgaccactctctcagcgacgtctcgcactccggcggatacggcaggggtggcttcgacggcatgtactcgcctgggggcggcctgcgctccctcgtcggcacgccggcctcctccgcgctgcactccttcgagccccaccctatcgtcggcgacgcctgggaggcgctccgccgctccctcgtcttctttcgcggccagccccttggcaccgttgccgccgtcgaccacgcgtccgaggaagtcctcaactacgaccaagtgggctgtcactccattttatagctccctcttgtgaaaaattgattattacttgtaatagacattcatatcgcttagaaaatggtataaatgtatattcgacacattcatatcgcttagaaagtatcagttaaaaaaagtcatttaggtagtattgtaagtctcttatgctcttttatgtctaaattttaactgacaggcgtttgaagtatttatattgtaatttatgccttcgaatttaaaatttaggagtatcttgttatccagtgcatgtatatcaaattacattgtaattctacaactgttactaccaaattgaaaaatggttctatcgaattgtataatcatttttggtggcatacccttagataaaaatcttagatccaccactgttgttgacacaagttgaaaattatttgattccaagcttgtcattcgaagctcgtaggagtacatatatcttattcagggtaccttggtgggcaggtgtttgtgagggatttcgtgccgagtgcactggcgtttctgatgaatggcgagccagatattgtcaagaacttccttctcaagaccctgctgctgcagggctgggagaagaaagtcgaccggttcaagcttggggagggagccatgccggctagcttcaaggtgatgcatgacgccaagaagggggtcgagaccctacatgctgattttggagagagcgccattgggagggttgcacctgtggattctgggttctggtggattatactcctccgggcctacacaaaaagtactggcgatttgacgctggcagagacaccggagtgccagaaagggatgaggctcatactcagcctgtgcttatctgaggggtttgataccttcccgacattgttgtgtgctgatggttgctgtatgatagatcgcagaatgggtgtatatggctaccctattgagattcaagcccttttctttatggcactaaggtgtgctcttcaaatgcttaagcatgataatgaagggaaggaatttgtagagaagattgctacccgccttcacgctttaagttatcacatgcgaagttatttttggctcgatttccaacagctaaatgacatttatcgttacaagacagaagaatattcccacacagctgtcaacaaattcaatgttattcccgattcaattccggactggttatttgactttatgccttgtcagggtggttttttcgttggtaatgttagtcctgccaggatggacttccgatggtttgcacttggaaacatgatcgctatactttcttctctcgcaacacctgagcaatctaacgctataatggatcttattgaggagcgctgggaagagcttatcggtgaaatgcctctgaagatatgttatcctgctattgagaaccatgaatggcgaattgtgactggctgtgatccaaaaaatactagatggagttatcacaatggaggatcgtggccagtgcttctgtggctgctgactgcagcctgcatcaaaactggacggccgcagattgcaagaagagcaatcgacctagcagagaggaggctgttgaaggatggctggccggagtactatgatgggaagcttggtcggtatgttggcaagcaggcgaggaaattccagacttggtccatcacggggtatttggtcgccaagatgctgttggaagatccttcacatcttggcatgatcgccctggaagaggacaaggcgatgttgaagcctgttttgaagcggtccgcgtcatggacaaattgagatggtgacgaaaatttttagggaggcgaagtcagctgaaaacacgaattcctgtggtagcgtctccttgtctgctgaccccttcatttgacttccaaaccaggatggtttgtgtctacttggttgtacaatatctcagctcgtttcctgagttgaaaaaaagaagcaactgcagaaatgggcattttatttttttctctctctttctcaatctctgtaagaagacactctgattcttgcttaggtcataccctataaataatggatccttttggttaggctcaactttgttgtaccagtggactatacagatgagtaagctgattccagcttccctgtgaagcataagtgctatttctaacgaatgaataagctactttccctgcgttgc

SEQ ID NO: 7926 - DNA, 2228 bp, Zea Mays
ctcgtcagactttcagttcttccaatctcttgcaagcacaactgcacaagggaacaggaggaaaaaagagcgagaactcgcagctgacgcgcacacggcaagccccaatcggagccgcggaccggatcagaactaggtctcgaggcgatggcaagcggaggcgagggcgcagggagcggcgaatcccctcccgccgcctcagtggaggcggcagcggtcgaggcgacgctgcacatccggtgcgcgaacggctccaagttcacggtgcagacggacctgggcgccacggtgggcgcgttcaaggaggtcttatccggtagctgcggcgtgccagcaccgcagcagcgcctgatctacaagggccgcatcctcaaggacgagcaaaccctagacagctatggcgttgagacggatcacacaattcacttggtgcgaggtgtcgccacaccagctgcatccagtgcacctgctgctgccaacccccttgcttcatttactcctagtagtggccctgcaggtggcctgggaggcctatttccaggtgttgatgctccaggaaatgacaggccatcaggtatatttaggccaggatttccagaattagagcaagttgagcaacatttaagccagaatcccaacttgatgagggagataatgaatatgccggcaatgcaaaatctcatgaataaccctgatttaatacgtaatatgatcatgaacaacccacaaatgcgcgagatcatggatcggaatcctgatcttgcccatgtgctcaatgacccaagcgtcctccgccaaacactcgaagctgctaggaaccctgaaatcatgagagagatgatgcggaacacagacagagctatgagcaacattgagtcttctcctgaaggttttaatatgctccgccgcatgtacgaaactgtccaggagccatttctaaatgcaacaacaatgggtggggaaggaagcacagcctcaaatccattttcagctcttctcgggaatcaggggtctagccaacctggtcaaggtcaacctgcaacaaatgctccaactactggttcagaatcgacaactggaaccccagctccaaatactaatccacttccaaatccctggagcaccaatgctgggagtgcacaaggtgcaacacggactcctagtggcaatgcaagaactggtggtgttgggggcactggtgccaccggtggactgggaggattgggttcaccagaattgagtagtttgcttggtggtcttgctggcagtccaagaactggttctgctggtggtttaggaggttcgggttcaccagatttggggagtatgcttggtggttcacctgatgtttctccgttcagtcagatgttgcaaaaccctgcaatgatacagatgatgcagaacattatgtctgacccacagaccatgaaccagttgcttaacctcaacccaaatgcacgcaacctgatggaatcaaacactcatatgagggaaatgtttcaaaatccagaatttcttcgccagctgacatcgcctgagactttgcagactttattaggacagcttggtcaacatcaacctagccagggcgggaacaatgcaggcagtgccacaggtacacggggaaaccctagccttgacaccttgatgagcatgctcagcgggcttggttcgggaggtggtctaggtgttccaaatacctccagcgtgccaccggaggagctctatgccacacagcttactcaactccaagaaatggggtttattgacaccgcggagaacattcaagcactggtcgctactgctgggaatgtacatgctgcggtggaacgccttcttgggaaccttggacagtagctaacccgagcgagccagacactattcgtaaatcttaaaattgtcgcgcatatgcaggagtgttcggcttaatgttcctcaagccccagaatttgaaggcggcggcgtccatagtcccgaaaacaaaataatgaaagagtcaggcagccgtttacttttgtcatacatggtggtcttgtcttttttttttacagcgatgtattttgcaatgttgattggtgtacatacgtatcggtcggatgttacctccctgtagtctgtcttttccaactatcgattcttgatttccaatatactatcaaatcaaattattatctattctaatccaacgggtggtttcctctgcagacttgtgtcaatactgatcgttg

SEQ ID NO: 7927 - DNA, 814 bp, Zea Mays
caggtatgtggatgatgggagaaccttttggcagcacatagtcacttcttctgcaggatgttcagatgcacaatactttgaggaactttatcaatactttatgacagaaaaggcctcgaagctttgtgaccctgatgctgaaaatgtattcaaagctttgaggaaagctggtgttaaaactgcagtggtctccaattttgatacccgtctacggccacttctgcaggccttgaaatgtgaccactggtttgatgcagttgcagtctctgcagaggtttgtttacctgtcctgtcatttcttctactcatgttagaaacagatggcttagttgtagaaatcctgtaccttttgcattccatgttatcatgtttgtattatgtactattattaccttctgctacggtgacctagtgatgtaatggttcttttcctatacaaaaaatgtggatattcagttcaaaattttattgccatataatcacaataccattgtttccaagcaactttccatgttgaaatttcttgtttctgtgtactgtatcaggttgcagcagagaagccaaatccaataatatttttgaaggcctgtgagttcataggtgtgtagcccgaagaagctgtgcattttggtgacgatcgtagaaatgatatatggggagctagagacgcaggctgtgatgcttggctttggggcagcgatgttcgctcttttgaattgaggtagaaccgaatatagctttaggggtgtgttggtcctaatgacgagatagaatgagacgattccttacaagaccatctcaatgccattccgtt

SEQ ID NO: 7928 - DNA, 1884 bp, Zea Mays
atgcgccggcgaaaacctaggagtttgatgaaagttgaaagcgaccacttgagatttgaaagcggcttgcccgggtgccggccccgggccccgtccaacccccccccccccccccatcttgtcgttttttgcgcgccgtcgcctccctttctcccccaaaaccatccatcgtctctgcccgccatcccatttcccaatcgcctccaaccccccacaccccgcccgccgcaaacccctccatttccgccgcatttccctcgctgtcccagctcaccggtcggtcgggtgctggggctcgcggctcctctcttcctggggcctggaagggacggggaaggatgcaggccgcgaccaggagcgtctcttgcatcggcgcgcagccgtccgtcctcatccggtgcggcggtggtgcgctgtccgcttcgcccggcggcctcggaggagggggatgcagggtccgggtcgtcgccgtgctgcggtgctgcgcacaggagaagcgtccgcctcgggtgcggaaatccaaggaggagagaagggagatggtggagtccttcatcaacagctatcgagcttcaaacgaaggaaaattcccatcggttaaccttacacataaggaagttggagggtcatattatatagttcgtgaaatcgtgagggatatcatccaagagaatagagtccttggtcctggtggcttagatgctatggtgctgaattttgaagattttgctgattcttcagggtcatccatgaagcatgaactgggtcaagacaatatcgagatattagatacgtctggtagtgaagtcagtaagggttatgtgcctgaaatatccaacactgatggatcttttctattgcaagacaatgccatcagcaaccagacactgttgggttcttccaatatcttagaggctggtattttgaatagtgtggtccaaaatgggagtgcagcagatgcaatattcatggaaacaaaccttgagaaacaagatgaagttccatctggtgaatcaattgagtttgacttgaatagttctgaagagcaagctcatttatttgctcaggtttctgattcagatgaaaacattgcactagacagtcaggcggatgcacaggacgtgatggccagtagtgctaccaatagagctattcttcccttagaagcttctgctgtttatgatgctgcacttttaagagatcatgagacattgcctaatgataatcatgatgcatcaactgatagttccgtggatgatgcaagtcacgttgagacgaccaatggtgttcaagcaaagcaagcttctttacatgagcatgatgcatcaactggaaatgtatcgattgaaaatgctcagagcttagatggtcagtttagtaatatatctactgatccaataaatggtgctaaattggaggctgaagttgcaaccaagacagttgaagcgtctaaagtacacaggctgcaagatgggtttgagcaaccattggctgatgctagctgtgatgggcaagaaaactctgacagccctgtttctcatccagcattagatacaaaggggctgttgcacacagaagatcagcagagtgtggtacaggtagatgaaagtgaattcaagaactcaacatctgggatcacaaaggaagatttcaagcatgagcaaggaattagcactgcaacagtgatcagcaggcatgcactttgcctcctaactttgcgttgcatgcttactgtttataatttccttcacacgtcacaaagggcagcagtatattagatttgttcattggatccacaaataaactgccgttggtttgttcttgttgaggtgaatttaggtttggatttgcctccccggttggagcgtaagcattgtttggttt

SEQ ID NO: 7929 - DNA, 5530 bp, Zea Mays
ggcaggggaggacagcgaagagagagagagagagaggggagaccggggggcaagcctgggaggggccgaggaggcccgcttacgaatctcgcgatccccaatccggaagcctcgattcgccgatccgggctcggccggggagagagggatcccgccgatcggggggcgctcgtgctgcaccgattcgagctcgctccctgctctgcccgcgcggggtgcgttcctgcggaggtccgcgccgggccggtagctgctgcgtgctgcctggtggctgctgctaggtaggtggttaggcggcggcaggaggatgcgggcggcggccgcgtagcgccagcgcaggcgcagcagccccggcatgggcgacgacgccgagctcgaggagggggaggcctgcgcctgcggggacgacaccgccttcgtcgaccccgatgtcgcgctctcttacattgacgaaaagcttcaagacatacttggccatttccagaaggacttcgaaggaggcgtttctgcagataatctagggtcaaaatttggtgcatatggttcatttttgcctacgtaccagcgctctcctcttcctcaaactagaagtccccctaaggcaggaaatattacctcaaaatctccctttcaccagtcgaatgaggacttgtctcagaaacctccagctgtggcagtttcatctaccccccaaagtaatggtcctgtggtgcctttttctggtgattcaattaaaaaggaaatacgcccatccacaaagtctgaaaggggttccgtctcccatgattcatatgggccatcaaaatgtagtgaccaaaacagacttaaagtccggataaaggttggctctgataatgttttggcaagaaataatgcagctatctacagtggcctgggccttgatatttcttcaccttcatcaaacgaggatagccctgatggccgtgggagcctgtcccctgaagttaacaatgtgccacatgaatctccacaaaccattcttcagatcatgacatgcttttcagttcctggaggcttcctgttatcccctctaccagccaatatcttgcagttgacaaaaaaggtcgtgtcttcatcaaagaagtgggaatcaaatgtggatgtagaaaatgtacaagaatcatatgaaggccatgtggctaaaagggtgaaatctgatggtaacaaaaagaggctgatagatgcaaaaaattcaaagaacaaaaatgatattagtgcagttatgaaaaaggagattgatatggaattagttgctggtcaaaagatagtatctgaagctcttaaaatatcattgctgtctgaccccagagctatggatgcaaaaggtgagaatcgtcttgaagaggagccagcagaaaacaacttggttggaattagagatgctcgattgaaagagcggtgcaccaagactgactccatgacagtcaaagtggaacctgccaaagcagaggtgatggaatgtttagagaacagtagttttggcagttcagaaatggatctttcagcagtgaaagggaaatcaaaacccaagacagaaaagggtgaggcaactttagaagataggaatacaactaatgacaaagacctaatatcagataggaagcaaaaaaagaaaataaaatctgggagtaaatataatgcctctaactttgaaggtagcattagcaatgttataaacgaaggagcttcagctgttttccacatgggaaaaatttctggtctagaagctttgccttatgacacaaatggggaaaataattccaagagtgaggtcaaaaaaatgcagagagaacaaaaggccaatgtttcgacgtcttctgatttcctggaggaggagaaacacattcattcttctgctgcagttaaggagagaagtgacatgcaatcaaaacctatccatactggaaagaaacccaaagcaaaatcacatagagatgttagggacaacaattttcctgaaggatcttatggaagcaaggaacaggattcattggagaataaaagtgcctttggagatccccggccaaaggaaaaaccatggaagtttgacagcgaggactctgatgcacctgggatctcgaggaaggatagttcttatgtaaagcttgacaaacacctggctactgaggagcagaagatgcatatacttccacctgccactgcttcaactgcgaatgcagcttttatacatgcagccccagtcgtaatagaggaacattgggtgtgctgtgacatatgccagaaatggcgtctcctaccttatgaaatgaatccttcagatcttcctaagaagtggaaatgtagcatgctacagtggctacctgggatgaataggtgtgagattagtgaagaggagactacaaatgctctgaatgcactgtatgtccctgcccctgcaaatggtattccttcagttggccttcctcatgttgcttcatcaggactagtaacatccagcactcccaatatgaatggacatattgagcagagtaggaaaagaaagaatgttctaagtgatggaaattttgtggctgagggttctcaccaaacacagggttcaggtcatccaatgagcaaccaacatgctcccaataaaagtaaaactcatactgatggtatccagtatcctattgatagagattctgtaagcaaatcagttgacccaacaattaaaaagcaaaggtccaaaagcaaacatcacagtagctattctgatggagtagatcttgttgaaagacctaagaagcattctaaagtaaaaagcaagagagacttggatcgtgatgaatacaaagcttctaaaaaaatcaggaaagaagagcgccattttgatagagatcggaaccttggatccggtttagctagtcgtgatgttcccgatgaggccaaggcttttcctgtgaagtcagtaacgtcaaagggttcaggtgaaaggagtgatctttcttcatcaaagcaaaaaaatgtctcacatcataaccatttggaaaattccaagaaagcaaggcaagattatgtaggttttcctgaagacgagagcaaggaatattttcaccagtcagatgtgcaaagatcagatttgtctagtaagaagaggatagtgaagaaatgggaggagagtcagtacaatccagtagctcaggtaagcaaaggagctatcaaggaaacctatagggatcagaacttaaaggaagcaaagttgatgtcattgaattctgaagaactgttttctatgacgagctccaaaccaccgaaagctcaacatgctgatcaggttttgttttatgatggggggcgtacgaacagcgagttagttgaggataacacacactttagtggcaaaacaggtctccctgagcaagaaaatagtctttctgataaggctttagacttgggcaaacctgctagtgatgtggcctatattcagacttcagctgtaacttcaagttcttcaaaggcttcagtctcacaaaaaaagaagcagaccactcaagctatgaagacatcgtcaattgagtctctttctttgtcaccacagagaaactctaacattgacaatgtctctgcctctcatagtagagtttcagtcaatgatcaatggtctagtgaacctattttggttggttcttcccgaagaaaatctgatagagataatggacaggttcagttaactcaaggtcatgcctctgatggtattcatcctgaaaggggtttgaatgaggacctgcagcctgaatctgggagaaaggattccaatataaaaaactcccatattcctaaaagttctaaccatttgcattctggtgaaaaaaataactataatacagatggctctcctatgcaaccaggaaagcatcttgttgatccaaagacaccagtcttggataaaggtgattcaagtatgcatgaaaataagaaaagtgcaaattctcttcaagatagaaatggatcaactcattgcccaccagatggaaatcctctgctcggtttaccatctggaaaagagaaatcatatctcaaaaacaacaggcaagattcacagaagcctaaaccccagatctcacctctgaaagaaagcaaattggattcccattccactccattaaaacctaatgggtcaaaattgactccacaatcaagacaatacaatgctgaaaatggagggcgacatggcactgcaaaacaagcaattcgtagtcctgctgatacttttagtccagctaggaaggacaatacttcaactgcgtatgctctcaaagaagcccgtgatttaaagcataaggctaatcgtttgaaggaagaaggaaaagagcttgaaagtacaagactctactttgactccgccttaaaatttttgcatgttgcatcacttttggaacctcctagctttgatggtttgaaacaaggcgatgcagcccagagcatgtattcagatactgcaaaactttgcaactttgttggtcacgcgtatgaaaaatgcaagaagatggctgctgctgctttagcatacaagtgtgttgaagttgcttatctgaaggctgcatactgcaagcacccaactgcaagcaaggatagacaagtgttacaggcagttgtacagactgctccaggtgaatcaccatcatcttcagcctcagacattgataatttaaataacaatggattatccaagggcccttcaagcaaggatgccaattcaccacaagtggttggaaatcatttgttgctggccactcgaaatcaaccacacttgatgcggttactagcttatacaaatgatgtcaatagtgcctttgaggctactcggaagtctcacatggcaattgcttctgcttctggcaatcacgaaaatggagttgatggtctttcttcagtaaaaacagtgctggattttaacttccgaagtgtgaatgatctactaaggtttgtgcggatttcaatggagtctatcagctgctgatgtgtgcagaatctgagaaagtgccatctgatggaagttcctgttggatgtttaatctaattaactttgtttttgatgaagtagcatgaagctgaatataatccaacagtgcaaaagcataggtctttcatttgagcttgctggtcaacttgtacagagagtgatcatatttcttctttttttacgttgattacacccaattagtatatatagttgcatacccacttggatgatttagttagtgaggaacacaagtgaagatgagctttgcactgttcaatgcttctgcttggaagaaggatgctcttgtggccgcagttcgttgttatctggaaagtggcttgctactgagcattctcttactacatgatgtaaattgtgaatctccatcaaggctggcttatggctgaagaggagaggacagcaaagccagctaatctcgctatccaagaaatcggctagtagttttttcccttttgaaccttgtcacgatgccttgtcttctggataaagttcacgcagatctgctgctatggtgcgaagtaaaaa

SEQ ID NO: 7930 - DNA, 1097 bp, Zea Mays
cgggtcgattgctttttcaactcaaagtccaccggagcagcatcagcagcagcagccacgagactcagcggcggcggcgtcgccctcttgctcctggcgctgctggccgccggcacctccacctcgtcggcgcagctctccaccggattctactcgcactcgtgccccggcgtgcacgacgccgtcaggtcggtgctgcaggccgccatcgccagggagcagcgcatgggagcctccatcctccgcctcttcttccacgactgcttcggctgcgacgcgtcgttgctgctggacgacacgcccagcttccagggcgagaagatggccaagcctaacaacggctccgtcagaggcttcgaggtcatcgacgccatcaagtccgccgtcgacaaggcctgccccggggtcgtctcctgcgccgacatcctcgccatcgccgccagggacagcgttgtcaccctcggaggtccgaactgggacgtcaagcttggccggagggactccaggacggcgagcttcagcggcgccaacaacaacatcccgccgcccacgtctggcctcgccaacctcacctccctcttcgccgcgcagggtctctcccagaaagacatggttgcactctccggagctcacaccatcggccaagcacgctgcaccaacttcagagcgcacgtgtacaacgacaccaacatcgacggcgccttcgcgagagcaaggcgatcggggctcctgcactccgaccaggagctcttcaatggcgcggccaccgacgcgcaggtccaggcgtacgtcagcagccagagcgcgttcttcgcggacttcgtggctggcatggtcaagatgggcgacatctcgccgctcacgggctccagcggggagatcaggaagaactgcagaaggatcaattaagctagaggcagcgcgcttctaagcgtataccttgtatcgttgaagtttctaattcctccgattcaaattaagttgtcaaatcactgtgctatgctgtaccaatgcgttggcatgtctattcgtttgaataaattagtcctatcccctctcaagcgttctctaaatataatatagagaatgttactccg

SEQ ID NO: 7931 - DNA, 351 bp, Zea Mays
cttttccttcgtttggtatctttgccgaggctgtgcgattggccatctccccctcgcgctctcgtgccctcacacgaccttctgctccccgcactgttcgattctgtgtcctcgtgcccttctgtgtgctattccgctcccgcttctgctgccgtgcacaatcgttgccatcacggccgtcttcaccatgttcaggccgccgcgtgctcgtccaacgacgctcgtggaaaccagcgttctagagagtactctcgcttcacagatgcctctagacaggatccgaagccaggtcgttgggtgggggagatggaagactgcggtttggagccctacactgactgctacaggagg

SEQ ID NO: 7932 - DNA, 2858 bp, Zea Mays
tttcgaccgtcgcccccgtgaatcactccctgccccacaacccccaagcaaccctagctctccctccccctccgcgtcctacagccatcgtcgctctgccttccgcccccgccgtcgccgcagacgcagccggccacccaccactcgcgcctcccccaccgcgtcgcgtgtgggccacagctacagctgcctcctcgagcaacccacactcctttcttcccctgcctgtcgtctctcttccaccttccaccacaagcgccgtcgcagccggtgcctgctccttcccgatccccgaggcaaagctgcgactccgcaactgccgccatggcgttcgagaagatcaaggtctccaacccaatcatcgagatggacggcgatgagatgaccagggtattctggcagtctatcaaggacaagcttatcttcccatttctggacctggacatcaagtactatgatttggggatactgcacggtgaagcaactgatgacaaggtcacagtggaggctgcagaggctactctcaagtacaatgtggctattaagtgtgcgaccattactccaggtacatttgattcttgtgtagatgcaatatgtactcttaatctatactactatattaaggctgtaagggggtagcctgcctcctctggttctgcctcccgttaatctacgtcgtccacgcccgttaatctgcaccgttcgtcatgcgtacgttttcgacgtccgtcgcccgtgtgaatcaccccctgccccacaacccccaagcaaccctagctctccctcccccctccgcgttcgcagtcgtcgtcgctctgcctcctgcccccgccgtcgccgccgcgccacagacgcagccggctacccaccgctcgcgcctcccgcaccgtgtcgcgtgtgggccacagctgcagctgccccccgagcaaccctagctctcgctcctccctccatagttgtcgccccaaacgttgcagcattgatggcagcgagctcgttctccactctccagcatgtcgatccagcgggagcaccttcgacctcaccggtgaaactagaagaacgtatgaagctagacttgttgcaatttatagacatgtaagagaggatggagttgagggacaacctatttctgtttcaacagaacaatttgcaatgacttgtaagttgacatgtcttgtgctgtgaacttgcagccttgttgataacaataattgatctgggcctcttccaccagaattagtagatacacgtagtcttcttgctatcttgacttcaggctgataataacaacttcagtggaagctccatcctgctgaatacaacaacatacaaacacttctaaagctgatattagttgtcaaatattttagtactaatattgagggggatggcggagggcattgcgctgcggggttacatcgccgtcaccttcgacatgcgcgacataggtgggtccacagggcgggtgtcgctcacgtgctccatcaagaacatcgagtgaggtggtgtgctgctgctctaaagaagggaggagaggaagtagcgacaatgtcgccaagaccacctggcgcgatgtctcctaccagatcaccaagatcaacatgtacaaggtgatccagtccgagccctctccctgcatgcttccattgattttttatttcattccaatcgatttgccgtgatatatgcaatgcaggatggtcggcatgtacaagatatgcttaaggaatgagccacaaaatctgagagaacttatgctcttggtgctgctgacaacacaactgttgctattagaaagggatttgccattggttcaggtgctcttgtgtccctggtgctgtttggtgccttcgttagcagagctggagtgaaggttgtcgatgttctctcctgaaggttttcattggtttgattgttggagacatgtttttgtactggttctctgtcatgaccatgaagagtgttggaagtgtcgccctaaagatggtggaggaggttcgcaggcagttcaacaccattcttgggttgatggagtgaacaagcaagcctgactatgcaacctatgtgaagatttgcactgatgcttcttccatcaaggagatgattccttggggtgctctggtcatgctgactccctcattgatggaacctctttggcatcgagactctctctggcgtttttgctggtgccctggtttttggagtgcaggtgcgcactttgccttctactctctctgtgcacttcaatgtgtttgcttgttctagggtttatggagatttctgctttggacaaattgccatctctacttccaacactgtgctgcataggataacgcaagaagtatattaagaacaaggccatctcagataaaagtagatgtagctttcataggacttaattccagcaaagcaaaggttggcagtgcaccaaacaatagcgtttatacttcattcttatggattggagaagcctatgcaacatgtcaagccagatgacatgcagatgagaaggttctgcatcaatagaaaccagagaaaaatctgtatgtgtctgtatgacatctcagataaagcctgatgatcagcatgatgaaaggtggggagttctatagctggtttaagctggagctagcttctgaagtccggtcaggtgtctgtatgtgttgcccctttttatttcatttcatgagaaaagattgttatttgttccttgaactgtacttggtcgtacttgtgaataaatattttagcatggttgttcgacttctcataatgtttattcgacatcagttcatgatattagtgttacgtgatattttatcatatgaattttgaatatcatagtgatgtttatc

SEQ ID NO: 7933 - DNA, 3949 bp, Zea Mays
cagccatcgtcgctctgccttccgcccccgccgtcgccgcagacgcagccggccacccaccactcgcgcctcccccaccgcgtcgcgtgtgggccacagctacagctgcctcctcgagcaacccacactcctttcttcccctgcctgtcgtctctcttccaccttccaccacaagcgccgtcgcagccggtgcctgctccttcccgatccccgaggcaaagctgcgactccgcaactgccgccatggcgttcgagaagatcaaggtctccaacccaatcatcgagatggacggcgatgagatgaccagggtattctggcagtctatcaaggacaagcttatcttcccatttctggacctggacatcaagtactatgatttggggatactgcacggtgaagcaactgatgacaaggtcacagtggaggctgcagaggctactctcaagtacaatgtggctattaagtgtgcgaccattactccaggtgaaactagaagaacgtatgaagctagacttgttgcaatttatagacatgtaagagaggatggagttgagggacaacctatttctgtttcaacagaacaatttgcaccttgttgataacaataattgatctgggcctcttccaccagaattagtagatacacgtagtcttcttgctatcttgacttcaggctgataataacaacttcagtggaagctccatcctgctgaatacaacaacatacaaacacttctaaagctgtgagtgtaacaaccttttcgctcatgttctctcttttcagaatttgaggtagatgagggcaaaagaatttaacagctattacaacttctgttattgagaacaatcattaaaagcatgcttattaaaacgacgttaaaacgacgtttaaacgtcgtttaaactataaaacgctgacaggaagtgaaacgacaaaacgttttacgattcgtcgtaaaacgttgtttaacgtcgtttaaacgtcgcgttttgacgtttaaacgcggtatagagtgaaacgccgcgtttaatgcgtctgctgctagtaattggcccagcccaattagaaactcccgcccagcccacccagaccgccgctacaagccgcactttcaccagcccaattagtaactcgcgttctcaccagccgtcgcactccagggcgcgctccagcctccaggccgccgctgctccaaccctcctgcgccgcccgtccggcgccgccaggcccgcctctgcgtgccgctgctccaggccgccgccgctccagtcagctgctctccaggccgtcctccctccaggccgctgctctccaggccgctccaggccgctgctctcaaggccgtcctccagccccgcctcagagcctctgcgtgccaccgctccaggccgccgcgctccaggccgtcctccctcctgcgccgcctgtccggctgccagcccctccagccccgcctctgctgtcccactgcggcaggactacagagtacagagactgactgtcccactgtttggtatttgacttgatataattgcctgaaattatgatatattgaaatttccctatgttgtttaaaactacatttaaactttgtttaaaccgtttaaaagttaaaacttacccatgagcgtttcaacgtttcgtcgttttaataaccttgattaaaagtgtaggcattggtgagtacaaacctaaggttaaaagaagaatattttgaataaaagtgtttgtatttgccaaatggcttatgcttttagttgagataggtagtatatcaaagttcagggcatcacatagataagaacgaatttgctccgtgtgcaacaaaaagctcgtttttacactgactcctcttctattgcagcctatagctgccaaatagttggatgcaactggtccatttatctggaaatatttatatttaaaaaaatatcgaaaaacattacatttaaaattttataggtagtcttctttcattctgtggagatcattttcactgataactgaaacaacaattacttcattatattcattcaaggacaagcaccacacaatcaacatcatgtttaaactcaaatcaagacgtgttgagtaaaccatccttttacatgttaccaggagtctaagaaactatagtttgggttgttccagatttgagtgtcatacctaaatttgggtacttgtaagtccagattaaatgcaatgtttcctttctcggtttttggacatcttacaatcataaattatccttttacattaacttgcagcctttcaaaaacatatgttttcccaatattatttattaaatgcttttagtattgtatcttcattttagagtgagaaatccgctactcaattcacatcaggatattagttgtcaaatattttagtactaatattgagggggatggcggagggcattgcgctgcggggttacatcgccgtcaccttcgacatgcgcgacataggtgggtccacagggcgggtgtcgctcacgtgctccatcaagaacatcgagtgaggtggtgtgctgctgctctaaagaagggaggagaggaagtagcgacaatgtcgccaagaccacctggcgcgatgtctcctaccagatcaccaagatcaacatgtacaaggtgatccagtccgagccctctccctgcatgcttccattgattttttatttcattccaatcgatttgccgtgatatatgcaatgcaggatggtcggcatgtacaagatatgcttaaggtcaaacatcactatgatattgctgagatggtccaatcagtgacaatgctggtggtattgttgagatggcaggaatgagccacaaaatctgagagaacttatgctcttggtgctgctgacaacacaactgttgctattagaaagggatttgccattggttcaggtgctcttgtgtccctggtgctgtttggtgccttcgttagcagagctggagtgaaggttgtcgatgttctctcctgaaggttttcattggtttgattgttggagacatgtttttgtactggttctctgtcatgaccatgaagagtgttggaagtgtcgccctaaagatggtggaggaggttcgcaggcagttcaacaccattcttgggttgatggagtgaacaagcaagcctgactatgcaacctatgtgaagatttgcactgatgcttcttccatcaaggagatgattccttggggtgctctggtcatgctgactccctcattgatggaacctctttggcatcgagactctctctggcgtttttgctggtgccctggtttttggagtgcaggtgcgcactttgccttctactctctctgtgcacttcaatgtgtttgcttgttctagggtttatggagatttctgctttggacaaattgccatctctacttccaacactgtgctgcataggataacgcaagaagtatattaagaacaaggccatctcagataaaagtagatgtagctttcataggacttaattccagcaaagcaaaggttggcagtgcaccaaacaatagcgtttatacttcattcttatggattggagaagcctatgcaacatgtcaagccagatgacatgcagatgagaaggttctgcatcaatagaaaccagagaaaaatctgtatgtgtctgtatgacatctcagataaagcctgatgatcagcatgatgaaaggtggggagttctatagctggtttaagctggagctagcttctgaagtccggtcaggtgtctgtatgtgttgcccctttttatttcatttcatgagaaaagattgttatttgttccttgaactgtacttggtcgtacttgtgaataaatattttagcatggttgttcgacttctcataatgtttattcgacatcagttcatgatattagtgttacgtgatattttatcatatgaattttgaatatcatagtgatgtttatc
